United States Patent Application Publication US 2022/0090207 A1 - sequence listing, part 27

SEQ ID NO: 353596 - DNA, 301 bp, Homo sapiens
  chr5:3761623-3761924
  hypo
gcacatgccctccctcctccctccatctccgtggcctttgcgtctctgtgtgggtgcacatgcgctccctccatctccgtggcctttgcgtctctgtgtgggtgcacatgcgctccctccatctccgtggcctttgcgtctctgtgtgggtgcacatgcgctccctccatctctgtggcctttgcgtctctgagcgggtgcacatgccctccctccatctctgtggcctttgcgtctctgagtgggtgcacatgcgctccctccatctctgtggcctttgcgtctctgagtgggtgcacac

SEQ ID NO: 353597 - DNA, 130 bp, Homo sapiens; identical to SEQ ID NO: 338690
  chr5:3781386-3781516
  hypo

SEQ ID NO: 353598 - DNA, 208 bp, Homo sapiens
  chr5:3932149-3932357
  hypo
cgcccggggaaagttcgtaggcaacattcatttgcacaacgagcgcactttgaaagactccagcgcaggcctgtgttcctggccgcaacaaaacacctgcttgaagcggagacaaaatgccaagctggagagagttcaaaagaacagggtgacaatcacacagtgttgaacaacagcaacggcaacccatcactacagccttttgtcc

SEQ ID NO: 353599 - DNA, 158 bp, Homo sapiens; identical to SEQ ID NO: 338697
  chr5:9497496-9497654
  hypo

SEQ ID NO: 353600 - DNA, 170 bp, Homo sapiens; identical to SEQ ID NO: 345154
  chr5:10564301-10564471
  hypo

SEQ ID NO: 353601 - DNA, 359 bp, Homo sapiens; identical to SEQ ID NO: 338703
  chr5:12794972-12795331
  hypo

SEQ ID NO: 353602 - DNA, 453 bp, Homo sapiens; identical to SEQ ID NO: 338705
  chr5:14328256-14328709
  hypo

SEQ ID NO: 353603 - DNA, 91 bp, Homo sapiens; identical to SEQ ID NO: 350046
  chr5:16935792-16935883
  hypo

SEQ ID NO: 353604 - DNA, 33 bp, Homo sapiens; identical to SEQ ID NO: 199774
  chr5:16936321-16936354
  hypo

SEQ ID NO: 353605 - DNA, 70 bp, Homo sapiens; identical to SEQ ID NO: 199775
  chr5:16936514-16936584
  hypo

SEQ ID NO: 353606 - DNA, 52 bp, Homo sapiens; identical to SEQ ID NO: 350050
  chr5:17217629-17217681
  hypo

SEQ ID NO: 353607 - DNA, 71 bp, Homo sapiens; identical to SEQ ID NO: 338718
  chr5:31410355-31410426
  hypo

SEQ ID NO: 353608 - DNA, 478 bp, Homo sapiens; identical to SEQ ID NO: 346679
  chr5:31854462-31854940
  hypo

SEQ ID NO: 353609 - DNA, 799 bp, Homo sapiens; identical to SEQ ID NO: 350063
  chr5:41870076-41870875
  hypo

SEQ ID NO: 353610 - DNA, 328 bp, Homo sapiens; identical to SEQ ID NO: 332354
  chr5:43557434-43557762
  hypo

SEQ ID NO: 353611 - DNA, 214 bp, Homo sapiens; identical to SEQ ID NO: 350071
  chr5:43603571-43603785
  hypo

SEQ ID NO: 353612 - DNA, 50 bp, Homo sapiens; identical to SEQ ID NO: 345162
  chr5:49737299-49737349
  hypo

SEQ ID NO: 353613 - DNA, 111 bp, Homo sapiens; identical to SEQ ID NO: 345853
  chr5:67590957-67591068
  hypo

SEQ ID NO: 353614 - DNA, 114 bp, Homo sapiens; identical to SEQ ID NO: 304477
  chr5:67591157-67591271
  hypo

SEQ ID NO: 353615 - DNA, 143 bp, Homo sapiens; identical to SEQ ID NO: 338734
  chr5:71714802-71714945
  hypo

SEQ ID NO: 353616 - DNA, 164 bp, Homo sapiens; identical to SEQ ID NO: 332389
  chr5:73843900-73844064
  hypo

SEQ ID NO: 353617 - DNA, 62 bp, Homo sapiens; identical to SEQ ID NO: 338743
  chr5:74753672-74753734
  hypo

SEQ ID NO: 353618 - DNA, 50 bp, Homo sapiens; identical to SEQ ID NO: 283051
  chr5:75698194-75698244
  hypo

SEQ ID NO: 353619 - DNA, 1185 bp, Homo sapiens; identical to SEQ ID NO: 199902
  chr5:75698274-75699459
  hypo

SEQ ID NO: 353620 - DNA, 37 bp, Homo sapiens; identical to SEQ ID NO: 346704
  chr5:77268330-77268367
  hypo

SEQ ID NO: 353621 - DNA, 173 bp, Homo sapiens; identical to SEQ ID NO: 338750
  chr5:77291967-77292140
  hypo

SEQ ID NO: 353622 - DNA, 35 bp, Homo sapiens; identical to SEQ ID NO: 338751
  chr5:77425063-77425098
  hypo

SEQ ID NO: 353623 - DNA, 43 bp, Homo sapiens
  chr5:78105396-78105439
  hypo
cggcacttcttgccttcagctgaagctgggagacccatcctac

SEQ ID NO: 353624 - DNA, 70 bp, Homo sapiens
  chr5:78105545-78105615
  hypo
tcctgctctgaaaatcacgtcctggcaacctgcccatcggacctggagccagccttgccctctccactgc

SEQ ID NO: 353625 - DNA, 735 bp, Homo sapiens; identical to SEQ ID NO: 345179
  chr5:87436769-87437504
  hypo

SEQ ID NO: 353626 - DNA, 52 bp, Homo sapiens; identical to SEQ ID NO: 338762
  chr5:90672526-90672578
  hypo

SEQ ID NO: 353627 - DNA, 446 bp, Homo sapiens; identical to SEQ ID NO: 338765
  chr5:96111437-96111883
  hypo

SEQ ID NO: 353628 - DNA, 71 bp, Homo sapiens
  chr5:96114516-96114587
  hypo
cgcaagatccagtgcatgtgctgagggaagaccggcaggacttgcgtagttagatgtctggggaagaaagg

SEQ ID NO: 353629 - DNA, 53 bp, Homo sapiens
  chr5:96114632-96114685
  hypo
attatgataacatctcgggctctttacttttcatgccctgcttcaggatcttc

SEQ ID NO: 353630 - DNA, 132 bp, Homo sapiens; identical to SEQ ID NO: 338767
  chr5:96121466-96121598
  hypo

SEQ ID NO: 353631 - DNA, 70 bp, Homo sapiens; identical to SEQ ID NO: 338768
  chr5:96362713-96362783
  hypo

SEQ ID NO: 353632 - DNA, 91 bp, Homo sapiens; identical to SEQ ID NO: 338770
  chr5:98239940-98240031
  hypo

SEQ ID NO: 353633 - DNA, 137 bp, Homo sapiens; identical to SEQ ID NO: 346722
  chr5:107005846-107005983
  hypo

SEQ ID NO: 353634 - DNA, 449 bp, Homo sapiens; identical to SEQ ID NO: 199970
  chr5:107006260-107006709
  hypo

SEQ ID NO: 353635 - DNA, 281 bp, Homo sapiens; identical to SEQ ID NO: 350137
  chr5:109024730-109025011
  hypo

SEQ ID NO: 353636 - DNA, 213 bp, Homo sapiens; identical to SEQ ID NO: 350143
  chr5:114506308-114506521
  hypo

SEQ ID NO: 353637 - DNA, 497 bp, Homo sapiens; identical to SEQ ID NO: 338778
  chr5:115783187-115783684
  hypo

SEQ ID NO: 353638 - DNA, 37 bp, Homo sapiens; identical to SEQ ID NO: 346733
  chr5:124084158-124084195
  hypo

SEQ ID NO: 353639 - DNA, 60 bp, Homo sapiens; identical to SEQ ID NO: 346734
  chr5:124084302-124084362
  hypo

SEQ ID NO: 353640 - DNA, 111 bp, Homo sapiens; identical to SEQ ID NO: 345192
  chr5:124084660-124084771
  hypo

SEQ ID NO: 353641 - DNA, 64 bp, Homo sapiens; identical to SEQ ID NO: 345193
  chr5:124084977-124085041
  hypo

SEQ ID NO: 353642 - DNA, 269 bp, Homo sapiens; identical to SEQ ID NO: 338783
  chr5:126250520-126250789
  hypo

SEQ ID NO: 353643 - DNA, 34 bp, Homo sapiens; identical to SEQ ID NO: 200020
  chr5:129240901-129240935
  hypo

SEQ ID NO: 353644 - DNA, 143 bp, Homo sapiens; identical to SEQ ID NO: 200021
  chr5:129240962-129241105
  hypo

SEQ ID NO: 353645 - DNA, 273 bp, Homo sapiens; identical to SEQ ID NO: 200022
  chr5:129241140-129241413
  hypo

SEQ ID NO: 353646 - DNA, 160 bp, Homo sapiens; identical to SEQ ID NO: 338787
  chr5:131037398-131037558
  hypo

SEQ ID NO: 353647 - DNA, 431 bp, Homo sapiens; identical to SEQ ID NO: 304697
  chr5:131607799-131608230
  hypo

SEQ ID NO: 353648 - DNA, 805 bp, Homo sapiens; identical to SEQ ID NO: 332483
  chr5:132386973-132387778
  hypo

SEQ ID NO: 353649 - DNA, 873 bp, Homo sapiens; identical to SEQ ID NO: 332486
  chr5:133862738-133863611
  hypo

SEQ ID NO: 353650 - DNA, 63 bp, Homo sapiens
  chr5:134273891-134273954
  hypo
cgatgtcgctgccttttggtatttatcataaggcatgtctccagatccgtcattgttgccatc

SEQ ID NO: 353651 - DNA, 391 bp, Homo sapiens; identical to SEQ ID NO: 338801
  chr5:135091190-135091581
  hypo

SEQ ID NO: 353652 - DNA, 145 bp, Homo sapiens; identical to SEQ ID NO: 338802
  chr5:135188298-135188443
  hypo

SEQ ID NO: 353653 - DNA, 102 bp, Homo sapiens; identical to SEQ ID NO: 338804
  chr5:136983271-136983373
  hypo

SEQ ID NO: 353654 - DNA, 196 bp, Homo sapiens; identical to SEQ ID NO: 338805
  chr5:137895663-137895859
  hypo

SEQ ID NO: 353655 - DNA, 118 bp, Homo sapiens; identical to SEQ ID NO: 338806
  chr5:137912556-137912674
  hypo

SEQ ID NO: 353656 - DNA, 127 bp, Homo sapiens; identical to SEQ ID NO: 338810
  chr5:140905588-140905715
  hypo

SEQ ID NO: 353657 - DNA, 65 bp, Homo sapiens; identical to SEQ ID NO: 338812
  chr5:141355864-141355929
  hypo

SEQ ID NO: 353658 - DNA, 624 bp, Homo sapiens; identical to SEQ ID NO: 283411
  chr5:142781875-142782499
  hypo

SEQ ID NO: 353659 - DNA, 124 bp, Homo sapiens; identical to SEQ ID NO: 283412
  chr5:142782625-142782749
  hypo

SEQ ID NO: 353660 - DNA, 410 bp, Homo sapiens; identical to SEQ ID NO: 345197
  chr5:142782794-142783204
  hypo

SEQ ID NO: 353661 - DNA, 1069 bp, Homo sapiens; identical to SEQ ID NO: 350188
  chr5:142783606-142784675
  hypo

SEQ ID NO: 353662 - DNA, 110 bp, Homo sapiens; identical to SEQ ID NO: 350190
  chr5:148206075-148206185
  hypo

SEQ ID NO: 353663 - DNA, 36 bp, Homo sapiens; identical to SEQ ID NO: 350191
  chr5:148206432-148206468
  hypo

SEQ ID NO: 353664 - DNA, 252 bp, Homo sapiens; identical to SEQ ID NO: 346754
  chr5:148650971-148651223
  hypo

SEQ ID NO: 353665 - DNA, 87 bp, Homo sapiens; identical to SEQ ID NO: 332540
  chr5:148724812-148724899
  hypo

SEQ ID NO: 353666 - DNA, 100 bp, Homo sapiens; identical to SEQ ID NO: 338820
  chr5:148821027-148821127
  hypo

SEQ ID NO: 353667 - DNA, 293 bp, Homo sapiens; identical to SEQ ID NO: 200114
  chr5:151150270-151150563
  hypo

SEQ ID NO: 353668 - DNA, 229 bp, Homo sapiens; identical to SEQ ID NO: 346758
  chr5:151150681-151150910
  hypo

SEQ ID NO: 353669 - DNA, 225 bp, Homo sapiens; identical to SEQ ID NO: 338832
  chr5:156895577-156895802
  hypo

SEQ ID NO: 353670 - DNA, 290 bp, Homo sapiens; identical to SEQ ID NO: 346761
  chr5:157002817-157003107
  hypo

SEQ ID NO: 353671 - DNA, 135 bp, Homo sapiens; identical to SEQ ID NO: 338834
  chr5:158139227-158139362
  hypo

SEQ ID NO: 353672 - DNA, 1199 bp, Homo sapiens; identical to SEQ ID NO: 350208
  chr5:158634816-158636015
  hypo

SEQ ID NO: 353673 - DNA, 172 bp, Homo sapiens; identical to SEQ ID NO: 350209
  chr5:159343215-159343387
  hypo

SEQ ID NO: 353674 - DNA, 152 bp, Homo sapiens; identical to SEQ ID NO: 350210
  chr5:159343648-159343800
  hypo

SEQ ID NO: 353675 - DNA, 168 bp, Homo sapiens; identical to SEQ ID NO: 338839
  chr5:159489238-159489406
  hypo

SEQ ID NO: 353676 - DNA, 398 bp, Homo sapiens; identical to SEQ ID NO: 338842
  chr5:159707402-159707800
  hypo

SEQ ID NO: 353677 - DNA, 162 bp, Homo sapiens
  chr5:159776164-159776326
  hypo
cgtggcatgtctatacctcgttggggtcatcctggtcggcatagattaggaagcccgtaaagaggctgtctgtccagtaagggtcatagaagagcccgttctgctctgagtagaagatctgcagccaaacttcgtcaccctgcttgagagccaggatggtgg

SEQ ID NO: 353678 - DNA, 147 bp, Homo sapiens
  chr5:159776588-159776735
  hypo
ggtatggccactgccacagctgcaggggcctgggaggcctggctcccccttcttgcccttgggccccttcttgcctggtgtgccatgcttcccgggggtaccgttgacccccttggggccacgggggccagcccgcccaatggcccc

SEQ ID NO: 353679 - DNA, 196 bp, Homo sapiens; identical to SEQ ID NO: 338845
  chr5:168112681-168112877
  hypo

SEQ ID NO: 353680 - DNA, 214 bp, Homo sapiens; identical to SEQ ID NO: 338846
  chr5:168189525-168189739
  hypo

SEQ ID NO: 353681 - DNA, 129 bp, Homo sapiens; identical to SEQ ID NO: 348113
  chr5:168195266-168195395
  hypo

SEQ ID NO: 353682 - DNA, 243 bp, Homo sapiens; identical to SEQ ID NO: 283532
  chr5:170171140-170171383
  hypo

SEQ ID NO: 353683 - DNA, 388 bp, Homo sapiens; identical to SEQ ID NO: 350214
  chr5:170171413-170171801
  hypo

SEQ ID NO: 353684 - DNA, 173 bp, Homo sapiens; identical to SEQ ID NO: 348114
  chr5:171533446-171533619
  hypo

SEQ ID NO: 353685 - DNA, 50 bp, Homo sapiens
  chr5:171724013-171724063
  hypo
cgaatcccacgggcgtacggcttcaggagtctcgaatcccacgggcgtac

SEQ ID NO: 353686 - DNA, 465 bp, Homo sapiens; identical to SEQ ID NO: 338857
  chr5:171766390-171766855
  hypo

SEQ ID NO: 353687 - DNA, 108 bp, Homo sapiens; identical to SEQ ID NO: 338860
  chr5:172191069-172191177
  hypo

SEQ ID NO: 353688 - DNA, 258 bp, Homo sapiens; identical to SEQ ID NO: 348116
  chr5:172353785-172354043
  hypo

SEQ ID NO: 353689 - DNA, 84 bp, Homo sapiens; identical to SEQ ID NO: 348117
  chr5:172354118-172354202
  hypo

SEQ ID NO: 353690 - DNA, 291 bp, Homo sapiens; identical to SEQ ID NO: 338862
  chr5:172461494-172461785
  hypo

SEQ ID NO: 353691 - DNA, 501 bp, Homo sapiens; identical to SEQ ID NO: 338866
  chr5:172744598-172745099
  hypo

SEQ ID NO: 353692 - DNA, 211 bp, Homo sapiens; identical to SEQ ID NO: 338871
  chr5:175777496-175777707
  hypo

SEQ ID NO: 353693 - DNA, 113 bp, Homo sapiens
  chr5:176225713-176225826
  hypo
cggggagccgcgcggggcaggagccaggcccacagacagcaagcagcgttctgcttggctgatccacgatgtcggggctgcggcatctccgcttccgcccggagagtgacggc

SEQ ID NO: 353694 - DNA, 194 bp, Homo sapiens; identical to SEQ ID NO: 345870
  chr5:176558657-176558851
  hypo

SEQ ID NO: 353695 - DNA, 144 bp, Homo sapiens; identical to SEQ ID NO: 345871
  chr5:176558908-176559052
  hypo

SEQ ID NO: 353696 - DNA, 248 bp, Homo sapiens; identical to SEQ ID NO: 283604
  chr5:176560001-176560249
  hypo

SEQ ID NO: 353697 - DNA, 290 bp, Homo sapiens; identical to SEQ ID NO: 345203
  chr5:176560318-176560608
  hypo

SEQ ID NO: 353698 - DNA, 50 bp, Homo sapiens; identical to SEQ ID NO: 338881
  chr5:176663899-176663949
  hypo

SEQ ID NO: 353699 - DNA, 192 bp, Homo sapiens; identical to SEQ ID NO: 345874
  chr5:176764238-176764430
  hypo

SEQ ID NO: 353700 - DNA, 76 bp, Homo sapiens; identical to SEQ ID NO: 210489
  chr5:176795049-176795125
  hypo

SEQ ID NO: 353701 - DNA, 238 bp, Homo sapiens; identical to SEQ ID NO: 348125
  chr5:176795288-176795526
  hypo

SEQ ID NO: 353702 - DNA, 130 bp, Homo sapiens; identical to SEQ ID NO: 338885
  chr5:176901651-176901781
  hypo

SEQ ID NO: 353703 - DNA, 842 bp, Homo sapiens
  chr5:176918897-176919739
  hypo
cgcggagggtccgcggcgggggcggaggcctgggcagagacacagccgggcagggcgggcgggcagggtaaggtgggggcctgggtggaagtggggcgcctgcagcagaggacagcggcagctccagccccccacccccaccccaccccctacatctatttggaggctacggggagaggacgactcaggtttcaaggggcccatttgggagtggcgatctcagtccacgcaggaccgagggctgaccgagtgcgggcgagcacgcagcgccggcggcgggaggcagcaggcggacagacaggcggacagacaggcggacatgcgtggtgccaggaccgtgcagcagcccctggctcaactccagggccctagacccgccttagctccggtttctgccctccactcccggccagggattggggtaccgagaatgtgccaggagggcgagcaggcctggccgtccaagcccacaccgcccaccgcccggatgtcccggccagcctcgtaccttctgcggtttgctctgaaccggctgggccctggaggagaaggaaagcgtgacagcgggccgggcccgcagggatccccactgccagcgcgggcgcacccatccatgtccacccgcatacctgctgaggcccaggctgaggcgctccccgcaggcccggatcttgttctgagcttcgatgtgtgtgaggctacccgcattctcgccatcgatgctcagcacccagtcacccacggccactccggcctgcgccgctttgcccccaggagtgagctgtggagagagaagcaaagtgaccgaggccctggaccctgcagacccaagccaggctgac

SEQ ID NO: 353704 - DNA, 59 bp, Homo sapiens; identical to SEQ ID NO: 338888
  chr5:176922905-176922964
  hypo

SEQ ID NO: 353705 - DNA, 294 bp, Homo sapiens
  chr5:177650761-177651055
  hypo
cgccaacagtcttccctctgttgtcaccgtaggtaacacacctctctctcctatgtctgcgcctccactccatctccaccatactgcccccgtcaggcctccccacagctcacttggggcctgctggccacttcacggtcacctgacctcaagccgccgcattccaatccatcctccacatagccctggagtcagagagcagccccggccccaggtcttagcgctctcctgcttaagactctggtggttcccgggggcctccagggcagaactgctgccgcccagcatagttcc

SEQ ID NO: 353706 - DNA, 93 bp, Homo sapiens
  chr5:178411761-178411854
  hypo
cccgaggcacgtggcgtgtgtggaacgaatagagaaggggctcgccgggagtggacagcaccgggagtgctccaaacgggtgagcaggtgttc

SEQ ID NO: 353707 - DNA, 112 bp, Homo sapiens
  chr5:178580401-178580513
  hypo
cggtcctcacactgtcccgggagctgcccctacaccagcacgcctccccccagacctgggagggtcccggctgcagggctgcacactcaccgccgtgcacatcatgtagccc

SEQ ID NO: 353708 - DNA, 118 bp, Homo sapiens
  chr5:178580543-178580661
  hypo
atggagtagtgcagtcccgggagctggggcagcgccggccagtcgtgggcgaaggggtcatccagcaggcagtcataggagctgtgggggacacacggtgccgcgagcagccttcagc

SEQ ID NO: 353709 - DNA, 288 bp, Homo sapiens; identical to SEQ ID NO: 350229
  chr5:178770455-178770743
  hypo

SEQ ID NO: 353710 - DNA, 121 bp, Homo sapiens; identical to SEQ ID NO: 338907
  chr5:179023553-179023674
  hypo

SEQ ID NO: 353711 - DNA, 727 bp, Homo sapiens; identical to SEQ ID NO: 332613
  chr5:179245848-179246575
  hypo

SEQ ID NO: 353712 - DNA, 422 bp, Homo sapiens
  chr5:179401775-179402197
  hypo
cactggaaggagcagccagccaagagaacgaggccccgaggaagggagagagcaggcacgcagcggcgcggggaggagcggcatggaccgcagcagacggcctctccggcctgcgcacccgggtcagcacgctgagggaattaaacccattgcttcctctgggcagtcaatggtgaagcggtcctctgagagtgaagaacaagcgtgtgagttaaggtgttgaagtagagtgaacacacctgcaggtgctgctgtgccgaatgcggagcgccagccaggcggggaggctctgtcttgccaagtctgttcagagtcccgtgggaagacggtgagggaacagaaccgcttagcaacatgaggtacagaaagccacagcaggtaacaccgactctgggcttcaaagacaataggggcggggaggc

SEQ ID NO: 353713 - DNA, 243 bp, Homo sapiens; identical to SEQ ID NO: 350231
  chr5:179498011-179498254
  hypo

SEQ ID NO: 353714 - DNA, 504 bp, Homo sapiens; identical to SEQ ID NO: 200203
  chr5:179498363-179498867
  hypo

SEQ ID NO: 353715 - DNA, 165 bp, Homo sapiens; identical to SEQ ID NO: 338915
  chr5:179743768-179743933
  hypo

SEQ ID NO: 353716 - DNA, 127 bp, Homo sapiens; identical to SEQ ID NO: 350235
  chr5:180018679-180018806
  hypo

SEQ ID NO: 353717 - DNA, 596 bp, Homo sapiens; identical to SEQ ID NO: 338922
  chr5:180218508-180219104
  hypo

SEQ ID NO: 353718 - DNA, 418 bp, Homo sapiens
  chr5:180326156-180326574
  hypo
tcagaacagcgcagtttgccctccgctcacgcagagcctctccgtggcttccgcaccttgagcattaggccagttctcctcttctctctaatccatccgtcacctctcctgtcatccgtttccatgccgtgaggtccattcacagaacacatccatggctctcatgctcagtttggttctgagtctcctcaagctgggatcaggtaagactcatctttgtttcctccttactaactaacagtttgagttctttagctacaatggttgcagcataatggaatgaaggcatctttgtcgtttccattcctttggcttctcctagcctcagcctggggaaggatcaggcgctgtggaaacaattatagtagcccccaaataatggaaacacgggtgttgaagacgcaccgtgatcgttgac

SEQ ID NO: 353719 - DNA, 594 bp, Homo sapiens; identical to SEQ ID NO: 350238
  chr5:180479644-180480238
  hypo

SEQ ID NO: 353720 - DNA, 829 bp, Homo sapiens; identical to SEQ ID NO: 346765
  chr5:180480302-180481131
  hypo

SEQ ID NO: 353721 - DNA, 55 bp, Homo sapiens; identical to SEQ ID NO: 346767
  chr6:393764-393819
  hypo

SEQ ID NO: 353722 - DNA, 393 bp, Homo sapiens; identical to SEQ ID NO: 346768
  chr6:710660-711053
  hypo

SEQ ID NO: 353723 - DNA, 197 bp, Homo sapiens
  chr6:2920938-2921135
  hypo
ttcccctcctcctatccggtgactccttggaccacatcaacccagagcaacaagacccattgcccctgctacctggggcccgcatggcatgtctgagcaatgaccccatcctcgctgcccgctgcccagctggcggaccctgccaggttcttactgcgatggccactccccaaccaccacacccgcagcacctccac

SEQ ID NO: 353724 - DNA, 266 bp, Homo sapiens; identical to SEQ ID NO: 345875
  chr6:3285535-3285801
  hypo

SEQ ID NO: 353725 - DNA, 182 bp, Homo sapiens
  chr6:3333155-3333337
  hypo
atgttccttcatgccctggtttaatctctaaactggaagctccacctaatgtctggtgagacccaggttcaggtttttggaagagcgtatcgcagctggtgcctgtgcgtcacggtgctgccccgcaggaggtcacctactgggaatgacgctaccactgacccatggagcaaagcggcggc

SEQ ID NO: 353726 - DNA, 684 bp, Homo sapiens; identical to SEQ ID NO: 332639
  chr6:3457545-3458229
  hypo

SEQ ID NO: 353727 - DNA, 504 bp, Homo sapiens
  chr6:3618094-3618598
  hypo
cgacatctgtctctccgagacctccaaccccagcctggagccgccgtgcctatttctggaatctgagagacctcaaattccaaaggcaccgtgagagtctcaggactcagcctttccacccttgccggggtgactcgtggagggaatcgagcctaagtcttacggcacgttgtgcagtttgggccggggcggaggaccagggcccagctgaggctggccttagtgactcagccttgatcctgccacggtgacaagggtgggagggttcccgcaggggtccagctcgtgtctgtgagaagcaccttcccttcagggtcgcacgtggaccgtggctgctaccacgctaccgttgccttcagtgctcttttgcaggagtgcagacgggcagttcagcgcgggccccagtgccgggggtggggggcagggagctcccgcagggctttgctgagaaggggcataaccatgacccactggtgatgtctgtgaggtggaggcagtggttgc

SEQ ID NO: 353728 - DNA, 307 bp, Homo sapiens; identical to SEQ ID NO: 338948
  chr6:3724319-3724626
  hypo

SEQ ID NO: 353729 - DNA, 416 bp, Homo sapiens; identical to SEQ ID NO: 338949
  chr6:3725763-3726179
  hypo

SEQ ID NO: 353730 - DNA, 406 bp, Homo sapiens; identical to SEQ ID NO: 338954
  chr6:4559591-4559997
  hypo

SEQ ID NO: 353731 - DNA, 95 bp, Homo sapiens; identical to SEQ ID NO: 200248
  chr6:4775543-4775638
  hypo

SEQ ID NO: 353732 - DNA, 306 bp, Homo sapiens; identical to SEQ ID NO: 350262
  chr6:4775639-4775945
  hypo

SEQ ID NO: 353733 - DNA, 37 bp, Homo sapiens; identical to SEQ ID NO: 345876
  chr6:4910947-4910984
  hypo

SEQ ID NO: 353734 - DNA, 465 bp, Homo sapiens; identical to SEQ ID NO: 332643
  chr6:4948996-4949461
  hypo

SEQ ID NO: 353735 - DNA, 80 bp, Homo sapiens; identical to SEQ ID NO: 350268
  chr6:6009552-6009632
  hypo

SEQ ID NO: 353736 - DNA, 119 bp, Homo sapiens; identical to SEQ ID NO: 350269
  chr6:6546401-6546520
  hypo

SEQ ID NO: 353737 - DNA, 90 bp, Homo sapiens; identical to SEQ ID NO: 350270
  chr6:6547222-6547312
  hypo

SEQ ID NO: 353738 - DNA, 184 bp, Homo sapiens
  chr6:7237796-7237980
  hypo
aatgctgtaggtcctgagtgcgcaggtaactcactgtggttacaggtgcttttacaaatccccttctaaagcagttattcgtggcagctaccaaataaatagaatcatttgctactttctatatagatggctggccaacaagtgtttttgaaacctgcgttattataaaatactaaacgggccc

SEQ ID NO: 353739 - DNA, 348 bp, Homo sapiens; identical to SEQ ID NO: 338972
  chr6:7882630-7882978
  hypo

SEQ ID NO: 353740 - DNA, 327 bp, Homo sapiens; identical to SEQ ID NO: 338973
  chr6:7887548-7887875
  hypo

SEQ ID NO: 353741 - DNA, 861 bp, Homo sapiens; identical to SEQ ID NO: 338974
  chr6:7888481-7889342
  hypo

SEQ ID NO: 353742 - DNA, 242 bp, Homo sapiens; identical to SEQ ID NO: 338978
  chr6:7893721-7893963
  hypo

SEQ ID NO: 353743 - DNA, 123 bp, Homo sapiens
  chr6:7920003-7920126
  hypo
cgaatgaataagaaggcagtacagaatgagaacactggcttttacgaatgagaagggaagtcatcggagggttttcagaagaaacacgacaggatctggcttccaattatttctacagcatgg

SEQ ID NO: 353744 - DNA, 451 bp, Homo sapiens; identical to SEQ ID NO: 338981
  chr6:10319622-10320073
  hypo

SEQ ID NO: 353745 - DNA, 77 bp, Homo sapiens; identical to SEQ ID NO: 346777
  chr6:11043624-11043701
  hypo

SEQ ID NO: 353746 - DNA, 249 bp, Homo sapiens; identical to SEQ ID NO: 338985
  chr6:12338243-12338492
  hypo

SEQ ID NO: 353747 - DNA, 144 bp, Homo sapiens; identical to SEQ ID NO: 338987
  chr6:13386531-13386675
  hypo

SEQ ID NO: 353748 - DNA, 394 bp, Homo sapiens; identical to SEQ ID NO: 345879
  chr6:15513386-15513780
  hypo

SEQ ID NO: 353749 - DNA, 48 bp, Homo sapiens; identical to SEQ ID NO: 345880
  chr6:15513981-15514029
  hypo

SEQ ID NO: 353750 - DNA, 120 bp, Homo sapiens; identical to SEQ ID NO: 338991
  chr6:16322061-16322181
  hypo

SEQ ID NO: 353751 - DNA, 564 bp, Homo sapiens; identical to SEQ ID NO: 200295
  chr6:17281534-17282098
  hypo

SEQ ID NO: 353752 - DNA, 956 bp, Homo sapiens; identical to SEQ ID NO: 350287
  chr6:18264270-18265226
  hypo

SEQ ID NO: 353753 - DNA, 235 bp, Homo sapiens; identical to SEQ ID NO: 338995
  chr6:18368676-18368911
  hypo

SEQ ID NO: 353754 - DNA, 94 bp, Homo sapiens; identical to SEQ ID NO: 339001
  chr6:24662806-24662900
  hypo

SEQ ID NO: 353755 - DNA, 412 bp, Homo sapiens
  chr6:25726863-25727275
  hypo
cgtctacccaatcagaaagtcgtactagaatcgcctcatttgcattcacgccacttcccattgtccaatcagattttggataccgaacgcggcgtttgagggccgtgcctataaataccgcatctttcatcctccagttctgtttgtttacttggcgagacttggagctgaggtcatttggagctgtttaatactgaagagctgttgagcactggaaagtgctgtgtaaccctggaaaagaaccgtgtaacgctgcagaagtgtgtggtagctatgccggaggtgtcatctaaaggtgctaccatttccaagaagggctttaagaaagctgtcgttaagacccagaaaaaggaaggcaaaaagcgcaagaggacccgtaaggagagttattctatttacatctacaaagtgc

SEQ ID NO: 353756 - DNA, 255 bp, Homo sapiens
  chr6:25727391-25727646
  hypo
agcaagcgctccaccatttcttccagagagattcagacagcagtgcgcttgctactgccgggagagctggctaaacatgctgtgtctgagggcaccaaggctgtcactaagtacaccagctccaagtaagcctgctaagtaaacgtcatttctaacccaaaggctcttttcagagccacttaaacatactgaaacagctgtgggcttcgtttttgtgtagtttctaaccgtaagggttttttttttttttgaggc

SEQ ID NO: 353757 - DNA, 213 bp, Homo sapiens; identical to SEQ ID NO: 200330
  chr6:26198924-26199137
  hypo

SEQ ID NO: 353758 - DNA, 125 bp, Homo sapiens; identical to SEQ ID NO: 283866
  chr6:26241269-26241394
  hypo

SEQ ID NO: 353759 - DNA, 104 bp, Homo sapiens; identical to SEQ ID NO: 339007
  chr6:27428748-27428852
  hypo

SEQ ID NO: 353760 - DNA, 149 bp, Homo sapiens; identical to SEQ ID NO: 339011
  chr6:33914107-33914256
  hypo

SEQ ID NO: 353761 - DNA, 96 bp, Homo sapiens
  chr6:33995852-33995948
  hypo
cggggcctggggcccgagagggcagaacggggccaggcactcacctggggcctcaaggttctcgcagagctcagacttggcctctccgttgggccg

SEQ ID NO: 353762 - DNA, 54 bp, Homo sapiens; identical to SEQ ID NO: 339015
  chr6:34219827-34219881
  hypo

SEQ ID NO: 353763 - DNA, 144 bp, Homo sapiens
  chr6:34520750-34520894
  hypo
cgcaaccagtctcaggcgctggagccccgggctgggcagtccctccagccacgtctcccctgtgccagagctagagggagaaggaggggggtctttatcctggtggtgcgccgtcataatcctggggaggtcccggtcccatcc

SEQ ID NO: 353764 - DNA, 1248 bp, Homo sapiens; identical to SEQ ID NO: 332764
  chr6:35655519-35656767
  hypo

SEQ ID NO: 353765 - DNA, 109 bp, Homo sapiens; identical to SEQ ID NO: 339022
  chr6:36165692-36165801
  hypo

SEQ ID NO: 353766 - DNA, 223 bp, Homo sapiens; identical to SEQ ID NO: 339024
  chr6:36198250-36198473
  hypo

SEQ ID NO: 353767 - DNA, 107 bp, Homo sapiens
  chr6:36238212-36238319
  hypo
cgcagaaagtcagaggccgaggagatggaagaacaggtgttcaagggggacccggacacccctcactccatctccttctcgggcagtggattcctctccttctacca

SEQ ID NO: 353768 - DNA, 313 bp, Homo sapiens; identical to SEQ ID NO: 348142
  chr6:37023826-37024139
  hypo

SEQ ID NO: 353769 - DNA, 90 bp, Homo sapiens
  chr6:37275483-37275573
  hypo
aacaacaaggacccgaatcaggtaaaccagaggctttggaaaatagaaaggccatctgcagctgaggcgttggagcctcttggtccggcc

SEQ ID NO: 353770 - DNA, 60 bp, Homo sapiens
  chr6:37358463-37358523
  hypo
cggaagggaaatacaggctcctcatttatttatttctcttctttttctccaaagcaaaga

SEQ ID NO: 353771 - DNA, 321 bp, Homo sapiens
  chr6:37358553-37358874
  hypo
tttgaaagactgccaggtagtgcgagcctgagatggtctggaggattctctctagccgtgactccgctgctctgaaggtcaactgagaagtcttgtgggacagagacttgagttaggaagccctcagtcacttgccttccacggtggccagccctgctgccatcattggctgaagcaccaccaggattcacggcacccaactgcttcagggtacttcgtagactctgcctcactacatgtcgaaagagttatttgagttctcttctgtttttttttaatttgttgttgttgttactgttttgatacctcggaaacacctcc

SEQ ID NO: 353772 - DNA, 369 bp, Homo sapiens; identical to SEQ ID NO: 345232
  chr6:37666475-37666844
  hypo

SEQ ID NO: 353773 - DNA, 218 bp, Homo sapiens; identical to SEQ ID NO: 345233
  chr6:37666866-37667084
  hypo

SEQ ID NO: 353774 - DNA, 707 bp, Homo sapiens
  chr6:40399988-40400695
  hypo
cggctcgcacacaaactcctcctcacgcacatgccagaagtagcgacccttgaggccccctggggagccacaggtttccaggtcatcgtcccgctcgagcctccgcagccagagaagctcacaattgcagtgaagtgggttacccccaaaactaaaggacaagggtggggcaaagggtgtggctgtcaaagccgaagcctgggagcgggcaaagatgggatcagggggcagcttctgcagccgattggaggtgagatccaggcgggccagtttctgcaggtctgcaaaggtgccctcggcgatgtgatccagcaggttgtggtccaggctcagctggtggaggttgaccatgcgtcgcacggagtcccacggcaggccatggaggttgttgtaggagaggtccagatcctccaatgtcagcaggaagtcctcaaaagcctcatctgcgatgccgcccagctggttgttgttcacgataaggtgctgcaggttgaccaggccccggagggtgtcctccccaaggcttggcagccgattgctgtcaagatgcagggagcggaggctctcgaggtccagaaaggaaaagggctggatgtggctgatggtgttcctggacagggtcaggtccaccagccccgtcatgttggcaaagtcctggcggctgatgtggatgatgaagttgccgcccaggcgcagctccactgtcc

SEQ ID NO: 353775 - DNA, 151 bp, Homo sapiens; identical to SEQ ID NO: 200432
  chr6:41339070-41339221
  hypo

SEQ ID NO: 353776 - DNA, 556 bp, Homo sapiens; identical to SEQ ID NO: 210797
  chr6:41773903-41774459
  hypo

SEQ ID NO: 353777 - DNA, 171 bp, Homo sapiens; identical to SEQ ID NO: 339051
  chr6:41827211-41827382
  hypo

SEQ ID NO: 353778 - DNA, 278 bp, Homo sapiens; identical to SEQ ID NO: 339058
  chr6:43745076-43745354
  hypo

SEQ ID NO: 353779 - DNA, 173 bp, Homo sapiens; identical to SEQ ID NO: 345885
  chr6:43748290-43748463
  hypo

SEQ ID NO: 353780 - DNA, 126 bp, Homo sapiens; identical to SEQ ID NO: 339060
  chr6:43752469-43752595
  hypo

SEQ ID NO: 353781 - DNA, 176 bp, Homo sapiens; identical to SEQ ID NO: 346816
  chr6:44044201-44044377
  hypo

SEQ ID NO: 353782 - DNA, 97 bp, Homo sapiens; identical to SEQ ID NO: 346817
  chr6:44044450-44044547
  hypo

SEQ ID NO: 353783 - DNA, 38 bp, Homo sapiens; identical to SEQ ID NO: 350372
  chr6:45631098-45631136
  hypo

SEQ ID NO: 353784 - DNA, 372 bp, Homo sapiens; identical to SEQ ID NO: 345236
  chr6:46097250-46097622
  hypo

SEQ ID NO: 353785 - DNA, 521 bp, Homo sapiens; identical to SEQ ID NO: 345237
  chr6:46097694-46098215
  hypo

SEQ ID NO: 353786 - DNA, 357 bp, Homo sapiens
  chr6:47202003-47202360
  hypo
cgcacggcctaaaacctgtacttctgactctcaagataagttcaactttaaatctttggatacagcaagcttggtaaataattttcaaaaatcttgccagactacattttatcaggccttccccgaaacacacatttgatagcatcatgaggataaagggtggccgatagctctccaccgggcagtgcgagctgcaaagattttggaggcgtgtcttcgccagccaatggcgaggttactctcgggccagcgtatcttgaagttttggactggtcttcctgggcaggtaattcagatgactcaactctcagctacaactggactgtggacggggagggacgaatcccaggggctctt

SEQ ID NO: 353787 - DNA, 155 bp, Homo sapiens
  chr6:47202453-47202608
  hypo
atgtagagtcacagcggagaaggggctccgactcatccacgaagaagcccttgttcttgtcctgtggggaaggctccaccgtcaggagagcggaattctcaagtttcgcgttggggctggggatggggctcgggctaagcgggctggggctcatc

SEQ ID NO: 353788 - DNA, 198 bp, Homo sapiens; identical to SEQ ID NO: 339069
  chr6:52141070-52141268
  hypo

SEQ ID NO: 353789 - DNA, 636 bp, Homo sapiens; identical to SEQ ID NO: 346822
  chr6:52227115-52227751
  hypo

SEQ ID NO: 353790 - DNA, 72 bp, Homo sapiens; identical to SEQ ID NO: 348152
  chr6:52344303-52344375
  hypo

SEQ ID NO: 353791 - DNA, 159 bp, Homo sapiens; identical to SEQ ID NO: 348153
  chr6:52344405-52344564
  hypo

SEQ ID NO: 353792 - DNA, 115 bp, Homo sapiens; identical to SEQ ID NO: 339073
  chr6:53139871-53139986
  hypo

SEQ ID NO: 353793 - DNA, 294 bp, Homo sapiens; identical to SEQ ID NO: 200490
  chr6:69344649-69344943
  hypo

SEQ ID NO: 353794 - DNA, 570 bp, Homo sapiens; identical to SEQ ID NO: 350396
  chr6:71123134-71123704
  hypo

SEQ ID NO: 353795 - DNA, 289 bp, Homo sapiens; identical to SEQ ID NO: 350397
  chr6:71123746-71124035
  hypo

SEQ ID NO: 353796 - DNA, 140 bp, Homo sapiens; identical to SEQ ID NO: 350398
  chr6:71665805-71665945
  hypo

SEQ ID NO: 353797 - DNA, 71 bp, Homo sapiens
  chr6:71955569-71955640
  hypo
cgccaccgatggcctgccgatgtctgctggtgtctgtgtgtttgcttttctgctcctcttgacgaccagcc

SEQ ID NO: 353798 - DNA, 155 bp, Homo sapiens; identical to SEQ ID NO: 350399
  chr6:72129577-72129732
  hypo

SEQ ID NO: 353799 - DNA, 40 bp, Homo sapiens; identical to SEQ ID NO: 346834
  chr6:74019373-74019413
  hypo

SEQ ID NO: 353800 - DNA, 102 bp, Homo sapiens; identical to SEQ ID NO: 346835
  chr6:74020094-74020196
  hypo

SEQ ID NO: 353801 - DNA, 178 bp, Homo sapiens; identical to SEQ ID NO: 200507
  chr6:74161321-74161499
  hypo

SEQ ID NO: 353802 - DNA, 83 bp, Homo sapiens; identical to SEQ ID NO: 350409
  chr6:80657600-80657683
  hypo

SEQ ID NO: 353803 - DNA, 129 bp, Homo sapiens; identical to SEQ ID NO: 339096
  chr6:89554102-89554231
  hypo

SEQ ID NO: 353804 - DNA, 304 bp, Homo sapiens; identical to SEQ ID NO: 200552
  chr6:90121293-90121597
  hypo

SEQ ID NO: 353805 - DNA, 255 bp, Homo sapiens; identical to SEQ ID NO: 346839
  chr6:90142647-90142902
  hypo

SEQ ID NO: 353806 - DNA, 372 bp, Homo sapiens; identical to SEQ ID NO: 346840
  chr6:91005702-91006074
  hypo

SEQ ID NO: 353807 - DNA, 352 bp, Homo sapiens; identical to SEQ ID NO: 346842
  chr6:106533693-106534045
  hypo

SEQ ID NO: 353808 - DNA, 155 bp, Homo sapiens; identical to SEQ ID NO: 345249
  chr6:106961023-106961178
  hypo

SEQ ID NO: 353809 - DNA, 314 bp, Homo sapiens; identical to SEQ ID NO: 200609
  chr6:107810308-107810622
  hypo

SEQ ID NO: 353810 - DNA, 430 bp, Homo sapiens; identical to SEQ ID NO: 350445
  chr6:107810665-107811095
  hypo

SEQ ID NO: 353811 - DNA, 85 bp, Homo sapiens; identical to SEQ ID NO: 339113
  chr6:109053387-109053472
  hypo

SEQ ID NO: 353812 - DNA, 121 bp, Homo sapiens; identical to SEQ ID NO: 339114
  chr6:109058656-109058777
  hypo

SEQ ID NO: 353813 - DNA, 114 bp, Homo sapiens; identical to SEQ ID NO: 339115
  chr6:109059982-109060096
  hypo

SEQ ID NO: 353814 - DNA, 120 bp, Homo sapiens
  chr6:109647757-109647877
  hypo
cgatgcagcaaagcggacgccttcctccatggaatgtgctgatttcagacggggcatcagccaatgtagaaaacactaacattttttcttggaactggattgtgatgagaggtgcttgcc

SEQ ID NO: 353815 - DNA, 93 bp, Homo sapiens; identical to SEQ ID NO: 339118
  chr6:110842285-110842378
  hypo

SEQ ID NO: 353816 - DNA, 264 bp, Homo sapiens; identical to SEQ ID NO: 346851
  chr6:111409052-111409316
  hypo

SEQ ID NO: 353817 - DNA, 273 bp, Homo sapiens; identical to SEQ ID NO: 200623
  chr6:111409368-111409641
  hypo

SEQ ID NO: 353818 - DNA, 184 bp, Homo sapiens; identical to SEQ ID NO: 339120
  chr6:111751880-111752064
  hypo

SEQ ID NO: 353819 - DNA, 135 bp, Homo sapiens; identical to SEQ ID NO: 339121
  chr6:111766152-111766287
  hypo

SEQ ID NO: 353820 - DNA, 66 bp, Homo sapiens; identical to SEQ ID NO: 339122
  chr6:112021634-112021700
  hypo

SEQ ID NO: 353821 - DNA, 73 bp, Homo sapiens
  chr6:119510833-119510906
  hypo
cgattatatgattcatgacaagtacgggcaatttcagccccgagttcaaggtagtgttgggccatgccttcgg

SEQ ID NO: 353822 - DNA, 70 bp, Homo sapiens
  chr6:119510942-119511012
  hypo
cgaagcaggtcaggtggcccatcttgtgctccaggaggccccctttccactctgcgatataagttagtcc

SEQ ID NO: 353823 - DNA, 439 bp, Homo sapiens; identical to SEQ ID NO: 284440
  chr6:127836226-127836665
  hypo

SEQ ID NO: 353824 - DNA, 31 bp, Homo sapiens; identical to SEQ ID NO: 350458
  chr6:127837749-127837780
  hypo

SEQ ID NO: 353825 - DNA, 428 bp, Homo sapiens; identical to SEQ ID NO: 348167
  chr6:128901277-128901705
  hypo

SEQ ID NO: 353826 - DNA, 89 bp, Homo sapiens; identical to SEQ ID NO: 339129
  chr6:130499429-130499518
  hypo

SEQ ID NO: 353827 - DNA, 365 bp, Homo sapiens; identical to SEQ ID NO: 332922
  chr6:131383375-131383740
  hypo

SEQ ID NO: 353828 - DNA, 103 bp, Homo sapiens; identical to SEQ ID NO: 348168
  chr6:131455849-131455952
  hypo

SEQ ID NO: 353829 - DNA, 41 bp, Homo sapiens; identical to SEQ ID NO: 339134
  chr6:136552688-136552729
  hypo

SEQ ID NO: 353830 - DNA, 132 bp, Homo sapiens; identical to SEQ ID NO: 348169
  chr6:136556331-136556463
  hypo

SEQ ID NO: 353831 - DNA, 135 bp, Homo sapiens; identical to SEQ ID NO: 339137
  chr6:136901469-136901604
  hypo

SEQ ID NO: 353832 - DNA, 97 bp, Homo sapiens; identical to SEQ ID NO: 339138
  chr6:136980882-136980979
  hypo

SEQ ID NO: 353833 - DNA, 48 bp, Homo sapiens; identical to SEQ ID NO: 200668
  chr6:137243410-137243458
  hypo

SEQ ID NO: 353834 - DNA, 528 bp, Homo sapiens; identical to SEQ ID NO: 346860
  chr6:146136035-146136563
  hypo

SEQ ID NO: 353835 - DNA, 232 bp, Homo sapiens; identical to SEQ ID NO: 346861
  chr6:146136564-146136796
  hypo

SEQ ID NO: 353836 - DNA, 455 bp, Homo sapiens; identical to SEQ ID NO: 339145
  chr6:149915200-149915655
  hypo

SEQ ID NO: 353837 - DNA, 256 bp, Homo sapiens; identical to SEQ ID NO: 339150
  chr6:151687263-151687519
  hypo

SEQ ID NO: 353838 - DNA, 96 bp, Homo sapiens; identical to SEQ ID NO: 339151
  chr6:152527379-152527475
  hypo

SEQ ID NO: 353839 - DNA, 296 bp, Homo sapiens; identical to SEQ ID NO: 210964
  chr6:155568912-155569208
  hypo

SEQ ID NO: 353840 - DNA, 140 bp, Homo sapiens
  chr6:155569349-155569489
  hypo
acagggcggcgaggggctgccagccgtgccctgggcctgacagctcacctcttccccgcctagtggcacgtcctaagtcacttttcagttctgcgatggttaatcttaggtttcacgtgaatatgtgaaactagctaggc

SEQ ID NO: 353841 - DNA, 63 bp, Homo sapiens; identical to SEQ ID NO: 339159
  chr6:157159632-157159695
  hypo

SEQ ID NO: 353842 - DNA, 210 bp, Homo sapiens; identical to SEQ ID NO: 339161
  chr6:157351875-157352085
  hypo

SEQ ID NO: 353843 - DNA, 55 bp, Homo sapiens
  chr6:157478478-157478533
  hypo
agcccagcaacccccacggttctgagttacgaaaggcagggatctttggaattac

SEQ ID NO: 353844 - DNA, 693 bp, Homo sapiens; identical to SEQ ID NO: 339166
  chr6:158024060-158024753
  hypo

SEQ ID NO: 353845 - DNA, 138 bp, Homo sapiens; identical to SEQ ID NO: 348174
  chr6:158093637-158093775
  hypo

SEQ ID NO: 353846 - DNA, 172 bp, Homo sapiens; identical to SEQ ID NO: 348175
  chr6:158094082-158094254
  hypo

SEQ ID NO: 353847 - DNA, 520 bp, Homo sapiens; identical to SEQ ID NO: 346865
  chr6:158402113-158402633
  hypo

SEQ ID NO: 353848 - DNA, 433 bp, Homo sapiens; identical to SEQ ID NO: 339173
  chr6:159045072-159045505
  hypo

SEQ ID NO: 353849 - DNA, 69 bp, Homo sapiens; identical to SEQ ID NO: 339175
  chr6:159203076-159203145
  hypo

SEQ ID NO: 353850 - DNA, 41 bp, Homo sapiens; identical to SEQ ID NO: 346866
  chr6:159591277-159591318
  hypo

SEQ ID NO: 353851 - DNA, 50 bp, Homo sapiens; identical to SEQ ID NO: 339180
  chr6:160455514-160455564
  hypo

SEQ ID NO: 353852 - DNA, 255 bp, Homo sapiens
  chr6:160512209-160512464
  hypo
gctccgtgccctggtgctgagcgcatcgccgagaaggagcaggtgctccgtgccctggtgctgagcgcatcgccgagaaggagcaggtgctccgtgccctggtgctgagcgcatcgccgagaaggagcaggtgctccgtgccctggtgctgagcgcatcgccgagaaggagcaggtgctctgtgccctggtgctgagcgcatcgccgagaaggagcaggtgctccgtgccctggtgctgagtgcatctccacgac

SEQ ID NO: 353853 - DNA, 447 bp, Homo sapiens; identical to SEQ ID NO: 339182
  chr6:160679377-160679824
  hypo

SEQ ID NO: 353854 - DNA, 238 bp, Homo sapiens; identical to SEQ ID NO: 200741
  chr6:163837231-163837469
  hypo

SEQ ID NO: 353855 - DNA, 228 bp, Homo sapiens; identical to SEQ ID NO: 284635
  chr6:166667296-166667524
  hypo

SEQ ID NO: 353856 - DNA, 809 bp, Homo sapiens
  chr6:167315260-167316069
  hypo
cgtaagttgaacggacagcggggagaacgccgccctaacacacgcgggaaataacgacgcgtgaacacacagcagggagaacgccgcgtgaaagcacaggggggagaacgccgcgtgaatgcacacacgggaaataacgccgtgtgaacacacagcggggagaacgccgcgtgaacgcacacaggggaaataacgccgcgcgaacacacagggggaagaacgtcacagggacgcacagtggggaaacgccatgtgaacgcacaaagaaagaacgccacgtgaactcgcacacgcggggagaacgccggggaaacgcacacagtaaagagaacgcagtttgaacgcacaggggagagaacgccacgtgaacacacagaagggagaatgcagtgcgaacacacagaagggagaacacctggtgaaggcacagaggggagaacgccgagcgaacgcacagggtggagaatgccatgtgaacgcacaaagaaaggagaacccctggtgaacgcacacaggagaaagaatgccgaggaacgcacagagtaaagagaccgccgtgggaacacacaggggagagaacgccacgtgaacacatggggagaacgccgcgggaacacacagaagggcgaccgcctggtggatgcacagaggggagaacgccaggggaacacacacaggggagaacgctgggcgatcacacagggtggagaacgccgggtaaatacacactggggaaaacgctgtgcaatcgcatagagggaagaacgccgggtgaacacacagggtgcgttcttccatcatgcggctgc

SEQ ID NO: 353857 - DNA, 513 bp, Homo sapiens; identical to SEQ ID NO: 339204
  chr6:168529700-168530213
  hypo

SEQ ID NO: 353858 - DNA, 365 bp, Homo sapiens; identical to SEQ ID NO: 339205
  chr6:168672446-168672811
  hypo

SEQ ID NO: 353859 - DNA, 314 bp, Homo sapiens; identical to SEQ ID NO: 339208
  chr6:169641077-169641391
  hypo

SEQ ID NO: 353860 - DNA, 506 bp, Homo sapiens; identical to SEQ ID NO: 345259
  chr6:170124879-170125385
  hypo

SEQ ID NO: 353861 - DNA, 226 bp, Homo sapiens; identical to SEQ ID NO: 211060
  chr6:170339178-170339404
  hypo

SEQ ID NO: 353862 - DNA, 229 bp, Homo sapiens
  chr6:170339543-170339772
  hypo
gaccaccctgagcctggtgacgtcacgggtggaggagaccgccccgagccctgtgacttcacggtggaggagaccaccctgagcccggtgacgtcacgggtggaggagaccgccccgagccctgtgacttcacggtggaggagtccaccccgagcctggtgacatcatggtggaggagaccgcccctgagcccgggtgcccctgatcccaggcactggatgggatcccc

SEQ ID NO: 353863 - DNA, 271 bp, Homo sapiens
  chr6:170474572-170474843
  hypo
cgcccgccatcctcctgcattagcatactcctaattgattaagtggatgattgattattggacccgtgcggtctgctttccagacccgttggctgggaatggaaagccacgctcggccctcggatgcagcagaagccccctgccccgtccgctccaggctgcagagccgaggtgattggcgccaggctgcccaccccgcctgccccagcaagtgcgtcgcgcccccatggtttctgctgtttgcatgtcaggtcccggcaggaagctgcag

SEQ ID NO: 353864 - DNA, 163 bp, Homo sapiens
  chr6:170531590-170531753
  hypo
cgagtggctgtctggcacaccaggcatcgatctccgcaaaacgaactggaaaatgctcttccccagaagcgcagcacctgagcgtgtgacgtgcacatgtttgtgtggaaggcccgagacgccatccaaccccgtggctctcaaaccgggtctccagaaccac

SEQ ID NO: 353865 - DNA, 148 bp, Homo sapiens; identical to SEQ ID NO: 339216
  chr6:170871281-170871429
  hypo

SEQ ID NO: 353866 - DNA, 86 bp, Homo sapiens; identical to SEQ ID NO: 350497
  chr7:149024-149110
  hypo

SEQ ID NO: 353867 - DNA, 575 bp, Homo sapiens; identical to SEQ ID NO: 350498
  chr7:149220-149795
  hypo

SEQ ID NO: 353868 - DNA, 550 bp, Homo sapiens; identical to SEQ ID NO: 348180
  chr7:287728-288278
  hypo

SEQ ID NO: 353869 - DNA, 468 bp, Homo sapiens; identical to SEQ ID NO: 348181
  chr7:288328-288796
  hypo

SEQ ID NO: 353870 - DNA, 705 bp, Homo sapiens
  chr7:300272-300977
  hypo
cgtgtacacagatgccaatcacctaccaaaccaaacacgaggaccgccctccctggttctgggggcccctcaaggccaagctcacccctcaagtgctctcacactcgggacctaattcaagtaaaaaccctttctccttcctggggcctcggctcctggagggctggagggtctcgtctgaggacgggaggaggctctcgctggacgtctggcctgtgcgctggtggacggatgcctacgtggttttggaggacccgatgaccaggcgtcctgcgagtccgcccgctggcctgcagcacccacctcggacttggctgtggacggttggtgcaagtgcatcctgcagggctggctgtgcgcagctgtgggctgacctttgcagagttttgtggaatagtttgcaatgtcataaaagtgcaataaaggtacagcagatgtgtgtcggcctcacggggcgggtccctcacaccctggtgtgtggctgcctgtccaccccctctccaaagaaaaaccagtcctggaaccaggcatggccaggagtcggcattcaaggtggcctggacccgaggcctgctggggtcggagggggctgcctgccaagccctggtgcaaacaggccaggtggggccccacctccaaggcagggcggtccgtcctgggttgctctcagaggctggggccgcgacccaaagctgcggcggcccc

SEQ ID NO: 353871 - DNA, 45 bp, Homo sapiens
  chr7:345250-345295
  hypo
cgctgtttgtacagagaaaggggtgcacagagccgtggacctgca

SEQ ID NO: 353872 - DNA, 147 bp, Homo sapiens
  chr7:345608-345755
  hypo
ctcacggaaccacggcaggacgtggaagaaattatgtggcttgtttgtgtgtctgcaatcgcgtcaagaccgatggtccctcggctctggacagacgcccccccagccagctgaggatgcgaatattcatggcctggtgccgggtcc

SEQ ID NO: 353873 - DNA, 302 bp, Homo sapiens
  chr7:455133-455435
  hypo
cgggggatgcggcctgcggtgccctccaggctcagcctgggtgacagggccaactcacggggcccgtggcctgcggagtcctccaggctcaccctgggtcacagggccagtttgcagggacagcagcctgcggtgccttccaggctcaccctgggtcacgcggccagttcgcggggcccgtggcctgcagagtcctctaggctcaccctgggtcatgcggccagttcgtggggacagcagcctgaggtgtcctccaggctcaccctgggtcacgcagtcagctcacgggggccgcggcctgc

SEQ ID NO: 353874 - DNA, 265 bp, Homo sapiens; identical to SEQ ID NO: 339246
  chr7:540536-540801
  hypo

SEQ ID NO: 353875 - DNA, 99 bp, Homo sapiens
  chr7:551473-551572
  hypo
cgcgggggtggagccctggagccaggtgtgagtggggcggggcacacgggtgtggtgagggtgtcggggggcagccgccggacacagcacgcgcgtccc

SEQ ID NO: 353876 - DNA, 256 bp, Homo sapiens; identical to SEQ ID NO: 306754
  chr7:551697-551953
  hypo

SEQ ID NO: 353877 - DNA, 116 bp, Homo sapiens
  chr7:552019-552135
  hypo
cgcttctcgggcacatgcttagtggcatggaccccgtgagctctcaggctggtgtccaaagaatcctcactccctgcaggcggaaggagaacaccgtgaatgccccaggcccgtgc

SEQ ID NO: 353878 - DNA, 252 bp, Homo sapiens; identical to SEQ ID NO: 339255
  chr7:716729-716981
  hypo

SEQ ID NO: 353879 - DNA, 238 bp, Homo sapiens; identical to SEQ ID NO: 332992
  chr7:822395-822633
  hypo

SEQ ID NO: 353880 - DNA, 58 bp, Homo sapiens
  chr7:834245-834303
  hypo
cgggtccaggggatgtctctgagcccccaatcctttacggggccttttcctggggtcc

SEQ ID NO: 353881 - DNA, 317 bp, Homo sapiens
  chr7:834873-835190
  hypo
ggaccagagcctgggagggtccacacccgcagaatctaacctggacctgggcagggcagggtccacacccacagagtctgtctaatctgcagaggacaagggtggggtctcccacagagccagcctgaggggtgggtgcacctgaggggtgggcgcacctgaggggtgggctcgtcgccctctgcctcatgctggcaggacccgagaggcctgggagtgctgggaactgagaaacagtcatcaccaattaaaagtcccgctgccttttattaacaccatgcgtcacccttctgtacaatatcagtgagaaaacactc

SEQ ID NO: 353882 - DNA, 372 bp, Homo sapiens
  chr7:907709-908081
  hypo
ggggcagtaaatccacagctggcatagaggagaagccggcgggtacgtgcccatcgttcaccatctcttctaaacacgaatgaaatgcgtgtgtcgtcctcacacactgaaggcaggctgcgtgcacggtctcctcctccgttgcgcacagcaacgtggctgcctgggcgcagcgtctgcaacttgtcagtcagtccctgtgtgtgcctggggacgctgtgctgcgaacagtgctctccggtcacatctgccctgcacctggaggtgggggtgcgatcgcaggccagaggcagatgtgtgcgcagcaggccgaccttgccaggctgtgcttctggggctgcaggctgcaccgtggccgggttaggttagaac

SEQ ID NO: 353883 - DNA, 176 bp, Homo sapiens; identical to SEQ ID NO: 348182
  chr7:920980-921156
  hypo

SEQ ID NO: 353884 - DNA, 594 bp, Homo sapiens; identical to SEQ ID NO: 339268
  chr7:943355-943949
  hypo

SEQ ID NO: 353885 - DNA, 333 bp, Homo sapiens; identical to SEQ ID NO: 332995
  chr7:1001822-1002155
  hypo

SEQ ID NO: 353886 - DNA, 420 bp, Homo sapiens; identical to SEQ ID NO: 339277
  chr7:1202650-1203070
  hypo

SEQ ID NO: 353887 - DNA, 123 bp, Homo sapiens
  chr7:1308164-1308287
  hypo
cgcgaccctggcaggaggtctcagagaagacggctcgccacaggccctcagaacaccctcctggtctacagaggggacgctgaggctgggagcgggaatgtggctggtccctgctgctccctc

SEQ ID NO: 353888 - DNA, 139 bp, Homo sapiens; identical to SEQ ID NO: 211166
  chr7:1315705-1315844
  hypo

SEQ ID NO: 353889 - DNA, 101 bp, Homo sapiens
  chr7:1460672-1460773
  hypo
cgtaacacgcatcccatgggcgtcccgtgccaggaattgagggggccacaccctactcaacgcgggggacagtctccgggctccgtggctcacggatggtg

SEQ ID NO: 353890 - DNA, 576 bp, Homo sapiens; identical to SEQ ID NO: 339288
  chr7:1473784-1474360
  hypo

SEQ ID NO: 353891 - DNA, 532 bp, Homo sapiens; identical to SEQ ID NO: 339294
  chr7:1533923-1534455
  hypo

SEQ ID NO: 353892 - DNA, 421 bp, Homo sapiens
  chr7:1641978-1642399
  hypo
ggcccaggctgaagtatcatgatgaagagcttggaccgagggcagttaaggtgtgtgagtattcagatcccccacgtgcccttctctggaaggtgccagcgacctgtcctctctgggcctctgtcttctcctctgtggaatgggaatgatggcgtccgcacctcatagggctgctggaaaatgggtctgggtctcggctggaatttcagccagcgccgaggaccagaggccctggttcctgtccacgtggcctgggacccccgcggccccgcacctgggctccgggggcaagtgtgttcgctttgaggacccagccttggaggtcagatggcatccgttatgggttaaattttgtccccctaaattcatatgttgaagtcttaacccacagggcctcagaatgggatggtatttggagccc

SEQ ID NO: 353893 - DNA, 95 bp, Homo sapiens; identical to SEQ ID NO: 346873
  chr7:1705153-1705248
  hypo

SEQ ID NO: 353894 - DNA, 206 bp, Homo sapiens; identical to SEQ ID NO: 348186
  chr7:1931663-1931869
  hypo

SEQ ID NO: 353895 - DNA, 45 bp, Homo sapiens; identical to SEQ ID NO: 348187
  chr7:1970797-1970842
  hypo

SEQ ID NO: 353896 - DNA, 88 bp, Homo sapiens; identical to SEQ ID NO: 348188
  chr7:1970921-1971009
  hypo

SEQ ID NO: 353897 - DNA, 108 bp, Homo sapiens
  chr7:2024704-2024812
  hypo
cggttcattccatgtgtccactggacaggacctggggtactcagatcaaaacactttctgggtgtgtctgggagggtttgtggatgagatcagcatttgaatcgggga

SEQ ID NO: 353898 - DNA, 384 bp, Homo sapiens
  chr7:2024842-2025226
  hypo
ggcctcctccaaccccttgaggccggaatgaaatgaaaactggaggaggcgaccgttcctcccttgcctgcctggtggcctgagcggggcagctcccgttttccgcccaggactggggctttcaccacaggctccgctggttctcaggcctgcagagcggactgggcacagcacaggctcttccaggtctgctgtgcacagatgcagaccacgggatcctggctccatggccaagagcgagggcctcacagtcactctctcgggatagaccagtctaccgcacctggtgctctagggagcctaacatgcagctcgatctgctctccccacctgatactacctttagatggtgtgtctgtgtcttcggctctcaacagcgaagcc

SEQ ID NO: 353899 - DNA, 147 bp, Homo sapiens; identical to SEQ ID NO: 339320
  chr7:2068947-2069094
  hypo

SEQ ID NO: 353900 - DNA, 253 bp, Homo sapiens; identical to SEQ ID NO: 348189
  chr7:2071776-2072029
  hypo

SEQ ID NO: 353901 - DNA, 403 bp, Homo sapiens
  chr7:2196807-2197210
  hypo
cgtcttcaaaagagtgctaagtaatacaatattttaagaatagaaatcaatagtaagaaggcgatgggaacactgttgtggggaggcctggctccactgaccactccagcagtgcaggtcaccgtgatcaggaagcggtaatgatggaacaaatcacagcactcagagggctcctccccttcatgttaccatttgagctccccaccatgcaagtccacacctcacatgcgtaagaacccgcaaaaactaagagactgagaagagaaaagcagcacagcatgctcccgacacggaagacgctgcccatctgggaggagtgggagagccggtcccctacagtctctgctcagtgcagcacaggcccagggccctgggacacagggcagagggtgtctgaaagagg

SEQ ID NO: 353902 - DNA, 326 bp, Homo sapiens; identical to SEQ ID NO: 345891
  chr7:2208344-2208670
  hypo

SEQ ID NO: 353903 - DNA, 91 bp, Homo sapiens; identical to SEQ ID NO: 345892
  chr7:2208844-2208935
  hypo

SEQ ID NO: 353904 - DNA, 236 bp, Homo sapiens; identical to SEQ ID NO: 211252
  chr7:2233056-2233292
  hypo

SEQ ID NO: 353905 - DNA, 114 bp, Homo sapiens; identical to SEQ ID NO: 339333
  chr7:2237109-2237223
  hypo

SEQ ID NO: 353906 - DNA, 136 bp, Homo sapiens; identical to SEQ ID NO: 345894
  chr7:2237982-2238118
  hypo

SEQ ID NO: 353907 - DNA, 289 bp, Homo sapiens; identical to SEQ ID NO: 211260
  chr7:2265241-2265530
  hypo

SEQ ID NO: 353908 - DNA, 316 bp, Homo sapiens
  chr7:2349432-2349748
  hypo
aacagacctgacatgagcgagcagctgcaggtaagggttgatgggagcccagggtgcatggaagtcgcccaggcaagaggggaaggctcggggcaggggtgaaggagccccgagggtcagcaaaggccctggacctgcctcaatgacactcaaggagtcatcgccaggtcaacgcggacaaacagcacggagcttccgaaccgaatggaatgtatggaatgccatgggatgagccgcaagtgaagcgtgactcaccctcgttctaaagagtcaatgtagggccgcaggactgtatacggcagagccaggatacgcc

SEQ ID NO: 353909 - DNA, 242 bp, Homo sapiens; identical to SEQ ID NO: 339340
  chr7:2448743-2448985
  hypo

SEQ ID NO: 353910 - DNA, 468 bp, Homo sapiens; identical to SEQ ID NO: 348195
  chr7:2472811-2473279
  hypo

SEQ ID NO: 353911 - DNA, 328 bp, Homo sapiens; identical to SEQ ID NO: 345896
  chr7:2473779-2474107
  hypo

SEQ ID NO: 353912 - DNA, 440 bp, Homo sapiens; identical to SEQ ID NO: 257151
  chr7:2643038-2643478
  hypo

SEQ ID NO: 353913 - DNA, 327 bp, Homo sapiens; identical to SEQ ID NO: 339345
  chr7:2679783-2680110
  hypo

SEQ ID NO: 353914 - DNA, 145 bp, Homo sapiens; identical to SEQ ID NO: 339351
  chr7:2804422-2804567
  hypo

SEQ ID NO: 353915 - DNA, 84 bp, Homo sapiens; identical to SEQ ID NO: 350505
  chr7:3083602-3083686
  hypo

SEQ ID NO: 353916 - DNA, 43 bp, Homo sapiens
  chr7:3283455-3283498
  hypo
cgtgagccaccgcgcccagcctcagaagtgctccttttttacc

SEQ ID NO: 353917 - DNA, 123 bp, Homo sapiens; identical to SEQ ID NO: 339361
  chr7:4254687-4254810
  hypo

SEQ ID NO: 353918 - DNA, 902 bp, Homo sapiens
  chr7:4801650-4802552
  hypo
cggcagggcccgcagggagcagagcaagggtagccgtcctgcctggcaggggtgcactgacctccggttccggcttggtggcttagcccctgtataggggacttgaaaaaagcagctgggtcctaaccagaccccagagtaaccctcttcttcctccactccagccctcaccagccctttgcagctccttgcgacccaagcgagttcatccgcgccggtggtggtcacccgggtgtgcgaggtggggcccaaggagccagcagcagccgtcgcggccacggccaccaccaccccagccactgccaccaccgcctctgcctccgcctcttccactggagagcccgaggtcaaaaggtcccgggtggaggagcccagtggtgctgtaaccacaccggctggagtgatcgcagctgccggcccccaggggccaggcaccggggagtgaggtcacctgcaacgcgggggagtgggactcacccagcggcgaccccgaagctggacccggcagctcaggcggccgcacccacagacggaggagaacagcccgcggcggcctgtgggcatcggcggcacctggacacacccagccctttccatttgatcgcctgccttcccgtggtttaagacaaaaacacataaacaagttcagacaactgattgtatgattctgggaattctttgctttcctttccttctccctcggcaccacctcctctccccaggcctccctgtcgggcatggggaggaggttggagctcagcatcttgaggaatgtgtcaagacagcccctccgctccgcgctgcacggccagccgcctttgtccgggaggacagacagaaacgcagcaaggcacacaccaaggctgccggggaggcccgggcaccggacagatgcctgttgg

SEQ ID NO: 353919 - DNA, 224 bp, Homo sapiens; identical to SEQ ID NO: 345897
  chr7:4856619-4856843
  hypo

SEQ ID NO: 353920 - DNA, 100 bp, Homo sapiens; identical to SEQ ID NO: 345898
  chr7:4857296-4857396
  hypo

SEQ ID NO: 353921 - DNA, 111 bp, Homo sapiens
  chr7:4857860-4857971
  hypo
cggcgcctggtgagccaggccaacactcaccccagcgcgggcctcccaggagcacaggcccccagctgcccctctgccgggcagactgcaccggaggccggcccactcatg

SEQ ID NO: 353922 - DNA, 527 bp, Homo sapiens
  chr7:4917102-4917629
  hypo
cgggctccgactgcctcctgcagagcgagcccgccccacgcatgtcccctgcaccactccttctccgcctacctcggctggccttctcagcgctcagacccacggctcttcctgaacctgtggcccccctcacctgccgtgatggtgtccacctccttggctgccagctcctccacgtccgacctcttcctcagctcaaacctccgggataaaccttctcggggtttccataattcctggatcaagaggggcttctcactgtccccaaacacccgaaagcaccgggcctgccaccgctgcccagcatcgccggcttggcccaccacgtcacacagcacgtactggccggcctgcctggggtccagggcgtaccgctccagcgcctccttcaccagctcacgggcgctggaggtgccggtggccaggacgctcttgtagtgggttcctgtgcagacactgtccccaaacaccttcaggacaccaggggccgacagctgggtggagagctcggcggggtcatcgctggc

SEQ ID NO: 353923 - DNA, 237 bp, Homo sapiens; identical to SEQ ID NO: 339373
  chr7:5230941-5231178
  hypo

SEQ ID NO: 353924 - DNA, 635 bp, Homo sapiens; identical to SEQ ID NO: 346875
  chr7:5632268-5632903
  hypo

SEQ ID NO: 353925 - DNA, 123 bp, Homo sapiens; identical to SEQ ID NO: 350511
  chr7:5633472-5633595
  hypo

SEQ ID NO: 353926 - DNA, 67 bp, Homo sapiens
  chr7:6060523-6060590
  hypo
cgagctcttacctataaaactgctaacacctgagacttaacgggaaaagataaacacagctgctgat

SEQ ID NO: 353927 - DNA, 104 bp, Homo sapiens; identical to SEQ ID NO: 211371
  chr7:6060612-6060716
  hypo

SEQ ID NO: 353928 - DNA, 71 bp, Homo sapiens
  chr7:6060772-6060843
  hypo
aggctcattacacacagtactctatgaaattgtcagtgctatgaaagagaaccctggctgggcatggtggc

SEQ ID NO: 353929 - DNA, 107 bp, Homo sapiens; identical to SEQ ID NO: 211378
  chr7:6443719-6443826
  hypo

SEQ ID NO: 353930 - DNA, 100 bp, Homo sapiens; identical to SEQ ID NO: 211379
  chr7:6443856-6443956
  hypo

SEQ ID NO: 353931 - DNA, 60 bp, Homo sapiens; identical to SEQ ID NO: 211380
  chr7:6443990-6444050
  hypo

SEQ ID NO: 353932 - DNA, 162 bp, Homo sapiens; identical to SEQ ID NO: 339401
  chr7:6694972-6695134
  hypo

SEQ ID NO: 353933 - DNA, 209 bp, Homo sapiens; identical to SEQ ID NO: 211394
  chr7:7605822-7606031
  hypo

SEQ ID NO: 353934 - DNA, 76 bp, Homo sapiens; identical to SEQ ID NO: 339406
  chr7:7612745-7612821
  hypo

SEQ ID NO: 353935 - DNA, 157 bp, Homo sapiens; identical to SEQ ID NO: 339407
  chr7:7613138-7613295
  hypo

SEQ ID NO: 353936 - DNA, 271 bp, Homo sapiens; identical to SEQ ID NO: 350515
  chr7:16793071-16793342
  hypo

SEQ ID NO: 353937 - DNA, 182 bp, Homo sapiens; identical to SEQ ID NO: 114656
  chr7:16793380-16793562
  hypo

SEQ ID NO: 353938 - DNA, 104 bp, Homo sapiens; identical to SEQ ID NO: 346877
  chr7:18125868-18125972
  hypo

SEQ ID NO: 353939 - DNA, 218 bp, Homo sapiens; identical to SEQ ID NO: 200838
  chr7:18126225-18126443
  hypo

SEQ ID NO: 353940 - DNA, 59 bp, Homo sapiens; identical to SEQ ID NO: 200840
  chr7:19156644-19156703
  hypo

SEQ ID NO: 353941 - DNA, 1116 bp, Homo sapiens; identical to SEQ ID NO: 350525
  chr7:21984770-21985886
  hypo

SEQ ID NO: 353942 - DNA, 140 bp, Homo sapiens; identical to SEQ ID NO: 345262
  chr7:22893437-22893577
  hypo

SEQ ID NO: 353943 - DNA, 1088 bp, Homo sapiens; identical to SEQ ID NO: 345263
  chr7:22893607-22894695
  hypo

SEQ ID NO: 353944 - DNA, 209 bp, Homo sapiens; identical to SEQ ID NO: 346882
  chr7:23052818-23053027
  hypo

SEQ ID NO: 353945 - DNA, 713 bp, Homo sapiens; identical to SEQ ID NO: 284856
  chr7:23053080-23053793
  hypo

SEQ ID NO: 353946 - DNA, 246 bp, Homo sapiens; identical to SEQ ID NO: 350530
  chr7:23053819-23054065
  hypo

SEQ ID NO: 353947 - DNA, 760 bp, Homo sapiens; identical to SEQ ID NO: 350533
  chr7:23510081-23510841
  hypo

SEQ ID NO: 353948 - DNA, 228 bp, Homo sapiens; identical to SEQ ID NO: 346885
  chr7:23513246-23513474
  hypo

SEQ ID NO: 353949 - DNA, 221 bp, Homo sapiens; identical to SEQ ID NO: 333064
  chr7:23570157-23570378
  hypo

SEQ ID NO: 353950 - DNA, 133 bp, Homo sapiens
  chr7:23749573-23749706
  hypo
cgtgaacagattaggaaagaccacgaaatcctacgtcacctctaaagtcacagcttgaagccttgcgaaaggaactggccctagaccccaccccggcctataaatcaccagggcgcagcctcagtgcctgggg

SEQ ID NO: 353951 - DNA, 364 bp, Homo sapiens
  chr7:23749829-23750193
  hypo
gggcccttgcggtcgaagctcacgcggtaagccgctgcacgtgtgctacggcgggcggagggccgaaagtccagtatgtgggtccagggtcactcttctagagcttccgcaacggaaagtgtgaggtcagtagtagtttttgtggtacgtgcagtggtggccgcttcaaggactattttcgtcgctgcttgcgttttaagtctccaatcctgggacgaggcccatttcagggttttctgtcaccttctagccgcccgccaccccagaggggtgccagatgccccagtttttgagtgcatgcaggcaggcgaaagtggctcgaaaagacctccggcctgaatgatctccatgaagacgcggtcac

SEQ ID NO: 353952 - DNA, 164 bp, Homo sapiens; identical to SEQ ID NO: 348217
  chr7:26283815-26283979
  hypo

SEQ ID NO: 353953 - DNA, 142 bp, Homo sapiens; identical to SEQ ID NO: 345270
  chr7:27136790-27136932
  hypo

SEQ ID NO: 353954 - DNA, 37 bp, Homo sapiens; identical to SEQ ID NO: 350552
  chr7:27278957-27278994
  hypo

SEQ ID NO: 353955 - DNA, 136 bp, Homo sapiens; identical to SEQ ID NO: 350553
  chr7:27279659-27279795
  hypo

SEQ ID NO: 353956 - DNA, 456 bp, Homo sapiens
  chr7:27531253-27531709
  hypo
ggtctgacatgattgttggccgtggaaggcctcgggccatcctgagctcagatcttggctgccggccgctagggcggctgcttctgcagcagggctagggtgtcccgcttctcaatggagcgcagctgctgctgctttgcccgcttgagcttggcagggtttcggatcacttggacgatctccaccttccgctcgttctccaggcggcatttcaggttctccgcccgacgctgtttcttctcctggcggcgcctctcctactcctcctccaggtgacgggcaaagtccttggccagcttcctctcctgcttcatcttccgctgccacgatatacgcaggggcttgtcctaaagcatctgagagaatcttttcttggagcggtccttccacacttgccccgacttgggcttccccttcgggattacaggaagctcctcctccttcagcttcttggac

SEQ ID NO: 353957 - DNA, 31 bp, Homo sapiens; identical to SEQ ID NO: 211454
  chr7:27686737-27686768
  hypo

SEQ ID NO: 353958 - DNA, 45 bp, Homo sapiens
  chr7:27686815-27686860
  hypo
ctagtaagtgactaatgggccagggagtgtctgcagcatggagac

SEQ ID NO: 353959 - DNA, 126 bp, Homo sapiens; identical to SEQ ID NO: 339438
  chr7:27831654-27831780
  hypo

SEQ ID NO: 353960 - DNA, 189 bp, Homo sapiens; identical to SEQ ID NO: 348220
  chr7:27907637-27907826
  hypo

SEQ ID NO: 353961 - DNA, 70 bp, Homo sapiens; identical to SEQ ID NO: 348221
  chr7:27908068-27908138
  hypo

SEQ ID NO: 353962 - DNA, 37 bp, Homo sapiens; identical to SEQ ID NO: 200915
  chr7:29186197-29186234
  hypo

SEQ ID NO: 353963 - DNA, 496 bp, Homo sapiens; identical to SEQ ID NO: 200916
  chr7:29234008-29234504
  hypo

SEQ ID NO: 353964 - DNA, 159 bp, Homo sapiens; identical to SEQ ID NO: 345272
  chr7:29234886-29235045
  hypo

SEQ ID NO: 353965 - DNA, 175 bp, Homo sapiens; identical to SEQ ID NO: 339453
  chr7:30972844-30973019
  hypo

SEQ ID NO: 353966 - DNA, 89 bp, Homo sapiens; identical to SEQ ID NO: 339457
  chr7:32609681-32609770
  hypo

SEQ ID NO: 353967 - DNA, 254 bp, Homo sapiens; identical to SEQ ID NO: 339463
  chr7:36124398-36124652
  hypo

SEQ ID NO: 353968 - DNA, 168 bp, Homo sapiens; identical to SEQ ID NO: 345273
  chr7:37960958-37961126
  hypo

SEQ ID NO: 353969 - DNA, 257 bp, Homo sapiens; identical to SEQ ID NO: 339469
  chr7:38725412-38725669
  hypo

SEQ ID NO: 353970 - DNA, 408 bp, Homo sapiens; identical to SEQ ID NO: 200954
  chr7:42276904-42277312
  hypo

SEQ ID NO: 353971 - DNA, 180 bp, Homo sapiens; identical to SEQ ID NO: 339474
  chr7:42834387-42834567
  hypo

SEQ ID NO: 353972 - DNA, 271 bp, Homo sapiens
  chr7:44153157-44153428
  hypo
cgctctggggcagccggatcgttctccctccgcagccagtggtggtgattactggcgaatcttgaacccgggtgagtaccgcgtgacagcccacgcggagggctacaccccgagcgccaagacctgcaatgttgactatgacatcggggccactcagtgcaacttcatcctggctcgctccaactggaagcgcatccgggagatcatggccatgaacgggaaccggcctatcccacacatagacccatcgcgccctatgaccccccaacag

SEQ ID NO: 353973 - DNA, 38 bp, Homo sapiens; identical to SEQ ID NO: 350573
  chr7:44364447-44364485
  hypo

SEQ ID NO: 353974 - DNA, 369 bp, Homo sapiens; identical to SEQ ID NO: 346904
  chr7:44365258-44365627
  hypo

SEQ ID NO: 353975 - DNA, 112 bp, Homo sapiens; identical to SEQ ID NO: 339481
  chr7:44611096-44611208
  hypo

SEQ ID NO: 353976 - DNA, 51 bp, Homo sapiens; identical to SEQ ID NO: 348228
  chr7:44740672-44740723
  hypo

SEQ ID NO: 353977 - DNA, 160 bp, Homo sapiens; identical to SEQ ID NO: 350576
  chr7:44924093-44924253
  hypo

SEQ ID NO: 353978 - DNA, 309 bp, Homo sapiens; identical to SEQ ID NO: 200961
  chr7:44924469-44924778
  hypo

SEQ ID NO: 353979 - DNA, 77 bp, Homo sapiens
  chr7:47515282-47515359
  hypo
cgcttgcagagtgtatgaaggtaaacacaggatggaaaaaaacaaggacactctgcccttgaacttcaatcaaaagc

SEQ ID NO: 353980 - DNA, 147 bp, Homo sapiens
  chr7:47515405-47515552
  hypo
agatcctgcaaacctgcaactaccaaggacagactcgcatgcgcccttgttctgaccgtggtgcctccaagtctgcaaatgcgggatcacaggaatcatctactgtgtctgtcatcggtgccctcaccctcaggaagcaggggacac

SEQ ID NO: 353981 - DNA, 437 bp, Homo sapiens; identical to SEQ ID NO: 339493
  chr7:47605260-47605697
  hypo

SEQ ID NO: 353982 - DNA, 95 bp, Homo sapiens
  chr7:50251628-50251723
  hypo
agcatgctggcattgggaagaggcaccctcacactggcatcgggaggaggtgtccatatgttggcatcaggaggaggtgtccacacgctggtatc

SEQ ID NO: 353983 - DNA, 102 bp, Homo sapiens; identical to SEQ ID NO: 345274
  chr7:50344738-50344840
  hypo

SEQ ID NO: 353984 - DNA, 56 bp, Homo sapiens; identical to SEQ ID NO: 345910
  chr7:50560501-50560557
  hypo

SEQ ID NO: 353985 - DNA, 220 bp, Homo sapiens; identical to SEQ ID NO: 345911
  chr7:50560663-50560883
  hypo

SEQ ID NO: 353986 - DNA, 178 bp, Homo sapiens; identical to SEQ ID NO: 339504
  chr7:50687526-50687704
  hypo

SEQ ID NO: 353987 - DNA, 154 bp, Homo sapiens
  chr7:52736911-52737065
  hypo
gcgaggctttgcatggacagaaccaacggcgagccgcgccctggggactccaggctgccgggatccagtcccgcctccagcgcaggctccaccctggggagctcccgagaggcctgcgcgctcctgccactctccaagcctgcaaggaagaacc

SEQ ID NO: 353988 - DNA, 587 bp, Homo sapiens; identical to SEQ ID NO: 307760
  chr7:53103586-53104173
  hypo

SEQ ID NO: 353989 - DNA, 64 bp, Homo sapiens
  chr7:53104233-53104297
  hypo
tgctggcccctttggctcctaagaatctgggctctgctacccacctccggagacacaagcccac

SEQ ID NO: 353990 - DNA, 619 bp, Homo sapiens
  chr7:55145980-55146599
  hypo
gggacaccccccaccccaccccaccgccacagcccagagcggtgccaggaagccgcctcgacgcagccgtatcttgaggctccagccccatccccagggtaccacgccacgtagagacactatttttcacttcgtgtttgtcactcctaaagcatgtgtgctagctgcaccaaccctgggatgcctcggtgcatagggtttatgtgcgtcctcctccttccctctgagctggtcccccgtggggaactgctgcccagactgacctgcgtccttccgcacgtgcaggaaaatgtccacgtgcacttgtcagggtgggggccacacgggcaccaccactgatcatctgtgggatcgagttactgcccatgcagatcccacgtgcagggcccagtcgctttggtgagagagtggacgctgtggtgactccacggtctgtggctgtgctcaggaggacagagaggggacatcctgagatggtttgggcagcccgcggatcctgtgcatgtccccagagcgtccactttctccatggagcagtggagtggcgttgctgagacagaaagttcaggttctccactccccatgcagcccccactcccctgtctccggccaggcacgc

SEQ ID NO: 353991 - DNA, 294 bp, Homo sapiens; identical to SEQ ID NO: 339518
  chr7:57324312-57324606
  hypo

SEQ ID NO: 353992 - DNA, 188 bp, Homo sapiens; identical to SEQ ID NO: 339519
  chr7:57706384-57706572
  hypo

SEQ ID NO: 353993 - DNA, 118 bp, Homo sapiens; identical to SEQ ID NO: 339521
  chr7:63569143-63569261
  hypo

SEQ ID NO: 353994 - DNA, 60 bp, Homo sapiens; identical to SEQ ID NO: 200992
  chr7:64974448-64974508
  hypo

SEQ ID NO: 353995 - DNA, 51 bp, Homo sapiens; identical to SEQ ID NO: 346909
  chr7:65037711-65037762
  hypo

SEQ ID NO: 353996 - DNA, 91 bp, Homo sapiens
  chr7:65553884-65553975
  hypo
cgtgcagctctcagatgcctacaggtaagccctgaactgccacctccatctgccgctgccggcctctgtatcccccgccgcccgcggacgt

SEQ ID NO: 353997 - DNA, 314 bp, Homo sapiens
  chr7:65554018-65554332
  hypo
ttgcggcgctggaccagccaagggtccagccccttcagcgccagcacctctgtccccagcacgggaagcagcctgatgccccagaagaaaaaccccgacagtttggagctgatccggagcaaggctgggcgtgtgtttgggcgggtgagcaaggcagggggaggggcggggcctctgggctgatggtgggtggccaggggggcaggatcccgggtccagcccctgtgcctccctcttcccgcagtgtgccgggctcctgatgaccctcaagggacttcccagcacctacaacaaagacttacaggtgcgaggcc

SEQ ID NO: 353998 - DNA, 245 bp, Homo sapiens
  chr7:65877904-65878149
  hypo
tacaccaagcgtgcaccacgcctggctaatttttgaaacttttctacagacggggttgcgtcacgttgcccagggcagtctcgaactccttagaccaagccatcctccccctcggcctcccaaagtgctgggattatagagtccagccagcctcatgttttctttaagcagtccctccctgttgcacagttggatagtttatttttttatttttttagacatggtttacctcagtctcgcaggac

SEQ ID NO: 353999 - DNA, 96 bp, Homo sapiens; identical to SEQ ID NO: 339534
  chr7:66204269-66204365
  hypo

SEQ ID NO: 354000 - DNA, 90 bp, Homo sapiens
  chr7:66293278-66293368
  hypo
gtgttttctaacgccgcagcgaaacccatccgtgtgccacgtcaattccttagccgccatgccatgctgtcatctcagcctgagcttggc

SEQ ID NO: 354001 - DNA, 156 bp, Homo sapiens; identical to SEQ ID NO: 350587
  chr7:69062203-69062359
  hypo

SEQ ID NO: 354002 - DNA, 421 bp, Homo sapiens; identical to SEQ ID NO: 201000
  chr7:69063038-69063459
  hypo

SEQ ID NO: 354003 - DNA, 318 bp, Homo sapiens; identical to SEQ ID NO: 201001
  chr7:69063552-69063870
  hypo

SEQ ID NO: 354004 - DNA, 282 bp, Homo sapiens; identical to SEQ ID NO: 201002
  chr7:69063900-69064182
  hypo

SEQ ID NO: 354005 - DNA, 163 bp, Homo sapiens
  chr7:77324199-77324362
  hypo
cgcgcccggccacattccttatcttttaagctaaaacccatctccccaaattgcttattttcgaagcaaaaatcaaagcacatgcttacaaaacatcgaacacgcagtgtgcttactaaacgctaaaatacagaaacctaaaaaaacaattcttgcttttcaa

SEQ ID NO: 354006 - DNA, 194 bp, Homo sapiens; identical to SEQ ID NO: 350599
  chr7:79082826-79083020
  hypo

SEQ ID NO: 354007 - DNA, 45 bp, Homo sapiens; identical to SEQ ID NO: 346914
  chr7:87258398-87258443
  hypo

SEQ ID NO: 354008 - DNA, 190 bp, Homo sapiens; identical to SEQ ID NO: 350606
  chr7:87563639-87563829
  hypo

SEQ ID NO: 354009 - DNA, 439 bp, Homo sapiens; identical to SEQ ID NO: 285134
  chr7:87563890-87564329
  hypo

SEQ ID NO: 354010 - DNA, 207 bp, Homo sapiens; identical to SEQ ID NO: 350608
  chr7:87564359-87564566
  hypo

SEQ ID NO: 354011 - DNA, 295 bp, Homo sapiens; identical to SEQ ID NO: 350611
  chr7:90225450-90225745
  hypo

SEQ ID NO: 354012 - DNA, 211 bp, Homo sapiens; identical to SEQ ID NO: 201040
  chr7:90226057-90226268
  hypo

SEQ ID NO: 354013 - DNA, 352 bp, Homo sapiens
  chr7:97925221-97925573
  hypo
ctggaagccactcagtgttgggccaaccccgtgcacgcatgcctggggcccaacaatcctgctccctgtaggaacaagcagggcacacacccatgggcaccgagacactcgggcagccctggagaaacagcccagaccagaaacaccagacgcccgtcaatgggagagtcagaaccagcttctgtgcagacagcaggtcaccacacagcactgagcgactgtccctacggggccaccccagacagccatctctgtgccagggcttggggagtctggtgttggagaagggatggtcacggaggtgggccatgctgggtgatcgtgggggccgggaacgtcctgctgggtatac

SEQ ID NO: 354014 - DNA, 216 bp, Homo sapiens; identical to SEQ ID NO: 339561
  chr7:98955444-98955660
  hypo

SEQ ID NO: 354015 - DNA, 47 bp, Homo sapiens
  chr7:98966410-98966457
  hypo
tcagtgctttatttcaacgctggggccttttgagtttgtgacgctcc

SEQ ID NO: 354016 - DNA, 77 bp, Homo sapiens; identical to SEQ ID NO: 201060
  chr7:98971600-98971677
  hypo

SEQ ID NO: 354017 - DNA, 396 bp, Homo sapiens; identical to SEQ ID NO: 346916
  chr7:98971810-98972206
  hypo

SEQ ID NO: 354018 - DNA, 215 bp, Homo sapiens; identical to SEQ ID NO: 201064
  chr7:99156600-99156815
  hypo

SEQ ID NO: 354019 - DNA, 77 bp, Homo sapiens; identical to SEQ ID NO: 345277
  chr7:99156982-99157059
  hypo

SEQ ID NO: 354020 - DNA, 87 bp, Homo sapiens; identical to SEQ ID NO: 339569
  chr7:100030648-100030735
  hypo

SEQ ID NO: 354021 - DNA, 236 bp, Homo sapiens; identical to SEQ ID NO: 339571
  chr7:100064586-100064822
  hypo

SEQ ID NO: 354022 - DNA, 157 bp, Homo sapiens; identical to SEQ ID NO: 339572
  chr7:100179313-100179470
  hypo

SEQ ID NO: 354023 - DNA, 188 bp, Homo sapiens
  chr7:100179940-100180128
  hypo
aggttgaggtaggtgagggctgtgagattccccaaggctgggttcaggcatctcaggcaattgtggtagaggctcaggccctccagggacaccagctggcacgccgcctcgggcacctcgggaaaccggttccgggacaggtctggggaaaaggaggtgtcggggagagttgcggaaaggcccagccc

SEQ ID NO: 354024 - DNA, 831 bp, Homo sapiens; identical to SEQ ID NO: 339574
  chr7:100402457-100403288
  hypo

SEQ ID NO: 354025 - DNA, 380 bp, Homo sapiens; identical to SEQ ID NO: 339576
  chr7:100421158-100421538
  hypo

SEQ ID NO: 354026 - DNA, 487 bp, Homo sapiens; identical to SEQ ID NO: 350630
  chr7:101460542-101461029
  hypo

SEQ ID NO: 354027 - DNA, 116 bp, Homo sapiens
  chr7:101475674-101475790
  hypo
cgacatggcacatccagcgagcccactgtgtccccagcacctgcggtgcagggggctggcaccttcaggggcgggcttcgtgcagacgtccacccagtcagtccccacaggtttat

SEQ ID NO: 354028 - DNA, 236 bp, Homo sapiens
  chr7:101475858-101476094
  hypo
gagttcctttattcatccctatttgctttctgtctgtaatcctttgtaattccctggtttcatgatgtaattctaatggaaataaacccgaacctttcaaaattatgtaattaattgcattcagcttcaatgacaatgactaattatagtgatacctggtggcaaggcaggtacctactgctggggggctcctgtctgcttggtactaggactgccacttctgggcgcgtcggagc

SEQ ID NO: 354029 - DNA, 132 bp, Homo sapiens; identical to SEQ ID NO: 339582
  chr7:101536683-101536815
  hypo

SEQ ID NO: 354030 - DNA, 332 bp, Homo sapiens
  chr7:101566736-101567068
  hypo
cgtcagtcggcccagtcctactccagaacgcttcttgggtgtctgtctgcaggactttgctcagttaatttttgtctcctctaaaacagaccccgttgctctgggaggagagccgagctgcggctcaggggccgtcactggtcatttttgccctgatgtatttttgcctctacatttcttgatctctggaacgttaatcccaacgatgcctggtctgcggtgctcacagtctgtgtctgtgctttctacacctgtcctgctcagatgcacatgatgtcacacccaggtctccatcctggctcttgttggctgcggcggcagccctgactgtc

SEQ ID NO: 354031 - DNA, 196 bp, Homo sapiens; identical to SEQ ID NO: 345915
  chr7:101603073-101603269
  hypo

SEQ ID NO: 354032 - DNA, 242 bp, Homo sapiens; identical to SEQ ID NO: 345916
  chr7:101603308-101603550
  hypo

SEQ ID NO: 354033 - DNA, 81 bp, Homo sapiens
  chr7:101627660-101627741
  hypo
cgtgggacaatgtagataaaaacctcgatatacagcctagtacacaaaggacggtgtaaatattctcttccgtgcttcgta

SEQ ID NO: 354034 - DNA, 282 bp, Homo sapiens
  chr7:101627846-101628128
  hypo
aagtcctgcaggactgagctctgaaggccacccacaccctgggttgtgcttggatgatggcatccctcctggcacaagcgcagatgggcagtcgggagggaacatcagcctgggaaaactagatgtcagtgaaaaatgctggaggtggctggcgttcgcaaaactcagtcgtaaaaaacagcacgttctcagtacaaaatgagcactgttaaaaataaaccgcgcaagaagaaatatatgaatacgagggcatggcaaacagttttgcaaggtattaagatc

SEQ ID NO: 354035 - DNA, 429 bp, Homo sapiens; identical to SEQ ID NO: 339587
  chr7:101649223-101649652
  hypo

SEQ ID NO: 354036 - DNA, 311 bp, Homo sapiens; identical to SEQ ID NO: 348244
  chr7:101652279-101652590
  hypo

SEQ ID NO: 354037 - DNA, 115 bp, Homo sapiens
  chr7:102782159-102782274
  hypo
atatgcctgcccttccggcaggccaaggtgtttttccggcatcaagcgggggaatggaccatcacaggcttgcggatgatcagcccatctttgatcagcttccggatctgctgac

SEQ ID NO: 354038 - DNA, 465 bp, Homo sapiens; identical to SEQ ID NO: 339593
  chr7:105254063-105254528
  hypo

SEQ ID NO: 354039 - DNA, 31 bp, Homo sapiens
  chr7:105279344-105279375
  hypo
cgagggaatgctagagttaatccaggtgcag

SEQ ID NO: 354040 - DNA, 75 bp, Homo sapiens; identical to SEQ ID NO: 339595
  chr7:105280248-105280323
  hypo

SEQ ID NO: 354041 - DNA, 147 bp, Homo sapiens
  chr7:106622687-106622834
  hypo
cgcaccggaacaatgtgcggcacatattagacactcaatacatgtttgccaaatgaatacgtgaatgattgtagtcttggacaagtcaaatggcccttagggactatttgttcattgattattttcccacctgcgtcacagcatggc

SEQ ID NO: 354042 - DNA, 251 bp, Homo sapiens; identical to SEQ ID NO: 201131
  chr7:106684920-106685171
  hypo

SEQ ID NO: 354043 - DNA, 118 bp, Homo sapiens; identical to SEQ ID NO: 345917
  chr7:107483576-107483694
  hypo

SEQ ID NO: 354044 - DNA, 482 bp, Homo sapiens; identical to SEQ ID NO: 285340
  chr7:113726887-113727369
  hypo

SEQ ID NO: 354045 - DNA, 750 bp, Homo sapiens; identical to SEQ ID NO: 350641
  chr7:120496826-120497576
  hypo

SEQ ID NO: 354046 - DNA, 51 bp, Homo sapiens; identical to SEQ ID NO: 350645
  chr7:126891155-126891206
  hypo

SEQ ID NO: 354047 - DNA, 37 bp, Homo sapiens; identical to SEQ ID NO: 285393
  chr7:126988120-126988157
  hypo

SEQ ID NO: 354048 - DNA, 56 bp, Homo sapiens; identical to SEQ ID NO: 350648
  chr7:126988206-126988262
  hypo

SEQ ID NO: 354049 - DNA, 87 bp, Homo sapiens
  chr7:127371042-127371129
  hypo
cgtatggagctgcctttagcagcatctgcttctccagctggagaggcttgttttagaacgactggcatgcggaagcggtaggtggag

SEQ ID NO: 354050 - DNA, 252 bp, Homo sapiens
  chr7:127371249-127371501
  hypo
cccctttcctctacttcataccgcagctgctgtgagcgagtgcactgtgctctgcacaggagaattggcagacagttccatatgctggttttggccattgggacattcaggattattaggccagtttgtactttaagaggagggagacttgacatcgctcaaagcagcttattttatttatttctatttcttataaaggggaaagaagctagcccagcccttagctgttcctttcaacgtagccggctcaac

SEQ ID NO: 354051 - DNA, 90 bp, Homo sapiens; identical to SEQ ID NO: 339611
  chr7:127679932-127680022
  hypo

SEQ ID NO: 354052 - DNA, 264 bp, Homo sapiens; identical to SEQ ID NO: 285416
  chr7:128828640-128828904
  hypo

SEQ ID NO: 354053 - DNA, 46 bp, Homo sapiens; identical to SEQ ID NO: 348248
  chr7:129330248-129330294
  hypo

SEQ ID NO: 354054 - DNA, 89 bp, Homo sapiens; identical to SEQ ID NO: 348249
  chr7:129330351-129330440
  hypo

SEQ ID NO: 354055 - DNA, 194 bp, Homo sapiens; identical to SEQ ID NO: 339621
  chr7:129470923-129471117
  hypo

SEQ ID NO: 354056 - DNA, 177 bp, Homo sapiens; identical to SEQ ID NO: 348251
  chr7:129483449-129483626
  hypo

SEQ ID NO: 354057 - DNA, 55 bp, Homo sapiens
  chr7:129846024-129846079
  hypo
cgctgagccaggcgcacggatatagaaaataagaccttcctggttattacccaga

SEQ ID NO: 354058 - DNA, 72 bp, Homo sapiens
  chr7:129846109-129846181
  hypo
gcatttcggtggcaggtgaggtggatgcagtgctccccaaggaggcgcatccagcccagccccagctctcgc

SEQ ID NO: 354059 - DNA, 31 bp, Homo sapiens; identical to SEQ ID NO: 345918
  chr7:131041484-131041515
  hypo

SEQ ID NO: 354060 - DNA, 61 bp, Homo sapiens; identical to SEQ ID NO: 345919
  chr7:132418888-132418949
  hypo

SEQ ID NO: 354061 - DNA, 42 bp, Homo sapiens; identical to SEQ ID NO: 345920
  chr7:132419066-132419108
  hypo

SEQ ID NO: 354062 - DNA, 157 bp, Homo sapiens; identical to SEQ ID NO: 348255
  chr7:134880754-134880911
  hypo

SEQ ID NO: 354063 - DNA, 211 bp, Homo sapiens; identical to SEQ ID NO: 348256
  chr7:134880941-134881152
  hypo

SEQ ID NO: 354064 - DNA, 177 bp, Homo sapiens; identical to SEQ ID NO: 339636
  chr7:134898284-134898461
  hypo

SEQ ID NO: 354065 - DNA, 85 bp, Homo sapiens; identical to SEQ ID NO: 345921
  chr7:134918319-134918404
  hypo

SEQ ID NO: 354066 - DNA, 132 bp, Homo sapiens; identical to SEQ ID NO: 345922
  chr7:134918661-134918793
  hypo

SEQ ID NO: 354067 - DNA, 151 bp, Homo sapiens; identical to SEQ ID NO: 339640
  chr7:137564632-137564783
  hypo

SEQ ID NO: 354068 - DNA, 75 bp, Homo sapiens; identical to SEQ ID NO: 339642
  chr7:138993466-138993541
  hypo

SEQ ID NO: 354069 - DNA, 256 bp, Homo sapiens; identical to SEQ ID NO: 339645
  chr7:139257804-139258060
  hypo

SEQ ID NO: 354070 - DNA, 176 bp, Homo sapiens; identical to SEQ ID NO: 339647
  chr7:139717431-139717607
  hypo

SEQ ID NO: 354071 - DNA, 362 bp, Homo sapiens; identical to SEQ ID NO: 345285
  chr7:139930346-139930708
  hypo

SEQ ID NO: 354072 - DNA, 31 bp, Homo sapiens; identical to SEQ ID NO: 345924
  chr7:140156493-140156524
  hypo

SEQ ID NO: 354073 - DNA, 125 bp, Homo sapiens; identical to SEQ ID NO: 339659
  chr7:148448819-148448944
  hypo

SEQ ID NO: 354074 - DNA, 503 bp, Homo sapiens; identical to SEQ ID NO: 339660
  chr7:148480954-148481457
  hypo

SEQ ID NO: 354075 - DNA, 163 bp, Homo sapiens; identical to SEQ ID NO: 345926
  chr7:148851234-148851397
  hypo

SEQ ID NO: 354076 - DNA, 98 bp, Homo sapiens; identical to SEQ ID NO: 339664
  chr7:148907697-148907795
  hypo

SEQ ID NO: 354077 - DNA, 117 bp, Homo sapiens; identical to SEQ ID NO: 339668
  chr7:150006604-150006721
  hypo

SEQ ID NO: 354078 - DNA, 112 bp, Homo sapiens; identical to SEQ ID NO: 339669
  chr7:150006790-150006902
  hypo

SEQ ID NO: 354079 - DNA, 99 bp, Homo sapiens; identical to SEQ ID NO: 211907
  chr7:150069580-150069679
  hypo

SEQ ID NO: 354080 - DNA, 114 bp, Homo sapiens; identical to SEQ ID NO: 211908
  chr7:150069820-150069934
  hypo

SEQ ID NO: 354081 - DNA, 846 bp, Homo sapiens; identical to SEQ ID NO: 333298
  chr7:150671471-150672317
  hypo

SEQ ID NO: 354082 - DNA, 112 bp, Homo sapiens; identical to SEQ ID NO: 346943
  chr7:150714968-150715080
  hypo

SEQ ID NO: 354083 - DNA, 295 bp, Homo sapiens; identical to SEQ ID NO: 285522
  chr7:150715323-150715618
  hypo

SEQ ID NO: 354084 - DNA, 340 bp, Homo sapiens; identical to SEQ ID NO: 345927
  chr7:150758626-150758966
  hypo

SEQ ID NO: 354085 - DNA, 148 bp, Homo sapiens; identical to SEQ ID NO: 348269
  chr7:150774065-150774213
  hypo

SEQ ID NO: 354086 - DNA, 346 bp, Homo sapiens; identical to SEQ ID NO: 308623
  chr7:150774358-150774704
  hypo

SEQ ID NO: 354087 - DNA, 370 bp, Homo sapiens; identical to SEQ ID NO: 333305
  chr7:151038589-151038959
  hypo

SEQ ID NO: 354088 - DNA, 271 bp, Homo sapiens; identical to SEQ ID NO: 339686
  chr7:151165408-151165679
  hypo

SEQ ID NO: 354089 - DNA, 211 bp, Homo sapiens; identical to SEQ ID NO: 339687
  chr7:151411325-151411536
  hypo

SEQ ID NO: 354090 - DNA, 697 bp, Homo sapiens; identical to SEQ ID NO: 346946
  chr7:151722447-151723144
  hypo

SEQ ID NO: 354091 - DNA, 34 bp, Homo sapiens; identical to SEQ ID NO: 346947
  chr7:151723206-151723240
  hypo

SEQ ID NO: 354092 - DNA, 195 bp, Homo sapiens; identical to SEQ ID NO: 339691
  chr7:151791364-151791559
  hypo

SEQ ID NO: 354093 - DNA, 146 bp, Homo sapiens; identical to SEQ ID NO: 339693
  chr7:152152776-152152922
  hypo

SEQ ID NO: 354094 - DNA, 313 bp, Homo sapiens; identical to SEQ ID NO: 339694
  chr7:152273159-152273472
  hypo

SEQ ID NO: 354095 - DNA, 127 bp, Homo sapiens
  chr7:154541944-154542071
  hypo
cgtagatgaacaccctcgctctccagaagacaagaagcgggagtcgcagcctattgaagtgtagacatgatgtctacacagccaccctgtgtcctgcaagagcccaggctcagagcgtgtgcaccgt

SEQ ID NO: 354096 - DNA, 135 bp, Homo sapiens
  chr7:154542290-154542425
  hypo
agagctgaagggtggcgggggtcggcttcctcctctctgcctcttcccttccgccacgcttcctacccacaccagccagtctccagtaacagatatagaatgccttcatttggaacacggagagacaagcgtgcc

SEQ ID NO: 354097 - DNA, 139 bp, Homo sapiens; identical to SEQ ID NO: 339705
  chr7:155502704-155502843
  hypo

SEQ ID NO: 354098 - DNA, 238 bp, Homo sapiens; identical to SEQ ID NO: 211970
  chr7:155581980-155582218
  hypo

SEQ ID NO: 354099 - DNA, 78 bp, Homo sapiens
  chr7:155898307-155898385
  hypo
cctgtgagggctccggactttgtgccgttctccgcacccctcaggcccggtggagtgcgtgacccctacgccgggccc

SEQ ID NO: 354100 - DNA, 288 bp, Homo sapiens; identical to SEQ ID NO: 339712
  chr7:155916075-155916363
  hypo

SEQ ID NO: 354101 - DNA, 169 bp, Homo sapiens; identical to SEQ ID NO: 339717
  chr7:156782599-156782768
  hypo

SEQ ID NO: 354102 - DNA, 458 bp, Homo sapiens; identical to SEQ ID NO: 339722
  chr7:157052694-157053152
  hypo

SEQ ID NO: 354103 - DNA, 144 bp, Homo sapiens; identical to SEQ ID NO: 339724
  chr7:157100035-157100179
  hypo

SEQ ID NO: 354104 - DNA, 53 bp, Homo sapiens; identical to SEQ ID NO: 339725
  chr7:157128236-157128289
  hypo

SEQ ID NO: 354105 - DNA, 650 bp, Homo sapiens; identical to SEQ ID NO: 348277
  chr7:157202474-157203124
  hypo

SEQ ID NO: 354106 - DNA, 215 bp, Homo sapiens
  chr7:157263471-157263686
  hypo
gggcatgttgctgaggtgctgggagctgggcctgacacttctgtgttttattgaatctcccaacatccaacatcccatttccatttaacagatgaggaaatgaaaacacagagaggagaaggcactcgcctgaggtaccctgccagacgctggggacgggctcacacgcagcggcccaaagcctgctgcctctcggagcagcgggggtctgggac

SEQ ID NO: 354107 - DNA, 475 bp, Homo sapiens
  chr7:157347322-157347797
  hypo
cgaaagttaaattccagggaaacagaaaggcccagtggtgtgacgctgacatcgaaaagcctgcaaacagtcgaggagtcagcgcacacacaaagaaaatccagatggaaggaaagaaaggaaccttaacgatgtctaccggggacagagcgtggggtccacggagaagtcccaggcgttttccacctaagaagcatcatggtgattcaaacaccagggaaatgaatggactcagtggagccactttctgctacttgaccaggtttaattcgagttgtccatgtcgggaatctacagggaagtgacgcaggctgccatcttgctcagcaccccagtgtggcgggcgccccagtgtggcgggcgtcccagtgtggtgagcaccggccaagtcagtttgggttgggctgcaccctcgtgcctgggacacccaggaagacccacctctctcgtgttagtggaccagggaggcagccac

SEQ ID NO: 354108 - DNA, 158 bp, Homo sapiens
  chr7:157404210-157404368
  hypo
cgtaccctcccccaaaaagacacactggagtcccagccctgggaacatgaccttatttggaaatagggtctttacagaggtaagcgagcggagggcatttgggcggccctaatgcaatatgactggcgtgctgttaggaagaaggactctgcacaccc

SEQ ID NO: 354109 - DNA, 46 bp, Homo sapiens
  chr7:157404566-157404612
  hypo
gaagacagccgcagtcatgctggggacacgcggagggagagcgccc

SEQ ID NO: 354110 - DNA, 296 bp, Homo sapiens; identical to SEQ ID NO: 348278
  chr7:157445780-157446076
  hypo

SEQ ID NO: 354111 - DNA, 69 bp, Homo sapiens; identical to SEQ ID NO: 339741
  chr7:157446148-157446217
  hypo

SEQ ID NO: 354112 - DNA, 284 bp, Homo sapiens; identical to SEQ ID NO: 339747
  chr7:157510178-157510462
  hypo

SEQ ID NO: 354113 - DNA, 115 bp, Homo sapiens
  chr7:157511495-157511610
  hypo
cactcttggtttctcagctgccgcaatcggtccttccagtgtccgacctctggggccctcagacccccaaacccaccttgtcgctgtggcctctccgcctcctgcaggtggcagc

SEQ ID NO: 354114 - DNA, 408 bp, Homo sapiens; identical to SEQ ID NO: 339749
  chr7:157513007-157513415
  hypo

SEQ ID NO: 354115 - DNA, 250 bp, Homo sapiens; identical to SEQ ID NO: 339753
  chr7:157589680-157589930
  hypo

SEQ ID NO: 354116 - DNA, 332 bp, Homo sapiens; identical to SEQ ID NO: 339756
  chr7:157621949-157622281
  hypo

SEQ ID NO: 354117 - DNA, 469 bp, Homo sapiens; identical to SEQ ID NO: 339757
  chr7:157625840-157626309
  hypo

SEQ ID NO: 354118 - DNA, 203 bp, Homo sapiens; identical to SEQ ID NO: 339758
  chr7:157642963-157643166
  hypo

SEQ ID NO: 354119 - DNA, 79 bp, Homo sapiens
  chr7:157703411-157703490
  hypo
gtgtgcgagcgcgcgtgcgcccctgcgatcagcccagcagacagagcacgttcctgtaacgtgttgtgatccactgcgc

SEQ ID NO: 354120 - DNA, 273 bp, Homo sapiens; identical to SEQ ID NO: 339764
  chr7:157738113-157738386
  hypo

SEQ ID NO: 354121 - DNA, 145 bp, Homo sapiens; identical to SEQ ID NO: 339765
  chr7:157744287-157744432
  hypo

SEQ ID NO: 354122 - DNA, 410 bp, Homo sapiens; identical to SEQ ID NO: 339766
  chr7:157853839-157854249
  hypo

SEQ ID NO: 354123 - DNA, 337 bp, Homo sapiens; identical to SEQ ID NO: 339767
  chr7:157860325-157860662
  hypo

SEQ ID NO: 354124 - DNA, 218 bp, Homo sapiens; identical to SEQ ID NO: 339770
  chr7:157916520-157916738
  hypo

SEQ ID NO: 354125 - DNA, 241 bp, Homo sapiens; identical to SEQ ID NO: 339771
  chr7:157919964-157920205
  hypo

SEQ ID NO: 354126 - DNA, 234 bp, Homo sapiens; identical to SEQ ID NO: 339772
  chr7:157929571-157929805
  hypo

SEQ ID NO: 354127 - DNA, 111 bp, Homo sapiens; identical to SEQ ID NO: 339773
  chr7:157934031-157934142
  hypo

SEQ ID NO: 354128 - DNA, 38 bp, Homo sapiens; identical to SEQ ID NO: 348284
  chr7:157934555-157934593
  hypo

SEQ ID NO: 354129 - DNA, 92 bp, Homo sapiens; identical to SEQ ID NO: 348285
  chr7:157934659-157934751
  hypo

SEQ ID NO: 354130 - DNA, 264 bp, Homo sapiens; identical to SEQ ID NO: 339776
  chr7:157936035-157936299
  hypo

SEQ ID NO: 354131 - DNA, 224 bp, Homo sapiens; identical to SEQ ID NO: 339777
  chr7:157949173-157949397
  hypo

SEQ ID NO: 354132 - DNA, 105 bp, Homo sapiens; identical to SEQ ID NO: 339779
  chr7:157959868-157959973
  hypo

SEQ ID NO: 354133 - DNA, 787 bp, Homo sapiens
  chr7:158066162-158066949
  hypo
cgcaggcacagggggagccgcaggcacagggggagccgcagacagacatgggaggagccgcagacacggggagccgcagacacagggggagccgcaggcacagggggagccgcagacagacatgggaggagccgcagacacggggagccgcaggcatgggggagccgcagacagacatgggaggagccgcagacacgggaggagccgcagacacagggagccgcagacacagggggagctgcagacacaggaggagacacacaaggagccgcagacacagggggagccacagacagacatgggaggagccgcagacacggggagccgcagacacagggggagccgcaggcatgggggagccgcagacacagggggagccgcagacacaggaggagacacacgaggagccgcagacgcaggaggagccgcagacagacgcgggaggagccgcagacacagggggagccgcagacacagggggagctgcagacagacatgggaggagccgcagacacagggagccgcagacacagggagccgcagacacagggggagccgcagacacaggaggagacacacgaggagccgcaggcacagggggagccgcagacacagggggagctgcagacagacatgggaggagccgcagacacggggagccgcagacacagggagccgcagacacagggggagccgcagacacaggaggagacacacgaggagccgcagacacagggggagccgcagacagacatgggaggagccacagacacgggagccgcagaca

SEQ ID NO: 354134 - DNA, 219 bp, Homo sapiens; identical to SEQ ID NO: 348289
  chr7:158067069-158067288
  hypo

SEQ ID NO: 354135 - DNA, 338 bp, Homo sapiens; identical to SEQ ID NO: 339787
  chr7:158136094-158136432
  hypo

SEQ ID NO: 354136 - DNA, 479 bp, Homo sapiens
  chr7:158270795-158271274
  hypo
cgtgggacaggcacggcggcaaagagagtgggctgagtgggtcatcacacagcacgggagccgcggccccaggtgctgcttgaatgaagaaggctcagcccatgactgctacgtctggtccccaggacccaaactgtccagaaatcagccagcactcctgcaggtgcactgcagtggacggctagaggagggaaagcagcgccgtacagacactcggaaaactgcagactggaaggggcgtgaaagcacaaggtcttgatcattctcctggcattcggtgctgtgcgtagggtgagcaatggacgccactggggaagagtgggaaaggaaggctcagcacgtcggtaacgaatgaggaggcagaggcccgctctgcgtctcaaagaacgggtgggatgcggagccgtgacaagggcatgggaaagaaagtggagtgggaataacgccaaaattaacctgataaggaagctgctttcaac

SEQ ID NO: 354137 - DNA, 69 bp, Homo sapiens
  chr7:158349387-158349456
  hypo
cgcgcaggtcagacggctcccgggcaggtcaggcggctcccgggcaggtcaggcggctcccgagcaggt

SEQ ID NO: 354138 - DNA, 361 bp, Homo sapiens
  chr7:158349747-158350108
  hypo
caggcaggtggctcccgcgcaggtcaggcggctcctgtgcaggtcgctcctgggcaggtcgctcccgcgcagggcaggcggctcccgggcagggcaggcggctcccacgcaggtcaggcggctcccgcgcaggtcaggcggctcccacgcaggtcgctcccacgcaggtcagagggctcccgtgcaggtcactcccaggcaggtggctcccgcgcaggtcaggcggctcctgtgcaggtcgctcctgggcaggtcgctcccgcgcagggcaggcggctcccgcgcaggtcagacggctcccacgcaggtcaggcggctcccacgcagtttaggcagctcccgcgcaggtcaggcagctccc

SEQ ID NO: 354139 - DNA, 107 bp, Homo sapiens; identical to SEQ ID NO: 350690
  chr7:158379699-158379806
  hypo

SEQ ID NO: 354140 - DNA, 177 bp, Homo sapiens; identical to SEQ ID NO: 339795
  chr7:158451052-158451229
  hypo

SEQ ID NO: 354141 - DNA, 140 bp, Homo sapiens; identical to SEQ ID NO: 339798
  chr7:158556274-158556414
  hypo

SEQ ID NO: 354142 - DNA, 207 bp, Homo sapiens; identical to SEQ ID NO: 348291
  chr7:158570568-158570775
  hypo

SEQ ID NO: 354143 - DNA, 210 bp, Homo sapiens; identical to SEQ ID NO: 339800
  chr7:158583831-158584041
  hypo

SEQ ID NO: 354144 - DNA, 33 bp, Homo sapiens
  chr7:158713060-158713093
  hypo
cgtgtggcctccgtcggggaacacgtgaagtgc

SEQ ID NO: 354145 - DNA, 42 bp, Homo sapiens; identical to SEQ ID NO: 350693
  chr8:495481-495523
  hypo

SEQ ID NO: 354146 - DNA, 68 bp, Homo sapiens; identical to SEQ ID NO: 201278
  chr8:495635-495703
  hypo

SEQ ID NO: 354147 - DNA, 260 bp, Homo sapiens
  chr8:591683-591943
  hypo
ggtacgctggcagcggagctcctcccggaggacccctccccctccccgccgattcctctcctgtctgcgttttccaggctcatctcagatgccgccttgtctatgaagctctctttggttcctgcccagacctcatcagaatcaacgccccggctctgtgctggccaaaaccccacggtgcctctggccgtatgcagtcctttcttctgaccccatctcgtcctccagtctccactggtctcaggtcaatagctttttcc

SEQ ID NO: 354148 - DNA, 233 bp, Homo sapiens
  chr8:1078113-1078346
  hypo
cgtgaggacctgctccccgtgttgtgttcggtgaggacctgctcccggtgttgtgttccgtgaggacctgctccccgtgttgtgttcggtgaggacctgctccccatgttgtgttcggtgaggacctgctcccggtgttgtgttcggtgaggacctgctcccggtgttgtgttccatgaggacctgctcctggtgttgtgttcggtgaggacctgcccccggtgttgtgttcc

SEQ ID NO: 354149 - DNA, 169 bp, Homo sapiens; identical to SEQ ID NO: 339824
  chr8:3509598-3509767
  hypo

SEQ ID NO: 354150 - DNA, 110 bp, Homo sapiens
  chr8:8560686-8560796
  hypo
cggtggacgtcctcgacggggaggggtgggagtcccaggacgctccctcgtgcagcacccacccctgcgacagctcgctgccctgcgactccgacctctagacgcttgta

SEQ ID NO: 354151 - DNA, 42 bp, Homo sapiens
  chr8:8561032-8561074
  hypo
tttttgctgaagaatatatggaaagggtggcatttgcgtcac

SEQ ID NO: 354152 - DNA, 106 bp, Homo sapiens; identical to SEQ ID NO: 350705
  chr8:8639980-8640086
  hypo

SEQ ID NO: 354153 - DNA, 110 bp, Homo sapiens; identical to SEQ ID NO: 339831
  chr8:8680452-8680562
  hypo

SEQ ID NO: 354154 - DNA, 124 bp, Homo sapiens
  chr8:8748226-8748350
  hypo
cggagcagttcctggctgggggtggaccgcgccatgggcggggagctttccccctccgccttgccctctccactggtccctaggagcagcttatgcagcagcaaagagggatccctctggaaga

SEQ ID NO: 354155 - DNA, 533 bp, Homo sapiens
  chr8:8749088-8749621
  hypo
gggacaggaagaagggctggatcacctcataactttcatccccagctaagtcatacacgatgaaccgcaggccccgggaggcatcggccgtccagctggtcacctcgatgcccttgctcacagggggaggtgacggtgggtagcacttctccttgtcccctcctcctgggcatccctccactctctcctcggtgaggcagtggcgcagcaaagtctttcctgcagccttatgccccatcaggagcagcttgagccggggctgcaccgccggctgggaatgagccagttccttctggtaggctgcgatgtaggggatccccttcatgcagacctcgtaggggggctggatcagtgggttgtctttgatcttccacaaacccacccgggagagctggccaaagtggtcgggcagcaccgcgatctggttcccctgcagcacgagctcctccaggccggtcagctccacgatggagtccggcaggtagcggatgcggttattatccagccacaaggtgagaagccggcccaggccc

SEQ ID NO: 354156 - DNA, 101 bp, Homo sapiens; identical to SEQ ID NO: 339837
  chr8:8898512-8898613
  hypo

SEQ ID NO: 354157 - DNA, 240 bp, Homo sapiens; identical to SEQ ID NO: 201296
  chr8:10873649-10873889
  hypo

SEQ ID NO: 354158 - DNA, 376 bp, Homo sapiens; identical to SEQ ID NO: 285647
  chr8:11058799-11059175
  hypo

SEQ ID NO: 354159 - DNA, 251 bp, Homo sapiens; identical to SEQ ID NO: 285656
  chr8:11550368-11550619
  hypo

SEQ ID NO: 354160 - DNA, 767 bp, Homo sapiens; identical to SEQ ID NO: 346965
  chr8:18870226-18870993
  hypo

SEQ ID NO: 354161 - DNA, 45 bp, Homo sapiens; identical to SEQ ID NO: 339853
  chr8:21624023-21624068
  hypo

SEQ ID NO: 354162 - DNA, 878 bp, Homo sapiens; identical to SEQ ID NO: 346966
  chr8:22436855-22437733
  hypo

SEQ ID NO: 354163 - DNA, 127 bp, Homo sapiens; identical to SEQ ID NO: 345299
  chr8:23021590-23021717
  hypo

SEQ ID NO: 354164 - DNA, 196 bp, Homo sapiens; identical to SEQ ID NO: 345934
  chr8:23423722-23423918
  hypo

SEQ ID NO: 354165 - DNA, 311 bp, Homo sapiens; identical to SEQ ID NO: 350731
  chr8:26148757-26149068
  hypo

SEQ ID NO: 354166 - DNA, 106 bp, Homo sapiens; identical to SEQ ID NO: 339867
  chr8:26267649-26267755
  hypo

SEQ ID NO: 354167 - DNA, 319 bp, Homo sapiens
  chr8:27779460-27779779
  hypo
cgccgtgtcgctctgctggcccgtgcggtcccgcagcagggccaccgcctgctcggtctgcaccgcctgcgcctgcagcccccacagcgcgccctccagccgctgcactgcgcccgccagcgccagcaacgagtctgactggttctgcagcgcgtcctgcaccttccacacctgctccgtcaggtccgcttgcagcggagcctgcagcagccgcagctgcaagtcccggaagctctcattcagccggttcacattgcgagtcagggccttcaggtcgtcaggggagctgcgcggcctggacactgcggaggaggaagag

SEQ ID NO: 354168 - DNA, 138 bp, Homo sapiens
  chr8:28938419-28938557
  hypo
cgcactcgaatagcgtcttctaactccattctcttcaaatccactttccaaactacagctggagggagctttccgaaaaacaaaagtgaccatgtcccatgtcgctcgccaccttgcagctgccagggtttcccactg

SEQ ID NO: 354169 - DNA, 136 bp, Homo sapiens; identical to SEQ ID NO: 212229
  chr8:28938587-28938723
  hypo

SEQ ID NO: 354170 - DNA, 1886 bp, Homo sapiens; identical to SEQ ID NO: 333411
  chr8:29205985-29207871
  hypo

SEQ ID NO: 354171 - DNA, 795 bp, Homo sapiens; identical to SEQ ID NO: 350734
  chr8:37553381-37554176
  hypo

SEQ ID NO: 354172 - DNA, 402 bp, Homo sapiens; identical to SEQ ID NO: 339882
  chr8:37702286-37702688
  hypo

SEQ ID NO: 354173 - DNA, 226 bp, Homo sapiens; identical to SEQ ID NO: 201396
  chr8:38326050-38326276
  hypo

SEQ ID NO: 354174 - DNA, 49 bp, Homo sapiens
  chr8:41553941-41553990
  hypo
cggccagtgggggcggcgtgctgagcttctggggcttgaccaggcggca

SEQ ID NO: 354175 - DNA, 39 bp, Homo sapiens
  chr8:41668308-41668347
  hypo
aacaggagaaacttcccacacctgtctccccgggaattc

SEQ ID NO: 354176 - DNA, 65 bp, Homo sapiens; identical to SEQ ID NO: 339891
  chr8:42134216-42134281
  hypo

SEQ ID NO: 354177 - DNA, 293 bp, Homo sapiens
  chr8:42333256-42333549
  hypo
cgaccacattggatacaaggcaagcagaaacatggaggatgagtcaggagcccgctgcatggcttaggcatgagatgaggcatccgggaccaggctgtggacggtggtgggtgggagggaatacgatgatttaagagaactgcagcggcaaaatccaacaggaccagatggtggattaaacatgggggtggagagaggatacatggtttatggaaccgaagtgaaaaataaccgagtgggtttttcttctcttttgcattgtttttagttttgctttttggggctaggatggg

SEQ ID NO: 354178 - DNA, 172 bp, Homo sapiens; identical to SEQ ID NO: 348297
  chr8:42750012-42750184
  hypo

SEQ ID NO: 354179 - DNA, 166 bp, Homo sapiens; identical to SEQ ID NO: 339901
  chr8:48801168-48801334
  hypo

SEQ ID NO: 354180 - DNA, 68 bp, Homo sapiens; identical to SEQ ID NO: 345936
  chr8:49334914-49334982
  hypo

SEQ ID NO: 354181 - DNA, 201 bp, Homo sapiens; identical to SEQ ID NO: 339904
  chr8:49339738-49339939
  hypo

SEQ ID NO: 354182 - DNA, 31 bp, Homo sapiens
  chr8:49382262-49382293
  hypo
cgggaaaagtagacgtcaatcaggtggaaaa

SEQ ID NO: 354183 - DNA, 439 bp, Homo sapiens
  chr8:49382383-49382822
  hypo
ggacagtgctgggcacggcggctgtgggcagtgtgggccgacagaatccccaggccaggtcaggtgtcccggccatccatggagaacaaggagtcattacagaggctcggtggcacacggtgaaaatgaggttcttctgggaaattttaggctgcaggatgtgagtggcccacagcagggaaggtctggcaggcagcgagagcttccggactggaccccaagaaggaggtcaggctgggaacacagactcggaggttcccatccacagatggtaccgaggctactgtgtcgggtcagatcttccaggagaccggaggagggacgtggctgcgggaagcaagcccagagccgccagcccgggaccagcgggaggccagggagcaaggccacagcagaggcagccaggaccccaaatatcagaggctcaaatgaagttgac

SEQ ID NO: 354184 - DNA, 187 bp, Homo sapiens
  chr8:49571728-49571915
  hypo
cgtcgtcctatcacagttaagaaagaattatttcgtgagttttacctagcagtttacataaatcagtttacagcagatttggagaaaaagaacattaaaagcagaccaggtgaacgagtttgaaacggcacacggaattggaagggagaaaaggttgtgatcactgctcaaacaagttcttccttcc

SEQ ID NO: 354185 - DNA, 256 bp, Homo sapiens; identical to SEQ ID NO: 339913
  chr8:50313987-50314243
  hypo

SEQ ID NO: 354186 - DNA, 116 bp, Homo sapiens; identical to SEQ ID NO: 201413
  chr8:56014011-56014127
  hypo

SEQ ID NO: 354187 - DNA, 156 bp, Homo sapiens
  chr8:56602062-56602218
  hypo
cgcccttcccggactccatccggctgcgcggggcagagttctgcattgcagaggccgggctgtggggacccaggccagcaccactcagggagcagcttggtgggccccgttcccgggtgtgagggcaggaaaactggctgaggagtcggcactaga

SEQ ID NO: 354188 - DNA, 72 bp, Homo sapiens
  chr8:56602280-56602352
  hypo
gagatgaggaagaaggacccagaaggtcccgggcgggcacagaggcagcgcccagggaggtacgcgctggcc

SEQ ID NO: 354189 - DNA, 935 bp, Homo sapiens; identical to SEQ ID NO: 350750
  chr8:56792306-56793241
  hypo

SEQ ID NO: 354190 - DNA, 238 bp, Homo sapiens; identical to SEQ ID NO: 201421
  chr8:60030908-60031146
  hypo

SEQ ID NO: 354191 - DNA, 349 bp, Homo sapiens; identical to SEQ ID NO: 201422
  chr8:60031791-60032140
  hypo

SEQ ID NO: 354192 - DNA, 114 bp, Homo sapiens; identical to SEQ ID NO: 339934
  chr8:61156160-61156274
  hypo

SEQ ID NO: 354193 - DNA, 292 bp, Homo sapiens; identical to SEQ ID NO: 201424
  chr8:61193765-61194057
  hypo

SEQ ID NO: 354194 - DNA, 144 bp, Homo sapiens; identical to SEQ ID NO: 201426
  chr8:61822883-61823027
  hypo

SEQ ID NO: 354195 - DNA, 267 bp, Homo sapiens; identical to SEQ ID NO: 350760
  chr8:65494311-65494578
  hypo

SEQ ID NO: 354196 - DNA, 349 bp, Homo sapiens; identical to SEQ ID NO: 339943
  chr8:68115303-68115652
  hypo

SEQ ID NO: 354197 - DNA, 42 bp, Homo sapiens; identical to SEQ ID NO: 350765
  chr8:69242761-69242803
  hypo

SEQ ID NO: 354198 - DNA, 56 bp, Homo sapiens; identical to SEQ ID NO: 201448
  chr8:69243011-69243067
  hypo

SEQ ID NO: 354199 - DNA, 1459 bp, Homo sapiens; identical to SEQ ID NO: 350767
  chr8:70745324-70746783
  hypo

SEQ ID NO: 354200 - DNA, 31 bp, Homo sapiens
  chr8:71017208-71017239
  hypo
cgtgagccaccgcgcccagatgatttggctt

SEQ ID NO: 354201 - DNA, 145 bp, Homo sapiens
  chr8:71447942-71448087
  hypo
cgtggtacaagagcttgggaactgccgaacgcgggtacaagagcttgggaaccgccgaacgtgggtacaagagcttgggaaccgccgaacgcggatagaagctataacacaggcgagctggggcatgccagcgtggctgagcagg

SEQ ID NO: 354202 - DNA, 50 bp, Homo sapiens
  chr8:71448124-71448174
  hypo
gcaaagtgaccgagaagaaaaatcctgcatcaaaagttacagttgctgcc

SEQ ID NO: 354203 - DNA, 100 bp, Homo sapiens; identical to SEQ ID NO: 339951
  chr8:71522547-71522647
  hypo

SEQ ID NO: 354204 - DNA, 55 bp, Homo sapiens; identical to SEQ ID NO: 346990
  chr8:72756949-72757004
  hypo

SEQ ID NO: 354205 - DNA, 90 bp, Homo sapiens; identical to SEQ ID NO: 348305
  chr8:74674345-74674435
  hypo

SEQ ID NO: 354206 - DNA, 194 bp, Homo sapiens; identical to SEQ ID NO: 350770
  chr8:77589904-77590098
  hypo

SEQ ID NO: 354207 - DNA, 208 bp, Homo sapiens; identical to SEQ ID NO: 201482
  chr8:80803900-80804108
  hypo

SEQ ID NO: 354208 - DNA, 141 bp, Homo sapiens
  chr8:81213177-81213318
  hypo
cgatgatgtgcagatctggcacttgcttgcaggattacactgcagtgaaggagaagtatgccaagtacctgcctcacagtgcagagcggtatgccgccaaacgcttccgcaaagctcagtgccccatcgtggagtgcctca

SEQ ID NO: 354209 - DNA, 327 bp, Homo sapiens
  chr8:81213356-81213683
  hypo
aagctcatgatcatgcgcatcgtcaagcacgccttcgagatcatccagctgctcacaggcgacaaccctctgcaggtcctggtgaacgccatcatcaacagtggtccccgggaggactccacactcactgggcgagccaggatcgtgagacgacaggctgtggccgtgtccccattaagccgtgtgaatcaggccatctggccgcagtgcacaggagctcttgaggctgccttccggaacatcaagaccattgctgagttcctggcagatgagctcatcagtgctgtcaagggctcctccaactcctatgctagcaagaagaaggac

SEQ ID NO: 354210 - DNA, 917 bp, Homo sapiens; identical to SEQ ID NO: 350777
  chr8:81785915-81786832
  hypo

SEQ ID NO: 354211 - DNA, 196 bp, Homo sapiens; identical to SEQ ID NO: 350778
  chr8:82192428-82192624
  hypo

SEQ ID NO: 354212 - DNA, 99 bp, Homo sapiens; identical to SEQ ID NO: 345308
  chr8:82193698-82193797
  hypo

SEQ ID NO: 354213 - DNA, 245 bp, Homo sapiens; identical to SEQ ID NO: 350781
  chr8:91657421-91657666
  hypo

SEQ ID NO: 354214 - DNA, 71 bp, Homo sapiens; identical to SEQ ID NO: 339971
  chr8:92120822-92120893
  hypo

SEQ ID NO: 354215 - DNA, 136 bp, Homo sapiens; identical to SEQ ID NO: 339973
  chr8:94685462-94685598
  hypo

SEQ ID NO: 354216 - DNA, 248 bp, Homo sapiens; identical to SEQ ID NO: 286033
  chr8:94712881-94713129
  hypo

SEQ ID NO: 354217 - DNA, 78 bp, Homo sapiens; identical to SEQ ID NO: 339978
  chr8:95848311-95848389
  hypo

SEQ ID NO: 354218 - DNA, 826 bp, Homo sapiens; identical to SEQ ID NO: 346999
  chr8:99956460-99957286
  hypo

SEQ ID NO: 354219 - DNA, 448 bp, Homo sapiens
  chr8:100796506-100796954
  hypo
cgatccatgttggctttcgtatcctttttctttcagaacaaatgccctgaggtagaggagttggtcttcagccattttgtgatctgtaatgacacacaggagacactgcggtttggccaggtggatactgatgaaaatattctgctggcgagtctccacagtcaccagtacagctggcgctctcacaaatccccacaggtatttgagaaacacccttacaaacagccattgttaaggttggggattcatttcttctgcacttgtgtgcctgtccagttatttccctttttaagtctccgaaggaaccacacagcgtagctacatctgacggaaacccaagagtgtttagagatgggagcacacgcttctcttggaatggagcattttcctgtttagcactggtgcttggggcgggggcagcagggtgtggtgatgaagaggctgactc

SEQ ID NO: 354220 - DNA, 76 bp, Homo sapiens; identical to SEQ ID NO: 339988
  chr8:100851164-100851240
  hypo

SEQ ID NO: 354221 - DNA, 162 bp, Homo sapiens
  chr8:102039330-102039492
  hypo
cgcttgctacatgcacagatctccttgaccctgcagccaatgcctcggtcagccagtgcacctgtactgtctctcctcttgggatagggtccctctccatcaggtacaatatatgggaaatcgaggggtggcctttgtcccagctgtcttagtcaccgcatt

SEQ ID NO: 354222 - DNA, 89 bp, Homo sapiens; identical to SEQ ID NO: 339994
  chr8:103315038-103315127
  hypo

SEQ ID NO: 354223 - DNA, 429 bp, Homo sapiens; identical to SEQ ID NO: 201548
  chr8:104511554-104511983
  hypo

SEQ ID NO: 354224 - DNA, 622 bp, Homo sapiens; identical to SEQ ID NO: 347003
  chr8:107669381-107670003
  hypo

SEQ ID NO: 354225 - DNA, 225 bp, Homo sapiens; identical to SEQ ID NO: 350815
  chr8:109799189-109799414
  hypo

SEQ ID NO: 354226 - DNA, 42 bp, Homo sapiens; identical to SEQ ID NO: 350816
  chr8:109799903-109799945
  hypo

SEQ ID NO: 354227 - DNA, 120 bp, Homo sapiens; identical to SEQ ID NO: 340001
  chr8:117631330-117631450
  hypo

SEQ ID NO: 354228 - DNA, 221 bp, Homo sapiens; identical to SEQ ID NO: 340002
  chr8:118531602-118531823
  hypo

SEQ ID NO: 354229 - DNA, 194 bp, Homo sapiens; identical to SEQ ID NO: 350823
  chr8:119123513-119123707
  hypo

SEQ ID NO: 354230 - DNA, 540 bp, Homo sapiens; identical to SEQ ID NO: 347007
  chr8:121823361-121823901
  hypo

SEQ ID NO: 354231 - DNA, 211 bp, Homo sapiens; identical to SEQ ID NO: 347008
  chr8:121824481-121824692
  hypo

SEQ ID NO: 354232 - DNA, 149 bp, Homo sapiens; identical to SEQ ID NO: 340009
  chr8:123865814-123865963
  hypo

SEQ ID NO: 354233 - DNA, 62 bp, Homo sapiens; identical to SEQ ID NO: 340014
  chr8:125498221-125498283
  hypo

SEQ ID NO: 354234 - DNA, 104 bp, Homo sapiens
  chr8:125580698-125580802
  hypo
tctgtttcttccaataagagatacttatcattgacatcttggagagcactgtccaactgaggctggatatcacctctccctgcaaaaaacagagacccaagcac

SEQ ID NO: 354235 - DNA, 43 bp, Homo sapiens; identical to SEQ ID NO: 348315
  chr8:126044399-126044442
  hypo

SEQ ID NO: 354236 - DNA, 354 bp, Homo sapiens; identical to SEQ ID NO: 340025
  chr8:128867892-128868246
  hypo

SEQ ID NO: 354237 - DNA, 630 bp, Homo sapiens; identical to SEQ ID NO: 345945
  chr8:128871653-128872283
  hypo

SEQ ID NO: 354238 - DNA, 191 bp, Homo sapiens; identical to SEQ ID NO: 345946
  chr8:128872459-128872650
  hypo

SEQ ID NO: 354239 - DNA, 61 bp, Homo sapiens; identical to SEQ ID NO: 345947
  chr8:128888848-128888909
  hypo

SEQ ID NO: 354240 - DNA, 43 bp, Homo sapiens; identical to SEQ ID NO: 345948
  chr8:128889422-128889465
  hypo

SEQ ID NO: 354241 - DNA, 440 bp, Homo sapiens; identical to SEQ ID NO: 340028
  chr8:128893135-128893575
  hypo

SEQ ID NO: 354242 - DNA, 107 bp, Homo sapiens; identical to SEQ ID NO: 340030
  chr8:128957492-128957599
  hypo

SEQ ID NO: 354243 - DNA, 159 bp, Homo sapiens; identical to SEQ ID NO: 340032
  chr8:131064030-131064189
  hypo

SEQ ID NO: 354244 - DNA, 310 bp, Homo sapiens; identical to SEQ ID NO: 286199
  chr8:133493185-133493495
  hypo

SEQ ID NO: 354245 - DNA, 482 bp, Homo sapiens; identical to SEQ ID NO: 340048
  chr8:140815079-140815561
  hypo

SEQ ID NO: 354246 - DNA, 147 bp, Homo sapiens
  chr8:140963396-140963543
  hypo
ctccatttcttcctcctaagaagttggagaatcaccctgacacctcacagaattggtatgggaaggaacaaagcctctgccaacgctcctcacacaaagccctactcctataggggcttgatgcctgcaggccccaccgttctcttc

SEQ ID NO: 354247 - DNA, 320 bp, Homo sapiens; identical to SEQ ID NO: 348321
  chr8:140971025-140971345
  hypo

SEQ ID NO: 354248 - DNA, 148 bp, Homo sapiens; identical to SEQ ID NO: 348322
  chr8:140971375-140971523
  hypo

SEQ ID NO: 354249 - DNA, 90 bp, Homo sapiens; identical to SEQ ID NO: 340054
  chr8:140992426-140992516
  hypo

SEQ ID NO: 354250 - DNA, 392 bp, Homo sapiens; identical to SEQ ID NO: 340057
  chr8:141147354-141147746
  hypo

SEQ ID NO: 354251 - DNA, 46 bp, Homo sapiens
  chr8:141159949-141159995
  hypo
acatgaggtggctctctgtatatcatgcatacatacatgcatgtac

SEQ ID NO: 354252 - DNA, 140 bp, Homo sapiens
  chr8:141249621-141249761
  hypo
ggagtgagaaggaccaaagtgcaggtgtgcttccctttgctcgggactcactggcacggaggccgcatccacctcctcacggccgtggaggggatgcgtgggaggcgcctggacacctacaccaacacaccgtgcactcc

SEQ ID NO: 354253 - DNA, 261 bp, Homo sapiens; identical to SEQ ID NO: 340060
  chr8:141458771-141459032
  hypo

SEQ ID NO: 354254 - DNA, 107 bp, Homo sapiens; identical to SEQ ID NO: 345951
  chr8:141534525-141534632
  hypo

SEQ ID NO: 354255 - DNA, 49 bp, Homo sapiens
  chr8:141559645-141559694
  hypo
cggctaacttgccaccgtaacacagcagcctttaaaccgcgctcacgct

SEQ ID NO: 354256 - DNA, 35 bp, Homo sapiens
  chr8:141559724-141559759
  hypo
gatgcgatgctgtccccgtaaagctgctgagcagc

SEQ ID NO: 354257 - DNA, 296 bp, Homo sapiens; identical to SEQ ID NO: 345952
  chr8:141599879-141600175
  hypo

SEQ ID NO: 354258 - DNA, 50 bp, Homo sapiens; identical to SEQ ID NO: 345953
  chr8:141600284-141600334
  hypo

SEQ ID NO: 354259 - DNA, 62 bp, Homo sapiens
  chr8:141623736-141623798
  hypo
cggtaatactggcagaatcggcgacaaatggaactctatccacaagaccactgcagaaattc

SEQ ID NO: 354260 - DNA, 1631 bp, Homo sapiens; identical to SEQ ID NO: 333579
  chr8:142138208-142139839
  hypo

SEQ ID NO: 354261 - DNA, 327 bp, Homo sapiens
  chr8:142227279-142227606
  hypo
cgagggggcctgttccggaaatgagacgggggctgacgagggcatctgctgggccctccaggccaggagcgtatttcccatgggaactgctggccggctgctcattctaagagcggtgacaggaaagtcccatccaggaggagagcccagcccaagtcggttgctatctgtaaagcatttccatgcctcccagaccacgaatgttctgtgacgtgactctgccaccgcggcaagaggcggagggttctgtgtgtctcccggtccccagtctgggctggtctggacttgcagaagtgacgctcccgcagcctctgccgtggccctctc

SEQ ID NO: 354262 - DNA, 934 bp, Homo sapiens; identical to SEQ ID NO: 340073
  chr8:142235190-142236124
  hypo

SEQ ID NO: 354263 - DNA, 88 bp, Homo sapiens
  chr8:142243860-142243948
  hypo
cggcaggcccctgggaaacggctatggagcgtggcacccgttttgctgtgcttttcccgttttgctggtgcagggccttggctaggca

SEQ ID NO: 354264 - DNA, 66 bp, Homo sapiens
  chr8:142244214-142244280
  hypo
tcacctgagggagtggggactgttcttctctatgtccactgaggcctaattcacatctcgtccctc

SEQ ID NO: 354265 - DNA, 204 bp, Homo sapiens; identical to SEQ ID NO: 340078
  chr8:142248320-142248524
  hypo

SEQ ID NO: 354266 - DNA, 593 bp, Homo sapiens; identical to SEQ ID NO: 340079
  chr8:142262690-142263283
  hypo

SEQ ID NO: 354267 - DNA, 449 bp, Homo sapiens; identical to SEQ ID NO: 345316
  chr8:142317706-142318155
  hypo

SEQ ID NO: 354268 - DNA, 415 bp, Homo sapiens; identical to SEQ ID NO: 345317
  chr8:142318184-142318599
  hypo

SEQ ID NO: 354269 - DNA, 192 bp, Homo sapiens; identical to SEQ ID NO: 345956
  chr8:142367176-142367368
  hypo

SEQ ID NO: 354270 - DNA, 287 bp, Homo sapiens; identical to SEQ ID NO: 212577
  chr8:142367824-142368111
  hypo

SEQ ID NO: 354271 - DNA, 106 bp, Homo sapiens; identical to SEQ ID NO: 350835
  chr8:142427489-142427595
  hypo

SEQ ID NO: 354272 - DNA, 327 bp, Homo sapiens; identical to SEQ ID NO: 286229
  chr8:142427700-142428027
  hypo

SEQ ID NO: 354273 - DNA, 55 bp, Homo sapiens
  chr8:143333267-143333322
  hypo
cgcccgcgttctctgtctgcagggcccgggcaccatgtacccgccgcccatgttc

SEQ ID NO: 354274 - DNA, 120 bp, Homo sapiens; identical to SEQ ID NO: 347012
  chr8:143531858-143531978
  hypo

SEQ ID NO: 354275 - DNA, 296 bp, Homo sapiens; identical to SEQ ID NO: 117271
  chr8:143556722-143557018
  hypo

SEQ ID NO: 354276 - DNA, 68 bp, Homo sapiens; identical to SEQ ID NO: 345958
  chr8:143558643-143558711
  hypo

SEQ ID NO: 354277 - DNA, 220 bp, Homo sapiens; identical to SEQ ID NO: 340107
  chr8:143582357-143582577
  hypo

SEQ ID NO: 354278 - DNA, 260 bp, Homo sapiens
  chr8:143662794-143663054
  hypo
cgtctgcccgtccacccgcaaacagcagaagctttgctagggagactgatcagccccagccgtgggtgaccgccccgtctgcccgtccgtgagtgaccgccccgtctgcccgtccgtgggtgaccgccccgtctgcccgtccgtgggtgaccgccccgtctgcccatccaccccaaaacagaaattgcttgctaggctcctagacgtcatccgaccaaggagaagggaccaggcggcaggcaggggagcgcctcgaccgc

SEQ ID NO: 354279 - DNA, 423 bp, Homo sapiens
  chr8:144205313-144205736
  hypo
cgcacacatgcatgccctcgtgtgtacacgtgcgcacacacacccttgaacacatatacatcttcacacatgtacacacaccctcacatgtacacacatgcaccctcaaacgtacagatcctcacacatgtacacacaccctcacacatgtacacacaccctcacacatgtacacaccctcacacatgtatacgtacgcacaccccctcaaacgtacacaccctcacacatgtacatgcacacacatgcacacatgcatgccctcgcatgtacaggcacaccctaatacatcctcacacatgtacgcacacaaaccctcacacgtacacacaccctcacatttacacactcaaacgtacacacatcctcacacatgtacacacaccctcgcacatgtatacatatgcacaccctcacacgtac

SEQ ID NO: 354280 - DNA, 65 bp, Homo sapiens; identical to SEQ ID NO: 310299
  chr8:144343416-144343481
  hypo

SEQ ID NO: 354281 - DNA, 227 bp, Homo sapiens; identical to SEQ ID NO: 212625
  chr8:144343992-144344219
  hypo

SEQ ID NO: 354282 - DNA, 231 bp, Homo sapiens; identical to SEQ ID NO: 340121
  chr8:144351704-144351935
  hypo

SEQ ID NO: 354283 - DNA, 283 bp, Homo sapiens; identical to SEQ ID NO: 345959
  chr8:144359694-144359977
  hypo

SEQ ID NO: 354284 - DNA, 91 bp, Homo sapiens; identical to SEQ ID NO: 345960
  chr8:144360545-144360636
  hypo

SEQ ID NO: 354285 - DNA, 307 bp, Homo sapiens
  chr8:144380308-144380615
  hypo
cggttgcaggattcgcccatcctggtctgggtgtggcttgtgaccacctcctgcagttctctgcccaggtaaggactaattgggaagaattctgggtcctgagctggctgccgcttccaagacagtcgctttgagggctcttggcaccgattttgttaaaatgcatgagcttagggttgtgcagcctgtaggggcaggggtggtctcagaatggatttggtggccccaccgttaattaagctcctgacccctgggccggtggtgaggtgggaagatgagcctgtgtctcccatgctgagccaagatc

SEQ ID NO: 354286 - DNA, 214 bp, Homo sapiens
  chr8:144380645-144380859
  hypo
ctccctgaaggaagcttacctggcttagcctcattcctgctcgtaagtcaggcattcagcttgcaaagatccccaagcacacaaggagagtcagctgactgagggccaacagaaacagcaggcagccgctgtcagccacaaagaaacgcagatcctgaaactgtcatcatacaggtgagaggatagttatgtgtgaggtgttcaaagaagtcgc

SEQ ID NO: 354287 - DNA, 129 bp, Homo sapiens
  chr8:144383407-144383536
  hypo
catgacgtgaaacatcagacagtccaggacatagagacgatctgaaagcgcagatcacacacacaggctgaggaataaatcccttcccaagggcagactggaagttagaaaatgacagaacaatgcttc

SEQ ID NO: 354288 - DNA, 236 bp, Homo sapiens
  chr8:144413516-144413752
  hypo
cggagacaggacgtgtcactctcctgggccaggccctgcatgagcctcttccccgctcccacagtggctcctccctgtggctcctagcaggtgagcagtgtggcctccacctcacgggggaggaaaacaaggcctgcagagggaggcaaccctacctgacctcagaccccatgcccgtgtacccgcccatgccccccacctgcagaggcccgtgtgctgctgagtcacggatccca

SEQ ID NO: 354289 - DNA, 244 bp, Homo sapiens
  chr8:144413782-144414026
  hypo
ccagctaagtgggaaaggcaacgtgcctctcccaggctctagggcctctccccagatgggtcccttcagagccggtctagaatcttcgggaacctctccatgggaccatttcatttgctaaataaaggacctggctgcttatgagagagccctgcctccgaggagctgggtggaagggggtccagcagtgcagccagtggagaggcaccacagcagggcgcaggaccgccgcccacagaggatc

SEQ ID NO: 354290 - DNA, 207 bp, Homo sapiens; identical to SEQ ID NO: 348337
  chr8:144414283-144414490
  hypo

SEQ ID NO: 354291 - DNA, 51 bp, Homo sapiens
  chr8:144457685-144457736
  hypo
cggggtcgggctgtgatcgcctgtggcctccctgcagggctgtgactccct

SEQ ID NO: 354292 - DNA, 70 bp, Homo sapiens
  chr8:144457835-144457905
  hypo
caggtcagtgcttgagactgcccggccccgggagcagggcccacctgggtgaggggggcaggacagccac

SEQ ID NO: 354293 - DNA, 161 bp, Homo sapiens; identical to SEQ ID NO: 340134
  chr8:144621169-144621330
  hypo

SEQ ID NO: 354294 - DNA, 394 bp, Homo sapiens; identical to SEQ ID NO: 350842
  chr8:144640377-144640771
  hypo

SEQ ID NO: 354295 - DNA, 214 bp, Homo sapiens
  chr8:144658291-144658505
  hypo
tgactacgatgaggactgactccagccagggcacctggaacctgccgcgtgggtggagaaagggtgggggccacccctcgggtcttcctgattcaccctggtgtccccctgctccccgccccgcctcagtcaaggacacctgtgctcaccttctgcttgggagctcctagggagccccaccacttacttccctgccacggcctgcagtatcacc

SEQ ID NO: 354296 - DNA, 88 bp, Homo sapiens; identical to SEQ ID NO: 345961
  chr8:144676118-144676206
  hypo

SEQ ID NO: 354297 - DNA, 270 bp, Homo sapiens; identical to SEQ ID NO: 340143
  chr8:145226085-145226355
  hypo

SEQ ID NO: 354298 - DNA, 632 bp, Homo sapiens; identical to SEQ ID NO: 340150
  chr8:145845229-145845861
  hypo

SEQ ID NO: 354299 - DNA, 96 bp, Homo sapiens; identical to SEQ ID NO: 340151
  chr8:145854692-145854788
  hypo

SEQ ID NO: 354300 - DNA, 526 bp, Homo sapiens; identical to SEQ ID NO: 333600
  chr8:145910996-145911522
  hypo

SEQ ID NO: 354301 - DNA, 63 bp, Homo sapiens; identical to SEQ ID NO: 340154
  chr8:146105109-146105172
  hypo

SEQ ID NO: 354302 - DNA, 878 bp, Homo sapiens; identical to SEQ ID NO: 333605
  chr9:503936-504814
  hypo

SEQ ID NO: 354303 - DNA, 200 bp, Homo sapiens
  chr9:2876419-2876619
  hypo
cgggcatggtgctgccgtgggcgctcgggccttgggcgtctggctctgtctctgactccagacctcaaacagggaccgccttctctgtgctttctccgtgtctcctgtgcgccctggcctctgcgtcacagcccgcggctgggccgaatccttccagagtcccacaatgctattataacagccgggaatcatttgaaaac

SEQ ID NO: 354304 - DNA, 167 bp, Homo sapiens; identical to SEQ ID NO: 340170
  chr9:4864421-4864588
  hypo

SEQ ID NO: 354305 - DNA, 201 bp, Homo sapiens
  chr9:6868324-6868525
  hypo
cgtgaagagagtttccgtaggtaacatagcattcatcccaggaaaccctgggaactttgaggtgtgccataaaaagcagtttgaaaatcggttaactggatcaccgatttgagccacccctcagtatccatgaactgttggttccaggttccattcacaataccaaaacctgtggctgctcacgtccctgatataaagtgc

SEQ ID NO: 354306 - DNA, 229 bp, Homo sapiens; identical to SEQ ID NO: 340174
  chr9:7028698-7028927
  hypo

SEQ ID NO: 354307 - DNA, 125 bp, Homo sapiens
  chr9:13323322-13323447
  hypo
gtcctgctctccaccagctccttcgtcggactcagtctggatcttctcaacgcccagctcctggctccgagtcagggctctctggatgcacggtaacaccctcctcttctgggtaccctccctcc

SEQ ID NO: 354308 - DNA, 2011 bp, Homo sapiens; identical to SEQ ID NO: 350852
  chr9:14313785-14315796
  hypo

SEQ ID NO: 354309 - DNA, 591 bp, Homo sapiens; identical to SEQ ID NO: 350855
  chr9:20620754-20621345
  hypo

SEQ ID NO: 354310 - DNA, 184 bp, Homo sapiens; identical to SEQ ID NO: 340185
  chr9:27212729-27212913
  hypo

SEQ ID NO: 354311 - DNA, 568 bp, Homo sapiens; identical to SEQ ID NO: 345323
  chr9:27528536-27529104
  hypo

SEQ ID NO: 354312 - DNA, 182 bp, Homo sapiens; identical to SEQ ID NO: 201692
  chr9:27529157-27529339
  hypo

SEQ ID NO: 354313 - DNA, 567 bp, Homo sapiens; identical to SEQ ID NO: 345325
  chr9:27529340-27529907
  hypo

SEQ ID NO: 354314 - DNA, 299 bp, Homo sapiens; identical to SEQ ID NO: 286381
  chr9:29212828-29213127
  hypo

SEQ ID NO: 354315 - DNA, 70 bp, Homo sapiens; identical to SEQ ID NO: 340188
  chr9:33023517-33023587
  hypo

SEQ ID NO: 354316 - DNA, 665 bp, Homo sapiens; identical to SEQ ID NO: 340190
  chr9:34318282-34318947
  hypo

SEQ ID NO: 354317 - DNA, 729 bp, Homo sapiens
  chr9:34372076-34372805
  hypo
cgtctgagcccacgcacactcggtagctcagctctggcgctgcggcgcggccggcgggtggcttgtagggcgtgtcgtggtagcgcgcctgaagccgcagcgagcgctccgtgctgttccagcccaggtggaagggcactgagtcattgactttgatggcggccgcgcgcgaagatagccagtagcgctcgaggatgcccccaaacgcggcgtcggaggagtagacatcgctggtgacgaacggctggggctcctgctggccatccaggcggatgggccagtgttgcgtcctcatctcggcgccaccataccagtgggccgccgcgtcgcccaagaacatggcgtgctccacggcccggcccggcgctgcctcctcccagcgcacgcggtagcacatgaccgtgtccttgggccgcacagtctggatgaagaagtgcagcggcagcccgtcggccgtgagcgagcagcccagcagggcgccatcgcggctgcaggagtcaaggtccagcgcgccggagcggaaggccaggcggaagacctgctctcccttctgattgcggatggagaagccgccagctttcaggtccagcagctccgcgcgaagtcgctccgccttgcgtagggagacgctgtagtagcaccaggccaccaccgcggccagcacaagcagcagccccagaaccgcggagcccagcagcggcttcaggtctttggaaggcttgggcttgg

SEQ ID NO: 354318 - DNA, 282 bp, Homo sapiens; identical to SEQ ID NO: 350864
  chr9:35161771-35162053
  hypo

SEQ ID NO: 354319 - DNA, 294 bp, Homo sapiens
  chr9:35711931-35712225
  hypo
cgagagggaggaaggagaggcctggcattctttgactcctacgttcccccaccccctaccgtcctcctaccgagtcactcaggagtcgcttgctggcatctccaactgccctcagggcattatccacatcgcgctggccaggtaggcagctgacacagcggttcagagcctgggtcactgctttagccacctggggtgagaaaggagacagggttgcccaagtgaaaagaatttgagagatcgcctccattcacgcgacatgggagatgactagctctactgcctctgaaagtg

SEQ ID NO: 354320 - DNA, 241 bp, Homo sapiens; identical to SEQ ID NO: 286422
  chr9:37035886-37036127
  hypo

SEQ ID NO: 354321 - DNA, 83 bp, Homo sapiens; identical to SEQ ID NO: 340200
  chr9:37118395-37118478
  hypo

SEQ ID NO: 354322 - DNA, 60 bp, Homo sapiens; identical to SEQ ID NO: 340201
  chr9:37118799-37118859
  hypo

SEQ ID NO: 354323 - DNA, 380 bp, Homo sapiens; identical to SEQ ID NO: 350871
  chr9:71788570-71788950
  hypo

SEQ ID NO: 354324 - DNA, 163 bp, Homo sapiens; identical to SEQ ID NO: 333671
  chr9:74640002-74640165
  hypo

SEQ ID NO: 354325 - DNA, 472 bp, Homo sapiens; identical to SEQ ID NO: 201742
  chr9:79630544-79631016
  hypo

SEQ ID NO: 354326 - DNA, 96 bp, Homo sapiens; identical to SEQ ID NO: 340216
  chr9:80007524-80007620
  hypo

SEQ ID NO: 354327 - DNA, 110 bp, Homo sapiens; identical to SEQ ID NO: 340217
  chr9:80475592-80475702
  hypo

SEQ ID NO: 354328 - DNA, 421 bp, Homo sapiens; identical to SEQ ID NO: 201747
  chr9:80645902-80646323
  hypo

SEQ ID NO: 354329 - DNA, 662 bp, Homo sapiens; identical to SEQ ID NO: 201748
  chr9:80646509-80647171
  hypo

SEQ ID NO: 354330 - DNA, 260 bp, Homo sapiens; identical to SEQ ID NO: 286495
  chr9:82185383-82185643
  hypo

SEQ ID NO: 354331 - DNA, 469 bp, Homo sapiens; identical to SEQ ID NO: 347033
  chr9:82185703-82186172
  hypo

SEQ ID NO: 354332 - DNA, 396 bp, Homo sapiens
  chr9:86590191-86590587
  hypo
cgtttgggtgggcaactcacggtaaaagttcagtgacaaaaagacttaatggggaaaataagacagaaacttgaaaaacaatacaccgtctaaaggggatactatttaattatataaaaggcaggtaataaaatacatttctctctttctaatcaggcagtgaggcataaactgttgggacataccgctcggggccactgctgtctgggactgaaacactggcattgtactgcattggtcattggcgttcgtggatgttggcattgggcatgggcattcaatcagaagttgtcaagtatggtacccgtttggcaacgagcacatttttgggcatagccaaccagggttttcacatgggcgttcaggggcggatgggccaacgtcatggtgggcaac

SEQ ID NO: 354333 - DNA, 431 bp, Homo sapiens; identical to SEQ ID NO: 201763
  chr9:89561318-89561749
  hypo

SEQ ID NO: 354334 - DNA, 494 bp, Homo sapiens; identical to SEQ ID NO: 350894
  chr9:89561779-89562273
  hypo

SEQ ID NO: 354335 - DNA, 276 bp, Homo sapiens; identical to SEQ ID NO: 350895
  chr9:90112514-90112790
  hypo

SEQ ID NO: 354336 - DNA, 167 bp, Homo sapiens
  chr9:91993499-91993666
  hypo
cgatgcgggctaacctacgcagcactgcacgagactcggatactgaacaggagaaacacaaaactctccacgcctggacacgtcgcagccgaggcaccagcggggatgcacagccggcctcagtctccatctgcgtctgagtcagcgaacttcagctcacacttgac

SEQ ID NO: 354337 - DNA, 62 bp, Homo sapiens; identical to SEQ ID NO: 348354
  chr9:91996203-91996265
  hypo

SEQ ID NO: 354338 - DNA, 152 bp, Homo sapiens
  chr9:92227900-92228052
  hypo
cggggccttggacgtgctggtccagctgcgtgaactgcatgttttcttgaacggcgactctgcttgcaggtggaatgcatggagtgcacgggcgtctgcctagagaggagatgtgggggctgggcatggaggtagccgaggagtcagcctgc

SEQ ID NO: 354339 - DNA, 544 bp, Homo sapiens; identical to SEQ ID NO: 347038
  chr9:93955385-93955929
  hypo

SEQ ID NO: 354340 - DNA, 267 bp, Homo sapiens; identical to SEQ ID NO: 201780
  chr9:93956177-93956444
  hypo

SEQ ID NO: 354341 - DNA, 310 bp, Homo sapiens; identical to SEQ ID NO: 340239
  chr9:95492133-95492443
  hypo

SEQ ID NO: 354342 - DNA, 370 bp, Homo sapiens; identical to SEQ ID NO: 340241
  chr9:96069038-96069408
  hypo

SEQ ID NO: 354343 - DNA, 139 bp, Homo sapiens
  chr9:96435988-96436127
  hypo
cgctggctgcccatggtgcccggaagaatgggggtggcagtggcaagagtgcaggcaaacgactgctgaagagggctgccaagaacagtgtcgacctggacgactacgaggaagagcaggaccacctggatgcctgctt

SEQ ID NO: 354344 - DNA, 280 bp, Homo sapiens
  chr9:96573430-96573710
  hypo
cgtggtacagtcactccctgctttgtaaagcgctgctgggtctcctgggaaacagcagcgtgcctggcactacgcaaggcccgcacagctgcgccgttgttgtcaccagccgcagttcccaggttgcacatgcctagagaaggtgttggcgggacgcggttgcgcctctgacttcctttaattccgacttctacttgcgtcgttgtgtaggcgtctgagggccacctgacgtcgtctagtgtctccacgccttgacacttgtctattgaaatgcatcttt

SEQ ID NO: 354345 - DNA, 174 bp, Homo sapiens; identical to SEQ ID NO: 201793
  chr9:96717633-96717807
  hypo

SEQ ID NO: 354346 - DNA, 429 bp, Homo sapiens; identical to SEQ ID NO: 347043
  chr9:97767434-97767863
  hypo

SEQ ID NO: 354347 - DNA, 124 bp, Homo sapiens; identical to SEQ ID NO: 340250
  chr9:97808146-97808270
  hypo

SEQ ID NO: 354348 - DNA, 182 bp, Homo sapiens; identical to SEQ ID NO: 348359
  chr9:97865087-97865269
  hypo

SEQ ID NO: 354349 - DNA, 864 bp, Homo sapiens; identical to SEQ ID NO: 350910
  chr9:98272643-98273507
  hypo

SEQ ID NO: 354350 - DNA, 131 bp, Homo sapiens
  chr9:100843158-100843289
  hypo
cgatatctgtggccgcagtggctctgggggccaaggtgttggaacgtcacataactttggacaagacctggaaggggagtgaccactcggcctcgctggagcctggagaactggccgagctggtgcggtca

SEQ ID NO: 354351 - DNA, 703 bp, Homo sapiens; identical to SEQ ID NO: 333740
  chr9:101569830-101570533
  hypo

SEQ ID NO: 354352 - DNA, 148 bp, Homo sapiens; identical to SEQ ID NO: 201823
  chr9:104248697-104248845
  hypo

SEQ ID NO: 354353 - DNA, 499 bp, Homo sapiens; identical to SEQ ID NO: 201824
  chr9:104248975-104249474
  hypo

SEQ ID NO: 354354 - DNA, 130 bp, Homo sapiens; identical to SEQ ID NO: 201836
  chr9:112081563-112081693
  hypo

SEQ ID NO: 354355 - DNA, 860 bp, Homo sapiens; identical to SEQ ID NO: 350926
  chr9:112081773-112082633
  hypo

SEQ ID NO: 354356 - DNA, 273 bp, Homo sapiens; identical to SEQ ID NO: 345966
  chr9:116059825-116060098
  hypo

SEQ ID NO: 354357 - DNA, 631 bp, Homo sapiens; identical to SEQ ID NO: 345967
  chr9:116060128-116060759
  hypo

SEQ ID NO: 354358 - DNA, 190 bp, Homo sapiens
  chr9:116065600-116065790
  hypo
cgctcatccttgcaggcctctgttctgggtccgattgatctcctgccatcccctcggattccactgtcctctgtgcgctgacctgcctcgactcctggcttctgccgagatggatccttccctatgctgagtccctgtaaccaaaatacagatagctcttgcaaaatactgacaaaagcggccactaata

SEQ ID NO: 354359 - DNA, 302 bp, Homo sapiens
  chr9:116065827-116066129
  hypo
ctgaagagccagggttctcaagcaaggcacacttctaggtcagagttcagccctcactgagaatccaaactccgtttaactaccgatggagacttgagcaaattaattaacttctgccagcctcagtttcctcacctgaaaatggccataataacctacctacttgatctgtagattaaatgaggtaatacgtgtcgagatcgcgtaataacacagggcctggcagacagtaactcgctaaatgttaaccagaactattattgttataaccggtctgttcacgtggcccatcttttgttccc

SEQ ID NO: 354360 - DNA, 395 bp, Homo sapiens; identical to SEQ ID NO: 333758
  chr9:116111663-116112058
  hypo

SEQ ID NO: 354361 - DNA, 280 bp, Homo sapiens; identical to SEQ ID NO: 340286
  chr9:116750660-116750940
  hypo

SEQ ID NO: 354362 - DNA, 299 bp, Homo sapiens; identical to SEQ ID NO: 340289
  chr9:116790949-116791248
  hypo

SEQ ID NO: 354363 - DNA, 113 bp, Homo sapiens; identical to SEQ ID NO: 340290
  chr9:116796590-116796703
  hypo

SEQ ID NO: 354364 - DNA, 42 bp, Homo sapiens
  chr9:116800647-116800689
  hypo
cggagtggagccgtgggctgctttgttctggttcagcgcagc

SEQ ID NO: 354365 - DNA, 563 bp, Homo sapiens
  chr9:116800730-116801293
  hypo
aatcccagccacactgaatcgggattaaaggcttggctccatagagagaaattaagcatcatgagctgcgcagttcacagcgccgacgataaggaggatcagccttgaataacaccaatctcattatggagctgctgaatggcacagggtaattcccgctaataaacttcctttctgtgctgtaggaaaacctggcgtgccttggtgacgttggagaagcatgctttggcagtaataataccaaagatagctacaattttgtgagtgctttctatgcgtcacttgtggcactgagagctttacgcaggttatttcatcagatcttcctgattaggtagttgacgttttcatccccattatgcagatgatgaaaccgaggctcagagaacataatcactggcccaaagttgcacagctcctaaaaaaagtatccaatagcatttgagcttttacgtggcgccaggccttgttctaagacttttacatatattcacttatttaattctcggaacaaccctcagagttaagtgcccataacagttccacttcatagctaacgaaac

SEQ ID NO: 354366 - DNA, 1421 bp, Homo sapiens; identical to SEQ ID NO: 340292
  chr9:116810967-116812388
  hypo

SEQ ID NO: 354367 - DNA, 390 bp, Homo sapiens; identical to SEQ ID NO: 340293
  chr9:116813618-116814008
  hypo

SEQ ID NO: 354368 - DNA, 398 bp, Homo sapiens; identical to SEQ ID NO: 340301
  chr9:123210124-123210522
  hypo

SEQ ID NO: 354369 - DNA, 82 bp, Homo sapiens; identical to SEQ ID NO: 345328
  chr9:124990438-124990520
  hypo

SEQ ID NO: 354370 - DNA, 142 bp, Homo sapiens; identical to SEQ ID NO: 345329
  chr9:124991012-124991154
  hypo

SEQ ID NO: 354371 - DNA, 60 bp, Homo sapiens; identical to SEQ ID NO: 340309
  chr9:125986796-125986856
  hypo

SEQ ID NO: 354372 - DNA, 166 bp, Homo sapiens
  chr9:126158115-126158281
  hypo
tgactgcaagccgcactctgccttcagattcctttgttcattcacccaggaaacatctcagagcagaggtctgggctcggatgtggtccaggagttggagagtcaaagctgaggaagagctcacagactactggtgtgcctggtgtgtgtgtgtgtgtgtgcacgc

SEQ ID NO: 354373 - DNA, 203 bp, Homo sapiens; identical to SEQ ID NO: 340315
  chr9:126180763-126180966
  hypo

SEQ ID NO: 354374 - DNA, 109 bp, Homo sapiens; identical to SEQ ID NO: 340316
  chr9:126321044-126321153
  hypo

SEQ ID NO: 354375 - DNA, 137 bp, Homo sapiens
  chr9:126348901-126349038
  hypo
cgtggactcaagggccttcctgaagctcactgttcccaaggaaagaattggagcccagctcgctggacagtgcccggtcccccaaaggatcaaggcaactaggggaatgaagaaaggcaagaaaaactcaaactggg

SEQ ID NO: 354376 - DNA, 40 bp, Homo sapiens; identical to SEQ ID NO: 212977
  chr9:126349104-126349144
  hypo

SEQ ID NO: 354377 - DNA, 90 bp, Homo sapiens; identical to SEQ ID NO: 340320
  chr9:127120340-127120430
  hypo

SEQ ID NO: 354378 - DNA, 55 bp, Homo sapiens; identical to SEQ ID NO: 340321
  chr9:128103464-128103519
  hypo

SEQ ID NO: 354379 - DNA, 445 bp, Homo sapiens; identical to SEQ ID NO: 340323
  chr9:128200066-128200511
  hypo

SEQ ID NO: 354380 - DNA, 125 bp, Homo sapiens
  chr9:128759727-128759852
  hypo
cgggctcagctgccttccctgccatgtgtcgtgtagttgttttcagcacataagctgtcaacgagcgttctttggagatacttgaactggagtggcccaggggcttttcgcctttccgtaagcct

SEQ ID NO: 354381 - DNA, 380 bp, Homo sapiens; identical to SEQ ID NO: 340328
  chr9:129455261-129455641
  hypo

SEQ ID NO: 354382 - DNA, 275 bp, Homo sapiens; identical to SEQ ID NO: 340329
  chr9:129458627-129458902
  hypo

SEQ ID NO: 354383 - DNA, 196 bp, Homo sapiens
  chr9:130496563-130496759
  hypo
cgcatccagcctaccttgtagcgctcgatgtggctggggtgggggaagtggaggacgggagaaaagtggtgcacgcgggggctgcggaggccgccctggaagaggtagtgcgccagcagggagctgacataggatttgccggtgccggtccagccgtgcagggagaggaccagcggcttggtgggggctgggtccc

SEQ ID NO: 354384 - DNA, 233 bp, Homo sapiens; identical to SEQ ID NO: 340335
  chr9:130907031-130907264
  hypo

SEQ ID NO: 354385 - DNA, 704 bp, Homo sapiens; identical to SEQ ID NO: 350949
  chr9:131842946-131843650
  hypo

SEQ ID NO: 354386 - DNA, 280 bp, Homo sapiens; identical to SEQ ID NO: 333801
  chr9:132145475-132145755
  hypo

SEQ ID NO: 354387 - DNA, 690 bp, Homo sapiens; identical to SEQ ID NO: 333804
  chr9:132258226-132258916
  hypo

SEQ ID NO: 354388 - DNA, 294 bp, Homo sapiens; identical to SEQ ID NO: 340349
  chr9:132501760-132502054
  hypo

SEQ ID NO: 354389 - DNA, 277 bp, Homo sapiens; identical to SEQ ID NO: 340350
  chr9:132633604-132633881
  hypo

SEQ ID NO: 354390 - DNA, 112 bp, Homo sapiens; identical to SEQ ID NO: 345331
  chr9:132804293-132804405
  hypo

SEQ ID NO: 354391 - DNA, 207 bp, Homo sapiens; identical to SEQ ID NO: 201905
  chr9:132804455-132804662
  hypo

SEQ ID NO: 354392 - DNA, 292 bp, Homo sapiens; identical to SEQ ID NO: 201908
  chr9:132805445-132805737
  hypo

SEQ ID NO: 354393 - DNA, 477 bp, Homo sapiens; identical to SEQ ID NO: 340353
  chr9:132874127-132874604
  hypo

SEQ ID NO: 354394 - DNA, 343 bp, Homo sapiens; identical to SEQ ID NO: 348378
  chr9:132881052-132881395
  hypo

SEQ ID NO: 354395 - DNA, 35 bp, Homo sapiens; identical to SEQ ID NO: 348379
  chr9:132881495-132881530
  hypo

SEQ ID NO: 354396 - DNA, 131 bp, Homo sapiens; identical to SEQ ID NO: 340360
  chr9:133513763-133513894
  hypo

SEQ ID NO: 354397 - DNA, 1351 bp, Homo sapiens; identical to SEQ ID NO: 333814
  chr9:133710055-133711406
  hypo

SEQ ID NO: 354398 - DNA, 53 bp, Homo sapiens
  chr9:134126741-134126794
  hypo
caggaaggaggcagcccaccctccaagggacacgtggtccacatgagcagctc

SEQ ID NO: 354399 - DNA, 329 bp, Homo sapiens; identical to SEQ ID NO: 340378
  chr9:135267105-135267434
  hypo

SEQ ID NO: 354400 - DNA, 630 bp, Homo sapiens; identical to SEQ ID NO: 345338
  chr9:135286324-135286954
  hypo

SEQ ID NO: 354401 - DNA, 33 bp, Homo sapiens
  chr9:135548276-135548309
  hypo
atataatgagttgggccgggcgcggtggctcac

SEQ ID NO: 354402 - DNA, 95 bp, Homo sapiens
  chr9:135767923-135768018
  hypo
cgcaggaggtgggcggcaccccatctcaccaaggtcctggccgggtcttcgctctgcccaaaccctcctccagcctgtgcaggcctcctcccacc

SEQ ID NO: 354403 - DNA, 203 bp, Homo sapiens; identical to SEQ ID NO: 340387
  chr9:135781263-135781466
  hypo

SEQ ID NO: 354404 - DNA, 33 bp, Homo sapiens; identical to SEQ ID NO: 348382
  chr9:135865230-135865263
  hypo

SEQ ID NO: 354405 - DNA, 113 bp, Homo sapiens; identical to SEQ ID NO: 340390
  chr9:135908551-135908664
  hypo

SEQ ID NO: 354406 - DNA, 381 bp, Homo sapiens; identical to SEQ ID NO: 340393
  chr9:136372653-136373034
  hypo

SEQ ID NO: 354407 - DNA, 321 bp, Homo sapiens; identical to SEQ ID NO: 340395
  chr9:136380597-136380918
  hypo

SEQ ID NO: 354408 - DNA, 115 bp, Homo sapiens; identical to SEQ ID NO: 345980
  chr9:136384021-136384136
  hypo

SEQ ID NO: 354409 - DNA, 574 bp, Homo sapiens; identical to SEQ ID NO: 340397
  chr9:136385211-136385785
  hypo

SEQ ID NO: 354410 - DNA, 643 bp, Homo sapiens; identical to SEQ ID NO: 340400
  chr9:136402186-136402829
  hypo

SEQ ID NO: 354411 - DNA, 106 bp, Homo sapiens; identical to SEQ ID NO: 348385
  chr9:136698796-136698902
  hypo

SEQ ID NO: 354412 - DNA, 50 bp, Homo sapiens; identical to SEQ ID NO: 345981
  chr9:137623301-137623351
  hypo

SEQ ID NO: 354413 - DNA, 153 bp, Homo sapiens; identical to SEQ ID NO: 345982
  chr9:137623543-137623696
  hypo

SEQ ID NO: 354414 - DNA, 473 bp, Homo sapiens
  chr9:137642188-137642661
  hypo
cgatcctcagcccacagccgtgcccctcccttctccgggtgggggtttctgaaacattcctgccacggggtctcacagcttctgtgcgtgtccagtgcatttcccgggtgggccgcttctccgacgccctcattctcgctgcagcccagccctggcctggttgcactctgacttgtctctcttggccccttgtcttcagggcccccctggacgcccaggccttcctggggccgatggcctgcccggtcctccaggaaccatgctcatgctgcccgtgagtacccttatcagtcggaggtggggaggcagctggggcaggtgggatccaaaccagaccctctgaggctgcgctgtcactggagaggcctgtgggccccgtctcagtctgtggtcttgcctgggtgccacgtcactgctcccagagtgacccttgtcttacacttgcagttccggtttggaggtggcggcgatgc

SEQ ID NO: 354415 - DNA, 335 bp, Homo sapiens; identical to SEQ ID NO: 340413
  chr9:138143914-138144249
  hypo

SEQ ID NO: 354416 - DNA, 274 bp, Homo sapiens
  chr9:138660497-138660771
  hypo
cgaggtggaccgcacggctgcagtgagtgaggctgaggccctgcccaggcgggaggggcaccgtggggccggggagcgggggtccctgagggaagagacctgccccaggctgccggtgccgcccagcagcccacagaggccagcccgtctgcactgaccaaccacccaccccgccaggaccaccagaccatcctgcgcgcctgggccgtgaaggacttcgcccccaactgccccctctacgtccagatcctcaaacctgaaaacaagtttcacg

SEQ ID NO: 354417 - DNA, 51 bp, Homo sapiens
  chr9:138661962-138662013
  hypo
cagggcctgcttgggggcggggatgggcttcccagaggaggggcacatggc

SEQ ID NO: 354418 - DNA, 323 bp, Homo sapiens
  chr9:138662685-138663008
  hypo
ccggtgcctctgcccaggtatggcgtgtgcctcatcgggctgaagcgggaggacaacaagagcatcctgctgaacccggggccccggcacatcctggccgcctctgacacctgcttctacatcaacatcaccaaggaggagaactcggccttcatcttcaagcaggaggagaagcggaagaagagggccttctcggggcaggggctgcacgagggtccggcccgcctgcccgtgcacagcatcatcgcctccatgggtgagccgggacaggcgcgcgggactccctgggcctgctcctttggcgggagaccaggcgggacacc

SEQ ID NO: 354419 - DNA, 141 bp, Homo sapiens; identical to SEQ ID NO: 311724
  chr9:138670510-138670651
  hypo

SEQ ID NO: 354420 - DNA, 33 bp, Homo sapiens
  chr9:138670778-138670811
  hypo
acagccacgaccacgggccctcgccctgagacc

SEQ ID NO: 354421 - DNA, 185 bp, Homo sapiens; identical to SEQ ID NO: 340424
  chr9:138719269-138719454
  hypo

SEQ ID NO: 354422 - DNA, 98 bp, Homo sapiens
  chr9:138743599-138743697
  hypo
cggagagatttccgtcactcatcttgaccgctatatggtcctccacgatttctcacaattatgacaaatgctgccatcacaaagcttgcgtgtgctgt

SEQ ID NO: 354423 - DNA, 90 bp, Homo sapiens; identical to SEQ ID NO: 340427
  chr9:138774525-138774615
  hypo

SEQ ID NO: 354424 - DNA, 538 bp, Homo sapiens; identical to SEQ ID NO: 340430
  chr9:138877542-138878080
  hypo

SEQ ID NO: 354425 - DNA, 93 bp, Homo sapiens; identical to SEQ ID NO: 340434
  chr9:139079359-139079452
  hypo

SEQ ID NO: 354426 - DNA, 264 bp, Homo sapiens; identical to SEQ ID NO: 345984
  chr9:139110897-139111161
  hypo

SEQ ID NO: 354427 - DNA, 81 bp, Homo sapiens; identical to SEQ ID NO: 345985
  chr9:139111384-139111465
  hypo

SEQ ID NO: 354428 - DNA, 195 bp, Homo sapiens
  chr9:139268627-139268822
  hypo
cgggggagaaacgtcccttccagaagtgtcgttatcctcgttatccccatcatgaggcatccctgctctccaccaggatgcatgtgaggactgaggccactctcggggtcccccaaaccagcttcagaagagccggtgacagcagggcacagctcggcccccatccagggacaacggacagcagagtctgccctg

SEQ ID NO: 354429 - DNA, 127 bp, Homo sapiens; identical to SEQ ID NO: 311797
  chr9:139268912-139269039
  hypo

SEQ ID NO: 354430 - DNA, 441 bp, Homo sapiens
  chr9:139269121-139269562
  hypo
cccctcaccatcaacatgagcgagtgtgcaggccggggccatcctgggccctgccagggagcgaaccggagctggcaccaggccctcatgacccagtgtttccccagcgtttaaaacgcggaccttagtgacttccctgtggtgtgtgtccttaggagtgaacacacataccatgttctctaaccatatcggaagctaaaaatcggtaacagatatcggcaaaatctctaaatatttggaaattaaataatataccgctaaataacccacagatcagagtggcccccagactaggcaccagactagagaaccaggcacagcaacacatactcaggagtgaggtcggccatgggaccgtcccgtctgccaggtgcccagggctgaggccccacagtggctccagtgaaggatcgaagcccagatagccaagggcctgggggc

SEQ ID NO: 354431 - DNA, 144 bp, Homo sapiens; identical to SEQ ID NO: 213214
  chr9:139317510-139317654
  hypo

SEQ ID NO: 354432 - DNA, 380 bp, Homo sapiens; identical to SEQ ID NO: 345987
  chr9:139317866-139318246
  hypo

SEQ ID NO: 354433 - DNA, 357 bp, Homo sapiens; identical to SEQ ID NO: 333839
  chr9:139401232-139401589
  hypo

SEQ ID NO: 354434 - DNA, 291 bp, Homo sapiens
  chr9:139506149-139506440
  hypo
cgcgtgcccggtccccactcacattgccacctgcctccggtgtggctgcgaagtcggagggaggagagagccagccaggggtgtgggcgccaagatcagagactcgcacgctgctggacggaatgtggaccggcccagctgctgggtcacctgccggcagctcccgaaacaaccagtcaccacgagacccagcaactccacccctaggtgtgcgcccaagataaacggaagctcctgtccgcacaaacacccgtgcggcttccttcactaagggtggaaacggcccgggtg

SEQ ID NO: 354435 - DNA, 205 bp, Homo sapiens; identical to SEQ ID NO: 345988
  chr9:139698453-139698658
  hypo

SEQ ID NO: 354436 - DNA, 106 bp, Homo sapiens
  chr9:139793021-139793127
  hypo
cgattctgcttctctgagtcttgaccgcaggtcagtggggacccggcccctcaccatcgcctgctactgatcaccattggtttggttttgtctcgaggactgttct

SEQ ID NO: 354437 - DNA, 53 bp, Homo sapiens
  chr9:139793190-139793243
  hypo
tcatggctgcagctagcgtgaccccccctggctccctggagttgctacagccc

SEQ ID NO: 354438 - DNA, 309 bp, Homo sapiens; identical to SEQ ID NO: 340455
  chr9:139803935-139804244
  hypo

SEQ ID NO: 354439 - DNA, 42 bp, Homo sapiens
  chr9:139809677-139809719
  hypo
cgaaaactacaaaaaaggtgcattctgagacgtcagagggaa

SEQ ID NO: 354440 - DNA, 37 bp, Homo sapiens
  chr9:139818622-139818659
  hypo
gcagtttgttgtttccatgatttctgagcactggtcc

SEQ ID NO: 354441 - DNA, 1801 bp, Homo sapiens
  chr9:139834961-139836762
  hypo
cgtgaccggccgctcccaagccccgggcgcacaaccacagccaggagcagcccctgccaccactgggccaccgtccagggccccacaggaccagccgaaggtgccccgggccgaggccagctgggtcaggtgtacccctagcctggggttgagtgaggagcggcacccccagtatcctgtgtaccccaagttgcccaggaggccgagggggccttgggctccatctgcactggccaccccgtgccaagcatcacagctgcgtgagcaggtttgtgtgtgagcgtgtggcggggcctggttgtccccttcctaaggcgtaactgctataagcatctccacctctcccgctcgggaaaaagccacagagcctggcgatgtcctcaaggggtcccggtggctccagtgcacccagcacacctcagcgcctctggctggcaagccaggagaagaaggtgcgaggccgtgggcgaggtgcctggaggacgcgcatggtgcgtggggagcgccaggctttgatggtggcgtcgtcgctggccgtgagcagcagctcctgctcctggggactgaagaccactgagttgaccacatcctcgtgccgcagcctggccagacagatgttgtagtggcggtcccagatgtagccgtgccggtcctccgccccgctgcagaacagcgcctgggtgagccggccgcccgcccgctgctgcccacacccgccctgcaccacgccgcgccctgcacctggccacgaagtccctgctgacgtccaggaagatgaagaagcactcgtcgttgggcgtgtaggcgcggtgcgcacgcagagcccgcctcacctcccgcatggtcttgaggtcgaacaccagcaggtcaatctcctccgcgattggtggcggctgcatggggtcggccaccaccgcaccgttgggccaggcgcggctgttcacgtacaggtacctgggcgaggggcactgtgctaggtgtgggccgcctgcgggcaccccgcctgggacactggcaagaggcccacctgttgtcgggcgacaggcccatgccgatgatgtgtccgtgtatgtctatgacgtggtccagcgcgtcgaagaaggcatcggagccccggccctcacccagcacgggccctgccgtggtcatctggtgtggcaggatctgcttgatgcctgcagggagggctacggtgagggtccctgtccaatgccccaaggacatcactccagggcagcttcctacctcagtggtgtctctggggctgtgagcaccacagaggtccgtgggcactgcctgctccgggggccccagacctgaatcaggcccgtcggttgcttgctggccagcggccctgcctgcgtttgttttcactgctcatcccacaggccccaggtctgggcttgtgaccccaggggcgagtgaacgatcccagctttgcctgtggacttgcttgctgtctgcccctcaggacccctgcccggcctcccccaagctcctaggaccgaggcgggcagcatggcggcaggggtgtaccgatctggtgtggggagtaggtgaggcagccagtggtgaagatgaggtacttgctcttggcgcctgtggcactgcgctcgggtggcttggtgtggccctgggccagcagctcggccaccttggtctctagcatgcgctccgacagctgtggctgcgcccgcccctccagcacgcggtccagaaagtgccgcaagccctccttggcgtgggcgggggccgggccagccaccacctcctcgttgtcgctgcccaggtcaaagatgcg

SEQ ID NO: 354442 - DNA, 594 bp, Homo sapiens
  chr9:139836968-139837562
  hypo
gggcagccccgcccctagccccgcacgcacctggaaggcattgttgagccacagcaccgagcaggaggtgatatctccgatgcggtgcaggttccccgagatgaggctggtctcggtgagccaacagccaaacacgtcatagggcttgttccgcacgcgggacagcagcgcgaaggagtctgtggggaggccggggctggacaggctgtcggcgtggggcgggggcagggtcaacccgccgcccgtgctcacctaggctgatgacagcaatctcgccggatgaggagttgtgcggccccaggaacacccccgaggccagcagtagcgagtcgtccttgttgaactgggagaactgggtgtagctccagttgtagggccgcatgtccgcgctgtgcagcagcgagatggtcaggtcgttgctccagatctgttcggcaggggcggctgtagtgatcgcctggccaggtcgcggggcgggggcctgctactacacagccatgaggccccagctctgccagccctactcagaggccaccagggagcagggaccccttccagccactgtcatccactcggggggcattggtatagagc

SEQ ID NO: 354443 - DNA, 650 bp, Homo sapiens
  chr9:139846908-139847558
  hypo
cggaaggagaagcagccggctgggtctgagtgcagggagaggctggtggctgagcaggcctggggatgctgcccagagagccaggaccagccgtgcttccaggagcccccaggcgggcccctgacctccagcagaggagggcccagcgcagaccttcctggcacccattccctgccgtcagcccagcccatcgctccctctgtgcgtgaggggaaacaggctcgggaaggccgcacagccactggccagggtcaccatgtccctgccagacccagagtaggctctggttcttgccagtgtccctggcgccggcccagccaggagcactgctctgtgaggggtccagaagctgccagggagggcgggagggggctcctgaccctgcccactgccacccctgcccaccgccgcccctgcccaccaccgcctctgtagttccagggggaatggttcgtcctgggcctggcgggcaacagcttcaggccggagcacagggcgctgctgaacgctttcaccgcaacttttgagctaagtgatgatggccgctttgaggtgtggaatgcgatgactcggtgagtggctgtccctgccgttccaagcgggtgaggaggatcccgggcctgggtcccagccgccagtggctcaggtgc

SEQ ID NO: 354444 - DNA, 33 bp, Homo sapiens; identical to SEQ ID NO: 348397
  chr9:139889104-139889137
  hypo

SEQ ID NO: 354445 - DNA, 159 bp, Homo sapiens
  chr9:139904532-139904691
  hypo
agtagccgaggctctgctgcacctggagcagctccttcagcacgctggggacacggcagctgtcagcgcgtgaggacgcggcggccccgcccacccagggctcccgccccacctgtgtccattgacgaaggcctcgccccccgtcgtgctctcgtcgcc

SEQ ID NO: 354446 - DNA, 520 bp, Homo sapiens; identical to SEQ ID NO: 350968
  chr9:139948370-139948890
  hypo

SEQ ID NO: 354447 - DNA, 375 bp, Homo sapiens; identical to SEQ ID NO: 350969
  chr9:140024237-140024612
  hypo

SEQ ID NO: 354448 - DNA, 302 bp, Homo sapiens; identical to SEQ ID NO: 311906
  chr9:140107736-140108038
  hypo

SEQ ID NO: 354449 - DNA, 180 bp, Homo sapiens; identical to SEQ ID NO: 348399
  chr9:140108461-140108641
  hypo

SEQ ID NO: 354450 - DNA, 42 bp, Homo sapiens; identical to SEQ ID NO: 340475
  chr9:140166945-140166987
  hypo

SEQ ID NO: 354451 - DNA, 292 bp, Homo sapiens; identical to SEQ ID NO: 311918
  chr9:140167091-140167383
  hypo

SEQ ID NO: 354452 - DNA, 322 bp, Homo sapiens
  chr9:140167413-140167735
  hypo
tgccgagtcgcggccctgctcagccggaagaggctcccggacctggatgtacagggcagtctctcttcccggggctatggctgggcctgtcctgccgtcatggccccctgcttcctgctccttggagctggctcccggaccttgcccaccatccatgcagtggctcccagggcagagcctctccttgtactttggcagccatagaaagcgtgctcattttctgttttcctgtgttaggaaaaaaccacctgttttccaaggggagagggcggggcctgagggtgggggcggggcctcttcattggcccagcttggcgaaagc

SEQ ID NO: 354453 - DNA, 636 bp, Homo sapiens; identical to SEQ ID NO: 347066
  chr9:140196486-140197122
  hypo

SEQ ID NO: 354454 - DNA, 155 bp, Homo sapiens; identical to SEQ ID NO: 347067
  chr9:140197263-140197418
  hypo

SEQ ID NO: 354455 - DNA, 373 bp, Homo sapiens; identical to SEQ ID NO: 348402
  chr9:140265361-140265734
  hypo

SEQ ID NO: 354456 - DNA, 183 bp, Homo sapiens; identical to SEQ ID NO: 348403
  chr9:140265902-140266085
  hypo

SEQ ID NO: 354457 - DNA, 150 bp, Homo sapiens
  chr9:140392858-140393008
  hypo
cctgccccacggcacagcactgcccaccacgtgcccagtggccagcagctgttggggagcccagagagccccctcctggcaggcccgcgagtgccccttggacacgggccctgtgtcaggctgcggtcctggcaggggactgcacatgcc

SEQ ID NO: 354458 - DNA, 249 bp, Homo sapiens; identical to SEQ ID NO: 348404
  chr9:140582119-140582368
  hypo

SEQ ID NO: 354459 - DNA, 233 bp, Homo sapiens; identical to SEQ ID NO: 340488
  chr9:140623363-140623596
  hypo

SEQ ID NO: 354460 - DNA, 232 bp, Homo sapiens; identical to SEQ ID NO: 340489
  chr9:140645189-140645421
  hypo

SEQ ID NO: 354461 - DNA, 188 bp, Homo sapiens; identical to SEQ ID NO: 345339
  chr9:140703858-140704046
  hypo

SEQ ID NO: 354462 - DNA, 327 bp, Homo sapiens; identical to SEQ ID NO: 345340
  chr9:140704131-140704458
  hypo

SEQ ID NO: 354463 - DNA, 90 bp, Homo sapiens
  chr9:140704673-140704763
  hypo
cggttccgatgccgccccgcgtggaccgtcggtgatgggtccggaggcggttccgatgccgccctgcgtgaaaggcgctcctcgcacggc

SEQ ID NO: 354464 - DNA, 133 bp, Homo sapiens
  chr9:140707377-140707510
  hypo
cggacattttataaatctcatctgtatcacattttcaagtcagctttaaatgttttgtggccttacattttcccttttagcctctttctttctcgggattcagatgtcaccttaaagaacaaggaaggagaga

SEQ ID NO: 354465 - DNA, 58 bp, Homo sapiens
  chr9:140707900-140707958
  hypo
atgccccagcaactacaagtacgtctctcagaactgcgtgacgtcccccatgaacatc

SEQ ID NO: 354466 - DNA, 479 bp, Homo sapiens; identical to SEQ ID NO: 345993
  chr9:140708213-140708692
  hypo

SEQ ID NO: 354467 - DNA, 215 bp, Homo sapiens; identical to SEQ ID NO: 213315
  chr9:140708771-140708986
  hypo

SEQ ID NO: 354468 - DNA, 479 bp, Homo sapiens; identical to SEQ ID NO: 340504
  chr10:425893-426372
  hypo

SEQ ID NO: 354469 - DNA, 46 bp, Homo sapiens
  chr10:518263-518309
  hypo
cgcgtgctgcaggtccacgcccactgcacttctgcctcgcccagtg

SEQ ID NO: 354470 - DNA, 131 bp, Homo sapiens
  chr10:518339-518470
  hypo
ggcagatggacgtattgtatcaccccaccccgtgcttacctgaccgatagcgctcatctcgtgaccctgaagaccgtcggcggtggtagcgagaggcggaggaaggagtgacaggagcccggcgttcttgc

SEQ ID NO: 354471 - DNA, 101 bp, Homo sapiens; identical to SEQ ID NO: 348411
  chr10:524407-524508
  hypo

SEQ ID NO: 354472 - DNA, 83 bp, Homo sapiens; identical to SEQ ID NO: 213327
  chr10:524671-524754
  hypo

SEQ ID NO: 354473 - DNA, 141 bp, Homo sapiens
  chr10:851108-851249
  hypo
cggctggaggtcgagggcgcgtggggggcctggagggtgcaggggacgccgagggcgcggggcccaacctccggccagccgcctggattctggtctctgctctgagcgaggtgcgtgggtgcctccctgcttttgagcggg

SEQ ID NO: 354474 - DNA, 175 bp, Homo sapiens
  chr10:851504-851679
  hypo
cgaggaatggacccggaagcgtcccctgcccagggggtgctgcaggtacccaggggaagagcattcacgggtgccaggcccaaggggctcacgccagaagtagaccaattagacgactacaaacggtgctcagtgctgcagaagcagccggggacaggcggctgtcggagagggc

SEQ ID NO: 354475 - DNA, 258 bp, Homo sapiens; identical to SEQ ID NO: 340510
  chr10:851928-852186
  hypo

SEQ ID NO: 354476 - DNA, 148 bp, Homo sapiens
  chr10:978663-978811
  hypo
cgaactcccgccccacacctgagacgaaggtcccggccccgaagtcccaaccccacacccgggaccaaggccccggcactgccccgaacccccgccccacacccctaaccaaggcctcggctcagccccggaatccccaaccccacac

SEQ ID NO: 354477 - DNA, 49 bp, Homo sapiens
  chr10:1120729-1120778
  hypo
cgtgttaggtttaactttatacatctcagatttgccagtctgaagtagt

SEQ ID NO: 354478 - DNA, 357 bp, Homo sapiens; identical to SEQ ID NO: 340515
  chr10:1167479-1167836
  hypo

SEQ ID NO: 354479 - DNA, 155 bp, Homo sapiens
  chr10:1443319-1443474
  hypo
cggcagccacaaacaccgtcaggcccagcgtcaccctccccacctcccggatgagaaggagcctccggagcagctgagggacccactgtggaggcagccgggtgggggacggcccggtgtgtgtggtctggtcgtgactttcccacaaggcatca

SEQ ID NO: 354480 - DNA, 311 bp, Homo sapiens
  chr10:1443566-1443877
  hypo
aagcctgggtcctctccctgtcagagaagacagctgggttctggggtttcacagcacacgggtacccccggttccaggactgaccatggagggcaggtgccagcgctgttcggggcctccggtgatggtcccagctcccttcccacaaaggccaggtgcagccttggaatcctctgacacttggatccccatggattcaatgggagctcgcatgctgtgaagaccgcggtgcattttaaacggcaccagcaaggaggctacactgtgtatcccgtgtccccatttctaccgaagagcggcggcttcacggc

SEQ ID NO: 354481 - DNA, 101 bp, Homo sapiens
  chr10:1506151-1506252
  hypo
cgcaaacgcaaacccccataagacgcctggacacacctgcgagagtggctgcaataaaacaaccacagagaagctgatgacagtgaatgctgacaaggatg

SEQ ID NO: 354482 - DNA, 45 bp, Homo sapiens
  chr10:1789180-1789225
  hypo
cgcgtgacgtgtatgcgagtgtcacatgaatcgcctgatgtgtac

SEQ ID NO: 354483 - DNA, 139 bp, Homo sapiens
  chr10:1789266-1789405
  hypo
gatcgcctgatgtgtatgtgtcacatggattgcgtgacgtgtatgcgagtgtcacatggatcgcgtgatgtgtatgcgagtgtcacatggatcgcgtgatgtgtatgcgagtgtcacatggatcgcgtgatgtgtatgc

SEQ ID NO: 354484 - DNA, 166 bp, Homo sapiens; identical to SEQ ID NO: 340525
  chr10:2006696-2006862
  hypo

SEQ ID NO: 354485 - DNA, 910 bp, Homo sapiens; identical to SEQ ID NO: 350976
  chr10:3109459-3110369
  hypo

SEQ ID NO: 354486 - DNA, 161 bp, Homo sapiens
  chr10:3160827-3160988
  hypo
cggcatgagtgaaaaggcagacgtttaccgctccttaattaaaaccacagactggggaaggcggccgggtggggaccggcgtggcgtcctgcggaccgcgtggagtttggggtgtctgacatcgttctccacgtggctattttcagcgttctcccggggaa

SEQ ID NO: 354487 - DNA, 125 bp, Homo sapiens
  chr10:3161171-3161296
  hypo
ccagacccagcggccactggagaattgtagaacagcaggatagcaggtggtaagacgtggcctacgagtggcccagttccagtaaagcaacttaaccgagaagcaaaagcttgactccttaaccc

SEQ ID NO: 354488 - DNA, 227 bp, Homo sapiens; identical to SEQ ID NO: 340531
  chr10:3194438-3194665
  hypo

SEQ ID NO: 354489 - DNA, 114 bp, Homo sapiens
  chr10:3196890-3197004
  hypo
cgtttttcgtatattctgaatacaggcctttatcagacaccatttttgcaaatgttttttcccagaggccaaactacctttgagaatccatttgggtccccttctctcccgtgg

SEQ ID NO: 354490 - DNA, 294 bp, Homo sapiens
  chr10:3197113-3197407
  hypo
aggtgtctaattgcctctcagcagttttctccatccaatttctctatttttctgcaaaactatcctgaatgaggctgcagctacactgctcactgacccgacagttctcctgccttaatacatgaagcacccgtgtgctccccatcttccatacaggccctccccagagccacagggcacacctgtctcccccacacacgctgtcctccctccatgcccaccgctccaccatccctgtgtgcctcacgcctgtcccacagaatcctggtgctgctctgtggctggcacacaccc

SEQ ID NO: 354491 - DNA, 307 bp, Homo sapiens; identical to SEQ ID NO: 213394
  chr10:3329809-3330116
  hypo

SEQ ID NO: 354492 - DNA, 226 bp, Homo sapiens; identical to SEQ ID NO: 312172
  chr10:3330188-3330414
  hypo

SEQ ID NO: 354493 - DNA, 297 bp, Homo sapiens
  chr10:3678862-3679159
  hypo
agatcagccctagaatgaaagcaaaaccgagatgatggacggcgcaggctccttggagatccgtgttcatgacacctgcaaggactgtgggcaagctgccaaccagacatgaaattagcaattagttgcatattcttccgagtgggtcatgtgctccttgcaatccaggcacatctctttccatctggcaggggtgtggcgtatttccagagggcttcaatgcgcaatccggcagcgcactgctgggagccccggcacaggacgcctgaccacactgacatacacatattcgcgtcc

SEQ ID NO: 354494 - DNA, 54 bp, Homo sapiens
  chr10:5523206-5523260
  hypo
cgggaggagacctgggcagcggcggactcattgcaggtcgctctgcggtgagga

SEQ ID NO: 354495 - DNA, 69 bp, Homo sapiens; identical to SEQ ID NO: 348413
  chr10:5538706-5538775
  hypo

SEQ ID NO: 354496 - DNA, 192 bp, Homo sapiens; identical to SEQ ID NO: 348414
  chr10:5538938-5539130
  hypo

SEQ ID NO: 354497 - DNA, 380 bp, Homo sapiens; identical to SEQ ID NO: 348415
  chr10:5540271-5540651
  hypo

SEQ ID NO: 354498 - DNA, 198 bp, Homo sapiens; identical to SEQ ID NO: 348416
  chr10:5541528-5541726
  hypo

SEQ ID NO: 354499 - DNA, 421 bp, Homo sapiens; identical to SEQ ID NO: 340545
  chr10:5960358-5960779
  hypo

SEQ ID NO: 354500 - DNA, 134 bp, Homo sapiens
  chr10:6003855-6003989
  hypo
tgtcaccacctttcatataacttgccctacgctcactgccaatgctccagggctccctgcacaggacgcaccaaggcatcctcagccaagtgcccacggtcgtgccagctcgggtcaaaggctgctgtcacatc

SEQ ID NO: 354501 - DNA, 130 bp, Homo sapiens; identical to SEQ ID NO: 340547
  chr10:6023448-6023578
  hypo

SEQ ID NO: 354502 - DNA, 145 bp, Homo sapiens
  chr10:6161993-6162138
  hypo
cgcctccacctccttgcttcttactgcctcttccactcagcccacacttgcagaatgaggactgcgtcgactacaaattagacctctgcttccaccaggcctccttgatagttcagctaagagccgtgcggtgagtctcctgacg

SEQ ID NO: 354503 - DNA, 666 bp, Homo sapiens; identical to SEQ ID NO: 350978
  chr10:6621854-6622520
  hypo

SEQ ID NO: 354504 - DNA, 87 bp, Homo sapiens; identical to SEQ ID NO: 350979
  chr10:6622706-6622793
  hypo

SEQ ID NO: 354505 - DNA, 34 bp, Homo sapiens
  chr10:7212711-7212745
  hypo
cgtccctgccaggcagctctcagcaggggccttg

SEQ ID NO: 354506 - DNA, 35 bp, Homo sapiens
  chr10:7409523-7409558
  hypo
cgcaaggttctctctgctccttgcaaaattacagg

SEQ ID NO: 354507 - DNA, 151 bp, Homo sapiens
  chr10:7409632-7409783
  hypo
gttgttctgtgtgcaccaccccacggggtgcaaatccgcgatgactacgtcacaccagaagtcggccctgcggtcctccccgtaaccgcagtagcgcagaagcagcagctgcccgcacgtggtaatgatcgtggccacccagtacgtgtcc

SEQ ID NO: 354508 - DNA, 60 bp, Homo sapiens; identical to SEQ ID NO: 201967
  chr10:7453036-7453096
  hypo

SEQ ID NO: 354509 - DNA, 297 bp, Homo sapiens; identical to SEQ ID NO: 340559
  chr10:7618377-7618674
  hypo

SEQ ID NO: 354510 - DNA, 112 bp, Homo sapiens
  chr10:7985048-7985160
  hypo
cggttgtgatcctgctcagatcaaaggagtccaatcctgtggttccggttccctgtagctccgtgagactctgagaactccactcggcctccagcgctgcctttgccgttgc

SEQ ID NO: 354511 - DNA, 115 bp, Homo sapiens
  chr10:7985194-7985309
  hypo
cttgcttggtttcttggcttctgtcttctgattctggctcctacgcatcacgttctgcttgctccttagcattgcaaactctgacattttagatgatacgtttgtttcctagttc

SEQ ID NO: 354512 - DNA, 183 bp, Homo sapiens
  chr10:8055498-8055681
  hypo
cgtttttctgtttcttgattctaaaacagtgatgacgctgatcatggcattaatgaagtgctgatctactatattttttagtttaatatgcctgtttattcggttaacagtataaagtaatcattctgatctggcctctttttgttttttttcccattccctccatttttgccgcttccgctt

SEQ ID NO: 354513 - DNA, 86 bp, Homo sapiens
  chr10:8055764-8055850
  hypo
gattgggtgtgacgactgcgatgactggtaccactggtgagtgcccagggcgccctgccggccacactcattaggcagcatcagcc

SEQ ID NO: 354514 - DNA, 117 bp, Homo sapiens; identical to SEQ ID NO: 350982
  chr10:8075813-8075930
  hypo

SEQ ID NO: 354515 - DNA, 51 bp, Homo sapiens; identical to SEQ ID NO: 286936
  chr10:8097537-8097588
  hypo

SEQ ID NO: 354516 - DNA, 42 bp, Homo sapiens; identical to SEQ ID NO: 350990
  chr10:11060746-11060788
  hypo

SEQ ID NO: 354517 - DNA, 124 bp, Homo sapiens; identical to SEQ ID NO: 350993
  chr10:12390701-12390825
  hypo

SEQ ID NO: 354518 - DNA, 875 bp, Homo sapiens; identical to SEQ ID NO: 201983
  chr10:12390995-12391870
  hypo

SEQ ID NO: 354519 - DNA, 324 bp, Homo sapiens; identical to SEQ ID NO: 345344
  chr10:12392327-12392651
  hypo

SEQ ID NO: 354520 - DNA, 275 bp, Homo sapiens
  chr10:13771131-13771406
  hypo
cgcatggaaagcgttcaggtccactcagactgtgctgcgatctgaaagaatgataacatacgagaaggccctttggtcctacactgtgaatgagtaaggggcagctgcaaaatgctaagaatgctgagtgcattaagtgaagtgtttctcccaggtgtgcacagggtgtggcttccaaggggaatgtggatgctggaatgagggaggcagccacctaggccggtcaagtcagaggcccagcaaggagaaagcgagccaaggcaaacgccgacaga

SEQ ID NO: 354521 - DNA, 127 bp, Homo sapiens
  chr10:13771447-13771574
  hypo
cgcaccgcataatttagcggggcaatgccgccgggagtccacgccaagttaatggaatatttcctgtaaatattattttcccttcctgtctcatcatctcatttcattcaaaaatctttactaatcc

SEQ ID NO: 354522 - DNA, 190 bp, Homo sapiens; identical to SEQ ID NO: 201987
  chr10:13933246-13933436
  hypo

SEQ ID NO: 354523 - DNA, 411 bp, Homo sapiens; identical to SEQ ID NO: 340577
  chr10:14816098-14816509
  hypo

SEQ ID NO: 354524 - DNA, 184 bp, Homo sapiens; identical to SEQ ID NO: 340581
  chr10:15255054-15255238
  hypo

SEQ ID NO: 354525 - DNA, 313 bp, Homo sapiens; identical to SEQ ID NO: 340585
  chr10:16716483-16716796
  hypo

SEQ ID NO: 354526 - DNA, 80 bp, Homo sapiens; identical to SEQ ID NO: 340586
  chr10:16806491-16806571
  hypo

SEQ ID NO: 354527 - DNA, 208 bp, Homo sapiens; identical to SEQ ID NO: 201993
  chr10:17270445-17270653
  hypo

SEQ ID NO: 354528 - DNA, 259 bp, Homo sapiens; identical to SEQ ID NO: 351000
  chr10:17495133-17495392
  hypo

SEQ ID NO: 354529 - DNA, 322 bp, Homo sapiens; identical to SEQ ID NO: 201996
  chr10:17495680-17496002
  hypo

SEQ ID NO: 354530 - DNA, 873 bp, Homo sapiens; identical to SEQ ID NO: 347076
  chr10:21815648-21816521
  hypo

SEQ ID NO: 354531 - DNA, 277 bp, Homo sapiens; identical to SEQ ID NO: 340595
  chr10:22042735-22043012
  hypo

SEQ ID NO: 354532 - DNA, 91 bp, Homo sapiens
  chr10:22047245-22047336
  hypo
cgactaacaatctagctacagggaaagaagcctcaagagacactgtgttaggatcacaccctggggctctctgcagcgcctcatggccaga

SEQ ID NO: 354533 - DNA, 62 bp, Homo sapiens; identical to SEQ ID NO: 351007
  chr10:22540645-22540707
  hypo

SEQ ID NO: 354534 - DNA, 87 bp, Homo sapiens; identical to SEQ ID NO: 340601
  chr10:22883126-22883213
  hypo

SEQ ID NO: 354535 - DNA, 214 bp, Homo sapiens; identical to SEQ ID NO: 287005
  chr10:23001984-23002198
  hypo

SEQ ID NO: 354536 - DNA, 286 bp, Homo sapiens; identical to SEQ ID NO: 351010
  chr10:23002228-23002514
  hypo

SEQ ID NO: 354537 - DNA, 211 bp, Homo sapiens
  chr10:24841853-24842064
  hypo
aattcacattcagagacgagtcgtaccggggactcgaacgctgtgaatggctggtaatgtgacttttcccaaatagcgaatgacttggttgaaagctttgaacaaagcagaatacgactctccctcactttacacgttcctgaaaaattttattgcacattttgaggctgcaaaagtgtttaaatataaaataaaattggcctctacactc

SEQ ID NO: 354538 - DNA, 223 bp, Homo sapiens; identical to SEQ ID NO: 340607
  chr10:24863037-24863260
  hypo

SEQ ID NO: 354539 - DNA, 56 bp, Homo sapiens; identical to SEQ ID NO: 340612
  chr10:27144571-27144627
  hypo

SEQ ID NO: 354540 - DNA, 111 bp, Homo sapiens; identical to SEQ ID NO: 340617
  chr10:29581547-29581658
  hypo

SEQ ID NO: 354541 - DNA, 734 bp, Homo sapiens; identical to SEQ ID NO: 202032
  chr10:30024793-30025527
  hypo

SEQ ID NO: 354542 - DNA, 137 bp, Homo sapiens; identical to SEQ ID NO: 340620
  chr10:30736731-30736868
  hypo

SEQ ID NO: 354543 - DNA, 790 bp, Homo sapiens; identical to SEQ ID NO: 345352
  chr10:31607954-31608744
  hypo

SEQ ID NO: 354544 - DNA, 252 bp, Homo sapiens; identical to SEQ ID NO: 202037
  chr10:31609416-31609668
  hypo

SEQ ID NO: 354545 - DNA, 544 bp, Homo sapiens; identical to SEQ ID NO: 202046
  chr10:35103534-35104078
  hypo

SEQ ID NO: 354546 - DNA, 217 bp, Homo sapiens
  chr10:44163386-44163603
  hypo
cgcgagtggggtgggccgcgagcgggaggaacacgcacgtcccggggcggccggaggggccccgcttgcgcagggggttgtcagaagactcgcacgcggcaggaggcctggccgtgggtgcagagttcccagtaggacgcccacgaaaaaaacctaactcccattatgttctgtaattctagtctagcccctatttcatgcttgatagagagcagtc

SEQ ID NO: 354547 - DNA, 94 bp, Homo sapiens; identical to SEQ ID NO: 351040
  chr10:50606762-50606856
  hypo

SEQ ID NO: 354548 - DNA, 398 bp, Homo sapiens; identical to SEQ ID NO: 340646
  chr10:70184294-70184692
  hypo

SEQ ID NO: 354549 - DNA, 1236 bp, Homo sapiens; identical to SEQ ID NO: 333960
  chr10:71078140-71079376
  hypo

SEQ ID NO: 354550 - DNA, 643 bp, Homo sapiens; identical to SEQ ID NO: 351052
  chr10:71892158-71892801
  hypo

SEQ ID NO: 354551 - DNA, 323 bp, Homo sapiens; identical to SEQ ID NO: 347095
  chr10:72238261-72238584
  hypo

SEQ ID NO: 354552 - DNA, 162 bp, Homo sapiens; identical to SEQ ID NO: 340658
  chr10:73445891-73446053
  hypo

SEQ ID NO: 354553 - DNA, 238 bp, Homo sapiens; identical to SEQ ID NO: 340659
  chr10:73514960-73515198
  hypo

SEQ ID NO: 354554 - DNA, 134 bp, Homo sapiens; identical to SEQ ID NO: 340660
  chr10:73591528-73591662
  hypo

SEQ ID NO: 354555 - DNA, 412 bp, Homo sapiens; identical to SEQ ID NO: 345356
  chr10:74079281-74079693
  hypo

SEQ ID NO: 354556 - DNA, 179 bp, Homo sapiens; identical to SEQ ID NO: 345357
  chr10:74079752-74079931
  hypo

SEQ ID NO: 354557 - DNA, 38 bp, Homo sapiens
  chr10:74451119-74451157
  hypo
cgtgagccaccgcgcccggccttacatgattttttatt

SEQ ID NO: 354558 - DNA, 116 bp, Homo sapiens; identical to SEQ ID NO: 340667
  chr10:75574077-75574193
  hypo

SEQ ID NO: 354559 - DNA, 102 bp, Homo sapiens; identical to SEQ ID NO: 340668
  chr10:76287784-76287886
  hypo

SEQ ID NO: 354560 - DNA, 73 bp, Homo sapiens; identical to SEQ ID NO: 340671
  chr10:76966489-76966562
  hypo

SEQ ID NO: 354561 - DNA, 404 bp, Homo sapiens; identical to SEQ ID NO: 340672
  chr10:76998426-76998830
  hypo

SEQ ID NO: 354562 - DNA, 918 bp, Homo sapiens; identical to SEQ ID NO: 351062
  chr10:77160017-77160935
  hypo

SEQ ID NO: 354563 - DNA, 499 bp, Homo sapiens; identical to SEQ ID NO: 340677
  chr10:79601557-79602056
  hypo

SEQ ID NO: 354564 - DNA, 226 bp, Homo sapiens; identical to SEQ ID NO: 340681
  chr10:80855265-80855491
  hypo

SEQ ID NO: 354565 - DNA, 423 bp, Homo sapiens; identical to SEQ ID NO: 340682
  chr10:80878255-80878678
  hypo

SEQ ID NO: 354566 - DNA, 253 bp, Homo sapiens; identical to SEQ ID NO: 340683
  chr10:80921761-80922014
  hypo

SEQ ID NO: 354567 - DNA, 197 bp, Homo sapiens; identical to SEQ ID NO: 340688
  chr10:81036003-81036200
  hypo

SEQ ID NO: 354568 - DNA, 261 bp, Homo sapiens; identical to SEQ ID NO: 340689
  chr10:81050762-81051023
  hypo

SEQ ID NO: 354569 - DNA, 82 bp, Homo sapiens; identical to SEQ ID NO: 340690
  chr10:81060524-81060606
  hypo

SEQ ID NO: 354570 - DNA, 447 bp, Homo sapiens; identical to SEQ ID NO: 340691
  chr10:81063491-81063938
  hypo

SEQ ID NO: 354571 - DNA, 137 bp, Homo sapiens; identical to SEQ ID NO: 340693
  chr10:81142199-81142336
  hypo

SEQ ID NO: 354572 - DNA, 635 bp, Homo sapiens; identical to SEQ ID NO: 348435
  chr10:88441134-88441769
  hypo

SEQ ID NO: 354573 - DNA, 740 bp, Homo sapiens; identical to SEQ ID NO: 340696
  chr10:88702294-88703034
  hypo

SEQ ID NO: 354574 - DNA, 57 bp, Homo sapiens; identical to SEQ ID NO: 345362
  chr10:93647662-93647719
  hypo

SEQ ID NO: 354575 - DNA, 79 bp, Homo sapiens; identical to SEQ ID NO: 287325
  chr10:94449318-94449397
  hypo

SEQ ID NO: 354576 - DNA, 384 bp, Homo sapiens; identical to SEQ ID NO: 287332
  chr10:94833649-94834033
  hypo

SEQ ID NO: 354577 - DNA, 82 bp, Homo sapiens
  chr10:98364552-98364634
  hypo
cgccttgtaataaggggccggaccctttgacacaaaacaaaatgcaaagtacacactcaaaagtataattttttttttcccc

SEQ ID NO: 354578 - DNA, 32 bp, Homo sapiens; identical to SEQ ID NO: 340711
  chr10:98983004-98983036
  hypo

SEQ ID NO: 354579 - DNA, 107 bp, Homo sapiens; identical to SEQ ID NO: 340716
  chr10:100171106-100171213
  hypo

SEQ ID NO: 354580 - DNA, 42 bp, Homo sapiens
  chr10:103425908-103425950
  hypo
cgctcccacacacttagcctctccactccctgctggtctttc

SEQ ID NO: 354581 - DNA, 279 bp, Homo sapiens
  chr10:104416719-104416998
  hypo
cgcagcacttggtggccctgccgggcggcgcccaaccagtgcactcaagccccgtgttccccccatcgcagtatcccaatggctccgccgcccagcagcccatgctcccccagtatggcggccgcaagattctcgtctgttctgtggacaactgttactgttcttccgtggccaaccatggcggccaccagccctacccccgctccggccactttccctggacagtgccctcgcaggagtactcacacccgctcccgcccacaccctccgtcccccagt

SEQ ID NO: 354582 - DNA, 142 bp, Homo sapiens
  chr10:104417062-104417204
  hypo
ctacagggtgtatgggcagccgtccaccaaacactacgtgacgagctaacgccacgcaggcggcggggcgctggggaatcttcctccccagcccccgggctcgggagttatgcatccagagacctgcccttctaccttcctc

SEQ ID NO: 354583 - DNA, 124 bp, Homo sapiens; identical to SEQ ID NO: 340732
  chr10:105403473-105403597
  hypo

SEQ ID NO: 354584 - DNA, 722 bp, Homo sapiens; identical to SEQ ID NO: 351100
  chr10:106097237-106097959
  hypo

SEQ ID NO: 354585 - DNA, 165 bp, Homo sapiens; identical to SEQ ID NO: 351101
  chr10:106098025-106098190
  hypo

SEQ ID NO: 354586 - DNA, 737 bp, Homo sapiens; identical to SEQ ID NO: 334066
  chr10:111767130-111767867
  hypo

SEQ ID NO: 354587 - DNA, 37 bp, Homo sapiens; identical to SEQ ID NO: 351106
  chr10:112431835-112431872
  hypo

SEQ ID NO: 354588 - DNA, 235 bp, Homo sapiens; identical to SEQ ID NO: 202288
  chr10:112432125-112432360
  hypo

SEQ ID NO: 354589 - DNA, 164 bp, Homo sapiens; identical to SEQ ID NO: 340740
  chr10:114200406-114200570
  hypo

SEQ ID NO: 354590 - DNA, 65 bp, Homo sapiens; identical to SEQ ID NO: 340741
  chr10:114252654-114252719
  hypo

SEQ ID NO: 354591 - DNA, 98 bp, Homo sapiens
  chr10:116045880-116045978
  hypo
cggtgcctgtgggggagtaccaggatgtgcctgacctggtctggagcctcgatggcattcccttccgtggtggccccaccctgacgggcagtgccttg

SEQ ID NO: 354592 - DNA, 180 bp, Homo sapiens
  chr10:116046022-116046202
  hypo
ccaggaccggccacgtagagtggtggttttgctcactgagtcacactccgaggatgaggttgcgggcccagcgcgtcacgcaagggcgcgagagctgctcctgctgggtgtaggcagtgaggccgtgcgggcagagctggaggagatcacaggcagcccaaagcatgtgatggtctactc

SEQ ID NO: 354593 - DNA, 93 bp, Homo sapiens
  chr10:119807131-119807224
  hypo
tgtggtggactgtgcaaatcatgtggagaccatgccccaaacacgggtttcgagtttcaggggataatacatgtgcctttcctagcacaatgc

SEQ ID NO: 354594 - DNA, 79 bp, Homo sapiens; identical to SEQ ID NO: 340753
  chr10:120601836-120601915
  hypo

SEQ ID NO: 354595 - DNA, 239 bp, Homo sapiens
  chr10:121265805-121266044
  hypo
cgaagcagctcaagtcagcccttgccccagagcgccaggacgggccacacagaaggctctgtcgccttgcacggctctccagcttcacgacagaccagccagagatggacagtgtgccaggggtgggattggaactccagaaggagtctggacaccagcgggatcagagagacctcgcttggacgatatcccctcccaagctcacgggttcacgcgtgtggcggtcacacgtgtggagc

SEQ ID NO: 354596 - DNA, 131 bp, Homo sapiens; identical to SEQ ID NO: 347121
  chr10:121301363-121301494
  hypo

SEQ ID NO: 354597 - DNA, 760 bp, Homo sapiens; identical to SEQ ID NO: 345370
  chr10:121301911-121302671
  hypo

SEQ ID NO: 354598 - DNA, 43 bp, Homo sapiens; identical to SEQ ID NO: 340757
  chr10:121591491-121591534
  hypo

SEQ ID NO: 354599 - DNA, 137 bp, Homo sapiens; identical to SEQ ID NO: 340758
  chr10:121702253-121702390
  hypo

SEQ ID NO: 354600 - DNA, 271 bp, Homo sapiens
  chr10:125617057-125617328
  hypo
cgatggaaggcggcgtggagatggaaggcggcgtggagatggaaggcggcgtggagatggaaggcggcgtggagatggaaggcggcgtggagatggaaggcggcgtggagatggaaggcggcgtggagatggaaggcggcgtggagctgctgagttgaaggctagggcaaaacggagaagaacctgagcaatgcaccagcacaggccccactgacgccgaggaacaggaggcacagggcaccacgcacgggactccgcagcttccacgctc

SEQ ID NO: 354601 - DNA, 1193 bp, Homo sapiens; identical to SEQ ID NO: 334112
  chr10:126106668-126107861
  hypo

SEQ ID NO: 354602 - DNA, 48 bp, Homo sapiens; identical to SEQ ID NO: 340765
  chr10:126190228-126190276
  hypo

SEQ ID NO: 354603 - DNA, 358 bp, Homo sapiens; identical to SEQ ID NO: 340767
  chr10:126296075-126296433
  hypo

SEQ ID NO: 354604 - DNA, 69 bp, Homo sapiens
  chr10:126314669-126314738
  hypo
cgcccgaacgcgtgccagcgttttctgcgagctgtcatgtgaggggcctggggcgtggcctgctgcgag

SEQ ID NO: 354605 - DNA, 261 bp, Homo sapiens; identical to SEQ ID NO: 340776
  chr10:126767714-126767975
  hypo

SEQ ID NO: 354606 - DNA, 549 bp, Homo sapiens; identical to SEQ ID NO: 340777
  chr10:126771776-126772325
  hypo

SEQ ID NO: 354607 - DNA, 92 bp, Homo sapiens; identical to SEQ ID NO: 340778
  chr10:126775448-126775540
  hypo

SEQ ID NO: 354608 - DNA, 392 bp, Homo sapiens; identical to SEQ ID NO: 340780
  chr10:126819324-126819716
  hypo

SEQ ID NO: 354609 - DNA, 379 bp, Homo sapiens; identical to SEQ ID NO: 340782
  chr10:126830153-126830532
  hypo

SEQ ID NO: 354610 - DNA, 141 bp, Homo sapiens; identical to SEQ ID NO: 346009
  chr10:127451818-127451959
  hypo

SEQ ID NO: 354611 - DNA, 38 bp, Homo sapiens; identical to SEQ ID NO: 346010
  chr10:127452067-127452105
  hypo

SEQ ID NO: 354612 - DNA, 166 bp, Homo sapiens; identical to SEQ ID NO: 340791
  chr10:129242401-129242567
  hypo

SEQ ID NO: 354613 - DNA, 161 bp, Homo sapiens; identical to SEQ ID NO: 340796
  chr10:131566947-131567108
  hypo

SEQ ID NO: 354614 - DNA, 351 bp, Homo sapiens; identical to SEQ ID NO: 340797
  chr10:131638488-131638839
  hypo

SEQ ID NO: 354615 - DNA, 135 bp, Homo sapiens
  chr10:131987142-131987277
  hypo
cgagtggctcagccagggttcattaccaggctccggatcctgcttctcccggatcacagcaagcgctgtgcttaggcctggggtgggggacggattctccctgaaggcaggtctgacgcgggcgggagcacccac

SEQ ID NO: 354616 - DNA, 202 bp, Homo sapiens; identical to SEQ ID NO: 213827
  chr10:133783038-133783240
  hypo

SEQ ID NO: 354617 - DNA, 238 bp, Homo sapiens; identical to SEQ ID NO: 340810
  chr10:133834585-133834823
  hypo

SEQ ID NO: 354618 - DNA, 167 bp, Homo sapiens; identical to SEQ ID NO: 340821
  chr10:134298551-134298718
  hypo

SEQ ID NO: 354619 - DNA, 199 bp, Homo sapiens
  chr10:134477298-134477497
  hypo
cgctcctcttctgagccgtgagctgggcagggccgcgctcacatcattcctctccccctgtcgccgggtgggaaatccgtaacaggctctgtggcaaaggctgggccaaggtgcctcgtgggcagccgatccatcaggcggccgacaggcgtgatcgagtgccgtgtcacacgcagcccaggaaacaaacacgccgcgc

SEQ ID NO: 354620 - DNA, 591 bp, Homo sapiens
  chr10:134527015-134527606
  hypo
cgggtatatggccttggctctcctctgcatctggcccttgctgagggccctgaggcgtggccccttatcccctctgaccgcccctgacctccgtctccagagtgatggagccctggtcccctgccactagcctggtcccggggagggtggcaactgcgaggcctgggtgctgctgtgctcgtggccacacactgaggccggccctcagccctgtgcacggccacaccctctgcaggggacctgtccggcctcccggatatctctggagctggcactgacaccgaggcagggatcggtctgagcctggggactgtgctctcaactgcccaccgtagggaagcagcacaggtgggggatgggggcctggggctttgtcagcgacaaagtgactgatgaccgcctgtgccctgggcgccctccctggacagcatgtcagtcgcccagggagaagggcctcacccacaggagcggcgcggttcttcctgcctgatcagccctcggcttgcaggcaccaagcgtctcggggacctcccacggagcccaggagcagggagggccctgccgtgtctgctgttgggtcttggtgacagc

SEQ ID NO: 354621 - DNA, 345 bp, Homo sapiens
  chr10:134527839-134528184
  hypo
ccctttcaccgcggctgctaacctcttggcagccaccagcagaccacattctgctgtgcggatcgggcaggacaatgccgcgcggcctctgaatggacgctgccaccaacggggccccattcacggcgttgggaaccgggcgcacattgtctgccccgcagggagacagcgaggaggctcctgcagcctcttcctggtttaatctccccgcgcggcttcccaggtccatgtcccgtatcagctgcggggccggcagcaccaggcccaggagggagggcaggtcccagccctggaggaggatgcaggccaggttaaaacccagaggcaccgtaggaccttcgcacc

SEQ ID NO: 354622 - DNA, 252 bp, Homo sapiens; identical to SEQ ID NO: 348449
  chr10:134562467-134562719
  hypo

SEQ ID NO: 354623 - DNA, 324 bp, Homo sapiens; identical to SEQ ID NO: 313431
  chr10:134562783-134563107
  hypo

SEQ ID NO: 354624 - DNA, 417 bp, Homo sapiens
  chr10:134592912-134593329
  hypo
cgtcggaggtcacgcgagtgcagattggtgagcagcgcccaagggcagaaggctggcagggctgtggcctccccacattgtgctgccgctgccagggctccaccagctcagagcagggcagcgttgcagcccgttttccattcactcacagcctctcgggttctctggatccgggacttgacactttatgctcagggtgggggacagagcctcacaacacacacctggcggcctttgacagcccctgccttctggggctggagtttggacaggctctccccatggggccacccagtgggcagcgggtgtgcaggacaagcagacgggcgccgggcgcgctccgcagcctcatccatcatgacacgcgccgtcacctcgtcaccaagctccgttctgcctccggagccctaaaacacc

SEQ ID NO: 354625 - DNA, 134 bp, Homo sapiens
  chr10:134593416-134593550
  hypo
ccgtaatttgtttatctgtccaaagattatgcagttgaaaatccacaattttatgctgcctttgtaaattaccacgctgcgtttgatgaatgtttctccacttctgcggaggcgccgcttcacccgcgagaggc

SEQ ID NO: 354626 - DNA, 40 bp, Homo sapiens
  chr10:134610534-134610574
  hypo
cgtcaagcatgaacctggatgtgcctggcctggtcccggg

SEQ ID NO: 354627 - DNA, 242 bp, Homo sapiens; identical to SEQ ID NO: 313464
  chr10:134699406-134699648
  hypo

SEQ ID NO: 354628 - DNA, 230 bp, Homo sapiens; identical to SEQ ID NO: 313470
  chr10:134733835-134734065
  hypo

SEQ ID NO: 354629 - DNA, 288 bp, Homo sapiens
  chr10:134790715-134791003
  hypo
cggaggcgcggtcatcagccagggatgggttggcctcgtgcgcgtgccctgcgcggtgctgagatcagcccagcacgatgtctagcatgttctgcccgaaacacacgcctcagaagaaagcgccaggcaaactgaaggacgcgaagccgtgggccggcctgccgagatcctgaaacgcaggcagagccgagacgctcttcagagcacgggtgtgtggcggccgaacacagcacctgaccctgggcttagtcttggacttctggaagaaaccgcggaactggtgcaatc

SEQ ID NO: 354630 - DNA, 50 bp, Homo sapiens; identical to SEQ ID NO: 346011
  chr10:134793882-134793932
  hypo

SEQ ID NO: 354631 - DNA, 144 bp, Homo sapiens; identical to SEQ ID NO: 346012
  chr10:134793968-134794112
  hypo

SEQ ID NO: 354632 - DNA, 202 bp, Homo sapiens; identical to SEQ ID NO: 348453
  chr10:134794144-134794346
  hypo

SEQ ID NO: 354633 - DNA, 133 bp, Homo sapiens
  chr10:134796042-134796175
  hypo
tgatggtccagttgcctgcggaagtaggtctgtgcacagtggaccttttaaaagagacacgaaacctgggagggcctggccttccctctgtgcgctgctgctgtttgtctttttcctcagcttcccgttgttc

SEQ ID NO: 354634 - DNA, 386 bp, Homo sapiens
  chr10:134830248-134830634
  hypo
cgctgggcgagcaggccagggctgcccgtctccacctttgtgctggaccatttacaatcaaagcgcagcatcgagatacccaggaaagagccaggaacaggccaggaagctgctgccccaccactgaccccaccgctctccttccctccttccttcccgctgggctgggcacaggtggagctcaccgtcgtcccccttcatcccttggcccctccaaggctcaaggactggaggccgactgggcagcagacatgtcaccatcaccatgctccccgtcaccacgctccctgtcgccatggtcactgtcaccatgctccctgtcgccatgctccccctcgccacgctccctctcgccacgctccccgtcgccacggtccccgtcgcca

SEQ ID NO: 354635 - DNA, 79 bp, Homo sapiens
  chr10:134830671-134830750
  hypo
cgtcgccacggtccccgtcgccacgctccccgtcgccacgctccccgtcgccacgctccccatcgccacagtccctgtc

SEQ ID NO: 354636 - DNA, 120 bp, Homo sapiens
  chr10:134875690-134875810
  hypo
cgcatgaaaatagccagttccgggggctccgcacccgcgtagggggcgcgtcggtcctttccattttagctgcgtgggggagggtgttggcggcaccattgtgctttcattccacgtttc

SEQ ID NO: 354637 - DNA, 557 bp, Homo sapiens; identical to SEQ ID NO: 213891
  chr10:134941895-134942452
  hypo

SEQ ID NO: 354638 - DNA, 514 bp, Homo sapiens; identical to SEQ ID NO: 340870
  chr10:135120335-135120849
  hypo

SEQ ID NO: 354639 - DNA, 70 bp, Homo sapiens; identical to SEQ ID NO: 340872
  chr10:135125649-135125719
  hypo

SEQ ID NO: 354640 - DNA, 234 bp, Homo sapiens; identical to SEQ ID NO: 348456
  chr10:135153722-135153956
  hypo

SEQ ID NO: 354641 - DNA, 34 bp, Homo sapiens; identical to SEQ ID NO: 348457
  chr10:135154001-135154035
  hypo

SEQ ID NO: 354642 - DNA, 107 bp, Homo sapiens; identical to SEQ ID NO: 340874
  chr10:135229000-135229107
  hypo

SEQ ID NO: 354643 - DNA, 150 bp, Homo sapiens; identical to SEQ ID NO: 346014
  chr11:233062-233212
  hypo

SEQ ID NO: 354644 - DNA, 175 bp, Homo sapiens; identical to SEQ ID NO: 340879
  chr11:380592-380767
  hypo

SEQ ID NO: 354645 - DNA, 91 bp, Homo sapiens; identical to SEQ ID NO: 348459
  chr11:487212-487303
  hypo

SEQ ID NO: 354646 - DNA, 279 bp, Homo sapiens; identical to SEQ ID NO: 313597
  chr11:487548-487827
  hypo

SEQ ID NO: 354647 - DNA, 169 bp, Homo sapiens; identical to SEQ ID NO: 348461
  chr11:487857-488026
  hypo

SEQ ID NO: 354648 - DNA, 343 bp, Homo sapiens
  chr11:561903-562246
  hypo
cggggtcaggcaggccgggcaggtagagctgaagtgggacctggtggtccagctccatggtctcccccaaggagagtggggctggttgctgatcctttttgttcttcccaactcttcaagccaggtggacagagagtcggggggacataggctgaccttctcctcttcttcccaggccagactggccgctttgtgcttgtgcagcggcttcgggagaaggagcggcagttgctgccacaagagtgtccagtgggcgcccaggccacctgcggacagtttgccagcgatgtccagtttgtcctgaggcgcacagggcccagcctagctgggaggccctcctcag

SEQ ID NO: 354649 - DNA, 627 bp, Homo sapiens
  chr11:562884-563511
  hypo
ctgtcactcccccacccctgacgtgggcagatatgggggtcacagggtctgactcgggaggcaggtgagcccgcggacctgatcccctgtcactcccccacccctgacgtgggcagatacgggggtcacagggtcccactcgggaggcaggtgagcccggggacctgatcccctgtcactccccaacccctgacgtgggcagatatgggggtcacagggcccgaccagggaaagtgctccctccggagcacaagggctgtggagcccagtggctgtgcctcctaaggatctcatgtgtccccaggctcaggctcaggagctggaggagctgaaccgagagctccgtcagtgcaacctgcagcagttcatccagcagaccggggctgcgctgccaccgcccccacggcctgacaggggccctcctggcactcaggtcggagtggttctggggggaggctgggaggtgaggacctggcccagccccactccaagctgacttcccaacccacagggccctctgcctccagccagagaggagtccctcctgggcgctccctctgagtcccatgctggtgcccagcctaggccccgagggtatgtctgtgccccacctccccctggggcacc

SEQ ID NO: 354650 - DNA, 37 bp, Homo sapiens
  chr11:567195-567232
  hypo
cgggcagagggcagagccaggctgtatcgaggggcgg

SEQ ID NO: 354651 - DNA, 48 bp, Homo sapiens
  chr11:567262-567310
  hypo
ctcatccccagcacagaagtgctctgtagggccagctgaggacacccc

SEQ ID NO: 354652 - DNA, 171 bp, Homo sapiens; identical to SEQ ID NO: 340889
  chr11:591108-591279
  hypo

SEQ ID NO: 354653 - DNA, 110 bp, Homo sapiens
  chr11:763192-763302
  hypo
cgccctcacctgccccgccctcacctgcccccgccctcacccgcccccgccctcacccatccccgccctcaccgtccccgccctcacccgcccccgccctcacctgtccc

SEQ ID NO: 354654 - DNA, 62 bp, Homo sapiens
  chr11:764018-764080
  hypo
gatccctcccacctgtggggcgagctcatcttgggagacatgagggtgaagtagacctcaac

SEQ ID NO: 354655 - DNA, 38 bp, Homo sapiens
  chr11:823426-823464
  hypo
cgggtagtgaagggaggtggctgttgggggtgccaggg

SEQ ID NO: 354656 - DNA, 409 bp, Homo sapiens; identical to SEQ ID NO: 313646
  chr11:823494-823903
  hypo

SEQ ID NO: 354657 - DNA, 102 bp, Homo sapiens
  chr11:850444-850546
  hypo
cggagtcgctgccccggccaggcgttgggtgcggttgtggggatggtcccgggaggacccaagaccgctgctccggctaggagcctggactgggcgggtggg

SEQ ID NO: 354658 - DNA, 258 bp, Homo sapiens
  chr11:859386-859644
  hypo
ggctcacatgcaccccggctcacacgcaccccctctcacacgcaccccggctcacacgcacccccctcacacgcaccccgggctcacacgcaccccgggctcacacgcaccccgggctcacacgcaccccctcttacacgcaccccgggcccacatgcactccggctcacacacaccctcactcatgcaccccgggcccacacgcaccccagctcccatgtacccctgctcacatgcaccccagctcccatgcatccc

SEQ ID NO: 354659 - DNA, 157 bp, Homo sapiens
  chr11:1095394-1095551
  hypo
cgcagcatgtccgggcagctgaggccccaggcaccacttcctgctggtcgtctgagggccgaggcctccagcaacccttgggtgcagggtctgccgagccctccacattttcaccgtgccccgctgtgcctggcgaggtggctggctgcagtgaggt

SEQ ID NO: 354660 - DNA, 498 bp, Homo sapiens
  chr11:1103476-1103974
  hypo
cgcccacggcatcgtgggaaggtgctctcatccccaggaatgtccgggggtcccgggctcattctcctttccctctagggctccatcacattcatgcccaatggatgctgcaagacctgtgagtacagggcacagcctggggggtaggcagggtgggggcacaagggctggtgccctcagccccgcctggggtggctggaggctggacaacggcctctgggtgggcagtgagggctgggggctgaggccgagcctggggaggggacgcagcgagggagagcctcctcgaagatgtggaggccctgccctaagccgctgcccgctctccccaggcacccctcgcaatgagaccagggtgccctgctccaccgtccccgtcaccacggaggtttcgtacgccggctgcaccaagaccgtcctcatgaatcattgctccgggtcctgcgggacatttgtcatgtgagtcccaggctgggagtgtgcctggagggggtggtg

SEQ ID NO: 354661 - DNA, 65 bp, Homo sapiens
  chr11:1254274-1254339
  hypo
cgctacgcctacgtggtggatgcctgccagcccacttgccgcggcctgagtgaggccgacgtcac

SEQ ID NO: 354662 - DNA, 70 bp, Homo sapiens
  chr11:1254423-1254493
  hypo
ccaggagtgcccctgctacgctcacggcaccgtgctggctcctggagaggtggtgcacgacgagggcgcc

SEQ ID NO: 354663 - DNA, 182 bp, Homo sapiens
  chr11:1262998-1263180
  hypo
cgccgcagcctacgagtagcccggggctgaccagggctcccccggccagcaccacagcagtccccaccctctcagaaggactgacatcccccagatacacaagcacccttggtacagccaccacgggaggccccacgacgcctgcaggctccacagaacccactgtcccaggggtggccaca

SEQ ID NO: 354664 - DNA, 123 bp, Homo sapiens
  chr11:1263764-1263887
  hypo
ccccagtaccccagccaccagctccacggccacgccctcctcaactccggggacgacctggatcctcacaaagccgaccacaacagccactacgactgcgtccactggatccacggccacccc

SEQ ID NO: 354665 - DNA, 731 bp, Homo sapiens; identical to SEQ ID NO: 347133
  chr11:1410711-1411442
  hypo

SEQ ID NO: 354666 - DNA, 350 bp, Homo sapiens
  chr11:1466353-1466703
  hypo
cgtggcctgcgctgggtgcggggtgcgggcaggacgcaggaggcctccccgggctgggcacagggagagtggcaggatgaagggccccaggtgagggcgggcgtcccaccctcgcagccgcccaggcccggccggagctgatgagcgggtggcccgtcctgtgtccacagagggggcaagaatgagcccgaaccagagcagcccattcctcgcaaggtgcagatccgctcgctgcccagcctggaggacatcgaccccgacgtgctggacagcatgcactcactgggctgcttccgagaccgcaacaagctgctgcaggacctgctgtccgaggagtgcgtctggggctg

SEQ ID NO: 354667 - DNA, 104 bp, Homo sapiens
  chr11:1471460-1471564
  hypo
agcttgtcctgcccccaccgccccccgagccgcccttcgtggcccgccccctggccacctccacggagcccgaagcttgtgggagcgcctcgaggcctggacac

SEQ ID NO: 354668 - DNA, 227 bp, Homo sapiens
  chr11:1521171-1521398
  hypo
cgcacacgaatgttcacggcagctgcaagtgtgctggtcagaaaggagagaacctgcacacccaccatggggaggtgacacagtgcggcctcagcatccacggaccgcgcctcagccacagacaggagtggcctgggagacacgcggaacacggaagactcctacagcaagtgtgctgagtgacggaggccaggtgaacatcaggttcacactgtgattccgttcac

SEQ ID NO: 354669 - DNA, 189 bp, Homo sapiens; identical to SEQ ID NO: 340925
  chr11:1795707-1795896
  hypo

SEQ ID NO: 354670 - DNA, 150 bp, Homo sapiens; identical to SEQ ID NO: 340926
  chr11:1800836-1800986
  hypo

SEQ ID NO: 354671 - DNA, 400 bp, Homo sapiens; identical to SEQ ID NO: 340928
  chr11:1824649-1825049
  hypo

SEQ ID NO: 354672 - DNA, 450 bp, Homo sapiens; identical to SEQ ID NO: 340940
  chr11:2124971-2125421
  hypo

SEQ ID NO: 354673 - DNA, 380 bp, Homo sapiens; identical to SEQ ID NO: 348466
  chr11:2337172-2337552
  hypo

SEQ ID NO: 354674 - DNA, 285 bp, Homo sapiens; identical to SEQ ID NO: 351144
  chr11:2399038-2399323
  hypo

SEQ ID NO: 354675 - DNA, 401 bp, Homo sapiens; identical to SEQ ID NO: 351145
  chr11:2399399-2399800
  hypo

SEQ ID NO: 354676 - DNA, 558 bp, Homo sapiens; identical to SEQ ID NO: 340950
  chr11:2412921-2413479
  hypo

SEQ ID NO: 354677 - DNA, 55 bp, Homo sapiens; identical to SEQ ID NO: 340955
  chr11:2987095-2987150
  hypo

SEQ ID NO: 354678 - DNA, 93 bp, Homo sapiens
  chr11:3164459-3164552
  hypo
cggggggggcagaggaggcaggtgcggagcggggcagaggaggcaggtacagcccagtgcgtggaccagcgaccggctccaggggcccatggg

SEQ ID NO: 354679 - DNA, 716 bp, Homo sapiens; identical to SEQ ID NO: 340964
  chr11:3243313-3244029
  hypo

SEQ ID NO: 354680 - DNA, 103 bp, Homo sapiens; identical to SEQ ID NO: 348470
  chr11:3697491-3697594
  hypo

SEQ ID NO: 354681 - DNA, 129 bp, Homo sapiens; identical to SEQ ID NO: 351149
  chr11:8615887-8616016
  hypo

SEQ ID NO: 354682 - DNA, 60 bp, Homo sapiens; identical to SEQ ID NO: 287811
  chr11:9112971-9113031
  hypo

SEQ ID NO: 354683 - DNA, 121 bp, Homo sapiens; identical to SEQ ID NO: 348471
  chr11:9405271-9405392
  hypo

SEQ ID NO: 354684 - DNA, 68 bp, Homo sapiens; identical to SEQ ID NO: 340978
  chr11:9548334-9548402
  hypo

SEQ ID NO: 354685 - DNA, 309 bp, Homo sapiens; identical to SEQ ID NO: 340980
  chr11:9554672-9554981
  hypo

SEQ ID NO: 354686 - DNA, 151 bp, Homo sapiens; identical to SEQ ID NO: 340982
  chr11:10519332-10519483
  hypo

SEQ ID NO: 354687 - DNA, 83 bp, Homo sapiens; identical to SEQ ID NO: 340984
  chr11:11960229-11960312
  hypo

SEQ ID NO: 354688 - DNA, 287 bp, Homo sapiens; identical to SEQ ID NO: 202443
  chr11:12132212-12132499
  hypo

SEQ ID NO: 354689 - DNA, 357 bp, Homo sapiens; identical to SEQ ID NO: 340988
  chr11:12182020-12182377
  hypo

SEQ ID NO: 354690 - DNA, 372 bp, Homo sapiens; identical to SEQ ID NO: 340989
  chr11:12183631-12184003
  hypo

SEQ ID NO: 354691 - DNA, 78 bp, Homo sapiens; identical to SEQ ID NO: 340990
  chr11:12225829-12225907
  hypo

SEQ ID NO: 354692 - DNA, 251 bp, Homo sapiens; identical to SEQ ID NO: 340993
  chr11:12247662-12247913
  hypo

SEQ ID NO: 354693 - DNA, 97 bp, Homo sapiens; identical to SEQ ID NO: 340995
  chr11:12262569-12262666
  hypo

SEQ ID NO: 354694 - DNA, 180 bp, Homo sapiens; identical to SEQ ID NO: 340996
  chr11:12267687-12267867
  hypo

SEQ ID NO: 354695 - DNA, 352 bp, Homo sapiens; identical to SEQ ID NO: 340997
  chr11:12278228-12278580
  hypo

SEQ ID NO: 354696 - DNA, 141 bp, Homo sapiens; identical to SEQ ID NO: 340998
  chr11:12279396-12279537
  hypo

SEQ ID NO: 354697 - DNA, 301 bp, Homo sapiens; identical to SEQ ID NO: 340999
  chr11:12281112-12281413
  hypo

SEQ ID NO: 354698 - DNA, 434 bp, Homo sapiens; identical to SEQ ID NO: 341000
  chr11:12283321-12283755
  hypo

SEQ ID NO: 354699 - DNA, 202 bp, Homo sapiens; identical to SEQ ID NO: 351154
  chr11:13300232-13300434
  hypo

SEQ ID NO: 354700 - DNA, 1596 bp, Homo sapiens; identical to SEQ ID NO: 334182
  chr11:17034991-17036587
  hypo

SEQ ID NO: 354701 - DNA, 402 bp, Homo sapiens; identical to SEQ ID NO: 287888
  chr11:17742811-17743213
  hypo

SEQ ID NO: 354702 - DNA, 37 bp, Homo sapiens; identical to SEQ ID NO: 351163
  chr11:17743245-17743282
  hypo

SEQ ID NO: 354703 - DNA, 65 bp, Homo sapiens; identical to SEQ ID NO: 341009
  chr11:19247033-19247098
  hypo

SEQ ID NO: 354704 - DNA, 200 bp, Homo sapiens; identical to SEQ ID NO: 341010
  chr11:19256446-19256646
  hypo

SEQ ID NO: 354705 - DNA, 982 bp, Homo sapiens; identical to SEQ ID NO: 345379
  chr11:19733991-19734973
  hypo

SEQ ID NO: 354706 - DNA, 338 bp, Homo sapiens; identical to SEQ ID NO: 202485
  chr11:19735066-19735404
  hypo

SEQ ID NO: 354707 - DNA, 384 bp, Homo sapiens; identical to SEQ ID NO: 334231
  chr11:32851566-32851950
  hypo

SEQ ID NO: 354708 - DNA, 929 bp, Homo sapiens; identical to SEQ ID NO: 345384
  chr11:32915113-32916042
  hypo

SEQ ID NO: 354709 - DNA, 202 bp, Homo sapiens; identical to SEQ ID NO: 287979
  chr11:35439896-35440098
  hypo

SEQ ID NO: 354710 - DNA, 238 bp, Homo sapiens; identical to SEQ ID NO: 202513
  chr11:35440137-35440375
  hypo

SEQ ID NO: 354711 - DNA, 155 bp, Homo sapiens; identical to SEQ ID NO: 341033
  chr11:36476175-36476330
  hypo

SEQ ID NO: 354712 - DNA, 210 bp, Homo sapiens
  chr11:43543814-43544024
  hypo
cgtgtggatagacagtggcaacgacaacgtggacatcaaggctgccgcgagctcggaattgttgtgtgcaacatcccgtccggagccctggaagagacagccgactccaccgtctgcgacatcctcaatctgtaccggaggaacacgtgggtgtgccaggcactgcgggaagggacgtgggttcagagcatggagcaaatcctcgaggtg

SEQ ID NO: 354713 - DNA, 98 bp, Homo sapiens
  chr11:43544070-43544168
  hypo
gagctttggtcgcacgaggcaggcagttgcatttcaagccaaggcctttggattcagcgtcatattttatgacccctacttgcaggatgggatagaac

SEQ ID NO: 354714 - DNA, 142 bp, Homo sapiens; identical to SEQ ID NO: 341039
  chr11:44608911-44609053
  hypo

SEQ ID NO: 354715 - DNA, 151 bp, Homo sapiens; identical to SEQ ID NO: 341040
  chr11:44621715-44621866
  hypo

SEQ ID NO: 354716 - DNA, 237 bp, Homo sapiens; identical to SEQ ID NO: 341041
  chr11:44625100-44625337
  hypo

SEQ ID NO: 354717 - DNA, 457 bp, Homo sapiens; identical to SEQ ID NO: 341042
  chr11:44639755-44640212
  hypo

SEQ ID NO: 354718 - DNA, 495 bp, Homo sapiens; identical to SEQ ID NO: 341043
  chr11:44640545-44641040
  hypo

SEQ ID NO: 354719 - DNA, 278 bp, Homo sapiens; identical to SEQ ID NO: 351192
  chr11:44748906-44749184
  hypo

SEQ ID NO: 354720 - DNA, 606 bp, Homo sapiens; identical to SEQ ID NO: 341048
  chr11:46391523-46392129
  hypo

SEQ ID NO: 354721 - DNA, 117 bp, Homo sapiens; identical to SEQ ID NO: 348489
  chr11:46920042-46920159
  hypo

SEQ ID NO: 354722 - DNA, 106 bp, Homo sapiens; identical to SEQ ID NO: 348490
  chr11:47359237-47359343
  hypo

SEQ ID NO: 354723 - DNA, 365 bp, Homo sapiens; identical to SEQ ID NO: 341057
  chr11:57182515-57182880
  hypo

SEQ ID NO: 354724 - DNA, 46 bp, Homo sapiens
  chr11:57235458-57235504
  hypo
catttgtaccgctgccagctcagcagcctgcccggcaacatcttcc

SEQ ID NO: 354725 - DNA, 93 bp, Homo sapiens; identical to SEQ ID NO: 341062
  chr11:57580261-57580354
  hypo

SEQ ID NO: 354726 - DNA, 101 bp, Homo sapiens; identical to SEQ ID NO: 348491
  chr11:61036547-61036648
  hypo

SEQ ID NO: 354727 - DNA, 230 bp, Homo sapiens; identical to SEQ ID NO: 351201
  chr11:61062458-61062688
  hypo

SEQ ID NO: 354728 - DNA, 315 bp, Homo sapiens; identical to SEQ ID NO: 202562
  chr11:61276101-61276416
  hypo

SEQ ID NO: 354729 - DNA, 604 bp, Homo sapiens; identical to SEQ ID NO: 347160
  chr11:61347974-61348578
  hypo

SEQ ID NO: 354730 - DNA, 259 bp, Homo sapiens; identical to SEQ ID NO: 202565
  chr11:61595492-61595751
  hypo

SEQ ID NO: 354731 - DNA, 176 bp, Homo sapiens; identical to SEQ ID NO: 334274
  chr11:61659371-61659547
  hypo

SEQ ID NO: 354732 - DNA, 139 bp, Homo sapiens; identical to SEQ ID NO: 341076
  chr11:61662946-61663085
  hypo

SEQ ID NO: 354733 - DNA, 200 bp, Homo sapiens; identical to SEQ ID NO: 341078
  chr11:61668820-61669020
  hypo

SEQ ID NO: 354734 - DNA, 214 bp, Homo sapiens; identical to SEQ ID NO: 341079
  chr11:61672924-61673138
  hypo

SEQ ID NO: 354735 - DNA, 371 bp, Homo sapiens; identical to SEQ ID NO: 341080
  chr11:61673908-61674279
  hypo

SEQ ID NO: 354736 - DNA, 96 bp, Homo sapiens; identical to SEQ ID NO: 348497
  chr11:61674760-61674856
  hypo

SEQ ID NO: 354737 - DNA, 85 bp, Homo sapiens; identical to SEQ ID NO: 348498
  chr11:61675100-61675185
  hypo

SEQ ID NO: 354738 - DNA, 213 bp, Homo sapiens; identical to SEQ ID NO: 351207
  chr11:62369471-62369684
  hypo

SEQ ID NO: 354739 - DNA, 137 bp, Homo sapiens; identical to SEQ ID NO: 341083
  chr11:63325873-63326010
  hypo

SEQ ID NO: 354740 - DNA, 119 bp, Homo sapiens; identical to SEQ ID NO: 341084
  chr11:63431997-63432116
  hypo

SEQ ID NO: 354741 - DNA, 180 bp, Homo sapiens; identical to SEQ ID NO: 263582
  chr11:63562759-63562939
  hypo

SEQ ID NO: 354742 - DNA, 197 bp, Homo sapiens; identical to SEQ ID NO: 341086
  chr11:63675233-63675430
  hypo

SEQ ID NO: 354743 - DNA, 305 bp, Homo sapiens; identical to SEQ ID NO: 341094
  chr11:63885581-63885886
  hypo

SEQ ID NO: 354744 - DNA, 203 bp, Homo sapiens; identical to SEQ ID NO: 334283
  chr11:64015094-64015297
  hypo

SEQ ID NO: 354745 - DNA, 305 bp, Homo sapiens
  chr11:64129097-64129402
  hypo
cggctccacccggcaggctgtggactggtggagcctgggcatcttgctcttcgagctgctgacgggggcctcgcccttcaccctggagggcgagaggaacacgcaggctgaggtgtctcggtgagtagggctggacgtggagggcggccagagggctgcagggcctgcctgggcagggctgtgggtggggggcttgctgcccctgacacccccccaatcctcccagacggatcctgaagtgctcccctcccttcccccctcggatcgggcccgtggcgcaggacctgctgcagcggctgctttgt

SEQ ID NO: 354746 - DNA, 634 bp, Homo sapiens
  chr11:64135647-64136281
  hypo
cgcggtgatgaccgatgggctggaagcgcctggtgctggagaccggccaggtcgggcagcggtggccaggagcgctatgatgcaggtgggctgggctgggctgggttggggggaaattggttttaggagaggcctaggcccggggactctaggcctagatccaactggcgcccgcagcgtgagctcagcaaggtcctaagcctctccgacatggggcgtggcggggccgcggggctaccaggtgggacctctgacgcgccgccttcgccttcgccttcgccttcgcctccaggactcgcccttcttccagcagtacgagctggacctgcgggagcctgcgctgggccagggcagcttttctgtgtgtcgccgctgccgccagcgccagagcggccaggagttcgcagtcaagatcctcagtcgcaggtgggagggcccaggcgcgggcaggggtgggggtggcagagcgctgtcccgggggcggggccgaagcgcggcgaccgtaactccttctgctccgtcccccaggctggaggcgaacacgcagcgcgaagtggctgccctgcgcctgtgccagtcacaccccaacgtggtgaatctgcacgaggtgcatcacgaccaggtgatggcttcc

SEQ ID NO: 354747 - DNA, 549 bp, Homo sapiens; identical to SEQ ID NO: 345393
  chr11:64512349-64512898
  hypo

SEQ ID NO: 354748 - DNA, 395 bp, Homo sapiens; identical to SEQ ID NO: 314515
  chr11:64875426-64875821
  hypo

SEQ ID NO: 354749 - DNA, 189 bp, Homo sapiens
  chr11:64876158-64876347
  hypo
cgcctgggccaccacctgcagggtctccgggcggccttcctgggctgcctgacagacgtccgccaggcgctggcagcacctcgcgtggctgggaaggagggccctggcctggccgagttgctggccaatgtggccagctccatcctgagccacattaaggcctctctggcagcagtgcaccttttcacc

SEQ ID NO: 354750 - DNA, 389 bp, Homo sapiens
  chr11:64951346-64951735
  hypo
cggaggtcggtctcagttgccccatctgagaaaggagtgttcgctggggaaaacagatcagcacgtgtggccttctccacgtgtcaagcctcctatcccccaactcctcctgcgctttggcaaggtctgactgagcccagcagaaaagaaagactcgggattaagtctacgtaaaccagcttttcctgacggtgtgcccagggcccatttttcaagtcacaccaatcaattctcaatgagctgcctttgggagggacatgcccagcaaccctggatgagactctccagccttggaggccccagccctgcccgaaggactcttgggtgttccctccttctgcctggttagagagccccttaccctactctgtccttgcccgccttgcgcg

SEQ ID NO: 354751 - DNA, 190 bp, Homo sapiens
  chr11:64951894-64952084
  hypo
gtacccgccacccacactctccgcaacctgggctcctagggccgcctccaccccgccccgccccccgttgtcctggccccgacccctcagatggtacctcgagtccttggtcgcttctgaccccagacgccttcggccccgaccctgccctgggaaacgtggcctttgtggcatctcagaaacaaagccc

SEQ ID NO: 354752 - DNA, 297 bp, Homo sapiens; identical to SEQ ID NO: 348502
  chr11:64977165-64977462
  hypo

SEQ ID NO: 354753 - DNA, 52 bp, Homo sapiens; identical to SEQ ID NO: 348503
  chr11:64977534-64977586
  hypo

SEQ ID NO: 354754 - DNA, 443 bp, Homo sapiens; identical to SEQ ID NO: 341113
  chr11:65123957-65124400
  hypo

SEQ ID NO: 354755 - DNA, 893 bp, Homo sapiens
  chr11:65397153-65398046
  hypo
cgaggttggcaatggcctcgtcaccttccagctgcgtggccttgagttccggggtgagccgcaggaccaggctcgggtgggcaggcacagctcgggcctgatgtgggagctgtgttcaatagcacgtgcgaaggaggtccagtccagctctgtccaggctggcgggtggccttgggcaaggcactcctcctccctgggcctgcgtttcccagtctgagcaatgaggtggcagggtctcttggccaagccctgtgcctgccccaactttaggtcccagtgactctacaggtcactgcagtgagggcctgggcctggaggtctgagttctcacacccagcctgctctgtggtctcaggcttggcccatgggttgggcgccatgagtgagccagctccttcctctcaggaagacgtgtgtgttggatgcccgagagtgcagaggggccagaccgtgtccctgctccctcccgccctgcccttggatgctgggagttgggaggagaaaggcaggcgctctttcgtgaatcttggcatccaataaggttgactcccctggcgtccaagggggtgaatggcagcaggcctctgatgccatgttggtcactctcccaggacagggcaggtagggattgttctagcagcccctgactgcacacccctcctccacaggcacttactgccagcagcgcgaggtggaggctatcaccgagggtgtggaggaggacgagggctgttgctgctgtgaacctggccacctgccacgggtcctgtccttcaatgctgcctttgggcagcgctggctggcttgggaggtaacagccagcaagtacgtgctggagggctatagcattagtgacaataatgctgcctccatgctgcaggttttcgacctcc

SEQ ID NO: 354756 - DNA, 35 bp, Homo sapiens; identical to SEQ ID NO: 347164
  chr11:65553778-65553813
  hypo

SEQ ID NO: 354757 - DNA, 227 bp, Homo sapiens; identical to SEQ ID NO: 202605
  chr11:65554410-65554637
  hypo

SEQ ID NO: 354758 - DNA, 1028 bp, Homo sapiens; identical to SEQ ID NO: 351221
  chr11:65554723-65555751
  hypo

SEQ ID NO: 354759 - DNA, 167 bp, Homo sapiens; identical to SEQ ID NO: 346030
  chr11:65685172-65685339
  hypo

SEQ ID NO: 354760 - DNA, 288 bp, Homo sapiens; identical to SEQ ID NO: 351223
  chr11:66045216-66045504
  hypo

SEQ ID NO: 354761 - DNA, 1101 bp, Homo sapiens; identical to SEQ ID NO: 347167
  chr11:66079395-66080496
  hypo

SEQ ID NO: 354762 - DNA, 78 bp, Homo sapiens
  chr11:66410904-66410982
  hypo
cgtctgtttcttcaaggcaaacgaatgcacgtgcagttgtccaccagccggcttaggactgcgcccgggatgggagac

SEQ ID NO: 354763 - DNA, 356 bp, Homo sapiens; identical to SEQ ID NO: 214346
  chr11:66411012-66411368
  hypo

SEQ ID NO: 354764 - DNA, 141 bp, Homo sapiens; identical to SEQ ID NO: 348509
  chr11:66513646-66513787
  hypo

SEQ ID NO: 354765 - DNA, 338 bp, Homo sapiens; identical to SEQ ID NO: 314614
  chr11:66626187-66626525
  hypo

SEQ ID NO: 354766 - DNA, 284 bp, Homo sapiens; identical to SEQ ID NO: 348511
  chr11:66633455-66633739
  hypo

SEQ ID NO: 354767 - DNA, 185 bp, Homo sapiens; identical to SEQ ID NO: 348512
  chr11:66633833-66634018
  hypo

SEQ ID NO: 354768 - DNA, 112 bp, Homo sapiens; identical to SEQ ID NO: 351230
  chr11:66886029-66886141
  hypo

SEQ ID NO: 354769 - DNA, 329 bp, Homo sapiens; identical to SEQ ID NO: 341138
  chr11:67078663-67078992
  hypo

SEQ ID NO: 354770 - DNA, 71 bp, Homo sapiens
  chr11:67462547-67462618
  hypo
cgctttgtcctacctggccactttcctcacgggaatttaggcccctcttagcattggcgtgccggtataaa

SEQ ID NO: 354771 - DNA, 394 bp, Homo sapiens
  chr11:67462833-67463227
  hypo
ctctgtgaacagagtttatctggtccccgaggcagtgcaatgcaagcctattcgccgttttccacgttgctgagggtccgggtttattcatcacaacaggtaagtccggattcccagtccctgaggccaccgcagtaaggcagtggggcgcctccccttggtgggggggcgggaatcagagaccccgacccgaaggagactgggtgatcccagacgagcccccaagactgttagaaataaatccttattccccgatgtcacaaagaagaatcagcagacgaaaagcttcctcagcaaggtgatttttaccttctgcagaaagagtgctgcccgtccgcaatcctgccacgatcgcatacaaaataaaaaaggcactagaatatttatcccttac

SEQ ID NO: 354772 - DNA, 112 bp, Homo sapiens; identical to SEQ ID NO: 348513
  chr11:67781084-67781196
  hypo

SEQ ID NO: 354773 - DNA, 188 bp, Homo sapiens; identical to SEQ ID NO: 341144
  chr11:67850488-67850676
  hypo

SEQ ID NO: 354774 - DNA, 78 bp, Homo sapiens
  chr11:68133213-68133291
  hypo
ctggcgggaatgggttgcggccgccgggggtgccccagaaggaacctcggcaaacccgttcgaaatgatccacttggc

SEQ ID NO: 354775 - DNA, 71 bp, Homo sapiens
  chr11:68564274-68564345
  hypo
cgccgccccaccgtcctcgtcagacagcagcccgggcgggtggactcaccatggcataatagttgctgttc

SEQ ID NO: 354776 - DNA, 167 bp, Homo sapiens
  chr11:68564381-68564548
  hypo
tcctcccaccagtcgctcacctagtgggcgcaaacaccagacaaacccgcaggctcagcaggggccaggcaggctccctggcagcagcccagagccgcggggaagggcaggcagtgcttttggcagacatttcggcgtctaacaggggccattccagaacagggaac

SEQ ID NO: 354777 - DNA, 260 bp, Homo sapiens; identical to SEQ ID NO: 341153
  chr11:68822128-68822388
  hypo

SEQ ID NO: 354778 - DNA, 170 bp, Homo sapiens
  chr11:69206214-69206384
  hypo
cgggcgagctgaggaaaaggctcaggggctgacagatacagggactgagcgcggctaggatagccctactgagggagccagaggggccctggggagatgcctggcgggcccgtctcctagcgactgacgtcccgccaccccacgggccccttgtgctgggcactgcccac

SEQ ID NO: 354779 - DNA, 299 bp, Homo sapiens
  chr11:69206414-69206713
  hypo
gctgttctgcatgaataagcgccaggcctcttgccaattgtccccctcttaaaaggcagccccggcgaaaggccttttcaagtgggatcgcacagtgccacccaggccgggcgggcattgttttggggagccagggtcctgcttggccgccggggtcggggggcccacaaagcatggtgatggcggctccacgcactcagcgcagcagccctgcttattaatctgcaaaactcacaccgatgcctttggaggggagattgagtgaaaacgatgtccttaggggagtggcctttgcaggc

SEQ ID NO: 354780 - DNA, 267 bp, Homo sapiens; identical to SEQ ID NO: 341156
  chr11:69931095-69931362
  hypo

SEQ ID NO: 354781 - DNA, 297 bp, Homo sapiens; identical to SEQ ID NO: 341165
  chr11:70031529-70031826
  hypo

SEQ ID NO: 354782 - DNA, 302 bp, Homo sapiens; identical to SEQ ID NO: 341169
  chr11:71169280-71169582
  hypo

SEQ ID NO: 354783 - DNA, 189 bp, Homo sapiens; identical to SEQ ID NO: 341170
  chr11:71185648-71185837
  hypo

SEQ ID NO: 354784 - DNA, 521 bp, Homo sapiens; identical to SEQ ID NO: 348515
  chr11:71192127-71192648
  hypo

SEQ ID NO: 354785 - DNA, 169 bp, Homo sapiens; identical to SEQ ID NO: 348516
  chr11:71192889-71193058
  hypo

SEQ ID NO: 354786 - DNA, 835 bp, Homo sapiens; identical to SEQ ID NO: 341173
  chr11:71229615-71230450
  hypo

SEQ ID NO: 354787 - DNA, 751 bp, Homo sapiens; identical to SEQ ID NO: 341175
  chr11:71724337-71725088
  hypo

SEQ ID NO: 354788 - DNA, 731 bp, Homo sapiens; identical to SEQ ID NO: 341176
  chr11:71725587-71726318
  hypo

SEQ ID NO: 354789 - DNA, 63 bp, Homo sapiens
  chr11:73073669-73073732
  hypo
cccagagctggtgccctttgacagtgactctgacgatgagtcttcgcccagcccctcggggac

SEQ ID NO: 354790 - DNA, 87 bp, Homo sapiens; identical to SEQ ID NO: 341186
  chr11:73491527-73491614
  hypo

SEQ ID NO: 354791 - DNA, 284 bp, Homo sapiens; identical to SEQ ID NO: 348518
  chr11:73685845-73686129
  hypo

SEQ ID NO: 354792 - DNA, 233 bp, Homo sapiens; identical to SEQ ID NO: 341192
  chr11:74994376-74994609
  hypo

SEQ ID NO: 354793 - DNA, 133 bp, Homo sapiens; identical to SEQ ID NO: 348519
  chr11:75858240-75858373
  hypo

SEQ ID NO: 354794 - DNA, 40 bp, Homo sapiens; identical to SEQ ID NO: 341199
  chr11:76164370-76164410
  hypo

SEQ ID NO: 354795 - DNA, 135 bp, Homo sapiens
  chr11:76371492-76371627
  hypo
cgcccagttccagtgtctccagggcattgtggcttaagtcaaggagcatcaggcagggcagggagcctaagcgccgggcctcaaaggtccgcaagcagtttctgctgaggttcaggaagcacagggaggtcaggt

SEQ ID NO: 354796 - DNA, 71 bp, Homo sapiens
  chr11:76372236-76372307
  hypo
tcccagacaggtccagggaggtcacgcgtggcagggggcccaggccaccagcactcagcgcagtggccatc

SEQ ID NO: 354797 - DNA, 509 bp, Homo sapiens; identical to SEQ ID NO: 345399
  chr11:76381512-76382021
  hypo

SEQ ID NO: 354798 - DNA, 118 bp, Homo sapiens; identical to SEQ ID NO: 341203
  chr11:77383112-77383230
  hypo

SEQ ID NO: 354799 - DNA, 366 bp, Homo sapiens; identical to SEQ ID NO: 341204
  chr11:78534109-78534475
  hypo

SEQ ID NO: 354800 - DNA, 57 bp, Homo sapiens
  chr11:85906179-85906236
  hypo
cggccaccgagggggtcggggaggctgcgcaaggcggtgagccccggcagctggagc

SEQ ID NO: 354801 - DNA, 208 bp, Homo sapiens
  chr11:85906275-85906483
  hypo
agcacgaggaagagatggcagcagaggctggggaagccgtggcgtcccccatggacgacgggtttctgagcctggattcgccctcctatgtcccgtacagggacagaacagaatgggctgatacagatccagtgccgcagaatgatggccccaatcccgtggtccagatcatttatagtgacaaatttagagatgtttgattacttcc

SEQ ID NO: 354802 - DNA, 675 bp, Homo sapiens; identical to SEQ ID NO: 288384
  chr11:92930674-92931349
  hypo

SEQ ID NO: 354803 - DNA, 51 bp, Homo sapiens; identical to SEQ ID NO: 341212
  chr11:93425646-93425697
  hypo

SEQ ID NO: 354804 - DNA, 89 bp, Homo sapiens
  chr11:93911562-93911651
  hypo
cgatcctcctgtacctgcccccgctgttctggcgtttcgcagctgctcctcatatttgctcagacttgaagtttatcatggaagaactt

SEQ ID NO: 354805 - DNA, 81 bp, Homo sapiens
  chr11:93911800-93911881
  hypo
aaattctctgcccttctactgccagtctgggcccagagttctcattgctaggaggcggggcaggagtggaagcagggggac

SEQ ID NO: 354806 - DNA, 886 bp, Homo sapiens; identical to SEQ ID NO: 334351
  chr11:96122370-96123256
  hypo

SEQ ID NO: 354807 - DNA, 174 bp, Homo sapiens; identical to SEQ ID NO: 341217
  chr11:97588960-97589134
  hypo

SEQ ID NO: 354808 - DNA, 226 bp, Homo sapiens; identical to SEQ ID NO: 288422
  chr11:106889091-106889317
  hypo

SEQ ID NO: 354809 - DNA, 67 bp, Homo sapiens; identical to SEQ ID NO: 341222
  chr11:107931221-107931288
  hypo

SEQ ID NO: 354810 - DNA, 158 bp, Homo sapiens; identical to SEQ ID NO: 341223
  chr11:108031546-108031704
  hypo

SEQ ID NO: 354811 - DNA, 121 bp, Homo sapiens; identical to SEQ ID NO: 351255
  chr11:115374870-115374991
  hypo

SEQ ID NO: 354812 - DNA, 398 bp, Homo sapiens; identical to SEQ ID NO: 202729
  chr11:115375434-115375832
  hypo

SEQ ID NO: 354813 - DNA, 320 bp, Homo sapiens; identical to SEQ ID NO: 341237
  chr11:117073762-117074082
  hypo

SEQ ID NO: 354814 - DNA, 206 bp, Homo sapiens; identical to SEQ ID NO: 341239
  chr11:117076092-117076298
  hypo

SEQ ID NO: 354815 - DNA, 59 bp, Homo sapiens; identical to SEQ ID NO: 341240
  chr11:117188555-117188614
  hypo

SEQ ID NO: 354816 - DNA, 261 bp, Homo sapiens; identical to SEQ ID NO: 341246
  chr11:119506104-119506365
  hypo

SEQ ID NO: 354817 - DNA, 130 bp, Homo sapiens; identical to SEQ ID NO: 341247
  chr11:119506981-119507111
  hypo

SEQ ID NO: 354818 - DNA, 750 bp, Homo sapiens; identical to SEQ ID NO: 341248
  chr11:119535401-119536151
  hypo

SEQ ID NO: 354819 - DNA, 283 bp, Homo sapiens; identical to SEQ ID NO: 334379
  chr11:119587853-119588136
  hypo

SEQ ID NO: 354820 - DNA, 223 bp, Homo sapiens; identical to SEQ ID NO: 351261
  chr11:120110626-120110849
  hypo

SEQ ID NO: 354821 - DNA, 155 bp, Homo sapiens; identical to SEQ ID NO: 351262
  chr11:120110967-120111122
  hypo

SEQ ID NO: 354822 - DNA, 150 bp, Homo sapiens
  chr11:120998452-120998602
  hypo
cgcgtcagtgtccacagtgcagtgcccgagcttcagccactactccgtgtgcacaagcagctgccccgacacatgctccgacctgacggcctcgcggaactgcgccacgccgtgcacagagggctgcgagtgcaaccagggcttcgtcct

SEQ ID NO: 354823 - DNA, 210 bp, Homo sapiens
  chr11:120998833-120999043
  hypo
ccagaaccaggtgctgcacacctttgacggcgcctcctacgccttcccctccgagttctcctacaccctcctgaagacctgccctgagcgcccagagtacttggaaatcgacatcaacaagaagaagcccgatgcaggacctgcttggctgcggggacttcggatcctggtggccgaccaggaggtcaagataggaggcatcggggcttc

SEQ ID NO: 354824 - DNA, 151 bp, Homo sapiens
  chr11:121023460-121023611
  hypo
cggcagacctcctggctcctgcctctccccgtgcctttcatctccctgagtaggtgagcaatggccatgagaaaaccctcctcggtgccttgtgatcgtgcgagtcttgacttgtctctcttgttccagctgtcacctgccctccaaacag

SEQ ID NO: 354825 - DNA, 171 bp, Homo sapiens; identical to SEQ ID NO: 341268
  chr11:124071504-124071675
  hypo

SEQ ID NO: 354826 - DNA, 268 bp, Homo sapiens; identical to SEQ ID NO: 341271
  chr11:124794665-124794933
  hypo

SEQ ID NO: 354827 - DNA, 135 bp, Homo sapiens; identical to SEQ ID NO: 345403
  chr11:128391758-128391893
  hypo

SEQ ID NO: 354828 - DNA, 623 bp, Homo sapiens; identical to SEQ ID NO: 345404
  chr11:128392116-128392739
  hypo

SEQ ID NO: 354829 - DNA, 543 bp, Homo sapiens; identical to SEQ ID NO: 345405
  chr11:129148497-129149040
  hypo

SEQ ID NO: 354830 - DNA, 820 bp, Homo sapiens; identical to SEQ ID NO: 345406
  chr11:129149096-129149916
  hypo

SEQ ID NO: 354831 - DNA, 125 bp, Homo sapiens; identical to SEQ ID NO: 341281
  chr11:129803851-129803976
  hypo

SEQ ID NO: 354832 - DNA, 181 bp, Homo sapiens
  chr11:129993371-129993552
  hypo
cggccaccgggcctccaggctccgtccagtctcaggcctcccccagcccatcccccagctcgccagcctgtagcattttgaagcatttgacgtcactgcctctgtcctgctgacactctgaccattttcacacagctgtctgctcccaggaggcgatgacggggccctgccgggccgtgat

SEQ ID NO: 354833 - DNA, 176 bp, Homo sapiens
  chr11:129993759-129993935
  hypo
gtggtgtccctgcccactcgggtgtttgctgtcggtcgtcttcccctcatctttgtgctttctagatctaggctttgctctcctgccggcagtggtaagctcagttctcgtgtcctgtgctcaccgtgtgtctggtggtgcttggtggtgatggtgcgtacccaccttggtatagc

SEQ ID NO: 354834 - DNA, 129 bp, Homo sapiens
  chr11:130079199-130079328
  hypo
cgcggattacccgtttgtcagccccgggcatctgggctgttccagagttttctagtccaatgacccgtggggagcgtctcgaatgacgctgccctcgaagcagcccggctctcagccccgtcctgccct

SEQ ID NO: 354835 - DNA, 430 bp, Homo sapiens
  chr11:130079388-130079818
  hypo
cacctgcgagaacctcctgccgcagcagatcacgccgcgcatgatgtgcgtgggcttcctcagcggcggcgtggactcctgccaggtggcccccggggcaggagggcggcaggtgggccccgggagaggcgggactggggactcacggcagggcttgtctccgcccagggtgattccgggggacccctgtccagcgtggaggcggatgggcggatcttccaggccggtgtggtgagctggggagacggctgcgctcagaggaacaagccaggcgtgtacacaaggctccctctgtttcgggactggatcaaagagaacactggggtataggggccggggccacccaaatgtgtacacctgcggggccacccatcgtccaccccagtgtgcacgcctgcaggctggagactggaccgctgactgcaccagc

SEQ ID NO: 354836 - DNA, 37 bp, Homo sapiens
  chr11:130089793-130089830
  hypo
cgtctgtttgccaggccttgttctaggaaccaggagt

SEQ ID NO: 354837 - DNA, 112 bp, Homo sapiens
  chr11:130089881-130089993
  hypo
ggaagggacgcgcatggcaagctcctgcctcgcatccccacgcaccgagagccctcctgcctgcacgtctaccacaggcggaaggagggaaccttccagaggcagagggtac

SEQ ID NO: 354838 - DNA, 123 bp, Homo sapiens; identical to SEQ ID NO: 346038
  chr11:130781427-130781550
  hypo

SEQ ID NO: 354839 - DNA, 66 bp, Homo sapiens
  chr11:130785392-130785458
  hypo
cgctcatccttctccgaagctcctggaccaaccctttcatggctgcctccatttcttcctcaaagg

SEQ ID NO: 354840 - DNA, 902 bp, Homo sapiens
  chr11:133734500-133735402
  hypo
cgcctgatcccacgccgccactcacagacccttcgttgaccggcagcattgaacaggaaaaaaaaaaaaagatgaaaacacagaaaaccccaaaaacccagacggggagacgatgtggggaagagaacgtgctgggagcctcagtagccagtctcctcctcgtagtaagcggaatattcaggggcctctccagggccaggacggtcgcctgcacccgagggagccccatcggccactgggccttgcgggcagtacttggggtcgtatatctgccggcccaggccaaagacctggccgctctggttggcgccctgcgcgtagcccatctgcagggacatgaaagagttgttacacttgtcggttcccagcttggtgtcatagatgtaccgccgggtcccgggagccgtcgtgcccacctggctggcacacttgtttgcacccatctggaggctgatggtcgagcggtccatggggggcaatacgtggttcttggggtcatagagatgcctcctcgtgctgtacgcggtcatgcgggactggctggtgcatttgtgggtgcccatctgcagcccgatgacgcactggcgggcattcatggtggcgtcctcaaagtcccactcctgcttctccgagtgcgtgtcaccgatgtccgcccctctctgcggccccttagtcttggccttccctgccagggcgagaagagacacctgcacctgcatcgtgttcccactctcagacaggtcgttggcctcaaacaggtccacggggttcatgccgtaggttttctagctggtgccagttctgcacggagcggttgatcttggggtctgagcccggctgcagcttgttcatgagtgtgcgtaagataatccaatccttcaggccctaatggaagtcgggac

SEQ ID NO: 354841 - DNA, 720 bp, Homo sapiens; identical to SEQ ID NO: 341294
  chr11:133790547-133791267
  hypo

SEQ ID NO: 354842 - DNA, 161 bp, Homo sapiens; identical to SEQ ID NO: 345407
  chr11:133939437-133939598
  hypo

SEQ ID NO: 354843 - DNA, 73 bp, Homo sapiens; identical to SEQ ID NO: 351280
  chr11:134281810-134281883
  hypo

SEQ ID NO: 354844 - DNA, 258 bp, Homo sapiens
  chr11:134458219-134458477
  hypo
cgagtgctgcatctgcgatgtgaacctgtgctggattccctgctgagagctgcacctgtgatgtgaacctgtgctggattccgtgccgagagctgcacctgcgatgtgaacctgtgctggattccctgctgagagctgcacctgcgatgtgaacctgtgctggattccctgccacgtgctgcacctgcgatgtgaacctctgctggattccctgccgagtgctgcacctgcgatgtgaacctgtgctggattccctgc

SEQ ID NO: 354845 - DNA, 133 bp, Homo sapiens; identical to SEQ ID NO: 351281
  chr12:708894-709027
  hypo

SEQ ID NO: 354846 - DNA, 182 bp, Homo sapiens; identical to SEQ ID NO: 351282
  chr12:709062-709244
  hypo

SEQ ID NO: 354847 - DNA, 209 bp, Homo sapiens; identical to SEQ ID NO: 341308
  chr12:939108-939317
  hypo

SEQ ID NO: 354848 - DNA, 235 bp, Homo sapiens; identical to SEQ ID NO: 351283
  chr12:1639655-1639890
  hypo

SEQ ID NO: 354849 - DNA, 344 bp, Homo sapiens; identical to SEQ ID NO: 288628
  chr12:1639977-1640321
  hypo

SEQ ID NO: 354850 - DNA, 273 bp, Homo sapiens; identical to SEQ ID NO: 351285
  chr12:1640476-1640749
  hypo

SEQ ID NO: 354851 - DNA, 454 bp, Homo sapiens; identical to SEQ ID NO: 341312
  chr12:1943616-1944070
  hypo

SEQ ID NO: 354852 - DNA, 155 bp, Homo sapiens; identical to SEQ ID NO: 341313
  chr12:1992067-1992222
  hypo

SEQ ID NO: 354853 - DNA, 94 bp, Homo sapiens; identical to SEQ ID NO: 346040
  chr12:2017667-2017761
  hypo

SEQ ID NO: 354854 - DNA, 213 bp, Homo sapiens; identical to SEQ ID NO: 214702
  chr12:2017874-2018087
  hypo

SEQ ID NO: 354855 - DNA, 75 bp, Homo sapiens
  chr12:2023599-2023674
  hypo
cgcagaggccacagccctttcaccttctacggcccgagcagcttccagggccctgcacgtgccctccaagtctcc

SEQ ID NO: 354856 - DNA, 248 bp, Homo sapiens; identical to SEQ ID NO: 341322
  chr12:2788614-2788862
  hypo

SEQ ID NO: 354857 - DNA, 120 bp, Homo sapiens; identical to SEQ ID NO: 341327
  chr12:3030601-3030721
  hypo

SEQ ID NO: 354858 - DNA, 773 bp, Homo sapiens; identical to SEQ ID NO: 351295
  chr12:3186287-3187060
  hypo

SEQ ID NO: 354859 - DNA, 198 bp, Homo sapiens; identical to SEQ ID NO: 347198
  chr12:3600534-3600732
  hypo

SEQ ID NO: 354860 - DNA, 396 bp, Homo sapiens; identical to SEQ ID NO: 288660
  chr12:3601625-3602021
  hypo

SEQ ID NO: 354861 - DNA, 85 bp, Homo sapiens; identical to SEQ ID NO: 345410
  chr12:4377809-4377894
  hypo

SEQ ID NO: 354862 - DNA, 244 bp, Homo sapiens; identical to SEQ ID NO: 202837
  chr12:4378558-4378802
  hypo

SEQ ID NO: 354863 - DNA, 284 bp, Homo sapiens; identical to SEQ ID NO: 202839
  chr12:4380196-4380480
  hypo

SEQ ID NO: 354864 - DNA, 113 bp, Homo sapiens
  chr12:4734902-4735015
  hypo
agaggagagagaagagaaggttgtagggatggtctttttaattcccgcacttcagtgtgaagcatctggggtaagtgtgcgtgttctccagactcaaaccctccctttggcgc

SEQ ID NO: 354865 - DNA, 466 bp, Homo sapiens; identical to SEQ ID NO: 341346
  chr12:5603587-5604053
  hypo

SEQ ID NO: 354866 - DNA, 99 bp, Homo sapiens
  chr12:6686943-6687042
  hypo
cgctcaccttaaaccttcgagctagaaatttattcttgatctctaagaaattgccacggttcatttcacccttgaaaggctcattgaggatggcatagc

SEQ ID NO: 354867 - DNA, 267 bp, Homo sapiens
  chr12:7858581-7858848
  hypo
cggggctgctcgactccgtcgtgcccccttgggcttccactgcaggaatgcaaggcgggtaaccttcaaagccaggtggaaacgtccggtttgaaccgcacatatgctagggtggagagtgagaacgaatgcaaagagaggctagcgttggggtggggctgccggggcaaagggacaggcccgggggaggcccgggccgccacggttagaaagcatggaaagagcttaagtaaaatagctgcgtgtcggcagggcgcggtggctcac

SEQ ID NO: 354868 - DNA, 55 bp, Homo sapiens; identical to SEQ ID NO: 345416
  chr12:8123528-8123583
  hypo

SEQ ID NO: 354869 - DNA, 231 bp, Homo sapiens; identical to SEQ ID NO: 214776
  chr12:8757695-8757926
  hypo

SEQ ID NO: 354870 - DNA, 162 bp, Homo sapiens
  chr12:8757966-8758128
  hypo
cacagtcgtagcaggggctccaggaggtgaaccaggtgacgcggtagcagcggccagggtctaggtcccagtccgagatgtagcggaggaagagcaattccacgtggcagccgttctggagagacagagaggaccacgctaaaattcactgacttttattgc

SEQ ID NO: 354871 - DNA, 215 bp, Homo sapiens; identical to SEQ ID NO: 341359
  chr12:9108820-9109035
  hypo

SEQ ID NO: 354872 - DNA, 156 bp, Homo sapiens; identical to SEQ ID NO: 341362
  chr12:12605374-12605530
  hypo

SEQ ID NO: 354873 - DNA, 86 bp, Homo sapiens
  chr12:13215310-13215396
  hypo
tgaaaaaaactgggatttgagttaactgtagaactgaagccatctggaaaacttcctatgatgctgtggtgcttacttatgtgacc

SEQ ID NO: 354874 - DNA, 804 bp, Homo sapiens; identical to SEQ ID NO: 351321
  chr12:15941918-15942722
  hypo

SEQ ID NO: 354875 - DNA, 73 bp, Homo sapiens; identical to SEQ ID NO: 345418
  chr12:19282260-19282333
  hypo

SEQ ID NO: 354876 - DNA, 840 bp, Homo sapiens; identical to SEQ ID NO: 202900
  chr12:19282363-19283203
  hypo

SEQ ID NO: 354877 - DNA, 249 bp, Homo sapiens; identical to SEQ ID NO: 202901
  chr12:19283425-19283674
  hypo

SEQ ID NO: 354878 - DNA, 117 bp, Homo sapiens; identical to SEQ ID NO: 347220
  chr12:21681020-21681137
  hypo

SEQ ID NO: 354879 - DNA, 118 bp, Homo sapiens; identical to SEQ ID NO: 347221
  chr12:22488705-22488823
  hypo

SEQ ID NO: 354880 - DNA, 252 bp, Homo sapiens; identical to SEQ ID NO: 202912
  chr12:24715505-24715757
  hypo

SEQ ID NO: 354881 - DNA, 45 bp, Homo sapiens
  chr12:25344059-25344104
  hypo
cgcaaagtagcctcacacggtggctcactcctgtaatagcattcg

SEQ ID NO: 354882 - DNA, 83 bp, Homo sapiens; identical to SEQ ID NO: 346049
  chr12:29373882-29373965
  hypo

SEQ ID NO: 354883 - DNA, 263 bp, Homo sapiens; identical to SEQ ID NO: 341382
  chr12:31255691-31255954
  hypo

SEQ ID NO: 354884 - DNA, 34 bp, Homo sapiens; identical to SEQ ID NO: 214842
  chr12:32831540-32831574
  hypo

SEQ ID NO: 354885 - DNA, 316 bp, Homo sapiens; identical to SEQ ID NO: 351334
  chr12:33049652-33049968
  hypo

SEQ ID NO: 354886 - DNA, 76 bp, Homo sapiens; identical to SEQ ID NO: 351335
  chr12:40618264-40618340
  hypo

SEQ ID NO: 354887 - DNA, 35 bp, Homo sapiens; identical to SEQ ID NO: 351336
  chr12:40619048-40619083
  hypo

SEQ ID NO: 354888 - DNA, 237 bp, Homo sapiens; identical to SEQ ID NO: 214866
  chr12:47628809-47629046
  hypo

SEQ ID NO: 354889 - DNA, 141 bp, Homo sapiens; identical to SEQ ID NO: 214867
  chr12:47629208-47629349
  hypo

SEQ ID NO: 354890 - DNA, 111 bp, Homo sapiens; identical to SEQ ID NO: 214868
  chr12:47629379-47629490
  hypo

SEQ ID NO: 354891 - DNA, 243 bp, Homo sapiens; identical to SEQ ID NO: 348555
  chr12:47629544-47629787
  hypo

SEQ ID NO: 354892 - DNA, 181 bp, Homo sapiens; identical to SEQ ID NO: 351339
  chr12:48299205-48299386
  hypo

SEQ ID NO: 354893 - DNA, 32 bp, Homo sapiens; identical to SEQ ID NO: 288870
  chr12:48299387-48299419
  hypo

SEQ ID NO: 354894 - DNA, 42 bp, Homo sapiens; identical to SEQ ID NO: 351341
  chr12:48299465-48299507
  hypo

SEQ ID NO: 354895 - DNA, 493 bp, Homo sapiens; identical to SEQ ID NO: 202958
  chr12:48576976-48577469
  hypo

SEQ ID NO: 354896 - DNA, 97 bp, Homo sapiens; identical to SEQ ID NO: 341398
  chr12:49065604-49065701
  hypo

SEQ ID NO: 354897 - DNA, 60 bp, Homo sapiens; identical to SEQ ID NO: 202964
  chr12:49364178-49364238
  hypo

SEQ ID NO: 354898 - DNA, 165 bp, Homo sapiens
  chr12:49416380-49416545
  hypo
cgtagattttctcccgccggttggccacctcgttccgaatgatggtgccaatgtactcgataaccattgtgtgcttttctaggtccttggctgcatagagccccaggccctggatacgggagcgagccaggtacacgttgttcttccattcggtgcgcagccgcc

SEQ ID NO: 354899 - DNA, 221 bp, Homo sapiens; identical to SEQ ID NO: 341401
  chr12:49422776-49422997
  hypo

SEQ ID NO: 354900 - DNA, 43 bp, Homo sapiens
  chr12:49989816-49989859
  hypo
acttagagaaacaggccattaggaatccattctcactgtgttc

SEQ ID NO: 354901 - DNA, 37 bp, Homo sapiens; identical to SEQ ID NO: 348557
  chr12:51421646-51421683
  hypo

SEQ ID NO: 354902 - DNA, 39 bp, Homo sapiens
  chr12:52387815-52387854
  hypo
cggcgcagcccgcctgacggccctgcgcatcaagaagac

SEQ ID NO: 354903 - DNA, 144 bp, Homo sapiens; identical to SEQ ID NO: 341417
  chr12:53007462-53007606
  hypo

SEQ ID NO: 354904 - DNA, 172 bp, Homo sapiens; identical to SEQ ID NO: 341421
  chr12:53474309-53474481
  hypo

SEQ ID NO: 354905 - DNA, 193 bp, Homo sapiens; identical to SEQ ID NO: 351361
  chr12:53719360-53719553
  hypo

SEQ ID NO: 354906 - DNA, 114 bp, Homo sapiens; identical to SEQ ID NO: 341425
  chr12:54122178-54122292
  hypo

SEQ ID NO: 354907 - DNA, 57 bp, Homo sapiens; identical to SEQ ID NO: 351363
  chr12:54144782-54144839
  hypo

SEQ ID NO: 354908 - DNA, 103 bp, Homo sapiens; identical to SEQ ID NO: 351368
  chr12:54393256-54393359
  hypo

SEQ ID NO: 354909 - DNA, 278 bp, Homo sapiens; identical to SEQ ID NO: 347234
  chr12:54427358-54427636
  hypo

SEQ ID NO: 354910 - DNA, 136 bp, Homo sapiens; identical to SEQ ID NO: 341435
  chr12:56183329-56183465
  hypo

SEQ ID NO: 354911 - DNA, 359 bp, Homo sapiens; identical to SEQ ID NO: 346055
  chr12:56558022-56558381
  hypo

SEQ ID NO: 354912 - DNA, 172 bp, Homo sapiens; identical to SEQ ID NO: 341440
  chr12:57625988-57626160
  hypo

SEQ ID NO: 354913 - DNA, 171 bp, Homo sapiens; identical to SEQ ID NO: 341443
  chr12:58263143-58263314
  hypo

SEQ ID NO: 354914 - DNA, 111 bp, Homo sapiens
  chr12:69999239-69999350
  hypo
cgaataatagaagtcaacaaaatactctgtacaaaaccctttataaaagtctgctgtgtgccgtattagcatattagatcaatagaagatattaagagaacctttttaaaa

SEQ ID NO: 354915 - DNA, 91 bp, Homo sapiens; identical to SEQ ID NO: 341456
  chr12:76878986-76879077
  hypo

SEQ ID NO: 354916 - DNA, 259 bp, Homo sapiens; identical to SEQ ID NO: 341458
  chr12:77216021-77216280
  hypo

SEQ ID NO: 354917 - DNA, 385 bp, Homo sapiens; identical to SEQ ID NO: 203112
  chr12:81330352-81330737
  hypo

SEQ ID NO: 354918 - DNA, 39 bp, Homo sapiens
  chr12:90313473-90313512
  hypo
cggtgagaggtactgggcgatgaggaagtacagctccaa

SEQ ID NO: 354919 - DNA, 264 bp, Homo sapiens; identical to SEQ ID NO: 347242
  chr12:93966037-93966301
  hypo

SEQ ID NO: 354920 - DNA, 104 bp, Homo sapiens; identical to SEQ ID NO: 351397
  chr12:94541793-94541897
  hypo

SEQ ID NO: 354921 - DNA, 1131 bp, Homo sapiens; identical to SEQ ID NO: 289236
  chr12:94541957-94543088
  hypo

SEQ ID NO: 354922 - DNA, 86 bp, Homo sapiens; identical to SEQ ID NO: 345430
  chr12:94544052-94544138
  hypo

SEQ ID NO: 354923 - DNA, 348 bp, Homo sapiens; identical to SEQ ID NO: 203159
  chr12:104851545-104851893
  hypo

SEQ ID NO: 354924 - DNA, 178 bp, Homo sapiens; identical to SEQ ID NO: 341481
  chr12:109050967-109051145
  hypo

SEQ ID NO: 354925 - DNA, 159 bp, Homo sapiens
  chr12:109970799-109970958
  hypo
cgggctccctctgttcgcaccacgtgcagtgggtgccaccagcctccgcctcgccctcaccgtctcccattttctcctcacatggtctctctgtgggagggtgtcagctgctgctctgttcctcttaacaatcccacaggagacctgcctctcggggac

SEQ ID NO: 354926 - DNA, 149 bp, Homo sapiens; identical to SEQ ID NO: 341488
  chr12:110019861-110020010
  hypo

SEQ ID NO: 354927 - DNA, 634 bp, Homo sapiens; identical to SEQ ID NO: 316194
  chr12:110352780-110353414
  hypo

SEQ ID NO: 354928 - DNA, 113 bp, Homo sapiens
  chr12:110783979-110784092
  hypo
cgtgacacgtcttccctgtgtgtcagctcatcttccagatcacaccgctgaacgtgacccagtggctgatggtgctgaaaatctccttgcccgtgattctcatggatgagacg

SEQ ID NO: 354929 - DNA, 113 bp, Homo sapiens; identical to SEQ ID NO: 341495
  chr12:110784858-110784971
  hypo

SEQ ID NO: 354930 - DNA, 114 bp, Homo sapiens; identical to SEQ ID NO: 341496
  chr12:110915439-110915553
  hypo

SEQ ID NO: 354931 - DNA, 60 bp, Homo sapiens
  chr12:110983646-110983706
  hypo
cgtcctgctcacacttaatggctgagaggggagattacctgtcgctcaagacgactccct

SEQ ID NO: 354932 - DNA, 136 bp, Homo sapiens
  chr12:110983736-110983872
  hypo
atggagtgttgaagtaatgctgctgctcatctgatcggtgcacgacttcaccacccctgacaaccaggaagcctgaatcgcccaggtttgctgtgtgtaagcggtggctggttctgtccagcaccacaatgcaggc

SEQ ID NO: 354933 - DNA, 96 bp, Homo sapiens; identical to SEQ ID NO: 351410
  chr12:111284508-111284604
  hypo

SEQ ID NO: 354934 - DNA, 51 bp, Homo sapiens
  chr12:111725459-111725510
  hypo
cgcaggccctgcctaatgacggggcgtgggggctgccggcagatgaaagcc

SEQ ID NO: 354935 - DNA, 63 bp, Homo sapiens; identical to SEQ ID NO: 215057
  chr12:111725564-111725627
  hypo

SEQ ID NO: 354936 - DNA, 390 bp, Homo sapiens
  chr12:111800610-111801000
  hypo
cggtggtggagggggctcgggtccaggcctgaaggtggcctcagtgctccagacagcgcagccattctccttgggcgggagggcactgggccggcggggcaggggcagggctgggaccggggctggggcagaaggcagggatgggactggggccagggcagagggcagggacgggggcaagggcagggactggggctggggctggggcagggccatgccacccccgccacgtacagccgccagctgctgctccagctcgcgcaccaccagccgcaggtagtcgaagctggcacgcgacagggccttgacccagccctccatggcatcctgactctcagcggccagcacgtaggtgcgcgcccgggtccccgcaaagcgcacagcgaaggc

SEQ ID NO: 354937 - DNA, 320 bp, Homo sapiens; identical to SEQ ID NO: 351411
  chr12:111844290-111844610
  hypo

SEQ ID NO: 354938 - DNA, 175 bp, Homo sapiens
  chr12:112681200-112681375
  hypo
cgtcactcccccgactcgtacggcagctgtcagcaattcccgcatgtgcaccagtgcctgcttgcgagtgtttccccgccgccaccttgtctgtgcagccaaaaggaaactgctgctggacacctgaaacacacaaggagggacacctgactcctgctaactgccgcaagacccc

SEQ ID NO: 354939 - DNA, 83 bp, Homo sapiens; identical to SEQ ID NO: 345434
  chr12:113495127-113495210
  hypo

SEQ ID NO: 354940 - DNA, 58 bp, Homo sapiens; identical to SEQ ID NO: 341514
  chr12:113704033-113704091
  hypo

SEQ ID NO: 354941 - DNA, 291 bp, Homo sapiens
  chr12:113725566-113725857
  hypo
cgcctccgtcccgccccctgccacccttcttcactggtgagctccattgcccccgctccccggggcacatgggcttctccccgctctttcccaggagcaaggccttgctcctgtctgagcctgcagctctactgcaaggagatgtggcctggccctgctcctcttcgtggaaggaccccgcccagccggtgtcctggggctgccaccatcccttccctcatgcatgaatcacctgagcccagctcagggttggtggcgcccaagggagtggacgcaggtggaggagaggcc

SEQ ID NO: 354942 - DNA, 615 bp, Homo sapiens; identical to SEQ ID NO: 334652
  chr12:113796265-113796880
  hypo

SEQ ID NO: 354943 - DNA, 72 bp, Homo sapiens
  chr12:114290596-114290668
  hypo
cgcacagctgcaaagaggccgcttgatgtcacaggccacactaaccagcgtgcagcacgttcctcctctgca

SEQ ID NO: 354944 - DNA, 284 bp, Homo sapiens
  chr12:114337479-114337763
  hypo
cgacaagttatttcttaactaaaaagcagtgtttgagacctcccttttccgtggaaaactctgcgatgcgtgaggggagagaagctgttcctaaagaggaatcccccaagctgtctggggctccctgctgcctttcaccacccagaatgctggaagacatggcgcgcaattatcagctccaacaatgagccaacggcggccctccgagcaagcccagacaaagcacagagaccttgcagctgaaaaggctctgaatgcagacaggggaggtgtgaaagcaaggt

SEQ ID NO: 354945 - DNA, 146 bp, Homo sapiens; identical to SEQ ID NO: 215093
  chr12:114337793-114337939
  hypo

SEQ ID NO: 354946 - DNA, 230 bp, Homo sapiens; identical to SEQ ID NO: 341529
  chr12:116443638-116443868
  hypo

SEQ ID NO: 354947 - DNA, 237 bp, Homo sapiens
  chr12:117155351-117155588
  hypo
cgtgagcccggcctccggtttcatctttcccgaatgggactggctggaggggccaagctgctttacagaagagttccatctggtaagcccgggtggtgagcgaagccaaagatgacaacacgagaaggggtcaaagccaaggtttcctcacgctgcctttgtcttcttcctgcagcctggcccgatggctgaagctgggtcccaggaggcgagttcttcagcggggcctcctcaccc

SEQ ID NO: 354948 - DNA, 187 bp, Homo sapiens
  chr12:117155627-117155814
  hypo
agctcgggcgggctttctccatagcaatactttgctatggggtcccggtaggtgttctcatgctgcacgctctgttggcaaaaggaaaataagagcgcagtgagagcgagcacagcttcacacacctccctctcggaagagtgagagtggatcgggactgtcagactctccctgcagggggctggcc

SEQ ID NO: 354949 - DNA, 31 bp, Homo sapiens; identical to SEQ ID NO: 289422
  chr12:117317225-117317256
  hypo

SEQ ID NO: 354950 - DNA, 482 bp, Homo sapiens; identical to SEQ ID NO: 351423
  chr12:117317288-117317770
  hypo

SEQ ID NO: 354951 - DNA, 218 bp, Homo sapiens; identical to SEQ ID NO: 341538
  chr12:117466159-117466377
  hypo

SEQ ID NO: 354952 - DNA, 99 bp, Homo sapiens
  chr12:117531122-117531221
  hypo
gaaaccagcgccacccccaccagccacgcttggctacgccagtcctccctgccatctctagctccttctccaaatgagattagaccaggaatggaatcc

SEQ ID NO: 354953 - DNA, 328 bp, Homo sapiens; identical to SEQ ID NO: 341543
  chr12:117600052-117600380
  hypo

SEQ ID NO: 354954 - DNA, 396 bp, Homo sapiens; identical to SEQ ID NO: 348568
  chr12:120147746-120148142
  hypo

SEQ ID NO: 354955 - DNA, 335 bp, Homo sapiens; identical to SEQ ID NO: 215132
  chr12:120148396-120148731
  hypo

SEQ ID NO: 354956 - DNA, 64 bp, Homo sapiens; identical to SEQ ID NO: 346059
  chr12:120172992-120173056
  hypo

SEQ ID NO: 354957 - DNA, 136 bp, Homo sapiens; identical to SEQ ID NO: 346060
  chr12:120173137-120173273
  hypo

SEQ ID NO: 354958 - DNA, 46 bp, Homo sapiens
  chr12:120574393-120574439
  hypo
gtgatgctgaccacggagggcctcagggcgtcagccgaggtcaggc

SEQ ID NO: 354959 - DNA, 143 bp, Homo sapiens; identical to SEQ ID NO: 341555
  chr12:120613510-120613653
  hypo

SEQ ID NO: 354960 - DNA, 97 bp, Homo sapiens; identical to SEQ ID NO: 341556
  chr12:121200066-121200163
  hypo

SEQ ID NO: 354961 - DNA, 206 bp, Homo sapiens; identical to SEQ ID NO: 341557
  chr12:121203947-121204153
  hypo

SEQ ID NO: 354962 - DNA, 200 bp, Homo sapiens; identical to SEQ ID NO: 341558
  chr12:121205162-121205362
  hypo

SEQ ID NO: 354963 - DNA, 81 bp, Homo sapiens; identical to SEQ ID NO: 341559
  chr12:121328606-121328687
  hypo

SEQ ID NO: 354964 - DNA, 49 bp, Homo sapiens; identical to SEQ ID NO: 316435
  chr12:121622576-121622625
  hypo

SEQ ID NO: 354965 - DNA, 703 bp, Homo sapiens; identical to SEQ ID NO: 348573
  chr12:121687598-121688301
  hypo

SEQ ID NO: 354966 - DNA, 239 bp, Homo sapiens; identical to SEQ ID NO: 348574
  chr12:121688331-121688570
  hypo

SEQ ID NO: 354967 - DNA, 124 bp, Homo sapiens; identical to SEQ ID NO: 341563
  chr12:121756071-121756195
  hypo

SEQ ID NO: 354968 - DNA, 39 bp, Homo sapiens; identical to SEQ ID NO: 346061
  chr12:122192684-122192723
  hypo

SEQ ID NO: 354969 - DNA, 116 bp, Homo sapiens; identical to SEQ ID NO: 215161
  chr12:122192843-122192959
  hypo

SEQ ID NO: 354970 - DNA, 45 bp, Homo sapiens; identical to SEQ ID NO: 346063
  chr12:122192989-122193034
  hypo

SEQ ID NO: 354971 - DNA, 496 bp, Homo sapiens
  chr12:122208807-122209303
  hypo
ccgagaattaaaggctggtgggtgtctcaccactacgtctccacattcctgtccggagtgatgctgacctggtgagtagcccctcgctgggcccctccagcctcccagggagtagagcctggggcccgggaatggggagggggctgatccagacagcggtggggggtgtgctccagggccaacttgggaaagaaagtatgagcctgcagctgcgccgggctgcgcgggccccacccagcccgtgaggggttctccagggaatggtttcgggtgtccctggccagggcagaggtagcggggctgcaaggctggagggagcgagtgaggctgggcactgaaggagactgcggaggacagaggggtcacagggagttagcgcttctgcacggccatgtggacccctgtgcttctagaaaggaagatgggatgacctcgcccagccccagggatagaagggcggaagtctggacctcagtttgactttatacaccttttc

SEQ ID NO: 354972 - DNA, 108 bp, Homo sapiens
  chr12:122213693-122213801
  hypo
cagccctctcaggcccgtggcatcgctgggagagggcccaggccctggtcccccagtggaccccagtggtctagaggaatgtgagccccgcctgtccgcacagtgtcc

SEQ ID NO: 354973 - DNA, 276 bp, Homo sapiens
  chr12:122439511-122439787
  hypo
agctggctttgtctgggcatgtagctgtggctcactgatttgttgtagacttcagtacatttatttctcctgatcggtgcaagccactctccctaagactgcacataacaaagcatgtctgttgggaatcccacatgaataagttatgaaaagaacagtgagtggtggcttttgttcccgcgctctgtccgtccttttgtttcttctgggcttattttccctttgttccactgacctgtcatcttgccggcttgggtgggtgaatattggccaccc

SEQ ID NO: 354974 - DNA, 407 bp, Homo sapiens; identical to SEQ ID NO: 341577
  chr12:122480960-122481367
  hypo

SEQ ID NO: 354975 - DNA, 375 bp, Homo sapiens; identical to SEQ ID NO: 341578
  chr12:122481629-122482004
  hypo

SEQ ID NO: 354976 - DNA, 70 bp, Homo sapiens
  chr12:122602792-122602862
  hypo
cggtttaggatttatagattgtttatttctgcaactttccatgtaatattttcagacagcggttgatcat

SEQ ID NO: 354977 - DNA, 64 bp, Homo sapiens; identical to SEQ ID NO: 351427
  chr12:122688584-122688648
  hypo

SEQ ID NO: 354978 - DNA, 123 bp, Homo sapiens; identical to SEQ ID NO: 341584
  chr12:122970391-122970514
  hypo

SEQ ID NO: 354979 - DNA, 551 bp, Homo sapiens; identical to SEQ ID NO: 334686
  chr12:123258823-123259374
  hypo

SEQ ID NO: 354980 - DNA, 473 bp, Homo sapiens; identical to SEQ ID NO: 334688
  chr12:123380333-123380806
  hypo

SEQ ID NO: 354981 - DNA, 203 bp, Homo sapiens; identical to SEQ ID NO: 341590
  chr12:123434957-123435160
  hypo

SEQ ID NO: 354982 - DNA, 202 bp, Homo sapiens
  chr12:123997867-123998069
  hypo
cgacatgccctgtcctggggcgccaggacccactcactcatttactccttgctggggctgccttggctccccgagaggtgggcgggaggcgagcatgaggagagaggggcggctgggtctatgtggaagcccagcagcctcatcaccttcctgggcggcagccgtaggagctatgagaccgaggcagaagcctggcgcctga

SEQ ID NO: 354983 - DNA, 158 bp, Homo sapiens; identical to SEQ ID NO: 341593
  chr12:124171347-124171505
  hypo

SEQ ID NO: 354984 - DNA, 84 bp, Homo sapiens; identical to SEQ ID NO: 341596
  chr12:124832004-124832088
  hypo

SEQ ID NO: 354985 - DNA, 642 bp, Homo sapiens; identical to SEQ ID NO: 316598
  chr12:124832318-124832960
  hypo

SEQ ID NO: 354986 - DNA, 257 bp, Homo sapiens
  chr12:124832990-124833247
  hypo
cagccgaggcctccagagggagctggcagcctgcaggccctgggggcctgccagcaggacccaggagcttttccagggggttgcacggtgggagatgcagggcacgctgcctgcaccctgtaccctagccctccagggtgctctgtctgcaagcaagggtgtgcctgtgaccacatgagcacgtgagtctgtgtccacacccacgggtgccgacatggggcgtgaacaagtgcacacacatgcacgtgagcaaggac

SEQ ID NO: 354987 - DNA, 286 bp, Homo sapiens; identical to SEQ ID NO: 341598
  chr12:124843509-124843795
  hypo

SEQ ID NO: 354988 - DNA, 723 bp, Homo sapiens
  chr12:124850157-124850880
  hypo
cggtgatgcctgcttaggctgcccatggcgcacagacgggggccagacgaggaaggtcaccctgacttctgcatgcacctccaccgcccccaccgccagcccactctcctccctcccctccctccacctgtccagaccctgcttgatctcccaggaccacctaaagcctctcctttggccactgccatgcctcactccctggacctgggcccagctgtgctctccccgccatcctcaaggtacagacaaggtaccctgacccaggtccaaacacagatggtatcacctgtcccaacattctccacctgcggcttcaactgccgccacccctatgtccctccccacaggtttacctaccaccatccgtttcaaccagctcgcacttgcaagctgaaatttaaaagagaatgctgcagccactttggaaagcagtcggtgagccctcattgccctaaacccagcactgccactcctaggcacacaccaggcaaatgagagcaaatgtctatgcagaaacctgcacgtgcccaccactgcagcaccgcccagcgcacaacagccagaaggcagagacaacccgacatccaccaagagacgaatgaggagacaaagcgtgccctgtccgcacgatggaacacatggccatcaaaaggcatgaggctctgacacgggctatgacgtgggtggaccctgaagacacgatgcgcgtgaaacaagctagtc

SEQ ID NO: 354989 - DNA, 178 bp, Homo sapiens
  chr12:124970986-124971164
  hypo
cgttcattcccgggctggaactcagacagcagggagggcctccgccgctggggctggatgatggagccgggcgacaggtgggaggcatagtcgcgggagtggtgctggtactccaggagcccgacgtcctgcaggaggggacagaggagtggtgagcgtgggcgggcacgggcatggc

SEQ ID NO: 354990 - DNA, 703 bp, Homo sapiens; identical to SEQ ID NO: 341605
  chr12:124979300-124980003
  hypo

SEQ ID NO: 354991 - DNA, 139 bp, Homo sapiens
  chr12:125102589-125102728
  hypo
gtctgtgcctatgcagttctgactgcgtttgtgccccttcgattcacgcccattgcacaaatggggacactgaggcaatgagaggcgaggagacttgcccaagacctgcaggctccgtcaggggcagggtcaccggtgc

SEQ ID NO: 354992 - DNA, 150 bp, Homo sapiens
  chr12:125500633-125500783
  hypo
cggcagcggatccacgagccctgaatgcctgcattcatcaggggagcagctggcgcgttctggaggcgaaacgagcttgcttccgtgtcgaagcttttctagttctgtttgatgcgtaagcttcaaggcatccgaagccctttggaattc

SEQ ID NO: 354993 - DNA, 150 bp, Homo sapiens
  chr12:128899867-128900017
  hypo
tggagctctactacaccgtgcacccaggaaacgagcgaggggactgtgccgggggtgacttcaggaagggcaacgccatccgtccaggaaaggatgggctggaggaaaccacgtcccacctgcagaggatcggcaccgtcggcctttacc

SEQ ID NO: 354994 - DNA, 152 bp, Homo sapiens
  chr12:130037501-130037653
  hypo
cggtccagatccaacaactacaacatggatgccccaagtccgagtctctggggacaagaaaggtcacgccaccatccgagccccagccttgctggtctgacagcatccaccggagcagcttcggttactcaacctttcaaggccaggctctt

SEQ ID NO: 354995 - DNA, 483 bp, Homo sapiens
  chr12:130184247-130184730
  hypo
cggctctacttcggtgagcgataacacagcttttctggtcaaacagcttctggaaaacaccacctgatcgacgggcgggtacagacagacattgggaaacgacttacctcaacgtgaagcgatcttcagtggaatttctggagatggaaacaggaaaagtcagcacgtctcctttcctcacggtctttggtatatagtggatggccacgctgttgtccagacgcagttctctcagggagggtttcctgtgtgtctgataaaggaagatgctcccgatcctctgcaaggggggcccggactcatcgatgtcactgtggcctgtccggatcccattgcttctcctcgcgtcttccctgacgcagtcccctctctcaccccctgggtgcacggtgtagtagagctccacgggggtcccctccggctggtccacggacttcctcctcccggcaaccaccgtgggggggctgaaccagctggacagga

SEQ ID NO: 354996 - DNA, 91 bp, Homo sapiens
  chr12:130184760-130184851
  hypo
ccccctgcagccggcagctgccccgcacctctcgggtctctcggaaagcaaagaccctcaggcacggcagcttctccccggcgctgcggtc

SEQ ID NO: 354997 - DNA, 263 bp, Homo sapiens; identical to SEQ ID NO: 351435
  chr12:130645806-130646069
  hypo

SEQ ID NO: 354998 - DNA, 73 bp, Homo sapiens
  chr12:130909511-130909584
  hypo
cgaggggggggaagcatgcgtctactcaggccgggggcatgccgtggagggctctgcaatgaaaacagaatgg

SEQ ID NO: 354999 - DNA, 475 bp, Homo sapiens
  chr12:130909737-130910212
  hypo
agatggtgggtgtggccacggtgccaggggagactgcccgggggctacatcctcagaaaccctgagggcagctgccactggaggccgtgtgtgactggagacagttcaccagacacggagcctgacccgtccctgtccatccactgggccaacttcccttccagcgctcggcaccctctgcaggactttctagttaggctgacgtgtcacccttctccctaagatacaagctgcgtgaaaccacgccatccccggccccaccaacagcgcccgcacaccatcgtgcagagtctgtgtcagcaaaggactggggtccgcctgtctcctctgcatcctgcatcaagtccctgagagccacacttgagccatcacagtctccagtgggtggcacagagctggccacaccgggagctgcttaaccagaccagtgtccatgacttttatactgcccgtctgcacgccatcactctctgcc

SEQ ID NO: 355000 - DNA, 429 bp, Homo sapiens; identical to SEQ ID NO: 341630
  chr12:131095743-131096172
  hypo

SEQ ID NO: 355001 - DNA, 229 bp, Homo sapiens; identical to SEQ ID NO: 341631
  chr12:131110936-131111165
  hypo

SEQ ID NO: 355002 - DNA, 78 bp, Homo sapiens; identical to SEQ ID NO: 348582
  chr12:131159367-131159445
  hypo

SEQ ID NO: 355003 - DNA, 260 bp, Homo sapiens; identical to SEQ ID NO: 215290
  chr12:131159530-131159790
  hypo

SEQ ID NO: 355004 - DNA, 174 bp, Homo sapiens; identical to SEQ ID NO: 341633
  chr12:131193281-131193455
  hypo

SEQ ID NO: 355005 - DNA, 394 bp, Homo sapiens
  chr12:131265535-131265929
  hypo
cggagcgtccaccgatccccaggacaggttgtggctcagggaggcggcacccacaacaggcttcccaggccgcacctccaggccccgatctctgctctcacctcctgggctcaccctcccgggggaaggaggggctggacatggagcctgtggctgctcggtgtgggtggtgacactcttggtgacgtccctcggtcgtcaggactcatttccccggtgttggatgcagctcgaggacagcagaggggcccagcccataaggatgggaaggtctaactgtagatgctgacaccgaatgccggagacgcggatgcttctaccccagtggcaccaaggctgctgtctgcggaatcccaaaggtgacagctttctctaccacgggccgccccagccc

SEQ ID NO: 355006 - DNA, 236 bp, Homo sapiens; identical to SEQ ID NO: 346066
  chr12:131271740-131271976
  hypo

SEQ ID NO: 355007 - DNA, 298 bp, Homo sapiens; identical to SEQ ID NO: 316760
  chr12:131272032-131272330
  hypo

SEQ ID NO: 355008 - DNA, 714 bp, Homo sapiens; identical to SEQ ID NO: 346068
  chr12:131272367-131273081
  hypo

SEQ ID NO: 355009 - DNA, 185 bp, Homo sapiens
  chr12:131418203-131418388
  hypo
cggggcgtccccacgtcagatccctggggtcaagcctgtccccaggatgactccccaggttttgacctgatcgctgcacccatgaggctcccggtgtccgggcgctcctcaggtccccgacacggaggcaggcttgggatgactgcaacctgctctcatgagtcacagcaggtgcctgtcgagac

SEQ ID NO: 355010 - DNA, 62 bp, Homo sapiens
  chr12:131418430-131418492
  hypo
tgtggggtcaggacctccttcctccaggttctgccgtctgaggccgcagcctgctcctcccc

SEQ ID NO: 355011 - DNA, 105 bp, Homo sapiens
  chr12:131623219-131623324
  hypo
cgctcccacccattctcgcactccgcccccgcccgcagctgtgtgattttccatttgcttagggaccacgtctgccctgctccatgggagctggctggctcatgg

SEQ ID NO: 355012 - DNA, 145 bp, Homo sapiens; identical to SEQ ID NO: 215298
  chr12:131623397-131623542
  hypo

SEQ ID NO: 355013 - DNA, 129 bp, Homo sapiens; identical to SEQ ID NO: 348587
  chr12:132222124-132222253
  hypo

SEQ ID NO: 355014 - DNA, 200 bp, Homo sapiens; identical to SEQ ID NO: 341648
  chr12:132250682-132250882
  hypo

SEQ ID NO: 355015 - DNA, 311 bp, Homo sapiens; identical to SEQ ID NO: 341649
  chr12:132270193-132270504
  hypo

SEQ ID NO: 355016 - DNA, 107 bp, Homo sapiens; identical to SEQ ID NO: 351437
  chr12:132312451-132312558
  hypo

SEQ ID NO: 355017 - DNA, 109 bp, Homo sapiens; identical to SEQ ID NO: 346069
  chr12:132378083-132378192
  hypo

SEQ ID NO: 355018 - DNA, 99 bp, Homo sapiens; identical to SEQ ID NO: 341656
  chr12:132411621-132411720
  hypo

SEQ ID NO: 355019 - DNA, 173 bp, Homo sapiens
  chr12:132423854-132424027
  hypo
ttgtagatggtcttgcagagacacgaggctatgcatgctcctgccttttccaactgtctctgatgcagaagcgtagtcagagttgctttgcagctggttctgaccttcagaaacgggagccactagacaggagtagaaagctgttcatttgcagtgcttgttgctacacgggc

SEQ ID NO: 355020 - DNA, 816 bp, Homo sapiens; identical to SEQ ID NO: 341659
  chr12:132536813-132537629
  hypo

SEQ ID NO: 355021 - DNA, 136 bp, Homo sapiens; identical to SEQ ID NO: 341669
  chr12:133097814-133097950
  hypo

SEQ ID NO: 355022 - DNA, 413 bp, Homo sapiens; identical to SEQ ID NO: 341671
  chr12:133111693-133112106
  hypo

SEQ ID NO: 355023 - DNA, 179 bp, Homo sapiens
  chr12:133199822-133200001
  hypo
cgggcatcggcctcaggtcaccccacggcctgcacatgctgtgtggctcacaaatatccagctcatttttggagaaactggctcttctggttgagccgctgcttgggaaccagggccagagcttcccgtttctgacccctccaccactactcaaatgcccgcagctagcctcacagtga

SEQ ID NO: 355024 - DNA, 226 bp, Homo sapiens
  chr12:133200090-133200316
  hypo
cccatcactcctcattcctgagggttctccagattcgcttccaggaatgaagcctagtcagccagcctccctcctcccctgcttgccctaatttgatttgatctccactctggaggcctcagcactcctccatctgagcaggcatcaggtttctccaggcaggcggccccagcagcatccaggggccaaacacgtgcccagtggtacccagtccccgatctgaggc

SEQ ID NO: 355025 - DNA, 135 bp, Homo sapiens
  chr12:133280443-133280578
  hypo
cgggaatttagagaaggaagcagagacaactgagaagacagactggccgggaacacggaggatctgggatggaagaggggagagctgggaagccgcgcctctgagtagcgtgggggcagagtcgccatcctaggt

SEQ ID NO: 355026 - DNA, 479 bp, Homo sapiens; identical to SEQ ID NO: 334707
  chr12:133286733-133287212
  hypo

SEQ ID NO: 355027 - DNA, 358 bp, Homo sapiens; identical to SEQ ID NO: 341680
  chr12:133435596-133435954
  hypo

SEQ ID NO: 355028 - DNA, 237 bp, Homo sapiens; identical to SEQ ID NO: 203265
  chr12:133464166-133464403
  hypo

SEQ ID NO: 355029 - DNA, 218 bp, Homo sapiens; identical to SEQ ID NO: 203266
  chr12:133464555-133464773
  hypo

SEQ ID NO: 355030 - DNA, 261 bp, Homo sapiens
  chr13:20392445-20392706
  hypo
atcctgtagaccgtgacctcctcacacagcgccaggacgaggatcgcggtgagccagcaggtgactgcgatcctggagctggtcgcagcaggccatcctgcacgcggtggaggcgccccctgcaggccgcagcgcatccccagcttctggacgcactgtgagcggttatgcagcagcacgctcatatgagatgccccgcagggtgctatgcaggcccacgtccccacaaagcccatggcaggcgcccgggtgccggagcac

SEQ ID NO: 355031 - DNA, 167 bp, Homo sapiens; identical to SEQ ID NO: 345438
  chr13:20735265-20735432
  hypo

SEQ ID NO: 355032 - DNA, 506 bp, Homo sapiens; identical to SEQ ID NO: 341686
  chr13:20979799-20980305
  hypo

SEQ ID NO: 355033 - DNA, 142 bp, Homo sapiens; identical to SEQ ID NO: 351449
  chr13:22243864-22244006
  hypo

SEQ ID NO: 355034 - DNA, 190 bp, Homo sapiens; identical to SEQ ID NO: 341693
  chr13:25026495-25026685
  hypo

SEQ ID NO: 355035 - DNA, 81 bp, Homo sapiens; identical to SEQ ID NO: 203288
  chr13:25746000-25746081
  hypo

SEQ ID NO: 355036 - DNA, 40 bp, Homo sapiens; identical to SEQ ID NO: 341698
  chr13:28152529-28152569
  hypo

SEQ ID NO: 355037 - DNA, 123 bp, Homo sapiens; identical to SEQ ID NO: 341702
  chr13:28745545-28745668
  hypo

SEQ ID NO: 355038 - DNA, 200 bp, Homo sapiens; identical to SEQ ID NO: 345441
  chr13:29292491-29292691
  hypo

SEQ ID NO: 355039 - DNA, 242 bp, Homo sapiens; identical to SEQ ID NO: 345442
  chr13:29293342-29293584
  hypo

SEQ ID NO: 355040 - DNA, 100 bp, Homo sapiens; identical to SEQ ID NO: 346075
  chr13:30123381-30123481
  hypo

SEQ ID NO: 355041 - DNA, 309 bp, Homo sapiens
  chr13:30707770-30708079
  hypo
gcgtgtttctttgagagccctcccctggaagctccctttcactccaccctgttgataaggcccaggacaaaaagcaagcaaccgctggaaacacacctgctggaaacacgcctccagtgccagcccaggaggtggtggccctgtcctgacgccccgtctagccaccgggccagagctgggagccccatagtggagtctgtgtccggcaggtgtctctggacagctgaggttcttgtaaccaaagaggttcgtttacctccttagatcacccagggacaagtgatgtgttttgtggcctcggatcgttcc

SEQ ID NO: 355042 - DNA, 52 bp, Homo sapiens; identical to SEQ ID NO: 341713
  chr13:30910073-30910125
  hypo

SEQ ID NO: 355043 - DNA, 165 bp, Homo sapiens
  chr13:32526656-32526821
  hypo
cgtcctgcgtcccccgattcctgctccctggttgccgcgtccttggctggcgtcagaaaaatggctacaaactttctagtaggtgagaagatctggttccacaagttcaaatatggcgatgcagaaaggagattctacgaacagatgaacgggcctgtggccggc

SEQ ID NO: 355044 - DNA, 116 bp, Homo sapiens; identical to SEQ ID NO: 341718
  chr13:32983242-32983358
  hypo

SEQ ID NO: 355045 - DNA, 177 bp, Homo sapiens; identical to SEQ ID NO: 351461
  chr13:33000891-33001068
  hypo

SEQ ID NO: 355046 - DNA, 204 bp, Homo sapiens; identical to SEQ ID NO: 351462
  chr13:33001228-33001432
  hypo

SEQ ID NO: 355047 - DNA, 85 bp, Homo sapiens; identical to SEQ ID NO: 348601
  chr13:37643604-37643689
  hypo

SEQ ID NO: 355048 - DNA, 479 bp, Homo sapiens; identical to SEQ ID NO: 347264
  chr13:42032017-42032496
  hypo

SEQ ID NO: 355049 - DNA, 109 bp, Homo sapiens; identical to SEQ ID NO: 347265
  chr13:42032649-42032758
  hypo

SEQ ID NO: 355050 - DNA, 284 bp, Homo sapiens; identical to SEQ ID NO: 334760
  chr13:44544261-44544545
  hypo

SEQ ID NO: 355051 - DNA, 123 bp, Homo sapiens; identical to SEQ ID NO: 341737
  chr13:50027700-50027823
  hypo

SEQ ID NO: 355052 - DNA, 141 bp, Homo sapiens; identical to SEQ ID NO: 341739
  chr13:52335934-52336075
  hypo

SEQ ID NO: 355053 - DNA, 82 bp, Homo sapiens; identical to SEQ ID NO: 341741
  chr13:52493838-52493920
  hypo

SEQ ID NO: 355054 - DNA, 915 bp, Homo sapiens; identical to SEQ ID NO: 351487
  chr13:74707668-74708583
  hypo

SEQ ID NO: 355055 - DNA, 130 bp, Homo sapiens; identical to SEQ ID NO: 341749
  chr13:76352659-76352789
  hypo

SEQ ID NO: 355056 - DNA, 718 bp, Homo sapiens; identical to SEQ ID NO: 347268
  chr13:77459628-77460346
  hypo

SEQ ID NO: 355057 - DNA, 287 bp, Homo sapiens; identical to SEQ ID NO: 203409
  chr13:95201339-95201626
  hypo

SEQ ID NO: 355058 - DNA, 229 bp, Homo sapiens; identical to SEQ ID NO: 203410
  chr13:95201662-95201891
  hypo

SEQ ID NO: 355059 - DNA, 438 bp, Homo sapiens; identical to SEQ ID NO: 341762
  chr13:96085837-96086275
  hypo

SEQ ID NO: 355060 - DNA, 73 bp, Homo sapiens
  chr13:96409644-96409717
  hypo
ttgcttcccggtaagtttttgggacccaggtcttctgagtctagatctgttgttcatgctcatggaccatatc

SEQ ID NO: 355061 - DNA, 601 bp, Homo sapiens; identical to SEQ ID NO: 334802
  chr13:96705328-96705929
  hypo

SEQ ID NO: 355062 - DNA, 351 bp, Homo sapiens; identical to SEQ ID NO: 348609
  chr13:98869699-98870050
  hypo

SEQ ID NO: 355063 - DNA, 220 bp, Homo sapiens; identical to SEQ ID NO: 348610
  chr13:98870098-98870318
  hypo

SEQ ID NO: 355064 - DNA, 234 bp, Homo sapiens
  chr13:99034903-99035137
  hypo
cggtcatttgtggatggcgaaaatttggagtcacctgatgtgcattcccagtggaggtcaaacgaggcaaagctctgccttctgttttttttttctcgtactgttaataagtatccttttcatggtctatttagtgccacgcttttcgcatttttgtgcatgtttttggtgatttcactgtttaaagcagtccccaggcgttgtgctgaagcgctgtctgtcttgtgtccccgc

SEQ ID NO: 355065 - DNA, 355 bp, Homo sapiens
  chr13:99104223-99104578
  hypo
gtgagcaagtgcgcaagcagtccagggcgctgacctgggcactcggcagctccaggcctggggacttctccctggagtcttccaaagtgtctcatcacacacacacagccacgagtacacacgcacggccacacatacacagcaggtgccctgtcctctgaagagtcacatttcaaggagtatgcaaaataagcgtgttataaaatttatttgtgtaagcattcagacatttttaggtgggaaagatgatatgcagaatccactacaaggtgcaacagaaaatcgtattggaaaggacggtacatctggcgcagaccagcagtggcacgattccaaacaaatgtcagacgagagc

SEQ ID NO: 355066 - DNA, 82 bp, Homo sapiens; identical to SEQ ID NO: 341769
  chr13:99115936-99116018
  hypo

SEQ ID NO: 355067 - DNA, 97 bp, Homo sapiens
  chr13:99851706-99851803
  hypo
gaagcaaataaaagtcatacttttgccttctataatcagtgttaacattttggcccactggaacctctctttgagggtagggactgtgttgatctac

SEQ ID NO: 355068 - DNA, 367 bp, Homo sapiens; identical to SEQ ID NO: 351497
  chr13:100632514-100632881
  hypo

SEQ ID NO: 355069 - DNA, 219 bp, Homo sapiens; identical to SEQ ID NO: 341777
  chr13:101194483-101194702
  hypo

SEQ ID NO: 355070 - DNA, 126 bp, Homo sapiens; identical to SEQ ID NO: 351499
  chr13:103046539-103046665
  hypo

SEQ ID NO: 355071 - DNA, 58 bp, Homo sapiens; identical to SEQ ID NO: 203450
  chr13:108519564-108519622
  hypo

SEQ ID NO: 355072 - DNA, 165 bp, Homo sapiens; identical to SEQ ID NO: 203451
  chr13:108519932-108520097
  hypo

SEQ ID NO: 355073 - DNA, 67 bp, Homo sapiens; identical to SEQ ID NO: 203452
  chr13:108520309-108520376
  hypo

SEQ ID NO: 355074 - DNA, 181 bp, Homo sapiens; identical to SEQ ID NO: 341786
  chr13:110008382-110008563
  hypo

SEQ ID NO: 355075 - DNA, 95 bp, Homo sapiens
  chr13:110486576-110486671
  hypo
cggtgtcactctgggaggagctcgtggaagccctgtcggcactgaccatagtaccttgactaggagaagtttctcaggtatgaccaggaagaggc

SEQ ID NO: 355076 - DNA, 400 bp, Homo sapiens
  chr13:111277855-111278255
  hypo
cggggcccagctccagaggcagggaggccctgtgggctgtgtgtgacaggtttgcagaaggtggaaacgaagggcctctgagcaataacaagacccttcctgcactcggcacatatgtctggtgccaggccctagcctgtgttccatgggtcagcgtggaactgggcaggcaaaaacctgcccccgtggggctcccccagaccgcctatgctatagagcttgctgtgtggaggtgttctctctgccgtccaggattgtggccactgagggcttgaaatgtggctgggaggtgcgggagcagagcgtttgctcttgtttacttttcattgtgtgtgtttgcaccgactggattgggctgtgctgctctggagacaagggagaggaggatgtcaggtggtga

SEQ ID NO: 355077 - DNA, 278 bp, Homo sapiens
  chr13:111278426-111278704
  hypo
tgcagggctgggccccacagggtgtggggctgctgtcagggctgtggctctggccctgagtaagcagggcagggccagtgtgggtcataaaggctcctacgcggctgtggggctgggccggaggctgtggtaaggacctgtgggagggaagggtgcagtcagatggtgagaggggccggattctgggtatgtttggaaagtttgggggtggaatttgccgacagattggattggaaaaggcaaggggcacagactccaccaagggttttggtctgagc

SEQ ID NO: 355078 - DNA, 269 bp, Homo sapiens
  chr13:111330283-111330552
  hypo
cggccaccccggtggaagcccctccagccgccagtgggcagcacgccccaggctgtgtctcttcgaaggagccttggcttctcgttcactcctgtttcacccacgtgagggacaggagcaccggcaacgctttcacctcagatgcaccagcgcacagggagagctgggcggccgggaacccacagaggctcatttctcaggaatgtactgtggaccaggtggggttttcccatttttccttattctgtcttacgagaaatactctgctt

SEQ ID NO: 355079 - DNA, 37 bp, Homo sapiens; identical to SEQ ID NO: 215584
  chr13:111363843-111363880
  hypo

SEQ ID NO: 355080 - DNA, 195 bp, Homo sapiens; identical to SEQ ID NO: 341798
  chr13:112022971-112023166
  hypo

SEQ ID NO: 355081 - DNA, 53 bp, Homo sapiens
  chr13:112690683-112690736
  hypo
cgtgacggctccgcaccgacgcacccttctcagggcaagatcgacacagagtg

SEQ ID NO: 355082 - DNA, 123 bp, Homo sapiens; identical to SEQ ID NO: 341806
  chr13:113244578-113244701
  hypo

SEQ ID NO: 355083 - DNA, 191 bp, Homo sapiens; identical to SEQ ID NO: 341807
  chr13:113255726-113255917
  hypo

SEQ ID NO: 355084 - DNA, 137 bp, Homo sapiens; identical to SEQ ID NO: 341811
  chr13:113369414-113369551
  hypo

SEQ ID NO: 355085 - DNA, 133 bp, Homo sapiens
  chr13:113424750-113424883
  hypo
cgttaccatgagtgtgacgagagtggggagaaccagtggagcttctgatcctgtcccagcagatgccagtggctcggaccaaggaggacagagggatgggcgtgcccacgtgaagcctcaccccagaccccag

SEQ ID NO: 355086 - DNA, 68 bp, Homo sapiens
  chr13:113424935-113425003
  hypo
ggcggtggaaacgtggtccacctgcggagggcctgtttgcgtttattacacccgagcaaggcccgcac

SEQ ID NO: 355087 - DNA, 306 bp, Homo sapiens; identical to SEQ ID NO: 341818
  chr13:113477621-113477927
  hypo

SEQ ID NO: 355088 - DNA, 535 bp, Homo sapiens; identical to SEQ ID NO: 341819
  chr13:113497181-113497716
  hypo

SEQ ID NO: 355089 - DNA, 146 bp, Homo sapiens
  chr13:113508784-113508930
  hypo
cgagctgagcaagacggtcctgcgccacagcgggagcctgaccagagacaacctgtccgggtaggcagcgcgtccccgcccccacccccacactcccgcaaaaggggcttcagacccagtggccttcacctgcaagtcggggagcc

SEQ ID NO: 355090 - DNA, 319 bp, Homo sapiens; identical to SEQ ID NO: 341824
  chr13:113627865-113628184
  hypo

SEQ ID NO: 355091 - DNA, 241 bp, Homo sapiens; identical to SEQ ID NO: 341827
  chr13:113796043-113796284
  hypo

SEQ ID NO: 355092 - DNA, 177 bp, Homo sapiens; identical to SEQ ID NO: 348613
  chr13:113797753-113797930
  hypo

SEQ ID NO: 355093 - DNA, 112 bp, Homo sapiens; identical to SEQ ID NO: 348614
  chr13:113797960-113798072
  hypo

SEQ ID NO: 355094 - DNA, 93 bp, Homo sapiens; identical to SEQ ID NO: 341830
  chr13:113887577-113887670
  hypo

SEQ ID NO: 355095 - DNA, 163 bp, Homo sapiens
  chr13:114123291-114123454
  hypo
ctgtggctgagggcagaggccaccaacagggaagtgcctgggagcagaacaggctgggcgggaaagggacaatggagatggaaaagagagaaaagctgaggaggggggaggagcagtgccagacaatctcagacagcaaagccgacatttctgtctactacac

SEQ ID NO: 355096 - DNA, 38 bp, Homo sapiens; identical to SEQ ID NO: 346080
  chr13:114188365-114188403
  hypo

SEQ ID NO: 355097 - DNA, 46 bp, Homo sapiens; identical to SEQ ID NO: 348616
  chr13:114189691-114189737
  hypo

SEQ ID NO: 355098 - DNA, 303 bp, Homo sapiens; identical to SEQ ID NO: 215680
  chr13:114189809-114190112
  hypo

SEQ ID NO: 355099 - DNA, 278 bp, Homo sapiens; identical to SEQ ID NO: 348618
  chr13:114190142-114190420
  hypo

SEQ ID NO: 355100 - DNA, 161 bp, Homo sapiens; identical to SEQ ID NO: 346081
  chr13:114271763-114271924
  hypo

SEQ ID NO: 355101 - DNA, 131 bp, Homo sapiens; identical to SEQ ID NO: 341848
  chr13:114295766-114295897
  hypo

SEQ ID NO: 355102 - DNA, 206 bp, Homo sapiens; identical to SEQ ID NO: 348620
  chr13:114302352-114302558
  hypo

SEQ ID NO: 355103 - DNA, 61 bp, Homo sapiens
  chr13:114502726-114502787
  hypo
cgagaaacttctggatttccctgagccaccgacagcggcagtgtgacctcatttctctttc

SEQ ID NO: 355104 - DNA, 302 bp, Homo sapiens; identical to SEQ ID NO: 347277
  chr13:114565969-114566271
  hypo

SEQ ID NO: 355105 - DNA, 114 bp, Homo sapiens; identical to SEQ ID NO: 347278
  chr13:114566409-114566523
  hypo

SEQ ID NO: 355106 - DNA, 150 bp, Homo sapiens
  chr13:114616940-114617090
  hypo
cgggagatgaatcacacgtgagccgacggtggaggaggcattgatcgggagatgattcacacgtgagccaacggtggaggaggcattgatcaggagagattcacacgtgagccgacggtggaggaggcattgatcaggagagattcacgc

SEQ ID NO: 355107 - DNA, 138 bp, Homo sapiens; identical to SEQ ID NO: 348623
  chr13:114748186-114748324
  hypo

SEQ ID NO: 355108 - DNA, 86 bp, Homo sapiens
  chr13:114769900-114769986
  hypo
cgtttttcagaagacaaatggccaacaagcatacgatataaagcccagcgtggctcatcacctgaggaatgagagccagagctgcc

SEQ ID NO: 355109 - DNA, 92 bp, Homo sapiens; identical to SEQ ID NO: 346082
  chr13:114807847-114807939
  hypo

SEQ ID NO: 355110 - DNA, 219 bp, Homo sapiens; identical to SEQ ID NO: 341880
  chr13:115052309-115052528
  hypo

SEQ ID NO: 355111 - DNA, 528 bp, Homo sapiens; identical to SEQ ID NO: 341881
  chr14:21560027-21560555
  hypo

SEQ ID NO: 355112 - DNA, 120 bp, Homo sapiens; identical to SEQ ID NO: 215731
  chr14:21689077-21689197
  hypo

SEQ ID NO: 355113 - DNA, 91 bp, Homo sapiens; identical to SEQ ID NO: 341885
  chr14:21969884-21969975
  hypo

SEQ ID NO: 355114 - DNA, 38 bp, Homo sapiens; identical to SEQ ID NO: 351521
  chr14:23355352-23355390
  hypo

SEQ ID NO: 355115 - DNA, 53 bp, Homo sapiens; identical to SEQ ID NO: 351522
  chr14:23355484-23355537
  hypo

SEQ ID NO: 355116 - DNA, 78 bp, Homo sapiens; identical to SEQ ID NO: 351523
  chr14:23835314-23835392
  hypo

SEQ ID NO: 355117 - DNA, 55 bp, Homo sapiens; identical to SEQ ID NO: 215754
  chr14:32597657-32597712
  hypo

SEQ ID NO: 355118 - DNA, 438 bp, Homo sapiens; identical to SEQ ID NO: 290092
  chr14:36003004-36003442
  hypo

SEQ ID NO: 355119 - DNA, 201 bp, Homo sapiens; identical to SEQ ID NO: 351548
  chr14:45431382-45431583
  hypo

SEQ ID NO: 355120 - DNA, 36 bp, Homo sapiens; identical to SEQ ID NO: 348627
  chr14:50287178-50287214
  hypo

SEQ ID NO: 355121 - DNA, 223 bp, Homo sapiens; identical to SEQ ID NO: 203572
  chr14:51562012-51562235
  hypo

SEQ ID NO: 355122 - DNA, 296 bp, Homo sapiens; identical to SEQ ID NO: 215787
  chr14:55765714-55766010
  hypo

SEQ ID NO: 355123 - DNA, 55 bp, Homo sapiens; identical to SEQ ID NO: 346085
  chr14:55766084-55766139
  hypo

SEQ ID NO: 355124 - DNA, 193 bp, Homo sapiens; identical to SEQ ID NO: 341914
  chr14:55817984-55818177
  hypo

SEQ ID NO: 355125 - DNA, 79 bp, Homo sapiens; identical to SEQ ID NO: 347299
  chr14:60097114-60097193
  hypo

SEQ ID NO: 355126 - DNA, 44 bp, Homo sapiens; identical to SEQ ID NO: 351564
  chr14:60385935-60385979
  hypo

SEQ ID NO: 355127 - DNA, 276 bp, Homo sapiens; identical to SEQ ID NO: 290237
  chr14:60974092-60974368
  hypo

SEQ ID NO: 355128 - DNA, 354 bp, Homo sapiens; identical to SEQ ID NO: 351574
  chr14:61123186-61123540
  hypo

SEQ ID NO: 355129 - DNA, 623 bp, Homo sapiens; identical to SEQ ID NO: 290253
  chr14:61123681-61124304
  hypo

SEQ ID NO: 355130 - DNA, 101 bp, Homo sapiens; identical to SEQ ID NO: 341932
  chr14:63857003-63857104
  hypo

SEQ ID NO: 355131 - DNA, 127 bp, Homo sapiens; identical to SEQ ID NO: 341937
  chr14:65236155-65236282
  hypo

SEQ ID NO: 355132 - DNA, 50 bp, Homo sapiens
  chr14:65239794-65239844
  hypo
cccagggcaggcctgcatcggctggtcccgcctcacactggggaggttac

SEQ ID NO: 355133 - DNA, 185 bp, Homo sapiens; identical to SEQ ID NO: 341939
  chr14:65271617-65271802
  hypo

SEQ ID NO: 355134 - DNA, 213 bp, Homo sapiens; identical to SEQ ID NO: 334953
  chr14:69259278-69259491
  hypo

SEQ ID NO: 355135 - DNA, 230 bp, Homo sapiens
  chr14:69278049-69278279
  hypo
cgggtggagcactggtcgggaaagccaaggacaggcactcgcagccagggcggctgtgtgggtgggaggacgcagggggctgcgctccagtctcccctaattagctcaacctggctacatccttaccattgcatgtgttcatccttatgtgaaacggagcccatattgacctagcacccagtatgtgcaaggcgctggctgaatagggagctgcagcgggagatttcagc

SEQ ID NO: 355136 - DNA, 211 bp, Homo sapiens; identical to SEQ ID NO: 341947
  chr14:69354686-69354897
  hypo

SEQ ID NO: 355137 - DNA, 241 bp, Homo sapiens; identical to SEQ ID NO: 341949
  chr14:69666624-69666865
  hypo

SEQ ID NO: 355138 - DNA, 419 bp, Homo sapiens
  chr14:70236294-70236713
  hypo
tcttggttgggcctggttgactttgccagtcagctcctacagtgatcagttggccacctctagatctgtgtttgccggtctagacgttatcggtgcacttccttgaagtgccaggttgcagcgatcccagagcgttgataacgtgatctgatccctaagttgagacctgtcttcctgtaacgcttccgaataagaggtccggtcgaaaagagttgaaagatacgaaattaggtggtcgttggaatcctgatcgcagtaaagtggtccttggtaactgctcgagtagaacatgtctgcatccgccaatagtccgctaatagggagggctgtgcgattaaaggcttccatcgattgggtagtgtccttcaagtgggtggcgaagagccagtcgggcatatgtcatgaaggtttctccgacc

SEQ ID NO: 355139 - DNA, 138 bp, Homo sapiens; identical to SEQ ID NO: 348632
  chr14:73146636-73146774
  hypo

SEQ ID NO: 355140 - DNA, 99 bp, Homo sapiens; identical to SEQ ID NO: 348633
  chr14:73147150-73147249
  hypo

SEQ ID NO: 355141 - DNA, 48 bp, Homo sapiens
  chr14:73167899-73167947
  hypo
cacctctgaagccaccacccctgggaccagtcagccctgcctgtgcac

SEQ ID NO: 355142 - DNA, 148 bp, Homo sapiens
  chr14:73238412-73238560
  hypo
cgcatgtcccaggagtggcgcagctcacctgggcctcggtgcctcttctccatccagatgtagcagttgttctgggccaccccagtctgtgagtccaggaagggaagacgcacgctgcgctctgcacacagccgtgagttgtaactcc

SEQ ID NO: 355143 - DNA, 464 bp, Homo sapiens; identical to SEQ ID NO: 334962
  chr14:73359779-73360243
  hypo

SEQ ID NO: 355144 - DNA, 62 bp, Homo sapiens; identical to SEQ ID NO: 341964
  chr14:73390972-73391034
  hypo

SEQ ID NO: 355145 - DNA, 145 bp, Homo sapiens
  chr14:75749334-75749479
  hypo
cgtggagggttattctacttcaaagatgagcaaattgaagaatggttagaataaacaactttcttgatattccgttatcggcattagaatcttcctgctcgttatcgtatccagcaggctgaactgcctcttgatacttggttaa

SEQ ID NO: 355146 - DNA, 82 bp, Homo sapiens; identical to SEQ ID NO: 290405
  chr14:77965137-77965219
  hypo

SEQ ID NO: 355147 - DNA, 180 bp, Homo sapiens; identical to SEQ ID NO: 290406
  chr14:77965244-77965424
  hypo

SEQ ID NO: 355148 - DNA, 274 bp, Homo sapiens; identical to SEQ ID NO: 341975
  chr14:81879122-81879396
  hypo

SEQ ID NO: 355149 - DNA, 163 bp, Homo sapiens; identical to SEQ ID NO: 290421
  chr14:88458964-88459127
  hypo

SEQ ID NO: 355150 - DNA, 239 bp, Homo sapiens; identical to SEQ ID NO: 290422
  chr14:88459170-88459409
  hypo

SEQ ID NO: 355151 - DNA, 57 bp, Homo sapiens; identical to SEQ ID NO: 351598
  chr14:88459631-88459688
  hypo

SEQ ID NO: 355152 - DNA, 197 bp, Homo sapiens; identical to SEQ ID NO: 351599
  chr14:88789765-88789962
  hypo

SEQ ID NO: 355153 - DNA, 165 bp, Homo sapiens
  chr14:89895069-89895234
  hypo
cgcagcagacgtcagagagacctcagcgcaggggtccaagcacctggccaaggcaccctgcgcaggcctccacgccccacgagtgcctgcagaggctacctgaggaccaaggtgggcatgccacggtgtcctggacttctggatggaggccagtcccagggagtg

SEQ ID NO: 355154 - DNA, 485 bp, Homo sapiens; identical to SEQ ID NO: 351602
  chr14:90085312-90085797
  hypo

SEQ ID NO: 355155 - DNA, 382 bp, Homo sapiens; identical to SEQ ID NO: 203714
  chr14:90849476-90849858
  hypo

SEQ ID NO: 355156 - DNA, 53 bp, Homo sapiens; identical to SEQ ID NO: 203715
  chr14:90849897-90849950
  hypo

SEQ ID NO: 355157 - DNA, 136 bp, Homo sapiens; identical to SEQ ID NO: 341990
  chr14:90871545-90871681
  hypo

SEQ ID NO: 355158 - DNA, 145 bp, Homo sapiens; identical to SEQ ID NO: 341993
  chr14:91750824-91750969
  hypo

SEQ ID NO: 355159 - DNA, 259 bp, Homo sapiens; identical to SEQ ID NO: 341995
  chr14:91757493-91757752
  hypo

SEQ ID NO: 355160 - DNA, 857 bp, Homo sapiens
  chr14:91805557-91806414
  hypo
cgacaccacaccagaaacatgtctgcaacacacacaaaggtaggagaagcagccggggactcacagctcctgcctgacgcgccgcagcctggccttggtgtcggccagctctacggccaggtgctgcttgtcttcgctagagaggctgctggtggggctgggagtggagtcggcgctggaggacttgatggggctgggtggatgctgtgcctgcaggtagtcccgttcctgagtgaggtccacgatcagctgcagccgggcagagagggggatggaggagaacaaacggggttaaccagcacaacgcctgagcttgaacagggtgaagaaaccgccaaaagacagatatttcagcggagactaagaaacgaggaggaaggtgggaaaaggctggcatgggttttgaaaagaggtgaaatatttagtgaaacaaaagggagtgtacgaaggaggagggccccaagctccgcgtcctgattccctgtatcctcccacaggcccgaggtgaccatgcactgcaggggccgtaaccagggaaagcacgcacgtcccacccccaccagaacctcagcagcaggaccgaggcgtctaggctgaagatgaagggagaggagatgaaggggcctaagccccttcccaggctgaccgggccaccgacccgcggacgcacctcggtgcactcgtcccgctggtcgatgagcctccgcaggtggagcaccatgctcctcgacagggcctccagctcctccggagccacgtcgggcagctccagccactgcaggtcaaacacgttctcttggttgtgagtcacctgtgggcacacatggcagggcactgcaggggcggcagagacgggc

SEQ ID NO: 355161 - DNA, 203 bp, Homo sapiens
  chr14:91808058-91808261
  hypo
cgccccctagggtgggcggcctccttagctgataccacctttgccaacatcaatggcaaagggccgggaaggtcaggcctcaaaggccaggggctcctcctcctccactccgctgacgctcagtgcagagccctcccggcccctcgctggggggcctgagttggggctgggccaagtctcccaaggcggtctttctgggactc

SEQ ID NO: 355162 - DNA, 118 bp, Homo sapiens; identical to SEQ ID NO: 290458
  chr14:91883379-91883497
  hypo

SEQ ID NO: 355163 - DNA, 405 bp, Homo sapiens; identical to SEQ ID NO: 351609
  chr14:91883530-91883935
  hypo

SEQ ID NO: 355164 - DNA, 187 bp, Homo sapiens; identical to SEQ ID NO: 203723
  chr14:92980770-92980957
  hypo

SEQ ID NO: 355165 - DNA, 159 bp, Homo sapiens; identical to SEQ ID NO: 318289
  chr14:93154728-93154887
  hypo

SEQ ID NO: 355166 - DNA, 328 bp, Homo sapiens
  chr14:93425284-93425612
  hypo
cgatgaggcgctgagaggttcagtgactgctggacagtgagtgagcccgggatggaactgggtctgcacagcacccagccgcgcccctacacacggagccatgtgatactccgcaaacaacaggcctttgtgctcctggtccccgactcctctggggaaaaaggtccctgacaggaggatctggtaggggctggggtagggagtgcaggggggcagctgccaaaaccctctcagccccggccagcacgggctctgcacagggtctgctctaaggacagaggggtgggccctaggcctagccgatccagctgctggtgccagggtcatg

SEQ ID NO: 355167 - DNA, 236 bp, Homo sapiens
  chr14:93706483-93706719
  hypo
cgaatgcgatgcacagccgacctgcagattagtgttaactctgggagctcgggagcgtgcaccaccaccagtgtcaccgagcgcacccgcacagcagctaaccagtcaggcagcagaacgagtggcggcagtttgccggggcgtgcagacacacgacatgtttcccatcttggagactatctactgttcggcttttctaaaatgtcagattattcctgagtgtatatccacagggt

SEQ ID NO: 355168 - DNA, 206 bp, Homo sapiens; identical to SEQ ID NO: 342009
  chr14:94404864-94405070
  hypo

SEQ ID NO: 355169 - DNA, 182 bp, Homo sapiens; identical to SEQ ID NO: 345461
  chr14:94406037-94406219
  hypo

SEQ ID NO: 355170 - DNA, 70 bp, Homo sapiens
  chr14:94603670-94603740
  hypo
gtcatcgttaagtcgtgttacctgctgtccggccctggcacagtgaggctacactcccacaaataatgac

SEQ ID NO: 355171 - DNA, 209 bp, Homo sapiens; identical to SEQ ID NO: 290501
  chr14:96505691-96505900
  hypo

SEQ ID NO: 355172 - DNA, 290 bp, Homo sapiens; identical to SEQ ID NO: 290502
  chr14:96506053-96506343
  hypo

SEQ ID NO: 355173 - DNA, 123 bp, Homo sapiens
  chr14:99849764-99849887
  hypo
cgaaggcaggggaagggacgacgcatttggaggaagcaccatccgagccacaccccgcacagaaaaaggacccaggcccacggcaaggcgcttcttggtcctttcggaagggccgctcctaaa

SEQ ID NO: 355174 - DNA, 286 bp, Homo sapiens
  chr14:99850063-99850349
  hypo
gctctgtagccggccagctgggtccccgtcacacactcacacgtgcacacatgcatgcatgcacacatcctcacacacattcatacgtgtgctctcacgctcacatgcacacattcacacacacgttcacacacccatgcgctcacatgcccatgcacgcacacgtttgcacatgtacgcgcacacacactaaacccgttgggcctcagcttactcatctgtcaagcggagaccatggcagtggctccgacaggtgcttggcacatggtaaatgcccaatacatac

SEQ ID NO: 355175 - DNA, 132 bp, Homo sapiens; identical to SEQ ID NO: 342019
  chr14:99902515-99902647
  hypo

SEQ ID NO: 355176 - DNA, 208 bp, Homo sapiens; identical to SEQ ID NO: 342027
  chr14:100748335-100748543
  hypo

SEQ ID NO: 355177 - DNA, 205 bp, Homo sapiens; identical to SEQ ID NO: 215982
  chr14:100749240-100749445
  hypo

SEQ ID NO: 355178 - DNA, 137 bp, Homo sapiens
  chr14:100749475-100749612
  hypo
tggactcggaagaacttgaccaaatacactgagagctacttaggatttagccaaaagcaaaatgcagagcagagcttcctccctctggttggggccttggtgtctgatgttctgcagagcaaggttcagagtgaggc

SEQ ID NO: 355179 - DNA, 183 bp, Homo sapiens; identical to SEQ ID NO: 342037
  chr14:101492091-101492274
  hypo

SEQ ID NO: 355180 - DNA, 247 bp, Homo sapiens; identical to SEQ ID NO: 342040
  chr14:102230139-102230386
  hypo

SEQ ID NO: 355181 - DNA, 245 bp, Homo sapiens
  chr14:102355922-102356167
  hypo
cgtgtcctggggctcccctagaagcaggcgcagtggacagagatgtctcagaggaagggagctgggtctgtcgcagatgggtgcttcagaaagatcgcacctgagacagcacggaggatgcgtgtgggtgtcagtggggaactgggcaggtagaataagaggagttcaggaatcacttctaccctttgcaggaactgtgctaaatattgcgggctttaaaattaagtaagacattggcctatgtt

SEQ ID NO: 355182 - DNA, 188 bp, Homo sapiens
  chr14:102356197-102356385
  hypo
tgaacgagtaaaagatggatgaacagatgtgcgtgtgatcaagcagatggagcacattgctcgtggtcgaatctggtggttgaaatgggtgttcactgtagaattctttccgttttcctagatgcttgaaattttccaaaataaaatattgagaaaaaaattcgtgcaagaccaagttctctgccctc

SEQ ID NO: 355183 - DNA, 116 bp, Homo sapiens
  chr14:102493497-102493613
  hypo
cgtaatgtttcagaatattccgtcaacctcaaggccacttgcttctgattggtgttagtggagcaggaaaaactaccctgtctcgtttcgtcgcctggatgaacggtttgagtgtg

SEQ ID NO: 355184 - DNA, 348 bp, Homo sapiens
  chr14:102493651-102493999
  hypo
cccagcaacagatgtgtgtgcagagctcagtgagtaggaatggacctaacttgcctctgcttctgtaggtccataggaagtacacaggggaagactttgatgaagatctacggacagtgttgagacgttctggctgtaaaaatgaaaagatagcatttataatggatgaatctaatgtgttagattctggattcctggagcgaatgaatacccttctggccaatggagaggtaattaggtgacgtgttgcgttgcattacgtgttaccgggggaccagtaagtcagcactgtgctgtttcccaggtgcctggtctctttgaaggagacgagtatgccaccttgatgac

SEQ ID NO: 355185 - DNA, 492 bp, Homo sapiens
  chr14:102500550-102501042
  hypo
ggatgtgcgagcagtgtgaggcaagctggtgtttagtgcacagttagagtcttgagaacagtcccatctgtggctgtgaagaggaggaaaggtaacggccttgcctttcagttccgtacagatattgccaggacggaatacctttccaatgctgatgagcgtcttcgctggcaggccagctccttgcctgctgatgacctttgcacagaaaatgccatcatgctgaaacgattcaataggtatgagctcgggtgccaaggagaggcatgggaggaatgtgggtggtgatcttgaatttttttcaaaatacacccttgtttgaagagaggaatagaaaatggggcgtgggcatacagtgctggcagcttggtgctcctctgatggtggggcgtgtgctgttctcgttattgtcaagtgtctgagttattctgcagtgaatgcttcttgtaaccttctaaaatcgattggcaggggccaggcacagtggatcac

SEQ ID NO: 355186 - DNA, 119 bp, Homo sapiens
  chr14:102691860-102691979
  hypo
cgagatggcatcactcgagatggttagtcctagctctgcctcagcccagtctgtcacccttcgctggttctggaatgcagtttgcatttggccatcactgtactaacgctgtcagatac

SEQ ID NO: 355187 - DNA, 604 bp, Homo sapiens; identical to SEQ ID NO: 342054
  chr14:102939202-102939806
  hypo

SEQ ID NO: 355188 - DNA, 466 bp, Homo sapiens
  chr14:102973268-102973734
  hypo
gggcctagcctttgccagtgaggtccaacggctgcaggaatgggggcagcggcagctcgtccagggcctcggggaagcggcctggagagatggcggtgaccagcacctgcatggcgcgcgcgaagagcgagggcggcgccaggcccgccagccactggaacttgtcctcacccagcagccgctgccagcgcggccggtcgcccagcagctcctggcgggccgagccggcggcacccacgggggtgtacagcgccaggaggtccagcagcagcaggcggcgctggcgcggctccccgggagctgaggcgggggctccggcggcggagggagtggccccggcgtcgcggcccagctggcgcagcagcagctcgagaggcgtgaggccgccgccgtcccgcagaccgggcgaggcgccgtggcccagcagcaggaagaggcactcggggcgcgccagctcacaggccac

SEQ ID NO: 355189 - DNA, 377 bp, Homo sapiens; identical to SEQ ID NO: 351623
  chr14:102975682-102976059
  hypo

SEQ ID NO: 355190 - DNA, 367 bp, Homo sapiens; identical to SEQ ID NO: 342059
  chr14:103369461-103369828
  hypo

SEQ ID NO: 355191 - DNA, 279 bp, Homo sapiens; identical to SEQ ID NO: 342063
  chr14:103423623-103423902
  hypo

SEQ ID NO: 355192 - DNA, 142 bp, Homo sapiens; identical to SEQ ID NO: 335034
  chr14:103430237-103430379
  hypo

SEQ ID NO: 355193 - DNA, 239 bp, Homo sapiens; identical to SEQ ID NO: 342066
  chr14:103433869-103434108
  hypo

SEQ ID NO: 355194 - DNA, 138 bp, Homo sapiens
  chr14:104000003-104000141
  hypo
cgtggctcggggaacccgcgcctgcctctgggacctgtccctttccctgcgagctcccccttctgggtccaaaggctcctggctcattcatgggcccggcatctcctgccggccacgggagcccgctggggaggatgc

SEQ ID NO: 355195 - DNA, 734 bp, Homo sapiens
  chr14:104000403-104001137
  hypo
cggcagggaggggctgtcatgctcgggctctgcttcgagtaggcgcctcctgttcccgggagcagcgacagcctctaatttcctgtgacagcagcggcccccgcaccgccccacgctgccgtgctgtcagagctgctccgggcccagagctccagcagccctgtggaaggcaggagagcagtgcccgctgtgggccaagtgagacaatggcagcgcgggcttgacccggtgcctggcacatgggagggcctggcatggctaagctgggtgacatgaacagcggcgccaggccccatggggggctgtcagttgagggccaggcccctctgccctgcagtcccagctcttggagagcttgcagtctgtgttggggctgtcttaggctggcctcagaccctagggtgggagtccagggatgctagggccagacgggccaggctctgccacccctgccctctgaccctcgggtcctgtttcccacaggcgggcgcttctgctccttctcaccgtgcatcgagcaggtgcaacgcacatgccaggcgctggcagcgcgcggcttctcagagctgagcaccctggaggtgctgccacaggtctacaacgtgcgcactgtcagcctgccaccgcccgacctgggcacaggcacagatggccctgccggctccgacaccagccccttccgcagcggcacgcccatgaaggaggccgtgggccacaccggctacctgaccttc

SEQ ID NO: 355196 - DNA, 993 bp, Homo sapiens
  chr14:104047919-104048912
  hypo
cgggtaactgaaaccatggaaagaaaaaccatggatggaggggacagctgtgctgccgccatctcccttacacagttgagtaaaccgaggcacagaagaaaatgaagtagccccagatgacgtaggaaatggcagaactgaagggaaaagcagagcagggggctgtagagttaaactgttcttcattccggtggcactagacctgcccgggcggccagaggacacgtggctcctgtcctgtctgccgtgtggctaggggacagccgtgcttgtgctgtgccgtctgagtgtttgtttctgtctgtgggaataaaggggttgccagacaccctccctgctctgtggagggagggtggaatcatgcctttggccactttgcccactcccccttgggccggagcatcagcattagctgtgccacagggtggtatgcgctctgctgaaggtggcaccttcagggaaaggcagtctgccggggaggctagcgagcaccctgggtaggagctgagcgtggcctccgcgcctcctcatgggaagtgctggagatgcaggagcccctgagccagagcccagcgctcttacaagagacctcacttcctgttcggggactggggctgctaagtcagagtgcgcctcctgcacccgccaccctggatgtggttccattccctggtccctgagccatagctggggggcatgagactgtcccctgggctgctttggggaccctacttcagggcagccctgccactccctgtaacgggctgtgggtcctgccctgtggccttcctacctctcttgcgtgtgggtgagcctgagcgtggccaccgccctgggagtgccacagaggcaagcggcactggtcctcatgtgtaaacagccccaccagcacgcggggctggagtagtcaggccgggacctgtcccaggaatgggcaggctgttaacctaggatgcattcaagttaggacacatttcattcccgtgtagcggt

SEQ ID NO: 355197 - DNA, 127 bp, Homo sapiens; identical to SEQ ID NO: 346089
  chr14:104048982-104049109
  hypo

SEQ ID NO: 355198 - DNA, 120 bp, Homo sapiens
  chr14:104159197-104159317
  hypo
cgtgctgtcagtttgacactaaaacctgaagcactcggtgcagttgctcgggcctcacacagacacatcaggtttacatctgaaagtactgcctcccttccccatcacggaggccgtttg

SEQ ID NO: 355199 - DNA, 106 bp, Homo sapiens
  chr14:104159437-104159543
  hypo
tggcagtccctgcccctgtgctggtgctgagagttcgcgacagtggccaggcactgccctcccagttgtccagatccactaatcctcacagacaggccagtgcccc

SEQ ID NO: 355200 - DNA, 129 bp, Homo sapiens
  chr14:104159892-104160021
  hypo
cgaaataattgtctggccgactcgcgagctctgagtgccagccacactgacctggcccactgagagccagcagggctaggtaacctgtcttgggagtgtgagaccgccccgccctgccacgcccctcac

SEQ ID NO: 355201 - DNA, 123 bp, Homo sapiens
  chr14:104160134-104160257
  hypo
tgttactcggcctgcagccccagtgccaggagccaccccgaccgcgacccggccaggctggctcagggaggccgaggtggcgctgaggtggcttcagcacgctggggattggctcctgctcac

SEQ ID NO: 355202 - DNA, 280 bp, Homo sapiens
  chr14:104194172-104194452
  hypo
cggcagtgcgcggagtgcgccctcgtgtccctcaaggaggcggagttctacgacaagcagctcaaagtgctcctgagcggtaaggacgggtgtcctgcacagtcccgcgcgctccgccagccggctcctcgtgtctgtggcgatgctgtgggctgtgcacggggcgttctgcttctctgacgttctctcgccctccctcccttccccgttttcttctggattcgtttagaagcggttatagagccttcccttcttttcagaggcggaatgtcgtctaaaa

SEQ ID NO: 355203 - DNA, 204 bp, Homo sapiens; identical to SEQ ID NO: 216067
  chr14:104194491-104194695
  hypo

SEQ ID NO: 355204 - DNA, 90 bp, Homo sapiens
  chr14:104194750-104194840
  hypo
actgccgtcccagcctcctgtcccctgcctgcccgccgtggggtctgggaccacctgccttcctgcccacagctccatcctgtgtgaaac

SEQ ID NO: 355205 - DNA, 335 bp, Homo sapiens; identical to SEQ ID NO: 348640
  chr14:104202370-104202705
  hypo

SEQ ID NO: 355206 - DNA, 236 bp, Homo sapiens; identical to SEQ ID NO: 216079
  chr14:104618440-104618676
  hypo

SEQ ID NO: 355207 - DNA, 100 bp, Homo sapiens; identical to SEQ ID NO: 348642
  chr14:104623761-104623861
  hypo

SEQ ID NO: 355208 - DNA, 137 bp, Homo sapiens
  chr14:104640046-104640183
  hypo
cggaggccgcagccgcctgcacctcatcgacctgggcagctgtgaggcggcggctggcagggccggggaggctgctgggggtcccctgtgtctgtccctgtcggccctgggcagcgtcatcttggccctggtcaacg

SEQ ID NO: 355209 - DNA, 101 bp, Homo sapiens
  chr14:104640582-104640683
  hypo
cagagacactcagcaccgtgcagctcgccgcccgcatccaccgcctgcgcaggaagaaggccaaggtgctccccacctcctgcccgccccatctcggggcc

SEQ ID NO: 355210 - DNA, 139 bp, Homo sapiens; identical to SEQ ID NO: 346091
  chr14:104641166-104641305
  hypo

SEQ ID NO: 355211 - DNA, 79 bp, Homo sapiens
  chr14:104645047-104645126
  hypo
cgccttcagcggccccgccccaccccgagggaggcccccacccaggtagggcctttggtgggctggggtctatgacccc

SEQ ID NO: 355212 - DNA, 163 bp, Homo sapiens; identical to SEQ ID NO: 346092
  chr14:104645553-104645716
  hypo

SEQ ID NO: 355213 - DNA, 198 bp, Homo sapiens; identical to SEQ ID NO: 345462
  chr14:105189960-105190158
  hypo

SEQ ID NO: 355214 - DNA, 151 bp, Homo sapiens; identical to SEQ ID NO: 351633
  chr14:105196121-105196272
  hypo

SEQ ID NO: 355215 - DNA, 167 bp, Homo sapiens; identical to SEQ ID NO: 348646
  chr14:105240770-105240937
  hypo

SEQ ID NO: 355216 - DNA, 132 bp, Homo sapiens; identical to SEQ ID NO: 318662
  chr14:105241177-105241309
  hypo

SEQ ID NO: 355217 - DNA, 227 bp, Homo sapiens; identical to SEQ ID NO: 348648
  chr14:105241428-105241655
  hypo

SEQ ID NO: 355218 - DNA, 127 bp, Homo sapiens; identical to SEQ ID NO: 342101
  chr14:105244222-105244349
  hypo

SEQ ID NO: 355219 - DNA, 64 bp, Homo sapiens
  chr14:105268589-105268653
  hypo
cgagcggacacactcgggtgagaagccctatacgtgtgtgcagtgtggcaaaagttttcagtac

SEQ ID NO: 355220 - DNA, 455 bp, Homo sapiens; identical to SEQ ID NO: 351636
  chr14:105330980-105331435
  hypo

SEQ ID NO: 355221 - DNA, 85 bp, Homo sapiens
  chr14:105472075-105472160
  hypo
cgaggaggaaaatgcacggcccgtgctcctcgcagccgcacccagtgtgagcacggctgagcagctctgcgggagtggtggcccc

SEQ ID NO: 355222 - DNA, 640 bp, Homo sapiens; identical to SEQ ID NO: 342110
  chr14:105687735-105688375
  hypo

SEQ ID NO: 355223 - DNA, 421 bp, Homo sapiens; identical to SEQ ID NO: 342111
  chr14:105689523-105689944
  hypo

SEQ ID NO: 355224 - DNA, 396 bp, Homo sapiens; identical to SEQ ID NO: 342114
  chr14:105728110-105728506
  hypo

SEQ ID NO: 355225 - DNA, 203 bp, Homo sapiens; identical to SEQ ID NO: 342119
  chr15:26026151-26026354
  hypo

SEQ ID NO: 355226 - DNA, 144 bp, Homo sapiens
  chr15:26234718-26234862
  hypo
cgcggcaagactccaagtagaagcggaccttgagaggcagccaggccaggcggcagccgcgcccggagggtgcggaatgaggagcgcaaggtgggcagagcgtgaaaccttcaccgactgcacctccgccctcgctgccctacc

SEQ ID NO: 355227 - DNA, 115 bp, Homo sapiens; identical to SEQ ID NO: 346095
  chr15:28516961-28517076
  hypo

SEQ ID NO: 355228 - DNA, 177 bp, Homo sapiens; identical to SEQ ID NO: 346096
  chr15:28517198-28517375
  hypo

SEQ ID NO: 355229 - DNA, 53 bp, Homo sapiens; identical to SEQ ID NO: 347321
  chr15:29130654-29130707
  hypo

SEQ ID NO: 355230 - DNA, 329 bp, Homo sapiens; identical to SEQ ID NO: 351648
  chr15:30113537-30113866
  hypo

SEQ ID NO: 355231 - DNA, 319 bp, Homo sapiens; identical to SEQ ID NO: 203810
  chr15:30113984-30114303
  hypo

SEQ ID NO: 355232 - DNA, 431 bp, Homo sapiens; identical to SEQ ID NO: 203811
  chr15:30114349-30114780
  hypo

SEQ ID NO: 355233 - DNA, 375 bp, Homo sapiens; identical to SEQ ID NO: 290655
  chr15:30114810-30115185
  hypo

SEQ ID NO: 355234 - DNA, 100 bp, Homo sapiens; identical to SEQ ID NO: 342131
  chr15:31188921-31189021
  hypo

SEQ ID NO: 355235 - DNA, 139 bp, Homo sapiens; identical to SEQ ID NO: 342133
  chr15:31453201-31453340
  hypo

SEQ ID NO: 355236 - DNA, 250 bp, Homo sapiens; identical to SEQ ID NO: 342134
  chr15:31561317-31561567
  hypo

SEQ ID NO: 355237 - DNA, 136 bp, Homo sapiens
  chr15:31571220-31571356
  hypo
cggtgccccatccctggcatggtccccactccaccctgccccagcaggaggccagtttgtcctggatgggaagaaggcctcacgggcaggggaggctcccacgcatgccaccccttcggccgtgccctggggttcc

SEQ ID NO: 355238 - DNA, 507 bp, Homo sapiens; identical to SEQ ID NO: 351653
  chr15:31774606-31775113
  hypo

SEQ ID NO: 355239 - DNA, 209 bp, Homo sapiens; identical to SEQ ID NO: 290663
  chr15:32162282-32162491
  hypo

SEQ ID NO: 355240 - DNA, 761 bp, Homo sapiens; identical to SEQ ID NO: 345467
  chr15:32162523-32163284
  hypo

SEQ ID NO: 355241 - DNA, 375 bp, Homo sapiens; identical to SEQ ID NO: 348660
  chr15:34635788-34636163
  hypo

SEQ ID NO: 355242 - DNA, 46 bp, Homo sapiens; identical to SEQ ID NO: 351657
  chr15:34729898-34729944
  hypo

SEQ ID NO: 355243 - DNA, 111 bp, Homo sapiens; identical to SEQ ID NO: 335080
  chr15:38857279-38857390
  hypo

SEQ ID NO: 355244 - DNA, 90 bp, Homo sapiens
  chr15:40532821-40532911
  hypo
agacaagcaccagcctgcagtggagaacgcaggaccccgctgcccagaaggagcagccacggtaaggtccccactgccgctgcgtgctcc

SEQ ID NO: 355245 - DNA, 103 bp, Homo sapiens
  chr15:40676583-40676686
  hypo
aagattgagctctgaagtaaataggcttttctccaaaggcttaatgggttgtttgttgtcttgtgttgccgcagaacacctgaatggtaatcctggcaccagc

SEQ ID NO: 355246 - DNA, 234 bp, Homo sapiens
  chr15:43020360-43020594
  hypo
aactgcctggcctgctagctgcaggcctccctcacacgtacggctgccggggtctcctctggaagcagcgcccgcacagccccagggctcttcctttgacagaacctaaaaggggacagatggggtcagtgatctctgggtatttcagcctggctgcagaagtaaatgccccgagtgcaccaagcccctgacctgggaggctgtaccttggaaggaggcaccgtttgccctccc

SEQ ID NO: 355247 - DNA, 563 bp, Homo sapiens
  chr15:45444141-45444704
  hypo
cagacggtgcaacagttcaagcgcttcattgagaactaccggcgccacatcggctgcgtggccgtgttctacgccatcgctggggggcttttcctggagagggcctactgtgagtgactttacttaccacgagccctgtccctaggcttgcaatgagtgatcgccctgggggtggggcctgcgataagtgccagccctgggtagggtaagtggagcctgtctgagtgaagactgtgcgggggaggcctgttgtgagtggcagccggccagggcctaccgcccctaaccagctctctgtcctctgcactgaccctcgcttgcctgcctgggccccctccacagactacgcctttgccgcacatcacacgggcatcacagacaccacccgcgtgggaatcatcctgtcgcggggcacagcagccagcatctctttcatgttctcctacatcttgctcaccatgtgccgcaacctcatcaccttcctgcgagaaaccttcctcaaccgctacgtgcccttcgacgccgccgtggacttccatcgcctcattgcctccaccgccatc

SEQ ID NO: 355248 - DNA, 274 bp, Homo sapiens; identical to SEQ ID NO: 203861
  chr15:45670188-45670462
  hypo

SEQ ID NO: 355249 - DNA, 339 bp, Homo sapiens; identical to SEQ ID NO: 345471
  chr15:45722599-45722938
  hypo

SEQ ID NO: 355250 - DNA, 77 bp, Homo sapiens; identical to SEQ ID NO: 345475
  chr15:48936649-48936726
  hypo

SEQ ID NO: 355251 - DNA, 350 bp, Homo sapiens; identical to SEQ ID NO: 335110
  chr15:50474768-50475118
  hypo

SEQ ID NO: 355252 - DNA, 76 bp, Homo sapiens; identical to SEQ ID NO: 342179
  chr15:54191760-54191836
  hypo

SEQ ID NO: 355253 - DNA, 75 bp, Homo sapiens; identical to SEQ ID NO: 351687
  chr15:60289235-60289310
  hypo

SEQ ID NO: 355254 - DNA, 782 bp, Homo sapiens; identical to SEQ ID NO: 351688
  chr15:60884567-60885349
  hypo

SEQ ID NO: 355255 - DNA, 87 bp, Homo sapiens; identical to SEQ ID NO: 351693
  chr15:62456599-62456686
  hypo

SEQ ID NO: 355256 - DNA, 130 bp, Homo sapiens; identical to SEQ ID NO: 203914
  chr15:62457008-62457138
  hypo

SEQ ID NO: 355257 - DNA, 257 bp, Homo sapiens; identical to SEQ ID NO: 351695
  chr15:62457296-62457553
  hypo

SEQ ID NO: 355258 - DNA, 66 bp, Homo sapiens; identical to SEQ ID NO: 342196
  chr15:62832519-62832585
  hypo

SEQ ID NO: 355259 - DNA, 290 bp, Homo sapiens; identical to SEQ ID NO: 342201
  chr15:63030480-63030770
  hypo

SEQ ID NO: 355260 - DNA, 67 bp, Homo sapiens; identical to SEQ ID NO: 342202
  chr15:63059828-63059895
  hypo

SEQ ID NO: 355261 - DNA, 153 bp, Homo sapiens; identical to SEQ ID NO: 342203
  chr15:63066085-63066238
  hypo

SEQ ID NO: 355262 - DNA, 222 bp, Homo sapiens; identical to SEQ ID NO: 342207
  chr15:63088341-63088563
  hypo

SEQ ID NO: 355263 - DNA, 741 bp, Homo sapiens; identical to SEQ ID NO: 342208
  chr15:63089582-63090323
  hypo

SEQ ID NO: 355264 - DNA, 747 bp, Homo sapiens
  chr15:63132755-63133502
  hypo
cgccagcagcagtataagtttttacccaccgagctgagggaagatgagggctaaaggtgcgagcccagatggcgagccccaggggatggccctggctgaactggacagacagtgttcctgagaggctgggcacttagctggaaaccgcccacctccctcccgggtgagcctggagccctgcgtgcttgttctcacatctctgtcccgtcggcactggctgcatgatcgtgatgtcacacggtacaatgtcctacccacaactcctctgccgcctcccctcatgcctcaccgtgtctcaggagagaggggtgcacgtttcatggactgttaccaacaaagaaaagtcagtattatgttgttctcagacactttggcttttgttggtccttctcttaggcctgctcctggacctctttatgatattgtgatagggaaaaaaatcattgacgtcatagaatattcttcttcctctcaggagaagacggaagctggagttggacatggttcataaaagccagaaacacaaacccgtgtggactccgggagggtgactcaggtcctccttccatgtcttgagcactggctcacccagggggtgaaaaattcccgcccctgtttgcacgctttcttgcctccgtgtgtaagctccttgtacaacccagacccatcttgtattttgtggcccagaaaactgaacgattattttgttcctccgtagtccaaagggcagagttgcggaaggccgtc

SEQ ID NO: 355265 - DNA, 76 bp, Homo sapiens; identical to SEQ ID NO: 342212
  chr15:63695768-63695844
  hypo

SEQ ID NO: 355266 - DNA, 350 bp, Homo sapiens; identical to SEQ ID NO: 203920
  chr15:63795501-63795851
  hypo

SEQ ID NO: 355267 - DNA, 338 bp, Homo sapiens; identical to SEQ ID NO: 347348
  chr15:63795894-63796232
  hypo

SEQ ID NO: 355268 - DNA, 218 bp, Homo sapiens; identical to SEQ ID NO: 342214
  chr15:63889834-63890052
  hypo

SEQ ID NO: 355269 - DNA, 64 bp, Homo sapiens; identical to SEQ ID NO: 342218
  chr15:64683091-64683155
  hypo

SEQ ID NO: 355270 - DNA, 421 bp, Homo sapiens; identical to SEQ ID NO: 342221
  chr15:66946036-66946457
  hypo

SEQ ID NO: 355271 - DNA, 115 bp, Homo sapiens; identical to SEQ ID NO: 342224
  chr15:68888212-68888327
  hypo

SEQ ID NO: 355272 - DNA, 99 bp, Homo sapiens; identical to SEQ ID NO: 342225
  chr15:68893753-68893852
  hypo

SEQ ID NO: 355273 - DNA, 174 bp, Homo sapiens; identical to SEQ ID NO: 342227
  chr15:68937507-68937681
  hypo

SEQ ID NO: 355274 - DNA, 410 bp, Homo sapiens; identical to SEQ ID NO: 342228
  chr15:70352928-70353338
  hypo

SEQ ID NO: 355275 - DNA, 193 bp, Homo sapiens; identical to SEQ ID NO: 351715
  chr15:71184276-71184469
  hypo

SEQ ID NO: 355276 - DNA, 766 bp, Homo sapiens; identical to SEQ ID NO: 290974
  chr15:71184499-71185265
  hypo

SEQ ID NO: 355277 - DNA, 587 bp, Homo sapiens; identical to SEQ ID NO: 345477
  chr15:71407569-71408156
  hypo

SEQ ID NO: 355278 - DNA, 191 bp, Homo sapiens; identical to SEQ ID NO: 335181
  chr15:75976190-75976381
  hypo

SEQ ID NO: 355279 - DNA, 96 bp, Homo sapiens; identical to SEQ ID NO: 342245
  chr15:76558876-76558972
  hypo

SEQ ID NO: 355280 - DNA, 31 bp, Homo sapiens
  chr15:77906720-77906751
  hypo
cgggcatggagtcgttgccgcccgcgttggc

SEQ ID NO: 355281 - DNA, 106 bp, Homo sapiens
  chr15:77906998-77907104
  hypo
ttgggcagtagcacatcagggaagtccttgaactccttgccctggacaaactcgggcgtggcgcacgtgggctgctgccggttgaagttgagccgccagcggcgcc

SEQ ID NO: 355282 - DNA, 1218 bp, Homo sapiens; identical to SEQ ID NO: 335194
  chr15:80215312-80216530
  hypo

SEQ ID NO: 355283 - DNA, 152 bp, Homo sapiens; identical to SEQ ID NO: 342257
  chr15:80295619-80295771
  hypo

SEQ ID NO: 355284 - DNA, 188 bp, Homo sapiens
  chr15:80471858-80472046
  hypo
cgtgcattgcatctgagcgtctcggtgggcacgtggtgccttggccccctctgcccacagcctgaccgcccacagctctccctcgctccttggcctgccctgacatcgtgtttgaatcgttcagctccattgcccagtgtccatcccaaggcccggcatgggagaatgggagcgagggctttgctcac

SEQ ID NO: 355285 - DNA, 196 bp, Homo sapiens; identical to SEQ ID NO: 347353
  chr15:81294105-81294301
  hypo

SEQ ID NO: 355286 - DNA, 194 bp, Homo sapiens; identical to SEQ ID NO: 345478
  chr15:82339684-82339878
  hypo

SEQ ID NO: 355287 - DNA, 113 bp, Homo sapiens; identical to SEQ ID NO: 342264
  chr15:83572358-83572471
  hypo

SEQ ID NO: 355288 - DNA, 305 bp, Homo sapiens; identical to SEQ ID NO: 342268
  chr15:86306299-86306604
  hypo

SEQ ID NO: 355289 - DNA, 47 bp, Homo sapiens
  chr15:89876331-89876378
  hypo
cgagggggatatggccaccgccaatgtggggcaagttccctctgcca

SEQ ID NO: 355290 - DNA, 106 bp, Homo sapiens; identical to SEQ ID NO: 342275
  chr15:90501638-90501744
  hypo

SEQ ID NO: 355291 - DNA, 364 bp, Homo sapiens; identical to SEQ ID NO: 348675
  chr15:90903993-90904357
  hypo

SEQ ID NO: 355292 - DNA, 109 bp, Homo sapiens; identical to SEQ ID NO: 351743
  chr15:91427360-91427469
  hypo

SEQ ID NO: 355293 - DNA, 77 bp, Homo sapiens; identical to SEQ ID NO: 351744
  chr15:91427979-91428056
  hypo

SEQ ID NO: 355294 - DNA, 387 bp, Homo sapiens; identical to SEQ ID NO: 342283
  chr15:91503650-91504037
  hypo

SEQ ID NO: 355295 - DNA, 297 bp, Homo sapiens; identical to SEQ ID NO: 348676
  chr15:91840031-91840328
  hypo

SEQ ID NO: 355296 - DNA, 103 bp, Homo sapiens; identical to SEQ ID NO: 347360
  chr15:92459227-92459330
  hypo

SEQ ID NO: 355297 - DNA, 67 bp, Homo sapiens; identical to SEQ ID NO: 342289
  chr15:93504252-93504319
  hypo

SEQ ID NO: 355298 - DNA, 229 bp, Homo sapiens; identical to SEQ ID NO: 319557
  chr15:93595181-93595410
  hypo

SEQ ID NO: 355299 - DNA, 121 bp, Homo sapiens
  chr15:93595508-93595629
  hypo
gggccatccttggagcagttgtgctggctcatgaggtcctctatgccatggacggccgagtggtaggccaggtcaccccggcaggtgcgggccgtccgccgcgtgcacagggcgtagctgc

SEQ ID NO: 355300 - DNA, 351 bp, Homo sapiens; identical to SEQ ID NO: 342291
  chr15:94048797-94049148
  hypo

SEQ ID NO: 355301 - DNA, 353 bp, Homo sapiens; identical to SEQ ID NO: 342293
  chr15:94881658-94882011
  hypo

SEQ ID NO: 355302 - DNA, 460 bp, Homo sapiens; identical to SEQ ID NO: 351747
  chr15:96873798-96874258
  hypo

SEQ ID NO: 355303 - DNA, 209 bp, Homo sapiens; identical to SEQ ID NO: 342305
  chr15:99465447-99465656
  hypo

SEQ ID NO: 355304 - DNA, 226 bp, Homo sapiens
  chr15:99497132-99497358
  hypo
agccccagtaagctcactgaggcacacaggccccatgtccacagccgctcctggctgaggcgtggttcctaagacgacccttactgttgagggctgccaggagggagagacacattcagccccgcaggtcctctgggaatccggtgagcgtcggcaccgggctggggccgtgctgattcccggcagcgtgtgggaatgtgcgggtgcctcgtggcctgctgacatc

SEQ ID NO: 355305 - DNA, 130 bp, Homo sapiens; identical to SEQ ID NO: 342309
  chr15:99505061-99505191
  hypo

SEQ ID NO: 355306 - DNA, 85 bp, Homo sapiens; identical to SEQ ID NO: 346105
  chr15:99506062-99506147
  hypo

SEQ ID NO: 355307 - DNA, 468 bp, Homo sapiens; identical to SEQ ID NO: 345483
  chr15:100882092-100882560
  hypo

SEQ ID NO: 355308 - DNA, 497 bp, Homo sapiens; identical to SEQ ID NO: 335245
  chr15:101458286-101458783
  hypo

SEQ ID NO: 355309 - DNA, 693 bp, Homo sapiens; identical to SEQ ID NO: 291211
  chr15:101459313-101460006
  hypo

SEQ ID NO: 355310 - DNA, 148 bp, Homo sapiens; identical to SEQ ID NO: 342314
  chr15:101464778-101464926
  hypo

SEQ ID NO: 355311 - DNA, 157 bp, Homo sapiens; identical to SEQ ID NO: 342316
  chr15:101845367-101845524
  hypo

SEQ ID NO: 355312 - DNA, 247 bp, Homo sapiens; identical to SEQ ID NO: 342318
  chr15:101938625-101938872
  hypo

SEQ ID NO: 355313 - DNA, 216 bp, Homo sapiens; identical to SEQ ID NO: 342319
  chr15:102020345-102020561
  hypo

SEQ ID NO: 355314 - DNA, 152 bp, Homo sapiens
  chr15:102043329-102043481
  hypo
agctggggaactgcccacactgggaggggttgggaagcgtaggagggcacctgtcgcagacgttgaggaggggctgcctttcccctccaggggctgacctcccaggtgattcccagagccagaccacaattccagaattcagtgaaaacagc

SEQ ID NO: 355315 - DNA, 544 bp, Homo sapiens; identical to SEQ ID NO: 342321
  chr15:102076822-102077366
  hypo

SEQ ID NO: 355316 - DNA, 179 bp, Homo sapiens; identical to SEQ ID NO: 348681
  chr16:142447-142626
  hypo

SEQ ID NO: 355317 - DNA, 117 bp, Homo sapiens; identical to SEQ ID NO: 342326
  chr16:189554-189671
  hypo

SEQ ID NO: 355318 - DNA, 358 bp, Homo sapiens
  chr16:311205-311563
  hypo
cgagcacaggagtgccgccctcccctcctgttggcatctgctctgagtgtgcagtgagccgtgggctcacgagggtgatgcctcaacaggagcctgcctgtcacaggccttgcagttgccgggctgctgttgaaggggactcagggccacgttccgtgaccgtgtgcttgattctaggggaaaccctgtggaaccacagcagcagcttcagcgggaatgcgtccatcctgagccctctgctgcaggtgcctgatgtggacggcgatggggccccagacctgctggttctcacccaggagcgggaggaggtacatcccagcctggctctgctcccaagtcacgaggccacctgccacac

SEQ ID NO: 355319 - DNA, 367 bp, Homo sapiens; identical to SEQ ID NO: 342333
  chr16:350669-351036
  hypo

SEQ ID NO: 355320 - DNA, 195 bp, Homo sapiens
  chr16:410000-410195
  hypo
cgcctctccgggcgctgccgcccccccgttggtgctcatctgtccttctgcccactatccccagcggccccgatacctgcacaccccagtgcccagcggttccccctcgagctggcaaggggacattaaatgggaggtgaggaagtgcggcccccagcgggcagctgcctttgccccggcccacctgcgcccccg

SEQ ID NO: 355321 - DNA, 140 bp, Homo sapiens
  chr16:410714-410854
  hypo
ggtggccgcgtcggcgacgtatgggccccgtggtgctgcggtgcacgacctctgtgctgtcaccccacagtgtccgctcctgcacgtacacgcgtgcacgcgcacacacgtgcacacgcacacacacacaagcacgcccc

SEQ ID NO: 355322 - DNA, 100 bp, Homo sapiens; identical to SEQ ID NO: 346108
  chr16:410895-410995
  hypo

SEQ ID NO: 355323 - DNA, 111 bp, Homo sapiens; identical to SEQ ID NO: 346109
  chr16:411606-411717
  hypo

SEQ ID NO: 355324 - DNA, 72 bp, Homo sapiens; identical to SEQ ID NO: 342335
  chr16:440413-440485
  hypo

SEQ ID NO: 355325 - DNA, 214 bp, Homo sapiens
  chr16:521925-522139
  hypo
ccggtctggagggttagattccaggagagccacgtggctgcagcagaaaatgcatgaagttgaacttgagcccttgggggccgccgggaaggtggaggtggcagccgccagtcctggtcagcctgctgccgagcaagggtaccagaagtggggctgagctgctggccggtagggcctgggcttctcatgtcagtcctctgagccctgactcctc

SEQ ID NO: 355326 - DNA, 128 bp, Homo sapiens
  chr16:533135-533263
  hypo
cgagctagttggggccggagtagagggacgggcagagtctgggagaaggtcagatgaaggaggtgtccagtggctcacgtggacctgctttccgtgttgcccctgctactggaaagtccgctcagcac

SEQ ID NO: 355327 - DNA, 576 bp, Homo sapiens; identical to SEQ ID NO: 342342
  chr16:594129-594705
  hypo

SEQ ID NO: 355328 - DNA, 150 bp, Homo sapiens
  chr16:611800-611950
  hypo
cgtgtgtcctggggagtcggtgtgtagggcctgtgtgagcatgtgagtgccgtgttggagtggtttggaaagcccccccacacctggatgggtggtgagtgtgttatcacggacaagcagccgtgttcaccgtgatggagtgtgaggtgt

SEQ ID NO: 355329 - DNA, 83 bp, Homo sapiens
  chr16:612320-612403
  hypo
gcctggcctggccccacatgagactgaccccctaagagacccccagtgcccacctgacgccctgctagagcaggctctgtgcc

SEQ ID NO: 355330 - DNA, 77 bp, Homo sapiens; identical to SEQ ID NO: 216551
  chr16:667407-667484
  hypo

SEQ ID NO: 355331 - DNA, 200 bp, Homo sapiens; identical to SEQ ID NO: 346112
  chr16:668074-668274
  hypo

SEQ ID NO: 355332 - DNA, 70 bp, Homo sapiens; identical to SEQ ID NO: 348687
  chr16:677367-677437
  hypo

SEQ ID NO: 355333 - DNA, 34 bp, Homo sapiens; identical to SEQ ID NO: 348688
  chr16:677803-677837
  hypo

SEQ ID NO: 355334 - DNA, 63 bp, Homo sapiens; identical to SEQ ID NO: 216557
  chr16:677909-677972
  hypo

SEQ ID NO: 355335 - DNA, 106 bp, Homo sapiens; identical to SEQ ID NO: 348690
  chr16:678084-678190
  hypo

SEQ ID NO: 355336 - DNA, 512 bp, Homo sapiens; identical to SEQ ID NO: 342349
  chr16:717202-717714
  hypo

SEQ ID NO: 355337 - DNA, 62 bp, Homo sapiens; identical to SEQ ID NO: 351764
  chr16:745060-745122
  hypo

SEQ ID NO: 355338 - DNA, 97 bp, Homo sapiens; identical to SEQ ID NO: 291235
  chr16:745316-745413
  hypo

SEQ ID NO: 355339 - DNA, 341 bp, Homo sapiens
  chr16:810054-810395
  hypo
ggtttcaggggcagggagggggcttctgtggccccaggtcaggaggagcagctcttccatcagcagcaggcagccagcccagatgcgtagggaagacagctcccacttcgccaggccagagagcgcccgggggcagctctgttccagtcgaccctgcgagaaaggggtgtgcgtgtgcctggagctgggccccgtcctgcctccctgacctgtgtgctcccacagccctgagacggacggctcacagccttgcgaggcccacactgcactgggggtcaggcttgtgctcccgggagtcctgtctgggctgcgtggccaccatccagagcctgctgacctgc

SEQ ID NO: 355340 - DNA, 126 bp, Homo sapiens
  chr16:845724-845850
  hypo
cgctggtgtccggcatcgcgccagccacgcgcagccgggccacgccccaggccctgctcctcgatgccctctgcctgctcctggacattcttgcacccaagctccgccccgtgagtgccgtccccg

SEQ ID NO: 355341 - DNA, 258 bp, Homo sapiens
  chr16:981471-981729
  hypo
cgcacacgcggctcggatgagctgaggaacgcacgcacaaactgcattctcccaggccgtcccgaacgaggccacaggaaaggagcctccccagaggtctcagatcaggaagcctgaccttccagtgcctttggtctaggtgttctgaggcccagcacccggagtcatacctcagtaactggcagctctatgttctccaagatcagggaagggaagacagttcaaagacgcatggctgctcggaaggcagggagagca

SEQ ID NO: 355342 - DNA, 226 bp, Homo sapiens; identical to SEQ ID NO: 216583
  chr16:981843-982069
  hypo

SEQ ID NO: 355343 - DNA, 278 bp, Homo sapiens
  chr16:982099-982377
  hypo
ccagagtcacccggctcctcgactgcctctgccgctccagcactgcctctgggagtccactgccccaggcacttcccccccaccctacttagagtagagcctgtgttccccaggaggcctcacaggcgggggcacggggagggtgggctccaggccctctcatcctcagcgatgggtcctgtggccctggtgctgagacacggcagcaccgtggcctcgcaggcccatctctcacagggaacacacaagcctcagccgctgccccccgagcctgcccc

SEQ ID NO: 355344 - DNA, 223 bp, Homo sapiens
  chr16:1061203-1061426
  hypo
cggccagggcagagacgtaggacagagacgcagcgcagagcggccagggcagagatgcagggcagagacacagcgtagagcggccagggcagagacgcagggcagagacgcagggcagagacacagggcagagacgcagggcaaagcggcagggcagagacgcagggcaaagcggcagggcagagacgcagggcaaagcggcagggcagagacgcagggcaaa

SEQ ID NO: 355345 - DNA, 81 bp, Homo sapiens
  chr16:1154990-1155071
  hypo
cgtctccacgtagtcgcccacgaggtaagggtgccagcattgctcgtggtactgcaggttgttggtggcgatggagaaggg

SEQ ID NO: 355346 - DNA, 131 bp, Homo sapiens
  chr16:1248221-1248352
  hypo
cgagcccgagatgccacgtggtcagacctgccgcagccagttccctgcctcggccagtcccctgcctccactcctgcccctccacaccccagccctccaaaagcagcagacctgctgccctgggatggttg

SEQ ID NO: 355347 - DNA, 88 bp, Homo sapiens
  chr16:1248922-1249010
  hypo
caccatgctgtctcccgcccccaccccccatcatggctccgcccagctggcagtcaccgccccacatggctccgcccacggtgcagtc

SEQ ID NO: 355348 - DNA, 385 bp, Homo sapiens
  chr16:1397859-1398244
  hypo
tgggggcaggggggctcacgactgtgctcctgcaggcttaagtgacccctttgtgatcgtggagctgggcccaccgcatctctttccactggtccgcagccagaggacccaggtgaagacccggacgctgcaccctgtatacgacgaactcttctacttgtgagtgtcctaagccccagccccagccccaggctccaggctgccggagcgagactcccgactggcctctgtccgcagttccgtgcctgccgaggcgtgccgccgccgcgcggcctgtgtgttgttcaccgtcatggaccacgactggctgtccaccaacgacttcgctggggaggcggccctcggcctaggtggcgtcactggtgtcgcccggccccaggtgggc

SEQ ID NO: 355349 - DNA, 132 bp, Homo sapiens
  chr16:1424307-1424439
  hypo
cgtccctgctggctgcaagttcttggaccctcactgatgcctggtactggacagtgtgctgctgaggcctgctctgagacaggcaaagccacccctgcctgtccctgaagggccctagacccccttcctcct

SEQ ID NO: 355350 - DNA, 177 bp, Homo sapiens
  chr16:1424469-1424646
  hypo
ggccccaggcaaccgcaccccggggaaacctgtcagacccgaccgtgggggtcggcgcgccgggaacctccacagcctggccagcccctgcctggtgctcggttcagacaagctggggcccagcagaagcaaagaggcggtcactgccccacctacccgacatcgagtcccgccctc

SEQ ID NO: 355351 - DNA, 472 bp, Homo sapiens; identical to SEQ ID NO: 348691
  chr16:1424928-1425400
  hypo

SEQ ID NO: 355352 - DNA, 407 bp, Homo sapiens; identical to SEQ ID NO: 346114
  chr16:1425684-1426091
  hypo

SEQ ID NO: 355353 - DNA, 53 bp, Homo sapiens; identical to SEQ ID NO: 342385
  chr16:1472227-1472280
  hypo

SEQ ID NO: 355354 - DNA, 232 bp, Homo sapiens
  chr16:1493342-1493574
  hypo
cgggtctggcacctgcccctggagtccacccagctccggcaccactggcccctgggagctctgggcctgggcagcaggggtgagctgggctccaggcccagaagcagctgcccccaacacccaggaaaggggcagctcgacctgtgggtgggggagccgctcacctccggcgcctccttttcgggggcctgggctgccggccgcgcctcctgctgcaactgcctcagctctg

SEQ ID NO: 355355 - DNA, 563 bp, Homo sapiens
  chr16:1493691-1494254
  hypo
ccaccctggccggggcgagagtgggcgagtctggcggtgcccgccgtggaggcggaggcggcggcgacgtggtcctcccccgccagcaccccctgcagggctcaccactgctccagctggttccagtgcttggcggtgtcctgctcggggacagaggccgtggatgtcggatggctggactcatacctctccgagagctcctccaggctcaagggctcggggctggccaggcctcctgccaggaggagccccaggtcttccagggtgacggctctcagctgggaaggggccgatgcccctgagggtccactgtcagccaactctacaaggaggcatcttgggagcttgccccttggggcccggcccccactggagcttacgggaacaaggccccaaacccccgcaggaccctcgcccaccacccagagctcaacgcgtctccttgggtcacacaggatccagacgggcttggctcagacaagtccagggccctgcctgaagacacacagcactgggcggcaggaacaagcgagctggagggagcccggggtcagaagcagagc

SEQ ID NO: 355356 - DNA, 135 bp, Homo sapiens; identical to SEQ ID NO: 342388
  chr16:1651481-1651616
  hypo

SEQ ID NO: 355357 - DNA, 301 bp, Homo sapiens; identical to SEQ ID NO: 342389
  chr16:1652282-1652583
  hypo

SEQ ID NO: 355358 - DNA, 90 bp, Homo sapiens; identical to SEQ ID NO: 342390
  chr16:1677046-1677136
  hypo

SEQ ID NO: 355359 - DNA, 194 bp, Homo sapiens; identical to SEQ ID NO: 346115
  chr16:1730112-1730306
  hypo

SEQ ID NO: 355360 - DNA, 105 bp, Homo sapiens; identical to SEQ ID NO: 346116
  chr16:1730761-1730866
  hypo

SEQ ID NO: 355361 - DNA, 131 bp, Homo sapiens
  chr16:1753650-1753781
  hypo
cgtaacctttatcgcacgttatttgctggagatggcgccatgctcctttcatggattagctgacattcctaataggctggatattttaggctgttttgcaggcttagaaacagagatttggggccaggcac

SEQ ID NO: 355362 - DNA, 346 bp, Homo sapiens
  chr16:1812272-1812618
  hypo
cgtgtaggcaccccaggaggaagcaggtgtcacccggcctccgagggctggctgagcctctgtgcccctccctccgcaggacaaaatccccatggcccagcgccgccgcttcacgcgggtggagatggcccgtgtgctcatggagcggaaccagtacaaggagcggctgatggagctgcaggaggctgtgcggtggactgagatgatcaggtgggagttgcggccaccccaggaggggctgcgggatcatccctgacggcaggactgcggctccctcctctgcacctccctgtcttctggggggactgaagtgcgctgggtgcttcctggcgggagccagagagtc

SEQ ID NO: 355363 - DNA, 183 bp, Homo sapiens; identical to SEQ ID NO: 346117
  chr16:1813299-1813482
  hypo

SEQ ID NO: 355364 - DNA, 216 bp, Homo sapiens; identical to SEQ ID NO: 216640
  chr16:1814037-1814253
  hypo

SEQ ID NO: 355365 - DNA, 112 bp, Homo sapiens
  chr16:1814369-1814481
  hypo
caagccagcgccaggccgcgatcccctgacctgcgaccgcgaaggagacggcgagcccaagagcgcccacacgtctcccgagaagaagaaggtgagcatggccgaggccacc

SEQ ID NO: 355366 - DNA, 48 bp, Homo sapiens; identical to SEQ ID NO: 345484
  chr16:2042503-2042551
  hypo

SEQ ID NO: 355367 - DNA, 228 bp, Homo sapiens; identical to SEQ ID NO: 348700
  chr16:2042997-2043225
  hypo

SEQ ID NO: 355368 - DNA, 74 bp, Homo sapiens; identical to SEQ ID NO: 348701
  chr16:2104688-2104762
  hypo

SEQ ID NO: 355369 - DNA, 187 bp, Homo sapiens; identical to SEQ ID NO: 348702
  chr16:2105384-2105571
  hypo

SEQ ID NO: 355370 - DNA, 67 bp, Homo sapiens; identical to SEQ ID NO: 346120
  chr16:2106533-2106600
  hypo

SEQ ID NO: 355371 - DNA, 62 bp, Homo sapiens; identical to SEQ ID NO: 216652
  chr16:2106641-2106703
  hypo

SEQ ID NO: 355372 - DNA, 426 bp, Homo sapiens; identical to SEQ ID NO: 346122
  chr16:2107057-2107483
  hypo

SEQ ID NO: 355373 - DNA, 440 bp, Homo sapiens; identical to SEQ ID NO: 342413
  chr16:2108531-2108971
  hypo

SEQ ID NO: 355374 - DNA, 183 bp, Homo sapiens
  chr16:2129581-2129764
  hypo
acagaccaaggaggcgccggccaagctggagtcccaggctgggcagcaggtgtcccgtggggcccgggatcgggtccgttccatgtcgggtgagccttggccccagccacctccacacaggcaccggggctccctcagttgctgctggtcccagtgttcaggaaggccccgagcccaggggcc

SEQ ID NO: 355375 - DNA, 228 bp, Homo sapiens
  chr16:2131440-2131668
  hypo
cgtcagagcagcgctggctccgacatcgtggtcctgaggattgtgggagggagcatgagggcaaaaccagggcccaggccaggaggcccctggggggccagagatgggtaaggggaggtactggcctcaggccaaaggtgctgccgcctccgcagggaacaccagctggctgatgagcctggagaacccgctcagccctttctcctcggacatcaacaacatgcccct

SEQ ID NO: 355376 - DNA, 49 bp, Homo sapiens
  chr16:2141860-2141909
  hypo
cgtagcccccgctgtcatacacggcacaggagccccaggaccatgccct

SEQ ID NO: 355377 - DNA, 574 bp, Homo sapiens; identical to SEQ ID NO: 216662
  chr16:2141972-2142546
  hypo

SEQ ID NO: 355378 - DNA, 391 bp, Homo sapiens
  chr16:2142628-2143019
  hypo
tgccccatgcccgcctcgagtgagcggccaccagagacccagggaacatggctcccactgccctgctggccacggctagacctgggcttctcagccttatcctggggatgttctggggcagacagttgtctgtcatgggcccgtcctgtgcactgcaagacacggacctgtgtccctcccctctgcctactgatgccagcagcacctacctccagttctagcagccacaaaggtatctacacatgtccacatgtcccctagggtctggctggactaaaggcaaaactaaagcccagaagacagaccagtgcaccggatgcccgtaccgcgtgatggccaggaaggcccggctgtgcagctcctgcttgatggcgctttgcagacggtaggc

SEQ ID NO: 355379 - DNA, 168 bp, Homo sapiens
  chr16:2146195-2146363
  hypo
cgtagttacccaaacccagacaccgcagcccctgtgcatgcaggccctgtggtgtggcctgtggctccggggcaccgcacctgcactgcatgccactgcactgaatcctgcaggcagctgcagtgcaacggcagggccgtgtggacctcagcacacctgagcatagga

SEQ ID NO: 355380 - DNA, 75 bp, Homo sapiens; identical to SEQ ID NO: 346123
  chr16:2229615-2229690
  hypo

SEQ ID NO: 355381 - DNA, 265 bp, Homo sapiens; identical to SEQ ID NO: 216670
  chr16:2230223-2230488
  hypo

SEQ ID NO: 355382 - DNA, 182 bp, Homo sapiens
  chr16:2231183-2231365
  hypo
ggaggtactcctggcttcgagacatggggctgctgggcccagggggcccatctcccagcagctcctgcgagctgctcatgtgccgtgcccgaccacccaggctggagtcctgccgcgtggtggccctcggggtgggtggcaggtggctggagggcttctcagtggtgggccccacctcagcc

SEQ ID NO: 355383 - DNA, 72 bp, Homo sapiens; identical to SEQ ID NO: 346125
  chr16:2278311-2278383
  hypo

SEQ ID NO: 355384 - DNA, 388 bp, Homo sapiens; identical to SEQ ID NO: 346126
  chr16:2280815-2281203
  hypo

SEQ ID NO: 355385 - DNA, 237 bp, Homo sapiens; identical to SEQ ID NO: 216674
  chr16:2281402-2281639
  hypo

SEQ ID NO: 355386 - DNA, 61 bp, Homo sapiens; identical to SEQ ID NO: 346128
  chr16:2281702-2281763
  hypo

SEQ ID NO: 355387 - DNA, 810 bp, Homo sapiens; identical to SEQ ID NO: 346129
  chr16:2282326-2283136
  hypo

SEQ ID NO: 355388 - DNA, 512 bp, Homo sapiens; identical to SEQ ID NO: 342425
  chr16:2358246-2358758
  hypo

SEQ ID NO: 355389 - DNA, 394 bp, Homo sapiens; identical to SEQ ID NO: 346130
  chr16:2540434-2540828
  hypo

SEQ ID NO: 355390 - DNA, 60 bp, Homo sapiens; identical to SEQ ID NO: 346131
  chr16:2540933-2540993
  hypo

SEQ ID NO: 355391 - DNA, 135 bp, Homo sapiens; identical to SEQ ID NO: 342431
  chr16:2544830-2544965
  hypo

SEQ ID NO: 355392 - DNA, 383 bp, Homo sapiens
  chr16:2642765-2643148
  hypo
cgctgtgctctagatgccgccagtggagctttgcccgcagtctctgtccatgcaccctgggccaccggggagtggaattgtccatttcattgtctctctcaggggatgctggcgcgggggtgggtggcgcctgtccgtggggcccttgcctgcctccccgtggtgctggcgtgttctgtcactgagccactctggggcttcagtgtccctggcatgggtgacactgctgggagtgcctctgggctccttgcctgtggcctttttttttctcaggatggatttctggaagcgaggctacttctcagtactatttccgaatcgcttcctcagtgagtcctccccaggctgcaggtgccgagcgggagcaccactcctgcacgccc

SEQ ID NO: 355393 - DNA, 49 bp, Homo sapiens; identical to SEQ ID NO: 346132
  chr16:2770043-2770092
  hypo

SEQ ID NO: 355394 - DNA, 173 bp, Homo sapiens; identical to SEQ ID NO: 346133
  chr16:2806405-2806578
  hypo

SEQ ID NO: 355395 - DNA, 173 bp, Homo sapiens; identical to SEQ ID NO: 348719
  chr16:2974650-2974823
  hypo

SEQ ID NO: 355396 - DNA, 326 bp, Homo sapiens; identical to SEQ ID NO: 346134
  chr16:3021581-3021907
  hypo

SEQ ID NO: 355397 - DNA, 52 bp, Homo sapiens; identical to SEQ ID NO: 348721
  chr16:3139033-3139085
  hypo

SEQ ID NO: 355398 - DNA, 608 bp, Homo sapiens; identical to SEQ ID NO: 348722
  chr16:3139367-3139975
  hypo

SEQ ID NO: 355399 - DNA, 304 bp, Homo sapiens; identical to SEQ ID NO: 351771
  chr16:3208795-3209099
  hypo

SEQ ID NO: 355400 - DNA, 203 bp, Homo sapiens; identical to SEQ ID NO: 348723
  chr16:3696491-3696694
  hypo

SEQ ID NO: 355401 - DNA, 62 bp, Homo sapiens; identical to SEQ ID NO: 348724
  chr16:3696802-3696864
  hypo

SEQ ID NO: 355402 - DNA, 179 bp, Homo sapiens; identical to SEQ ID NO: 342450
  chr16:3811586-3811765
  hypo

SEQ ID NO: 355403 - DNA, 147 bp, Homo sapiens
  chr16:3900217-3900364
  hypo
cgtggtcccattttacgcattactcggagggaaagcccgcggttaggtaggaagtattgaaagtgcttcagttcacttaccttggccatgcctcctgcctgtgcggtgttcagtcccgcgtgaccagtcatttgcggggaaacctgc

SEQ ID NO: 355404 - DNA, 122 bp, Homo sapiens; identical to SEQ ID NO: 89770
  chr16:4092845-4092967
  hypo

SEQ ID NO: 355405 - DNA, 282 bp, Homo sapiens; identical to SEQ ID NO: 351774
  chr16:4165534-4165816
  hypo

SEQ ID NO: 355406 - DNA, 1114 bp, Homo sapiens; identical to SEQ ID NO: 351775
  chr16:4165852-4166966
  hypo

SEQ ID NO: 355407 - DNA, 193 bp, Homo sapiens; identical to SEQ ID NO: 348725
  chr16:4203995-4204188
  hypo

SEQ ID NO: 355408 - DNA, 543 bp, Homo sapiens; identical to SEQ ID NO: 345486
  chr16:4233245-4233788
  hypo

SEQ ID NO: 355409 - DNA, 187 bp, Homo sapiens; identical to SEQ ID NO: 335276
  chr16:4234090-4234277
  hypo

SEQ ID NO: 355410 - DNA, 68 bp, Homo sapiens
  chr16:4430998-4431066
  hypo
cgccaggggaccacggtgccccgagacgtgccacccgacacggtggggctgtacgtctttgagaacgg

SEQ ID NO: 355411 - DNA, 298 bp, Homo sapiens; identical to SEQ ID NO: 216731
  chr16:4431189-4431487
  hypo

SEQ ID NO: 355412 - DNA, 313 bp, Homo sapiens
  chr16:4431516-4431829
  hypo
ccgcttgcgcaacctccacgacctggatgtgtccgacaaccagctggagcgagtgccacctgtgatccgaggcctccggggcctgacgcgcctgcggctggccggcaacacccgcattgcccagctgcggcccgaggacctggccggcctggctgccctgcaggagctggatgtgagcaacctaagcctgcaggccctgcctggcgacctctcgggcctcttcccccgcctgcggctgctggcagctgcccgcaaccccttcaactgcgtgtgccccctgagctggtttggcccctgggtgcgcgagagccac

SEQ ID NO: 355413 - DNA, 847 bp, Homo sapiens; identical to SEQ ID NO: 342461
  chr16:4431854-4432701
  hypo

SEQ ID NO: 355414 - DNA, 176 bp, Homo sapiens; identical to SEQ ID NO: 342463
  chr16:4478626-4478802
  hypo

SEQ ID NO: 355415 - DNA, 59 bp, Homo sapiens; identical to SEQ ID NO: 342467
  chr16:4719497-4719556
  hypo

SEQ ID NO: 355416 - DNA, 256 bp, Homo sapiens; identical to SEQ ID NO: 342470
  chr16:4787730-4787986
  hypo

SEQ ID NO: 355417 - DNA, 568 bp, Homo sapiens; identical to SEQ ID NO: 342471
  chr16:4802468-4803036
  hypo

SEQ ID NO: 355418 - DNA, 118 bp, Homo sapiens; identical to SEQ ID NO: 348727
  chr16:4920116-4920234
  hypo

SEQ ID NO: 355419 - DNA, 200 bp, Homo sapiens; identical to SEQ ID NO: 216748
  chr16:4920289-4920489
  hypo

SEQ ID NO: 355420 - DNA, 314 bp, Homo sapiens; identical to SEQ ID NO: 348729
  chr16:4920526-4920840
  hypo

SEQ ID NO: 355421 - DNA, 814 bp, Homo sapiens; identical to SEQ ID NO: 335283
  chr16:8767901-8768715
  hypo

SEQ ID NO: 355422 - DNA, 64 bp, Homo sapiens
  chr16:9005277-9005341
  hypo
cgagccacatgctgagtgacaagctctcaatccaacacggaattgtatatccagagtgtatgga

SEQ ID NO: 355423 - DNA, 298 bp, Homo sapiens; identical to SEQ ID NO: 335285
  chr16:9186882-9187180
  hypo

SEQ ID NO: 355424 - DNA, 587 bp, Homo sapiens; identical to SEQ ID NO: 342488
  chr16:11219568-11220155
  hypo

SEQ ID NO: 355425 - DNA, 74 bp, Homo sapiens; identical to SEQ ID NO: 342490
  chr16:11974709-11974783
  hypo

SEQ ID NO: 355426 - DNA, 146 bp, Homo sapiens
  chr16:12132253-12132399
  hypo
cggggcagctcttctcaacaccccttcctggcacttgttcttgttggcattcggctttcaggtgtttggagaaccagaagcccttgcccgctttttgacttaaccccatgtttcaaagcagatcagtgtatatccctaaattaaat

SEQ ID NO: 355427 - DNA, 376 bp, Homo sapiens
  chr16:12132450-12132826
  hypo
acattaattctggcagtggaagcggaaccctgctgggataattcttatcatcatcagcatcaccctgactagctttaaaaggattctgtagcagtaagcaatttgcagaattgaaaggtgaaaacacactttaaagcgttcatgtagattcaaggtcggagggaggtgactgcatttttcaagacaggctgcaggtgagagtcacttgactggaaatgtgatggacgtaccgacaatggtctggggtatttcgaaatacgttgttggccagctggcccagggtgttgttgtcgccagattccccgtcctggtttcttgagtgaggcggagaatggaaggaaggctgttttgtacagttgtgtggagtagactgatc

SEQ ID NO: 355428 - DNA, 150 bp, Homo sapiens; identical to SEQ ID NO: 348732
  chr16:12210622-12210772
  hypo

SEQ ID NO: 355429 - DNA, 91 bp, Homo sapiens; identical to SEQ ID NO: 348733
  chr16:12210896-12210987
  hypo

SEQ ID NO: 355430 - DNA, 429 bp, Homo sapiens; identical to SEQ ID NO: 345490
  chr16:12897365-12897794
  hypo

SEQ ID NO: 355431 - DNA, 108 bp, Homo sapiens; identical to SEQ ID NO: 342503
  chr16:15129362-15129470
  hypo

SEQ ID NO: 355432 - DNA, 160 bp, Homo sapiens; identical to SEQ ID NO: 342508
  chr16:16103307-16103467
  hypo

SEQ ID NO: 355433 - DNA, 63 bp, Homo sapiens; identical to SEQ ID NO: 342509
  chr16:16188327-16188390
  hypo

SEQ ID NO: 355434 - DNA, 117 bp, Homo sapiens
  chr16:19708387-19708504
  hypo
cgccagccagtttgcgagtccgtgcccagcaggtgccagcccgcgtgccctgtgccaaagcgcttttctcttgtagcccgcgggcctgggcgcccacagcacaacctgctccctgat

SEQ ID NO: 355435 - DNA, 47 bp, Homo sapiens; identical to SEQ ID NO: 216831
  chr16:19708561-19708608
  hypo

SEQ ID NO: 355436 - DNA, 41 bp, Homo sapiens; identical to SEQ ID NO: 342516
  chr16:21515452-21515493
  hypo

SEQ ID NO: 355437 - DNA, 64 bp, Homo sapiens; identical to SEQ ID NO: 342518
  chr16:21567027-21567091
  hypo

SEQ ID NO: 355438 - DNA, 106 bp, Homo sapiens; identical to SEQ ID NO: 342525
  chr16:23497832-23497938
  hypo

SEQ ID NO: 355439 - DNA, 713 bp, Homo sapiens; identical to SEQ ID NO: 342529
  chr16:24837143-24837856
  hypo

SEQ ID NO: 355440 - DNA, 43 bp, Homo sapiens
  chr16:27539990-27540033
  hypo
cggcgttcagcatatactggtacagacgcttaaacgtcctttc

SEQ ID NO: 355441 - DNA, 64 bp, Homo sapiens; identical to SEQ ID NO: 342539
  chr16:28183893-28183957
  hypo

SEQ ID NO: 355442 - DNA, 54 bp, Homo sapiens; identical to SEQ ID NO: 216888
  chr16:29153320-29153374
  hypo

SEQ ID NO: 355443 - DNA, 276 bp, Homo sapiens
  chr16:29170096-29170372
  hypo
agagccctcaaccagggacggagccgccctgtccacggagcctccagacccaccagaacgcctgggtcaccgcggctcccgggcgggcctcactgcgctgggacacgtcaggacacgtggcagctcccagcgcggtggaaggcctgagccctgggaacactggctggaaaatggaactcggaggacagagcttgtcgacggcgtctcgtatgaatcctggaggagacgcccgtgtcgagggcaattagaatccaggcgtgagccccggctggctgc

SEQ ID NO: 355444 - DNA, 533 bp, Homo sapiens; identical to SEQ ID NO: 347376
  chr16:29624651-29625184
  hypo

SEQ ID NO: 355445 - DNA, 189 bp, Homo sapiens; identical to SEQ ID NO: 342551
  chr16:30061428-30061617
  hypo

SEQ ID NO: 355446 - DNA, 75 bp, Homo sapiens
  chr16:30354637-30354712
  hypo
cgatgccaccaaggcatcaggtgagtgccagctggggctcgaggactttctcctctccgctccctgttctgggag

SEQ ID NO: 355447 - DNA, 70 bp, Homo sapiens
  chr16:30354742-30354812
  hypo
ggagagctggaaggtgctgctttccttgtgctgctggcgcgccactgcacttcagcctgggagacagagc

SEQ ID NO: 355448 - DNA, 47 bp, Homo sapiens; identical to SEQ ID NO: 216915
  chr16:30907062-30907109
  hypo

SEQ ID NO: 355449 - DNA, 549 bp, Homo sapiens; identical to SEQ ID NO: 347378
  chr16:30959765-30960314
  hypo

SEQ ID NO: 355450 - DNA, 284 bp, Homo sapiens; identical to SEQ ID NO: 342562
  chr16:31131573-31131857
  hypo

SEQ ID NO: 355451 - DNA, 200 bp, Homo sapiens
  chr16:31138407-31138607
  hypo
cggtaagtggggctgggaagctgcctgcaggtcccccgtctccccttgccgaggagcccctgctgagccgtgcactgtgcctcactcccaccctgcctgcagatcaccaaggtgaagtatgtggacaagatccacatcgggaactacgaaattgatgcctggtatttctcaccattccccgaagactatgggaaacagcc

SEQ ID NO: 355452 - DNA, 61 bp, Homo sapiens
  chr16:31447348-31447409
  hypo
gctcgcacagcttctgggccccatcgccccctcctgctgagctgccggctgggtggctggc

SEQ ID NO: 355453 - DNA, 266 bp, Homo sapiens
  chr16:31500256-31500522
  hypo
cggcacagggcgggcagctcttcgattacatccaggcagtctctagctacctggcaccgcccgtgtccgccgtcttcgtgctggcgctcttcgtgccgcgcgttaatgagcaggtgagcggcacgcgcgtggtgacggcagggctgggcttgcacatcctcagcaggctgacctgtttccttcgcagggcgccttctggggactcatcgggggcctgctgatgggcctggcacgcctgattcccgagttctccttcggctcgggca

SEQ ID NO: 355454 - DNA, 78 bp, Homo sapiens
  chr16:31500673-31500751
  hypo
gccccaggcaagcactgtgggacacagcacctaccctctgcttcctggagtgcccagctgggaggacctgaatttctc

SEQ ID NO: 355455 - DNA, 397 bp, Homo sapiens; identical to SEQ ID NO: 351796
  chr16:31712178-31712575
  hypo

SEQ ID NO: 355456 - DNA, 507 bp, Homo sapiens; identical to SEQ ID NO: 342569
  chr16:46683305-46683812
  hypo

SEQ ID NO: 355457 - DNA, 304 bp, Homo sapiens; identical to SEQ ID NO: 345492
  chr16:47176468-47176772
  hypo

SEQ ID NO: 355458 - DNA, 116 bp, Homo sapiens; identical to SEQ ID NO: 351806
  chr16:55513960-55514076
  hypo

SEQ ID NO: 355459 - DNA, 85 bp, Homo sapiens; identical to SEQ ID NO: 351807
  chr16:56228284-56228369
  hypo

SEQ ID NO: 355460 - DNA, 57 bp, Homo sapiens; identical to SEQ ID NO: 351808
  chr16:56228591-56228648
  hypo

SEQ ID NO: 355461 - DNA, 1300 bp, Homo sapiens; identical to SEQ ID NO: 342595
  chr16:58030214-58031514
  hypo

SEQ ID NO: 355462 - DNA, 72 bp, Homo sapiens; identical to SEQ ID NO: 342600
  chr16:58558309-58558381
  hypo

SEQ ID NO: 355463 - DNA, 566 bp, Homo sapiens; identical to SEQ ID NO: 351815
  chr16:66638452-66639018
  hypo

SEQ ID NO: 355464 - DNA, 130 bp, Homo sapiens; identical to SEQ ID NO: 345493
  chr16:67189038-67189168
  hypo

SEQ ID NO: 355465 - DNA, 377 bp, Homo sapiens; identical to SEQ ID NO: 345494
  chr16:67189259-67189636
  hypo

SEQ ID NO: 355466 - DNA, 93 bp, Homo sapiens; identical to SEQ ID NO: 348746
  chr16:67313759-67313852
  hypo

SEQ ID NO: 355467 - DNA, 115 bp, Homo sapiens; identical to SEQ ID NO: 348747
  chr16:67313958-67314073
  hypo

SEQ ID NO: 355468 - DNA, 255 bp, Homo sapiens; identical to SEQ ID NO: 291637
  chr16:67678786-67679041
  hypo

SEQ ID NO: 355469 - DNA, 134 bp, Homo sapiens; identical to SEQ ID NO: 345495
  chr16:68118915-68119049
  hypo

SEQ ID NO: 355470 - DNA, 65 bp, Homo sapiens; identical to SEQ ID NO: 347385
  chr16:68269820-68269885
  hypo

SEQ ID NO: 355471 - DNA, 112 bp, Homo sapiens; identical to SEQ ID NO: 204263
  chr16:68269896-68270008
  hypo

SEQ ID NO: 355472 - DNA, 105 bp, Homo sapiens; identical to SEQ ID NO: 204264
  chr16:68270022-68270127
  hypo

SEQ ID NO: 355473 - DNA, 125 bp, Homo sapiens; identical to SEQ ID NO: 347388
  chr16:68270157-68270282
  hypo

SEQ ID NO: 355474 - DNA, 637 bp, Homo sapiens; identical to SEQ ID NO: 347389
  chr16:68270868-68271505
  hypo

SEQ ID NO: 355475 - DNA, 167 bp, Homo sapiens
  chr16:68386187-68386354
  hypo
gcctgctgccgtggcacaacctctacttctggtacgtgcggaccgctgtggaccagcacctggggccaggtgccatggtgatgccccaggcagcctcgctgcacgctgtggttgtggagttcagggtaggccacccaggggatgttggagaaaaaagcagaggaggc

SEQ ID NO: 355476 - DNA, 411 bp, Homo sapiens; identical to SEQ ID NO: 342626
  chr16:69833676-69834087
  hypo

SEQ ID NO: 355477 - DNA, 166 bp, Homo sapiens; identical to SEQ ID NO: 342628
  chr16:69921972-69922138
  hypo

SEQ ID NO: 355478 - DNA, 111 bp, Homo sapiens; identical to SEQ ID NO: 342629
  chr16:69922460-69922571
  hypo

SEQ ID NO: 355479 - DNA, 364 bp, Homo sapiens; identical to SEQ ID NO: 342631
  chr16:70754664-70755028
  hypo

SEQ ID NO: 355480 - DNA, 352 bp, Homo sapiens; identical to SEQ ID NO: 342633
  chr16:70808012-70808364
  hypo

SEQ ID NO: 355481 - DNA, 310 bp, Homo sapiens
  chr16:70811523-70811833
  hypo
cggagcaagtgaagaggcacagatgaggggctgccctgactggaggtcctgtggttagaggaggagggagaagatgcggaggtggggcaggggtgcaaatatgcacacacacaaaggttcttgcccggaggtgtgccatgaggaacgtggtgctgtcggcggatcagcacaagtaaacaaagaaggccaggcatgaggtcctgtctccagccaggtggaccagagtgggaacagagggagcagagagggaagagtgagcaggagaggctgtgatgaacttgtccctgaccagcgaagctatctgtcctgc

SEQ ID NO: 355482 - DNA, 78 bp, Homo sapiens; identical to SEQ ID NO: 348755
  chr16:71715666-71715744
  hypo

SEQ ID NO: 355483 - DNA, 116 bp, Homo sapiens; identical to SEQ ID NO: 342637
  chr16:71754757-71754873
  hypo

SEQ ID NO: 355484 - DNA, 174 bp, Homo sapiens; identical to SEQ ID NO: 335377
  chr16:74659437-74659611
  hypo

SEQ ID NO: 355485 - DNA, 234 bp, Homo sapiens; identical to SEQ ID NO: 342643
  chr16:74908874-74909108
  hypo

SEQ ID NO: 355486 - DNA, 86 bp, Homo sapiens; identical to SEQ ID NO: 342644
  chr16:74984568-74984654
  hypo

SEQ ID NO: 355487 - DNA, 166 bp, Homo sapiens; identical to SEQ ID NO: 342646
  chr16:75127929-75128095
  hypo

SEQ ID NO: 355488 - DNA, 60 bp, Homo sapiens; identical to SEQ ID NO: 348758
  chr16:75148493-75148553
  hypo

SEQ ID NO: 355489 - DNA, 136 bp, Homo sapiens; identical to SEQ ID NO: 348759
  chr16:75149151-75149287
  hypo

SEQ ID NO: 355490 - DNA, 82 bp, Homo sapiens; identical to SEQ ID NO: 204296
  chr16:77246930-77247012
  hypo

SEQ ID NO: 355491 - DNA, 204 bp, Homo sapiens; identical to SEQ ID NO: 204297
  chr16:77247511-77247715
  hypo

SEQ ID NO: 355492 - DNA, 553 bp, Homo sapiens
  chr16:77753318-77753871
  hypo
cgatatttccttaatatcatgatgtgtaaacactagatattataaatattgcatcgatatttcattaatatcatggcgtgtaaacactatgtgtgaacactggatattagaaatatcacaacatttcattaatatcacggtgtgcaaacactgtgtgtaaacaatggatattatgaaaatcacagcgatatttcattaatgtcacagtgtgtaagcactgtgtgcaaacactggatattatgaatatcatagcgatattttattaatatcgcagtgtgtaagcactgtgtggaaacactggatattatgaatatcacagcgatatttcgttaatgtcacagtgcgtaagcactgtgtgtaaatactggatattatgaatatcacagtgatatttcattaacgtaacagcgtgtaagcactgtgtaaacactggatattatgagtgtcacagtgatatttcattaatttcacacgggatattataaaaatcacaacgatatttaacatcatagtgtgtaaacactttgtgtaaacatcgggtattataaatatc

SEQ ID NO: 355493 - DNA, 48 bp, Homo sapiens; identical to SEQ ID NO: 351836
  chr16:77822069-77822117
  hypo

SEQ ID NO: 355494 - DNA, 101 bp, Homo sapiens; identical to SEQ ID NO: 291736
  chr16:79804457-79804558
  hypo

SEQ ID NO: 355495 - DNA, 97 bp, Homo sapiens; identical to SEQ ID NO: 351841
  chr16:79804596-79804693
  hypo

SEQ ID NO: 355496 - DNA, 322 bp, Homo sapiens; identical to SEQ ID NO: 351844
  chr16:80837640-80837962
  hypo

SEQ ID NO: 355497 - DNA, 260 bp, Homo sapiens
  chr16:81563939-81564199
  hypo
cggatccctcagggacctaggtgcagttcctgttcctcccgtctcgcctctgttgcgctgcaaggtggggtgtgtagtgagtatcactgtaacctgtacttttctaaagtcaaacagatttctcttggtgggaggacgtgtcttttgtgggatcggtgtagcccgtctgagtcagtgactcacctggcacccctggcagctgactttcctggcagttcactcgagtctcttgcctctgctcacaaaagcctgcgccttta

SEQ ID NO: 355498 - DNA, 162 bp, Homo sapiens; identical to SEQ ID NO: 217146
  chr16:81564229-81564391
  hypo

SEQ ID NO: 355499 - DNA, 240 bp, Homo sapiens
  chr16:81564541-81564781
  hypo
gaactgtcgaacgtagccaccagctagcctgagcttgttctgatgtcttctgggatcgtcattgttatgggttgaactgtagccttcaaaaggcacgtttacgctgtagtctctgtacctgtgagcatgaccttctttggaaatagggactttgcagatgcgaccaagttaagatcatgctggaggtcatgcgggaggtcatgctggaggagagtgggcccaaatccagtgactgtgtcc

SEQ ID NO: 355500 - DNA, 606 bp, Homo sapiens; identical to SEQ ID NO: 342667
  chr16:81565589-81566195
  hypo

SEQ ID NO: 355501 - DNA, 140 bp, Homo sapiens; identical to SEQ ID NO: 342668
  chr16:81580491-81580631
  hypo

SEQ ID NO: 355502 - DNA, 77 bp, Homo sapiens
  chr16:81632835-81632912
  hypo
cggggcaaggagaggtcatattacctgagggaaaccaggggagggagagtgtgaacggcatttgagatttcttctgg

SEQ ID NO: 355503 - DNA, 811 bp, Homo sapiens; identical to SEQ ID NO: 347395
  chr16:84650982-84651793
  hypo

SEQ ID NO: 355504 - DNA, 69 bp, Homo sapiens
  chr16:84780671-84780740
  hypo
agaatcttgtgggaccatcatacgtgcggctcattgttgaccgaaatgttacgccgcgcgtgactgtac

SEQ ID NO: 355505 - DNA, 346 bp, Homo sapiens; identical to SEQ ID NO: 342684
  chr16:84813536-84813882
  hypo

SEQ ID NO: 355506 - DNA, 92 bp, Homo sapiens
  chr16:85033902-85033994
  hypo
cttttcttcctggataacccgcgttcctgagtccagaccctgtcttggatttacttgtatctgtaacttcaagcaagtgtcttaagctcttc

SEQ ID NO: 355507 - DNA, 816 bp, Homo sapiens; identical to SEQ ID NO: 351849
  chr16:85202563-85203379
  hypo

SEQ ID NO: 355508 - DNA, 257 bp, Homo sapiens; identical to SEQ ID NO: 342694
  chr16:85407706-85407963
  hypo

SEQ ID NO: 355509 - DNA, 49 bp, Homo sapiens
  chr16:85517169-85517218
  hypo
cgatgcccaggcccccggccactgtctccgccctcttggtaggccctgt

SEQ ID NO: 355510 - DNA, 137 bp, Homo sapiens
  chr16:85517620-85517757
  hypo
gatggggaaactgaggcagagctggggttaccccagaagaccctcagattcgcggtaggatgacgtcccacacttggtgactttatgtggctcccggaccagttatgccgtgcaggaatatgccccttcatagaacc

SEQ ID NO: 355511 - DNA, 66 bp, Homo sapiens
  chr16:85617682-85617748
  hypo
cgcatggggacggggacacaggctcgccagctgcacagcccgcagactggccttgggtctttgtgt

SEQ ID NO: 355512 - DNA, 143 bp, Homo sapiens; identical to SEQ ID NO: 342702
  chr16:85618063-85618206
  hypo

SEQ ID NO: 355513 - DNA, 259 bp, Homo sapiens; identical to SEQ ID NO: 217217
  chr16:85671775-85672034
  hypo

SEQ ID NO: 355514 - DNA, 97 bp, Homo sapiens
  chr16:85672078-85672175
  hypo
cactttccttccttgctgtgtgatccgggcaggccgctttgcctctctgagcttccactttttcttgggtgaggagcaggtctctacctcatgaatc

SEQ ID NO: 355515 - DNA, 356 bp, Homo sapiens
  chr16:85673482-85673838
  hypo
cggccgggggcggaggtacggggagccttgcgtgtcctcagctgctccaggaggcacaggcagcacctgggaccaggcaccccctccctgggaaacagttgggggcgatcgtgctgcgggcctttgctctgggaggccggcgctttgggaacagggtggctccagagccttcccaggtgggctggagagccgccgtctggaggacagttctgagcaggtgctcctggctggcgaggaagccccacctcaccccagcaccacccatggtgcagggagctggggttgggcgcacaagagtctgagcccgttcccaccccgcctccttgtcaccagcccggtggccgggactcatggct

SEQ ID NO: 355516 - DNA, 237 bp, Homo sapiens; identical to SEQ ID NO: 217221
  chr16:85673886-85674123
  hypo

SEQ ID NO: 355517 - DNA, 140 bp, Homo sapiens
  chr16:85674334-85674474
  hypo
caaagaaaacagcaaaacaaacacggaggaaggatcccgcctggcaggcgcgcctcgcgtgggtgtcagtctgcggcggcggcggctctgcaggcgtctggagcccgtctgtctcccgcgcaggtgtgagcgccgcgggc

SEQ ID NO: 355518 - DNA, 208 bp, Homo sapiens; identical to SEQ ID NO: 348765
  chr16:85699437-85699645
  hypo

SEQ ID NO: 355519 - DNA, 177 bp, Homo sapiens; identical to SEQ ID NO: 345500
  chr16:85932121-85932298
  hypo

SEQ ID NO: 355520 - DNA, 389 bp, Homo sapiens; identical to SEQ ID NO: 335407
  chr16:86609636-86610025
  hypo

SEQ ID NO: 355521 - DNA, 464 bp, Homo sapiens; identical to SEQ ID NO: 351853
  chr16:87417704-87418168
  hypo

SEQ ID NO: 355522 - DNA, 50 bp, Homo sapiens; identical to SEQ ID NO: 351854
  chr16:87418200-87418250
  hypo

SEQ ID NO: 355523 - DNA, 802 bp, Homo sapiens; identical to SEQ ID NO: 345501
  chr16:87525701-87526503
  hypo

SEQ ID NO: 355524 - DNA, 505 bp, Homo sapiens; identical to SEQ ID NO: 335410
  chr16:87526565-87527070
  hypo

SEQ ID NO: 355525 - DNA, 66 bp, Homo sapiens
  chr16:87594891-87594957
  hypo
cgccttcatctttcgtcaacatctgtccaaatagtacctttaaaaatcattgccaaagcgtttgct

SEQ ID NO: 355526 - DNA, 59 bp, Homo sapiens; identical to SEQ ID NO: 351857
  chr16:87635912-87635971
  hypo

SEQ ID NO: 355527 - DNA, 189 bp, Homo sapiens; identical to SEQ ID NO: 291796
  chr16:87636008-87636197
  hypo

SEQ ID NO: 355528 - DNA, 728 bp, Homo sapiens; identical to SEQ ID NO: 342728
  chr16:87739334-87740062
  hypo

SEQ ID NO: 355529 - DNA, 426 bp, Homo sapiens; identical to SEQ ID NO: 342729
  chr16:87744572-87744998
  hypo

SEQ ID NO: 355530 - DNA, 353 bp, Homo sapiens
  chr16:88037900-88038253
  hypo
cgtcgtcccccagactacagtaatactcaacaatgatcggcagaacgccattgtagccaagatggaagaccccttgagcaacagggcaccggattccctggaaaatgtcattagcaagtcagtagcacggcaccaaccccacctttccctgccactgtgcggagtcccatgagaataagtcaacgtccctaagccagggcacagtccagcacacgcttcatctctgtggtcacagggttgagcctggcaggcaccgccccagctctctgaggtcggggagggcaggctgggcgatgctgaatgctgagtccagccacaccaggggcagctgccgccggggacttctgtgtctc

SEQ ID NO: 355531 - DNA, 170 bp, Homo sapiens; identical to SEQ ID NO: 346150
  chr16:88106152-88106322
  hypo

SEQ ID NO: 355532 - DNA, 96 bp, Homo sapiens; identical to SEQ ID NO: 346151
  chr16:88106398-88106494
  hypo

SEQ ID NO: 355533 - DNA, 328 bp, Homo sapiens; identical to SEQ ID NO: 342740
  chr16:88111298-88111626
  hypo

SEQ ID NO: 355534 - DNA, 31 bp, Homo sapiens; identical to SEQ ID NO: 217301
  chr16:88757496-88757527
  hypo

SEQ ID NO: 355535 - DNA, 31 bp, Homo sapiens
  chr16:88757686-88757717
  hypo
ggatctgtggggtccccggcatcgtcctgcc

SEQ ID NO: 355536 - DNA, 103 bp, Homo sapiens
  chr16:88791422-88791525
  hypo
cgtggtccagccagggccgccaccactgcctccgtggcggggaggagccccctggactgtcgggccctgtggaggggcagggtgagcatgaggcagcagtcaa

SEQ ID NO: 355537 - DNA, 354 bp, Homo sapiens
  chr16:88791819-88792173
  hypo
tcacctggctccaggccggggtccttggggcccagggtgtcctgggggcgactgcggtccacccggccctgcctgtgcttctcctgcttggcacggatacgctccatcctgtggtggggaaaggtggggtatgctgagcattggggggaggagccggggagtccccgccccagaggcacctactgtcttttcagctgggccagggacttctcctctatcctgcggtgaaagtcaatgctcttgaggttggcagcgttgtagagggcgaagcccctgtagggaggcggggatggggtgtgagcaccaggcactcgaccccagcaacatgggcagccgccgctccccgctcagccc

SEQ ID NO: 355538 - DNA, 517 bp, Homo sapiens; identical to SEQ ID NO: 348771
  chr16:88792758-88793275
  hypo

SEQ ID NO: 355539 - DNA, 219 bp, Homo sapiens; identical to SEQ ID NO: 342758
  chr16:88892602-88892821
  hypo

SEQ ID NO: 355540 - DNA, 279 bp, Homo sapiens; identical to SEQ ID NO: 348772
  chr16:88946079-88946358
  hypo

SEQ ID NO: 355541 - DNA, 366 bp, Homo sapiens
  chr16:88956712-88957078
  hypo
ctggcctcacccaggggccaacagctgctaagtggcaggctcgggctcaagccagggagcatctggtctggtctgtcctctggacccccgaggggaggcctggcccagcagagatggagcccacagcagtacgggcagtgctcaggctgggcccgaaggtgtggccaggctggcagctcccaactaagctccacggaaccctgaccccaacacgtgctcggcagagaaggtcacatggtcagacacatttggggaacctttcctcagctcctgctagagatgtgcagccgtcttggggaaatggagacccgcagagatggcagtctgactccacggcactcccgtgcccgtcccgtctgtgtgtgc

SEQ ID NO: 355542 - DNA, 399 bp, Homo sapiens; identical to SEQ ID NO: 291816
  chr16:89006909-89007308
  hypo

SEQ ID NO: 355543 - DNA, 91 bp, Homo sapiens; identical to SEQ ID NO: 204343
  chr16:89007789-89007880
  hypo

SEQ ID NO: 355544 - DNA, 373 bp, Homo sapiens; identical to SEQ ID NO: 204344
  chr16:89007995-89008368
  hypo

SEQ ID NO: 355545 - DNA, 315 bp, Homo sapiens; identical to SEQ ID NO: 342779
  chr16:89169100-89169415
  hypo

SEQ ID NO: 355546 - DNA, 259 bp, Homo sapiens; identical to SEQ ID NO: 347402
  chr16:89189500-89189759
  hypo

SEQ ID NO: 355547 - DNA, 48 bp, Homo sapiens
  chr16:89202519-89202567
  hypo
cgttttcttctttgaaagcacaggaaccacagccctgtggattttgcg

SEQ ID NO: 355548 - DNA, 112 bp, Homo sapiens
  chr16:89203215-89203327
  hypo
agatggcaaaggtctgtttcaggtaactcctctgacggccacaacgatgtcttcagacgtcaaaggtctgtctcaggtaactcctctgacggccacaacgatgtcttcagac

SEQ ID NO: 355549 - DNA, 225 bp, Homo sapiens; identical to SEQ ID NO: 217355
  chr16:89219372-89219597
  hypo

SEQ ID NO: 355550 - DNA, 90 bp, Homo sapiens
  chr16:89220237-89220327
  hypo
cgcccaaggcctgcacgcaccatggcttctgtggtaccagtgataacaccatgccgggcacctcctgcagtcaccacccctgggctgcta

SEQ ID NO: 355551 - DNA, 78 bp, Homo sapiens
  chr16:89254530-89254608
  hypo
cgtcagcggagtggatgtgggacgcctggaagtggaggacagggacctgccaggctccccaaactgggtggccaggtt

SEQ ID NO: 355552 - DNA, 144 bp, Homo sapiens
  chr16:89254764-89254908
  hypo
gatgccggcacacacagatgcccacacacagatgccggcacacacacatgccggcacacacagatgcccacacacagatgccggcacacacacatgccggcacacacagatgcccacacacagatgccggcacacacagatgcc

SEQ ID NO: 355553 - DNA, 107 bp, Homo sapiens; identical to SEQ ID NO: 342793
  chr16:89442354-89442461
  hypo

SEQ ID NO: 355554 - DNA, 58 bp, Homo sapiens; identical to SEQ ID NO: 342795
  chr16:89446081-89446139
  hypo

SEQ ID NO: 355555 - DNA, 98 bp, Homo sapiens
  chr16:89647563-89647661
  hypo
cgtcacccgtcacacggaacattccgtctcccgctgacacggaatatctgatcacccatcacatggaacatcccatcacccactcacacggaacatcc

SEQ ID NO: 355556 - DNA, 737 bp, Homo sapiens; identical to SEQ ID NO: 321648
  chr16:89900815-89901552
  hypo

SEQ ID NO: 355557 - DNA, 81 bp, Homo sapiens; identical to SEQ ID NO: 348779
  chr16:89901590-89901671
  hypo

SEQ ID NO: 355558 - DNA, 146 bp, Homo sapiens
  chr16:89972529-89972675
  hypo
cgaggctccatggcggttaccatttcatttgctgtgctttatctgctgtgccttgtttctccccggccctaggcggaaggtgctctaccagcgtgcacccaggaatatccaccgccatgtgatcctctctgagatcaaggaagccg

SEQ ID NO: 355559 - DNA, 482 bp, Homo sapiens
  chr16:89972802-89973284
  hypo
cccagccccgccacggcaggggcagggtctagtgcagagggctcctcctttcctggcagcccgggttcggatgcttgttgttttgagagagaaatcctttggggctcagagcacaagctgagtcgtcaccgtggtgagctgctccatccgtggtcttgtgagcgcgtggtgcggctgctgggggattctctgtagtcgtggggtgtagtcctgctctgacgcctcctgtgctggaggtgccgtttctgtctcaaaacctaaggagtttgtactgttgttaagggataagatagaacgagtgagaaaaccagcaagtcagagggtcgcaggaccgtggaccgtccactggggacagcttagtgcctcctggtttaacttcagctgctctgcgggcccttatgaccggcatggctggctttgtctggggctgtgagcttctgactctcctcagtagagtggcagcacgtggcactgtgcaaccc

SEQ ID NO: 355560 - DNA, 307 bp, Homo sapiens; identical to SEQ ID NO: 335424
  chr17:523549-523856
  hypo

SEQ ID NO: 355561 - DNA, 64 bp, Homo sapiens
  chr17:692558-692622
  hypo
cgtcagcagctctgaatcctaatgtcattgtgatccgtttcccttagattcccttagcctcagc

SEQ ID NO: 355562 - DNA, 306 bp, Homo sapiens
  chr17:692652-692958
  hypo
ctcattacatttctgtctcttctcatcagaaatagggattaataggcttggctctaaacagactttcctcacagttggagcacgcctaaaatgtctcttacaccttgggaggtggaggggacagagagtaccattcatcagaaacaccccagccaccattaaaagtaaactaatagtggcacccgttgttgagacttgcctaaattgctgctcgcagctctttctcagtcacgccttgctagaatacgtttctgtgccagtgtgagagctacgtgctggggttctgtgatcagtacccgcttactc

SEQ ID NO: 355563 - DNA, 539 bp, Homo sapiens; identical to SEQ ID NO: 342817
  chr17:951725-952264
  hypo

SEQ ID NO: 355564 - DNA, 270 bp, Homo sapiens; identical to SEQ ID NO: 342821
  chr17:1407895-1408165
  hypo

SEQ ID NO: 355565 - DNA, 141 bp, Homo sapiens; identical to SEQ ID NO: 346153
  chr17:1412249-1412390
  hypo

SEQ ID NO: 355566 - DNA, 84 bp, Homo sapiens; identical to SEQ ID NO: 346154
  chr17:1412463-1412547
  hypo

SEQ ID NO: 355567 - DNA, 299 bp, Homo sapiens; identical to SEQ ID NO: 342824
  chr17:1454071-1454370
  hypo

SEQ ID NO: 355568 - DNA, 194 bp, Homo sapiens; identical to SEQ ID NO: 342825
  chr17:1462644-1462838
  hypo

SEQ ID NO: 355569 - DNA, 272 bp, Homo sapiens; identical to SEQ ID NO: 342828
  chr17:1775571-1775843
  hypo

SEQ ID NO: 355570 - DNA, 402 bp, Homo sapiens; identical to SEQ ID NO: 217450
  chr17:1783887-1784289
  hypo

SEQ ID NO: 355571 - DNA, 115 bp, Homo sapiens; identical to SEQ ID NO: 342837
  chr17:2326357-2326472
  hypo

SEQ ID NO: 355572 - DNA, 459 bp, Homo sapiens; identical to SEQ ID NO: 351870
  chr17:3867210-3867669
  hypo

SEQ ID NO: 355573 - DNA, 322 bp, Homo sapiens; identical to SEQ ID NO: 342846
  chr17:4048756-4049078
  hypo

SEQ ID NO: 355574 - DNA, 60 bp, Homo sapiens
  chr17:4236565-4236625
  hypo
cgttcacatcaaaagtaatgtaaagaatgtgtgtatctcagccatcattttaaaagaaga

SEQ ID NO: 355575 - DNA, 73 bp, Homo sapiens
  chr17:4436345-4436418
  hypo
cgctctacctgcaccgcgcccaagttgtgcagaagacagcagagacgtgcaacagcccgccctgtggggccaa

SEQ ID NO: 355576 - DNA, 164 bp, Homo sapiens
  chr17:4436450-4436614
  hypo
gctggtgagggacctcggacaggagagcccctcagccttagccctgagccgcctcaactcgtgcgccaccatcctctgtccccacagcctcatctttggggccatcacctgctttacgggatttctgggcgtggtcacgggggcaggagccacgcgctggtgcc

SEQ ID NO: 355577 - DNA, 36 bp, Homo sapiens
  chr17:4446272-4446308
  hypo
cgcagccctcagcagtgttgcccttcaagacccgga

SEQ ID NO: 355578 - DNA, 138 bp, Homo sapiens
  chr17:4446376-4446514
  hypo
accaaccgctccacctgggcgtgcagggcccctgcgcgctcacccaagtcgtggcagtagcgccgggcacggcacaggtggtgcctgtgggtggtgaggacgagagctggtcagaacattctcggtccaccctgctcc

SEQ ID NO: 355579 - DNA, 238 bp, Homo sapiens; identical to SEQ ID NO: 342854
  chr17:4685696-4685934
  hypo

SEQ ID NO: 355580 - DNA, 507 bp, Homo sapiens; identical to SEQ ID NO: 342855
  chr17:4795549-4796056
  hypo

SEQ ID NO: 355581 - DNA, 341 bp, Homo sapiens; identical to SEQ ID NO: 335442
  chr17:4890368-4890709
  hypo

SEQ ID NO: 355582 - DNA, 34 bp, Homo sapiens; identical to SEQ ID NO: 345503
  chr17:4981985-4982019
  hypo

SEQ ID NO: 355583 - DNA, 213 bp, Homo sapiens; identical to SEQ ID NO: 342859
  chr17:5269074-5269287
  hypo

SEQ ID NO: 355584 - DNA, 61 bp, Homo sapiens
  chr17:7187868-7187929
  hypo
cggaagctggagcgtgagcggccactgtccctgctccagctcctgggcagccgtacccacc

SEQ ID NO: 355585 - DNA, 569 bp, Homo sapiens
  chr17:7224752-7225321
  hypo
cgacgaacacccacacggctccccacctaggaccgaggtaggacaaggacggacgatgttcagcccacctctccctgccacctccactcccaacccctcccctgtccctggagccagccacttcacccccagcctctctaggttccggccatagttcatcctctggagctgcccatcacgcctcacttcacagctggataccatccaagtggtcttcgtccggagctctggcagggaaggaggcagccctgggccaccaccgcctgccccgggtcccatctcccccggtgctagtgtggtcagccccagccgcagggaacctgcccacttctcatctagctcttccactttcacctacgagacagagaaaacataagctggccctgtcgtgatgggcctcgcagcccctctgtcacatcactacggcctacctcaaagacttcctcagccctcagctccttggtactgaagacaaggccatgagcatagccagcggcacgcactgccctcgtgccatcctcctctagagtgacgttcttgccgcaagtactgtggaatcggtgagccac

SEQ ID NO: 355586 - DNA, 1345 bp, Homo sapiens; identical to SEQ ID NO: 345504
  chr17:7254483-7255828
  hypo

SEQ ID NO: 355587 - DNA, 156 bp, Homo sapiens; identical to SEQ ID NO: 346157
  chr17:7369222-7369378
  hypo

SEQ ID NO: 355588 - DNA, 73 bp, Homo sapiens; identical to SEQ ID NO: 342868
  chr17:7493149-7493222
  hypo

SEQ ID NO: 355589 - DNA, 442 bp, Homo sapiens; identical to SEQ ID NO: 342869
  chr17:7493709-7494151
  hypo

SEQ ID NO: 355590 - DNA, 261 bp, Homo sapiens; identical to SEQ ID NO: 342874
  chr17:8012317-8012578
  hypo

SEQ ID NO: 355591 - DNA, 272 bp, Homo sapiens; identical to SEQ ID NO: 217545
  chr17:8104639-8104911
  hypo

SEQ ID NO: 355592 - DNA, 212 bp, Homo sapiens
  chr17:8383605-8383817
  hypo
cggctgctagctcggcgttcagtgtgtccacctagagaggagagaggagtttagtcacttgtgcctgaggggtggcacagccctccctgggtgacgggctcctgcatgggccacctgtagagtggtcttgcggaagcggtcgttgagcagctccatgttgctctgctcctcttccagctcctcctccagctgtgcgatccgagcttccagac

SEQ ID NO: 355593 - DNA, 143 bp, Homo sapiens; identical to SEQ ID NO: 348789
  chr17:8384370-8384513
  hypo

SEQ ID NO: 355594 - DNA, 186 bp, Homo sapiens; identical to SEQ ID NO: 342883
  chr17:8977478-8977664
  hypo

SEQ ID NO: 355595 - DNA, 196 bp, Homo sapiens; identical to SEQ ID NO: 342886
  chr17:9631380-9631576
  hypo

SEQ ID NO: 355596 - DNA, 173 bp, Homo sapiens; identical to SEQ ID NO: 351890
  chr17:10632714-10632887
  hypo

SEQ ID NO: 355597 - DNA, 245 bp, Homo sapiens; identical to SEQ ID NO: 351891
  chr17:10633350-10633595
  hypo

SEQ ID NO: 355598 - DNA, 119 bp, Homo sapiens; identical to SEQ ID NO: 342890
  chr17:12032523-12032642
  hypo

SEQ ID NO: 355599 - DNA, 239 bp, Homo sapiens; identical to SEQ ID NO: 342891
  chr17:12890262-12890501
  hypo

SEQ ID NO: 355600 - DNA, 75 bp, Homo sapiens; identical to SEQ ID NO: 351897
  chr17:14212398-14212473
  hypo

SEQ ID NO: 355601 - DNA, 104 bp, Homo sapiens
  chr17:16282523-16282627
  hypo
gacaatgcaactaagagcactctgactacagaagcatgatttaaagctccacaaccctgcaataaccacgaagaaaaataaaaagcggctagtccgccaggcac

SEQ ID NO: 355602 - DNA, 674 bp, Homo sapiens; identical to SEQ ID NO: 204447
  chr17:16283956-16284630
  hypo

SEQ ID NO: 355603 - DNA, 39 bp, Homo sapiens; identical to SEQ ID NO: 347411
  chr17:16285065-16285104
  hypo

SEQ ID NO: 355604 - DNA, 300 bp, Homo sapiens; identical to SEQ ID NO: 217585
  chr17:17062274-17062574
  hypo

SEQ ID NO: 355605 - DNA, 282 bp, Homo sapiens
  chr17:17062763-17063045
  hypo
ccaggggcatccagcaggagatgacagctgggtcctaggtcatgaggatatgaagcagaagacagtggtgaggcagggtaggctgtggatgaaggctgccctgtgactgtcactcctccacgaggccttcagtgcacctaggtacatagatgaacaagctggcccccgaactataaaataagatgttctttcatggaaatgtatgcagaaatccagtctgcagaacttcagtggtagattgacatgtctgggcagggagtctcgtagctggggaggtgtagc

SEQ ID NO: 355606 - DNA, 210 bp, Homo sapiens; identical to SEQ ID NO: 342903
  chr17:17104713-17104923
  hypo

SEQ ID NO: 355607 - DNA, 208 bp, Homo sapiens; identical to SEQ ID NO: 342905
  chr17:17224346-17224554
  hypo

SEQ ID NO: 355608 - DNA, 199 bp, Homo sapiens; identical to SEQ ID NO: 342909
  chr17:17637969-17638168
  hypo

SEQ ID NO: 355609 - DNA, 246 bp, Homo sapiens
  chr17:18024621-18024867
  hypo
cggctcgccgctgccgggctcacccaggccgccctcgccgcccctggggctctgccacagcccgcggcgcagctccctgaatctgccctcgcgcctcccgcacacgtggcggcgcctcagcgagccacccactcgggctgtgaagccgcaagtgcgcctgcccttccaccgaccgcccagggccggggcctggcgggcgcccctggaacaccgggagagcccgcgagaacccgaggactcagagac

SEQ ID NO: 355610 - DNA, 142 bp, Homo sapiens; identical to SEQ ID NO: 342912
  chr17:18083378-18083520
  hypo

SEQ ID NO: 355611 - DNA, 602 bp, Homo sapiens
  chr17:18854647-18855249
  hypo
cgccttcaatggctgcgtaatggcggatggccatttccttgactaggatgagacattgcctactctgcgtggctgctgtgagcgtgaaatgggatcatgtgcggaacagccacgcatggtccgtgaaatgggatcatgtgcagaacagccacgcatggtccttggtgtgtgacagatattgggtccctctgtggtcccaggcagacattgcccggggtgggggccgaatgcatggtcaagttgaggggcctgggactgtttcacgggtctagaaaaagaaagcagaaacgctggaagcaggactttattgtccgacatggggctgcctctgagcctgggctgtgttggctggacgtgagccataatgcaggtgtccccctcccaagccctgctcagtccactcacagcccgatggccaagggaggacatggctgcccgccacggcagtatcttcagaggtgaggcggttgtccctacgctctatgcttcttatacaaattagatataggtgaagccacccattaagcaacccagcctttctgggactatttgggctgcctccgggtccactaaatgcggttcattttccccaagccccctcc

SEQ ID NO: 355612 - DNA, 112 bp, Homo sapiens; identical to SEQ ID NO: 342918
  chr17:19513145-19513257
  hypo

SEQ ID NO: 355613 - DNA, 64 bp, Homo sapiens; identical to SEQ ID NO: 342922
  chr17:19842333-19842397
  hypo

SEQ ID NO: 355614 - DNA, 226 bp, Homo sapiens; identical to SEQ ID NO: 342923
  chr17:20903670-20903896
  hypo

SEQ ID NO: 355615 - DNA, 232 bp, Homo sapiens
  chr17:21104115-21104347
  hypo
ggcaggcacacctggctgcggtgcagaggagagtcatggggagctgagccacctggccattggccgtaatatgggagtgacgagtgaagacattcataacaagccaccccagaacctcagcccagcatgaaggtaactccctccagcctccttcaaagatgggagcaattccaagtgaaggatggtggaaatcggactgtcgggaaacttcaaggaaaaagaacaggcaatc

SEQ ID NO: 355616 - DNA, 117 bp, Homo sapiens; identical to SEQ ID NO: 342925
  chr17:25619839-25619956
  hypo

SEQ ID NO: 355617 - DNA, 62 bp, Homo sapiens; identical to SEQ ID NO: 348797
  chr17:25931759-25931821
  hypo

SEQ ID NO: 355618 - DNA, 200 bp, Homo sapiens; identical to SEQ ID NO: 342930
  chr17:25934818-25935018
  hypo

SEQ ID NO: 355619 - DNA, 317 bp, Homo sapiens
  chr17:25936178-25936495
  hypo
cgtcatcgttgcacatcttcactcctcctgatgtgtcctccagggcatgggatatcttcatgccaagggcatcgtacacaaagatctcaaatctaagaacgtcttctatgacaacggcaaggtggtcatcacagacttcgggctgtttgggatctcaggcgtggtccgagagggacggtgagttggtcttgagtgtctgggtgggttgtgggtgctggatggggaagagcagggctgaggtctgggcactttcactgtttgttgctgagctgcagccctccctgcagggaagcccaggtcgctttggtcctgccctc

SEQ ID NO: 355620 - DNA, 48 bp, Homo sapiens; identical to SEQ ID NO: 348798
  chr17:26961722-26961770
  hypo

SEQ ID NO: 355621 - DNA, 59 bp, Homo sapiens; identical to SEQ ID NO: 351908
  chr17:27332307-27332366
  hypo

SEQ ID NO: 355622 - DNA, 122 bp, Homo sapiens; identical to SEQ ID NO: 351909
  chr17:27332733-27332855
  hypo

SEQ ID NO: 355623 - DNA, 125 bp, Homo sapiens
  chr17:27909050-27909175
  hypo
cgtgcagaggtgtggtgcccttctctgggtggaagaagttggcctgggcacccagggagagcaggcgcagacatgtctccaggttgcctgtccgcacgctcgagtgtagttgctaagaggagcag

SEQ ID NO: 355624 - DNA, 157 bp, Homo sapiens
  chr17:27909205-27909362
  hypo
cgcacctccccacccacaagctgcaccctggctgcccctgggacacctagcagctccaaggaggcctgcccaaaccagactatgtcgggaggacagaggcttcccgctaggggttaatgccaattaataaacgctgccgtcagtcaccatctaccac

SEQ ID NO: 355625 - DNA, 337 bp, Homo sapiens; identical to SEQ ID NO: 351912
  chr17:29248950-29249287
  hypo

SEQ ID NO: 355626 - DNA, 32 bp, Homo sapiens; identical to SEQ ID NO: 347419
  chr17:29718746-29718778
  hypo

SEQ ID NO: 355627 - DNA, 60 bp, Homo sapiens
  chr17:30333052-30333112
  hypo
cgcgcccggccaagtatttttgtttaaattactttttggttgtcacttatctcaataaat

SEQ ID NO: 355628 - DNA, 126 bp, Homo sapiens; identical to SEQ ID NO: 342952
  chr17:30804383-30804509
  hypo

SEQ ID NO: 355629 - DNA, 261 bp, Homo sapiens; identical to SEQ ID NO: 346160
  chr17:33344328-33344589
  hypo

SEQ ID NO: 355630 - DNA, 130 bp, Homo sapiens; identical to SEQ ID NO: 342960
  chr17:35545278-35545408
  hypo

SEQ ID NO: 355631 - DNA, 36 bp, Homo sapiens
  chr17:36875885-36875921
  hypo
cgagggaggagggacggagagaccggcgtgggctgg

SEQ ID NO: 355632 - DNA, 406 bp, Homo sapiens
  chr17:36876379-36876785
  hypo
gcaacttccgcccttctctcctgacccgtgtggcctcgaccccagcctcaggctccgccccaggtcttcacacctgtggctccccaagtcccgcctctcttctcagagctcacctgtgtccctccttaggatggcgccgccttttcaagggctgagcactggctcccctccaggccccgcccccggtcccctggccccgcctccgccccctcgcccctccctcaggttcctcgctctctccgcagtcgtggagatgctgaaggcgctgcacgcgctgcagaaggagaaccagcggctgcaagagcagatcctgagcctgacggccaaaaaggagcggctgcagattctcaacgtgcagctctctgtgcccttccctgccctgcctgctgccctgcctgccgccaac

SEQ ID NO: 355633 - DNA, 226 bp, Homo sapiens; identical to SEQ ID NO: 347425
  chr17:36886750-36886976
  hypo

SEQ ID NO: 355634 - DNA, 123 bp, Homo sapiens; identical to SEQ ID NO: 342967
  chr17:37583075-37583198
  hypo

SEQ ID NO: 355635 - DNA, 508 bp, Homo sapiens; identical to SEQ ID NO: 342975
  chr17:39658629-39659137
  hypo

SEQ ID NO: 355636 - DNA, 191 bp, Homo sapiens
  chr17:39788236-39788427
  hypo
cagcccccatctccttgctcgggaggctttgggggcacagcgagggtcggctgtgaaaacacggagagaatgcgtgtagggtgactcgaggcacagccctggtgcgtgctgcgcggcggggttggtgatgaggtgctggctgatcccgaagatcaggagcactgactcaccagggctcccctgggttcccc

SEQ ID NO: 355637 - DNA, 36 bp, Homo sapiens; identical to SEQ ID NO: 347428
  chr17:40332770-40332806
  hypo

SEQ ID NO: 355638 - DNA, 649 bp, Homo sapiens; identical to SEQ ID NO: 348804
  chr17:40371760-40372409
  hypo

SEQ ID NO: 355639 - DNA, 841 bp, Homo sapiens; identical to SEQ ID NO: 335546
  chr17:41245464-41246305
  hypo

SEQ ID NO: 355640 - DNA, 170 bp, Homo sapiens; identical to SEQ ID NO: 345520
  chr17:42092357-42092527
  hypo

SEQ ID NO: 355641 - DNA, 343 bp, Homo sapiens
  chr17:42254319-42254662
  hypo
cgacaccaggctgcggcgcgccggctcctggaggctggagctgatgcccgggcggccgggcgcaagcgccacacgccgctgcacaacgcttgtgccaacggctgcgggggcctggccgagctgctgctgcgttacggggcccgcgctgaggtccccaatggggcgggccacacgcccatggactgtgcgctgcaggccgtccaggactcccccaactgggagcctgaagtccttttcgccgcactgctggactacggggcgcagccagtgcgccctgaggtgcgctgggaggccctgacataggaggctcctgtgtgggggagcccgcggctggaactgctcc

SEQ ID NO: 355642 - DNA, 99 bp, Homo sapiens; identical to SEQ ID NO: 342995
  chr17:42338019-42338118
  hypo

SEQ ID NO: 355643 - DNA, 62 bp, Homo sapiens; identical to SEQ ID NO: 204629
  chr17:42402710-42402772
  hypo

SEQ ID NO: 355644 - DNA, 192 bp, Homo sapiens; identical to SEQ ID NO: 347435
  chr17:42402917-42403109
  hypo

SEQ ID NO: 355645 - DNA, 111 bp, Homo sapiens; identical to SEQ ID NO: 343000
  chr17:43121686-43121797
  hypo

SEQ ID NO: 355646 - DNA, 230 bp, Homo sapiens; identical to SEQ ID NO: 343001
  chr17:43180339-43180569
  hypo

SEQ ID NO: 355647 - DNA, 425 bp, Homo sapiens; identical to SEQ ID NO: 348809
  chr17:43246865-43247290
  hypo

SEQ ID NO: 355648 - DNA, 38 bp, Homo sapiens; identical to SEQ ID NO: 347438
  chr17:43298587-43298625
  hypo

SEQ ID NO: 355649 - DNA, 230 bp, Homo sapiens; identical to SEQ ID NO: 347439
  chr17:43298666-43298896
  hypo

SEQ ID NO: 355650 - DNA, 879 bp, Homo sapiens; identical to SEQ ID NO: 351953
  chr17:43324795-43325674
  hypo

SEQ ID NO: 355651 - DNA, 107 bp, Homo sapiens; identical to SEQ ID NO: 343008
  chr17:46006406-46006513
  hypo

SEQ ID NO: 355652 - DNA, 298 bp, Homo sapiens; identical to SEQ ID NO: 292442
  chr17:46089283-46089581
  hypo

SEQ ID NO: 355653 - DNA, 218 bp, Homo sapiens; identical to SEQ ID NO: 345528
  chr17:46124683-46124901
  hypo

SEQ ID NO: 355654 - DNA, 164 bp, Homo sapiens; identical to SEQ ID NO: 345529
  chr17:46125148-46125312
  hypo

SEQ ID NO: 355655 - DNA, 31 bp, Homo sapiens; identical to SEQ ID NO: 348815
  chr17:46152418-46152449
  hypo

SEQ ID NO: 355656 - DNA, 181 bp, Homo sapiens; identical to SEQ ID NO: 351966
  chr17:46659093-46659274
  hypo

SEQ ID NO: 355657 - DNA, 45 bp, Homo sapiens; identical to SEQ ID NO: 204661
  chr17:46659384-46659429
  hypo

SEQ ID NO: 355658 - DNA, 63 bp, Homo sapiens; identical to SEQ ID NO: 345531
  chr17:46687527-46687590
  hypo

SEQ ID NO: 355659 - DNA, 170 bp, Homo sapiens; identical to SEQ ID NO: 351973
  chr17:46724200-46724370
  hypo

SEQ ID NO: 355660 - DNA, 348 bp, Homo sapiens; identical to SEQ ID NO: 292486
  chr17:47073560-47073908
  hypo

SEQ ID NO: 355661 - DNA, 65 bp, Homo sapiens; identical to SEQ ID NO: 351981
  chr17:47653244-47653309
  hypo

SEQ ID NO: 355662 - DNA, 715 bp, Homo sapiens; identical to SEQ ID NO: 351982
  chr17:47653373-47654088
  hypo

SEQ ID NO: 355663 - DNA, 146 bp, Homo sapiens
  chr17:48687012-48687158
  hypo
cggtgcctccctgccccgtgaccctgaccagctagccacattgcttgtcttcctcaagtgccctgtgcccccagcttcgggctggacattcagagccagccacccaatgggctcagcgcaccccacccataggcagagtgaggtgg

SEQ ID NO: 355664 - DNA, 78 bp, Homo sapiens
  chr17:48687246-48687324
  hypo
aatgctggacgatgtaattgcttccggcagctcagccagcgctgcgtcaggtactgcgtctggggtgtgggctcatgc

SEQ ID NO: 355665 - DNA, 134 bp, Homo sapiens; identical to SEQ ID NO: 343028
  chr17:49281042-49281176
  hypo

SEQ ID NO: 355666 - DNA, 297 bp, Homo sapiens; identical to SEQ ID NO: 345533
  chr17:54911482-54911779
  hypo

SEQ ID NO: 355667 - DNA, 515 bp, Homo sapiens; identical to SEQ ID NO: 345534
  chr17:54911874-54912389
  hypo

SEQ ID NO: 355668 - DNA, 266 bp, Homo sapiens; identical to SEQ ID NO: 343035
  chr17:55917220-55917486
  hypo

SEQ ID NO: 355669 - DNA, 215 bp, Homo sapiens; identical to SEQ ID NO: 292571
  chr17:56327007-56327222
  hypo

SEQ ID NO: 355670 - DNA, 80 bp, Homo sapiens; identical to SEQ ID NO: 343039
  chr17:56439864-56439944
  hypo

SEQ ID NO: 355671 - DNA, 136 bp, Homo sapiens; identical to SEQ ID NO: 348819
  chr17:56743008-56743144
  hypo

SEQ ID NO: 355672 - DNA, 48 bp, Homo sapiens; identical to SEQ ID NO: 348820
  chr17:57297129-57297177
  hypo

SEQ ID NO: 355673 - DNA, 214 bp, Homo sapiens; identical to SEQ ID NO: 348821
  chr17:60754652-60754866
  hypo

SEQ ID NO: 355674 - DNA, 207 bp, Homo sapiens; identical to SEQ ID NO: 343051
  chr17:60766578-60766785
  hypo

SEQ ID NO: 355675 - DNA, 102 bp, Homo sapiens; identical to SEQ ID NO: 348822
  chr17:60766832-60766934
  hypo

SEQ ID NO: 355676 - DNA, 224 bp, Homo sapiens; identical to SEQ ID NO: 348823
  chr17:60767107-60767331
  hypo

SEQ ID NO: 355677 - DNA, 40 bp, Homo sapiens; identical to SEQ ID NO: 347459
  chr17:60885408-60885448
  hypo

SEQ ID NO: 355678 - DNA, 308 bp, Homo sapiens; identical to SEQ ID NO: 347460
  chr17:60885548-60885856
  hypo

SEQ ID NO: 355679 - DNA, 111 bp, Homo sapiens; identical to SEQ ID NO: 345536
  chr17:61777761-61777872
  hypo

SEQ ID NO: 355680 - DNA, 76 bp, Homo sapiens; identical to SEQ ID NO: 345537
  chr17:61778423-61778499
  hypo

SEQ ID NO: 355681 - DNA, 848 bp, Homo sapiens; identical to SEQ ID NO: 335648
  chr17:63555681-63556529
  hypo

SEQ ID NO: 355682 - DNA, 669 bp, Homo sapiens; identical to SEQ ID NO: 335649
  chr17:64187889-64188558
  hypo

SEQ ID NO: 355683 - DNA, 675 bp, Homo sapiens; identical to SEQ ID NO: 352002
  chr17:64298985-64299660
  hypo

SEQ ID NO: 355684 - DNA, 293 bp, Homo sapiens
  chr17:66420425-66420718
  hypo
cgctgcgaccgacccgcagagccgatgtgggaaatcacaaaacaacagccccagccctgcatgcagggccccaccgcagctttgttttctaagccaaatgtgctcactagagggttccacggatctgcgggagaaagaagccagacctgcactccatccttttacaattggaagctcaatggacacaaaacaatgatcaggagaagtttccataacaaagcctaatggacattgtttcagtgcccaagtggcagctcctctctggctctaggagctgatgctccaagtcttgg

SEQ ID NO: 355685 - DNA, 425 bp, Homo sapiens; identical to SEQ ID NO: 343072
  chr17:66440125-66440550
  hypo

SEQ ID NO: 355686 - DNA, 57 bp, Homo sapiens; identical to SEQ ID NO: 343073
  chr17:66913081-66913138
  hypo

SEQ ID NO: 355687 - DNA, 204 bp, Homo sapiens; identical to SEQ ID NO: 204763
  chr17:68164928-68165132
  hypo

SEQ ID NO: 355688 - DNA, 133 bp, Homo sapiens; identical to SEQ ID NO: 343075
  chr17:70220156-70220289
  hypo

SEQ ID NO: 355689 - DNA, 201 bp, Homo sapiens
  chr17:71201650-71201851
  hypo
tcctctctcttcatgggtggggactgggaattcatttgcagaaagaaggtgcatttccagtcacccagaaccgggcgctgcagctgctttatgatctgcgttacctcaacattgttctgacagccaagggtgacgaggtgaagagtggccggagcaagccagactccaggtgtcgtatcctctagggagctatgtcaaggc

SEQ ID NO: 355690 - DNA, 256 bp, Homo sapiens; identical to SEQ ID NO: 343083
  chr17:71431621-71431877
  hypo

SEQ ID NO: 355691 - DNA, 308 bp, Homo sapiens; identical to SEQ ID NO: 343084
  chr17:71548553-71548861
  hypo

SEQ ID NO: 355692 - DNA, 197 bp, Homo sapiens
  chr17:72220057-72220254
  hypo
cgcaggcgagacgctaaagcagccttgtggggcggacaaagctctgagcacaaggaaggggaccaaggctgctgcaatacatggccggggctgaaataagagactcagaggacagagttctggacaggccgggaggtcacagtcgagtgcggttcccagtacagtggaagagctttgagaagtgactggtgttaaaa

SEQ ID NO: 355693 - DNA, 183 bp, Homo sapiens
  chr17:72367880-72368063
  hypo
cgcagtggccctggcgcgccttgccaccaggaccaggaggccctcctactactaccttctggcgctcacagcctcggatatcatcatccaggtggtcatcgtgttcgcgggcttcctcctgcagggagcagtgctggcccgccaggtgccccaggctgtggtgcgcacggccaacatcctgga

SEQ ID NO: 355694 - DNA, 345 bp, Homo sapiens
  chr17:72368130-72368475
  hypo
tgccaccccctgcaccatcgggccgcctcgtccccaggccggacccgccgggccattgctgctgtcctgagtgctgccctgttgaccggcatccccttctactggtggctggacatgtggagagacaccgactcacccagaacactggacgaggtcctcaagtgggctcactgtctcactgtctatttcatcccttgtggcgtgttcctggtcaccaactcggccatcatccaccggctacggaggaggggccggagtgggctgcagccccgggtgggcaagagcacagccatcctcctgggcatcaccacactgttcaccctcctgtgggcgccccgggtcttc

SEQ ID NO: 355695 - DNA, 359 bp, Homo sapiens; identical to SEQ ID NO: 347466
  chr17:72449954-72450313
  hypo

SEQ ID NO: 355696 - DNA, 336 bp, Homo sapiens; identical to SEQ ID NO: 347467
  chr17:72450330-72450666
  hypo

SEQ ID NO: 355697 - DNA, 508 bp, Homo sapiens
  chr17:72824032-72824540
  hypo
cgcacccaccccttccgaggcccagctaaagccaagagagccctgcagcccggcaccttccaagggctaagtggtggtgaaggagggagctggcgccaagtcctcccctagtcctgttccccgcctggagtgccggtgcctgagctggtgatgggcacactgccggccatttgttatcattagccctggcatgttgattctctgcttggaaaagagagtgccgctcccagacagccaccgtgacggatggcctccacctcacagtgtcagagccagagccacacatggggagcagggaatggcacggggcttggggcgccctgacctcagggacatctggagccaggttcagaggtcagagagttgtgggagcagctctccaggaagcagccctgccaaggcacagctcagcactggcgtgtggaaaaggcctgggggcccatgcctggaggaagacccttcacccttggccctcagggtcatggctctgagtgtgtgtgcacaactc

SEQ ID NO: 355698 - DNA, 65 bp, Homo sapiens; identical to SEQ ID NO: 347468
  chr17:73073967-73074032
  hypo

SEQ ID NO: 355699 - DNA, 84 bp, Homo sapiens
  chr17:73090991-73091075
  hypo
cgttgggagcagggcagagggagggttctctgcagtcgccgtggacacagggacctgccctcagctcctgggagctctccaggg

SEQ ID NO: 355700 - DNA, 257 bp, Homo sapiens; identical to SEQ ID NO: 322977
  chr17:73091180-73091437
  hypo

SEQ ID NO: 355701 - DNA, 48 bp, Homo sapiens; identical to SEQ ID NO: 346169
  chr17:73215386-73215434
  hypo

SEQ ID NO: 355702 - DNA, 141 bp, Homo sapiens; identical to SEQ ID NO: 343103
  chr17:73242514-73242655
  hypo

SEQ ID NO: 355703 - DNA, 80 bp, Homo sapiens; identical to SEQ ID NO: 292709
  chr17:73584287-73584367
  hypo

SEQ ID NO: 355704 - DNA, 170 bp, Homo sapiens; identical to SEQ ID NO: 352021
  chr17:73584951-73585121
  hypo

SEQ ID NO: 355705 - DNA, 192 bp, Homo sapiens; identical to SEQ ID NO: 348834
  chr17:73615737-73615929
  hypo

SEQ ID NO: 355706 - DNA, 109 bp, Homo sapiens; identical to SEQ ID NO: 348835
  chr17:73616587-73616696
  hypo

SEQ ID NO: 355707 - DNA, 149 bp, Homo sapiens; identical to SEQ ID NO: 343110
  chr17:73635145-73635294
  hypo

SEQ ID NO: 355708 - DNA, 153 bp, Homo sapiens
  chr17:73808671-73808824
  hypo
ggcatccacacctcggccgcgccctccctataatcctgctcatagctgccctggggatttggctcaccaccacctactgcctgctctagccgaggccccgacctggcccgcatcccaccctacacccaccattcaaaaggcgcctctaggggc

SEQ ID NO: 355709 - DNA, 194 bp, Homo sapiens
  chr17:73811214-73811408
  hypo
gcctgagcctgacttgcctgtgctctgccctccagatctacaagtccaccaagtgcaacgacatgcagcagtcgggcagctgtccccgaggacccttctgcgcctttgcccacgtagaacgtatgctgttcccattgccccggggcagtgccctctcccacccctccctcgcctggctagctcaggcttaggcc

SEQ ID NO: 355710 - DNA, 506 bp, Homo sapiens; identical to SEQ ID NO: 343117
  chr17:74003908-74004414
  hypo

SEQ ID NO: 355711 - DNA, 269 bp, Homo sapiens
  chr17:74005186-74005455
  hypo
cgggcttcctcctctccagcagcaggcgcttgctctgcagctcgtacaccgcgtcctccgcggcccgcctcttctgggccgcctcccgcacctcctggcggagccgctctgcttctttctccagcaccgggtccttctcgtggcgcaccacctccttgctcaccgtcttggtctccaccttggcccgctcgcgcctccactcgtcgcgctcaccctgcaggcggatgagctgctcctgggagcgcccgtggctgttgacgagctcgttg

SEQ ID NO: 355712 - DNA, 154 bp, Homo sapiens
  chr17:74005497-74005651
  hypo
ctcctctcatgcctcaccacctcctgggtcacctccttgtactccaccgtgggcttctgggcccgcaggacctccaggtcgggcagcagcttctccacctccttctccacaccgctcctcttgcccgccatctcctgcagcttggccttgagcc

SEQ ID NO: 355713 - DNA, 194 bp, Homo sapiens; identical to SEQ ID NO: 343119
  chr17:74013689-74013883
  hypo

SEQ ID NO: 355714 - DNA, 185 bp, Homo sapiens; identical to SEQ ID NO: 343121
  chr17:74042063-74042248
  hypo

SEQ ID NO: 355715 - DNA, 386 bp, Homo sapiens; identical to SEQ ID NO: 343124
  chr17:74086716-74087102
  hypo

SEQ ID NO: 355716 - DNA, 264 bp, Homo sapiens; identical to SEQ ID NO: 343127
  chr17:74387398-74387662
  hypo

SEQ ID NO: 355717 - DNA, 81 bp, Homo sapiens; identical to SEQ ID NO: 343128
  chr17:74388687-74388768
  hypo

SEQ ID NO: 355718 - DNA, 118 bp, Homo sapiens; identical to SEQ ID NO: 348836
  chr17:74390245-74390363
  hypo

SEQ ID NO: 355719 - DNA, 182 bp, Homo sapiens; identical to SEQ ID NO: 348837
  chr17:74390459-74390641
  hypo

SEQ ID NO: 355720 - DNA, 149 bp, Homo sapiens; identical to SEQ ID NO: 343130
  chr17:74391568-74391717
  hypo

SEQ ID NO: 355721 - DNA, 103 bp, Homo sapiens
  chr17:74908627-74908730
  hypo
cgcagatgttcacggcagatgtcctggccactgatggagcaacaaggctggacggatgagccggtcccgctctgctcctcgggtctcggtgtttcaattaact

SEQ ID NO: 355722 - DNA, 132 bp, Homo sapiens
  chr17:74908814-74908946
  hypo
ggcacgagggagccgtgcgctctgtgatgagactgcagcaaggtgatgtcagccagtccccgcccgcgccccgccgtgtgcggagggaagaagccaaaccctagtgcctgcccagccgctgcatcctgagac

SEQ ID NO: 355723 - DNA, 657 bp, Homo sapiens; identical to SEQ ID NO: 346170
  chr17:75206857-75207514
  hypo

SEQ ID NO: 355724 - DNA, 209 bp, Homo sapiens; identical to SEQ ID NO: 323128
  chr17:75207630-75207839
  hypo

SEQ ID NO: 355725 - DNA, 328 bp, Homo sapiens; identical to SEQ ID NO: 346172
  chr17:75207987-75208315
  hypo

SEQ ID NO: 355726 - DNA, 689 bp, Homo sapiens; identical to SEQ ID NO: 343143
  chr17:75213347-75214036
  hypo

SEQ ID NO: 355727 - DNA, 148 bp, Homo sapiens; identical to SEQ ID NO: 343148
  chr17:76034983-76035131
  hypo

SEQ ID NO: 355728 - DNA, 282 bp, Homo sapiens; identical to SEQ ID NO: 343151
  chr17:76167747-76168029
  hypo

SEQ ID NO: 355729 - DNA, 330 bp, Homo sapiens; identical to SEQ ID NO: 348843
  chr17:76187077-76187407
  hypo

SEQ ID NO: 355730 - DNA, 478 bp, Homo sapiens; identical to SEQ ID NO: 343153
  chr17:76215753-76216231
  hypo

SEQ ID NO: 355731 - DNA, 170 bp, Homo sapiens; identical to SEQ ID NO: 352027
  chr17:76337740-76337910
  hypo

SEQ ID NO: 355732 - DNA, 488 bp, Homo sapiens
  chr17:76395100-76395588
  hypo
cgtcttcacccagagcagaaatgctgcgagtgggtggggtagtgccccaggagaaggttgggtgcagttaccaggagaagggtgaatgggtgctgtgtggcaagaagagcaggcgtctgccacgctgaggacttcaggcctgagacatggccagcatgcaggacagaggttggcctggaagtcctctggctaggagtagccccagctggtgtgactgattcaggtggacggcacaggtgaaggcgaggccacgtggaggtggctcctcattgggggcaggacgccttcctgttgtgagtcaggtgccgttttctctgtccgtgttcaggccggaagaactcccgcacaatgctgctcccactcctgcggaggttcccagagcaggtccgagtctccctctttcacacgccgcacctccgtgggctgcttcggctcctcatccctgagcgcttcaacgagaccatcggcctccagcacattaaggtgta

SEQ ID NO: 355733 - DNA, 50 bp, Homo sapiens
  chr17:76395713-76395763
  hypo
tggagaacctgcttgtaggtctggctgctgtgcacccgcggcacctcccc

SEQ ID NO: 355734 - DNA, 443 bp, Homo sapiens; identical to SEQ ID NO: 343159
  chr17:76818622-76819065
  hypo

SEQ ID NO: 355735 - DNA, 631 bp, Homo sapiens; identical to SEQ ID NO: 348845
  chr17:76992727-76993358
  hypo

SEQ ID NO: 355736 - DNA, 478 bp, Homo sapiens; identical to SEQ ID NO: 218133
  chr17:76993419-76993897
  hypo

SEQ ID NO: 355737 - DNA, 285 bp, Homo sapiens
  chr17:76996197-76996482
  hypo
cgtcttagacatttcaagacacgagtcctgtgcagcttttccctcaagcctacttgctcctcgtctccccttgggaagggtagtggtgacgggtggccaccgtgtccacagtggtctggttcaagctctctcaggatcctgggagatgtgcttttctgtgtgaatatacacttcgataaaaacataaggcactgccaccacgaaaaacctgactggcctcatcctccgtcttccttcctcagcattgactccgtggacaggttctgtcctcttccatggcccttc

SEQ ID NO: 355738 - DNA, 412 bp, Homo sapiens; identical to SEQ ID NO: 218135
  chr17:76996567-76996979
  hypo

SEQ ID NO: 355739 - DNA, 530 bp, Homo sapiens; identical to SEQ ID NO: 218136
  chr17:76997041-76997571
  hypo

SEQ ID NO: 355740 - DNA, 261 bp, Homo sapiens; identical to SEQ ID NO: 343164
  chr17:76998502-76998763
  hypo

SEQ ID NO: 355741 - DNA, 287 bp, Homo sapiens
  chr17:77113248-77113535
  hypo
cgcccccccaggagtctgcggtgaggaggccccactgcctggaaggacagatgccgcctctgcctggagcagcccagtgtgttaggacccctgctcagatgtggatgggtctgacgctcagccaccctggcagggacaggcaggagtccgcgtccttgctgaaggtgggctttgcggtggggaggaggagcgcccagcagggaagtggctgctcacctccctcacctgcgcctccaccccacgctcccatcacccggggccacgcacgctttgttcacaccacacac

SEQ ID NO: 355742 - DNA, 184 bp, Homo sapiens; identical to SEQ ID NO: 348849
  chr17:77769064-77769248
  hypo

SEQ ID NO: 355743 - DNA, 124 bp, Homo sapiens; identical to SEQ ID NO: 352030
  chr17:77778310-77778434
  hypo

SEQ ID NO: 355744 - DNA, 50 bp, Homo sapiens
  chr17:77808028-77808078
  hypo
tcatccaggtctgagtctagcaggatgacctcgggctgcgggagggcggc

SEQ ID NO: 355745 - DNA, 105 bp, Homo sapiens; identical to SEQ ID NO: 346174
  chr17:77899559-77899664
  hypo

SEQ ID NO: 355746 - DNA, 116 bp, Homo sapiens
  chr17:78143796-78143912
  hypo
cgttcagttcagccagagattgggccacattcagtcctcgcttccctgggagggggaaggtaagtgcgcgcagtccatccggcgaagagcaggtcagcctacggagggctcagcct

SEQ ID NO: 355747 - DNA, 399 bp, Homo sapiens
  chr17:78163400-78163799
  hypo
cgtggcttctctcctgcccggtgtagagtggcaagactgcatccgtccacacacctgaccgtgcagttgccgccatcttctcgggattctgcttgcctagggcaggcctctggggaagccagcaccccaggctgacctctctctgccccaggcggagaaggacattctggagcagagcctggacgaggcgcgggggagccgacaggagctggtggagcgcatccactcgctgcgggagcgggccgtggctgccgagaggcagcgagagcaggtgccgtgtgagcccttcctcccttgtgactctcctggggcttgtctcaggggtgcggacaggtctgtggggaagccagattccttcatccacgccgagctcacataattttgctgaacgaatctgtc

SEQ ID NO: 355748 - DNA, 561 bp, Homo sapiens; identical to SEQ ID NO: 218184
  chr17:78271717-78272278
  hypo

SEQ ID NO: 355749 - DNA, 77 bp, Homo sapiens; identical to SEQ ID NO: 348852
  chr17:78272313-78272390
  hypo

SEQ ID NO: 355750 - DNA, 162 bp, Homo sapiens; identical to SEQ ID NO: 343198
  chr17:78590602-78590764
  hypo

SEQ ID NO: 355751 - DNA, 522 bp, Homo sapiens; identical to SEQ ID NO: 343205
  chr17:78775515-78776037
  hypo

SEQ ID NO: 355752 - DNA, 446 bp, Homo sapiens
  chr17:78935167-78935613
  hypo
cgctgagcgtgccccctcccctacagccgcgtcatgacgtaccgggagcacacagcctgggtggtgaaggcctccctgcagaagcgtcccgacggccacatcgtgagtgtgaggtgaggagcgccgatatttagcagccgttctgctgtaaaaacattattttcccctccatttaaaatacgtccttggtatttaaacagctggaaggggatggcatttcgggcagtaattaactcctgccctggaactggccagaaagatcaggcgcagcccgtaggggcccaggggccacagctgctcccctgctgggggacacctgacctgcaggcgctttgggaactttcctgggctgccaactgcggagggttccggggggagttgggcagctgctctccctccacgggcaggggtggcagggtggcaggggcggcgcgtctgccaggcac

SEQ ID NO: 355753 - DNA, 735 bp, Homo sapiens; identical to SEQ ID NO: 352037
  chr17:79007528-79008263
  hypo

SEQ ID NO: 355754 - DNA, 753 bp, Homo sapiens; identical to SEQ ID NO: 352038
  chr17:79008842-79009595
  hypo

SEQ ID NO: 355755 - DNA, 60 bp, Homo sapiens; identical to SEQ ID NO: 343216
  chr17:79060187-79060247
  hypo

SEQ ID NO: 355756 - DNA, 516 bp, Homo sapiens
  chr17:79166571-79167087
  hypo
gccacctcactgtacagccgctgccgttgctgctgcagcgcccactgctcctgctccaggtgctgctggaacctgcgggacggtcaggactggctctcgggggccgggacgggcggtcccaggacccacccaccgcaggggcacgggccgaccacaggcctgactcacagctggagagcagccctccggggccctgcccctccccctcggcagtcaaggcccctcaaagccaccgcccgggggcaggcaaggccacgaggaacttgcccatcagccaagcgcagcaattccctgagctccaggccctcgtggcactttgggaagtggctgtggagccgcgtccaggcccccttttccctcagcccgtgtgccggcctcaccctgttcagcattgccccacgggcatggagggcgggaggcaggtgcctcgtggggccttatccacctcccctgcctccggcctgagggtgccaggtgcctggctccgtgacctgagcaagctcgcgccagggcctc

SEQ ID NO: 355757 - DNA, 421 bp, Homo sapiens; identical to SEQ ID NO: 343230
  chr17:79542407-79542828
  hypo

SEQ ID NO: 355758 - DNA, 388 bp, Homo sapiens
  chr17:79612376-79612764
  hypo
cgcagtgagcctggctggctacctgggcgccctctgtgagaacacctgcctgttacgtggcttctctgggggcatccttgccttcctggtgcttgaggccgtggcgggggccctggtggtggccctctggggcccgctgcaagacagcctggagcacaccctgcgtgtggccatcgcccactaccaggacgacccagacctgcgcttcctcctcgaccaagtccagctcgggctgaggtgctgcggagctgcctcctaccaggactggcagcagaacctgtgagtcttggagtgggcgagggacagggccaccacagggtcgcagaggccacacacccttgtgcgtgtacacacagtcactcacacgtacatactcattcgtgcatgc

SEQ ID NO: 355759 - DNA, 253 bp, Homo sapiens; identical to SEQ ID NO: 343233
  chr17:79648960-79649213
  hypo

SEQ ID NO: 355760 - DNA, 95 bp, Homo sapiens
  chr17:79826882-79826977
  hypo
cgggggtcaggaactcgtactcctcggcccggggcccatagctgcctaccatgtagtcagtcttgtcaactgcggcacaaggaagagggcggtca

SEQ ID NO: 355761 - DNA, 140 bp, Homo sapiens
  chr17:79827029-79827169
  hypo
tgcccggggccccactcactcttgacgcctttcctgtacgtatgctggatgtacttcatgccggacactatctctcggttaacctgcaggacccgaagcgaggatcagggaaggtcggtccggaccccagccccagcccc

SEQ ID NO: 355762 - DNA, 398 bp, Homo sapiens; identical to SEQ ID NO: 343239
  chr17:79873436-79873834
  hypo

SEQ ID NO: 355763 - DNA, 168 bp, Homo sapiens; identical to SEQ ID NO: 348854
  chr17:79887422-79887590
  hypo

SEQ ID NO: 355764 - DNA, 56 bp, Homo sapiens; identical to SEQ ID NO: 348855
  chr17:79887849-79887905
  hypo

SEQ ID NO: 355765 - DNA, 274 bp, Homo sapiens; identical to SEQ ID NO: 218273
  chr17:79913170-79913444
  hypo

SEQ ID NO: 355766 - DNA, 522 bp, Homo sapiens; identical to SEQ ID NO: 352041
  chr17:79989097-79989619
  hypo

SEQ ID NO: 355767 - DNA, 764 bp, Homo sapiens; identical to SEQ ID NO: 343243
  chr17:80019114-80019878
  hypo

SEQ ID NO: 355768 - DNA, 220 bp, Homo sapiens; identical to SEQ ID NO: 347472
  chr17:80186335-80186555
  hypo

SEQ ID NO: 355769 - DNA, 517 bp, Homo sapiens; identical to SEQ ID NO: 347473
  chr17:80186618-80187135
  hypo

SEQ ID NO: 355770 - DNA, 514 bp, Homo sapiens
  chr17:80201427-80201941
  hypo
cgcgcccaacagaaggtcacagcgcagactctactttctggccgtgaaggttctgggtccggttgggagagtcacctgctccttggcacctcagggtgggtccttctggcctgccggcttttctgagctagtcttggcacgtggcaaggacagccccgctcctggttttaagcacaggcattcatacagacggagtgccaatccgcacaggagcattgagtgctgagaaaatggactgagtgcaaaggcagcaaggcaacaaacactacagtaaccacctctcggttcacagtcctctcccaagggaccagaaacgcatcttccaccttgaatcctgggactcccaattgtcctgctagggtctcaaagcctctgcttccaagctctcagctgcctgcccacctcctggggaagaagcgcgcagtgctttgcctggtaacacccactgcacccctgccccgcggcagcctgcggtccctaactgctctccgagggcctcaagagttcctgacag

SEQ ID NO: 355771 - DNA, 91 bp, Homo sapiens
  chr17:80201971-80202062
  hypo
tgagacgccaaaatcaggttgaagaggtcccaccacacacgggcacacacacacaccacggacttttgatgagaaatctcctctccaaagc

SEQ ID NO: 355772 - DNA, 229 bp, Homo sapiens
  chr17:80394871-80395100
  hypo
cgactgggacccgggccggccgcatacactctggagtctcctacactgagacccgggcctggctgtctcaggcggctcccatgttggctctgggtacagccccgggaggcgtgtccagggccgtgttggccgcctcccctggagccactcacctgtttgctttctcacccagtcctcctcatgcagaagtaccggcggtgcggctttccgcagctgtgggcagccagtg

SEQ ID NO: 355773 - DNA, 82 bp, Homo sapiens
  chr17:80395146-80395228
  hypo
gcaccacctcaggaaccacgtgcagtggctgcaggtggcgggcagcgggcccacggactcactgcagggcatcatcctgacc

SEQ ID NO: 355774 - DNA, 522 bp, Homo sapiens; identical to SEQ ID NO: 343253
  chr17:80445750-80446272
  hypo

SEQ ID NO: 355775 - DNA, 223 bp, Homo sapiens; identical to SEQ ID NO: 343256
  chr17:80517124-80517347
  hypo

SEQ ID NO: 355776 - DNA, 295 bp, Homo sapiens; identical to SEQ ID NO: 343260
  chr17:80563218-80563513
  hypo

SEQ ID NO: 355777 - DNA, 243 bp, Homo sapiens
  chr17:80571137-80571380
  hypo
cgcccccgactacagtggtgggagcgggaggtggccaggggttcacacaggcatcaacgccaaacacagggtgggtatgggtcagggctgcgttccacagggcacaagccgcctgtccccgcaagacatcccagggccacaggggagggaggacagaccagaaacgcagccggagtcatccatgcccacgcacctgtacgatcagacaggaaagctgctgagtaggcaccgtctgaggcagtc

SEQ ID NO: 355778 - DNA, 271 bp, Homo sapiens
  chr17:80571776-80572047
  hypo
acccagagtcagatctcaagtgttagacaagccagggtgacgccggctcacttgaagctgccacttcaacatgcagggacattgctgctgccagccaccctccacctccacaggccagcaggagcctcagacctcccagagccacacaggcctcctacagatgcatttcctccctccctcctccagaggtgcccttggggcacagggagagaggagggcaggccgccccgtcccgacacagggagagaggagggcaggccgtcccatcccc

SEQ ID NO: 355779 - DNA, 112 bp, Homo sapiens
  chr17:80654614-80654726
  hypo
cgctcaatctccagccctgtcctccaggcgctcaatctccagccctgtcctccaggcgctcaatctccagggcagcgctggccctcggactttgccacagcgacatccgaac

SEQ ID NO: 355780 - DNA, 329 bp, Homo sapiens; identical to SEQ ID NO: 343267
  chr17:80712025-80712354
  hypo

SEQ ID NO: 355781 - DNA, 58 bp, Homo sapiens
  chr17:80747254-80747312
  hypo
cgtgtgctcacaggcagcccgtcgcggggtcatgtgctagacggggagggggcttggc

SEQ ID NO: 355782 - DNA, 62 bp, Homo sapiens
  chr17:80747754-80747816
  hypo
cgggagcccagcaacaaatgggagcttctgtgctgctgtccgtgcatacggcccaggagccg

SEQ ID NO: 355783 - DNA, 95 bp, Homo sapiens
  chr17:80747890-80747985
  hypo
tctccttcctggttcattgctcatctgttctcatgtggctgcgccgccaccctgtcctgggggtccttgtcccagcacgtggctctgtgcttcac

SEQ ID NO: 355784 - DNA, 139 bp, Homo sapiens; identical to SEQ ID NO: 343273
  chr17:80763321-80763460
  hypo

SEQ ID NO: 355785 - DNA, 137 bp, Homo sapiens
  chr17:80772735-80772872
  hypo
cgtggcatgggggatgtctggcgctggcagagctgggcaggagaggcctgttgctgccgtctcgactcgtggatggtgagtagctgaggcacggtcaggggggatgtctggcgctggcggagctgggcaggagaggc

SEQ ID NO: 355786 - DNA, 513 bp, Homo sapiens
  chr17:80772941-80773454
  hypo
cgtggcaggctgcagcccttcgtctgaacccatctccgcggtgtggccctgccgcgggcacgcccagaagagcttgagaacaaggtctgtctacctttttctcgcattggcctttgtaatttcctaattgcctcttttgtctgctgtggaattttaatgccacagattaccctgtgtagctggttttggagggccacgaatccttgtaatgtctgattttcttactccccaaaaccggttttcattcttgagggacattgtcgccccttaaggacacatgcagtggcacctgcttcagttgtagaaccaggtacccctggcagcatcctgggtcacctggagtgacgtggtgctccctggagatgaggctcacgccagcgtgaaaccagggtgggaactggggtggagggccaggggagctctgcagtggccagcagtggggtggggacagagggcacagcatggcagatgcaggggcactgccccagaccagctcttgtgccgtggccacac

SEQ ID NO: 355787 - DNA, 52 bp, Homo sapiens; identical to SEQ ID NO: 343275
  chr17:80794418-80794470
  hypo

SEQ ID NO: 355788 - DNA, 32 bp, Homo sapiens; identical to SEQ ID NO: 348859
  chr17:80797632-80797664
  hypo

SEQ ID NO: 355789 - DNA, 177 bp, Homo sapiens; identical to SEQ ID NO: 343278
  chr17:80859381-80859558
  hypo

SEQ ID NO: 355790 - DNA, 178 bp, Homo sapiens; identical to SEQ ID NO: 343279
  chr17:80860241-80860419
  hypo

SEQ ID NO: 355791 - DNA, 308 bp, Homo sapiens; identical to SEQ ID NO: 343281
  chr17:80879354-80879662
  hypo

SEQ ID NO: 355792 - DNA, 269 bp, Homo sapiens; identical to SEQ ID NO: 348861
  chr17:80965953-80966222
  hypo

SEQ ID NO: 355793 - DNA, 277 bp, Homo sapiens; identical to SEQ ID NO: 352044
  chr17:81038567-81038844
  hypo

SEQ ID NO: 355794 - DNA, 508 bp, Homo sapiens; identical to SEQ ID NO: 352045
  chr17:81038865-81039373
  hypo

SEQ ID NO: 355795 - DNA, 188 bp, Homo sapiens; identical to SEQ ID NO: 323753
  chr17:81062393-81062581
  hypo

SEQ ID NO: 355796 - DNA, 1315 bp, Homo sapiens; identical to SEQ ID NO: 347474
  chr18:811501-812816
  hypo

SEQ ID NO: 355797 - DNA, 190 bp, Homo sapiens; identical to SEQ ID NO: 347475
  chr18:812869-813059
  hypo

SEQ ID NO: 355798 - DNA, 238 bp, Homo sapiens; identical to SEQ ID NO: 345538
  chr18:2848166-2848404
  hypo

SEQ ID NO: 355799 - DNA, 120 bp, Homo sapiens; identical to SEQ ID NO: 343299
  chr18:3051295-3051415
  hypo

SEQ ID NO: 355800 - DNA, 205 bp, Homo sapiens; identical to SEQ ID NO: 346176
  chr18:3214837-3215042
  hypo

SEQ ID NO: 355801 - DNA, 137 bp, Homo sapiens; identical to SEQ ID NO: 346177
  chr18:3215256-3215393
  hypo

SEQ ID NO: 355802 - DNA, 2276 bp, Homo sapiens; identical to SEQ ID NO: 335731
  chr18:3449180-3451456
  hypo

SEQ ID NO: 355803 - DNA, 185 bp, Homo sapiens; identical to SEQ ID NO: 343306
  chr18:3580794-3580979
  hypo

SEQ ID NO: 355804 - DNA, 995 bp, Homo sapiens; identical to SEQ ID NO: 335733
  chr18:3879130-3880125
  hypo

SEQ ID NO: 355805 - DNA, 216 bp, Homo sapiens; identical to SEQ ID NO: 292892
  chr18:7566793-7567009
  hypo

SEQ ID NO: 355806 - DNA, 415 bp, Homo sapiens; identical to SEQ ID NO: 204882
  chr18:7567335-7567750
  hypo

SEQ ID NO: 355807 - DNA, 153 bp, Homo sapiens
  chr18:8612051-8612204
  hypo
cgtttgttgagcacctactgtgtgttgggtgttatgctacccagtggggattcagtggtaaacaggacatcgactctgtccagaagtggatcggagcttctgggagctgcgtgaccgcttgtcagggcagtgacagatgtgtatgggtatttg

SEQ ID NO: 355808 - DNA, 789 bp, Homo sapiens
  chr18:8659297-8660086
  hypo
cgcgcagaacgcccgtgcctgggaagaggcctgcactccagcagacttccatgttcgctggaagcctcccttcctgactgtgaattgggacaatgcgcagacttccatgttcgttggaagcctcccttcctgactgtgaattgggacgatgcgcgggattttctgaaacctcagttcctccgtctgtaagatgagattgtggggaggagggcggacctgtaagtgcccagccacgagggctgagagattcgaactcctttgctgccgcgaagaagggcctgttccccggaggccaggtgggctccaggccaagctcgcagaggggccaggtgtgctctggcggtgagagggccgcgcgtcccggcacacaccccgcccatttcagcaccctctccaccctcctcagatgaccagagaaatccaagcaggcccttggctttcaagattcagcttcagccatgcataagtccttcactgaagtggcagaggaaggacgagcggctttgttggattggggctggagccccgtgcccggctgtgggtgctcgtgggagagcctcgcccggccctgcgcttcccgagagttcgccgggagcacaagccctggagagcccatgggcagagctcaccagccccacctcacagagagggaaactccgaagtggccgtggatttgcccagggtcacccagtgacagacagctcagactcctttcccagctccggccaccgaagcttgcaggcgcgtccgttccagctcagataagcacctccgccacgctttcctcac

SEQ ID NO: 355809 - DNA, 113 bp, Homo sapiens; identical to SEQ ID NO: 343321
  chr18:9196896-9197009
  hypo

SEQ ID NO: 355810 - DNA, 467 bp, Homo sapiens; identical to SEQ ID NO: 343324
  chr18:9478452-9478919
  hypo

SEQ ID NO: 355811 - DNA, 81 bp, Homo sapiens; identical to SEQ ID NO: 343325
  chr18:9514129-9514210
  hypo

SEQ ID NO: 355812 - DNA, 65 bp, Homo sapiens; identical to SEQ ID NO: 348873
  chr18:9547721-9547786
  hypo

SEQ ID NO: 355813 - DNA, 176 bp, Homo sapiens; identical to SEQ ID NO: 348874
  chr18:9547816-9547992
  hypo

SEQ ID NO: 355814 - DNA, 275 bp, Homo sapiens; identical to SEQ ID NO: 292905
  chr18:9708063-9708338
  hypo

SEQ ID NO: 355815 - DNA, 257 bp, Homo sapiens; identical to SEQ ID NO: 343334
  chr18:10485485-10485742
  hypo

SEQ ID NO: 355816 - DNA, 192 bp, Homo sapiens; identical to SEQ ID NO: 343337
  chr18:11992166-11992358
  hypo

SEQ ID NO: 355817 - DNA, 160 bp, Homo sapiens; identical to SEQ ID NO: 343338
  chr18:11992771-11992931
  hypo

SEQ ID NO: 355818 - DNA, 46 bp, Homo sapiens; identical to SEQ ID NO: 348877
  chr18:12277197-12277243
  hypo

SEQ ID NO: 355819 - DNA, 111 bp, Homo sapiens; identical to SEQ ID NO: 348878
  chr18:12277273-12277384
  hypo

SEQ ID NO: 355820 - DNA, 140 bp, Homo sapiens
  chr18:12375127-12375267
  hypo
cgaaaaaggacctaccacacggcagcgtggcgtgaccatggcgaagaaattgatttaagactggcaagggagcctcaaggagtaaaaatcatgaatgcaggcactattattccccctccccacccccgctcttttttttt

SEQ ID NO: 355821 - DNA, 60 bp, Homo sapiens; identical to SEQ ID NO: 218438
  chr18:12375294-12375354
  hypo

SEQ ID NO: 355822 - DNA, 165 bp, Homo sapiens; identical to SEQ ID NO: 343346
  chr18:13033480-13033645
  hypo

SEQ ID NO: 355823 - DNA, 32 bp, Homo sapiens; identical to SEQ ID NO: 348880
  chr18:13036746-13036778
  hypo

SEQ ID NO: 355824 - DNA, 110 bp, Homo sapiens
  chr18:13135194-13135304
  hypo
agggctgccagcaccctgtcatctctcaggttttagctcagggctgctgtccagcacccgctcttgcttggatactttcggtggtgtggctgctggttactgtattgcac

SEQ ID NO: 355825 - DNA, 340 bp, Homo sapiens; identical to SEQ ID NO: 343354
  chr18:13442504-13442844
  hypo

SEQ ID NO: 355826 - DNA, 56 bp, Homo sapiens; identical to SEQ ID NO: 343356
  chr18:13499663-13499719
  hypo

SEQ ID NO: 355827 - DNA, 51 bp, Homo sapiens
  chr18:13826252-13826303
  hypo
cgccggcatctgggctttctgcacgggctgcggcattgtcttcatcctgta

SEQ ID NO: 355828 - DNA, 79 bp, Homo sapiens
  chr18:13826592-13826671
  hypo
ttcaatatgtacctcatactcatcatgtgtaattccgtgatggaccctctcatatatgccttccgcagccaagagatgc

SEQ ID NO: 355829 - DNA, 195 bp, Homo sapiens; identical to SEQ ID NO: 345545
  chr18:20512643-20512838
  hypo

SEQ ID NO: 355830 - DNA, 1232 bp, Homo sapiens; identical to SEQ ID NO: 345546
  chr18:20512902-20514134
  hypo

SEQ ID NO: 355831 - DNA, 310 bp, Homo sapiens
  chr18:20911034-20911344
  hypo
cgttcagcgagaggcagagccccggaacagcggtgttcactcagttaaacctcatggtctgagagagtggcaggtgtgccgttttccataattagtcacagcccctgaaggaaaagcgcgcccgtgtggggcaggaccaaaggaagaaacgcttctgcaatgctaccgggaagtctgagctcaccttctttaccttggcaccgagctgaagatctgttagaaaccctctccaaccaggactttcaggagaaacggtggccaccgcccagaataacaaggccccagcagcaaggtgtccttttcccagcaa

SEQ ID NO: 355832 - DNA, 157 bp, Homo sapiens
  chr18:22804909-22805066
  hypo
cggcagtttccagtatcaagactcttactatgcgtgactttgtgttcagtaagagttaaaagggagggaaaccgctctccgcaaatagggcacatgtagtgtttgacagggcctaggtgggtctgcatatgttcccggaggccattttcggagaaga

SEQ ID NO: 355833 - DNA, 1113 bp, Homo sapiens; identical to SEQ ID NO: 352075
  chr18:23806188-23807301
  hypo

SEQ ID NO: 355834 - DNA, 105 bp, Homo sapiens; identical to SEQ ID NO: 352078
  chr18:25756986-25757091
  hypo

SEQ ID NO: 355835 - DNA, 281 bp, Homo sapiens; identical to SEQ ID NO: 293004
  chr18:30349781-30350062
  hypo

SEQ ID NO: 355836 - DNA, 1207 bp, Homo sapiens; identical to SEQ ID NO: 345548
  chr18:32556625-32557832
  hypo

SEQ ID NO: 355837 - DNA, 45 bp, Homo sapiens; identical to SEQ ID NO: 204955
  chr18:32557883-32557928
  hypo

SEQ ID NO: 355838 - DNA, 755 bp, Homo sapiens; identical to SEQ ID NO: 345552
  chr18:42258983-42259738
  hypo

SEQ ID NO: 355839 - DNA, 120 bp, Homo sapiens; identical to SEQ ID NO: 204967
  chr18:42259821-42259941
  hypo

SEQ ID NO: 355840 - DNA, 1164 bp, Homo sapiens; identical to SEQ ID NO: 352089
  chr18:42260083-42261247
  hypo

SEQ ID NO: 355841 - DNA, 58 bp, Homo sapiens; identical to SEQ ID NO: 343381
  chr18:45353804-45353862
  hypo

SEQ ID NO: 355842 - DNA, 796 bp, Homo sapiens; identical to SEQ ID NO: 335809
  chr18:45687770-45688566
  hypo

SEQ ID NO: 355843 - DNA, 154 bp, Homo sapiens; identical to SEQ ID NO: 352092
  chr18:45934877-45935031
  hypo

SEQ ID NO: 355844 - DNA, 660 bp, Homo sapiens; identical to SEQ ID NO: 352093
  chr18:45935196-45935856
  hypo

SEQ ID NO: 355845 - DNA, 1224 bp, Homo sapiens; identical to SEQ ID NO: 352094
  chr18:45935857-45937081
  hypo

SEQ ID NO: 355846 - DNA, 51 bp, Homo sapiens; identical to SEQ ID NO: 324178
  chr18:46142611-46142662
  hypo

SEQ ID NO: 355847 - DNA, 323 bp, Homo sapiens; identical to SEQ ID NO: 343385
  chr18:46287816-46288139
  hypo

SEQ ID NO: 355848 - DNA, 556 bp, Homo sapiens; identical to SEQ ID NO: 335811
  chr18:46502500-46503056
  hypo

SEQ ID NO: 355849 - DNA, 137 bp, Homo sapiens; identical to SEQ ID NO: 343388
  chr18:47285297-47285434
  hypo

SEQ ID NO: 355850 - DNA, 436 bp, Homo sapiens; identical to SEQ ID NO: 347511
  chr18:47720908-47721344
  hypo

SEQ ID NO: 355851 - DNA, 53 bp, Homo sapiens; identical to SEQ ID NO: 352104
  chr18:53257322-53257375
  hypo

SEQ ID NO: 355852 - DNA, 115 bp, Homo sapiens; identical to SEQ ID NO: 346183
  chr18:55850987-55851102
  hypo

SEQ ID NO: 355853 - DNA, 172 bp, Homo sapiens
  chr18:56008826-56008998
  hypo
cgttgttgtttgggttcgcgctcctaatcacacacaccgggagatcctcctatgaagctaacttgtttttgcctccaaaatagcttgcagaagatggtgcgtccggatcagccacaaacagtaacaaccatctaatcgagcctcagatccgccggcctcgtagcctcagctc

SEQ ID NO: 355854 - DNA, 486 bp, Homo sapiens
  chr18:59483218-59483704
  hypo
cgccccgcctgtcctgctcctcctccaccgcctcctggggagccccaccttgcagaggctgctgttcagcagggatggtcaccacggtgacggacttctgctggctcccgggcagcaggcggcagcccatgtctccgggcagcagcgcacgctccttggagatgggcaggggcagcatgtagcacccattgctgggaagtttgatgaagaccggggtgtgttcggaagtgtgtggaatggcgatgacagccaggacctccgggtcgtccgggagctgcgacacggagaagccgggaggcagcttggtgacaccgcggcaccaggggcaccgcacatccttctggctggtcctcatctgctgcaggcacactgaacagcaggtgtgcttgcagtccagcaacttgggcctgcgccgggggctgtagtaattgaaacagatctgacattccagcagagagtcctgggacagcgtctccatggtggacc

SEQ ID NO: 355855 - DNA, 127 bp, Homo sapiens
  chr18:72347372-72347499
  hypo
cggccacatgagaaatgagcaggccagtgtggaggagcttccggagggaggggccacctttaaatgtgtcaagtgcacagagccctttgattctgaacagaatttatttttacatattaaaggacag

SEQ ID NO: 355856 - DNA, 74 bp, Homo sapiens
  chr18:72347576-72347650
  hypo
ccagggaaacgtctgcaagtattgtgggaagatgtgtcgaagcagcaactcgatggccttcctggcacacattc

SEQ ID NO: 355857 - DNA, 227 bp, Homo sapiens; identical to SEQ ID NO: 343416
  chr18:72764607-72764834
  hypo

SEQ ID NO: 355858 - DNA, 153 bp, Homo sapiens; identical to SEQ ID NO: 343418
  chr18:74069268-74069421
  hypo

SEQ ID NO: 355859 - DNA, 163 bp, Homo sapiens; identical to SEQ ID NO: 343419
  chr18:74073695-74073858
  hypo

SEQ ID NO: 355860 - DNA, 684 bp, Homo sapiens; identical to SEQ ID NO: 343420
  chr18:74083302-74083986
  hypo

SEQ ID NO: 355861 - DNA, 1404 bp, Homo sapiens; identical to SEQ ID NO: 343421
  chr18:74090923-74092327
  hypo

SEQ ID NO: 355862 - DNA, 874 bp, Homo sapiens; identical to SEQ ID NO: 343422
  chr18:74096607-74097481
  hypo

SEQ ID NO: 355863 - DNA, 132 bp, Homo sapiens
  chr18:74113780-74113912
  hypo
cgcgctccatctctccaccaaccacacccccgcgccgcacccctccactactgtttataggctctcaagagggacagggaaaaccagtattgtttgagtgccaactctgcataaacaatttccacagaatga

SEQ ID NO: 355864 - DNA, 60 bp, Homo sapiens; identical to SEQ ID NO: 218599
  chr18:74113942-74114002
  hypo

SEQ ID NO: 355865 - DNA, 266 bp, Homo sapiens; identical to SEQ ID NO: 343428
  chr18:74148373-74148639
  hypo

SEQ ID NO: 355866 - DNA, 460 bp, Homo sapiens; identical to SEQ ID NO: 343430
  chr18:74159178-74159638
  hypo

SEQ ID NO: 355867 - DNA, 366 bp, Homo sapiens; identical to SEQ ID NO: 324379
  chr18:74171117-74171483
  hypo

SEQ ID NO: 355868 - DNA, 122 bp, Homo sapiens
  chr18:74171505-74171627
  hypo
gaatgtattccagcactgtctgccatgatgccaacagcaacacttctcaacaccaagcctttaaatgtccagcagctccacagcccgagtcagagtggcccagcctcccctggacctgatgc

SEQ ID NO: 355869 - DNA, 182 bp, Homo sapiens
  chr18:74195379-74195561
  hypo
cgcctccctgcccactcctgtgggaagctccctctcggcatctgtccgtcatcagcatctgtccgtcatcggcatctgtctgtcacgggtcatctgccgcaccacactgagaacccatgagtgccaaatgtcccccgtcagctggcccacccgcatttcatcttcctggcttaagaaggtga

SEQ ID NO: 355870 - DNA, 245 bp, Homo sapiens
  chr18:74325503-74325748
  hypo
cggtctcgtgcaagccccgcctctcccttactagcaaagttgtgaggacagcgcctgcacgcaacacttgcttactaacttgtaactgttattacagaaagcgtggagccaaacagatggcagaggcccaaggaagagcgcgctaaacccgaagtagatctgatttcacatcttgacttggcgattgtttagctgggtcagggtaaatgcctcactgttcctcgtctgtaaatgaacacgggtgc

SEQ ID NO: 355871 - DNA, 173 bp, Homo sapiens
  chr18:74325938-74326111
  hypo
gacaggggacactggaacaggggagacgacatggaagaaatctgggggagccaaaagccgccatgccgagaagggggtcggaggaggcgcgggagagaaaagcccagggctgtacactcgcatccctctgctgccggcccttcgggtacattcaaatactgggcatgagtccc

SEQ ID NO: 355872 - DNA, 250 bp, Homo sapiens
  chr18:74396249-74396499
  hypo
cgagtcgattctgtgcccagctcagactgtggctgatgcgcagaggcacgtgggctcttggagggtggggatgagctgggcagccccacggctcctcctggcagggcccccatgctgcgcgtctgtgggctcttggagggtggggatgagctgggcagccgcacggctcctcctggcagatcccccatgctgcgcgtctgtgggttccacggcagccagttccaggcacagggcattcttggtgcacttg

SEQ ID NO: 355873 - DNA, 140 bp, Homo sapiens
  chr18:74721790-74721930
  hypo
cgccggcgtcttaccttgtacatgttgcacagcccaggctggctgcgggcatgagagggcagagggctccggcccggctttagccagggtacctgccgggggacacagagtgggctgcgtgagtccgggtgggcgccgcc

SEQ ID NO: 355874 - DNA, 1775 bp, Homo sapiens; identical to SEQ ID NO: 343449
  chr18:74736601-74738376
  hypo

SEQ ID NO: 355875 - DNA, 337 bp, Homo sapiens; identical to SEQ ID NO: 343451
  chr18:74759077-74759414
  hypo

SEQ ID NO: 355876 - DNA, 636 bp, Homo sapiens
  chr18:74763734-74764370
  hypo
cgtgaagaccaggggtaggagcgtgagtgggggtgcactttgctaaacctgcatgtaacagtgggcttaattttccctttttttaacaccttgtttcttcaaattacacaatgttgatgctaaaatgttctttgtagaagcgaggcccagctcctgaaggattcatctgagaaacccagggacatgcccttctctcattggaacaagtgggaaaaaaggcatcttaaaaaaaggttatggtgaagccgtgcggcagcactggaagaggatgaggaggctggagaaggcgtgtgagtgcaagctgccctcccgagactgtgccctctgagccagagtcttcctccgatgtgcccaagtccacccgaccaggaacgggggaaggagcggggcgatccaacagccacacaacagagtcccaagttccaatcacaaattcaggctgtgaggtgaaatcacaaatgtgaactttacttatggaaaccaaatagaagtgctttcaaattggggatccaagacccaacagacataagtgatcagcagcatcccgatcgggggggtaagacaaaggggtccttggatgggggcacctgtgagcagggacccctttgtctgagctccccgggtcccgagctggac

SEQ ID NO: 355877 - DNA, 817 bp, Homo sapiens; identical to SEQ ID NO: 347518
  chr18:74844285-74845102
  hypo

SEQ ID NO: 355878 - DNA, 241 bp, Homo sapiens; identical to SEQ ID NO: 343461
  chr18:75873544-75873785
  hypo

SEQ ID NO: 355879 - DNA, 236 bp, Homo sapiens; identical to SEQ ID NO: 348899
  chr18:75999434-75999670
  hypo

SEQ ID NO: 355880 - DNA, 143 bp, Homo sapiens
  chr18:76129277-76129420
  hypo
cgcagtaacacacggcacagaccgcgtgcctttcctccatctgcttaccgagtcggcgcggccacttaccacccatggcagcacattgcaaggtttgtccgtataaaagaaagtgccggcagatcgtgacgtggaggcctcgg

SEQ ID NO: 355881 - DNA, 180 bp, Homo sapiens
  chr18:76129450-76129630
  hypo
ggccaggctttgctgcgatcactaaaacctggttcgaaatgagccactttagccctccgcatggtggcctcctaggcatccaggcagagggaccctccccgacagcgctctgggggcagcccaggaaggctcagtgctgcggtaattcggggcctccaggtccaccttacgctcatccac

SEQ ID NO: 355882 - DNA, 114 bp, Homo sapiens
  chr18:76189679-76189793
  hypo
cgtgggacccatgacgcagagaggcaggtccctacccaccgggccgtgggccgctgagcacagagcgtggagccctgcggcggggtcgttcctgggccccgcgtgccatcctgg

SEQ ID NO: 355883 - DNA, 273 bp, Homo sapiens
  chr18:76189872-76190145
  hypo
gctccctgtctgcgggccccttgctttccgcagcagccggcctgtcggtcctcggcgggagcctctcgttccccagccacggggccttcccggggtgcggccgagtcaggcggagaccccctggggtgggtggcgggagcggggccgcagcaacagggcggcgtggagggggagaaacaccttacccagccggcggccccctccagcgtgcagctggaacgggaagctgtctgctcagccgtcagaaggatgcgagaaattacctagctcccc

SEQ ID NO: 355884 - DNA, 463 bp, Homo sapiens
  chr18:76435960-76436423
  hypo
cgttcactcaggaagccgaagcccagaagagtgaggtctcaaagttcacagcacgtggcctagaattcaggggtgcagagctcctgcttggtaactcatcccctgtgcggtgatgcttctgatcccacagcaatgcctgcttctgcgaggctggtccagggctggaacggagccctgtgccgtgatgcttccgatcccacagcaatgccacgctcctccagagctggagcagattccgatcccacagcaatgccacgctcctccagggctggagcagattctgatcccacagcaaggccgcgcttctccaaggctggagcagattctgatcccaccgcaatgccgcgcttctccaagactggagcacattctgatcccaccgcaatgccgcatttctccaaggctggagcagattccgatcccaccgcaatgccgcatttctccagggctggagcagattcca

SEQ ID NO: 355885 - DNA, 432 bp, Homo sapiens; identical to SEQ ID NO: 343471
  chr18:76495838-76496270
  hypo

SEQ ID NO: 355886 - DNA, 178 bp, Homo sapiens; identical to SEQ ID NO: 343473
  chr18:76552775-76552953
  hypo

SEQ ID NO: 355887 - DNA, 55 bp, Homo sapiens; identical to SEQ ID NO: 348901
  chr18:76653387-76653442
  hypo

SEQ ID NO: 355888 - DNA, 137 bp, Homo sapiens
  chr18:76685353-76685490
  hypo
cgcaagagggcgtgaagccacgcggtcgcacacctggtaccgcgcacagtgagaaaggagggcaagtgcgctgagacccaggagggagggcagccctcccctgcgctgctgaggctcgtttctttcaatgtgtccct

SEQ ID NO: 355889 - DNA, 298 bp, Homo sapiens; identical to SEQ ID NO: 218657
  chr18:76685836-76686134
  hypo

SEQ ID NO: 355890 - DNA, 102 bp, Homo sapiens
  chr18:76686279-76686381
  hypo
gccatgagaaggttctagaattagatggtggcgatggttgctccacgctgccatgggggcagctgagggaaaggaggtgggatcggggctcggccagctctc

SEQ ID NO: 355891 - DNA, 583 bp, Homo sapiens; identical to SEQ ID NO: 293194
  chr18:77160022-77160605
  hypo

SEQ ID NO: 355892 - DNA, 710 bp, Homo sapiens; identical to SEQ ID NO: 343492
  chr18:77474501-77475211
  hypo

SEQ ID NO: 355893 - DNA, 160 bp, Homo sapiens; identical to SEQ ID NO: 346187
  chr18:77508739-77508899
  hypo

SEQ ID NO: 355894 - DNA, 398 bp, Homo sapiens; identical to SEQ ID NO: 324585
  chr18:77508946-77509344
  hypo

SEQ ID NO: 355895 - DNA, 116 bp, Homo sapiens; identical to SEQ ID NO: 346189
  chr18:77509679-77509795
  hypo

SEQ ID NO: 355896 - DNA, 265 bp, Homo sapiens
  chr18:77542640-77542905
  hypo
cgccgactctgcagcccggcgactgcttcccaggtgactgtttccagagtcaggtgttggccgtggtcaggttgacctgcctgtttgttttctataagctgtgtgtgttgtgcccgggtgtagatgccctgaggtttcacggccccccagcaagcagccccaggcccggcaccggatgggcccttcatacccattcactgtaacagacaagcagacggatgaggccatcgtggtccctctgaataaacgatgcttcacagaagtc

SEQ ID NO: 355897 - DNA, 270 bp, Homo sapiens; identical to SEQ ID NO: 218705
  chr18:77542951-77543221
  hypo

SEQ ID NO: 355898 - DNA, 576 bp, Homo sapiens; identical to SEQ ID NO: 343503
  chr18:77608097-77608673
  hypo

SEQ ID NO: 355899 - DNA, 135 bp, Homo sapiens; identical to SEQ ID NO: 348905
  chr18:77609451-77609586
  hypo

SEQ ID NO: 355900 - DNA, 474 bp, Homo sapiens; identical to SEQ ID NO: 348906
  chr18:77609678-77610152
  hypo

SEQ ID NO: 355901 - DNA, 113 bp, Homo sapiens; identical to SEQ ID NO: 343505
  chr18:77616298-77616411
  hypo

SEQ ID NO: 355902 - DNA, 362 bp, Homo sapiens
  chr18:77627972-77628334
  hypo
cggctgctgcctgcagtctgggtgtctggcggccaggctgccttcccccgtcgtccccatgaggtccaggtcctgatcgtgcttccaaaaggtgctggagtgtttggctgtcctcggtcgaatatccaggagggaaaattcatttgtgtcacgttagagaataggagaagtttgggctgccccagctacagaagtcaccccaggaacaccagccctaacccttactgtggaccccaaaaccccagatcctctcagggacaaccctgggctccgtggcacccagcccttcacactcctggcacgcacccctaaattgcttgtccagttaagaagcagtcgccctccgcgtggggcctggtgac

SEQ ID NO: 355903 - DNA, 122 bp, Homo sapiens
  chr18:77628470-77628592
  hypo
tgactgaccgaaggtctttttcggaagcgattcagttgtgtgggtgaagagccaagaaaaggtggttctcactcctgtcctaagagaatatttcaaagcatgagaattggcgtgttggtgac

SEQ ID NO: 355904 - DNA, 189 bp, Homo sapiens
  chr18:77635961-77636150
  hypo
cgatgtccggcacgcagtccccaggcgggcacactgcccagcagcccagtggcaggagctcagagctgacttgcttcttgcccaggtctggggttggtgcagcgcccgcagctcacgggccacagcagcggaaggtctgcggcattttggaccttgctgttgccggggcagtgggtgttggcgccacat

SEQ ID NO: 355905 - DNA, 344 bp, Homo sapiens; identical to SEQ ID NO: 324607
  chr18:77636190-77636534
  hypo

SEQ ID NO: 355906 - DNA, 277 bp, Homo sapiens
  chr18:77808879-77809156
  hypo
cgtcggctcagtgcctcctagaaagtggagtgtgggcacgtttgcaggggatccaaccaggcgtctgctcagtgcctcctagaaagtggagtgtgggcacgtttgtaggggatcccaccaggcatcagctcagtgcctcctagaaagaggagtgtgggcacgtttcagagaaaactggcttaggcctccctgtttctggcgtggccttccctgggagcgagttagggacacggaagctcacccgcttctgaatgggtccactcctggggatttccgc

SEQ ID NO: 355907 - DNA, 368 bp, Homo sapiens
  chr18:77809186-77809554
  hypo
gaagctcacccccttctgaatgggtccactcctggggatttccgcggccttccctgggagcgggttagggacatggaagctcaccctcttctgaatgggtccactcctggggatttccacggcctttcctgggagcaggttagggacatggaagctcacgcccttctgaatgggtccactcccggggatttccatggccttccctggatgatccactcctggggattttccgcagctctccagatgacgtgcacgcacactaaacacccagaagttagggaggcactgatccagtgaagtcctcagatcaaccttgtgagctttttacaagtacctgtcactgttaaactgctgatgaaatgtgaaac

SEQ ID NO: 355908 - DNA, 912 bp, Homo sapiens; identical to SEQ ID NO: 343511
  chr18:77943609-77944521
  hypo

SEQ ID NO: 355909 - DNA, 54 bp, Homo sapiens
  chr19:403809-403863
  hypo
ccgtcccaggccctgactggggctcaccaggccgcggtcaggaggccgggctac

SEQ ID NO: 355910 - DNA, 53 bp, Homo sapiens
  chr19:407832-407885
  hypo
ccacctgggccagagccccgtgctcactgtggaacagagactccttgcgcctc

SEQ ID NO: 355911 - DNA, 66 bp, Homo sapiens
  chr19:491540-491606
  hypo
gagcctggagatgcccccgggagcaccaaggcgtcagagcagctgaccagggccccaggcctcgcc

SEQ ID NO: 355912 - DNA, 834 bp, Homo sapiens; identical to SEQ ID NO: 343521
  chr19:581325-582159
  hypo

SEQ ID NO: 355913 - DNA, 405 bp, Homo sapiens; identical to SEQ ID NO: 352128
  chr19:603411-603816
  hypo

SEQ ID NO: 355914 - DNA, 159 bp, Homo sapiens; identical to SEQ ID NO: 352129
  chr19:603846-604005
  hypo

SEQ ID NO: 355915 - DNA, 56 bp, Homo sapiens
  chr19:617561-617617
  hypo
cgccttactcagagcagaaccgcttgaccaggaatctggacaggtcctgcaggatg

SEQ ID NO: 355916 - DNA, 808 bp, Homo sapiens
  chr19:617647-618455
  hypo
cggcacacctgggcaggagtcagaggatccccaggggtgatcaggcaggctctgggcaccacccctacccaacgccccagtgtgggggccccacccatgggtggactgaggctcagactacgggggcacctggttcatgacggagacatcagctgcgtgagtccagtaacagtcgtgcacagagacgaaggtcaggcccttcctgtggcagagcggaggactcctgaagggaggggagctcacagggccacccagtgaccagcatcctggccctgcgctcagccccctccacttgaggtccagggaagcccaccctcctgcaggcctcgccccacccctcgccccgcccctccccaaacatcctgggttaggtatcagtacagggggaggaaatgttcccagaagcctcctcgccccacccctgccgccccccacgctgctgtgggagcctcagctccgagggcggctacgaggtcccctcctgccagggccaccaccccgcatcctgagcattcccagctcccgtggccggtagattctgctggaacgacctccacgtgctccagatctaaccacacatcgcggtgccaagaaatgcccagcaggaaggggcagcgcccatgctcggctctccctgtcgggccacaggaggggagctgccaggaccacctacattcggggcacacagcctcagggcctctacacaggccccacagacacagcagatccactctgcccagtccctgcccccagctagacccagccttgccagctgtgccctgctagccagaagacgcccctgggaggc

SEQ ID NO: 355917 - DNA, 34 bp, Homo sapiens
  chr19:638348-638382
  hypo
cgaggtgtcattaaagaaactcagacgcctgggg

SEQ ID NO: 355918 - DNA, 112 bp, Homo sapiens
  chr19:638476-638588
  hypo
gggaagacctgggctcctgctggcgagaaggcggtggacatttcttcagtgtctggtgccgcgccctctgcccagcgtgctccgtggagggtctcattgtcttcctccagac

SEQ ID NO: 355919 - DNA, 739 bp, Homo sapiens; identical to SEQ ID NO: 343528
  chr19:736036-736775
  hypo

SEQ ID NO: 355920 - DNA, 287 bp, Homo sapiens; identical to SEQ ID NO: 293229
  chr19:813409-813696
  hypo

SEQ ID NO: 355921 - DNA, 322 bp, Homo sapiens; identical to SEQ ID NO: 352133
  chr19:813830-814152
  hypo

SEQ ID NO: 355922 - DNA, 102 bp, Homo sapiens
  chr19:814741-814843
  hypo
aggtcttcctgtaagaggcgtccagcgtgagccccgcccacctggggaccccagctccagtggcctctctgtgtctctgtttccccgcatgttcaccggggc

SEQ ID NO: 355923 - DNA, 158 bp, Homo sapiens; identical to SEQ ID NO: 346190
  chr19:883424-883582
  hypo

SEQ ID NO: 355924 - DNA, 544 bp, Homo sapiens; identical to SEQ ID NO: 346191
  chr19:884311-884855
  hypo

SEQ ID NO: 355925 - DNA, 167 bp, Homo sapiens; identical to SEQ ID NO: 348910
  chr19:901066-901233
  hypo

SEQ ID NO: 355926 - DNA, 743 bp, Homo sapiens; identical to SEQ ID NO: 335871
  chr19:941824-942567
  hypo

SEQ ID NO: 355927 - DNA, 68 bp, Homo sapiens; identical to SEQ ID NO: 348912
  chr19:956638-956706
  hypo

SEQ ID NO: 355928 - DNA, 50 bp, Homo sapiens
  chr19:957401-957451
  hypo
tcctcacctgcaaagcagagccagttctcggaacaaatgcgctcccgtcc

SEQ ID NO: 355929 - DNA, 228 bp, Homo sapiens; identical to SEQ ID NO: 348913
  chr19:1004547-1004775
  hypo

SEQ ID NO: 355930 - DNA, 279 bp, Homo sapiens; identical to SEQ ID NO: 218770
  chr19:1005441-1005720
  hypo

SEQ ID NO: 355931 - DNA, 319 bp, Homo sapiens; identical to SEQ ID NO: 343553
  chr19:1128115-1128434
  hypo

SEQ ID NO: 355932 - DNA, 338 bp, Homo sapiens; identical to SEQ ID NO: 348916
  chr19:1166870-1167208
  hypo

SEQ ID NO: 355933 - DNA, 68 bp, Homo sapiens; identical to SEQ ID NO: 343557
  chr19:1179335-1179403
  hypo

SEQ ID NO: 355934 - DNA, 197 bp, Homo sapiens
  chr19:1226490-1226687
  hypo
cgccggggcctccccaaggccgtgtgtatgaacggcacagaggcggcgcagctgagcaccaaatccagggcggagggccgggcccccaaccctgcccgcaaggcctgctccgccagcagcaagatccgccggctgtcggcctgcaagcagcagtgaggctggccgcctgcaggtggggcgcggcggggcccgggtgg

SEQ ID NO: 355935 - DNA, 317 bp, Homo sapiens
  chr19:1226828-1227145
  hypo
gtgccgtctcggggcctggtgtctggccagcgtgctggtcatggaggcctacgtgtggcggggctctgggggggcgtgccgtcctcacagccacctctcagagtgggtgcattccgaggaccctgccctgggcctggcgccccctccccatgcccgcgccgcttccaggaaaggcttatgctgggctcagcccagaggcttttgagcaccagtgggtggtgggtggtggggaggggccgcggcctccatggctctgccggggtgccgcaggctctgagccagctgccaagtatggctgaggctgagtcgtgccggac

SEQ ID NO: 355936 - DNA, 397 bp, Homo sapiens
  chr19:1312697-1313094
  hypo
cgtccgtgtcatcagcaacggccaaatgccgttcccagcactggatgggggtggagggcctgaggggtgtgggtgggggggagctccaggcgcccctgccccccgcccagccgtcagtcaggctggccgggcccccttcaagtcgtcacggcccagcagcggccacgggagggattattccggcctgtccagggtggactgaagtggaaccaaggctgacgagcggaacgcgcccccatggacccagcccgcccgcctttgtccgccgccagccccccacccgcctgccgtcacagaccccgcctcccgtgcctgagccccatttctctgggggccgggctgcctcgcgtggcccccgcctgactaaagccatgcagcttctcggccggctccatcc

SEQ ID NO: 355937 - DNA, 576 bp, Homo sapiens; identical to SEQ ID NO: 343565
  chr19:1333769-1334345
  hypo

SEQ ID NO: 355938 - DNA, 255 bp, Homo sapiens
  chr19:1423978-1424233
  hypo
cggagagacgctgcggcgctgcttagcgggtcctcccagagagtgtgtccccttcccttggcctttctgcatcttctgagacgggtctgtgtccccctccccgccacctcctccctcttcctctccactgactgaaggtcatggccatgtccctgtcagggaccccgcctgtgtctcgggcacacagtgtctgtgcgggtccctgcttggccctcccacgtctaccctcggcccgcccgctccagccgctgcctc

SEQ ID NO: 355939 - DNA, 58 bp, Homo sapiens; identical to SEQ ID NO: 218817
  chr19:1496674-1496732
  hypo

SEQ ID NO: 355940 - DNA, 241 bp, Homo sapiens
  chr19:1506026-1506267
  hypo
cgccgggcagtcaggcgtatgcggctgtcctccgcagggctccagggccgggcgtagccggcgtggggcagcagcagctggtcctgtgtgccgtcggggctgacaagacgctggacagccatcaggtagtcccggtggggtgccagcatcgggcaggggcagtggcctggcgcccacacgtactcgcgtgcccgcagtggcgagcggttcttgtagacgagctggatgcgcacctcatagc

SEQ ID NO: 355941 - DNA, 121 bp, Homo sapiens
  chr19:1565953-1566074
  hypo
cagccacagcctccaccacctggaggctcaggctcgtgcctttggtcacttggtccccaggcctcggcttggacgcctgtctccacaggctcccagacactccgcacagggcagctgtccc

SEQ ID NO: 355942 - DNA, 227 bp, Homo sapiens; identical to SEQ ID NO: 324873
  chr19:1577427-1577654
  hypo

SEQ ID NO: 355943 - DNA, 547 bp, Homo sapiens; identical to SEQ ID NO: 324874
  chr19:1577687-1578234
  hypo

SEQ ID NO: 355944 - DNA, 280 bp, Homo sapiens; identical to SEQ ID NO: 205085
  chr19:1748599-1748879
  hypo

SEQ ID NO: 355945 - DNA, 349 bp, Homo sapiens; identical to SEQ ID NO: 293279
  chr19:1748939-1749288
  hypo

SEQ ID NO: 355946 - DNA, 70 bp, Homo sapiens; identical to SEQ ID NO: 352140
  chr19:1749318-1749388
  hypo

SEQ ID NO: 355947 - DNA, 367 bp, Homo sapiens; identical to SEQ ID NO: 343582
  chr19:1785308-1785675
  hypo

SEQ ID NO: 355948 - DNA, 87 bp, Homo sapiens
  chr19:1807818-1807905
  hypo
cgggaagtggctccacaggtcctgagaacatgctctgggctcctccttccccctcgcctctgaggtcagctgggagggcgggggcca

SEQ ID NO: 355949 - DNA, 242 bp, Homo sapiens; identical to SEQ ID NO: 348917
  chr19:1911845-1912087
  hypo

SEQ ID NO: 355950 - DNA, 659 bp, Homo sapiens
  chr19:1912446-1913105
  hypo
gcggcctggggcaacccttcctggtgcccgtgcccgcccggccgcctctgaccaggggccagttcgaggaggcccgggcccactggcccacgtccttccacgaggacaagcaggtgaccagcgccctggctgggcggctcttctccacgcaggagcgcgccgccatgcagagccacatggagcgggcggtgtgggcggcccggcgggcagcagcgcggggcttgcgggccgtgggggccgtggtagtggacccggcctcggaccgcgtgctggccaccggccacgactgcagctgcgcggacaaccccctcctgcacgccgtcatggtgtgcgtggacctcgtggcgcgcggccagggccgcggcacctacgacttcagacccttccccgcctgctccttcgccccggccgctgccccccaggccgtccgcgcaggcgccgtgcgtaaactggacgcagacgaggacggcctcccctacctgtgcactggctacgacctgtacgtgacccgcgagccctgcgccatgtgcgccatggccctggtgcacgcacgcatcctgcgcgtcttctacggtgcgccctcgcccgacggcgccctgggcacccgcttccgcatccacgcacggcccgacctcaaccaccgcttccaggtgttccgc

SEQ ID NO: 355951 - DNA, 261 bp, Homo sapiens
  chr19:1969650-1969911
  hypo
cgcccgcccaccggccgcagtgatgttctagccacagaggagccaagacctcaggtttccagagacttgggatttgcacggcagcagagtcaccgtggagaggccagggtatcacaaacttatggattttgacaagaaaggagggaaaggggagacggaggagggccggagaatgtccaaggccggcgggggccggagcagccacggcatccggagctcggggaccagctcgggggtcctgatggtgggccccaacttccg

SEQ ID NO: 355952 - DNA, 319 bp, Homo sapiens; identical to SEQ ID NO: 324918
  chr19:1970106-1970425
  hypo

SEQ ID NO: 355953 - DNA, 304 bp, Homo sapiens; identical to SEQ ID NO: 343588
  chr19:1977028-1977332
  hypo

SEQ ID NO: 355954 - DNA, 232 bp, Homo sapiens; identical to SEQ ID NO: 346192
  chr19:1978023-1978255
  hypo

SEQ ID NO: 355955 - DNA, 116 bp, Homo sapiens; identical to SEQ ID NO: 345560
  chr19:1979018-1979134
  hypo

SEQ ID NO: 355956 - DNA, 89 bp, Homo sapiens; identical to SEQ ID NO: 343596
  chr19:2204172-2204261
  hypo

SEQ ID NO: 355957 - DNA, 95 bp, Homo sapiens; identical to SEQ ID NO: 343597
  chr19:2224728-2224823
  hypo

SEQ ID NO: 355958 - DNA, 125 bp, Homo sapiens
  chr19:2244081-2244206
  hypo
cgcccggctgccccagcttagggcctgcagatgggcgggtctttgggtcttcagtgtagcccatttgcttttcttgtgcctgtgtctgccttgtgcctactgctggcgtggtggcgtgggcagtg

SEQ ID NO: 355959 - DNA, 612 bp, Homo sapiens
  chr19:2244236-2244848
  hypo
gtgctgtcctggctgtgcctccctctgactcagaaccaccaggaaggtggtgtcgggggctccctgggaacccccactgctcgaagcctggcccacagccccaggtggtgacacccgtgctcacgaaggcctcccgctggatcccccgttttcagaaatgcttgaccactgtcagcggtagccatgcctctacagaaggggggttctgcctccatgcctctacagaaaggggatcccgcctctgagggccttgacggcagcaggccgcgatcttctgtctaacgggcccctgttcttcccctccaggacccgtacttcatgaagaaccacctgggctcctatgaatgcaaactctgcctgacacttcacaacaatgaggtgcggcctctgcctggctccgggcggctcgcggcgggctgagtggctgacgtcagggggacctgcctgtgtctgtccgcccggcctcgagtcatgcgtgtttcctttccactccaggggagctacctggcacatacgcaggggaagaagcaccagaccaacctgtgagtacctcatgtccctttgatgcctggtgctccagcagccgttggctcaagtctctgtgagcctcgc

SEQ ID NO: 355960 - DNA, 301 bp, Homo sapiens; identical to SEQ ID NO: 343604
  chr19:2413723-2414024
  hypo

SEQ ID NO: 355961 - DNA, 91 bp, Homo sapiens
  chr19:2524648-2524739
  hypo
cgtgtgtgcgtctgcatatgagtgtgtgcataggtgcatttgcatacgtgcatgtgtgtggacatgcatgccagtgtgcacgtgtgtatgt

SEQ ID NO: 355962 - DNA, 72 bp, Homo sapiens; identical to SEQ ID NO: 347528
  chr19:2702445-2702517
  hypo

SEQ ID NO: 355963 - DNA, 453 bp, Homo sapiens; identical to SEQ ID NO: 347529
  chr19:2702553-2703006
  hypo

SEQ ID NO: 355964 - DNA, 72 bp, Homo sapiens
  chr19:3219654-3219726
  hypo
agatgtgcccaagctcacagcctcactattctccgtgctcacagcctcgctattctccaggctcacagcctc

SEQ ID NO: 355965 - DNA, 84 bp, Homo sapiens
  chr19:3494540-3494624
  hypo
ggcctgccggctggagactccagaatttggggccactggggctacacttaggtgggttcgggtacaggcgcaagtgcaggcgtc

SEQ ID NO: 355966 - DNA, 214 bp, Homo sapiens; identical to SEQ ID NO: 325072
  chr19:3565326-3565540
  hypo

SEQ ID NO: 355967 - DNA, 205 bp, Homo sapiens; identical to SEQ ID NO: 343624
  chr19:3669713-3669918
  hypo

SEQ ID NO: 355968 - DNA, 46 bp, Homo sapiens; identical to SEQ ID NO: 347530
  chr19:3785511-3785557
  hypo

SEQ ID NO: 355969 - DNA, 265 bp, Homo sapiens; identical to SEQ ID NO: 205120
  chr19:4054040-4054305
  hypo

SEQ ID NO: 355970 - DNA, 55 bp, Homo sapiens; identical to SEQ ID NO: 205121
  chr19:4054380-4054435
  hypo

SEQ ID NO: 355971 - DNA, 170 bp, Homo sapiens; identical to SEQ ID NO: 205122
  chr19:4054471-4054641
  hypo

SEQ ID NO: 355972 - DNA, 520 bp, Homo sapiens; identical to SEQ ID NO: 352163
  chr19:4054917-4055437
  hypo

SEQ ID NO: 355973 - DNA, 97 bp, Homo sapiens; identical to SEQ ID NO: 205124
  chr19:4064872-4064969
  hypo

SEQ ID NO: 355974 - DNA, 351 bp, Homo sapiens; identical to SEQ ID NO: 325155
  chr19:4096065-4096416
  hypo

SEQ ID NO: 355975 - DNA, 165 bp, Homo sapiens
  chr19:4096525-4096690
  hypo
cttgttttactcatctgggcggtggaaaccctcatactgtggctcactgggttgttatggggactgacggagcaggagccaccccgggacctacaggtccttctaggctctctgggcctccttccaagaggcaagggccattcctgtacctttctccgtggaagc

SEQ ID NO: 355976 - DNA, 107 bp, Homo sapiens; identical to SEQ ID NO: 335912
  chr19:4432865-4432972
  hypo

SEQ ID NO: 355977 - DNA, 242 bp, Homo sapiens; identical to SEQ ID NO: 352167
  chr19:4523777-4524019
  hypo

SEQ ID NO: 355978 - DNA, 129 bp, Homo sapiens
  chr19:4550735-4550864
  hypo
cggaagccccagccctcggccctggggatcaggacctcatccgggcatgtgactcaggatggagggggttctcaccggggtcgaggcacctgatcctccggcaccggcgtccagatggactcgggggac

SEQ ID NO: 355979 - DNA, 130 bp, Homo sapiens; identical to SEQ ID NO: 343650
  chr19:4675518-4675648
  hypo

SEQ ID NO: 355980 - DNA, 638 bp, Homo sapiens; identical to SEQ ID NO: 343651
  chr19:4676079-4676717
  hypo

SEQ ID NO: 355981 - DNA, 80 bp, Homo sapiens; identical to SEQ ID NO: 343653
  chr19:4697654-4697734
  hypo

SEQ ID NO: 355982 - DNA, 615 bp, Homo sapiens
  chr19:4816550-4817165
  hypo
cacctggcccccaaagggcattcgagccccatagggcgccccagtcccaaatgacatgtggctcccaaaagccacctggagctgctccatctgtgcctggtaggacaagtagctctggaggtaggctgagtaggctgcgttcagtgccgccgcctgcatccgctcaccgtccaggtgttggctctgttcccgcagggctcgggtgtcctgttccttcctccacatggcctttcgggcctgaagcctgtggggcttgaaggtgttggccaccttcctggcgaagatctgggagtgttcgtccagccgcaccagcccggagagcaggctggccgtgtcggagctgagctgggccggggagctctccaggggcaggaaggggatgacacagtctggcgacccctgtcgcgtgaggttgctcatcatggcttggttcacctggtgcaggctcaggcgacagtcgaagttggaggtgagaagtaggatgatgaaagctgagtggtctatggcgtcctgcaggcagctcagctccccgcgccccggcacctggaaatcctcgcagaaggtggccccgtcgggcacgccaagggcctccagcttctcccgaacccgcagggc

SEQ ID NO: 355983 - DNA, 586 bp, Homo sapiens; identical to SEQ ID NO: 343657
  chr19:4817473-4818059
  hypo

SEQ ID NO: 355984 - DNA, 168 bp, Homo sapiens; identical to SEQ ID NO: 348926
  chr19:5023047-5023215
  hypo

SEQ ID NO: 355985 - DNA, 450 bp, Homo sapiens; identical to SEQ ID NO: 348927
  chr19:5023245-5023695
  hypo

SEQ ID NO: 355986 - DNA, 284 bp, Homo sapiens
  chr19:5064018-5064302
  hypo
cggcttgctctccttcccggcctgtgccagccacagggcagtgcgccagagccatcttgctgggtcacaggccggggccaccatagggctttgttgcgagggtggcggtcaccatggcttttccgttctgtttgcaacttggggtcccgggggcgccactggcgtttggatctgccgtggccctcctgggcttgcgtgggtggctcactctgccaggtggcctctgtccaacctgacacctggtctcgggtacttccagcgtgacgtgcacgggctctgcctcc

SEQ ID NO: 355987 - DNA, 203 bp, Homo sapiens
  chr19:5064332-5064535
  hypo
aaatggcgaaggcccgtctgcccaggcctgtgcagacactgtgaaattaactttctcaccctccagcacgcattgggctgtgccgacatctctgaagggctcttggtcggacctctgctcttggcacacattcctcggcggcgggggtggggggtagggaggagagcgttttcatccctggcacctaattgccgagagcttcc

SEQ ID NO: 355988 - DNA, 415 bp, Homo sapiens
  chr19:5269156-5269571
  hypo
cgtgggtacatgtgtgccgcatgtatgtgctcacgcttgcccgtgcccacgtgtccacacgtgagcaattcccgtgtgtatgtggccccgcaggggtccccataagcgtgtgtggacagcagccagccagggtgcagggggaggtctcggccgcctgacgctaccgagaacacctaattaaacaaaaacgtacatcgcgaaccacactctgcccagttcctcggagtttaattaaaacaacagtgcaggaggcgtgtgtggggtccacaatcagatggcagaggaggaggaaggcagggagtggccctggcagtccagatggtcccccaccaactgccagggactggccggaggtgcccggagctcagggctggtggcaaggtgggtgggatcgggtcagggtatccaaggcccc

SEQ ID NO: 355989 - DNA, 438 bp, Homo sapiens; identical to SEQ ID NO: 347531
  chr19:5608081-5608519
  hypo

SEQ ID NO: 355990 - DNA, 229 bp, Homo sapiens; identical to SEQ ID NO: 348929
  chr19:5608569-5608798
  hypo

SEQ ID NO: 355991 - DNA, 84 bp, Homo sapiens; identical to SEQ ID NO: 343669
  chr19:5630448-5630532
  hypo

SEQ ID NO: 355992 - DNA, 441 bp, Homo sapiens
  chr19:5789249-5789690
  hypo
cgtcctcatccgtcaggggcccgcaggtccgcacggggctgctgggaggggtgctagtgcccggccctgcggggacctgctgggcaccacagttttcctgcctgggagcgccctcggctgccgtgccctcggggacagcggcagcgggtgtggggccctggctgaaccggcgcagggcctgctcagctcgctcgaagcggacctcgcgcttccgcagctgctgctgcagggctttgtccaggccgttgcggatggacgggggctgggtcccgcgggccgccaactcctcctgcaccaggttctgtccctcgggcctcaggtgggccccagcgaagcggcaggtcacgccgtaggggcaccggccgaaggtctcgaagagcacgcagcgggggcccaggtcggccggcttggtctccaggtagcgccccacgtcgtgcagaa

SEQ ID NO: 355993 - DNA, 241 bp, Homo sapiens; identical to SEQ ID NO: 219015
  chr19:5789927-5790168
  hypo

SEQ ID NO: 355994 - DNA, 138 bp, Homo sapiens
  chr19:5790213-5790351
  hypo
cagtcggatccgcttagcctcaggctcagccagctcattgccagcagggtctcctacctcggtttcccggcaagtcttctcctgccctttggcttccaggaattggtgaaactgctccttggtggtgaggtatctgcc

SEQ ID NO: 355995 - DNA, 336 bp, Homo sapiens
  chr19:5896616-5896952
  hypo
cgagacgggcacagcaggagcctcttgggcgctcactgccagtgtctggatggagagagatgccacgagtcggctgctcgctgtgcatggcagcctcctggccccagtcctggagctgttctcctgggcctccccaccctacatgtattcctgataaaggaacaccccactttctccggatggccagcactgtggacacgggctggggagtcagagagaagaggcagccgtcaaatgtgctctgagagctggggctgtgccaggagagggcccagccatgcccagcccagcgtgctcacctgcagtgaacgtgtattgtccaaccttagccactcc

SEQ ID NO: 355996 - DNA, 311 bp, Homo sapiens; identical to SEQ ID NO: 343677
  chr19:5938115-5938426
  hypo

SEQ ID NO: 355997 - DNA, 922 bp, Homo sapiens; identical to SEQ ID NO: 343679
  chr19:5994773-5995695
  hypo

SEQ ID NO: 355998 - DNA, 111 bp, Homo sapiens; identical to SEQ ID NO: 343688
  chr19:6024069-6024180
  hypo

SEQ ID NO: 355999 - DNA, 510 bp, Homo sapiens; identical to SEQ ID NO: 348931
  chr19:6024679-6025189
  hypo

SEQ ID NO: 356000 - DNA, 653 bp, Homo sapiens; identical to SEQ ID NO: 343692
  chr19:6045007-6045660
  hypo

SEQ ID NO: 356001 - DNA, 1037 bp, Homo sapiens; identical to SEQ ID NO: 335924
  chr19:7459644-7460681
  hypo

SEQ ID NO: 356002 - DNA, 354 bp, Homo sapiens; identical to SEQ ID NO: 343708
  chr19:7991824-7992178
  hypo

SEQ ID NO: 356003 - DNA, 83 bp, Homo sapiens; identical to SEQ ID NO: 343711
  chr19:8004778-8004861
  hypo

SEQ ID NO: 356004 - DNA, 685 bp, Homo sapiens; identical to SEQ ID NO: 335930
  chr19:8274278-8274963
  hypo

SEQ ID NO: 356005 - DNA, 71 bp, Homo sapiens
  chr19:8463144-8463215
  hypo
cgactgggctcaggcccccgtccctgggtgctgttgcccacaaaccctcatctctgttctgtccacgctgc

SEQ ID NO: 356006 - DNA, 131 bp, Homo sapiens; identical to SEQ ID NO: 343715
  chr19:8526882-8527013
  hypo

SEQ ID NO: 356007 - DNA, 252 bp, Homo sapiens; identical to SEQ ID NO: 343718
  chr19:8554998-8555250
  hypo

SEQ ID NO: 356008 - DNA, 763 bp, Homo sapiens
  chr19:8576026-8576789
  hypo
cgggcgcctagttcagtttctcccgggtctgtctgcccctagagttgggggcacccaacttggcttctccgcgtcccctactatcatccccagattcactgttggggagaagcccgctccgaggtgaacggtgaaaggggcgcaaggtttatacgggaacgccggcgcagatgaaggcgcaggtgccagtcatttttaaggcaaaaatcctgtatttcgggacggtggcatttgtgccccctgggaaggggatgagcactgctgcctcctggtatccaccagaccccgcagggcgcaggaaagaaagcccctccacccctccctggtggtcacctgcacgcacctgagggcgcgtcggagccgccctggggtcttcgggggctgctgccagcacctgcggtaaaggggcgggtcaagttcagagtcagggcgagcccagccagccctcctggaggcccccgaccccacactcaccttggctctttttccagacggcggcgctggaagccggcggcccgggtgcagcggccaggaaggggcgcaggcgcggggggcttaggccaaagggcgcagggttcaagtagggcaggaacggtccggtgggggcaggggcgggggtcgtgaagggttccagcagcgggaacggcaggcccggcgctgatgcggggtcaacctccggggggcgctccggcgcgggcggctctcggtccagggccgggggtggcggcggggctgggctctgcgcatgctccgcgcaaacatg

SEQ ID NO: 356009 - DNA, 106 bp, Homo sapiens
  chr19:9129007-9129113
  hypo
cgcccgcccagccaacagagtgacctttcaaaaatgcaacaccggccatgccccgccccggtccgaattcttcagtgccttctcaccgccctcgggaccaagtcca

SEQ ID NO: 356010 - DNA, 92 bp, Homo sapiens
  chr19:9129229-9129321
  hypo
aattaccctccttccctttacctgattctgtgtcccctaattctctccaggcctcccctacctccctccccagacagaaagcagagctcccc

SEQ ID NO: 356011 - DNA, 211 bp, Homo sapiens; identical to SEQ ID NO: 347533
  chr19:10197461-10197672
  hypo

SEQ ID NO: 356012 - DNA, 60 bp, Homo sapiens; identical to SEQ ID NO: 348938
  chr19:10370250-10370310
  hypo

SEQ ID NO: 356013 - DNA, 88 bp, Homo sapiens; identical to SEQ ID NO: 348939
  chr19:10370575-10370663
  hypo

SEQ ID NO: 356014 - DNA, 992 bp, Homo sapiens; identical to SEQ ID NO: 335937
  chr19:10381056-10382048
  hypo

SEQ ID NO: 356015 - DNA, 214 bp, Homo sapiens; identical to SEQ ID NO: 205174
  chr19:10400761-10400975
  hypo

SEQ ID NO: 356016 - DNA, 484 bp, Homo sapiens; identical to SEQ ID NO: 352183
  chr19:10529649-10530133
  hypo

SEQ ID NO: 356017 - DNA, 111 bp, Homo sapiens; identical to SEQ ID NO: 352184
  chr19:10530526-10530637
  hypo

SEQ ID NO: 356018 - DNA, 630 bp, Homo sapiens; identical to SEQ ID NO: 352185
  chr19:10530654-10531284
  hypo

SEQ ID NO: 356019 - DNA, 143 bp, Homo sapiens
  chr19:10665634-10665777
  hypo
cgaacccaggtctcagagcggggggcgctgcattcccaaagtcatgcaacaagaggttgacggagccaagactcaagcctgggcctgacaggctccccacccacgcttccccagccagcactgcttactcttctcggcagagt

SEQ ID NO: 356020 - DNA, 143 bp, Homo sapiens
  chr19:10665807-10665950
  hypo
ttctgggccttctggctgtacgcccgcttgtcccgcagctcctcctgctctgacctgcagacagatgcccctgtgttgggtgctctgggaagtgcccgaggctgcccgccctgccccctgcgcatgtggccccgccgcgcccc

SEQ ID NO: 356021 - DNA, 56 bp, Homo sapiens; identical to SEQ ID NO: 343735
  chr19:10687570-10687626
  hypo

SEQ ID NO: 356022 - DNA, 115 bp, Homo sapiens; identical to SEQ ID NO: 352186
  chr19:10691764-10691879
  hypo

SEQ ID NO: 356023 - DNA, 69 bp, Homo sapiens
  chr19:10817637-10817706
  hypo
cgtagtcactgcgcccagtcagcagagccctgctgatggacgtttggtttcccggtcttgctgtggcac

SEQ ID NO: 356024 - DNA, 122 bp, Homo sapiens
  chr19:10872413-10872535
  hypo
cgccagctctcagcttggcctcccaagactcctcactttcgtcctctggccccgcccaacctggcaagaaggcgtgtctccagtgagagacagcagccgatgggcccaccacctcttcttta

SEQ ID NO: 356025 - DNA, 177 bp, Homo sapiens
  chr19:11003087-11003264
  hypo
gctgcgccagaggagcccagggtgacctcatggtcctcagatacccggggctgggcagcacagtggaacagctgctccagagcttctccgaggacgacatcggaggatccgactcaggttacggcaggagagggaggccaggccgggttagggttctggggtttgggattctcttcc

SEQ ID NO: 356026 - DNA, 153 bp, Homo sapiens
  chr19:11008216-11008369
  hypo
cgactgcagtgtggcaggccagcgagtagccccaggctgggtccaggggtggccaaagcgtaacactcagtccgggtttgtgttctttacgttccccgttggagactccacctggagatcccagtccctttccttttactgcagggtaaagaa

SEQ ID NO: 356027 - DNA, 385 bp, Homo sapiens
  chr19:11030249-11030634
  hypo
cacacctgtggtctctcccaggacacatttgacatccggatcctgatggccaagtctgtcaagtacacggtgaacttcttagaagccaaagaaggagatttgcacaggtactggcacccacactccatcctcccaggcctggctcaggccgaaggtcagggccacccctggctcccgccggcatcctgccgtcccagggcagatggtgggcgggggccccaggcctctgcacctggcaccccctcttctctctcggcagcgcctgtctggcttccccagcagccactgccctttgccttccaggatagaaatcccattcaaattccacatgctgcattcagggctggtccacggcctggctttctggtttgacgttgctttcatc

SEQ ID NO: 356028 - DNA, 347 bp, Homo sapiens
  chr19:11128636-11128983
  hypo
cgcaaggctgctgagcctctgctccccacgcttcttcaggaactctccccagccttcaccacagccatgcgtccttctgtctattggctgtgccgcctggttggctgtggcttccagcggggctggagatgggttcatggtggacacagcacctccctcgtggagctgcttgggggcaaaccacgagtagtccctgggactccagcttcgagccctgtctttacggaccaccccgtctagactttctgagtggcttccctcccccactgaaaactccctgccccagagttcctcccagagcccgtcccctttgggactcagctttattaccgcctccaccctctcct

SEQ ID NO: 356029 - DNA, 266 bp, Homo sapiens
  chr19:11129453-11129719
  hypo
cgtcctcgccagtctctcttcctccctccctccctcagctgccctaaacacagtttctctgcccactcggagggctgtggccatgttggcctcgcccctgacagccagtggctatgggtttgcacagtgagccattgatgagagaccggcacttgactctcatttccttgttccatcagaacgctgtccaactgggcgtacgagtttgacaagtgggccccctccgtggtgaaggtgtcttacaaggtaggtcacagccactgagg

SEQ ID NO: 356030 - DNA, 31 bp, Homo sapiens
  chr19:11129826-11129857
  hypo
ggacagcctggaactccagtcacatggatcc

SEQ ID NO: 356031 - DNA, 143 bp, Homo sapiens; identical to SEQ ID NO: 343755
  chr19:11152817-11152960
  hypo

SEQ ID NO: 356032 - DNA, 177 bp, Homo sapiens; identical to SEQ ID NO: 335952
  chr19:11199850-11200027
  hypo

SEQ ID NO: 356033 - DNA, 1111 bp, Homo sapiens; identical to SEQ ID NO: 343760
  chr19:11303560-11304671
  hypo

SEQ ID NO: 356034 - DNA, 146 bp, Homo sapiens; identical to SEQ ID NO: 335953
  chr19:11466008-11466154
  hypo

SEQ ID NO: 356035 - DNA, 67 bp, Homo sapiens; identical to SEQ ID NO: 352195
  chr19:11592604-11592671
  hypo

SEQ ID NO: 356036 - DNA, 189 bp, Homo sapiens; identical to SEQ ID NO: 347537
  chr19:11593453-11593642
  hypo

SEQ ID NO: 356037 - DNA, 433 bp, Homo sapiens
  chr19:11662248-11662681
  hypo
cgggactctaaaaggctgtgtccagggcctcaacctcctcacatttcagaggggaccctgttatccccgggaggagggagaggtccccaaccatcaggattccaaggaggagaggaggcagagaagcgaggagcgcggcacggagctgtcttctccccagggagggcaggagttgaggctggaacgtggagacctgcggaggcagacaccagaagacccgcgcacagacgcacgcagcccctggggcctcgtaaaccggattccaggcgcttttggcctggctaccgcaagtcctgctccccctgggccggcgcggggaagctatgctgaggaggatccgggcctggcccagggccctgcctcctcgggaaaacagcaccatattagcacttagcctgtgaggctggggtgggcgggcggcaggaagggcctc

SEQ ID NO: 356038 - DNA, 514 bp, Homo sapiens; identical to SEQ ID NO: 352205
  chr19:12146030-12146544
  hypo

SEQ ID NO: 356039 - DNA, 538 bp, Homo sapiens; identical to SEQ ID NO: 205207
  chr19:12595307-12595845
  hypo

SEQ ID NO: 356040 - DNA, 198 bp, Homo sapiens; identical to SEQ ID NO: 352212
  chr19:12595896-12596094
  hypo

SEQ ID NO: 356041 - DNA, 206 bp, Homo sapiens
  chr19:12977267-12977473
  hypo
cggggctagacggtgccactgagaatggggcaaggaccttgcctgggagcggagcctaaattaaatacactaatgaggcaggggcgtggcctgacctgaagacttgtaaacccgtcttgaaccaggactgggctcctgtggggatgtgatatgaggaggaaccccgtaccctcagtcacagcccatacccgctccccagcccgctc

SEQ ID NO: 356042 - DNA, 73 bp, Homo sapiens; identical to SEQ ID NO: 346198
  chr19:13181444-13181517
  hypo

SEQ ID NO: 356043 - DNA, 420 bp, Homo sapiens; identical to SEQ ID NO: 343786
  chr19:13186075-13186495
  hypo

SEQ ID NO: 356044 - DNA, 34 bp, Homo sapiens; identical to SEQ ID NO: 348945
  chr19:13201116-13201150
  hypo

SEQ ID NO: 356045 - DNA, 189 bp, Homo sapiens; identical to SEQ ID NO: 345572
  chr19:13213427-13213616
  hypo

SEQ ID NO: 356046 - DNA, 112 bp, Homo sapiens; identical to SEQ ID NO: 345573
  chr19:13213834-13213946
  hypo

SEQ ID NO: 356047 - DNA, 1257 bp, Homo sapiens; identical to SEQ ID NO: 345574
  chr19:13265772-13267029
  hypo

SEQ ID NO: 356048 - DNA, 203 bp, Homo sapiens; identical to SEQ ID NO: 343791
  chr19:13879644-13879847
  hypo

SEQ ID NO: 356049 - DNA, 1302 bp, Homo sapiens; identical to SEQ ID NO: 335994
  chr19:14073521-14074823
  hypo

SEQ ID NO: 356050 - DNA, 151 bp, Homo sapiens
  chr19:14181154-14181305
  hypo
cgcgtccgccgattcctcctccttggtcgccgcgtccttggctggcgtcagaaaaatggctacaaacttcctagcacatgagaagatctggtttgacaagttcaaatatgacgacgcagaaaggagattctatcagcagatgaacaggcct

SEQ ID NO: 356051 - DNA, 179 bp, Homo sapiens
  chr19:14181846-14182025
  hypo
tggaggcctgtgtgcgctctatcgagctggacgggctggtctgggggacctccaagctgatgcccgtgggctacggtatccggaagctacagattcagtgtgtggtggaggacgacaaggtggggacttacttgctggaggaggagatcactaaatttgaggagcacgtgcagagtgtc

SEQ ID NO: 356052 - DNA, 461 bp, Homo sapiens; identical to SEQ ID NO: 343796
  chr19:14263414-14263875
  hypo

SEQ ID NO: 356053 - DNA, 155 bp, Homo sapiens; identical to SEQ ID NO: 343797
  chr19:14522737-14522892
  hypo

SEQ ID NO: 356054 - DNA, 178 bp, Homo sapiens; identical to SEQ ID NO: 348950
  chr19:14663747-14663925
  hypo

SEQ ID NO: 356055 - DNA, 267 bp, Homo sapiens; identical to SEQ ID NO: 346202
  chr19:14664561-14664828
  hypo

SEQ ID NO: 356056 - DNA, 324 bp, Homo sapiens; identical to SEQ ID NO: 335997
  chr19:15235629-15235953
  hypo

SEQ ID NO: 356057 - DNA, 131 bp, Homo sapiens
  chr19:15364865-15364996
  hypo
cgtctctgggctctagcatcctggacacaggaccgagctagtgccaggcacaggtgggaagagtttggtaagacacgtagaacacaagtcacctaacctgtttcggagtcttcgctgtcagaggagctgga

SEQ ID NO: 356058 - DNA, 247 bp, Homo sapiens
  chr19:15512036-15512283
  hypo
cgggagccgcccgggaaggcgcccccacctcgcatgccctggaacatgccgtactcggggatgatgttctgggagaagagggagggcagccgagaggcaccagacatgcactggccccgggcccccatggggtcttcccacatgcgcccatagcctgaggccattggccggccgctccgggcatcccgggcccagccctgtgccctgggaccgaaggtgtcgttgccacgcatgcggaactggtcgc

SEQ ID NO: 356059 - DNA, 99 bp, Homo sapiens; identical to SEQ ID NO: 343813
  chr19:15531296-15531395
  hypo

SEQ ID NO: 356060 - DNA, 106 bp, Homo sapiens; identical to SEQ ID NO: 352228
  chr19:15695669-15695775
  hypo

SEQ ID NO: 356061 - DNA, 102 bp, Homo sapiens; identical to SEQ ID NO: 205249
  chr19:16187000-16187102
  hypo

SEQ ID NO: 356062 - DNA, 517 bp, Homo sapiens; identical to SEQ ID NO: 205250
  chr19:16187103-16187620
  hypo

SEQ ID NO: 356063 - DNA, 634 bp, Homo sapiens; identical to SEQ ID NO: 345579
  chr19:16187640-16188274
  hypo

SEQ ID NO: 356064 - DNA, 66 bp, Homo sapiens
  chr19:16638602-16638668
  hypo
cgtgccttgcagcgttaaactcccctgcactcgcaggacaatggtgatctatactacagagaagcc

SEQ ID NO: 356065 - DNA, 118 bp, Homo sapiens
  chr19:16756119-16756237
  hypo
cgcctcattgagacctccgcgccagtctgaataaggcaggaaggtttcttcacaccattcatctggcctgtgagggacccagccaagatcttggcgtgcctgttctgacagcgacacc

SEQ ID NO: 356066 - DNA, 376 bp, Homo sapiens; identical to SEQ ID NO: 343826
  chr19:17172577-17172953
  hypo

SEQ ID NO: 356067 - DNA, 246 bp, Homo sapiens
  chr19:17264714-17264960
  hypo
cgcagagtagctattacttggcctccaaaaacaactattttcctcccaattttgacctgtaggaactaccatgtgttttattatttgttacttggggtcagcgaggaagagcgccaagaatttcagctcaagcagcctgaagattatttctacctcaaccaggtaaacagcctcaagcccgagccacaaacgccacctctgttcccggcctcaagctgtttatgtatagccgggaagtcagaggca

SEQ ID NO: 356068 - DNA, 239 bp, Homo sapiens; identical to SEQ ID NO: 205266
  chr19:17716539-17716778
  hypo

SEQ ID NO: 356069 - DNA, 1191 bp, Homo sapiens; identical to SEQ ID NO: 343835
  chr19:17837853-17839044
  hypo

SEQ ID NO: 356070 - DNA, 744 bp, Homo sapiens; identical to SEQ ID NO: 343836
  chr19:18052925-18053669
  hypo

SEQ ID NO: 356071 - DNA, 353 bp, Homo sapiens; identical to SEQ ID NO: 347564
  chr19:18117804-18118157
  hypo

SEQ ID NO: 356072 - DNA, 40 bp, Homo sapiens
  chr19:18241264-18241304
  hypo
cgatctccggtcccagcaagcctggccctctgtccccagg

SEQ ID NO: 356073 - DNA, 124 bp, Homo sapiens
  chr19:18241355-18241479
  hypo
aagatcaacaaacagaacttgatcctgcgtaaccagatccagcaggtctttgtggagcgtgacattctcacctttgccgagaacccctttgtggtcagcatgttctgctcctttgagacccggc

SEQ ID NO: 356074 - DNA, 612 bp, Homo sapiens; identical to SEQ ID NO: 343847
  chr19:18368482-18369094
  hypo

SEQ ID NO: 356075 - DNA, 207 bp, Homo sapiens; identical to SEQ ID NO: 343850
  chr19:18757941-18758148
  hypo

SEQ ID NO: 356076 - DNA, 67 bp, Homo sapiens; identical to SEQ ID NO: 325964
  chr19:18783006-18783073
  hypo

SEQ ID NO: 356077 - DNA, 34 bp, Homo sapiens; identical to SEQ ID NO: 325965
  chr19:18783151-18783185
  hypo

SEQ ID NO: 356078 - DNA, 126 bp, Homo sapiens
  chr19:18783216-18783342
  hypo
tggatctcagcggcctggcgcctaacacagagcctggcaccgacggagcatagctcgaatgtttgctgcacaaaggagaggtgctggggcgggaaggtgagggcagccttcttcacactagtggcc

SEQ ID NO: 356079 - DNA, 160 bp, Homo sapiens
  chr19:18808024-18808184
  hypo
ggggttcttgcacggagggattcagaagcacttggcaccggggggagcagcctcatcggtgtccagccagggccacacagtcagcctcagcccccacctcgcttccttctgggcgagcttagacctgggaggcctctttttttttggagtgccgtggtgc

SEQ ID NO: 356080 - DNA, 301 bp, Homo sapiens; identical to SEQ ID NO: 343853
  chr19:18836823-18837124
  hypo

SEQ ID NO: 356081 - DNA, 368 bp, Homo sapiens
  chr19:18856011-18856379
  hypo
cggaaggcgcctgtacttggctctggtggtgcctggagtgcctggaggaggctgcgggggagggtgtgtgggggccgcgtctcaatcaagagcagccctgggctccacaaggaagcctcccaggaactcgcgcttggccaggtgggccccgaaacagtcctgggctggaagcccctgggctgtctcttggcaggcccctccagggatgacgtaggtgggggtaggaggccgtccaggcccggagagagagggcggaggcctgtctgcacctggtgagactggggaggagggctgcctaggccggctacatccctggcacccggcgggcgctggccccgagcttgtgccgctctgcctggcctgtgcat

SEQ ID NO: 356082 - DNA, 329 bp, Homo sapiens
  chr19:18856409-18856738
  hypo
ggctcccgggaccccagctcacaccccctccctaccccccagtgcttggagagccagggagctggggctgaaggaagaagcccatcccaggctgtggagcgatggccgagggtgctccagagtggggggccctgcgatcagactctggggccagcgctggggccacagctggtaaccattgtttggatttctctctctctgtttccatctcctcctcccccagacccccttccaatcctcgggcctggacaccagccggaccacccggcaccatgggctggtggacagggtgtaccgggagcgtggccggctcggctccccacaccgcc

SEQ ID NO: 356083 - DNA, 145 bp, Homo sapiens
  chr19:18872680-18872825
  hypo
cgagcgcattgaggctgcattctgactcccacacctgggccctgggccctgggcccgcggggctctgccactggacagagggcaccagagaaggcccagaaaacacagccgattcggaggagccctcttcattgtctccagatag

SEQ ID NO: 356084 - DNA, 137 bp, Homo sapiens
  chr19:18872900-18873037
  hypo
tacccctgccccgcatagaagccaccatctcccagcccctgcttttcccctcacatctcttcacggccaccagagcacatggcccccttcccgctggagggtccttggcaggtccccagcgcccgcccgggagctgc

SEQ ID NO: 356085 - DNA, 165 bp, Homo sapiens; identical to SEQ ID NO: 343859
  chr19:18963604-18963769
  hypo

SEQ ID NO: 356086 - DNA, 196 bp, Homo sapiens
  chr19:18988706-18988902
  hypo
cgagccaaaagtcttgagtcgtctttgattcttttatttctgtttcatctacacccaaggcgaatctgatgggttctcccttccaaacagggtggggggtctgacgctcctctgcctggctacagccccggatgtgttaaatgtctgcatctcgcacctcccgttccaaaaaacgtcacggagctctgagccactg

SEQ ID NO: 356087 - DNA, 233 bp, Homo sapiens; identical to SEQ ID NO: 343864
  chr19:19156742-19156975
  hypo

SEQ ID NO: 356088 - DNA, 270 bp, Homo sapiens; identical to SEQ ID NO: 343867
  chr19:19576172-19576442
  hypo

SEQ ID NO: 356089 - DNA, 90 bp, Homo sapiens; identical to SEQ ID NO: 352243
  chr19:19729161-19729251
  hypo

SEQ ID NO: 356090 - DNA, 135 bp, Homo sapiens; identical to SEQ ID NO: 205291
  chr19:19729395-19729530
  hypo

SEQ ID NO: 356091 - DNA, 147 bp, Homo sapiens; identical to SEQ ID NO: 352245
  chr19:19729585-19729732
  hypo

SEQ ID NO: 356092 - DNA, 50 bp, Homo sapiens; identical to SEQ ID NO: 205293
  chr19:19738572-19738622
  hypo

SEQ ID NO: 356093 - DNA, 504 bp, Homo sapiens; identical to SEQ ID NO: 293751
  chr19:19738668-19739172
  hypo

SEQ ID NO: 356094 - DNA, 247 bp, Homo sapiens; identical to SEQ ID NO: 205295
  chr19:19739428-19739675
  hypo

SEQ ID NO: 356095 - DNA, 150 bp, Homo sapiens; identical to SEQ ID NO: 343876
  chr19:19769454-19769604
  hypo

SEQ ID NO: 356096 - DNA, 261 bp, Homo sapiens; identical to SEQ ID NO: 205296
  chr19:19843330-19843591
  hypo

SEQ ID NO: 356097 - DNA, 47 bp, Homo sapiens; identical to SEQ ID NO: 352250
  chr19:19844044-19844091
  hypo

SEQ ID NO: 356098 - DNA, 53 bp, Homo sapiens; identical to SEQ ID NO: 347571
  chr19:20162601-20162654
  hypo

SEQ ID NO: 356099 - DNA, 259 bp, Homo sapiens; identical to SEQ ID NO: 336066
  chr19:30165123-30165382
  hypo

SEQ ID NO: 356100 - DNA, 60 bp, Homo sapiens; identical to SEQ ID NO: 205342
  chr19:30718934-30718994
  hypo

SEQ ID NO: 356101 - DNA, 184 bp, Homo sapiens; identical to SEQ ID NO: 343895
  chr19:31640397-31640581
  hypo

SEQ ID NO: 356102 - DNA, 411 bp, Homo sapiens
  chr19:31767664-31768075
  hypo
cggtggacagtttggataagtcccgtagccggaagcctaagtgtgactctaggtgactgatgtacgtggaaggagtcctgatttgggacgcacaatcgttacaaaagaagacggggtggccagtgtccaagtttttgaggaactttgttccacctgtccttcgaagctggtatttcacgttggccagccagtggctgatggtggtcatggacagcccggtgaacctggagatatgcatccgctcctgggggctcaggtctgacatgatgtacttcccttctgaggtctgccggaggctggcggcaaactgggcctggaggatcaggaggtgctgggggttccagtttgactggcggcccttcctcttctgggcgggcgtcgactcctcagcctcctccagagtggccccgt

SEQ ID NO: 356103 - DNA, 701 bp, Homo sapiens
  chr19:31768105-31768806
  hypo
gagtggaggattttgacgtgtggctctctgtcaagttcttcagcatatcggatatatctgacaaggcattctcgcgtagcggcgagtttgacatgaatgatacgacggcagatgtctttgccgttgtcaccgtggatgaggaggttgccggggctgtggacgtgggtgacagaagcactgaacccaaggagcagcctttgtcactcttcccttttgtcaagtctatgggctggtcgttgttgacgtggtagaaatagcggtcgaggtggtctgccttcttggactgcaggggcggcggggtggccacagcagccttctccgccaggctgttgctcatcttgaaaagcatgctcatggggtccagggcaggcagggagggcttggcggccttgcccaggtgaatgttcatgactgactgcagggcgctcaaagggttaacaaaaggctgttcaggcgggtggtcggtgatgatggccgtgctgccactcaaactgctggctaggggcttcaccagctccttgccattctccaccggctcagcgagggggctcccatccttgcacccatcccgcggggggctggggctgttctcctggctgcggaagcccccatcgctggatgcctccatcttgatgggttccccgacttcgctgctacatggggagggagtggcccgcttgggcggggaaagcttcccatcc

SEQ ID NO: 356104 - DNA, 573 bp, Homo sapiens; identical to SEQ ID NO: 348963
  chr19:31769887-31770460
  hypo

SEQ ID NO: 356105 - DNA, 157 bp, Homo sapiens; identical to SEQ ID NO: 348964
  chr19:31770490-31770647
  hypo

SEQ ID NO: 356106 - DNA, 58 bp, Homo sapiens; identical to SEQ ID NO: 352276
  chr19:31839508-31839566
  hypo

SEQ ID NO: 356107 - DNA, 233 bp, Homo sapiens; identical to SEQ ID NO: 293818
  chr19:31841177-31841410
  hypo

SEQ ID NO: 356108 - DNA, 325 bp, Homo sapiens; identical to SEQ ID NO: 293819
  chr19:31841583-31841908
  hypo

SEQ ID NO: 356109 - DNA, 267 bp, Homo sapiens; identical to SEQ ID NO: 343903
  chr19:32845502-32845769
  hypo

SEQ ID NO: 356110 - DNA, 38 bp, Homo sapiens; identical to SEQ ID NO: 343904
  chr19:32849484-32849522
  hypo

SEQ ID NO: 356111 - DNA, 158 bp, Homo sapiens; identical to SEQ ID NO: 343905
  chr19:32850587-32850745
  hypo

SEQ ID NO: 356112 - DNA, 143 bp, Homo sapiens; identical to SEQ ID NO: 348968
  chr19:32898192-32898335
  hypo

SEQ ID NO: 356113 - DNA, 219 bp, Homo sapiens; identical to SEQ ID NO: 348969
  chr19:32898490-32898709
  hypo

SEQ ID NO: 356114 - DNA, 75 bp, Homo sapiens; identical to SEQ ID NO: 343907
  chr19:33209600-33209675
  hypo

SEQ ID NO: 356115 - DNA, 1246 bp, Homo sapiens; identical to SEQ ID NO: 205356
  chr19:33792630-33793876
  hypo

SEQ ID NO: 356116 - DNA, 248 bp, Homo sapiens
  chr19:33996157-33996405
  hypo
tgctctccacagaaggcagcggcatttgctctgcggtggaagccggcagccatctgaggatgttagctggtcagagacaaaagcagacctcgccacagtgacgcaggtgcctatgcccaaagaccactcccggagcaagcttcctcacaggggccacagagggaacagcgctgcccgggaggctggagaccaggtccagtgaccaggcctgcccagggtcagtgcctcaaaccacccgggcagcagcc

SEQ ID NO: 356117 - DNA, 49 bp, Homo sapiens; identical to SEQ ID NO: 352281
  chr19:34114303-34114352
  hypo

SEQ ID NO: 356118 - DNA, 78 bp, Homo sapiens; identical to SEQ ID NO: 346209
  chr19:34949560-34949638
  hypo

SEQ ID NO: 356119 - DNA, 52 bp, Homo sapiens; identical to SEQ ID NO: 343916
  chr19:34963061-34963113
  hypo

SEQ ID NO: 356120 - DNA, 478 bp, Homo sapiens; identical to SEQ ID NO: 352284
  chr19:35454533-35455011
  hypo

SEQ ID NO: 356121 - DNA, 450 bp, Homo sapiens
  chr19:35551123-35551573
  hypo
cgtcccctcaagctccccaggatggggccatgtactttcagaccccctagggcagggccaagcctgggctctggggacctgggctccagtcccctgtcgccgccccctgctgacccttgtcccacagactgtggccgcaggaagctgcccgtggaccgcatcgtgggaggccgggacaccagcttgggccggtggccgtggcaagtcagccttcgctatgatggagcacacctctgtgggggatccctgctctccggggactgggtgctgacagccgcccactgcttcccggagtgagtgccccccaatggcgctgatgatggggaggcagaggagcggagagacagtggggaggagggcggattgtgcccaggcaggtggccaccctccacccctttccctggtaggcggaaccgggtcctgtcccgatggcgagtgtttgccggtgcc

SEQ ID NO: 356122 - DNA, 58 bp, Homo sapiens
  chr19:36222534-36222592
  hypo
gcagttccccatggcgtgcaaagcctgcagcagaggcagagaggagatggcaaggagc

SEQ ID NO: 356123 - DNA, 63 bp, Homo sapiens; identical to SEQ ID NO: 352285
  chr19:36478303-36478366
  hypo

SEQ ID NO: 356124 - DNA, 566 bp, Homo sapiens; identical to SEQ ID NO: 343932
  chr19:36592549-36593115
  hypo

SEQ ID NO: 356125 - DNA, 295 bp, Homo sapiens; identical to SEQ ID NO: 345590
  chr19:37568994-37569289
  hypo

SEQ ID NO: 356126 - DNA, 182 bp, Homo sapiens; identical to SEQ ID NO: 345591
  chr19:37569554-37569736
  hypo

SEQ ID NO: 356127 - DNA, 263 bp, Homo sapiens; identical to SEQ ID NO: 293927
  chr19:38719956-38720219
  hypo

SEQ ID NO: 356128 - DNA, 187 bp, Homo sapiens; identical to SEQ ID NO: 352306
  chr19:38720439-38720626
  hypo

SEQ ID NO: 356129 - DNA, 389 bp, Homo sapiens; identical to SEQ ID NO: 347597
  chr19:38754883-38755272
  hypo

SEQ ID NO: 356130 - DNA, 175 bp, Homo sapiens; identical to SEQ ID NO: 347598
  chr19:38755344-38755519
  hypo

SEQ ID NO: 356131 - DNA, 324 bp, Homo sapiens; identical to SEQ ID NO: 348975
  chr19:38781936-38782260
  hypo

SEQ ID NO: 356132 - DNA, 72 bp, Homo sapiens
  chr19:38828044-38828116
  hypo
cgagagtggtgtgagcgacagcttctttgagcaagagcccgtggacacagtgagcagcttgtttcacatgct

SEQ ID NO: 356133 - DNA, 132 bp, Homo sapiens
  chr19:38901796-38901928
  hypo
cggggggtcctgcatcgcccttggcccctggcctcttcttacattctaccttcacctggtctctgcagtgtttgtggcaacacagcccgcactctgggggaaggcagcggcaggggtccgatctgtgtcatc

SEQ ID NO: 356134 - DNA, 72 bp, Homo sapiens; identical to SEQ ID NO: 343954
  chr19:39094650-39094722
  hypo

SEQ ID NO: 356135 - DNA, 84 bp, Homo sapiens; identical to SEQ ID NO: 343960
  chr19:39289891-39289975
  hypo

SEQ ID NO: 356136 - DNA, 73 bp, Homo sapiens
  chr19:39305794-39305867
  hypo
cgaacgccaccctcaaccccagggcaggcagggagaccaggaagccttgcaacccagagggaccccagcgact

SEQ ID NO: 356137 - DNA, 192 bp, Homo sapiens
  chr19:39306241-39306433
  hypo
cgcgagggctctcagagcttggagaaggtgacggttttcagttccttgttctcagtcgtggcctggaccgacttcacgaggtcttgggtctgcagcatgctcatgttccaggacgcctggtaccgagggtgttgagagagaacgaggagagagattagcaggggccaatcaggataaagcatgagagcaccc

SEQ ID NO: 356138 - DNA, 100 bp, Homo sapiens
  chr19:39306545-39306645
  hypo
ttgaccttggtgctctgcaccgccacggggctcttgctggaaatctcggccgccagcgctaaggcagcatccagcatgacctctttgtctgggaacaccc

SEQ ID NO: 356139 - DNA, 56 bp, Homo sapiens; identical to SEQ ID NO: 348977
  chr19:39329516-39329572
  hypo

SEQ ID NO: 356140 - DNA, 369 bp, Homo sapiens; identical to SEQ ID NO: 343965
  chr19:39435437-39435806
  hypo

SEQ ID NO: 356141 - DNA, 136 bp, Homo sapiens; identical to SEQ ID NO: 343967
  chr19:39642874-39643010
  hypo

SEQ ID NO: 356142 - DNA, 485 bp, Homo sapiens
  chr19:39646243-39646728
  hypo
actggaggtgggatttgaaggggagggaggggtgctgtggagcatctttttcttctgttcctgaacgggggttctgatcacatcagcctcatgcttggagcagctggttaagggcacagacaccgggacagacatccagcctgggagtcccagcgcctgacctcccctcgggcatcaagtcactccgcctctccgcgcctcagtttcctccatgatgaaaggggcctgctgaaggacctgtctcatttagggcagcagtgaggcaaagccccggagcccatgcctgtgccaagagcagggcctggcccagaatatggccttgtcacgttgagctgccttttttcagcagggttagtttcatcctggtgaggcggcgccagcatggcgttccaccttcttggcctcctctccctcctccctttcctgccatccacacctcccggccctattctcacacctcaggatggcgatatgggggcttcacc

SEQ ID NO: 356143 - DNA, 67 bp, Homo sapiens; identical to SEQ ID NO: 352310
  chr19:39997621-39997688
  hypo

SEQ ID NO: 356144 - DNA, 473 bp, Homo sapiens
  chr19:40362772-40363245
  hypo
cgccgtgtaggctgccaggctgcggcacaggaaggctttgtcacccttttgcgcgcacaggtcgtatacgcattggcggaagtactcagagggactcagcaccgcctggcaggtcgcgaaggggccctgggggttccggagctgcccgcaggcctcgttgctctcatagggtgcagtctcctctgccaagcacactgggcagccttggggcccgcagccctcgccacagcccttggaggagccgggcgcccgccatgcagccccgaaggtctccacactggacgctgctgagccattgggcaggacaaagtcgtcactccagttgccattgaagttcccacagaggccacagagccgtccacggaaggggctggggatggacatgaggaggtgggcatcgccatcaaagagaagccgcagccccttggtcgtctgcagaaccatgtttcggccctcggcggtcacccgcacgc

SEQ ID NO: 356145 - DNA, 109 bp, Homo sapiens; identical to SEQ ID NO: 343976
  chr19:40474764-40474873
  hypo

SEQ ID NO: 356146 - DNA, 301 bp, Homo sapiens; identical to SEQ ID NO: 343977
  chr19:40753417-40753718
  hypo

SEQ ID NO: 356147 - DNA, 294 bp, Homo sapiens; identical to SEQ ID NO: 348979
  chr19:40829211-40829505
  hypo

SEQ ID NO: 356148 - DNA, 359 bp, Homo sapiens; identical to SEQ ID NO: 336145
  chr19:41190162-41190521
  hypo

SEQ ID NO: 356149 - DNA, 157 bp, Homo sapiens
  chr19:42408960-42409117
  hypo
agcagacagtgagtggtgagttgagccatgggagccctgagagcgccaccactgtgggtgacttctccagcttgtgcttagggaggggcaggcactggggggacctgggctctgagccccatctccccctctccctgcagatcacaaagccttctac

SEQ ID NO: 356150 - DNA, 71 bp, Homo sapiens; identical to SEQ ID NO: 348981
  chr19:42906796-42906867
  hypo

SEQ ID NO: 356151 - DNA, 157 bp, Homo sapiens; identical to SEQ ID NO: 348982
  chr19:42906913-42907070
  hypo

SEQ ID NO: 356152 - DNA, 246 bp, Homo sapiens; identical to SEQ ID NO: 352320
  chr19:43967263-43967509
  hypo

SEQ ID NO: 356153 - DNA, 330 bp, Homo sapiens; identical to SEQ ID NO: 348983
  chr19:44222791-44223121
  hypo

SEQ ID NO: 356154 - DNA, 344 bp, Homo sapiens; identical to SEQ ID NO: 219534
  chr19:44223175-44223519
  hypo

SEQ ID NO: 356155 - DNA, 300 bp, Homo sapiens; identical to SEQ ID NO: 344001
  chr19:45315421-45315721
  hypo

SEQ ID NO: 356156 - DNA, 292 bp, Homo sapiens
  chr19:45322448-45322740
  hypo
cgtaagggaccttcctctccaccctgagccccctctcactcatccaagtatcacaccctcctttccacttcctgggagactggacgtcgttcacctctgcccttgaccccaccccttgaccccaccagccggggcctgatcggagcctccatagcccgcagagccaatccccggacggcagggttgggtgagcagctctctgaccctgaaagtgaccagcgccctgagccgcgatggcatctcctgtgaagcctccaacccccacgggaacaagcgccatgtcttccacttc

SEQ ID NO: 356157 - DNA, 1002 bp, Homo sapiens; identical to SEQ ID NO: 352329
  chr19:45349502-45350504
  hypo

SEQ ID NO: 356158 - DNA, 362 bp, Homo sapiens; identical to SEQ ID NO: 344004
  chr19:45377472-45377834
  hypo

SEQ ID NO: 356159 - DNA, 237 bp, Homo sapiens
  chr19:45567162-45567399
  hypo
cgggtcgctgtggcccgcgctggcgctgctgttgatctgctgtgtgtgctgttcccgaagaggctccgggagcctgagctagtgagcctcctcctccctacccgcaggtcaccctcggagtccagctcagagtcccgctcccgctcccgctccccgaccccgggccgcgaggagaagatcacgttcatcaccagttttgggggcagcgatgaggaggcagccgcagccgctgctgcc

SEQ ID NO: 356160 - DNA, 83 bp, Homo sapiens
  chr19:45570303-45570386
  hypo
cgggaagttagcaagcgggtgtctagtgagggagaggtgacgtgggccaggcagggctcatgatggcaggactgcccttaggc

SEQ ID NO: 356161 - DNA, 220 bp, Homo sapiens
  chr19:45570493-45570713
  hypo
gggccttgcaggaaggaggactgtggatccggacccagggtggggtgcggttggggtccctggagcctcacagtcctcctcccgccctgctgcatccccaggagccgctcccactcaggggaccgctacaggcggggcggccggggcctcaggcaccacagcagtagccgcagccgcagcagctggtccctcagcccgtcccgcagtcgcagcctgactc

SEQ ID NO: 356162 - DNA, 47 bp, Homo sapiens; identical to SEQ ID NO: 219561
  chr19:45574888-45574935
  hypo

SEQ ID NO: 356163 - DNA, 472 bp, Homo sapiens; identical to SEQ ID NO: 219562
  chr19:45575156-45575628
  hypo

SEQ ID NO: 356164 - DNA, 132 bp, Homo sapiens; identical to SEQ ID NO: 346212
  chr19:45603745-45603877
  hypo

SEQ ID NO: 356165 - DNA, 334 bp, Homo sapiens; identical to SEQ ID NO: 346213
  chr19:45603910-45604244
  hypo

SEQ ID NO: 356166 - DNA, 802 bp, Homo sapiens; identical to SEQ ID NO: 347608
  chr19:45648009-45648811
  hypo

SEQ ID NO: 356167 - DNA, 75 bp, Homo sapiens
  chr19:45810267-45810342
  hypo
agccgcatgtagtgagtgcctactgtgtaacaggttacctgcacacaggtaatgcctgttcattcgtgagctcac

SEQ ID NO: 356168 - DNA, 40 bp, Homo sapiens
  chr19:46307556-46307596
  hypo
cgaccagctccagcacggggatgccctcgaagtccgggtt

SEQ ID NO: 356169 - DNA, 39 bp, Homo sapiens
  chr19:46308096-46308135
  hypo
ggtagctgcgtttgattcccaggatcttgccccagaagc

SEQ ID NO: 356170 - DNA, 58 bp, Homo sapiens
  chr19:46321120-46321178
  hypo
cgggctccctccggggtcagacgggggaaggggagggcaagcaggctagaagctgctg

SEQ ID NO: 356171 - DNA, 110 bp, Homo sapiens
  chr19:46321422-46321532
  hypo
tgggcctgtcctctctgcccagctgccccctgggaggtgggagtcccggcctctgctgtctgcccatgtgaggggaagacttctaaagccctgacttctaaagcccctgc

SEQ ID NO: 356172 - DNA, 88 bp, Homo sapiens; identical to SEQ ID NO: 352339
  chr19:46519167-46519255
  hypo

SEQ ID NO: 356173 - DNA, 421 bp, Homo sapiens; identical to SEQ ID NO: 352340
  chr19:46519582-46520003
  hypo

SEQ ID NO: 356174 - DNA, 369 bp, Homo sapiens; identical to SEQ ID NO: 344021
  chr19:46885301-46885670
  hypo

SEQ ID NO: 356175 - DNA, 139 bp, Homo sapiens; identical to SEQ ID NO: 345597
  chr19:46931914-46932053
  hypo

SEQ ID NO: 356176 - DNA, 31 bp, Homo sapiens; identical to SEQ ID NO: 326702
  chr19:47116867-47116898
  hypo

SEQ ID NO: 356177 - DNA, 259 bp, Homo sapiens; identical to SEQ ID NO: 352348
  chr19:47523724-47523983
  hypo

SEQ ID NO: 356178 - DNA, 112 bp, Homo sapiens; identical to SEQ ID NO: 344031
  chr19:47646754-47646866
  hypo

SEQ ID NO: 356179 - DNA, 287 bp, Homo sapiens; identical to SEQ ID NO: 336192
  chr19:47731303-47731590
  hypo

SEQ ID NO: 356180 - DNA, 205 bp, Homo sapiens; identical to SEQ ID NO: 344036
  chr19:47881084-47881289
  hypo

SEQ ID NO: 356181 - DNA, 64 bp, Homo sapiens; identical to SEQ ID NO: 348989
  chr19:47881711-47881775
  hypo

SEQ ID NO: 356182 - DNA, 214 bp, Homo sapiens; identical to SEQ ID NO: 219597
  chr19:48003714-48003928
  hypo

SEQ ID NO: 356183 - DNA, 202 bp, Homo sapiens; identical to SEQ ID NO: 344039
  chr19:48012665-48012867
  hypo

SEQ ID NO: 356184 - DNA, 311 bp, Homo sapiens; identical to SEQ ID NO: 347612
  chr19:48901504-48901815
  hypo

SEQ ID NO: 356185 - DNA, 196 bp, Homo sapiens; identical to SEQ ID NO: 352353
  chr19:49014625-49014821
  hypo

SEQ ID NO: 356186 - DNA, 550 bp, Homo sapiens; identical to SEQ ID NO: 336209
  chr19:49467064-49467614
  hypo

SEQ ID NO: 356187 - DNA, 224 bp, Homo sapiens; identical to SEQ ID NO: 344049
  chr19:49600463-49600687
  hypo

SEQ ID NO: 356188 - DNA, 435 bp, Homo sapiens; identical to SEQ ID NO: 336213
  chr19:49660929-49661364
  hypo

SEQ ID NO: 356189 - DNA, 133 bp, Homo sapiens
  chr19:49703923-49704056
  hypo
cgtggccacggaggggctcctgaggccacgggacagtgacttcccaagtatcctgcgccgcgtcttctaccgtccctacctgcagatcttcgggcagattccccaggaggacatggacggtaggggggatgac

SEQ ID NO: 356190 - DNA, 456 bp, Homo sapiens
  chr19:49971410-49971866
  hypo
cgtctcaaaaaaaaaaaaaaagaaaggcggttatgcaggatgtttctcaccgcccgaacccccgtggaatgattcactttgaccagcgtctgcgaaatggcaggggcttccacaatggtgcggtttgggccaacaccaagtgttggggagaatgtagaggaactggatctctcatttactgcgggcggggctcccctgccccacacgtgacccacctgtccctgcaggtagccgggctgagaggccctgtgctgcgcctgcgggagccgctgggtgtgctggctgtggtgtgtccggacgagtggcccctgcttgccttcgtgtccctgctggctcccgccctggcctacggcaacactgtggtcatggtgcccagtgcggcctgtcctctgctggccctggaggtctgccaggtatagccccctgccttcctgcctctcctccccgtagcctcag

SEQ ID NO: 356191 - DNA, 121 bp, Homo sapiens
  chr19:50129561-50129682
  hypo
cgttctcgcccccgccccaccccctgctcccactaccctttgtctcttgctctttcttgggcttctgtacaactcaacttgtatacactgtgtacacacaaccagccaaacgaaaacccaa

SEQ ID NO: 356192 - DNA, 253 bp, Homo sapiens; identical to SEQ ID NO: 344060
  chr19:50306223-50306476
  hypo

SEQ ID NO: 356193 - DNA, 78 bp, Homo sapiens
  chr19:50320125-50320203
  hypo
tttgagacacgccagagcaacacagtgagaccccatctctacaaaaaatttaaaaattagctggaagtggtagtgcgc

SEQ ID NO: 356194 - DNA, 67 bp, Homo sapiens; identical to SEQ ID NO: 348994
  chr19:50365162-50365229
  hypo

SEQ ID NO: 356195 - DNA, 218 bp, Homo sapiens; identical to SEQ ID NO: 347617
  chr19:50553779-50553997
  hypo

SEQ ID NO: 356196 - DNA, 230 bp, Homo sapiens; identical to SEQ ID NO: 344068
  chr19:50784855-50785085
  hypo

SEQ ID NO: 356197 - DNA, 39 bp, Homo sapiens
  chr19:50789768-50789807
  hypo
cgggcagtggaggaacgtgagcgggccgaggcagagggc

SEQ ID NO: 356198 - DNA, 446 bp, Homo sapiens; identical to SEQ ID NO: 352368
  chr19:50833970-50834416
  hypo

SEQ ID NO: 356199 - DNA, 176 bp, Homo sapiens; identical to SEQ ID NO: 346217
  chr19:50919593-50919769
  hypo

SEQ ID NO: 356200 - DNA, 153 bp, Homo sapiens; identical to SEQ ID NO: 352372
  chr19:50979533-50979686
  hypo

SEQ ID NO: 356201 - DNA, 767 bp, Homo sapiens
  chr19:51020756-51021523
  hypo
cggtcaggctgcgcccgggctgggacctgggtggggggctccacgcccctcgcccgcccggccccgccgcctcagatctgcgtctcttgcacgttctccttggagccgctcttgaagagcagaggttcgtggatggagttgaggccaggcgggcctttgcccccgcagcccccgccgctggggttgctgctgtagtgcgccttgaaggcggcagccacgtagtggtggtggttgaggtggtctcgctccagggcgggcagggccaggtggctgtccccgcccacaccacccccactggccacggcggccgcggcggccacggacacggccgaggcggcgggcagctcgtcctccacgttgatgatctccacggtgcgcgtgggcccgtggtgcttgtggagctggtgctgcttgcgcagcttgtagaaggccacgagcatcaccgcggccatgaacgtgatggccacgaagcagccgatgatgattttggtggtcttcatgacgtcgtccaggtccttgagggcgttctccgtcacatccgtgatgggcaccgtgaacgccttctccgtgggccgcgaggagcgcggggcgggtgccgtggtagaagacgaggcagggccggccgcgtccccaggccggcccccaccccagacaccgtctgtcgtgggccctggcggttccttctccgtcccccgcggctgcagggcctcctctccgggctgcgtctccagggtctccacggtcaccgtggtgaagtaggtgtagcc

SEQ ID NO: 356202 - DNA, 77 bp, Homo sapiens; identical to SEQ ID NO: 336229
  chr19:51111319-51111396
  hypo

SEQ ID NO: 356203 - DNA, 73 bp, Homo sapiens; identical to SEQ ID NO: 345605
  chr19:51228809-51228882
  hypo

SEQ ID NO: 356204 - DNA, 676 bp, Homo sapiens; identical to SEQ ID NO: 344078
  chr19:51303021-51303697
  hypo

SEQ ID NO: 356205 - DNA, 87 bp, Homo sapiens
  chr19:51535218-51535305
  hypo
cgctgctggttacgcggacgggcaggcgcagccgcagcagccggaggtcgtgctcgtggctcgtcgaggctcccaggtagccgggat

SEQ ID NO: 356206 - DNA, 36 bp, Homo sapiens; identical to SEQ ID NO: 348998
  chr19:52058332-52058368
  hypo

SEQ ID NO: 356207 - DNA, 74 bp, Homo sapiens; identical to SEQ ID NO: 205557
  chr19:52531285-52531359
  hypo

SEQ ID NO: 356208 - DNA, 208 bp, Homo sapiens; identical to SEQ ID NO: 345609
  chr19:52531884-52532092
  hypo

SEQ ID NO: 356209 - DNA, 119 bp, Homo sapiens; identical to SEQ ID NO: 336251
  chr19:52715152-52715271
  hypo

SEQ ID NO: 356210 - DNA, 818 bp, Homo sapiens; identical to SEQ ID NO: 352396
  chr19:53237625-53238443
  hypo

SEQ ID NO: 356211 - DNA, 351 bp, Homo sapiens; identical to SEQ ID NO: 352398
  chr19:53445359-53445710
  hypo

SEQ ID NO: 356212 - DNA, 231 bp, Homo sapiens; identical to SEQ ID NO: 352399
  chr19:53445822-53446053
  hypo

SEQ ID NO: 356213 - DNA, 139 bp, Homo sapiens; identical to SEQ ID NO: 347631
  chr19:53606073-53606212
  hypo

SEQ ID NO: 356214 - DNA, 221 bp, Homo sapiens; identical to SEQ ID NO: 205580
  chr19:53606354-53606575
  hypo

SEQ ID NO: 356215 - DNA, 143 bp, Homo sapiens; identical to SEQ ID NO: 344098
  chr19:53806012-53806155
  hypo

SEQ ID NO: 356216 - DNA, 84 bp, Homo sapiens; identical to SEQ ID NO: 347635
  chr19:54412564-54412648
  hypo

SEQ ID NO: 356217 - DNA, 386 bp, Homo sapiens
  chr19:55990556-55990942
  hypo
cggagggcagtgagggagcgaggtatcccggaggccagggggaggcgggccacggacccagtgacaagtgggccattgcgggccacgcgccgcccaggccatggagtgggggcacccgcgtgggactgaaggggtttgcgctgggaaagagcgggctgacacttgagctgctctgctgtgaaggaatggagaaacgagtctgcagctggacagggaagtggagtgaagagctttttggtttttaaagatgggagacatagattgttggttctgcagatgggaacgtccaggagaggaggaaaagtggaggatgtgggtgggaaggcacagtccacgggcactgggtcaggcctgtggggaaggattgcgcagggtttctggacctc

SEQ ID NO: 356218 - DNA, 77 bp, Homo sapiens
  chr19:56104962-56105039
  hypo
cggagctcgcagaccaggcagcagtagggtttctcaccagtgtggacgacctaggggtgcgggaggaagggcacaac

SEQ ID NO: 356219 - DNA, 134 bp, Homo sapiens; identical to SEQ ID NO: 336290
  chr19:56112791-56112925
  hypo

SEQ ID NO: 356220 - DNA, 245 bp, Homo sapiens; identical to SEQ ID NO: 294401
  chr19:56159669-56159914
  hypo

SEQ ID NO: 356221 - DNA, 68 bp, Homo sapiens; identical to SEQ ID NO: 352417
  chr19:56159950-56160018
  hypo

SEQ ID NO: 356222 - DNA, 411 bp, Homo sapiens
  chr19:56199006-56199417
  hypo
cgctggcctcacctgtgccccacgctgcccttccatctgcccatcccctcagaaggccgcttacccacccaagtccgtcaatccctgctggttctctcgtcctttcctcactcataaccccagatggtcacccttcggccccgctctgccacccacatgctccctggagcatcccatgcacccagccctgctgggcacaccacacgggggccagcctgggggcccctggacccggtgcaggtggggccgccagacagctgcctgctgcggctccgggcaaggggagccagggcctgctcgtcagggagaggcctgggcctggggagtgggttgggtggggacacaagtacaggacacaggtgcaaggcggcgtcttggagctggagcagacagaacttgctgaccagtgca

SEQ ID NO: 356223 - DNA, 133 bp, Homo sapiens
  chr19:56199619-56199752
  hypo
gatgctgcagtggaggccggggatatctcagcagcctcctggagggtccggccctgccttcctgtgtcctctctctcccttcccctcctgctcttggaaccaagggctcctcgctagcccactccctaacccc

SEQ ID NO: 356224 - DNA, 149 bp, Homo sapiens; identical to SEQ ID NO: 346221
  chr19:56201494-56201643
  hypo

SEQ ID NO: 356225 - DNA, 495 bp, Homo sapiens; identical to SEQ ID NO: 349005
  chr19:56538418-56538913
  hypo

SEQ ID NO: 356226 - DNA, 74 bp, Homo sapiens; identical to SEQ ID NO: 349006
  chr19:56539122-56539196
  hypo

SEQ ID NO: 356227 - DNA, 145 bp, Homo sapiens
  chr19:56688223-56688368
  hypo
cgctgggggaccaggtcggcctgatccgatgatgggggaaggagaggcttaattgcttgcacacgtccaaactcctcaagatgtgtacattaaatgtgcgccatttttgtatctcgatgatgcctccataaagctaaaaaataaa

SEQ ID NO: 356228 - DNA, 171 bp, Homo sapiens; identical to SEQ ID NO: 344121
  chr19:56807013-56807184
  hypo

SEQ ID NO: 356229 - DNA, 343 bp, Homo sapiens; identical to SEQ ID NO: 352436
  chr19:58694209-58694552
  hypo

SEQ ID NO: 356230 - DNA, 53 bp, Homo sapiens; identical to SEQ ID NO: 349008
  chr19:58964127-58964180
  hypo

SEQ ID NO: 356231 - DNA, 236 bp, Homo sapiens; identical to SEQ ID NO: 344146
  chr20:371973-372209
  hypo

SEQ ID NO: 356232 - DNA, 93 bp, Homo sapiens
  chr20:400189-400282
  hypo
ctctgctcccaggtgggctggcagtgccccgggtgcaccttcatcaacaagcccacgcggcctggctgtgagatgtgctgccgggcgcgcccc

SEQ ID NO: 356233 - DNA, 101 bp, Homo sapiens
  chr20:400915-401016
  hypo
cgccttagccctaccccgcccccatcgtgacacacgcactaatgacacagacattgatccccgagtgctccccattctgatctcacccctggccccacctg

SEQ ID NO: 356234 - DNA, 139 bp, Homo sapiens; identical to SEQ ID NO: 219814
  chr20:2820587-2820726
  hypo

SEQ ID NO: 356235 - DNA, 143 bp, Homo sapiens; identical to SEQ ID NO: 294514
  chr20:2820861-2821004
  hypo

SEQ ID NO: 356236 - DNA, 265 bp, Homo sapiens; identical to SEQ ID NO: 219817
  chr20:3202153-3202418
  hypo

SEQ ID NO: 356237 - DNA, 283 bp, Homo sapiens; identical to SEQ ID NO: 352445
  chr20:3220266-3220549
  hypo

SEQ ID NO: 356238 - DNA, 125 bp, Homo sapiens; identical to SEQ ID NO: 352446
  chr20:3229128-3229253
  hypo

SEQ ID NO: 356239 - DNA, 154 bp, Homo sapiens; identical to SEQ ID NO: 205676
  chr20:3229326-3229480
  hypo

SEQ ID NO: 356240 - DNA, 31 bp, Homo sapiens; identical to SEQ ID NO: 205677
  chr20:3229526-3229557
  hypo

SEQ ID NO: 356241 - DNA, 144 bp, Homo sapiens; identical to SEQ ID NO: 352449
  chr20:3229659-3229803
  hypo

SEQ ID NO: 356242 - DNA, 414 bp, Homo sapiens; identical to SEQ ID NO: 347652
  chr20:4804008-4804422
  hypo

SEQ ID NO: 356243 - DNA, 93 bp, Homo sapiens
  chr20:6022704-6022797
  hypo
cgggggctgcgctgggcgcgacggtggtaccctgtgcgtaggtggagcggttgaagcaaggtgggtgtgaagccccgagagtggtgctttggt

SEQ ID NO: 356244 - DNA, 427 bp, Homo sapiens; identical to SEQ ID NO: 352453
  chr20:6747996-6748423
  hypo

SEQ ID NO: 356245 - DNA, 293 bp, Homo sapiens; identical to SEQ ID NO: 294559
  chr20:6748470-6748763
  hypo

SEQ ID NO: 356246 - DNA, 267 bp, Homo sapiens; identical to SEQ ID NO: 294620
  chr20:19193616-19193883
  hypo

SEQ ID NO: 356247 - DNA, 225 bp, Homo sapiens; identical to SEQ ID NO: 349013
  chr20:20376606-20376831
  hypo

SEQ ID NO: 356248 - DNA, 218 bp, Homo sapiens; identical to SEQ ID NO: 219867
  chr20:20376973-20377191
  hypo

SEQ ID NO: 356249 - DNA, 923 bp, Homo sapiens; identical to SEQ ID NO: 347661
  chr20:22564324-22565247
  hypo

SEQ ID NO: 356250 - DNA, 264 bp, Homo sapiens; identical to SEQ ID NO: 352468
  chr20:23617984-23618248
  hypo

SEQ ID NO: 356251 - DNA, 68 bp, Homo sapiens; identical to SEQ ID NO: 352469
  chr20:23618645-23618713
  hypo

SEQ ID NO: 356252 - DNA, 112 bp, Homo sapiens; identical to SEQ ID NO: 219885
  chr20:23969320-23969432
  hypo

SEQ ID NO: 356253 - DNA, 237 bp, Homo sapiens
  chr20:25320332-25320569
  hypo
cgtatcaggaaagagcggcctcctcaggcctcccgatccgtcttctgtgagacaactgcaggcaggcgtaggttacttattagctcctggtaggaagcacgtagaccaaggacatcaacagaacctgcctgaccaggtcctcagagagcaggaggctaagaactggcacggtgtgtccttgcatttacgcgtgggcgagcccctctgtacccacccaacagaggacccttttccagg

SEQ ID NO: 356254 - DNA, 113 bp, Homo sapiens; identical to SEQ ID NO: 344193
  chr20:30139516-30139629
  hypo

SEQ ID NO: 356255 - DNA, 1002 bp, Homo sapiens; identical to SEQ ID NO: 345628
  chr20:30192854-30193856
  hypo

SEQ ID NO: 356256 - DNA, 189 bp, Homo sapiens; identical to SEQ ID NO: 345629
  chr20:30193992-30194181
  hypo

SEQ ID NO: 356257 - DNA, 482 bp, Homo sapiens; identical to SEQ ID NO: 352476
  chr20:30555404-30555886
  hypo

SEQ ID NO: 356258 - DNA, 248 bp, Homo sapiens; identical to SEQ ID NO: 352477
  chr20:30556403-30556651
  hypo

SEQ ID NO: 356259 - DNA, 270 bp, Homo sapiens
  chr20:30772699-30772969
  hypo
cgttaaccacgccgcacattttcccatccagtgccttcgctcatgttgttcgctctgccaggaattcccttctctggctccactttccaaactactgcctattctttaacacccagctcgtgacccaacttcagagaagtctccgccctctggtcccacatcatcacatacctggtgaactataagccacgttgaacacagttgggttttgtctccttggatgaccgttggataccagttacacctcttgccccggtgtaattattagtc

SEQ ID NO: 356260 - DNA, 35 bp, Homo sapiens; identical to SEQ ID NO: 344204
  chr20:30996055-30996090
  hypo

SEQ ID NO: 356261 - DNA, 145 bp, Homo sapiens
  chr20:32301652-32301797
  hypo
cgcaacccgttttctgagaagtgccttgagggaagagctacgggagatgacaggaaggtgaagatgcttcagcgagagacaagagatcagggagctttgaggaggaagtgatcctcagagaactggtctggattgccaggaggga

SEQ ID NO: 356262 - DNA, 207 bp, Homo sapiens; identical to SEQ ID NO: 344209
  chr20:32332893-32333100
  hypo

SEQ ID NO: 356263 - DNA, 237 bp, Homo sapiens; identical to SEQ ID NO: 344211
  chr20:32436267-32436504
  hypo

SEQ ID NO: 356264 - DNA, 71 bp, Homo sapiens; identical to SEQ ID NO: 344213
  chr20:32669113-32669184
  hypo

SEQ ID NO: 356265 - DNA, 134 bp, Homo sapiens; identical to SEQ ID NO: 344217
  chr20:33183817-33183951
  hypo

SEQ ID NO: 356266 - DNA, 86 bp, Homo sapiens; identical to SEQ ID NO: 344218
  chr20:33876250-33876336
  hypo

SEQ ID NO: 356267 - DNA, 72 bp, Homo sapiens
  chr20:34147099-34147171
  hypo
cgggcacccaccgtgaggatgtacacattgccacccatgtctgtgaactccaggtcttctggccggcccttc

SEQ ID NO: 356268 - DNA, 131 bp, Homo sapiens
  chr20:34147230-34147361
  hypo
gtcctctgcctccttcagcttcactaccggccaccagcccctcaggcggcggcagcgaaacagattgcacctcggcccggccccattgcgggccagctgcacagagcagagctcggggccccgggccccac

SEQ ID NO: 356269 - DNA, 534 bp, Homo sapiens; identical to SEQ ID NO: 336423
  chr20:34652354-34652888
  hypo

SEQ ID NO: 356270 - DNA, 431 bp, Homo sapiens
  chr20:35155295-35155726
  hypo
cgccagcgacaagcagcgccaggaggcccgcaagagactcctggcggccaagcgggcagcttctgtgcggcagaactcagccaccgagagcgcagacagcatcgagatttatgtcccggaggcccagaccaggctctgagaccatgcaggaggaaagaaacgattttaaatcattaaaaacacaaaaactaagtgcgaacggaacagagttttctcaacctttgctatggttattctgtctagagaccctgagccaactttcaaattgacgcatacaagggctcacaatttggcttttttgggtccctcccagctttaggttatgaagattttactcacaaaaaaaatcaacaaaaatcacgaaactagaaaactttttttttcctcttgctggccgtggtggactagatagatggacgtcggcaactccc

SEQ ID NO: 356271 - DNA, 435 bp, Homo sapiens; identical to SEQ ID NO: 346229
  chr20:35443740-35444175
  hypo

SEQ ID NO: 356272 - DNA, 381 bp, Homo sapiens; identical to SEQ ID NO: 346230
  chr20:35444205-35444586
  hypo

SEQ ID NO: 356273 - DNA, 538 bp, Homo sapiens
  chr20:36760841-36761379
  hypo
ttggactccgtaaggcagtcacggtatttctcatagaggatgcaaagaggaacgctcttctctgcagaaggggagaaaggagggtgctcatgatgcagaatcacccctcccaactctcttgcaactccaagaggcacagagaggggaaggaatgtgcttggggtcacacagcgggggaatggctgggcggatccctgaactccccactgtggctccagggttcccagcgaggagctggagagtggacactgagcagcgggtagaggacgcacttggactcccacgggccttggttctaatcctgcctttgcctcttctaatgggtgaccccgcgtgagccactccacctcccaggtcctcgatgtttggatctgcgtggcacaggcactcctaaggctgtgggaggatgagctgagcgagtgtcccggaagagcctggtgcgctcgggactcagggtgtgtgagccgcgggcccttcatcctggggaggatcagagccgacatctgcttgctgcaccaggcactgcacttcccacggc

SEQ ID NO: 356274 - DNA, 116 bp, Homo sapiens; identical to SEQ ID NO: 349021
  chr20:36764040-36764156
  hypo

SEQ ID NO: 356275 - DNA, 124 bp, Homo sapiens; identical to SEQ ID NO: 349022
  chr20:36764186-36764310
  hypo

SEQ ID NO: 356276 - DNA, 186 bp, Homo sapiens; identical to SEQ ID NO: 344229
  chr20:36765901-36766087
  hypo

SEQ ID NO: 356277 - DNA, 278 bp, Homo sapiens; identical to SEQ ID NO: 344230
  chr20:36766589-36766867
  hypo

SEQ ID NO: 356278 - DNA, 148 bp, Homo sapiens; identical to SEQ ID NO: 344233
  chr20:37145099-37145247
  hypo

SEQ ID NO: 356279 - DNA, 62 bp, Homo sapiens; identical to SEQ ID NO: 345634
  chr20:37274639-37274701
  hypo

SEQ ID NO: 356280 - DNA, 546 bp, Homo sapiens; identical to SEQ ID NO: 205802
  chr20:37274731-37275277
  hypo

SEQ ID NO: 356281 - DNA, 100 bp, Homo sapiens; identical to SEQ ID NO: 352489
  chr20:37303401-37303501
  hypo

SEQ ID NO: 356282 - DNA, 389 bp, Homo sapiens; identical to SEQ ID NO: 345636
  chr20:37433723-37434112
  hypo

SEQ ID NO: 356283 - DNA, 138 bp, Homo sapiens; identical to SEQ ID NO: 344240
  chr20:37673303-37673441
  hypo

SEQ ID NO: 356284 - DNA, 233 bp, Homo sapiens
  chr20:40020340-40020573
  hypo
cggggcagagagagagagcgcgcctcaatggctttcaatagttcaagtgcattcacaccaggcgcattcctgcgcttgagattcctagcatcagccaggagcggcttagtgggagaaagagctgcgacggtgatgatagtgacattccaaagttttgtggcaacatgaaggaggaggtgtgtctgcgcttgcacagtgactgcagcccttgggcagatgtggagaatgtgtga

SEQ ID NO: 356285 - DNA, 172 bp, Homo sapiens; identical to SEQ ID NO: 346234
  chr20:42088459-42088631
  hypo

SEQ ID NO: 356286 - DNA, 95 bp, Homo sapiens
  chr20:42931339-42931434
  hypo
gcaactctagccataaaataacccgtatatgacaagttaaattgagaaagaattacctactttcacgaagtgcgctgaggtttattgggctctgc

SEQ ID NO: 356287 - DNA, 215 bp, Homo sapiens; identical to SEQ ID NO: 347677
  chr20:43976984-43977199
  hypo

SEQ ID NO: 356288 - DNA, 578 bp, Homo sapiens; identical to SEQ ID NO: 352497
  chr20:44642532-44643110
  hypo

SEQ ID NO: 356289 - DNA, 66 bp, Homo sapiens; identical to SEQ ID NO: 352499
  chr20:44937643-44937709
  hypo

SEQ ID NO: 356290 - DNA, 455 bp, Homo sapiens; identical to SEQ ID NO: 344262
  chr20:46234984-46235439
  hypo

SEQ ID NO: 356291 - DNA, 93 bp, Homo sapiens
  chr20:46823583-46823676
  hypo
gcttttggcccaaacagctctttggaaaagagcacaggaatggccccggaaggtgggacctgtttccatggtgcacgcgcaacattggaggac

SEQ ID NO: 356292 - DNA, 129 bp, Homo sapiens; identical to SEQ ID NO: 344268
  chr20:47688836-47688965
  hypo

SEQ ID NO: 356293 - DNA, 67 bp, Homo sapiens; identical to SEQ ID NO: 344270
  chr20:47765244-47765311
  hypo

SEQ ID NO: 356294 - DNA, 50 bp, Homo sapiens
  chr20:47766299-47766349
  hypo
cggaaaatggaaatgcagcgtaacaaaagaaaaacaaatcgctcctgtgc

SEQ ID NO: 356295 - DNA, 36 bp, Homo sapiens; identical to SEQ ID NO: 349028
  chr20:47837206-47837242
  hypo

SEQ ID NO: 356296 - DNA, 50 bp, Homo sapiens; identical to SEQ ID NO: 352500
  chr20:47934774-47934824
  hypo

SEQ ID NO: 356297 - DNA, 522 bp, Homo sapiens; identical to SEQ ID NO: 346235
  chr20:48498752-48499274
  hypo

SEQ ID NO: 356298 - DNA, 343 bp, Homo sapiens
  chr20:48504339-48504682
  hypo
cggcttggttgtgtctctcgacccaggacctgcaccacgggcgcatccagatgaaaactctcaccaacaagtggtacgaggaggtacgccagggcccctccggctccgaggacgacgagcaggagctgctctgacgccaggtgccaaggcttcaggcaggcaggcccaggatgggcgtttgctgcgcacagacactcagcaggggcctcgcagagatgcgtgcatccagcagccccttcaagacataagagggcggggcgaggtactggctgcagagtcgccttagtccagaacctgacaggcctctggagccaggcgacttcttgggaaactgtcatctccc

SEQ ID NO: 356299 - DNA, 245 bp, Homo sapiens
  chr20:48524519-48524764
  hypo
cgggccagaaacggttcagaggtgatgctggagagacggggaaggttcggagcccggaaggatctgagagcacaggatggatgggatcagactggcatagcctctcaggagggactgccaggggcaggaagagagaaggagggcctgtatggaggctgctccaggacctcaccttgatgcttctgaattccttcttccacgggtagaggaagaggttgatgcccaccgtctccagcatgctgaag

SEQ ID NO: 356300 - DNA, 373 bp, Homo sapiens
  chr20:48524818-48525191
  hypo
accacctcatagaactggatcagccggaatcgataaaagggatccaccttgtgcaggctgagcagggttgaggctgccacccgcaggcactcatcgctgccaggccgctgcctgctggtggtggtatccactttgctctcatggaactgcacgtacttccgaaataagtcatccttgaatttagtatccattgaactgggcttccccatccgatcgaggggggctaccttatctcctccatggcttctggattagaggcagggacatcactaaaagcatggacatgttgccgcctggaccagcggagtgctctggaaggaggggaacaagaagcatgtcattcctcgatacggtcgcgcttcggcttcaggtc

SEQ ID NO: 356301 - DNA, 982 bp, Homo sapiens; identical to SEQ ID NO: 336464
  chr20:48598700-48599682
  hypo

SEQ ID NO: 356302 - DNA, 164 bp, Homo sapiens; identical to SEQ ID NO: 345639
  chr20:48771177-48771341
  hypo

SEQ ID NO: 356303 - DNA, 158 bp, Homo sapiens; identical to SEQ ID NO: 344282
  chr20:49178954-49179112
  hypo

SEQ ID NO: 356304 - DNA, 242 bp, Homo sapiens
  chr20:49206898-49207140
  hypo
cgcagtggagtccagcgtctgcggctgcaaagggaaacccaggagtgggtttgccctcactcagtcgagtggctgcaccttcaactgcacgggtggggcgatggaggggcccaggtgtagagttggctccagggacctgggcccagagccaaaagagaatggccgcctttccatctgcaggtggctctccaaagtgtctgctgctttgggaagacagactgggagtaggatcgggtcctccc

SEQ ID NO: 356305 - DNA, 62 bp, Homo sapiens; identical to SEQ ID NO: 349032
  chr20:49218808-49218870
  hypo

SEQ ID NO: 356306 - DNA, 581 bp, Homo sapiens; identical to SEQ ID NO: 347682
  chr20:49224897-49225478
  hypo

SEQ ID NO: 356307 - DNA, 305 bp, Homo sapiens; identical to SEQ ID NO: 336468
  chr20:49225991-49226296
  hypo

SEQ ID NO: 356308 - DNA, 159 bp, Homo sapiens
  chr20:49236444-49236603
  hypo
cgcttccccaggaagagacagagaggaggcgaggtagaggaatgcacttcttaaaggcagcacacagcccagccttacttgaggcctcttttcaatgcttcgaagatcttcttcacctgctggggcttcgggtctgcacagaccgaccccttccgcagc

SEQ ID NO: 356309 - DNA, 141 bp, Homo sapiens; identical to SEQ ID NO: 344291
  chr20:49247308-49247449
  hypo

SEQ ID NO: 356310 - DNA, 570 bp, Homo sapiens; identical to SEQ ID NO: 345641
  chr20:50383675-50384245
  hypo

SEQ ID NO: 356311 - DNA, 243 bp, Homo sapiens; identical to SEQ ID NO: 205849
  chr20:50384928-50385171
  hypo

SEQ ID NO: 356312 - DNA, 174 bp, Homo sapiens; identical to SEQ ID NO: 344302
  chr20:52374073-52374247
  hypo

SEQ ID NO: 356313 - DNA, 135 bp, Homo sapiens; identical to SEQ ID NO: 205864
  chr20:55206463-55206598
  hypo

SEQ ID NO: 356314 - DNA, 95 bp, Homo sapiens; identical to SEQ ID NO: 352515
  chr20:55206774-55206869
  hypo

SEQ ID NO: 356315 - DNA, 91 bp, Homo sapiens
  chr20:56772299-56772390
  hypo
tgctaggtcagcagatctttgaggacggagccaggctcacacttctgtggcactgatgctgtcccaccagcacaccgtcgtaagcattcac

SEQ ID NO: 356316 - DNA, 213 bp, Homo sapiens; identical to SEQ ID NO: 220091
  chr20:56780225-56780438
  hypo

SEQ ID NO: 356317 - DNA, 60 bp, Homo sapiens; identical to SEQ ID NO: 220092
  chr20:56780951-56781011
  hypo

SEQ ID NO: 356318 - DNA, 96 bp, Homo sapiens
  chr20:56781104-56781200
  hypo
ctcccacgtcgacgcctcctaggtctccacttcccacgtccctgcttgtggagcctgtgccccggccgacctgctggtgccaggacagtgagagac

SEQ ID NO: 356319 - DNA, 64 bp, Homo sapiens; identical to SEQ ID NO: 344314
  chr20:56999390-56999454
  hypo

SEQ ID NO: 356320 - DNA, 167 bp, Homo sapiens
  chr20:57009378-57009545
  hypo
cggtaggcttgcagtagtgaaagatccatggactaggaatcagaagactgggtcctcggccttattcccagctctgtcatgcgtgattttgtggctcttaggttggtgacctgcaaaatggagatgttggtcatccttgcttacttcaccaggggcgtccatcctaa

SEQ ID NO: 356321 - DNA, 113 bp, Homo sapiens; identical to SEQ ID NO: 345643
  chr20:57225466-57225579
  hypo

SEQ ID NO: 356322 - DNA, 164 bp, Homo sapiens; identical to SEQ ID NO: 346239
  chr20:57268976-57269140
  hypo

SEQ ID NO: 356323 - DNA, 430 bp, Homo sapiens; identical to SEQ ID NO: 344321
  chr20:57571504-57571934
  hypo

SEQ ID NO: 356324 - DNA, 327 bp, Homo sapiens; identical to SEQ ID NO: 336499
  chr20:57797949-57798276
  hypo

SEQ ID NO: 356325 - DNA, 176 bp, Homo sapiens; identical to SEQ ID NO: 205885
  chr20:57875365-57875541
  hypo

SEQ ID NO: 356326 - DNA, 220 bp, Homo sapiens; identical to SEQ ID NO: 352521
  chr20:57875889-57876109
  hypo

SEQ ID NO: 356327 - DNA, 233 bp, Homo sapiens; identical to SEQ ID NO: 347690
  chr20:57978841-57979074
  hypo

SEQ ID NO: 356328 - DNA, 354 bp, Homo sapiens; identical to SEQ ID NO: 344328
  chr20:58507061-58507415
  hypo

SEQ ID NO: 356329 - DNA, 260 bp, Homo sapiens
  chr20:58508063-58508323
  hypo
cagggtcacccccgaaccaacaaagcacacacacacccgagatgcgccccaggccgcagcgccaaccccccttcagatgtcccggagacaggcgagcagcggtccccagggctcccgtcgccaccgcttctcccgcacccctcagcctcctcgggccggcgacgcgcgcagccccaggcctgctccccgctcgccaagcgcaccgccccgcgcctcagccaccttgaccgagtcgcccacgcgcgggggcggctccgagc

SEQ ID NO: 356330 - DNA, 56 bp, Homo sapiens; identical to SEQ ID NO: 346240
  chr20:58514041-58514097
  hypo

SEQ ID NO: 356331 - DNA, 115 bp, Homo sapiens; identical to SEQ ID NO: 345644
  chr20:58514400-58514515
  hypo

SEQ ID NO: 356332 - DNA, 352 bp, Homo sapiens; identical to SEQ ID NO: 220128
  chr20:60238496-60238848
  hypo

SEQ ID NO: 356333 - DNA, 331 bp, Homo sapiens
  chr20:60273150-60273481
  hypo
tagccgcacgttgctggacagcacagacctggcacgtgtcgtccaccctcggaggggtccccttgcacgggctccactccggacggtccctgagactctcccgccctcacgcctgctctctaagccaagcacaaagccaagtgcagcccccactgaccattccagcccatgccggcgtctgccccaggccccagatccgtcctgctggtgcgattgagggcacagagtcgagccttcaagtaggtcttctaatatggctccattcatgcagaaacctcccagtggggctgtgccaggcacttggaaagtgggagccgcagccctgccgtcc

SEQ ID NO: 356334 - DNA, 347 bp, Homo sapiens; identical to SEQ ID NO: 349042
  chr20:60352702-60353049
  hypo

SEQ ID NO: 356335 - DNA, 83 bp, Homo sapiens; identical to SEQ ID NO: 346242
  chr20:60544922-60545005
  hypo

SEQ ID NO: 356336 - DNA, 208 bp, Homo sapiens; identical to SEQ ID NO: 220146
  chr20:60545058-60545266
  hypo

SEQ ID NO: 356337 - DNA, 265 bp, Homo sapiens; identical to SEQ ID NO: 220147
  chr20:60545296-60545561
  hypo

SEQ ID NO: 356338 - DNA, 409 bp, Homo sapiens; identical to SEQ ID NO: 344359
  chr20:60725146-60725555
  hypo

SEQ ID NO: 356339 - DNA, 373 bp, Homo sapiens; identical to SEQ ID NO: 349046
  chr20:60773878-60774251
  hypo

SEQ ID NO: 356340 - DNA, 175 bp, Homo sapiens
  chr20:60781114-60781289
  hypo
cgtgaaatgccctctagtcaaaaagccaaagacagccacacgcgcccaggctctgcacagttgggcccaccaccctctcgtgcacgcactttccacacttcacgttagccgccgtcgcccccccgccctaagctcctggagaacagagacctcgtttgtctgtatgcagtgcccg

SEQ ID NO: 356341 - DNA, 256 bp, Homo sapiens
  chr20:60781567-60781823
  hypo
attggcggtcctcgggctgaggagggcgggagggtggaggtagccgtggacacaaaagggccatgccagggtcctcagaccatcaccctgtgtgttggcggtggggccacgagtctgcacgtgcgaaagaatcctgttggcttagtgtttcaggctgggaagatgaccggctctgaaggtggagggtggtgatgggagagccactgaaccgcacacttcagatagctcaagtggtgaactttatgtttatcaccac

SEQ ID NO: 356342 - DNA, 64 bp, Homo sapiens; identical to SEQ ID NO: 344363
  chr20:60842033-60842097
  hypo

SEQ ID NO: 356343 - DNA, 236 bp, Homo sapiens
  chr20:61287746-61287982
  hypo
cgctgaggccactcccactgcgtggctgaagcctcgaggtcaccaggcggaggcgcggagatgcccctgcatcagctgggggacaagccgctcaccttccccagccccaactcagccatggaaaacgggcttgaccacaccccacccagcaggagggcatccccgggcacacccctgagccccggctccctccgctccgctgcccatagccccctggacaccagcaagcagcccct

SEQ ID NO: 356344 - DNA, 60 bp, Homo sapiens
  chr20:61288557-61288617
  hypo
acctggatgagaacgtcaagtccagctgctcgcccgtctacattggtgagtggggctggc

SEQ ID NO: 356345 - DNA, 115 bp, Homo sapiens
  chr20:61330805-61330920
  hypo
cgcccagcctctggtgttgtgtgtcagcaccccgagtggaccgggacaggctcccaagtggactgagacaggctcccgagtggaccgggacaggctcccgagtggactggagaca

SEQ ID NO: 356346 - DNA, 166 bp, Homo sapiens; identical to SEQ ID NO: 344386
  chr20:61591490-61591656
  hypo

SEQ ID NO: 356347 - DNA, 192 bp, Homo sapiens; identical to SEQ ID NO: 352526
  chr20:61806216-61806408
  hypo

SEQ ID NO: 356348 - DNA, 123 bp, Homo sapiens; identical to SEQ ID NO: 346245
  chr20:61838301-61838424
  hypo

SEQ ID NO: 356349 - DNA, 46 bp, Homo sapiens
  chr20:61974409-61974455
  hypo
ctaaaacccagtgcaaacccctgacaatcccactaccaggtgttcc

SEQ ID NO: 356350 - DNA, 31 bp, Homo sapiens
  chr20:61991069-61991100
  hypo
cagtggctcaggtgcaggcgggacaggagcc

SEQ ID NO: 356351 - DNA, 233 bp, Homo sapiens; identical to SEQ ID NO: 220227
  chr20:62031374-62031607
  hypo

SEQ ID NO: 356352 - DNA, 179 bp, Homo sapiens
  chr20:62197207-62197386
  hypo
cgcctgctcctcggccaggtcccctactggctctggggcagcctcccagttccccgctgccccagcctgtgtgcctcggggaggccagcgccgtctctgcgccacaccctgctcgacctgctccatggacaggccctcggggcagacactgtgccgctccacgcactcacggatgaagc

SEQ ID NO: 356353 - DNA, 336 bp, Homo sapiens
  chr20:62197416-62197752
  hypo
agcagagggccacggcgtcccccactaccaccagctgggactgggcgcgggtcaggacggtgttgagcacgcgggcgtcggtgaagaactcaggggccagtgccccagggctgagcaggctctggcaggtgtgcacagtgctgagcaccacgacccggaactgccgccctgcagggggcacgcagtcaggtcaggctgggtgcgcaagacggtgggaccagccccacccctgccgatgccaggctgaggagtgggccgagccacccggggtatcctggggcagctggcagcacctggccccgctggtcacccacctggcaggatctcaaaactgcc

SEQ ID NO: 356354 - DNA, 227 bp, Homo sapiens; identical to SEQ ID NO: 344409
  chr20:62242319-62242546
  hypo

SEQ ID NO: 356355 - DNA, 357 bp, Homo sapiens; identical to SEQ ID NO: 344411
  chr20:62252093-62252450
  hypo

SEQ ID NO: 356356 - DNA, 390 bp, Homo sapiens; identical to SEQ ID NO: 347694
  chr20:62273399-62273789
  hypo

SEQ ID NO: 356357 - DNA, 103 bp, Homo sapiens; identical to SEQ ID NO: 344414
  chr20:62310122-62310225
  hypo

SEQ ID NO: 356358 - DNA, 161 bp, Homo sapiens
  chr20:62314955-62315116
  hypo
cggcttctccgcatttctgtgaatgattccggcttcttggtgttcccagcagaactccctcaagtctgcggcggggctctgacggcggtggcttggctgacatggccacattgctgagcctgttgggggctttgcgttcctgttctggccgtttttggctc

SEQ ID NO: 356359 - DNA, 269 bp, Homo sapiens
  chr20:62322022-62322291
  hypo
ccccaatagcagggaggacacccacaggcaggaccccaagtgctgggactctcccccaagaggggctttgccacaggcagggaccccagctggggccccccgtgggcttcactgcgcactcgggtgcccctgcagggtcaccagctgccggggaccccgagagtagcctgtgtgtggagtatgagcaggagccagttcctgcccggcagaggcccagggggctgctggccgccctggagcacagcgaacagcgggcggggagccctggc

SEQ ID NO: 356360 - DNA, 264 bp, Homo sapiens; identical to SEQ ID NO: 352532
  chr20:62461639-62461903
  hypo

SEQ ID NO: 356361 - DNA, 345 bp, Homo sapiens; identical to SEQ ID NO: 345646
  chr20:62495236-62495581
  hypo

SEQ ID NO: 356362 - DNA, 507 bp, Homo sapiens; identical to SEQ ID NO: 344425
  chr20:62550652-62551159
  hypo

SEQ ID NO: 356363 - DNA, 284 bp, Homo sapiens; identical to SEQ ID NO: 344428
  chr20:62578699-62578983
  hypo

SEQ ID NO: 356364 - DNA, 98 bp, Homo sapiens; identical to SEQ ID NO: 344429
  chr20:62581888-62581986
  hypo

SEQ ID NO: 356365 - DNA, 142 bp, Homo sapiens; identical to SEQ ID NO: 344431
  chr20:62630932-62631074
  hypo

SEQ ID NO: 356366 - DNA, 251 bp, Homo sapiens; identical to SEQ ID NO: 205918
  chr20:62694767-62695018
  hypo

SEQ ID NO: 356367 - DNA, 197 bp, Homo sapiens; identical to SEQ ID NO: 352536
  chr20:62695048-62695245
  hypo

SEQ ID NO: 356368 - DNA, 204 bp, Homo sapiens
  chr20:62868769-62868973
  hypo
ggctctttgcccacccaacccaaacattcgtcttggggacagtgaggcatccgtcggcactcatcaaggttgctgtcagggctgagctgacggacagcgcagtggctggcacacaggcacacttaggacgtgctggccgctcacaatgcggagtccgtgaagtcacactgtgagtgccagtgggccgccggagctggttgtccc

SEQ ID NO: 356369 - DNA, 56 bp, Homo sapiens; identical to SEQ ID NO: 220292
  chr21:19274772-19274828
  hypo

SEQ ID NO: 356370 - DNA, 122 bp, Homo sapiens; identical to SEQ ID NO: 205931
  chr21:27011487-27011609
  hypo

SEQ ID NO: 356371 - DNA, 133 bp, Homo sapiens; identical to SEQ ID NO: 205932
  chr21:27011639-27011772
  hypo

SEQ ID NO: 356372 - DNA, 55 bp, Homo sapiens; identical to SEQ ID NO: 344444
  chr21:30294975-30295030
  hypo

SEQ ID NO: 356373 - DNA, 108 bp, Homo sapiens
  chr21:33954435-33954543
  hypo
aagcccacatctttatggggacgctatttttacataacgcaaacggtacaaaaacataaatgcgcttttggtaccagagtgtgcgattcttgccccgcgtgtggggac

SEQ ID NO: 356374 - DNA, 53 bp, Homo sapiens; identical to SEQ ID NO: 344452
  chr21:34033597-34033650
  hypo

SEQ ID NO: 356375 - DNA, 255 bp, Homo sapiens; identical to SEQ ID NO: 344458
  chr21:35258647-35258902
  hypo

SEQ ID NO: 356376 - DNA, 42 bp, Homo sapiens; identical to SEQ ID NO: 344459
  chr21:35286360-35286402
  hypo

SEQ ID NO: 356377 - DNA, 176 bp, Homo sapiens; identical to SEQ ID NO: 344463
  chr21:36437239-36437415
  hypo

SEQ ID NO: 356378 - DNA, 246 bp, Homo sapiens; identical to SEQ ID NO: 344466
  chr21:37582287-37582533
  hypo

SEQ ID NO: 356379 - DNA, 48 bp, Homo sapiens; identical to SEQ ID NO: 344468
  chr21:37718564-37718612
  hypo

SEQ ID NO: 356380 - DNA, 42 bp, Homo sapiens; identical to SEQ ID NO: 349055
  chr21:37775172-37775214
  hypo

SEQ ID NO: 356381 - DNA, 78 bp, Homo sapiens
  chr21:38918381-38918459
  hypo
cgtggatatgatgagcggttatgcgggctctgcttcttgccacctacttgcaggttgaaggatgtgcctattccacat

SEQ ID NO: 356382 - DNA, 169 bp, Homo sapiens
  chr21:38918561-38918730
  hypo
tactcacactctatacacctggattgagatcacagtattattattttcacaatcgaactgagcaaagatacggcagccactgaagactcactgtgaggtgcgtctaagggagaaaccatgggctgttgccgaagatctgggagaaaaagtgtggaaaaggcaaaaccgc

SEQ ID NO: 356383 - DNA, 289 bp, Homo sapiens; identical to SEQ ID NO: 352559
  chr21:39288415-39288704
  hypo

SEQ ID NO: 356384 - DNA, 279 bp, Homo sapiens; identical to SEQ ID NO: 206001
  chr21:39288901-39289180
  hypo

SEQ ID NO: 356385 - DNA, 749 bp, Homo sapiens; identical to SEQ ID NO: 344480
  chr21:40316188-40316937
  hypo

SEQ ID NO: 356386 - DNA, 51 bp, Homo sapiens; identical to SEQ ID NO: 344484
  chr21:40580603-40580654
  hypo

SEQ ID NO: 356387 - DNA, 238 bp, Homo sapiens; identical to SEQ ID NO: 344487
  chr21:42572234-42572472
  hypo

SEQ ID NO: 356388 - DNA, 151 bp, Homo sapiens; identical to SEQ ID NO: 344488
  chr21:42593821-42593972
  hypo

SEQ ID NO: 356389 - DNA, 90 bp, Homo sapiens
  chr21:42613666-42613756
  hypo
cgcgtggcgtctacactgggtgacccatgtctacactgtgagtcctaagcgggtgcccctctctgtcgccctcccgcagccatcaagttc

SEQ ID NO: 356390 - DNA, 82 bp, Homo sapiens
  chr21:42613819-42613901
  hypo
gatgtgtggagccggcttgcccgttgctggatctgggaccaacggaggtagtcttgtgggtatcttttagtcttaaaggggc

SEQ ID NO: 356391 - DNA, 146 bp, Homo sapiens; identical to SEQ ID NO: 346249
  chr21:42617817-42617963
  hypo

SEQ ID NO: 356392 - DNA, 92 bp, Homo sapiens; identical to SEQ ID NO: 346250
  chr21:42617995-42618087
  hypo

SEQ ID NO: 356393 - DNA, 211 bp, Homo sapiens; identical to SEQ ID NO: 344491
  chr21:42629074-42629285
  hypo

SEQ ID NO: 356394 - DNA, 824 bp, Homo sapiens
  chr21:43160967-43161791
  hypo
cgtggacccccggtctccgcaggcagccagctaggtcttgcttcgccgcaggagcgtggcggcggggccatggccgccctggaacttgaggctctgcaggttgatgtgggccccatgcctgagcagagtctccaccgtctgtgcgtgccggccctgggcggccaggtgcagcgcgctgagcccctgctcgtcgaacaggtcaatgacatcggcgctgaccaactcctccaccacctccgagtgcccgtgggcggcagccaggtgcagcgccgtctggttcaggggtccccgggccagcacatcggccttctcctcgacaagcagcttgacagtggccaggtgtccgttgcgggcagccaggtgcagagcggtgtagccgtctgaggtcatggcctccttgccagcgccccgatgcaggagcagcctggcagtgctcgtgtgccccgtctccgcggccacgtgcaggggtgtctgtgccagcaggctgcagacgttgacgtcggagcacaggtcgatgaggatgcgggccacgcggtagtgcccgcgctgtgcggccaggtgcaatggcgtcctcccatccagcgtctgggcgttcacactcacccccggctgcttggccagcagcttgacgatgggcaggtggccctgccaggcagcgtagtgcagtggcagccaggcatccttgccctgcaggctcacgtccacgcctcggcgcagcaggatgcgcacgatattctcctgcccgtgctggcaggccacgtgcatgggcgtccggccctcaaagtccacctcgttgaccgaggcgttcttctccaacagcagcc

SEQ ID NO: 356395 - DNA, 283 bp, Homo sapiens; identical to SEQ ID NO: 344495
  chr21:43161857-43162140
  hypo

SEQ ID NO: 356396 - DNA, 317 bp, Homo sapiens; identical to SEQ ID NO: 344496
  chr21:43162557-43162874
  hypo

SEQ ID NO: 356397 - DNA, 375 bp, Homo sapiens; identical to SEQ ID NO: 346251
  chr21:43239707-43240082
  hypo

SEQ ID NO: 356398 - DNA, 243 bp, Homo sapiens; identical to SEQ ID NO: 346252
  chr21:43240112-43240355
  hypo

SEQ ID NO: 356399 - DNA, 396 bp, Homo sapiens
  chr21:43547667-43548063
  hypo
cggagcctgtggaatctgcgagtgtcgtcagatgtagtcgtgagtaaactcatctgagaacaaggacagcggggctcgctgacaagcaaggagtcccatttcctctcttctcagctgccctgtgcccaacacatacaccaacgtgattgagaacggcaactccaataaggcccagttcaagctgaggatcttttcctttatcaacgactccatcgtctacctgcactgcaaactccgcgtctgcatggaatcccccggagccacgtgcaaaatcgtaagtgttttttggttttctaaacgtttggttggattcacgttccttattgttacggttcgaggctctgttaataaaaacctagggctcgagtggctcggggccaacctctgggaggagtc

SEQ ID NO: 356400 - DNA, 516 bp, Homo sapiens; identical to SEQ ID NO: 344507
  chr21:43791392-43791908
  hypo

SEQ ID NO: 356401 - DNA, 239 bp, Homo sapiens
  chr21:43991061-43991300
  hypo
cgcggagctgccgcgcccaccttgatggctgctgcgttacaccagaggcaggaccaggacctgactcctccaggctccactgcccatcagtgcctgctgcctgctcagtgaatggtcaccatggaaacggcgctcaggcctacccacccccaccaccacgccttggtcattgttccttccatgagtgagtgctgcccagcaagacaaagtacaggctccagtgggaaggccaccatgtc

SEQ ID NO: 356402 - DNA, 205 bp, Homo sapiens
  chr21:43991493-43991698
  hypo
ttctgtacatttcatgcagagcaattaaatagggcactgcatttttcttcaagttaatttttatttattaaagtaaaacataatgtaccttagaagctagacagtcctacaagcttattatgttgtacagcggcgttccgtccccctccccagccctctctttctagaggcagccaatttcagctgcctctctctgcttacctac

SEQ ID NO: 356403 - DNA, 114 bp, Homo sapiens
  chr21:44110034-44110148
  hypo
cgcggatgaggatacaggcgaagaagatggagacacacgcggatgaggatacaggtgaagaagatggagacacacgcggatgaggatacaggtgaagaaggtggagacagacgc

SEQ ID NO: 356404 - DNA, 467 bp, Homo sapiens
  chr21:44180227-44180694
  hypo
cgggtgccgtggtgtggcccgctggacgttctcagggtccctgtgtcacctcattggtacctgtggtaaacctggaacactgttgacctctggttgggatgagggtttggcagagaatgttcaaaccagcgcacagccttctgggtggctttgggaggagaggtgggcgggcccaggcacagggtgactcggaccccctgcctcccgcagttctgcgtccacgacaactacagaaacaaccccttccacaacttccggcactgcttctgcgtggcccagatgatgtacagcatggtctggctctgcagtctccaggtgggtcctgcccgctgcacacccagacctctactctcgggggtcagacggaggcccccttccagggagcggcagccccatcccaccaagagagccacaggcgtggggtccccagccgctccgcccctcctagggacgcacccctgcccacc

SEQ ID NO: 356405 - DNA, 119 bp, Homo sapiens; identical to SEQ ID NO: 346254
  chr21:44338552-44338671
  hypo

SEQ ID NO: 356406 - DNA, 209 bp, Homo sapiens; identical to SEQ ID NO: 344516
  chr21:44444714-44444923
  hypo

SEQ ID NO: 356407 - DNA, 330 bp, Homo sapiens; identical to SEQ ID NO: 344517
  chr21:44448081-44448411
  hypo

SEQ ID NO: 356408 - DNA, 165 bp, Homo sapiens; identical to SEQ ID NO: 328822
  chr21:44837213-44837378
  hypo

SEQ ID NO: 356409 - DNA, 33 bp, Homo sapiens; identical to SEQ ID NO: 352569
  chr21:44847478-44847511
  hypo

SEQ ID NO: 356410 - DNA, 703 bp, Homo sapiens; identical to SEQ ID NO: 344535
  chr21:45345807-45346510
  hypo

SEQ ID NO: 356411 - DNA, 100 bp, Homo sapiens
  chr21:45374905-45375005
  hypo
cgtgaatgtgcatcacggctctatctgtggcccccaaaggctgggtgccagctgcctgtcggcagggagcgtatcaccgtggcacgtccatgccgtgggg

SEQ ID NO: 356412 - DNA, 642 bp, Homo sapiens; identical to SEQ ID NO: 349066
  chr21:45400182-45400824
  hypo

SEQ ID NO: 356413 - DNA, 278 bp, Homo sapiens; identical to SEQ ID NO: 349067
  chr21:45400854-45401132
  hypo

SEQ ID NO: 356414 - DNA, 105 bp, Homo sapiens; identical to SEQ ID NO: 344539
  chr21:45499846-45499951
  hypo

SEQ ID NO: 356415 - DNA, 162 bp, Homo sapiens; identical to SEQ ID NO: 344541
  chr21:45513811-45513973
  hypo

SEQ ID NO: 356416 - DNA, 98 bp, Homo sapiens; identical to SEQ ID NO: 344545
  chr21:45617247-45617345
  hypo

SEQ ID NO: 356417 - DNA, 468 bp, Homo sapiens; identical to SEQ ID NO: 344553
  chr21:45941802-45942270
  hypo

SEQ ID NO: 356418 - DNA, 106 bp, Homo sapiens
  chr21:46277475-46277581
  hypo
cgcatgattcactgtttttaactacagttaatagctgtgccaccaccacaggtgacaccgtctcacctccaggggctgggagttgaacacttgctgcatgcctggg

SEQ ID NO: 356419 - DNA, 45 bp, Homo sapiens
  chr21:46277614-46277659
  hypo
ggctcccgcagcctcacccctctgctgccccggacgctgagatcc

SEQ ID NO: 356420 - DNA, 42 bp, Homo sapiens
  chr21:46311711-46311753
  hypo
cgcccgcctcacctgcagatgccgcactccaagaagcccttg

SEQ ID NO: 356421 - DNA, 160 bp, Homo sapiens
  chr21:46316870-46317030
  hypo
cgtcatggccacctacagatgggacacagggctgtgacatcctgaccagcaggtggtctctgtggatgtccggccccagccctgccctgcgctgacccactgtcccggcagcctgaccagctctgggtgcccactcggagggtcccccagacacctgccc

SEQ ID NO: 356422 - DNA, 175 bp, Homo sapiens
  chr21:46317252-46317427
  hypo
agcctaagcagcagggcaggggctgtgaggctgcccagctgggcagagccccaggcagggggaagagggggccctggtttcctgcgtgccattttgaagaagatggcggtgatggccctggaatggccagcaggtcggtcactgtccggatgaggataatcgggccctttagggc

SEQ ID NO: 356423 - DNA, 60 bp, Homo sapiens
  chr21:46319505-46319565
  hypo
ttgtatctctaaagtcctttgcggcccccagagcctacaacgtcaggctgcaagagcgtc

SEQ ID NO: 356424 - DNA, 422 bp, Homo sapiens; identical to SEQ ID NO: 344570
  chr21:46326574-46326996
  hypo

SEQ ID NO: 356425 - DNA, 34 bp, Homo sapiens; identical to SEQ ID NO: 352572
  chr21:46351619-46351653
  hypo

SEQ ID NO: 356426 - DNA, 323 bp, Homo sapiens; identical to SEQ ID NO: 352573
  chr21:46352279-46352602
  hypo

SEQ ID NO: 356427 - DNA, 278 bp, Homo sapiens
  chr21:46397986-46398264
  hypo
cgccaaggatgcctggcgagtgggtggccgaggcaagttggagcctgtgtccctgctgttcagtgtcctggcccttccctgacacgagcagacacggcatccacagagacagcccggacaccctccaaggccccggccgatgggacagacgggcgtacaggagccataggcagcagatcccacgctccctcggccggggccagcttggctgcccagccccagctccttagagaacgggcttctcgcttcagaggagctggtcacaaaccagtggtcgc

SEQ ID NO: 356428 - DNA, 184 bp, Homo sapiens; identical to SEQ ID NO: 344580
  chr21:46799934-46800118
  hypo

SEQ ID NO: 356429 - DNA, 571 bp, Homo sapiens
  chr21:46801817-46802388
  hypo
cggagtcctgtccaggccgaaaggtggtgggtgggtgctttaggggccagtggggagcgaggccgaagctatctctgtgcagctgccccctcacgctgctgtggccccagggtttggttcagatgctgagtgtccggtgacttccagacacttcctttccagtctcagggaacccaccccacaaagcgcctgccccaggacctgggtggcgcgtctgtgtcttctcagcatatccggttcttggagcagggagacgacccagatcctgctctctggctcctggcccgctgcccccaagctgtcaccaaggcaggtcatggatgttccgtgtcatggctgcgtgggccgttcgaccacggccacacacgcatagactgaggaagacagagcaaggggctgatcgctgccaagcagtggatgccagtgcaccgtgacaaggagcccagagcctttggtgggcgcctgactgtgtcttcaagttcccgggatctgtgtggacagctgccatcccagtcggccctttcttggttttcttggttttcagagaaggggcgaagaataagggggcagc

SEQ ID NO: 356430 - DNA, 177 bp, Homo sapiens; identical to SEQ ID NO: 344584
  chr21:46802668-46802845
  hypo

SEQ ID NO: 356431 - DNA, 140 bp, Homo sapiens
  chr21:46808694-46808834
  hypo
cgcagggcgaggtcgggggaatggactcccctgggtttctccctgccgatcgctgtagtggttgagtcctccactgagcacagccactcctgtaggcttaccccgctgcagctcgctctcggatcctaataaacaagtga

SEQ ID NO: 356432 - DNA, 339 bp, Homo sapiens; identical to SEQ ID NO: 344587
  chr21:46811012-46811351
  hypo

SEQ ID NO: 356433 - DNA, 333 bp, Homo sapiens; identical to SEQ ID NO: 346256
  chr21:46811998-46812331
  hypo

SEQ ID NO: 356434 - DNA, 81 bp, Homo sapiens; identical to SEQ ID NO: 346257
  chr21:46812995-46813076
  hypo

SEQ ID NO: 356435 - DNA, 192 bp, Homo sapiens; identical to SEQ ID NO: 346258
  chr21:46813106-46813298
  hypo

SEQ ID NO: 356436 - DNA, 391 bp, Homo sapiens; identical to SEQ ID NO: 344591
  chr21:46834432-46834823
  hypo

SEQ ID NO: 356437 - DNA, 499 bp, Homo sapiens; identical to SEQ ID NO: 344592
  chr21:46835379-46835878
  hypo

SEQ ID NO: 356438 - DNA, 261 bp, Homo sapiens; identical to SEQ ID NO: 346259
  chr21:46839249-46839510
  hypo

SEQ ID NO: 356439 - DNA, 139 bp, Homo sapiens
  chr21:46842404-46842543
  hypo
cggggcctttgcgtggctgcctggcctgacgcacctcgcgccgtgccaggacccgggcagggcagcaaaaggcatctgtgagtcgccgtcctgtgcgggtctcagggcacagtgggtggcacgggctctcccagccgtc

SEQ ID NO: 356440 - DNA, 324 bp, Homo sapiens; identical to SEQ ID NO: 349077
  chr21:46844304-46844628
  hypo

SEQ ID NO: 356441 - DNA, 448 bp, Homo sapiens; identical to SEQ ID NO: 220526
  chr21:46844763-46845211
  hypo

SEQ ID NO: 356442 - DNA, 670 bp, Homo sapiens; identical to SEQ ID NO: 344602
  chr21:46849594-46850264
  hypo

SEQ ID NO: 356443 - DNA, 786 bp, Homo sapiens; identical to SEQ ID NO: 344603
  chr21:46861383-46862169
  hypo

SEQ ID NO: 356444 - DNA, 107 bp, Homo sapiens
  chr21:46862420-46862527
  hypo
cgtagtctctgtcgccgggtagtagcagggccggaccccttcggatgagcacgcccaggcccaagagtggcagtcctggtgtgggcggtggtgctggtgtgggcggc

SEQ ID NO: 356445 - DNA, 54 bp, Homo sapiens; identical to SEQ ID NO: 346261
  chr21:46864076-46864130
  hypo

SEQ ID NO: 356446 - DNA, 297 bp, Homo sapiens; identical to SEQ ID NO: 344607
  chr21:46870768-46871065
  hypo

SEQ ID NO: 356447 - DNA, 274 bp, Homo sapiens; identical to SEQ ID NO: 344609
  chr21:46886377-46886651
  hypo

SEQ ID NO: 356448 - DNA, 222 bp, Homo sapiens; identical to SEQ ID NO: 344610
  chr21:46893658-46893880
  hypo

SEQ ID NO: 356449 - DNA, 277 bp, Homo sapiens; identical to SEQ ID NO: 346263
  chr21:46894494-46894771
  hypo

SEQ ID NO: 356450 - DNA, 257 bp, Homo sapiens; identical to SEQ ID NO: 220538
  chr21:46894910-46895167
  hypo

SEQ ID NO: 356451 - DNA, 215 bp, Homo sapiens; identical to SEQ ID NO: 220539
  chr21:46895491-46895706
  hypo

SEQ ID NO: 356452 - DNA, 575 bp, Homo sapiens; identical to SEQ ID NO: 346266
  chr21:46895736-46896311
  hypo

SEQ ID NO: 356453 - DNA, 866 bp, Homo sapiens; identical to SEQ ID NO: 344612
  chr21:46900291-46901157
  hypo

SEQ ID NO: 356454 - DNA, 251 bp, Homo sapiens
  chr21:46901458-46901709
  hypo
cgatgggcattcaccgtcaccatcggctctgaggcctctctgggtgccgcatggcaagtgctccccagaatccattctgaggggaatttgggcttaaagaacatgcctaatccatattcacgcatgtggccagactgcctctcagagggagcagcggctaccccagccctggtgtgcaagcatcttcccgccgtggtgctgtcggctctgccatctcatcctgccaatgtggccgcgaaactgcgggctac

SEQ ID NO: 356455 - DNA, 1234 bp, Homo sapiens; identical to SEQ ID NO: 344614
  chr21:46906455-46907689
  hypo

SEQ ID NO: 356456 - DNA, 616 bp, Homo sapiens; identical to SEQ ID NO: 344616
  chr21:46911022-46911638
  hypo

SEQ ID NO: 356457 - DNA, 755 bp, Homo sapiens; identical to SEQ ID NO: 220545
  chr21:46912528-46913283
  hypo

SEQ ID NO: 356458 - DNA, 319 bp, Homo sapiens; identical to SEQ ID NO: 346270
  chr21:46913360-46913679
  hypo

SEQ ID NO: 356459 - DNA, 469 bp, Homo sapiens
  chr21:46914465-46914934
  hypo
cgggcttccgaggacccccggtaagtcggtccctggctttctctgcactgagctcgggcatgacggcccccaaggacacggtcgcccgcggctgctgagcttgtgctgtgcggcccagggctcatctccctagtgcagttttaaagcgtgtggggcaggtgtcggcgtgaggctgcagtgggctcctccgagctgatgggtggcccagggtgctgtgctctgcatggcccctccccttccccaggaccccccaactcgtggtcaagggccagggtctgccccactaagcctggcccccttcctcttgcagggtccatacggacggccggggtacaagggagagattggctttcctggacggccggtgaggacctggggtctccagtgggggcggcagatggggtctggcaggtggggagcagcccaggcccacgggggtgacatgcccagaggggagtggacggccgcc

SEQ ID NO: 356460 - DNA, 395 bp, Homo sapiens; identical to SEQ ID NO: 344619
  chr21:46918218-46918613
  hypo

SEQ ID NO: 356461 - DNA, 390 bp, Homo sapiens; identical to SEQ ID NO: 346272
  chr21:46935349-46935739
  hypo

SEQ ID NO: 356462 - DNA, 55 bp, Homo sapiens; identical to SEQ ID NO: 352575
  chr21:47062898-47062953
  hypo

SEQ ID NO: 356463 - DNA, 142 bp, Homo sapiens; identical to SEQ ID NO: 345651
  chr21:47063290-47063432
  hypo

SEQ ID NO: 356464 - DNA, 539 bp, Homo sapiens; identical to SEQ ID NO: 344631
  chr21:47369859-47370398
  hypo

SEQ ID NO: 356465 - DNA, 504 bp, Homo sapiens
  chr21:47413791-47414295
  hypo
cgggtccacggagcttgctggagaagcagggatgcacgcagggacgcctctggggccccaggaggagctgccggcctcctgaatgaagatagccatagccagccacgccgatggccacgcacgtgggccgaggaaacgcttggcgaggccaggaaggggctgtgcggggagggaaggccggaacagcccagtgaccacctggacagcatgctgtggctcccagcgtgcccgggcagccatcctccccaaggatggcccagctccacactcacggctcgtttctcttcagggtgaagctggcccgcagggtgatcagggaagagaaggccccgttggtgtccctggagacccggtaggaagcgctgtggggttggggggcgttggccaatttgggttttgggggtagaagtgctccagcagctcacgcactgggggtctgttcatttccgtttgagggcctctgtgtttccgtagatctcgggggtgtccctgcgtgggagccgg

SEQ ID NO: 356466 - DNA, 44 bp, Homo sapiens
  chr21:47414327-47414371
  hypo
tggtgtggattgttgagagcaggcccagcgcccgggggcctgac

SEQ ID NO: 356467 - DNA, 384 bp, Homo sapiens; identical to SEQ ID NO: 349095
  chr21:47602705-47603089
  hypo

SEQ ID NO: 356468 - DNA, 276 bp, Homo sapiens; identical to SEQ ID NO: 344643
  chr21:47640150-47640426
  hypo

SEQ ID NO: 356469 - DNA, 67 bp, Homo sapiens; identical to SEQ ID NO: 346274
  chr21:47689571-47689638
  hypo

SEQ ID NO: 356470 - DNA, 129 bp, Homo sapiens; identical to SEQ ID NO: 346275
  chr21:47689700-47689829
  hypo

SEQ ID NO: 356471 - DNA, 188 bp, Homo sapiens
  chr21:47799620-47799808
  hypo
cgagtctgctgccgaacccctctctagtgaatttttttttctgtgattgtatttttcagctccagatgtcaagggagctctatttcagtctttctctctgctgagggccctgcgtgcattgtgccctcagggctctggcgggcggtggacagcctggccctggccttcacccctgctgtgccaagcca

SEQ ID NO: 356472 - DNA, 731 bp, Homo sapiens; identical to SEQ ID NO: 344649
  chr21:47832850-47833581
  hypo

SEQ ID NO: 356473 - DNA, 67 bp, Homo sapiens
  chr21:47918529-47918596
  hypo
cggcgacccgggcgactcacctccactccgctccagagccattccagcgtcgagccctggctcgacc

SEQ ID NO: 356474 - DNA, 106 bp, Homo sapiens; identical to SEQ ID NO: 344655
  chr22:18084157-18084263
  hypo

SEQ ID NO: 356475 - DNA, 118 bp, Homo sapiens
  chr22:18265358-18265476
  hypo
cgatctgaccccgtggcatccttcctttcctacaaactgcactgagacccaggtgtcatcgtgaagttcatgccagccagaggagccactgtggcgtttccggccataggcctgggca

SEQ ID NO: 356476 - DNA, 196 bp, Homo sapiens
  chr22:18265523-18265719
  hypo
ggaagagatgcctgtatgggaccaactcaggcagccacagagggatggcccagcaccccacaaaacccaaagtgctcagcgtctaggatctgtttacggggcagagaagtggatgttcttttcctggttcaaaggtagaaacaggcttggagagccgcacccggcatcagccagccaggcagacgcctggtctagc

SEQ ID NO: 356477 - DNA, 44 bp, Homo sapiens
  chr22:18328049-18328093
  hypo
cgaaacttgggaaggaaaacatccaagaggcgtctgtttgacgt

SEQ ID NO: 356478 - DNA, 537 bp, Homo sapiens
  chr22:18340868-18341405
  hypo
gagagtcccatccacctggaggcccgcatcccctcccgggcaatgaaacgtgtttctgcgtacaagcctaccaccccctcccgccaaggtaagcggtgaggagacaaggagcaattataaagaaagaggtgttggcagccaacagggtgctgagaattccgggcggtggtgagaggagcccacagtgccatgacctgacctgggcaggagtgccaatgggcctcaccaccccttgtttcattatgactaatctacttgctggcacttgtgaggcgcttggctgggtgagctgcaaggtaagggctggtttttgagtctaaaggaggtttcagggcttcgtgaaaggggctggaattcggaaagacttctcctgaaatctctgcctggctgctgccgttcagagctccacatgggtgtttttatctcggggagcacttgtgggaccgggtcctatacggcatcatcctgccctattttttagcatgaaaataagagtggcccattttcacagccgctctccttccatgtgtgtgccac

SEQ ID NO: 356479 - DNA, 289 bp, Homo sapiens
  chr22:18348544-18348833
  hypo
cggactgccactgcatttcgggccctccccgttcccaggagaggcaaggacgcaggggcatttgcaggttggccgcccccggcccatagccacactgctgcaacacccactgcttctcccccacttacaggagagtcaccattacctttccagacaggggagccactgccggtctcttcctttgtgcgtagccagagagtcgatagcagtagtgtggcttacagtagaatttacctgcagacagcaagaggcagggacagaggcgatgagccaggcacggatcctgaac

SEQ ID NO: 356480 - DNA, 542 bp, Homo sapiens; identical to SEQ ID NO: 344661
  chr22:18443260-18443802
  hypo

SEQ ID NO: 356481 - DNA, 129 bp, Homo sapiens; identical to SEQ ID NO: 352578
  chr22:19706042-19706171
  hypo

SEQ ID NO: 356482 - DNA, 175 bp, Homo sapiens
  chr22:19771495-19771670
  hypo
cgaggagaggcaggcctgggggaccgtgcagcagctgtgcccacctaggaccacagggctggtggggctggcagcttggtagagggcaggtgcacagcaaagttttcaccggtgccggcttgttgtcttccacgctgggatttcacatgaagttctagctaattgagtataagca

SEQ ID NO: 356483 - DNA, 218 bp, Homo sapiens
  chr22:19771889-19772107
  hypo
gcatcggctgacccctcggtgtctacgtgccaagcccaatctgcctgcagggacacccactgccagaggcggaggcaggttctcctggtcccagacccagggccgtctgttggcctgcaggtaacacgcagggaggaaggaaaaggctctaggcacagctgcttgtctaagagggaccctgttggcggcgcaacgctgggtgagtgctgcccgcccgc

SEQ ID NO: 356484 - DNA, 88 bp, Homo sapiens; identical to SEQ ID NO: 344669
  chr22:19924393-19924481
  hypo

SEQ ID NO: 356485 - DNA, 388 bp, Homo sapiens; identical to SEQ ID NO: 344671
  chr22:19968748-19969136
  hypo

SEQ ID NO: 356486 - DNA, 118 bp, Homo sapiens
  chr22:20228961-20229079
  hypo
cgtcgtccgatatttttacacaagtaaaataaaatgcatatctctatataccgcgatctgggtgggaggcggcgttctggaacaaacgctgccgccgaaccctgtaaacatgatgggg

SEQ ID NO: 356487 - DNA, 155 bp, Homo sapiens
  chr22:20229239-20229394
  hypo
gggcccaagcactgtccacagcaccagcgccaggcccaggggggtgaggctgcaggtgaggctgggtagggcacctgagccttctgagtcaccagtcccgccacccccgctgcctgcctggcccagacggcagtggctgcgggtgcggttcttgc

SEQ ID NO: 356488 - DNA, 210 bp, Homo sapiens
  chr22:20929364-20929574
  hypo
cgatcaccttgtctgttgtccctctgtcctcaaagatgatcacggaagccttggcccaaggtgggatgcacataagagcccggttcccgcctaccaccgctgtgtccgccatcccgtcaagctccatccctttgggcagacagcccatggcacaggtatttacggggcagcgcccagggcacggctgggagctcggggcgtcctctgagc

SEQ ID NO: 356489 - DNA, 201 bp, Homo sapiens; identical to SEQ ID NO: 344679
  chr22:21977477-21977678
  hypo

SEQ ID NO: 356490 - DNA, 46 bp, Homo sapiens
  chr22:21983041-21983087
  hypo
cgcaagtgctcaggcccacgaaggcgtctgtccacctgtggggggc

SEQ ID NO: 356491 - DNA, 66 bp, Homo sapiens; identical to SEQ ID NO: 344682
  chr22:22029114-22029180
  hypo

SEQ ID NO: 356492 - DNA, 212 bp, Homo sapiens
  chr22:22036173-22036385
  hypo
atggcgggaaagccgacctttgcgccgttgtcaatcctgcacctggacgtttgtggggtgtaggtggccagcgctgctccaggggccttgggagccacttcttgccagaagcctgcacaaactggcatggtcagtcctcgttagtggagtgagggctctgctagaccgcaccgcaggagtgcaggcatcttgtgtgcacagcccctgcccac

SEQ ID NO: 356493 - DNA, 97 bp, Homo sapiens
  chr22:22057979-22058076
  hypo
cgcgtttcagaaactcccggcggggggatggtgggttctttcaggacccctaaagacccaggtgattctacacagggcactgtgtaggtgccatcca

SEQ ID NO: 356494 - DNA, 192 bp, Homo sapiens; identical to SEQ ID NO: 344688
  chr22:22324565-22324757
  hypo

SEQ ID NO: 356495 - DNA, 136 bp, Homo sapiens; identical to SEQ ID NO: 345653
  chr22:22862472-22862608
  hypo

SEQ ID NO: 356496 - DNA, 134 bp, Homo sapiens; identical to SEQ ID NO: 349101
  chr22:22899978-22900112
  hypo

SEQ ID NO: 356497 - DNA, 116 bp, Homo sapiens
  chr22:23437460-23437576
  hypo
cggaggcggggggctgcagggagcacaccagcgaccggccctccaaccctccagccactcagcaacatcgccacagcaaccagcaaccagacggcagcagccgaggcaaacacaag

SEQ ID NO: 356498 - DNA, 74 bp, Homo sapiens
  chr22:23437631-23437705
  hypo
ctttgccaactagggaggtggagtgtcactagtggggaggggcggccaccgcccgctgcacagagcgccatgcc

SEQ ID NO: 356499 - DNA, 151 bp, Homo sapiens
  chr22:24179789-24179940
  hypo
cgtgtcctgaggggagtggccagcctggggcggactagatgtaccgggaggctcacccagcaggtccacgaggatggagttgcccagcagcagcgagaagcccatgagcgcccaaggcaggaacggtgcctggaaagtgagcaggccgaag

SEQ ID NO: 356500 - DNA, 226 bp, Homo sapiens
  chr22:24179982-24180208
  hypo
accagcatggccatgagggcctggcccaggaagaacaggctgcccaggagtcccagcagctgggccagagtcaaggtgctccggtgcaggcctcagcccaagcccagggcccctctgacttcccaagaccctggaattcttcccctcatctcccctatgtgctattccctcatcaagatgagccagtccaataaaggcgacacactccacgggcttcaggtcccac

SEQ ID NO: 356501 - DNA, 187 bp, Homo sapiens; identical to SEQ ID NO: 295268
  chr22:24552924-24553111
  hypo

SEQ ID NO: 356502 - DNA, 173 bp, Homo sapiens; identical to SEQ ID NO: 295271
  chr22:24819901-24820074
  hypo

SEQ ID NO: 356503 - DNA, 61 bp, Homo sapiens; identical to SEQ ID NO: 295272
  chr22:24820486-24820547
  hypo

SEQ ID NO: 356504 - DNA, 240 bp, Homo sapiens; identical to SEQ ID NO: 345654
  chr22:25348202-25348442
  hypo

SEQ ID NO: 356505 - DNA, 787 bp, Homo sapiens; identical to SEQ ID NO: 206075
  chr22:25348485-25349272
  hypo

SEQ ID NO: 356506 - DNA, 395 bp, Homo sapiens; identical to SEQ ID NO: 352589
  chr22:25349348-25349743
  hypo

SEQ ID NO: 356507 - DNA, 305 bp, Homo sapiens; identical to SEQ ID NO: 344700
  chr22:25561932-25562237
  hypo

SEQ ID NO: 356508 - DNA, 122 bp, Homo sapiens; identical to SEQ ID NO: 344701
  chr22:25570292-25570414
  hypo

SEQ ID NO: 356509 - DNA, 352 bp, Homo sapiens; identical to SEQ ID NO: 344702
  chr22:25602982-25603334
  hypo

SEQ ID NO: 356510 - DNA, 251 bp, Homo sapiens; identical to SEQ ID NO: 349106
  chr22:27007869-27008120
  hypo

SEQ ID NO: 356511 - DNA, 88 bp, Homo sapiens
  chr22:27019127-27019215
  hypo
cgagcccccaacctctcacccttcacgggactctgatgcggatctccaccttttttttttcctggcacagatggtggtgtgggatgag

SEQ ID NO: 356512 - DNA, 299 bp, Homo sapiens; identical to SEQ ID NO: 352596
  chr22:27068622-27068921
  hypo

SEQ ID NO: 356513 - DNA, 63 bp, Homo sapiens; identical to SEQ ID NO: 295312
  chr22:29075343-29075406
  hypo

SEQ ID NO: 356514 - DNA, 67 bp, Homo sapiens; identical to SEQ ID NO: 344712
  chr22:29076607-29076674
  hypo

SEQ ID NO: 356515 - DNA, 86 bp, Homo sapiens; identical to SEQ ID NO: 344714
  chr22:29587127-29587213
  hypo

SEQ ID NO: 356516 - DNA, 139 bp, Homo sapiens; identical to SEQ ID NO: 344715
  chr22:29686357-29686496
  hypo

SEQ ID NO: 356517 - DNA, 120 bp, Homo sapiens; identical to SEQ ID NO: 344717
  chr22:29758124-29758244
  hypo

SEQ ID NO: 356518 - DNA, 79 bp, Homo sapiens
  chr22:30084279-30084358
  hypo
cggcccctcggcactgaagatgtgtttcagtgcagctctcctcggcaccggattcgttgctgcaacagtgggagggaag

SEQ ID NO: 356519 - DNA, 120 bp, Homo sapiens
  chr22:30084388-30084508
  hypo
aggttctgttctcatgatccttgctgtgatttctcttttgatgttggcaattttaaaatgacatcagtctatctggacctttttcctaaggctcttgctcagaccactcagtagatagcc

SEQ ID NO: 356520 - DNA, 457 bp, Homo sapiens
  chr22:30090282-30090739
  hypo
cgtcaccttaccccagccatgttgccagggcatgaggactaagatgcttgccctgccaagcccggaggggatgagcagcctcagctggtgccgccacagacagcacaccacagaggtggctcagggaccttggtagatgggaatgtgagaatctattaaaataggcagggatctccggtcctctgtcaagaggcaatgctgacggctttttcctgctggcgtgcctctgcccaccagccttccccttgcacatcctcatttgtcacctcctaatttgaattattgggcaaatctggccgcttatttgggactgacagccaacttcttgagcatctatttgaacagccttccctttcgctcccagccacctttgaggtgagtccaagtggcaggacaggaccctgtgtgacagagcggaggtcttgtgccctctcagcttcttctctgctttcttaca

SEQ ID NO: 356521 - DNA, 74 bp, Homo sapiens
  chr22:30090769-30090843
  hypo
ggccttctttgaagagctctagcaggtgacccagccaccccaggacctgccacttctcctgctaccgggaccgc

SEQ ID NO: 356522 - DNA, 254 bp, Homo sapiens; identical to SEQ ID NO: 344724
  chr22:30190745-30190999
  hypo

SEQ ID NO: 356523 - DNA, 688 bp, Homo sapiens; identical to SEQ ID NO: 344731
  chr22:31266269-31266957
  hypo

SEQ ID NO: 356524 - DNA, 425 bp, Homo sapiens; identical to SEQ ID NO: 344735
  chr22:31487263-31487688
  hypo

SEQ ID NO: 356525 - DNA, 345 bp, Homo sapiens
  chr22:31489493-31489838
  hypo
cgggcactggaggagctgcgggcggtggctgaagcaggccgggtggcagtgacccaggcagccgaggtagctgtagccaccgtggagccggtggcccgggcagctgaagagctgcgggcagagagagcagcactgagccggcggctggatgcactgagcaggcaggtggaggtgctgagcctacggctgggggtcccacttgtgtccggccttgagcctgagctggagcccagcgagctgctcctggctgccgccgaccccgaggccctctttcaggctgccgaggatgccgggacccccgtggcccacccacctgccttcagcacccgccgccgctcctccacc

SEQ ID NO: 356526 - DNA, 96 bp, Homo sapiens
  chr22:31495078-31495174
  hypo
cgatccaccagcttcggggtccccaacgccaacagcatcaagcagatgctgctggactggtgtcgagccaagactcgcggctacgaggtgagcccc

SEQ ID NO: 356527 - DNA, 365 bp, Homo sapiens
  chr22:32078028-32078393
  hypo
cgcagatcttaatgtacatggcattgattatgagacggaattccagcctggagacggagcgacggccgtgcattcattggctgcaccgcggccttggatctgctgctcccgtcctgtacgctccctgctgctcttggctcagtgggcaaggaaggagccacgggggaggtctcacgcccagatagtgggatctggaatggacctcaggttggctctggagcccgtgccaaagaccctttcaggcaaaattgtgacaaagtatcatgattttcacagctcttgaggagcgctgagttttgggattcacagcatgggtttctgggctcctcaggctccgaataaggcaaacgctacatgtcttcacc

SEQ ID NO: 356528 - DNA, 389 bp, Homo sapiens; identical to SEQ ID NO: 344743
  chr22:32665378-32665767
  hypo

SEQ ID NO: 356529 - DNA, 102 bp, Homo sapiens; identical to SEQ ID NO: 344747
  chr22:35821646-35821748
  hypo

SEQ ID NO: 356530 - DNA, 269 bp, Homo sapiens
  chr22:35848670-35848939
  hypo
tcctggttagccctgtgtgtgagtttgtgttaaataatcagtccgactcctccgctggggtggtggtgccagtgtggccagttcttgtgcaaatagaacattttcaagatagttctgccacttgtacagcactctacgtgctgtagagttcagccctgagagagagggacaggatcctgtgtgtcccgtccgccttgcatgtgggtctcaccagcggcttccttcatgtcactctggagcactctcacccaccccgagaggaaagtgcc

SEQ ID NO: 356531 - DNA, 127 bp, Homo sapiens; identical to SEQ ID NO: 344749
  chr22:36519474-36519601
  hypo

SEQ ID NO: 356532 - DNA, 96 bp, Homo sapiens; identical to SEQ ID NO: 346280
  chr22:36902565-36902661
  hypo

SEQ ID NO: 356533 - DNA, 800 bp, Homo sapiens
  chr22:38379141-38379941
  hypo
cgccgccccgtagggagacccggcctaggccgctggagttccgagttccagggtccttgtgatggaagggcgggcgcggcccccacacctggtcttccagccctatccaaggaggactgccagacagtcccgctctgaggtgcaggaggccgggccgcctcggctaccctgaatccacccgaagctagagggcccgagcccggggggcggtcgggtgctcacctccagagcttgcccagcgtcttgctgagctcagcgttgtgcaggtgcgggtactggtccgcgagcttcctgcgcgctgcctgagcccacaccatgaaggcgttcatgggccgcttgacgtgcggcttgcttttgctggcgccgttgacgcgcacgggcatgggcaccagcgtccagtcgtagccgctgagcacctggctgacggcctcgcggatgcacacggggaacttgtcatcgtccgcctcgccgtcctgctgctccttcttgaccttgcccagctcgcctggccccgggctggctcgcaggcccgatccgccgccgccgccgtcgggccctagcgagggcgcgctccccggggacaggcagcggggctcctccgagcccacggggctcagctccacctccgataggtcctgctcctccgccatgtcgcccccggccgccgccgccgccgcctcggccgcctcccccgggccagccgccggggtcctcgcaaagagtccaacgcccacctggatggaaggagggcgcgatggagcggccgcgcgcgcagccccgagggcggcccgagacaggac

SEQ ID NO: 356534 - DNA, 591 bp, Homo sapiens
  chr22:38434385-38434976
  hypo
cgggcccaggcaggtggaagccatggctctggccgggtcacagggcggctggggtttgacctggcggccatgatgggctctggacccaggagccacccgggcacaggatgggacgggttgagagattggtcgtccaggcgttgagtgtgccctcgctcctccccaccttccgccgtggccttgagccccttgcgcccgcgcccatggggttaaatctctccctgtctctctctgctccaagttgttttccaagtgaggcagagaatggttctcttgttaccaacatggcttctgggcattgggtaatgcgctccctcttctcccgcagcgccacaaagggaccttttgttcccctccctgcccctctcgctggctcttcccggccccccacccacccaaactccctcctccccccgccggcgcccgcaccccggggctgcgcgctgaccgtggcggccgcggcgccctccctctcccagcgcctgcactggcggccgccatcttgcgagcggccctcagggcggcctgggctttcccagggttctcggggccggggcagtcgtagggggcggctggggctccacaggacgt

SEQ ID NO: 356535 - DNA, 146 bp, Homo sapiens
  chr22:38435006-38435152
  hypo
ggcaggaccctcccgtccccagcctccgcgccaggcctcgtccctgcatgggacaagaggcagccctccgccatttcccgcggcccttgcctcccgggagcggctcccctctgacgactgagtggactgcgcttgagggggccgcc

SEQ ID NO: 356536 - DNA, 320 bp, Homo sapiens; identical to SEQ ID NO: 352609
  chr22:39549067-39549387
  hypo

SEQ ID NO: 356537 - DNA, 137 bp, Homo sapiens; identical to SEQ ID NO: 352610
  chr22:39549472-39549609
  hypo

SEQ ID NO: 356538 - DNA, 31 bp, Homo sapiens; identical to SEQ ID NO: 295456
  chr22:39853626-39853657
  hypo

SEQ ID NO: 356539 - DNA, 209 bp, Homo sapiens; identical to SEQ ID NO: 295457
  chr22:39853690-39853899
  hypo

SEQ ID NO: 356540 - DNA, 130 bp, Homo sapiens; identical to SEQ ID NO: 345661
  chr22:39853934-39854064
  hypo

SEQ ID NO: 356541 - DNA, 423 bp, Homo sapiens
  chr22:40045208-40045631
  hypo
cggtcagcacggatgcgcgccctgcaccgtgctgggcccatcatgtgccttaagggagagaatcctcctacagcctgcatggtgggcgttcctgccccaacttctacaacaggggcagacaaagctcagagagctgcagccgcttccccaggcacccctgaccgcctttccaggctgggtcggctggttccaggcagacctgtgggcctgggagccaagcgcactcagggatgtgtcccagggtggattgggcctggtgtgggcaacgactctatgcccctctcatttgcttttcagagctgtgcccgcaacatagccccctggatgcgacgccccacaccctggtgcagcccatccccgccacgctggcttccgatcccgccagctgcccttgctgccagcatgaggacggccggcggccct

SEQ ID NO: 356542 - DNA, 220 bp, Homo sapiens
  chr22:40045721-40045941
  hypo
ggagcagcgaggacggagcctcctcagaactggggaaggaggaggaggaggaggagcaggcggatggggcggtctggctgtgcggggatgtgtggcgggagacgcgagccaagctgcgcggcatcgtggacagcaagtacttcaaccggggcatcatgatggccatcctggtcaacaccgtcagcatgggcatcgagcaccacgagcaggccagtgcagc

SEQ ID NO: 356543 - DNA, 171 bp, Homo sapiens
  chr22:40074986-40075157
  hypo
cggggccatctcgggggttgaatctcggtcttgctgcctccgagcgtggccctgggctggcctctgcctccagcagcctctgggatgtctccgtcctcatcctcaccgccctccctgccacgcaggacacgctgcgggactgcacccacgacgagcgcagctgcctgagca

SEQ ID NO: 356544 - DNA, 195 bp, Homo sapiens
  chr22:40075302-40075497
  hypo
gctcgagctggagatggcccatggcctgggccctggcccgaggctgcctaccggctccccgggcgcccctggccgagggccgggaggggcgggcggcgggggcgacaccgagggcggcttgtgccggcgctgctactcgcctgcccaggtgggcaggggctggagaggtgtgagggtcgccagagggggggcacc

SEQ ID NO: 356545 - DNA, 192 bp, Homo sapiens; identical to SEQ ID NO: 344782
  chr22:40812801-40812993
  hypo

SEQ ID NO: 356546 - DNA, 190 bp, Homo sapiens; identical to SEQ ID NO: 344783
  chr22:41536192-41536382
  hypo

SEQ ID NO: 356547 - DNA, 106 bp, Homo sapiens; identical to SEQ ID NO: 349116
  chr22:41634855-41634961
  hypo

SEQ ID NO: 356548 - DNA, 69 bp, Homo sapiens; identical to SEQ ID NO: 344787
  chr22:41658279-41658348
  hypo

SEQ ID NO: 356549 - DNA, 137 bp, Homo sapiens; identical to SEQ ID NO: 344792
  chr22:41973298-41973435
  hypo

SEQ ID NO: 356550 - DNA, 32 bp, Homo sapiens
  chr22:42667137-42667169
  hypo
cgccaagagccctctgggccgggggcagccca

SEQ ID NO: 356551 - DNA, 77 bp, Homo sapiens
  chr22:42995235-42995312
  hypo
cgtttataaaactaagggaatggactagttccagctctgaaaatcttacggcccaaacaaagaaatatttctgcatt

SEQ ID NO: 356552 - DNA, 106 bp, Homo sapiens; identical to SEQ ID NO: 220854
  chr22:42995599-42995705
  hypo

SEQ ID NO: 356553 - DNA, 173 bp, Homo sapiens; identical to SEQ ID NO: 344802
  chr22:43529312-43529485
  hypo

SEQ ID NO: 356554 - DNA, 559 bp, Homo sapiens; identical to SEQ ID NO: 295522
  chr22:44419919-44420478
  hypo

SEQ ID NO: 356555 - DNA, 34 bp, Homo sapiens; identical to SEQ ID NO: 295527
  chr22:45064203-45064237
  hypo

SEQ ID NO: 356556 - DNA, 389 bp, Homo sapiens; identical to SEQ ID NO: 295528
  chr22:45064286-45064675
  hypo

SEQ ID NO: 356557 - DNA, 147 bp, Homo sapiens; identical to SEQ ID NO: 352628
  chr22:45064918-45065065
  hypo

SEQ ID NO: 356558 - DNA, 324 bp, Homo sapiens; identical to SEQ ID NO: 344808
  chr22:45074487-45074811
  hypo

SEQ ID NO: 356559 - DNA, 98 bp, Homo sapiens
  chr22:45075627-45075725
  hypo
cgctctgggacactcagtctgatggggcaggctggtcagaagacatagagccatggtgtgtttggaactttcacagagggaagcctggggctcgggaa

SEQ ID NO: 356560 - DNA, 553 bp, Homo sapiens; identical to SEQ ID NO: 345662
  chr22:45097777-45098330
  hypo

SEQ ID NO: 356561 - DNA, 470 bp, Homo sapiens; identical to SEQ ID NO: 206166
  chr22:45098381-45098851
  hypo

SEQ ID NO: 356562 - DNA, 78 bp, Homo sapiens
  chr22:45120758-45120836
  hypo
ttggacaggtggaaggcaggagcaaaccaagtgttgcaggcccagccctgccaggtgtctctccagaaggtgtgagac

SEQ ID NO: 356563 - DNA, 733 bp, Homo sapiens
  chr22:45592910-45593643
  hypo
cggccccgggagtcgagtggcctcgcctggctgcggctccagcactggcgtgccatcgcagaccccggtggcggtggacaggtaggcacttggcagcactccgagggctgggcccggccggggctctgcgcaggctccgcacgcggctaggtcatcaggatgggcttctgccgaacttccaggatgtctagggccggcaggagggaagcaggtgaaacagtaaccctcaacagcggtgagtgctatggtcacggcagtgccacttctgaaggaagcccgcctcagccactcatgcatctcctctccaggcctcacagactgcagaggagacgtgtctccaccatcctcaccctgcagactgggaaatgggctcgcagcaacggcacaccctgcagggcctcaggtgcaagctggtgtgggggccagagccactgcctgtcacagctgctgcaggcctgggtcagcgaggtggcctgagagcctcccctcgcccgtgagtaacacacacctgggcatctgtggccactcaagaggggacagcaggtgcgccagaaaggtgaacaaagggaggacttcagctctgggaaagctacggctccacccaaagtctgagacaaagaggccaagagccctgcaaagaaacccaaccaaccgacaggacagggcgggatgactccgggtggctcacaagtaccaaggccctggaggcagagctggctgtgagaaggtgcgg

SEQ ID NO: 356564 - DNA, 258 bp, Homo sapiens; identical to SEQ ID NO: 346288
  chr22:45593715-45593973
  hypo

SEQ ID NO: 356565 - DNA, 238 bp, Homo sapiens; identical to SEQ ID NO: 329970
  chr22:45603946-45604184
  hypo

SEQ ID NO: 356566 - DNA, 55 bp, Homo sapiens
  chr22:45604387-45604442
  hypo
ggcagaacccaccgactccacatgcaggagctgtgagaacaggcagaacccgccc

SEQ ID NO: 356567 - DNA, 567 bp, Homo sapiens; identical to SEQ ID NO: 344821
  chr22:45808579-45809146
  hypo

SEQ ID NO: 356568 - DNA, 392 bp, Homo sapiens; identical to SEQ ID NO: 344822
  chr22:45959040-45959432
  hypo

SEQ ID NO: 356569 - DNA, 710 bp, Homo sapiens; identical to SEQ ID NO: 344831
  chr22:46815686-46816396
  hypo

SEQ ID NO: 356570 - DNA, 281 bp, Homo sapiens; identical to SEQ ID NO: 349123
  chr22:46931438-46931719
  hypo

SEQ ID NO: 356571 - DNA, 68 bp, Homo sapiens; identical to SEQ ID NO: 349124
  chr22:46932128-46932196
  hypo

SEQ ID NO: 356572 - DNA, 359 bp, Homo sapiens
  chr22:46979972-46980331
  hypo
cgttccagtgctggccgtcgggttccctggatgcaccccttcacggtgggtggtgtgagtccttcctcactttctggccctgtgagatgctccaggctcagcttgtccattccctgcccaggcctagagtcagccccttctgcagggagcccgggttccttttgttggagggcagaatcggaaaccaagatccaggtggcgggtacgctcatcactaccggggtgtcattgcttctgggccctcttagctgacagcaaggaaatgcacgtgtgagctgacgcgcacatatgtacgtgtctctgcctgtgtccgcgtgtagcctcctgtacctgtattgagcaaagtgtgagttcgcgcc

SEQ ID NO: 356573 - DNA, 134 bp, Homo sapiens
  chr22:47022417-47022551
  hypo
cgggggtctctgggtcggggttttctttggaaagctggaccggccgtgccctgcgtgtgggagctggctcgtggggcttggaggtgtgtgtgggagggacggtggcagggcggggtctctgggtcggggttttc

SEQ ID NO: 356574 - DNA, 412 bp, Homo sapiens; identical to SEQ ID NO: 220934
  chr22:47022632-47023044
  hypo

SEQ ID NO: 356575 - DNA, 58 bp, Homo sapiens
  chr22:47023191-47023249
  hypo
gggcgttgtctggaagccgctggtgcctggcttgtcttctattcaagccaaggtgcac

SEQ ID NO: 356576 - DNA, 263 bp, Homo sapiens; identical to SEQ ID NO: 344836
  chr22:47054031-47054294
  hypo

SEQ ID NO: 356577 - DNA, 209 bp, Homo sapiens; identical to SEQ ID NO: 344837
  chr22:47075172-47075381
  hypo

SEQ ID NO: 356578 - DNA, 850 bp, Homo sapiens; identical to SEQ ID NO: 344838
  chr22:47197347-47198197
  hypo

SEQ ID NO: 356579 - DNA, 99 bp, Homo sapiens
  chr22:47441200-47441299
  hypo
cgctcctccgcggtttggaagtcccattaatgcgacttctctctgagaagtcaacctgggcctcctcactctgcagacgtccagctccctcccggaagc

SEQ ID NO: 356580 - DNA, 117 bp, Homo sapiens; identical to SEQ ID NO: 344845
  chr22:47465782-47465899
  hypo

SEQ ID NO: 356581 - DNA, 110 bp, Homo sapiens; identical to SEQ ID NO: 344850
  chr22:48280063-48280173
  hypo

SEQ ID NO: 356582 - DNA, 220 bp, Homo sapiens
  chr22:49138251-49138471
  hypo
cgggtggagcgggtggtgctgtgtggcggagctggcggcgcagtggagcgggcgttgtggtggacccggtggcgtggcagaccaggcgacgtggtggacccggccgcatggtggaccaggcaacgtggtagactgggcagcgtgatggaccaggcgacatggtggaccgggccgcatggtggaccaggcaacgtggtagaccgggccgcatggtggacca

SEQ ID NO: 356583 - DNA, 574 bp, Homo sapiens
  chr22:49138501-49139075
  hypo
accaggcgacgtggtgggccgggtggtgtggtgaagccggcagcacagtggagcaggcattatggtggactgggcagcatggtgtattagaagaggagagatggcctggggtgctcagcggggctgagtccccagctgggagctcaggtgcgatgaagcccaagggactgacggtgtgaggagggccctctgctgcctccatgcagcccacacgcggggcccccacagtgcggacatgttggggcaatgctgcctggccccgccctcagcccagccctgggacgcaggctcagcagcccccggattccagtcaacatccccaggactcactcgggtcaggcacagtgtccaagctgtgtgagtctccgggagccgctggaacaaaatgccacacacccggtggcttcaaaccatgaaacccgttctcactgttctgggtccagacgtctgtggtcacagtgtctgctgggccgtgctcccgcaggaggcagcagcagagggtcctccctgcctcctcctgccattcttccggttcgggggtccagacgtctgtggtcacggtgtctgctgggcc

SEQ ID NO: 356584 - DNA, 298 bp, Homo sapiens; identical to SEQ ID NO: 344861
  chr22:49729101-49729399
  hypo

SEQ ID NO: 356585 - DNA, 107 bp, Homo sapiens; identical to SEQ ID NO: 330245
  chr22:49967872-49967979
  hypo

SEQ ID NO: 356586 - DNA, 238 bp, Homo sapiens; identical to SEQ ID NO: 330251
  chr22:50002819-50003057
  hypo

SEQ ID NO: 356587 - DNA, 210 bp, Homo sapiens; identical to SEQ ID NO: 220970
  chr22:50008973-50009183
  hypo

SEQ ID NO: 356588 - DNA, 289 bp, Homo sapiens; identical to SEQ ID NO: 220971
  chr22:50009330-50009619
  hypo

SEQ ID NO: 356589 - DNA, 48 bp, Homo sapiens; identical to SEQ ID NO: 346291
  chr22:50009663-50009711
  hypo

SEQ ID NO: 356590 - DNA, 58 bp, Homo sapiens; identical to SEQ ID NO: 352639
  chr22:50170525-50170583
  hypo

SEQ ID NO: 356591 - DNA, 160 bp, Homo sapiens
  chr22:50170790-50170950
  hypo
acatttgggcgcattaaagcttcgggaggaagagcagagggagtcaggcgccccgcccctgccttcagcctcactcgggcttcgtcccgtgagctgtccgccaccaagctggccacgcatcctgcctgacacccccgcggccagacgggcctgtgggtgc

SEQ ID NO: 356592 - DNA, 225 bp, Homo sapiens; identical to SEQ ID NO: 346292
  chr22:50191356-50191581
  hypo

SEQ ID NO: 356593 - DNA, 81 bp, Homo sapiens; identical to SEQ ID NO: 346293
  chr22:50191626-50191707
  hypo

SEQ ID NO: 356594 - DNA, 248 bp, Homo sapiens
  chr22:50316625-50316873
  hypo
cgccatcctcatggggcgcctgccccggttggcactgagtgtctaaggacagggcctggccatcgcctcatcccctcccctgccgcgtggggcctccgaggatggcatttgagatgattcctcctcaggggctgccctcctccctgcccttccccagccggccctggccacgggctgtgtcaggccatgatcggtccttccccgctccctggccgggctgtcctgggccgctcacagctgtgccgctc

SEQ ID NO: 356595 - DNA, 72 bp, Homo sapiens
  chr22:50316938-50317010
  hypo
acgccaacggctcctacacgtgcgaaggtgggccaggcgggcgggtctgcactccggggcctgccgggtttc

SEQ ID NO: 356596 - DNA, 217 bp, Homo sapiens; identical to SEQ ID NO: 352640
  chr22:50453240-50453457
  hypo

SEQ ID NO: 356597 - DNA, 98 bp, Homo sapiens; identical to SEQ ID NO: 352641
  chr22:50453539-50453637
  hypo

SEQ ID NO: 356598 - DNA, 768 bp, Homo sapiens
  chr22:50718718-50719486
  hypo
cgctggacaggaagggctagagtccggctttgagtttgtggccggggacaccacccctagaccgccccccaccaccagcgctggctggcacctgccggctcctgggggcccaacaggccgctgtgccacccgccaccagccccagagcccctgcggccgccccgcccgtggccccgctcgtggccccgcccatgtgcacctgcgcagcatcagcttggggttcttggccaccacgtactgctccaggagctccaggaagagcgtgtgcatgatgtccgtgtagtactccagtttcccgtgcagcgccaccgtcagcagggacgcgaagtagaccttggcgcgggccgagaactcccgctggttctccagggtgtggatgaactgtaggggccggcggtcaaagcctgcccggcgccacctgtgtgccctcccgcccgcccgacgcctggctcacattgatgaggaaagacttgctgttcagcaggttggagaactggtagagggcctgctccaccaccggccgccgcggctcagggatgtccagcttgccggtgatcatcacgtccttgtcgccgtccttggagggcaggaagaagacgcggtcggtgtaggtcttgtagtccagcacggggatgccggcctcgtgcacgtcgttggtctggtcctccatctcgatcatcaggtctggggggaggctggcgtgagacgtccctggccacgtggggccctgacccccacgctacacacagcatccccgccccaggaggc

SEQ ID NO: 356599 - DNA, 109 bp, Homo sapiens; identical to SEQ ID NO: 344882
  chr22:50864117-50864226
  hypo

SEQ ID NO: 356600 - DNA, 153 bp, Homo sapiens
  chr22:50899708-50899861
  hypo
tccccaacttaggacaggccaggcagagtcagaagcaaggaaggtaagggggggggggtcccagaatctcagggtaccacagttatggggaatcccaagtgggtggggaaggagcagacaaaggcccgtttcccacgggcacccagaaccccc

SEQ ID NO: 356601 - DNA, 378 bp, Homo sapiens
  chr22:50942715-50943093
  hypo
cggccttacccctgcaccccgggctccacaccccacccggtgcccagccttacccctgctccccaggctgggagaaccagtacttgtagcgctgggctcggacgtaggtgggcggctgcttgtggaagggatacctggccacttggctctggacaaggcggatcactgcagcgagaggcatcagcgtggcccccacagtacccgccctgcccctcccctccccaccccgctccaccccagcccactccacaccccccaagcccgctccgcacctggctccttgccctgcagcaggcgcaagaccaggcttgtgaaccacgggctgtgcgtgtgtgggcccagggctgcaaaccacatctgccagtccaggcgtggctg

SEQ ID NO: 356602 - DNA, 308 bp, Homo sapiens
  chr22:50943412-50943720
  hypo
cctggagacaggtgggaggttctcagggctgccctgcccccagcccatcccccagccctgcagcgctacccaccaggctaatcaggaacaaggccacggtcgcagtgcccacaagggacagttggactacagcactgagcttccgtagccagccccgcacctgggtccacctgtgggcaaggacccaaggtcgtcaggccggccctgcacacctgtgccccctccctgcttcctgggccatgtacctccacagggcactcagcagctcccagaccagggaggccacacccagccacacagtgggcagc

SEQ ID NO: 356603 - DNA, 209 bp, Homo sapiens
  chr22:50944156-50944365
  hypo
cgtccagcagcgcagtggtaagcaccagcgtcatcaggttgaagaagttgtagttgccggtgatgataatcaggacctgcagcagcacctgggggcggcccgctctcagtgctcccggagactgacgcctggccccgtggcaggcacccacctccaccctgcagggtgcatccctctgctacaaggccttcccaacagcggttgccagc

SEQ ID NO: 356604 - DNA, 103 bp, Homo sapiens
  chr22:50944716-50944819
  hypo
tgagcccccaccacgcagggcagcggctggtcagcttgaccacgcctgaggcgaacatgaggcggaacagcagccatcgcaccagccagaaggggaggtcttc

SEQ ID NO: 356605 - DNA, 154 bp, Homo sapiens; identical to SEQ ID NO: 346294
  chr22:50954823-50954977
  hypo

SEQ ID NO: 356606 - DNA, 596 bp, Homo sapiens; identical to SEQ ID NO: 352644
  chrX:9432830-9433426
  hypo

SEQ ID NO: 356607 - DNA, 241 bp, Homo sapiens; identical to SEQ ID NO: 206206
  chrX:9433471-9433712
  hypo

SEQ ID NO: 356608 - DNA, 224 bp, Homo sapiens; identical to SEQ ID NO: 206224
  chrX:16730628-16730852
  hypo

SEQ ID NO: 356609 - DNA, 35 bp, Homo sapiens; identical to SEQ ID NO: 345669
  chrX:16730902-16730937
  hypo

SEQ ID NO: 356610 - DNA, 223 bp, Homo sapiens; identical to SEQ ID NO: 336704
  chrX:39921413-39921636
  hypo

SEQ ID NO: 356611 - DNA, 1938 bp, Homo sapiens; identical to SEQ ID NO: 352661
  chrX:39954918-39956856
  hypo

SEQ ID NO: 356612 - DNA, 621 bp, Homo sapiens; identical to SEQ ID NO: 352672
  chrX:40014669-40015290
  hypo

SEQ ID NO: 356613 - DNA, 667 bp, Homo sapiens; identical to SEQ ID NO: 295697
  chrX:40035057-40035724
  hypo

SEQ ID NO: 356614 - DNA, 721 bp, Homo sapiens; identical to SEQ ID NO: 347751
  chrX:40035852-40036573
  hypo

SEQ ID NO: 356615 - DNA, 264 bp, Homo sapiens; identical to SEQ ID NO: 336722
  chrX:41112874-41113138
  hypo

SEQ ID NO: 356616 - DNA, 856 bp, Homo sapiens; identical to SEQ ID NO: 336731
  chrX:129146935-129147791
  hypo

SEQ ID NO: 356617 - DNA, 431 bp, Homo sapiens; identical to SEQ ID NO: 344915
  chrY:14776368-14776799
  hypo

SEQ ID NO: 356618 - DNA, 1082 bp, Homo sapiens; identical to SEQ ID NO: 345679
  chrY:16636060-16637142
  hypo

SEQ ID NO: 356619 - DNA, 208 bp, Homo sapiens
  chrY:21205113-21205321
  hypo
tcctcgcagcctccactggaacaatagtttcccttgttgaggctgctaccctggaagcgaggagaggcggggacgaaggaggagccgagtgtccatcttgcgcatctggcctcccgcatctaggcacatgtttaagatgcttacacagcaggtgccatgctaactgctggcagaaggaatcccgccttcttgcatgcaggcactcgcc

SEQ ID NO: 356620 - DNA, 122 bp, Homo sapiens; identical to SEQ ID NO: 346299
  chrY:22918582-22918704
  hypo

SEQ ID NO: 356621 - DNA, 205 bp, Homo sapiens; identical to SEQ ID NO: 344920
  AEKP01149809.1_1-6354:1345-1550
  hypo

SEQ ID NO: 356622 - DNA, 96 bp, Homo sapiens
  NW_001838014.1_249000-295694:3973-4069
  hypo
cgtgtggatcccacagacagacacccttgggtggccccgaggacgcgggagaaagtcccccttcccagaccggtctcgatctcatgggatcaagtt

SEQ ID NO: 356623 - DNA, 191 bp, Homo sapiens; identical to SEQ ID NO: 344924
  NW_001838286.2_1380778-1470498:80846-81037
  hypo

SEQ ID NO: 356624 - DNA, 860 bp, Homo sapiens
  NW_001838286.2_1380778-1470498:81470-82330
  hypo
cggtggggataaaaagccacagctgcaaaaagcagcggtggtggggataaaaagccgtggcggcaaaaacccgcagcagcacaggcaaaaagccgtggcagcaggggcaaaaagccacggtggcaggggcaaaaagccgcggcggtgagggcagaaagctgtggcttcgggggcaaataaacacggcggccaaaagccgtagtggcagggcaaaaagctgcagcagtgggggcaaaaagcagcgggagcgggtgcaaaaacccacaaaaacccatggcaacgggaggaaaaagccatggtggcaaaaagccacagtggcggggggtaaaaagccatggcggtgagggggcaaaaagccacaaaaagcagcgtcggcggggacaaaaaccacggcggcaaaaagcctcagtggcaggagcaaaaagccatggcggcggaggcaaaaagccgtggcagcaaaaacccgtggtggcaaaaacccgtggtggcaggggcaaaaagccgtggctttggaggcaaagagccgtggctgtaaaaagccatagtggcgggagcaaaaagccacaaaaagccacggtggcgggggcaaaagccacggcgccgagggcaaaaagccgtggcttcgggggcaaagagccgcagtggcaaaaagctgcaaaaagccaaggtgacggggcaaaatgccacggcggcggggttaagaagccacggcggcggggcaaaaagccgtggcgggagaaacccgcagcagcgagggcaaaaatccatggcagcagtgacgaaaagccacagcagcggtggcagaaagccgtgaggcgggggaaaaatccgcagcagcggggtcaaaatggcactgcagc

SEQ ID NO: 356625 - DNA, 135 bp, Homo sapiens; identical to SEQ ID NO: 330646
  chr1:999594-999729
  hyper

SEQ ID NO: 356626 - DNA, 58 bp, Homo sapiens; identical to SEQ ID NO: 277818
  chr1:1566482-1566540
  hyper

SEQ ID NO: 356627 - DNA, 97 bp, Homo sapiens; identical to SEQ ID NO: 349142
  chr1:1566979-1567076
  hyper

SEQ ID NO: 356628 - DNA, 431 bp, Homo sapiens; identical to SEQ ID NO: 344930
  chr1:1713574-1714005
  hyper

SEQ ID NO: 356629 - DNA, 232 bp, Homo sapiens; identical to SEQ ID NO: 344931
  chr1:1714067-1714299
  hyper

SEQ ID NO: 356630 - DNA, 194 bp, Homo sapiens; identical to SEQ ID NO: 344932
  chr1:2460612-2460806
  hyper

SEQ ID NO: 356631 - DNA, 413 bp, Homo sapiens; identical to SEQ ID NO: 197254
  chr1:2460898-2461311
  hyper

SEQ ID NO: 356632 - DNA, 443 bp, Homo sapiens; identical to SEQ ID NO: 344934
  chr1:2461988-2462431
  hyper

SEQ ID NO: 356633 - DNA, 42 bp, Homo sapiens; identical to SEQ ID NO: 349148
  chr1:3325196-3325238
  hyper

SEQ ID NO: 356634 - DNA, 178 bp, Homo sapiens; identical to SEQ ID NO: 346305
  chr1:3663338-3663516
  hyper

SEQ ID NO: 356635 - DNA, 101 bp, Homo sapiens; identical to SEQ ID NO: 346306
  chr1:3663983-3664084
  hyper

SEQ ID NO: 356636 - DNA, 896 bp, Homo sapiens; identical to SEQ ID NO: 330665
  chr1:6052426-6053322
  hyper

SEQ ID NO: 356637 - DNA, 35 bp, Homo sapiens; identical to SEQ ID NO: 349151
  chr1:6086224-6086259
  hyper

SEQ ID NO: 356638 - DNA, 88 bp, Homo sapiens; identical to SEQ ID NO: 349152
  chr1:6086291-6086379
  hyper

SEQ ID NO: 356639 - DNA, 223 bp, Homo sapiens; identical to SEQ ID NO: 277883
  chr1:6240708-6240931
  hyper

SEQ ID NO: 356640 - DNA, 280 bp, Homo sapiens
  chr1:6241264-6241544
  hyper
cccagaaggcccgtgaagggagggccccctctcactgcctcgcaggggcactgggggaacccacctgagacacgcaggatcggcagcagtttcccttcttcccgttcaattttattgccagcaaaccccaaacaaaagaccctctgcattcatccctgggcaaggagaggtcggtccagccttctggaaccaaagactggggtgttgggaacccctccatctcccagatccgctttaactacgctgtagatagagaagccgggtcagcccagtgctggcc

SEQ ID NO: 356641 - DNA, 165 bp, Homo sapiens; identical to SEQ ID NO: 330668
  chr1:6265347-6265512
  hyper

SEQ ID NO: 356642 - DNA, 695 bp, Homo sapiens; identical to SEQ ID NO: 197277
  chr1:6265789-6266484
  hyper

SEQ ID NO: 356643 - DNA, 64 bp, Homo sapiens; identical to SEQ ID NO: 344936
  chr1:6266713-6266777
  hyper

SEQ ID NO: 356644 - DNA, 56 bp, Homo sapiens
  chr1:6302010-6302066
  hyper
tgcttaagaaacactaagctatccacgtgagcgtccccccgcccccggcccgatgc

SEQ ID NO: 356645 - DNA, 227 bp, Homo sapiens; identical to SEQ ID NO: 330672
  chr1:6474528-6474755
  hyper

SEQ ID NO: 356646 - DNA, 219 bp, Homo sapiens; identical to SEQ ID NO: 346310
  chr1:6479997-6480216
  hyper

SEQ ID NO: 356647 - DNA, 53 bp, Homo sapiens; identical to SEQ ID NO: 344938
  chr1:6507073-6507126
  hyper

SEQ ID NO: 356648 - DNA, 108 bp, Homo sapiens; identical to SEQ ID NO: 197284
  chr1:6545271-6545379
  hyper

SEQ ID NO: 356649 - DNA, 246 bp, Homo sapiens; identical to SEQ ID NO: 197285
  chr1:6545639-6545885
  hyper

SEQ ID NO: 356650 - DNA, 222 bp, Homo sapiens; identical to SEQ ID NO: 349161
  chr1:6545931-6546153
  hyper

SEQ ID NO: 356651 - DNA, 344 bp, Homo sapiens; identical to SEQ ID NO: 330677
  chr1:6546495-6546839
  hyper

SEQ ID NO: 356652 - DNA, 199 bp, Homo sapiens; identical to SEQ ID NO: 349163
  chr1:7764988-7765187
  hyper

SEQ ID NO: 356653 - DNA, 108 bp, Homo sapiens; identical to SEQ ID NO: 330679
  chr1:7843510-7843618
  hyper

SEQ ID NO: 356654 - DNA, 179 bp, Homo sapiens; identical to SEQ ID NO: 349165
  chr1:7844224-7844403
  hyper

SEQ ID NO: 356655 - DNA, 248 bp, Homo sapiens; identical to SEQ ID NO: 330682
  chr1:8014160-8014408
  hyper

SEQ ID NO: 356656 - DNA, 131 bp, Homo sapiens
  chr1:8085554-8085685
  hyper
cggcattaccatcgtcgctgtgagattaggcagagggagcggggctgaccgccagagaaccggtaccaaccaccgcaagcaatcgccgagcctcccaccccagctttcaagacaggatttacgggtacacg

SEQ ID NO: 356657 - DNA, 377 bp, Homo sapiens; identical to SEQ ID NO: 277921
  chr1:8085715-8086092
  hyper

SEQ ID NO: 356658 - DNA, 401 bp, Homo sapiens; identical to SEQ ID NO: 349167
  chr1:8086401-8086802
  hyper

SEQ ID NO: 356659 - DNA, 425 bp, Homo sapiens; identical to SEQ ID NO: 344939
  chr1:9711649-9712074
  hyper

SEQ ID NO: 356660 - DNA, 125 bp, Homo sapiens; identical to SEQ ID NO: 330686
  chr1:9747572-9747697
  hyper

SEQ ID NO: 356661 - DNA, 122 bp, Homo sapiens; identical to SEQ ID NO: 330687
  chr1:9749342-9749464
  hyper

SEQ ID NO: 356662 - DNA, 259 bp, Homo sapiens
  chr1:10057121-10057380
  hyper
cgcgcggtgggcagagccaggagcaccgggctgaggcggccgggagcgcagcggcttctaggggtgagtgggacccacgcggccccacctgctcctcccgcgcgcggccccacccccctgccccgccccgcctggtttataggtcccggcccgagcctccggccgcccgccgggtttgtcccgcgatccccgaccatgcccgccgacctcagcggtacttggaccctgctcagcagcgacaacttcgagggctacatgc

SEQ ID NO: 356663 - DNA, 485 bp, Homo sapiens
  chr1:10057622-10058107
  hyper
ctgtccccacggccgtctctccacgccctctgttcccccggccgtcggtcccccacccgtccgtccctgagtgcccgcgtccagccccacgtccgtctctacccgcacgcggcacacctgcggagactgcagactcggggtccggccggggaggggggtccggccggggagggggcgcccgggaccgaagcctctgcccggccaccctccccgcagccgccttccgtgcaggccccggggccccgggcgcgctcccgcagcgaagtcccagcagcctcggcgcacccggagcgggtcggggatgcagaatcctggagccagcggacgacccttcaggtccgggcacccgcgggagtgcagagcctggttcggcccggggcgtgccccgaccgccgcctcccacgagggctgggtgcccgcggcgttcttgctcccgggggccccgcgctgtgcttcccgccctcatcgcggtgccaacggtgcgc

SEQ ID NO: 356664 - DNA, 139 bp, Homo sapiens; identical to SEQ ID NO: 277949
  chr1:10854235-10854374
  hyper

SEQ ID NO: 356665 - DNA, 386 bp, Homo sapiens; identical to SEQ ID NO: 349172
  chr1:10854661-10855047
  hyper

SEQ ID NO: 356666 - DNA, 52 bp, Homo sapiens; identical to SEQ ID NO: 197314
  chr1:11538821-11538873
  hyper

SEQ ID NO: 356667 - DNA, 64 bp, Homo sapiens; identical to SEQ ID NO: 346318
  chr1:12123950-12124014
  hyper

SEQ ID NO: 356668 - DNA, 516 bp, Homo sapiens; identical to SEQ ID NO: 349175
  chr1:12226892-12227408
  hyper

SEQ ID NO: 356669 - DNA, 206 bp, Homo sapiens; identical to SEQ ID NO: 197324
  chr1:12227438-12227644
  hyper

SEQ ID NO: 356670 - DNA, 1749 bp, Homo sapiens; identical to SEQ ID NO: 330694
  chr1:12677012-12678761
  hyper

SEQ ID NO: 356671 - DNA, 264 bp, Homo sapiens; identical to SEQ ID NO: 197328
  chr1:13840257-13840521
  hyper

SEQ ID NO: 356672 - DNA, 87 bp, Homo sapiens; identical to SEQ ID NO: 349178
  chr1:13910927-13911014
  hyper

SEQ ID NO: 356673 - DNA, 169 bp, Homo sapiens; identical to SEQ ID NO: 349179
  chr1:14926204-14926373
  hyper

SEQ ID NO: 356674 - DNA, 239 bp, Homo sapiens
  chr1:15479871-15480110
  hyper
cgaccaccacccgtcacacacacgcgcgtgcgcgcacacacgcatgcacaccgattctctgggccctagggaggaggggggatcagggctctattttctcccgaccccctcttatccaactcggctggcaagggttggggagaacttaggcccagcccccggcacacgctcagcgcgctccagcggcatacgctggggagtgggtgcccgcctcgctcagctgcgatccctcgcctcgg

SEQ ID NO: 356675 - DNA, 367 bp, Homo sapiens; identical to SEQ ID NO: 197338
  chr1:15480226-15480593
  hyper

SEQ ID NO: 356676 - DNA, 238 bp, Homo sapiens; identical to SEQ ID NO: 277988
  chr1:15573761-15573999
  hyper

SEQ ID NO: 356677 - DNA, 73 bp, Homo sapiens
  chr1:15574029-15574102
  hyper
ccccagtagctaccccaacaccagcccctcctttccagatgcaggccccaccccgcccgcggaggaagccccc

SEQ ID NO: 356678 - DNA, 274 bp, Homo sapiens; identical to SEQ ID NO: 330703
  chr1:15735867-15736141
  hyper

SEQ ID NO: 356679 - DNA, 135 bp, Homo sapiens; identical to SEQ ID NO: 349180
  chr1:16085153-16085288
  hyper

SEQ ID NO: 356680 - DNA, 529 bp, Homo sapiens
  chr1:17445328-17445857
  hyper
cggcaagtctccgcggaagctccgctgaactgggagtgggaagcaggagaggggctgggttgaggtgggtccgaggggaagtgaggtgcggaggggaagtgaaaggggagaggacggcagggaagctgaaggggtgtgaggtcccccgggaggagaactggagagggccagacggagggttacgggtgaaagggagggtctgtgagggagctggggctgaggctgtgttagggggtctgggagagtctcagggtttctggaaggtggacacaaggttcgggggttgtcaggtttctggatgagattcttaggatttctgggctcgggggctcgggatgagggacaactcgggctggacaaaggctgtccacgtccccgagtctgagcgcgtctcaggatttctgggctcgagatctcggcccgggcatcacggtgggccggctcacctgtagacatcggtccagaggtaggtgcccagcacgtacaccgcctccacgcggctcccgtactgcagccgcacggtccgctc

SEQ ID NO: 356681 - DNA, 144 bp, Homo sapiens
  chr1:17445943-17446087
  hyper
cctgcgccccacggccccgcgcgcagccttatccagcggccggtgggcggggcggcccgccccagtcctctcgcagtgggctgcgggcctgtccgtcaagcgtggtcccgcccctaactcgtcccgccccgctgaggtcgtggc

SEQ ID NO: 356682 - DNA, 204 bp, Homo sapiens; identical to SEQ ID NO: 349181
  chr1:18434105-18434309
  hyper

SEQ ID NO: 356683 - DNA, 37 bp, Homo sapiens; identical to SEQ ID NO: 349182
  chr1:18434816-18434853
  hyper

SEQ ID NO: 356684 - DNA, 56 bp, Homo sapiens
  chr1:18960805-18960861
  hyper
cgcttggccaaggccgggtcaatcagctgggaggggtcttcatcaatgggcgaccc

SEQ ID NO: 356685 - DNA, 82 bp, Homo sapiens
  chr1:18971634-18971716
  hyper
cgcgcgcgcgcgtgcgtgcgcacgacagcagagtgtgtttgcggggctggggctgaatttggcagccagcccccaagctgac

SEQ ID NO: 356686 - DNA, 209 bp, Homo sapiens; identical to SEQ ID NO: 278034
  chr1:19043143-19043352
  hyper

SEQ ID NO: 356687 - DNA, 201 bp, Homo sapiens; identical to SEQ ID NO: 344942
  chr1:20512799-20513000
  hyper

SEQ ID NO: 356688 - DNA, 258 bp, Homo sapiens; identical to SEQ ID NO: 349185
  chr1:20810336-20810594
  hyper

SEQ ID NO: 356689 - DNA, 259 bp, Homo sapiens; identical to SEQ ID NO: 197367
  chr1:20810930-20811189
  hyper

SEQ ID NO: 356690 - DNA, 67 bp, Homo sapiens; identical to SEQ ID NO: 197368
  chr1:20811219-20811286
  hyper

SEQ ID NO: 356691 - DNA, 99 bp, Homo sapiens; identical to SEQ ID NO: 278068
  chr1:21835634-21835733
  hyper

SEQ ID NO: 356692 - DNA, 150 bp, Homo sapiens; identical to SEQ ID NO: 278069
  chr1:21835765-21835915
  hyper

SEQ ID NO: 356693 - DNA, 186 bp, Homo sapiens; identical to SEQ ID NO: 330722
  chr1:22351424-22351610
  hyper

SEQ ID NO: 356694 - DNA, 79 bp, Homo sapiens
  chr1:23884853-23884932
  hyper
cggcaggagaggttcccggggtcccaggcagaacgggcgccagcacctgcgttctgggcgggggaggaaagaagaccaa

SEQ ID NO: 356695 - DNA, 66 bp, Homo sapiens; identical to SEQ ID NO: 197390
  chr1:23885004-23885070
  hyper

SEQ ID NO: 356696 - DNA, 468 bp, Homo sapiens
  chr1:23885100-23885568
  hyper
ttggaattgacactagctgggagggggctgccgaagacagctccctatacaacatggaacagaaagacttgtatttagtcggacccatgtctactttgccagaccctcggccactgcgggagggcagggcccaggcgcatttaaggcttaaatgcacatcacatggaaactgactctgccattcatttgatgcaaccatgggcaagtcacttgtccctctctggcctcagtttccctaaaccgagtgagtggcaatttttcaaaacgtctgccaactccaggacttgccgtttaaacctccctctccaagagaggagatactcacctggaggtgtcaggacacggccgagtcagtggcaaaagctccttttgtcgttggagatgacaagttccggagtgagctcggctgtctgattagaggaaaagagggaagagttacgcgaggcaatcgggagctccgagggtccc

SEQ ID NO: 356697 - DNA, 385 bp, Homo sapiens; identical to SEQ ID NO: 349190
  chr1:24126326-24126711
  hyper

SEQ ID NO: 356698 - DNA, 490 bp, Homo sapiens; identical to SEQ ID NO: 197394
  chr1:24648342-24648832
  hyper

SEQ ID NO: 356699 - DNA, 40 bp, Homo sapiens; identical to SEQ ID NO: 330727
  chr1:24739857-24739897
  hyper

SEQ ID NO: 356700 - DNA, 234 bp, Homo sapiens; identical to SEQ ID NO: 330728
  chr1:24742017-24742251
  hyper

SEQ ID NO: 356701 - DNA, 795 bp, Homo sapiens; identical to SEQ ID NO: 346322
  chr1:24882115-24882910
  hyper

SEQ ID NO: 356702 - DNA, 320 bp, Homo sapiens; identical to SEQ ID NO: 349193
  chr1:25255291-25255611
  hyper

SEQ ID NO: 356703 - DNA, 391 bp, Homo sapiens; identical to SEQ ID NO: 278124
  chr1:26372144-26372535
  hyper

SEQ ID NO: 356704 - DNA, 299 bp, Homo sapiens
  chr1:26372565-26372864
  hyper
tccggctctggctccgcgtgccaagcgctcccgtgtctcgggtcagccgctgcgccccgcggccgccggctttatccggccctcgccaacccgtgtgaagctgccgtcggcgcgtcgtgtgcaaaagcccgcggggaagggggggcggtcgccggctgcaaaaggcccggctgtggccccgcacacctgtgcctgcgcccatggggcccgcggagcccacctgccggccgcgagaagtttgccagccttcgcccggcgcggcgccgggtgttgctgagtgaggacggggtgacgcctgc

SEQ ID NO: 356705 - DNA, 807 bp, Homo sapiens; identical to SEQ ID NO: 330733
  chr1:26662538-26663345
  hyper

SEQ ID NO: 356706 - DNA, 65 bp, Homo sapiens
  chr1:27113559-27113624
  hyper
cggcccctggcttcgtttggagggcagataactgaaaccacataaggctttggaatcctgagaaa

SEQ ID NO: 356707 - DNA, 530 bp, Homo sapiens
  chr1:27113714-27114244
  hyper
aactggccgctccccccaatagacggttttgttgagttcgcctctttttttttcttctttttttggccccacttcctatgagagaaactgcttgggtgagggaggtgaaaggagccctggagggtgttctctgaggttttcttcaccatcctcattagccacctgaggtggggctgaggactaaagtaggacagaaggtctctggtagatagaggaggggaaaatcagggggatcccccactttcttcacacccaggacgcagggtgccgctgccggccacagaaaccccaagaatgtttttctttggctattcagaggacatctattgtgtgtcaggccctgtgctgagctgttgttgcctgacagcaggaagagcgcggctctggtttctgtgaagaggctgcgggtcagcctccgactacaagagcctcggcccacaccgggaactcagtgaacgtcagcgggagctggggcaagagcactgactctgagacagcagcctccgctcactatttgaaggcggggtggc

SEQ ID NO: 356708 - DNA, 308 bp, Homo sapiens; identical to SEQ ID NO: 349195
  chr1:27332673-27332981
  hyper

SEQ ID NO: 356709 - DNA, 698 bp, Homo sapiens; identical to SEQ ID NO: 330736
  chr1:27901989-27902687
  hyper

SEQ ID NO: 356710 - DNA, 48 bp, Homo sapiens
  chr1:27960573-27960621
  hyper
cgcctcctacctcggtcgggaagcccaccccccacccaccagaccgag

SEQ ID NO: 356711 - DNA, 134 bp, Homo sapiens; identical to SEQ ID NO: 349197
  chr1:28198925-28199059
  hyper

SEQ ID NO: 356712 - DNA, 738 bp, Homo sapiens; identical to SEQ ID NO: 330739
  chr1:28286184-28286922
  hyper

SEQ ID NO: 356713 - DNA, 148 bp, Homo sapiens; identical to SEQ ID NO: 344946
  chr1:29585852-29586000
  hyper

SEQ ID NO: 356714 - DNA, 81 bp, Homo sapiens; identical to SEQ ID NO: 197427
  chr1:31157913-31157994
  hyper

SEQ ID NO: 356715 - DNA, 226 bp, Homo sapiens; identical to SEQ ID NO: 349201
  chr1:31158226-31158452
  hyper

SEQ ID NO: 356716 - DNA, 261 bp, Homo sapiens; identical to SEQ ID NO: 197432
  chr1:32180427-32180688
  hyper

SEQ ID NO: 356717 - DNA, 143 bp, Homo sapiens
  chr1:32226391-32226534
  hyper
ggtcctcaggagccgctctcctagagctctgtcgccctgggggacgcacaccctccatcctgcctccggagctggggactgggccgaggggagggagcgaccccctctgtgcagtcctcccgctccgactgccagagagggtc

SEQ ID NO: 356718 - DNA, 129 bp, Homo sapiens; identical to SEQ ID NO: 278204
  chr1:32410105-32410234
  hyper

SEQ ID NO: 356719 - DNA, 191 bp, Homo sapiens
  chr1:32827549-32827740
  hyper
gtcgctcacctcccggcggttgagaccggtcccaggctagaagcagctgccggagccctggccgcgggagaacgctccggtccaggcggagccgggcaggtctctgtggcgtgcccgggcccgggcgtcgaggagggcagcattgtgacccgggccgcggcgcgctgacctcacagagcacgttcctccca

SEQ ID NO: 356720 - DNA, 299 bp, Homo sapiens; identical to SEQ ID NO: 278215
  chr1:32930159-32930458
  hyper

SEQ ID NO: 356721 - DNA, 61 bp, Homo sapiens; identical to SEQ ID NO: 197440
  chr1:32930558-32930619
  hyper

SEQ ID NO: 356722 - DNA, 178 bp, Homo sapiens; identical to SEQ ID NO: 344949
  chr1:33219389-33219567
  hyper

SEQ ID NO: 356723 - DNA, 307 bp, Homo sapiens; identical to SEQ ID NO: 344950
  chr1:33219596-33219903
  hyper

SEQ ID NO: 356724 - DNA, 33 bp, Homo sapiens; identical to SEQ ID NO: 349208
  chr1:33438467-33438500
  hyper

SEQ ID NO: 356725 - DNA, 57 bp, Homo sapiens; identical to SEQ ID NO: 349209
  chr1:33438921-33438978
  hyper

SEQ ID NO: 356726 - DNA, 91 bp, Homo sapiens; identical to SEQ ID NO: 349210
  chr1:33772615-33772706
  hyper

SEQ ID NO: 356727 - DNA, 638 bp, Homo sapiens; identical to SEQ ID NO: 278237
  chr1:33896186-33896824
  hyper

SEQ ID NO: 356728 - DNA, 393 bp, Homo sapiens; identical to SEQ ID NO: 330757
  chr1:33937934-33938327
  hyper

SEQ ID NO: 356729 - DNA, 224 bp, Homo sapiens; identical to SEQ ID NO: 197453
  chr1:34629913-34630137
  hyper

SEQ ID NO: 356730 - DNA, 252 bp, Homo sapiens; identical to SEQ ID NO: 278242
  chr1:35394790-35395042
  hyper

SEQ ID NO: 356731 - DNA, 113 bp, Homo sapiens; identical to SEQ ID NO: 346333
  chr1:35396131-35396244
  hyper

SEQ ID NO: 356732 - DNA, 209 bp, Homo sapiens; identical to SEQ ID NO: 349215
  chr1:36916114-36916323
  hyper

SEQ ID NO: 356733 - DNA, 79 bp, Homo sapiens
  chr1:37721195-37721274
  hyper
gagggggctgtccgtggtgctgaacccaagctatcctaggattgccaggcagtacgaatgaacgctggttaatggaacc

SEQ ID NO: 356734 - DNA, 47 bp, Homo sapiens; identical to SEQ ID NO: 349216
  chr1:38230859-38230906
  hyper

SEQ ID NO: 356735 - DNA, 423 bp, Homo sapiens; identical to SEQ ID NO: 349217
  chr1:38512641-38513064
  hyper

SEQ ID NO: 356736 - DNA, 90 bp, Homo sapiens; identical to SEQ ID NO: 278275
  chr1:38513154-38513244
  hyper

SEQ ID NO: 356737 - DNA, 62 bp, Homo sapiens
  chr1:39043982-39044044
  hyper
cggagatggaaggagccgaagggaccagagagagcgtggacgggaggaagacagacacgaag

SEQ ID NO: 356738 - DNA, 66 bp, Homo sapiens
  chr1:39044466-39044532
  hyper
gagcaaaagacagatcagcagaagcaaggcaggtggggcgggagcgggagcgtggacatccggcac

SEQ ID NO: 356739 - DNA, 696 bp, Homo sapiens; identical to SEQ ID NO: 349219
  chr1:39956640-39957336
  hyper

SEQ ID NO: 356740 - DNA, 132 bp, Homo sapiens
  chr1:40158183-40158315
  hyper
cttctaaggatctgtcgaaagtcggggcggacggctggggattggcctaatcggagcgcggacgctgaagagcagcggtgagaggcggggcttctgtccgcgcggcgaaggtagaggtgggctgggcggggc

SEQ ID NO: 356741 - DNA, 101 bp, Homo sapiens; identical to SEQ ID NO: 346335
  chr1:40781107-40781208
  hyper

SEQ ID NO: 356742 - DNA, 351 bp, Homo sapiens; identical to SEQ ID NO: 349221
  chr1:40782323-40782674
  hyper

SEQ ID NO: 356743 - DNA, 52 bp, Homo sapiens; identical to SEQ ID NO: 349222
  chr1:40782908-40782960
  hyper

SEQ ID NO: 356744 - DNA, 237 bp, Homo sapiens; identical to SEQ ID NO: 349223
  chr1:41268046-41268283
  hyper

SEQ ID NO: 356745 - DNA, 462 bp, Homo sapiens; identical to SEQ ID NO: 330784
  chr1:41832027-41832489
  hyper

SEQ ID NO: 356746 - DNA, 913 bp, Homo sapiens; identical to SEQ ID NO: 349225
  chr1:43389625-43390538
  hyper

SEQ ID NO: 356747 - DNA, 46 bp, Homo sapiens
  chr1:45097397-45097443
  hyper
cggggccgggcgatggggcggaaggagccccgcagcgggaggggtc

SEQ ID NO: 356748 - DNA, 87 bp, Homo sapiens; identical to SEQ ID NO: 401
  chr1:45097717-45097804
  hyper

SEQ ID NO: 356749 - DNA, 114 bp, Homo sapiens; identical to SEQ ID NO: 403
  chr1:45098213-45098327
  hyper

SEQ ID NO: 356750 - DNA, 317 bp, Homo sapiens; identical to SEQ ID NO: 330795
  chr1:45284969-45285286
  hyper

SEQ ID NO: 356751 - DNA, 784 bp, Homo sapiens; identical to SEQ ID NO: 330796
  chr1:45285419-45286203
  hyper

SEQ ID NO: 356752 - DNA, 1865 bp, Homo sapiens; identical to SEQ ID NO: 330798
  chr1:46767970-46769835
  hyper

SEQ ID NO: 356753 - DNA, 188 bp, Homo sapiens; identical to SEQ ID NO: 349230
  chr1:46954676-46954864
  hyper

SEQ ID NO: 356754 - DNA, 392 bp, Homo sapiens; identical to SEQ ID NO: 349231
  chr1:46954904-46955296
  hyper

SEQ ID NO: 356755 - DNA, 263 bp, Homo sapiens
  chr1:46955978-46956241
  hyper
cgcttcggatccgtcacggttttgcctcatttggaagatattacttcgcccctgaaaaaaaaaatacaaaaaaggtttggatattaagcggagacaaatccttctcagtttggaagggggcggcgcggggagggaggtggccggcgtaatgcggaccagatgcggcctggggagttgcggagccctgggcgggggctggggagggggcgcggccggcagcccagttcccagcctgcggagcgcagaggccgcccacgccctcc

SEQ ID NO: 356756 - DNA, 255 bp, Homo sapiens; identical to SEQ ID NO: 346339
  chr1:46957171-46957426
  hyper

SEQ ID NO: 356757 - DNA, 159 bp, Homo sapiens; identical to SEQ ID NO: 349233
  chr1:48190715-48190874
  hyper

SEQ ID NO: 356758 - DNA, 48 bp, Homo sapiens; identical to SEQ ID NO: 349234
  chr1:48191178-48191226
  hyper

SEQ ID NO: 356759 - DNA, 677 bp, Homo sapiens
  chr1:48462497-48463174
  hyper
ggcggcgcccctcagcggggcggggagcccccagttgggcacggagtttcctctggagcacggggctccagccgcaggatgctgggcgccctctggggcgtggctgactgtccctgtcggacctgggggtttctctggggccgggctccgtctgttggaagagggagaccctctagggctgggcccctcccccgggcgctcaacctcgctggccgagcccccgggtgctgagggcgtgttggggtccgggggcgcgcggggtcccggagctgcgtcgcggtccaggggcgcgcggggttcctggggcagaaccgagaacccggggtgcgcaagggtcccggggttatgctgggcacccggggcacgcaagggtcccaggggtgcgcggcgctccaggaggcgcgcagtgggacaagtgcggcggaaggcgcggcaggggtggggggcggctctggggcgaccggctgcccccgagcccggctcagaggggcggcgggcggccgcgcggccgctgcccgggctccgccatgctgctccgcggccgggagggagggagagaggagggcgggagagcggcgcggagccgggccgggctgggggctggggccgctggggcgggggaggggaggacctggcgcggggggcgggggggcgaggggccggggccgcgccgggcc

SEQ ID NO: 356760 - DNA, 135 bp, Homo sapiens
  chr1:48559554-48559689
  hyper
cggaaacgcaggtgcggcagctgcacaactggttctacgggtggatctgagcaccgggctcacctgggagatttctaataatacaaatccccaggctccgcccctgagattttgacgccgtgggtttggtgtggc

SEQ ID NO: 356761 - DNA, 836 bp, Homo sapiens; identical to SEQ ID NO: 330816
  chr1:48937304-48938140
  hyper

SEQ ID NO: 356762 - DNA, 108 bp, Homo sapiens; identical to SEQ ID NO: 349235
  chr1:49242191-49242299
  hyper

SEQ ID NO: 356763 - DNA, 107 bp, Homo sapiens; identical to SEQ ID NO: 349236
  chr1:49243013-49243120
  hyper

SEQ ID NO: 356764 - DNA, 114 bp, Homo sapiens; identical to SEQ ID NO: 344955
  chr1:50893877-50893991
  hyper

SEQ ID NO: 356765 - DNA, 189 bp, Homo sapiens; identical to SEQ ID NO: 330827
  chr1:52081941-52082130
  hyper

SEQ ID NO: 356766 - DNA, 31 bp, Homo sapiens; identical to SEQ ID NO: 344956
  chr1:52194847-52194878
  hyper

SEQ ID NO: 356767 - DNA, 322 bp, Homo sapiens; identical to SEQ ID NO: 197534
  chr1:52194968-52195290
  hyper

SEQ ID NO: 356768 - DNA, 778 bp, Homo sapiens; identical to SEQ ID NO: 344958
  chr1:52195348-52196126
  hyper

SEQ ID NO: 356769 - DNA, 949 bp, Homo sapiens; identical to SEQ ID NO: 349242
  chr1:53017742-53018691
  hyper

SEQ ID NO: 356770 - DNA, 136 bp, Homo sapiens; identical to SEQ ID NO: 349243
  chr1:53168691-53168827
  hyper

SEQ ID NO: 356771 - DNA, 291 bp, Homo sapiens; identical to SEQ ID NO: 330834
  chr1:53387231-53387522
  hyper

SEQ ID NO: 356772 - DNA, 605 bp, Homo sapiens; identical to SEQ ID NO: 349244
  chr1:54204704-54205309
  hyper

SEQ ID NO: 356773 - DNA, 354 bp, Homo sapiens; identical to SEQ ID NO: 197546
  chr1:55505162-55505516
  hyper

SEQ ID NO: 356774 - DNA, 50 bp, Homo sapiens; identical to SEQ ID NO: 278445
  chr1:55505559-55505609
  hyper

SEQ ID NO: 356775 - DNA, 434 bp, Homo sapiens
  chr1:59042557-59042991
  hyper
gcaccagcgtgcgggcgttcttgggggcgctcatgcgcgccttgagcagcagacacttggaggtcagcgtggagcagtcgaccgccatgcccgagcccagcgcgcggcactggcagcggccgccggggccgtcggggctgcacacggtcatcttgttggtgggacacgtgcagttgtcctgcgcggccgtgtggccggtcaccgccgccagcaccagcagcagcagcggcagccgcagcggtggcggcgcgaggccggggccccgagccatggtggggcggaggaacgcggaccggacgcgggcggatgaggcgcggggactcgtcggggctcgggctccggcgtctgggatggtctgcaggcgtctgccgcccggccgctccctccggctcttatactctacccgacctgcccggctggttccaccaccgacc

SEQ ID NO: 356776 - DNA, 435 bp, Homo sapiens; identical to SEQ ID NO: 346344
  chr1:59281487-59281922
  hyper

SEQ ID NO: 356777 - DNA, 63 bp, Homo sapiens; identical to SEQ ID NO: 349249
  chr1:59612305-59612368
  hyper

SEQ ID NO: 356778 - DNA, 216 bp, Homo sapiens; identical to SEQ ID NO: 349250
  chr1:60539399-60539615
  hyper

SEQ ID NO: 356779 - DNA, 94 bp, Homo sapiens
  chr1:62207675-62207769
  hyper
cgttttagaatattttattttgcgtcagcgaatagagaaaacaaaggagggatgagagaacaggaaaggaaaggggcaaaaagacaaagtgtta

SEQ ID NO: 356780 - DNA, 420 bp, Homo sapiens; identical to SEQ ID NO: 197564
  chr1:62207842-62208262
  hyper

SEQ ID NO: 356781 - DNA, 203 bp, Homo sapiens
  chr1:62208291-62208494
  hyper
cggccgggggcagctccctcggggcttcccgggcctgcctgccctgcccccgcgctctccccgcccgcccgcctggagtgggtgggagccggaggtggagggcgccgccgggcgctcagaggggccgcggcgaggatggggcgcccgcggcgtgcgtccgcgctgacccgggaggcggggcgggggcgccgtcctcctgcgtc

SEQ ID NO: 356782 - DNA, 205 bp, Homo sapiens
  chr1:62784150-62784355
  hyper
cgccctcggcggcgtctagagcactcggagctgccccattgcctccgcccaaggtcgcggcccaaagggagccctggaaagttcagccaggggccgaggagtgccagggttggcactacggggagacttttgcgacaggagagagactaagagctcgattccaggtagcagtgggagcccgcggcaaagaacgcccagtcccgca

SEQ ID NO: 356783 - DNA, 224 bp, Homo sapiens; identical to SEQ ID NO: 278478
  chr1:62784646-62784870
  hyper

SEQ ID NO: 356784 - DNA, 102 bp, Homo sapiens
  chr1:63791875-63791977
  hyper
cggctcggccctgcgcgcgtccttttggttaatcccggccagtccccggtgttgtcgtccactttgcctccctggtggtggagatgcctccccgtctcggat

SEQ ID NO: 356785 - DNA, 163 bp, Homo sapiens; identical to SEQ ID NO: 197567
  chr1:63792016-63792179
  hyper

SEQ ID NO: 356786 - DNA, 50 bp, Homo sapiens
  chr1:63792231-63792281
  hyper
cggtctccgggcgggtcccttctaatctccttttacaaggaaaactaaac

SEQ ID NO: 356787 - DNA, 266 bp, Homo sapiens; identical to SEQ ID NO: 197569
  chr1:63793072-63793338
  hyper

SEQ ID NO: 356788 - DNA, 293 bp, Homo sapiens; identical to SEQ ID NO: 330855
  chr1:65431047-65431340
  hyper

SEQ ID NO: 356789 - DNA, 40 bp, Homo sapiens; identical to SEQ ID NO: 349253
  chr1:65468262-65468302
  hyper

SEQ ID NO: 356790 - DNA, 155 bp, Homo sapiens; identical to SEQ ID NO: 197574
  chr1:65468660-65468815
  hyper

SEQ ID NO: 356791 - DNA, 180 bp, Homo sapiens; identical to SEQ ID NO: 278491
  chr1:65468816-65468996
  hyper

SEQ ID NO: 356792 - DNA, 393 bp, Homo sapiens; identical to SEQ ID NO: 278499
  chr1:65774903-65775296
  hyper

SEQ ID NO: 356793 - DNA, 446 bp, Homo sapiens; identical to SEQ ID NO: 349257
  chr1:65775326-65775772
  hyper

SEQ ID NO: 356794 - DNA, 60 bp, Homo sapiens; identical to SEQ ID NO: 197583
  chr1:66999412-66999472
  hyper

SEQ ID NO: 356795 - DNA, 36 bp, Homo sapiens; identical to SEQ ID NO: 349259
  chr1:66999673-66999709
  hyper

SEQ ID NO: 356796 - DNA, 47 bp, Homo sapiens; identical to SEQ ID NO: 349260
  chr1:67773780-67773827
  hyper

SEQ ID NO: 356797 - DNA, 132 bp, Homo sapiens; identical to SEQ ID NO: 349261
  chr1:70032839-70032971
  hyper

SEQ ID NO: 356798 - DNA, 231 bp, Homo sapiens; identical to SEQ ID NO: 197592
  chr1:70033272-70033503
  hyper

SEQ ID NO: 356799 - DNA, 44 bp, Homo sapiens
  chr1:70035044-70035088
  hyper
cgagaagctggtgaacctgcctattcccaatccagcgctgggtc

SEQ ID NO: 356800 - DNA, 92 bp, Homo sapiens
  chr1:70035537-70035629
  hyper
accatctgcgactcccacgttcctttcgaagttctccttcaaaaggaattacaaaaaaaaaaaaaaaaaaaaaagcgatgggggtggggatc

SEQ ID NO: 356801 - DNA, 393 bp, Homo sapiens
  chr1:72749248-72749641
  hyper
cggcagagcagcttgcgtgtttgtggcggtcggcccgtatggattgcaggacgcccctcttttatctgtgggtgttgacactaagttgtgtgtgtgagtaggggattgtttatggtcaacatggagtgtgtgtgtgatagagagcgtgtcgtgcgcgcgggggcctgtgcacgcgcggcacgcaggcgcgctgggagggacggggcgggtcatgctgggatgtagagtcgggaaaagactgcaatcaagtgttttaattgtgtagagcccaggcggtccagttatgtaagaggcagtttaacccatttgagcctatcaggccgaataatcggcgcatccgagtcaaggcagggcagagttaaggggtttaacgagtcgcagggttgtatttct

SEQ ID NO: 356802 - DNA, 100 bp, Homo sapiens; identical to SEQ ID NO: 349263
  chr1:72750578-72750678
  hyper

SEQ ID NO: 356803 - DNA, 124 bp, Homo sapiens
  chr1:75597701-75597825
  hyper
cgtttgggctaaaaaccctcattactaagaccaaacaaacaaacaaaaactcttttgatttttagcgcacccctgtaaagtaggaagataacttttccgttgccccagccgaggatgagcgtgg

SEQ ID NO: 356804 - DNA, 47 bp, Homo sapiens; identical to SEQ ID NO: 349264
  chr1:75603159-75603206
  hyper

SEQ ID NO: 356805 - DNA, 126 bp, Homo sapiens; identical to SEQ ID NO: 349265
  chr1:76080152-76080278
  hyper

SEQ ID NO: 356806 - DNA, 184 bp, Homo sapiens; identical to SEQ ID NO: 197604
  chr1:77333579-77333763
  hyper

SEQ ID NO: 356807 - DNA, 223 bp, Homo sapiens; identical to SEQ ID NO: 349267
  chr1:78956569-78956792
  hyper

SEQ ID NO: 356808 - DNA, 142 bp, Homo sapiens
  chr1:82266277-82266419
  hyper
cgagccgctggtcatccccctgcgctcagcctcggagcgccgcgcttcgcggcgctctcccaaatactcttcacccactccagaaataaaataaatgtttttaaagtgcatgtgtgtggacaggatggagagcgcgcgccgg

SEQ ID NO: 356809 - DNA, 326 bp, Homo sapiens; identical to SEQ ID NO: 278556
  chr1:82266440-82266766
  hyper

SEQ ID NO: 356810 - DNA, 295 bp, Homo sapiens; identical to SEQ ID NO: 278557
  chr1:82266855-82267150
  hyper

SEQ ID NO: 356811 - DNA, 51 bp, Homo sapiens
  chr1:82267185-82267236
  hyper
gaattccttgggattgttggggggcatctcccctccgctgctgtgtgtggc

SEQ ID NO: 356812 - DNA, 369 bp, Homo sapiens
  chr1:82267247-82267616
  hyper
cggctactccttgcttccccgagcccgagtctgcgccgccagccttccttggggcagcggccaccgctcagccccggccgggagatccgaaatgtgaggaggggtcgccgccgcctcccgccccaggccgcagggtcggcgcgagggatgctattccggccgggcgctcggggggctgaggggcttcgcctgacaaactgagttggcctcgcgcccccggcgccctcccgcccgtcgcttcgaagggactcccaagtctgcgcacctctgtcaggcttttgcttccaccacccctttcgctctgattcccgatttttttttcctaagggagcgtgcggtctgggggtgtgtgcgtgtgtgtgaaagacc

SEQ ID NO: 356813 - DNA, 149 bp, Homo sapiens; identical to SEQ ID NO: 278559
  chr1:82267739-82267888
  hyper

SEQ ID NO: 356814 - DNA, 49 bp, Homo sapiens; identical to SEQ ID NO: 349268
  chr1:84326267-84326316
  hyper

SEQ ID NO: 356815 - DNA, 385 bp, Homo sapiens; identical to SEQ ID NO: 349269
  chr1:84326357-84326742
  hyper

SEQ ID NO: 356816 - DNA, 228 bp, Homo sapiens; identical to SEQ ID NO: 349270
  chr1:84543146-84543374
  hyper

SEQ ID NO: 356817 - DNA, 659 bp, Homo sapiens; identical to SEQ ID NO: 349271
  chr1:84543409-84544068
  hyper

SEQ ID NO: 356818 - DNA, 201 bp, Homo sapiens; identical to SEQ ID NO: 197612
  chr1:85358969-85359170
  hyper

SEQ ID NO: 356819 - DNA, 800 bp, Homo sapiens
  chr1:85462482-85463282
  hyper
cggttaacctgaaaacacctgatcctctctccggaatccttgcctggggaaaacgataaggctgccgggccatgcctcctccttcaaaactttccagggctctcgggattcggaacaggaaacaccgttcacggccgactcatttcgccctcgccgtaacgcgtccgccgaagttggagccctgcaaagcggggttcccttctcttaccctttctgccggccgcgtggtgcgcgcagaccccggcccgagagcaggcgccgcagtcgtggagtgcggcgggcagttctcgggcggctgaaaggcggctctgtgtgcaccctgcaggatgcggcgcgtggccaggcgctcccgccccgcccccaaggggctgccccgccccgccccgccccgccgcctcctaccggggaccggagcttccccagttggggtcctaggggacttattccacgcttcagcggaccagcctccccgcgctcccggagaagggggtcggcgacgcggaggcggggtgggggccgtaggggatggaaccgaggcgcgcgcgagaagagccgaggaagtaagcagtcccaaaagggggcggcggtggggcccccagggaggcgtggggcacgccaagggcgccgtggggcactgacctgtggtgcggcccccaggacaggcccgaggcgcggttgcacaccggcaggtccagcacctccatgcctcgaggcatggcgcggccagggagcggcaggaggacacctagcgtgggacggctacacctgtctgggcgcaggcccgccgcccttgcactctc

SEQ ID NO: 356820 - DNA, 77 bp, Homo sapiens; identical to SEQ ID NO: 346346
  chr1:85773944-85774021
  hyper

SEQ ID NO: 356821 - DNA, 112 bp, Homo sapiens; identical to SEQ ID NO: 346347
  chr1:85774083-85774195
  hyper

SEQ ID NO: 356822 - DNA, 64 bp, Homo sapiens
  chr1:86621199-86621263
  hyper
cgcgcaacccctggtccgagcccttttcccagggaaggcatgggagcaggtacagcgcccaaag

SEQ ID NO: 356823 - DNA, 222 bp, Homo sapiens; identical to SEQ ID NO: 330886
  chr1:87800835-87801057
  hyper

SEQ ID NO: 356824 - DNA, 1156 bp, Homo sapiens; identical to SEQ ID NO: 330887
  chr1:90098160-90099316
  hyper

SEQ ID NO: 356825 - DNA, 437 bp, Homo sapiens; identical to SEQ ID NO: 344960
  chr1:90308855-90309292
  hyper

SEQ ID NO: 356826 - DNA, 115 bp, Homo sapiens; identical to SEQ ID NO: 344961
  chr1:90309490-90309605
  hyper

SEQ ID NO: 356827 - DNA, 171 bp, Homo sapiens; identical to SEQ ID NO: 330889
  chr1:91170461-91170632
  hyper

SEQ ID NO: 356828 - DNA, 154 bp, Homo sapiens
  chr1:91183993-91184147
  hyper
cgcgcgcgggaatagtccgaagacattaagagcggaggaaggagatccctgaaggaatccacagaaaagtgtgtcacttcaggcgccggagccttgcataagcgggcgggtcggctctgggctctgatttctcgcccgacgaacccaggcgctc

SEQ ID NO: 356829 - DNA, 60 bp, Homo sapiens; identical to SEQ ID NO: 278617
  chr1:91185065-91185125
  hyper

SEQ ID NO: 356830 - DNA, 284 bp, Homo sapiens; identical to SEQ ID NO: 349278
  chr1:92495420-92495704
  hyper

SEQ ID NO: 356831 - DNA, 64 bp, Homo sapiens; identical to SEQ ID NO: 349279
  chr1:92495832-92495896
  hyper

SEQ ID NO: 356832 - DNA, 170 bp, Homo sapiens; identical to SEQ ID NO: 346351
  chr1:92948154-92948324
  hyper

SEQ ID NO: 356833 - DNA, 225 bp, Homo sapiens; identical to SEQ ID NO: 197641
  chr1:92949466-92949691
  hyper

SEQ ID NO: 356834 - DNA, 227 bp, Homo sapiens; identical to SEQ ID NO: 197642
  chr1:92950207-92950434
  hyper

SEQ ID NO: 356835 - DNA, 119 bp, Homo sapiens; identical to SEQ ID NO: 330906
  chr1:94374262-94374381
  hyper

SEQ ID NO: 356836 - DNA, 501 bp, Homo sapiens; identical to SEQ ID NO: 346354
  chr1:94702434-94702935
  hyper

SEQ ID NO: 356837 - DNA, 88 bp, Homo sapiens; identical to SEQ ID NO: 197650
  chr1:94702990-94703078
  hyper

SEQ ID NO: 356838 - DNA, 221 bp, Homo sapiens; identical to SEQ ID NO: 197651
  chr1:94703103-94703324
  hyper

SEQ ID NO: 356839 - DNA, 157 bp, Homo sapiens
  chr1:94703357-94703514
  hyper
cttgcaggggacaggcagagcgactcagagaaaagtcacctgaggactagatgcggctaatggccagatgagcagctacatttcttatgagacacttctgtggatcgcctttttcctccctcttccaggggttagggcctggggaagggcgccacac

SEQ ID NO: 356840 - DNA, 283 bp, Homo sapiens; identical to SEQ ID NO: 349287
  chr1:94713022-94713305
  hyper

SEQ ID NO: 356841 - DNA, 148 bp, Homo sapiens; identical to SEQ ID NO: 349288
  chr1:95428574-95428722
  hyper

SEQ ID NO: 356842 - DNA, 759 bp, Homo sapiens; identical to SEQ ID NO: 349289
  chr1:99126872-99127631
  hyper

SEQ ID NO: 356843 - DNA, 325 bp, Homo sapiens; identical to SEQ ID NO: 344965
  chr1:99127671-99127996
  hyper

SEQ ID NO: 356844 - DNA, 288 bp, Homo sapiens; identical to SEQ ID NO: 278688
  chr1:101702081-101702369
  hyper

SEQ ID NO: 356845 - DNA, 392 bp, Homo sapiens; identical to SEQ ID NO: 278689
  chr1:101702796-101703188
  hyper

SEQ ID NO: 356846 - DNA, 184 bp, Homo sapiens
  chr1:101774910-101775094
  hyper
cgcagcaaacgggaaaataccaatttagctctgtttgctgcagcttcgcagctttaccaggagagggcgccgacggacctgacttttgccttgcctcgcagtagagcccaactagagggtaaacagcagccacagtaagttctagctgttgcagaaataaattacaaatacatgtaggaaaaag

SEQ ID NO: 356847 - DNA, 244 bp, Homo sapiens; identical to SEQ ID NO: 346359
  chr1:103574168-103574412
  hyper

SEQ ID NO: 356848 - DNA, 1045 bp, Homo sapiens
  chr1:107599205-107600250
  hyper
cgcgccgccggccgggcgaccccgcaggaagtaggaaggacgagcgcgcactacaagtcccagaagcccccgtttcctggagcccgcgccgtgccgcgctacgcccgccgggagccgggcagagcggccaagatgtcgcagcccaagaaaagaaagcttgagtcggggggcggcggcgaaggaggggagggaactgaagaggaagatggcgcggagcgggaggcggccctggagcgaccccggaggactaagcgggaacgggaccagctgtactacgagtgctactcggacgtttcggtccacgaggagatgatcgcggaccgcgtccgcaccgatgcctaccgcctgggtatccttcggaactgggcagcactgcgaggcaagacggtactggacgtgggcgcgggcaccggcattctgagcatcttctgtgcccaggccggggcccggcgcgtgtacgcggtagaggccagcgccatctggcaacaggcccgggaggtggtgcggttcaacgggctggaggaccgggtgcacgtcctgccgggaccagtggagactgtagagttgccggaacaggtggatgccatcgtgagcgagtggatgggctacggactcctgcacgagtccatgctgagctccgtcctccacgcgcgaaccaagtggctgaaggagggcggtcttctcctgccggcctccgccgagctcttcatagcccccatcagcgaccagatgctggaatggcgcctgggcttctggagccaggtgaagcagcactatggtgtggacatgagctgcctggagggcttcgccacgcgctgtctcatgggccactcggagatcgttgtgcagggattgtccggcgaggacgtgctggcccggccgcagcgctttgctcagctagagctctcccgcgccggcttggagcaggagctggaggccggagtgggcgggcgcttccgctgcagctgctatggctcggcgcccatgcatggctttgccatctggttccaggtgaccttccctggaggggagtcggagaaacccc

SEQ ID NO: 356849 - DNA, 40 bp, Homo sapiens
  chr1:107600359-107600399
  hyper
cacgctgctgccctcccgggacaacccccgtcgcctgcgc

SEQ ID NO: 356850 - DNA, 49 bp, Homo sapiens; identical to SEQ ID NO: 349294
  chr1:107684495-107684544
  hyper

SEQ ID NO: 356851 - DNA, 305 bp, Homo sapiens; identical to SEQ ID NO: 349295
  chr1:108506290-108506595
  hyper

SEQ ID NO: 356852 - DNA, 113 bp, Homo sapiens; identical to SEQ ID NO: 349296
  chr1:109204221-109204334
  hyper

SEQ ID NO: 356853 - DNA, 119 bp, Homo sapiens; identical to SEQ ID NO: 278710
  chr1:109656101-109656220
  hyper

SEQ ID NO: 356854 - DNA, 203 bp, Homo sapiens; identical to SEQ ID NO: 197688
  chr1:109656291-109656494
  hyper

SEQ ID NO: 356855 - DNA, 116 bp, Homo sapiens; identical to SEQ ID NO: 344968
  chr1:109657070-109657186
  hyper

SEQ ID NO: 356856 - DNA, 143 bp, Homo sapiens; identical to SEQ ID NO: 349300
  chr1:110186004-110186147
  hyper

SEQ ID NO: 356857 - DNA, 35 bp, Homo sapiens; identical to SEQ ID NO: 349301
  chr1:110186177-110186212
  hyper

SEQ ID NO: 356858 - DNA, 65 bp, Homo sapiens; identical to SEQ ID NO: 344969
  chr1:110672768-110672833
  hyper

SEQ ID NO: 356859 - DNA, 364 bp, Homo sapiens; identical to SEQ ID NO: 349303
  chr1:110753530-110753894
  hyper

SEQ ID NO: 356860 - DNA, 46 bp, Homo sapiens; identical to SEQ ID NO: 197698
  chr1:110753957-110754003
  hyper

SEQ ID NO: 356861 - DNA, 360 bp, Homo sapiens; identical to SEQ ID NO: 344970
  chr1:111506646-111507006
  hyper

SEQ ID NO: 356862 - DNA, 736 bp, Homo sapiens; identical to SEQ ID NO: 344971
  chr1:111746588-111747324
  hyper

SEQ ID NO: 356863 - DNA, 818 bp, Homo sapiens; identical to SEQ ID NO: 330937
  chr1:113498720-113499538
  hyper

SEQ ID NO: 356864 - DNA, 699 bp, Homo sapiens; identical to SEQ ID NO: 349308
  chr1:113932580-113933279
  hyper

SEQ ID NO: 356865 - DNA, 264 bp, Homo sapiens; identical to SEQ ID NO: 349309
  chr1:113933305-113933569
  hyper

SEQ ID NO: 356866 - DNA, 612 bp, Homo sapiens; identical to SEQ ID NO: 330940
  chr1:115212647-115213259
  hyper

SEQ ID NO: 356867 - DNA, 35 bp, Homo sapiens; identical to SEQ ID NO: 349311
  chr1:115632692-115632727
  hyper

SEQ ID NO: 356868 - DNA, 1132 bp, Homo sapiens; identical to SEQ ID NO: 330944
  chr1:116184428-116185560
  hyper

SEQ ID NO: 356869 - DNA, 98 bp, Homo sapiens
  chr1:116370923-116371021
  hyper
cgtggccgcgatcccacctgcggcgtccgcgtccgcccgctctccctgaggtctgcaccctgagaggaggggcgagcgagccaacttggggcagggat

SEQ ID NO: 356870 - DNA, 47 bp, Homo sapiens; identical to SEQ ID NO: 349313
  chr1:116711292-116711339
  hyper

SEQ ID NO: 356871 - DNA, 200 bp, Homo sapiens; identical to SEQ ID NO: 349314
  chr1:117452644-117452844
  hyper

SEQ ID NO: 356872 - DNA, 219 bp, Homo sapiens; identical to SEQ ID NO: 349315
  chr1:117453203-117453422
  hyper

SEQ ID NO: 356873 - DNA, 287 bp, Homo sapiens; identical to SEQ ID NO: 330949
  chr1:118149482-118149769
  hyper

SEQ ID NO: 356874 - DNA, 141 bp, Homo sapiens; identical to SEQ ID NO: 197734
  chr1:119548917-119549058
  hyper

SEQ ID NO: 356875 - DNA, 84 bp, Homo sapiens; identical to SEQ ID NO: 330956
  chr1:150586185-150586269
  hyper

SEQ ID NO: 356876 - DNA, 430 bp, Homo sapiens; identical to SEQ ID NO: 330957
  chr1:150669495-150669925
  hyper

SEQ ID NO: 356877 - DNA, 797 bp, Homo sapiens; identical to SEQ ID NO: 330959
  chr1:151020083-151020880
  hyper

SEQ ID NO: 356878 - DNA, 154 bp, Homo sapiens; identical to SEQ ID NO: 330960
  chr1:151566699-151566853
  hyper

SEQ ID NO: 356879 - DNA, 79 bp, Homo sapiens; identical to SEQ ID NO: 197752
  chr1:151694406-151694485
  hyper

SEQ ID NO: 356880 - DNA, 137 bp, Homo sapiens; identical to SEQ ID NO: 278839
  chr1:151801436-151801573
  hyper

SEQ ID NO: 356881 - DNA, 321 bp, Homo sapiens; identical to SEQ ID NO: 278843
  chr1:152080641-152080962
  hyper

SEQ ID NO: 356882 - DNA, 447 bp, Homo sapiens; identical to SEQ ID NO: 346369
  chr1:154297543-154297990
  hyper

SEQ ID NO: 356883 - DNA, 72 bp, Homo sapiens; identical to SEQ ID NO: 278861
  chr1:154298038-154298110
  hyper

SEQ ID NO: 356884 - DNA, 244 bp, Homo sapiens; identical to SEQ ID NO: 349324
  chr1:154474305-154474549
  hyper

SEQ ID NO: 356885 - DNA, 216 bp, Homo sapiens; identical to SEQ ID NO: 278869
  chr1:154971706-154971922
  hyper

SEQ ID NO: 356886 - DNA, 457 bp, Homo sapiens
  chr1:154971923-154972380
  hyper
gctccaacccagaggcccggaataggcgcggagttataaatagtgccacccgcaggtgttggggggagtcggcgggaggggggtacccctggcggccacggccccttcaggtgggttgggcggtcgcggtgggagcgctggggggcggggggcgtggggggtctgcggtctgagcgcccccagcggtttcctgggcggcgggtttttcgagggaagcggaggcagcggaggatgggggggagcagcggagaagaggtgggcgcctggcgcatgctgacgctccgcttgcagctcagccccccacattccgaaacaggcccccagacccactcacgcaggaccccgcccaggcaaagcctcgcctttcttaacacctgaaggcctcattcccccaggttctgcaagcatctaacttctatgcttctacccttcggcgcacgtggcccggccagtccgc

SEQ ID NO: 356887 - DNA, 155 bp, Homo sapiens; identical to SEQ ID NO: 344973
  chr1:155043706-155043861
  hyper

SEQ ID NO: 356888 - DNA, 269 bp, Homo sapiens
  chr1:155164146-155164415
  hyper
cggacacagaactatcctttggggagcagagtggtattggggacaggtaggcacgtagcggggggcaaaagcacacgtgaggtgcgtaatgcgcgacagccaagaggtgtgtgcggcagcagtgcacgaggggaggaagctatcccaggccgcggcagcacgtggaacttgggtcccgcagtcgcaggctgcgctctaggccgacggaagcagttccgcctgtattcagaaaacagttctcagccccaaagacacaggttggaaagaac

SEQ ID NO: 356889 - DNA, 594 bp, Homo sapiens
  chr1:155164455-155165049
  hyper
tcagatcagcaggcgagagaccaccgctctcgcccgcgcgccgcgcggcgcccgaggcgcagctttgtgtgcggcgagaccctggggcaggcgctgggcggggtggggacatctgacgtcagcgcgcccgggagcgcgggccggggaggcggggagccccccaactcgcaggccggagaaaacacgagtagctaggtgggcggccccaaacctcaactcccggcattgccaagcaacagccattcagttcggttgctgggacacgcgtcaccatggcgacggctccgcgccgcgcagtctgagtacttaaagagcaagcgcgcgcaacgcccgggcgtcggaaagcggccttctgggactccgcaaactcccgttctccctcccccctcccccttgccattccctttgccttccgggcgccaagtctctctggcctccaaggtgaacccaactccccagcgcgccccgggttcccgggtcgggccggcttcaggcggtggggagcgggatcccgggccccgggcgggcgggagggacgggacgcggtgcagtgttgttttttcccccgccaatattgcactcgtcccggcctcc

SEQ ID NO: 356890 - DNA, 35 bp, Homo sapiens; identical to SEQ ID NO: 330975
  chr1:156036276-156036311
  hyper

SEQ ID NO: 356891 - DNA, 96 bp, Homo sapiens; identical to SEQ ID NO: 349326
  chr1:156215233-156215329
  hyper

SEQ ID NO: 356892 - DNA, 229 bp, Homo sapiens; identical to SEQ ID NO: 330977
  chr1:156326789-156327018
  hyper

SEQ ID NO: 356893 - DNA, 42 bp, Homo sapiens; identical to SEQ ID NO: 346372
  chr1:156390054-156390096
  hyper

SEQ ID NO: 356894 - DNA, 422 bp, Homo sapiens
  chr1:156593638-156594060
  hyper
cgaggtcattcactctcatcgtggggccacggccacgctgccctgcgtcctgggcaccacgcctcccagctacaaggtgcgctggagcaaggtggagcctggggagctccgggaaacgctgatcctcatcaccaacggactgcacgcccgggggtatgggcccctgggagggcgcgccaggatgcggagggggcatcgactagacgcctccctggtcatcgcgggcgtgcgcctggaggacgagggccggtaccgctgcgagctcatcaacggcatcgaggacgagagcgtggcgctgaccttgagcttggagggtgaggcccttccgctcccgccccattcctgtgtagcagcgggtccgcctcgcctgggtctcccagggctccttcccagtatctcctccgcacccctggggaccccag

SEQ ID NO: 356895 - DNA, 202 bp, Homo sapiens; identical to SEQ ID NO: 197783
  chr1:156594227-156594429
  hyper

SEQ ID NO: 356896 - DNA, 146 bp, Homo sapiens; identical to SEQ ID NO: 278916
  chr1:156646447-156646593
  hyper

SEQ ID NO: 356897 - DNA, 403 bp, Homo sapiens
  chr1:156646856-156647259
  hyper
acgagggcccgcagggccgccagctcgtcgtcggcatgcgcccgccaggaggtgtccgcggattgtgcccggagccccccgagctccgcgctgagcagctcattctgctcctccagcgccttgacccgggccaggtaggcctccaggcgccgattgagctcccacatctgaaacgactcctcccccatgcagccctccatcctgctcgtctgacccactgaggatggacagacgcggggcaccgggagaagggagcggctcgcagagcttttaggacggaagagaaaagagaccgacggggacaatgacggggcggggcggggtgggagtagcctgagcgactgagagtcgggagtgggagcgaggctattcatactcccgccaggcgggcgggaagaggggc

SEQ ID NO: 356898 - DNA, 175 bp, Homo sapiens
  chr1:156662232-156662407
  hyper
cgagtggaaatggggacgggcaaggcactctagagggccaagtgtcacggaaagagaaggaagttagacaggagaggagggggagggggctcctaggtcccatccttccataaagagccgtgggtctgaccccgatgcaggggaaaccaagtgtaggcagcaaggatgtgtcctc

SEQ ID NO: 356899 - DNA, 103 bp, Homo sapiens; identical to SEQ ID NO: 344974
  chr1:158083079-158083182
  hyper

SEQ ID NO: 356900 - DNA, 916 bp, Homo sapiens
  chr1:159894399-159895315
  hyper
cgaccacaccctgggccgttacaacagatgagtcacccaccgccctcccgccgctggggtgacgcagtggtctgggcagcccgcccgtccgcccgcggccaccaccggctttcccagcagcagggggcacccggtgggggcagcggcgctcgggcagggtaaaagcagccaccaccacccccacaacctcacacagggcaccccggggcgcagtcagggctgcagcacccagacccccgaggtcaggggaccgtcatagagatgactggagcttcacagaaggtcaccgtgcgacccatgcagagccccctagccccagcccgtgacctcaagtccccagaatagcaagctagcaggaacaggaatgaaaagggcggcctcggggactcagagggcacgcagtgctcacacgtgctcctggaaccaggaagtgaagggtcgcgcgggaaagcccaggagcacgagctggcccagggccggcgccacgacccggggtcactcggggccagccagctaaagtccgacgcccttttttcccctcgccccagtgaggactcagcgatggagcccgcgggtggggctcagtccctgagtccctgctccagacggacgccctgtctatgcatgggctaacctcgcctgacctcatcgtccaacaatgtcgggtcagggcttggggacaggacctgacagcacggggcggggtaaagtagtcaccggacccttgcctggtaccagcccttgatccccgagctcgctggagcaagttcaaagcgctggcttcttgctttctacacagcacgcacatgtccccgacccccgtacccccgacctgctcaccgttcaagcgggctggagagcggcgcactgactcaaggcaagggctgcagctgcaagtggtgcgccctgcccagcc

SEQ ID NO: 356901 - DNA, 329 bp, Homo sapiens; identical to SEQ ID NO: 278955
  chr1:160370270-160370599
  hyper

SEQ ID NO: 356902 - DNA, 232 bp, Homo sapiens
  chr1:160370629-160370861
  hyper
cggagcccacccggcagttcgcagcggcgggtgagtgccgggccgcgggggcgcgggcaaagtttgaaaaaaaaagaagaaagaaagagagagaaaaaaagaaatggaaaaggaggaaaatcatgcaaggggccagggggtgcccgaccccagagcgagcggggtggcttatgggggaaggggggctggactccgggcaacccccttccggtccgcttccccactgcacagc

SEQ ID NO: 356903 - DNA, 396 bp, Homo sapiens; identical to SEQ ID NO: 330996
  chr1:160983499-160983895
  hyper

SEQ ID NO: 356904 - DNA, 935 bp, Homo sapiens; identical to SEQ ID NO: 344975
  chr1:160990384-160991319
  hyper

SEQ ID NO: 356905 - DNA, 367 bp, Homo sapiens; identical to SEQ ID NO: 330998
  chr1:161195526-161195893
  hyper

SEQ ID NO: 356906 - DNA, 187 bp, Homo sapiens; identical to SEQ ID NO: 330999
  chr1:161196150-161196337
  hyper

SEQ ID NO: 356907 - DNA, 93 bp, Homo sapiens; identical to SEQ ID NO: 346376
  chr1:161276123-161276216
  hyper

SEQ ID NO: 356908 - DNA, 64 bp, Homo sapiens; identical to SEQ ID NO: 344976
  chr1:161368929-161368993
  hyper

SEQ ID NO: 356909 - DNA, 95 bp, Homo sapiens; identical to SEQ ID NO: 344977
  chr1:161369405-161369500
  hyper

SEQ ID NO: 356910 - DNA, 293 bp, Homo sapiens; identical to SEQ ID NO: 344978
  chr1:161369566-161369859
  hyper

SEQ ID NO: 356911 - DNA, 299 bp, Homo sapiens; identical to SEQ ID NO: 344979
  chr1:161369945-161370244
  hyper

SEQ ID NO: 356912 - DNA, 712 bp, Homo sapiens; identical to SEQ ID NO: 349339
  chr1:161409991-161410703
  hyper

SEQ ID NO: 356913 - DNA, 36 bp, Homo sapiens
  chr1:161582198-161582234
  hyper
cgggacatgaggagtgcgggggggaagagaagacgg

SEQ ID NO: 356914 - DNA, 108 bp, Homo sapiens; identical to SEQ ID NO: 197819
  chr1:161591364-161591472
  hyper

SEQ ID NO: 356915 - DNA, 82 bp, Homo sapiens; identical to SEQ ID NO: 197820
  chr1:161591546-161591628
  hyper

SEQ ID NO: 356916 - DNA, 903 bp, Homo sapiens; identical to SEQ ID NO: 331011
  chr1:162039148-162040051
  hyper

SEQ ID NO: 356917 - DNA, 60 bp, Homo sapiens; identical to SEQ ID NO: 346381
  chr1:162792553-162792613
  hyper

SEQ ID NO: 356918 - DNA, 55 bp, Homo sapiens; identical to SEQ ID NO: 331013
  chr1:163378364-163378419
  hyper

SEQ ID NO: 356919 - DNA, 204 bp, Homo sapiens; identical to SEQ ID NO: 349344
  chr1:165086756-165086960
  hyper

SEQ ID NO: 356920 - DNA, 60 bp, Homo sapiens; identical to SEQ ID NO: 349345
  chr1:165087027-165087087
  hyper

SEQ ID NO: 356921 - DNA, 103 bp, Homo sapiens; identical to SEQ ID NO: 278995
  chr1:165204594-165204697
  hyper

SEQ ID NO: 356922 - DNA, 93 bp, Homo sapiens; identical to SEQ ID NO: 278996
  chr1:165204732-165204825
  hyper

SEQ ID NO: 356923 - DNA, 87 bp, Homo sapiens; identical to SEQ ID NO: 349348
  chr1:165205366-165205453
  hyper

SEQ ID NO: 356924 - DNA, 138 bp, Homo sapiens; identical to SEQ ID NO: 349349
  chr1:165414053-165414191
  hyper

SEQ ID NO: 356925 - DNA, 805 bp, Homo sapiens; identical to SEQ ID NO: 331017
  chr1:165737832-165738637
  hyper

SEQ ID NO: 356926 - DNA, 629 bp, Homo sapiens
  chr1:166135586-166136215
  hyper
tcccggtcagactcagctcgcacctaggagcggggagccgccgggcatccttggggaagccccctcctcttgcagccgcgcggggtccccgctgccccgacgtccgcccacgcccgccccctcgctccggcagggcgcgcggagggtgcactcctaggaggcggcgggtgccctcgccggctccagcgcccgggcggagggcagggaggggagcggcgctgcgaggaatggtgcccaccccgggccggagccccccgcccctcgccggagaggaggaggcggcagcggcggcggcatggagccgggggagggcggcggtggcagcgcccggtctgtctgcctccgcggcggcagcagcagcagccgccgccgccgccgccgctgcatgaacctctgcaccacggctgccccccgcgtgcagcgcacccagcggcgggcgagcgggcggcccaagaggcaggcggaggcagcagcggcggcggcggcgaccggagctcccgccggccccgccccgtagccggaccacaccgacactcctcggcccggctgcctcggcccggggggcgccaggaggctgtggcccggggtggagagccccaacggctggagcagcacaggacgtgctccgc

SEQ ID NO: 356927 - DNA, 263 bp, Homo sapiens; identical to SEQ ID NO: 331021
  chr1:168311912-168312175
  hyper

SEQ ID NO: 356928 - DNA, 328 bp, Homo sapiens; identical to SEQ ID NO: 331022
  chr1:169074766-169075094
  hyper

SEQ ID NO: 356929 - DNA, 255 bp, Homo sapiens; identical to SEQ ID NO: 197848
  chr1:170633637-170633892
  hyper

SEQ ID NO: 356930 - DNA, 135 bp, Homo sapiens
  chr1:170637507-170637642
  hyper
cgaaaccagattgtcctaataagaccttttgttggaaacacatgtagtcataaaaaggtagacggaaagtcaattagacacgcgcgcacacacgcacacattcacaagccggtgctaagtgtgcacccggcgcag

SEQ ID NO: 356931 - DNA, 346 bp, Homo sapiens; identical to SEQ ID NO: 331030
  chr1:171220542-171220888
  hyper

SEQ ID NO: 356932 - DNA, 135 bp, Homo sapiens; identical to SEQ ID NO: 349354
  chr1:171811643-171811778
  hyper

SEQ ID NO: 356933 - DNA, 108 bp, Homo sapiens; identical to SEQ ID NO: 331033
  chr1:173683937-173684045
  hyper

SEQ ID NO: 356934 - DNA, 301 bp, Homo sapiens; identical to SEQ ID NO: 349355
  chr1:175048508-175048809
  hyper

SEQ ID NO: 356935 - DNA, 227 bp, Homo sapiens; identical to SEQ ID NO: 331035
  chr1:175161560-175161787
  hyper

SEQ ID NO: 356936 - DNA, 116 bp, Homo sapiens; identical to SEQ ID NO: 349357
  chr1:177133329-177133445
  hyper

SEQ ID NO: 356937 - DNA, 177 bp, Homo sapiens; identical to SEQ ID NO: 349358
  chr1:177134163-177134340
  hyper

SEQ ID NO: 356938 - DNA, 98 bp, Homo sapiens
  chr1:177140714-177140812
  hyper
gaaagaaccacaagaaatcatgaagtaaaaactttggaaagctgccactggagatgttgcacaaaaacctggaatcttttaggagtctcctcccagtc

SEQ ID NO: 356939 - DNA, 31 bp, Homo sapiens; identical to SEQ ID NO: 349359
  chr1:177150742-177150773
  hyper

SEQ ID NO: 356940 - DNA, 693 bp, Homo sapiens
  chr1:178062419-178063112
  hyper
cgcggacagggcgcagggcgcagaccctgtgcatatcccagaatcccggacccactgccactccactctgggaaggaagaaggcgctcccccttgggtgactgtaagataaagcagcttcttcgatctctttgtccaataagaaagaaacgttggcccataaagaaagaaagaaacaaataaataggaaaggtgtgagaaggaagggaagctcctttcttttctgtttaaatttcccgcacccttttacctccccgccttctcaaacggtctttactttgagcagcagagacccggaccgctcaatacccggctatccctgggagggtacttggaaagtaggcgggacaggccggatgaataattcggtgtccgacttttcctgcctgcggcgcagtccctccccggcttcgttactcgagtgcacacgcggccgggctctcggccctcgattgcttcagcctatcaccctgggatgccgcctgccgctgccgccgccgccgccgccgccaccgccaccgccaccgccaccgccaccgccgtggctgccgggtttgtgggatccgccgcggagcaggagccagagctgtggccggagctgtggcctgagagtcagggggcgggcaggctcattccagaagtgggggccgaggacaggcgggctagaacccggggccaccgccccctacccctc

SEQ ID NO: 356941 - DNA, 475 bp, Homo sapiens; identical to SEQ ID NO: 197861
  chr1:178063150-178063625
  hyper

SEQ ID NO: 356942 - DNA, 112 bp, Homo sapiens
  chr1:178063733-178063845
  hyper
cggttgtcccagtcagtggagccgtcgccggtggcatgttggatcggatccttctggagtccgtgtgccagcaacagagctgggtccgggtgtacggtaaggaccacaggcc

SEQ ID NO: 356943 - DNA, 194 bp, Homo sapiens
  chr1:180123493-180123687
  hyper
cgatcctgtggggtcttggtggtcgcagaccaagcgtccctcttctcacatctaattcacaacgtctcatcgctccgcgggagcccaggaactgccctacaacagccgaaatccgggtcgtctattccaacggactcctcttccgttggatacgggggccgtgagaggccaaacaacctccgcgaggctacccc

SEQ ID NO: 356944 - DNA, 587 bp, Homo sapiens
  chr1:180123700-180124287
  hyper
cggcgggcgctccattcctttaccggactgtacacctcgcctcctggggcctgaggcgggaacccgggtcgcgctgctccgaggcctcggcggaccgcgaaaggatggctcaccacccggccagggccagcccctgcaacaagctcagccccgcccgctcccgcgcccaggagcggccggcggggcggggtggctgggccggcctcgggggcgggggctcgggggcgggggctcaggggcggggccacgtggctcctccttgcgggcggaggcaggcggtgccgcggcgccgggacccgactcatccggtgcttgcgtgtggtggtgagcgcagcgccgaggatgaggaggtgcaacagcggctccgggccgccgccgtcgctgctgctgctgctgctgtggctgctcgcggttcccggcgctaacgcggccccgcggtcggcgctctattcgccttccgacccgctgacgctgctgcaggcggacacggtgcgcggcgcggtgctgggctcccgcagcgcctgggccgtggagttcttcgcctcctggtgcggccactgcatcgccttcgccccgacgtggaaggc

SEQ ID NO: 356945 - DNA, 1580 bp, Homo sapiens; identical to SEQ ID NO: 331042
  chr1:180199369-180200949
  hyper

SEQ ID NO: 356946 - DNA, 640 bp, Homo sapiens; identical to SEQ ID NO: 331044
  chr1:181059009-181059649
  hyper

SEQ ID NO: 356947 - DNA, 43 bp, Homo sapiens
  chr1:181286822-181286865
  hyper
cgctcccttgccgcctcgcgcgtgccgcccgtgtctggacagc

SEQ ID NO: 356948 - DNA, 110 bp, Homo sapiens; identical to SEQ ID NO: 331048
  chr1:182361452-182361562
  hyper

SEQ ID NO: 356949 - DNA, 249 bp, Homo sapiens; identical to SEQ ID NO: 344982
  chr1:182583799-182584048
  hyper

SEQ ID NO: 356950 - DNA, 40 bp, Homo sapiens; identical to SEQ ID NO: 344983
  chr1:182584613-182584653
  hyper

SEQ ID NO: 356951 - DNA, 77 bp, Homo sapiens; identical to SEQ ID NO: 349363
  chr1:182911469-182911546
  hyper

SEQ ID NO: 356952 - DNA, 118 bp, Homo sapiens
  chr1:184633170-184633288
  hyper
cggctcctctacactctgcagagctgttttcccccttcagagctcctctcctccgggagggcttgcctcgccccggtccaggatctctgccttcggttgaagcgcagcgcccccagcc

SEQ ID NO: 356953 - DNA, 81 bp, Homo sapiens
  chr1:184633350-184633431
  hyper
ggtggtctcctcttccccccatcgcggcccagcaacctgggggtccgcgtgacttctccctggccgggggatggaggatgc

SEQ ID NO: 356954 - DNA, 151 bp, Homo sapiens; identical to SEQ ID NO: 331054
  chr1:184722819-184722970
  hyper

SEQ ID NO: 356955 - DNA, 121 bp, Homo sapiens; identical to SEQ ID NO: 331056
  chr1:185014263-185014384
  hyper

SEQ ID NO: 356956 - DNA, 93 bp, Homo sapiens
  chr1:196577278-196577371
  hyper
cggccctcccatttccgtctctttttcagcaatatttacagaacaatcctccaccacaccactcacctgtcgtcgttttgccatccttggtcc

SEQ ID NO: 356957 - DNA, 193 bp, Homo sapiens; identical to SEQ ID NO: 197889
  chr1:196577435-196577628
  hyper

SEQ ID NO: 356958 - DNA, 99 bp, Homo sapiens
  chr1:197881313-197881412
  hyper
cgccgcctcccgccgagaaccgagttctagttggggaaacgtctgacatctggacatcaaggtaagaccctgatggagatattttagtcggagcagttt

SEQ ID NO: 356959 - DNA, 176 bp, Homo sapiens
  chr1:197881604-197881780
  hyper
cttttctctgccagtgcaaccaccattacggcgtgatccactccttttcctctaagaatgctgaacggtaccactctagaggcaggtgagttatgtgccaggttccttctgatgttctctgccccttgggccagtgcgtataccatgtgagtgtgtgtgcgtgtgtgtgcgccttc

SEQ ID NO: 356960 - DNA, 50 bp, Homo sapiens; identical to SEQ ID NO: 349366
  chr1:197882002-197882052
  hyper

SEQ ID NO: 356961 - DNA, 219 bp, Homo sapiens; identical to SEQ ID NO: 197892
  chr1:197882208-197882427
  hyper

SEQ ID NO: 356962 - DNA, 261 bp, Homo sapiens; identical to SEQ ID NO: 279146
  chr1:197882611-197882872
  hyper

SEQ ID NO: 356963 - DNA, 217 bp, Homo sapiens; identical to SEQ ID NO: 349369
  chr1:200008298-200008515
  hyper

SEQ ID NO: 356964 - DNA, 355 bp, Homo sapiens; identical to SEQ ID NO: 349370
  chr1:200008691-200009046
  hyper

SEQ ID NO: 356965 - DNA, 93 bp, Homo sapiens; identical to SEQ ID NO: 349371
  chr1:200012227-200012320
  hyper

SEQ ID NO: 356966 - DNA, 137 bp, Homo sapiens; identical to SEQ ID NO: 344984
  chr1:200271204-200271341
  hyper

SEQ ID NO: 356967 - DNA, 528 bp, Homo sapiens; identical to SEQ ID NO: 344985
  chr1:200271373-200271901
  hyper

SEQ ID NO: 356968 - DNA, 255 bp, Homo sapiens; identical to SEQ ID NO: 331068
  chr1:200379717-200379972
  hyper

SEQ ID NO: 356969 - DNA, 311 bp, Homo sapiens
  chr1:201228906-201229217
  hyper
cgcccagagagccgccctcttccgggaacctcctgctccggagccaggaagggctgccctttccccaccaggaggccaggcacgagctccaccagggtgtggacccccagggaaagtgcgccaggtgcctgggatgctcaatgggggacttgttccaggactgggaggctggcggggtgggggctgctgcttccctggagcagcacctgtcccccacccccacctcccgcgtcagtggagctgttggcgcttgcacccggcttcccaagcgatgagacacggctcccagccagccgccccaagccgctggc

SEQ ID NO: 356970 - DNA, 42 bp, Homo sapiens
  chr1:201252452-201252494
  hyper
cgagcaggaaggcgcccagcgtcccacacaggggactcgcag

SEQ ID NO: 356971 - DNA, 134 bp, Homo sapiens
  chr1:201252816-201252950
  hyper
cgcctcccgccaccatgaaccactcgccgctcaagaccgccttggcgtacgaatgcttccaggaccaggacaactccacgttggctttgccgtcggaccaaaagatgaaaacaggcacgtctggcaggcagcgc

SEQ ID NO: 356972 - DNA, 206 bp, Homo sapiens; identical to SEQ ID NO: 349375
  chr1:201368376-201368582
  hyper

SEQ ID NO: 356973 - DNA, 121 bp, Homo sapiens; identical to SEQ ID NO: 197902
  chr1:201368727-201368848
  hyper

SEQ ID NO: 356974 - DNA, 578 bp, Homo sapiens; identical to SEQ ID NO: 344986
  chr1:201449645-201450223
  hyper

SEQ ID NO: 356975 - DNA, 289 bp, Homo sapiens
  chr1:201915739-201916028
  hyper
aatccccaagctgggggcgggcctacctcgctgtcagagctgtttgaaacttgaggacattccagggaatcttggagcgctgcgtgaccaaatttagtacagagcagtttagccttttaaagacaaggggccacgcaatgagaaaaagatacaaaaatgcgtaggctggcagaagcagatcacagccacggagagccagacaagcagggacgaggccatgagggccggtgaactcgccagcccggggcacgttcaagagcgtattttactactccatcaccgggtggac

SEQ ID NO: 356976 - DNA, 160 bp, Homo sapiens; identical to SEQ ID NO: 331074
  chr1:202112280-202112440
  hyper

SEQ ID NO: 356977 - DNA, 86 bp, Homo sapiens
  chr1:202183285-202183371
  hyper
cgcttggagggagagggccgctcagcgagggcgggacagaacctctcccgggctgggagtgcacggcgcggtgcgcccaggtaggc

SEQ ID NO: 356978 - DNA, 80 bp, Homo sapiens; identical to SEQ ID NO: 349379
  chr1:202613545-202613625
  hyper

SEQ ID NO: 356979 - DNA, 252 bp, Homo sapiens; identical to SEQ ID NO: 331077
  chr1:202936089-202936341
  hyper

SEQ ID NO: 356980 - DNA, 58 bp, Homo sapiens; identical to SEQ ID NO: 331079
  chr1:203242491-203242549
  hyper

SEQ ID NO: 356981 - DNA, 374 bp, Homo sapiens; identical to SEQ ID NO: 349382
  chr1:204042250-204042624
  hyper

SEQ ID NO: 356982 - DNA, 244 bp, Homo sapiens; identical to SEQ ID NO: 197916
  chr1:204042692-204042936
  hyper

SEQ ID NO: 356983 - DNA, 75 bp, Homo sapiens; identical to SEQ ID NO: 349384
  chr1:204042966-204043041
  hyper

SEQ ID NO: 356984 - DNA, 357 bp, Homo sapiens; identical to SEQ ID NO: 279201
  chr1:204654218-204654575
  hyper

SEQ ID NO: 356985 - DNA, 73 bp, Homo sapiens; identical to SEQ ID NO: 349386
  chr1:204654769-204654842
  hyper

SEQ ID NO: 356986 - DNA, 483 bp, Homo sapiens
  chr1:205313006-205313489
  hyper
acttcactgggaagacgcggcggcggagggcgccccccgggggcagcaccacaccctgcactgcttggtccccgccccctccccacccgctgctcggacactgccgaagcaagccgcaggccggggctttcaggggttcggggtgccgggcagtccccgggcggaggaaggagttagcgtctctcggcgtcgacgcctctctttccccgcgccccctccccgcagtctcggcgcccccgcccccgcatcacttacgctgccaggcccggggagcgcggcggcgaggcgcagacgacgcatcactggggagcccggagcccccgccccgctgcacgggagccggggagagggcgctctgtccttccccagtccgcgcgccgctgtcacacatgcagatgaggagatgaagtgaacagcaggaaggagaagcggagccgccgccggggaggaggccggcgagcctgctccgctccgtccccatcc

SEQ ID NO: 356987 - DNA, 63 bp, Homo sapiens; identical to SEQ ID NO: 349387
  chr1:205400134-205400197
  hyper

SEQ ID NO: 356988 - DNA, 60 bp, Homo sapiens; identical to SEQ ID NO: 197925
  chr1:205425836-205425896
  hyper

SEQ ID NO: 356989 - DNA, 455 bp, Homo sapiens
  chr1:205425997-205426452
  hyper
gtctctcttctctcttttgcagccccccagccccggggccggcgtgcccggcccaccccgccctccgcgccccccgacggccgcggtcagccggcattccggagcagcgcgtcggagctgcaacttcgcgcctaagcgcccgcacctcgcagcccggcgggcgggagacaaaagctgcggcgccgccgccggaggccgcgcggccaaggtgtgttcgctaattgtcaggaaatgtgtgtgtgtgcggccgggagcccgcaggggcgggggaggggacggaggaagaggagacccacccctcctacccccgccactcgccagcgccgggtacccgaaccgggattagagaataaattatctgctctcttctcattgggctgtggctgaggacgccgtcggcggcgccgggctgggagctctcccggctctttgcattcaccgcacagctccggctc

SEQ ID NO: 356990 - DNA, 146 bp, Homo sapiens
  chr1:207628133-207628279
  hyper
gcaggtgctcatcgctctctggccggcggtcagcgctaccgctcgccacgggaaacctacccactgcatgaggcaccagctagccacgtgaggctgtttctgtacacccgaaccgcgctcttgcccagcaaaagcggcagaacctc

SEQ ID NO: 356991 - DNA, 585 bp, Homo sapiens
  chr1:209957600-209958185
  hyper
cgccttccctttctgtccgacatcaaggaccctcggaagatgagatttctccgatccacacaccccacaccagagcatgttatagtgatttgctaaatgaggcataagtctgtctcacatacgttctttttccacgtccgctacaggttcgggggctcagaaactttttgcggcttcctgcctgctgccagaaaggcagctagtcccccacgcccagccgcaagtaacactggaaaacccgcctgcgctgggaagaccctcgcagcccgctctgctccagtcccgcaggcaccttcttgcgcatgcgcacccactcgagtgccgccctctttccccccattccgtgacgtcatccagccgctcgcgcgcctcgcgttagaatcactagctaggcagccttactgcgcgccggaagtttgggccaccgtgcggcccgccctttccggccagactgaacgcggccccatctgtcggcttaggaactgggaagggcggaagtaaacgagaaaaggcggaacctggtgaaactggtttcccgctgctgccctcattttgcttcgccgaacgtcctccctgtgttatgac

SEQ ID NO: 356992 - DNA, 179 bp, Homo sapiens; identical to SEQ ID NO: 331096
  chr1:212838662-212838841
  hyper

SEQ ID NO: 356993 - DNA, 257 bp, Homo sapiens
  chr1:212873467-212873724
  hyper
cggagggaacgcgaagcccacccacgcgaggcgacgcccgggggggtggggaccaggggggcgccatgcagcctttggggtccttcggcggctgccggggaactcaggttgagaaacacagtgggtgttttggggtcggtgttttttcccggtcccatcgcggcatcttcctgcgcctcagccacgccctgcgtccgccccccggcgcgggggtcacagtcccgggggactttctccgcggcgatcagtcatccggg

SEQ ID NO: 356994 - DNA, 224 bp, Homo sapiens; identical to SEQ ID NO: 197940
  chr1:212873750-212873974
  hyper

SEQ ID NO: 356995 - DNA, 116 bp, Homo sapiens; identical to SEQ ID NO: 346393
  chr1:214156950-214157066
  hyper

SEQ ID NO: 356996 - DNA, 155 bp, Homo sapiens; identical to SEQ ID NO: 349390
  chr1:214161233-214161388
  hyper

SEQ ID NO: 356997 - DNA, 157 bp, Homo sapiens
  chr1:214162300-214162457
  hyper
cgctttccgccaaaccccatccttccgatctccccaggctaaaactccggggccggtccccttgtcctttctctttgtcttgtttattatagctgcctttcttcccggctcttccaatttgcttgtcatttgcatacctttcacttctcctttttta

SEQ ID NO: 356998 - DNA, 70 bp, Homo sapiens; identical to SEQ ID NO: 349391
  chr1:214387777-214387847
  hyper

SEQ ID NO: 356999 - DNA, 279 bp, Homo sapiens; identical to SEQ ID NO: 331104
  chr1:214453844-214454123
  hyper

SEQ ID NO: 357000 - DNA, 233 bp, Homo sapiens; identical to SEQ ID NO: 346394
  chr1:214724215-214724448
  hyper

SEQ ID NO: 357001 - DNA, 44 bp, Homo sapiens; identical to SEQ ID NO: 197950
  chr1:214724487-214724531
  hyper

SEQ ID NO: 357002 - DNA, 182 bp, Homo sapiens; identical to SEQ ID NO: 197951
  chr1:214724561-214724743
  hyper

SEQ ID NO: 357003 - DNA, 427 bp, Homo sapiens; identical to SEQ ID NO: 197952
  chr1:214724786-214725213
  hyper

SEQ ID NO: 357004 - DNA, 239 bp, Homo sapiens; identical to SEQ ID NO: 349397
  chr1:214725561-214725800
  hyper

SEQ ID NO: 357005 - DNA, 592 bp, Homo sapiens; identical to SEQ ID NO: 331107
  chr1:216774207-216774799
  hyper

SEQ ID NO: 357006 - DNA, 456 bp, Homo sapiens; identical to SEQ ID NO: 349398
  chr1:218519313-218519769
  hyper

SEQ ID NO: 357007 - DNA, 54 bp, Homo sapiens
  chr1:218520805-218520859
  hyper
aagggttaaaaaaagtgtctcaaaactagcctctccggaaggcgccccctttcc

SEQ ID NO: 357008 - DNA, 151 bp, Homo sapiens; identical to SEQ ID NO: 197959
  chr1:219347035-219347186
  hyper

SEQ ID NO: 357009 - DNA, 55 bp, Homo sapiens; identical to SEQ ID NO: 344990
  chr1:219347516-219347571
  hyper

SEQ ID NO: 357010 - DNA, 91 bp, Homo sapiens
  chr1:220102055-220102146
  hyper
acttggcaggtggccacgagccgatgtctctctttgtgggacaggactgtgcagagaggggcgctgcggaggagagggggcgtgtctggac

SEQ ID NO: 357011 - DNA, 197 bp, Homo sapiens; identical to SEQ ID NO: 349401
  chr1:220700617-220700814
  hyper

SEQ ID NO: 357012 - DNA, 592 bp, Homo sapiens
  chr1:220701523-220702115
  hyper
cgctgctccgcgcgcagccggctcgggccgctcctcctgactgaggcgcggcggcggcggtggctgtgaccgcgcggaccgagccgagacattcgcgccgggggatcgggcgccgccgccgctgggccccgggcgcgtggatgcggctgggtcgggcggcgccgtacacctgaggcggagaacggggcgcggcgcgggtgacgctgtcagggccgcggttcctgacgcccaggcgctcgccaggacgagccaggcagtgatttgaggcaccggcttcaccttcacccatggtccggagagcctagcggggctcgccaccgcctcccggctccccttccacgcctcatcctgccagcctcgccgccccgccagcgccgggcaaccgcctcgcccgaagccctccctcgttactgtccgcataccccggcggcgccgccgcgggaagcggctccccctcctcttcctccgcgtcctcttccctctttcccccgccggggccgcttgttgcaccgccccgcggcctgcgggagccgctcgccccggccttgtgctcgcgtccgcacccctttcctgtcgccccccggggcccgca

SEQ ID NO: 357013 - DNA, 133 bp, Homo sapiens; identical to SEQ ID NO: 346400
  chr1:220863507-220863640
  hyper

SEQ ID NO: 357014 - DNA, 198 bp, Homo sapiens; identical to SEQ ID NO: 349403
  chr1:220921368-220921566
  hyper

SEQ ID NO: 357015 - DNA, 115 bp, Homo sapiens; identical to SEQ ID NO: 349404
  chr1:220922060-220922175
  hyper

SEQ ID NO: 357016 - DNA, 42 bp, Homo sapiens; identical to SEQ ID NO: 331120
  chr1:220950193-220950235
  hyper

SEQ ID NO: 357017 - DNA, 83 bp, Homo sapiens; identical to SEQ ID NO: 349406
  chr1:221051890-221051973
  hyper

SEQ ID NO: 357018 - DNA, 37 bp, Homo sapiens; identical to SEQ ID NO: 331122
  chr1:223936543-223936580
  hyper

SEQ ID NO: 357019 - DNA, 33 bp, Homo sapiens
  chr1:224528889-224528922
  hyper
ctttgggatgcagagcacaggggacccaccgcc

SEQ ID NO: 357020 - DNA, 234 bp, Homo sapiens; identical to SEQ ID NO: 279312
  chr1:224803483-224803717
  hyper

SEQ ID NO: 357021 - DNA, 99 bp, Homo sapiens; identical to SEQ ID NO: 197977
  chr1:225117651-225117750
  hyper

SEQ ID NO: 357022 - DNA, 66 bp, Homo sapiens; identical to SEQ ID NO: 346403
  chr1:225117751-225117817
  hyper

SEQ ID NO: 357023 - DNA, 936 bp, Homo sapiens; identical to SEQ ID NO: 331128
  chr1:225614356-225615292
  hyper

SEQ ID NO: 357024 - DNA, 44 bp, Homo sapiens; identical to SEQ ID NO: 349411
  chr1:226736488-226736532
  hyper

SEQ ID NO: 357025 - DNA, 67 bp, Homo sapiens; identical to SEQ ID NO: 349412
  chr1:226814279-226814346
  hyper

SEQ ID NO: 357026 - DNA, 34 bp, Homo sapiens; identical to SEQ ID NO: 344992
  chr1:226924738-226924772
  hyper

SEQ ID NO: 357027 - DNA, 1206 bp, Homo sapiens; identical to SEQ ID NO: 197984
  chr1:226925659-226926865
  hyper

SEQ ID NO: 357028 - DNA, 49 bp, Homo sapiens; identical to SEQ ID NO: 344995
  chr1:226926951-226927000
  hyper

SEQ ID NO: 357029 - DNA, 260 bp, Homo sapiens; identical to SEQ ID NO: 349416
  chr1:227505256-227505516
  hyper

SEQ ID NO: 357030 - DNA, 153 bp, Homo sapiens; identical to SEQ ID NO: 197988
  chr1:227505859-227506012
  hyper

SEQ ID NO: 357031 - DNA, 212 bp, Homo sapiens; identical to SEQ ID NO: 349418
  chr1:227506042-227506254
  hyper

SEQ ID NO: 357032 - DNA, 84 bp, Homo sapiens
  chr1:228225442-228225526
  hyper
cggccgactccccgccgcgtccggctgggagcacaatatcccagcgacggcgacaagattaagcacaaggggagagtgcaaatg

SEQ ID NO: 357033 - DNA, 62 bp, Homo sapiens
  chr1:228225939-228226001
  hyper
aggtgggcagcccccgaggggaggcgcccgggcgtcggctccggcgggctccggcggggacc

SEQ ID NO: 357034 - DNA, 253 bp, Homo sapiens; identical to SEQ ID NO: 279361
  chr1:228646941-228647194
  hyper

SEQ ID NO: 357035 - DNA, 117 bp, Homo sapiens; identical to SEQ ID NO: 279362
  chr1:228647317-228647434
  hyper

SEQ ID NO: 357036 - DNA, 142 bp, Homo sapiens
  chr1:228652629-228652771
  hyper
attgaggtcttctctggctgtgaggcacatacatgggggcattttttttttctgaggcccacagctagggaggggtagttagtgcttatttagaaggggaggtggcggtgggaatggcagtttgcaacgaccttaacccttc

SEQ ID NO: 357037 - DNA, 97 bp, Homo sapiens; identical to SEQ ID NO: 346407
  chr1:228870708-228870805
  hyper

SEQ ID NO: 357038 - DNA, 328 bp, Homo sapiens; identical to SEQ ID NO: 198004
  chr1:228870899-228871227
  hyper

SEQ ID NO: 357039 - DNA, 269 bp, Homo sapiens; identical to SEQ ID NO: 198005
  chr1:228871596-228871865
  hyper

SEQ ID NO: 357040 - DNA, 252 bp, Homo sapiens; identical to SEQ ID NO: 349424
  chr1:228872003-228872255
  hyper

SEQ ID NO: 357041 - DNA, 103 bp, Homo sapiens; identical to SEQ ID NO: 349425
  chr1:229543603-229543706
  hyper

SEQ ID NO: 357042 - DNA, 618 bp, Homo sapiens
  chr1:230561973-230562591
  hyper
ccgccgccaccgccgccaccaccgccaccaccgccgccgctgcgtctcctcggcgcccgccgcctccctgcccgccctctccacggcctccggcgctcggctgccgaccttcccgggcgcgagccgccagaggcgggccctgccgcccctcacctcccgcccgccggccaatggggagcccggcccggacagccgcgggggagctgggcgggcccggcgcggggaacgcccccaccctcctccgcggggcggggcggggcgcgcggccggggctggcggttagggggagggccgccggcggcagtgccggtctcctcctacagggacgcgcagcccgggaccgccacgcgcagcgcgggagggggagggcgggaccggggaacaggaggggagggggacccgggtgcttccagcggtccgggcccgcggacggagtgcgggccgatcccgctcactgtccccttccgcagtccgcgtgcagctccagggagctgtccgccccggtggttctgaaccaggcgccgccgaaacgctccaggtaggcggcgggcccgaggtcaccacacccgcggcggcggctgctgccgaggtttcctgggggtcactgccagctgcgcc

SEQ ID NO: 357043 - DNA, 44 bp, Homo sapiens
  chr1:231053141-231053185
  hyper
cgttacttgctaataaaccgcctctagggggcgctgacatacac

SEQ ID NO: 357044 - DNA, 587 bp, Homo sapiens; identical to SEQ ID NO: 349427
  chr1:231175062-231175649
  hyper

SEQ ID NO: 357045 - DNA, 709 bp, Homo sapiens; identical to SEQ ID NO: 349428
  chr1:231175692-231176401
  hyper

SEQ ID NO: 357046 - DNA, 58 bp, Homo sapiens; identical to SEQ ID NO: 349429
  chr1:231297569-231297627
  hyper

SEQ ID NO: 357047 - DNA, 61 bp, Homo sapiens
  chr1:231297736-231297797
  hyper
cgagcccttattcgctgagctgaagcctcctcccccctcctccccattactctctgctctg

SEQ ID NO: 357048 - DNA, 155 bp, Homo sapiens; identical to SEQ ID NO: 349430
  chr1:232765040-232765195
  hyper

SEQ ID NO: 357049 - DNA, 162 bp, Homo sapiens; identical to SEQ ID NO: 198015
  chr1:232765375-232765537
  hyper

SEQ ID NO: 357050 - DNA, 411 bp, Homo sapiens; identical to SEQ ID NO: 349432
  chr1:232765595-232766006
  hyper

SEQ ID NO: 357051 - DNA, 322 bp, Homo sapiens
  chr1:233749409-233749731
  hyper
cgcgcgcgaacacacacacacacacacgcacacgccgcgcgcggtcagctagagtttggctactggacccaggaagggagggagcgggaggagctggtggctgtcgggtcggggtctgggcgccaccgagcgcccgccccacctctggagtgcgcagaaggcggtgcgtcccgggccccggcagcccagcccaggcgctctggccaagtttgcgcgcggtctccgctgactctcgggttacctgagccggcaaccacgtcagcgccacatcatctgggctttttatattgcaaggaaacaggaaaagaaggaagaaaaacat

SEQ ID NO: 357052 - DNA, 314 bp, Homo sapiens; identical to SEQ ID NO: 198020
  chr1:233749768-233750082
  hyper

SEQ ID NO: 357053 - DNA, 181 bp, Homo sapiens; identical to SEQ ID NO: 349434
  chr1:233750511-233750692
  hyper

SEQ ID NO: 357054 - DNA, 116 bp, Homo sapiens; identical to SEQ ID NO: 279397
  chr1:234350341-234350457
  hyper

SEQ ID NO: 357055 - DNA, 174 bp, Homo sapiens; identical to SEQ ID NO: 349435
  chr1:234736252-234736426
  hyper

SEQ ID NO: 357056 - DNA, 162 bp, Homo sapiens; identical to SEQ ID NO: 331158
  chr1:234812061-234812223
  hyper

SEQ ID NO: 357057 - DNA, 81 bp, Homo sapiens
  chr1:235811934-235812015
  hyper
cggcacacctcactcatgagcagacgacaggactggcacgttttaatggagcacacgggcgcagcctaggcggccttttgc

SEQ ID NO: 357058 - DNA, 184 bp, Homo sapiens; identical to SEQ ID NO: 279411
  chr1:235813161-235813345
  hyper

SEQ ID NO: 357059 - DNA, 98 bp, Homo sapiens; identical to SEQ ID NO: 349438
  chr1:236850212-236850310
  hyper

SEQ ID NO: 357060 - DNA, 36 bp, Homo sapiens; identical to SEQ ID NO: 198032
  chr1:237205188-237205224
  hyper

SEQ ID NO: 357061 - DNA, 420 bp, Homo sapiens; identical to SEQ ID NO: 349439
  chr1:241519651-241520071
  hyper

SEQ ID NO: 357062 - DNA, 50 bp, Homo sapiens; identical to SEQ ID NO: 198037
  chr1:241520533-241520583
  hyper

SEQ ID NO: 357063 - DNA, 147 bp, Homo sapiens; identical to SEQ ID NO: 198038
  chr1:241520612-241520759
  hyper

SEQ ID NO: 357064 - DNA, 91 bp, Homo sapiens; identical to SEQ ID NO: 349442
  chr1:241520789-241520880
  hyper

SEQ ID NO: 357065 - DNA, 156 bp, Homo sapiens
  chr1:243646223-243646379
  hyper
cgtgtgtggttcgcaggctgtggggggcttcttgcagcgggggctgctgcctaaacagactccgcgggccccatgatggcaaaccccctcgccccgttcatgacttaatgcctcctagaagaaaaggctaaaaacaagacacacagaacaagaaat

SEQ ID NO: 357066 - DNA, 499 bp, Homo sapiens; identical to SEQ ID NO: 349443
  chr1:244013722-244014221
  hyper

SEQ ID NO: 357067 - DNA, 168 bp, Homo sapiens; identical to SEQ ID NO: 279435
  chr1:244080795-244080963
  hyper

SEQ ID NO: 357068 - DNA, 137 bp, Homo sapiens; identical to SEQ ID NO: 349444
  chr1:247170868-247171005
  hyper

SEQ ID NO: 357069 - DNA, 307 bp, Homo sapiens; identical to SEQ ID NO: 331178
  chr1:247241973-247242280
  hyper

SEQ ID NO: 357070 - DNA, 819 bp, Homo sapiens; identical to SEQ ID NO: 331179
  chr1:247267064-247267883
  hyper

SEQ ID NO: 357071 - DNA, 177 bp, Homo sapiens; identical to SEQ ID NO: 331181
  chr1:248406552-248406729
  hyper

SEQ ID NO: 357072 - DNA, 534 bp, Homo sapiens
  chr2:45398-45932
  hyper
cgcacacggccagccccgcccccagccttctgggcacacacctcgggtccggctctgctcctggctgggggtctccttggccttcttacaggtgtacagccacttgatgatgcgggcgttcctctcgatgaccgaagtggtgctgggcacctgctctatcagctcctcctcctgcagcccctcgtcgtcgccgccgctgtgccgggagaagccgctgccggaggtggcgacgctcacgctgcgcaccttgagggtcacacagtccgaccccgcggtgaagttctccctccccagggcctccaccacctcggggtccaggccgcagtactggaagaaggtgtcagactcggccaaggcagcggaatagcgggagctgaggtccgactgtgagcgctgcagcccccgacgcctcaccacccgcggctctggcccagggggcgcggccgggacactggagggcgccgcggaccgcgcggctggggctggggtctcggggattgcggggtccgccgcggggccaggagtggtcgggac

SEQ ID NO: 357073 - DNA, 245 bp, Homo sapiens; identical to SEQ ID NO: 279456
  chr2:45969-46214
  hyper

SEQ ID NO: 357074 - DNA, 143 bp, Homo sapiens
  chr2:46450-46593
  hyper
gtcagtcccagggccggttccgaagtccgcgccgggtggggaacggcgccccagtgcccagctgcccaggcccggggttggggagaaccggagtctgcaccgattggcgaaactccccagttcccgcccctcccgacctcatc

SEQ ID NO: 357075 - DNA, 530 bp, Homo sapiens
  chr2:46665-47195
  hyper
cgtccccgcccgtccccgcctcctcactcccgcccgggcccgcctccctggccgctctccgggtgccagcgcccgccctcacctcgcgtccggggtcccggccctcacctcctgcccggtgccgtccccgccccccctcaccttccggcggcgctgccaaccgcctggaggacgctggggcgagcaggctctgaacccccactcgctcagccccagatccccgaggtcactgctggacgcaggcatttccggggagggggagcagaggggacgtccccccacctcccccgggcaggtgcctcacatcctttgaattcttaaagtgacctcatcgtgtttggaaacttgactgtttaattttgtctacctgagctcatattcttattaacagaaaggaataggacataagaggaaagaacacgcagcgcacgccaggatcagcctacgtgttgggtggcaagaacgcagggcctcggattgggtccgactcggtcgctggccggcagcgggcgtggccgggcccgaggacc

SEQ ID NO: 357076 - DNA, 105 bp, Homo sapiens
  chr2:945447-945552
  hyper
cgtggcctccgcgatgggcgctcgtgcctgggtcgaaggactggggggcggaggatttggaaagggagaaaaatacgggctggcttctttttaaaaaatgtgggt

SEQ ID NO: 357077 - DNA, 128 bp, Homo sapiens; identical to SEQ ID NO: 331190
  chr2:3307454-3307582
  hyper

SEQ ID NO: 357078 - DNA, 259 bp, Homo sapiens
  chr2:5866211-5866470
  hyper
ggaaggtgtgtgtcacagtccctaatggatcagctaccaatcattagccaagtccttctcttacttttctcctcggagagaaccaagcttagacaatagcatggctttcgaggtgggaaggacctcatgaaggagacggaaaagagtgactgcagatcttacatgtaggatctggcggagctcagcttaaagccgttgccacccagccatgggcattttctccacattttgcaggcatcctacaactgaaaactgggtc

SEQ ID NO: 357079 - DNA, 270 bp, Homo sapiens
  chr2:7005163-7005433
  hyper
cggcccgggcggcttcccggtccgggaagaccacggaactgggcaagtctggcaccaccgggtgcagcgggggctccgggacgggcacgacctgtgcgcagcccacctgcagccgcctgccgtcttgcacctcccagaggcgctgccacagctggccgcgcgggtcggcctcgaactcgcccaagtgcgggcgtggtgcctcctgacaggcgcccagcagctcgagcagcgcttgccgggtgtcagggtcatccagggggtcgcgcagca

SEQ ID NO: 357080 - DNA, 728 bp, Homo sapiens; identical to SEQ ID NO: 349448
  chr2:7005469-7006197
  hyper

SEQ ID NO: 357081 - DNA, 291 bp, Homo sapiens; identical to SEQ ID NO: 344998
  chr2:7057762-7058053
  hyper

SEQ ID NO: 357082 - DNA, 41 bp, Homo sapiens; identical to SEQ ID NO: 344999
  chr2:7058391-7058432
  hyper

SEQ ID NO: 357083 - DNA, 166 bp, Homo sapiens; identical to SEQ ID NO: 331200
  chr2:10152421-10152587
  hyper

SEQ ID NO: 357084 - DNA, 201 bp, Homo sapiens
  chr2:10183602-10183803
  hyper
cgcggtgtattttggttcgcctccgcgccccgccccgccagccgctccctccgcggccgccccgcccctcccgcgccgcgagggccgcgccggggcagagccgcgcgggcgggcgaggcgcgtgccggccgcaggagctccgggttgccgccgccgccgccgcccgcagcccacgtgcggccgctgctgcgcccgagctca

SEQ ID NO: 357085 - DNA, 439 bp, Homo sapiens
  chr2:10183814-10184253
  hyper
cgctttgttgctcccggccggcctgcacgatgcacacgccggacttcgcaggcccagacgacgcgcgcgcagtgagtggtggggctgccgcggcgggactactcgtctgagcgaggggcgaggcgggggaagtggtgcggcactcgcgcgcctgtaaatgcgggaggtggggcgtgcagggcttcgctgcggccgcgccggtaggggcctgggcgggctccggagccgggcggggcggcggccgcgacgggcgcgcccgggtcggcgggggcgaggagggggcgtgttccccgcgcagctttgtcttgcgcttcctgggcggccccgccccgctggccccgcggctatttccagccatgacgtcaccccggtcctgtgagccggacggccgttgggcgggggagcggctggcgggaacgcggcacgcggccttgggggc

SEQ ID NO: 357086 - DNA, 213 bp, Homo sapiens; identical to SEQ ID NO: 331202
  chr2:10587836-10588049
  hyper

SEQ ID NO: 357087 - DNA, 178 bp, Homo sapiens; identical to SEQ ID NO: 345000
  chr2:10588876-10589054
  hyper

SEQ ID NO: 357088 - DNA, 117 bp, Homo sapiens; identical to SEQ ID NO: 198078
  chr2:10589055-10589172
  hyper

SEQ ID NO: 357089 - DNA, 197 bp, Homo sapiens; identical to SEQ ID NO: 345002
  chr2:10589298-10589495
  hyper

SEQ ID NO: 357090 - DNA, 42 bp, Homo sapiens
  chr2:11051801-11051843
  hyper
cggcagcattctctccccactaatcctctccaaacagcagtg

SEQ ID NO: 357091 - DNA, 229 bp, Homo sapiens; identical to SEQ ID NO: 279516
  chr2:11052132-11052361
  hyper

SEQ ID NO: 357092 - DNA, 70 bp, Homo sapiens; identical to SEQ ID NO: 346417
  chr2:12856411-12856481
  hyper

SEQ ID NO: 357093 - DNA, 849 bp, Homo sapiens; identical to SEQ ID NO: 346418
  chr2:12856549-12857398
  hyper

SEQ ID NO: 357094 - DNA, 184 bp, Homo sapiens
  chr2:12857960-12858144
  hyper
cgcgttgggactgagtcgccgccgtgagctccccgaagactgcacaaactaccgcgggctcctccgccccgtctgcgattcggaagccggcctgggggtcgcgtcgggagccctggcgctgcagctccgcaccttagcagcccgggtactcatccagatccacgccggggacacacacacagag

SEQ ID NO: 357095 - DNA, 283 bp, Homo sapiens
  chr2:14772282-14772565
  hyper
aaagacgtctggggaacgaaaagggtcttcgatccaaggaccagcctaggggccatcgggaaccaaggctctgggggatcccagcagggcccagacgcccgcctcgggcaatgtcgctgcctgccccgggccgctcgcagtgcctgggccatactggggtgccctggggtttcttctccatacccagactcagcttccccgctggagtctgtcttcctggaacacggaacgcgggcgggctgtgttctcagtcacaatcagctcggatgagctggggggcgcg

SEQ ID NO: 357096 - DNA, 167 bp, Homo sapiens
  chr2:14772823-14772990
  hyper
gtcggcgcggcggtgggaaagcagagccgagccgggactgtccagtgggagcaggcgccccggccagcgcagacctggaggcgcacgggcgccgcaccgcacgattcggctcggggtagagcggagccgcagccccacgcgcagcccaggacccactcgccaccgcc

SEQ ID NO: 357097 - DNA, 78 bp, Homo sapiens
  chr2:14773829-14773907
  hyper
cgagttcccggaaggggtcggaggctgtgtggtggcgtctgctctcgcctgacctgtggcggcttctccgcccctcgt

SEQ ID NO: 357098 - DNA, 239 bp, Homo sapiens; identical to SEQ ID NO: 198087
  chr2:14774042-14774281
  hyper

SEQ ID NO: 357099 - DNA, 255 bp, Homo sapiens; identical to SEQ ID NO: 198088
  chr2:14774684-14774939
  hyper

SEQ ID NO: 357100 - DNA, 239 bp, Homo sapiens; identical to SEQ ID NO: 198089
  chr2:14775287-14775526
  hyper

SEQ ID NO: 357101 - DNA, 359 bp, Homo sapiens
  chr2:16790115-16790474
  hyper
cgactcagaccaccacgtcagtgaagaggtgaagctgggtcctgaactgctgctgcgatgggatcattcacatggctattaatcatacaagagcccatttatgacaaacgcaggtcactccctttgcatgacaaggcacatgggtccacagagccccattatccaaaaaaaaacacagagcattgtgggcgatgcaggcgaaggcgagtgcacacacacaagcggacattgtaaggctgtttgcacaaccccgccgtgctcctcgcggatttcctgccaaggagacatttagatctcacagaggcggctgcagacatttgctcattcaacatggcttcaggcagtggctgcggaaaccc

SEQ ID NO: 357102 - DNA, 460 bp, Homo sapiens; identical to SEQ ID NO: 331212
  chr2:17699502-17699962
  hyper

SEQ ID NO: 357103 - DNA, 159 bp, Homo sapiens; identical to SEQ ID NO: 349460
  chr2:17721363-17721522
  hyper

SEQ ID NO: 357104 - DNA, 241 bp, Homo sapiens; identical to SEQ ID NO: 349461
  chr2:17721867-17722108
  hyper

SEQ ID NO: 357105 - DNA, 419 bp, Homo sapiens; identical to SEQ ID NO: 279542
  chr2:18060198-18060617
  hyper

SEQ ID NO: 357106 - DNA, 137 bp, Homo sapiens; identical to SEQ ID NO: 198097
  chr2:19550409-19550546
  hyper

SEQ ID NO: 357107 - DNA, 274 bp, Homo sapiens; identical to SEQ ID NO: 346421
  chr2:19550611-19550885
  hyper

SEQ ID NO: 357108 - DNA, 297 bp, Homo sapiens; identical to SEQ ID NO: 349464
  chr2:19551656-19551953
  hyper

SEQ ID NO: 357109 - DNA, 361 bp, Homo sapiens; identical to SEQ ID NO: 279548
  chr2:19557098-19557459
  hyper

SEQ ID NO: 357110 - DNA, 137 bp, Homo sapiens
  chr2:19557489-19557626
  hyper
atcctatggagaatatccctaagttagagcgcgagtgcaaggcggggttcagactcgcagccctgcgctctcgggtctaggcggcctcatactagagcgcaactcctcaaaagacaaacttgaacgaaagcgctacc

SEQ ID NO: 357111 - DNA, 33 bp, Homo sapiens
  chr2:19557652-19557685
  hyper
cgcggtcggctgcggctgtggccattcactccc

SEQ ID NO: 357112 - DNA, 234 bp, Homo sapiens; identical to SEQ ID NO: 279550
  chr2:19557727-19557961
  hyper

SEQ ID NO: 357113 - DNA, 340 bp, Homo sapiens; identical to SEQ ID NO: 279551
  chr2:19558041-19558381
  hyper

SEQ ID NO: 357114 - DNA, 286 bp, Homo sapiens
  chr2:19561707-19561993
  hyper
tcggagtgaaaattgagcagcttccagaaaattaactagaatgtggtctatattgctttgagttgttttggattcaaaaaaaaatgaaccccacctctccgcaccccatagcctaaaaaaaaaaaaaaaagtcctcattttttcaaatgaagtttgctcagcacttgcgaatttttgcttccaacgcaactacttcctgtaactactttgcagacaattgggggtctgctcgttagaaacccccttacgcatgtacagggctttcaaataacctggagatttaggc

SEQ ID NO: 357115 - DNA, 141 bp, Homo sapiens
  chr2:19563170-19563311
  hyper
cgtccttgctctcagatggatgagggcttttgtttgtttgtttgtttgtttttaaataatccgaaattcctagcaactatctgccgccgttcgcttctggtcctgggaagacgatgagcaaagatctactgggaccccatc

SEQ ID NO: 357116 - DNA, 67 bp, Homo sapiens
  chr2:19563433-19563500
  hyper
ggctttctgaagaagcgcgggaagaagagagagagtctgtttccgtgaatcgatttccctgaaacac

SEQ ID NO: 357117 - DNA, 431 bp, Homo sapiens; identical to SEQ ID NO: 345003
  chr2:20425309-20425740
  hyper

SEQ ID NO: 357118 - DNA, 387 bp, Homo sapiens
  chr2:20646879-20647266
  hyper
cgaggcccggagagacccgggagagagctaggccgagtccaccgcccgagtctgctgcccgagcccgcgttacgcacaaagccgccgatccccggcctggggtgagcagagcgaccaccgcccgggagcagcgcggcgagacgcacggtgcgccctatgcccccgcgcccccaccgcccccgccgcggcagccgaagcgcagcgagagaacgcgccaccgcggggcccgggtgcagctagcgaccctctcgccacctgcgcgcagcccgaggtgagcagtgagcggcgagcgggagggcagcgaggcgttcgcgggccccctcctgctgcccgggcccggcccgctcatggcggccatccgcaagaagctggtggtggtgggcgacg

SEQ ID NO: 357119 - DNA, 461 bp, Homo sapiens
  chr2:20647309-20647770
  hyper
cgagttccccgaggtgtacgtgcccaccgtcttcgagaactatgtggccgacattgaggtggacggcaagcaggtggagctggcgctgtgggacacggcgggccaggaggactacgaccgcctgcggccgctctcctacccggacaccgacgtcattctcatgtgcttctcggtggacagcccggactcgctggagaacatccccgagaagtgggtccccgaggtgaagcacttctgtcccaatgtgcccatcatcctggtggccaacaaaaaagacctgcgcagcgacgagcatgtccgcacagagctggcccgcatgaagcaggaacccgtgcgcacggatgacggccgcgccatggccgtgcgcatccaagcctacgactacctcgagtgctctgccaagaccaaggaaggcgtgcgcgaggtcttcgagacggccacgcgcgccgcgctgcagaagc

SEQ ID NO: 357120 - DNA, 174 bp, Homo sapiens; identical to SEQ ID NO: 346423
  chr2:20865462-20865636
  hyper

SEQ ID NO: 357121 - DNA, 449 bp, Homo sapiens; identical to SEQ ID NO: 198111
  chr2:20866660-20867109
  hyper

SEQ ID NO: 357122 - DNA, 155 bp, Homo sapiens; identical to SEQ ID NO: 349468
  chr2:20867313-20867468
  hyper

SEQ ID NO: 357123 - DNA, 508 bp, Homo sapiens; identical to SEQ ID NO: 198113
  chr2:21022199-21022707
  hyper

SEQ ID NO: 357124 - DNA, 249 bp, Homo sapiens; identical to SEQ ID NO: 198115
  chr2:23609647-23609896
  hyper

SEQ ID NO: 357125 - DNA, 206 bp, Homo sapiens; identical to SEQ ID NO: 349471
  chr2:23610070-23610276
  hyper

SEQ ID NO: 357126 - DNA, 513 bp, Homo sapiens; identical to SEQ ID NO: 349472
  chr2:24272450-24272963
  hyper

SEQ ID NO: 357127 - DNA, 243 bp, Homo sapiens
  chr2:24714924-24715167
  hyper
cggaatctcgcctgccgggaccgcgaaatgggggcgaccgcggcgtccctctccgtcggcgcagccctcgacggcgcttgggtttgaccccggcgcgcttgctcgccccttctcccgagaaggggtttcggaggtagacatgggatggatactggacatgttcctgtcgcggcccgggtttggtccccttcctgggattcagccgaaagggccgaggaagggaagcaaacatgttgacgaggc

SEQ ID NO: 357128 - DNA, 206 bp, Homo sapiens; identical to SEQ ID NO: 349473
  chr2:25142479-25142685
  hyper

SEQ ID NO: 357129 - DNA, 287 bp, Homo sapiens
  chr2:25354461-25354748
  hyper
cggagtccgttttcctcgggagaagtccgccaggaagttgggagcgcagaggaagcccaggctggaagggggcgtgaccctgccctgcctgcgcgcggtgcacagaggaggagggtgccagccttggatctcgggtgtcccgccccaccgctctcagggcccacagtactggagatgttcaacacgctgctgaggcagctgcggctcagcatcgactacgcgctgaccgggagctacgacggggcggtcagcctcggcaccaagatcatcaaggagcacgaggagcg

SEQ ID NO: 357130 - DNA, 44 bp, Homo sapiens
  chr2:25354957-25355001
  hyper
ggttggagagggagggaccgcactggggcgaagggcatccaacc

SEQ ID NO: 357131 - DNA, 93 bp, Homo sapiens; identical to SEQ ID NO: 331235
  chr2:25464444-25464537
  hyper

SEQ ID NO: 357132 - DNA, 79 bp, Homo sapiens; identical to SEQ ID NO: 198137
  chr2:26521880-26521959
  hyper

SEQ ID NO: 357133 - DNA, 374 bp, Homo sapiens; identical to SEQ ID NO: 349476
  chr2:26522127-26522501
  hyper

SEQ ID NO: 357134 - DNA, 54 bp, Homo sapiens
  chr2:27069931-27069985
  hyper
tctgcagctgcagcttggaggtccttgatgctgcattttaacgcgcatcgcaac

SEQ ID NO: 357135 - DNA, 50 bp, Homo sapiens
  chr2:27165764-27165814
  hyper
cggcagcgccagggaacgctagagtcagaaaatgctgatttctgttcccc

SEQ ID NO: 357136 - DNA, 134 bp, Homo sapiens
  chr2:27304246-27304380
  hyper
cgtggcctctggagaccgcaggtcccagcatgcagcagttcctgtggcttgccttccctcctgcgtgctgcacaccggatgtgctgtttccctgccccgagatagccttactataattatgcaaacaggaactc

SEQ ID NO: 357137 - DNA, 250 bp, Homo sapiens; identical to SEQ ID NO: 198140
  chr2:27308893-27309143
  hyper

SEQ ID NO: 357138 - DNA, 111 bp, Homo sapiens; identical to SEQ ID NO: 1396
  chr2:27309206-27309317
  hyper

SEQ ID NO: 357139 - DNA, 88 bp, Homo sapiens; identical to SEQ ID NO: 349479
  chr2:27473102-27473190
  hyper

SEQ ID NO: 357140 - DNA, 58 bp, Homo sapiens; identical to SEQ ID NO: 346425
  chr2:27938267-27938325
  hyper

SEQ ID NO: 357141 - DNA, 51 bp, Homo sapiens; identical to SEQ ID NO: 349481
  chr2:29033285-29033336
  hyper

SEQ ID NO: 357142 - DNA, 206 bp, Homo sapiens; identical to SEQ ID NO: 198150
  chr2:30143712-30143918
  hyper

SEQ ID NO: 357143 - DNA, 157 bp, Homo sapiens
  chr2:30144693-30144850
  hyper
ctgttccctctccagtctcttgttcttcccctcctctagattccctgccctatttctctgcagtgtgaaagggagcaaatgtgagaactggaagaggcctttgcaatcaagcactctccctaattatacatttaagagattaaacgggtccgacttc

SEQ ID NO: 357144 - DNA, 37 bp, Homo sapiens; identical to SEQ ID NO: 345005
  chr2:30453530-30453567
  hyper

SEQ ID NO: 357145 - DNA, 461 bp, Homo sapiens
  chr2:30454942-30455403
  hyper
cggagagctgcaggaggcgcgcgccccacttggcgcaggggggctcctgctcttcccgggcccctcctctttttctttttgtttgcatgcaagtctcaacgtcgaggccggcagcagcggggctgagctggtgcggccgcagggtttgcagagctccgggggggtggggggcgggaaacgctctccccacacgtaaccccactaaagccacaagcagcagggcacgcgctgcagcctctcaacccctgccctctccaccgcccctaaaaaccgacgcacattggtgggggccgggactgggaggagccgccttcgccgtgctgaaggggaaggagcccgggccgggcgcggggcgtcggaggtttgccccggactggggatcggagccgggagggatgcagagagaggcaggcccctgactgctgggacttccttgctggcagtttcttccttcctgctct

SEQ ID NO: 357146 - DNA, 68 bp, Homo sapiens; identical to SEQ ID NO: 198154
  chr2:31361021-31361089
  hyper

SEQ ID NO: 357147 - DNA, 178 bp, Homo sapiens; identical to SEQ ID NO: 198155
  chr2:31361118-31361296
  hyper

SEQ ID NO: 357148 - DNA, 70 bp, Homo sapiens; identical to SEQ ID NO: 346429
  chr2:31361690-31361760
  hyper

SEQ ID NO: 357149 - DNA, 105 bp, Homo sapiens; identical to SEQ ID NO: 198157
  chr2:31457427-31457532
  hyper

SEQ ID NO: 357150 - DNA, 408 bp, Homo sapiens; identical to SEQ ID NO: 349487
  chr2:32852661-32853069
  hyper

SEQ ID NO: 357151 - DNA, 702 bp, Homo sapiens
  chr2:37899247-37899949
  hyper
cggtgacccgcagggaagcgaggccacctgagtgcgccgccccggccaggccgcagctccccaggtccctctcagcccgggctccggtgggcgcggagggggagggtcgcgttctgtcagtttctagctcgctcccctcagagctgcagccaaaacccggagagtggaataagcgccctgaagatgccggagctcccggctgagcaactggacacgcgacgaacagcagacgctacaggttctcctacccagagggaggcgtttcttctccctcagggtctttcaaaaggatttgcctaaagctggggcaagccggtggcggctgccccagacgcgcgacgaggcgcaagtggcgcagctgccggcccgagagagtaaaattcaggccgcggtggcacctgcgcccgccggtcacccggccaccgccagcgccgccgcccggcgcgcccctcccctccgccggggccggagcgtgaaccgggttaatgaatgctaattttcttaatcggcctccgtctcttcctcctccgcgagtcgtcggcctggggaaggagtaggcgacaggaaagggcggtgttttccggctgggaggtcccagcccgcatggtcagccaggggagggggctgggacccctgggagtcggacgctgggggcctggcctctgccctgagactctcgggttggatggaaatcctggcaca

SEQ ID NO: 357152 - DNA, 60 bp, Homo sapiens
  chr2:37899997-37900057
  hyper
tcaggtcatcaccgcggtgccctgggtctgtctgaaaccttagagggtgcgccttaagcc

SEQ ID NO: 357153 - DNA, 135 bp, Homo sapiens
  chr2:38303709-38303844
  hyper
gtttaaattttatcttaggttctcgcaaacaaattgccacctcagtggaggctctttggcatgctaaattttttccagttcttgcggcgagatcaggaatccctaaaagtagccgctcccccgccccggggcccc

SEQ ID NO: 357154 - DNA, 134 bp, Homo sapiens; identical to SEQ ID NO: 331260
  chr2:38342446-38342580
  hyper

SEQ ID NO: 357155 - DNA, 1085 bp, Homo sapiens; identical to SEQ ID NO: 279692
  chr2:42274691-42275776
  hyper

SEQ ID NO: 357156 - DNA, 76 bp, Homo sapiens
  chr2:42720186-42720262
  hyper
cgcctggagggagccgcctcggccccgccggggcgcgcctcgtcgcggcccagcacgcccggctcgtcggccgagt

SEQ ID NO: 357157 - DNA, 281 bp, Homo sapiens
  chr2:42721246-42721527
  hyper
cccgcccgcgcccgcacctccccggcttgctcgggctgggattcccgggcgccccgccctggacctcgggctccccgcctcgtgacgccgtcctccccctccgctccggcccgtagtggcggggaggggtccgcagggcgggggagcggggagcccagcgccgggatgcctgctcccgcgtcctgccctgggccatcgggatgaattgggcagtccccagggccccttttaacagccctggttcaaagcccagtgtggactcgggtgcggggacagacggc

SEQ ID NO: 357158 - DNA, 63 bp, Homo sapiens; identical to SEQ ID NO: 345009
  chr2:43019535-43019598
  hyper

SEQ ID NO: 357159 - DNA, 70 bp, Homo sapiens; identical to SEQ ID NO: 346432
  chr2:43020503-43020573
  hyper

SEQ ID NO: 357160 - DNA, 395 bp, Homo sapiens; identical to SEQ ID NO: 345010
  chr2:43452443-43452838
  hyper

SEQ ID NO: 357161 - DNA, 367 bp, Homo sapiens; identical to SEQ ID NO: 279710
  chr2:43864730-43865097
  hyper

SEQ ID NO: 357162 - DNA, 47 bp, Homo sapiens; identical to SEQ ID NO: 349493
  chr2:45164561-45164608
  hyper

SEQ ID NO: 357163 - DNA, 314 bp, Homo sapiens; identical to SEQ ID NO: 279718
  chr2:45165156-45165470
  hyper

SEQ ID NO: 357164 - DNA, 228 bp, Homo sapiens; identical to SEQ ID NO: 198186
  chr2:45396995-45397223
  hyper

SEQ ID NO: 357165 - DNA, 481 bp, Homo sapiens
  chr2:46525231-46525712
  hyper
cggtttgggggcgcggatcagcagctttgcagtggagacttctgcggctcggaggagtcggggatttgcgcgcacggcgaggccaggaggccgagggagatggcctggaggtcggaggtgcttccgcggtgcctttgaaaatctcccagccgccccgcagcagattaccgtggccaccggcgcttggaaatgtttgtgggtgcatgtcctcgactttctctggtctctcattttggggcagcatccacgtctctatttttctctggattcgcggagtccttccaaatgcgctcctgtgcccgcgccgcggcccaagtgggcaaaggggggcgggaggcggagagcggctcagggacacgatcctaccgaggagccaggacccttcagagcgccccgctgccgggctccagaccccaccgaaggttggagaacccacttcctcgtgccgcaccttgactctggggagagtaggtagtgagtg

SEQ ID NO: 357166 - DNA, 245 bp, Homo sapiens; identical to SEQ ID NO: 198189
  chr2:46525757-46526002
  hyper

SEQ ID NO: 357167 - DNA, 537 bp, Homo sapiens; identical to SEQ ID NO: 331290
  chr2:47142873-47143410
  hyper

SEQ ID NO: 357168 - DNA, 462 bp, Homo sapiens; identical to SEQ ID NO: 345011
  chr2:47499350-47499812
  hyper

SEQ ID NO: 357169 - DNA, 73 bp, Homo sapiens; identical to SEQ ID NO: 331292
  chr2:47656947-47657020
  hyper

SEQ ID NO: 357170 - DNA, 59 bp, Homo sapiens
  chr2:47747991-47748050
  hyper
cgcccggcggccccgcggcctggagagggtccccggcgcgggcggacgggcggtctacc

SEQ ID NO: 357171 - DNA, 203 bp, Homo sapiens; identical to SEQ ID NO: 279765
  chr2:47748523-47748726
  hyper

SEQ ID NO: 357172 - DNA, 182 bp, Homo sapiens; identical to SEQ ID NO: 279782
  chr2:50573865-50574047
  hyper

SEQ ID NO: 357173 - DNA, 448 bp, Homo sapiens; identical to SEQ ID NO: 198207
  chr2:54784958-54785406
  hyper

SEQ ID NO: 357174 - DNA, 716 bp, Homo sapiens; identical to SEQ ID NO: 346436
  chr2:54785407-54786123
  hyper

SEQ ID NO: 357175 - DNA, 397 bp, Homo sapiens; identical to SEQ ID NO: 331298
  chr2:54798152-54798549
  hyper

SEQ ID NO: 357176 - DNA, 546 bp, Homo sapiens; identical to SEQ ID NO: 331299
  chr2:55509233-55509779
  hyper

SEQ ID NO: 357177 - DNA, 60 bp, Homo sapiens; identical to SEQ ID NO: 349500
  chr2:56149749-56149809
  hyper

SEQ ID NO: 357178 - DNA, 89 bp, Homo sapiens; identical to SEQ ID NO: 198215
  chr2:56150447-56150536
  hyper

SEQ ID NO: 357179 - DNA, 50 bp, Homo sapiens
  chr2:60780349-60780399
  hyper
cgcgagaattcccgtttgcttaagtgctggggtttgccttgcttgcggcg

SEQ ID NO: 357180 - DNA, 541 bp, Homo sapiens; identical to SEQ ID NO: 346437
  chr2:60783811-60784352
  hyper

SEQ ID NO: 357181 - DNA, 373 bp, Homo sapiens; identical to SEQ ID NO: 349503
  chr2:60784505-60784878
  hyper

SEQ ID NO: 357182 - DNA, 362 bp, Homo sapiens; identical to SEQ ID NO: 331309
  chr2:61109154-61109516
  hyper

SEQ ID NO: 357183 - DNA, 109 bp, Homo sapiens; identical to SEQ ID NO: 331310
  chr2:61110127-61110236
  hyper

SEQ ID NO: 357184 - DNA, 428 bp, Homo sapiens
  chr2:61175657-61176085
  hyper
cgtcgagtttgcgtgttttagggagaaccacatacctactgtcaggggtgggttgttttggtttttttttggtgaaggaaaagggttatacaaaaggatatgtctggaaaagttatgaatacatcttgtttagggtgacatttcaatataataattacaaatcgatgtgcataataaaccgggacctttcaatgtttgttagcccagcttgcaactaataataccgcatgtctttttacatttcagattttttagggacacaggcttgtttttctcacaattcgttagagattttcttttatgtcacaagataaaaattaagaaatagaggttaacgctgtaaaaggtcaactaattccaagttttaaaaattgggcgtaatcagaaattcagattcataagaactgaatcctcttcattttcttgtc

SEQ ID NO: 357185 - DNA, 203 bp, Homo sapiens; identical to SEQ ID NO: 349506
  chr2:63278430-63278633
  hyper

SEQ ID NO: 357186 - DNA, 282 bp, Homo sapiens; identical to SEQ ID NO: 349507
  chr2:63279141-63279423
  hyper

SEQ ID NO: 357187 - DNA, 98 bp, Homo sapiens
  chr2:63282552-63282650
  hyper
cgggagttgggtccgcggggcggtggagcaacaagctcccctagctccctttgacccactctcccccatccggcccactgcaggtctggttcaagaac

SEQ ID NO: 357188 - DNA, 89 bp, Homo sapiens
  chr2:63284469-63284558
  hyper
cgcgggatatccgaagtgtggaggaaacagacaagtcagggtacagaggtgggggttgggcaggggcgcagggctgaccccctcacccg

SEQ ID NO: 357189 - DNA, 54 bp, Homo sapiens; identical to SEQ ID NO: 346439
  chr2:63287368-63287422
  hyper

SEQ ID NO: 357190 - DNA, 354 bp, Homo sapiens; identical to SEQ ID NO: 331320
  chr2:64994400-64994754
  hyper

SEQ ID NO: 357191 - DNA, 76 bp, Homo sapiens
  chr2:66652787-66652863
  hyper
cgctcttccgaattatttaggaaagccaacacgcaattatgcaaaagtgtagataaggttctccgaagcagaaagc

SEQ ID NO: 357192 - DNA, 59 bp, Homo sapiens; identical to SEQ ID NO: 198245
  chr2:66652963-66653022
  hyper

SEQ ID NO: 357193 - DNA, 213 bp, Homo sapiens; identical to SEQ ID NO: 331326
  chr2:67624288-67624501
  hyper

SEQ ID NO: 357194 - DNA, 79 bp, Homo sapiens; identical to SEQ ID NO: 346440
  chr2:68547270-68547349
  hyper

SEQ ID NO: 357195 - DNA, 74 bp, Homo sapiens
  chr2:69533984-69534058
  hyper
ctggcccgactgtggcccccgggaaagacgccggtcccgtgagcaccgccccttctgttgtctccagacgcccc

SEQ ID NO: 357196 - DNA, 317 bp, Homo sapiens; identical to SEQ ID NO: 346441
  chr2:70351179-70351496
  hyper

SEQ ID NO: 357197 - DNA, 236 bp, Homo sapiens; identical to SEQ ID NO: 346442
  chr2:70351563-70351799
  hyper

SEQ ID NO: 357198 - DNA, 280 bp, Homo sapiens; identical to SEQ ID NO: 331330
  chr2:70369049-70369329
  hyper

SEQ ID NO: 357199 - DNA, 442 bp, Homo sapiens; identical to SEQ ID NO: 349515
  chr2:71453505-71453947
  hyper

SEQ ID NO: 357200 - DNA, 228 bp, Homo sapiens; identical to SEQ ID NO: 349516
  chr2:71454386-71454614
  hyper

SEQ ID NO: 357201 - DNA, 126 bp, Homo sapiens
  chr2:71680558-71680684
  hyper
cgtcctaccccgggcggtcgggttgagttctggagagactgctccaatccccgaggcggaaggaggcaaccgatttggcgcagcactcagccagggggtagaagctcaggggaggagccgagcctt

SEQ ID NO: 357202 - DNA, 89 bp, Homo sapiens; identical to SEQ ID NO: 349517
  chr2:72371941-72372030
  hyper

SEQ ID NO: 357203 - DNA, 354 bp, Homo sapiens; identical to SEQ ID NO: 198272
  chr2:72372237-72372591
  hyper

SEQ ID NO: 357204 - DNA, 480 bp, Homo sapiens
  chr2:72372758-72373238
  hyper
tcttttcctctgtttttcttttctttcaacacaaaagttgggttgtgaattttccgaggtcgccgccgcctcgcccccaccccccgcctctgatctgcctaactataattaaagtgcgttttttgtggcattaataaagagttatttgtccgccgtttccacggtcttcacaaagagtactttcataggggcggccgctcgggccgcgagtccaatttatacaaaaatgttgtatttttagccctgggctctgtttagatggcgctcggtggaaacggagagcccttggaggtccccccgtaaaatctgataaatgactccgaaaaaataacgctgggattcagagggctctcattaaccccttaggcgctcctgtacacgtaccccctatttccctcctcacctccagatctagggccccgggttggagggatggggaggcttaggtttcctcctccctaacttctgtgcaggttggac

SEQ ID NO: 357205 - DNA, 127 bp, Homo sapiens; identical to SEQ ID NO: 345014
  chr2:72374248-72374375
  hyper

SEQ ID NO: 357206 - DNA, 259 bp, Homo sapiens; identical to SEQ ID NO: 345015
  chr2:72374932-72375191
  hyper

SEQ ID NO: 357207 - DNA, 698 bp, Homo sapiens
  chr2:73052641-73053339
  hyper
cgccctctcgttccccagcgccggaccagcctcggagggagaacgaaggctgctcctgccccgagggaggcagcgggagggtcctgagtcactgggctgtagggcgccgggaagggaccccgcgtcggggctgcgaagggagacccgcctcgcccggtatgcagggtctctccgaagggaggggccggcgccggacctggggacagccggccggaggcccgacccagaggagcctgccccgtcccgcccgttcccgcccctctgtggtcccggcacccggggtacctgagcgtgggcccgatgcaggccgtgtcagtgctctcgatctctcgcaggatccgctcgtgctctgccgctgtctccaggctctccgcctccgccatcttaccccgctccatagactgggggcgccccgcagcgcgtcccctccgtcggctcggctcaccttttccctgccccacaatgccgctcccaccacaggctccacagccgccccagcctctggctacccgcaggccgacccctccctcaggctcgacacgcccccttgcgtcaccgcgtccgtcggcgttctgcgtaatgtccgctgggatttgtagttctctgggaaatgctaggttggattccattcattcatacatggaatccgcaaatactagttgaagcccactgtaagcaaaaacagttaacgacagtgc

SEQ ID NO: 357208 - DNA, 223 bp, Homo sapiens; identical to SEQ ID NO: 279917
  chr2:73144495-73144718
  hyper

SEQ ID NO: 357209 - DNA, 120 bp, Homo sapiens; identical to SEQ ID NO: 346446
  chr2:73147029-73147149
  hyper

SEQ ID NO: 357210 - DNA, 189 bp, Homo sapiens; identical to SEQ ID NO: 346447
  chr2:73150996-73151185
  hyper

SEQ ID NO: 357211 - DNA, 35 bp, Homo sapiens; identical to SEQ ID NO: 198289
  chr2:73151849-73151884
  hyper

SEQ ID NO: 357212 - DNA, 285 bp, Homo sapiens; identical to SEQ ID NO: 198290
  chr2:73151946-73152231
  hyper

SEQ ID NO: 357213 - DNA, 46 bp, Homo sapiens; identical to SEQ ID NO: 349526
  chr2:73152264-73152310
  hyper

SEQ ID NO: 357214 - DNA, 135 bp, Homo sapiens; identical to SEQ ID NO: 349527
  chr2:73520107-73520242
  hyper

SEQ ID NO: 357215 - DNA, 228 bp, Homo sapiens; identical to SEQ ID NO: 331345
  chr2:74211299-74211527
  hyper

SEQ ID NO: 357216 - DNA, 275 bp, Homo sapiens; identical to SEQ ID NO: 345016
  chr2:74425444-74425719
  hyper

SEQ ID NO: 357217 - DNA, 395 bp, Homo sapiens; identical to SEQ ID NO: 198298
  chr2:74425790-74426185
  hyper

SEQ ID NO: 357218 - DNA, 228 bp, Homo sapiens; identical to SEQ ID NO: 345018
  chr2:74426214-74426442
  hyper

SEQ ID NO: 357219 - DNA, 412 bp, Homo sapiens; identical to SEQ ID NO: 345019
  chr2:74729488-74729900
  hyper

SEQ ID NO: 357220 - DNA, 238 bp, Homo sapiens; identical to SEQ ID NO: 198302
  chr2:74729933-74730171
  hyper

SEQ ID NO: 357221 - DNA, 79 bp, Homo sapiens; identical to SEQ ID NO: 345021
  chr2:74730644-74730723
  hyper

SEQ ID NO: 357222 - DNA, 235 bp, Homo sapiens; identical to SEQ ID NO: 345022
  chr2:74781700-74781935
  hyper

SEQ ID NO: 357223 - DNA, 122 bp, Homo sapiens; identical to SEQ ID NO: 198308
  chr2:74782349-74782471
  hyper

SEQ ID NO: 357224 - DNA, 1609 bp, Homo sapiens
  chr2:75060920-75062529
  hyper
cgccccacaccccgggtccgcgatcacgctccccccacccatagccgagcctgacgcggcggtggctcatgcgcctttccgtcccagcctttagccacggaccacacgtcccatctcaggcgccccgcccctcccccgccccccgcccccggcgcgcctccccaggctgccggctccggtgtctgagcggccgcgcccgcgagccgtgagcgatgattggctgcgccacggcggcgggcggtccgtgggcgcacacaccctccccgcgcagccaatgggcgtgcgcacgtcactgatccggaggcccgcgggccggcagcccctcaataagccacattgttgcatgaaactccggcgcaggagtcccgggctgccgctggcaacatcgtgtcacccagctaagaaaatccgcgggcccgagccacgcgcctgtgaatcggagaggtcccactgcccgagtggagccgggctgagattcttctcaagttgagcctcagtgatcctgtggccgaagttagcgccttgacgtgggacaaccggacacgtcgccaggagagaactgaggcgccttctagcagttgtgacgccaaaatcacgtctccggagacccgcgccctccgccagccgggcgcaccctcgccggtagccttctttgtgcgccgtccggactcccagctcccggcccggcagccgagccccagcacaaagcagtcggaccgcgccgcccgcctcccctctcgcgtctccgcctcggtttcccaactctgcgccgtcgggccgcggcaggatgattgcctcgcatctgcttgcctacttcttcacggagctcaaccatgaccaagtgcagaaggtaagtcagcgcgggcggggcggcaggctgggctctggcaaagtggtctggcctccatcagtctcttcctcgaccctgcggggacccgcttcctccctactccgggcctgggagcggaaaaagtttgggcagccgggacactcctgggcgccaggagccacgtccgctaagcacagccggcgagtgcgcgcgggcggggagccgaggtcgcgctccgccgggcgccctccctccctgagctccggcacgcgctcacgctctctcccccagtccctttttccctgttactggaggggcgggtcaccccgcaggtagtcagggattgctgcgcccacgtgggagggagcccccttctgcagcgcgagttccggcgagagcacgtggagagaatcgtggctgcgggaggctgctccgctgccgcgtggggccgccgggggccgtccgcgctcgcggaccgcgtgtaggagacgagcggttcccttctccttccccgcggccctgcgggggtgggctcgaggagaagctgacccgggaaggagtaggaaaggggcagaggaactccgcccgccgcgccccctccccggaactgtggcgcccggaactgaggctcggcgaggggcgtcccccattaacccccgcccctccaaatcagcctcgggaccgcccagcctcgtgtcctcaggatctgcctctgagtaaggggaggactttggttgttactttctggtttgccctaaaagttactcggagaggccaacg

SEQ ID NO: 357225 - DNA, 229 bp, Homo sapiens
  chr2:75062575-75062804
  hyper
cgaaaacgagcttttttttccttaagcctcgacctgtctgttcccacctggctccgcagctccctatggctgagcgctcaccgcggccgggtcatttacataagaaagagcctcaggccaagccgggaagctctcattccccgcctcggggtatgggggtggggatggggccggggccggggacgggcagggccaggggcgcgctcagaattgagtttctgaaatgccc

SEQ ID NO: 357226 - DNA, 47 bp, Homo sapiens; identical to SEQ ID NO: 198309
  chr2:75147056-75147103
  hyper

SEQ ID NO: 357227 - DNA, 182 bp, Homo sapiens
  chr2:75426248-75426430
  hyper
cgcctgcccgcggtggctctgaattcctccactttcaagcttcaggagacgtttgagttcagaagtctggagacagcatctctcttgcggtaaactgaaaaagggaaagaaattccaccggtcacagttctaggaagcaagagatcccccgcatttatgcacctgctgctgcctgcaactcc

SEQ ID NO: 357228 - DNA, 214 bp, Homo sapiens; identical to SEQ ID NO: 279955
  chr2:75426570-75426784
  hyper

SEQ ID NO: 357229 - DNA, 54 bp, Homo sapiens
  chr2:75426875-75426929
  hyper
tggcttggaagtaactgacacagatgcggtccgcagctggaatcgtcgttgcac

SEQ ID NO: 357230 - DNA, 100 bp, Homo sapiens
  chr2:80549811-80549911
  hyper
gggtgccagtgtcgccttgtccattatccaaaacccagtcgcttttgctggttcctcactcagcatgtgagagagattgtcttctcactcggtgccactc

SEQ ID NO: 357231 - DNA, 77 bp, Homo sapiens
  chr2:85360795-85360872
  hyper
cgcggccccaccatgccccagctcggcggcgggggcggcggcggcggcggcggcagcgggggaggcggcggctccag

SEQ ID NO: 357232 - DNA, 163 bp, Homo sapiens; identical to SEQ ID NO: 349538
  chr2:87018396-87018559
  hyper

SEQ ID NO: 357233 - DNA, 72 bp, Homo sapiens
  chr2:87034584-87034656
  hyper
cggtgcttccccacgctgctgtgcaatggataggagctatgtgaagctggcgtatgggtggggtttgcaggc

SEQ ID NO: 357234 - DNA, 622 bp, Homo sapiens
  chr2:87034689-87035311
  hyper
caccaattcctgttctgcaggtctcaccgcagaggggcacgccagccatgaggacagatgagggaacacgtgatgccacgatgggggtgccaggatgaggtgggtgcggtcgcggacaggcgcacgaggagcccagcggagcgccacccggagcaggcgcggaggagggctggggagggccaccaaggcgacgagagccggtgtgcctgaatcagcctaaaggagacggaggaggagtgtggtgggcgcaggggcagggagctgggggaagggcggggggctagcccaggctgaaggcaggcaggagcagggccgcgatgtcagacaagaaacggcagcagtgtgtttgggaacctagcaccaaccgcaccggtggagacagggtctgctgtagaggaggtggggccgggtcccagctaagtaaggcggtggatcttgcagcccttccatcctcagccgctcattctgcgcaaatctcggggccagccttggtggagccgtaaagcgtccaccagaacctggatccctccgccacctttcccatgaattcacctttctgtacacagcaagcgcctgagcggagacggccgacacgtttcccactgttaccccaggaaaccgc

SEQ ID NO: 357235 - DNA, 895 bp, Homo sapiens; identical to SEQ ID NO: 331365
  chr2:88315911-88316806
  hyper

SEQ ID NO: 357236 - DNA, 144 bp, Homo sapiens; identical to SEQ ID NO: 349540
  chr2:88752878-88753022
  hyper

SEQ ID NO: 357237 - DNA, 205 bp, Homo sapiens
  chr2:96011320-96011525
  hyper
cgcgcttataggcgtggagcggagctggatttctcccttggctaacacagcgggaaggatgaggtgcgggccgtagccgcgctgccgcgctgagtccgtccggcggggatgcccacagtgcgccgcgcccgctggagggcagcagagggccaggctcccggctcaggtctccggcctcgcggctccaaggaccccgggctccgcc

SEQ ID NO: 357238 - DNA, 129 bp, Homo sapiens; identical to SEQ ID NO: 280005
  chr2:96011564-96011693
  hyper

SEQ ID NO: 357239 - DNA, 578 bp, Homo sapiens; identical to SEQ ID NO: 280006
  chr2:96011863-96012441
  hyper

SEQ ID NO: 357240 - DNA, 48 bp, Homo sapiens; identical to SEQ ID NO: 346460
  chr2:96012683-96012731
  hyper

SEQ ID NO: 357241 - DNA, 250 bp, Homo sapiens; identical to SEQ ID NO: 346461
  chr2:96192254-96192504
  hyper

SEQ ID NO: 357242 - DNA, 193 bp, Homo sapiens; identical to SEQ ID NO: 346462
  chr2:96192624-96192817
  hyper

SEQ ID NO: 357243 - DNA, 59 bp, Homo sapiens; identical to SEQ ID NO: 345026
  chr2:96991316-96991375
  hyper

SEQ ID NO: 357244 - DNA, 42 bp, Homo sapiens; identical to SEQ ID NO: 346464
  chr2:97203334-97203376
  hyper

SEQ ID NO: 357245 - DNA, 39 bp, Homo sapiens; identical to SEQ ID NO: 346465
  chr2:97203545-97203584
  hyper

SEQ ID NO: 357246 - DNA, 212 bp, Homo sapiens; identical to SEQ ID NO: 345027
  chr2:98703022-98703234
  hyper

SEQ ID NO: 357247 - DNA, 200 bp, Homo sapiens; identical to SEQ ID NO: 198335
  chr2:98703475-98703675
  hyper

SEQ ID NO: 357248 - DNA, 77 bp, Homo sapiens; identical to SEQ ID NO: 345029
  chr2:98703736-98703813
  hyper

SEQ ID NO: 357249 - DNA, 146 bp, Homo sapiens; identical to SEQ ID NO: 345030
  chr2:101033445-101033591
  hyper

SEQ ID NO: 357250 - DNA, 489 bp, Homo sapiens
  chr2:101435063-101435552
  hyper
cgacccccagtccaccgcgggggcctggcgcgcttggggcaaaggccctaggagaccccttctggccacaaaatcgagtatgacagaaaagggccagcgggggcgctttccttccagggccacttgccggaatgtaagagggacggagagacgtccggaaaaggctgccacgctcggagcgctgcgccaggccaggcacctaggccaggggagcggagacctcgtgggagcgggcagggggacctttcccctctcccgggcttccacccaggcgcctccccgctgtgaacgccgccgcccaggtgaaggggaaaccggccacgtttccggacctcggcggggcacacggtctccggttttcaccggctctgtcttggagccccgaagggcatcagacagcagccccggcacccggggattattcctgtacctctgcctccctccgcttggcgtttgcgggaaccttggtaaaatcctccctgtttctcg

SEQ ID NO: 357251 - DNA, 94 bp, Homo sapiens; identical to SEQ ID NO: 198345
  chr2:101435590-101435684
  hyper

SEQ ID NO: 357252 - DNA, 275 bp, Homo sapiens
  chr2:101436113-101436388
  hyper
gcggcccgcactgcgagggtctacactaggcgggggcggcagattccttgttccccccgagtgacaactttaatgggacctcggctggcagcctctagtccacttgcctctcctctgggccggctcacctggaagcacaacccccccctcccccagccccggcgcccaaccccgaccctgcgccccaggcccgaccccgccgcgcgtccctggcagcccagcagaggctgcggcggcctggggactcgcgggtgtctgcgccgcccagggaagcc

SEQ ID NO: 357253 - DNA, 886 bp, Homo sapiens
  chr2:101436742-101437628
  hyper
cagcgcctcccgccgccgcccgggaggagctcgccgcgcccgctcgccgcctcgtctcccagcggcggcgggaggcgcgtctccccggcccagtccgcgcccggccccgcggggccgctccggcccgctccgaggtaaggggccgcgcctaggggcgcgggggacccagggtgggtagtacgtgcgcgcggggtcgcaggactcggtcacctgctcgccagcgtggaggacgcgcgggggcggaggggcgctcaggcgcgaggctgcgcggcaccggggaccccggacgcgggggcgcggagaggtgggttcccctccacagtcaggccgctgggggcttcgcgtcctgcaggaggtagcaatcgctgggccggtgggctccgggcgcgtctcgacgcagaagacagaggactgggcatccgagcctcggaatttgggggtcctcggggtgtccgacagggtggagaaggatcgtgccccagggcaacagctttggggattgcccgtggttgtcttcgagacccatcgcgctaccctccgaaacgtcgggcgtcctggacccccggagagtgcggcgtgcgcgccctgggcccgcggtctctcggagtccctgggtcggaattggttccgggccggattgggtgcggaatcggtgcccccaacccccgtgtgcgcagacagcgtgcagcctggctcctcacgtcgctgccgcccccccaccccaactccggagctccccaggttggatgtatgcgtatggttttgttgggagatgtgcccctttcccagccgaggagggacgcacctttgacctttctgaagagctgggcaggtcggtaaccagggaagggacaggcaccacccggctaaattcagaaccagtccc

SEQ ID NO: 357254 - DNA, 519 bp, Homo sapiens; identical to SEQ ID NO: 331387
  chr2:102758965-102759484
  hyper

SEQ ID NO: 357255 - DNA, 58 bp, Homo sapiens
  chr2:102972750-102972808
  hyper
cggagatcgctgcttctcacctactttctgaacttggcctccgcagtcgcgacctggc

SEQ ID NO: 357256 - DNA, 173 bp, Homo sapiens; identical to SEQ ID NO: 349554
  chr2:103235763-103235936
  hyper

SEQ ID NO: 357257 - DNA, 346 bp, Homo sapiens; identical to SEQ ID NO: 349555
  chr2:103236292-103236638
  hyper

SEQ ID NO: 357258 - DNA, 96 bp, Homo sapiens; identical to SEQ ID NO: 349556
  chr2:105468467-105468563
  hyper

SEQ ID NO: 357259 - DNA, 144 bp, Homo sapiens; identical to SEQ ID NO: 345031
  chr2:105471069-105471213
  hyper

SEQ ID NO: 357260 - DNA, 155 bp, Homo sapiens; identical to SEQ ID NO: 349558
  chr2:105473814-105473969
  hyper

SEQ ID NO: 357261 - DNA, 337 bp, Homo sapiens; identical to SEQ ID NO: 198369
  chr2:105489278-105489615
  hyper

SEQ ID NO: 357262 - DNA, 112 bp, Homo sapiens; identical to SEQ ID NO: 345033
  chr2:105490035-105490147
  hyper

SEQ ID NO: 357263 - DNA, 65 bp, Homo sapiens; identical to SEQ ID NO: 349561
  chr2:109647974-109648039
  hyper

SEQ ID NO: 357264 - DNA, 71 bp, Homo sapiens; identical to SEQ ID NO: 349562
  chr2:109648464-109648535
  hyper

SEQ ID NO: 357265 - DNA, 224 bp, Homo sapiens; identical to SEQ ID NO: 349563
  chr2:110370717-110370941
  hyper

SEQ ID NO: 357266 - DNA, 266 bp, Homo sapiens; identical to SEQ ID NO: 349564
  chr2:110371219-110371485
  hyper

SEQ ID NO: 357267 - DNA, 264 bp, Homo sapiens; identical to SEQ ID NO: 345034
  chr2:111874622-111874886
  hyper

SEQ ID NO: 357268 - DNA, 204 bp, Homo sapiens; identical to SEQ ID NO: 198386
  chr2:111874987-111875191
  hyper

SEQ ID NO: 357269 - DNA, 138 bp, Homo sapiens; identical to SEQ ID NO: 345036
  chr2:111875611-111875749
  hyper

SEQ ID NO: 357270 - DNA, 699 bp, Homo sapiens; identical to SEQ ID NO: 331404
  chr2:111877567-111878266
  hyper

SEQ ID NO: 357271 - DNA, 70 bp, Homo sapiens; identical to SEQ ID NO: 349569
  chr2:112656507-112656577
  hyper

SEQ ID NO: 357272 - DNA, 32 bp, Homo sapiens; identical to SEQ ID NO: 280126
  chr2:112657092-112657124
  hyper

SEQ ID NO: 357273 - DNA, 554 bp, Homo sapiens; identical to SEQ ID NO: 345037
  chr2:113341898-113342452
  hyper

SEQ ID NO: 357274 - DNA, 33 bp, Homo sapiens; identical to SEQ ID NO: 198390
  chr2:114035443-114035476
  hyper

SEQ ID NO: 357275 - DNA, 88 bp, Homo sapiens
  chr2:114035830-114035918
  hyper
cgcgggtgggtcccgcgaatcccgtgctgacgctctcgagatccaaccacccgagcgcacgcacggacgctcagcggcgcgggggctc

SEQ ID NO: 357276 - DNA, 190 bp, Homo sapiens
  chr2:119068126-119068316
  hyper
ttccaaggctctggctttccccagccgacttgggtttcggggcagcgcgggctcccttctttccagcgcaggaagaaggggtgagggaggaggggccggggtgctggcactcaacggtaacatctgttttacttaagcagctcgatttcgttttaggatgaaaaagtattccctttcagcatgaggaatc

SEQ ID NO: 357277 - DNA, 120 bp, Homo sapiens
  chr2:119615627-119615747
  hyper
tcacctttcactaagatgtttccaatttaccaaggggatagaatgagagacagagatgtgagagatacagagagagagatagagagtgcagggtcgggggaggaggcagagagcggaagc

SEQ ID NO: 357278 - DNA, 139 bp, Homo sapiens
  chr2:119913874-119914013
  hyper
cggtgtggagaggtgaattttctgtttgctggaattctgctgtgggtggggttttggctgatggacagggaaatctgcacaagtatttcgggtcacaaagaaggacgccccaggaagcccgcgctccctctggcctacc

SEQ ID NO: 357279 - DNA, 147 bp, Homo sapiens; identical to SEQ ID NO: 280165
  chr2:119914053-119914200
  hyper

SEQ ID NO: 357280 - DNA, 33 bp, Homo sapiens; identical to SEQ ID NO: 280166
  chr2:119914247-119914280
  hyper

SEQ ID NO: 357281 - DNA, 224 bp, Homo sapiens
  chr2:120281422-120281646
  hyper
cgggcggctccagaatttccgtgtaggagagtttcagaagccagaccagaggaaggggtcggtggtgggcacagggattcatcttagagccgccttcgtctggcgcgcacgatgtttttctttgggaaagggtccctccggagaagagctgggagagattaatgttgggaggattgggagggaagagtccctattcctcatgggaagatctgctagtccctctc

SEQ ID NO: 357282 - DNA, 636 bp, Homo sapiens; identical to SEQ ID NO: 331421
  chr2:120301702-120302338
  hyper

SEQ ID NO: 357283 - DNA, 323 bp, Homo sapiens
  chr2:121199626-121199949
  hyper
cgggcgttccgctttctccactgtaccatgctaatttttcgagggacaattttttgacaatgagtcctccagcccgaacagaaaccctttatggggccggccccagggaggccgcggcgctgccaaggcaaacaaaggctcattgctgccgcggaacatgcctgcgcctttcagggccgggttcgcagagcgcgccgcctccagcccgcgccgaggtaacacctggtccgccaactcctggcgcctaatcaagatatcaatcacggcgcgggggcaggggggcgcacgggccccgaaggctccagaacccggcaagtgcaggt

SEQ ID NO: 357284 - DNA, 260 bp, Homo sapiens; identical to SEQ ID NO: 280178
  chr2:121200130-121200390
  hyper

SEQ ID NO: 357285 - DNA, 241 bp, Homo sapiens; identical to SEQ ID NO: 198417
  chr2:121200454-121200695
  hyper

SEQ ID NO: 357286 - DNA, 56 bp, Homo sapiens; identical to SEQ ID NO: 349576
  chr2:121200731-121200787
  hyper

SEQ ID NO: 357287 - DNA, 693 bp, Homo sapiens
  chr2:121494270-121494963
  hyper
gagcgtgtctgcgggcgtactgagcgcggaggggctgcagccagccacttgagaacttcgaactccacttctccgcgctgcgcgtcccggagccctgcctttctttcttccttcctcaatccttcctccccctcgcccggcccggccgccccctccccctctgctgggctctcctcctcggccccccctctttgcctctcttctcctcctctcctgccctcggccctgagatccgcttgacttcccaaagggatccgcacgtaatcctttgccgggtcctccggttcccccttccacctcactttcatccctgcccccctactcatcgtctctccccacccccgacaatctctcaacaagtatatttgctgaggaatttgaaaaatccactactgcaacttgatctgtatgtgatggatggggagaggcgcggagagagttgggcgccaatcctattaagggtttagagaggggagtcttttccccggacggggcgggggcggggagctgggagggagcgtgtgcttgcgtgtgtgagtgtgagcgcgcccgccgcgctggagagctgggagtccacccagctcggcgccttttcagcccggcggtaactgctgtcatttcctaggaaacccgacttttaccgcgcggggagctggggatggagcccgtgcgcctcaccctgggtgatcggtc

SEQ ID NO: 357288 - DNA, 269 bp, Homo sapiens; identical to SEQ ID NO: 349577
  chr2:121499186-121499455
  hyper

SEQ ID NO: 357289 - DNA, 47 bp, Homo sapiens; identical to SEQ ID NO: 349578
  chr2:121499643-121499690
  hyper

SEQ ID NO: 357290 - DNA, 154 bp, Homo sapiens; identical to SEQ ID NO: 331428
  chr2:121834588-121834742
  hyper

SEQ ID NO: 357291 - DNA, 286 bp, Homo sapiens; identical to SEQ ID NO: 198421
  chr2:122042359-122042645
  hyper

SEQ ID NO: 357292 - DNA, 110 bp, Homo sapiens
  chr2:122042982-122043092
  hyper
aactccgatgtggggctcaggtgacccttgccgcccccaacccgctccacacggcccctctggcctctgctccccactctacgcccagggccggtctccagagcggctcc

SEQ ID NO: 357293 - DNA, 381 bp, Homo sapiens; identical to SEQ ID NO: 280195
  chr2:127413347-127413728
  hyper

SEQ ID NO: 357294 - DNA, 255 bp, Homo sapiens; identical to SEQ ID NO: 349581
  chr2:127414108-127414363
  hyper

SEQ ID NO: 357295 - DNA, 48 bp, Homo sapiens; identical to SEQ ID NO: 345038
  chr2:127782995-127783043
  hyper

SEQ ID NO: 357296 - DNA, 121 bp, Homo sapiens
  chr2:127863367-127863488
  hyper
cggcggccgcgcagcgggtgggagagggggcaggcctggccgcggggcactggggggccaccctggcagaaacacagattctgcaatctcagatttcagagttggagtcgtcaggggaagt

SEQ ID NO: 357297 - DNA, 427 bp, Homo sapiens
  chr2:127863878-127864305
  hyper
aatccctccttcggcccacggagaacgaaagtggagaagcagtgggaaggaaggaactgtgggtgccggttcgagaagcagccttgggagtccgggggaatagtgtccccaggggcagagggacatactccctctcgccccgagcgccggcccagcctaggttgcctgcatgggcctggagagctgagggtcaccacctggcctcccagcctcccggcccttggcctccaaagcggggtagcctggagcgcgcgcctgagaagagcctggagcagggccggccactgctgtgcagccgagccacgaaggtgcaaagcggggccctgtcctgccccggccgggtgtggggagacagaggacgcaaacctaagagggcacccagagcgccggggaacgcagcctggggacctcgaagcccctcgaaagc

SEQ ID NO: 357298 - DNA, 312 bp, Homo sapiens
  chr2:127976826-127977138
  hyper
gcccccctcagccccaactccgcgggtcccgccagctctccactcccaggccccggcggcgtccaccaggcgcccgctgcccctccccaagtctcctcctccgggacctcagccctggtgccctccccgcagtcccattcctggtttcccttcgcggcgccccctccccaggttccccaaccaggcaatccctgcctgggtccctccccgggaccagtccctggagaccctgcccgccgcctctctcgggctaccactctccgaaactccatccctgactcccctccccgctacctcctccccaggggtccc

SEQ ID NO: 357299 - DNA, 550 bp, Homo sapiens; identical to SEQ ID NO: 331437
  chr2:128173501-128174051
  hyper

SEQ ID NO: 357300 - DNA, 155 bp, Homo sapiens
  chr2:128284482-128284637
  hyper
cgttactaactggcgcgatccacagcgcctcctctcccggcgtcttcctctctttcattctaaacaacgatttaatttccttgttaagaagccatttagccaacagtaagaagtacacgtctttgcttccagaagggttcccctgatgaaacacc

SEQ ID NO: 357301 - DNA, 105 bp, Homo sapiens
  chr2:128459397-128459502
  hyper
cggtgttgctgctgcgcgcgcgcaagttcgcgctgctctggtcactgggctcggcgctggcgttggcgggaagcgcgctgctgcggggcggcgcggcgtgcggac

SEQ ID NO: 357302 - DNA, 31 bp, Homo sapiens
  chr2:131484816-131484847
  hyper
cgagtttccctctcccagggaatctgcattc

SEQ ID NO: 357303 - DNA, 135 bp, Homo sapiens; identical to SEQ ID NO: 198433
  chr2:131792037-131792172
  hyper

SEQ ID NO: 357304 - DNA, 209 bp, Homo sapiens; identical to SEQ ID NO: 198440
  chr2:133427262-133427471
  hyper

SEQ ID NO: 357305 - DNA, 233 bp, Homo sapiens; identical to SEQ ID NO: 280229
  chr2:133427652-133427885
  hyper

SEQ ID NO: 357306 - DNA, 191 bp, Homo sapiens; identical to SEQ ID NO: 349585
  chr2:133428106-133428297
  hyper

SEQ ID NO: 357307 - DNA, 398 bp, Homo sapiens
  chr2:134023956-134024354
  hyper
cggaagcatacagtctgcggggacaaggactgaacggggtagtgggagccaggtgccgaagggctggggctagggtggcggcgcgcagggggcgcgcctgggcggggagtgggctggcgtctccttacctggccttcggtggagcatgctgctgcgggctgggggcggggtgggcgctgcgtccccaggggttgactccgcagcgccttcacttcgggggcagcaaggcgcgcgctgcagagccgggagttgccaaacttgccatgtccagagcgcggaggcagcctgggccacgcgctcaccgcagcccgggcacctcgcgctcctccgctttgttgtgttccgccgccagtccccctgcgcctgcctgccagtgtccccgagccctctcctgccgc

SEQ ID NO: 357308 - DNA, 294 bp, Homo sapiens; identical to SEQ ID NO: 280232
  chr2:134024401-134024695
  hyper

SEQ ID NO: 357309 - DNA, 146 bp, Homo sapiens; identical to SEQ ID NO: 349586
  chr2:134325872-134326018
  hyper

SEQ ID NO: 357310 - DNA, 353 bp, Homo sapiens; identical to SEQ ID NO: 198445
  chr2:135476396-135476749
  hyper

SEQ ID NO: 357311 - DNA, 128 bp, Homo sapiens; identical to SEQ ID NO: 345039
  chr2:136873862-136873990
  hyper

SEQ ID NO: 357312 - DNA, 912 bp, Homo sapiens; identical to SEQ ID NO: 198448
  chr2:136874020-136874932
  hyper

SEQ ID NO: 357313 - DNA, 482 bp, Homo sapiens; identical to SEQ ID NO: 198449
  chr2:136875399-136875881
  hyper

SEQ ID NO: 357314 - DNA, 217 bp, Homo sapiens; identical to SEQ ID NO: 198450
  chr2:136876145-136876362
  hyper

SEQ ID NO: 357315 - DNA, 60 bp, Homo sapiens; identical to SEQ ID NO: 198452
  chr2:137523039-137523099
  hyper

SEQ ID NO: 357316 - DNA, 102 bp, Homo sapiens
  chr2:137523676-137523778
  hyper
cgcccaaaatcgaaaggccgggagttgttctgcaggctttgcaaacaggttgactgagggtttcctttcccgtagcgctgactgcgaaatctgtgcataggc

SEQ ID NO: 357317 - DNA, 69 bp, Homo sapiens
  chr2:139538166-139538235
  hyper
ggcggcggctcgggcgcttgggtgatgggttcagtgcgaggctgccctccagatccgatcccgccgggc

SEQ ID NO: 357318 - DNA, 131 bp, Homo sapiens; identical to SEQ ID NO: 349592
  chr2:142887740-142887871
  hyper

SEQ ID NO: 357319 - DNA, 32 bp, Homo sapiens; identical to SEQ ID NO: 349593
  chr2:142888566-142888598
  hyper

SEQ ID NO: 357320 - DNA, 35 bp, Homo sapiens; identical to SEQ ID NO: 349594
  chr2:145275891-145275926
  hyper

SEQ ID NO: 357321 - DNA, 186 bp, Homo sapiens; identical to SEQ ID NO: 331461
  chr2:148602743-148602929
  hyper

SEQ ID NO: 357322 - DNA, 50 bp, Homo sapiens; identical to SEQ ID NO: 345044
  chr2:149632592-149632642
  hyper

SEQ ID NO: 357323 - DNA, 544 bp, Homo sapiens
  chr2:149634146-149634690
  hyper
cccctccctctctatctcccttccccaccttttctcccccaccccctccccctacttagctccctctctgcagctggggctgctggtagggggagggaacaccaatggattgtagttcttaaaggaatctgtcagatgaaacaaaccagctcggtcccccgccccttccccgcccgctgtccgtagcgtgtgtggctgatggtgccccctttgtatgcgagccgcgtggggagggaccgagttaatgggagcctcccggtccccgctgacacgttcctggcagcctgctccaggctgctgatgcagccttcccgtccccagcattgattaagtgatgtcatcctgatcactgagcatgctccgactaaccccctcctccccttcctccagtggctggtgtatttaggtcaagtgattgacaggtgacagtttaccgagggtattgcaggagtccgcctggcctttctcaagcgccagaggccgacgttttccagcccgggcggtccccagcatctttgccaaggttgtctgccgcagtcgcagc

SEQ ID NO: 357324 - DNA, 114 bp, Homo sapiens; identical to SEQ ID NO: 349597
  chr2:149645382-149645496
  hyper

SEQ ID NO: 357325 - DNA, 64 bp, Homo sapiens; identical to SEQ ID NO: 349598
  chr2:149645987-149646051
  hyper

SEQ ID NO: 357326 - DNA, 763 bp, Homo sapiens; identical to SEQ ID NO: 331465
  chr2:151341770-151342533
  hyper

SEQ ID NO: 357327 - DNA, 135 bp, Homo sapiens; identical to SEQ ID NO: 349599
  chr2:151342572-151342707
  hyper

SEQ ID NO: 357328 - DNA, 166 bp, Homo sapiens; identical to SEQ ID NO: 198470
  chr2:151342737-151342903
  hyper

SEQ ID NO: 357329 - DNA, 266 bp, Homo sapiens; identical to SEQ ID NO: 349601
  chr2:151343277-151343543
  hyper

SEQ ID NO: 357330 - DNA, 282 bp, Homo sapiens; identical to SEQ ID NO: 331467
  chr2:151344070-151344352
  hyper

SEQ ID NO: 357331 - DNA, 147 bp, Homo sapiens; identical to SEQ ID NO: 349602
  chr2:152954365-152954512
  hyper

SEQ ID NO: 357332 - DNA, 593 bp, Homo sapiens
  chr2:153192142-153192735
  hyper
cgcagcagaccgatttcagggcgcacaacgtgcctttgaagctgccgatgccagagccaggtgaactggaggagcgatttgccatcgtgctggtaagtgcgcggcggcggtcgggcgcggggacccggggccccgggccgggcggcgcagctgacccccgcccctccccttcaccccgtgccgggagcgagcctccattcccgagggggaggctcccgctttcccctttgtggccccccagcactcctcttcacccccctggcagtcccccgcgctcagtctctcggggtcccgggatggggatgggggctcagggccggctgcccaaccagcctcgaacccattgtctggctggagaggcacctcacggcgcgtgtgcccgggaggtgcggcgtgggcgtgaagagaaggtggcgcgggctgggaggaggaggtggcgagccgcttaggctttttttttaaaaaaaacaaaacaaaacaaaacaaaacaaaacaccctgagcccctgcggaccatccctcgggcggccagcccgggacctgcgaagtccccggcagatggggcgcatgtggccggccgcgggcgccgcgccg

SEQ ID NO: 357333 - DNA, 80 bp, Homo sapiens
  chr2:153192765-153192845
  hyper
cacgtcgcggcttggccaaggggagcttccccgaaagggaaagcggagacccacagcagtgcggcgccccggcccttggc

SEQ ID NO: 357334 - DNA, 109 bp, Homo sapiens
  chr2:154335663-154335772
  hyper
ctgcccccctgacctctgggcgaatggaaagtggcgatgaatcgcaggtgccagatggtgccggctgaggcacccgcccactgcctgtgcttgactccgactcgcctgc

SEQ ID NO: 357335 - DNA, 60 bp, Homo sapiens
  chr2:155553956-155554016
  hyper
cggaggtgcaattcaggctggtggagcagcgggggaaggcagggacaggcggggctagcg

SEQ ID NO: 357336 - DNA, 612 bp, Homo sapiens; identical to SEQ ID NO: 198483
  chr2:155554076-155554688
  hyper

SEQ ID NO: 357337 - DNA, 349 bp, Homo sapiens; identical to SEQ ID NO: 198484
  chr2:155554689-155555038
  hyper

SEQ ID NO: 357338 - DNA, 461 bp, Homo sapiens; identical to SEQ ID NO: 349603
  chr2:157292161-157292622
  hyper

SEQ ID NO: 357339 - DNA, 1811 bp, Homo sapiens; identical to SEQ ID NO: 331475
  chr2:159313069-159314880
  hyper

SEQ ID NO: 357340 - DNA, 123 bp, Homo sapiens
  chr2:161264043-161264166
  hyper
cgctgcgggcggcggcggcgggtgcgggcgcgggcgcgggcgcggggcagcctcgccgcgagggggagggcgcaaggaggtggccggccgggcccggggccgcggcagctctgggaactccct

SEQ ID NO: 357341 - DNA, 203 bp, Homo sapiens; identical to SEQ ID NO: 198498
  chr2:161264419-161264622
  hyper

SEQ ID NO: 357342 - DNA, 97 bp, Homo sapiens; identical to SEQ ID NO: 349605
  chr2:162094194-162094291
  hyper

SEQ ID NO: 357343 - DNA, 258 bp, Homo sapiens; identical to SEQ ID NO: 280315
  chr2:162094357-162094615
  hyper

SEQ ID NO: 357344 - DNA, 625 bp, Homo sapiens
  chr2:162271677-162272302
  hyper
cgtacacacacacacacgttttcagtagcgattactgtgttgacaccacttccactctgtctccccagatcagcgcttctgacgagcccatttgcacggggactcggccctctcttttcctggcgaggcttttgaacctgtcgccaagccagtacctcagagagaaggaaatgcagagggacgagaaggatgcatggcgcctgcccccagttagatgttcttcagataatctgcaaccaagtgcgctgataaaatatttaataaagagccggtaaacatcactgcaaatacattaaggcatttcagcccgacagcttatgattatttcaaaacttaaaaaggagatcatagattgtcactgtttctgtactcaaccaagaaaccgaaccttcctgaggtgggtggattggtgggtgagttgctgcttttcgccccctctcctccccccttctgcttgtcgctgtggctctcagcagcagggatttatttatttatgtttgcagtttaaaaggtgggggtgggggcgccgaggacatgtaggatctgctcacaaagcaccagctcaggtgttgtgtgcttttgtattagctggaaaagacagactctggaacttttacagggcgag

SEQ ID NO: 357345 - DNA, 91 bp, Homo sapiens
  chr2:162272334-162272425
  hyper
gcacttgaaatcgttacattcaactgaatatttggctcattcagatccgaaaagtctcctagcatcgtcgaattccctcctccgcccctcc

SEQ ID NO: 357346 - DNA, 49 bp, Homo sapiens
  chr2:162284276-162284325
  hyper
cggcgattcctctccgtaaactcagatttcctcagtttttaacagtgta

SEQ ID NO: 357347 - DNA, 94 bp, Homo sapiens; identical to SEQ ID NO: 349607
  chr2:162930102-162930196
  hyper

SEQ ID NO: 357348 - DNA, 262 bp, Homo sapiens; identical to SEQ ID NO: 198502
  chr2:162930659-162930921
  hyper

SEQ ID NO: 357349 - DNA, 137 bp, Homo sapiens; identical to SEQ ID NO: 345047
  chr2:166649931-166650068
  hyper

SEQ ID NO: 357350 - DNA, 37 bp, Homo sapiens; identical to SEQ ID NO: 198509
  chr2:166650106-166650143
  hyper

SEQ ID NO: 357351 - DNA, 723 bp, Homo sapiens; identical to SEQ ID NO: 345049
  chr2:166650508-166651231
  hyper

SEQ ID NO: 357352 - DNA, 100 bp, Homo sapiens; identical to SEQ ID NO: 349612
  chr2:168148871-168148971
  hyper

SEQ ID NO: 357353 - DNA, 239 bp, Homo sapiens; identical to SEQ ID NO: 198512
  chr2:168149264-168149503
  hyper

SEQ ID NO: 357354 - DNA, 220 bp, Homo sapiens; identical to SEQ ID NO: 198513
  chr2:168149556-168149776
  hyper

SEQ ID NO: 357355 - DNA, 89 bp, Homo sapiens
  chr2:168150962-168151051
  hyper
ctttgcgctgctgcaaatggatggtgctactgggccagatccgaatctccgtagttcagtgcagtgggttctccatccctgctcaggac

SEQ ID NO: 357356 - DNA, 401 bp, Homo sapiens; identical to SEQ ID NO: 349615
  chr2:169312417-169312818
  hyper

SEQ ID NO: 357357 - DNA, 904 bp, Homo sapiens; identical to SEQ ID NO: 349616
  chr2:169312881-169313785
  hyper

SEQ ID NO: 357358 - DNA, 361 bp, Homo sapiens; identical to SEQ ID NO: 349617
  chr2:171567970-171568331
  hyper

SEQ ID NO: 357359 - DNA, 273 bp, Homo sapiens; identical to SEQ ID NO: 349618
  chr2:171568711-171568984
  hyper

SEQ ID NO: 357360 - DNA, 243 bp, Homo sapiens; identical to SEQ ID NO: 198523
  chr2:171570957-171571200
  hyper

SEQ ID NO: 357361 - DNA, 161 bp, Homo sapiens; identical to SEQ ID NO: 198524
  chr2:171571315-171571476
  hyper

SEQ ID NO: 357362 - DNA, 277 bp, Homo sapiens; identical to SEQ ID NO: 349621
  chr2:171571520-171571797
  hyper

SEQ ID NO: 357363 - DNA, 137 bp, Homo sapiens
  chr2:171670741-171670878
  hyper
cccaactaggcaaaacaaacagcagttactgtcaggagggaggagggctggggcgagtctggtgggttggcccatagctattggcggaagcaaacgaaacagaggcatggggaccagaaggacgggcgctgtccttc

SEQ ID NO: 357364 - DNA, 178 bp, Homo sapiens; identical to SEQ ID NO: 349622
  chr2:171671978-171672156
  hyper

SEQ ID NO: 357365 - DNA, 764 bp, Homo sapiens
  chr2:171673109-171673873
  hyper
cgacagcctgcctatttccaaaggaaaaaaaaaaagcgtgttgagtacgttctggattactcataagaccttttttttttccttccgggcgcaaaaccgtgagctggatttataatcgccctataaagctccagaggcggtcaggcacctgcagaggagccccgccgctccgccgactagctgcccccgcgagcaacggcctcgtgatttccccgccgatccggtccccgcctccccactctgcccccgcctaccccggagccgtgcagccgcctctccgaatctctctcttctcctggcgctcgcgtgcgagagggaactagcgagaacgaggaagcagctggaggtgacgccgggcagattacgcctgtcagggccgagccgagcggatcgctgggcgctgtgcagaggaaaggcgggagtgcccggctcgctgtcgcagagccgaggtgggtaagctagcgaccacctggacttcccagcgcccaaccgtggcttttcagccaggtcctctcctcccgcggcttctcaaccaaccccatcccagcgccggccacccaacctcccgaaatgagtgcttcctgcccgccctagtccctgctctccacgggtgcgctgcgcagggacccccccccccccgcctccctcgtcactcttcttatccctgccctccggattcacgccccggggaagcacggaggctgaggctctagttgaagtggggcaagagcgattttcccttgagcttccatgctgcgagcgcc

SEQ ID NO: 357366 - DNA, 152 bp, Homo sapiens; identical to SEQ ID NO: 198531
  chr2:171673939-171674091
  hyper

SEQ ID NO: 357367 - DNA, 51 bp, Homo sapiens
  chr2:171674329-171674380
  hyper
gatggctaaaaaccggctgggataagagggaggcaagcaacattccgactc

SEQ ID NO: 357368 - DNA, 32 bp, Homo sapiens
  chr2:172379091-172379123
  hyper
ctggggtcggcactgctcgtcggcttcctgtc

SEQ ID NO: 357369 - DNA, 127 bp, Homo sapiens
  chr2:172947590-172947717
  hyper
cgccagcggctcggcatcagagggcccgcgctcagtgctcctccctagacctttctgagctaagaaataattccggagtgtagccatctcttgctcacacacaacccgcttctaaattaagcaaggc

SEQ ID NO: 357370 - DNA, 230 bp, Homo sapiens; identical to SEQ ID NO: 198538
  chr2:172950233-172950463
  hyper

SEQ ID NO: 357371 - DNA, 233 bp, Homo sapiens; identical to SEQ ID NO: 349624
  chr2:172950493-172950726
  hyper

SEQ ID NO: 357372 - DNA, 169 bp, Homo sapiens; identical to SEQ ID NO: 198540
  chr2:172951779-172951948
  hyper

SEQ ID NO: 357373 - DNA, 112 bp, Homo sapiens; identical to SEQ ID NO: 346490
  chr2:172955255-172955367
  hyper

SEQ ID NO: 357374 - DNA, 57 bp, Homo sapiens; identical to SEQ ID NO: 346491
  chr2:172955887-172955944
  hyper

SEQ ID NO: 357375 - DNA, 116 bp, Homo sapiens
  chr2:172962017-172962133
  hyper
tcagcccaccccggagctgggagctcccgccctcccgactcccaggcttggctcatgccaaggcctgttgcgtgattccaacttgggctgacattccctgccccgggctctccagc

SEQ ID NO: 357376 - DNA, 66 bp, Homo sapiens
  chr2:172964092-172964158
  hyper
ccggcctgggcagcggcttgagctctgagcacgtgactgaccggaccctggcaccaagaaaaaagc

SEQ ID NO: 357377 - DNA, 163 bp, Homo sapiens; identical to SEQ ID NO: 346492
  chr2:172967062-172967225
  hyper

SEQ ID NO: 357378 - DNA, 85 bp, Homo sapiens; identical to SEQ ID NO: 345050
  chr2:173099596-173099681
  hyper

SEQ ID NO: 357379 - DNA, 1041 bp, Homo sapiens; identical to SEQ ID NO: 345051
  chr2:174219326-174220367
  hyper

SEQ ID NO: 357380 - DNA, 41 bp, Homo sapiens; identical to SEQ ID NO: 349630
  chr2:175190730-175190771
  hyper

SEQ ID NO: 357381 - DNA, 650 bp, Homo sapiens; identical to SEQ ID NO: 198556
  chr2:175197265-175197915
  hyper

SEQ ID NO: 357382 - DNA, 454 bp, Homo sapiens; identical to SEQ ID NO: 198557
  chr2:175198064-175198518
  hyper

SEQ ID NO: 357383 - DNA, 350 bp, Homo sapiens; identical to SEQ ID NO: 280407
  chr2:175199018-175199368
  hyper

SEQ ID NO: 357384 - DNA, 205 bp, Homo sapiens; identical to SEQ ID NO: 198560
  chr2:175199935-175200140
  hyper

SEQ ID NO: 357385 - DNA, 75 bp, Homo sapiens
  chr2:175204013-175204088
  hyper
cgttttaaaaagcccccaaactaagcacttgatttgataactaggctttttaatgttatggaagacaactgctcc

SEQ ID NO: 357386 - DNA, 75 bp, Homo sapiens; identical to SEQ ID NO: 345052
  chr2:175546713-175546788
  hyper

SEQ ID NO: 357387 - DNA, 543 bp, Homo sapiens; identical to SEQ ID NO: 331523
  chr2:176937692-176938235
  hyper

SEQ ID NO: 357388 - DNA, 207 bp, Homo sapiens
  chr2:176965522-176965729
  hyper
cttttggacagaggccttgtttggggagggggatctggggctaaggctaaggcttttccttcggttccttctctgctggccccagaagccaccaagagatttacagaccaggccagttgggcctccttgctttcctcagtccctgagaagcccgtgagaaacgtgcggaagtaccagtgcaactctggctggccttaaggcttccac

SEQ ID NO: 357389 - DNA, 173 bp, Homo sapiens; identical to SEQ ID NO: 349636
  chr2:176969908-176970081
  hyper

SEQ ID NO: 357390 - DNA, 84 bp, Homo sapiens; identical to SEQ ID NO: 346499
  chr2:176975945-176976029
  hyper

SEQ ID NO: 357391 - DNA, 61 bp, Homo sapiens
  chr2:176980657-176980718
  hyper
cgagggacgctttcgcggatagtgaactgctggcaaagaattgtctctgggctgaaagctc

SEQ ID NO: 357392 - DNA, 125 bp, Homo sapiens; identical to SEQ ID NO: 198576
  chr2:176993339-176993464
  hyper

SEQ ID NO: 357393 - DNA, 61 bp, Homo sapiens; identical to SEQ ID NO: 349639
  chr2:176995668-176995729
  hyper

SEQ ID NO: 357394 - DNA, 40 bp, Homo sapiens; identical to SEQ ID NO: 346500
  chr2:177005679-177005719
  hyper

SEQ ID NO: 357395 - DNA, 40 bp, Homo sapiens
  chr2:177042492-177042532
  hyper
cgtggttggtgaggaggctgggagaaggcctttttgatgg

SEQ ID NO: 357396 - DNA, 219 bp, Homo sapiens; identical to SEQ ID NO: 280446
  chr2:177052744-177052963
  hyper

SEQ ID NO: 357397 - DNA, 55 bp, Homo sapiens
  chr2:177502170-177502225
  hyper
cgcacccctctttacaaacctgagcggggctttcggggtaaggggaggcaagact

SEQ ID NO: 357398 - DNA, 60 bp, Homo sapiens; identical to SEQ ID NO: 198583
  chr2:177502920-177502980
  hyper

SEQ ID NO: 357399 - DNA, 794 bp, Homo sapiens; identical to SEQ ID NO: 331546
  chr2:178257227-178258021
  hyper

SEQ ID NO: 357400 - DNA, 353 bp, Homo sapiens; identical to SEQ ID NO: 331547
  chr2:178483339-178483692
  hyper

SEQ ID NO: 357401 - DNA, 486 bp, Homo sapiens; identical to SEQ ID NO: 331549
  chr2:179343487-179343973
  hyper

SEQ ID NO: 357402 - DNA, 33 bp, Homo sapiens; identical to SEQ ID NO: 349644
  chr2:180725139-180725172
  hyper

SEQ ID NO: 357403 - DNA, 34 bp, Homo sapiens; identical to SEQ ID NO: 345053
  chr2:182323095-182323129
  hyper

SEQ ID NO: 357404 - DNA, 44 bp, Homo sapiens
  chr2:182521331-182521375
  hyper
cggcgacttggggactcggtaacctgtccgggcagtgaggcgag

SEQ ID NO: 357405 - DNA, 280 bp, Homo sapiens
  chr2:182521646-182521926
  hyper
aggcacagcggcagcctccgggggcgcctcttcctcccggccgccctccagggcactcacccggttcctgcgcctcctccagggcatggcggagtcgcaggctgggcccgagccaggggtccggggaggcctttggagaaggaggtggagggcgcggcagccccagctctagccgcgtccagcgctgccacagcaacggcgcgcagggcagggacccaggagggaggcggggccgcgcctgacccagtccagcaccctggcctgccagcctcgccgcttc

SEQ ID NO: 357406 - DNA, 193 bp, Homo sapiens; identical to SEQ ID NO: 349646
  chr2:182756176-182756369
  hyper

SEQ ID NO: 357407 - DNA, 71 bp, Homo sapiens; identical to SEQ ID NO: 345054
  chr2:182818959-182819030
  hyper

SEQ ID NO: 357408 - DNA, 67 bp, Homo sapiens
  chr2:183732106-183732173
  hyper
gaacccgtctttggccccagaaacgagcccctagcccctcactgaagagcccaccccaattccctac

SEQ ID NO: 357409 - DNA, 90 bp, Homo sapiens; identical to SEQ ID NO: 345055
  chr2:183902312-183902402
  hyper

SEQ ID NO: 357410 - DNA, 568 bp, Homo sapiens; identical to SEQ ID NO: 198600
  chr2:183902442-183903010
  hyper

SEQ ID NO: 357411 - DNA, 587 bp, Homo sapiens; identical to SEQ ID NO: 346507
  chr2:183903037-183903624
  hyper

SEQ ID NO: 357412 - DNA, 352 bp, Homo sapiens; identical to SEQ ID NO: 349651
  chr2:185462268-185462620
  hyper

SEQ ID NO: 357413 - DNA, 107 bp, Homo sapiens; identical to SEQ ID NO: 349652
  chr2:190445073-190445180
  hyper

SEQ ID NO: 357414 - DNA, 819 bp, Homo sapiens; identical to SEQ ID NO: 198610
  chr2:190445255-190446074
  hyper

SEQ ID NO: 357415 - DNA, 279 bp, Homo sapiens; identical to SEQ ID NO: 349654
  chr2:190446109-190446388
  hyper

SEQ ID NO: 357416 - DNA, 86 bp, Homo sapiens; identical to SEQ ID NO: 345058
  chr2:191044988-191045074
  hyper

SEQ ID NO: 357417 - DNA, 513 bp, Homo sapiens; identical to SEQ ID NO: 345059
  chr2:191045505-191046018
  hyper

SEQ ID NO: 357418 - DNA, 171 bp, Homo sapiens; identical to SEQ ID NO: 349657
  chr2:191208170-191208341
  hyper

SEQ ID NO: 357419 - DNA, 361 bp, Homo sapiens; identical to SEQ ID NO: 331567
  chr2:191514839-191515200
  hyper

SEQ ID NO: 357420 - DNA, 287 bp, Homo sapiens
  chr2:192015084-192015371
  hyper
cgttgcttctgaaaactcagtgcctgtctgtcctttttgcgtgcatttcctagaagatcccactaaaggggcattttgtcccaccgtctgtgagctggtggtgccgctttggctctgtggcctgtagcttgcaaaaggagatgacctgccctaaaatgtcactcgcgcccatcaaagccacagtcaccggctgccgtagctgcaagcttttttctgaaatccaggtacgctaatctaaagtcagacatcacagctctagagaagctggctaagaaagtgaagagggg

SEQ ID NO: 357421 - DNA, 251 bp, Homo sapiens; identical to SEQ ID NO: 198622
  chr2:192015426-192015677
  hyper

SEQ ID NO: 357422 - DNA, 240 bp, Homo sapiens
  chr2:192015678-192015918
  hyper
ctctctcagcacaggtcccaggcagtgctcaagtccaaagtcagaagcgcccctcacagtccctaggagaaagccgctgacgccatcatcagtaggggatttgcatttctcctcccacttgaggctttcctgtgcgtcagtgttcgagtctctgggactttacttgggtcagttcccacccactctattctagaaatgctaacacgcagaaactgccaggctggagccccttcaccgggc

SEQ ID NO: 357423 - DNA, 447 bp, Homo sapiens; identical to SEQ ID NO: 345060
  chr2:192109730-192110177
  hyper

SEQ ID NO: 357424 - DNA, 253 bp, Homo sapiens; identical to SEQ ID NO: 198625
  chr2:192110303-192110556
  hyper

SEQ ID NO: 357425 - DNA, 439 bp, Homo sapiens; identical to SEQ ID NO: 345062
  chr2:192110584-192111023
  hyper

SEQ ID NO: 357426 - DNA, 518 bp, Homo sapiens; identical to SEQ ID NO: 349662
  chr2:198174828-198175346
  hyper

SEQ ID NO: 357427 - DNA, 897 bp, Homo sapiens; identical to SEQ ID NO: 331573
  chr2:200320451-200321348
  hyper

SEQ ID NO: 357428 - DNA, 44 bp, Homo sapiens
  chr2:200322454-200322498
  hyper
cggcggcggcggcgagccggggctgctggttcgcagggcggcta

SEQ ID NO: 357429 - DNA, 62 bp, Homo sapiens
  chr2:200322611-200322673
  hyper
ctccagcctctcccctctcggccgcctctgccagcagccagagccggactcactgacaagcc

SEQ ID NO: 357430 - DNA, 133 bp, Homo sapiens; identical to SEQ ID NO: 280540
  chr2:200326735-200326868
  hyper

SEQ ID NO: 357431 - DNA, 279 bp, Homo sapiens; identical to SEQ ID NO: 280541
  chr2:200326960-200327239
  hyper

SEQ ID NO: 357432 - DNA, 280 bp, Homo sapiens; identical to SEQ ID NO: 349666
  chr2:200327794-200328074
  hyper

SEQ ID NO: 357433 - DNA, 197 bp, Homo sapiens
  chr2:200329745-200329942
  hyper
cttttagtatcaataaagcctagtaattgggtttgttggttacctaagctcgagttcgactttctcagtctctctctctctctctctttctcattcagaggcaacgttttcaaaaaccggcaattgcgtgtgcgtttggggtgtgcaagtgtgagtgtagatgtgtgaaagttatttgtttcagcagtccttgtctc

SEQ ID NO: 357434 - DNA, 111 bp, Homo sapiens; identical to SEQ ID NO: 331580
  chr2:201727391-201727502
  hyper

SEQ ID NO: 357435 - DNA, 132 bp, Homo sapiens; identical to SEQ ID NO: 331581
  chr2:201828586-201828718
  hyper

SEQ ID NO: 357436 - DNA, 42 bp, Homo sapiens; identical to SEQ ID NO: 280569
  chr2:202897429-202897471
  hyper

SEQ ID NO: 357437 - DNA, 580 bp, Homo sapiens
  chr2:202897603-202898183
  hyper
gaaagggcacacgccgcagaaccaaggcacacggggccactgagacgcccggcgcgtcgtacagagtgttcctgggcgctcggtctcaggttacttctagaaccagtctccccaacgccgtcttcgtttccttaaaacctcgctagagtcaccccagttccccagactccaggccgtgcgcgcgggcggggtggcctgagcccgggttccccgctctccctgcttcgggcccttcctccgaggggtccttcctcccgccgtcactcggccccctccgcccgactcgggtttctcctcggaggcggcccctcctcctttttataactcgggggaggggagaggggactgtggcctcgcgtggactctttgggtccggggggaaagaggcgatccgcaaggcgcacccccttctcgtcccgtcccaaaccccacattgaggacccggcgacccgaaagccccgccagagccagcctttgcagtcctaacgcgactcctggtcacgtctctccccgaaggggcgctgcgcggtcctcgctcccctcaaacgccgctggcgaaggcgcccctgctcaggaatgc

SEQ ID NO: 357438 - DNA, 173 bp, Homo sapiens; identical to SEQ ID NO: 331583
  chr2:206750391-206750564
  hyper

SEQ ID NO: 357439 - DNA, 57 bp, Homo sapiens
  chr2:207307406-207307463
  hyper
cgtggttgacaaacaacggatttcccaagatagctgccacacacttggtttctaatc

SEQ ID NO: 357440 - DNA, 239 bp, Homo sapiens; identical to SEQ ID NO: 198669
  chr2:207308960-207309199
  hyper

SEQ ID NO: 357441 - DNA, 1168 bp, Homo sapiens; identical to SEQ ID NO: 349669
  chr2:208030665-208031833
  hyper

SEQ ID NO: 357442 - DNA, 56 bp, Homo sapiens; identical to SEQ ID NO: 349670
  chr2:208031939-208031995
  hyper

SEQ ID NO: 357443 - DNA, 32 bp, Homo sapiens
  chr2:210637062-210637094
  hyper
atatatatgtatatatttcagtgaagtttgac

SEQ ID NO: 357444 - DNA, 426 bp, Homo sapiens; identical to SEQ ID NO: 331594
  chr2:216946200-216946626
  hyper

SEQ ID NO: 357445 - DNA, 87 bp, Homo sapiens; identical to SEQ ID NO: 349672
  chr2:217498487-217498574
  hyper

SEQ ID NO: 357446 - DNA, 160 bp, Homo sapiens; identical to SEQ ID NO: 349673
  chr2:217556802-217556962
  hyper

SEQ ID NO: 357447 - DNA, 239 bp, Homo sapiens; identical to SEQ ID NO: 198687
  chr2:217557011-217557250
  hyper

SEQ ID NO: 357448 - DNA, 454 bp, Homo sapiens; identical to SEQ ID NO: 349675
  chr2:217557321-217557775
  hyper

SEQ ID NO: 357449 - DNA, 86 bp, Homo sapiens; identical to SEQ ID NO: 331598
  chr2:217558012-217558098
  hyper

SEQ ID NO: 357450 - DNA, 32 bp, Homo sapiens; identical to SEQ ID NO: 349676
  chr2:217558872-217558904
  hyper

SEQ ID NO: 357451 - DNA, 410 bp, Homo sapiens; identical to SEQ ID NO: 280629
  chr2:217559556-217559966
  hyper

SEQ ID NO: 357452 - DNA, 324 bp, Homo sapiens; identical to SEQ ID NO: 280633
  chr2:219232221-219232545
  hyper

SEQ ID NO: 357453 - DNA, 32 bp, Homo sapiens
  chr2:219232859-219232891
  hyper
gctagaaataggaaccgttaccgtcgtacctc

SEQ ID NO: 357454 - DNA, 128 bp, Homo sapiens; identical to SEQ ID NO: 349678
  chr2:219735657-219735785
  hyper

SEQ ID NO: 357455 - DNA, 594 bp, Homo sapiens; identical to SEQ ID NO: 346517
  chr2:219757371-219757965
  hyper

SEQ ID NO: 357456 - DNA, 64 bp, Homo sapiens; identical to SEQ ID NO: 346518
  chr2:219758014-219758078
  hyper

SEQ ID NO: 357457 - DNA, 208 bp, Homo sapiens; identical to SEQ ID NO: 331604
  chr2:219762346-219762554
  hyper

SEQ ID NO: 357458 - DNA, 166 bp, Homo sapiens; identical to SEQ ID NO: 198699
  chr2:219827883-219828049
  hyper

SEQ ID NO: 357459 - DNA, 53 bp, Homo sapiens
  chr2:219828117-219828170
  hyper
tttgggaggagggagggaggatcactagggtcactccgcggctgtcggctgtc

SEQ ID NO: 357460 - DNA, 832 bp, Homo sapiens
  chr2:219845565-219846397
  hyper
cggaagggagtgaggtgagctggggtcgcctggcagggtgggtatgaggcaaggcggctccctcgggctgagcccaccatccaggcctctcgctgcctgcgggcggcgcccaagcccgcgccaccctccttctcgggacgttttccttggcagttctctgctcaggcccgagatgagcctctccctgctttcccctaaccacgggttctggcgcagcaaagaacagagagagaggaggcagcggagagctcaggagctttaatggggctgaaagggtcagaaacacaccgggagtttctcctgggagtgtggggacaggaggaagggggccgtgtgtcacggaggacggtggctttcaccaaacctgctcaggtcccaggaaggaggaccgtgagaggcctccacgtgctgaggtgggagcagttccttggggaagagcaaaagtgggaaaagatttggcactcgttaaagagtagtgatattgaatggggcttctaggagccaggcggaaatgcactggagtggtggggagacaagagaggtccacaaatcccctccgggacctggagacctagaagaaaaaaagtgaaagagggcgcacatcgccctcctcaggggactgcggggtgggacaggagcaaatctagtaccagacaaggattgagggagcttcggtcccgtccccctgctaagtgcggcaggtggagtaaactctggattagaggacggttgacggaggctcccgggccctccccgggatgccgatgggatcgggcgagactctaggcgtgcgggcgaggccgcaggcacccgaccgccccgtctagtggta

SEQ ID NO: 357461 - DNA, 197 bp, Homo sapiens; identical to SEQ ID NO: 349682
  chr2:219847616-219847813
  hyper

SEQ ID NO: 357462 - DNA, 41 bp, Homo sapiens
  chr2:219857682-219857723
  hyper
cggtggaacccagcgcccctcaacccagcccagccgcggcc

SEQ ID NO: 357463 - DNA, 74 bp, Homo sapiens
  chr2:219858468-219858542
  hyper
ctggcctcccctgggcctcgggctaagaccgcgctgctgactcgctgagcggaagttcttcccagagtctaatc

SEQ ID NO: 357464 - DNA, 969 bp, Homo sapiens; identical to SEQ ID NO: 280663
  chr2:219866613-219867582
  hyper

SEQ ID NO: 357465 - DNA, 369 bp, Homo sapiens; identical to SEQ ID NO: 345064
  chr2:219922768-219923137
  hyper

SEQ ID NO: 357466 - DNA, 393 bp, Homo sapiens; identical to SEQ ID NO: 346520
  chr2:220348591-220348984
  hyper

SEQ ID NO: 357467 - DNA, 182 bp, Homo sapiens; identical to SEQ ID NO: 198715
  chr2:220361644-220361826
  hyper

SEQ ID NO: 357468 - DNA, 98 bp, Homo sapiens
  chr2:220378995-220379093
  hyper
cgcccgtgctgccggtgaaacgctgttgacatgtcctgaattattaagcgtggggagggctccggagcacatgctgagcggagcggctggggctgcgc

SEQ ID NO: 357469 - DNA, 59 bp, Homo sapiens; identical to SEQ ID NO: 349687
  chr2:220417712-220417771
  hyper

SEQ ID NO: 357470 - DNA, 81 bp, Homo sapiens
  chr2:220435308-220435389
  hyper
cgtgcgcgttgcgggcgtggcacacgtagacgccggaatccggcagccgagccgccaggatgcgcagtgccaggctcgcgc

SEQ ID NO: 357471 - DNA, 95 bp, Homo sapiens
  chr2:220436254-220436349
  hyper
tgctcttaggagcctctcttcccagccccctcccacagcttgggcctcttccccctcctccctcccacctccagccgccaggtccccagccgccc

SEQ ID NO: 357472 - DNA, 138 bp, Homo sapiens; identical to SEQ ID NO: 198724
  chr2:222435635-222435773
  hyper

SEQ ID NO: 357473 - DNA, 406 bp, Homo sapiens; identical to SEQ ID NO: 198725
  chr2:222436961-222437367
  hyper

SEQ ID NO: 357474 - DNA, 806 bp, Homo sapiens; identical to SEQ ID NO: 346522
  chr2:222437421-222438227
  hyper

SEQ ID NO: 357475 - DNA, 304 bp, Homo sapiens; identical to SEQ ID NO: 198729
  chr2:223166850-223167154
  hyper

SEQ ID NO: 357476 - DNA, 60 bp, Homo sapiens; identical to SEQ ID NO: 198731
  chr2:223170211-223170271
  hyper

SEQ ID NO: 357477 - DNA, 284 bp, Homo sapiens; identical to SEQ ID NO: 198732
  chr2:223171556-223171840
  hyper

SEQ ID NO: 357478 - DNA, 94 bp, Homo sapiens; identical to SEQ ID NO: 349691
  chr2:223185036-223185130
  hyper

SEQ ID NO: 357479 - DNA, 1340 bp, Homo sapiens
  chr2:223288948-223290288
  hyper
cgctcccattagtgttacgtctgccgggggaagaaggtggggtggggggttgggggcgccgggagaagagaggcgcagttcggagatcggcactcctccgtccagttacaggcggtcctgcccccgtggccgcccggggccgcccaagccctccgggacggagagaaagggggacgcgttgcgcaaggtggaggcagacacctgggcgggcgctaggacccgggcggcgcacctgttggctgggcccggggccccgcccgcccggcctccgcccggagtgcgggatcggcgggggcgaggcgggagtggcggtgccagcggagggcaccggcccggcgtggcagcggcggcggagcgcggccccgggcacaccatggccgagctgctgcggagcctgcaggattcccagctcgtcgcccgcttccagcgccgctgcgggctcttccccgctccggatgaaggcccccgggagaacggcgcggaccccacggagcgcgcggcgcgggtccccggggtcgagcatctccccgcagccaacggcaagggcggcgaggctccggccaacgggctgcgcagagccgcggcgccggaggtaaccatgggcaggtgttcgccgggtacggggagggggcggctgcggacgtgcgggtccctgcgactccgccacgcggggccggccgggccgagagggcgccgtccccggcagtgacccggctcccgccgctgcgagcggacggggaggcctggccttccagtaaccaggatgccaccctccaacgctgccaggggcaaccgggtctattgagatatccccagacgctttcaatgcagtccatttagagacttcccactttcaaaagtagttaaattcacgtagatgccagcaaatatgtaagagttacgtaatggaacggaggagcggggatgtccttggcacttccccggggagacgttcttagactcccccccacccccgtattcttgcatttccgcccatcccccttccctgatgcgcacaaatgcgggtgcagccgggctcagcgcgctcctcaccgcgctgcaccgccagctctgggcacagaacttggggctcacacagctcctagagagatttacaacctccctgcactacccccggcgatgatgtcttaacagcaactctcgcttgccctcccccagagtctgggggtccctcctgcctggtgggtcttttatggaccgacaccagtgacttctaacagatgcttctgggagggaagctcgctacgctcccgctaggtgttcaaagcgtggttatacaacccactgcggcttggggggaaccagcgtgcgtcgtcgtc

SEQ ID NO: 357480 - DNA, 163 bp, Homo sapiens; identical to SEQ ID NO: 331637
  chr2:224702626-224702789
  hyper

SEQ ID NO: 357481 - DNA, 372 bp, Homo sapiens; identical to SEQ ID NO: 331638
  chr2:224808923-224809295
  hyper

SEQ ID NO: 357482 - DNA, 236 bp, Homo sapiens; identical to SEQ ID NO: 198740
  chr2:225906168-225906404
  hyper

SEQ ID NO: 357483 - DNA, 210 bp, Homo sapiens; identical to SEQ ID NO: 331640
  chr2:227700369-227700579
  hyper

SEQ ID NO: 357484 - DNA, 352 bp, Homo sapiens; identical to SEQ ID NO: 345069
  chr2:230932495-230932847
  hyper

SEQ ID NO: 357485 - DNA, 146 bp, Homo sapiens; identical to SEQ ID NO: 280732
  chr2:230933064-230933210
  hyper

SEQ ID NO: 357486 - DNA, 156 bp, Homo sapiens
  chr2:231902837-231902993
  hyper
cggcctcccggcctcctgcctggccgtccaggcggccgcctgcagggccctgcaagccgccggagccgggcaaccaggtgagactgcgcggggcccggctgggcgcgggcgggcggtggctcgggcacgtcccccaagttggacccctttggccat

SEQ ID NO: 357487 - DNA, 167 bp, Homo sapiens; identical to SEQ ID NO: 349698
  chr2:232260775-232260942
  hyper

SEQ ID NO: 357488 - DNA, 41 bp, Homo sapiens; identical to SEQ ID NO: 349699
  chr2:232260984-232261025
  hyper

SEQ ID NO: 357489 - DNA, 104 bp, Homo sapiens; identical to SEQ ID NO: 280744
  chr2:232479181-232479285
  hyper

SEQ ID NO: 357490 - DNA, 227 bp, Homo sapiens; identical to SEQ ID NO: 349701
  chr2:232479454-232479681
  hyper

SEQ ID NO: 357491 - DNA, 115 bp, Homo sapiens
  chr2:232527239-232527354
  hyper
ttccgcgtgatggacgcccggaagccggcacaacaaatgcccaagcgccagggcttcgctgtctgcaggtccttccgctgcccgcggagcgaagatggcgcctagagcttgcagc

SEQ ID NO: 357492 - DNA, 623 bp, Homo sapiens; identical to SEQ ID NO: 346527
  chr2:232790030-232790653
  hyper

SEQ ID NO: 357493 - DNA, 263 bp, Homo sapiens; identical to SEQ ID NO: 280754
  chr2:232790784-232791047
  hyper

SEQ ID NO: 357494 - DNA, 390 bp, Homo sapiens; identical to SEQ ID NO: 280755
  chr2:232791140-232791530
  hyper

SEQ ID NO: 357495 - DNA, 254 bp, Homo sapiens
  chr2:233283897-233284151
  hyper
cccaggtcccagcccccgcagtcctccatgacctctagcatgggccgaggactcagtagctctatctcgcgcatgtcgaggcacgaacggaaaaaggcgctcaccttgcactgggccgcgccgccgggcccatccctgggccgtgccagcaggcgcctcaggcgctcctctttctgctcgccgaaggccgcgatggtgccataggtgagcttttcgttgggggtggcatggcgcttcagtcagcagccgcagac

SEQ ID NO: 357496 - DNA, 92 bp, Homo sapiens
  chr2:233367692-233367784
  hyper
cgggagggaggtttatccgtaggagtcagcccagttgggtcaaactaaggacccagtgcagaccccgaggcccagagacacaggtgtgcgca

SEQ ID NO: 357497 - DNA, 339 bp, Homo sapiens; identical to SEQ ID NO: 280765
  chr2:233497841-233498180
  hyper

SEQ ID NO: 357498 - DNA, 33 bp, Homo sapiens; identical to SEQ ID NO: 198759
  chr2:233499312-233499345
  hyper

SEQ ID NO: 357499 - DNA, 220 bp, Homo sapiens; identical to SEQ ID NO: 349705
  chr2:233740556-233740776
  hyper

SEQ ID NO: 357500 - DNA, 168 bp, Homo sapiens
  chr2:233741586-233741754
  hyper
ctgcctcccatcccgctccgctggggttcagagcgttccgtgaggaggtaagcgctagggcaggagaggccgacagagaccccggggcccgccgctccttgaggccggggttggggagggcaggggccgtcggctctcccagccagaggccgcgtggttttgggggac

SEQ ID NO: 357501 - DNA, 359 bp, Homo sapiens; identical to SEQ ID NO: 349706
  chr2:234474820-234475179
  hyper

SEQ ID NO: 357502 - DNA, 102 bp, Homo sapiens; identical to SEQ ID NO: 349707
  chr2:234475503-234475605
  hyper

SEQ ID NO: 357503 - DNA, 165 bp, Homo sapiens
  chr2:235404971-235405136
  hyper
ccgtgcagcggctgtaggacttccacagcggccgcagcttctcctggccgcccacgtcccagaagtggcagctgatgcccttggccgtgccgttgctcagcttgatcttctcggtgttgaagccgatggtgggcaccgtgttcacgaactcgttgaacttgagcc

SEQ ID NO: 357504 - DNA, 592 bp, Homo sapiens; identical to SEQ ID NO: 198764
  chr2:235860154-235860746
  hyper

SEQ ID NO: 357505 - DNA, 84 bp, Homo sapiens; identical to SEQ ID NO: 198765
  chr2:235860808-235860892
  hyper

SEQ ID NO: 357506 - DNA, 438 bp, Homo sapiens; identical to SEQ ID NO: 198766
  chr2:235860951-235861389
  hyper

SEQ ID NO: 357507 - DNA, 132 bp, Homo sapiens
  chr2:235861533-235861665
  hyper
tcagttgggaccccaaccctgggtcccgcggctcctagcccggggcctgcggtgtagacgggggttggggacaggcccagctggccctgaccgggtgtcgggcgcccagagatgccgcgcgggaggagccgc

SEQ ID NO: 357508 - DNA, 297 bp, Homo sapiens; identical to SEQ ID NO: 198767
  chr2:236402404-236402701
  hyper

SEQ ID NO: 357509 - DNA, 138 bp, Homo sapiens; identical to SEQ ID NO: 198768
  chr2:236403013-236403151
  hyper

SEQ ID NO: 357510 - DNA, 68 bp, Homo sapiens; identical to SEQ ID NO: 346533
  chr2:236403736-236403804
  hyper

SEQ ID NO: 357511 - DNA, 307 bp, Homo sapiens; identical to SEQ ID NO: 198771
  chr2:236578055-236578362
  hyper

SEQ ID NO: 357512 - DNA, 44 bp, Homo sapiens; identical to SEQ ID NO: 346535
  chr2:236578677-236578721
  hyper

SEQ ID NO: 357513 - DNA, 115 bp, Homo sapiens
  chr2:237080431-237080546
  hyper
gcagctcttgctcctggcaatagttgggaaataacttgggatgggttttatttatggaagggcaattgggattcacacccagctaaccctgaacagtccctcccgagcccaggac

SEQ ID NO: 357514 - DNA, 352 bp, Homo sapiens; identical to SEQ ID NO: 280797
  chr2:237087070-237087422
  hyper

SEQ ID NO: 357515 - DNA, 374 bp, Homo sapiens; identical to SEQ ID NO: 345073
  chr2:237087637-237088011
  hyper

SEQ ID NO: 357516 - DNA, 223 bp, Homo sapiens; identical to SEQ ID NO: 345074
  chr2:237088239-237088462
  hyper

SEQ ID NO: 357517 - DNA, 226 bp, Homo sapiens; identical to SEQ ID NO: 331671
  chr2:238617178-238617404
  hyper

SEQ ID NO: 357518 - DNA, 112 bp, Homo sapiens
  chr2:241393469-241393581
  hyper
gaaatggtggcgggggggcttcgggcagacggcaggggtgtggggaggggagggaagcacgatggggtgagtctgggggccgtggatgccgttgacgaggagctgagatgcc

SEQ ID NO: 357519 - DNA, 205 bp, Homo sapiens; identical to SEQ ID NO: 198794
  chr2:241771771-241771976
  hyper

SEQ ID NO: 357520 - DNA, 82 bp, Homo sapiens; identical to SEQ ID NO: 331676
  chr2:242269474-242269556
  hyper

SEQ ID NO: 357521 - DNA, 246 bp, Homo sapiens; identical to SEQ ID NO: 349719
  chr2:242498020-242498266
  hyper

SEQ ID NO: 357522 - DNA, 235 bp, Homo sapiens; identical to SEQ ID NO: 280841
  chr2:242498800-242499035
  hyper

SEQ ID NO: 357523 - DNA, 172 bp, Homo sapiens; identical to SEQ ID NO: 280842
  chr2:242549677-242549849
  hyper

SEQ ID NO: 357524 - DNA, 50 bp, Homo sapiens; identical to SEQ ID NO: 280843
  chr2:242549957-242550007
  hyper

SEQ ID NO: 357525 - DNA, 109 bp, Homo sapiens; identical to SEQ ID NO: 349721
  chr3:2139600-2139709
  hyper

SEQ ID NO: 357526 - DNA, 54 bp, Homo sapiens; identical to SEQ ID NO: 198804
  chr3:2141396-2141450
  hyper

SEQ ID NO: 357527 - DNA, 244 bp, Homo sapiens; identical to SEQ ID NO: 349723
  chr3:2141539-2141783
  hyper

SEQ ID NO: 357528 - DNA, 193 bp, Homo sapiens
  chr3:3221338-3221531
  hyper
cgcagcgtcctgctgatctccttcgccggccatgtctgtttacccgcaaaggaggctgggacagggcggtgccgaagactccgagggagggcccgtgtcgcgcggctgccgcgcaccggggccacagcgccccctggcggccccaggggagcagacggcggcgcgtacccaagcctgaaagtgatggcctagg

SEQ ID NO: 357529 - DNA, 46 bp, Homo sapiens; identical to SEQ ID NO: 107798
  chr3:3221564-3221610
  hyper

SEQ ID NO: 357530 - DNA, 81 bp, Homo sapiens; identical to SEQ ID NO: 349724
  chr3:3840349-3840430
  hyper

SEQ ID NO: 357531 - DNA, 326 bp, Homo sapiens; identical to SEQ ID NO: 349725
  chr3:4909962-4910288
  hyper

SEQ ID NO: 357532 - DNA, 210 bp, Homo sapiens; identical to SEQ ID NO: 349726
  chr3:4910550-4910760
  hyper

SEQ ID NO: 357533 - DNA, 231 bp, Homo sapiens; identical to SEQ ID NO: 345076
  chr3:5018754-5018985
  hyper

SEQ ID NO: 357534 - DNA, 143 bp, Homo sapiens; identical to SEQ ID NO: 345077
  chr3:5019132-5019275
  hyper

SEQ ID NO: 357535 - DNA, 205 bp, Homo sapiens; identical to SEQ ID NO: 345078
  chr3:5137574-5137779
  hyper

SEQ ID NO: 357536 - DNA, 190 bp, Homo sapiens; identical to SEQ ID NO: 280868
  chr3:6902672-6902862
  hyper

SEQ ID NO: 357537 - DNA, 40 bp, Homo sapiens; identical to SEQ ID NO: 280869
  chr3:6902929-6902969
  hyper

SEQ ID NO: 357538 - DNA, 76 bp, Homo sapiens
  chr3:6903188-6903264
  hyper
cgccccgcactcaatccggatcgagggggacgtcaccctcggggggctgttccccgtgcacgccaagggtcccagc

SEQ ID NO: 357539 - DNA, 233 bp, Homo sapiens; identical to SEQ ID NO: 280892
  chr3:10183473-10183706
  hyper

SEQ ID NO: 357540 - DNA, 176 bp, Homo sapiens
  chr3:10183782-10183958
  hyper
gctgcccgtatggctcaacttcgacggcgagccgcagccctacccaacgctgccgcctggcacgggccgccgcatccacagctaccgaggtacgggcccggcgcttaggcccgacccagcagggacgatagcacggtctgaagcccctctaccgccccggggtccattttgcagac

SEQ ID NO: 357541 - DNA, 412 bp, Homo sapiens; identical to SEQ ID NO: 345079
  chr3:10206343-10206755
  hyper

SEQ ID NO: 357542 - DNA, 880 bp, Homo sapiens; identical to SEQ ID NO: 331693
  chr3:11684049-11684929
  hyper

SEQ ID NO: 357543 - DNA, 427 bp, Homo sapiens; identical to SEQ ID NO: 346543
  chr3:12329055-12329482
  hyper

SEQ ID NO: 357544 - DNA, 205 bp, Homo sapiens; identical to SEQ ID NO: 198821
  chr3:12330025-12330230
  hyper

SEQ ID NO: 357545 - DNA, 80 bp, Homo sapiens; identical to SEQ ID NO: 349733
  chr3:12330283-12330363
  hyper

SEQ ID NO: 357546 - DNA, 98 bp, Homo sapiens; identical to SEQ ID NO: 349734
  chr3:13009355-13009453
  hyper

SEQ ID NO: 357547 - DNA, 50 bp, Homo sapiens; identical to SEQ ID NO: 280911
  chr3:13009475-13009525
  hyper

SEQ ID NO: 357548 - DNA, 896 bp, Homo sapiens; identical to SEQ ID NO: 349736
  chr3:13461404-13462300
  hyper

SEQ ID NO: 357549 - DNA, 201 bp, Homo sapiens; identical to SEQ ID NO: 198829
  chr3:13920779-13920980
  hyper

SEQ ID NO: 357550 - DNA, 138 bp, Homo sapiens
  chr3:13921903-13922041
  hyper
agactcggccgagaggcctagtgccttggtctgctgccctgctccctccagcccggaacagggagctggggctgacagggcacaccccagttccccaaccccagcttcaggggagggcgccccctttcgcggagcgac

SEQ ID NO: 357551 - DNA, 478 bp, Homo sapiens; identical to SEQ ID NO: 349738
  chr3:13936742-13937220
  hyper

SEQ ID NO: 357552 - DNA, 124 bp, Homo sapiens; identical to SEQ ID NO: 349739
  chr3:13937250-13937374
  hyper

SEQ ID NO: 357553 - DNA, 92 bp, Homo sapiens; identical to SEQ ID NO: 331702
  chr3:14443834-14443926
  hyper

SEQ ID NO: 357554 - DNA, 578 bp, Homo sapiens; identical to SEQ ID NO: 331703
  chr3:14443998-14444576
  hyper

SEQ ID NO: 357555 - DNA, 78 bp, Homo sapiens; identical to SEQ ID NO: 280927
  chr3:14644635-14644713
  hyper

SEQ ID NO: 357556 - DNA, 54 bp, Homo sapiens
  chr3:14644749-14644803
  hyper
cggagaggacggctggaggggagcccgaaggcgccccagccgtctcgcaccctc

SEQ ID NO: 357557 - DNA, 369 bp, Homo sapiens; identical to SEQ ID NO: 345080
  chr3:16553609-16553978
  hyper

SEQ ID NO: 357558 - DNA, 78 bp, Homo sapiens; identical to SEQ ID NO: 345081
  chr3:16555426-16555504
  hyper

SEQ ID NO: 357559 - DNA, 107 bp, Homo sapiens
  chr3:16925425-16925532
  hyper
cgagatcctgagccccgggacccttgttccgggccccgaggcctacttggtagttgcccctcggggttccgggtgggtgactgacagttgcagcagctctggggagg

SEQ ID NO: 357560 - DNA, 73 bp, Homo sapiens; identical to SEQ ID NO: 280940
  chr3:16925583-16925656
  hyper

SEQ ID NO: 357561 - DNA, 230 bp, Homo sapiens; identical to SEQ ID NO: 280941
  chr3:16925705-16925935
  hyper

SEQ ID NO: 357562 - DNA, 255 bp, Homo sapiens; identical to SEQ ID NO: 280942
  chr3:16925965-16926220
  hyper

SEQ ID NO: 357563 - DNA, 93 bp, Homo sapiens
  chr3:16926261-16926354
  hyper
cggggctccgccggcgccggagctgactcgtctctctcttctttcccctgcaggaatcttccgataattctgccgccgcgactttaaccgtgc

SEQ ID NO: 357564 - DNA, 340 bp, Homo sapiens; identical to SEQ ID NO: 349744
  chr3:16926663-16927003
  hyper

SEQ ID NO: 357565 - DNA, 269 bp, Homo sapiens; identical to SEQ ID NO: 331711
  chr3:23957838-23958107
  hyper

SEQ ID NO: 357566 - DNA, 989 bp, Homo sapiens; identical to SEQ ID NO: 331712
  chr3:24536360-24537349
  hyper

SEQ ID NO: 357567 - DNA, 158 bp, Homo sapiens; identical to SEQ ID NO: 280964
  chr3:24870844-24871002
  hyper

SEQ ID NO: 357568 - DNA, 349 bp, Homo sapiens
  chr3:24871245-24871594
  hyper
cgtgaacccaggagtcgctggcaagttgcacctgccagccggatccgccccggctcccttcgcgtccctgccgggtccagcgctgtcctgcgcaccttagggctgggcacggcgaaacctggcgcccttgggagcagaggttctcgctccattcccctgtggggatctaagctccaggccggggtgtcggacctctgggttgcagcatgctttggggccgaagaaagggcgagaaaaagtttgagcattggctgggcctagggagcgggtagcgccaggctgcacatggcaggagttggagaagagtactaggggcttggcgccggacacagggacgcggccagggacc

SEQ ID NO: 357569 - DNA, 221 bp, Homo sapiens; identical to SEQ ID NO: 198852
  chr3:25469458-25469679
  hyper

SEQ ID NO: 357570 - DNA, 130 bp, Homo sapiens; identical to SEQ ID NO: 345083
  chr3:25469874-25470004
  hyper

SEQ ID NO: 357571 - DNA, 214 bp, Homo sapiens; identical to SEQ ID NO: 346549
  chr3:27410391-27410605
  hyper

SEQ ID NO: 357572 - DNA, 61 bp, Homo sapiens; identical to SEQ ID NO: 346550
  chr3:27411079-27411140
  hyper

SEQ ID NO: 357573 - DNA, 150 bp, Homo sapiens
  chr3:29322332-29322482
  hyper
cggcagcagcgttgctgcaaaaatcgcttgctattcgagatagccagcagagggaatcggaactttgcttgcagcaggggttgaagcagcctttttttttttttttcttggaggaaatactgcagccttctggactgcgtacgctgctcc

SEQ ID NO: 357574 - DNA, 168 bp, Homo sapiens
  chr3:32279558-32279726
  hyper
cgccctcaaagccaagcgattaagttggttcctcaaattgttcccgacaggaggggcaggaaataacaccgggctctggcggcggccgcagcaggagggggagaagagcgggccgtctcccgggcagtgctggcggcctctcatcgatctcgggtctaaggtccggcc

SEQ ID NO: 357575 - DNA, 558 bp, Homo sapiens; identical to SEQ ID NO: 345084
  chr3:32433054-32433612
  hyper

SEQ ID NO: 357576 - DNA, 200 bp, Homo sapiens; identical to SEQ ID NO: 198867
  chr3:32433665-32433865
  hyper

SEQ ID NO: 357577 - DNA, 81 bp, Homo sapiens; identical to SEQ ID NO: 345086
  chr3:32434068-32434149
  hyper

SEQ ID NO: 357578 - DNA, 64 bp, Homo sapiens; identical to SEQ ID NO: 349753
  chr3:35681641-35681705
  hyper

SEQ ID NO: 357579 - DNA, 240 bp, Homo sapiens
  chr3:36985571-36985811
  hyper
cgcaacgcgcctcccaggcaacagactccgagctccggttcggaaacgctccgaggcagaagcaagggcttctaagggctccgcttcccagccttgggtccctactactaccttccccctagactcggtgagcccaggctgatggaccgtgcagtccagtttgagccagcccagcagccctcaatcgggcgggcagggaagaaggcctcctactgccgggaagaggccagcgcgctccaa

SEQ ID NO: 357580 - DNA, 250 bp, Homo sapiens; identical to SEQ ID NO: 198878
  chr3:36986413-36986663
  hyper

SEQ ID NO: 357581 - DNA, 1420 bp, Homo sapiens; identical to SEQ ID NO: 331732
  chr3:37033979-37035399
  hyper

SEQ ID NO: 357582 - DNA, 93 bp, Homo sapiens; identical to SEQ ID NO: 281033
  chr3:37901953-37902046
  hyper

SEQ ID NO: 357583 - DNA, 423 bp, Homo sapiens; identical to SEQ ID NO: 281034
  chr3:37902095-37902518
  hyper

SEQ ID NO: 357584 - DNA, 255 bp, Homo sapiens
  chr3:37902584-37902839
  hyper
cccctcaagctggggagcgcagccctgggcctctccgaaccttccccacgctccccggtctccatcacagcagcgccgcgcccgggcccctctgcgggccgtctgggtgtcactaccgctcctgggcagcccccacttctgcacaccgcttccctccgcactcacgtcccaggcccctcggttccctcgcctggacgcccctcgcccagcaccttcccgagacaccctcacagcacctccgccagcacttcccgc

SEQ ID NO: 357585 - DNA, 41 bp, Homo sapiens; identical to SEQ ID NO: 349755
  chr3:38070629-38070670
  hyper

SEQ ID NO: 357586 - DNA, 50 bp, Homo sapiens; identical to SEQ ID NO: 331738
  chr3:39250115-39250165
  hyper

SEQ ID NO: 357587 - DNA, 493 bp, Homo sapiens; identical to SEQ ID NO: 346555
  chr3:39850742-39851235
  hyper

SEQ ID NO: 357588 - DNA, 88 bp, Homo sapiens; identical to SEQ ID NO: 331740
  chr3:40350800-40350888
  hyper

SEQ ID NO: 357589 - DNA, 217 bp, Homo sapiens
  chr3:40547367-40547584
  hyper
cgctgcaggacccctgcctggggccgcccgctcgggcccgtgttgtctcaggcagtagggacactggcgctgacggcgggggtaggaaaccacagagactggcaacttcccaggttcctagagaggaggggcatggaaaacgcacttccggcggagggtctcaagctttccccggtgtcggcggcaggtggaatttccacgctttatctgcgcctgc

SEQ ID NO: 357590 - DNA, 158 bp, Homo sapiens
  chr3:42542869-42543027
  hyper
cgcacattctgctcagggctctgggacccgctgccctctccgcctctccactgaactccgcctctccttctgtcacacggctccgccagccactctatcctgccgccgcgaccacatctccagcctcgattgtgcaggctcgagcccgtagaaagagg

SEQ ID NO: 357591 - DNA, 129 bp, Homo sapiens; identical to SEQ ID NO: 281069
  chr3:42543580-42543709
  hyper

SEQ ID NO: 357592 - DNA, 243 bp, Homo sapiens; identical to SEQ ID NO: 345088
  chr3:43147038-43147281
  hyper

SEQ ID NO: 357593 - DNA, 105 bp, Homo sapiens; identical to SEQ ID NO: 345089
  chr3:43147607-43147712
  hyper

SEQ ID NO: 357594 - DNA, 131 bp, Homo sapiens; identical to SEQ ID NO: 349760
  chr3:43935666-43935797
  hyper

SEQ ID NO: 357595 - DNA, 426 bp, Homo sapiens; identical to SEQ ID NO: 198906
  chr3:44038922-44039348
  hyper

SEQ ID NO: 357596 - DNA, 41 bp, Homo sapiens; identical to SEQ ID NO: 345091
  chr3:44063232-44063273
  hyper

SEQ ID NO: 357597 - DNA, 71 bp, Homo sapiens; identical to SEQ ID NO: 346560
  chr3:44597031-44597102
  hyper

SEQ ID NO: 357598 - DNA, 550 bp, Homo sapiens; identical to SEQ ID NO: 331751
  chr3:44666348-44666898
  hyper

SEQ ID NO: 357599 - DNA, 157 bp, Homo sapiens
  chr3:44771093-44771250
  hyper
tgacgtcacgccggctgggcgcgtccgggacttactcctttccgcagggcagcacccagggacctgagtgttgcaaggtgcgagaggggagcgccgcggggagcgccgcgggaagcgcatggtgagcggtttctgctgtgcccggctgccgcgggtc

SEQ ID NO: 357600 - DNA, 365 bp, Homo sapiens; identical to SEQ ID NO: 349765
  chr3:45186931-45187296
  hyper

SEQ ID NO: 357601 - DNA, 485 bp, Homo sapiens
  chr3:49027062-49027547
  hyper
cggcctatgaaaccttgcacatcaggcagcttcttcctaaggcctgcctgactccggcgagacttcccgggagatccggaccgaccgcggaaccgagctccaagaatgcctgcgaggaggctgtgggtcctaccctatcgccgcttacgcagtcccagcctccgcggcgcccccaaatgccgcactgttgagtcatctcagcgctgcctcctccgcgctgcgctccccacccccgctcctggagcaagaagatgcagacgatacttttcccggaggcaagagggcgtcttcacgcaggcaccgagaagctcccactagtgtatgccttaatggtgccgctcttgtccgcgtctacgcttgggaccttggcttctgacttggagagtgtacagctctgcccgacggcaacccagcttgggaagagaagccccagcgtgggctggggctcaaggcgcaggaaggccgagcccggcgcggacgcaggc

SEQ ID NO: 357602 - DNA, 395 bp, Homo sapiens; identical to SEQ ID NO: 346561
  chr3:49027805-49028200
  hyper

SEQ ID NO: 357603 - DNA, 190 bp, Homo sapiens
  chr3:49066961-49067151
  hyper
cgctgaagaaacagcgcatgcgtatagcacatagtggccttgtcactgaggagctgccacttcacgtcccaccccacactccccgcaggacctcggccagttcaattaacaggcaagggtttacttctactgtcccgccgggctcctccccaaaataaagagacgttgttcactaacatgttgaaaagac

SEQ ID NO: 357604 - DNA, 387 bp, Homo sapiens
  chr3:49893744-49894131
  hyper
cggtacccgggcaaacaccgggccccaacactgcagtcactcaccactgcaagtggaaggtgtggccgcagtggatggcggccacgtcgcgggagtgatcgaagaagtcggagcagatagtgcacagagcacggataggcatgatggctggactcaaggggcccaggcagccaaagaaactgctacaggtccggcttcgtagacgcgcccccgcgcctccgcttgcttcaaatttggctccgcagcacgacttcctggagcgggccggaagtgacaacacaaaactttgggcggagcgtgaatacttcgcctggattggacaaattctcggatgggcggaactatgggcggggcttagcggccccgaggccgtagagaatcctgggc

SEQ ID NO: 357605 - DNA, 233 bp, Homo sapiens; identical to SEQ ID NO: 349767
  chr3:49906737-49906970
  hyper

SEQ ID NO: 357606 - DNA, 49 bp, Homo sapiens; identical to SEQ ID NO: 349768
  chr3:49907379-49907428
  hyper

SEQ ID NO: 357607 - DNA, 94 bp, Homo sapiens
  chr3:50243562-50243656
  hyper
ttcgattggccacagcaaatgcgtgcgtttgtttacacccaggcagggggaggccaggggagggacctgcggggacccgcccttttccccccac

SEQ ID NO: 357608 - DNA, 356 bp, Homo sapiens; identical to SEQ ID NO: 346562
  chr3:50374299-50374655
  hyper

SEQ ID NO: 357609 - DNA, 233 bp, Homo sapiens; identical to SEQ ID NO: 281171
  chr3:50374684-50374917
  hyper

SEQ ID NO: 357610 - DNA, 34 bp, Homo sapiens; identical to SEQ ID NO: 346564
  chr3:50374946-50374980
  hyper

SEQ ID NO: 357611 - DNA, 81 bp, Homo sapiens; identical to SEQ ID NO: 346565
  chr3:50377892-50377973
  hyper

SEQ ID NO: 357612 - DNA, 167 bp, Homo sapiens; identical to SEQ ID NO: 346566
  chr3:50378002-50378169
  hyper

SEQ ID NO: 357613 - DNA, 37 bp, Homo sapiens; identical to SEQ ID NO: 281183
  chr3:51989952-51989989
  hyper

SEQ ID NO: 357614 - DNA, 138 bp, Homo sapiens
  chr3:51990500-51990638
  hyper
tcgcctactcggccttcgcggctcaccccttcctgtacgggctgctgcagcgccccgtgcgcttggcactgggccgcctctctcgccgtgcactgcctggacctgtgcgggcctgcactccgcaagcctggcacccgc

SEQ ID NO: 357615 - DNA, 199 bp, Homo sapiens; identical to SEQ ID NO: 331773
  chr3:53195788-53195987
  hyper

SEQ ID NO: 357616 - DNA, 572 bp, Homo sapiens
  chr3:53527829-53528401
  hyper
cgagcggtttgaaagaccttggctttgacttccctgtacctgcctccaaacacacgtgggggcggggtggggtggggggagatattgccccccatccccgttgccttccgcgacgccaggccaggcgcagggcaggggagaagatggggggcgccctggattcgcggttccagctgcaggcagttacctggggtagtgagtgctctctacagacccgggctaccccaacccccccgattccagaaagggccggagaaaagcagggggcgcctgccccgctccggagcagccagggagcccggccgagccttgacgaggatgagctcggagaccgcagcagctaccgcccgctagcacctgagctcccagggggcggggcctcctccaggtgtgcgcagaggaggccggcgcggagtcggggccggcgcgggagcccgagctgtcccccagcccagaaatgcgcggggaggagcggttcatccgcaccccagcgccgcgggagacactggcgccgcctgcctcctccgggtcccggggggagagcgcaccgtgcggcgcggagggggttaacc

SEQ ID NO: 357617 - DNA, 247 bp, Homo sapiens; identical to SEQ ID NO: 198957
  chr3:53879786-53880033
  hyper

SEQ ID NO: 357618 - DNA, 201 bp, Homo sapiens; identical to SEQ ID NO: 198959
  chr3:54156155-54156356
  hyper

SEQ ID NO: 357619 - DNA, 346 bp, Homo sapiens; identical to SEQ ID NO: 198961
  chr3:55521390-55521736
  hyper

SEQ ID NO: 357620 - DNA, 165 bp, Homo sapiens; identical to SEQ ID NO: 349778
  chr3:57198384-57198549
  hyper

SEQ ID NO: 357621 - DNA, 568 bp, Homo sapiens; identical to SEQ ID NO: 349779
  chr3:57198581-57199149
  hyper

SEQ ID NO: 357622 - DNA, 127 bp, Homo sapiens
  chr3:57204027-57204154
  hyper
cgcctggcctgggaccgccttgcctgggacgaaaggccccagactcagctgattcctccagactcttcctgtctaggacgccaaaaacatggccttcctaaacccagccttggcgcctcctgcacag

SEQ ID NO: 357623 - DNA, 322 bp, Homo sapiens
  chr3:57204208-57204530
  hyper
tgcgcccagaaatcccaggacgcccaccccatagttctggagcggtgcgtaccttggccactacacggaattcaccggcccacggccacttcccgtttcttttcccggaggaaaagaagagcggatgtctagtctccaaggtaaccgcgagggggcgcgcgcagtccaggtcggagaccgccgccccagactaccctgcactgcgaccgcacaacaagtctttctagatcaaagccgccagggcaggtgggagtactctgctgttattcagagctggtgctaagctttaggggaagtagagtccagggggtcgtaagaaaac

SEQ ID NO: 357624 - DNA, 625 bp, Homo sapiens
  chr3:57994555-57995180
  hyper
cgtgagagcatcaagctcgtgtccatcggtgagttctctggccgggcccaggcgcccactgtggtgccgacccgcccccgcgcgtgcacccctgcggagggcgaggatttcccgcagcgcgcccccacctcggagataagggggagtcgtccccaggggtgggttatagggggcctagaccccctccccggtgtcttcccctgggatgggacctgttgtgatcgctccccgccatccgccccagcagtgcacctttggctggctaagggttgagggtttgggctggggtcacaggaggagaggtggagttgttgcatttctctacacctggggcgcccctatgggagctaggggactagaaaccctcgttcgctgtccccgggggcgggccctagggtcagatgctccgcggagtgctctccctgctgcgcccaggttggtgctctcagaggcagctgaatgggcgttggctcggaggccgggccgtgagacctgaggaggaaccgttctctgcgcctggggcctccctgcccaggtggagacagagacctggtaccttcccctgccgtcgctggaatgggtgtgggccccgaggttgcaagggtaggcgcgggtgtgtgtcctc

SEQ ID NO: 357625 - DNA, 962 bp, Homo sapiens
  chr3:61547191-61548153
  hyper
cgctcgctccttcgctcgccggctttaaagtctctgccaggatccatgctcacatgttacttcctgtatggaggcatggccagtttccagccccgcgctcttcgttccttcccagcctgcgccggagccacaactttcaggagcatggactgaaggcgccctcgccccagcgcccctctgagatcctttgtgttttcctccgtttcctccggccgtttctattttggggggctctccgctccccctgcctctcccctccccttcccctctcgcaaacatgcctccttccttcccggggccctggaaggagctgcctgcctgaagcccggagacgccgcgccgcgctcagccccgccgccgcccgccggctctcgggctgtgctgcgctgccgactcaagttggggatcctcggctgctcgccgccgccgcccgcggtccctgcctgccccaggcccggggcatcgccgccggccgccgactccgcgccctgcccgatcggctctctcctttttaaacggaaagcagcctttctccgccgagaggatcgtccccagcgtggctctgcgttcccggtcactttttgagattttccggggggcgctcggcggcttcccggattccaaggggactcgggccgccgagcgcggggggcccgtggagcgggcgagccggggaagcgccccggcttagcggaggctcgcacggaggcaagaacttattcaacaagtttacctccctgctttcctcttttcgatgtgcgttttcggacatgcggaggttactggaaccgtgttggtggattttgttcctgaaaatcaccagttccgtgctccattatgtcgtgtgcttccccggtgagtgccggccgccgaggggatgcggccccggccggcgcgcgttggggatgcggagttgtcgcctgggcgcggagctccggcgcccgtccgggagaccctggaga

SEQ ID NO: 357626 - DNA, 446 bp, Homo sapiens; identical to SEQ ID NO: 349780
  chr3:62859445-62859891
  hyper

SEQ ID NO: 357627 - DNA, 205 bp, Homo sapiens; identical to SEQ ID NO: 198979
  chr3:62859964-62860169
  hyper

SEQ ID NO: 357628 - DNA, 77 bp, Homo sapiens; identical to SEQ ID NO: 198981
  chr3:63264062-63264139
  hyper

SEQ ID NO: 357629 - DNA, 85 bp, Homo sapiens; identical to SEQ ID NO: 198982
  chr3:63264169-63264254
  hyper

SEQ ID NO: 357630 - DNA, 389 bp, Homo sapiens; identical to SEQ ID NO: 349782
  chr3:64430905-64431294
  hyper

SEQ ID NO: 357631 - DNA, 129 bp, Homo sapiens
  chr3:64673134-64673263
  hyper
cgctgcggggtgcccctgcccaggagcgaggaccgggaggcggcgtcggggccggcggggtcccgggggccggagcctggttaccttgcctcgggtgcagcctgtccttgcgcacggccgccgcggcgt

SEQ ID NO: 357632 - DNA, 507 bp, Homo sapiens
  chr3:64673419-64673926
  hyper
ggagagcgcgcggagcccggcgcccgccgccaacttttgactttaggagtcgctgaggtctcgctgcgagggtcccgtctgcgctcggctgagcaacgccgccgcctgccgagagctgagccgctcgggccgcaggaggagccggaggagcaggaggaggaggaggactggggctcggctgcttggccgcataatgcccagcgagcgggcaggagaaggcgaggaacttgcgctccgaggcgcgccgggcgccctgtgctggccgggatagctgagcggcttcttgaatggggggctgggggggcggaggcgggggggccgcgggtccacagcctctcaaatgcccccggtgcacgcctctaagaggaggagaggggaggagaaagcgagacgaacggggaccgcctccttccagaccatgtcccctcctcggccggcccgtgcgggactcgcagccggaggccctgccggctgcaagaggcggaggccagaggcgtcaccagcgcc

SEQ ID NO: 357633 - DNA, 1318 bp, Homo sapiens; identical to SEQ ID NO: 281269
  chr3:66024122-66025440
  hyper

SEQ ID NO: 357634 - DNA, 56 bp, Homo sapiens; identical to SEQ ID NO: 349784
  chr3:66025506-66025562
  hyper

SEQ ID NO: 357635 - DNA, 1570 bp, Homo sapiens; identical to SEQ ID NO: 331800
  chr3:66550318-66551888
  hyper

SEQ ID NO: 357636 - DNA, 1076 bp, Homo sapiens; identical to SEQ ID NO: 331801
  chr3:67048291-67049367
  hyper

SEQ ID NO: 357637 - DNA, 221 bp, Homo sapiens; identical to SEQ ID NO: 349787
  chr3:69434926-69435147
  hyper

SEQ ID NO: 357638 - DNA, 1710 bp, Homo sapiens; identical to SEQ ID NO: 331806
  chr3:71113110-71114820
  hyper

SEQ ID NO: 357639 - DNA, 1327 bp, Homo sapiens; identical to SEQ ID NO: 349789
  chr3:71630573-71631900
  hyper

SEQ ID NO: 357640 - DNA, 60 bp, Homo sapiens; identical to SEQ ID NO: 198999
  chr3:71802788-71802848
  hyper

SEQ ID NO: 357641 - DNA, 152 bp, Homo sapiens; identical to SEQ ID NO: 349791
  chr3:72149806-72149958
  hyper

SEQ ID NO: 357642 - DNA, 96 bp, Homo sapiens; identical to SEQ ID NO: 349792
  chr3:72150077-72150173
  hyper

SEQ ID NO: 357643 - DNA, 311 bp, Homo sapiens
  chr3:73674224-73674535
  hyper
gctggaaggcagaagcgcgtgggaggacactgaggctcgccagaagggacgggccagcccaggacgccagcctgaatcttctcgggaaactcctttctgttctcttacagtctacgctataggagacaaaacgccagccgagaaaagctcgctgagtttggagctgaggctactgctttctcccaagggttctcttcgagccccttcccgaacggatcaaaacttttttactcccttctccctcccccttcctctagtggctgattgcagaggactaaaaatatcttggggcccgctatctcagcacttac

SEQ ID NO: 357644 - DNA, 174 bp, Homo sapiens
  chr3:85008817-85008991
  hyper
aggtaatccccgccccggcgcagggaacatcaacttctcgcccattccccatcttccccattccaccccatatttccactctcccctcccagtctccctgtccccagcgatttccaccccctccccctactctctggtgcggcagggggcagtggcagtttgcaccagcccctc

SEQ ID NO: 357645 - DNA, 280 bp, Homo sapiens; identical to SEQ ID NO: 345095
  chr3:98619774-98620054
  hyper

SEQ ID NO: 357646 - DNA, 58 bp, Homo sapiens; identical to SEQ ID NO: 345096
  chr3:98621126-98621184
  hyper

SEQ ID NO: 357647 - DNA, 101 bp, Homo sapiens; identical to SEQ ID NO: 346575
  chr3:99594790-99594891
  hyper

SEQ ID NO: 357648 - DNA, 434 bp, Homo sapiens; identical to SEQ ID NO: 331822
  chr3:100120034-100120468
  hyper

SEQ ID NO: 357649 - DNA, 299 bp, Homo sapiens; identical to SEQ ID NO: 349796
  chr3:101497996-101498295
  hyper

SEQ ID NO: 357650 - DNA, 98 bp, Homo sapiens; identical to SEQ ID NO: 349797
  chr3:101498512-101498610
  hyper

SEQ ID NO: 357651 - DNA, 566 bp, Homo sapiens; identical to SEQ ID NO: 346576
  chr3:105087465-105088031
  hyper

SEQ ID NO: 357652 - DNA, 459 bp, Homo sapiens; identical to SEQ ID NO: 346577
  chr3:105088087-105088546
  hyper

SEQ ID NO: 357653 - DNA, 907 bp, Homo sapiens; identical to SEQ ID NO: 281361
  chr3:110789734-110790641
  hyper

SEQ ID NO: 357654 - DNA, 573 bp, Homo sapiens; identical to SEQ ID NO: 349801
  chr3:110790671-110791244
  hyper

SEQ ID NO: 357655 - DNA, 762 bp, Homo sapiens; identical to SEQ ID NO: 331829
  chr3:111578054-111578816
  hyper

SEQ ID NO: 357656 - DNA, 334 bp, Homo sapiens
  chr3:112051807-112052141
  hyper
cggtcacctttgaaaagggaaaaatgtctgaaaatagacaaagctgaatataaacatcatttaattccccccacacagacagcctccgctcctgtgagggcgtggggaaaacggagtgggagaagggggctagcgaggaggaagaggcgggaggtgcggcaggggcacaggtgacgctcctcccgcctgcctagcagagctccaggcgcacatccgcagtcagccacctcgcgcgcgcctccaggagcaaggatggagaggctggtgagcggggccggggcttgggaaggagggcgcagggcaggcgatgttgagccggtggccctggggcggg

SEQ ID NO: 357657 - DNA, 79 bp, Homo sapiens; identical to SEQ ID NO: 199042
  chr3:112052419-112052498
  hyper

SEQ ID NO: 357658 - DNA, 103 bp, Homo sapiens; identical to SEQ ID NO: 199043
  chr3:112930511-112930614
  hyper

SEQ ID NO: 357659 - DNA, 151 bp, Homo sapiens; identical to SEQ ID NO: 199044
  chr3:112930655-112930806
  hyper

SEQ ID NO: 357660 - DNA, 1176 bp, Homo sapiens; identical to SEQ ID NO: 331832
  chr3:113251180-113252356
  hyper

SEQ ID NO: 357661 - DNA, 48 bp, Homo sapiens; identical to SEQ ID NO: 345098
  chr3:115231437-115231485
  hyper

SEQ ID NO: 357662 - DNA, 302 bp, Homo sapiens; identical to SEQ ID NO: 349804
  chr3:116163989-116164291
  hyper

SEQ ID NO: 357663 - DNA, 127 bp, Homo sapiens; identical to SEQ ID NO: 281391
  chr3:119422082-119422209
  hyper

SEQ ID NO: 357664 - DNA, 128 bp, Homo sapiens
  chr3:120626737-120626865
  hyper
cgacccccagcatactggccaataccgctgtcaatcaaatacctcacctacttctctaaattcccccctcccactgtcattggctttaccttcggcctatccacagatttcttctgccctggagacca

SEQ ID NO: 357665 - DNA, 59 bp, Homo sapiens; identical to SEQ ID NO: 199059
  chr3:120627258-120627317
  hyper

SEQ ID NO: 357666 - DNA, 253 bp, Homo sapiens; identical to SEQ ID NO: 331842
  chr3:121741110-121741363
  hyper

SEQ ID NO: 357667 - DNA, 53 bp, Homo sapiens
  chr3:121902674-121902727
  hyper
cgcgatttgtatttattttactgtgaatctctggccttatatcagaaaaaaaa

SEQ ID NO: 357668 - DNA, 154 bp, Homo sapiens
  chr3:123168102-123168256
  hyper
tcgcggcgagagtggatgcgtggccccggcgaaagccgagccgagccttcggcgcgtccgcgcagggggcggggtccgggtcagggaccggctcctgcggtgcggcccttcccctctcgcctctccctttcccgcaaacggagcggggccggcc

SEQ ID NO: 357669 - DNA, 731 bp, Homo sapiens; identical to SEQ ID NO: 346580
  chr3:123751654-123752385
  hyper

SEQ ID NO: 357670 - DNA, 247 bp, Homo sapiens; identical to SEQ ID NO: 199066
  chr3:123752573-123752820
  hyper

SEQ ID NO: 357671 - DNA, 102 bp, Homo sapiens; identical to SEQ ID NO: 349807
  chr3:124606483-124606585
  hyper

SEQ ID NO: 357672 - DNA, 438 bp, Homo sapiens; identical to SEQ ID NO: 345099
  chr3:124773932-124774370
  hyper

SEQ ID NO: 357673 - DNA, 244 bp, Homo sapiens
  chr3:125986265-125986509
  hyper
cgctggggcggtgcgctggccgtgggtcgagaggtcgctgcgccctgcattcctggccgcgcgcgcacaggctggaatccgtacattccattcataacattcccgcaagcgaggggaggagacgcaaagccggggagtgagtgattaaagaaaagaaagaagggcttcttgcagctccgggctgtgttttttcctgcgcgccctggcgcagtccccggctcggaaaggcaggagcacgtgagcg

SEQ ID NO: 357674 - DNA, 48 bp, Homo sapiens; identical to SEQ ID NO: 199076
  chr3:126373704-126373752
  hyper

SEQ ID NO: 357675 - DNA, 317 bp, Homo sapiens; identical to SEQ ID NO: 349810
  chr3:126373824-126374141
  hyper

SEQ ID NO: 357676 - DNA, 99 bp, Homo sapiens; identical to SEQ ID NO: 349811
  chr3:127634312-127634411
  hyper

SEQ ID NO: 357677 - DNA, 122 bp, Homo sapiens; identical to SEQ ID NO: 345100
  chr3:127794271-127794393
  hyper

SEQ ID NO: 357678 - DNA, 288 bp, Homo sapiens; identical to SEQ ID NO: 199083
  chr3:127794860-127795148
  hyper

SEQ ID NO: 357679 - DNA, 44 bp, Homo sapiens; identical to SEQ ID NO: 345102
  chr3:127795229-127795273
  hyper

SEQ ID NO: 357680 - DNA, 333 bp, Homo sapiens; identical to SEQ ID NO: 345103
  chr3:128216313-128216646
  hyper

SEQ ID NO: 357681 - DNA, 378 bp, Homo sapiens; identical to SEQ ID NO: 345104
  chr3:128216713-128217091
  hyper

SEQ ID NO: 357682 - DNA, 601 bp, Homo sapiens; identical to SEQ ID NO: 331858
  chr3:128336511-128337112
  hyper

SEQ ID NO: 357683 - DNA, 57 bp, Homo sapiens; identical to SEQ ID NO: 346587
  chr3:128713000-128713057
  hyper

SEQ ID NO: 357684 - DNA, 562 bp, Homo sapiens; identical to SEQ ID NO: 199092
  chr3:129345876-129346438
  hyper

SEQ ID NO: 357685 - DNA, 93 bp, Homo sapiens; identical to SEQ ID NO: 349820
  chr3:129346564-129346657
  hyper

SEQ ID NO: 357686 - DNA, 48 bp, Homo sapiens; identical to SEQ ID NO: 199094
  chr3:129694299-129694347
  hyper

SEQ ID NO: 357687 - DNA, 474 bp, Homo sapiens
  chr3:131080684-131081158
  hyper
cggcaccgcccacgctcggattggtccgaggtgagattcgcccttgtgccctcgtaggccttcggaacagcggaagagcagtgtcgggccatggccagggcccgcaggctggagctggccgaggccctggcgctggggccaggctagaggcatgcctgctatgcgctcctgcacgcgccggaccctggaattctctctggccgcctccctctgcgctacgccatactggtgaggagggcgcgcgcccggccactctccgctctggccttgcaccttccttgcggcgctactctcgggtgtccctgccaatcccagcttcctcctctctcagatgcagatgcgctttgatgggcgcctgggcttccctggcggattcgtggactcgcaagacagcagcctggaggacgggctgaaccgtggtctgctggaactgctgggcgaggcggcggccgccttccgcgtggagcgccctga

SEQ ID NO: 357688 - DNA, 816 bp, Homo sapiens; identical to SEQ ID NO: 199096
  chr3:131753156-131753972
  hyper

SEQ ID NO: 357689 - DNA, 196 bp, Homo sapiens; identical to SEQ ID NO: 346590
  chr3:132756116-132756312
  hyper

SEQ ID NO: 357690 - DNA, 39 bp, Homo sapiens; identical to SEQ ID NO: 346591
  chr3:132756477-132756516
  hyper

SEQ ID NO: 357691 - DNA, 65 bp, Homo sapiens
  chr3:132757908-132757973
  hyper
ggaggaatccagagattggttcaggggctatttttttttttaagcagttgggcaccggtggagcc

SEQ ID NO: 357692 - DNA, 80 bp, Homo sapiens; identical to SEQ ID NO: 281503
  chr3:133748401-133748481
  hyper

SEQ ID NO: 357693 - DNA, 72 bp, Homo sapiens; identical to SEQ ID NO: 281504
  chr3:133748576-133748648
  hyper

SEQ ID NO: 357694 - DNA, 260 bp, Homo sapiens
  chr3:133748694-133748954
  hyper
tcgggctggagcggccgggcgggtgagaggcgaccgcggcggcagtggccggaggagattcgcggagcggagactgagccagcgagtgcgcgcctagaagtttttataagtggccgccgccgatgatgaaacgcgctctccctcctccctcttttcctcgggtgtcaaaggcgctacgagcccccgccccgccgccgccgccgccgccgccccctcagacaggtgtgacgccgcagcgacccgcgaggcttgactgcccc

SEQ ID NO: 357695 - DNA, 295 bp, Homo sapiens; identical to SEQ ID NO: 345106
  chr3:135684609-135684904
  hyper

SEQ ID NO: 357696 - DNA, 306 bp, Homo sapiens
  chr3:136538179-136538485
  hyper
cctaaggggcacaacagtctttttgggtaagggccgggctgggggcgacgcgccccgcccgctttgcagacttcggggtgctctgcacgacgcctgaaaggccgcggggcccgcatttctctgtgctgccctcctggagaaccgggacacggggacgggagggccagcatcggctacggcccggtttcccgtttctttccgctgtcgcgtgtctgggccctcctgcagcgtccatgatgaaggccaggggctgttgctttcctctcgcccagtagccaacccaagcaaggggtgagtcactgtggc

SEQ ID NO: 357697 - DNA, 35 bp, Homo sapiens; identical to SEQ ID NO: 346593
  chr3:136751341-136751376
  hyper

SEQ ID NO: 357698 - DNA, 356 bp, Homo sapiens; identical to SEQ ID NO: 281523
  chr3:137480764-137481120
  hyper

SEQ ID NO: 357699 - DNA, 60 bp, Homo sapiens; identical to SEQ ID NO: 281527
  chr3:137483589-137483649
  hyper

SEQ ID NO: 357700 - DNA, 247 bp, Homo sapiens; identical to SEQ ID NO: 281530
  chr3:137488090-137488337
  hyper

SEQ ID NO: 357701 - DNA, 703 bp, Homo sapiens; identical to SEQ ID NO: 199114
  chr3:138067014-138067717
  hyper

SEQ ID NO: 357702 - DNA, 106 bp, Homo sapiens; identical to SEQ ID NO: 346595
  chr3:138067747-138067853
  hyper

SEQ ID NO: 357703 - DNA, 267 bp, Homo sapiens; identical to SEQ ID NO: 349830
  chr3:139258672-139258939
  hyper

SEQ ID NO: 357704 - DNA, 79 bp, Homo sapiens; identical to SEQ ID NO: 346596
  chr3:139655101-139655180
  hyper

SEQ ID NO: 357705 - DNA, 1495 bp, Homo sapiens; identical to SEQ ID NO: 331891
  chr3:140660238-140661733
  hyper

SEQ ID NO: 357706 - DNA, 207 bp, Homo sapiens
  chr3:142607211-142607418
  hyper
cggagcggctccctaggcgccgcgccgctagggttgttccctagtttacgtctctgggcaaagcctctcggggaaggaaaaaaaacagcggtaaaccaaaatccacatatttgggccccagtgcttccctctggccccatagacacgaggagaggggagacacaagtcagattaagccccgccacgtggtggccaagccagctgcag

SEQ ID NO: 357707 - DNA, 85 bp, Homo sapiens
  chr3:142607884-142607969
  hyper
gcgcgcaccgccgcggggcggcccaggtagccgggggatacgcggccggcagggcggaggcacttttaaaggcgattatggtgcc

SEQ ID NO: 357708 - DNA, 59 bp, Homo sapiens; identical to SEQ ID NO: 349833
  chr3:145878430-145878489
  hyper

SEQ ID NO: 357709 - DNA, 112 bp, Homo sapiens; identical to SEQ ID NO: 199124
  chr3:145878553-145878665
  hyper

SEQ ID NO: 357710 - DNA, 173 bp, Homo sapiens; identical to SEQ ID NO: 281571
  chr3:145878695-145878868
  hyper

SEQ ID NO: 357711 - DNA, 349 bp, Homo sapiens; identical to SEQ ID NO: 349836
  chr3:145878937-145879286
  hyper

SEQ ID NO: 357712 - DNA, 604 bp, Homo sapiens; identical to SEQ ID NO: 346598
  chr3:145968403-145969007
  hyper

SEQ ID NO: 357713 - DNA, 130 bp, Homo sapiens; identical to SEQ ID NO: 349838
  chr3:147075091-147075221
  hyper

SEQ ID NO: 357714 - DNA, 379 bp, Homo sapiens; identical to SEQ ID NO: 349839
  chr3:147086665-147087044
  hyper

SEQ ID NO: 357715 - DNA, 60 bp, Homo sapiens; identical to SEQ ID NO: 281579
  chr3:147088567-147088627
  hyper

SEQ ID NO: 357716 - DNA, 100 bp, Homo sapiens
  chr3:147088653-147088753
  hyper
gctaaaattatacagcatggggcagagtttaaaacagccagatggccaaaggtagagggaccctctcggtttcaaaccccagatatagaattccaccggc

SEQ ID NO: 357717 - DNA, 97 bp, Homo sapiens
  chr3:147111702-147111799
  hyper
gccttcaaagccaggccccggattcaggtcagggagaatctcagctcctgagaaatttgctcctgtttgccgcttctgctactcgaggaaatgaaac

SEQ ID NO: 357718 - DNA, 346 bp, Homo sapiens
  chr3:147138422-147138768
  hyper
cgagtctccgagctcaataacgcaaggatggctgaagagcgtctgctccatgtctctttgccggactcaacgaccctcacccactgccaccgagtgctaggcccacagaggcctggcagaagccactcacccctcactactcatgactaggaagaaagtggccggggcatgagggttcgagttctgtcctaggtcccggaagccagggctcccagcgtctagtcaggggcgcagaaaccctcgttcctccaaacccccgccacagggaccactccagaagaaacccattcgtgatttgggtccctttgtgtttgagtattgtggggagtgggctatctagactcta

SEQ ID NO: 357719 - DNA, 590 bp, Homo sapiens; identical to SEQ ID NO: 199134
  chr3:149375406-149375996
  hyper

SEQ ID NO: 357720 - DNA, 269 bp, Homo sapiens; identical to SEQ ID NO: 331913
  chr3:150481645-150481914
  hyper

SEQ ID NO: 357721 - DNA, 85 bp, Homo sapiens; identical to SEQ ID NO: 349841
  chr3:150802802-150802887
  hyper

SEQ ID NO: 357722 - DNA, 70 bp, Homo sapiens
  chr3:150805097-150805167
  hyper
ccgaaaccttgctcgctctcacccgtttctgcctgctttatttttcttcttgccgcttcggtaaatcgtc

SEQ ID NO: 357723 - DNA, 98 bp, Homo sapiens; identical to SEQ ID NO: 349842
  chr3:152553725-152553823
  hyper

SEQ ID NO: 357724 - DNA, 191 bp, Homo sapiens
  chr3:152879611-152879802
  hyper
cggggctgagtgaatggcgtccttgggcctttgataacgggagttggcaagaccacagcctactccatccctgaggcggcccgccgcgcccacgtgcttctcgcagagccgccgcccttgtccaccactcccacagctgtaaaataaagcggcctgcatgcttcctacagcgctttcctcgctcccatata

SEQ ID NO: 357725 - DNA, 31 bp, Homo sapiens; identical to SEQ ID NO: 349843
  chr3:153838787-153838818
  hyper

SEQ ID NO: 357726 - DNA, 58 bp, Homo sapiens; identical to SEQ ID NO: 199144
  chr3:153839460-153839518
  hyper

SEQ ID NO: 357727 - DNA, 84 bp, Homo sapiens; identical to SEQ ID NO: 349845
  chr3:153840393-153840477
  hyper

SEQ ID NO: 357728 - DNA, 63 bp, Homo sapiens; identical to SEQ ID NO: 349846
  chr3:154797121-154797184
  hyper

SEQ ID NO: 357729 - DNA, 120 bp, Homo sapiens; identical to SEQ ID NO: 199148
  chr3:154797214-154797334
  hyper

SEQ ID NO: 357730 - DNA, 122 bp, Homo sapiens; identical to SEQ ID NO: 345108
  chr3:156533976-156534098
  hyper

SEQ ID NO: 357731 - DNA, 142 bp, Homo sapiens; identical to SEQ ID NO: 345109
  chr3:156534539-156534681
  hyper

SEQ ID NO: 357732 - DNA, 523 bp, Homo sapiens; identical to SEQ ID NO: 345110
  chr3:157217201-157217724
  hyper

SEQ ID NO: 357733 - DNA, 184 bp, Homo sapiens; identical to SEQ ID NO: 349851
  chr3:157260928-157261112
  hyper

SEQ ID NO: 357734 - DNA, 258 bp, Homo sapiens; identical to SEQ ID NO: 345111
  chr3:157815399-157815657
  hyper

SEQ ID NO: 357735 - DNA, 67 bp, Homo sapiens; identical to SEQ ID NO: 199159
  chr3:157815822-157815889
  hyper

SEQ ID NO: 357736 - DNA, 568 bp, Homo sapiens; identical to SEQ ID NO: 345113
  chr3:157815923-157816491
  hyper

SEQ ID NO: 357737 - DNA, 193 bp, Homo sapiens; identical to SEQ ID NO: 199161
  chr3:157821711-157821904
  hyper

SEQ ID NO: 357738 - DNA, 32 bp, Homo sapiens; identical to SEQ ID NO: 346606
  chr3:157824101-157824133
  hyper

SEQ ID NO: 357739 - DNA, 140 bp, Homo sapiens; identical to SEQ ID NO: 349857
  chr3:157825408-157825548
  hyper

SEQ ID NO: 357740 - DNA, 31 bp, Homo sapiens
  chr3:157828149-157828180
  hyper
cgtgcgcagtgtcaccgtgcgcatgcgtccc

SEQ ID NO: 357741 - DNA, 173 bp, Homo sapiens; identical to SEQ ID NO: 349858
  chr3:158289012-158289185
  hyper

SEQ ID NO: 357742 - DNA, 79 bp, Homo sapiens; identical to SEQ ID NO: 345114
  chr3:159480852-159480931
  hyper

SEQ ID NO: 357743 - DNA, 943 bp, Homo sapiens; identical to SEQ ID NO: 346608
  chr3:159480975-159481918
  hyper

SEQ ID NO: 357744 - DNA, 272 bp, Homo sapiens
  chr3:159943217-159943489
  hyper
cgcctcccgcagcctccgcgcgccgcgggctcctcctcccgcccaagcgtggccaagtgaggactgctccggccgcaggtagctgaggcgcgggaggcggcgcgcgcgggacccgagcggagcgccggggaggggccgacggacgcgagggcggacggactccccagcctcccgtcccggacgttagccgaggtctgcgcgggccatgtggggacccggggtcactgctgagggcctgtcggtggctccggcgccgccgcctctgctgccgc

SEQ ID NO: 357745 - DNA, 344 bp, Homo sapiens
  chr3:160822422-160822766
  hyper
cgtgggatttccttctctctccgcccgttctccacattccccacttagtttcacattccttcccaatccctccgacatccctgcgccggggcccttccctagcgctccgggaaagcgttcgccgcaggcctgttaggggcccaccaataccgtaacaccgttcccgtcctcttcctcggcaccgctgcaaacgccccgggtcgctacccggatttgacggtggctggagcggcacgggcgacgcaaggcaggtattgcaccctggggcaaggcaaggtggacaaccagcggatgcggcgcggccgcggcctgggcctgggccctccgcgtcgcccactgcccca

SEQ ID NO: 357746 - DNA, 245 bp, Homo sapiens; identical to SEQ ID NO: 199173
  chr3:160822962-160823207
  hyper

SEQ ID NO: 357747 - DNA, 80 bp, Homo sapiens; identical to SEQ ID NO: 345116
  chr3:167098187-167098267
  hyper

SEQ ID NO: 357748 - DNA, 271 bp, Homo sapiens; identical to SEQ ID NO: 349862
  chr3:169379645-169379916
  hyper

SEQ ID NO: 357749 - DNA, 227 bp, Homo sapiens; identical to SEQ ID NO: 345117
  chr3:169482182-169482409
  hyper

SEQ ID NO: 357750 - DNA, 241 bp, Homo sapiens; identical to SEQ ID NO: 199188
  chr3:169482439-169482680
  hyper

SEQ ID NO: 357751 - DNA, 282 bp, Homo sapiens; identical to SEQ ID NO: 281698
  chr3:170626174-170626456
  hyper

SEQ ID NO: 357752 - DNA, 508 bp, Homo sapiens
  chr3:170626710-170627218
  hyper
aggtttgttgcgttcgggtcgcagtcgactttaatgggaaccaagcaaagcacccaatggcccctgccatcaggtgcgtggcagttatcacatgacgatcgtcagaactcgcgaggcgcgcagattcagcgagtgccagtgtggctggctgtgaagcgaactttgggttcgagcttctggttcagcttgcagcctttcttggggttcgaacctcctcctggtccttaaagaagaattcaggtgcagtattttattacccagctcggcaccgcaggtcctgaggaccccccattcaccccttggtgagatttttggcagcgactgccgccggatgcccctgtagagtcagcactgctccctggggtgggaactcccgaagcgtccgccagctaacaagccagcagtgaaatgaattaacccacttctcacaccaaaggctgttgggaagttgtggaggcgaagggtgtctgactcctacggcattgtgggtccagagaggtgttctgcc

SEQ ID NO: 357753 - DNA, 361 bp, Homo sapiens
  chr3:171527569-171527930
  hyper
cgtattgtgaggaagaagaccttttacacactccctgctgctggcccccggccccctcgccccacctccgagtggtcacatcacacggcgggagccgcggtcagcagctgtgatcacacccccaggaccgtgctctgcgggctgggctcgaagccttgggacgcggcacttcctggttggtacgggatgccggtcccatcgcccccaccagcccagtcatgccaccgcgcacccgaaccaagggcgcccggatgacctggggacaccacacacactgcacccgaagccctgtggcggcgaggcggtgcatcctgcagaggacgcctgggcttcagcctgagcctgcgcggctctgcgctcc

SEQ ID NO: 357754 - DNA, 79 bp, Homo sapiens; identical to SEQ ID NO: 199196
  chr3:171527971-171528050
  hyper

SEQ ID NO: 357755 - DNA, 216 bp, Homo sapiens; identical to SEQ ID NO: 199197
  chr3:171528333-171528549
  hyper

SEQ ID NO: 357756 - DNA, 80 bp, Homo sapiens
  chr3:173115694-173115774
  hyper
gaagggagcgagcgactgtgcggcgctcacgctgccagagcccgggcggagtgcagtcgcctccaaagccttagagcggc

SEQ ID NO: 357757 - DNA, 138 bp, Homo sapiens; identical to SEQ ID NO: 345119
  chr3:179169640-179169778
  hyper

SEQ ID NO: 357758 - DNA, 86 bp, Homo sapiens; identical to SEQ ID NO: 349867
  chr3:179754092-179754178
  hyper

SEQ ID NO: 357759 - DNA, 134 bp, Homo sapiens; identical to SEQ ID NO: 281734
  chr3:180319921-180320055
  hyper

SEQ ID NO: 357760 - DNA, 169 bp, Homo sapiens; identical to SEQ ID NO: 281735
  chr3:180320087-180320256
  hyper

SEQ ID NO: 357761 - DNA, 98 bp, Homo sapiens; identical to SEQ ID NO: 349870
  chr3:180320294-180320392
  hyper

SEQ ID NO: 357762 - DNA, 206 bp, Homo sapiens; identical to SEQ ID NO: 346614
  chr3:180397104-180397310
  hyper

SEQ ID NO: 357763 - DNA, 97 bp, Homo sapiens; identical to SEQ ID NO: 349872
  chr3:181421152-181421249
  hyper

SEQ ID NO: 357764 - DNA, 336 bp, Homo sapiens; identical to SEQ ID NO: 281747
  chr3:181429718-181430054
  hyper

SEQ ID NO: 357765 - DNA, 36 bp, Homo sapiens; identical to SEQ ID NO: 199220
  chr3:181430331-181430367
  hyper

SEQ ID NO: 357766 - DNA, 252 bp, Homo sapiens; identical to SEQ ID NO: 199221
  chr3:181430443-181430695
  hyper

SEQ ID NO: 357767 - DNA, 47 bp, Homo sapiens; identical to SEQ ID NO: 199223
  chr3:181444767-181444814
  hyper

SEQ ID NO: 357768 - DNA, 434 bp, Homo sapiens
  chr3:182880277-182880711
  hyper
cgcgccacacctccctacccgcagcccgtcctgtggcgcccgggactccagagtgcgtttagatgaaaggggaccgacacgtcagggccaccgcgggaagcgctgagggccactcaccggccagggacgcgaagagcgcggccgccgcgctgagctgccggggcatggtgggcgctgggcgaggttctgcagcgtgcggcgaagtccgggcaggccccgaatcggtgccagagaaacctacctgtgccggagaaacgaaaccacctgcttatgagaagcagccgaaaagcccgcccagggccgctgggcggggagggaaactccgccggccccctcctacccctacggagcagggaggggcggggactcggcgcagccgccggggcccgggcctctgggaccgtttaccgcacgcgcgtggtcccggcagcgcc

SEQ ID NO: 357769 - DNA, 49 bp, Homo sapiens; identical to SEQ ID NO: 349877
  chr3:182896562-182896611
  hyper

SEQ ID NO: 357770 - DNA, 201 bp, Homo sapiens
  chr3:182970902-182971103
  hyper
cggggcccatcaccttcacctacgcgccgggagggtggcggctggcgggcggggccgggctcgggccgtgacgccgagagtgcggggcgcgcggctgggagcctcgcgcccccgcccgggcccgcccccatcccgcccgcatacagcccgcatcccgccggggaagcgagcccagtccagcgctgcccgtccagtcctcgc

SEQ ID NO: 357771 - DNA, 368 bp, Homo sapiens
  chr3:182971342-182971710
  hyper
agtttgctgtaagtttccttactttgttactgaggcccccagagctccacgcataagtggtgtgaccagaaaccttttaacaagacccgcctgagcctgcgttagagctcccgctcggaaagtaaaagaccatcctaatccgcggcgctgcggaaccggtgtcccgtgtgggaggaaccgcggcgttccctgggcgtagggcccgcgaggccagcacagtccgcctcttggcggagcgccctgggccggtggttccgcgcggagttagtctgtggtcagttacgtggtgaaaacacggctgtgccgcggccgcatctttccgcggccgaggcctctctgggtgggagtgttggcttcctttccggatc

SEQ ID NO: 357772 - DNA, 313 bp, Homo sapiens; identical to SEQ ID NO: 281765
  chr3:183145618-183145931
  hyper

SEQ ID NO: 357773 - DNA, 319 bp, Homo sapiens
  chr3:183146025-183146344
  hyper
aggaagcaagtcgccaatctcgccggaaccgcgccccggctcctccggccgggcgagctccggggcttccagaatcgcggtcccggccgccaggtttccggcgccgcctccagggactgtagagtgagggatgctccgccaggtgcaggggaggcggcaggtggccgtggcttctctgcgccgccggccccacgccccagcgcccacctcgtccagcccacgggtggcgcccggggctctcggggaggcacgcacgctcccaagcgccgctcgttttggggtcgggaacgctgcgcacctttccctgcggggagcccgc

SEQ ID NO: 357774 - DNA, 809 bp, Homo sapiens; identical to SEQ ID NO: 345120
  chr3:183165024-183165833
  hyper

SEQ ID NO: 357775 - DNA, 570 bp, Homo sapiens; identical to SEQ ID NO: 345121
  chr3:183542795-183543365
  hyper

SEQ ID NO: 357776 - DNA, 213 bp, Homo sapiens; identical to SEQ ID NO: 281792
  chr3:184301275-184301488
  hyper

SEQ ID NO: 357777 - DNA, 253 bp, Homo sapiens
  chr3:184322331-184322584
  hyper
ggtctggcctggggggcgcctcccgccccctcttggggaaggtgctcggagactcccgggccctgggcggagagtgtggggaggctgggctaaaggcagagacccaggccgagggctctgacccacccaagaggaaatagctactaattagggacgggacgtttttatgctaatatgcacctggctgggcttttctggaggctgagaaagtgtggagtggaagggaagaagttccggagagcgggaaacttcc

SEQ ID NO: 357778 - DNA, 301 bp, Homo sapiens; identical to SEQ ID NO: 199246
  chr3:184870307-184870608
  hyper

SEQ ID NO: 357779 - DNA, 43 bp, Homo sapiens; identical to SEQ ID NO: 331974
  chr3:185977478-185977521
  hyper

SEQ ID NO: 357780 - DNA, 290 bp, Homo sapiens; identical to SEQ ID NO: 199253
  chr3:186079331-186079621
  hyper

SEQ ID NO: 357781 - DNA, 45 bp, Homo sapiens; identical to SEQ ID NO: 345123
  chr3:187455297-187455342
  hyper

SEQ ID NO: 357782 - DNA, 446 bp, Homo sapiens; identical to SEQ ID NO: 199256
  chr3:187456666-187457112
  hyper

SEQ ID NO: 357783 - DNA, 509 bp, Homo sapiens; identical to SEQ ID NO: 345125
  chr3:187457654-187458163
  hyper

SEQ ID NO: 357784 - DNA, 1066 bp, Homo sapiens; identical to SEQ ID NO: 331979
  chr3:187458583-187459649
  hyper

SEQ ID NO: 357785 - DNA, 40 bp, Homo sapiens; identical to SEQ ID NO: 349887
  chr3:190529763-190529803
  hyper

SEQ ID NO: 357786 - DNA, 56 bp, Homo sapiens; identical to SEQ ID NO: 349888
  chr3:192128140-192128196
  hyper

SEQ ID NO: 357787 - DNA, 198 bp, Homo sapiens
  chr3:192635147-192635345
  hyper
ccagccccaggtggcggagaaattaacaaaagagcaagcgaacagggggaaagggagacccggcgtaaagtatagtaaggaggggagggcaggcagctcggctttcggcggagaaagaagagagaggcggaacagagatggcttatacccaaggcaccggctcgggaaggcaacccagaagggaagaggtcgagaagc

SEQ ID NO: 357788 - DNA, 111 bp, Homo sapiens; identical to SEQ ID NO: 345126
  chr3:193775965-193776076
  hyper

SEQ ID NO: 357789 - DNA, 352 bp, Homo sapiens
  chr3:193852659-193853011
  hyper
cgcagcgcgcgccaatgagcccgggccaggcgcagggggcggggttttcccaggctcgagcacagcagctgctatttaccttcttggcttctcccggggaccaggaaccggcccccgctctccgccgcccgtcgccgccccccgcctccctgcccccggggcgcgcgcacacacactcactcacacacgcacgcacacacacatcctcccggcccggccgcagccgcggcggcaataaaacatcctggcacgtgctccggctccaggcgcgcccacgccggccggctgatgtcaaactgcagctcggctggtgtagctcttaaagggcccgcgggcgccgggggccgaggcc

SEQ ID NO: 357790 - DNA, 146 bp, Homo sapiens; identical to SEQ ID NO: 345127
  chr3:194407289-194407435
  hyper

SEQ ID NO: 357791 - DNA, 153 bp, Homo sapiens; identical to SEQ ID NO: 199276
  chr3:194407836-194407989
  hyper

SEQ ID NO: 357792 - DNA, 101 bp, Homo sapiens; identical to SEQ ID NO: 199277
  chr3:194408028-194408129
  hyper

SEQ ID NO: 357793 - DNA, 582 bp, Homo sapiens; identical to SEQ ID NO: 345130
  chr3:195599104-195599686
  hyper

SEQ ID NO: 357794 - DNA, 968 bp, Homo sapiens; identical to SEQ ID NO: 349894
  chr3:195622064-195623032
  hyper

SEQ ID NO: 357795 - DNA, 94 bp, Homo sapiens; identical to SEQ ID NO: 281876
  chr3:196755864-196755958
  hyper

SEQ ID NO: 357796 - DNA, 341 bp, Homo sapiens; identical to SEQ ID NO: 349896
  chr3:196756044-196756385
  hyper

SEQ ID NO: 357797 - DNA, 211 bp, Homo sapiens; identical to SEQ ID NO: 331997
  chr3:197023975-197024186
  hyper

SEQ ID NO: 357798 - DNA, 643 bp, Homo sapiens; identical to SEQ ID NO: 331998
  chr3:197025639-197026282
  hyper

SEQ ID NO: 357799 - DNA, 150 bp, Homo sapiens
  chr3:197807078-197807228
  hyper
cgctctgagggtgcccagcgccctccaaggcccccgtcccaggggctgcggggctgcggggaagccgggcctggggaccccctcccaccccggctgagcccccgctacctgtcctgggcatccacgtcccggcacctgcgcgccaggcgg

SEQ ID NO: 357800 - DNA, 368 bp, Homo sapiens
  chr3:197807545-197807913
  hyper
ctcagcccgcgaagccgttaggcgcgcgcctgcagctcagcgcccgcgcggactccggaagccgctcccaagcccgcgctgccggcagggggcggctgcggctcgggcgcaggcgccgctggcttgcgggttctcctgggctcgcccgggacgtcccgtagtcgcaggcgcgcaacccgcccggcctgagggcccgcctggccgtgacccccgccccgctcctcctccgaagagagatcggggccgctggcaggggccctccgcagccaccagggatggggctgtggggcagttcccgccccggtgcagccgccgccgggcagaccgcctggcttggctgcagccgcggcatctggctccggttctgc

SEQ ID NO: 357801 - DNA, 210 bp, Homo sapiens; identical to SEQ ID NO: 199287
  chr4:331352-331562
  hyper

SEQ ID NO: 357802 - DNA, 171 bp, Homo sapiens
  chr4:657350-657521
  hyper
cgtcccaagccgacgatggagccgctggtggagagctgggcaccctgaggagggccctgagcagcaggcggattaggggtcccgcccaccgagggcccgagggcgggggcgtgagaggcacaggcagccgaggcggaaggggcggggtccccgggcaccctgagaggtggc

SEQ ID NO: 357803 - DNA, 114 bp, Homo sapiens; identical to SEQ ID NO: 281896
  chr4:657552-657666
  hyper

SEQ ID NO: 357804 - DNA, 139 bp, Homo sapiens
  chr4:657712-657851
  hyper
ccccggcagacacgggggcgcagcggcggcacagcccgggggacgcagccccggattccgtccctgcccgccggccccgcgcaccccggatggggcctcgctcgggctccgcgcctccctgcagacgggcgcttggggc

SEQ ID NO: 357805 - DNA, 289 bp, Homo sapiens; identical to SEQ ID NO: 332005
  chr4:819440-819729
  hyper

SEQ ID NO: 357806 - DNA, 69 bp, Homo sapiens; identical to SEQ ID NO: 349899
  chr4:1036539-1036608
  hyper

SEQ ID NO: 357807 - DNA, 240 bp, Homo sapiens
  chr4:1165750-1165990
  hyper
cggaacagatggactctcccccaagaggctggccggcggcgccgagagtggccaggaggagagcgcagagggccttgcccagggcggcggccgggctggggttttccatcacctgggagcacagaggggagcagccgcgcgctggcaccgtcgtggcagcctcggggtggaaagccgagagggctgcggcactttgggctctgaggacggccccgagcacccgcgaccccctccctgctc

SEQ ID NO: 357808 - DNA, 222 bp, Homo sapiens
  chr4:1166359-1166581
  hyper
cagcggtcgggtcccagccagagcccggagctcctatttaagcccgaggccggcgccccgggccggccaatgaggctccagttcctcctgtcttcgatgctgcacggcctggcctccagcgagaggcagataggacgtgggagaaaggaggagaaggggctgcgggggcggcgggggctgccgctttcccaactcgccctgcccagcgaccttccccgggtc

SEQ ID NO: 357809 - DNA, 218 bp, Homo sapiens; identical to SEQ ID NO: 199294
  chr4:1332660-1332878
  hyper

SEQ ID NO: 357810 - DNA, 186 bp, Homo sapiens
  chr4:1796303-1796489
  hyper
cgagggcgcttccccgtgggtgcgcgccgagctccaggcaagcgaggggcgcgtgtcccagcgtcgcgggccctagactgggctggcggtccaggtcccgcgggacgtcgagggtctgaagggaggtcccaaggggcgaggggaggggaaggggcgcccggccggacctgcacacgcgccgcggtt

SEQ ID NO: 357811 - DNA, 549 bp, Homo sapiens
  chr4:1796598-1797147
  hyper
aggccttggcccggtgagctcgcgccccacccgggccgaggcccgaacagccgcttctttgtacctcgacgcggccacagaccgcgcattgatggcggctcggcggctcgcggggaggtgtgagcgaccgcgggcgcggcgggccggggagggcgcctggagggccgaggcagatggcgtccgccccgcccgcgcccccgcgcccctttctccgtcggcggctgcagcctcccggaacaatgtcattttttttatgaatgaaagtggcccggcgcttgaatgtgcgtgtcattcagcggcgtgacaggggccgtcgggaggtcagcgcgcgcttttagcgtctgctcgggcggccccgcttccaggggtgccggaggggcggccgcggggggagcttggctttcgcattctcattcagataaagatattactccctacggcccgggaatgtcagccagccccggggaagggcggcggccaggctgcggagcctctcctggaccccctgcgggcgcgcggggcctcccccagtcgctcctggaacgcccc

SEQ ID NO: 357812 - DNA, 197 bp, Homo sapiens
  chr4:2061279-2061476
  hyper
cgtggccgccgaggaccatgaggcgctgccgggggccaagaaggacgcgctgctcgccgccgccggcgccatgtggcccccgctgcccgccgcgcccgggccggccgccgcgccccccgcgcccccacctgccccggtggctcagcctcacggcggggcggggggcgcggggccgccgggggggcgcggcgtgtgca

SEQ ID NO: 357813 - DNA, 137 bp, Homo sapiens; identical to SEQ ID NO: 349901
  chr4:3767158-3767295
  hyper

SEQ ID NO: 357814 - DNA, 275 bp, Homo sapiens; identical to SEQ ID NO: 349902
  chr4:3768207-3768482
  hyper

SEQ ID NO: 357815 - DNA, 174 bp, Homo sapiens; identical to SEQ ID NO: 349903
  chr4:3882250-3882424
  hyper

SEQ ID NO: 357816 - DNA, 185 bp, Homo sapiens
  chr4:4854484-4854669
  hyper
cgtgttctaggacggcagggatgaatcactataggctggctctctctagctcagcccggcctgctgcggcctggggccactgctcctgggtcctcaggactgcctgggggaaggtagtgcattgtgcagcgcgcggtccagaagtgaaaagggaggcgcggagataagctgccggcggaagttcc

SEQ ID NO: 357817 - DNA, 460 bp, Homo sapiens
  chr4:4870855-4871315
  hyper
cgcaccagcggggtgcaataaagatcggcctttgtgtgtgtgtggtgggggggaggagtggggggtaggtagttaaaagcgaattcaaaagcccgccctcaatttggggcctgattaggggcagatggaaggaagggtccccgaccctacgtggcagcctttgttgcacattttacaggcgaggagacagtggtgggatccaagcccgctgctgtgggacctcaggagttgctttctccttcaccagctgggtgcagattttgatgatgcacagggcgcggcctgacagtgcgtgtgtgcgcccaccgggcgctgctgccagagtttgcggggttcagggagcgggaggagggtctgagagaccccaaagcctcccctttgcgagaccactccttgcttcccccgcctggcgctttccataaccctctgcggcgccctgcctctttgttgccccttagat

SEQ ID NO: 357818 - DNA, 265 bp, Homo sapiens
  chr4:4871384-4871649
  hyper
aaagaaaaccccgttccctctctgatgactctcgtggcacccgggtggcagcaggggcttctccaccggagaaacagccacatcgactaaaagggaatgtgtgaggcaggctgagaccttgggtggggccccccacctctcgagttttccaagactcaggttccatctctgttaaatggacacaatcctgacccctggcaggtcctgaaagagtagaagggaaggggttctccacgggctgtaccatcacttgcgtccccagttc

SEQ ID NO: 357819 - DNA, 1146 bp, Homo sapiens
  chr4:4873528-4874674
  hyper
aggtgcgtgccagctgtaggagcctgctccgcctgccctcctggaacgcagtcatcctccaggccctgcccgcgcccatttcgcggcccaggaaactgaggtgtggaagcctgtgaagggagggactgctacctatcgattcgtaccggatccagaccctgtgctaaacgctcggcgtgcatggtgccccttaatcctcacaaaagtcgagcgacttagggaggaatattatcccattgcacacacgagcacactgctgcgcagaggcacgaaggtacctgcccagggtctcagctagtcccatttccaacccaggaaggcaagggagcaacccgggaagcaaaatgtaaggagacactttcagggttgtgcaagtgtggggtgggcacccggggagaagggaggagggatgaactatccagagaggaaggcacgcccggccccgacttatcggaataattgtctccattccgcttcggcggtgtctgttgtgtccattgaacagaagcagaacgtgagtccgtatctgcccctcgccaccgccaccagcacctgggatttgactcacacttcaattcctgccctaggaattgatgccagcgcccagtatggccccgcgtggggaatcgagcgccccatccctcggtgagggcttactctgagcctgagtctgtggcaggcccccccatagctactgtctgccttaatccacgccaaggcctctaaaggaaaacattgccttggttctttttcacagacgtgtcaactgtggaccagagatgtcaagccacgtgcccaaggtcaccaagcagtttctgggtgagccctcagggaatcctaaatcccgacccaaacccgggatttcccctcgccctcggggcctccaaggggagctgcgagaggcggggacgcaaggaggcgctgggaccagtttgctctgagtgctcctgctccggactgctccttggagaggcggggccttgggcagcagaatcccaagctcctcccggtgggaaatccggcagctcccgtctgagggtagggccagcagaccacctggcccagtaaactccaccggcttcgggggtggggagttggggcaggtgcgccccaggggctcggtatacaaagccatgcctgagccac

SEQ ID NO: 357820 - DNA, 57 bp, Homo sapiens
  chr4:5052378-5052435
  hyper
cggagagctgggcccgcaggactgcaaggcagggggacctgcctgtccctcagggag

SEQ ID NO: 357821 - DNA, 289 bp, Homo sapiens; identical to SEQ ID NO: 199324
  chr4:5052556-5052845
  hyper

SEQ ID NO: 357822 - DNA, 145 bp, Homo sapiens; identical to SEQ ID NO: 349905
  chr4:5890606-5890751
  hyper

SEQ ID NO: 357823 - DNA, 206 bp, Homo sapiens; identical to SEQ ID NO: 199329
  chr4:6201673-6201879
  hyper

SEQ ID NO: 357824 - DNA, 65 bp, Homo sapiens; identical to SEQ ID NO: 346630
  chr4:6202658-6202723
  hyper

SEQ ID NO: 357825 - DNA, 821 bp, Homo sapiens; identical to SEQ ID NO: 332029
  chr4:6271360-6272181
  hyper

SEQ ID NO: 357826 - DNA, 364 bp, Homo sapiens; identical to SEQ ID NO: 332030
  chr4:6339386-6339750
  hyper

SEQ ID NO: 357827 - DNA, 164 bp, Homo sapiens; identical to SEQ ID NO: 349908
  chr4:6473630-6473794
  hyper

SEQ ID NO: 357828 - DNA, 46 bp, Homo sapiens; identical to SEQ ID NO: 349909
  chr4:6474487-6474533
  hyper

SEQ ID NO: 357829 - DNA, 127 bp, Homo sapiens
  chr4:6717788-6717915
  hyper
cggaaacaaaggtggatgcgcgtgaacagacgccctcgcaggccgccggaagcaaaggcgtgagcgcgcgtgcgtgcgtgtgcgggtgcgtgagcgtgagcgcgcggaggccggaagcgagcgctgc

SEQ ID NO: 357830 - DNA, 214 bp, Homo sapiens; identical to SEQ ID NO: 281997
  chr4:7194882-7195096
  hyper

SEQ ID NO: 357831 - DNA, 667 bp, Homo sapiens
  chr4:7940425-7941092
  hyper
cgctgagagctacaaagttcaatctggctttccagattttttttttcttcccattactaacggaagaaatcaagaagctccgggcagtagggccctgctccctccaatcagagcccagcccggggccagagcaggaagcgcggcggtgggacgcgcggtgacagccccgcgccccccggggcccgccggccaggggagaggacggtgcggccgctgcgcgacagctccgggcccgcgcctctcgcttccacccgccgggcaggtgagaggataaatcacggggcggggcagtgcgcccccaccaaccgcgccccccgcgcacggacccccattacactcgcgtcccaggcggggtcgacccagacgagccacggggcggcgcagagccccactcgcagggcggccgggacccacgcgcgtgggtccacgcaacaacctataggtgacaaaacactcaggaagccgtcatgcggggccaagaaagagcccccatccagagtcacggaccccctcgtccgagggtccgcgcagtcccctcggtaagtcggacgaagcagtctcgctacgggggagggcggcggagcctcccactcttggtgacccggaccccgccccacgagtgggtcttcgcagggccccctctgacgcacacggggaccagccacgc

SEQ ID NO: 357832 - DNA, 32 bp, Homo sapiens; identical to SEQ ID NO: 199335
  chr4:7941129-7941161
  hyper

SEQ ID NO: 357833 - DNA, 522 bp, Homo sapiens; identical to SEQ ID NO: 199336
  chr4:7941191-7941713
  hyper

SEQ ID NO: 357834 - DNA, 627 bp, Homo sapiens
  chr4:8159728-8160355
  hyper
cgcggctgggctccagcgctgtgggatttttccagccccgcacagaggctgtcagatcccggagggtgggtgcggcgggaaaggcaggggtgcgacgcgcaggggcgaggggctggagacgcgcagagatcgggtcggggccgggtctgacacatgcgggctccgggtccccagatctgctgcggagagtcctgggcgccgagggtcggcctgacgcccccaacccaggcgctgccagagcggcgcaagggcggcgcccccagctgcaaagccccgcctatcatctcacctctgcgtgcctaggtctgctggggccccggcccttcgcccggaccccaggcccccgcgcggaccctgaccgctttctgcagcctggaacaacccggacccccgtgagaagcaaagaaggggcgccttccagacatcctggcgcagccacgccggccggcgcgctgggaaaggatccccggcccgcgccactgagctacgcgctccgggcgcagggcagagggctgcgctctggcccctcggggctgcaaaatcctggagcaaaagttgggtggagccgctgggtgattttccccggcgttgcaggtgcagcctccgaatgccacccagcccttgcgg

SEQ ID NO: 357835 - DNA, 142 bp, Homo sapiens
  chr4:8160429-8160571
  hyper
cggagtcggggcggcccggcgctgcgacagccagaccctcgggcccgcaggtgccgcgcccgcgctatcctccgcccgcccgccggctccgcgcccgctccttgcgcacacgccaggcagcgccgccgcagccccacggcgc

SEQ ID NO: 357836 - DNA, 88 bp, Homo sapiens; identical to SEQ ID NO: 199339
  chr4:8201024-8201112
  hyper

SEQ ID NO: 357837 - DNA, 38 bp, Homo sapiens; identical to SEQ ID NO: 282004
  chr4:8201450-8201488
  hyper

SEQ ID NO: 357838 - DNA, 115 bp, Homo sapiens; identical to SEQ ID NO: 332040
  chr4:8609457-8609572
  hyper

SEQ ID NO: 357839 - DNA, 310 bp, Homo sapiens; identical to SEQ ID NO: 199344
  chr4:8894331-8894641
  hyper

SEQ ID NO: 357840 - DNA, 207 bp, Homo sapiens; identical to SEQ ID NO: 332046
  chr4:10090148-10090355
  hyper

SEQ ID NO: 357841 - DNA, 43 bp, Homo sapiens; identical to SEQ ID NO: 345134
  chr4:10458329-10458372
  hyper

SEQ ID NO: 357842 - DNA, 153 bp, Homo sapiens
  chr4:13546756-13546909
  hyper
attggctggctccagttgggcgacgttgactttaacagacaaaactgggcacgttgcgccgctaaagacagggtctgacttaaccccttctctcctaagcctggtcctcgaagcaccctccagcaacaaggaggctcatccgacccaaaccac

SEQ ID NO: 357843 - DNA, 353 bp, Homo sapiens; identical to SEQ ID NO: 349919
  chr4:15780742-15781095
  hyper

SEQ ID NO: 357844 - DNA, 140 bp, Homo sapiens; identical to SEQ ID NO: 199357
  chr4:16228990-16229130
  hyper

SEQ ID NO: 357845 - DNA, 273 bp, Homo sapiens
  chr4:16229202-16229475
  hyper
cgaacactaagcttcctggaaacttccctagacctaaacttgagaaccgcatataaatgggccttgagggttctgtcgtcagtagcgggttacgtgattgcaaacgagcaagtttaaaacggagtgggctttgggctgcagagccgcctggcattctgacagctgagcaggaggcagaggtgagagtccaagatggactaaaaatgtcccagcagctgggagcccaacctcggcccaacctcgttgaaaggaggaacattcggtgcagccgtc

SEQ ID NO: 357846 - DNA, 82 bp, Homo sapiens; identical to SEQ ID NO: 199363
  chr4:20253975-20254057
  hyper

SEQ ID NO: 357847 - DNA, 196 bp, Homo sapiens
  chr4:20254323-20254519
  hyper
cgcacacactactgccattcagctgccgcctggctctgcctggagtagtggatcccacccgcccacctgccaccgagccattctccagtacgccccagcaggacgctgacacctccaaccttggcctttgcctttccactccttccggtctgcctggtttttaagtccgcccccagtcagtccccactcagtcttc

SEQ ID NO: 357848 - DNA, 144 bp, Homo sapiens
  chr4:24914262-24914406
  hyper
cgaaagtgcaggaggagcggcgcacctggcggggtcgcgcgggtgcggcagccgcggccacttggagtgcgcgcccccctctcgtccctcccagctcggcctctctgggggcgcgggcccggggctggcggccgctcggcccgg

SEQ ID NO: 357849 - DNA, 72 bp, Homo sapiens
  chr4:24914804-24914876
  hyper
gggaagccagggtctcagcctacaggtcactccggacccctcagcgctctccgcgcgggaggcgggccccac

SEQ ID NO: 357850 - DNA, 94 bp, Homo sapiens
  chr4:25031950-25032044
  hyper
cgtcctccccgggggccaacactccacccacgtcccccacacaaaggcaaagaaggggcctggggagtgggtcagggtcgcgctggcccggcgc

SEQ ID NO: 357851 - DNA, 461 bp, Homo sapiens
  chr4:25032103-25032564
  hyper
aggggtcccactcacagggagctgatgtcgcccggcacgatcctgggcacccaggaagagcccacgcagatgatagactccttggtacagctgcaagtggcggggcagcgcgccagccgcctcacctgcgcgctccgcggtatcaggcacgcggcgcccagcagcagcagcagcagcccgagcgctccgcagccgcctctccgcagcgccatgcccggtccccgctccccgcccgggccccgacccccaccgccgcgccgcgcgctcggacccggcgccgctgcagacgcgggcgccgctcgctgctctgccgccgccgctgctggcgaggactagggagccgcgggtgtgggaggccgagccgcagccgagcagcatgctggccgccacccccactcggcgcccccccacccgagcccgggctgctgggcggccgccgccgctgcgcccgccgcactcgc

SEQ ID NO: 357852 - DNA, 251 bp, Homo sapiens; identical to SEQ ID NO: 282065
  chr4:25656879-25657130
  hyper

SEQ ID NO: 357853 - DNA, 53 bp, Homo sapiens
  chr4:25657493-25657546
  hyper
acctgcggagggagcgctggtgagtaccgccgccggggcaggggcgcttcctc

SEQ ID NO: 357854 - DNA, 609 bp, Homo sapiens; identical to SEQ ID NO: 332064
  chr4:25863681-25864290
  hyper

SEQ ID NO: 357855 - DNA, 283 bp, Homo sapiens; identical to SEQ ID NO: 349921
  chr4:30720964-30721247
  hyper

SEQ ID NO: 357856 - DNA, 304 bp, Homo sapiens; identical to SEQ ID NO: 349922
  chr4:30721470-30721774
  hyper

SEQ ID NO: 357857 - DNA, 201 bp, Homo sapiens; identical to SEQ ID NO: 282083
  chr4:30723862-30724063
  hyper

SEQ ID NO: 357858 - DNA, 90 bp, Homo sapiens; identical to SEQ ID NO: 282084
  chr4:30724126-30724216
  hyper

SEQ ID NO: 357859 - DNA, 785 bp, Homo sapiens; identical to SEQ ID NO: 349925
  chr4:36245423-36246208
  hyper

SEQ ID NO: 357860 - DNA, 131 bp, Homo sapiens; identical to SEQ ID NO: 349926
  chr4:36246257-36246388
  hyper

SEQ ID NO: 357861 - DNA, 397 bp, Homo sapiens
  chr4:37455033-37455430
  hyper
cgtggtggtggcgcccccgctgtttctaggtccatgtagctcatacagggctggccatggaactcacagcaggtctaggcggcgaatgccagaaataaggaggaaactgaaaaatgccaagttctcggggtttgggagtacacaactatttgccagcgggtgcatttgttttgtgtatccccgtactccagtcccttgatcataggaagctcccttctctccagcgcaacattggagtaagcaccccggagtttcccgtgatggcaggcggttggcgcggtcgtttgtgctcagaggccaacaagcgcgtggattttctgcttcagtgcgcccgggactgccaccccggccccggggatgtcggacatcgtactccagggtttcgagccctagcccc

SEQ ID NO: 357862 - DNA, 330 bp, Homo sapiens
  chr4:37455485-37455815
  hyper
gcagcccgggccacgtgacgcgcgggcccaatgacagcgctggggcggccgctgcgagctcggcgggctcagggcagcgcggagccgctagcgtctcccggcgcggctgcccgaggccggcgaagccatgggcgccgggaccccgccgccgccgccgccgccgccgtctggccccaggtagggacaatcccccgccccgcgcgcgcaaagagggctttagtcctgcggaacttggctttggggcgagctttcccccacttctctccgagtcgcctacttttaagtttaatttcttgatttgcttttgccctgaaaaaaaaaattagagac

SEQ ID NO: 357863 - DNA, 184 bp, Homo sapiens; identical to SEQ ID NO: 332074
  chr4:37978665-37978849
  hyper

SEQ ID NO: 357864 - DNA, 182 bp, Homo sapiens
  chr4:39047105-39047287
  hyper
cggattttttttttcctctccttattacttgcaggcaattttgacctaagtttttaagcttttcttttaaataataccctcgcccccggagtgtggagaataagacggggacttcattttcccgagacccggcgtgcctggtgaaacttttgcatttaggcatttatttcagtgcatgctct

SEQ ID NO: 357865 - DNA, 322 bp, Homo sapiens; identical to SEQ ID NO: 349928
  chr4:40632148-40632470
  hyper

SEQ ID NO: 357866 - DNA, 58 bp, Homo sapiens; identical to SEQ ID NO: 349929
  chr4:41746763-41746821
  hyper

SEQ ID NO: 357867 - DNA, 65 bp, Homo sapiens
  chr4:41752247-41752312
  hyper
cgttcagtgtttgccaaactaagtggtttaattcgatgctagtgccggggagtggatgggctccc

SEQ ID NO: 357868 - DNA, 1067 bp, Homo sapiens; identical to SEQ ID NO: 346638
  chr4:42657902-42658969
  hyper

SEQ ID NO: 357869 - DNA, 34 bp, Homo sapiens; identical to SEQ ID NO: 199402
  chr4:44449403-44449437
  hyper

SEQ ID NO: 357870 - DNA, 707 bp, Homo sapiens; identical to SEQ ID NO: 282134
  chr4:46391710-46392417
  hyper

SEQ ID NO: 357871 - DNA, 142 bp, Homo sapiens
  chr4:46392515-46392657
  hyper
tccctggggccgcgccctgccgcccgtcccccaacatcaccctactgtggagcgacgtggctgctaagaggtaaagaggttccgctcctgctggagggcaaggggactaatcacgcctttacttagtcatcaacgcatccac

SEQ ID NO: 357872 - DNA, 104 bp, Homo sapiens
  chr4:47033907-47034011
  hyper
cggtccctacttcttccccttagcaccaatgaacccagcaacatgtcatacgtgaaagagacagtggacagattgctcaaaggatatgacattcgcttgcggcc

SEQ ID NO: 357873 - DNA, 93 bp, Homo sapiens; identical to SEQ ID NO: 199407
  chr4:47839530-47839623
  hyper

SEQ ID NO: 357874 - DNA, 375 bp, Homo sapiens
  chr4:47839675-47840050
  hyper
cggacgccgggcgaccggggtggtggtcgggaccagggccgtgcgcctgggaactgggtgcagggcgctgagcgcggaactgtcagagcgggagctcaccggcggctggggaaggaggtggcatcgggcggaggagaggacgggggcgggaggggctgaccctgaattcaccgggactaagaggccatcacacctggctgcggtaggacagcgaatcatcgatcttaccggctttggggacccggctctgcggcagcgctcttccggagcgagggcaggagactgtttcatggataaaaagtctcgcttattcttctgtccacttttatcttggtcgcttttctctcctctacgtgtcccccggggaggcactac

SEQ ID NO: 357875 - DNA, 260 bp, Homo sapiens; identical to SEQ ID NO: 346640
  chr4:48271822-48272082
  hyper

SEQ ID NO: 357876 - DNA, 190 bp, Homo sapiens; identical to SEQ ID NO: 346641
  chr4:48272083-48272273
  hyper

SEQ ID NO: 357877 - DNA, 239 bp, Homo sapiens
  chr4:53617162-53617401
  hyper
cggccggggttgggttcctgtcgccgcacgcgtggcccgcccgaaacccgctacaaagtagcggcgtgtctgccctagggaggcaaagcgcaaacttgttaccgcgccgggacctgccccgggattctcccagcggctccgcaggacgcagcgcctgtgcctcgcgcggccctgggacgggcacggccgtccgccccctgggccgccgagggctgctttacccctccgttctggccgcg

SEQ ID NO: 357878 - DNA, 241 bp, Homo sapiens; identical to SEQ ID NO: 199414
  chr4:53617560-53617801
  hyper

SEQ ID NO: 357879 - DNA, 172 bp, Homo sapiens
  chr4:54965627-54965799
  hyper
cgttggtctgagtggccccaggagggccccaagtacaaagacacttcagaccttgtcgaacatcagcatgaaaagcttgacggtttcttagctgggaggcctcacagttctgcgccggacagtcctgaactaaccacctgaatgacctctgccaagtccaaaagctgtggac

SEQ ID NO: 357880 - DNA, 354 bp, Homo sapiens
  chr4:54967511-54967865
  hyper
agcccccatccctctttaatcctgtgacttcgcatcctgcgcatcgaagacctttatttgctttgcacgtctcttttcttccccgctaagcaaccacgtgccttgaaatgggaaagggatacagatgttcggctgggcttccccgggtgggtccctgaaatgcgtcctggttagcacatggggtgggagcaccttgcccgagccttacctctctaccctctcttcgccggtccgcaggaggctctgacgccagccaggtacccaatggcaagaggatgaggacggcgttcactagcacgcaactcctggagctggagagagaattctcttccaacatgtacctgtctcgactcc

SEQ ID NO: 357881 - DNA, 193 bp, Homo sapiens
  chr4:55094321-55094514
  hyper
cgatgaaggtgaacgcgctcccctcccccgctgtcgctgggaagccccactctgcccaggtctggttcctggagcatcagcgccccctttccctcgccggcaggatcgtttcctcccgacactggcctctcgccttgggcgcagggtttggggctcagctgtcaattccaaggaattcgtagggttcgaccca

SEQ ID NO: 357882 - DNA, 70 bp, Homo sapiens
  chr4:55094684-55094754
  hyper
cttcaagggagtaaaggtcgttctatcggagaacgttccaaacctacacagaccctcttttctttgtacc

SEQ ID NO: 357883 - DNA, 93 bp, Homo sapiens; identical to SEQ ID NO: 346642
  chr4:57687545-57687638
  hyper

SEQ ID NO: 357884 - DNA, 205 bp, Homo sapiens; identical to SEQ ID NO: 346643
  chr4:57687887-57688092
  hyper

SEQ ID NO: 357885 - DNA, 427 bp, Homo sapiens; identical to SEQ ID NO: 346644
  chr4:58029764-58030191
  hyper

SEQ ID NO: 357886 - DNA, 229 bp, Homo sapiens; identical to SEQ ID NO: 349937
  chr4:73433670-73433899
  hyper

SEQ ID NO: 357887 - DNA, 125 bp, Homo sapiens; identical to SEQ ID NO: 349938
  chr4:73434163-73434288
  hyper

SEQ ID NO: 357888 - DNA, 249 bp, Homo sapiens; identical to SEQ ID NO: 282236
  chr4:75230487-75230736
  hyper

SEQ ID NO: 357889 - DNA, 133 bp, Homo sapiens; identical to SEQ ID NO: 199452
  chr4:76555905-76556038
  hyper

SEQ ID NO: 357890 - DNA, 421 bp, Homo sapiens
  chr4:77172549-77172970
  hyper
cgctcctcctgccttcttcctttctttccttcagtaaacgttttttgaaacgatgatgagcaaaaaacgcctgatccagtctatggcgcgtttcggtgggaagatgaacacgccttcccagcagagtaaaacgtgattacaccaaggaccggtaccctctcccttccctcggccaggtccacgtccccaggcgtcggagaaggggttggaccgcgcagcggggcgtcagagttgccaggcgcccggggcaaataccggcagcggtggttgtgcggtgtcctagcaacggggcggcagcagggcacacacaccgcccaagcccggacggtggccgcgaagctagggccaccatggcggaccgcaggcggcggctccggccggggacgttggccccggtgcgcgagggcgtgaactgcaggtc

SEQ ID NO: 357891 - DNA, 86 bp, Homo sapiens
  chr4:77173055-77173141
  hyper
gggcgaggggagaggtccagcctgccttccctcctcaatgcttcctgtacgtacaacataatacgctgagataaccaacgcttggc

SEQ ID NO: 357892 - DNA, 361 bp, Homo sapiens
  chr4:77227668-77228029
  hyper
cgggaacagaaagtgtagggacagaagagcgctggagtcttccccgggagggagcccggggctgcagcccaggggcggggagcggggcggggctgggaaagttgagtactggtcgctcagggccgggctccgccggagtgcccggcgcagaaaccgtaaaaggctggagcgggcggggtaggtgtggctctgtgtgcgtgacctgagccccggtcccagtccctgtagtctcctgcggccgcggcctctcagccatgggcgccgtctggtccgccctgctggttggagggggtctggccggagcacttttcgtttggctgctgcggggcggccctggcgacaccgggaaggacggggatgc

SEQ ID NO: 357893 - DNA, 78 bp, Homo sapiens
  chr4:77228452-77228530
  hyper
gggcggctgcagtggcggcgccccttcccggcctttggaaaggggggcttaggtttaggggatcctacaagcctcttc

SEQ ID NO: 357894 - DNA, 448 bp, Homo sapiens; identical to SEQ ID NO: 332121
  chr4:77610260-77610708
  hyper

SEQ ID NO: 357895 - DNA, 275 bp, Homo sapiens; identical to SEQ ID NO: 349941
  chr4:77818885-77819160
  hyper

SEQ ID NO: 357896 - DNA, 267 bp, Homo sapiens; identical to SEQ ID NO: 199462
  chr4:77819271-77819538
  hyper

SEQ ID NO: 357897 - DNA, 142 bp, Homo sapiens; identical to SEQ ID NO: 349943
  chr4:77819573-77819715
  hyper

SEQ ID NO: 357898 - DNA, 780 bp, Homo sapiens; identical to SEQ ID NO: 332123
  chr4:80993254-80994034
  hyper

SEQ ID NO: 357899 - DNA, 151 bp, Homo sapiens
  chr4:81124731-81124882
  hyper
gccacctgcaggaataaacacgcgagaacatccaccgcttccttgcaccccgaaaccctgcacaaagacacatacattcaccgcccccccgcccccccaacgcgcacacacacgtcctctcctcccaggaacctcattcaaatatttaccc

SEQ ID NO: 357900 - DNA, 642 bp, Homo sapiens; identical to SEQ ID NO: 332131
  chr4:82391851-82392493
  hyper

SEQ ID NO: 357901 - DNA, 233 bp, Homo sapiens; identical to SEQ ID NO: 349945
  chr4:82965099-82965332
  hyper

SEQ ID NO: 357902 - DNA, 47 bp, Homo sapiens
  chr4:84030839-84030886
  hyper
cgggcttcaggaggcggggagtgggtgggtgggcttcttaccttctc

SEQ ID NO: 357903 - DNA, 229 bp, Homo sapiens; identical to SEQ ID NO: 282286
  chr4:84030916-84031145
  hyper

SEQ ID NO: 357904 - DNA, 215 bp, Homo sapiens; identical to SEQ ID NO: 346647
  chr4:84457821-84458036
  hyper

SEQ ID NO: 357905 - DNA, 48 bp, Homo sapiens; identical to SEQ ID NO: 282293
  chr4:85403425-85403473
  hyper

SEQ ID NO: 357906 - DNA, 147 bp, Homo sapiens
  chr4:85404934-85405081
  hyper
cggccacggctgccttttcctgccctgaagtggtggagcttctgggaagatccggggcctgtagcgccctttccactgcgagtaggcgcagccgctttacaggttgtgcgatggatacaggtatcgtgtggcagacgtggtgccgtc

SEQ ID NO: 357907 - DNA, 93 bp, Homo sapiens
  chr4:85405111-85405204
  hyper
acaagccagccaatcccgagcgttctaattgccttagtcctgggatcacccacgcagcaagtccagccatgaagcccgcccccacagacacac

SEQ ID NO: 357908 - DNA, 296 bp, Homo sapiens; identical to SEQ ID NO: 349947
  chr4:85419891-85420187
  hyper

SEQ ID NO: 357909 - DNA, 310 bp, Homo sapiens
  chr4:85503546-85503856
  hyper
cggcgctgcggttgtgatcggaattgttggccgacgcacctctggacgcccagtgaggcaaaagcatctcctgttttcaaggtgatgacactgggctggaatgccgcggggccaaccagtccgtcctgccagacaagtttctggtccagtgagcctccgacccgccgcgcgtgtcaagctgacaaggccggggaggcgtttgaagcagcagtgttgagcgctgttaacatttagcgggcgtctttgagtagctcctccagccctcgcagcggcccagggactagcctgcaagttctcaacgctcacttcc

SEQ ID NO: 357910 - DNA, 250 bp, Homo sapiens; identical to SEQ ID NO: 199476
  chr4:85503985-85504235
  hyper

SEQ ID NO: 357911 - DNA, 297 bp, Homo sapiens
  chr4:85504793-85505090
  hyper
ttcctccctgcctggcactgcttcctccttctccagagggggtcgggacccgggatcccagtggcggtgaggttcccaggatgaccgcggccgctgcccgggagaaatgggccactcaacccggcttacagtttagcttcatcctcttccggtcccttcttcaggatctggggccgacgctggaatcaggagggaacctgtcctcctaggggctgcagtgcagttagtagctgccacctcacctctcttttcagtagagggaacaaagttagtaaggactagagacgtgccaccgtc

SEQ ID NO: 357912 - DNA, 306 bp, Homo sapiens
  chr4:85886808-85887114
  hyper
cgaagggcttccagcgtagggcgtagggggagaggcccgaagccctggagacagcgcccgagggatggaggccgcgctcggctgcgctcaggtccgggtggctccgggagctgagaccccgcaggatgcagcgggggggggccagggcctgatcccctacccctgcgagccagggccgcctacgcccccactgcttcccacaggtaacgtccagccctctcctcccctatcccccgaaatatcccggttccgctccgctccgctcgccgcccgtgaccccgaccccgacccgtccgcgacggcgcc

SEQ ID NO: 357913 - DNA, 678 bp, Homo sapiens; identical to SEQ ID NO: 282305
  chr4:85887200-85887878
  hyper

SEQ ID NO: 357914 - DNA, 192 bp, Homo sapiens
  chr4:85887927-85888119
  hyper
ccctcctgcctttccttcctctttccttacttccttcccttccctcggcttcccgctcttgcctcactctcagcggctgccttcgcccctgtctgcagacagcgccgctggatgctcccagctggacttcaaccccactcctctcagtccctctccccactgccttccagacgcgcctcttccccgccccgc

SEQ ID NO: 357915 - DNA, 183 bp, Homo sapiens
  chr4:87515033-87515216
  hyper
cgaagagtaagggaggagccagcacttacgcatttttcactctcctcctcactccctagggtcatagttttgattctgaagttagaagtgtgggggtcgtcggctgcattttcaacttggcctaaaagttggagttcaccacactgcaggcgctaggaactctgccgctcggtcaccaacctg

SEQ ID NO: 357916 - DNA, 340 bp, Homo sapiens; identical to SEQ ID NO: 199484
  chr4:87813080-87813420
  hyper

SEQ ID NO: 357917 - DNA, 313 bp, Homo sapiens; identical to SEQ ID NO: 349949
  chr4:87813512-87813825
  hyper

SEQ ID NO: 357918 - DNA, 119 bp, Homo sapiens
  chr4:89378198-89378317
  hyper
cgttttccactggagctgcaggccccgcccccaaacagcacgtggggggcgtggcgtcccggcaggggctcagtagctgaggctgcggttccccgacgccacgcagctgcgcgcagctg

SEQ ID NO: 357919 - DNA, 616 bp, Homo sapiens; identical to SEQ ID NO: 332148
  chr4:90228673-90229289
  hyper

SEQ ID NO: 357920 - DNA, 320 bp, Homo sapiens
  chr4:94748540-94748860
  hyper
cgcactcccgcgccccaggggcggtgcaggagagcgcccggagccagagccagggcgcgctgggcgcaagctggggcgcgcccagggccaatgagcttctgattggctctttgctgtgaatagactaggccgaggctaataggaccggagggggcgttcacctgggaattggcctcccccccttgccaaggacctccctgattgtatggggcggagtggggtgggggtgggggctggaaaggggaagcccaccctaactaaacggaggggcgggaggaggttaaactgaggaagccacgagcccgcagtaaagagagggc

SEQ ID NO: 357921 - DNA, 196 bp, Homo sapiens; identical to SEQ ID NO: 282339
  chr4:94749529-94749725
  hyper

SEQ ID NO: 357922 - DNA, 276 bp, Homo sapiens; identical to SEQ ID NO: 282340
  chr4:94749755-94750031
  hyper

SEQ ID NO: 357923 - DNA, 47 bp, Homo sapiens; identical to SEQ ID NO: 349950
  chr4:94753232-94753279
  hyper

SEQ ID NO: 357924 - DNA, 33 bp, Homo sapiens; identical to SEQ ID NO: 349951
  chr4:94753547-94753580
  hyper

SEQ ID NO: 357925 - DNA, 60 bp, Homo sapiens; identical to SEQ ID NO: 199502
  chr4:95678999-95679059
  hyper

SEQ ID NO: 357926 - DNA, 314 bp, Homo sapiens; identical to SEQ ID NO: 282348
  chr4:95679325-95679639
  hyper

SEQ ID NO: 357927 - DNA, 63 bp, Homo sapiens; identical to SEQ ID NO: 349954
  chr4:95679745-95679808
  hyper

SEQ ID NO: 357928 - DNA, 134 bp, Homo sapiens; identical to SEQ ID NO: 345137
  chr4:100729543-100729677
  hyper

SEQ ID NO: 357929 - DNA, 258 bp, Homo sapiens; identical to SEQ ID NO: 345138
  chr4:100867945-100868203
  hyper

SEQ ID NO: 357930 - DNA, 91 bp, Homo sapiens; identical to SEQ ID NO: 199513
  chr4:102711787-102711878
  hyper

SEQ ID NO: 357931 - DNA, 692 bp, Homo sapiens; identical to SEQ ID NO: 349957
  chr4:103997179-103997871
  hyper

SEQ ID NO: 357932 - DNA, 269 bp, Homo sapiens; identical to SEQ ID NO: 349958
  chr4:106067220-106067489
  hyper

SEQ ID NO: 357933 - DNA, 971 bp, Homo sapiens
  chr4:106156519-106157490
  hyper
cgatgctttctgaaaggcctcagaataattgtgtgaacaggaatgacatacagactgcagggacaatgactgttccattgtgttctgagaaaacaagaccaatgtcagaacacctcaagcataacccaccaatttttggtagcagtggagagctacaggacaactgccagcagttgatgagaaacaaagagcaagagattctgaagggtcgagacaaggagcaaacacgagatcttgtgcccccaacacagcactatctgaaaccaggatggattgaattgaaggcccctcgttttcaccaagcggaatcccatctaaaacgtaatgaggcatcactgccatcaattcttcagtatcaacccaatctctccaatcaaatgacctccaaacaatacactggaaattccaacatgcctggggggctcccaaggcaagcttacacccagaaaacaacacagctggagcacaagtcacaaatgtaccaagttgaaatgaatcaagggcagtcccaaggtacagtggaccaacatctccagttccaaaaaccctcacaccaggtgcacttctccaaaacagaccatttaccaaaagctcatgtgcagtcactgtgtggcactagatttcattttcaacaaagagcagattcccaaactgaaaaacttatgtccccagtgttgaaacagcacttgaatcaacaggcttcagagactgagccattttcaaactcacaccttttgcaacataagcctcataaacaggcagcacaaacacaaccatcccagagttcacatctccctcaaaaccagcaacagcagcaaaaattacaaataaagaataaagaggaaatactccagacttttcctcacccccaaagcaacaatgatcagcaaagagaaggatcattctttggccagactaaagtggaagaatgttttcatggtgaaaatcagtattcaaaatcaagcgagttc

SEQ ID NO: 357934 - DNA, 206 bp, Homo sapiens; identical to SEQ ID NO: 282408
  chr4:109088463-109088669
  hyper

SEQ ID NO: 357935 - DNA, 71 bp, Homo sapiens; identical to SEQ ID NO: 332164
  chr4:110343729-110343800
  hyper

SEQ ID NO: 357936 - DNA, 501 bp, Homo sapiens; identical to SEQ ID NO: 332165
  chr4:110481822-110482323
  hyper

SEQ ID NO: 357937 - DNA, 232 bp, Homo sapiens; identical to SEQ ID NO: 199554
  chr4:111543735-111543967
  hyper

SEQ ID NO: 357938 - DNA, 47 bp, Homo sapiens; identical to SEQ ID NO: 349961
  chr4:113432609-113432656
  hyper

SEQ ID NO: 357939 - DNA, 299 bp, Homo sapiens; identical to SEQ ID NO: 199559
  chr4:113435475-113435774
  hyper

SEQ ID NO: 357940 - DNA, 242 bp, Homo sapiens; identical to SEQ ID NO: 199560
  chr4:113436585-113436827
  hyper

SEQ ID NO: 357941 - DNA, 228 bp, Homo sapiens; identical to SEQ ID NO: 199561
  chr4:113438278-113438506
  hyper

SEQ ID NO: 357942 - DNA, 157 bp, Homo sapiens; identical to SEQ ID NO: 349965
  chr4:113442552-113442709
  hyper

SEQ ID NO: 357943 - DNA, 80 bp, Homo sapiens; identical to SEQ ID NO: 349966
  chr4:113444864-113444944
  hyper

SEQ ID NO: 357944 - DNA, 115 bp, Homo sapiens; identical to SEQ ID NO: 349967
  chr4:113445444-113445559
  hyper

SEQ ID NO: 357945 - DNA, 105 bp, Homo sapiens; identical to SEQ ID NO: 282450
  chr4:113627471-113627576
  hyper

SEQ ID NO: 357946 - DNA, 879 bp, Homo sapiens; identical to SEQ ID NO: 332181
  chr4:114682555-114683434
  hyper

SEQ ID NO: 357947 - DNA, 215 bp, Homo sapiens; identical to SEQ ID NO: 349969
  chr4:115520945-115521160
  hyper

SEQ ID NO: 357948 - DNA, 108 bp, Homo sapiens; identical to SEQ ID NO: 349970
  chr4:119273336-119273444
  hyper

SEQ ID NO: 357949 - DNA, 222 bp, Homo sapiens; identical to SEQ ID NO: 199571
  chr4:119273515-119273737
  hyper

SEQ ID NO: 357950 - DNA, 201 bp, Homo sapiens; identical to SEQ ID NO: 199572
  chr4:119273903-119274104
  hyper

SEQ ID NO: 357951 - DNA, 243 bp, Homo sapiens
  chr4:119274214-119274457
  hyper
tgccccctgggggcgggcgccggccgcgcaagctgctccggacctacgctcggcccctgccaggcccaccgcagtccgcccgcacggcactgccagctgctgggaccgagcccgagggtgcccgcgcggagcacggtcttggctgccccttgccagcatgcagcaccagcacagcccggcgttggcggctcccaaatctggcaccggcccctgccgtcatctctcctccaacctcgtcgcccc

SEQ ID NO: 357952 - DNA, 153 bp, Homo sapiens
  chr4:119809913-119810066
  hyper
cgaaggtgggccgagcaaaggagagtgacgcaagagtgggctgtgtcctggatgctgcgagcgcctctgcctccttgagaatgagcccattagccgcacaaattcgcagcaggcggctggggcggcggctggggcagcggctgcagcagcggc

SEQ ID NO: 357953 - DNA, 60 bp, Homo sapiens
  chr4:121843504-121843564
  hyper
cgccgtgccccgcggtccccggccttcccacggacgcctggcccggcccgggcgaggggc

SEQ ID NO: 357954 - DNA, 276 bp, Homo sapiens; identical to SEQ ID NO: 199580
  chr4:121843731-121844007
  hyper

SEQ ID NO: 357955 - DNA, 170 bp, Homo sapiens
  chr4:121844206-121844376
  hyper
ctgggttttcaaaccttgccccgctgaaccattactccctgtaggggagtctcgcttgcttctcttcagatgcaaaacgaaatggaccttcacacagctggggcatcctccaaaacaactttatcaagttcctgactctgaaagccagcttattgccgactactgagaac

SEQ ID NO: 357956 - DNA, 234 bp, Homo sapiens; identical to SEQ ID NO: 349973
  chr4:121992978-121993212
  hyper

SEQ ID NO: 357957 - DNA, 114 bp, Homo sapiens; identical to SEQ ID NO: 349974
  chr4:121993736-121993850
  hyper

SEQ ID NO: 357958 - DNA, 70 bp, Homo sapiens; identical to SEQ ID NO: 349975
  chr4:123747655-123747725
  hyper

SEQ ID NO: 357959 - DNA, 225 bp, Homo sapiens
  chr4:123748993-123749218
  hyper
actactctcacccactctgttttatatttttccgaattgacgaaagctgaaagagcaaaaacaaaaaccaaccagccaaccagcaaaaaatccagatgttgttaataaagtgccatagctttgtttcagtagtgaaaagaagtgcaaacactttaatcttccacctgcagtgactagctttgagaccttgagccgacgcttaaccccagagccggtttcctcatc

SEQ ID NO: 357960 - DNA, 1233 bp, Homo sapiens
  chr4:124317751-124318984
  hyper
cgaagttttaagaggatgtttattacacgagtctgtagggcaacatttccaagttggtacacataaacgaaagaggaaacgatagttaaggaaatcctgttccaggttttcgggcagcccgagtgattgacacatgatatcaccggaggcgtgtcctggagtggaggtggaggtggaggcaaggagctgaaattctgcgtagccggagtgagaccgctctgcaaaccactgcgtgctttgcagagtgattatcagcacagttccctgccctggataaggaacagctacagtcgctgttaaatgtgcctgaaaagcaatttgcaatctttgcattaggtaagtaccgtttccttccgtagacattttaggaaagataaggtgagaaatgttgacttttgcaaggaactgaacatttatttatttgaacttgctttccagctaaggttactggttgcatttcaaaacaccggtagcattcccactgctaaaactaatgctcttaaagtaaatgctaccgctaaaagaaaaagcagggtccctttcacctttccttaaccgaacagtagacgtttaaagtctgaaacgatcgaatttgtgaaacacagagccgttaatgcctttatgcgaagaggggctagcactcggtgtgtggaccaaatgcgtgtttgtttaggcattgttggcgaccgaatcccgagtgaagcattggtttaaaacctgaatttcccgtctctgtgtattgattcctaacgcgcagaggcgttgcttgaacgttgtttgaactcctaggcattccagggggcaaaagcacctcggcaaaaacgtgcaggactgcatgttactttggttcgcggctgacacgccgactgtgcgccggcctgtcaatcaccgggagcagcaacagggagcacatggcaacgggctgcgggcgagctggccagcggcccgcccggggtcccagcccttcgaagaaagggacattcacgagcttctatctctaattctctgtcgcaggcatttcggccgtggaaccccaggctcggaggactgggtgtgagcgctgcccgggagaggctgacctgccgggaccggagtgcccggggacgctgtgcccccacttgcccaacgtgcggaatcggctaagcgcgtcggcctgcgcggggcacaagggacgacgcccgcctttctctctccgagaaggatccccaaacctcactctcttcactcctcccc

SEQ ID NO: 357961 - DNA, 242 bp, Homo sapiens; identical to SEQ ID NO: 282500
  chr4:128544404-128544646
  hyper

SEQ ID NO: 357962 - DNA, 49 bp, Homo sapiens
  chr4:128544806-128544855
  hyper
cccaccctttccagaatcgggtgccagcgatccaccctgtcccgctgcc

SEQ ID NO: 357963 - DNA, 149 bp, Homo sapiens; identical to SEQ ID NO: 349977
  chr4:129210000-129210149
  hyper

SEQ ID NO: 357964 - DNA, 136 bp, Homo sapiens; identical to SEQ ID NO: 349978
  chr4:140970253-140970389
  hyper

SEQ ID NO: 357965 - DNA, 212 bp, Homo sapiens; identical to SEQ ID NO: 349979
  chr4:140970419-140970631
  hyper

SEQ ID NO: 357966 - DNA, 352 bp, Homo sapiens; identical to SEQ ID NO: 345141
  chr4:141293964-141294316
  hyper

SEQ ID NO: 357967 - DNA, 103 bp, Homo sapiens; identical to SEQ ID NO: 199607
  chr4:141294418-141294521
  hyper

SEQ ID NO: 357968 - DNA, 88 bp, Homo sapiens; identical to SEQ ID NO: 199608
  chr4:141294545-141294633
  hyper

SEQ ID NO: 357969 - DNA, 40 bp, Homo sapiens; identical to SEQ ID NO: 345144
  chr4:141295287-141295327
  hyper

SEQ ID NO: 357970 - DNA, 88 bp, Homo sapiens; identical to SEQ ID NO: 349984
  chr4:141489128-141489216
  hyper

SEQ ID NO: 357971 - DNA, 60 bp, Homo sapiens; identical to SEQ ID NO: 199612
  chr4:142054594-142054654
  hyper

SEQ ID NO: 357972 - DNA, 155 bp, Homo sapiens
  chr4:142054757-142054912
  hyper
ctcaaattcaacctcaatcggcgacttaatctaggtggaggtaaagaggaagcgacccctcgacctttgagtacgggaataacttcctgagcgttacatttagcaaatgtatgtgcctctcgtaaacgaccctcccgtttgctggaagtactgcc

SEQ ID NO: 357973 - DNA, 824 bp, Homo sapiens; identical to SEQ ID NO: 332200
  chr4:142557243-142558067
  hyper

SEQ ID NO: 357974 - DNA, 192 bp, Homo sapiens; identical to SEQ ID NO: 199617
  chr4:143767433-143767625
  hyper

SEQ ID NO: 357975 - DNA, 332 bp, Homo sapiens
  chr4:143768278-143768610
  hyper
ctgaggagaccagcttagagcagccctcggccacccaccgccagttcccacgtcgcggcgggtgactgaggccgagatgctcccaactagcgtatgacatgcctttgatatcccgggtgcgtggggacaaatccgccctgaatgtgttggggtatcaggaaaacggggtatgtaagcaagcagtctggacggagactaaaactcccccacttcctagcccctaacaagcccacaggggaaagcacgcaccctggttattccgggctgtgtagggtgtggggcaaatgactctccccatctgcgctttacaggtgccacctggcggctctctc

SEQ ID NO: 357976 - DNA, 194 bp, Homo sapiens; identical to SEQ ID NO: 332204
  chr4:146098925-146099119
  hyper

SEQ ID NO: 357977 - DNA, 995 bp, Homo sapiens
  chr4:146857459-146858454
  hyper
cgccttctccttcctcgcacaaaatttccctacacacgcagccgcctgcgagtgattttatgtgcatatatattacatatgtgatattatcctcagaacctctagcgggcaggcgaagaaaggactgcacaggggcattttttttttttaaaggaaggggaaaaaagcacaacccaagccctttgcgtcgactcctgcgtaccgggaaggggaaagaaagaggaatgtttgcggagcggactgcttgcaagtgcccttgctcgccacttcggctgcggcccgggtgacacggaggcgcgggggcgcctggcccgagcagcccgcgcccccctcccggtcccctgggcaggcaccgccgcggttatttcgcgagggggagatcgatcgccctgcctgtctgcagcggaaaagcacaagctcacacacagcccgagcccgagacaccataaccttaacccttcccccaccctccgtgaacttcaggtgaccgaccacgtcggcctgacacccgggcgggcgggcgctccggctccactcccgcccccagcccgggttttgcaggatcgggctccgagcagcgccaaaccgccgggagaggggagtagtgtggggggagagaagagaaattgaccctccgtctcccccgacccctccctccggcgcctcccgcgtcccctcctccccgtcaccccgccccacgccttctcccctgccccctcttccctgcattcaaggagccgggcggccccgggggatatttttagttgcttctttctccttcacttttagctttagcagcatctcgaaacactcaaagcggagaaagactggggggttggggggagctggagagggagtgggggaaaagttaagagtcgcgcaaagaaaagccggagggagggcggagagggaccgggggcgcgggtggaggaggggaaggggaccgggccgtgccggcgggtgtgtgtctccagttggcgtgtgtggctgccgcc

SEQ ID NO: 357978 - DNA, 270 bp, Homo sapiens; identical to SEQ ID NO: 199627
  chr4:147560617-147560887
  hyper

SEQ ID NO: 357979 - DNA, 260 bp, Homo sapiens; identical to SEQ ID NO: 332209
  chr4:149362760-149363020
  hyper

SEQ ID NO: 357980 - DNA, 223 bp, Homo sapiens; identical to SEQ ID NO: 346657
  chr4:149364661-149364884
  hyper

SEQ ID NO: 357981 - DNA, 438 bp, Homo sapiens; identical to SEQ ID NO: 282569
  chr4:149365430-149365868
  hyper

SEQ ID NO: 357982 - DNA, 346 bp, Homo sapiens
  chr4:149365911-149366257
  hyper
gggcacccgcccgcccccagcggcggcggccgggcctctggcgggcccctctcccggggctgcgcgtccgctcggcgttgacagcggcgtccctgggagccgggaagtccggcaggaggatcccgcgcccgccgctccgcagcgccactctccgcgccccctccccgggccctgggtggccggtgacagctccggcggccgagcgcgtgtgtgagggggcggtcgcagggggagcctgcgcccccctccccgggtcacgccctcacgagcgggaggaggcggcaccgcgtccggccacccgcgggtgggaaacgggcaggggcgccggcagccgccctcccactac

SEQ ID NO: 357983 - DNA, 410 bp, Homo sapiens; identical to SEQ ID NO: 346660
  chr4:150999731-151000141
  hyper

SEQ ID NO: 357984 - DNA, 124 bp, Homo sapiens; identical to SEQ ID NO: 346661
  chr4:151000581-151000705
  hyper

SEQ ID NO: 357985 - DNA, 113 bp, Homo sapiens; identical to SEQ ID NO: 349995
  chr4:152246019-152246132
  hyper

SEQ ID NO: 357986 - DNA, 178 bp, Homo sapiens; identical to SEQ ID NO: 199640
  chr4:152246314-152246492
  hyper

SEQ ID NO: 357987 - DNA, 469 bp, Homo sapiens; identical to SEQ ID NO: 349997
  chr4:152246542-152247011
  hyper

SEQ ID NO: 357988 - DNA, 1048 bp, Homo sapiens; identical to SEQ ID NO: 332213
  chr4:152329824-152330872
  hyper

SEQ ID NO: 357989 - DNA, 190 bp, Homo sapiens; identical to SEQ ID NO: 349998
  chr4:153600941-153601131
  hyper

SEQ ID NO: 357990 - DNA, 261 bp, Homo sapiens; identical to SEQ ID NO: 349999
  chr4:153601161-153601422
  hyper

SEQ ID NO: 357991 - DNA, 177 bp, Homo sapiens; identical to SEQ ID NO: 332215
  chr4:153856957-153857134
  hyper

SEQ ID NO: 357992 - DNA, 45 bp, Homo sapiens; identical to SEQ ID NO: 345146
  chr4:154143770-154143815
  hyper

SEQ ID NO: 357993 - DNA, 213 bp, Homo sapiens; identical to SEQ ID NO: 199648
  chr4:154144184-154144397
  hyper

SEQ ID NO: 357994 - DNA, 192 bp, Homo sapiens; identical to SEQ ID NO: 350003
  chr4:154714010-154714202
  hyper

SEQ ID NO: 357995 - DNA, 40 bp, Homo sapiens; identical to SEQ ID NO: 350004
  chr4:156298073-156298113
  hyper

SEQ ID NO: 357996 - DNA, 200 bp, Homo sapiens
  chr4:156587883-156588083
  hyper
cgattgggcggctgcagagaccaggactcagttcccctgccctagtctgagcctagtgggtgggactcagctcagagtcagttttccagaagcaggtttcagtgcagagttttcctacacttttcctgcgctagagcagcgagcagcctggaacagacccaggcggaggacacctgtgggggagggagcgcctggaggag

SEQ ID NO: 357997 - DNA, 144 bp, Homo sapiens; identical to SEQ ID NO: 199653
  chr4:156588167-156588311
  hyper

SEQ ID NO: 357998 - DNA, 55 bp, Homo sapiens; identical to SEQ ID NO: 199654
  chr4:156588401-156588456
  hyper

SEQ ID NO: 357999 - DNA, 156 bp, Homo sapiens
  chr4:156680543-156680699
  hyper
cgggaaggggaggtgcggcggaggcgtggggtcttcccggctctggccggccccaccagtgtgggaggctgagcgccagcggaagggaaggctccgggttcgcgtccccgcgctgcccccgatgcccagcctctcccggagcggtgacaggtgagg

SEQ ID NO: 358000 - DNA, 216 bp, Homo sapiens; identical to SEQ ID NO: 199658
  chr4:156680970-156681186
  hyper

SEQ ID NO: 358001 - DNA, 42 bp, Homo sapiens; identical to SEQ ID NO: 282611
  chr4:158141450-158141492
  hyper

SEQ ID NO: 358002 - DNA, 53 bp, Homo sapiens
  chr4:158142705-158142758
  hyper
cggcctattcgcgtgaataagagactcttggatttttgggcgctagcgcgcgc

SEQ ID NO: 358003 - DNA, 268 bp, Homo sapiens; identical to SEQ ID NO: 282613
  chr4:158143023-158143291
  hyper

SEQ ID NO: 358004 - DNA, 120 bp, Homo sapiens; identical to SEQ ID NO: 332230
  chr4:159093914-159094034
  hyper

SEQ ID NO: 358005 - DNA, 168 bp, Homo sapiens
  chr4:163085074-163085242
  hyper
cgctcgcgtctcaggttcagcaccgacagcacagtggacagtaccagctcctttcacctccagtttgtctcagtcactgaaccaggctgattctcgctcctcctccctaggcaggagctgctgccactcaacccgggggtgccccgcccccaccatctgacgtaacta

SEQ ID NO: 358006 - DNA, 244 bp, Homo sapiens
  chr4:163085479-163085723
  hyper
tctggaaggaagacggggcggagagagggggcagtggagcacggagaggaccgagtgggaggcgggtggggaggagacggagaaatagaatgaatctattcaaccattcttgaaaacatctccaatccttttcatcttcctgcccaaactttgctgcctctccctgccatttggttatttgaacggatccgtatttggtgttcctactcccttccctcggttcacggagcctctggagggagtc

SEQ ID NO: 358007 - DNA, 359 bp, Homo sapiens
  chr4:164253781-164254140
  hyper
gaactccacctcatcccggatcacgtgacggcgtcccgcgagtagcgcctgaagctcccccaaccccacaaacacctcacaaaggtgcacacctcggggaagcattgcctaggaattttggaaagaaaagcaatccaacagaagccacacattattcgacacagacctcccgcgcaggggaaaggaagccctaatccccacagtcctcgactccggggaaggcagggcagtttcccgaggcttgaaaaagtcggtgccactgtgcttttctttgtttgcaggtcagtgccatcttgtggccgaagtcatacccggctggagagctcgagcgccagcccaaaccaggaatcaaagggctc

SEQ ID NO: 358008 - DNA, 155 bp, Homo sapiens; identical to SEQ ID NO: 350006
  chr4:165304258-165304413
  hyper

SEQ ID NO: 358009 - DNA, 244 bp, Homo sapiens
  chr4:166300444-166300688
  hyper
cgccgaagcccaggagcccggggcgcccgcggcgggcatgaggcggcgccggcggctgcagcaagaggacggcatctccttcgagtaccaccgctaccccgagctgcgcgaggcgctcgtgtccgtgtggctgcagtgcaccgccatcagcaggatttacacggtggggcgcagcttcgagggccgggagctcctggtcatcgagctgtccgacaaccctggcgtccatgagcctggtaagggc

SEQ ID NO: 358010 - DNA, 63 bp, Homo sapiens; identical to SEQ ID NO: 332241
  chr4:169552556-169552619
  hyper

SEQ ID NO: 358011 - DNA, 677 bp, Homo sapiens; identical to SEQ ID NO: 350007
  chr4:169752829-169753506
  hyper

SEQ ID NO: 358012 - DNA, 439 bp, Homo sapiens; identical to SEQ ID NO: 282635
  chr4:169753535-169753974
  hyper

SEQ ID NO: 358013 - DNA, 273 bp, Homo sapiens
  chr4:169754143-169754416
  hyper
gggtcccgtgagcagccaggctggccctccccgggcctgggtgagctcccaaagctggagcgcagggctctaggccggccccgccccggggctgggggcttcccgcccgtttgtctcattttaacttttgggggcagctctgtcccgaatggtgagtggtccagactctagaaaggggtttggtcgcttgagcccggattgaggcttgggacctttgctctcttgctggggacggaagggggcgcgctgggcaggagagggggcgtctcggtc

SEQ ID NO: 358014 - DNA, 102 bp, Homo sapiens; identical to SEQ ID NO: 199680
  chr4:170947173-170947275
  hyper

SEQ ID NO: 358015 - DNA, 171 bp, Homo sapiens; identical to SEQ ID NO: 199681
  chr4:170947867-170948038
  hyper

SEQ ID NO: 358016 - DNA, 426 bp, Homo sapiens; identical to SEQ ID NO: 199682
  chr4:170948089-170948515
  hyper

SEQ ID NO: 358017 - DNA, 940 bp, Homo sapiens
  chr4:171010636-171011576
  hyper
cgcagagcctggctcaccgcgagcgtgcacaggggtacgcatggatgcaaccaagcggtggcttgctagggaaccctccttagaggctgtgcgaggaatgccccaccccaaaggagagatggtcaccccgtttctcactcatggtccggatgggagaagggtttctggctgcgctcgctgccgtgatgaaccgtgcgtaattcatgtcttctgacagccaagcatcaagcttcttcttcagtggttgaggactagaaaaaccaaagagcctcgtcaagtcctgcctgctaactcctcactctggcaacgccaccgcgagatgtgtccccccgctgcgtctggcttcccgcgcgcggtgcccggagaacgccgccgaaactccccggctggacgctgcgttcggtctcccggtcctaaacgggtctggggctgtgtggcgagcccggcaaagtccacgccgcacgcgctcctgcggccgccagggcccaggccggttttgccccgccgcgggcctcgccgcgccccctcccgccccgcgccgtggcctatggccgcccgcggcgcgcgcctccccgtcccggatcatcgccctcagagcgcagggcgcggggtagcccaggcgcgaggcgcttgcagccccaggccaatgactcttgacctcgccgctgggaatcaccgcaacccggcgtccgcgttggccggcctaggcgccggcccagaggctagcccaggggctgaccgaggggaccggaagtgcccgtgatcctaatcctcgggaaccatctggcggcgacttgggtccactgcagggggctcccgagctgcgcccagccgggagcggccccaccctcgttcccgcgcgctccgctggcctcctctcagtcactgggactgtgcattttgcccgctcagaccatggctatgctaaatacccatcttt

SEQ ID NO: 358018 - DNA, 1342 bp, Homo sapiens
  chr4:174090080-174091422
  hyper
cggacgacccaagcccgctgagcaggatgagggtgagtgacccgcccggccccctccggcggcagcgaccggcaacttgttttgtttgcccgcgtgtggagggagcaggggcggcggggtcgcggcacggcgtgggcaccgcagctccgcaggtggtgctggcgcagcgcgggccgagggggtgccgagccccgcgcactccgacctccctggccgccgccggcccgccccctcgccgccccttcctccgctcttccccgccccgggctccgtcgccgacacccgcgctgccgcggcagcggctcgggcggccgctctccgcgccgggactgcgggcggagcgggcggagagccgggtccggggggctgcggccgcccggcgtcccgctctggggggccgggaccgcagcgctcacggcccggggacgcggggttggtccaggctgcggcctgtggcgcgtgcaggcctgaaggaggcgagatgccgatgccgccaccgctggtccggtggaccaggccccttggtccagcctcccctcccgcagccgcccgtctgggggtgttcgcagccccgggctcccccggcccgcccgccggggagtgggagggcgatggcgccccgcctccggctcttacggagagcgcgcctccccctcaactccggcggcggggagccggggtgcgatgcgcggccgaggcctcgcccggaccgccggtccccctcgcgtccctgggcgagggaggggcggttggccggagatggcggaggggcgtccccgccccgcctgcccgccgcccccagccctcagcgcctggggaagcccctgctgtggcagtgctcgggcgctatccgggggaagaggagcagttcctcttccttggctgcggcagggctgcttgggccggaaaactaacttgtgtcggcgcccggccgccccgcgccggctgccggctagctcaggccgacgccgaggggagcggcggcgcggagctcgcggcggctccgctgggacgcatttgtctgccgcccagggcgcgagtgttagcgctgacattccttggatttggagggtttagtcaggcgcctcggaacattagttacccggagccgcgccgcgcggggaagggaccgcgggcactgcggcttccctgacccggcagcgggcggcgcgcaccggcctcgcccccgaccctgacctgcttccccccggatgaaccgttgcaccacctgcttcctcctccccgctgggacagccaactgggccggctgccagtgggggtaggagagggtatgaggggctcacgaccgccgaggcggcggggctgcaggaggagtcgagtc

SEQ ID NO: 358019 - DNA, 42 bp, Homo sapiens
  chr4:174439755-174439797
  hyper
cgcagtcccccttctccccattccagaacctgccgagcccct

SEQ ID NO: 358020 - DNA, 270 bp, Homo sapiens; identical to SEQ ID NO: 199686
  chr4:174440348-174440618
  hyper

SEQ ID NO: 358021 - DNA, 126 bp, Homo sapiens; identical to SEQ ID NO: 350013
  chr4:174443425-174443551
  hyper

SEQ ID NO: 358022 - DNA, 168 bp, Homo sapiens
  chr4:174448150-174448318
  hyper
cgggatcccttaccacacgggagtgtcctcttcgtattaaaatatggaatgcttttcttcaaatatccactttttttttggagggggagacggggagcagatgcctcaaagggggtcaaagagaggggaaggaaattgcacataaataaaccggatgattccaaatgc

SEQ ID NO: 358023 - DNA, 355 bp, Homo sapiens
  chr4:174448663-174449018
  hyper
agcccctgcagagaagctaccaaggttagcgctaccctagccggcggggaggcctcggcgctgcagcgctcaacaaccggatccacaagtttataaacaaccgcccgttttcgagtcgtttatggaggagcggggggccttttctcttactccagatgtaggggcgggagctggagtcggcgctaagtctggtttctctgttttcattagcaatcctagatccacatctaggaaaaatagggcgaaggagcctctgtttcggcctgggcctctcggccagaggctctcggcctccagctcagcagtgcctctcctccaaggcttctgaaatctctggttattcgggaggtcactc

SEQ ID NO: 358024 - DNA, 126 bp, Homo sapiens; identical to SEQ ID NO: 350014
  chr4:174458996-174459122
  hyper

SEQ ID NO: 358025 - DNA, 35 bp, Homo sapiens
  chr4:174460221-174460256
  hyper
catgttagcggtttgctggatttcccttctccctc

SEQ ID NO: 358026 - DNA, 275 bp, Homo sapiens
  chr4:175138136-175138411
  hyper
cgtgcaatgtcactttaacctggatagcgtcaggtttcctcacgcataaaataagatcagatgatgccctcttggattctttgactgcaggacaatcattaggccatagtgaacagatgcgcttggttgccagaccgcgccctttgcgggtctatcaaaagggcaagcgcatattctggagctgtctcggagacttggacagaaagattcgaggcaaatattctaggctgggaaatttcgcgccgagcccccccctcagttagcctgtctaaagg

SEQ ID NO: 358027 - DNA, 71 bp, Homo sapiens; identical to SEQ ID NO: 350015
  chr4:175750738-175750809
  hyper

SEQ ID NO: 358028 - DNA, 68 bp, Homo sapiens; identical to SEQ ID NO: 350016
  chr4:176922585-176922653
  hyper

SEQ ID NO: 358029 - DNA, 42 bp, Homo sapiens; identical to SEQ ID NO: 345148
  chr4:176986744-176986786
  hyper

SEQ ID NO: 358030 - DNA, 504 bp, Homo sapiens; identical to SEQ ID NO: 332261
  chr4:177116437-177116941
  hyper

SEQ ID NO: 358031 - DNA, 355 bp, Homo sapiens; identical to SEQ ID NO: 282677
  chr4:180979649-180980004
  hyper

SEQ ID NO: 358032 - DNA, 268 bp, Homo sapiens; identical to SEQ ID NO: 332264
  chr4:183839058-183839326
  hyper

SEQ ID NO: 358033 - DNA, 206 bp, Homo sapiens; identical to SEQ ID NO: 199699
  chr4:184019900-184020106
  hyper

SEQ ID NO: 358034 - DNA, 365 bp, Homo sapiens; identical to SEQ ID NO: 199701
  chr4:184718835-184719200
  hyper

SEQ ID NO: 358035 - DNA, 521 bp, Homo sapiens
  chr4:184719413-184719934
  hyper
gtcccattcccggtgcgccgcccccgcctgcccgcgggagcctccccggtggcgggcggtgcctgaggccggccaggtgggcgccgcggctcggcgggcggctcggagggcgcggcgctcggggcgcgtgagtgtccccctcccggcactgctccgcggctggagtgcgcgggccgggcggaggtgggcggggaggattccggggctcgggtcgcgcggggctcccagctggagcggcggctcaggtgcgcccgggacgcccttccctgggcggcgactgcgggggacgcgccgggaagctagggttgaggctgagtgttgcgcgcacgcatttctcaacgaggcaaggctgcagagttcgtcttaaatgtctcacctgcagcacatctctcaagtcgttttgtgtgtctgagggaaggaagagacacaaagaggccggaggaaaaaaaatctgatcctcaacaaaagagagcaaaacgtaaagaggggcagagtcgcccagaggtgaaggtcgccgccgc

SEQ ID NO: 358036 - DNA, 365 bp, Homo sapiens; identical to SEQ ID NO: 332268
  chr4:185747631-185747996
  hyper

SEQ ID NO: 358037 - DNA, 219 bp, Homo sapiens
  chr4:185939454-185939673
  hyper
cggcggaacagcctattaaaggcttacttaattactttaatgactctggacaggctttaaaacgcactcggcgctgggacggcgggcttgctgggatttgtaaacaggcgatcatgtgagactcagcggtgggactaaaagaggcgacactgttttgtgagggtcctcgccccccggtgcccgcggccgctgcgcccctgcgctccgcgcccgcgactg

SEQ ID NO: 358038 - DNA, 52 bp, Homo sapiens
  chr4:186050065-186050117
  hyper
aggggtgaccgagttacgccgcgggcgctgcctgagcaacgctttctaccgc

SEQ ID NO: 358039 - DNA, 182 bp, Homo sapiens; identical to SEQ ID NO: 199719
  chr4:187647457-187647639
  hyper

SEQ ID NO: 358040 - DNA, 393 bp, Homo sapiens; identical to SEQ ID NO: 199720
  chr4:187647669-187648062
  hyper

SEQ ID NO: 358041 - DNA, 239 bp, Homo sapiens; identical to SEQ ID NO: 350024
  chr4:187648119-187648358
  hyper

SEQ ID NO: 358042 - DNA, 1660 bp, Homo sapiens; identical to SEQ ID NO: 332275
  chr5:472600-474260
  hyper

SEQ ID NO: 358043 - DNA, 329 bp, Homo sapiens
  chr5:490894-491223
  hyper
cgcccacgtgacgggcctgccatccatgagcctgtctgtgccctcggcagctttccctgggctgcacctggtgggtgatgctggacggcagggactacagggaggggtgagaaggcgccaaggaaccacgtgctgggtgaggcggccccaacccgggagctcctctttctccatgcgtctccttggtctcaggtttcagccccttgattcccatggagaggccgggccgtgctctctcttgaaccagacggaaaatcgccaattcttgtgagtctggttcagctggtggatttgtttgaggctgagttctcagaccggtgagggcggca

SEQ ID NO: 358044 - DNA, 74 bp, Homo sapiens; identical to SEQ ID NO: 350026
  chr5:523704-523778
  hyper

SEQ ID NO: 358045 - DNA, 258 bp, Homo sapiens; identical to SEQ ID NO: 350027
  chr5:676510-676768
  hyper

SEQ ID NO: 358046 - DNA, 356 bp, Homo sapiens; identical to SEQ ID NO: 350028
  chr5:676926-677282
  hyper

SEQ ID NO: 358047 - DNA, 210 bp, Homo sapiens; identical to SEQ ID NO: 332279
  chr5:1004778-1004988
  hyper

SEQ ID NO: 358048 - DNA, 116 bp, Homo sapiens; identical to SEQ ID NO: 350029
  chr5:1009142-1009258
  hyper

SEQ ID NO: 358049 - DNA, 151 bp, Homo sapiens; identical to SEQ ID NO: 350030
  chr5:1009625-1009776
  hyper

SEQ ID NO: 358050 - DNA, 860 bp, Homo sapiens; identical to SEQ ID NO: 332282
  chr5:1064412-1065272
  hyper

SEQ ID NO: 358051 - DNA, 991 bp, Homo sapiens; identical to SEQ ID NO: 332283
  chr5:1111396-1112387
  hyper

SEQ ID NO: 358052 - DNA, 166 bp, Homo sapiens
  chr5:1155508-1155674
  hyper
cgaggtcagagggcgccccgggagctgtcggcccatccccgcggcccctgccccggctcggtgtcacctgcaggccccggacagggcgggatccccgcagggaactgccccaggtccccggagcgcgcggcgggcggcaggggcggggctccgctgggctgggggg

SEQ ID NO: 358053 - DNA, 315 bp, Homo sapiens; identical to SEQ ID NO: 345152
  chr5:1645162-1645477
  hyper

SEQ ID NO: 358054 - DNA, 901 bp, Homo sapiens; identical to SEQ ID NO: 332288
  chr5:1800443-1801344
  hyper

SEQ ID NO: 358055 - DNA, 286 bp, Homo sapiens; identical to SEQ ID NO: 345153
  chr5:1874606-1874892
  hyper

SEQ ID NO: 358056 - DNA, 70 bp, Homo sapiens; identical to SEQ ID NO: 350034
  chr5:1877239-1877309
  hyper

SEQ ID NO: 358057 - DNA, 87 bp, Homo sapiens
  chr5:1879747-1879834
  hyper
cttcttgaggcgccggcgcgcgttggcgaaccaggtggagacctgtgtgagggtcatcttggtgatgatggccagcatgatcttctc

SEQ ID NO: 358058 - DNA, 39 bp, Homo sapiens; identical to SEQ ID NO: 350035
  chr5:2743466-2743505
  hyper

SEQ ID NO: 358059 - DNA, 174 bp, Homo sapiens
  chr5:2753572-2753746
  hyper
cccaccactcttcctacaaaccacacccccatcctgcacacatcctcttcaggccatctcaacacacgcacacgcacacacacccacgaccacctctccctccacccacagacaccccgttcccacaggctgggccccctgcaacgacccagcggggggtttcaaccttgttgc

SEQ ID NO: 358060 - DNA, 96 bp, Homo sapiens; identical to SEQ ID NO: 346675
  chr5:3121996-3122092
  hyper

SEQ ID NO: 358061 - DNA, 83 bp, Homo sapiens; identical to SEQ ID NO: 346676
  chr5:3122204-3122287
  hyper

SEQ ID NO: 358062 - DNA, 88 bp, Homo sapiens; identical to SEQ ID NO: 282777
  chr5:3602716-3602804
  hyper

SEQ ID NO: 358063 - DNA, 32 bp, Homo sapiens; identical to SEQ ID NO: 350038
  chr5:6583144-6583176
  hyper

SEQ ID NO: 358064 - DNA, 376 bp, Homo sapiens; identical to SEQ ID NO: 199753
  chr5:9545120-9545496
  hyper

SEQ ID NO: 358065 - DNA, 85 bp, Homo sapiens
  chr5:9545851-9545936
  hyper
tgggggcaccggcttgggggccacgagcacggtccccgagcgcgcggccaaccggtgggtgggcaggttcgcgcccagcagagac

SEQ ID NO: 358066 - DNA, 468 bp, Homo sapiens; identical to SEQ ID NO: 332309
  chr5:10354870-10355338
  hyper

SEQ ID NO: 358067 - DNA, 95 bp, Homo sapiens
  chr5:10563418-10563513
  hyper
cgcccatccccggcgccaggactgacggggagagggcaaggccgggccagaggggctgtgggcctggactgcggctgtcgcccgcggccctgctc

SEQ ID NO: 358068 - DNA, 170 bp, Homo sapiens; identical to SEQ ID NO: 345154
  chr5:10564301-10564471
  hyper

SEQ ID NO: 358069 - DNA, 147 bp, Homo sapiens; identical to SEQ ID NO: 350041
  chr5:11385588-11385735
  hyper

SEQ ID NO: 358070 - DNA, 73 bp, Homo sapiens; identical to SEQ ID NO: 350042
  chr5:11903295-11903368
  hyper

SEQ ID NO: 358071 - DNA, 125 bp, Homo sapiens; identical to SEQ ID NO: 332315
  chr5:14205146-14205271
  hyper

SEQ ID NO: 358072 - DNA, 252 bp, Homo sapiens; identical to SEQ ID NO: 350044
  chr5:16934300-16934552
  hyper

SEQ ID NO: 358073 - DNA, 43 bp, Homo sapiens; identical to SEQ ID NO: 350045
  chr5:16934582-16934625
  hyper

SEQ ID NO: 358074 - DNA, 88 bp, Homo sapiens
  chr5:16935468-16935556
  hyper
cgcacgttttgcaaaggaaataccagacaagacctttcttggagaaaggcaggtccccgctgaacattttattgggcttcctgcaccc

SEQ ID NO: 358075 - DNA, 266 bp, Homo sapiens; identical to SEQ ID NO: 199773
  chr5:16935617-16935883
  hyper

SEQ ID NO: 358076 - DNA, 33 bp, Homo sapiens; identical to SEQ ID NO: 199774
  chr5:16936321-16936354
  hyper

SEQ ID NO: 358077 - DNA, 70 bp, Homo sapiens; identical to SEQ ID NO: 199775
  chr5:16936514-16936584
  hyper

SEQ ID NO: 358078 - DNA, 235 bp, Homo sapiens; identical to SEQ ID NO: 350049
  chr5:16936833-16937068
  hyper

SEQ ID NO: 358079 - DNA, 302 bp, Homo sapiens
  chr5:17216361-17216663
  hyper
cgcaggcgagcatgaaagcgatccaaacacagccagagggcgccaaaatgccgcaaataaaagttccaaaggcgtcaactggcttttgcgggaaggtaaaattggcttttgtgtaatcaaagagctaccgttgtcaacgatgtcacgttacgttatttttgtatgtccctcttgccaacaggtaagcaaagtgaacgcatcttcctaccccggtggctattctgtgtcccggtgctaaaccaagtgtccgcccccttagggcacccggacaagccgcggttggccctagctttgactcgagc

SEQ ID NO: 358080 - DNA, 52 bp, Homo sapiens; identical to SEQ ID NO: 350050
  chr5:17217629-17217681
  hyper

SEQ ID NO: 358081 - DNA, 187 bp, Homo sapiens; identical to SEQ ID NO: 282827
  chr5:22853256-22853443
  hyper

SEQ ID NO: 358082 - DNA, 100 bp, Homo sapiens; identical to SEQ ID NO: 350052
  chr5:22853569-22853669
  hyper

SEQ ID NO: 358083 - DNA, 478 bp, Homo sapiens; identical to SEQ ID NO: 346679
  chr5:31854462-31854940
  hyper

SEQ ID NO: 358084 - DNA, 131 bp, Homo sapiens; identical to SEQ ID NO: 350054
  chr5:34655742-34655873
  hyper

SEQ ID NO: 358085 - DNA, 441 bp, Homo sapiens; identical to SEQ ID NO: 199790
  chr5:34655910-34656351
  hyper

SEQ ID NO: 358086 - DNA, 221 bp, Homo sapiens; identical to SEQ ID NO: 199791
  chr5:34656421-34656642
  hyper

SEQ ID NO: 358087 - DNA, 387 bp, Homo sapiens
  chr5:34657034-34657421
  hyper
caatccgcctcccggctgaacttggaggaggtggggagggaggtgcgagcgggagactccgggtggctcccaggacgcggggtccgctattgttcctcctctgactccagggagcccctcggccggcccaagggcgggggcgagacccctctgggcctgcccctgccccctaccttgttttccccgccgcagctcggggagaacggatgctggagttggggcagactcggggccgccgggacttcgggagtaaggaggacgtggagccaccagaaaggcgcccgccatctcccgcgacccctgcctggtggggggtggggggtggggtgtcgtcctcaaccaccttcgctgccttcttgggcaggttggtgtcggtttagtttctgc

SEQ ID NO: 358088 - DNA, 376 bp, Homo sapiens
  chr5:35230090-35230466
  hyper
aaagctggggttgggggcagtggtggaggcaaagcaccttaagagtattttttagcccctctgagaagggacatccgggcgggaggcgggcggatcccgggcttccccgccggctgccgactctggctcctggctggcgttctctccaggagcccgcgccggtggccccgctctccccttcagcacgcgggcctcgaacccgcatcccggagagcggccgcccgcgcagcccctgccgcgcgccgtcggaggcggcctcagctcgccatgggtactcacttttgccagggagcaaagtctgccacatcagtcgatgagtacttcctgcacgaggacatgaagctccattgtgtggaaagctgtttcgcgaacggtc

SEQ ID NO: 358089 - DNA, 747 bp, Homo sapiens; identical to SEQ ID NO: 350058
  chr5:36744888-36745635
  hyper

SEQ ID NO: 358090 - DNA, 786 bp, Homo sapiens; identical to SEQ ID NO: 332333
  chr5:37248996-37249782
  hyper

SEQ ID NO: 358091 - DNA, 100 bp, Homo sapiens; identical to SEQ ID NO: 350059
  chr5:38556107-38556207
  hyper

SEQ ID NO: 358092 - DNA, 85 bp, Homo sapiens; identical to SEQ ID NO: 199802
  chr5:38556985-38557070
  hyper

SEQ ID NO: 358093 - DNA, 162 bp, Homo sapiens
  chr5:38557400-38557562
  hyper
tctcttaatggggtgagatttttcctccgtacattgttcccatttccgcagtttcacttggcctcggttttctagcagagtaatcaccaaatgaaattagctggagagcgtttgatggcgcagaatcacggtctgaagatgtttacgctgtatgccggacgc

SEQ ID NO: 358094 - DNA, 336 bp, Homo sapiens; identical to SEQ ID NO: 199807
  chr5:40680627-40680963
  hyper

SEQ ID NO: 358095 - DNA, 462 bp, Homo sapiens; identical to SEQ ID NO: 350062
  chr5:41510373-41510835
  hyper

SEQ ID NO: 358096 - DNA, 799 bp, Homo sapiens; identical to SEQ ID NO: 350063
  chr5:41870076-41870875
  hyper

SEQ ID NO: 358097 - DNA, 277 bp, Homo sapiens
  chr5:42424338-42424615
  hyper
cggcagggagttgcgggcgacagacgaaccatcacactctggcgtctgctctggcccgcgagtagtgtacgtggaggggtttactccggagacagttttgttaaagtcataaaagttttgctagtgtgtttctgtttgccatcatctgcctggctgcggcaggaactgccgaggctgctgctgttgcgcggggaagaatccccggcagcgcgactggagagactggggaggtcgagctgtgcgcgtggacacagcgcgcagagcgcgcggtcttttg

SEQ ID NO: 358098 - DNA, 98 bp, Homo sapiens; identical to SEQ ID NO: 345157
  chr5:42950747-42950845
  hyper

SEQ ID NO: 358099 - DNA, 175 bp, Homo sapiens; identical to SEQ ID NO: 346682
  chr5:42995428-42995603
  hyper

SEQ ID NO: 358100 - DNA, 337 bp, Homo sapiens; identical to SEQ ID NO: 345158
  chr5:43007481-43007818
  hyper

SEQ ID NO: 358101 - DNA, 387 bp, Homo sapiens; identical to SEQ ID NO: 199819
  chr5:43017314-43017701
  hyper

SEQ ID NO: 358102 - DNA, 303 bp, Homo sapiens; identical to SEQ ID NO: 199820
  chr5:43019347-43019650
  hyper

SEQ ID NO: 358103 - DNA, 259 bp, Homo sapiens; identical to SEQ ID NO: 199821
  chr5:43019887-43020146
  hyper

SEQ ID NO: 358104 - DNA, 328 bp, Homo sapiens; identical to SEQ ID NO: 332354
  chr5:43557434-43557762
  hyper

SEQ ID NO: 358105 - DNA, 214 bp, Homo sapiens; identical to SEQ ID NO: 350071
  chr5:43603571-43603785
  hyper

SEQ ID NO: 358106 - DNA, 50 bp, Homo sapiens; identical to SEQ ID NO: 345162
  chr5:49737299-49737349
  hyper

SEQ ID NO: 358107 - DNA, 104 bp, Homo sapiens; identical to SEQ ID NO: 350073
  chr5:50263380-50263484
  hyper

SEQ ID NO: 358108 - DNA, 318 bp, Homo sapiens
  chr5:52778284-52778602
  hyper
cgtcgcatcctgtttttgtcaggttctttaatctgctcttcgagtctctgcaggttatgaaatgggacgaataaaagtaaacagtctagtaaaagtcaatgcaagctgcacgtgttgtgtctgggtcactggtaactgacattgatatggctggggcgccctgtcttctccctctctccctccctccctctcgcccacctcccatctctgtgatcagggcttccccctccactgccttctttttccacccctccacccctttcgatttatttcctacttttctcccgcgtctctctcacttcccctcctccacgctca

SEQ ID NO: 358109 - DNA, 135 bp, Homo sapiens
  chr5:52778741-52778876
  hyper
ggccgctgccaggtcctgtacaagaccgaactgagcaaggaggagtgctgcagcaccggccggctgagcacctcgtggaccgaggaggacgtgaatgacaacacactcttcaagtggatgattttcaacgggggc

SEQ ID NO: 358110 - DNA, 75 bp, Homo sapiens; identical to SEQ ID NO: 345163
  chr5:54518558-54518633
  hyper

SEQ ID NO: 358111 - DNA, 209 bp, Homo sapiens; identical to SEQ ID NO: 345164
  chr5:54526958-54527167
  hyper

SEQ ID NO: 358112 - DNA, 308 bp, Homo sapiens; identical to SEQ ID NO: 332365
  chr5:56110226-56110534
  hyper

SEQ ID NO: 358113 - DNA, 552 bp, Homo sapiens
  chr5:56112644-56113196
  hyper
cgaactgcactgctaagtcacttgagtgacttctgtttggagtttgaatttggcctttgaagtttgcatttggcggagtggtgtaagagccaggaccggatgtgtcagccattcagtttcaaagcagtggtgactgctccccgcagcccctccggcttggcccggggactgcggcgcgggtgcagtgcttcctgctcggtgccctggcgcgggccgcccgctgaattccaggggccgcagtgcggtgggcttcggctcagatgcgtcttctggtgcatatgaagtacagtatgtgtaaggtaatttagaccagcggtttattggcctcgcccatttttggctactggaaatttttatgttaaaggaaattcttttaagtgtgacagctacatccttgtttgtttgttttttaaaaacctgattaacgtatgcaaagtacaaagtcttgatgggtattttgagttgctggaaatgtttttgtgatagtccctcgtggccctgtagaattccctgacctttattatgagaagaaagcgtgtcattttgtgagac

SEQ ID NO: 358114 - DNA, 37 bp, Homo sapiens; identical to SEQ ID NO: 199857
  chr5:57878673-57878710
  hyper

SEQ ID NO: 358115 - DNA, 158 bp, Homo sapiens; identical to SEQ ID NO: 199858
  chr5:57878752-57878910
  hyper

SEQ ID NO: 358116 - DNA, 227 bp, Homo sapiens; identical to SEQ ID NO: 345168
  chr5:57879190-57879417
  hyper

SEQ ID NO: 358117 - DNA, 128 bp, Homo sapiens; identical to SEQ ID NO: 345169
  chr5:58334886-58335014
  hyper

SEQ ID NO: 358118 - DNA, 210 bp, Homo sapiens; identical to SEQ ID NO: 199861
  chr5:58335353-58335563
  hyper

SEQ ID NO: 358119 - DNA, 73 bp, Homo sapiens; identical to SEQ ID NO: 345171
  chr5:58335881-58335954
  hyper

SEQ ID NO: 358120 - DNA, 201 bp, Homo sapiens; identical to SEQ ID NO: 199865
  chr5:59189507-59189708
  hyper

SEQ ID NO: 358121 - DNA, 53 bp, Homo sapiens
  chr5:59190083-59190136
  hyper
tcttagagaaatggagtttggcgattcctggctggttctcagagcttgttgac

SEQ ID NO: 358122 - DNA, 160 bp, Homo sapiens
  chr5:60921444-60921604
  hyper
cgttctctgagatgtcgctgctattactgtctcaaatttccttttaaattttgctgtttgagtaaattagtgctggcctttcctgagctccgcagctccgaggtggcccgactgccgggcctccaccccttttccccggtcccgggtcggtttctccggg

SEQ ID NO: 358123 - DNA, 49 bp, Homo sapiens
  chr5:60921662-60921711
  hyper
cggtcatgcgggcgggcgggcggtgttccccagagaccgcccatcccgc

SEQ ID NO: 358124 - DNA, 489 bp, Homo sapiens; identical to SEQ ID NO: 332371
  chr5:64398796-64399285
  hyper

SEQ ID NO: 358125 - DNA, 348 bp, Homo sapiens; identical to SEQ ID NO: 346698
  chr5:65220847-65221195
  hyper

SEQ ID NO: 358126 - DNA, 1043 bp, Homo sapiens; identical to SEQ ID NO: 332373
  chr5:66299591-66300634
  hyper

SEQ ID NO: 358127 - DNA, 97 bp, Homo sapiens; identical to SEQ ID NO: 350085
  chr5:66511687-66511784
  hyper

SEQ ID NO: 358128 - DNA, 81 bp, Homo sapiens; identical to SEQ ID NO: 199883
  chr5:72416165-72416246
  hyper

SEQ ID NO: 358129 - DNA, 114 bp, Homo sapiens; identical to SEQ ID NO: 350086
  chr5:72497779-72497893
  hyper

SEQ ID NO: 358130 - DNA, 269 bp, Homo sapiens; identical to SEQ ID NO: 199884
  chr5:72594501-72594770
  hyper

SEQ ID NO: 358131 - DNA, 316 bp, Homo sapiens; identical to SEQ ID NO: 199885
  chr5:72733185-72733501
  hyper

SEQ ID NO: 358132 - DNA, 177 bp, Homo sapiens; identical to SEQ ID NO: 350088
  chr5:72733588-72733765
  hyper

SEQ ID NO: 358133 - DNA, 85 bp, Homo sapiens; identical to SEQ ID NO: 350089
  chr5:72742484-72742569
  hyper

SEQ ID NO: 358134 - DNA, 216 bp, Homo sapiens; identical to SEQ ID NO: 199888
  chr5:72744481-72744697
  hyper

SEQ ID NO: 358135 - DNA, 177 bp, Homo sapiens
  chr5:72745196-72745373
  hyper
tctgcgattgaatgccctagagacttgacagttaaactaagccactctaatgagacgatctgacaaatgtcatgggaataaagaacgtaataattgaattcggagaagaaattgaaatttttagtgaaaacccaaatacacgcacaaaaattgcacctagaaactactaaaaagttc

SEQ ID NO: 358136 - DNA, 300 bp, Homo sapiens; identical to SEQ ID NO: 199889
  chr5:72747520-72747820
  hyper

SEQ ID NO: 358137 - DNA, 127 bp, Homo sapiens; identical to SEQ ID NO: 350091
  chr5:72747850-72747977
  hyper

SEQ ID NO: 358138 - DNA, 164 bp, Homo sapiens; identical to SEQ ID NO: 332389
  chr5:73843900-73844064
  hyper

SEQ ID NO: 358139 - DNA, 291 bp, Homo sapiens; identical to SEQ ID NO: 199900
  chr5:75378714-75379005
  hyper

SEQ ID NO: 358140 - DNA, 373 bp, Homo sapiens; identical to SEQ ID NO: 199901
  chr5:75379694-75380067
  hyper

SEQ ID NO: 358141 - DNA, 50 bp, Homo sapiens; identical to SEQ ID NO: 283051
  chr5:75698194-75698244
  hyper

SEQ ID NO: 358142 - DNA, 1185 bp, Homo sapiens; identical to SEQ ID NO: 199902
  chr5:75698274-75699459
  hyper

SEQ ID NO: 358143 - DNA, 110 bp, Homo sapiens; identical to SEQ ID NO: 350096
  chr5:76011064-76011174
  hyper

SEQ ID NO: 358144 - DNA, 410 bp, Homo sapiens; identical to SEQ ID NO: 283056
  chr5:76011754-76012164
  hyper

SEQ ID NO: 358145 - DNA, 377 bp, Homo sapiens; identical to SEQ ID NO: 283057
  chr5:76012199-76012576
  hyper

SEQ ID NO: 358146 - DNA, 184 bp, Homo sapiens
  chr5:76012643-76012827
  hyper
ttgttggaagtttttttcttgcacattttacaggcgagaaaagtgatgtagagaaaagcccaggcagtcccttggcatgtttagcagagaatcagtaccagcagcccccggcccggccttgtgtccaggaggtgcgcagggtgcgagatatatggtgacaatagcagaggctccgcgtggtggc

SEQ ID NO: 358147 - DNA, 407 bp, Homo sapiens; identical to SEQ ID NO: 199907
  chr5:76114443-76114850
  hyper

SEQ ID NO: 358148 - DNA, 282 bp, Homo sapiens; identical to SEQ ID NO: 199908
  chr5:76114880-76115162
  hyper

SEQ ID NO: 358149 - DNA, 218 bp, Homo sapiens; identical to SEQ ID NO: 199909
  chr5:76115225-76115443
  hyper

SEQ ID NO: 358150 - DNA, 78 bp, Homo sapiens
  chr5:76115609-76115687
  hyper
ctaggttgttttttgcgtccctctccaactgctggaagcctttcttcgggttctggcccctgcgttcgagacccaccc

SEQ ID NO: 358151 - DNA, 96 bp, Homo sapiens
  chr5:76507202-76507298
  hyper
ggttgtcactaaggaggagtttacttttcatttgtggagatgatgggagcccaggaaatgtggtcagaaaaaggcccctggaggggtcctggaagc

SEQ ID NO: 358152 - DNA, 345 bp, Homo sapiens; identical to SEQ ID NO: 345175
  chr5:76926856-76927201
  hyper

SEQ ID NO: 358153 - DNA, 50 bp, Homo sapiens
  chr5:76937347-76937397
  hyper
cgccgccagcaggcagagcgagaaaaacgacaatagcctggatgtaaaaa

SEQ ID NO: 358154 - DNA, 89 bp, Homo sapiens
  chr5:76939813-76939902
  hyper
ctttcccttctaactactggcgctcacggccctccacacagaaagctcgacacaaaacaatgacggattagtatccgccccctgactgc

SEQ ID NO: 358155 - DNA, 191 bp, Homo sapiens; identical to SEQ ID NO: 199915
  chr5:77148195-77148386
  hyper

SEQ ID NO: 358156 - DNA, 37 bp, Homo sapiens; identical to SEQ ID NO: 346704
  chr5:77268330-77268367
  hyper

SEQ ID NO: 358157 - DNA, 180 bp, Homo sapiens; identical to SEQ ID NO: 332410
  chr5:78531507-78531687
  hyper

SEQ ID NO: 358158 - DNA, 1538 bp, Homo sapiens; identical to SEQ ID NO: 332411
  chr5:78531956-78533494
  hyper

SEQ ID NO: 358159 - DNA, 418 bp, Homo sapiens; identical to SEQ ID NO: 350103
  chr5:79551984-79552402
  hyper

SEQ ID NO: 358160 - DNA, 41 bp, Homo sapiens; identical to SEQ ID NO: 199922
  chr5:79865662-79865703
  hyper

SEQ ID NO: 358161 - DNA, 90 bp, Homo sapiens; identical to SEQ ID NO: 199923
  chr5:79865744-79865834
  hyper

SEQ ID NO: 358162 - DNA, 224 bp, Homo sapiens; identical to SEQ ID NO: 199924
  chr5:80256566-80256790
  hyper

SEQ ID NO: 358163 - DNA, 158 bp, Homo sapiens; identical to SEQ ID NO: 350105
  chr5:82767810-82767968
  hyper

SEQ ID NO: 358164 - DNA, 541 bp, Homo sapiens; identical to SEQ ID NO: 283098
  chr5:82769369-82769910
  hyper

SEQ ID NO: 358165 - DNA, 245 bp, Homo sapiens; identical to SEQ ID NO: 283099
  chr5:82770318-82770563
  hyper

SEQ ID NO: 358166 - DNA, 45 bp, Homo sapiens; identical to SEQ ID NO: 345178
  chr5:87436549-87436594
  hyper

SEQ ID NO: 358167 - DNA, 735 bp, Homo sapiens; identical to SEQ ID NO: 345179
  chr5:87436769-87437504
  hyper

SEQ ID NO: 358168 - DNA, 80 bp, Homo sapiens; identical to SEQ ID NO: 283113
  chr5:87955380-87955460
  hyper

SEQ ID NO: 358169 - DNA, 80 bp, Homo sapiens; identical to SEQ ID NO: 345180
  chr5:87957200-87957280
  hyper

SEQ ID NO: 358170 - DNA, 49 bp, Homo sapiens; identical to SEQ ID NO: 199934
  chr5:87962917-87962966
  hyper

SEQ ID NO: 358171 - DNA, 388 bp, Homo sapiens; identical to SEQ ID NO: 283116
  chr5:87963002-87963390
  hyper

SEQ ID NO: 358172 - DNA, 191 bp, Homo sapiens; identical to SEQ ID NO: 350114
  chr5:87963511-87963702
  hyper

SEQ ID NO: 358173 - DNA, 156 bp, Homo sapiens; identical to SEQ ID NO: 345181
  chr5:87969885-87970041
  hyper

SEQ ID NO: 358174 - DNA, 599 bp, Homo sapiens; identical to SEQ ID NO: 199937
  chr5:87970918-87971517
  hyper

SEQ ID NO: 358175 - DNA, 37 bp, Homo sapiens; identical to SEQ ID NO: 345183
  chr5:87975991-87976028
  hyper

SEQ ID NO: 358176 - DNA, 243 bp, Homo sapiens; identical to SEQ ID NO: 345184
  chr5:87976663-87976906
  hyper

SEQ ID NO: 358177 - DNA, 325 bp, Homo sapiens; identical to SEQ ID NO: 350119
  chr5:87979367-87979692
  hyper

SEQ ID NO: 358178 - DNA, 157 bp, Homo sapiens; identical to SEQ ID NO: 283123
  chr5:87979985-87980142
  hyper

SEQ ID NO: 358179 - DNA, 147 bp, Homo sapiens; identical to SEQ ID NO: 283124
  chr5:87980250-87980397
  hyper

SEQ ID NO: 358180 - DNA, 138 bp, Homo sapiens; identical to SEQ ID NO: 332428
  chr5:87982673-87982811
  hyper

SEQ ID NO: 358181 - DNA, 108 bp, Homo sapiens; identical to SEQ ID NO: 332430
  chr5:87984851-87984959
  hyper

SEQ ID NO: 358182 - DNA, 262 bp, Homo sapiens; identical to SEQ ID NO: 283129
  chr5:87986873-87987135
  hyper

SEQ ID NO: 358183 - DNA, 139 bp, Homo sapiens; identical to SEQ ID NO: 346715
  chr5:87987165-87987304
  hyper

SEQ ID NO: 358184 - DNA, 453 bp, Homo sapiens; identical to SEQ ID NO: 346716
  chr5:88178399-88178852
  hyper

SEQ ID NO: 358185 - DNA, 422 bp, Homo sapiens; identical to SEQ ID NO: 283136
  chr5:88179429-88179851
  hyper

SEQ ID NO: 358186 - DNA, 42 bp, Homo sapiens; identical to SEQ ID NO: 345186
  chr5:88180346-88180388
  hyper

SEQ ID NO: 358187 - DNA, 286 bp, Homo sapiens; identical to SEQ ID NO: 350128
  chr5:89854237-89854523
  hyper

SEQ ID NO: 358188 - DNA, 546 bp, Homo sapiens
  chr5:92943283-92943829
  hyper
cgctgaagccctgggaatcatttcagcccaaggtgagcctttcaggcactgctctttgtccccatttggataagaaggtgcaaaactagttagacactaggctgattttggggaggtggtaggaggggatggagaagcggcctgttctaattaaagacaataagcaatcctgcgaggagctgtcctttagccttggctggaggcagaaacggtctgtctcacctcagttgttaggtttatttgagctggtcggtgaggcgaagagcagaaacttgcaggtagctctgggctcaggtgagactgggtggatggttaaatcacagcaagtgatctcgaagtccccctttacctccccatcccctgtccttctgtgctctgtgcttgactcaggcatactttgattctaactttgcttgctagatggcgctcggtgtctcaggactttctgtttcagaattaaagcggctttttagcaccgttgttctgaactatttgtgggcatttgatcagtacagtgctggtaatgttattattgcccttgttttc

SEQ ID NO: 358189 - DNA, 926 bp, Homo sapiens
  chr5:94619403-94620329
  hyper
cgagatgttttctttcgactgtttcatctacttagaattaatagcatttctcctcccgcctcccggcccccgccccccgctccccgggtggtgaacgcctgaagagggaggcgtggtcccgcgcaccttgtctccggccgcgccaccggcactcacctggctgctgccgtgctcctcgcccgtctccggggcccgagactccgcgggactccgcgccggctctgcgggaggaggcggcggctccagcagctgctccaggcaggcggtgcccggcagagaggagctcttctggtggcacaagtgcgccccggggccctgacgccgtgcaccctcatctcgggcgcggtcccccctcgggggaggctggggcgaggaggacagggaggatgaggcggaggaagaggaaggagctgagtcgggggagcgtccgccaggaggcgtccctcccgctgctcccgaggccgccgcgggcccctttacggcggggagcaaatgctcgcggatccggcggcgtagcgtggacccctgctcggctctgccggcgccgccgggctccaggggctccggcgacgagcagcacaggttgggctgcgaggaggagaagactcggtccagcacttgcttccgcttcttgaagccgctccacctgctgcctgcaccactccccctggccggtgcattccctgtgcccaccgggggtggcggggagggcgacggggtgtccgcagtgcggcgctctggacccccagcgcgcccgcccccgccgcccttgctcctgcccacccccagctgcaggttcttccagagccgggcctggaaggaggaggacgccgccggcggctctggctcgcccgccgcggcagcccggggctccatcctccaccccctgctcctcctctcccctcctcctcctcctcctcctcctg

SEQ ID NO: 358190 - DNA, 434 bp, Homo sapiens
  chr5:95767460-95767894
  hyper
cgccgattactcatccgtgactccagcggcgtctcaaccaccacctccagaaaaaacgcgccaaaatgttttacaactgcctcctcccacgcttcaatgcagaccaacttcccaagcagggggcgagggcttgattccgagccaaggaaaggaaagctctagactagaagtcacactccctagggtcccctcggaatcgctcagctataagcagtctcccacttaatgtcttgacgcccacccacctccaaccagctacctatcgaccaagccttcacttggacaggcaacaataagctgaaattcccgggaaaacgattacgtacttggctgaagaacaagaaagaaatagatcccttccccatagtcagttcggcatctcgaccctgcagtgggactggccgggcaaagttatgaagcttggactttataag

SEQ ID NO: 358191 - DNA, 114 bp, Homo sapiens; identical to SEQ ID NO: 345187
  chr5:100236036-100236150
  hyper

SEQ ID NO: 358192 - DNA, 86 bp, Homo sapiens; identical to SEQ ID NO: 346720
  chr5:100238197-100238283
  hyper

SEQ ID NO: 358193 - DNA, 344 bp, Homo sapiens; identical to SEQ ID NO: 199962
  chr5:100239724-100240068
  hyper

SEQ ID NO: 358194 - DNA, 399 bp, Homo sapiens; identical to SEQ ID NO: 199964
  chr5:101631635-101632034
  hyper

SEQ ID NO: 358195 - DNA, 221 bp, Homo sapiens; identical to SEQ ID NO: 199965
  chr5:101632074-101632295
  hyper

SEQ ID NO: 358196 - DNA, 298 bp, Homo sapiens; identical to SEQ ID NO: 199969
  chr5:107005685-107005983
  hyper

SEQ ID NO: 358197 - DNA, 449 bp, Homo sapiens; identical to SEQ ID NO: 199970
  chr5:107006260-107006709
  hyper

SEQ ID NO: 358198 - DNA, 281 bp, Homo sapiens; identical to SEQ ID NO: 350137
  chr5:109024730-109025011
  hyper

SEQ ID NO: 358199 - DNA, 738 bp, Homo sapiens; identical to SEQ ID NO: 332448
  chr5:110847638-110848376
  hyper

SEQ ID NO: 358200 - DNA, 469 bp, Homo sapiens; identical to SEQ ID NO: 199981
  chr5:112629778-112630247
  hyper

SEQ ID NO: 358201 - DNA, 113 bp, Homo sapiens; identical to SEQ ID NO: 345190
  chr5:112630698-112630811
  hyper

SEQ ID NO: 358202 - DNA, 252 bp, Homo sapiens; identical to SEQ ID NO: 283209
  chr5:112823814-112824066
  hyper

SEQ ID NO: 358203 - DNA, 218 bp, Homo sapiens; identical to SEQ ID NO: 199985
  chr5:113696733-113696951
  hyper

SEQ ID NO: 358204 - DNA, 97 bp, Homo sapiens; identical to SEQ ID NO: 199986
  chr5:113698167-113698264
  hyper

SEQ ID NO: 358205 - DNA, 56 bp, Homo sapiens; identical to SEQ ID NO: 199987
  chr5:113698330-113698386
  hyper

SEQ ID NO: 358206 - DNA, 213 bp, Homo sapiens; identical to SEQ ID NO: 350143
  chr5:114506308-114506521
  hyper

SEQ ID NO: 358207 - DNA, 57 bp, Homo sapiens; identical to SEQ ID NO: 199990
  chr5:114515671-114515728
  hyper

SEQ ID NO: 358208 - DNA, 131 bp, Homo sapiens; identical to SEQ ID NO: 199991
  chr5:114515769-114515900
  hyper

SEQ ID NO: 358209 - DNA, 44 bp, Homo sapiens; identical to SEQ ID NO: 346728
  chr5:114516274-114516318
  hyper

SEQ ID NO: 358210 - DNA, 51 bp, Homo sapiens; identical to SEQ ID NO: 350147
  chr5:115911175-115911226
  hyper

SEQ ID NO: 358211 - DNA, 105 bp, Homo sapiens; identical to SEQ ID NO: 346729
  chr5:115911590-115911695
  hyper

SEQ ID NO: 358212 - DNA, 35 bp, Homo sapiens; identical to SEQ ID NO: 346730
  chr5:119799821-119799856
  hyper

SEQ ID NO: 358213 - DNA, 112 bp, Homo sapiens
  chr5:122423762-122423874
  hyper
cggtatggccagaaccccggcgatgggaaagtacctcctgagtcggtcaatttcacacaccctgcctgtgccctctaccatctactaccgaaaatgccaggaagagctgggg

SEQ ID NO: 358214 - DNA, 331 bp, Homo sapiens; identical to SEQ ID NO: 283251
  chr5:122424105-122424436
  hyper

SEQ ID NO: 358215 - DNA, 287 bp, Homo sapiens
  chr5:122434876-122435163
  hyper
cgggctttttttcgcaatacaaggataaacacatcctgaaactccagatagaaacctcaggaatgggcgagagggtcagaaggaacgagagacagtagggaagagagagagagagacagagacagagggagagatgcagagagactgaaacgggaggaagaagcctggaactgtcggttccgtggagagcggacatgctatctgcgcccagatccgaaggctttttggggagcctagagtcctggcccggtaccaggcagatctgggtgcggcgaattccaagggag

SEQ ID NO: 358216 - DNA, 102 bp, Homo sapiens; identical to SEQ ID NO: 200008
  chr5:122435201-122435303
  hyper

SEQ ID NO: 358217 - DNA, 122 bp, Homo sapiens; identical to SEQ ID NO: 283256
  chr5:122435413-122435535
  hyper

SEQ ID NO: 358218 - DNA, 94 bp, Homo sapiens; identical to SEQ ID NO: 346731
  chr5:124082318-124082412
  hyper

SEQ ID NO: 358219 - DNA, 924 bp, Homo sapiens; identical to SEQ ID NO: 283263
  chr5:124082442-124083366
  hyper

SEQ ID NO: 358220 - DNA, 37 bp, Homo sapiens; identical to SEQ ID NO: 346733
  chr5:124084158-124084195
  hyper

SEQ ID NO: 358221 - DNA, 60 bp, Homo sapiens; identical to SEQ ID NO: 346734
  chr5:124084302-124084362
  hyper

SEQ ID NO: 358222 - DNA, 111 bp, Homo sapiens; identical to SEQ ID NO: 345192
  chr5:124084660-124084771
  hyper

SEQ ID NO: 358223 - DNA, 64 bp, Homo sapiens; identical to SEQ ID NO: 345193
  chr5:124084977-124085041
  hyper

SEQ ID NO: 358224 - DNA, 94 bp, Homo sapiens; identical to SEQ ID NO: 350156
  chr5:125930492-125930586
  hyper

SEQ ID NO: 358225 - DNA, 170 bp, Homo sapiens; identical to SEQ ID NO: 350157
  chr5:125931062-125931232
  hyper

SEQ ID NO: 358226 - DNA, 44 bp, Homo sapiens
  chr5:126626239-126626283
  hyper
cgcgaccaggcctttggcggggtcacccaccaggcggtggaagc

SEQ ID NO: 358227 - DNA, 63 bp, Homo sapiens
  chr5:126626738-126626801
  hyper
ctggacctgggtaagagttgggcaaactcaactccggcggctcctggaccttggccggacgcc

SEQ ID NO: 358228 - DNA, 82 bp, Homo sapiens; identical to SEQ ID NO: 350158
  chr5:127537002-127537084
  hyper

SEQ ID NO: 358229 - DNA, 65 bp, Homo sapiens; identical to SEQ ID NO: 350159
  chr5:127537230-127537295
  hyper

SEQ ID NO: 358230 - DNA, 55 bp, Homo sapiens; identical to SEQ ID NO: 346737
  chr5:129239969-129240024
  hyper

SEQ ID NO: 358231 - DNA, 34 bp, Homo sapiens; identical to SEQ ID NO: 200020
  chr5:129240901-129240935
  hyper

SEQ ID NO: 358232 - DNA, 143 bp, Homo sapiens; identical to SEQ ID NO: 200021
  chr5:129240962-129241105
  hyper

SEQ ID NO: 358233 - DNA, 273 bp, Homo sapiens; identical to SEQ ID NO: 200022
  chr5:129241140-129241413
  hyper

SEQ ID NO: 358234 - DNA, 241 bp, Homo sapiens
  chr5:131831522-131831763
  hyper
cgctgatggccgctgcggagcttcatttcttataaacaccgccgttgggaggaaagagaactcagccccctgtcagtcccatggggccccgaggccgggggaggctcctgggccaggcccagcggccgcgacctggagcggggcttgatgggatcagcactctcctcccccgcgccaatgggtgctgcagaacggcccacgcccactgccgttcgcccggggcgcccctggcaggcttctc

SEQ ID NO: 358235 - DNA, 187 bp, Homo sapiens
  chr5:132072695-132072882
  hyper
cgctccgctgcctccctgcgcttgctccgaggcgcaaaggcctcaccaggtgtgcagcatccaaagagccccaccgtggccacccccagacgccccgctcagcaggaagggctgcgagccagagcgcatcctccagcacagcgcctttttgataagcggcgcaggccccacgggatgcagcagcgac

SEQ ID NO: 358236 - DNA, 217 bp, Homo sapiens; identical to SEQ ID NO: 350164
  chr5:132082800-132083017
  hyper

SEQ ID NO: 358237 - DNA, 805 bp, Homo sapiens; identical to SEQ ID NO: 332483
  chr5:132386973-132387778
  hyper

SEQ ID NO: 358238 - DNA, 873 bp, Homo sapiens; identical to SEQ ID NO: 332486
  chr5:133862738-133863611
  hyper

SEQ ID NO: 358239 - DNA, 36 bp, Homo sapiens; identical to SEQ ID NO: 350167
  chr5:134364991-134365027
  hyper

SEQ ID NO: 358240 - DNA, 169 bp, Homo sapiens; identical to SEQ ID NO: 200034
  chr5:134365094-134365263
  hyper

SEQ ID NO: 358241 - DNA, 185 bp, Homo sapiens; identical to SEQ ID NO: 346740
  chr5:134366533-134366718
  hyper

SEQ ID NO: 358242 - DNA, 124 bp, Homo sapiens; identical to SEQ ID NO: 200036
  chr5:134367305-134367429
  hyper

SEQ ID NO: 358243 - DNA, 172 bp, Homo sapiens
  chr5:134370281-134370453
  hyper
cgcctagaatcaactcccgtctcggccgcctcgaagtccccagccctggcgagaacagcccaggatgagtgaatgtttgccgaacaggatcgcaccgagcgggcgccttcgagccagcgccggggcgggggcagagcccggggcccgttccggcagctcccagcggtgtcct

SEQ ID NO: 358244 - DNA, 38 bp, Homo sapiens
  chr5:134370508-134370546
  hyper
cggctgagtgacagcagcctgcgctctaatgggccccc

SEQ ID NO: 358245 - DNA, 62 bp, Homo sapiens
  chr5:134374385-134374447
  hyper
cgatcccggctttggggccctgcctttgccgcgggagaataggctccaatttacgaagctgg

SEQ ID NO: 358246 - DNA, 84 bp, Homo sapiens; identical to SEQ ID NO: 350171
  chr5:134375851-134375935
  hyper

SEQ ID NO: 358247 - DNA, 219 bp, Homo sapiens; identical to SEQ ID NO: 350172
  chr5:134527185-134527404
  hyper

SEQ ID NO: 358248 - DNA, 70 bp, Homo sapiens; identical to SEQ ID NO: 346742
  chr5:134802366-134802436
  hyper

SEQ ID NO: 358249 - DNA, 226 bp, Homo sapiens; identical to SEQ ID NO: 346743
  chr5:134824599-134824825
  hyper

SEQ ID NO: 358250 - DNA, 45 bp, Homo sapiens; identical to SEQ ID NO: 350175
  chr5:134827217-134827262
  hyper

SEQ ID NO: 358251 - DNA, 89 bp, Homo sapiens
  chr5:134879182-134879271
  hyper
cgagttaaagggggaggaaagcgcctcattttctatgcccccaagggacggaccgagcgggcagcctctaaacaatgtatttatcactt

SEQ ID NO: 358252 - DNA, 73 bp, Homo sapiens; identical to SEQ ID NO: 345194
  chr5:134880614-134880687
  hyper

SEQ ID NO: 358253 - DNA, 68 bp, Homo sapiens
  chr5:137474821-137474889
  hyper
cgagggggcggtagagcgggtggtgggggctcgaggggacggtggctggtgggcaaccacacaccatt

SEQ ID NO: 358254 - DNA, 150 bp, Homo sapiens
  chr5:137474919-137475069
  hyper
gcctctgtgaagcgaccctgtcccgcagggacctctctgtgcatagggtcaggctaattgaaaagcagggcctctaggtccgcggggactttccgggttgcacctgcaaattctgaatttgaccctctctaagtactcacctcagcggcc

SEQ ID NO: 358255 - DNA, 240 bp, Homo sapiens
  chr5:138923037-138923277
  hyper
cgtagatcctggattgcacgtcagtaggcgggctgcagaggaagggcgctgttctggttggtcctggccttaccccgccggagggcgccagctgccccggcgacgacacgggggaccggacggagcctcgggccgccagggaggggcctggctgcagaggcagctttctcactagcgactcgggcctctcaaaaccagcctttaggcatttaaaaagtgatacggttcacgccggtcttc

SEQ ID NO: 358256 - DNA, 201 bp, Homo sapiens; identical to SEQ ID NO: 350177
  chr5:139047738-139047939
  hyper

SEQ ID NO: 358257 - DNA, 469 bp, Homo sapiens; identical to SEQ ID NO: 332510
  chr5:139088846-139089315
  hyper

SEQ ID NO: 358258 - DNA, 335 bp, Homo sapiens; identical to SEQ ID NO: 350178
  chr5:139135589-139135924
  hyper

SEQ ID NO: 358259 - DNA, 63 bp, Homo sapiens; identical to SEQ ID NO: 200064
  chr5:139227938-139228001
  hyper

SEQ ID NO: 358260 - DNA, 601 bp, Homo sapiens; identical to SEQ ID NO: 332514
  chr5:139487921-139488522
  hyper

SEQ ID NO: 358261 - DNA, 276 bp, Homo sapiens; identical to SEQ ID NO: 332516
  chr5:139554306-139554582
  hyper

SEQ ID NO: 358262 - DNA, 248 bp, Homo sapiens
  chr5:139742899-139743147
  hyper
cgccatggttccctcgccggcagagacaagagcagccgctagggggcagggcgccacgagctctggaccgagtcgcagactggttggagatcctcagccaacctggggttcccctcctcctcaggcttccctcgcaacagcgggagatcagaggtcccgccgtcccgcgcctgacctcggctgaggacaggcaccgccatgggccacacgcacacagcccggagttgcagcggaccggcaggtgaggc

SEQ ID NO: 358263 - DNA, 192 bp, Homo sapiens; identical to SEQ ID NO: 350181
  chr5:140011830-140012022
  hyper

SEQ ID NO: 358264 - DNA, 111 bp, Homo sapiens; identical to SEQ ID NO: 350182
  chr5:140012520-140012631
  hyper

SEQ ID NO: 358265 - DNA, 275 bp, Homo sapiens; identical to SEQ ID NO: 350183
  chr5:140346034-140346309
  hyper

SEQ ID NO: 358266 - DNA, 212 bp, Homo sapiens
  chr5:140855386-140855598
  hyper
cgctagcgcgtgtcctgctcagagagcccggcgctagctcattcttcgtgcagttattggctgggactctgtgtgccgctgtcggccaatgaagacgctggagatcgggcccctgcccgtcccctttctgcgccccgggatgaggcagagactgaacagccggcgagcaaatcaacggcatccagaaagccatgtcggactcggcgcccagc

SEQ ID NO: 358267 - DNA, 155 bp, Homo sapiens; identical to SEQ ID NO: 346746
  chr5:141931151-141931306
  hyper

SEQ ID NO: 358268 - DNA, 624 bp, Homo sapiens; identical to SEQ ID NO: 283411
  chr5:142781875-142782499
  hyper

SEQ ID NO: 358269 - DNA, 124 bp, Homo sapiens; identical to SEQ ID NO: 283412
  chr5:142782625-142782749
  hyper

SEQ ID NO: 358270 - DNA, 410 bp, Homo sapiens; identical to SEQ ID NO: 345197
  chr5:142782794-142783204
  hyper

SEQ ID NO: 358271 - DNA, 1069 bp, Homo sapiens; identical to SEQ ID NO: 350188
  chr5:142783606-142784675
  hyper

SEQ ID NO: 358272 - DNA, 32 bp, Homo sapiens; identical to SEQ ID NO: 345199
  chr5:142785272-142785304
  hyper

SEQ ID NO: 358273 - DNA, 184 bp, Homo sapiens
  chr5:148033538-148033722
  hyper
cgtcgtgctgccccgcccccgccgcgtccccaccggcacccgtgggctcctggggtcccgacccccggcgcacttgccgcacatacccgctgccagaggcgagggagcgaggtgccctggcagattcgagcggccacccccagccgctgagccgagcttctgctgccgccgctgccgctgcgct

SEQ ID NO: 358274 - DNA, 110 bp, Homo sapiens; identical to SEQ ID NO: 350190
  chr5:148206075-148206185
  hyper

SEQ ID NO: 358275 - DNA, 36 bp, Homo sapiens; identical to SEQ ID NO: 350191
  chr5:148206432-148206468
  hyper

SEQ ID NO: 358276 - DNA, 126 bp, Homo sapiens; identical to SEQ ID NO: 346752
  chr5:148520933-148521059
  hyper

SEQ ID NO: 358277 - DNA, 45 bp, Homo sapiens; identical to SEQ ID NO: 346753
  chr5:148521331-148521376
  hyper

SEQ ID NO: 358278 - DNA, 252 bp, Homo sapiens; identical to SEQ ID NO: 346754
  chr5:148650971-148651223
  hyper

SEQ ID NO: 358279 - DNA, 87 bp, Homo sapiens; identical to SEQ ID NO: 332540
  chr5:148724812-148724899
  hyper

SEQ ID NO: 358280 - DNA, 103 bp, Homo sapiens
  chr5:149569886-149569989
  hyper
caagatgaagaagctccagggagctcacctccgcaaggtagggcacgagggcgggggcgctgggggtgcacctggaggagggttggagagacccgcccccaac

SEQ ID NO: 358281 - DNA, 101 bp, Homo sapiens; identical to SEQ ID NO: 283446
  chr5:149682691-149682792
  hyper

SEQ ID NO: 358282 - DNA, 434 bp, Homo sapiens; identical to SEQ ID NO: 332544
  chr5:150004280-150004714
  hyper

SEQ ID NO: 358283 - DNA, 316 bp, Homo sapiens
  chr5:150536746-150537062
  hyper
cgcaggcagccctcccccgacaccacacacaagccattttataagcagctggagggtccaacgctcttgctctcagtcttgggcctcagccacacccttctctgcgggtcctttgactggcgtccagctgaccccaaccccggaccttcaaagtctcttgagcccccccaaattaaggccggcaggaccagcccctggctcagctccggcgcccaggaccctcaaccagaccctctgcagcaacgggactccctcccctccccctagccagggcgccctccgcccgcgcctctccgccccgaccccagatttgctc

SEQ ID NO: 358284 - DNA, 494 bp, Homo sapiens
  chr5:150603058-150603552
  hyper
cgagtctgtggaacactcttcgagcagccctgagattatcagcctttaacccccggggggaggaagccgaaggcccagagaggtcaagtcacttgtccatggccacacagcgaacagccccagaccgaaagcagagggcacctgccacagacacacgacatctccccacccgaggcagcgggaatcagctgcctttccctggcccgggtgccgtgtttgtaaactcggctgcttggtgcggctcgggccggggtaaagggcgcctcccagcagagcctccctcgtctctgagctggcctctccaggttctccgtccggtatcccgggccgaccagagagagcccggggcgccgagtcctctgcggcggagcgattccgcactcccctctcctctgaaagcaaacttctccgccggcgccctttacctttttcgggggtttgcagctgctcagcctgctgtgtctgcagcccatcctcctccgggggctcccgga

SEQ ID NO: 358285 - DNA, 163 bp, Homo sapiens
  chr5:150603589-150603752
  hyper
cgatccgggccccgctgcccgctccgcgcccgccggctggggctgccggcgagaccctgaaactgaacctggaagcgctgtcttgagcctgagctggggcggccgcccgccgtaaatacccgaagagcggggcctcagtgtagcccgcagggccagcggcgcc

SEQ ID NO: 358286 - DNA, 98 bp, Homo sapiens; identical to SEQ ID NO: 350197
  chr5:151066500-151066598
  hyper

SEQ ID NO: 358287 - DNA, 293 bp, Homo sapiens; identical to SEQ ID NO: 200114
  chr5:151150270-151150563
  hyper

SEQ ID NO: 358288 - DNA, 229 bp, Homo sapiens; identical to SEQ ID NO: 346758
  chr5:151150681-151150910
  hyper

SEQ ID NO: 358289 - DNA, 173 bp, Homo sapiens; identical to SEQ ID NO: 350200
  chr5:152870319-152870492
  hyper

SEQ ID NO: 358290 - DNA, 226 bp, Homo sapiens
  chr5:153854949-153855175
  hyper
cggcgtcggggcggatcatatggagggacaagagagaaagagccagatagggaaatggagatagggctgaggttctaaattcgctccaaaagggtggaagagtgcgtctttgagcccttgggttcgacagtccctccttcttgcatgttgccgccaagggccgccctcggttgggctgggggtggatatatatatatttctctttctcttaatgtattaaaaaaaa

SEQ ID NO: 358291 - DNA, 94 bp, Homo sapiens; identical to SEQ ID NO: 345201
  chr5:153862577-153862671
  hyper

SEQ ID NO: 358292 - DNA, 159 bp, Homo sapiens; identical to SEQ ID NO: 350202
  chr5:153900641-153900800
  hyper

SEQ ID NO: 358293 - DNA, 255 bp, Homo sapiens; identical to SEQ ID NO: 200123
  chr5:155108849-155109104
  hyper

SEQ ID NO: 358294 - DNA, 240 bp, Homo sapiens; identical to SEQ ID NO: 200124
  chr5:157001858-157002098
  hyper

SEQ ID NO: 358295 - DNA, 243 bp, Homo sapiens; identical to SEQ ID NO: 200125
  chr5:157002204-157002447
  hyper

SEQ ID NO: 358296 - DNA, 290 bp, Homo sapiens; identical to SEQ ID NO: 346761
  chr5:157002817-157003107
  hyper

SEQ ID NO: 358297 - DNA, 239 bp, Homo sapiens; identical to SEQ ID NO: 283484
  chr5:157098032-157098271
  hyper

SEQ ID NO: 358298 - DNA, 205 bp, Homo sapiens
  chr5:157170412-157170617
  hyper
cgcttcctgccagctcaagctaggatgcgatcccgagctcattcccggggaacccagagtattaacaaacaccctaagtgataatgatacagacggggaaactgcgctggagcaggtcaagcagcagtcgacagcgttaacctgtcagctatgggaggaggcggtgcgaggcgcgggctggtcggagccgcgtaccacgcccccc

SEQ ID NO: 358299 - DNA, 1199 bp, Homo sapiens; identical to SEQ ID NO: 350208
  chr5:158634816-158636015
  hyper

SEQ ID NO: 358300 - DNA, 172 bp, Homo sapiens; identical to SEQ ID NO: 350209
  chr5:159343215-159343387
  hyper

SEQ ID NO: 358301 - DNA, 152 bp, Homo sapiens; identical to SEQ ID NO: 350210
  chr5:159343648-159343800
  hyper

SEQ ID NO: 358302 - DNA, 42 bp, Homo sapiens; identical to SEQ ID NO: 350211
  chr5:159399024-159399066
  hyper

SEQ ID NO: 358303 - DNA, 231 bp, Homo sapiens
  chr5:159414348-159414579
  hyper
cggcgtctccagcagagcgcagcaaagaagacgaagcctcctggggcctttcctcgccgcctggagcggggcatccttcctccttacgtgcagagactgggaagcagctctttagacactgcagtgaccgagcccgctccacgcccctttcccctgagcaggtgcttgacgtggggcaagctcggcgttgaggtggacccgcgcgccacccgctggccaacgcgcctaagc

SEQ ID NO: 358304 - DNA, 335 bp, Homo sapiens; identical to SEQ ID NO: 350212
  chr5:160973804-160974139
  hyper

SEQ ID NO: 358305 - DNA, 72 bp, Homo sapiens; identical to SEQ ID NO: 283509
  chr5:160974540-160974612
  hyper

SEQ ID NO: 358306 - DNA, 210 bp, Homo sapiens; identical to SEQ ID NO: 283510
  chr5:160974861-160975071
  hyper

SEQ ID NO: 358307 - DNA, 96 bp, Homo sapiens
  chr5:168727259-168727355
  hyper
cgggccctgcgtctggaaccctcacccctggagaggcactgctctttgcccatcgctgggggtttcgagacctctctttccagatctgaccaagcc

SEQ ID NO: 358308 - DNA, 226 bp, Homo sapiens; identical to SEQ ID NO: 283530
  chr5:169930945-169931171
  hyper

SEQ ID NO: 358309 - DNA, 243 bp, Homo sapiens; identical to SEQ ID NO: 283532
  chr5:170171140-170171383
  hyper

SEQ ID NO: 358310 - DNA, 388 bp, Homo sapiens; identical to SEQ ID NO: 350214
  chr5:170171413-170171801
  hyper

SEQ ID NO: 358311 - DNA, 152 bp, Homo sapiens
  chr5:172656561-172656713
  hyper
gggggtcgccatgtaaacacggggtgttgttactttaggatacttctgaccctgtcccggcctgagtcctcgctccctgactcagcatccacgcaggaaagcctcgccccagccaggcaagggcagtccctgccggctccttgagttctgcc

SEQ ID NO: 358312 - DNA, 181 bp, Homo sapiens; identical to SEQ ID NO: 350215
  chr5:172660254-172660435
  hyper

SEQ ID NO: 358313 - DNA, 342 bp, Homo sapiens; identical to SEQ ID NO: 283559
  chr5:172663868-172664210
  hyper

SEQ ID NO: 358314 - DNA, 142 bp, Homo sapiens
  chr5:172665306-172665448
  hyper
cgagcgcattctccgtgaataaattattattaattgaaaagcgatcggcgcagccggagccggcccccctttcgtgcaatcagcagggctggtcgcaaaaggtatatatgattaattgaaagataagctggaactatcaccg

SEQ ID NO: 358315 - DNA, 297 bp, Homo sapiens
  chr5:172665949-172666246
  hyper
cggatttttcctgcctcgggactcgcctcattcaggtggctcagctggcaccaaatccttctcatttccacgcttgttcagtgcccacggggtgtgccaggcgctctcacggatctcgtcacggatcctcttattccgactgcaggcctgaggagaatgaggttcagagacgtggagtaagttgctcagggtcacacagatgggaaaggacagtgtcagggtgttaggattcgaacacacagctgactgcacagctgagactgttttcttttattacacgtcgctgcgcccaagacc

SEQ ID NO: 358316 - DNA, 162 bp, Homo sapiens
  chr5:172756215-172756377
  hyper
cgccgcggagcatcgcgtgcccggaggccagagcttgaaaggcaactttacgcgtctccaaacacactcctgcattttctcaaagcgctgctcgccaccccgctccgggttcccttttactctccagtcatccgatggaagtggtgagaacaaaaacaaaga

SEQ ID NO: 358317 - DNA, 475 bp, Homo sapiens
  chr5:174119512-174119987
  hyper
cgtgtcctcctgtgcagacgaggaaactgagtcacacgagaggaagcaattgctgatagttcacagttgccacgccctcctcatgcctttacagacatcccaggcctttgatcaaactagggagaggttagaagaaaggcgagacgggcctcagaagaatttggatctgttgaaaaaggattttaggacaagaacgaaacaagacgcgttttcatgggaacgcaaacccagtaacttctcagagccagggcttcgcagagaaactgcatcaaaaggaaaagagtctggtcccaacctttatttctcccaaggcatgaaactcctgatttcaaaccacttctctttgcctctgaaagaaaacaagaaaaagatggggctgtgtagttcttccaacagtgaaaaaaagaaagaaaagagagaagaagaaaactgtttcgggtttcgaaacagaaagggcctccttcccctttatcga

SEQ ID NO: 358318 - DNA, 233 bp, Homo sapiens; identical to SEQ ID NO: 200172
  chr5:174120134-174120367
  hyper

SEQ ID NO: 358319 - DNA, 175 bp, Homo sapiens; identical to SEQ ID NO: 350219
  chr5:174120406-174120581
  hyper

SEQ ID NO: 358320 - DNA, 305 bp, Homo sapiens
  chr5:174148214-174148519
  hyper
cgaagcccaggcccgtctacagcccccttcgctgcccctcccccgcccccttctagccgctggggttacaaactagccttcggccctcggggttacaaacgctgcgttctgcgcgcagtgctccacagtttgcaaggagtgttttctccttgggactcgcagcgcgcgtacgcggttgcttcaagaaggggcctggcgggtgtaacgcgccccggggagcgcgggaaggtgcagggttgaggatctacgctcagaggcctcagccgcgcgggagggattcctgtgtctcccacttctacctgcgc

SEQ ID NO: 358321 - DNA, 414 bp, Homo sapiens; identical to SEQ ID NO: 350220
  chr5:174150711-174151125
  hyper

SEQ ID NO: 358322 - DNA, 246 bp, Homo sapiens; identical to SEQ ID NO: 283578
  chr5:174151197-174151443
  hyper

SEQ ID NO: 358323 - DNA, 999 bp, Homo sapiens
  chr5:174151769-174152768
  hyper
ggagcgccgcgtcaaggtctccagcctgcccttcagcgtggaggcgctcatgtccgacaagaagccgcccaaggaggcgtccccgctgccggccgaaagcgcctcggccggggccaccctgcggccactgctgctgtcggggcacggcgctcgggaagcgcacagccccgggccgctggtgaagcccttcgagaccgcctcggtcaagtcggaaaattcagaagatggagcggcgtggatgcaggaacccggccgatattcgccgccgccaagtgagtgcgcgccggggcaggagtaggaggtagcgcggggtactggagggagcggggggcgggtgttccagggctgagggtaccgagacccttctgcgtgcgctacactcccgggaaagcaagcccagggcctctggactcctgggtgcccggggcgttcggcgcgcccagtgcgccgtccgcatccaagacaccctctgggtaataaccgcgctgtgtgtgtctgagactccctcgacatacagattgttttttcaagagcgaaccccagctgggtttacggggtcgctcggtggtccgtttctacagccctcggccctgcgctctggccacttggcttgtttttgtttcactgttccccggagtctctgcctggggagtgaaggagttggatccatgttcagtgagcacttggatgtaccaggaacgagacaggttcaaaactcaaccctgagagttgtgcccccattttaaagatgagctaactgggcttagccagacattgaggagaaaccattttctttcgtgagtcccgcgggtgtcgaagccggatcccacgaagggatggtggcaccagggatggtggcatcagagtctggtgcggggaggaaatgtctctctgtggtctccgcagccagcacctccccggcaaggttctgagcttcgccgggagcgggctggggccagaagcgcacgggctcttcttggctcacagtaataattaacc

SEQ ID NO: 358324 - DNA, 92 bp, Homo sapiens; identical to SEQ ID NO: 200177
  chr5:174162402-174162494
  hyper

SEQ ID NO: 358325 - DNA, 87 bp, Homo sapiens; identical to SEQ ID NO: 350223
  chr5:174162904-174162991
  hyper

SEQ ID NO: 358326 - DNA, 65 bp, Homo sapiens; identical to SEQ ID NO: 350224
  chr5:174178103-174178168
  hyper

SEQ ID NO: 358327 - DNA, 383 bp, Homo sapiens; identical to SEQ ID NO: 283585
  chr5:174178248-174178631
  hyper

SEQ ID NO: 358328 - DNA, 78 bp, Homo sapiens
  chr5:174220739-174220817
  hyper
cggcggctcctcctcgcagaaaccctccgcagtcccctaccccagaaaggtttcccttccctccccttcccgcaggcc

SEQ ID NO: 358329 - DNA, 46 bp, Homo sapiens
  chr5:174221001-174221047
  hyper
ctataaaagagaagtttgaggctcgtggggtgggggacgggggcac

SEQ ID NO: 358330 - DNA, 241 bp, Homo sapiens; identical to SEQ ID NO: 332600
  chr5:175969793-175970034
  hyper

SEQ ID NO: 358331 - DNA, 59 bp, Homo sapiens
  chr5:176038454-176038513
  hyper
cgtgggactggcgtctccaggcagcacgccaggcaaggagaaaacctcagcgtgtcgga

SEQ ID NO: 358332 - DNA, 209 bp, Homo sapiens; identical to SEQ ID NO: 200186
  chr5:176057164-176057373
  hyper

SEQ ID NO: 358333 - DNA, 159 bp, Homo sapiens; identical to SEQ ID NO: 332604
  chr5:176239899-176240058
  hyper

SEQ ID NO: 358334 - DNA, 248 bp, Homo sapiens; identical to SEQ ID NO: 283604
  chr5:176560001-176560249
  hyper

SEQ ID NO: 358335 - DNA, 290 bp, Homo sapiens; identical to SEQ ID NO: 345203
  chr5:176560318-176560608
  hyper

SEQ ID NO: 358336 - DNA, 93 bp, Homo sapiens
  chr5:177543589-177543682
  hyper
cgtgaccgtctgcaccgtgtcctctaacatgggctctctgtgctgctgggtggggctgacatgtggcacaccgtggcgtgtgtggttgtatgc

SEQ ID NO: 358337 - DNA, 116 bp, Homo sapiens; identical to SEQ ID NO: 350228
  chr5:178016455-178016571
  hyper

SEQ ID NO: 358338 - DNA, 184 bp, Homo sapiens
  chr5:178594471-178594655
  hyper
ttgctctggaaggagctgaattatctatgctcttccctccttcagtcaaggagacgtgggaggaaaccgggatggggatcagcagcctggaggccgcctccgctggaaccgcgcccgccccgccaggaggctctgcctgctgggcaaggcgcactcagccagccccgcaggccgccacgcgacc

SEQ ID NO: 358339 - DNA, 288 bp, Homo sapiens; identical to SEQ ID NO: 350229
  chr5:178770455-178770743
  hyper

SEQ ID NO: 358340 - DNA, 66 bp, Homo sapiens
  chr5:179244342-179244408
  hyper
cccccttttccccactccgcggttgacgagggccgcccccaagtggccatgtcccccggcatggac

SEQ ID NO: 358341 - DNA, 727 bp, Homo sapiens; identical to SEQ ID NO: 332613
  chr5:179245848-179246575
  hyper

SEQ ID NO: 358342 - DNA, 243 bp, Homo sapiens; identical to SEQ ID NO: 350231
  chr5:179498011-179498254
  hyper

SEQ ID NO: 358343 - DNA, 504 bp, Homo sapiens; identical to SEQ ID NO: 200203
  chr5:179498363-179498867
  hyper

SEQ ID NO: 358344 - DNA, 329 bp, Homo sapiens; identical to SEQ ID NO: 200204
  chr5:179498897-179499226
  hyper

SEQ ID NO: 358345 - DNA, 81 bp, Homo sapiens; identical to SEQ ID NO: 350234
  chr5:179499256-179499337
  hyper

SEQ ID NO: 358346 - DNA, 196 bp, Homo sapiens
  chr5:179779452-179779648
  hyper
cgctccgggccgcggccgccctccccacggtcccgcagccacgcgggacagcgcgggagcgccgcgggaatcggacgcccggccccgctccccgccccggactccctctcgtggcttcgggccgaggttcgggcagtgactgcctcttccccgcgcaaagaggcggtaacgcggcagcgacccttctagggaccag

SEQ ID NO: 358347 - DNA, 127 bp, Homo sapiens; identical to SEQ ID NO: 350235
  chr5:180018679-180018806
  hyper

SEQ ID NO: 358348 - DNA, 365 bp, Homo sapiens
  chr5:180046947-180047312
  hyper
aggtgtgacagatacaccctgctcagggtggcagcaggtgacctcagggagcctgggaactggggaccctggctgaggttctaggtacccacgcccacagggacaggtcaggccaggcggaacttcctggtgcaagttttgaaaatggagggattcaggcactccggcctgcagcaggtgggtcgggcaggaggtgtgggttgggcaggctggtgctggcctcacccaggtgcagccgctctcgggggaattcccactggctggcatcgtaggacaggtattcgcattgctcctccagaggcacctccccggggtccatgatgatggacaggtagcccgtcttgatgtctgcgtgggccggctgc

SEQ ID NO: 358349 - DNA, 561 bp, Homo sapiens; identical to SEQ ID NO: 332620
  chr5:180257880-180258441
  hyper

SEQ ID NO: 358350 - DNA, 457 bp, Homo sapiens; identical to SEQ ID NO: 332621
  chr5:180258503-180258960
  hyper

SEQ ID NO: 358351 - DNA, 594 bp, Homo sapiens; identical to SEQ ID NO: 350238
  chr5:180479644-180480238
  hyper

SEQ ID NO: 358352 - DNA, 829 bp, Homo sapiens; identical to SEQ ID NO: 346765
  chr5:180480302-180481131
  hyper

SEQ ID NO: 358353 - DNA, 607 bp, Homo sapiens
  chr5:180630981-180631588
  hyper
cgcccgagcctccccgccccgccctcacccctgcacacaccctcgctgaggctcagcgagaaaatagcaaagaaagggcccccagaatcgacagcgttggcacagtcagacggctctaggtgcgcggcttaacccgggagccccctccctggacatcttggcgaggtcctctcactcagttccacgaggtggggactttgagcagagcccgcttcggggaaagagataagagtgggggcagcggctgcgtggctgtgccggagacttcccgcgggcagagagctgcggagacgcagaccaggctagaggctccgaacagacaggaagaacatcgccaagtccgtgggggacgtcgcgcaggcggcccagtatctggcccagagggaaacgcagtgggggtggggtgggggtattggtgatgttgggggtgacagagaaccgcgctcagcccgggaaccagcgctgggcttcctggaatggagaaagaagggaggggctcacccgggcctcctgatcgacaggctgttctctgcaccccgtgcgcgggagcgcgggaccaagtcagggggtcccggggacccacggggtgggtgggggctgcgctcac

SEQ ID NO: 358354 - DNA, 63 bp, Homo sapiens
  chr5:180632796-180632859
  hyper
cgctctcttgtcccccagctgtctccacagccccgcagcagagctgcctgtgttatccgcttc

SEQ ID NO: 358355 - DNA, 244 bp, Homo sapiens
  chr5:180633225-180633469
  hyper
gtcgtctcttagcgcgctcccttctcagggccggctctgtgcccgcactctatctcctctggaatgtcagctttcagatggactgtactaggtttgttcacggctgaatcctgtttttagagcagttcttggcaagctcagtaaggttttcttggattaaacttggttcgaaattcaaaagaggagccgcagttcacggtggaaagtaggcccatcgcctgtgtcccagtcctttcttcctccc

SEQ ID NO: 358356 - DNA, 60 bp, Homo sapiens; identical to SEQ ID NO: 345204
  chr6:391113-391173
  hyper

SEQ ID NO: 358357 - DNA, 55 bp, Homo sapiens; identical to SEQ ID NO: 346767
  chr6:393764-393819
  hyper

SEQ ID NO: 358358 - DNA, 393 bp, Homo sapiens; identical to SEQ ID NO: 346768
  chr6:710660-711053
  hyper

SEQ ID NO: 358359 - DNA, 141 bp, Homo sapiens; identical to SEQ ID NO: 346769
  chr6:711310-711451
  hyper

SEQ ID NO: 358360 - DNA, 274 bp, Homo sapiens; identical to SEQ ID NO: 350244
  chr6:1311068-1311342
  hyper

SEQ ID NO: 358361 - DNA, 428 bp, Homo sapiens; identical to SEQ ID NO: 200222
  chr6:1311343-1311771
  hyper

SEQ ID NO: 358362 - DNA, 223 bp, Homo sapiens; identical to SEQ ID NO: 200223
  chr6:1312096-1312319
  hyper

SEQ ID NO: 358363 - DNA, 46 bp, Homo sapiens; identical to SEQ ID NO: 200224
  chr6:1312708-1312754
  hyper

SEQ ID NO: 358364 - DNA, 483 bp, Homo sapiens; identical to SEQ ID NO: 200225
  chr6:1312784-1313267
  hyper

SEQ ID NO: 358365 - DNA, 602 bp, Homo sapiens; identical to SEQ ID NO: 200226
  chr6:1313302-1313904
  hyper

SEQ ID NO: 358366 - DNA, 85 bp, Homo sapiens; identical to SEQ ID NO: 350250
  chr6:1381781-1381866
  hyper

SEQ ID NO: 358367 - DNA, 61 bp, Homo sapiens; identical to SEQ ID NO: 350251
  chr6:1382651-1382712
  hyper

SEQ ID NO: 358368 - DNA, 65 bp, Homo sapiens; identical to SEQ ID NO: 350252
  chr6:1524429-1524494
  hyper

SEQ ID NO: 358369 - DNA, 165 bp, Homo sapiens; identical to SEQ ID NO: 200236
  chr6:1624812-1624977
  hyper

SEQ ID NO: 358370 - DNA, 51 bp, Homo sapiens; identical to SEQ ID NO: 200237
  chr6:1625068-1625119
  hyper

SEQ ID NO: 358371 - DNA, 123 bp, Homo sapiens; identical to SEQ ID NO: 345205
  chr6:2841503-2841626
  hyper

SEQ ID NO: 358372 - DNA, 732 bp, Homo sapiens; identical to SEQ ID NO: 345206
  chr6:2841627-2842359
  hyper

SEQ ID NO: 358373 - DNA, 156 bp, Homo sapiens; identical to SEQ ID NO: 200240
  chr6:2903557-2903713
  hyper

SEQ ID NO: 358374 - DNA, 559 bp, Homo sapiens
  chr6:3229632-3230191
  hyper
agggcgcccagactggagctcgccggccggtattccagacccggccggcgtgcccgggtgagggtggggtctaccgagaggcagagagcagcggagggtctgtccacatgccctgctctcccggtaccaaggtctcggggcctgacctccgagtttctaatccagatcctgcagatgccgaaacgtcgagggctagcaattcccaaggtcatacagcaagttgaggacagggctcggactggaatctcgtcttttgggcacaccagacctcagggaaagtgaccgcatctcggccaaaagggctgtggcaggtgtcagcctcgaggtggcggctctggtgggaccaagctgcgccggaaggaacagagctagggcggcacccgcgcggcgagtgtagacacactcggagcggtcaccccctcgctgcgagctcccaggagcaaccctgatgctcagcgctggggggtggggttgggggccgctcagctccatgctgagtaacttgagctggccgcctgcctccttcatctaaccaattcatttctcagcttctgtttcc

SEQ ID NO: 358375 - DNA, 72 bp, Homo sapiens; identical to SEQ ID NO: 200244
  chr6:3231938-3232010
  hyper

SEQ ID NO: 358376 - DNA, 70 bp, Homo sapiens; identical to SEQ ID NO: 350259
  chr6:3232260-3232330
  hyper

SEQ ID NO: 358377 - DNA, 684 bp, Homo sapiens; identical to SEQ ID NO: 332639
  chr6:3457545-3458229
  hyper

SEQ ID NO: 358378 - DNA, 699 bp, Homo sapiens; identical to SEQ ID NO: 332640
  chr6:3750702-3751401
  hyper

SEQ ID NO: 358379 - DNA, 478 bp, Homo sapiens; identical to SEQ ID NO: 283717
  chr6:4135305-4135783
  hyper

SEQ ID NO: 358380 - DNA, 95 bp, Homo sapiens; identical to SEQ ID NO: 200248
  chr6:4775543-4775638
  hyper

SEQ ID NO: 358381 - DNA, 358 bp, Homo sapiens; identical to SEQ ID NO: 200249
  chr6:4775639-4775997
  hyper

SEQ ID NO: 358382 - DNA, 76 bp, Homo sapiens
  chr6:4776187-4776263
  hyper
cgcatggttccctgccccatctcgggtccgtcgctgcccgtcctggtgtgcacaaccgcgctgcgcctcgaacctc

SEQ ID NO: 358383 - DNA, 465 bp, Homo sapiens; identical to SEQ ID NO: 332643
  chr6:4948996-4949461
  hyper

SEQ ID NO: 358384 - DNA, 229 bp, Homo sapiens; identical to SEQ ID NO: 346774
  chr6:5084683-5084912
  hyper

SEQ ID NO: 358385 - DNA, 695 bp, Homo sapiens; identical to SEQ ID NO: 283724
  chr6:5084942-5085637
  hyper

SEQ ID NO: 358386 - DNA, 115 bp, Homo sapiens; identical to SEQ ID NO: 200254
  chr6:5997274-5997389
  hyper

SEQ ID NO: 358387 - DNA, 112 bp, Homo sapiens; identical to SEQ ID NO: 200255
  chr6:5997401-5997513
  hyper

SEQ ID NO: 358388 - DNA, 162 bp, Homo sapiens
  chr6:5997899-5998061
  hyper
gggctccggcccgcctgaggcgggggcagacggccggccactggcattgtctgcctgtgcgagcaagcccagttcctctaaatctcaaacagaaagaatctctgctttgtaattaatttaaaaacaactttcattttctcttttttaaggaagcacggtttc

SEQ ID NO: 358389 - DNA, 80 bp, Homo sapiens; identical to SEQ ID NO: 350268
  chr6:6009552-6009632
  hyper

SEQ ID NO: 358390 - DNA, 119 bp, Homo sapiens; identical to SEQ ID NO: 350269
  chr6:6546401-6546520
  hyper

SEQ ID NO: 358391 - DNA, 90 bp, Homo sapiens; identical to SEQ ID NO: 350270
  chr6:6547222-6547312
  hyper

SEQ ID NO: 358392 - DNA, 189 bp, Homo sapiens; identical to SEQ ID NO: 350271
  chr6:7726066-7726255
  hyper

SEQ ID NO: 358393 - DNA, 143 bp, Homo sapiens; identical to SEQ ID NO: 350272
  chr6:10383584-10383727
  hyper

SEQ ID NO: 358394 - DNA, 85 bp, Homo sapiens; identical to SEQ ID NO: 350273
  chr6:10384074-10384159
  hyper

SEQ ID NO: 358395 - DNA, 148 bp, Homo sapiens
  chr6:10392129-10392277
  hyper
cgtgtgtttaggtttgttactggaatttaaaggacgcgatctttattgccatagaaaaatcacgtgcagcaaaagcatagcatgggttgggtcactttttaaagctcccgccctgctgatgaaaatattcccgcccccttaaatgggc

SEQ ID NO: 358396 - DNA, 179 bp, Homo sapiens
  chr6:10409954-10410133
  hyper
cgcaactactttgtgtggttcctcaaaacgtccctcactctccgcctccgaataaaatgtttttataaggaaatactagggagaacccgggcccaccgactgtatgttccaggtatcctttctggggtaggtaagtagggggctgtgttccctcccgcgctggttgcgcggcctcttac

SEQ ID NO: 358397 - DNA, 202 bp, Homo sapiens; identical to SEQ ID NO: 200266
  chr6:10410242-10410444
  hyper

SEQ ID NO: 358398 - DNA, 305 bp, Homo sapiens; identical to SEQ ID NO: 200267
  chr6:10410948-10411253
  hyper

SEQ ID NO: 358399 - DNA, 341 bp, Homo sapiens
  chr6:10412036-10412377
  hyper
cttcagctggtcgaacccacggtctctatcctgccgcgactggttatgattcaaagttctttaaaaatgaaaaaccccaaaaaaggaaaaaggaaaaagtatgtgtgagtgtgtgggtgcgtgcgtgttccttaatccgtgtctccccctcttttcttagcggcggcttcgcttgagcttctaataaccgcgctgggcagcgttcctggagcctcctaatagcagatattcatgactattaatattacacgaatacttaataagggaagaatgcctggaaatcgagcgtgaagcggagaggcaactcgcgccggagccggctctcaatgcagtccattgac

SEQ ID NO: 358400 - DNA, 60 bp, Homo sapiens; identical to SEQ ID NO: 200271
  chr6:10415329-10415389
  hyper

SEQ ID NO: 358401 - DNA, 282 bp, Homo sapiens; identical to SEQ ID NO: 283756
  chr6:10415836-10416118
  hyper

SEQ ID NO: 358402 - DNA, 227 bp, Homo sapiens; identical to SEQ ID NO: 345207
  chr6:10417842-10418069
  hyper

SEQ ID NO: 358403 - DNA, 137 bp, Homo sapiens; identical to SEQ ID NO: 350277
  chr6:10418940-10419077
  hyper

SEQ ID NO: 358404 - DNA, 94 bp, Homo sapiens; identical to SEQ ID NO: 350278
  chr6:10420268-10420362
  hyper

SEQ ID NO: 358405 - DNA, 142 bp, Homo sapiens; identical to SEQ ID NO: 350279
  chr6:10423471-10423613
  hyper

SEQ ID NO: 358406 - DNA, 214 bp, Homo sapiens; identical to SEQ ID NO: 200278
  chr6:10423704-10423918
  hyper

SEQ ID NO: 358407 - DNA, 318 bp, Homo sapiens; identical to SEQ ID NO: 350281
  chr6:10424087-10424405
  hyper

SEQ ID NO: 358408 - DNA, 77 bp, Homo sapiens; identical to SEQ ID NO: 346777
  chr6:11043624-11043701
  hyper

SEQ ID NO: 358409 - DNA, 66 bp, Homo sapiens; identical to SEQ ID NO: 350283
  chr6:13013504-13013570
  hyper

SEQ ID NO: 358410 - DNA, 391 bp, Homo sapiens; identical to SEQ ID NO: 350284
  chr6:13014076-13014467
  hyper

SEQ ID NO: 358411 - DNA, 446 bp, Homo sapiens
  chr6:17101827-17102273
  hyper
cgtgttggtttctgttcgtgcgaccgtctttctgaggtcgcttttgtgccactgccttctggtgctgtcggggccgcctccacaccgtcctccggccctcaacagccgtctctgcgactggacacctgcctcgcatgccacacgatcaccttcactacagacagtgtctaaaaacaaggatgtggtccaggcaccaggggtaggggcgtgtcacacacaccgtgtcttacaaagaggaaaaataagaggttcccgcaagatgcttgcgactctggtacttttcaaagtaacgcagccaggcagcgggctttcccccggcccctcgctctggatagggctgccatttgcatcctagctgtgatttagacacctccaaccttctagttttcagttacaagagtcccatctccgcccaggtcccaggtctgcatgacgtaatttattgt

SEQ ID NO: 358412 - DNA, 192 bp, Homo sapiens
  chr6:17102346-17102538
  hyper
gcgggtggcgcccgagcgcagtagcaggggcgtagggcgcagggcgcaggagcgcgggaccaccggcgccggagcgcggcagggagcgctcgcgggggcgcacagcagccaagcccgcggaggaggagcgcgcgcgcgcagcatgggctgtggaccttcccaacctgctgaagaccggagacgtgtacgcgc

SEQ ID NO: 358413 - DNA, 564 bp, Homo sapiens; identical to SEQ ID NO: 200295
  chr6:17281534-17282098
  hyper

SEQ ID NO: 358414 - DNA, 181 bp, Homo sapiens; identical to SEQ ID NO: 350286
  chr6:17282217-17282398
  hyper

SEQ ID NO: 358415 - DNA, 1440 bp, Homo sapiens; identical to SEQ ID NO: 332674
  chr6:18263786-18265226
  hyper

SEQ ID NO: 358416 - DNA, 615 bp, Homo sapiens; identical to SEQ ID NO: 332675
  chr6:19804685-19805300
  hyper

SEQ ID NO: 358417 - DNA, 95 bp, Homo sapiens
  chr6:21664624-21664719
  hyper
cggaacgggacgcgcaggaacccggcccgacgggcgcggctcacacccgtgctcttcctgcgctctcggcctcactttgcggccagagccgcggc

SEQ ID NO: 358418 - DNA, 174 bp, Homo sapiens; identical to SEQ ID NO: 200310
  chr6:21664749-21664923
  hyper

SEQ ID NO: 358419 - DNA, 431 bp, Homo sapiens; identical to SEQ ID NO: 200311
  chr6:21665191-21665622
  hyper

SEQ ID NO: 358420 - DNA, 268 bp, Homo sapiens; identical to SEQ ID NO: 200312
  chr6:21666189-21666457
  hyper

SEQ ID NO: 358421 - DNA, 351 bp, Homo sapiens; identical to SEQ ID NO: 200313
  chr6:21666588-21666939
  hyper

SEQ ID NO: 358422 - DNA, 873 bp, Homo sapiens; identical to SEQ ID NO: 345210
  chr6:24910930-24911803
  hyper

SEQ ID NO: 358423 - DNA, 201 bp, Homo sapiens; identical to SEQ ID NO: 200321
  chr6:26087985-26088186
  hyper

SEQ ID NO: 358424 - DNA, 327 bp, Homo sapiens; identical to SEQ ID NO: 350294
  chr6:26197520-26197847
  hyper

SEQ ID NO: 358425 - DNA, 86 bp, Homo sapiens; identical to SEQ ID NO: 350295
  chr6:26198488-26198574
  hyper

SEQ ID NO: 358426 - DNA, 213 bp, Homo sapiens; identical to SEQ ID NO: 200330
  chr6:26198924-26199137
  hyper

SEQ ID NO: 358427 - DNA, 367 bp, Homo sapiens; identical to SEQ ID NO: 283855
  chr6:26204318-26204685
  hyper

SEQ ID NO: 358428 - DNA, 204 bp, Homo sapiens; identical to SEQ ID NO: 200332
  chr6:26205298-26205502
  hyper

SEQ ID NO: 358429 - DNA, 55 bp, Homo sapiens; identical to SEQ ID NO: 345214
  chr6:26205712-26205767
  hyper

SEQ ID NO: 358430 - DNA, 42 bp, Homo sapiens; identical to SEQ ID NO: 332688
  chr6:26206006-26206048
  hyper

SEQ ID NO: 358431 - DNA, 171 bp, Homo sapiens; identical to SEQ ID NO: 350301
  chr6:26215876-26216047
  hyper

SEQ ID NO: 358432 - DNA, 223 bp, Homo sapiens; identical to SEQ ID NO: 200335
  chr6:26216853-26217076
  hyper

SEQ ID NO: 358433 - DNA, 209 bp, Homo sapiens; identical to SEQ ID NO: 200336
  chr6:26217156-26217365
  hyper

SEQ ID NO: 358434 - DNA, 312 bp, Homo sapiens; identical to SEQ ID NO: 345216
  chr6:26217578-26217890
  hyper

SEQ ID NO: 358435 - DNA, 114 bp, Homo sapiens; identical to SEQ ID NO: 345217
  chr6:26233864-26233978
  hyper

SEQ ID NO: 358436 - DNA, 125 bp, Homo sapiens; identical to SEQ ID NO: 283866
  chr6:26241269-26241394
  hyper

SEQ ID NO: 358437 - DNA, 113 bp, Homo sapiens; identical to SEQ ID NO: 346790
  chr6:26250001-26250114
  hyper

SEQ ID NO: 358438 - DNA, 129 bp, Homo sapiens; identical to SEQ ID NO: 345218
  chr6:26271217-26271346
  hyper

SEQ ID NO: 358439 - DNA, 326 bp, Homo sapiens; identical to SEQ ID NO: 283871
  chr6:26272105-26272431
  hyper

SEQ ID NO: 358440 - DNA, 227 bp, Homo sapiens; identical to SEQ ID NO: 200345
  chr6:26272853-26273080
  hyper

SEQ ID NO: 358441 - DNA, 352 bp, Homo sapiens; identical to SEQ ID NO: 350311
  chr6:26313163-26313515
  hyper

SEQ ID NO: 358442 - DNA, 345 bp, Homo sapiens; identical to SEQ ID NO: 350312
  chr6:26313545-26313890
  hyper

SEQ ID NO: 358443 - DNA, 205 bp, Homo sapiens; identical to SEQ ID NO: 200346
  chr6:26322363-26322568
  hyper

SEQ ID NO: 358444 - DNA, 124 bp, Homo sapiens; identical to SEQ ID NO: 332704
  chr6:26330521-26330645
  hyper

SEQ ID NO: 358445 - DNA, 70 bp, Homo sapiens; identical to SEQ ID NO: 345220
  chr6:26331633-26331703
  hyper

SEQ ID NO: 358446 - DNA, 323 bp, Homo sapiens; identical to SEQ ID NO: 200349
  chr6:26331811-26332134
  hyper

SEQ ID NO: 358447 - DNA, 243 bp, Homo sapiens; identical to SEQ ID NO: 345222
  chr6:26332283-26332526
  hyper

SEQ ID NO: 358448 - DNA, 278 bp, Homo sapiens; identical to SEQ ID NO: 345223
  chr6:26522013-26522291
  hyper

SEQ ID NO: 358449 - DNA, 67 bp, Homo sapiens
  chr6:26555496-26555563
  hyper
cggctcgttggtctaggggtatgattctcgcttagggtgcgagaggtcccgggttcaaatcccggac

SEQ ID NO: 358450 - DNA, 247 bp, Homo sapiens; identical to SEQ ID NO: 200355
  chr6:26577475-26577722
  hyper

SEQ ID NO: 358451 - DNA, 188 bp, Homo sapiens; identical to SEQ ID NO: 350320
  chr6:26987779-26987967
  hyper

SEQ ID NO: 358452 - DNA, 139 bp, Homo sapiens; identical to SEQ ID NO: 350321
  chr6:27059547-27059686
  hyper

SEQ ID NO: 358453 - DNA, 43 bp, Homo sapiens; identical to SEQ ID NO: 350322
  chr6:27059899-27059942
  hyper

SEQ ID NO: 358454 - DNA, 60 bp, Homo sapiens; identical to SEQ ID NO: 200363
  chr6:27100389-27100449
  hyper

SEQ ID NO: 358455 - DNA, 60 bp, Homo sapiens; identical to SEQ ID NO: 200364
  chr6:27101049-27101109
  hyper

SEQ ID NO: 358456 - DNA, 87 bp, Homo sapiens; identical to SEQ ID NO: 345226
  chr6:27101206-27101293
  hyper

SEQ ID NO: 358457 - DNA, 139 bp, Homo sapiens; identical to SEQ ID NO: 350326
  chr6:27125333-27125472
  hyper

SEQ ID NO: 358458 - DNA, 84 bp, Homo sapiens; identical to SEQ ID NO: 350327
  chr6:27125473-27125557
  hyper

SEQ ID NO: 358459 - DNA, 51 bp, Homo sapiens; identical to SEQ ID NO: 200369
  chr6:27173864-27173915
  hyper

SEQ ID NO: 358460 - DNA, 360 bp, Homo sapiens
  chr6:27218591-27218951
  hyper
cgactcctccgggtgggctggggggagggaactcggactccagggccccagtctcagataataggaataccctcccaccacgcccctaccttcctcccgcgcccaaagaattttgcacaagctgtcctcacaagagcccgagattacacagcgagtaagtgacacagaggcagaaagatatgcgattccaacccctcagcccgcaggctgacggcgtctcctcccttagttcccccatctcattttcgcgtcggtcgcctcctccgccccggtgcgggccgtgctggatttctccgagtataatgacgtaaggatggcgggcagcaggtgcgggacggggaggggtcccagcgggcggag

SEQ ID NO: 358461 - DNA, 447 bp, Homo sapiens
  chr6:27218980-27219427
  hyper
gcggtccgcccacaggtggtatcccgaagcctaatgagcaccgcgatcggcgggtccctggaggtaggaggtggggcctagtccgagggggactgggagggaaaagaggcctcggatgccagggaagaggaggccagagaagggcgaaacctgcaacgtggcggggtctaaggaaggtcggagctcgggggaatacgcaggttttggaagaaggcgggagctgacgaagaggaggggcaccaggaaaagaggcgctccccagagagggcggggtttgggcagggacaatcctatccggaggtgaggctcaaggtggggcggggccacaatggaggacggggcctgcagggaagacccgagaaggagggctgcgaggcaggggattgggggcgggggcctgggggcgggggcctgggccaagagctaggtctgcaccctctgagtccc

SEQ ID NO: 358462 - DNA, 56 bp, Homo sapiens
  chr6:27256447-27256503
  hyper
gaggagccctactccccccggaatcagaactgtgcatagcgggctctggatttgcc

SEQ ID NO: 358463 - DNA, 219 bp, Homo sapiens
  chr6:27300812-27301031
  hyper
cgcttccgctgcgccactctgctaagcggtttctgaagaccactgatcttaatttcaatcatcaaaatcacctttcagtaccgacaaaattttcattgtctaattatttcattttgtatctgatcgtttacactgtccctatctctgccaagcaagtcgaagattcgctacccgataatcagatggcctcaggtcataacctccagatctgtgcttttc

SEQ ID NO: 358464 - DNA, 140 bp, Homo sapiens; identical to SEQ ID NO: 350328
  chr6:27356293-27356433
  hyper

SEQ ID NO: 358465 - DNA, 222 bp, Homo sapiens; identical to SEQ ID NO: 283916
  chr6:27356463-27356685
  hyper

SEQ ID NO: 358466 - DNA, 540 bp, Homo sapiens; identical to SEQ ID NO: 350330
  chr6:27470822-27471362
  hyper

SEQ ID NO: 358467 - DNA, 204 bp, Homo sapiens; identical to SEQ ID NO: 346801
  chr6:27560506-27560710
  hyper

SEQ ID NO: 358468 - DNA, 60 bp, Homo sapiens
  chr6:27635798-27635858
  hyper
cgccgattacatcagtgcttatgtttgtgacttcagagacactgagaaggcgcggctctt

SEQ ID NO: 358469 - DNA, 90 bp, Homo sapiens; identical to SEQ ID NO: 200378
  chr6:27636531-27636621
  hyper

SEQ ID NO: 358470 - DNA, 87 bp, Homo sapiens
  chr6:27640312-27640399
  hyper
cgaggacactttttgtttcagaggaagtcgtgttaggctctttgactctctcgctttttaatgttcccacggcaggttaatgcttcc

SEQ ID NO: 358471 - DNA, 1073 bp, Homo sapiens; identical to SEQ ID NO: 332740
  chr6:27655169-27656242
  hyper

SEQ ID NO: 358472 - DNA, 136 bp, Homo sapiens
  chr6:27662125-27662261
  hyper
tcggcgcttcgcctcgggactccagtgcaacctatggggcttttggaaatgaggaagtcgatgactctgcagggactcctctgacccaggagcagatggcgctcgtctgggcactccccaggagaaaaggtgcatc

SEQ ID NO: 358473 - DNA, 106 bp, Homo sapiens; identical to SEQ ID NO: 200383
  chr6:27775598-27775704
  hyper

SEQ ID NO: 358474 - DNA, 67 bp, Homo sapiens; identical to SEQ ID NO: 350334
  chr6:27777648-27777715
  hyper

SEQ ID NO: 358475 - DNA, 402 bp, Homo sapiens; identical to SEQ ID NO: 350335
  chr6:27778156-27778558
  hyper

SEQ ID NO: 358476 - DNA, 71 bp, Homo sapiens; identical to SEQ ID NO: 350336
  chr6:27782642-27782713
  hyper

SEQ ID NO: 358477 - DNA, 351 bp, Homo sapiens; identical to SEQ ID NO: 346802
  chr6:27798705-27799056
  hyper

SEQ ID NO: 358478 - DNA, 133 bp, Homo sapiens
  chr6:27805774-27805907
  hyper
cggcctggatattgggcaggacaccaccctgggcgatggtcactttaccaagcagcttgttgagctcctcgtcgttgcggatggccagctgcaagtggcgcgggatgatgcgggtcttcttgttgtcgcgggc

SEQ ID NO: 358479 - DNA, 535 bp, Homo sapiens
  chr6:27805936-27806471
  hyper
cggttaggtactccaacaccgccgccaggtacaccggcgctccggcaccgacccgctcagcgtagttgcccttgcggagcagtcggtgcactcggcccactgggaactgaagacccgcccttgaagaacgggtcttagccttggcgcgagctttgccgccctgcttgccacgtcccgacatgacgtaaaaaattcaatcagtaacgttcctgagactgacgtaacgctaaagctccgctacttatagtcaacagaggcacgaaaactaagctgtgctattggctaacattacagtttcgctttaaccaatgggattgcggttttgaaaaacacttattttgattggacaaagttaatatacgtttccaggactcaccactggttaaacgcacaacttcattctctaccccacttgcgttaagaagcagtgaataagcggtaggttgacagagctaccgtcttcctgtttttttcctccaattttccggcagttactcccagtcatgcccgagccctcaaagtccgctcctgcccc

SEQ ID NO: 358480 - DNA, 72 bp, Homo sapiens
  chr6:27833292-27833364
  hyper
cggtgctggagtacctgactgccgagatcctggagctggcgggcaacgccgcccgcgacaacaagaagaccc

SEQ ID NO: 358481 - DNA, 487 bp, Homo sapiens; identical to SEQ ID NO: 200395
  chr6:27840617-27841104
  hyper

SEQ ID NO: 358482 - DNA, 139 bp, Homo sapiens
  chr6:27841257-27841396
  hyper
gacccttcccgcctttgccgcgcccagacatgtcttgtactaaacaaaatgcaacacggcaagcctcgcagcagtactttatatagtaataaatcggacctgattgggaactctccacaccagctgcatccggtcggcc

SEQ ID NO: 358483 - DNA, 48 bp, Homo sapiens; identical to SEQ ID NO: 200397
  chr6:27858740-27858788
  hyper

SEQ ID NO: 358484 - DNA, 304 bp, Homo sapiens; identical to SEQ ID NO: 346803
  chr6:28249105-28249409
  hyper

SEQ ID NO: 358485 - DNA, 125 bp, Homo sapiens; identical to SEQ ID NO: 346804
  chr6:28249579-28249704
  hyper

SEQ ID NO: 358486 - DNA, 190 bp, Homo sapiens; identical to SEQ ID NO: 345227
  chr6:28303261-28303451
  hyper

SEQ ID NO: 358487 - DNA, 73 bp, Homo sapiens; identical to SEQ ID NO: 200404
  chr6:28303489-28303562
  hyper

SEQ ID NO: 358488 - DNA, 208 bp, Homo sapiens; identical to SEQ ID NO: 200405
  chr6:28303607-28303815
  hyper

SEQ ID NO: 358489 - DNA, 150 bp, Homo sapiens; identical to SEQ ID NO: 345230
  chr6:28304301-28304451
  hyper

SEQ ID NO: 358490 - DNA, 314 bp, Homo sapiens
  chr6:28456978-28457292
  hyper
cgaatacacggggaaacgtattcggcagtctacagtgtcaaaggatttttctattaatccaagaaagagcattacagaaagctatacaatacgtgaagacgattaaaaggaatatatctatacataattttaaaaaacctttgaatcttgaaagtcactcacttagggtacgtgaagctgccaaatttatcagagaaggaacaggcatctctcgcatggagccgtgggcctcggcgttaaggcactcttcagctacaggtggcagcccgtttagctcttcttaaggtcttgtgatgtcattttcaagaggccag

SEQ ID NO: 358491 - DNA, 208 bp, Homo sapiens; identical to SEQ ID NO: 283964
  chr6:28457345-28457553
  hyper

SEQ ID NO: 358492 - DNA, 143 bp, Homo sapiens; identical to SEQ ID NO: 350345
  chr6:28458192-28458335
  hyper

SEQ ID NO: 358493 - DNA, 248 bp, Homo sapiens; identical to SEQ ID NO: 332760
  chr6:33538968-33539216
  hyper

SEQ ID NO: 358494 - DNA, 418 bp, Homo sapiens; identical to SEQ ID NO: 283975
  chr6:35181443-35181861
  hyper

SEQ ID NO: 358495 - DNA, 217 bp, Homo sapiens; identical to SEQ ID NO: 283976
  chr6:35181983-35182200
  hyper

SEQ ID NO: 358496 - DNA, 1248 bp, Homo sapiens; identical to SEQ ID NO: 332764
  chr6:35655519-35656767
  hyper

SEQ ID NO: 358497 - DNA, 441 bp, Homo sapiens
  chr6:35744202-35744643
  hyper
agggcccctacagtctggaatcccgcccgtgcgagcctgagcgcctttcctccctccttcccttccgcaggcgtcctcgccctccacgtccctcctccgccggggtggcctggggcgccgggtcacgtggccggggaagaggttttatcccgcggcccctcggaaccccgccgctgctctgccgcccaggcccatggccgcagccctggcgctcgtggcgggggtcctgtcgggggcggtgctgcccctctggagcgcgcttccgcaatataaaaaggtgagccggggagcgcgcccagccggccgcgaccgcaggagagggtggccccgccgccggggcactggagcccgaaggcgccgggcagcctgaaagggagaggtgggtccggaaccacacccaggcgggtagcctggggcatcctcagacggacttcaaaagcc

SEQ ID NO: 358498 - DNA, 463 bp, Homo sapiens; identical to SEQ ID NO: 345231
  chr6:36098070-36098533
  hyper

SEQ ID NO: 358499 - DNA, 577 bp, Homo sapiens; identical to SEQ ID NO: 350349
  chr6:36354750-36355327
  hyper

SEQ ID NO: 358500 - DNA, 407 bp, Homo sapiens; identical to SEQ ID NO: 350350
  chr6:36355357-36355764
  hyper

SEQ ID NO: 358501 - DNA, 80 bp, Homo sapiens
  chr6:36807979-36808059
  hyper
cgcgcgcatcttcatttgcgcccgccccctctcaccacccctatctcccatcaggggtctccatcctgggggagggggag

SEQ ID NO: 358502 - DNA, 462 bp, Homo sapiens
  chr6:37665241-37665703
  hyper
agccgagccgccgataaacccgggggaagaatagcagcccggcgccccgcgggaatctggagagcaattccaggcaagaagggccccagaaaacggggaaaggaggaaagtttgagtcttttgaaaaatattcgcgctctcgcccaggccggggctgcggcgcgggcgccgctcgccgcctccgctcgccgcgctcctctcccgccgtctggccgcggccgtagccctcccgggctccgagctctcgggagagcggggctacgccgcgccccaagttggtcgtccccgcccccgcccggcggccttggcctgcgggggcccagagcgggcggggccgggccgggctccggggcgcggcggccgctcggctccgggccgcgggagcgctccgctcgctcagcaacttgggctttgctgtgctgctttttcgcccctccgagcttttcattccgcgctcctccc

SEQ ID NO: 358503 - DNA, 369 bp, Homo sapiens; identical to SEQ ID NO: 345232
  chr6:37666475-37666844
  hyper

SEQ ID NO: 358504 - DNA, 218 bp, Homo sapiens; identical to SEQ ID NO: 345233
  chr6:37666866-37667084
  hyper

SEQ ID NO: 358505 - DNA, 208 bp, Homo sapiens; identical to SEQ ID NO: 350353
  chr6:39196876-39197084
  hyper

SEQ ID NO: 358506 - DNA, 146 bp, Homo sapiens; identical to SEQ ID NO: 350354
  chr6:39197391-39197537
  hyper

SEQ ID NO: 358507 - DNA, 156 bp, Homo sapiens
  chr6:40554364-40554520
  hyper
cggttccatccacccgtggctccccgtctctccatccggctctccagtctcacatggacccggctctccccgctccccgccagagtttcacccccactgtaggaaataaagactaaagaaaggaaaggaaatctctcgcgataaggatgggcgaaa

SEQ ID NO: 358508 - DNA, 315 bp, Homo sapiens; identical to SEQ ID NO: 284013
  chr6:40554860-40555175
  hyper

SEQ ID NO: 358509 - DNA, 151 bp, Homo sapiens; identical to SEQ ID NO: 200432
  chr6:41339070-41339221
  hyper

SEQ ID NO: 358510 - DNA, 360 bp, Homo sapiens
  chr6:41340027-41340387
  hyper
ctgacacgcacacacacacacacacacactcgagacactgcagggccctgcccatcctcgagttcacaccagccccgccactattatgggcactgccggggctgtggacgctcaaagaatagatcctcattagcatcttgctttgaatatcatttgcattttattcatttcatgtcaaaacgctcagaactctccccagcccgcaccttccccagagcttgggagtcatgggtttccagctcaagccccttctctgtgggccccacgcttgctggctacccccaccccacctaccctgcgccacagcccccacaaaatgaattgacgtctcctaagcacttggcaagttccatctcctgc

SEQ ID NO: 358511 - DNA, 101 bp, Homo sapiens
  chr6:41472031-41472132
  hyper
cgcataggaaaggagggtgctgccgaggtggctgcctgggggcgggccctacaggggtcatttggggcatcccctgcctctaggcaaatccccacggagcc

SEQ ID NO: 358512 - DNA, 85 bp, Homo sapiens; identical to SEQ ID NO: 346813
  chr6:41605681-41605766
  hyper

SEQ ID NO: 358513 - DNA, 308 bp, Homo sapiens; identical to SEQ ID NO: 350357
  chr6:42109904-42110212
  hyper

SEQ ID NO: 358514 - DNA, 324 bp, Homo sapiens; identical to SEQ ID NO: 350358
  chr6:42110273-42110597
  hyper

SEQ ID NO: 358515 - DNA, 34 bp, Homo sapiens; identical to SEQ ID NO: 350359
  chr6:42145871-42145905
  hyper

SEQ ID NO: 358516 - DNA, 45 bp, Homo sapiens; identical to SEQ ID NO: 350360
  chr6:42145975-42146020
  hyper

SEQ ID NO: 358517 - DNA, 62 bp, Homo sapiens; identical to SEQ ID NO: 345234
  chr6:42928259-42928321
  hyper

SEQ ID NO: 358518 - DNA, 76 bp, Homo sapiens; identical to SEQ ID NO: 345235
  chr6:42928454-42928530
  hyper

SEQ ID NO: 358519 - DNA, 155 bp, Homo sapiens; identical to SEQ ID NO: 332786
  chr6:42947097-42947252
  hyper

SEQ ID NO: 358520 - DNA, 179 bp, Homo sapiens
  chr6:43243254-43243433
  hyper
cggctaagcctccaggctcggagggccctgtcgccccacccctgactcccgttacctcactgcccgtcgggctgccccccaccccgccccaataattggccttgcaattggatgccaaagagcccagagttgagggggagcagagctttgagcccaggtctctcagagcaacccaacag

SEQ ID NO: 358521 - DNA, 557 bp, Homo sapiens; identical to SEQ ID NO: 284051
  chr6:43243475-43244032
  hyper

SEQ ID NO: 358522 - DNA, 466 bp, Homo sapiens; identical to SEQ ID NO: 350363
  chr6:43969986-43970452
  hyper

SEQ ID NO: 358523 - DNA, 176 bp, Homo sapiens; identical to SEQ ID NO: 346816
  chr6:44044201-44044377
  hyper

SEQ ID NO: 358524 - DNA, 97 bp, Homo sapiens; identical to SEQ ID NO: 346817
  chr6:44044450-44044547
  hyper

SEQ ID NO: 358525 - DNA, 37 bp, Homo sapiens; identical to SEQ ID NO: 332792
  chr6:44094355-44094392
  hyper

SEQ ID NO: 358526 - DNA, 45 bp, Homo sapiens; identical to SEQ ID NO: 350367
  chr6:44187030-44187075
  hyper

SEQ ID NO: 358527 - DNA, 468 bp, Homo sapiens; identical to SEQ ID NO: 350368
  chr6:44187131-44187599
  hyper

SEQ ID NO: 358528 - DNA, 253 bp, Homo sapiens; identical to SEQ ID NO: 350369
  chr6:45387325-45387578
  hyper

SEQ ID NO: 358529 - DNA, 261 bp, Homo sapiens; identical to SEQ ID NO: 200456
  chr6:45388098-45388359
  hyper

SEQ ID NO: 358530 - DNA, 186 bp, Homo sapiens; identical to SEQ ID NO: 350371
  chr6:45388397-45388583
  hyper

SEQ ID NO: 358531 - DNA, 57 bp, Homo sapiens
  chr6:45390807-45390864
  hyper
cggctctaaccccagaaacccccggccgggcctccctccggatgccctggcgggctc

SEQ ID NO: 358532 - DNA, 38 bp, Homo sapiens; identical to SEQ ID NO: 350372
  chr6:45631098-45631136
  hyper

SEQ ID NO: 358533 - DNA, 224 bp, Homo sapiens; identical to SEQ ID NO: 200458
  chr6:45982991-45983215
  hyper

SEQ ID NO: 358534 - DNA, 372 bp, Homo sapiens; identical to SEQ ID NO: 345236
  chr6:46097250-46097622
  hyper

SEQ ID NO: 358535 - DNA, 521 bp, Homo sapiens; identical to SEQ ID NO: 345237
  chr6:46097694-46098215
  hyper

SEQ ID NO: 358536 - DNA, 333 bp, Homo sapiens; identical to SEQ ID NO: 350375
  chr6:46138265-46138598
  hyper

SEQ ID NO: 358537 - DNA, 162 bp, Homo sapiens; identical to SEQ ID NO: 350376
  chr6:46138801-46138963
  hyper

SEQ ID NO: 358538 - DNA, 99 bp, Homo sapiens; identical to SEQ ID NO: 332801
  chr6:47382546-47382645
  hyper

SEQ ID NO: 358539 - DNA, 105 bp, Homo sapiens; identical to SEQ ID NO: 350378
  chr6:49518471-49518576
  hyper

SEQ ID NO: 358540 - DNA, 278 bp, Homo sapiens; identical to SEQ ID NO: 350379
  chr6:49519000-49519278
  hyper

SEQ ID NO: 358541 - DNA, 41 bp, Homo sapiens
  chr6:50674750-50674791
  hyper
ttttaggcgtttggagagggatggagatggtgggtgggggc

SEQ ID NO: 358542 - DNA, 368 bp, Homo sapiens; identical to SEQ ID NO: 284097
  chr6:50690697-50691065
  hyper

SEQ ID NO: 358543 - DNA, 84 bp, Homo sapiens; identical to SEQ ID NO: 350381
  chr6:50691095-50691179
  hyper

SEQ ID NO: 358544 - DNA, 53 bp, Homo sapiens
  chr6:50692556-50692609
  hyper
tttaaaaaaaagtggcggggttgggtggcctataatcaggttgccgagcgtgc

SEQ ID NO: 358545 - DNA, 43 bp, Homo sapiens; identical to SEQ ID NO: 346821
  chr6:50805695-50805738
  hyper

SEQ ID NO: 358546 - DNA, 193 bp, Homo sapiens
  chr6:50808438-50808631
  hyper
cgtttccaacgttgctgtttgtcatcttccacagacttgtaaaatttactacaactccagaggggaaaatagtaaatctctggctaaatttaggtctagagctcatttgaacttttacagtgggttttctatttatttgatttactcctgtctttggcttcggtgtcatattgttggtgttttatggccggct

SEQ ID NO: 358547 - DNA, 42 bp, Homo sapiens; identical to SEQ ID NO: 200471
  chr6:50810509-50810551
  hyper

SEQ ID NO: 358548 - DNA, 211 bp, Homo sapiens; identical to SEQ ID NO: 200472
  chr6:50811605-50811816
  hyper

SEQ ID NO: 358549 - DNA, 313 bp, Homo sapiens
  chr6:50813939-50814252
  hyper
ctaccccttctccctccctcacttctcctttcatgtaggacccccgcccccttgctttccttagccaggcccgctacatttatctgataattgagttattaaaagatttggtttccttgggcctataaatcaataaacagtaggattaacgcaatagtttgccttttaagtcaagggagacgtttaaggcaagcccctttgagctttgttttcaaaccaaacaggtgagttgcagctctccccccggcccctgcactcttcagacatttggtccctgcccactcctaaacgctcagtcccaaaacaaaatagc

SEQ ID NO: 358550 - DNA, 636 bp, Homo sapiens; identical to SEQ ID NO: 346822
  chr6:52227115-52227751
  hyper

SEQ ID NO: 358551 - DNA, 132 bp, Homo sapiens; identical to SEQ ID NO: 200475
  chr6:52227876-52228008
  hyper

SEQ ID NO: 358552 - DNA, 119 bp, Homo sapiens; identical to SEQ ID NO: 345238
  chr6:53212372-53212491
  hyper

SEQ ID NO: 358553 - DNA, 215 bp, Homo sapiens; identical to SEQ ID NO: 200479
  chr6:53213970-53214185
  hyper

SEQ ID NO: 358554 - DNA, 189 bp, Homo sapiens; identical to SEQ ID NO: 346826
  chr6:56716695-56716884
  hyper

SEQ ID NO: 358555 - DNA, 248 bp, Homo sapiens; identical to SEQ ID NO: 345240
  chr6:56818408-56818656
  hyper

SEQ ID NO: 358556 - DNA, 620 bp, Homo sapiens; identical to SEQ ID NO: 332826
  chr6:57036954-57037574
  hyper

SEQ ID NO: 358557 - DNA, 207 bp, Homo sapiens; identical to SEQ ID NO: 350390
  chr6:69344116-69344323
  hyper

SEQ ID NO: 358558 - DNA, 294 bp, Homo sapiens; identical to SEQ ID NO: 200490
  chr6:69344649-69344943
  hyper

SEQ ID NO: 358559 - DNA, 72 bp, Homo sapiens; identical to SEQ ID NO: 350392
  chr6:69346042-69346114
  hyper

SEQ ID NO: 358560 - DNA, 115 bp, Homo sapiens; identical to SEQ ID NO: 350393
  chr6:69942728-69942843
  hyper

SEQ ID NO: 358561 - DNA, 574 bp, Homo sapiens; identical to SEQ ID NO: 350394
  chr6:70576385-70576959
  hyper

SEQ ID NO: 358562 - DNA, 298 bp, Homo sapiens; identical to SEQ ID NO: 200494
  chr6:70576997-70577295
  hyper

SEQ ID NO: 358563 - DNA, 570 bp, Homo sapiens; identical to SEQ ID NO: 350396
  chr6:71123134-71123704
  hyper

SEQ ID NO: 358564 - DNA, 289 bp, Homo sapiens; identical to SEQ ID NO: 350397
  chr6:71123746-71124035
  hyper

SEQ ID NO: 358565 - DNA, 54 bp, Homo sapiens; identical to SEQ ID NO: 200498
  chr6:71665452-71665506
  hyper

SEQ ID NO: 358566 - DNA, 222 bp, Homo sapiens; identical to SEQ ID NO: 200499
  chr6:71665723-71665945
  hyper

SEQ ID NO: 358567 - DNA, 975 bp, Homo sapiens
  chr6:71998106-71999081
  hyper
cgcctgctgacggtgacacctcttcgacaccacgtccacgccagtcctcagctccaggagctgggcgggatccctcatcccgctcagctgggagatgccccgggagggcgtcccccggctccgggcggcgagggtagtagccgaccccaatccactccgggggccgccgggggccgcgtgaaggcaggtgttccggggagaaacgtggaagggaggcgcggcctggggccggtggcgctcggctgggggccgcagttggctcccctgggggctctgggcggcggcagctcccgcctgtggggaggagaaggagccggatgggcgggttcaggcgcgcgcggcggcggtcccggggccgccggctcctccccgcgagggtgcctgtccgccgctcgccgcgctgaggcagtgcggggcgggcgcgcctaggctgccgcccagcgccctcgccgcggccatgcccgggccctagagcgcctgccgcagcttgcgccccgcagccccgcagccccgcgcccgccgccgcctcttcaatgggcaacctgctcggcggggtcagcttccgcgagcccaccaccgtggaggactgcgactccacctggcagaccgactcggagcccgagcccgaagaaccagggccgggcggcggcagcgagggcccggggcaggagtccgagcagcccgcgcagcccccggagcaagccggcgggcggcccggcgccagccccgcgccggacgaggacgccgaggcggcgggcgccgagcaggtacgcggcccagcggtggcctcgggtcgggctggggcgccccgacaccccagaggggcaagtgccaagccgccctcgcgctcggaggccaggggcgccaggtggctgctcgccgctgcgacccgacccctccgcgccgcggctgacctgtctcccggtggagcccgggggcctgcaggagcccaaagcgccggaccctcccactgcc

SEQ ID NO: 358568 - DNA, 155 bp, Homo sapiens; identical to SEQ ID NO: 350399
  chr6:72129577-72129732
  hyper

SEQ ID NO: 358569 - DNA, 61 bp, Homo sapiens; identical to SEQ ID NO: 350400
  chr6:72130646-72130707
  hyper

SEQ ID NO: 358570 - DNA, 226 bp, Homo sapiens; identical to SEQ ID NO: 200502
  chr6:72596315-72596541
  hyper

SEQ ID NO: 358571 - DNA, 163 bp, Homo sapiens; identical to SEQ ID NO: 346832
  chr6:73329621-73329784
  hyper

SEQ ID NO: 358572 - DNA, 82 bp, Homo sapiens; identical to SEQ ID NO: 346833
  chr6:73330126-73330208
  hyper

SEQ ID NO: 358573 - DNA, 40 bp, Homo sapiens; identical to SEQ ID NO: 346834
  chr6:74019373-74019413
  hyper

SEQ ID NO: 358574 - DNA, 102 bp, Homo sapiens; identical to SEQ ID NO: 346835
  chr6:74020094-74020196
  hyper

SEQ ID NO: 358575 - DNA, 130 bp, Homo sapiens; identical to SEQ ID NO: 350406
  chr6:74161047-74161177
  hyper

SEQ ID NO: 358576 - DNA, 178 bp, Homo sapiens; identical to SEQ ID NO: 200507
  chr6:74161321-74161499
  hyper

SEQ ID NO: 358577 - DNA, 290 bp, Homo sapiens; identical to SEQ ID NO: 284165
  chr6:74405623-74405913
  hyper

SEQ ID NO: 358578 - DNA, 174 bp, Homo sapiens
  chr6:74406015-74406189
  hyper
ggaacgtgggcgcgcggggggcgcgcgggcgcgcgggcctgggccgctctgcggctctgggccagggcttcggggaggtggcggctgctgtgcagcagcgggtgggaaatgccctcgcggctgcagtccccagcctggtactggcctggaggtttgaccatatgtagcttcagc

SEQ ID NO: 358579 - DNA, 280 bp, Homo sapiens; identical to SEQ ID NO: 284172
  chr6:75915989-75916269
  hyper

SEQ ID NO: 358580 - DNA, 50 bp, Homo sapiens
  chr6:79620238-79620288
  hyper
cgaattatacaacgtagacctaggtcgtgcgatagctacaaaatacctaa

SEQ ID NO: 358581 - DNA, 390 bp, Homo sapiens; identical to SEQ ID NO: 332846
  chr6:80487617-80488007
  hyper

SEQ ID NO: 358582 - DNA, 83 bp, Homo sapiens; identical to SEQ ID NO: 350409
  chr6:80657600-80657683
  hyper

SEQ ID NO: 358583 - DNA, 164 bp, Homo sapiens; identical to SEQ ID NO: 350410
  chr6:83073044-83073208
  hyper

SEQ ID NO: 358584 - DNA, 268 bp, Homo sapiens; identical to SEQ ID NO: 284199
  chr6:83073251-83073519
  hyper

SEQ ID NO: 358585 - DNA, 213 bp, Homo sapiens; identical to SEQ ID NO: 284200
  chr6:83073590-83073803
  hyper

SEQ ID NO: 358586 - DNA, 682 bp, Homo sapiens; identical to SEQ ID NO: 200530
  chr6:83073835-83074517
  hyper

SEQ ID NO: 358587 - DNA, 66 bp, Homo sapiens; identical to SEQ ID NO: 350415
  chr6:83074829-83074895
  hyper

SEQ ID NO: 358588 - DNA, 123 bp, Homo sapiens
  chr6:85478295-85478418
  hyper
cgtgaacatcagcctacgctgagtcaccaggcagcgccgcacaaatgggctagggcttcccctttccgcgattcctgtccctactctttcccactctctttcttctctttgcacatacttttc

SEQ ID NO: 358589 - DNA, 58 bp, Homo sapiens; identical to SEQ ID NO: 284218
  chr6:85478456-85478514
  hyper

SEQ ID NO: 358590 - DNA, 353 bp, Homo sapiens; identical to SEQ ID NO: 350416
  chr6:86159095-86159448
  hyper

SEQ ID NO: 358591 - DNA, 269 bp, Homo sapiens; identical to SEQ ID NO: 200542
  chr6:86159509-86159778
  hyper

SEQ ID NO: 358592 - DNA, 243 bp, Homo sapiens; identical to SEQ ID NO: 200543
  chr6:86159903-86160146
  hyper

SEQ ID NO: 358593 - DNA, 123 bp, Homo sapiens; identical to SEQ ID NO: 350419
  chr6:87646737-87646860
  hyper

SEQ ID NO: 358594 - DNA, 170 bp, Homo sapiens; identical to SEQ ID NO: 200546
  chr6:87646944-87647114
  hyper

SEQ ID NO: 358595 - DNA, 74 bp, Homo sapiens; identical to SEQ ID NO: 200547
  chr6:87647143-87647217
  hyper

SEQ ID NO: 358596 - DNA, 280 bp, Homo sapiens; identical to SEQ ID NO: 332855
  chr6:88678327-88678607
  hyper

SEQ ID NO: 358597 - DNA, 304 bp, Homo sapiens; identical to SEQ ID NO: 200552
  chr6:90121293-90121597
  hyper

SEQ ID NO: 358598 - DNA, 709 bp, Homo sapiens; identical to SEQ ID NO: 284243
  chr6:90121684-90122393
  hyper

SEQ ID NO: 358599 - DNA, 74 bp, Homo sapiens; identical to SEQ ID NO: 345243
  chr6:90122423-90122497
  hyper

SEQ ID NO: 358600 - DNA, 255 bp, Homo sapiens; identical to SEQ ID NO: 346839
  chr6:90142647-90142902
  hyper

SEQ ID NO: 358601 - DNA, 1051 bp, Homo sapiens; identical to SEQ ID NO: 284249
  chr6:91005702-91006753
  hyper

SEQ ID NO: 358602 - DNA, 97 bp, Homo sapiens
  chr6:91006779-91006876
  hyper
cgggggcgggcgcgcgcgctccgctggctcgcgggagggggcgcgcctcatgccgccgcagcagcagatctccccgctttgtgcggccgcgcggccc

SEQ ID NO: 358603 - DNA, 41 bp, Homo sapiens; identical to SEQ ID NO: 350428
  chr6:91320244-91320285
  hyper

SEQ ID NO: 358604 - DNA, 286 bp, Homo sapiens; identical to SEQ ID NO: 200558
  chr6:94127131-94127417
  hyper

SEQ ID NO: 358605 - DNA, 217 bp, Homo sapiens; identical to SEQ ID NO: 284267
  chr6:99272867-99273084
  hyper

SEQ ID NO: 358606 - DNA, 208 bp, Homo sapiens; identical to SEQ ID NO: 200570
  chr6:99273114-99273322
  hyper

SEQ ID NO: 358607 - DNA, 101 bp, Homo sapiens; identical to SEQ ID NO: 350431
  chr6:99276279-99276380
  hyper

SEQ ID NO: 358608 - DNA, 274 bp, Homo sapiens; identical to SEQ ID NO: 200576
  chr6:99276430-99276704
  hyper

SEQ ID NO: 358609 - DNA, 399 bp, Homo sapiens; identical to SEQ ID NO: 200577
  chr6:99276781-99277180
  hyper

SEQ ID NO: 358610 - DNA, 60 bp, Homo sapiens; identical to SEQ ID NO: 350434
  chr6:99292143-99292203
  hyper

SEQ ID NO: 358611 - DNA, 109 bp, Homo sapiens; identical to SEQ ID NO: 350435
  chr6:99292521-99292630
  hyper

SEQ ID NO: 358612 - DNA, 168 bp, Homo sapiens
  chr6:100036494-100036662
  hyper
cgactacactgcgcttcctttggagagagacactggagaactaaaaccgacccaagcgctaagcgatctgcctaatagagggaacgccagctgagaccagcgcaaggcgggcgctgggtggcgtgcgcgactgcaaagtctggcatgcccaggttctgctccttgggc

SEQ ID NO: 358613 - DNA, 227 bp, Homo sapiens; identical to SEQ ID NO: 284294
  chr6:100036732-100036959
  hyper

SEQ ID NO: 358614 - DNA, 97 bp, Homo sapiens
  chr6:100039474-100039571
  hyper
tcgcaagggggctgaagagccaaatggggaaactgatggagcctcacaagtttattcctttcccacgtctgtgtttgtctaagggtgctttctgtgc

SEQ ID NO: 358615 - DNA, 59 bp, Homo sapiens
  chr6:105389710-105389769
  hyper
gatttgtactccaaaaactttttttaaaaattgcacgttggtaaatattgagtgttttc

SEQ ID NO: 358616 - DNA, 126 bp, Homo sapiens
  chr6:105627242-105627368
  hyper
cggcgctggcatgacttccccaggactgacaagggcccctaggaacggcttttctcccttgcaaaactggcctgtttatttcggctccagggtgcctggggccagagtaggacctgcaggaaaaga

SEQ ID NO: 358617 - DNA, 134 bp, Homo sapiens
  chr6:105628083-105628217
  hyper
cctagtattcacagtcacactaggcaggagcgatgggctggctgctgaaccaaggcaactgcacgcctgctctctcacccccgctccacacacaccgtaaacaaaatgaagaggtaaatcaccatagtggggac

SEQ ID NO: 358618 - DNA, 61 bp, Homo sapiens; identical to SEQ ID NO: 345244
  chr6:106443120-106443181
  hyper

SEQ ID NO: 358619 - DNA, 352 bp, Homo sapiens; identical to SEQ ID NO: 346842
  chr6:106533693-106534045
  hyper

SEQ ID NO: 358620 - DNA, 388 bp, Homo sapiens; identical to SEQ ID NO: 346843
  chr6:106534075-106534463
  hyper

SEQ ID NO: 358621 - DNA, 248 bp, Homo sapiens
  chr6:106808607-106808855
  hyper
cgctgggtgctggttctgcaacccgcggccgtccccccgcatccgcgacgagggggcggggtcccacggcgcgctgagaaaggcgggcgagctggcgctcaggtgtgttcttccatagggcccgggcggcagagaggaccgcgtcccggcagtcggagcgggaggaggacaagacgatgccgctgtccccgccagcccagggcgaccccggggagcccagcccgtgcaggccccctaagaagcacacc

SEQ ID NO: 358622 - DNA, 113 bp, Homo sapiens
  chr6:106809184-106809297
  hyper
cccacgcatgtggcctttagtatgactgcaaagttttcatgcaggagcctcccgcatcagcctgctaaccagagcggcggggagtgagggttgttaccgtcctaaatgatggc

SEQ ID NO: 358623 - DNA, 104 bp, Homo sapiens; identical to SEQ ID NO: 345245
  chr6:106958136-106958240
  hyper

SEQ ID NO: 358624 - DNA, 404 bp, Homo sapiens; identical to SEQ ID NO: 345246
  chr6:106958337-106958741
  hyper

SEQ ID NO: 358625 - DNA, 333 bp, Homo sapiens; identical to SEQ ID NO: 200605
  chr6:106959606-106959939
  hyper

SEQ ID NO: 358626 - DNA, 262 bp, Homo sapiens; identical to SEQ ID NO: 200606
  chr6:106960046-106960308
  hyper

SEQ ID NO: 358627 - DNA, 155 bp, Homo sapiens; identical to SEQ ID NO: 345249
  chr6:106961023-106961178
  hyper

SEQ ID NO: 358628 - DNA, 314 bp, Homo sapiens; identical to SEQ ID NO: 200609
  chr6:107810308-107810622
  hyper

SEQ ID NO: 358629 - DNA, 430 bp, Homo sapiens; identical to SEQ ID NO: 350445
  chr6:107810665-107811095
  hyper

SEQ ID NO: 358630 - DNA, 197 bp, Homo sapiens
  chr6:108478324-108478521
  hyper
cgccccatactgaccgcggtccctcacctgctgactgattgacttataaatctgccccccacccacttgtctgtccattgaaggcaaattcgccatcgggaacacagtagtttctcaataactatctaatgcatggccacccttcccaggatttagaatatcaaagggacgtgttctttcctcccaaatcacctgcc

SEQ ID NO: 358631 - DNA, 255 bp, Homo sapiens; identical to SEQ ID NO: 284345
  chr6:108478551-108478806
  hyper

SEQ ID NO: 358632 - DNA, 44 bp, Homo sapiens
  chr6:108484828-108484872
  hyper
cgccttaaatccgaggtcccccgtggcctgcagcagctttgcct

SEQ ID NO: 358633 - DNA, 159 bp, Homo sapiens; identical to SEQ ID NO: 200614
  chr6:108496966-108497125
  hyper

SEQ ID NO: 358634 - DNA, 72 bp, Homo sapiens; identical to SEQ ID NO: 350448
  chr6:108882975-108883047
  hyper

SEQ ID NO: 358635 - DNA, 572 bp, Homo sapiens
  chr6:111408744-111409316
  hyper
cgatccccgaggtgttcgcgcgcgccagctgtcctcgcggccgcctgcgcgctggccgcctgcgcgctgccagcccgcccgcccgccaggggctccgccgccctcgcctcggcctcgttagcccgccaggagccccgcagctcctccgggagcccgctggtaactcgcgtccctcgcgcttctccggcgcctgaggggcccgcctcgggccatggtgctctcccaggaggagccggactccgcgcggggcacgagcgaggcgcagccgctcggccccgcgcccacgggggccgctccgccgcccggcccgggaccctcggacagccccgaggcggctgtcgagaaggtggaggtggagctggcggggccggcgaccgcggagccccatgagccccccgaaccccccgagggcggctggggctggctggtgatgctggcggccatgtggtgcaacgggtcggtgttcggcatccagaacgcttgcggggtgctcttcgtgtccatgctggaaaccttcggctccaaagacgatgacaagatggtctttaagacaggtgaggcgcggcgcccgc

SEQ ID NO: 358636 - DNA, 273 bp, Homo sapiens; identical to SEQ ID NO: 200623
  chr6:111409368-111409641
  hyper

SEQ ID NO: 358637 - DNA, 945 bp, Homo sapiens; identical to SEQ ID NO: 346853
  chr6:112193858-112194803
  hyper

SEQ ID NO: 358638 - DNA, 72 bp, Homo sapiens; identical to SEQ ID NO: 332906
  chr6:116691827-116691899
  hyper

SEQ ID NO: 358639 - DNA, 133 bp, Homo sapiens
  chr6:118241526-118241659
  hyper
ttgcgaaattaaccgtttttcctccacaactgccagctcggcgaatggccttcaagcccatccaacaggagataatctgtccttggaactagtgcaagtcagtttttaactacttgcggagaaagtctgaaac

SEQ ID NO: 358640 - DNA, 69 bp, Homo sapiens; identical to SEQ ID NO: 350453
  chr6:119030678-119030747
  hyper

SEQ ID NO: 358641 - DNA, 547 bp, Homo sapiens; identical to SEQ ID NO: 350454
  chr6:122931206-122931753
  hyper

SEQ ID NO: 358642 - DNA, 58 bp, Homo sapiens; identical to SEQ ID NO: 346854
  chr6:126068722-126068780
  hyper

SEQ ID NO: 358643 - DNA, 155 bp, Homo sapiens; identical to SEQ ID NO: 345250
  chr6:126069942-126070097
  hyper

SEQ ID NO: 358644 - DNA, 439 bp, Homo sapiens; identical to SEQ ID NO: 284440
  chr6:127836226-127836665
  hyper

SEQ ID NO: 358645 - DNA, 31 bp, Homo sapiens; identical to SEQ ID NO: 350458
  chr6:127837749-127837780
  hyper

SEQ ID NO: 358646 - DNA, 516 bp, Homo sapiens
  chr6:128840521-128841037
  hyper
cgagacgctccacttgtctccttttgggttctccggcagaaggcagacatttacagtccgcttccagccccaggccggatccggggagcgcggggccagagccccaggccggatccggggagcgcggggccagcctggcggtggttttgcccgaggagcgggctcccacgcgcgagtcaggcttcctccaccaggcgcccagacctcgatgcccatgaacgctcagagtgggtccttagaaccgcatttcaacacatcttacagggctccgccaacacacacacagaacatgctccaagcagtgcccgagcgcacagggcaagcccgggagcaacccagagctgggggaggagaaaaggggactccgggagggacggggaagtagttagacaatagtcaggggaggttattcccgggacaaaaagcacctggcaaagcgcgccgaggtcagtcccttcgaatctccacatttctgacaatggcttcccagggaatttgtttaaacacccaagtggc

SEQ ID NO: 358647 - DNA, 476 bp, Homo sapiens; identical to SEQ ID NO: 200651
  chr6:128841101-128841577
  hyper

SEQ ID NO: 358648 - DNA, 686 bp, Homo sapiens
  chr6:128841719-128842405
  hyper
ctcggcggaggctgctcctgttagtcaagagttactttgctcggggagggacgggggcggagccgggggtgacgtcgccccgcgggctccgggcgcttctgaggaatgcgggctcgggcgcggcgccgccaccgcctcctgccggagagacgcgcgccagccccggccgcgcgccccgcgccgcctttgttcgcagcctgggccccgccgccagccgctgctcggagggagcgagcgagaaaggggagccggcgcagctcgctgccctgttccagaactcagaatttgagaggcgagagttcggtaagccgtgcgaccagacgaccgaggacgcgcgcagagaaacccccgccgtccgaggagaggcgtcctggggttccgtcccaaggtggaggtccccccgagcggttgctgattgaaaggggagtgtggaagcgccctgaggaaacacccgcctgccttgaaaactccccgttccttattcttgtaataaggaataagacaccccacccccatcgaaaacttgtcccttattcatagaataaataaaacttgaaccagaataaacgatcagtaactttccagcgtgaacagctggcgtgtctcctttctggtttatttgtcattggccaagtatttggatttactctgcttcactgactttgcttgttgctctgaaaccctcc

SEQ ID NO: 358649 - DNA, 291 bp, Homo sapiens; identical to SEQ ID NO: 350459
  chr6:130088466-130088757
  hyper

SEQ ID NO: 358650 - DNA, 365 bp, Homo sapiens; identical to SEQ ID NO: 332922
  chr6:131383375-131383740
  hyper

SEQ ID NO: 358651 - DNA, 96 bp, Homo sapiens; identical to SEQ ID NO: 350461
  chr6:134499457-134499553
  hyper

SEQ ID NO: 358652 - DNA, 160 bp, Homo sapiens; identical to SEQ ID NO: 346856
  chr6:134639003-134639163
  hyper

SEQ ID NO: 358653 - DNA, 330 bp, Homo sapiens; identical to SEQ ID NO: 345251
  chr6:137112609-137112939
  hyper

SEQ ID NO: 358654 - DNA, 61 bp, Homo sapiens; identical to SEQ ID NO: 345252
  chr6:137112940-137113001
  hyper

SEQ ID NO: 358655 - DNA, 48 bp, Homo sapiens; identical to SEQ ID NO: 200668
  chr6:137243410-137243458
  hyper

SEQ ID NO: 358656 - DNA, 216 bp, Homo sapiens; identical to SEQ ID NO: 284487
  chr6:137310942-137311158
  hyper

SEQ ID NO: 358657 - DNA, 259 bp, Homo sapiens; identical to SEQ ID NO: 332933
  chr6:137365631-137365890
  hyper

SEQ ID NO: 358658 - DNA, 46 bp, Homo sapiens; identical to SEQ ID NO: 350467
  chr6:137808706-137808752
  hyper

SEQ ID NO: 358659 - DNA, 120 bp, Homo sapiens; identical to SEQ ID NO: 332939
  chr6:138132663-138132783
  hyper

SEQ ID NO: 358660 - DNA, 249 bp, Homo sapiens; identical to SEQ ID NO: 332941
  chr6:138724531-138724780
  hyper

SEQ ID NO: 358661 - DNA, 256 bp, Homo sapiens
  chr6:139694249-139694505
  hyper
cgccggggtttcgatcgagtcaacagctcactctgctgggctgctgtttgcacacgaagtccgtcataaaatcaaactcgttttgccccagccagagttcgggcagctccttgatgcggtccaaacccatttctatcaccaaggacataagaacttcctcgtcgatgaaatcagtgtctatgacattgggcggcagcattgcagcggggacgtgggccacggaggcgggcatgttgccgctgccgctgccgccgcc

SEQ ID NO: 358662 - DNA, 131 bp, Homo sapiens
  chr6:142622583-142622714
  hyper
cgggagcgtggcggggggacccgcgcggggactcgggtaggctgcaaacgctggggagatgccacaggagcgcctgccttcccagcttctcctttctctcgccgagggtctctggggttcagcgctcccgg

SEQ ID NO: 358663 - DNA, 486 bp, Homo sapiens
  chr6:142622963-142623449
  hyper
acgccgccggggccgccgcacctgagcccagctccagtcacgccggaagcgcgggcggagcgcacgggtccggggagagtcgcctgcgcccgcgagggggacccaagtacctagggtggtggccgagtcccgcctcccgccagcgggggcgaggacctgcgacgcgcacccctgcctggcccggtctcctcagcaccagccccacgcacaccctacttcctcagcttctcgccctcaccctgccaacttccctgcgaggagggacctgccgccagcctgcttcctcgtccgcaggccctgcgctgaacgctgccgcgcccagggttcaccttgcgccgtcgggaaagcccatgaactctccagaaacggcgtaaaggagggtcccgccgcggcgcagggctggggcgcctgggttccccctgggtggagcagcggcagcagagcgggaaagtggtggaggatgatcttgcggccaaaggggacctc

SEQ ID NO: 358664 - DNA, 368 bp, Homo sapiens; identical to SEQ ID NO: 200679
  chr6:143247975-143248343
  hyper

SEQ ID NO: 358665 - DNA, 208 bp, Homo sapiens; identical to SEQ ID NO: 350470
  chr6:143248451-143248659
  hyper

SEQ ID NO: 358666 - DNA, 370 bp, Homo sapiens; identical to SEQ ID NO: 332946
  chr6:143268770-143269140
  hyper

SEQ ID NO: 358667 - DNA, 528 bp, Homo sapiens; identical to SEQ ID NO: 346860
  chr6:146136035-146136563
  hyper

SEQ ID NO: 358668 - DNA, 232 bp, Homo sapiens; identical to SEQ ID NO: 346861
  chr6:146136564-146136796
  hyper

SEQ ID NO: 358669 - DNA, 56 bp, Homo sapiens; identical to SEQ ID NO: 350473
  chr6:146349455-146349511
  hyper

SEQ ID NO: 358670 - DNA, 213 bp, Homo sapiens; identical to SEQ ID NO: 200695
  chr6:148663794-148664007
  hyper

SEQ ID NO: 358671 - DNA, 181 bp, Homo sapiens
  chr6:148664163-148664344
  hyper
gcggggactgggacgcacggcccgcgcgcgggacacggccatggaggacgcgggagcagctggcccggggccggagcctgagcccgagcccgagccggagcccgagcccgcgccggagccggaaccggagcccaagccgggtgctggcacatccgaggcgttctcccgactctggaccgac

SEQ ID NO: 358672 - DNA, 258 bp, Homo sapiens; identical to SEQ ID NO: 200697
  chr6:149068930-149069188
  hyper

SEQ ID NO: 358673 - DNA, 223 bp, Homo sapiens; identical to SEQ ID NO: 284543
  chr6:149069508-149069731
  hyper

SEQ ID NO: 358674 - DNA, 59 bp, Homo sapiens; identical to SEQ ID NO: 350476
  chr6:149069769-149069828
  hyper

SEQ ID NO: 358675 - DNA, 86 bp, Homo sapiens; identical to SEQ ID NO: 200703
  chr6:150284581-150284667
  hyper

SEQ ID NO: 358676 - DNA, 752 bp, Homo sapiens; identical to SEQ ID NO: 332955
  chr6:150921277-150922029
  hyper

SEQ ID NO: 358677 - DNA, 42 bp, Homo sapiens; identical to SEQ ID NO: 332956
  chr6:150962790-150962832
  hyper

SEQ ID NO: 358678 - DNA, 69 bp, Homo sapiens
  chr6:151562596-151562665
  hyper
aagttctcaaaggatggggtcagtgtaacgagcattccgggtactcttccctggacgcagtgctgaaac

SEQ ID NO: 358679 - DNA, 234 bp, Homo sapiens; identical to SEQ ID NO: 200709
  chr6:151815611-151815845
  hyper

SEQ ID NO: 358680 - DNA, 80 bp, Homo sapiens; identical to SEQ ID NO: 350480
  chr6:151815879-151815959
  hyper

SEQ ID NO: 358681 - DNA, 181 bp, Homo sapiens; identical to SEQ ID NO: 345254
  chr6:152622733-152622914
  hyper

SEQ ID NO: 358682 - DNA, 520 bp, Homo sapiens; identical to SEQ ID NO: 346865
  chr6:158402113-158402633
  hyper

SEQ ID NO: 358683 - DNA, 39 bp, Homo sapiens
  chr6:158957708-158957747
  hyper
cgcaggcggcgacacaaagggtggagcggcgggaccggg

SEQ ID NO: 358684 - DNA, 206 bp, Homo sapiens; identical to SEQ ID NO: 284595
  chr6:158957988-158958194
  hyper

SEQ ID NO: 358685 - DNA, 228 bp, Homo sapiens
  chr6:159589682-159589910
  hyper
cggcggcggacagcagcacgcggcgtccaggacccggccttcctagagcttaggtcactgtagcctccaggggcgctccgagtccatctggagggccgcgaggcttccaggctggaaggaggaatagggagaaggaggaatagggagacctggggcagtgttacaattacagaaaagggagaggcgaggtccgctgagtccttggcctgggcaacaaggcacactgaa

SEQ ID NO: 358686 - DNA, 41 bp, Homo sapiens; identical to SEQ ID NO: 346866
  chr6:159591277-159591318
  hyper

SEQ ID NO: 358687 - DNA, 240 bp, Homo sapiens; identical to SEQ ID NO: 350484
  chr6:159654657-159654897
  hyper

SEQ ID NO: 358688 - DNA, 62 bp, Homo sapiens; identical to SEQ ID NO: 200729
  chr6:159655003-159655065
  hyper

SEQ ID NO: 358689 - DNA, 257 bp, Homo sapiens; identical to SEQ ID NO: 350486
  chr6:159655082-159655339
  hyper

SEQ ID NO: 358690 - DNA, 108 bp, Homo sapiens; identical to SEQ ID NO: 346867
  chr6:163834157-163834265
  hyper

SEQ ID NO: 358691 - DNA, 96 bp, Homo sapiens; identical to SEQ ID NO: 200737
  chr6:163834987-163835083
  hyper

SEQ ID NO: 358692 - DNA, 666 bp, Homo sapiens; identical to SEQ ID NO: 284617
  chr6:163835131-163835797
  hyper

SEQ ID NO: 358693 - DNA, 291 bp, Homo sapiens; identical to SEQ ID NO: 200740
  chr6:163835906-163836197
  hyper

SEQ ID NO: 358694 - DNA, 238 bp, Homo sapiens; identical to SEQ ID NO: 200741
  chr6:163837231-163837469
  hyper

SEQ ID NO: 358695 - DNA, 88 bp, Homo sapiens; identical to SEQ ID NO: 350492
  chr6:166076007-166076095
  hyper

SEQ ID NO: 358696 - DNA, 276 bp, Homo sapiens; identical to SEQ ID NO: 284624
  chr6:166077059-166077335
  hyper

SEQ ID NO: 358697 - DNA, 55 bp, Homo sapiens; identical to SEQ ID NO: 350493
  chr6:166268182-166268237
  hyper

SEQ ID NO: 358698 - DNA, 140 bp, Homo sapiens; identical to SEQ ID NO: 350494
  chr6:166298522-166298662
  hyper

SEQ ID NO: 358699 - DNA, 211 bp, Homo sapiens; identical to SEQ ID NO: 332975
  chr6:166419580-166419791
  hyper

SEQ ID NO: 358700 - DNA, 60 bp, Homo sapiens
  chr6:166422281-166422341
  hyper
gtgcgttctccaagagggaagctcagtatgagcactcccttcgtccccttaaggaggacc

SEQ ID NO: 358701 - DNA, 228 bp, Homo sapiens; identical to SEQ ID NO: 284635
  chr6:166667296-166667524
  hyper

SEQ ID NO: 358702 - DNA, 334 bp, Homo sapiens
  chr6:167039793-167040127
  hyper
cgaatctgtatcagcctcggcgctgcgaggatattgcatcaggctctttactcctgaacgccgttttagacgcctaagcagattgtgctgctgcctgttcttccccgttctgtgaattctacactgacttcaagtgcacgaatgagctacaagataaggtggaacctgccggccgggcacggcagacagcacctgatcagcgcctcggagggcggagctggggggcttctccactcgggactttgagggacccccgcggagcgctccgcgccactcggcggtctagctgcagagaaagcccctcctcacccggggctccctgtggcccacaggg

SEQ ID NO: 358703 - DNA, 423 bp, Homo sapiens
  chr6:167040325-167040748
  hyper
acccaggggtggcgaggcgggctcgggcgaccacggcccgctcagtgcccggcacctgcgcgccccgagggcggccgcattacctcgagccggctcaggctggagctcttggagcgcgacttcctgcgcaggtacacagagaagaacctgcgcacggcgaacttcttcatgctcaggtccatcgccccgcgcccagcccggagcagccgcagggccgggggacgcgcatccccggcatcccaggcgcggggctcaggtccgcgggcgggcacgcgtggccagggagcccggcacggcggccatgggcgcggggcgtggggcgcgagctgcggtcacaaagggcaggccgcgccggccaccgcggccggggccacaatcgctccctccgcctccttctccgcctcccctgcgagtaccagcgcc

SEQ ID NO: 358704 - DNA, 340 bp, Homo sapiens
  chr6:167764611-167764951
  hyper
cggagccccgcaggcccgtggccccctgcctggttctcccgcctctgcaagcctagccttcaggactccgcctcgcccccctcttttctgttcggagactcacggggccgtctgtctggaccacgtgtgcacatttctgaccacgattcctccgcacaccagctacaggcaccgcagcgctggggacggcacagctgaactgtgctggcagcgaaggggcctcacggggacggctcagctccctgagggcgcaacccacctggtccgggggcgggggggggggtgaggaataaacttccgcggttttcagtgacccagtttgttgcatggcacatgttgg

SEQ ID NO: 358705 - DNA, 506 bp, Homo sapiens; identical to SEQ ID NO: 345259
  chr6:170124879-170125385
  hyper

SEQ ID NO: 358706 - DNA, 86 bp, Homo sapiens; identical to SEQ ID NO: 350497
  chr7:149024-149110
  hyper

SEQ ID NO: 358707 - DNA, 575 bp, Homo sapiens; identical to SEQ ID NO: 350498
  chr7:149220-149795
  hyper

SEQ ID NO: 358708 - DNA, 437 bp, Homo sapiens
  chr7:191993-192430
  hyper
cgggaccggtgccgggagctccgctgccctggcgtcccctgggtccaggcccagtcgctccttgggcctctctcgcggggccgcctccgcctcctccttgccgagacgggcgtggggcacggggtcgccgcccggcggggagctcatccggcggcgcagacgccccgcggctccggggagggacttggcctgggccccggccccgcgctcctctggggaggagccgagaggctgcagctggcggcggcggccccgggcgggagggggtcccaggaagcggccaggccggagccccccactcggccgcagctgctggcctggccagaaccgagcgcgccctcccggtctccgccgcttccctctgcaaaccgcgggcaggaggagccctctccttagcgggcccggagctcagaggcgtcgcggggcgcggccgaggg

SEQ ID NO: 358709 - DNA, 362 bp, Homo sapiens; identical to SEQ ID NO: 284670
  chr7:192614-192976
  hyper

SEQ ID NO: 358710 - DNA, 511 bp, Homo sapiens; identical to SEQ ID NO: 284671
  chr7:193101-193612
  hyper

SEQ ID NO: 358711 - DNA, 34 bp, Homo sapiens
  chr7:193708-193742
  hyper
ccgggtggcggttccgccgctcacggaggaggac

SEQ ID NO: 358712 - DNA, 115 bp, Homo sapiens
  chr7:556571-556686
  hyper
cgggccctgacccgggggccgcctccgcccgcccgcccgtcggaccgggagccgcgcctgcccttggggcctcgctccgcgggctgcccgcccggcgcacgggccagggctctgc

SEQ ID NO: 358713 - DNA, 212 bp, Homo sapiens; identical to SEQ ID NO: 200765
  chr7:556716-556928
  hyper

SEQ ID NO: 358714 - DNA, 110 bp, Homo sapiens; identical to SEQ ID NO: 200766
  chr7:556983-557093
  hyper

SEQ ID NO: 358715 - DNA, 77 bp, Homo sapiens
  chr7:557220-557297
  hyper
gagaccccgcgagcgccggccgcagtccccgccccagcccccgcggagccctcgccccggccctggaaccagaagcc

SEQ ID NO: 358716 - DNA, 294 bp, Homo sapiens; identical to SEQ ID NO: 200769
  chr7:557697-557991
  hyper

SEQ ID NO: 358717 - DNA, 238 bp, Homo sapiens; identical to SEQ ID NO: 332992
  chr7:822395-822633
  hyper

SEQ ID NO: 358718 - DNA, 274 bp, Homo sapiens; identical to SEQ ID NO: 332994
  chr7:889360-889634
  hyper

SEQ ID NO: 358719 - DNA, 333 bp, Homo sapiens; identical to SEQ ID NO: 332995
  chr7:1001822-1002155
  hyper

SEQ ID NO: 358720 - DNA, 223 bp, Homo sapiens
  chr7:1270815-1271038
  hyper
cgcctctcggtctcctggattggctgggcctggtcctcaaccctgcgccgtcccctcctctcccgcaaggagagacaagagggtcattgaagtcggagtcagcgtggatcggcccgtccacgaccttcagttaggaacagggccagactgtgggtccagtcgcagggacaggcagtcgtgtggcaggacggggtggccttgcgcccgccaacccaagcattcc

SEQ ID NO: 358721 - DNA, 91 bp, Homo sapiens
  chr7:1276567-1276658
  hyper
ggccggacccagcccgccggagggcgaggagctggacatggactgaggccgcggcggccgggagaggcgcgtagccggcccgcggccgctc

SEQ ID NO: 358722 - DNA, 261 bp, Homo sapiens; identical to SEQ ID NO: 284709
  chr7:1277556-1277817
  hyper

SEQ ID NO: 358723 - DNA, 114 bp, Homo sapiens; identical to SEQ ID NO: 350501
  chr7:1280235-1280349
  hyper

SEQ ID NO: 358724 - DNA, 1005 bp, Homo sapiens; identical to SEQ ID NO: 333003
  chr7:1498587-1499592
  hyper

SEQ ID NO: 358725 - DNA, 233 bp, Homo sapiens; identical to SEQ ID NO: 284724
  chr7:1705153-1705386
  hyper

SEQ ID NO: 358726 - DNA, 502 bp, Homo sapiens; identical to SEQ ID NO: 284725
  chr7:1705693-1706195
  hyper

SEQ ID NO: 358727 - DNA, 147 bp, Homo sapiens
  chr7:1708913-1709060
  hyper
cggcgagcggagagcgtgccgggggtactgaggccgggaaccagaggcgggcgggggacaggaagcggggagggggcgccggcggggacgcgcgggctgcgcggggactggagagggtccccaggcgccggccgttctgcgaacgcg

SEQ ID NO: 358728 - DNA, 290 bp, Homo sapiens; identical to SEQ ID NO: 333006
  chr7:2517249-2517539
  hyper

SEQ ID NO: 358729 - DNA, 152 bp, Homo sapiens; identical to SEQ ID NO: 333008
  chr7:2559952-2560104
  hyper

SEQ ID NO: 358730 - DNA, 43 bp, Homo sapiens; identical to SEQ ID NO: 284742
  chr7:2728259-2728302
  hyper

SEQ ID NO: 358731 - DNA, 396 bp, Homo sapiens; identical to SEQ ID NO: 333010
  chr7:3018114-3018510
  hyper

SEQ ID NO: 358732 - DNA, 395 bp, Homo sapiens; identical to SEQ ID NO: 350504
  chr7:3082731-3083126
  hyper

SEQ ID NO: 358733 - DNA, 84 bp, Homo sapiens; identical to SEQ ID NO: 350505
  chr7:3083602-3083686
  hyper

SEQ ID NO: 358734 - DNA, 132 bp, Homo sapiens; identical to SEQ ID NO: 284748
  chr7:4784755-4784887
  hyper

SEQ ID NO: 358735 - DNA, 293 bp, Homo sapiens
  chr7:4922256-4922549
  hyper
cgaagcgcagactttacacactcagctctctcccctccttccatgaatcctatctttacagccccagcccgagccacgctttcaaatgcaaacataattcaatcagatttaattctgacctgctagctgctggagaggagaccgacttgccccccagcaaaagggactttcaagactggttcctgtctggaatgcacaagaggtggcctatattaaccgcgggacacgagcaatcagattcttctgtgcaattcagattagccaaacacttgacaggcgacagggcagggcag

SEQ ID NO: 358736 - DNA, 436 bp, Homo sapiens; identical to SEQ ID NO: 350507
  chr7:5458503-5458939
  hyper

SEQ ID NO: 358737 - DNA, 128 bp, Homo sapiens; identical to SEQ ID NO: 350508
  chr7:5467061-5467189
  hyper

SEQ ID NO: 358738 - DNA, 107 bp, Homo sapiens; identical to SEQ ID NO: 350509
  chr7:5467905-5468012
  hyper

SEQ ID NO: 358739 - DNA, 635 bp, Homo sapiens; identical to SEQ ID NO: 346875
  chr7:5632268-5632903
  hyper

SEQ ID NO: 358740 - DNA, 123 bp, Homo sapiens; identical to SEQ ID NO: 350511
  chr7:5633472-5633595
  hyper

SEQ ID NO: 358741 - DNA, 237 bp, Homo sapiens
  chr7:6543240-6543477
  hyper
ccaggcgccggggctccatgctcatcagcacctggcgcagctccgcggggctcagcttcaggtgtgccaagaggatggctgcgggcggggcggggcggtgagctgggcggggccggagcggggccggatgggacccaagacggagagggcagggcagaggcggggagagggcggacacggggcggggcctaggggagaggacggggccttgaggctggaaggacaagaaacgcggac

SEQ ID NO: 358742 - DNA, 61 bp, Homo sapiens
  chr7:6570393-6570454
  hyper
cgaccagcccaattgtaggaaggaaagtgggctttcaatcccagccttttatcccaacacc

SEQ ID NO: 358743 - DNA, 62 bp, Homo sapiens; identical to SEQ ID NO: 284778
  chr7:6655356-6655418
  hyper

SEQ ID NO: 358744 - DNA, 220 bp, Homo sapiens; identical to SEQ ID NO: 284779
  chr7:6655448-6655668
  hyper

SEQ ID NO: 358745 - DNA, 153 bp, Homo sapiens
  chr7:6655854-6656007
  hyper
gacgcgtcccttgagagagtttggactggatggcacgagtcggcctgtttaggggagaggggccagctctgcacgggccagggtggactctcaggagcgcctgggcacagggccaggccgtgggtgacagtgctctggacacctgccttgccc

SEQ ID NO: 358746 - DNA, 521 bp, Homo sapiens; identical to SEQ ID NO: 333026
  chr7:8301683-8302204
  hyper

SEQ ID NO: 358747 - DNA, 322 bp, Homo sapiens; identical to SEQ ID NO: 345260
  chr7:8476750-8477072
  hyper

SEQ ID NO: 358748 - DNA, 314 bp, Homo sapiens; identical to SEQ ID NO: 333029
  chr7:8480006-8480320
  hyper

SEQ ID NO: 358749 - DNA, 66 bp, Homo sapiens; identical to SEQ ID NO: 333032
  chr7:11870605-11870671
  hyper

SEQ ID NO: 358750 - DNA, 352 bp, Homo sapiens
  chr7:14028689-14029041
  hyper
cgcaaatctcagctcagtattttatattttgagcatttagctggagatttcctcaggatctggacttctatcaacctagaggggaacaagatggcttttaggcttaaaaaaaaatcatgaatgaagctcttgaatttgcatagctaattaccctccgacagtcccattcacaaaaataaccctccctacaccgcctccttcacctggatccaaagagagccaacagagttcacaatttacatattttcggtagtagcaaaaatccgaacaagaggcgatgtatttatttacactctcgatgtttccctgcgcggtcggtgtaccccgggcagctctgattcgcaaacgtgtg

SEQ ID NO: 358751 - DNA, 370 bp, Homo sapiens
  chr7:14029071-14029441
  hyper
gctttgcacctaacgggactaaagagacggagacacctctttcatcaggatagtttttgcgacccacaaccatgcaattatctggagagacataaaaagttgttggaaagacccacctgaaggccacgctaggcgaaaggctgcaaaaacttccctccaaatttaataaaaacattaattatagcccagcacttcccccttggaagccgaaagcgcctctgacagagctcaattcggtggtttttcctctacttctcctccaggggcctccaatccaaactgatggatcgctgcctcccattggctccgcgtctctttcacaagatcagatttcgggctgtcaatcaggcggcttgctgccccttcccgc

SEQ ID NO: 358752 - DNA, 373 bp, Homo sapiens; identical to SEQ ID NO: 284815
  chr7:16460517-16460890
  hyper

SEQ ID NO: 358753 - DNA, 271 bp, Homo sapiens; identical to SEQ ID NO: 350515
  chr7:16793071-16793342
  hyper

SEQ ID NO: 358754 - DNA, 182 bp, Homo sapiens; identical to SEQ ID NO: 114656
  chr7:16793380-16793562
  hyper

SEQ ID NO: 358755 - DNA, 215 bp, Homo sapiens; identical to SEQ ID NO: 350517
  chr7:17339346-17339561
  hyper

SEQ ID NO: 358756 - DNA, 260 bp, Homo sapiens; identical to SEQ ID NO: 350518
  chr7:17339591-17339851
  hyper

SEQ ID NO: 358757 - DNA, 104 bp, Homo sapiens; identical to SEQ ID NO: 346877
  chr7:18125868-18125972
  hyper

SEQ ID NO: 358758 - DNA, 218 bp, Homo sapiens; identical to SEQ ID NO: 200838
  chr7:18126225-18126443
  hyper

SEQ ID NO: 358759 - DNA, 76 bp, Homo sapiens; identical to SEQ ID NO: 350521
  chr7:19146849-19146925
  hyper

SEQ ID NO: 358760 - DNA, 59 bp, Homo sapiens; identical to SEQ ID NO: 200840
  chr7:19156644-19156703
  hyper

SEQ ID NO: 358761 - DNA, 127 bp, Homo sapiens; identical to SEQ ID NO: 350523
  chr7:19183520-19183647
  hyper

SEQ ID NO: 358762 - DNA, 312 bp, Homo sapiens; identical to SEQ ID NO: 284827
  chr7:19183746-19184058
  hyper

SEQ ID NO: 358763 - DNA, 276 bp, Homo sapiens; identical to SEQ ID NO: 333045
  chr7:20369119-20369395
  hyper

SEQ ID NO: 358764 - DNA, 119 bp, Homo sapiens; identical to SEQ ID NO: 200845
  chr7:20825260-20825379
  hyper

SEQ ID NO: 358765 - DNA, 297 bp, Homo sapiens; identical to SEQ ID NO: 200847
  chr7:20826202-20826499
  hyper

SEQ ID NO: 358766 - DNA, 41 bp, Homo sapiens
  chr7:20830567-20830608
  hyper
cgcgtacctctgcagggtacgtttaaacccggctcttagca

SEQ ID NO: 358767 - DNA, 147 bp, Homo sapiens
  chr7:20836997-20837144
  hyper
cttcggaagtgctcctgcttccggtttcacgtatacctgggatgcgttgccatacaggtttgtcccgttttaatgctttgacccatctaagatacgaggacaggagactggagaagtaaacgaaaggcaatggccgaggggtaaggc

SEQ ID NO: 358768 - DNA, 49 bp, Homo sapiens
  chr7:21582471-21582520
  hyper
cgcactgggggctcagacccaccccggacacgcggcttctcggccgtgt

SEQ ID NO: 358769 - DNA, 1116 bp, Homo sapiens; identical to SEQ ID NO: 350525
  chr7:21984770-21985886
  hyper

SEQ ID NO: 358770 - DNA, 136 bp, Homo sapiens
  chr7:22589952-22590088
  hyper
ccgcagccccagggaaatggcagtgacacaggtggcagccaccttcagagcgccaggcccccgccagcacatctgcaggtagcagctttggccacaggaaggcgcatctgcactgccgggttcgcaaaagcggggc

SEQ ID NO: 358771 - DNA, 140 bp, Homo sapiens; identical to SEQ ID NO: 345262
  chr7:22893437-22893577
  hyper

SEQ ID NO: 358772 - DNA, 1088 bp, Homo sapiens; identical to SEQ ID NO: 345263
  chr7:22893607-22894695
  hyper

SEQ ID NO: 358773 - DNA, 209 bp, Homo sapiens; identical to SEQ ID NO: 346882
  chr7:23052818-23053027
  hyper

SEQ ID NO: 358774 - DNA, 713 bp, Homo sapiens; identical to SEQ ID NO: 284856
  chr7:23053080-23053793
  hyper

SEQ ID NO: 358775 - DNA, 246 bp, Homo sapiens; identical to SEQ ID NO: 350530
  chr7:23053819-23054065
  hyper

SEQ ID NO: 358776 - DNA, 107 bp, Homo sapiens; identical to SEQ ID NO: 346884
  chr7:23287654-23287761
  hyper

SEQ ID NO: 358777 - DNA, 522 bp, Homo sapiens; identical to SEQ ID NO: 350532
  chr7:23507580-23508102
  hyper

SEQ ID NO: 358778 - DNA, 760 bp, Homo sapiens; identical to SEQ ID NO: 350533
  chr7:23510081-23510841
  hyper

SEQ ID NO: 358779 - DNA, 228 bp, Homo sapiens; identical to SEQ ID NO: 346885
  chr7:23513246-23513474
  hyper

SEQ ID NO: 358780 - DNA, 241 bp, Homo sapiens; identical to SEQ ID NO: 284862
  chr7:23514425-23514666
  hyper

SEQ ID NO: 358781 - DNA, 221 bp, Homo sapiens; identical to SEQ ID NO: 333064
  chr7:23570157-23570378
  hyper

SEQ ID NO: 358782 - DNA, 285 bp, Homo sapiens; identical to SEQ ID NO: 333065
  chr7:23570662-23570947
  hyper

SEQ ID NO: 358783 - DNA, 42 bp, Homo sapiens
  chr7:23719658-23719700
  hyper
ggcgccggcagccagtaggggcgcgcgtcctgcgcagttgcc

SEQ ID NO: 358784 - DNA, 868 bp, Homo sapiens; identical to SEQ ID NO: 333067
  chr7:24613119-24613987
  hyper

SEQ ID NO: 358785 - DNA, 845 bp, Homo sapiens
  chr7:25019409-25020254
  hyper
cgcggcgccccgcaaacagcagcccttccgagcccgcgccgccgccaggccccccgacacccaggccccatttaggcgggcgccccgccactcacctgagcgctgtgcagccggagacgctccctagttccccggggccgggctccggggttagcgcacagaaccgggagaaggcaaccccggcttctccggtacccccgcaacgtgcagctgacagctcccgcaccggccgcaggagtcgggggcggggatggccacttgcagacagactgcggggccggagccgcgctgcgcaccggccgcgaagcgctcaagtcccctctcccgggccggctggcgggcgccaccagcacgcggccagttctgagtactttgcccagaacttctcggcgcgcgccgcccggcgattagcccgaggagccgcgcaagggcgggagcgcaggggaggggcctgagaggcccaggggcggggccccgagggggcgggagggcggcagagtgatgcacaatctcaccaatcagaagtcgcctttcgggaaggaggtggggcgatgtcctcggaagaagccagcggattccatgacgcggcgggggaactagggaccccggattccggatgggttgggagggcggagggaggcgagtcctgcggcgaggcactgggtggggctcccggtggcccagctcggtgcctgcgcgcggtaggcgttcggtaaatgttcctctagtggcttttccgggccagggaaggaggaaaaagtgagggcagcgcgggaggggcaggtttacggagaaggctccaggggacccttgcggtcgcacaggctaggagaactcgacctccc

SEQ ID NO: 358786 - DNA, 188 bp, Homo sapiens; identical to SEQ ID NO: 200878
  chr7:25892243-25892431
  hyper

SEQ ID NO: 358787 - DNA, 338 bp, Homo sapiens; identical to SEQ ID NO: 333071
  chr7:25894678-25895016
  hyper

SEQ ID NO: 358788 - DNA, 195 bp, Homo sapiens; identical to SEQ ID NO: 284882
  chr7:25896938-25897133
  hyper

SEQ ID NO: 358789 - DNA, 109 bp, Homo sapiens; identical to SEQ ID NO: 345266
  chr7:25897246-25897355
  hyper

SEQ ID NO: 358790 - DNA, 295 bp, Homo sapiens; identical to SEQ ID NO: 346890
  chr7:25901811-25902106
  hyper

SEQ ID NO: 358791 - DNA, 207 bp, Homo sapiens; identical to SEQ ID NO: 200882
  chr7:25902138-25902345
  hyper

SEQ ID NO: 358792 - DNA, 224 bp, Homo sapiens; identical to SEQ ID NO: 345267
  chr7:26192423-26192647
  hyper

SEQ ID NO: 358793 - DNA, 111 bp, Homo sapiens; identical to SEQ ID NO: 200885
  chr7:26192748-26192859
  hyper

SEQ ID NO: 358794 - DNA, 90 bp, Homo sapiens; identical to SEQ ID NO: 345269
  chr7:27135176-27135266
  hyper

SEQ ID NO: 358795 - DNA, 142 bp, Homo sapiens; identical to SEQ ID NO: 345270
  chr7:27136790-27136932
  hyper

SEQ ID NO: 358796 - DNA, 66 bp, Homo sapiens
  chr7:27203938-27204004
  hyper
cgccctaaggccgctgatcacgtctgtggcttatttgaataatctgtcatggggacccttgtggcc

SEQ ID NO: 358797 - DNA, 243 bp, Homo sapiens; identical to SEQ ID NO: 200892
  chr7:27204141-27204384
  hyper

SEQ ID NO: 358798 - DNA, 418 bp, Homo sapiens; identical to SEQ ID NO: 284906
  chr7:27209044-27209462
  hyper

SEQ ID NO: 358799 - DNA, 108 bp, Homo sapiens; identical to SEQ ID NO: 284907
  chr7:27209681-27209789
  hyper

SEQ ID NO: 358800 - DNA, 104 bp, Homo sapiens
  chr7:27223010-27223114
  hyper
cgcctgcggacatttcaccttccagcacctgggctgccccttcccaaggcagtaaaggcggctccagtcccagtctttcccggctgcggccaagactgggcagt

SEQ ID NO: 358801 - DNA, 268 bp, Homo sapiens; identical to SEQ ID NO: 200894
  chr7:27223306-27223574
  hyper

SEQ ID NO: 358802 - DNA, 47 bp, Homo sapiens
  chr7:27225249-27225296
  hyper
gggtgggtgagggatgccctggactggggatagccaggtgggagtcc

SEQ ID NO: 358803 - DNA, 59 bp, Homo sapiens; identical to SEQ ID NO: 350549
  chr7:27233098-27233157
  hyper

SEQ ID NO: 358804 - DNA, 224 bp, Homo sapiens; identical to SEQ ID NO: 200900
  chr7:27238917-27239141
  hyper

SEQ ID NO: 358805 - DNA, 71 bp, Homo sapiens; identical to SEQ ID NO: 350551
  chr7:27245310-27245381
  hyper

SEQ ID NO: 358806 - DNA, 263 bp, Homo sapiens
  chr7:27250231-27250494
  hyper
agcattcctctgtgaaagctggcttttccctttttttcctatactccccttcccgccctgcgctctaaatcctggctctggaaatccaccagaatcaaatgctggctccctgcgggcccgcgtcggagcggctcacgccattggaatctttttatgacctttgatgtgtttaaataacatggcaagtctgagcacacacctcggattaaactttaatcggctgcagtcaaggtcgcccaggtggtaaaagcgtttcctccgac

SEQ ID NO: 358807 - DNA, 37 bp, Homo sapiens; identical to SEQ ID NO: 350552
  chr7:27278957-27278994
  hyper

SEQ ID NO: 358808 - DNA, 136 bp, Homo sapiens; identical to SEQ ID NO: 350553
  chr7:27279659-27279795
  hyper

SEQ ID NO: 358809 - DNA, 77 bp, Homo sapiens; identical to SEQ ID NO: 350554
  chr7:27281871-27281948
  hyper

SEQ ID NO: 358810 - DNA, 59 bp, Homo sapiens; identical to SEQ ID NO: 200908
  chr7:27285386-27285445
  hyper

SEQ ID NO: 358811 - DNA, 371 bp, Homo sapiens; identical to SEQ ID NO: 284934
  chr7:28450240-28450611
  hyper

SEQ ID NO: 358812 - DNA, 185 bp, Homo sapiens; identical to SEQ ID NO: 350556
  chr7:28995382-28995567
  hyper

SEQ ID NO: 358813 - DNA, 332 bp, Homo sapiens; identical to SEQ ID NO: 200912
  chr7:28995992-28996324
  hyper

SEQ ID NO: 358814 - DNA, 161 bp, Homo sapiens; identical to SEQ ID NO: 350558
  chr7:29185654-29185815
  hyper

SEQ ID NO: 358815 - DNA, 37 bp, Homo sapiens; identical to SEQ ID NO: 200915
  chr7:29186197-29186234
  hyper

SEQ ID NO: 358816 - DNA, 496 bp, Homo sapiens; identical to SEQ ID NO: 200916
  chr7:29234008-29234504
  hyper

SEQ ID NO: 358817 - DNA, 159 bp, Homo sapiens; identical to SEQ ID NO: 345272
  chr7:29234886-29235045
  hyper

SEQ ID NO: 358818 - DNA, 292 bp, Homo sapiens; identical to SEQ ID NO: 346899
  chr7:29602717-29603009
  hyper

SEQ ID NO: 358819 - DNA, 66 bp, Homo sapiens; identical to SEQ ID NO: 350563
  chr7:29604726-29604792
  hyper

SEQ ID NO: 358820 - DNA, 156 bp, Homo sapiens
  chr7:29847067-29847223
  hyper
cggggagggcgggcacccggccgccctggacctggaggagcgccgcccgggccccgtgggcaggcaggcaccggctctcaggaacagcgcctttggagggtggcgtgccagccgcgtgggtgtgcccgtggcgggcgccggggcggcgtggggacc

SEQ ID NO: 358821 - DNA, 31 bp, Homo sapiens; identical to SEQ ID NO: 350564
  chr7:31528326-31528357
  hyper

SEQ ID NO: 358822 - DNA, 338 bp, Homo sapiens
  chr7:32981774-32982112
  hyper
cgggagcgcaaggcctcccaagtcagggcccgaattccgcgtggtgccaaacggcagctggctccctgaatgcccaccctgaaccctggtaaaaaataaaaaaaacaacaacaaaattccctccaacccggagaaaacaagtccgcctctgttctacctagcagcgccgtggccagtccccgccgcccattctctcttcttccgggcctcgccacaccaacactgcaggacccgtgtcctcgtcccttctccgtagcagaggatgaaaagaacggggtttctccatgtcgcagtggcccagggaactcagaggtggagcgcgggggcagcgtgctcgg

SEQ ID NO: 358823 - DNA, 344 bp, Homo sapiens
  chr7:32982270-32982614
  hyper
ggcccctccgtggccgggcgggcctcgctccccacccagtgaggactagaagtcccgtcgcaggcactaggttcctcacaggcccgcacccctgcctgggtcctgggggcttggaggacccagcccagcgcccaacacggcgccgggcgcccctgttcccagaaaacgggcggcgcgcggactgcggcccagacggctgctcgagactcacaaggactccaggcgcttgagctgctgcagctgctgggcgtcgtgccgccgccgcttctgctcccgggcccgctgcagttcctgatccagcggctcccgcggccaccacgcgcccccagccctcgcatcctcgc

SEQ ID NO: 358824 - DNA, 212 bp, Homo sapiens
  chr7:32996732-32996944
  hyper
cggccacgtaggagcccctcacggcaccaaacccggtgtctccagggacgggcggagaccagcgggtgggcttgggcagtacgcgcttttctcttccgactttgggccaaagccttgtccggagatcacagtgtctcgctcggggacacgccctctctaggcccagacttggtccccactggagttcccagcccccctccccgctgcggcac

SEQ ID NO: 358825 - DNA, 155 bp, Homo sapiens
  chr7:32997454-32997609
  hyper
ctctccggacaggcctttccctcctgccggacctcccctagctccgccccgtgcagccgcgctcctcccttcttccgctgcccagatcctcccggaccccagaccctccgccgcgggtgagcctcccggccctcacgtgccctaggctgccagcc

SEQ ID NO: 358826 - DNA, 308 bp, Homo sapiens; identical to SEQ ID NO: 333118
  chr7:35576961-35577269
  hyper

SEQ ID NO: 358827 - DNA, 40 bp, Homo sapiens
  chr7:37955597-37955637
  hyper
cgcccctggcagccttaggtgtggccgcccagttctcgat

SEQ ID NO: 358828 - DNA, 204 bp, Homo sapiens; identical to SEQ ID NO: 200945
  chr7:37956056-37956260
  hyper

SEQ ID NO: 358829 - DNA, 136 bp, Homo sapiens
  chr7:37956568-37956704
  hyper
ctctgggccgcagcccagggctggaagcctgctttccccctaaagtccctcctttttagtctggccagtcttttttcttcggaccaagaaaaagaacctctggcagttgttttcgacaccggatacaagagggtgc

SEQ ID NO: 358830 - DNA, 168 bp, Homo sapiens; identical to SEQ ID NO: 345273
  chr7:37960958-37961126
  hyper

SEQ ID NO: 358831 - DNA, 46 bp, Homo sapiens; identical to SEQ ID NO: 350567
  chr7:39454304-39454350
  hyper

SEQ ID NO: 358832 - DNA, 62 bp, Homo sapiens; identical to SEQ ID NO: 350568
  chr7:42267546-42267608
  hyper

SEQ ID NO: 358833 - DNA, 139 bp, Homo sapiens; identical to SEQ ID NO: 350569
  chr7:42267822-42267961
  hyper

SEQ ID NO: 358834 - DNA, 408 bp, Homo sapiens; identical to SEQ ID NO: 200954
  chr7:42276904-42277312
  hyper

SEQ ID NO: 358835 - DNA, 60 bp, Homo sapiens; identical to SEQ ID NO: 200955
  chr7:42277588-42277648
  hyper

SEQ ID NO: 358836 - DNA, 51 bp, Homo sapiens; identical to SEQ ID NO: 346902
  chr7:42927739-42927790
  hyper

SEQ ID NO: 358837 - DNA, 412 bp, Homo sapiens; identical to SEQ ID NO: 346903
  chr7:42928175-42928587
  hyper

SEQ ID NO: 358838 - DNA, 38 bp, Homo sapiens; identical to SEQ ID NO: 350573
  chr7:44364447-44364485
  hyper

SEQ ID NO: 358839 - DNA, 369 bp, Homo sapiens; identical to SEQ ID NO: 346904
  chr7:44365258-44365627
  hyper

SEQ ID NO: 358840 - DNA, 211 bp, Homo sapiens; identical to SEQ ID NO: 333131
  chr7:44788907-44789118
  hyper

SEQ ID NO: 358841 - DNA, 160 bp, Homo sapiens; identical to SEQ ID NO: 350576
  chr7:44924093-44924253
  hyper

SEQ ID NO: 358842 - DNA, 309 bp, Homo sapiens; identical to SEQ ID NO: 200961
  chr7:44924469-44924778
  hyper

SEQ ID NO: 358843 - DNA, 168 bp, Homo sapiens
  chr7:45299683-45299851
  hyper
cgcgcgcaatcagatccgggttagcaggatgcatctttgaggtccccaaaccaagccacctgcacggacccaatatctctggcgcgtcccgaacgccgtggattggcgtctgccgccccctgccggcggcgcgctgcactgcagacactgaactcgcccaatgggtgc

SEQ ID NO: 358844 - DNA, 95 bp, Homo sapiens
  chr7:45615102-45615197
  hyper
cggtcttttgccgcacccatccccacagagggactgaaagtgggcgaggagagcagacccccagggcaagctccaaggccggctctgcgcgcagc

SEQ ID NO: 358845 - DNA, 55 bp, Homo sapiens; identical to SEQ ID NO: 200968
  chr7:48075904-48075959
  hyper

SEQ ID NO: 358846 - DNA, 102 bp, Homo sapiens; identical to SEQ ID NO: 345274
  chr7:50344738-50344840
  hyper

SEQ ID NO: 358847 - DNA, 208 bp, Homo sapiens; identical to SEQ ID NO: 200972
  chr7:50861127-50861335
  hyper

SEQ ID NO: 358848 - DNA, 106 bp, Homo sapiens; identical to SEQ ID NO: 350580
  chr7:50861531-50861637
  hyper

SEQ ID NO: 358849 - DNA, 362 bp, Homo sapiens; identical to SEQ ID NO: 200974
  chr7:51383392-51383754
  hyper

SEQ ID NO: 358850 - DNA, 461 bp, Homo sapiens; identical to SEQ ID NO: 200975
  chr7:51383790-51384251
  hyper

SEQ ID NO: 358851 - DNA, 152 bp, Homo sapiens
  chr7:51384951-51385103
  hyper
atccgtgcagcaaatgtctagtgcgtagggtcgcaaagtgggagtcccgaccgggagcgtcaggaacacctgggaacttgttagaaatgcagatttctggggcccaccaggtcccacggaatcagaaacagtgcgggctggagcgcggcctc

SEQ ID NO: 358852 - DNA, 294 bp, Homo sapiens; identical to SEQ ID NO: 200980
  chr7:55086689-55086983
  hyper

SEQ ID NO: 358853 - DNA, 144 bp, Homo sapiens; identical to SEQ ID NO: 200981
  chr7:55087803-55087947
  hyper

SEQ ID NO: 358854 - DNA, 78 bp, Homo sapiens
  chr7:55087982-55088060
  hyper
cggagacgtccgggtctgctccacctgcagcccttcggtcgcgcctgggcttcgcggtggagcgggacgcggctgtcc

SEQ ID NO: 358855 - DNA, 65 bp, Homo sapiens; identical to SEQ ID NO: 333144
  chr7:63767198-63767263
  hyper

SEQ ID NO: 358856 - DNA, 110 bp, Homo sapiens; identical to SEQ ID NO: 333146
  chr7:64254700-64254810
  hyper

SEQ ID NO: 358857 - DNA, 56 bp, Homo sapiens; identical to SEQ ID NO: 346907
  chr7:64734140-64734196
  hyper

SEQ ID NO: 358858 - DNA, 60 bp, Homo sapiens; identical to SEQ ID NO: 200992
  chr7:64974448-64974508
  hyper

SEQ ID NO: 358859 - DNA, 51 bp, Homo sapiens; identical to SEQ ID NO: 346909
  chr7:65037711-65037762
  hyper

SEQ ID NO: 358860 - DNA, 469 bp, Homo sapiens; identical to SEQ ID NO: 200994
  chr7:65509043-65509512
  hyper

SEQ ID NO: 358861 - DNA, 51 bp, Homo sapiens
  chr7:65509542-65509593
  hyper
ttcgcccaggccgacttcagactgctgagcgtttgcggacaggattatctc

SEQ ID NO: 358862 - DNA, 156 bp, Homo sapiens; identical to SEQ ID NO: 350587
  chr7:69062203-69062359
  hyper

SEQ ID NO: 358863 - DNA, 421 bp, Homo sapiens; identical to SEQ ID NO: 201000
  chr7:69063038-69063459
  hyper

SEQ ID NO: 358864 - DNA, 318 bp, Homo sapiens; identical to SEQ ID NO: 201001
  chr7:69063552-69063870
  hyper

SEQ ID NO: 358865 - DNA, 282 bp, Homo sapiens; identical to SEQ ID NO: 201002
  chr7:69063900-69064182
  hyper

SEQ ID NO: 358866 - DNA, 200 bp, Homo sapiens; identical to SEQ ID NO: 350591
  chr7:69065161-69065361
  hyper

SEQ ID NO: 358867 - DNA, 181 bp, Homo sapiens; identical to SEQ ID NO: 346910
  chr7:70060834-70061015
  hyper

SEQ ID NO: 358868 - DNA, 238 bp, Homo sapiens; identical to SEQ ID NO: 346911
  chr7:70061149-70061387
  hyper

SEQ ID NO: 358869 - DNA, 58 bp, Homo sapiens; identical to SEQ ID NO: 350594
  chr7:76145303-76145361
  hyper

SEQ ID NO: 358870 - DNA, 106 bp, Homo sapiens; identical to SEQ ID NO: 346912
  chr7:76751570-76751676
  hyper

SEQ ID NO: 358871 - DNA, 230 bp, Homo sapiens; identical to SEQ ID NO: 346913
  chr7:76751716-76751946
  hyper

SEQ ID NO: 358872 - DNA, 131 bp, Homo sapiens; identical to SEQ ID NO: 285105
  chr7:79081892-79082023
  hyper

SEQ ID NO: 358873 - DNA, 441 bp, Homo sapiens; identical to SEQ ID NO: 285106
  chr7:79082579-79083020
  hyper

SEQ ID NO: 358874 - DNA, 116 bp, Homo sapiens
  chr7:79084011-79084127
  hyper
ggagacactcccttgcccaggaaagccgccagagtccggcttgtacctggggaagaatccttaagacggtctggcccaacactcctttgctcacagagaaaggggagaagactccc

SEQ ID NO: 358875 - DNA, 258 bp, Homo sapiens; identical to SEQ ID NO: 201015
  chr7:79764213-79764471
  hyper

SEQ ID NO: 358876 - DNA, 216 bp, Homo sapiens; identical to SEQ ID NO: 201016
  chr7:79764712-79764928
  hyper

SEQ ID NO: 358877 - DNA, 229 bp, Homo sapiens
  chr7:79765213-79765442
  hyper
ttttcttgctgtgggggcatggaagccacccaagtggggttgggaagctttgctttagtagtaggcaaggcagatactcgagtggtgaaaactgctgtgaaagagcgagagggtcacgccagacaacagggttctgtctccgctgccaccgtttctgatgaatgagatttgccaggtacacgcaaggcttttatttgttcttagcactgttctgttcgtgaaacgctac

SEQ ID NO: 358878 - DNA, 236 bp, Homo sapiens
  chr7:80548021-80548257
  hyper
cgcgtgtgttcttaagaaaatgtccaggcttgagcataccaatgtatgaaaaatcaatatacaggccaaaaaagttatactttgctaaatctgtaatgcggaaaatgaccaatttagcttaccgaggttgaaagaaatcagcacggaaaagtcatcagtttgctaccggggttggatgcgcttgtgtctccagtccttttcccagacgaccttattttctagcacgtcgcaaaggt

SEQ ID NO: 358879 - DNA, 446 bp, Homo sapiens
  chr7:80548403-80548849
  hyper
ttggtgtccgattacagcgccgcggcgcgcggctccggctgccccggcgcgccgccctgcaggctcgcatcaccaccgcgcagccccggccgcatctccgccagccgcgaggccccaccccgagcgcgcccgcgagagcctggcagggagccgcgggggcggaccgggcggggccgacccttagagctcgcggctggccagacgcaagaatgcgcggccgcaggctggagccctagctccgcaaccctgctcctttcgcagtccgcggcggagtgagcaacttgctgggtgcgctccacggtttttgttgccggcggctctcgaagacttacacaggctttgcctggccgtaaatatcaaagtgcaaagcagttgtggttttttatttttgccagggaaggatcactgcagccttttaaggcaaagagatgcgtttttaaaaggac

SEQ ID NO: 358880 - DNA, 351 bp, Homo sapiens; identical to SEQ ID NO: 201017
  chr7:82072703-82073054
  hyper

SEQ ID NO: 358881 - DNA, 172 bp, Homo sapiens
  chr7:82073323-82073495
  hyper
cgggcggagacgggccgggagcagccctccatacaaggcagccaggaactcccaaagtcggcgccggctcgctcccgccgcccggcgtgcgcaggcggagcggaccagccccgcggggctcccgggggacggccagccgcccagcgggcatccacaggctgcagaggctcca

SEQ ID NO: 358882 - DNA, 40 bp, Homo sapiens
  chr7:82073533-82073573
  hyper
cacatgcaggcagcgttcccccccagccctactcccaggc

SEQ ID NO: 358883 - DNA, 79 bp, Homo sapiens; identical to SEQ ID NO: 350603
  chr7:83277846-83277925
  hyper

SEQ ID NO: 358884 - DNA, 258 bp, Homo sapiens; identical to SEQ ID NO: 201022
  chr7:83277959-83278217
  hyper

SEQ ID NO: 358885 - DNA, 45 bp, Homo sapiens; identical to SEQ ID NO: 346914
  chr7:87258398-87258443
  hyper

SEQ ID NO: 358886 - DNA, 167 bp, Homo sapiens
  chr7:87563203-87563370
  hyper
cgatgcagatgaatactggctgctgtaacggcccagttggtgcatctcggatgccaggaggcggtccagtgctgatctctttcttttgcccttccctcccgcccttccagtctgtgggatatagaggacctcacagtcacgaggtcgcgacggtccgtgccgtcgtg

SEQ ID NO: 358887 - DNA, 215 bp, Homo sapiens; identical to SEQ ID NO: 285133
  chr7:87563614-87563829
  hyper

SEQ ID NO: 358888 - DNA, 439 bp, Homo sapiens; identical to SEQ ID NO: 285134
  chr7:87563890-87564329
  hyper

SEQ ID NO: 358889 - DNA, 207 bp, Homo sapiens; identical to SEQ ID NO: 350608
  chr7:87564359-87564566
  hyper

SEQ ID NO: 358890 - DNA, 106 bp, Homo sapiens; identical to SEQ ID NO: 350609
  chr7:87936014-87936120
  hyper

SEQ ID NO: 358891 - DNA, 188 bp, Homo sapiens; identical to SEQ ID NO: 350610
  chr7:87936226-87936414
  hyper

SEQ ID NO: 358892 - DNA, 636 bp, Homo sapiens
  chr7:90225109-90225745
  hyper
cgtggaaggagaaaaccgctcaaacaactggactcggcccgtttcctttcggtaacctccccacagcccaacacgctgtccccagacgctgcccgctcccaccccggtcccttcgtgatcctcccgcgcgcgggcggggcgggggaggagcgcgggggcggccgggaggggcgcggccgggagggggcgccgccggggcgcgagccagacacagagggccgcggaggacgcgggaggcgagcggggagccgaggtcgtgctaggatcccgcgcccaggggccttcgtcgagggaggggcgtggcggcggcagcaggagggcagcaggagctgtcaggctggcggttccgcgccgcggctccttctgcgctgcgcccgcaactctgggctgagaacttctcccgccggcccactcgccctcgccccgcgcactcggcgccaggcgactcccgcaccttgtacccggcccgccccgcctcctccttcggccgcaccactccccctgccggccgcgcttctctccgttacaaaggagggaaaatgagccgggcggcggcggcgcggcgcggggccaccacggcggcggcgagcgcggccgcccccggcaccacgtaaaccgcccccgcccgcccagctg

SEQ ID NO: 358893 - DNA, 211 bp, Homo sapiens; identical to SEQ ID NO: 201040
  chr7:90226057-90226268
  hyper

SEQ ID NO: 358894 - DNA, 204 bp, Homo sapiens
  chr7:93203842-93204046
  hyper
cgttagtctcagtcctccctctccgcccctctcctggttttctgacactttaaatctgtcttaggtggttcagacccaagtctaggttgtattatcagctaaaagacaactgttctttcccctggcttgctttctacctccccagagtccaggaggctcaccttcccggcgccttcctgcgctctcccagctgtgaagctgtgc

SEQ ID NO: 358895 - DNA, 170 bp, Homo sapiens; identical to SEQ ID NO: 285166
  chr7:93204047-93204217
  hyper

SEQ ID NO: 358896 - DNA, 139 bp, Homo sapiens; identical to SEQ ID NO: 350613
  chr7:94285147-94285286
  hyper

SEQ ID NO: 358897 - DNA, 38 bp, Homo sapiens; identical to SEQ ID NO: 350614
  chr7:94536809-94536847
  hyper

SEQ ID NO: 358898 - DNA, 279 bp, Homo sapiens; identical to SEQ ID NO: 201051
  chr7:94537598-94537877
  hyper

SEQ ID NO: 358899 - DNA, 472 bp, Homo sapiens; identical to SEQ ID NO: 350616
  chr7:95025593-95026065
  hyper

SEQ ID NO: 358900 - DNA, 101 bp, Homo sapiens
  chr7:95226207-95226308
  hyper
tgtcaagtactcctggccacaaactgtttccaagagtttggactccgcgtgctcattggtccttgctcagagcagggcttttacagtagccaacaagctgc

SEQ ID NO: 358901 - DNA, 261 bp, Homo sapiens; identical to SEQ ID NO: 285189
  chr7:96652921-96653182
  hyper

SEQ ID NO: 358902 - DNA, 235 bp, Homo sapiens
  chr7:98030416-98030651
  hyper
cgggcggccccacctgaggcgggcggggcagacgggggcggggccgcagggccggaggggcgtggcgtacccacctgaggcggcctggtgagcggggcccggccggggtgggcggggaggaggcggggccaggcagctggaatgggcgtggccagagggaagcgggccccccgagtgggcggggtcaccccacctgtggcggacagggcagcgaggccacggtgcgccccctcgc

SEQ ID NO: 358903 - DNA, 77 bp, Homo sapiens; identical to SEQ ID NO: 201060
  chr7:98971600-98971677
  hyper

SEQ ID NO: 358904 - DNA, 396 bp, Homo sapiens; identical to SEQ ID NO: 346916
  chr7:98971810-98972206
  hyper

SEQ ID NO: 358905 - DNA, 79 bp, Homo sapiens; identical to SEQ ID NO: 345275
  chr7:99155672-99155751
  hyper

SEQ ID NO: 358906 - DNA, 215 bp, Homo sapiens; identical to SEQ ID NO: 201064
  chr7:99156600-99156815
  hyper

SEQ ID NO: 358907 - DNA, 77 bp, Homo sapiens; identical to SEQ ID NO: 345277
  chr7:99156982-99157059
  hyper

SEQ ID NO: 358908 - DNA, 154 bp, Homo sapiens; identical to SEQ ID NO: 333194
  chr7:99680237-99680391
  hyper

SEQ ID NO: 358909 - DNA, 243 bp, Homo sapiens; identical to SEQ ID NO: 345279
  chr7:100167136-100167379
  hyper

SEQ ID NO: 358910 - DNA, 239 bp, Homo sapiens; identical to SEQ ID NO: 285218
  chr7:100167621-100167860
  hyper

SEQ ID NO: 358911 - DNA, 145 bp, Homo sapiens; identical to SEQ ID NO: 350625
  chr7:100168054-100168199
  hyper

SEQ ID NO: 358912 - DNA, 754 bp, Homo sapiens
  chr7:100202089-100202843
  hyper
cgcgggtggaatgggcggcctggggttactgggacggtgagtaactgccggcccccgtccgcaatcgggctccctccgtcgggcgcgagggggcaccccagggctggggggactaggttcctccaaccccggggggcccctacacccagccctgggctcccgattgcggtcccatcaccccctcctggcggcagaagtctcccttgcaatgtttcaggcggggacctccctaaaggggtcctcgggggctgtgccccaagtcgaggacaccctctccagcctgaaaggggactctgctgcagggccggggagatgggatctcctaggggaagaggcgcggtgcggccgcgggtcggggaggggccagaagggggcgtccagccagttcctcctcccgcttccaccgcccgccagtgcgccctgcggccccagacttccccgagccgcgctcctcccggccgctctctgttaacctgcccccatcttacctccccttcttctcgtcccctcatcctgagccccagacatccgagctgcctgccggggctcccagcctagagttctcctgaagctgaccgagggtctccaccgccccccacccccgctcctctctcccctccccagagcaccaattttgcggggggcggctggagaaggcccagggaaccctgaccacgcccaactggcccgagtccgattaccccccgggcatcagctgttcctggcacatcatcgcgcccccggaccaggtacc

SEQ ID NO: 358913 - DNA, 277 bp, Homo sapiens
  chr7:100203058-100203335
  hyper
cgcgggcctgtcacttgtgagtgcgccaggacttgaccttgccaaccacgacgaccgacacccctgcagggtcccatgggtgtgtgtggtcctccgtgctgtggtgtgaacgccttcaggaggggggcccagaggacgcgggaggtgggagtgggagctgctgcaggcacccagtaggagatgaggtgcaggcgcccaggggtgtcccgccgcgcagtccccgcctccgcccgccgccaggtcatcgcgctgaccttcgagaagtttgacctggagc

SEQ ID NO: 358914 - DNA, 105 bp, Homo sapiens; identical to SEQ ID NO: 285222
  chr7:100203366-100203471
  hyper

SEQ ID NO: 358915 - DNA, 50 bp, Homo sapiens
  chr7:100203505-100203555
  hyper
cggggttcagctaaagggacgggatctgaaccccagggctccaaaccggc

SEQ ID NO: 358916 - DNA, 379 bp, Homo sapiens; identical to SEQ ID NO: 333199
  chr7:100224197-100224576
  hyper

SEQ ID NO: 358917 - DNA, 58 bp, Homo sapiens
  chr7:100254132-100254190
  hyper
cgagacaatgaccgaccgggggcagctgctttaaaggggaagatacactctattaagc

SEQ ID NO: 358918 - DNA, 1057 bp, Homo sapiens; identical to SEQ ID NO: 350626
  chr7:100806337-100807394
  hyper

SEQ ID NO: 358919 - DNA, 168 bp, Homo sapiens; identical to SEQ ID NO: 346924
  chr7:100815484-100815652
  hyper

SEQ ID NO: 358920 - DNA, 101 bp, Homo sapiens; identical to SEQ ID NO: 346925
  chr7:100815930-100816031
  hyper

SEQ ID NO: 358921 - DNA, 257 bp, Homo sapiens; identical to SEQ ID NO: 350629
  chr7:100816655-100816912
  hyper

SEQ ID NO: 358922 - DNA, 151 bp, Homo sapiens
  chr7:100845050-100845201
  hyper
cggacaggcgaggccaggcggtggggcgcgcctccgtgaggaccaggtgtctgtcggcggggacaccatagcgcgcctggtgctcctcgaagagctgcgtgagtcgccccacgtagcgcgcttgcagcgtgtccacctgggccggactggg

SEQ ID NO: 358923 - DNA, 45 bp, Homo sapiens; identical to SEQ ID NO: 201083
  chr7:100845248-100845293
  hyper

SEQ ID NO: 358924 - DNA, 487 bp, Homo sapiens; identical to SEQ ID NO: 350630
  chr7:101460542-101461029
  hyper

SEQ ID NO: 358925 - DNA, 251 bp, Homo sapiens; identical to SEQ ID NO: 201131
  chr7:106684920-106685171
  hyper

SEQ ID NO: 358926 - DNA, 221 bp, Homo sapiens; identical to SEQ ID NO: 346927
  chr7:106685920-106686141
  hyper

SEQ ID NO: 358927 - DNA, 684 bp, Homo sapiens
  chr7:107641955-107642639
  hyper
cgggaggaggcgctagcagagcctcgaaccccgctctcagccctcacctgcaagtggctgacgatacagtagggttcgggcttgtgcagcccgcacgtcgaggtcaccgaaagcttctgtgctcggccgatgagaaggtcgcccgtggcgggatagcagctgccttctgcgcagccgtagctgaactcgggttcctgagcgcgcactcgggctctgcacagggctgcgggaaggacaggcaacagagttggggggacacaagcagggagtggagcccgaaaaaaacgaacaagcgggggcgggggagtgggtgcggagagaggacagtccattcggaagaaagcaaaatgcacagaaaagacaatggagagatgagcgcaggagaggctgggaaggcagggactccgaaaggagaaggacacggaaagaaacccacacacgtcatcaggtctgtccagcagcgagagcctccctcccgggaaacccaccgacgctcgcgcccaccctgatcagccccggggagcagctcccccaacaaagggtggatgtgtagaccctccacttcgacgtgtccggagcccggcgcagggaggctgacccccaaagggccacacacccacgcacgtgaacccgcgtgcacgcggcagcccgcgcatcctcggtgtgagtgtgcgcgtggagatc

SEQ ID NO: 358928 - DNA, 182 bp, Homo sapiens; identical to SEQ ID NO: 201140
  chr7:112430003-112430185
  hyper

SEQ ID NO: 358929 - DNA, 142 bp, Homo sapiens; identical to SEQ ID NO: 201141
  chr7:112430224-112430366
  hyper

SEQ ID NO: 358930 - DNA, 239 bp, Homo sapiens; identical to SEQ ID NO: 201143
  chr7:112726614-112726853
  hyper

SEQ ID NO: 358931 - DNA, 152 bp, Homo sapiens; identical to SEQ ID NO: 350635
  chr7:113724594-113724746
  hyper

SEQ ID NO: 358932 - DNA, 229 bp, Homo sapiens; identical to SEQ ID NO: 201145
  chr7:113725472-113725701
  hyper

SEQ ID NO: 358933 - DNA, 229 bp, Homo sapiens; identical to SEQ ID NO: 201146
  chr7:113725858-113726087
  hyper

SEQ ID NO: 358934 - DNA, 482 bp, Homo sapiens; identical to SEQ ID NO: 285340
  chr7:113726887-113727369
  hyper

SEQ ID NO: 358935 - DNA, 114 bp, Homo sapiens; identical to SEQ ID NO: 350639
  chr7:115117321-115117435
  hyper

SEQ ID NO: 358936 - DNA, 90 bp, Homo sapiens; identical to SEQ ID NO: 333226
  chr7:116759594-116759684
  hyper

SEQ ID NO: 358937 - DNA, 258 bp, Homo sapiens; identical to SEQ ID NO: 285352
  chr7:117513178-117513436
  hyper

SEQ ID NO: 358938 - DNA, 185 bp, Homo sapiens
  chr7:117513471-117513656
  hyper
tcctgctctagcggatccgaatgcgagctcggagccgcggctccggactcagccgtctccgcgcgggcggcacttaacccgctgctgtccgggacgcgggcgcctggagccgggagccgggagccgcggcactccctccgcccctcgccaccgccctcgccgcttaacccgctgcgcgccggagc

SEQ ID NO: 358939 - DNA, 564 bp, Homo sapiens
  chr7:119912404-119912968
  hyper
cgccatccacgccatctagtggcttgtatgtgttacgtttggttttaaggatgattcctaatgactcgggggcggggtacgcgaaaaacaaaaaggttggtagcgacaattttcctgtgtctctctacctcagtaacccctcatacgaacacctttaactcttttaactattttaaatatgcgcagtgatgcgcagagaggatgaaggggacgcaaactttcagagacgcacgccccttgacgatgacatttagaaaagggctccacatccctgttattcgtaaaggacgggaaaaggagttgtgtcaagacctcgatcgaggagagtctctgattttttggcaagttggacagatggcatatcaatccctgcaacgttaacaatctggttttgaaaataaataaaaacagaaagaggaaatgcacttaaaaattccgcgtcggagctttgcgggtcttgccttccagtcgcccccagaagacaaccaattcctgcgcattccgctccgctcaccctccttcccagcttctctcgctctctttccccccattttcccacgctcg

SEQ ID NO: 358940 - DNA, 750 bp, Homo sapiens; identical to SEQ ID NO: 350641
  chr7:120496826-120497576
  hyper

SEQ ID NO: 358941 - DNA, 428 bp, Homo sapiens; identical to SEQ ID NO: 201161
  chr7:121512905-121513333
  hyper

SEQ ID NO: 358942 - DNA, 119 bp, Homo sapiens; identical to SEQ ID NO: 350642
  chr7:121942391-121942510
  hyper

SEQ ID NO: 358943 - DNA, 226 bp, Homo sapiens; identical to SEQ ID NO: 201166
  chr7:121946146-121946372
  hyper

SEQ ID NO: 358944 - DNA, 203 bp, Homo sapiens; identical to SEQ ID NO: 201171
  chr7:123673023-123673226
  hyper

SEQ ID NO: 358945 - DNA, 296 bp, Homo sapiens
  chr7:123673383-123673679
  hyper
aggcggcgccggggctgtgaggggaaatgcagaagcttgtggaagccccatcccctccgctgcttagccccgcgcctccgctgcaggctctgggaacgtaacgcgagcagcggcggccctgcccccgccctgccaatgcccctctccgcctgcctcgacctctcccgccttctcaggccgcccccacgcgcccgcccgccgcaccgagtcccacagggtctgctcgggaaggcccggccctgcttcttcctcccggtgcgcccactcaacacaggggctccggtcgtgcggggggc

SEQ ID NO: 358946 - DNA, 54 bp, Homo sapiens; identical to SEQ ID NO: 350644
  chr7:124404307-124404361
  hyper

SEQ ID NO: 358947 - DNA, 51 bp, Homo sapiens; identical to SEQ ID NO: 350645
  chr7:126891155-126891206
  hyper

SEQ ID NO: 358948 - DNA, 204 bp, Homo sapiens; identical to SEQ ID NO: 201176
  chr7:126893238-126893442
  hyper

SEQ ID NO: 358949 - DNA, 587 bp, Homo sapiens; identical to SEQ ID NO: 285391
  chr7:126893489-126894076
  hyper

SEQ ID NO: 358950 - DNA, 65 bp, Homo sapiens
  chr7:126894197-126894262
  hyper
ggggcgcggggggagagggggcagcccaggagataaggaggatggagaaggacgggagagacccc

SEQ ID NO: 358951 - DNA, 37 bp, Homo sapiens; identical to SEQ ID NO: 285393
  chr7:126988120-126988157
  hyper

SEQ ID NO: 358952 - DNA, 56 bp, Homo sapiens; identical to SEQ ID NO: 350648
  chr7:126988206-126988262
  hyper

SEQ ID NO: 358953 - DNA, 277 bp, Homo sapiens; identical to SEQ ID NO: 333248
  chr7:127291492-127291769
  hyper

SEQ ID NO: 358954 - DNA, 208 bp, Homo sapiens; identical to SEQ ID NO: 285400
  chr7:127671450-127671658
  hyper

SEQ ID NO: 358955 - DNA, 54 bp, Homo sapiens; identical to SEQ ID NO: 285405
  chr7:127991607-127991661
  hyper

SEQ ID NO: 358956 - DNA, 264 bp, Homo sapiens; identical to SEQ ID NO: 285416
  chr7:128828640-128828904
  hyper

SEQ ID NO: 358957 - DNA, 81 bp, Homo sapiens; identical to SEQ ID NO: 345282
  chr7:129421203-129421284
  hyper

SEQ ID NO: 358958 - DNA, 281 bp, Homo sapiens; identical to SEQ ID NO: 201185
  chr7:129421349-129421630
  hyper

SEQ ID NO: 358959 - DNA, 169 bp, Homo sapiens; identical to SEQ ID NO: 346933
  chr7:129424378-129424547
  hyper

SEQ ID NO: 358960 - DNA, 158 bp, Homo sapiens; identical to SEQ ID NO: 333265
  chr7:130741985-130742143
  hyper

SEQ ID NO: 358961 - DNA, 101 bp, Homo sapiens; identical to SEQ ID NO: 333266
  chr7:131240439-131240540
  hyper

SEQ ID NO: 358962 - DNA, 122 bp, Homo sapiens; identical to SEQ ID NO: 350654
  chr7:131242600-131242722
  hyper

SEQ ID NO: 358963 - DNA, 73 bp, Homo sapiens; identical to SEQ ID NO: 350655
  chr7:134832843-134832916
  hyper

SEQ ID NO: 358964 - DNA, 269 bp, Homo sapiens; identical to SEQ ID NO: 350656
  chr7:139168725-139168994
  hyper

SEQ ID NO: 358965 - DNA, 197 bp, Homo sapiens; identical to SEQ ID NO: 345284
  chr7:139929854-139930051
  hyper

SEQ ID NO: 358966 - DNA, 362 bp, Homo sapiens; identical to SEQ ID NO: 345285
  chr7:139930346-139930708
  hyper

SEQ ID NO: 358967 - DNA, 209 bp, Homo sapiens; identical to SEQ ID NO: 333277
  chr7:140103670-140103879
  hyper

SEQ ID NO: 358968 - DNA, 183 bp, Homo sapiens; identical to SEQ ID NO: 285462
  chr7:140340368-140340551
  hyper

SEQ ID NO: 358969 - DNA, 82 bp, Homo sapiens; identical to SEQ ID NO: 345286
  chr7:140771242-140771324
  hyper

SEQ ID NO: 358970 - DNA, 219 bp, Homo sapiens; identical to SEQ ID NO: 285467
  chr7:140771550-140771769
  hyper

SEQ ID NO: 358971 - DNA, 203 bp, Homo sapiens; identical to SEQ ID NO: 345288
  chr7:140771841-140772044
  hyper

SEQ ID NO: 358972 - DNA, 357 bp, Homo sapiens; identical to SEQ ID NO: 201210
  chr7:141211599-141211956
  hyper

SEQ ID NO: 358973 - DNA, 999 bp, Homo sapiens; identical to SEQ ID NO: 333283
  chr7:142985430-142986429
  hyper

SEQ ID NO: 358974 - DNA, 93 bp, Homo sapiens; identical to SEQ ID NO: 345289
  chr7:143105734-143105827
  hyper

SEQ ID NO: 358975 - DNA, 454 bp, Homo sapiens; identical to SEQ ID NO: 345290
  chr7:143105844-143106298
  hyper

SEQ ID NO: 358976 - DNA, 107 bp, Homo sapiens; identical to SEQ ID NO: 350665
  chr7:145814199-145814306
  hyper

SEQ ID NO: 358977 - DNA, 669 bp, Homo sapiens; identical to SEQ ID NO: 333286
  chr7:148036392-148037061
  hyper

SEQ ID NO: 358978 - DNA, 298 bp, Homo sapiens; identical to SEQ ID NO: 333287
  chr7:148394984-148395282
  hyper

SEQ ID NO: 358979 - DNA, 168 bp, Homo sapiens; identical to SEQ ID NO: 333288
  chr7:148523540-148523708
  hyper

SEQ ID NO: 358980 - DNA, 32 bp, Homo sapiens; identical to SEQ ID NO: 350667
  chr7:149112425-149112457
  hyper

SEQ ID NO: 358981 - DNA, 199 bp, Homo sapiens; identical to SEQ ID NO: 350668
  chr7:149119398-149119597
  hyper

SEQ ID NO: 358982 - DNA, 207 bp, Homo sapiens; identical to SEQ ID NO: 285506
  chr7:149119682-149119889
  hyper

SEQ ID NO: 358983 - DNA, 51 bp, Homo sapiens; identical to SEQ ID NO: 285507
  chr7:149120073-149120124
  hyper

SEQ ID NO: 358984 - DNA, 1023 bp, Homo sapiens; identical to SEQ ID NO: 350671
  chr7:149570406-149571429
  hyper

SEQ ID NO: 358985 - DNA, 88 bp, Homo sapiens
  chr7:149745487-149745575
  hyper
cggagagggcacggggtcgcacaaaaagggtgcgagggtgcgtgaagagggtggaggggcggggaccacgcgggtcgtgggtgcgggg

SEQ ID NO: 358986 - DNA, 437 bp, Homo sapiens; identical to SEQ ID NO: 333295
  chr7:150075217-150075654
  hyper

SEQ ID NO: 358987 - DNA, 35 bp, Homo sapiens; identical to SEQ ID NO: 333296
  chr7:150102887-150102922
  hyper

SEQ ID NO: 358988 - DNA, 846 bp, Homo sapiens; identical to SEQ ID NO: 333298
  chr7:150671471-150672317
  hyper

SEQ ID NO: 358989 - DNA, 351 bp, Homo sapiens; identical to SEQ ID NO: 333299
  chr7:150676178-150676529
  hyper

SEQ ID NO: 358990 - DNA, 112 bp, Homo sapiens; identical to SEQ ID NO: 346943
  chr7:150714968-150715080
  hyper

SEQ ID NO: 358991 - DNA, 295 bp, Homo sapiens; identical to SEQ ID NO: 285522
  chr7:150715323-150715618
  hyper

SEQ ID NO: 358992 - DNA, 253 bp, Homo sapiens; identical to SEQ ID NO: 350676
  chr7:150863966-150864219
  hyper

SEQ ID NO: 358993 - DNA, 370 bp, Homo sapiens; identical to SEQ ID NO: 333305
  chr7:151038589-151038959
  hyper

SEQ ID NO: 358994 - DNA, 99 bp, Homo sapiens
  chr7:151136933-151137032
  hyper
cgaaggcggagccccactcggtttccttggggttgagggacgcactcaccttccccgagcgctgcgccatggtgcgccccgccccttccgcgggtcccc

SEQ ID NO: 358995 - DNA, 121 bp, Homo sapiens
  chr7:151137113-151137234
  hyper
gtcgggcgtgctaagcccgaggggccaccaggcggttgggacccgccgcggccaccctgtgccaccgcgagtgcagcccgccctgcccggggtctccctgtgctctccgcgtttagctccc

SEQ ID NO: 358996 - DNA, 968 bp, Homo sapiens
  chr7:151572574-151573542
  hyper
cggacagcccattcactgcgcactcccaccctgccccgggagagcaaaataactttctctacggagcactctggtgtgtgtgtgtgtgtgtgtgtgtgtgtgtgtgtgtgtgtgtgtgtgtgtgtacacaaacatttacttggttggctgaggcggagggtgtgacccagtgggccacacctcccaccgccctaccccgctacgtggaggcgaggaacagtggccgcgggctaccggggcgccttccgaaaagagaaccactacgcggcccgccgcccctctggctggacaaagtgaagccgcaggcagatccgagtcgccaatgtcctcccgggcggctggcgcggacggggctgaagttcaatgcagcctgcacggattagggagctccgagcccccaaataccacagagacccaaagtacactcccggggcgggggaagggaacggcggcagaggagacccccgctccaggcccagaaacgcccggagagaaactggagcggagggggtgcattggaagacgcagctacacagctccccccaacccccgccccgctgctttccccacccaccgcccctcccctctcctccctcccctcccctctctccgtctccagcagccgagcgcgggctccacctccccggagcgcagtccacaccgtcccttttcagcaaaacaacacaacgcaccgccccccgcacccgcacccggctggataccgggctacgcccagccgcccacccgccgcgcccggcgccccctctagtctgcagccgcccagcccccgccccaggcggagccccagccctggctgcacgcgggcagagagagagattgagccccggctccgccagcccagctcgggccctgtccctctaccctttccccaagccgcccgaagtgacaggaggggcacgcacggcgcgcgcggggcgtccagcgttaaccgcttcggcgccggggac

SEQ ID NO: 358997 - DNA, 697 bp, Homo sapiens; identical to SEQ ID NO: 346946
  chr7:151722447-151723144
  hyper

SEQ ID NO: 358998 - DNA, 34 bp, Homo sapiens; identical to SEQ ID NO: 346947
  chr7:151723206-151723240
  hyper

SEQ ID NO: 358999 - DNA, 154 bp, Homo sapiens
  chr7:152591569-152591723
  hyper
cgctcccccttcgccccggccctcggtgggcgcctctgacctgggccgtagtttccaggcccgcgcgtccccgaggcggacgccagagggcgcgcgccccccactcctgcccgcgtcggggccgcagccgcgctccgccctttgcctgcagagc

SEQ ID NO: 359000 - DNA, 104 bp, Homo sapiens; identical to SEQ ID NO: 350680
  chr7:155246271-155246375
  hyper

SEQ ID NO: 359001 - DNA, 82 bp, Homo sapiens
  chr7:155257774-155257856
  hyper
cggtgctattccagtgactacatttttttaaattttgcgaagttcaacaggtctccctccggctgggtgctcactggccctg

SEQ ID NO: 359002 - DNA, 39 bp, Homo sapiens; identical to SEQ ID NO: 350681
  chr7:155301671-155301710
  hyper

SEQ ID NO: 359003 - DNA, 193 bp, Homo sapiens
  chr7:155601495-155601688
  hyper
cgcctgagctcccgcctacctccctgatctgcgagccgcgccggcgagtgtcaccgccagcagccggtgggcttcccccagcgcgggggcgggggcgtcccagcttcaagacagccccagcccctaaacgcacctctctccactgtcctttcccccaagcttggtggaacagcccctccccaaccccatacct

SEQ ID NO: 359004 - DNA, 539 bp, Homo sapiens
  chr7:155601951-155602490
  hyper
tgagggacttgggcggcagtcacattagagacccagagacagggagggagacagaagaagagggtcacgcacctggggcagagcctaggtggttatttaaaatgagggcggccgagcaggctccccaaacctcccgccggcctggggctcccctgccgcctcctgcaccccgcccctgccctcagcacccgagcctccgccttccccatcccttcctcccccacccttaactcctggaatcgggagaaggaaggtaggggagggatcaaccggggatacctcacagactgccagcccctacccccctcggttttaggggacctttgtggggtctgcctgataatcccggcctggctctcctcacccaacccccacttgggccgtccttccccctccttttgtgttgggaacgggaatagccactgcccaaggaaaaaagtatttgttttcgtttcgttcgtctgagggaagttgacagaaggtcagaagttcaaatgctgcctgtgcgcgcggcggcgagagtggccgggcgcggggcc

SEQ ID NO: 359005 - DNA, 387 bp, Homo sapiens
  chr7:155604534-155604921
  hyper
cgctccggtgttttcttcatccttaaatatgatgtcggggttgtaattgggggtgagttccttaaatcgctcggagtttctggagatcttcccttcataccttccgctggcgcctagggtcttctcggccacattggggataaactgcttgtaggctaaaggggtcagctttttggggtgcctcctcttcccgaaccccctgcccggtccgcacgccagtcccgagcataccagcagcgaggagacgaggactagcagcagacatctcgccagcagcagcatctcgcccatggaactgatgacttccgagctgtccccgtgcgggtccgtgcgcgagtgcgcgcggcgggtgtgtgcgtgtgcgctctctcttgcgctttcccttcc

SEQ ID NO: 359006 - DNA, 75 bp, Homo sapiens
  chr7:155605019-155605094
  hyper
cgctccccacccagacaggggctggaatggcaggctgccggccgctgataacggaacacatcggagttgggtcgc

SEQ ID NO: 359007 - DNA, 345 bp, Homo sapiens; identical to SEQ ID NO: 201261
  chr7:156433175-156433520
  hyper

SEQ ID NO: 359008 - DNA, 459 bp, Homo sapiens; identical to SEQ ID NO: 201262
  chr7:156433521-156433980
  hyper

SEQ ID NO: 359009 - DNA, 41 bp, Homo sapiens; identical to SEQ ID NO: 350684
  chr7:156796104-156796145
  hyper

SEQ ID NO: 359010 - DNA, 63 bp, Homo sapiens; identical to SEQ ID NO: 346950
  chr7:156796431-156796494
  hyper

SEQ ID NO: 359011 - DNA, 96 bp, Homo sapiens; identical to SEQ ID NO: 346951
  chr7:156799510-156799606
  hyper

SEQ ID NO: 359012 - DNA, 249 bp, Homo sapiens; identical to SEQ ID NO: 201268
  chr7:156802164-156802413
  hyper

SEQ ID NO: 359013 - DNA, 213 bp, Homo sapiens
  chr7:156802537-156802750
  hyper
cgccgcggagtagccgtagaccgggtggccgtagagcgccgcctgcgccgggaggcccgcgccgccctgcgcgcccccagggtgcagccccagcgccaggcccccagcggcggcggcggcggcggcggcggcggcagcggccgctgcgcccggatgcgcgtggtggtggggccccccgtgcccgccgcccgtgccgccgccgccgccgcccgc

SEQ ID NO: 359014 - DNA, 210 bp, Homo sapiens; identical to SEQ ID NO: 350687
  chr7:157361395-157361605
  hyper

SEQ ID NO: 359015 - DNA, 53 bp, Homo sapiens; identical to SEQ ID NO: 350688
  chr7:157361751-157361804
  hyper

SEQ ID NO: 359016 - DNA, 216 bp, Homo sapiens; identical to SEQ ID NO: 285596
  chr7:157476655-157476871
  hyper

SEQ ID NO: 359017 - DNA, 242 bp, Homo sapiens; identical to SEQ ID NO: 333344
  chr7:157594777-157595019
  hyper

SEQ ID NO: 359018 - DNA, 107 bp, Homo sapiens; identical to SEQ ID NO: 350690
  chr7:158379699-158379806
  hyper

SEQ ID NO: 359019 - DNA, 93 bp, Homo sapiens; identical to SEQ ID NO: 285601
  chr7:158380396-158380489
  hyper

SEQ ID NO: 359020 - DNA, 126 bp, Homo sapiens; identical to SEQ ID NO: 346954
  chr7:158380510-158380636
  hyper

SEQ ID NO: 359021 - DNA, 71 bp, Homo sapiens
  chr7:158823238-158823309
  hyper
cggcgtctcagccccgcagaagccccgaaccgtgggcctcccgccgcgtccgacaggcaggggtggggcta

SEQ ID NO: 359022 - DNA, 77 bp, Homo sapiens
  chr7:158823665-158823742
  hyper
cacaggagggcgggggacgctgccagactctaagactgtgcgtgggtggttcggggatcgccactgccgcggtaagc

SEQ ID NO: 359023 - DNA, 42 bp, Homo sapiens; identical to SEQ ID NO: 350693
  chr8:495481-495523
  hyper

SEQ ID NO: 359024 - DNA, 68 bp, Homo sapiens; identical to SEQ ID NO: 201278
  chr8:495635-495703
  hyper

SEQ ID NO: 359025 - DNA, 287 bp, Homo sapiens
  chr8:1771751-1772038
  hyper
ggagcaggctctgcggggaggatccagatgttgggggcggggagggcactcggtctgcccagcgacccctcccgaagtgagcgcggcccggggtccgcggggcaggagatgatccgggggcgggagcctctgccgcgcgccccctcccacgcgtgcgcagcctgggccgggcgttgggcagcgggagggggcgcgggcggccacgtggcctcgaaggaatgcgcgggcgcgagggcagggcgctgccgagaaaccggcaggctctgcggccaatgggcgcccggaac

SEQ ID NO: 359026 - DNA, 130 bp, Homo sapiens; identical to SEQ ID NO: 333354
  chr8:2970523-2970653
  hyper

SEQ ID NO: 359027 - DNA, 397 bp, Homo sapiens; identical to SEQ ID NO: 285618
  chr8:4849835-4850232
  hyper

SEQ ID NO: 359028 - DNA, 335 bp, Homo sapiens; identical to SEQ ID NO: 345293
  chr8:4851007-4851342
  hyper

SEQ ID NO: 359029 - DNA, 117 bp, Homo sapiens; identical to SEQ ID NO: 201281
  chr8:4851375-4851492
  hyper

SEQ ID NO: 359030 - DNA, 73 bp, Homo sapiens; identical to SEQ ID NO: 201282
  chr8:4851508-4851581
  hyper

SEQ ID NO: 359031 - DNA, 125 bp, Homo sapiens; identical to SEQ ID NO: 201283
  chr8:4851611-4851736
  hyper

SEQ ID NO: 359032 - DNA, 34 bp, Homo sapiens; identical to SEQ ID NO: 201284
  chr8:4851780-4851814
  hyper

SEQ ID NO: 359033 - DNA, 66 bp, Homo sapiens; identical to SEQ ID NO: 350700
  chr8:4852588-4852654
  hyper

SEQ ID NO: 359034 - DNA, 108 bp, Homo sapiens; identical to SEQ ID NO: 333357
  chr8:6673921-6674029
  hyper

SEQ ID NO: 359035 - DNA, 202 bp, Homo sapiens; identical to SEQ ID NO: 346961
  chr8:6691849-6692051
  hyper

SEQ ID NO: 359036 - DNA, 224 bp, Homo sapiens; identical to SEQ ID NO: 201288
  chr8:6692462-6692686
  hyper

SEQ ID NO: 359037 - DNA, 209 bp, Homo sapiens; identical to SEQ ID NO: 350704
  chr8:6693170-6693379
  hyper

SEQ ID NO: 359038 - DNA, 106 bp, Homo sapiens; identical to SEQ ID NO: 350705
  chr8:8639980-8640086
  hyper

SEQ ID NO: 359039 - DNA, 208 bp, Homo sapiens
  chr8:9760527-9760735
  hyper
cggaggaaggtgttgacccacatacaatgagtcctgagcccagagaaaaatctgcacacacaagcactccgcaatgcgctcccaggcgaccccctccccacgcacaccgcatctgtgctgcacagatctgcttctgtcacagaatcagcttctgtttctctccctgagtctgtttgcatctctaagcccctgtctgtcacaggctgca

SEQ ID NO: 359040 - DNA, 260 bp, Homo sapiens; identical to SEQ ID NO: 285637
  chr8:9761155-9761415
  hyper

SEQ ID NO: 359041 - DNA, 206 bp, Homo sapiens
  chr8:10587216-10587422
  hyper
cgggaatattcgttaattataatttcatctgtgacagccttcctctgagatggcccaattgtaaggtccagggaatgctggcttttcccgcttcggtattcctagtaaacgcctgttccacccagcctcaaacgtttccgtccctgccctgtccatgcacgccggtccctgtcgccaggcgtcctggcctggccgctgccccgtct

SEQ ID NO: 359042 - DNA, 303 bp, Homo sapiens
  chr8:10873138-10873441
  hyper
cggggctggctgcgttcgggacccagcgccccccaggccctccaaagactggttgagctcagaaccagaaggagcgagggagcagagaaagccgggggcgggctcggggtaagacaggaagggagtgagattaaggtgagaagtgggaggggaaggagggaaaccgagaggaattgagggtgggctcggcgtatctagagcagtccgcggaggacgctgaggctcgccggggaagtgctgtgcccgaggcgccccaaaggtgggcggcggtgccagctcagacccacgcctctgtccaagtcc

SEQ ID NO: 359043 - DNA, 240 bp, Homo sapiens; identical to SEQ ID NO: 201296
  chr8:10873649-10873889
  hyper

SEQ ID NO: 359044 - DNA, 258 bp, Homo sapiens; identical to SEQ ID NO: 350707
  chr8:10874042-10874300
  hyper

SEQ ID NO: 359045 - DNA, 376 bp, Homo sapiens; identical to SEQ ID NO: 285647
  chr8:11058799-11059175
  hyper

SEQ ID NO: 359046 - DNA, 158 bp, Homo sapiens; identical to SEQ ID NO: 350709
  chr8:11059210-11059368
  hyper

SEQ ID NO: 359047 - DNA, 106 bp, Homo sapiens
  chr8:11537483-11537589
  hyper
cgcatgatgagaagaaagaaagattgggagaagttaatcagctcaaagtcacatcgccggggtctcctgccagggggcttggaccagttgctaaaggacttcccgc

SEQ ID NO: 359048 - DNA, 251 bp, Homo sapiens; identical to SEQ ID NO: 285656
  chr8:11550368-11550619
  hyper

SEQ ID NO: 359049 - DNA, 154 bp, Homo sapiens; identical to SEQ ID NO: 350711
  chr8:11554731-11554885
  hyper

SEQ ID NO: 359050 - DNA, 54 bp, Homo sapiens; identical to SEQ ID NO: 201306
  chr8:11554915-11554969
  hyper

SEQ ID NO: 359051 - DNA, 141 bp, Homo sapiens; identical to SEQ ID NO: 350713
  chr8:11555521-11555662
  hyper

SEQ ID NO: 359052 - DNA, 109 bp, Homo sapiens
  chr8:11561282-11561391
  hyper
cgggcaccccgggtgacccagtgccccacacaagatcgagagttgagcccaagaggtcaccttcttctctactggccccgcccctcgcccgccgctgcgggatgaggac

SEQ ID NO: 359053 - DNA, 140 bp, Homo sapiens; identical to SEQ ID NO: 333372
  chr8:11726011-11726151
  hyper

SEQ ID NO: 359054 - DNA, 150 bp, Homo sapiens; identical to SEQ ID NO: 285667
  chr8:12808911-12809061
  hyper

SEQ ID NO: 359055 - DNA, 185 bp, Homo sapiens; identical to SEQ ID NO: 285668
  chr8:12809462-12809647
  hyper

SEQ ID NO: 359056 - DNA, 62 bp, Homo sapiens; identical to SEQ ID NO: 346964
  chr8:12809799-12809861
  hyper

SEQ ID NO: 359057 - DNA, 324 bp, Homo sapiens; identical to SEQ ID NO: 285670
  chr8:12989711-12990035
  hyper

SEQ ID NO: 359058 - DNA, 84 bp, Homo sapiens; identical to SEQ ID NO: 201316
  chr8:16884239-16884323
  hyper

SEQ ID NO: 359059 - DNA, 287 bp, Homo sapiens; identical to SEQ ID NO: 333378
  chr8:17940762-17941049
  hyper

SEQ ID NO: 359060 - DNA, 1070 bp, Homo sapiens; identical to SEQ ID NO: 333379
  chr8:18870226-18871296
  hyper

SEQ ID NO: 359061 - DNA, 998 bp, Homo sapiens; identical to SEQ ID NO: 333381
  chr8:19171057-19172055
  hyper

SEQ ID NO: 359062 - DNA, 590 bp, Homo sapiens
  chr8:19796843-19797433
  hyper
cgacttgctcagcgccaaaccgcggctccagccctctccagcctccggctcagccggctcatcagtcggtccgcgccttgcagctcctccagagggacgcgccccgagatggagagcaaagccctgctcgtgctgactctggccgtgtggctccagagtctgaccgcctcccgcggaggggtggccgccgccgaccgtaagttttgcgcgcaaactcccctccacctgcagacccggcgggtggccactgccacccgaactgaggatgagaagaaggaagttggaaggggcggtggatgcgcccagggactctcccagcctgggctctagccccgaaacggtccccggagtgggatccaggaggggccgggagggaatctcctcccgatcgtgaagcggcggcgcccagttcccgctttttctctctgccgggttcccgcgctatcccttccactctggctgggaccgcgttcccgggctcgcaggctccgccggggaggttccggggtgtgggggccgggacggcggaggcggggagtaagggcccggctggcggtgacctgcagtcacctctctgccggaggggccct

SEQ ID NO: 359063 - DNA, 414 bp, Homo sapiens; identical to SEQ ID NO: 333386
  chr8:22299385-22299799
  hyper

SEQ ID NO: 359064 - DNA, 878 bp, Homo sapiens; identical to SEQ ID NO: 346966
  chr8:22436855-22437733
  hyper

SEQ ID NO: 359065 - DNA, 51 bp, Homo sapiens
  chr8:22722458-22722509
  hyper
atgaggccccttcacggccactagggggcaggagtgcggggcgggcagcac

SEQ ID NO: 359066 - DNA, 123 bp, Homo sapiens
  chr8:22960460-22960583
  hyper
cgcgcacgaactcagccaacgatttctgatagatttttgggagtttgaccagagatgcaaggggtgaaggagcgcttcctaccgttagggaactctggggacagagcgccccggccgcctgat

SEQ ID NO: 359067 - DNA, 127 bp, Homo sapiens; identical to SEQ ID NO: 345299
  chr8:23021590-23021717
  hyper

SEQ ID NO: 359068 - DNA, 89 bp, Homo sapiens
  chr8:23082568-23082657
  hyper
cgccatcctgccaggtcaatccaagaagcagcgtgcttggctatgacaagacagaacttcgcattcggagttcagggcacccctgaccc

SEQ ID NO: 359069 - DNA, 169 bp, Homo sapiens
  chr8:23082729-23082898
  hyper
cgctctcagcttctgttcctcaaccacggccgccgcgtggatgccgctgcattcggagtcgttttgccacttggtcccagcgccaggcttctcggtcgggagttgacctcagcctttctgtgacccagttcctggcacccagcaggcgctcggtggacggatgggtggc

SEQ ID NO: 359070 - DNA, 672 bp, Homo sapiens; identical to SEQ ID NO: 350720
  chr8:24771632-24772304
  hyper

SEQ ID NO: 359071 - DNA, 304 bp, Homo sapiens; identical to SEQ ID NO: 201345
  chr8:24812836-24813140
  hyper

SEQ ID NO: 359072 - DNA, 259 bp, Homo sapiens; identical to SEQ ID NO: 350722
  chr8:24814801-24815060
  hyper

SEQ ID NO: 359073 - DNA, 39 bp, Homo sapiens; identical to SEQ ID NO: 350723
  chr8:24815435-24815474
  hyper

SEQ ID NO: 359074 - DNA, 66 bp, Homo sapiens
  chr8:24816325-24816391
  hyper
cgttttttttctttctttctttctttttttttttttttttttttctttttttccgcggctcctccc

SEQ ID NO: 359075 - DNA, 302 bp, Homo sapiens; identical to SEQ ID NO: 201346
  chr8:25041946-25042248
  hyper

SEQ ID NO: 359076 - DNA, 250 bp, Homo sapiens; identical to SEQ ID NO: 201347
  chr8:25042284-25042534
  hyper

SEQ ID NO: 359077 - DNA, 63 bp, Homo sapiens; identical to SEQ ID NO: 201348
  chr8:25042567-25042630
  hyper

SEQ ID NO: 359078 - DNA, 106 bp, Homo sapiens; identical to SEQ ID NO: 201349
  chr8:25042631-25042737
  hyper

SEQ ID NO: 359079 - DNA, 73 bp, Homo sapiens; identical to SEQ ID NO: 346972
  chr8:25042833-25042906
  hyper

SEQ ID NO: 359080 - DNA, 499 bp, Homo sapiens; identical to SEQ ID NO: 285759
  chr8:25902969-25903468
  hyper

SEQ ID NO: 359081 - DNA, 88 bp, Homo sapiens; identical to SEQ ID NO: 350729
  chr8:25904367-25904455
  hyper

SEQ ID NO: 359082 - DNA, 290 bp, Homo sapiens; identical to SEQ ID NO: 285765
  chr8:25908102-25908392
  hyper

SEQ ID NO: 359083 - DNA, 251 bp, Homo sapiens
  chr8:25908517-25908768
  hyper
gcagctccataccaccctcgaagggggacacaacttccacttactcttttctcccaaaggagagcagatgggggtcacagggcttgggggtcactgcgttcagacagtcaccccgcgcggtaagtgcttagagcaacgtttatagggcaatgctggcctcgccgcgtaggggtcgctggactaaatgcccagaaaccctcacaacccgtgatgtccactttccgtggatctgaacccgggcaagttcggtc

SEQ ID NO: 359084 - DNA, 41 bp, Homo sapiens; identical to SEQ ID NO: 333406
  chr8:25910878-25910919
  hyper

SEQ ID NO: 359085 - DNA, 311 bp, Homo sapiens; identical to SEQ ID NO: 350731
  chr8:26148757-26149068
  hyper

SEQ ID NO: 359086 - DNA, 576 bp, Homo sapiens; identical to SEQ ID NO: 333408
  chr8:26436208-26436784
  hyper

SEQ ID NO: 359087 - DNA, 372 bp, Homo sapiens; identical to SEQ ID NO: 346973
  chr8:28347825-28348197
  hyper

SEQ ID NO: 359088 - DNA, 1886 bp, Homo sapiens; identical to SEQ ID NO: 333411
  chr8:29205985-29207871
  hyper

SEQ ID NO: 359089 - DNA, 282 bp, Homo sapiens
  chr8:29387050-29387332
  hyper
cgccatccgtcatttctcggcttcctcccacgcgccttcatgcggatgtgtaggtatctcctctccctggctgagtcaagtcactcagagactgaaaagagagagaggatgtggcgtgaagctgaagcctgcacccagggcctggcacctactgggttgggcttggcgctgcgtgcttgcatttccgcggatagaccgagatggcatctgggctgtgacactggctgcccagcttttcttttctttttttccaacagcatctggaagaggctctgggagggt

SEQ ID NO: 359090 - DNA, 269 bp, Homo sapiens; identical to SEQ ID NO: 201374
  chr8:29387367-29387636
  hyper

SEQ ID NO: 359091 - DNA, 95 bp, Homo sapiens
  chr8:30890537-30890632
  hyper
cgccgccgcccgtcccgcgctccgcggccccaggtctccagccggcgggcactcacatcatctctgccatcaccgccgccgccgatgcccttcac

SEQ ID NO: 359092 - DNA, 231 bp, Homo sapiens
  chr8:33372206-33372437
  hyper
tcccgaggagctgcttccatttaggaccttgtgactctcatagcttccacggtttcgcaggagcccgaggaggcaaacttcatttgtgccactgcacaggcgggagcttcggaccctgggaggggtggcgcgagagagacgtgtcgccagctgctcggagagggactcttattcagcctctaaggcgtcaattgcgcctccagggttccaggagtccagagaaagcccttc

SEQ ID NO: 359093 - DNA, 795 bp, Homo sapiens; identical to SEQ ID NO: 350734
  chr8:37553381-37554176
  hyper

SEQ ID NO: 359094 - DNA, 134 bp, Homo sapiens; identical to SEQ ID NO: 350735
  chr8:37595183-37595317
  hyper

SEQ ID NO: 359095 - DNA, 56 bp, Homo sapiens
  chr8:37655257-37655313
  hyper
cgggggacaggcgcaccccagagaaaggcaccgcaggcgcccactcacctgcacag

SEQ ID NO: 359096 - DNA, 217 bp, Homo sapiens; identical to SEQ ID NO: 350736
  chr8:37756358-37756575
  hyper

SEQ ID NO: 359097 - DNA, 355 bp, Homo sapiens; identical to SEQ ID NO: 201389
  chr8:37756610-37756965
  hyper

SEQ ID NO: 359098 - DNA, 372 bp, Homo sapiens; identical to SEQ ID NO: 350738
  chr8:37756966-37757338
  hyper

SEQ ID NO: 359099 - DNA, 153 bp, Homo sapiens; identical to SEQ ID NO: 201395
  chr8:38324508-38324661
  hyper

SEQ ID NO: 359100 - DNA, 215 bp, Homo sapiens; identical to SEQ ID NO: 285835
  chr8:38324861-38325076
  hyper

SEQ ID NO: 359101 - DNA, 226 bp, Homo sapiens; identical to SEQ ID NO: 201396
  chr8:38326050-38326276
  hyper

SEQ ID NO: 359102 - DNA, 539 bp, Homo sapiens; identical to SEQ ID NO: 346977
  chr8:41685769-41686308
  hyper

SEQ ID NO: 359103 - DNA, 111 bp, Homo sapiens; identical to SEQ ID NO: 201404
  chr8:49309646-49309757
  hyper

SEQ ID NO: 359104 - DNA, 164 bp, Homo sapiens; identical to SEQ ID NO: 350744
  chr8:49309797-49309961
  hyper

SEQ ID NO: 359105 - DNA, 112 bp, Homo sapiens; identical to SEQ ID NO: 346978
  chr8:49834207-49834319
  hyper

SEQ ID NO: 359106 - DNA, 127 bp, Homo sapiens
  chr8:53853387-53853514
  hyper
cgccttcctggacgccagcttccgcaggaacctccgccagctgataacttgccgcgcggcagcctgactcccccagcgtccggctccgcaactgcccgccactcctggccagcgagggaggagccgg

SEQ ID NO: 359107 - DNA, 231 bp, Homo sapiens; identical to SEQ ID NO: 350746
  chr8:54570292-54570523
  hyper

SEQ ID NO: 359108 - DNA, 61 bp, Homo sapiens; identical to SEQ ID NO: 350747
  chr8:54570562-54570623
  hyper

SEQ ID NO: 359109 - DNA, 151 bp, Homo sapiens; identical to SEQ ID NO: 350748
  chr8:55379013-55379164
  hyper

SEQ ID NO: 359110 - DNA, 116 bp, Homo sapiens; identical to SEQ ID NO: 201413
  chr8:56014011-56014127
  hyper

SEQ ID NO: 359111 - DNA, 172 bp, Homo sapiens
  chr8:56791852-56792024
  hyper
cggagaacttgccgggccatttgactctacgtcatcccctcccccatcaatgccctgaacagcctcctgtacacccttaaggaacttactttgtaatgattattaagaactcagcgagaccccgagcatcacctcggcatatcgcatcctttctctagagaacccctaatgt

SEQ ID NO: 359112 - DNA, 1176 bp, Homo sapiens
  chr8:56792065-56793241
  hyper
ccccttcctaataataccttggggatgggtcggaaggaaaggaaaggagacgcgagaggtgtagtcgatgtgcctgcgaagcccaggctcctctggagatccttccgtccgtccctacaggagaaggctggcccgggctgctccactccccggagctgcagactgagtcgccaggtttctgtgccttcaaagccctgcgcgacggccacaccaaacacccaaaccttgggcagggaccaaacggtcacttccccgccctccgggctcaatatgcaaatccgagcaccaggaagtagctgggacctctcggccgagcccagagacagccagttcctctcccgccgcgccgggccgcgctgccgctcgctccccggccgtggcgcctccgggccagacgcgctgcagcctccagcccgcggcaagcggggcggccgcgccacccccggccccgcgccagcagcccctcgccgcgcgtccagcgttcccggccagcagcctccccatacgcaggtcctgctgggccgccccgtcgcgccccccactctgaactcaagtcaccgtggagctccgccgccccgaaactttcaccgcgagcgggtgagtcctctgcgcgagcccaggggtgggcgcgggcacgcgggcagtgggtgcaggggccgcggctgtgccaccagccggagtcccgggcgcagggtagactcggggccgggggcatcggcgcggcccgcggcggcttcctggccgcaccgcctctgggctccggcggcgaaggctcttagatgtcttcagccgacgggtgaccgggcccgggggagccagggcgcggggactgaggctccgcaggtgtccgccgcggagccgcgcaggggagcggtgggaggtgcgggcgcgggggcgggctcaccgcgtgtccttcccggtgagggcccgagggccggctgctgtccctgctccggccgcttctcgcacacagtggggaagccgctgcccttgcggagcgggcgcgcggcggggatactggagaggactcctcggattgtgcaatctgatctcccctctggaccctgggtctcctggcagtgggagatggggctcggccggcgccctctcgaggcccgcggacagttgccctccctggtggccccgggcaggagcgtgacgtcgaggggctgcagc

SEQ ID NO: 359113 - DNA, 606 bp, Homo sapiens; identical to SEQ ID NO: 333447
  chr8:57122656-57123262
  hyper

SEQ ID NO: 359114 - DNA, 148 bp, Homo sapiens; identical to SEQ ID NO: 345301
  chr8:58906804-58906952
  hyper

SEQ ID NO: 359115 - DNA, 102 bp, Homo sapiens; identical to SEQ ID NO: 346981
  chr8:60030067-60030169
  hyper

SEQ ID NO: 359116 - DNA, 238 bp, Homo sapiens; identical to SEQ ID NO: 201421
  chr8:60030908-60031146
  hyper

SEQ ID NO: 359117 - DNA, 349 bp, Homo sapiens; identical to SEQ ID NO: 201422
  chr8:60031791-60032140
  hyper

SEQ ID NO: 359118 - DNA, 202 bp, Homo sapiens; identical to SEQ ID NO: 285892
  chr8:60032288-60032490
  hyper

SEQ ID NO: 359119 - DNA, 292 bp, Homo sapiens; identical to SEQ ID NO: 201424
  chr8:61193765-61194057
  hyper

SEQ ID NO: 359120 - DNA, 119 bp, Homo sapiens; identical to SEQ ID NO: 345303
  chr8:61822259-61822378
  hyper

SEQ ID NO: 359121 - DNA, 144 bp, Homo sapiens; identical to SEQ ID NO: 201426
  chr8:61822883-61823027
  hyper

SEQ ID NO: 359122 - DNA, 40 bp, Homo sapiens
  chr8:62200462-62200502
  hyper
cggaggcatttaggacccaggggaaagctaggctccgtat

SEQ ID NO: 359123 - DNA, 131 bp, Homo sapiens
  chr8:62200984-62201115
  hyper
cacaactgtgtcttgccacttagacaaagcccgaggtccgcagggcagagggaaagagctcaagttgacaggcataggaaggaaagttcaggtgaacaaacccctgaaaacaaagagagacgcctgtttgc

SEQ ID NO: 359124 - DNA, 177 bp, Homo sapiens
  chr8:65283513-65283690
  hyper
tgtggctgccgtgcaggtgtcccggcccagccatctgtatggggtgggggtggggtgaaagtcttggactaatggtggggtgcttgcctgtgatctctctcacgttttcctttgaggcctccactcggaataagccgccggcgagggagcggcccattcgtgggaaacgcgcccacc

SEQ ID NO: 359125 - DNA, 219 bp, Homo sapiens; identical to SEQ ID NO: 201432
  chr8:65489646-65489865
  hyper

SEQ ID NO: 359126 - DNA, 188 bp, Homo sapiens
  chr8:65490182-65490370
  hyper
gcgacgattaaaccaagtaacgagacaccgggcagatgtgttttcattgccctgtaagataaatgcagtgttaagtgcctgacaacttcccagaagcaatcagcaaaagtttacgagtgcataaacctcaaagaccattccctatcggttgttataaggccggtatttagagcttccataaattcttc

SEQ ID NO: 359127 - DNA, 260 bp, Homo sapiens; identical to SEQ ID NO: 201435
  chr8:65492407-65492667
  hyper

SEQ ID NO: 359128 - DNA, 267 bp, Homo sapiens; identical to SEQ ID NO: 350760
  chr8:65494311-65494578
  hyper

SEQ ID NO: 359129 - DNA, 84 bp, Homo sapiens; identical to SEQ ID NO: 350761
  chr8:65499649-65499733
  hyper

SEQ ID NO: 359130 - DNA, 104 bp, Homo sapiens; identical to SEQ ID NO: 350762
  chr8:65710834-65710938
  hyper

SEQ ID NO: 359131 - DNA, 280 bp, Homo sapiens; identical to SEQ ID NO: 201437
  chr8:67025640-67025920
  hyper

SEQ ID NO: 359132 - DNA, 234 bp, Homo sapiens; identical to SEQ ID NO: 201438
  chr8:67026578-67026812
  hyper

SEQ ID NO: 359133 - DNA, 42 bp, Homo sapiens; identical to SEQ ID NO: 350765
  chr8:69242761-69242803
  hyper

SEQ ID NO: 359134 - DNA, 56 bp, Homo sapiens; identical to SEQ ID NO: 201448
  chr8:69243011-69243067
  hyper

SEQ ID NO: 359135 - DNA, 1459 bp, Homo sapiens; identical to SEQ ID NO: 350767
  chr8:70745324-70746783
  hyper

SEQ ID NO: 359136 - DNA, 311 bp, Homo sapiens; identical to SEQ ID NO: 333477
  chr8:71316520-71316831
  hyper

SEQ ID NO: 359137 - DNA, 55 bp, Homo sapiens; identical to SEQ ID NO: 346990
  chr8:72756949-72757004
  hyper

SEQ ID NO: 359138 - DNA, 94 bp, Homo sapiens
  chr8:73448692-73448786
  hyper
cggacccggctttaccctcaaacccaggaaagccgggtcacttggggctagggacggcccccgagcgagcggggctgcaggtgccgcgaggaaa

SEQ ID NO: 359139 - DNA, 252 bp, Homo sapiens; identical to SEQ ID NO: 285959
  chr8:73448832-73449084
  hyper

SEQ ID NO: 359140 - DNA, 263 bp, Homo sapiens; identical to SEQ ID NO: 285960
  chr8:73449114-73449377
  hyper

SEQ ID NO: 359141 - DNA, 207 bp, Homo sapiens; identical to SEQ ID NO: 285961
  chr8:73449432-73449639
  hyper

SEQ ID NO: 359142 - DNA, 339 bp, Homo sapiens
  chr8:74005170-74005509
  hyper
gtccagcctccagccgcgggcgaagcaggcggggtcccggccgggacagcagcgcccggcctcggcgcagccggcctgggccccgggccacagccgcgacagcgcgcacagcgccatccacagggtcctcatggccagggctccggcggcgcctgcgacgcgacagacccccggggcaagcgctctgatcctcggctggccgcggcccgggagctgcccgagcggccggcgaggcacagccgggccctgccctgcgcccggcccccgccctccgcgccgcccctccccagccctggcggcgcgcccgtcgaggcccgggcgggtggcggggctgccctg

SEQ ID NO: 359143 - DNA, 122 bp, Homo sapiens; identical to SEQ ID NO: 201465
  chr8:74005539-74005661
  hyper

SEQ ID NO: 359144 - DNA, 57 bp, Homo sapiens
  chr8:74005798-74005855
  hyper
cgatgggcaccaaacgtgtctcagcagcactctgcgcgggccaccccgccttcgccc

SEQ ID NO: 359145 - DNA, 77 bp, Homo sapiens; identical to SEQ ID NO: 346991
  chr8:75897394-75897471
  hyper

SEQ ID NO: 359146 - DNA, 172 bp, Homo sapiens
  chr8:76316995-76317167
  hyper
attgagcccgcgcggggaggtaaggactccggcgtgggtgccaccgcggttgcgaaaaatcgggttctgaacccggtcagcaggagtggcagcgccccagcagcacctaggcaggaagaggacacttcccgttcgcgtttggtgatggtttcatgtaccaggacatgggtgc

SEQ ID NO: 359147 - DNA, 194 bp, Homo sapiens; identical to SEQ ID NO: 350770
  chr8:77589904-77590098
  hyper

SEQ ID NO: 359148 - DNA, 135 bp, Homo sapiens; identical to SEQ ID NO: 350771
  chr8:80524710-80524845
  hyper

SEQ ID NO: 359149 - DNA, 112 bp, Homo sapiens; identical to SEQ ID NO: 201479
  chr8:80695946-80696058
  hyper

SEQ ID NO: 359150 - DNA, 132 bp, Homo sapiens; identical to SEQ ID NO: 201480
  chr8:80696101-80696233
  hyper

SEQ ID NO: 359151 - DNA, 307 bp, Homo sapiens; identical to SEQ ID NO: 350774
  chr8:80696263-80696570
  hyper

SEQ ID NO: 359152 - DNA, 208 bp, Homo sapiens; identical to SEQ ID NO: 201482
  chr8:80803900-80804108
  hyper

SEQ ID NO: 359153 - DNA, 273 bp, Homo sapiens; identical to SEQ ID NO: 201484
  chr8:81398155-81398428
  hyper

SEQ ID NO: 359154 - DNA, 602 bp, Homo sapiens
  chr8:81399496-81400098
  hyper
ggcatttcaatgggcgagggccggcgactgtggatctggagctggacgcgctggaggggaaggagttgatgcaggacggcgcgtccctgagcgacagcaccgaggacgaggaggagggggcgagcctgggcgacggcagcggggcggaaggcggcagctgcagcagcagcaggcggtcgggcggcgatggcggggacgaagtggagggcagcggtgtgggagctggcgaaggagagactgtccagcacttcccgctcgcgcggcccaagtctctaatgcagaagctccaatgctccttccagacctcctggctcaaggactttccctggctgcgctattccaaggatactggtcttatgtcttgcggctggtgccaaaagacccctgcagatgggggaagcgtggaccttcccccagtggggcatgatgagctttcgcgagggacccgcaactacaagaaaaccctcctcctgaggcaccacgtctctaccgagcacaaactccacgaagccaacgcccaggtacagtatatcctgctcctacttttttgagatcttttagggaaaggtttatcagcactcccttcacccccacccaccccc

SEQ ID NO: 359155 - DNA, 917 bp, Homo sapiens; identical to SEQ ID NO: 350777
  chr8:81785915-81786832
  hyper

SEQ ID NO: 359156 - DNA, 196 bp, Homo sapiens; identical to SEQ ID NO: 350778
  chr8:82192428-82192624
  hyper

SEQ ID NO: 359157 - DNA, 99 bp, Homo sapiens; identical to SEQ ID NO: 345308
  chr8:82193698-82193797
  hyper

SEQ ID NO: 359158 - DNA, 140 bp, Homo sapiens; identical to SEQ ID NO: 333501
  chr8:91014317-91014457
  hyper

SEQ ID NO: 359159 - DNA, 243 bp, Homo sapiens; identical to SEQ ID NO: 350780
  chr8:91657148-91657391
  hyper

SEQ ID NO: 359160 - DNA, 245 bp, Homo sapiens; identical to SEQ ID NO: 350781
  chr8:91657421-91657666
  hyper

SEQ ID NO: 359161 - DNA, 65 bp, Homo sapiens; identical to SEQ ID NO: 350782
  chr8:91996920-91996985
  hyper

SEQ ID NO: 359162 - DNA, 52 bp, Homo sapiens; identical to SEQ ID NO: 350783
  chr8:94712366-94712418
  hyper

SEQ ID NO: 359163 - DNA, 248 bp, Homo sapiens; identical to SEQ ID NO: 286033
  chr8:94712881-94713129
  hyper

SEQ ID NO: 359164 - DNA, 261 bp, Homo sapiens; identical to SEQ ID NO: 333507
  chr8:95003763-95004024
  hyper

SEQ ID NO: 359165 - DNA, 71 bp, Homo sapiens; identical to SEQ ID NO: 201508
  chr8:95651655-95651726
  hyper

SEQ ID NO: 359166 - DNA, 176 bp, Homo sapiens; identical to SEQ ID NO: 346996
  chr8:95651845-95652021
  hyper

SEQ ID NO: 359167 - DNA, 223 bp, Homo sapiens; identical to SEQ ID NO: 201510
  chr8:95652591-95652814
  hyper

SEQ ID NO: 359168 - DNA, 377 bp, Homo sapiens; identical to SEQ ID NO: 201511
  chr8:95652863-95653240
  hyper

SEQ ID NO: 359169 - DNA, 52 bp, Homo sapiens; identical to SEQ ID NO: 201512
  chr8:95653290-95653342
  hyper

SEQ ID NO: 359170 - DNA, 109 bp, Homo sapiens
  chr8:95653451-95653560
  hyper
tcttagaagagggtttagcacaggttttttcgttctcacttccacaccaccttaccgcctcccgaccccccctctccccctccccacctatcgtcatgacggcctctcc

SEQ ID NO: 359171 - DNA, 54 bp, Homo sapiens; identical to SEQ ID NO: 346997
  chr8:97156910-97156964
  hyper

SEQ ID NO: 359172 - DNA, 77 bp, Homo sapiens; identical to SEQ ID NO: 350790
  chr8:97166796-97166873
  hyper

SEQ ID NO: 359173 - DNA, 275 bp, Homo sapiens; identical to SEQ ID NO: 201518
  chr8:97166903-97167178
  hyper

SEQ ID NO: 359174 - DNA, 214 bp, Homo sapiens; identical to SEQ ID NO: 350792
  chr8:97167223-97167437
  hyper

SEQ ID NO: 359175 - DNA, 80 bp, Homo sapiens; identical to SEQ ID NO: 350793
  chr8:97507728-97507808
  hyper

SEQ ID NO: 359176 - DNA, 188 bp, Homo sapiens; identical to SEQ ID NO: 333522
  chr8:98787253-98787441
  hyper

SEQ ID NO: 359177 - DNA, 177 bp, Homo sapiens; identical to SEQ ID NO: 350794
  chr8:98787803-98787980
  hyper

SEQ ID NO: 359178 - DNA, 355 bp, Homo sapiens; identical to SEQ ID NO: 201523
  chr8:98788437-98788792
  hyper

SEQ ID NO: 359179 - DNA, 765 bp, Homo sapiens; identical to SEQ ID NO: 286064
  chr8:98881052-98881817
  hyper

SEQ ID NO: 359180 - DNA, 43 bp, Homo sapiens
  chr8:98881884-98881927
  hyper
attcctattccacggacagccgatggctcccccttccctcttc

SEQ ID NO: 359181 - DNA, 134 bp, Homo sapiens; identical to SEQ ID NO: 333527
  chr8:99182356-99182490
  hyper

SEQ ID NO: 359182 - DNA, 74 bp, Homo sapiens; identical to SEQ ID NO: 286069
  chr8:99438739-99438813
  hyper

SEQ ID NO: 359183 - DNA, 59 bp, Homo sapiens; identical to SEQ ID NO: 350796
  chr8:99953137-99953196
  hyper

SEQ ID NO: 359184 - DNA, 95 bp, Homo sapiens
  chr8:99954061-99954156
  hyper
cgtccttggtgtcgcaagtccagagccgcgaggacagcagatgaccgggtcagcggaaatttcagagccagccagcagctcaggtccccggggcc

SEQ ID NO: 359185 - DNA, 418 bp, Homo sapiens; identical to SEQ ID NO: 201528
  chr8:99954762-99955180
  hyper

SEQ ID NO: 359186 - DNA, 826 bp, Homo sapiens; identical to SEQ ID NO: 346999
  chr8:99956460-99957286
  hyper

SEQ ID NO: 359187 - DNA, 51 bp, Homo sapiens; identical to SEQ ID NO: 345310
  chr8:99957709-99957760
  hyper

SEQ ID NO: 359188 - DNA, 80 bp, Homo sapiens
  chr8:99963508-99963588
  hyper
cgaggtggctgcgggtctgcctccgaagttatcagtgtaatcgggcctctgtgtatgcctgcacgtgtattttcatgatt

SEQ ID NO: 359189 - DNA, 244 bp, Homo sapiens; identical to SEQ ID NO: 350799
  chr8:101661596-101661840
  hyper

SEQ ID NO: 359190 - DNA, 62 bp, Homo sapiens; identical to SEQ ID NO: 350800
  chr8:101661991-101662053
  hyper

SEQ ID NO: 359191 - DNA, 169 bp, Homo sapiens; identical to SEQ ID NO: 350801
  chr8:101920213-101920382
  hyper

SEQ ID NO: 359192 - DNA, 62 bp, Homo sapiens; identical to SEQ ID NO: 350802
  chr8:101920468-101920530
  hyper

SEQ ID NO: 359193 - DNA, 48 bp, Homo sapiens; identical to SEQ ID NO: 350803
  chr8:102092936-102092984
  hyper

SEQ ID NO: 359194 - DNA, 141 bp, Homo sapiens; identical to SEQ ID NO: 350804
  chr8:102093137-102093278
  hyper

SEQ ID NO: 359195 - DNA, 32 bp, Homo sapiens; identical to SEQ ID NO: 201542
  chr8:102504696-102504728
  hyper

SEQ ID NO: 359196 - DNA, 143 bp, Homo sapiens; identical to SEQ ID NO: 350806
  chr8:102504760-102504903
  hyper

SEQ ID NO: 359197 - DNA, 40 bp, Homo sapiens; identical to SEQ ID NO: 201544
  chr8:102506365-102506405
  hyper

SEQ ID NO: 359198 - DNA, 429 bp, Homo sapiens; identical to SEQ ID NO: 201548
  chr8:104511554-104511983
  hyper

SEQ ID NO: 359199 - DNA, 48 bp, Homo sapiens; identical to SEQ ID NO: 347002
  chr8:105236123-105236171
  hyper

SEQ ID NO: 359200 - DNA, 37 bp, Homo sapiens; identical to SEQ ID NO: 350809
  chr8:105600489-105600526
  hyper

SEQ ID NO: 359201 - DNA, 329 bp, Homo sapiens; identical to SEQ ID NO: 201550
  chr8:105600681-105601010
  hyper

SEQ ID NO: 359202 - DNA, 244 bp, Homo sapiens; identical to SEQ ID NO: 201551
  chr8:105601687-105601931
  hyper

SEQ ID NO: 359203 - DNA, 142 bp, Homo sapiens
  chr8:105602083-105602225
  hyper
cgactttcagggtagatatattgaaaggaggattcgcccatcacgctgcagtttccctaaagctcttttctcactcccagcaaatgggagtcctcctttacttagatccccagaacacttttctaagtacgtctgtagtgac

SEQ ID NO: 359204 - DNA, 358 bp, Homo sapiens
  chr8:106331443-106331801
  hyper
cgctcagccctcgcgctcccgggctgcttttttaattccgacccgcgcacgctgcgagtccccggcgctgtcgtccagccggaggggcagtcccgctcctttagacgcttattattgttgttgtcattgctttgtgcgattgacgtgggactactcttgggaaccacttttagtaaccagggtagaaacttctcagaaaagctgggcggtcgagacctcggggcgagggaggtaacttccccacgcggtggaaaatcagagcgtcagggtcccgatcctgggcggtgccagagccacaccaaacccgaagcgaaacaaaaagtaggtgtaaaagttcgcgcctctgcggcgggcggcc

SEQ ID NO: 359205 - DNA, 89 bp, Homo sapiens
  chr8:107281820-107281909
  hyper
cgctccaagctgccttgggtccctttctaggctgtcagacttcgccttcctttcctccttgtttttcccagcaaccaaagcatctgaag

SEQ ID NO: 359206 - DNA, 217 bp, Homo sapiens; identical to SEQ ID NO: 201555
  chr8:107282895-107283112
  hyper

SEQ ID NO: 359207 - DNA, 622 bp, Homo sapiens; identical to SEQ ID NO: 347003
  chr8:107669381-107670003
  hyper

SEQ ID NO: 359208 - DNA, 633 bp, Homo sapiens; identical to SEQ ID NO: 201557
  chr8:107670289-107670922
  hyper

SEQ ID NO: 359209 - DNA, 105 bp, Homo sapiens; identical to SEQ ID NO: 345314
  chr8:107670978-107671083
  hyper

SEQ ID NO: 359210 - DNA, 59 bp, Homo sapiens
  chr8:108509697-108509756
  hyper
ccactgttttctggacttcggcgctgattgctgcaccctatgtgagtcagaatggcagc

SEQ ID NO: 359211 - DNA, 225 bp, Homo sapiens; identical to SEQ ID NO: 350815
  chr8:109799189-109799414
  hyper

SEQ ID NO: 359212 - DNA, 42 bp, Homo sapiens; identical to SEQ ID NO: 350816
  chr8:109799903-109799945
  hyper

SEQ ID NO: 359213 - DNA, 284 bp, Homo sapiens; identical to SEQ ID NO: 333553
  chr8:110552612-110552896
  hyper

SEQ ID NO: 359214 - DNA, 99 bp, Homo sapiens; identical to SEQ ID NO: 350817
  chr8:110986113-110986212
  hyper

SEQ ID NO: 359215 - DNA, 174 bp, Homo sapiens; identical to SEQ ID NO: 350818
  chr8:110987222-110987396
  hyper

SEQ ID NO: 359216 - DNA, 65 bp, Homo sapiens; identical to SEQ ID NO: 350819
  chr8:110987616-110987681
  hyper

SEQ ID NO: 359217 - DNA, 300 bp, Homo sapiens; identical to SEQ ID NO: 350820
  chr8:110987956-110988256
  hyper

SEQ ID NO: 359218 - DNA, 39 bp, Homo sapiens; identical to SEQ ID NO: 201567
  chr8:114444541-114444580
  hyper

SEQ ID NO: 359219 - DNA, 341 bp, Homo sapiens; identical to SEQ ID NO: 286136
  chr8:114447448-114447789
  hyper

SEQ ID NO: 359220 - DNA, 818 bp, Homo sapiens; identical to SEQ ID NO: 345315
  chr8:114449602-114450420
  hyper

SEQ ID NO: 359221 - DNA, 194 bp, Homo sapiens; identical to SEQ ID NO: 350823
  chr8:119123513-119123707
  hyper

SEQ ID NO: 359222 - DNA, 60 bp, Homo sapiens; identical to SEQ ID NO: 350824
  chr8:120220368-120220428
  hyper

SEQ ID NO: 359223 - DNA, 326 bp, Homo sapiens; identical to SEQ ID NO: 350825
  chr8:120220895-120221221
  hyper

SEQ ID NO: 359224 - DNA, 540 bp, Homo sapiens; identical to SEQ ID NO: 347007
  chr8:121823361-121823901
  hyper

SEQ ID NO: 359225 - DNA, 211 bp, Homo sapiens; identical to SEQ ID NO: 347008
  chr8:121824481-121824692
  hyper

SEQ ID NO: 359226 - DNA, 79 bp, Homo sapiens; identical to SEQ ID NO: 333566
  chr8:124778505-124778584
  hyper

SEQ ID NO: 359227 - DNA, 278 bp, Homo sapiens; identical to SEQ ID NO: 333569
  chr8:128806660-128806938
  hyper

SEQ ID NO: 359228 - DNA, 105 bp, Homo sapiens
  chr8:131455079-131455184
  hyper
cgctctcagaaaacgcagcaggtcccaaaatggtacaagcagaaaacacaagccacttcacggtccgcccaggagccaaccccaagctccaagtaggactccccc

SEQ ID NO: 359229 - DNA, 72 bp, Homo sapiens; identical to SEQ ID NO: 350829
  chr8:131456212-131456284
  hyper

SEQ ID NO: 359230 - DNA, 310 bp, Homo sapiens; identical to SEQ ID NO: 286199
  chr8:133493185-133493495
  hyper

SEQ ID NO: 359231 - DNA, 435 bp, Homo sapiens
  chr8:134582738-134583173
  hyper
cggccgccgaggaccctagcgtaggagggaggagcgagtcagggctccagctgacgagcagagccagacgatccccacacgcttcctgggagacccggctgcaaggccaggctaatgcgcgctccgacgtctctgtgccaagccggggcgcaagctcaacccccatctcaagttcagccgcgcttcctcccgcaaggtcacgcttaaacactcgcgcagagaaaggaggagcggaaagttgcgccaccgtcccgattccaaactaactgtaccctcaccagagcgcctcgccccagggtcaccgctgtccgtccccgtgcgctcccagaaggggtggccctgcccccacgcaggtcacacacacgagagacacaggcaagttgctaacttttgtcagattatttcttgggagctgcgacgcctcacggggttggg

SEQ ID NO: 359232 - DNA, 926 bp, Homo sapiens
  chr8:134583293-134584219
  hyper
cccccagatccggagcagcgcgctctgacggcgtccccggggccgatagccacctcccggatctgcgcctgcttgcagcggattgggggactcgatccggatactgtcccacggccgctcgtccagaacactggcggcctccgcggtgtcccagcctgtgaccccaaatccgctcgagagcgcctgagcccggccacccagcgaggtctcctcccacgggcggccccagcggaggagatcccagcccggcgccgggtgcaatgtcactggggctgctttcgggaaccgctgcccgggacttggcgtaggttccccacagagctccaggcagctcctccagtgtcggccgaagacccctaagcccgaacctccaccccgaccttcttcctctcccaaagccctgggtggtcgccgctgccaaggaaggggtctcccttcgaatgtcttccactagaatcccggggtcttcagtcccagctccactgtcacaccctcctagtcccctccccaccccttcagttcccgggtccagacaatcaaccttccactccgagaatccacaggaaactgcccgagccccaactcaggcggacgcagcccccgcgcaccccgagcagggttcgcctccgcgcgcgcactcaccacggctggagacacgctggagtttccgggatttgggcatgaaggggttcggaggagaatacaggggtgtgggtgtcccggacacttgcccccttcccagctcacatcgcctcttccttctctctccgctcttcttcctcctcctcctccctccggtctagggctctttgtctttgcaaagtgtcgaaactgtctggcatagtgggctccgccggcggaggctggagccgaggaagcgaggaggcgggatgagggtgggagagggctcgggaacaccttccccc

SEQ ID NO: 359233 - DNA, 392 bp, Homo sapiens
  chr8:136469763-136470155
  hyper
cgggactggcggggatcgccgtggactgcctcaggggcgccgcagcccgctcggcccgagggcccgcctaaccgcgccgcccgcgcccgctcctcctcggcccgcgcccggagcgcgggggccgccggcgctgggtactcggcggccaccggggatcggggctgagcggtcggttcccgcccccgtgccgccgccgccgccttccggccgaccgcccggcttggccgctgctgccgcgtctggcccccgggtccccgccgctgggggcgcgggcggggtcgggggttgccgggcgccgccccccgtgcgcctggagtccacatcccgggcccggcggccggcgagcatggaggagaagtacctgcccgagctgatggcggagaaggactccc

SEQ ID NO: 359234 - DNA, 206 bp, Homo sapiens
  chr8:136470313-136470519
  hyper
cccgggtggcccccggggtcgtttgcacggggacctgggaggctgtgggacacctaggggaagaccctgatgtgaattttggggacttggaaggagaaggctggggcgcatgggtgagacttgaaggaaatctttggggactcgggcacacccaggggaaacttctgggtgggggacagcgaccatctgggggcttcgttgggaac

SEQ ID NO: 359235 - DNA, 102 bp, Homo sapiens; identical to SEQ ID NO: 286213
  chr8:139509549-139509651
  hyper

SEQ ID NO: 359236 - DNA, 150 bp, Homo sapiens; identical to SEQ ID NO: 350831
  chr8:140643192-140643342
  hyper

SEQ ID NO: 359237 - DNA, 1631 bp, Homo sapiens; identical to SEQ ID NO: 333579
  chr8:142138208-142139839
  hyper

SEQ ID NO: 359238 - DNA, 449 bp, Homo sapiens; identical to SEQ ID NO: 345316
  chr8:142317706-142318155
  hyper

SEQ ID NO: 359239 - DNA, 415 bp, Homo sapiens; identical to SEQ ID NO: 345317
  chr8:142318184-142318599
  hyper

SEQ ID NO: 359240 - DNA, 106 bp, Homo sapiens; identical to SEQ ID NO: 350835
  chr8:142427489-142427595
  hyper

SEQ ID NO: 359241 - DNA, 327 bp, Homo sapiens; identical to SEQ ID NO: 286229
  chr8:142427700-142428027
  hyper

SEQ ID NO: 359242 - DNA, 69 bp, Homo sapiens; identical to SEQ ID NO: 333583
  chr8:143483659-143483728
  hyper

SEQ ID NO: 359243 - DNA, 64 bp, Homo sapiens
  chr8:143531771-143531835
  hyper
cacacaccacagcctggcacccctcttcatcacatgcacagggcaggctggggagggcgttccc

SEQ ID NO: 359244 - DNA, 120 bp, Homo sapiens; identical to SEQ ID NO: 347012
  chr8:143531858-143531978
  hyper

SEQ ID NO: 359245 - DNA, 296 bp, Homo sapiens; identical to SEQ ID NO: 117271
  chr8:143556722-143557018
  hyper

SEQ ID NO: 359246 - DNA, 90 bp, Homo sapiens; identical to SEQ ID NO: 201623
  chr8:143695816-143695906
  hyper

SEQ ID NO: 359247 - DNA, 56 bp, Homo sapiens; identical to SEQ ID NO: 286236
  chr8:143859071-143859127
  hyper

SEQ ID NO: 359248 - DNA, 49 bp, Homo sapiens
  chr8:143859361-143859410
  hyper
ccgcctcgctgcccatggcctccgcctgcctcccctgcgctcagctccc

SEQ ID NO: 359249 - DNA, 219 bp, Homo sapiens; identical to SEQ ID NO: 350840
  chr8:144240980-144241199
  hyper

SEQ ID NO: 359250 - DNA, 55 bp, Homo sapiens
  chr8:144328118-144328173
  hyper
cgcggggctctggcgggcctggcggctcagtgcgatctgggcaggcaggaagtgg

SEQ ID NO: 359251 - DNA, 104 bp, Homo sapiens; identical to SEQ ID NO: 333591
  chr8:144417159-144417263
  hyper

SEQ ID NO: 359252 - DNA, 120 bp, Homo sapiens; identical to SEQ ID NO: 286253
  chr8:144636569-144636689
  hyper

SEQ ID NO: 359253 - DNA, 394 bp, Homo sapiens; identical to SEQ ID NO: 350842
  chr8:144640377-144640771
  hyper

SEQ ID NO: 359254 - DNA, 91 bp, Homo sapiens; identical to SEQ ID NO: 333595
  chr8:144641074-144641165
  hyper

SEQ ID NO: 359255 - DNA, 93 bp, Homo sapiens; identical to SEQ ID NO: 333596
  chr8:145692498-145692591
  hyper

SEQ ID NO: 359256 - DNA, 77 bp, Homo sapiens; identical to SEQ ID NO: 345318
  chr8:145698674-145698751
  hyper

SEQ ID NO: 359257 - DNA, 429 bp, Homo sapiens; identical to SEQ ID NO: 333598
  chr8:145733644-145734073
  hyper

SEQ ID NO: 359258 - DNA, 209 bp, Homo sapiens
  chr8:145747534-145747743
  hyper
cgtcggcactgccggccagtccttgctcttcccacctttcggaggcccaagatcctactgtggccggccagggccagcgagggaccccccccatgcagagctggaggttggggtgatgtcttttcggaagagcttcaagggaggtgttggggcctccccggccaccttccattgctaccccaggattcccgagtgcaacgttcccggct

SEQ ID NO: 359259 - DNA, 526 bp, Homo sapiens; identical to SEQ ID NO: 333600
  chr8:145910996-145911522
  hyper

SEQ ID NO: 359260 - DNA, 37 bp, Homo sapiens; identical to SEQ ID NO: 350846
  chr9:118139-118176
  hyper

SEQ ID NO: 359261 - DNA, 92 bp, Homo sapiens
  chr9:214559-214651
  hyper
cgacttgcctacattccctggcagcctcgcagcttcgggcagatggagcttccggcctgcgcgcagtggtcgcctgtcgtccgcccgcgctc

SEQ ID NO: 359262 - DNA, 169 bp, Homo sapiens
  chr9:215348-215517
  hyper
tgataggcgcctgggtaaccgtgttgggcgcgccacggagtgtctcataaacggctccttcctttgaggcaagtctgagcgcggggggaagaagtgaagtggctgaaattagagttgcgtttgaggcaggctgcaagccttctgtcgtcctgagcaaggctccgtcctc

SEQ ID NO: 359263 - DNA, 878 bp, Homo sapiens; identical to SEQ ID NO: 333605
  chr9:503936-504814
  hyper

SEQ ID NO: 359264 - DNA, 104 bp, Homo sapiens
  chr9:3181020-3181124
  hyper
cgcacttctacacgcgcgcgccgggcaacatagcgcaccgcgggtacacgcacgccgaccggacacacgcagtctcgtacacgcccaacgagcgcacacacccg

SEQ ID NO: 359265 - DNA, 43 bp, Homo sapiens
  chr9:3181880-3181923
  hyper
ctctgcttggtgagtgggcactcgctcttggtgtgattctggc

SEQ ID NO: 359266 - DNA, 375 bp, Homo sapiens; identical to SEQ ID NO: 333616
  chr9:4297365-4297740
  hyper

SEQ ID NO: 359267 - DNA, 220 bp, Homo sapiens
  chr9:4298789-4299009
  hyper
cgccgggccggtacccgcgaggagtgtaggtaccctcagcccgaccacctcccgcaatcatggggacaccggcttggatgagacacaggcgtggaaaacagccttcgtgaaactccacaaacacgtggaacttgaaaagacaactacagccccgcgtgtgcgcgagagacctcacgtcaccccatcagttcccacttcgccaaagtttcccttcagtggg

SEQ ID NO: 359268 - DNA, 70 bp, Homo sapiens
  chr9:6412900-6412970
  hyper
ggcacccgccccctcagctctgaaacgaggcctcaaaacggcaaccgatgtggtagccgcgcaatcttcc

SEQ ID NO: 359269 - DNA, 315 bp, Homo sapiens; identical to SEQ ID NO: 286313
  chr9:6644554-6644869
  hyper

SEQ ID NO: 359270 - DNA, 332 bp, Homo sapiens
  chr9:8857015-8857347
  hyper
cgttcccttccctacggaatgaatgtgtgtgttaagtacaccagattcccgcagctgaactacgagctttgattctgccacgggaaggtctcccaaacaatccccctcctctatggcagctgcgtagactttgattcctgctatttctccttctccccactagttcagaggaaagaaagaaaaagaaatcgccccctcaccgtagtcagccctccttaaaacagtaatccctgcctttaaaaaaggcggtggcaggatccctgggtaagggtggattgccccaccgctccaccatttgcccccaatactacgcccaccctaggaggagagag

SEQ ID NO: 359271 - DNA, 37 bp, Homo sapiens; identical to SEQ ID NO: 201664
  chr9:8857406-8857443
  hyper

SEQ ID NO: 359272 - DNA, 49 bp, Homo sapiens; identical to SEQ ID NO: 201665
  chr9:10612635-10612684
  hyper

SEQ ID NO: 359273 - DNA, 143 bp, Homo sapiens; identical to SEQ ID NO: 350851
  chr9:10613299-10613442
  hyper

SEQ ID NO: 359274 - DNA, 98 bp, Homo sapiens
  chr9:13278637-13278735
  hyper
cgcccatcagcgcggggggtgaggagactaagggagagacaagaccaacgtgctcccaccaacgggagcggcggttaaaagggcgccggtgccagggg

SEQ ID NO: 359275 - DNA, 347 bp, Homo sapiens; identical to SEQ ID NO: 286324
  chr9:13278956-13279303
  hyper

SEQ ID NO: 359276 - DNA, 227 bp, Homo sapiens; identical to SEQ ID NO: 201670
  chr9:13279406-13279633
  hyper

SEQ ID NO: 359277 - DNA, 2011 bp, Homo sapiens; identical to SEQ ID NO: 350852
  chr9:14313785-14315796
  hyper

SEQ ID NO: 359278 - DNA, 587 bp, Homo sapiens
  chr9:14348452-14349039
  hyper
ggtggagagaaaacaaggttatttaaagtgactcccagaacgcagctttcgttcctagactctttaggtgtcagtgcttcggctccagtttagcacggcacaggcggcccagcctttgatatttaagccaggccagcgcccgggtgaaactacctgttgggggattctgccgcctggaacccttcttcttctgcgcaatactggcagcagtgggatggctctgggggtgccacgcgaagagagagggcggaagagccgggagcagcggacagtcagctgcatgtggcagtgcctagcgagctgctcccgcgcctctgctcgctctttgaaaactggaaacagccccctgtgctctgtgctgggcccctggctgcggagatgggcccaaactcggcacgattctctaagttcggaaaccacgaagcttgcgccttcatgcgtgtctaacattaaaaacaaaaaaacctcctggcggcttcctgggctcccgcccccaccttgcgctccaacacccggcacttttccctgtaccgaaattcactttactacttcttgaaattcggaaaactccaccgacgcttggactc

SEQ ID NO: 359279 - DNA, 224 bp, Homo sapiens; identical to SEQ ID NO: 333625
  chr9:16133902-16134126
  hyper

SEQ ID NO: 359280 - DNA, 55 bp, Homo sapiens
  chr9:16154771-16154826
  hyper
gtgcggctccgacgccacgctggtgctgcagcagcaagcgccgcgagccagccac

SEQ ID NO: 359281 - DNA, 70 bp, Homo sapiens
  chr9:17905988-17906058
  hyper
cgtgcctacccagctgtcgtgggtccccgtcactcccgggcgcatgttgcaaaacaaatcaactccatgg

SEQ ID NO: 359282 - DNA, 37 bp, Homo sapiens
  chr9:17906726-17906763
  hyper
gcctgccggccgccgccgcggagccaccgcaatcagc

SEQ ID NO: 359283 - DNA, 96 bp, Homo sapiens; identical to SEQ ID NO: 345320
  chr9:19127135-19127231
  hyper

SEQ ID NO: 359284 - DNA, 341 bp, Homo sapiens; identical to SEQ ID NO: 350854
  chr9:20620372-20620713
  hyper

SEQ ID NO: 359285 - DNA, 591 bp, Homo sapiens; identical to SEQ ID NO: 350855
  chr9:20620754-20621345
  hyper

SEQ ID NO: 359286 - DNA, 71 bp, Homo sapiens; identical to SEQ ID NO: 345321
  chr9:21395928-21395999
  hyper

SEQ ID NO: 359287 - DNA, 36 bp, Homo sapiens; identical to SEQ ID NO: 345322
  chr9:21396327-21396363
  hyper

SEQ ID NO: 359288 - DNA, 203 bp, Homo sapiens
  chr9:21994237-21994440
  hyper
cgtgagccgcgggatgtgaaccacgaaaaccctcactcgcggcgggccgcacgcgcgccgaatccggagggtcaccaagaacctgcgcaccatgttctcgccgcctccagggccgagctcggcagccgctgcgccgccctttggcaccagaggtgagcagcgccactcctgcccccttaactgcagactgggacccacgcacc

SEQ ID NO: 359289 - DNA, 244 bp, Homo sapiens
  chr9:22446681-22446925
  hyper
cggattccccgccgccctcctcccagaaggtccccactccccgccccgggccctcccccggcttccgcgctgggccgggagcctgggtgggcggggtagcctctctagccttgccttcttggctggaggcacaaaggcattaacttagcgcccggggtctctgccaggctcacgggacagctgcacctctcagcgtctccagctccaggacgcggtcgtcccaactccttccgagtggaaagag

SEQ ID NO: 359290 - DNA, 153 bp, Homo sapiens
  chr9:22447276-22447429
  hyper
cggaggctgcccgccggctcccgggctggagagcggggtaggcgcggtgggctgcggctacccgcggacgcccaagtgcgcccgctgtcgtaaccatggtgtggtgtcagcgctcaagggccacaagcgcttctgccgctggcgggactgcgc

SEQ ID NO: 359291 - DNA, 75 bp, Homo sapiens
  chr9:23849766-23849841
  hyper
cgggtttctttttgttgttgtttaacgaccccctcctcccagcccccaaccctttgtgtgtgaggattccccttc

SEQ ID NO: 359292 - DNA, 568 bp, Homo sapiens; identical to SEQ ID NO: 345323
  chr9:27528536-27529104
  hyper

SEQ ID NO: 359293 - DNA, 182 bp, Homo sapiens; identical to SEQ ID NO: 201692
  chr9:27529157-27529339
  hyper

SEQ ID NO: 359294 - DNA, 567 bp, Homo sapiens; identical to SEQ ID NO: 345325
  chr9:27529340-27529907
  hyper

SEQ ID NO: 359295 - DNA, 299 bp, Homo sapiens; identical to SEQ ID NO: 286381
  chr9:29212828-29213127
  hyper

SEQ ID NO: 359296 - DNA, 194 bp, Homo sapiens; identical to SEQ ID NO: 333648
  chr9:34379701-34379895
  hyper

SEQ ID NO: 359297 - DNA, 337 bp, Homo sapiens; identical to SEQ ID NO: 350863
  chr9:34380737-34381074
  hyper

SEQ ID NO: 359298 - DNA, 264 bp, Homo sapiens
  chr9:34591191-34591455
  hyper
cggccagctaggacttcaggacacacagcaaactagctgcgccccgctgagggtcagcgcacagccgcccacacaaggtgtcctctccccgggctctctgggccgccggcctcctgcttcccgtgccgcagaccgggattagactgtggacgcggggaaggaagggggcgttgcgacgggatcttgaggggagcaggacttgcccctgcccctgcggcgaagctctaggccctggcaaggttcggtacaccgggggccgctcct

SEQ ID NO: 359299 - DNA, 31 bp, Homo sapiens
  chr9:34591656-34591687
  hyper
tgctgtcggcagagcagcagtccacggctgc

SEQ ID NO: 359300 - DNA, 92 bp, Homo sapiens
  chr9:34664955-34665047
  hyper
cgtgtggggaggggcgctcggctcgaatggcgacagcggcggcagagtcaggaggtcagtacggtgggcttcggtttaaatctttaatgcac

SEQ ID NO: 359301 - DNA, 82 bp, Homo sapiens
  chr9:34665215-34665297
  hyper
gcggggcgggagctaccggattccccccgatgggtcctcagagactgagtcccgtccatgcccggggcgggtccgcggtatc

SEQ ID NO: 359302 - DNA, 542 bp, Homo sapiens; identical to SEQ ID NO: 286398
  chr9:34701753-34702295
  hyper

SEQ ID NO: 359303 - DNA, 282 bp, Homo sapiens; identical to SEQ ID NO: 350864
  chr9:35161771-35162053
  hyper

SEQ ID NO: 359304 - DNA, 253 bp, Homo sapiens; identical to SEQ ID NO: 350865
  chr9:35162422-35162675
  hyper

SEQ ID NO: 359305 - DNA, 41 bp, Homo sapiens
  chr9:35676180-35676221
  hyper
aaggccaccgtttccctgccgaggtgagcgcggagctggcc

SEQ ID NO: 359306 - DNA, 894 bp, Homo sapiens; identical to SEQ ID NO: 333655
  chr9:35756575-35757469
  hyper

SEQ ID NO: 359307 - DNA, 62 bp, Homo sapiens; identical to SEQ ID NO: 345326
  chr9:37034135-37034197
  hyper

SEQ ID NO: 359308 - DNA, 241 bp, Homo sapiens; identical to SEQ ID NO: 286422
  chr9:37035886-37036127
  hyper

SEQ ID NO: 359309 - DNA, 349 bp, Homo sapiens; identical to SEQ ID NO: 333667
  chr9:71320587-71320936
  hyper

SEQ ID NO: 359310 - DNA, 465 bp, Homo sapiens; identical to SEQ ID NO: 350870
  chr9:71735786-71736251
  hyper

SEQ ID NO: 359311 - DNA, 380 bp, Homo sapiens; identical to SEQ ID NO: 350871
  chr9:71788570-71788950
  hyper

SEQ ID NO: 359312 - DNA, 45 bp, Homo sapiens; identical to SEQ ID NO: 350872
  chr9:71789757-71789802
  hyper

SEQ ID NO: 359313 - DNA, 149 bp, Homo sapiens
  chr9:74061513-74061662
  hyper
cgcgtgcgaagggagaaaagaaagcaaagactggggctctcccccggccactcaccggcgtctgctgcgacgggagtcccgagcgtttggtggacccctgcttggaacttaaccttttccacgactcggcaaacctgccccggctggcg

SEQ ID NO: 359314 - DNA, 163 bp, Homo sapiens; identical to SEQ ID NO: 333671
  chr9:74640002-74640165
  hyper

SEQ ID NO: 359315 - DNA, 50 bp, Homo sapiens
  chr9:74764247-74764297
  hyper
cgcggagccaactcgcgggagaaaaatcctattggcattgaggaggtagg

SEQ ID NO: 359316 - DNA, 42 bp, Homo sapiens
  chr9:74764879-74764921
  hyper
caccccccgctcccccgccccccgttccaatcctaagatacc

SEQ ID NO: 359317 - DNA, 101 bp, Homo sapiens; identical to SEQ ID NO: 350874
  chr9:77111662-77111763
  hyper

SEQ ID NO: 359318 - DNA, 92 bp, Homo sapiens
  chr9:77501932-77502024
  hyper
cgagaccaagaaattaccaggatctccactactctcccaagcgtctccagtgctctcccaacagccaggagcaccctccctctccaagcccc

SEQ ID NO: 359319 - DNA, 380 bp, Homo sapiens; identical to SEQ ID NO: 201733
  chr9:77502233-77502613
  hyper

SEQ ID NO: 359320 - DNA, 127 bp, Homo sapiens; identical to SEQ ID NO: 350875
  chr9:78505461-78505588
  hyper

SEQ ID NO: 359321 - DNA, 717 bp, Homo sapiens; identical to SEQ ID NO: 286474
  chr9:78505622-78506339
  hyper

SEQ ID NO: 359322 - DNA, 247 bp, Homo sapiens; identical to SEQ ID NO: 333677
  chr9:79319779-79320026
  hyper

SEQ ID NO: 359323 - DNA, 183 bp, Homo sapiens; identical to SEQ ID NO: 350878
  chr9:79629667-79629850
  hyper

SEQ ID NO: 359324 - DNA, 54 bp, Homo sapiens; identical to SEQ ID NO: 201741
  chr9:79630437-79630491
  hyper

SEQ ID NO: 359325 - DNA, 472 bp, Homo sapiens; identical to SEQ ID NO: 201742
  chr9:79630544-79631016
  hyper

SEQ ID NO: 359326 - DNA, 171 bp, Homo sapiens; identical to SEQ ID NO: 350881
  chr9:79632239-79632410
  hyper

SEQ ID NO: 359327 - DNA, 291 bp, Homo sapiens; identical to SEQ ID NO: 286485
  chr9:79632921-79633212
  hyper

SEQ ID NO: 359328 - DNA, 321 bp, Homo sapiens; identical to SEQ ID NO: 286488
  chr9:80645546-80645867
  hyper

SEQ ID NO: 359329 - DNA, 421 bp, Homo sapiens; identical to SEQ ID NO: 201747
  chr9:80645902-80646323
  hyper

SEQ ID NO: 359330 - DNA, 662 bp, Homo sapiens; identical to SEQ ID NO: 201748
  chr9:80646509-80647171
  hyper

SEQ ID NO: 359331 - DNA, 382 bp, Homo sapiens; identical to SEQ ID NO: 347030
  chr9:80647247-80647629
  hyper

SEQ ID NO: 359332 - DNA, 166 bp, Homo sapiens; identical to SEQ ID NO: 286494
  chr9:82185179-82185345
  hyper

SEQ ID NO: 359333 - DNA, 260 bp, Homo sapiens; identical to SEQ ID NO: 286495
  chr9:82185383-82185643
  hyper

SEQ ID NO: 359334 - DNA, 469 bp, Homo sapiens; identical to SEQ ID NO: 347033
  chr9:82185703-82186172
  hyper

SEQ ID NO: 359335 - DNA, 64 bp, Homo sapiens; identical to SEQ ID NO: 333690
  chr9:82188495-82188559
  hyper

SEQ ID NO: 359336 - DNA, 243 bp, Homo sapiens; identical to SEQ ID NO: 201759
  chr9:87283766-87284009
  hyper

SEQ ID NO: 359337 - DNA, 113 bp, Homo sapiens
  chr9:87285083-87285196
  hyper
cgaagagagagtgggcacactggtggctccagcggcgtcagtgccatcgcggggcaagttgattcctgggccggagctgggcactcatccatccacagtctccgggctggggt

SEQ ID NO: 359338 - DNA, 218 bp, Homo sapiens; identical to SEQ ID NO: 333696
  chr9:88355794-88356012
  hyper

SEQ ID NO: 359339 - DNA, 92 bp, Homo sapiens; identical to SEQ ID NO: 350891
  chr9:89517563-89517655
  hyper

SEQ ID NO: 359340 - DNA, 182 bp, Homo sapiens; identical to SEQ ID NO: 286516
  chr9:89517860-89518042
  hyper

SEQ ID NO: 359341 - DNA, 431 bp, Homo sapiens; identical to SEQ ID NO: 201763
  chr9:89561318-89561749
  hyper

SEQ ID NO: 359342 - DNA, 494 bp, Homo sapiens; identical to SEQ ID NO: 350894
  chr9:89561779-89562273
  hyper

SEQ ID NO: 359343 - DNA, 276 bp, Homo sapiens; identical to SEQ ID NO: 350895
  chr9:90112514-90112790
  hyper

SEQ ID NO: 359344 - DNA, 270 bp, Homo sapiens; identical to SEQ ID NO: 201767
  chr9:90112856-90113126
  hyper

SEQ ID NO: 359345 - DNA, 115 bp, Homo sapiens; identical to SEQ ID NO: 350897
  chr9:90113156-90113271
  hyper

SEQ ID NO: 359346 - DNA, 385 bp, Homo sapiens
  chr9:90113280-90113665
  hyper
cgcctcggtgggccgctcccttccctcccttgctcccccgggcggccgcacgccgggtcggccgggtaacggagagggagtcgccaggaatgtggctctggggactgcctcgctcggggaaggggagagggtggccacggtgttaggagaggcgcgggagccgagaggtggcgcgggggtgccaccgttgccgcaggctggagagagattgctcccagtgaggcgcgtaccgtctgggcgagggcttcattcttccgcggcgtccctggaggtgggaaagctgggtgggcatgtgtgcagagaaaggggaggcggggaggccagtcacttccggagccggttctgatcccaacagaccgcccagcgtttggggacgccgacctcg

SEQ ID NO: 359347 - DNA, 202 bp, Homo sapiens; identical to SEQ ID NO: 350898
  chr9:90340643-90340845
  hyper

SEQ ID NO: 359348 - DNA, 321 bp, Homo sapiens; identical to SEQ ID NO: 201770
  chr9:90340943-90341264
  hyper

SEQ ID NO: 359349 - DNA, 198 bp, Homo sapiens; identical to SEQ ID NO: 350900
  chr9:90341343-90341541
  hyper

SEQ ID NO: 359350 - DNA, 77 bp, Homo sapiens; identical to SEQ ID NO: 347035
  chr9:91149647-91149724
  hyper

SEQ ID NO: 359351 - DNA, 222 bp, Homo sapiens; identical to SEQ ID NO: 286534
  chr9:91149754-91149976
  hyper

SEQ ID NO: 359352 - DNA, 236 bp, Homo sapiens; identical to SEQ ID NO: 201776
  chr9:91150385-91150621
  hyper

SEQ ID NO: 359353 - DNA, 544 bp, Homo sapiens; identical to SEQ ID NO: 347038
  chr9:93955385-93955929
  hyper

SEQ ID NO: 359354 - DNA, 267 bp, Homo sapiens; identical to SEQ ID NO: 201780
  chr9:93956177-93956444
  hyper

SEQ ID NO: 359355 - DNA, 218 bp, Homo sapiens; identical to SEQ ID NO: 347040
  chr9:95820744-95820962
  hyper

SEQ ID NO: 359356 - DNA, 214 bp, Homo sapiens; identical to SEQ ID NO: 286552
  chr9:95821006-95821220
  hyper

SEQ ID NO: 359357 - DNA, 278 bp, Homo sapiens; identical to SEQ ID NO: 201789
  chr9:96711697-96711975
  hyper

SEQ ID NO: 359358 - DNA, 121 bp, Homo sapiens; identical to SEQ ID NO: 201792
  chr9:96714974-96715095
  hyper

SEQ ID NO: 359359 - DNA, 174 bp, Homo sapiens; identical to SEQ ID NO: 201793
  chr9:96717633-96717807
  hyper

SEQ ID NO: 359360 - DNA, 155 bp, Homo sapiens
  chr9:96720648-96720803
  hyper
cggcggcggcggcggggcctcctctgctcaggcactgccgcgttggcggccgaaaaaagagggtcccagagaaggggaaccccctccctgtcgaggacaccgaggcccagagaggggaagcctcctccccagtggggtgcagtctgggattgcag

SEQ ID NO: 359361 - DNA, 429 bp, Homo sapiens; identical to SEQ ID NO: 347043
  chr9:97767434-97767863
  hyper

SEQ ID NO: 359362 - DNA, 1264 bp, Homo sapiens; identical to SEQ ID NO: 333721
  chr9:98272643-98273907
  hyper

SEQ ID NO: 359363 - DNA, 248 bp, Homo sapiens; identical to SEQ ID NO: 286576
  chr9:98783525-98783773
  hyper

SEQ ID NO: 359364 - DNA, 395 bp, Homo sapiens; identical to SEQ ID NO: 286577
  chr9:98784377-98784772
  hyper

SEQ ID NO: 359365 - DNA, 178 bp, Homo sapiens; identical to SEQ ID NO: 350911
  chr9:99637706-99637884
  hyper

SEQ ID NO: 359366 - DNA, 316 bp, Homo sapiens; identical to SEQ ID NO: 333725
  chr9:99638097-99638413
  hyper

SEQ ID NO: 359367 - DNA, 41 bp, Homo sapiens
  chr9:99984107-99984148
  hyper
cgcagccaccggggatggggctgagggtcggttcctgcccc

SEQ ID NO: 359368 - DNA, 239 bp, Homo sapiens; identical to SEQ ID NO: 286592
  chr9:100000500-100000739
  hyper

SEQ ID NO: 359369 - DNA, 99 bp, Homo sapiens; identical to SEQ ID NO: 333730
  chr9:100263437-100263536
  hyper

SEQ ID NO: 359370 - DNA, 110 bp, Homo sapiens
  chr9:100264589-100264699
  hyper
cgtggatcccaggttcgcgctgagagtgtttggggcaggtgaagtttcccaaactgggagagacaaggtttaaagcaccacgacacgcgctacgcggccaagtggagctg

SEQ ID NO: 359371 - DNA, 108 bp, Homo sapiens
  chr9:100264871-100264979
  hyper
gcgctccccacacctgttcaccctctccgggcctgggacgctggggtcccagccgcgcacatgcggagacgctgcagaaatcggagactgactgccccagactcgatc

SEQ ID NO: 359372 - DNA, 93 bp, Homo sapiens; identical to SEQ ID NO: 350914
  chr9:100503340-100503433
  hyper

SEQ ID NO: 359373 - DNA, 201 bp, Homo sapiens; identical to SEQ ID NO: 201812
  chr9:100610480-100610681
  hyper

SEQ ID NO: 359374 - DNA, 703 bp, Homo sapiens; identical to SEQ ID NO: 333740
  chr9:101569830-101570533
  hyper

SEQ ID NO: 359375 - DNA, 441 bp, Homo sapiens; identical to SEQ ID NO: 350917
  chr9:102586203-102586644
  hyper

SEQ ID NO: 359376 - DNA, 227 bp, Homo sapiens; identical to SEQ ID NO: 347046
  chr9:102586985-102587212
  hyper

SEQ ID NO: 359377 - DNA, 273 bp, Homo sapiens; identical to SEQ ID NO: 286613
  chr9:103790689-103790962
  hyper

SEQ ID NO: 359378 - DNA, 203 bp, Homo sapiens; identical to SEQ ID NO: 201821
  chr9:103791017-103791220
  hyper

SEQ ID NO: 359379 - DNA, 148 bp, Homo sapiens; identical to SEQ ID NO: 201823
  chr9:104248697-104248845
  hyper

SEQ ID NO: 359380 - DNA, 499 bp, Homo sapiens; identical to SEQ ID NO: 201824
  chr9:104248975-104249474
  hyper

SEQ ID NO: 359381 - DNA, 299 bp, Homo sapiens; identical to SEQ ID NO: 333748
  chr9:110187439-110187738
  hyper

SEQ ID NO: 359382 - DNA, 57 bp, Homo sapiens
  chr9:110249882-110249939
  hyper
cgccaccaccaccgggtggctgccgtcagggctgcctttgctgacgctgatgaccga

SEQ ID NO: 359383 - DNA, 122 bp, Homo sapiens; identical to SEQ ID NO: 201829
  chr9:110250497-110250619
  hyper

SEQ ID NO: 359384 - DNA, 202 bp, Homo sapiens
  chr9:110250630-110250832
  hyper
cgactgcaccgcccagacatggggactggtcaggcaggaagcacccgggaacccagggcgccagcgctgcaatctcggcccactcccgggtcgaagaagaggtgatgcgtctgtattgcgggtgttatgtcctgtctgcccaattgcgtgtgagcgagcgccgcggctggtccctccccctccaggtcccgtggacgtcccc

SEQ ID NO: 359385 - DNA, 220 bp, Homo sapiens; identical to SEQ ID NO: 201833
  chr9:110252078-110252298
  hyper

SEQ ID NO: 359386 - DNA, 118 bp, Homo sapiens; identical to SEQ ID NO: 201834
  chr9:110252515-110252633
  hyper

SEQ ID NO: 359387 - DNA, 81 bp, Homo sapiens; identical to SEQ ID NO: 350923
  chr9:110252700-110252781
  hyper

SEQ ID NO: 359388 - DNA, 60 bp, Homo sapiens; identical to SEQ ID NO: 350924
  chr9:112081274-112081334
  hyper

SEQ ID NO: 359389 - DNA, 130 bp, Homo sapiens; identical to SEQ ID NO: 201836
  chr9:112081563-112081693
  hyper

SEQ ID NO: 359390 - DNA, 860 bp, Homo sapiens; identical to SEQ ID NO: 350926
  chr9:112081773-112082633
  hyper

SEQ ID NO: 359391 - DNA, 216 bp, Homo sapiens; identical to SEQ ID NO: 201839
  chr9:112260252-112260468
  hyper

SEQ ID NO: 359392 - DNA, 162 bp, Homo sapiens; identical to SEQ ID NO: 347050
  chr9:112260523-112260685
  hyper

SEQ ID NO: 359393 - DNA, 59 bp, Homo sapiens
  chr9:112402440-112402499
  hyper
cgggaacacgcagaatttggagtgaaacggaaaggggcatggggtcgccaaggtggtga

SEQ ID NO: 359394 - DNA, 178 bp, Homo sapiens; identical to SEQ ID NO: 333756
  chr9:113017465-113017643
  hyper

SEQ ID NO: 359395 - DNA, 287 bp, Homo sapiens; identical to SEQ ID NO: 286650
  chr9:113800481-113800768
  hyper

SEQ ID NO: 359396 - DNA, 282 bp, Homo sapiens; identical to SEQ ID NO: 201845
  chr9:113800798-113801080
  hyper

SEQ ID NO: 359397 - DNA, 66 bp, Homo sapiens
  chr9:113801414-113801480
  hyper
tttttcacttcactggatctgtaaacgaaagcaagtgtgtctgctcccctagttctccatatccac

SEQ ID NO: 359398 - DNA, 395 bp, Homo sapiens; identical to SEQ ID NO: 333758
  chr9:116111663-116112058
  hyper

SEQ ID NO: 359399 - DNA, 300 bp, Homo sapiens
  chr9:116918462-116918762
  hyper
cgggcgagagttggcgaacgctgcccgccctgccgcgcctggcccggctgcccgatcccgttggggcgggggcagagccagcccgggggtcgggggtgggggtgggtggtggcgcctggagcggccggcggggtgcggaggggggctttttggatgcttgggggaggaggggggtctccgtttggggccgtctcggtgtgttccggtgtctcagtgtctgcaggtcccaagcctgtacgtctccgtttctatctgttcttgtgaaattgtccgcaagtttctaggtcaccaggtctcggg

SEQ ID NO: 359400 - DNA, 167 bp, Homo sapiens; identical to SEQ ID NO: 350930
  chr9:117267296-117267463
  hyper

SEQ ID NO: 359401 - DNA, 131 bp, Homo sapiens; identical to SEQ ID NO: 345327
  chr9:117880425-117880556
  hyper

SEQ ID NO: 359402 - DNA, 69 bp, Homo sapiens
  chr9:120175204-120175273
  hyper
cgtgggaagagctactggtttgtgtgtgtctgtgtgtgtgtgcttggtgcgtcgcaccccagaagcgcc

SEQ ID NO: 359403 - DNA, 254 bp, Homo sapiens
  chr9:120176358-120176612
  hyper
ggggcggtgacggcgggtggccagtgacggtacccggagaagtgggaggctcgacctgaaactggcttaggatctgggatgctccggcccctagccagagcaccttcagtgaatggggtctccggcttccgggatggatcaagcagagctccaggtcgggactgagaggcagaggggcaggttcccactgcgggagggttggcacgcccccaggctcccgccgcgcgctctccaggacctcctcccacatgctc

SEQ ID NO: 359404 - DNA, 65 bp, Homo sapiens
  chr9:120176629-120176694
  hyper
cgacctctgggcccctcctctaccctctgccaaccccactcggggcagccccgggcagggatccc

SEQ ID NO: 359405 - DNA, 392 bp, Homo sapiens; identical to SEQ ID NO: 350932
  chr9:122318421-122318813
  hyper

SEQ ID NO: 359406 - DNA, 168 bp, Homo sapiens; identical to SEQ ID NO: 333766
  chr9:124062292-124062460
  hyper

SEQ ID NO: 359407 - DNA, 1023 bp, Homo sapiens; identical to SEQ ID NO: 333767
  chr9:124131788-124132811
  hyper

SEQ ID NO: 359408 - DNA, 268 bp, Homo sapiens; identical to SEQ ID NO: 333769
  chr9:124857529-124857797
  hyper

SEQ ID NO: 359409 - DNA, 82 bp, Homo sapiens; identical to SEQ ID NO: 345328
  chr9:124990438-124990520
  hyper

SEQ ID NO: 359410 - DNA, 142 bp, Homo sapiens; identical to SEQ ID NO: 345329
  chr9:124991012-124991154
  hyper

SEQ ID NO: 359411 - DNA, 215 bp, Homo sapiens; identical to SEQ ID NO: 333771
  chr9:126759147-126759362
  hyper

SEQ ID NO: 359412 - DNA, 51 bp, Homo sapiens
  chr9:126773180-126773231
  hyper
cgaaccctggcctttctgagttcctaaagccatgctcgcccccactcttcc

SEQ ID NO: 359413 - DNA, 60 bp, Homo sapiens; identical to SEQ ID NO: 201866
  chr9:126773978-126774038
  hyper

SEQ ID NO: 359414 - DNA, 249 bp, Homo sapiens; identical to SEQ ID NO: 201867
  chr9:126780315-126780564
  hyper

SEQ ID NO: 359415 - DNA, 227 bp, Homo sapiens
  chr9:126782445-126782672
  hyper
ctctaaaatgggaatagtcatagccacctctctgagaggtaatgatgtacagtgacatttgtaaagccaaacacacaccataggtgtctactacatgtttatttctgcctcggacttccttccccgtccactctgccgctctctgtggactgccgcagatctctgaacttccccgagcctaatttgctccacttgttcacggagaaacaatcatcttacagggtagc

SEQ ID NO: 359416 - DNA, 32 bp, Homo sapiens; identical to SEQ ID NO: 350939
  chr9:126783540-126783572
  hyper

SEQ ID NO: 359417 - DNA, 203 bp, Homo sapiens
  chr9:126784854-126785057
  hyper
cgagtccaggccagtctgacccaccctccagccccaggtctctgggattgagggctgggaggtgacacagagggatgacggagacggagggctgcgcagctgccctgagaaagttcttgtgagtttgtcagaaacaaaaaacaaacaaaaaaatgccctctgtggggcgggtggaggctgtgacgcggcgcaactgcagctgc

SEQ ID NO: 359418 - DNA, 45 bp, Homo sapiens
  chr9:126785351-126785396
  hyper
tggggttaggtcaaggaccctctttggcgtcccctcccttcagcc

SEQ ID NO: 359419 - DNA, 192 bp, Homo sapiens; identical to SEQ ID NO: 350940
  chr9:129373418-129373610
  hyper

SEQ ID NO: 359420 - DNA, 62 bp, Homo sapiens; identical to SEQ ID NO: 350941
  chr9:129373640-129373702
  hyper

SEQ ID NO: 359421 - DNA, 132 bp, Homo sapiens
  chr9:129387302-129387434
  hyper
cgtttaatcagaggctgtgccgctcaaaccgcggggccctttgtcccacggagtgaacgacggaaacttgccatcctaatccccttattcatgtcaagcacagaaaagaagccgagcaccttacaaccgtgt

SEQ ID NO: 359422 - DNA, 51 bp, Homo sapiens; identical to SEQ ID NO: 201882
  chr9:129387464-129387515
  hyper

SEQ ID NO: 359423 - DNA, 231 bp, Homo sapiens; identical to SEQ ID NO: 333788
  chr9:129393170-129393401
  hyper

SEQ ID NO: 359424 - DNA, 135 bp, Homo sapiens; identical to SEQ ID NO: 345330
  chr9:129400713-129400848
  hyper

SEQ ID NO: 359425 - DNA, 167 bp, Homo sapiens; identical to SEQ ID NO: 347056
  chr9:129485513-129485680
  hyper

SEQ ID NO: 359426 - DNA, 120 bp, Homo sapiens; identical to SEQ ID NO: 333794
  chr9:130661066-130661186
  hyper

SEQ ID NO: 359427 - DNA, 42 bp, Homo sapiens; identical to SEQ ID NO: 350946
  chr9:130689378-130689420
  hyper

SEQ ID NO: 359428 - DNA, 418 bp, Homo sapiens; identical to SEQ ID NO: 286760
  chr9:130689749-130690167
  hyper

SEQ ID NO: 359429 - DNA, 138 bp, Homo sapiens
  chr9:131127341-131127479
  hyper
ctgatctcagcttgacacccaattagcacaagaatgggaggaggaagcctgcgagaggcgcctcccagcctcccggggcgcgcgaggggagcaggcgggaagacaaaggacagcaggcaggggggcacccgcgccctc

SEQ ID NO: 359430 - DNA, 88 bp, Homo sapiens; identical to SEQ ID NO: 350948
  chr9:131842789-131842877
  hyper

SEQ ID NO: 359431 - DNA, 704 bp, Homo sapiens; identical to SEQ ID NO: 350949
  chr9:131842946-131843650
  hyper

SEQ ID NO: 359432 - DNA, 258 bp, Homo sapiens; identical to SEQ ID NO: 350950
  chr9:132020659-132020917
  hyper

SEQ ID NO: 359433 - DNA, 73 bp, Homo sapiens; identical to SEQ ID NO: 350951
  chr9:132021110-132021183
  hyper

SEQ ID NO: 359434 - DNA, 280 bp, Homo sapiens; identical to SEQ ID NO: 333801
  chr9:132145475-132145755
  hyper

SEQ ID NO: 359435 - DNA, 166 bp, Homo sapiens; identical to SEQ ID NO: 333802
  chr9:132176641-132176807
  hyper

SEQ ID NO: 359436 - DNA, 187 bp, Homo sapiens; identical to SEQ ID NO: 350954
  chr9:132244512-132244699
  hyper

SEQ ID NO: 359437 - DNA, 554 bp, Homo sapiens; identical to SEQ ID NO: 201899
  chr9:132244741-132245295
  hyper

SEQ ID NO: 359438 - DNA, 728 bp, Homo sapiens
  chr9:132245345-132246073
  hyper
cttcccaggagctcggctccccgggatggaagggactgatacccagttaatgggcgtggagcctgagcccctgagggtcgtcgctaacgggggtcgctcagcagggccggcctccgctgcctgcccggggtgtctaatcacctctccgatcctttgcccggatctgagcttcgtcattcacgcccctcctccctggcgactttgggcctggtgacagtcccccgaccctcgcagagccaggggcacagtaggcgccttagccactggcagaatttcaccggcgctctgcccgacgcccccagccccagggccgggcgtgggtggaagtgtctggaagggtgggttcaccagggctgggcacgtcagcggccccgtacagagaatccggtgcctggggtctctggagggggtactcagagtatccgaggaggagactcctggatgctaacagagcccccagttaggagcagtccgcgagacagttggtaacagtgctggccttgcccgggcgccggaaggttccgtgaggcccagcaagtcctgacttggcacagggcccagcacacggtaagcgctcggtacttggtcactgttgcttgattttaccatttcggaggggctcatctacgcctagcaaagcccccctcccggtgacccaaggggagctccagaatgttgagcggctgagcggcctggctcctcctctcgaccccatcgagccaagtgtc

SEQ ID NO: 359439 - DNA, 690 bp, Homo sapiens; identical to SEQ ID NO: 333804
  chr9:132258226-132258916
  hyper

SEQ ID NO: 359440 - DNA, 112 bp, Homo sapiens; identical to SEQ ID NO: 345331
  chr9:132804293-132804405
  hyper

SEQ ID NO: 359441 - DNA, 207 bp, Homo sapiens; identical to SEQ ID NO: 201905
  chr9:132804455-132804662
  hyper

SEQ ID NO: 359442 - DNA, 103 bp, Homo sapiens; identical to SEQ ID NO: 201906
  chr9:132804693-132804796
  hyper

SEQ ID NO: 359443 - DNA, 290 bp, Homo sapiens; identical to SEQ ID NO: 201907
  chr9:132805028-132805318
  hyper

SEQ ID NO: 359444 - DNA, 292 bp, Homo sapiens; identical to SEQ ID NO: 201908
  chr9:132805445-132805737
  hyper

SEQ ID NO: 359445 - DNA, 55 bp, Homo sapiens; identical to SEQ ID NO: 201909
  chr9:132805893-132805948
  hyper

SEQ ID NO: 359446 - DNA, 140 bp, Homo sapiens
  chr9:133308607-133308747
  hyper
cgggagaaggacgggcagcgcgtgggcggaactgcaggggctggcagggaggtctgagttacgcggatgggccacgctccgaccgcacccccgagtccgcctgtccgtgtgtctgtgccgcccgcaggacgtgcttccgg

SEQ ID NO: 359447 - DNA, 67 bp, Homo sapiens; identical to SEQ ID NO: 286803
  chr9:133308769-133308836
  hyper

SEQ ID NO: 359448 - DNA, 199 bp, Homo sapiens
  chr9:133309052-133309251
  hyper
catcgccgtgtccccctacccctactaaacgggagagggcattggcggccgccctggcgtgacccccgaggaaggggtcgaggagaagcttggtccacgccacctgctgtggcaagcggagcgtcatcgtctcccgccccgtgcgtcagcgagaccttgggtcaacacgaccctgcgcacagccttgacccccgacagc

SEQ ID NO: 359449 - DNA, 1351 bp, Homo sapiens; identical to SEQ ID NO: 333814
  chr9:133710055-133711406
  hyper

SEQ ID NO: 359450 - DNA, 101 bp, Homo sapiens; identical to SEQ ID NO: 286815
  chr9:134131797-134131898
  hyper

SEQ ID NO: 359451 - DNA, 123 bp, Homo sapiens
  chr9:135037440-135037563
  hyper
ccccgatctgacggcggcggcggcggcggccacagcggcgggagcggcgcggggaaggagcagcggctcgcagccctcggcccgcgcccccacccagcgccagcccgaggggggaggcgcagc

SEQ ID NO: 359452 - DNA, 223 bp, Homo sapiens
  chr9:135117797-135118020
  hyper
cggtgagccagagggtcgggagaaacgctgctcgccccacaccccgtcctgcctcccaccacacttacacacacgggactgtggccgacaccccctggcctgtgccaggctcacgggcggcggcggaccccgacctccagttgcctacaattccagtcgctgacttggtcctgttttctattctttatttttcctgcaacccaccagaccccaggcctcaccg

SEQ ID NO: 359453 - DNA, 131 bp, Homo sapiens
  chr9:135118060-135118191
  hyper
gagagaaggaaggggtggggggcctggaaacttcgttctgtagagaactatttttgtttgtattcactgtcccctgcaagggggacggggcgggagcactggtcaccgcgggggccgatggtggagaatcc

SEQ ID NO: 359454 - DNA, 630 bp, Homo sapiens; identical to SEQ ID NO: 345338
  chr9:135286324-135286954
  hyper

SEQ ID NO: 359455 - DNA, 207 bp, Homo sapiens
  chr9:135645005-135645212
  hyper
cggtcatgagcttgcctctaacccagcaaagcgtgtggaagaaacatcggcagtgagggctcccatctctcatttctcaaagagccgagactttcagcgaggccacttgccattcctggtaggtaatcagatcgctgttaattaataaagctgtcaggtggctcgtcctctctggtcattagtatcctttcagaaagagaatcctgc

SEQ ID NO: 359456 - DNA, 452 bp, Homo sapiens
  chr9:135645250-135645702
  hyper
aacttaatgctatgcaaatgagaggctcttctcatcattagcttatagccacgaatgttaatcgcataattgggtcttcaacagggtaattagacacgatttcctccattagtcttacaaggctaattattgttgagcggagagggggactgctcccagggctccaggcgaagaggggcatctggttaaagcgaattcgggcgcatcgtccgccaggtaaaaacagcagtcgcgatccattgtcacagcccactgtccccacccatcgtggggaccgggctagggagggaaacggaaccaggggaaggcctgggggggtcacactcgtgccccttgcctgggtcctgggatgcagacaacgtggcatttaaaagtgaaagcggaaacaaacagcagccccgccagcccgggcccggaggcccagccccgcgccaagggccacccctcggcgc

SEQ ID NO: 359457 - DNA, 469 bp, Homo sapiens; identical to SEQ ID NO: 201922
  chr9:136399643-136400112
  hyper

SEQ ID NO: 359458 - DNA, 57 bp, Homo sapiens
  chr9:136603465-136603522
  hyper
cggaactccaggcctcccccgccccccaccctcgctgccagccccatgtctccgccc

SEQ ID NO: 359459 - DNA, 356 bp, Homo sapiens; identical to SEQ ID NO: 350966
  chr9:137533140-137533496
  hyper

SEQ ID NO: 359460 - DNA, 99 bp, Homo sapiens
  chr9:138986173-138986272
  hyper
cggctccacgacgagagtccaagaccaaacttcccccagagcctggcagaggggctgggaggtgacctctgacctccgaccccacacgatcccagcaag

SEQ ID NO: 359461 - DNA, 824 bp, Homo sapiens; identical to SEQ ID NO: 201927
  chr9:138986333-138987157
  hyper

SEQ ID NO: 359462 - DNA, 563 bp, Homo sapiens
  chr9:138987167-138987730
  hyper
cgggggcggggcggcggcgggggaggtgcccgcgggccgttaaagggacagcgcgccggccgcgcgcgcgcgcgcactggcagccaggtgggctcccggggtcggggctggggtccgggggccgggagggtccccagtgggggccggcggggcgtggggaaccccgagcgctggggaggggaggcggcagctcctcgcccctcgcgcgtcctccttccggagctgccggcggtcgaccctgcgcgggacacccggcgggagccggacgccgcggcgcagaggacggagctcggcggccgggtcgggaaaggacctggagcgccgccctccgccctccccgggccccggcctcggccggactcgctaagcccgggagagcccccgggcccccctaccccgcccccggcgcgcgccctgcccgcggcagtcgcgtccgcacggtgcagcctccgggatccgggcgggggaagtgcgcgcatccgcagccgccctggacgctcaggcgggccgtgaaagacgaggatacgggagcgcccttgggcgaacgtctgcggggctccggc

SEQ ID NO: 359463 - DNA, 33 bp, Homo sapiens
  chr9:139084513-139084546
  hyper
cgtcccgccaaggggacgccacccagagccctg

SEQ ID NO: 359464 - DNA, 357 bp, Homo sapiens; identical to SEQ ID NO: 333839
  chr9:139401232-139401589
  hyper

SEQ ID NO: 359465 - DNA, 133 bp, Homo sapiens; identical to SEQ ID NO: 333841
  chr9:139703274-139703407
  hyper

SEQ ID NO: 359466 - DNA, 139 bp, Homo sapiens; identical to SEQ ID NO: 286862
  chr9:139740877-139741016
  hyper

SEQ ID NO: 359467 - DNA, 520 bp, Homo sapiens; identical to SEQ ID NO: 350968
  chr9:139948370-139948890
  hyper

SEQ ID NO: 359468 - DNA, 375 bp, Homo sapiens; identical to SEQ ID NO: 350969
  chr9:140024237-140024612
  hyper

SEQ ID NO: 359469 - DNA, 636 bp, Homo sapiens; identical to SEQ ID NO: 347066
  chr9:140196486-140197122
  hyper

SEQ ID NO: 359470 - DNA, 155 bp, Homo sapiens; identical to SEQ ID NO: 347067
  chr9:140197263-140197418
  hyper

SEQ ID NO: 359471 - DNA, 188 bp, Homo sapiens; identical to SEQ ID NO: 345339
  chr9:140703858-140704046
  hyper

SEQ ID NO: 359472 - DNA, 327 bp, Homo sapiens; identical to SEQ ID NO: 345340
  chr9:140704131-140704458
  hyper

SEQ ID NO: 359473 - DNA, 238 bp, Homo sapiens
  chr10:734738-734976
  hyper
cgagaggaccaggacggcaaggccggagcccggcccggggggaggttgacgattccgcccagccctccccgcgcagcgcccgcgaacaatgggggtgggatcccccgggccgcgccaggaccgctgcacggcctgagccaccagagatcgaacccggggtccaacgacaagtttcgcattgaaatctggccgggcgttccaggccgaacccgccagcgaggaggtggcgcgcaccgcg

SEQ ID NO: 359474 - DNA, 175 bp, Homo sapiens; identical to SEQ ID NO: 286884
  chr10:735049-735224
  hyper

SEQ ID NO: 359475 - DNA, 884 bp, Homo sapiens; identical to SEQ ID NO: 350974
  chr10:735245-736129
  hyper

SEQ ID NO: 359476 - DNA, 96 bp, Homo sapiens; identical to SEQ ID NO: 345341
  chr10:1780056-1780152
  hyper

SEQ ID NO: 359477 - DNA, 192 bp, Homo sapiens; identical to SEQ ID NO: 286895
  chr10:3109168-3109360
  hyper

SEQ ID NO: 359478 - DNA, 1896 bp, Homo sapiens
  chr10:3109459-3111355
  hyper
ggccccactagcagggacccgcccacctgtggcgctacccctgcctctgccgcctcccgcaccgctagcgcggcccccacctacgacgacccccgcgtagatgctcctgcccacacccgccccagccccggcccctgcccctagccgcgcccgcgccccctcccccgcagcccctcccatacgctcgggccccgcccgtcaccgcccattggcgctggggccgggcgggggcgcgggcggggcggcggttccgagtcaggcgcgcgcgggcagggtccccattgcctgctgcgcacccggacgtgcggctcccctcggcctcctcgccatggacgcggacgactcccgggcccccaagggctccttgcggaagttcctggagcacctctccggggccggcaaggccatcggcgtgctgaccagcggcggggatgctcaaggtgcgcgcccccctcccggcggcgagggagggacggacggacggagctggggagaaccgggcgaaggcgatggggtgaccggagagaagaggggggaagcgatgggggggacccggggaaaggtggcgaagcgatggggagaaccggggagaagagcggggaagcgatggggagaaccgggaagaagcccgcgcccggaagcggcaggggtacctgcggggcggcatgagccggcgaggcagccccggggtccttgcccggtggggcgggggaggaagggacatggcggtaggaacctccatccggaagatcagtgagttttccaccttcggttttgttttaaatggaacctggcagagggagtcgcctgaagcgccctcgggggtcgttctgcctctgagctgtaggacggggccgggcgtcccctccgaagcgtgggtacagcgcgatcacttcctaagtgcccccccgccccccaactccgccgcacgccaccccctagaatgtcgaggaagaaacggctgggtccccgcgcgcctcctgtcgcctcgtgccctgcgcggcgtgggcggggtcctggctgctgcaatgcgggacgcggcgggggtgcgcggggttcccgcctggcgtctccagggcggtccggcagcccctcgcgtttccgctgggagatttttaaaaagggtttcctgcgctcgcatgtgctgtcgccttccggctcgtgacaaaaacgaaaaccaaaatgggtcccaggccctccccgccagcctccgcagacgggaaggatcaggaagcggggactccgggatgtcagcggcgccgcggcgcgggctccgggcttccctgccctgcaatgtggaagctgctctctaggaggggcccgaggctgggcccacggacgcgggcgcgccgggaggatatttaacattgaagagcggaaggtggcggagactcggcgcgccccaggccccgggtgcacgtgggggcgccggtgcccggatgatggagtgtcccgatccgtgcaatccctggcgggtagatcggcgcttcccaggcgaacgcaacctgggagccttagcgatcgcgcaggctggagacgcggcgcgccccgagctgggttttgatttttgttttcccggttcctcctgccgcagatgcgtggaaaggcccggatggcggatttcctcccgtttcggggccgcgcactgcacagggttggagcggggatgcaccccctgcccactgcgcgggtgaccttcccttcgcccttgagcgcgcggggcgggcgcgggtgccgcaggttgaggcgctgtgggcgccgccccgcccgccacgagcgcctacgtgatgcccggcccgtcgtctccacgagccccggccccgacacccgtgcgccgcgcgctccccaggcccgcagcgcagcctccccaggcccagcgccccccgcgggagaccc

SEQ ID NO: 359479 - DNA, 298 bp, Homo sapiens; identical to SEQ ID NO: 350977
  chr10:6018666-6018964
  hyper

SEQ ID NO: 359480 - DNA, 146 bp, Homo sapiens
  chr10:6246024-6246170
  hyper
cgggcgcacgcaccccccggtgctcggaattggctggcagtaccctgccccgccccgccggtcgccgcccccgccaccagcgatcgcttgggagagggttacctcgagctccacctcagctgcggagcgccgccgcggaaaagggc

SEQ ID NO: 359481 - DNA, 666 bp, Homo sapiens; identical to SEQ ID NO: 350978
  chr10:6621854-6622520
  hyper

SEQ ID NO: 359482 - DNA, 87 bp, Homo sapiens; identical to SEQ ID NO: 350979
  chr10:6622706-6622793
  hyper

SEQ ID NO: 359483 - DNA, 56 bp, Homo sapiens; identical to SEQ ID NO: 201966
  chr10:7449898-7449954
  hyper

SEQ ID NO: 359484 - DNA, 60 bp, Homo sapiens; identical to SEQ ID NO: 201967
  chr10:7453036-7453096
  hyper

SEQ ID NO: 359485 - DNA, 228 bp, Homo sapiens; identical to SEQ ID NO: 286915
  chr10:7454077-7454305
  hyper

SEQ ID NO: 359486 - DNA, 117 bp, Homo sapiens; identical to SEQ ID NO: 350982
  chr10:8075813-8075930
  hyper

SEQ ID NO: 359487 - DNA, 124 bp, Homo sapiens; identical to SEQ ID NO: 350983
  chr10:8086048-8086172
  hyper

SEQ ID NO: 359488 - DNA, 168 bp, Homo sapiens; identical to SEQ ID NO: 201973
  chr10:8092278-8092446
  hyper

SEQ ID NO: 359489 - DNA, 602 bp, Homo sapiens; identical to SEQ ID NO: 350985
  chr10:8092535-8093137
  hyper

SEQ ID NO: 359490 - DNA, 102 bp, Homo sapiens; identical to SEQ ID NO: 201975
  chr10:8094141-8094243
  hyper

SEQ ID NO: 359491 - DNA, 83 bp, Homo sapiens; identical to SEQ ID NO: 286932
  chr10:8094348-8094431
  hyper

SEQ ID NO: 359492 - DNA, 111 bp, Homo sapiens; identical to SEQ ID NO: 350988
  chr10:8094540-8094651
  hyper

SEQ ID NO: 359493 - DNA, 78 bp, Homo sapiens
  chr10:8095120-8095198
  hyper
cgcatgaaaggaatccttcagaacttactttcagggacggcttcttctatctcgaatttttgcatttgtagggaattt

SEQ ID NO: 359494 - DNA, 99 bp, Homo sapiens; identical to SEQ ID NO: 201977
  chr10:8095845-8095944
  hyper

SEQ ID NO: 359495 - DNA, 51 bp, Homo sapiens; identical to SEQ ID NO: 286936
  chr10:8097537-8097588
  hyper

SEQ ID NO: 359496 - DNA, 42 bp, Homo sapiens; identical to SEQ ID NO: 350990
  chr10:11060746-11060788
  hyper

SEQ ID NO: 359497 - DNA, 100 bp, Homo sapiens; identical to SEQ ID NO: 201979
  chr10:11207330-11207430
  hyper

SEQ ID NO: 359498 - DNA, 155 bp, Homo sapiens; identical to SEQ ID NO: 286940
  chr10:11207724-11207879
  hyper

SEQ ID NO: 359499 - DNA, 124 bp, Homo sapiens; identical to SEQ ID NO: 350993
  chr10:12390701-12390825
  hyper

SEQ ID NO: 359500 - DNA, 875 bp, Homo sapiens; identical to SEQ ID NO: 201983
  chr10:12390995-12391870
  hyper

SEQ ID NO: 359501 - DNA, 324 bp, Homo sapiens; identical to SEQ ID NO: 345344
  chr10:12392327-12392651
  hyper

SEQ ID NO: 359502 - DNA, 85 bp, Homo sapiens
  chr10:13043901-13043986
  hyper
aattggggacagtggcccagcaatctcctggcgccccacgatggacgtggtccgagcttgccaggcgtaaagcctgtttgcaaac

SEQ ID NO: 359503 - DNA, 99 bp, Homo sapiens; identical to SEQ ID NO: 286955
  chr10:13933035-13933134
  hyper

SEQ ID NO: 359504 - DNA, 190 bp, Homo sapiens; identical to SEQ ID NO: 201987
  chr10:13933246-13933436
  hyper

SEQ ID NO: 359505 - DNA, 76 bp, Homo sapiens
  chr10:14646259-14646335
  hyper
cgcggctccctcccagctcgctcccggcgcccgcggcggcgcccagcggcccgactgctcggcggcggcccgaggc

SEQ ID NO: 359506 - DNA, 87 bp, Homo sapiens
  chr10:14646653-14646740
  hyper
cgggaaagtgggaaggcggccgcgtgggtcacagccacaaagctccggggcgctcactctccttttttctcactccctcgttccctc

SEQ ID NO: 359507 - DNA, 174 bp, Homo sapiens
  chr10:15762154-15762328
  hyper
aagctatttattgctttagaagcaatgccccaggtggagcgagagcttgctccagttgtgtcaaaggcgcagcttggatggagaatgtgaaaaccaaccccaccaccaggaggggcaaagcaattatctcttcatcacctctgcagcctgacctcagcgttcacggctttgcac

SEQ ID NO: 359508 - DNA, 208 bp, Homo sapiens; identical to SEQ ID NO: 201993
  chr10:17270445-17270653
  hyper

SEQ ID NO: 359509 - DNA, 368 bp, Homo sapiens; identical to SEQ ID NO: 286970
  chr10:17272233-17272601
  hyper

SEQ ID NO: 359510 - DNA, 259 bp, Homo sapiens; identical to SEQ ID NO: 351000
  chr10:17495133-17495392
  hyper

SEQ ID NO: 359511 - DNA, 322 bp, Homo sapiens; identical to SEQ ID NO: 201996
  chr10:17495680-17496002
  hyper

SEQ ID NO: 359512 - DNA, 116 bp, Homo sapiens; identical to SEQ ID NO: 351002
  chr10:18429033-18429149
  hyper

SEQ ID NO: 359513 - DNA, 49 bp, Homo sapiens; identical to SEQ ID NO: 351003
  chr10:18430247-18430296
  hyper

SEQ ID NO: 359514 - DNA, 296 bp, Homo sapiens
  chr10:20106155-20106451
  hyper
cgcagctgaagacctctctggcactctcgtgctccctaccctctccccccaacatcacctatctgcccttgggaaacttattgcagttgcttttcggctaaacttaggcttcccaaatggggaaagagggttatcaagagaaggacgccggggactaggggttttcttgaggctttcgggcttacttcacctgggcggcagggggtggtactgtctccccaaagtagcccagggagggcttcagtgtgagagcaaagcttcttccgtggatacatctcctaggacctggcatctcc

SEQ ID NO: 359515 - DNA, 233 bp, Homo sapiens
  chr10:20106694-20106927
  hyper
caggtgggaaaggtggaggcgggctcgcctctggagacctacccctgctcccattgtcctccgcctgccagcttcacagacaggcctgaacgcgcagagagttccttggagtgccctgattttgtccccgagagggcccccaacctccgcatcctcttagtggctgtcctggcaggtgcgcgtcctgcggggagttgcgccccgggggctatcgccgagcgggagctgcctcc

SEQ ID NO: 359516 - DNA, 873 bp, Homo sapiens; identical to SEQ ID NO: 347076
  chr10:21815648-21816521
  hyper

SEQ ID NO: 359517 - DNA, 102 bp, Homo sapiens; identical to SEQ ID NO: 345347
  chr10:22517909-22518011
  hyper

SEQ ID NO: 359518 - DNA, 60 bp, Homo sapiens; identical to SEQ ID NO: 345348
  chr10:22518450-22518510
  hyper

SEQ ID NO: 359519 - DNA, 62 bp, Homo sapiens; identical to SEQ ID NO: 351007
  chr10:22540645-22540707
  hyper

SEQ ID NO: 359520 - DNA, 32 bp, Homo sapiens; identical to SEQ ID NO: 345349
  chr10:22626103-22626135
  hyper

SEQ ID NO: 359521 - DNA, 214 bp, Homo sapiens; identical to SEQ ID NO: 287005
  chr10:23001984-23002198
  hyper

SEQ ID NO: 359522 - DNA, 286 bp, Homo sapiens; identical to SEQ ID NO: 351010
  chr10:23002228-23002514
  hyper

SEQ ID NO: 359523 - DNA, 193 bp, Homo sapiens; identical to SEQ ID NO: 351011
  chr10:24497856-24498049
  hyper

SEQ ID NO: 359524 - DNA, 471 bp, Homo sapiens
  chr10:25241259-25241730
  hyper
cgggactcagagtttcgtcagattgggggcggggagaggaggcccgggtccgaggatggaagcgatccccgccgggagggagaacaaagcggtggccctctctctcccccgacgcacggcaagcatttaatctacaagcagggtgccagggagggaggggagcgggccgagccccaaaatagggagtttgcatttaccacgacgcctcgcccgtagtctggcgcctcctcgctgctcccggccatgtttctcccggggaacgcgggaagggaagacggcgcgggaaggagcagggagggcgaaggctgcgtgggggatgggacgtggggatggggacggggacggggacggggacggggacggggacgggtccgccccgccccgggcccgccggcgggaagcagcggcctgacgcggatccatggccccggcgctgcgccccctcccctggctaggccgcgggggcgcggg

SEQ ID NO: 359525 - DNA, 46 bp, Homo sapiens; identical to SEQ ID NO: 351012
  chr10:26222946-26222992
  hyper

SEQ ID NO: 359526 - DNA, 63 bp, Homo sapiens
  chr10:26503630-26503693
  hyper
cggagttgttattgtggtgacctagagtgtcagagccaggagagcaagaaagaggagccaaac

SEQ ID NO: 359527 - DNA, 90 bp, Homo sapiens
  chr10:26726986-26727076
  hyper
cggccaactgagcgtggttaaacgtggggagggaggagggtgaggttaccaacctgatggttgagaaagggcctccgcccagcgcgccct

SEQ ID NO: 359528 - DNA, 65 bp, Homo sapiens; identical to SEQ ID NO: 351013
  chr10:26728108-26728173
  hyper

SEQ ID NO: 359529 - DNA, 209 bp, Homo sapiens; identical to SEQ ID NO: 287029
  chr10:28031105-28031314
  hyper

SEQ ID NO: 359530 - DNA, 225 bp, Homo sapiens; identical to SEQ ID NO: 202026
  chr10:28031638-28031863
  hyper

SEQ ID NO: 359531 - DNA, 208 bp, Homo sapiens; identical to SEQ ID NO: 202027
  chr10:28032744-28032952
  hyper

SEQ ID NO: 359532 - DNA, 273 bp, Homo sapiens; identical to SEQ ID NO: 333909
  chr10:28968999-28969272
  hyper

SEQ ID NO: 359533 - DNA, 342 bp, Homo sapiens; identical to SEQ ID NO: 287040
  chr10:29011162-29011504
  hyper

SEQ ID NO: 359534 - DNA, 78 bp, Homo sapiens; identical to SEQ ID NO: 345350
  chr10:30024003-30024081
  hyper

SEQ ID NO: 359535 - DNA, 734 bp, Homo sapiens; identical to SEQ ID NO: 202032
  chr10:30024793-30025527
  hyper

SEQ ID NO: 359536 - DNA, 124 bp, Homo sapiens
  chr10:30509077-30509201
  hyper
cgctcttcccgggcagccccatgttccagggagccaaagcttgcagcgtgagagggtctctttttggaacaaaggtcggtgagtgaagtcaagtccaggcttggttttgagagatcacatgtca

SEQ ID NO: 359537 - DNA, 184 bp, Homo sapiens
  chr10:31422647-31422831
  hyper
cggggagaagggcctcgtgggccagcgcagcttgctcctctgcagacccagaagcatttgtgcgtcccgggcgtggcaggcccggcgcccactccgccctcccgcccctcccccgcgccacgtcacccgggtcacgtgagtgaccaggctcctcaccccaacccccctccctactcccgccaga

SEQ ID NO: 359538 - DNA, 115 bp, Homo sapiens
  chr10:31423116-31423231
  hyper
gaaatgcggcagccgggggtgccggcagcttgagagaaaagtctgcgtggagggggggtgggggggatgaggggaggcccggggagacagagggcaggagaaaaaggccggcccc

SEQ ID NO: 359539 - DNA, 157 bp, Homo sapiens; identical to SEQ ID NO: 333915
  chr10:31607149-31607306
  hyper

SEQ ID NO: 359540 - DNA, 790 bp, Homo sapiens; identical to SEQ ID NO: 345352
  chr10:31607954-31608744
  hyper

SEQ ID NO: 359541 - DNA, 252 bp, Homo sapiens; identical to SEQ ID NO: 202037
  chr10:31609416-31609668
  hyper

SEQ ID NO: 359542 - DNA, 215 bp, Homo sapiens
  chr10:33623838-33624053
  hyper
cgcctcccctcctgcggcctccccccactccggagcccttccctcgcttcctcccgcccctctccccgcttgggctcgcctgtaattgcctgacaggagactgggaggaacaactttccctccgagtgctctccccgtccgtctgtctgtctttcccagagaccctgcagggatctccgcgggaaggaaggcgctgggagtctgcgccccggtcg

SEQ ID NO: 359543 - DNA, 45 bp, Homo sapiens; identical to SEQ ID NO: 202040
  chr10:33624447-33624492
  hyper

SEQ ID NO: 359544 - DNA, 138 bp, Homo sapiens; identical to SEQ ID NO: 202041
  chr10:33624560-33624698
  hyper

SEQ ID NO: 359545 - DNA, 447 bp, Homo sapiens; identical to SEQ ID NO: 202042
  chr10:33624841-33625288
  hyper

SEQ ID NO: 359546 - DNA, 62 bp, Homo sapiens; identical to SEQ ID NO: 351024
  chr10:35102985-35103047
  hyper

SEQ ID NO: 359547 - DNA, 403 bp, Homo sapiens; identical to SEQ ID NO: 202045
  chr10:35103079-35103482
  hyper

SEQ ID NO: 359548 - DNA, 544 bp, Homo sapiens; identical to SEQ ID NO: 202046
  chr10:35103534-35104078
  hyper

SEQ ID NO: 359549 - DNA, 649 bp, Homo sapiens; identical to SEQ ID NO: 347086
  chr10:35104117-35104766
  hyper

SEQ ID NO: 359550 - DNA, 251 bp, Homo sapiens; identical to SEQ ID NO: 287083
  chr10:43572998-43573249
  hyper

SEQ ID NO: 359551 - DNA, 135 bp, Homo sapiens; identical to SEQ ID NO: 351029
  chr10:43697752-43697887
  hyper

SEQ ID NO: 359552 - DNA, 124 bp, Homo sapiens; identical to SEQ ID NO: 202055
  chr10:43698155-43698279
  hyper

SEQ ID NO: 359553 - DNA, 133 bp, Homo sapiens; identical to SEQ ID NO: 333927
  chr10:43725410-43725543
  hyper

SEQ ID NO: 359554 - DNA, 504 bp, Homo sapiens
  chr10:43761675-43762179
  hyper
cgttcctggggccggcaaggcctggggcaaagagagcgtggtccttcaaatgacccttgcccagcagggagagggagacacctggcatggccctggacctctcccccaaatgcagagctcaagccccaattcctcgccaaacagcaagggcgtgagataccacggcggggcccagaatgcagaagagcaaatggaaacttccaactgcgcagccctgagctcctccgattccccagcccccacccccacgccaggccccgggcagcgaacctgcccgcagtgcccacgcccgcccgccgcgtgcgctcctgccacgcccggcccggcccggcccggcccgccaggtgccctgaaggggcggagggtgcagggggtcctggcgccgtccagcccggggcggagttctcagcaactccgcgcgccgggatcccggccgccctccccgcgcgcgtcccccgccccgcgcccggagcccgcgccccggccccacgacggccgcgccgg

SEQ ID NO: 359555 - DNA, 55 bp, Homo sapiens; identical to SEQ ID NO: 351031
  chr10:43818322-43818377
  hyper

SEQ ID NO: 359556 - DNA, 129 bp, Homo sapiens; identical to SEQ ID NO: 202057
  chr10:43818407-43818536
  hyper

SEQ ID NO: 359557 - DNA, 700 bp, Homo sapiens; identical to SEQ ID NO: 351033
  chr10:43892074-43892774
  hyper

SEQ ID NO: 359558 - DNA, 171 bp, Homo sapiens; identical to SEQ ID NO: 347088
  chr10:43892970-43893141
  hyper

SEQ ID NO: 359559 - DNA, 216 bp, Homo sapiens; identical to SEQ ID NO: 347089
  chr10:44185124-44185340
  hyper

SEQ ID NO: 359560 - DNA, 78 bp, Homo sapiens; identical to SEQ ID NO: 347090
  chr10:44186043-44186121
  hyper

SEQ ID NO: 359561 - DNA, 107 bp, Homo sapiens; identical to SEQ ID NO: 345354
  chr10:44806674-44806781
  hyper

SEQ ID NO: 359562 - DNA, 173 bp, Homo sapiens; identical to SEQ ID NO: 351038
  chr10:44879650-44879823
  hyper

SEQ ID NO: 359563 - DNA, 197 bp, Homo sapiens; identical to SEQ ID NO: 345355
  chr10:44882100-44882297
  hyper

SEQ ID NO: 359564 - DNA, 201 bp, Homo sapiens; identical to SEQ ID NO: 287106
  chr10:49731801-49732002
  hyper

SEQ ID NO: 359565 - DNA, 94 bp, Homo sapiens; identical to SEQ ID NO: 351040
  chr10:50606762-50606856
  hyper

SEQ ID NO: 359566 - DNA, 53 bp, Homo sapiens
  chr10:50815014-50815067
  hyper
cgttttctcctacaggattggacaggaagttctctgttgcctgcaagttatgc

SEQ ID NO: 359567 - DNA, 159 bp, Homo sapiens
  chr10:50815344-50815503
  hyper
tgaaagttagagaatgagggagtttagtgtctttggagcctccttagggagccagcccaggaccttcctcctcccatgggtcttgatctgctcctcacccctacactgccagcgtgcggccaccttggagatggagcagcaggagcacgacgccgtgcc

SEQ ID NO: 359568 - DNA, 215 bp, Homo sapiens
  chr10:50969681-50969896
  hyper
cggttcggcgaatgcgtactgcagcctgctgtggcctcgggattaccccgtccccctcccacatctcccggggggcggaagaagcgcatcccatgcaagcagcgacctcaggccatgccgccctctctcaggcctcagttttctcatctgtaatcggagaccgcggttaaaaccgtctattaggctccttggtagtccgaagctgcctatgggtc

SEQ ID NO: 359569 - DNA, 192 bp, Homo sapiens
  chr10:50970412-50970604
  hyper
gcccctgagactccgcgcgtcgtgacgtctccatggatgccccgccccgctcctggcgctgtccacggtgctggcggcccaggcccgaggtcgcccacggccgaaggggggactcctctctgagaccgcagaacggggctgaggccctgaaccccgtgtgctcgtcctaaaactaggacgaatgtaccagac

SEQ ID NO: 359570 - DNA, 122 bp, Homo sapiens; identical to SEQ ID NO: 351041
  chr10:54073737-54073859
  hyper

SEQ ID NO: 359571 - DNA, 48 bp, Homo sapiens; identical to SEQ ID NO: 287131
  chr10:60026209-60026257
  hyper

SEQ ID NO: 359572 - DNA, 193 bp, Homo sapiens
  chr10:60272362-60272555
  hyper
cgtggatactccatgtgcgttcaggagtgtgtgtgtttgaggagctatgaaagtgcatgtatggaaaggatttatacgtgtaagtgcagaaagtggcagtgtgtacgtggtgtgtgtgtgcgcgcgcgagtgtgtgagcgccaggggccgcccgcccgccgcggctccccgtgggctggccgggccaatgagc

SEQ ID NO: 359573 - DNA, 313 bp, Homo sapiens; identical to SEQ ID NO: 287136
  chr10:60935996-60936309
  hyper

SEQ ID NO: 359574 - DNA, 65 bp, Homo sapiens
  chr10:61469827-61469892
  hyper
cggtgcgcacacacgcgcgtccccaggcgccgctgtgcccccgccgcccaccacgtgccctggcc

SEQ ID NO: 359575 - DNA, 256 bp, Homo sapiens; identical to SEQ ID NO: 351043
  chr10:62492589-62492845
  hyper

SEQ ID NO: 359576 - DNA, 295 bp, Homo sapiens; identical to SEQ ID NO: 351044
  chr10:62761026-62761321
  hyper

SEQ ID NO: 359577 - DNA, 76 bp, Homo sapiens; identical to SEQ ID NO: 287148
  chr10:62761372-62761448
  hyper

SEQ ID NO: 359578 - DNA, 127 bp, Homo sapiens
  chr10:63213212-63213339
  hyper
ttcccaagaacttccccatcacgagggggcggaaagaggagggaggaggactgaaggtcaaggtgcagcacagccagaaaggcggaggaggagagcatctctggcagctccgccttacttttccacc

SEQ ID NO: 359579 - DNA, 194 bp, Homo sapiens; identical to SEQ ID NO: 351046
  chr10:63656701-63656895
  hyper

SEQ ID NO: 359580 - DNA, 73 bp, Homo sapiens; identical to SEQ ID NO: 347093
  chr10:64578688-64578761
  hyper

SEQ ID NO: 359581 - DNA, 42 bp, Homo sapiens; identical to SEQ ID NO: 333957
  chr10:68685841-68685883
  hyper

SEQ ID NO: 359582 - DNA, 153 bp, Homo sapiens
  chr10:69834338-69834491
  hyper
cgtctttccctgaacgtgcacccagatcagctcatggggactgggaaagagaaatcatctgcacacacccaacctcgcagccaagcagacgactaccgcaaccggccgctcgcaacagcttcagaggccggcggccgaggcttggcagtgcgc

SEQ ID NO: 359583 - DNA, 1236 bp, Homo sapiens; identical to SEQ ID NO: 333960
  chr10:71078140-71079376
  hyper

SEQ ID NO: 359584 - DNA, 65 bp, Homo sapiens
  chr10:71267698-71267763
  hyper
cggagttgcccacaggtccacctaccgcgctccctgcagccctcagtgtgcctaatggctgccgc

SEQ ID NO: 359585 - DNA, 38 bp, Homo sapiens
  chr10:71267805-71267843
  hyper
atgccgggacttgcgtgcgtcagtccactcaaaccttc

SEQ ID NO: 359586 - DNA, 99 bp, Homo sapiens; identical to SEQ ID NO: 287184
  chr10:71333132-71333231
  hyper

SEQ ID NO: 359587 - DNA, 198 bp, Homo sapiens; identical to SEQ ID NO: 202107
  chr10:71389862-71390060
  hyper

SEQ ID NO: 359588 - DNA, 140 bp, Homo sapiens; identical to SEQ ID NO: 351051
  chr10:71390109-71390249
  hyper

SEQ ID NO: 359589 - DNA, 782 bp, Homo sapiens
  chr10:71812318-71813100
  hyper
cgcgaccatagcgcgtttgtgcccagttctggggaaagcctcatgttagcgagtggccctcggctcgtctcgcagatcggccaagtacgcggaggccgcgcggtttcaccattaatactcctgaaggacaatagctcatcaagccccaccgaaagccccggacccgtcgcggagcctgggctggcgggggatgaggctgagcaactcctcctagaggtggttatgtggagaaggagcaatcccttctccctcctcctcctccccccgctactatccgcggcccagagaactgccgcttgccgccattgacacgcacagatagaacccaaagaaaggcaaagagtcctgcccggcaccggcgccgcgtgggccaaacctgcgcccgtggaggggcgcgcagagggcaccgggcgccgggagcaggcggcgcagcaccaggtgagcccgccatggcgatggcattattgtttagggtgctccggggtctggaaacaaaacgcgccgccggggcagtgcaggggccggagagaaccacctctgcctctcccccgagcccctgcgggcgcaccctcgatagccgacccaccctctgcaaaaacaaattcttaaatccagctgcccaacttgcttccttgggcgataaagggggggctgctaaagaagtggtcaaattcctgcggccagcgaggggccgggggcgtcgagggtactgagaggggaaggaggagggatgcgaggttcagcagcgggccccaggcgaggctggacccggaggaagcgga

SEQ ID NO: 359590 - DNA, 643 bp, Homo sapiens; identical to SEQ ID NO: 351052
  chr10:71892158-71892801
  hyper

SEQ ID NO: 359591 - DNA, 85 bp, Homo sapiens; identical to SEQ ID NO: 347094
  chr10:72015065-72015150
  hyper

SEQ ID NO: 359592 - DNA, 323 bp, Homo sapiens; identical to SEQ ID NO: 347095
  chr10:72238261-72238584
  hyper

SEQ ID NO: 359593 - DNA, 146 bp, Homo sapiens; identical to SEQ ID NO: 351055
  chr10:73846836-73846982
  hyper

SEQ ID NO: 359594 - DNA, 164 bp, Homo sapiens; identical to SEQ ID NO: 351056
  chr10:73847427-73847591
  hyper

SEQ ID NO: 359595 - DNA, 365 bp, Homo sapiens
  chr10:74020611-74020976
  hyper
cgccggggccccaaatgctgagctcagcatctctgtggcctggctgccctcctcccgggcagtgggaggagcctccttcctcccgagggtgggcggggccagggccagccccgccctcctccccgttccccctctccctccatccccctcccgttcctcagtcgcacgttctccaagtcacgtcccccgcttcccctagtagggggtcgacggagattggacccttcccccagtcagctgctctgcatctgtcacctcggcggcagcgctcccttgaggtcgcacctccgctgtggagggaggcgagagcgagctgagtggggggtcttcccttcccccatcccgctggccccagacaagccacc

SEQ ID NO: 359596 - DNA, 249 bp, Homo sapiens; identical to SEQ ID NO: 347096
  chr10:74057413-74057662
  hyper

SEQ ID NO: 359597 - DNA, 295 bp, Homo sapiens; identical to SEQ ID NO: 347097
  chr10:74057707-74058002
  hyper

SEQ ID NO: 359598 - DNA, 412 bp, Homo sapiens; identical to SEQ ID NO: 345356
  chr10:74079281-74079693
  hyper

SEQ ID NO: 359599 - DNA, 179 bp, Homo sapiens; identical to SEQ ID NO: 345357
  chr10:74079752-74079931
  hyper

SEQ ID NO: 359600 - DNA, 73 bp, Homo sapiens
  chr10:75670652-75670725
  hyper
cggccaggtgcatgggaggaagcacggagaatttacaagcctctcgattcctcagtccagacgctgttgggtc

SEQ ID NO: 359601 - DNA, 45 bp, Homo sapiens
  chr10:75670755-75670800
  hyper
tctttgtgagcgttgcggaagcacgcggggtccgggtcgctgagc

SEQ ID NO: 359602 - DNA, 345 bp, Homo sapiens; identical to SEQ ID NO: 351061
  chr10:77159582-77159927
  hyper

SEQ ID NO: 359603 - DNA, 918 bp, Homo sapiens; identical to SEQ ID NO: 351062
  chr10:77160017-77160935
  hyper

SEQ ID NO: 359604 - DNA, 67 bp, Homo sapiens; identical to SEQ ID NO: 351063
  chr10:77160965-77161032
  hyper

SEQ ID NO: 359605 - DNA, 217 bp, Homo sapiens; identical to SEQ ID NO: 202139
  chr10:77161406-77161623
  hyper

SEQ ID NO: 359606 - DNA, 1015 bp, Homo sapiens; identical to SEQ ID NO: 202140
  chr10:77161691-77162706
  hyper

SEQ ID NO: 359607 - DNA, 324 bp, Homo sapiens; identical to SEQ ID NO: 202141
  chr10:77163338-77163662
  hyper

SEQ ID NO: 359608 - DNA, 86 bp, Homo sapiens
  chr10:77163726-77163812
  hyper
gcccatctcactcccctcccccacctgactcccctccccggcttctttctctgtctcccactccgcacgggtaccgagaactttcc

SEQ ID NO: 359609 - DNA, 310 bp, Homo sapiens; identical to SEQ ID NO: 351067
  chr10:77168785-77169095
  hyper

SEQ ID NO: 359610 - DNA, 364 bp, Homo sapiens; identical to SEQ ID NO: 351068
  chr10:77169218-77169582
  hyper

SEQ ID NO: 359611 - DNA, 200 bp, Homo sapiens
  chr10:77190985-77191185
  hyper
cgttcagccaagaggcccctcctcgctgcagttgaggtccattatgtaacccagcttgcgaaatgcaggaaaggcccggctggctacagcccggctaacggctcagaaagggcgcccctgataggaatacccccacctcaggcgtggcccagacaaacgcgataaagctgtgggcatggagttttgggcattgggacatc

SEQ ID NO: 359612 - DNA, 84 bp, Homo sapiens; identical to SEQ ID NO: 351069
  chr10:79396547-79396631
  hyper

SEQ ID NO: 359613 - DNA, 102 bp, Homo sapiens; identical to SEQ ID NO: 287279
  chr10:83634159-83634261
  hyper

SEQ ID NO: 359614 - DNA, 47 bp, Homo sapiens
  chr10:83634499-83634546
  hyper
tgcacctcaccgcccgggctcgcggagcagccgccgaagatcgcggc

SEQ ID NO: 359615 - DNA, 415 bp, Homo sapiens; identical to SEQ ID NO: 287282
  chr10:83635818-83636233
  hyper

SEQ ID NO: 359616 - DNA, 64 bp, Homo sapiens
  chr10:83636388-83636452
  hyper
ggaagttatgtccttgtgtggggtgacgagttgatggagataatggtagaatgttgctgaggac

SEQ ID NO: 359617 - DNA, 90 bp, Homo sapiens; identical to SEQ ID NO: 351070
  chr10:85954199-85954289
  hyper

SEQ ID NO: 359618 - DNA, 41 bp, Homo sapiens; identical to SEQ ID NO: 351071
  chr10:88731062-88731103
  hyper

SEQ ID NO: 359619 - DNA, 177 bp, Homo sapiens; identical to SEQ ID NO: 351072
  chr10:88731133-88731310
  hyper

SEQ ID NO: 359620 - DNA, 417 bp, Homo sapiens; identical to SEQ ID NO: 345358
  chr10:89621342-89621759
  hyper

SEQ ID NO: 359621 - DNA, 148 bp, Homo sapiens; identical to SEQ ID NO: 202167
  chr10:89621836-89621984
  hyper

SEQ ID NO: 359622 - DNA, 853 bp, Homo sapiens; identical to SEQ ID NO: 345360
  chr10:89621985-89622838
  hyper

SEQ ID NO: 359623 - DNA, 53 bp, Homo sapiens; identical to SEQ ID NO: 345361
  chr10:90342577-90342630
  hyper

SEQ ID NO: 359624 - DNA, 239 bp, Homo sapiens
  chr10:91403644-91403883
  hyper
cggctttctccggtgtacattacaattacaaaccctcaactcaacctcccccttcgttgaaaaaaaaaatccacctccaatcctcattggtccacatagttccggcccacatggtatcagtgggtgtgtccctcccaaaaaaccctctcattggccgtgaagaaacagcttctaataggctgtgattttggggggtagttaaactccacgcctccagacttgcgctctccaatagaccc

SEQ ID NO: 359625 - DNA, 81 bp, Homo sapiens; identical to SEQ ID NO: 287311
  chr10:92617016-92617097
  hyper

SEQ ID NO: 359626 - DNA, 508 bp, Homo sapiens; identical to SEQ ID NO: 287312
  chr10:92617539-92618047
  hyper

SEQ ID NO: 359627 - DNA, 64 bp, Homo sapiens
  chr10:92618077-92618141
  hyper
cacactagtcagccacagttcagtgggggcatttttcttttgttaagaggcctaatgagccagc

SEQ ID NO: 359628 - DNA, 57 bp, Homo sapiens; identical to SEQ ID NO: 345362
  chr10:93647662-93647719
  hyper

SEQ ID NO: 359629 - DNA, 79 bp, Homo sapiens; identical to SEQ ID NO: 287325
  chr10:94449318-94449397
  hyper

SEQ ID NO: 359630 - DNA, 643 bp, Homo sapiens; identical to SEQ ID NO: 287326
  chr10:94450726-94451369
  hyper

SEQ ID NO: 359631 - DNA, 314 bp, Homo sapiens; identical to SEQ ID NO: 334000
  chr10:94607767-94608081
  hyper

SEQ ID NO: 359632 - DNA, 230 bp, Homo sapiens
  chr10:94831380-94831610
  hyper
cgaaagcttggcgagattcctagatcaaagttcctattggcctggtaatttattgaccccccaccccccgccctgcccccctacaagatgttctttaatgatcgttcactctcacatttaatcctttcctgccggacgcccccgccggcctcgatgtacagatagattaaaacgtttttttccctgcggcaatttccagcgtgcaggccccgctcatcttgtgacccggc

SEQ ID NO: 359633 - DNA, 384 bp, Homo sapiens; identical to SEQ ID NO: 287332
  chr10:94833649-94834033
  hyper

SEQ ID NO: 359634 - DNA, 112 bp, Homo sapiens
  chr10:95753372-95753484
  hyper
cgcccttcccggagccgggcgccccaggagcgctctctctggctcccgccagaaaggatggctcctaggggtcagggccaggggtctgggaaggggtcgcgccgccagcagc

SEQ ID NO: 359635 - DNA, 372 bp, Homo sapiens; identical to SEQ ID NO: 287338
  chr10:95753760-95754132
  hyper

SEQ ID NO: 359636 - DNA, 50 bp, Homo sapiens
  chr10:95754214-95754264
  hyper
acaccctgccagtgccttcactccagacgcctgcctcaggtcgccccttc

SEQ ID NO: 359637 - DNA, 852 bp, Homo sapiens
  chr10:97802911-97803763
  hyper
cgtgaagacttttaaacgccaaactgaggcgtcggaactttgctccgcgggcatcgaggagccatcgaaggttctcagcaggtgagtggcctaactggattggtcactgcagtgatccaccttacaatttctccggcgctctctgccgacctcagccggcgatcaggccggcttcgcagtaggtggcggctgagcgccccggcaaccgaagcgccaggccagcccaggccacgccgcgccgtgcgggatgctgaccgtacccaggcgggagccgccgcgccgccgcctggcgctgcacctgggcccggcccggccgccaattggacggctcggggcgaccccgctgtatcgcgagacgagattggcagcggcggggcctcaagtgcccccgcgctggctttgtatgcggagccgcctgccggtcctttaacaatgggcggcgcgagcgtccaggcgctgggctctagctgaggccggcgcttagcggcccactgtccgcagcatgagcggggccggcgtccgccgcacgacggcggggctggggctgtgagggccgcggttccgggtaagggagccagcgtggggccgggcggcccggcaggcctggggtaggcgtggggcagcggaccctcccggggtgaggcgcagagcctggctggcccggccttttgttcccctttctgaggccgcgcggaacgtgcgtttctcggggctcccggggaggagcaggctcccgacgtccatgcggagacccgcggccaggcagacgctcacccccgggctttgccatgggagcgtttcccctcagcggggctatgagcgtgtcacctctccccgctcctcagggagggc

SEQ ID NO: 359638 - DNA, 230 bp, Homo sapiens; identical to SEQ ID NO: 351082
  chr10:98272415-98272645
  hyper

SEQ ID NO: 359639 - DNA, 715 bp, Homo sapiens; identical to SEQ ID NO: 351083
  chr10:98272768-98273483
  hyper

SEQ ID NO: 359640 - DNA, 761 bp, Homo sapiens; identical to SEQ ID NO: 345363
  chr10:98479725-98480486
  hyper

SEQ ID NO: 359641 - DNA, 114 bp, Homo sapiens
  chr10:99474279-99474393
  hyper
cgtttccactgtcgcccgcgcccgggaaccctgacgctcagctcccgcccgacggcagcgccgccgccgcccagaatcccagcccagaatcccgaccgccgcgccggacgcgcc

SEQ ID NO: 359642 - DNA, 62 bp, Homo sapiens
  chr10:99474467-99474529
  hyper
cctcgcggttcctcttcccttccctgctgagactaagacgtggacaggggccgcgcagatcc

SEQ ID NO: 359643 - DNA, 194 bp, Homo sapiens
  chr10:99530903-99531097
  hyper
cgggggataattccggggacgctgggctgagctaggacagcgtgtgtgtgtgtgtgtgggcggagggggggagctgcacctcttggggggttcgcagagctgtgctaggggagctgcagggccgtcggagcgcgcggggacggcggcggcggcgctacctggaggcgcggtggcgggcaggtgcccgaactgca

SEQ ID NO: 359644 - DNA, 59 bp, Homo sapiens; identical to SEQ ID NO: 351085
  chr10:100992740-100992799
  hyper

SEQ ID NO: 359645 - DNA, 124 bp, Homo sapiens; identical to SEQ ID NO: 345364
  chr10:100994695-100994819
  hyper

SEQ ID NO: 359646 - DNA, 56 bp, Homo sapiens; identical to SEQ ID NO: 202208
  chr10:101089476-101089532
  hyper

SEQ ID NO: 359647 - DNA, 236 bp, Homo sapiens; identical to SEQ ID NO: 202209
  chr10:101089565-101089801
  hyper

SEQ ID NO: 359648 - DNA, 312 bp, Homo sapiens; identical to SEQ ID NO: 351087
  chr10:101279860-101280172
  hyper

SEQ ID NO: 359649 - DNA, 205 bp, Homo sapiens
  chr10:102473078-102473283
  hyper
cgccatagccggaaataccactgttggatccaccttctgcgccccaggcctccccagcctccgtacccaggaggcagccagcttagcagggtaggcatgtgggtggcccaccagctcctggaatggagcgtactccgtttctggggaggttccccgcgtcctgcctggagtctagaagggagcggggaagtgaccagcactagat

SEQ ID NO: 359650 - DNA, 72 bp, Homo sapiens
  chr10:102475189-102475261
  hyper
cgtggagaagggcagagacagagaccaacgaagtggggtcgggtagaaagaggcggatataaaggcaggcca

SEQ ID NO: 359651 - DNA, 330 bp, Homo sapiens; identical to SEQ ID NO: 202220
  chr10:102490316-102490646
  hyper

SEQ ID NO: 359652 - DNA, 414 bp, Homo sapiens
  chr10:102490715-102491129
  hyper
cgcctcaaacagtgtccttcgcgacggcggaaaactacagcccgcccccgctcccgtgcctgctcaggaagccgtgaccaagccagtgcccgccggtgcccggagtgaaggtggaaaaagccgagtgctcctgctcgggggcggggttgagagggggagattaatccgggcaagccaaggggaccttagacttgcagccagggccgccacccgaggagcccgcatgcagggacgcgcctgaaggcttagtcaaacccggggaaatgccctcccccgcctgcagaatccccacgccgtctcttacttcctccctctttgccactggcgagcttacacgtgcacacacacacacccctctctgtctgtgaccgcaacaaactttgtgaaacttgaaccgctgggtgcaaagttcac

SEQ ID NO: 359653 - DNA, 60 bp, Homo sapiens; identical to SEQ ID NO: 287408
  chr10:102498764-102498824
  hyper

SEQ ID NO: 359654 - DNA, 115 bp, Homo sapiens; identical to SEQ ID NO: 351088
  chr10:102501611-102501726
  hyper

SEQ ID NO: 359655 - DNA, 287 bp, Homo sapiens; identical to SEQ ID NO: 287412
  chr10:102507993-102508280
  hyper

SEQ ID NO: 359656 - DNA, 257 bp, Homo sapiens; identical to SEQ ID NO: 202223
  chr10:102585797-102586054
  hyper

SEQ ID NO: 359657 - DNA, 109 bp, Homo sapiens; identical to SEQ ID NO: 202224
  chr10:102587493-102587602
  hyper

SEQ ID NO: 359658 - DNA, 163 bp, Homo sapiens; identical to SEQ ID NO: 202225
  chr10:102587906-102588069
  hyper

SEQ ID NO: 359659 - DNA, 77 bp, Homo sapiens; identical to SEQ ID NO: 202226
  chr10:102588175-102588252
  hyper

SEQ ID NO: 359660 - DNA, 160 bp, Homo sapiens; identical to SEQ ID NO: 202227
  chr10:102588941-102589101
  hyper

SEQ ID NO: 359661 - DNA, 653 bp, Homo sapiens; identical to SEQ ID NO: 347115
  chr10:102791390-102792043
  hyper

SEQ ID NO: 359662 - DNA, 114 bp, Homo sapiens; identical to SEQ ID NO: 347116
  chr10:102792044-102792158
  hyper

SEQ ID NO: 359663 - DNA, 569 bp, Homo sapiens; identical to SEQ ID NO: 334036
  chr10:102822304-102822873
  hyper

SEQ ID NO: 359664 - DNA, 139 bp, Homo sapiens; identical to SEQ ID NO: 334040
  chr10:102978324-102978463
  hyper

SEQ ID NO: 359665 - DNA, 246 bp, Homo sapiens; identical to SEQ ID NO: 287435
  chr10:102988365-102988611
  hyper

SEQ ID NO: 359666 - DNA, 33 bp, Homo sapiens; identical to SEQ ID NO: 345367
  chr10:102995986-102996019
  hyper

SEQ ID NO: 359667 - DNA, 211 bp, Homo sapiens; identical to SEQ ID NO: 202239
  chr10:103535916-103536127
  hyper

SEQ ID NO: 359668 - DNA, 578 bp, Homo sapiens; identical to SEQ ID NO: 351098
  chr10:105253250-105253828
  hyper

SEQ ID NO: 359669 - DNA, 574 bp, Homo sapiens
  chr10:105253853-105254427
  hyper
cgtccccggccccggcccagggccctgcttgtggcccccgctcccgccacggggcatgggaggcaggtagcccagcctgcgccaggacacccgtggcgggcggaacccgccaaggaccgcgaagtccagagaaaggaagctgaggagctgcccgcccgcccccggctgcagccccagcagggccctcccccggtggcgcgcacccgcgcgcgcacactcgcacaccgcacctcagcgcctgcccggcctcgcccccacccgcgagcgccgaacctcctggggccggatgccatgggtaacaacttctccagtatcccctcgctgccccgaggaaacccgagccgcgcgccgcggggccacccccagaacctcaaaggtaggctccccggccgagcgctgctggaggactggggcgcaggtggagggccagggaggtgtggttggggagggcgggcagacgccacctgttgtgcgtgtctggaggccggagatgcacctctggccgtggagtgggctgggggtggagggcagccggcgatgatggtgatggaggatggcgtcccgcggggtctgc

SEQ ID NO: 359670 - DNA, 722 bp, Homo sapiens; identical to SEQ ID NO: 351100
  chr10:106097237-106097959
  hyper

SEQ ID NO: 359671 - DNA, 165 bp, Homo sapiens; identical to SEQ ID NO: 351101
  chr10:106098025-106098190
  hyper

SEQ ID NO: 359672 - DNA, 293 bp, Homo sapiens
  chr10:106398982-106399275
  hyper
ttttggcaccgggtggaaaggcaagttcaagagggcgggggctctcgggaatcgctggatgtcttcttccttggccagcttagattctcagtcgcctcttctgcctcctccatccctcttggctcttacctggcgccctttcgcctcctcttctatctccctcttccttttgcaccattctctcgccccttttctccttcatcttgtctttcctctctccccttttccctctattttctccttcattccttcctctcacctttctttcctctccgcgcattcccctccctctc

SEQ ID NO: 359673 - DNA, 82 bp, Homo sapiens
  chr10:108924881-108924963
  hyper
ttctagttgaggagatagggatgggtgggcttctgctccttccctctcttatgcttcctgagttggcatcttgaccttaccc

SEQ ID NO: 359674 - DNA, 39 bp, Homo sapiens
  chr10:110671608-110671647
  hyper
cgcttcagctactccgttaggaggcgggcagttttgtct

SEQ ID NO: 359675 - DNA, 737 bp, Homo sapiens; identical to SEQ ID NO: 334066
  chr10:111767130-111767867
  hyper

SEQ ID NO: 359676 - DNA, 567 bp, Homo sapiens; identical to SEQ ID NO: 287502
  chr10:112257242-112257809
  hyper

SEQ ID NO: 359677 - DNA, 353 bp, Homo sapiens; identical to SEQ ID NO: 202259
  chr10:112257978-112258331
  hyper

SEQ ID NO: 359678 - DNA, 184 bp, Homo sapiens; identical to SEQ ID NO: 351105
  chr10:112258408-112258592
  hyper

SEQ ID NO: 359679 - DNA, 37 bp, Homo sapiens; identical to SEQ ID NO: 351106
  chr10:112431835-112431872
  hyper

SEQ ID NO: 359680 - DNA, 235 bp, Homo sapiens; identical to SEQ ID NO: 202288
  chr10:112432125-112432360
  hyper

SEQ ID NO: 359681 - DNA, 654 bp, Homo sapiens; identical to SEQ ID NO: 334071
  chr10:114708972-114709626
  hyper

SEQ ID NO: 359682 - DNA, 169 bp, Homo sapiens
  chr10:114711931-114712100
  hyper
cgcgcagagcccggggccctggagaggctccttggctttctcttttgggcgactatgtatttagctttctagtggagattgctggctctcggccctccttcccccttcccctggaaggtcacacttcccagattggtcccaccgcaaacttgggggctctgaggcgtcc

SEQ ID NO: 359683 - DNA, 427 bp, Homo sapiens
  chr10:114712446-114712873
  hyper
ggagtgggccgccgatcgccggccacccaactttgggggccccagggcagcgcggggtgccgggctcggggggcgcttcctgcagggtcggtcccgcgcccaaccctgacatttgttaatacggctcatcccctcccccaccggcctgtgccccctgccctcaccctgaaccccctcctcctcatccctccctccctcttctaagaagcctggattacgaatccctggacgcaagacgcatttgtgcccggcttcccggtattgtcattttacaccttctccagtttggtcccctaccccttatttacacacacgacttttgttttttctttttcggtaactctagatagcaatttgaaataatgcacccactgttcagcagccatggattcggtgctaatggccgagggcttgccggacgggagtc

SEQ ID NO: 359684 - DNA, 46 bp, Homo sapiens; identical to SEQ ID NO: 351108
  chr10:115998990-115999036
  hyper

SEQ ID NO: 359685 - DNA, 411 bp, Homo sapiens; identical to SEQ ID NO: 351109
  chr10:115999183-115999594
  hyper

SEQ ID NO: 359686 - DNA, 916 bp, Homo sapiens; identical to SEQ ID NO: 334075
  chr10:116527415-116528331
  hyper

SEQ ID NO: 359687 - DNA, 587 bp, Homo sapiens; identical to SEQ ID NO: 287577
  chr10:118608718-118609305
  hyper

SEQ ID NO: 359688 - DNA, 239 bp, Homo sapiens; identical to SEQ ID NO: 202308
  chr10:118891774-118892013
  hyper

SEQ ID NO: 359689 - DNA, 295 bp, Homo sapiens; identical to SEQ ID NO: 287582
  chr10:118927594-118927889
  hyper

SEQ ID NO: 359690 - DNA, 51 bp, Homo sapiens
  chr10:119001564-119001615
  hyper
cttatgtttccccctgataatttcccgcatcctcttgcctgctttcactgc

SEQ ID NO: 359691 - DNA, 542 bp, Homo sapiens; identical to SEQ ID NO: 334087
  chr10:119293016-119293558
  hyper

SEQ ID NO: 359692 - DNA, 482 bp, Homo sapiens; identical to SEQ ID NO: 351112
  chr10:119293799-119294281
  hyper

SEQ ID NO: 359693 - DNA, 116 bp, Homo sapiens; identical to SEQ ID NO: 202319
  chr10:119296211-119296327
  hyper

SEQ ID NO: 359694 - DNA, 52 bp, Homo sapiens; identical to SEQ ID NO: 202320
  chr10:119296362-119296414
  hyper

SEQ ID NO: 359695 - DNA, 62 bp, Homo sapiens; identical to SEQ ID NO: 202321
  chr10:119296567-119296629
  hyper

SEQ ID NO: 359696 - DNA, 140 bp, Homo sapiens
  chr10:119303721-119303861
  hyper
ggatttgttttttctttcctgcttttcggaggcctggggaggggcgggaacccgtgcgggaggaaagctccagggcttggcgctctcgccgcgacctgcttaattggggcgccgagcagccacagcgggaaggcaggttc

SEQ ID NO: 359697 - DNA, 68 bp, Homo sapiens
  chr10:119494306-119494374
  hyper
cgactctccccgggtcccccaccccagccaagagggaacctgccaatcaggctgcgccaccaccaggc

SEQ ID NO: 359698 - DNA, 131 bp, Homo sapiens; identical to SEQ ID NO: 347121
  chr10:121301363-121301494
  hyper

SEQ ID NO: 359699 - DNA, 760 bp, Homo sapiens; identical to SEQ ID NO: 345370
  chr10:121301911-121302671
  hyper

SEQ ID NO: 359700 - DNA, 138 bp, Homo sapiens; identical to SEQ ID NO: 345371
  chr10:122708760-122708898
  hyper

SEQ ID NO: 359701 - DNA, 74 bp, Homo sapiens; identical to SEQ ID NO: 351119
  chr10:122739316-122739390
  hyper

SEQ ID NO: 359702 - DNA, 209 bp, Homo sapiens; identical to SEQ ID NO: 351120
  chr10:123356997-123357206
  hyper

SEQ ID NO: 359703 - DNA, 372 bp, Homo sapiens; identical to SEQ ID NO: 202339
  chr10:123357242-123357614
  hyper

SEQ ID NO: 359704 - DNA, 106 bp, Homo sapiens; identical to SEQ ID NO: 202340
  chr10:123357660-123357766
  hyper

SEQ ID NO: 359705 - DNA, 375 bp, Homo sapiens; identical to SEQ ID NO: 202341
  chr10:123357893-123358268
  hyper

SEQ ID NO: 359706 - DNA, 274 bp, Homo sapiens
  chr10:124133662-124133936
  hyper
cgttgctgaaagaatttcgactaacccttctttaagtctctcttaccctcctgtactattaacaccattgtaagtaggcagtggagctacatttgcagggagagagaagagcgaaaaattggcgcgcagagctgtaaagcgtttttctccaggtcacaccgcagcctgtaaatttgtgacacttggaccgattatgggacagcttgcaaacaaattatctgcaaactaacgaagcctatttttaaagatccctgttcctcgcagctctaggcga

SEQ ID NO: 359707 - DNA, 276 bp, Homo sapiens
  chr10:124134313-124134589
  hyper
gaggccgcggtaaagtttagcttgaagaacgcggccgcgctggagcaggggtggtggacggggccaggcgcgaggtggcggcggctgcggggctgccgggctgctggagcgcggttcccgctgtggcgagcggggaggcgtccgcagaggggcggtgggtgctggtgagtgcggagccggcgccccctctgcgcacgtccgcgccacgcgccacagcacctggaggccgccgggccggctcacctgccctggcttggggcagcgggagggggcggc

SEQ ID NO: 359708 - DNA, 629 bp, Homo sapiens; identical to SEQ ID NO: 202348
  chr10:124221086-124221715
  hyper

SEQ ID NO: 359709 - DNA, 318 bp, Homo sapiens; identical to SEQ ID NO: 351125
  chr10:124221921-124222239
  hyper

SEQ ID NO: 359710 - DNA, 68 bp, Homo sapiens
  chr10:124639064-124639132
  hyper
cgtcgaaaaaccgccgtggtgcccgcgcacagtgcaccgcgcctgcgcatggtctccaaaggctgagc

SEQ ID NO: 359711 - DNA, 163 bp, Homo sapiens
  chr10:124639526-124639689
  hyper
ggtgcgccgggccgccggcgaccgggtcgctgcgctcggcgactgccgcgctcctcggggaacgtgagggtctgagtccgggatccaggagagcagttggtgtcgggtctctgcgggggagcggggctgcgaggtggaggcgaggaccggggtgggcggaggc

SEQ ID NO: 359712 - DNA, 367 bp, Homo sapiens; identical to SEQ ID NO: 202351
  chr10:124899187-124899554
  hyper

SEQ ID NO: 359713 - DNA, 94 bp, Homo sapiens
  chr10:124907174-124907268
  hyper
cgcagggcgccacggtcccaggagtgccggctttgcccgcccactggggctagaaggggtggagggctgggggaggatggtggagcagcctgta

SEQ ID NO: 359714 - DNA, 203 bp, Homo sapiens; identical to SEQ ID NO: 202353
  chr10:125851929-125852132
  hyper

SEQ ID NO: 359715 - DNA, 96 bp, Homo sapiens; identical to SEQ ID NO: 287649
  chr10:125853277-125853373
  hyper

SEQ ID NO: 359716 - DNA, 1193 bp, Homo sapiens; identical to SEQ ID NO: 334112
  chr10:126106668-126107861
  hyper

SEQ ID NO: 359717 - DNA, 50 bp, Homo sapiens
  chr10:126136723-126136773
  hyper
agaaggggtcggtgaacagaagcctctccaggtccccaaacctcgtcctc

SEQ ID NO: 359718 - DNA, 47 bp, Homo sapiens; identical to SEQ ID NO: 287667
  chr10:128994482-128994529
  hyper

SEQ ID NO: 359719 - DNA, 141 bp, Homo sapiens; identical to SEQ ID NO: 287668
  chr10:128994545-128994686
  hyper

SEQ ID NO: 359720 - DNA, 95 bp, Homo sapiens
  chr10:129534419-129534514
  hyper
cgcacaggtgcccgactcggagtccgggaggcgggccctctttccaggtacccagcccagcgtcagcctgggtccatcctccgccaccccacagc

SEQ ID NO: 359721 - DNA, 45 bp, Homo sapiens; identical to SEQ ID NO: 202367
  chr10:129534541-129534586
  hyper

SEQ ID NO: 359722 - DNA, 142 bp, Homo sapiens; identical to SEQ ID NO: 287676
  chr10:130338585-130338727
  hyper

SEQ ID NO: 359723 - DNA, 333 bp, Homo sapiens; identical to SEQ ID NO: 287677
  chr10:130338995-130339328
  hyper

SEQ ID NO: 359724 - DNA, 133 bp, Homo sapiens; identical to SEQ ID NO: 287682
  chr10:133999554-133999687
  hyper

SEQ ID NO: 359725 - DNA, 128 bp, Homo sapiens
  chr10:134209485-134209613
  hyper
cgaggtcgacaggcgccagcgacccgacggtccccagtggcaccaggggcggtggtcctcaattcccaggctgggaggagccctgcccggcggcgctgggtcgccaggacaactacgcggtcccccgc

SEQ ID NO: 359726 - DNA, 126 bp, Homo sapiens
  chr10:134209650-134209776
  hyper
tcagaagcccggcccggggccaaggtcaccgcagcaggccgggcccctgcgttctgagccgggtgcggacgtgctggtgctcggggaagtcgggggctttgacgcctgaaggcgcgggagccgggc

SEQ ID NO: 359727 - DNA, 206 bp, Homo sapiens; identical to SEQ ID NO: 202379
  chr10:134600998-134601204
  hyper

SEQ ID NO: 359728 - DNA, 66 bp, Homo sapiens; identical to SEQ ID NO: 347130
  chr10:134676272-134676338
  hyper

SEQ ID NO: 359729 - DNA, 41 bp, Homo sapiens; identical to SEQ ID NO: 347131
  chr10:134676653-134676694
  hyper

SEQ ID NO: 359730 - DNA, 451 bp, Homo sapiens; identical to SEQ ID NO: 351133
  chr10:134973438-134973889
  hyper

SEQ ID NO: 359731 - DNA, 123 bp, Homo sapiens; identical to SEQ ID NO: 347132
  chr10:135075001-135075124
  hyper

SEQ ID NO: 359732 - DNA, 127 bp, Homo sapiens; identical to SEQ ID NO: 351135
  chr10:135090197-135090324
  hyper

SEQ ID NO: 359733 - DNA, 99 bp, Homo sapiens; identical to SEQ ID NO: 351136
  chr10:135090391-135090490
  hyper

SEQ ID NO: 359734 - DNA, 60 bp, Homo sapiens; identical to SEQ ID NO: 202385
  chr11:308266-308326
  hyper

SEQ ID NO: 359735 - DNA, 93 bp, Homo sapiens; identical to SEQ ID NO: 351138
  chr11:308362-308455
  hyper

SEQ ID NO: 359736 - DNA, 943 bp, Homo sapiens
  chr11:416597-417540
  hyper
ggttcgacgctcagcacccagcaccctgcgggcgactcccgctcagctcggacgcgccgcccctccgctccccgtgcgcgctgggcccccagcgcctgtcctgaagcaggaacgtgggtaaaaggctgcggccccgcaggccgaggggctctggttcgctcccctaccccgcgcccacctgcgccctgggcgccctccaagtgaggagggcggagaacgaggacgcgcgcgggaggcgggcacgggggtgcggctcggggcgctcggccggggcagaggcgcgcggatggcggaagctccacccggcgccgggcgagctcgggccccagcctgactcttggtccgccctcggcgcctcaggaagcctcgagctgggatccaggcttgggcgaccgaggtgggatccctgcgcgcctcggcgctcctagccccgctctgttctgcgcgagggtcaccaaaaagccgctgaccacgtcgggcagaggaaagggtggcccccgcccccttcgcccactttcctcccttcccccagccctggaaagggccaggacgcgggcgagctcgggcttccgggcgacgcgggaacctccccggccccgagccatttcctgagagaccgcgcccagggacaagcagcgccccgggccccgactccaggcctgcagcggctctgggaggactgcgacctccactcaccttcgcgggtctgatggcgaccgccactcacctgctgccaggacctggggctcgcgccgggcgggggcggggcagctcacctgagccaggtgcgcagcggcaacagccccggcggcggcgtagccccggcagcggcagcaggtgcggccccgccccgcagtcagggcgggggcggaccccagcgtcccgctctgcgcccaaggctggcgctggaggctgcgctgctgcccgggagccgctgccgcac

SEQ ID NO: 359737 - DNA, 117 bp, Homo sapiens; identical to SEQ ID NO: 334148
  chr11:441960-442077
  hyper

SEQ ID NO: 359738 - DNA, 394 bp, Homo sapiens; identical to SEQ ID NO: 351140
  chr11:537174-537568
  hyper

SEQ ID NO: 359739 - DNA, 672 bp, Homo sapiens; identical to SEQ ID NO: 334150
  chr11:705963-706635
  hyper

SEQ ID NO: 359740 - DNA, 93 bp, Homo sapiens; identical to SEQ ID NO: 287738
  chr11:829438-829531
  hyper

SEQ ID NO: 359741 - DNA, 731 bp, Homo sapiens; identical to SEQ ID NO: 347133
  chr11:1410711-1411442
  hyper

SEQ ID NO: 359742 - DNA, 93 bp, Homo sapiens; identical to SEQ ID NO: 347134
  chr11:2290844-2290937
  hyper

SEQ ID NO: 359743 - DNA, 564 bp, Homo sapiens
  chr11:2398759-2399323
  hyper
cgcccgccgcccgcgccgccatgggagtggagggctgcaccaagtgcatcaagtacctgctcttcgtcttcaatttcgtcttctgggtaagggctgcgccgggggccggggcgggagggggcaggcacacactccacgttgggcaggtcccgcggcagcgtgctaggccccgcgggcgcagcgcgggccgcgaagttgtggggccacctgtgggctccaggagcggggtggggggtcgcccggggccaccgcgccccccgacattggggctgagggctgcgagccgagtttcggggcctctgtgctcgggggcccacctctgcggccgggccggggcttctgggggccgccgggcagttcccgctgtggtggtgatgggtgcggtggtcgcgggtcgggacccgagtacccggccgcccctcagctaaggaggggcctgcgcgggtccctggccgcggattccggactgctgcttcgcggggacgaggggggggctcgcgggcgggactcctggcgccccgcccccatgagctcatcaagagccgccgcccctggatggtgggg

SEQ ID NO: 359744 - DNA, 401 bp, Homo sapiens; identical to SEQ ID NO: 351145
  chr11:2399399-2399800
  hyper

SEQ ID NO: 359745 - DNA, 127 bp, Homo sapiens; identical to SEQ ID NO: 351146
  chr11:2465520-2465647
  hyper

SEQ ID NO: 359746 - DNA, 157 bp, Homo sapiens; identical to SEQ ID NO: 351147
  chr11:2466019-2466176
  hyper

SEQ ID NO: 359747 - DNA, 250 bp, Homo sapiens; identical to SEQ ID NO: 287760
  chr11:2466191-2466441
  hyper

SEQ ID NO: 359748 - DNA, 413 bp, Homo sapiens
  chr11:2950407-2950820
  hyper
gctccacgcagtccaccttgaggatggagtggaagcgcagctccttggggcgcgcgcgggggctggcggggaacaggctcaggcggtcggaggtgagcaccccgcgcttcttcttccatagctggaagaggctgtcgctgcgcttctccaactcgccctcgcgtagcacctcgtcgggggatttcatgtcgtgccgagcgcgggactgggagcggcaatgcgggcggtgacggcgccggctctgctcctcgtggccccggcgcggcctttatagctgcccctccccgccccgcccctccccgccccgccccggccctcgggccaccccgcccgcctgagccccgcgcgccccgggccataccctccccaagcccagccgtccgggcccgcaccgtcgcgtccgcgctctggtc

SEQ ID NO: 359749 - DNA, 76 bp, Homo sapiens
  chr11:3181650-3181726
  hyper
cgacccacactccccgcgtcgcattcaccctaataggcgggcatacaaatgccgttgcctggagccgcagcccagc

SEQ ID NO: 359750 - DNA, 211 bp, Homo sapiens
  chr11:3186017-3186228
  hyper
cgcgtcggccgagctggggggacagaccccctgattggccagggtttgtggtggtcagacccagccaccttccctggcggtcccggctcctttaagccccaccaagtggggagccgagctgggcgcgccgcttcccactcgcgggccccacccgccccaacccgccaggcgccgacccgtcctggcccggggcgcccccaggctcccgcgc

SEQ ID NO: 359751 - DNA, 290 bp, Homo sapiens; identical to SEQ ID NO: 202417
  chr11:3186311-3186601
  hyper

SEQ ID NO: 359752 - DNA, 150 bp, Homo sapiens
  chr11:3663265-3663415
  hyper
cgccccccgccccaagtctccgcccccgactccccacaccccttcctcagagcctccagtctggggacctttccgagactgtaaaggcggggccgcagtttggctccgcctgagaggggagggccgggggcggaggacccacttgaaggc

SEQ ID NO: 359753 - DNA, 212 bp, Homo sapiens
  chr11:3663525-3663737
  hyper
cccccgcgctggtaacccgacacccctttcccagcgccgcacgcggggccgggagcgggcgcgccagggcagggactgaggagcaattccctttctcaaggcctgcggggtctttctgcgggaccctctttggctgtgagtgatggggaggaaacttgtgagactcggcctctccctcaggcgggccctgacccggtcggcccctggtcccc

SEQ ID NO: 359754 - DNA, 344 bp, Homo sapiens; identical to SEQ ID NO: 287800
  chr11:8041149-8041493
  hyper

SEQ ID NO: 359755 - DNA, 129 bp, Homo sapiens; identical to SEQ ID NO: 351149
  chr11:8615887-8616016
  hyper

SEQ ID NO: 359756 - DNA, 60 bp, Homo sapiens; identical to SEQ ID NO: 287811
  chr11:9112971-9113031
  hyper

SEQ ID NO: 359757 - DNA, 400 bp, Homo sapiens
  chr11:10326048-10326448
  hyper
cgaaacgccggggtcttggtcctctgggggactagtgagtcctgctcctctcggctttgctccgtccctgccccggcccctccgcgggagtctggggtcgcggcccggtcaggcgccaagccggcaggggggcgcggtccacttgaggccacagctccccaggtccagggctcgggccatccgcgctgtcccttccgcgggctcttgctgttcttcgccaggaggctttgcactccgggccgcatgggtcctggataaggacctcaagaggttgtagtggcgccccttcgctccggcgtactgtctgaaccctgtgcccaaagagggctgtggcagttcctgcaccaaccgcctggagcccatacctaagccctctgggcacgagggacctcctctcccc

SEQ ID NO: 359758 - DNA, 229 bp, Homo sapiens
  chr11:10326499-10326728
  hyper
cgtccgagagcaggagcgcgcgtggctgaggaaagaaagggaaggcaaccgggcagcccaggccccgccccgccgctcccccacccgtgcgcttataaagcacaggaaccagagctggccactcagtggtttcttggtgacactggatagaacagctcaagccttgccacttcgggcttctcactgcagctgggcttggacttcggagttttgccattgccagtgggac

SEQ ID NO: 359759 - DNA, 262 bp, Homo sapiens; identical to SEQ ID NO: 202440
  chr11:12030561-12030823
  hyper

SEQ ID NO: 359760 - DNA, 53 bp, Homo sapiens
  chr11:12031006-12031059
  hyper
ctcacgccccacgccccacgccctcctcttctgcctcagcgaccagctctacc

SEQ ID NO: 359761 - DNA, 124 bp, Homo sapiens; identical to SEQ ID NO: 345376
  chr11:12131738-12131862
  hyper

SEQ ID NO: 359762 - DNA, 287 bp, Homo sapiens; identical to SEQ ID NO: 202443
  chr11:12132212-12132499
  hyper

SEQ ID NO: 359763 - DNA, 55 bp, Homo sapiens; identical to SEQ ID NO: 202444
  chr11:12399222-12399277
  hyper

SEQ ID NO: 359764 - DNA, 344 bp, Homo sapiens; identical to SEQ ID NO: 202445
  chr11:12399383-12399727
  hyper

SEQ ID NO: 359765 - DNA, 71 bp, Homo sapiens
  chr11:12399791-12399862
  hyper
tccttaaaatcaggtcgtttcctggacctgctgacgtcctctggcagcggcgtcgtggctttggcctcttc

SEQ ID NO: 359766 - DNA, 234 bp, Homo sapiens; identical to SEQ ID NO: 347137
  chr11:12696746-12696980
  hyper

SEQ ID NO: 359767 - DNA, 317 bp, Homo sapiens; identical to SEQ ID NO: 334173
  chr11:12849699-12850016
  hyper

SEQ ID NO: 359768 - DNA, 332 bp, Homo sapiens; identical to SEQ ID NO: 202448
  chr11:13031624-13031956
  hyper

SEQ ID NO: 359769 - DNA, 344 bp, Homo sapiens; identical to SEQ ID NO: 287844
  chr11:13032312-13032656
  hyper

SEQ ID NO: 359770 - DNA, 202 bp, Homo sapiens; identical to SEQ ID NO: 351154
  chr11:13300232-13300434
  hyper

SEQ ID NO: 359771 - DNA, 657 bp, Homo sapiens
  chr11:13689464-13690121
  hyper
cgtgccccacccctcagaagtaaacgttattctaactcctatcactaccggtaagttttgtagggaattattttggaggaagtggaaggtggaatgaatgggcccacagtcccctgggactgggcgagacccgtggaggctccaggggtccgtagagctcttcgctctcaccgacccgggccacacccgccaagctggtagttctccgaacggatccctcacgcccagcaatggccggagggcccccgggccccaccataatagcgctaagcacgccacaatggcagccccgctgtctcccgcgcgggcctcgctgcgtgctcccaaccttgggagttggcgcccctcccgcgcgacggacagccgggcgtggccctgggcgcgacccgacaggacgccagcagccggcgggggcgctccaggactcgagatgtggggcgcgggcccattggctgagcattcccccgcgagcctcccggccgcagggcccacctcccggccctctctccgcgcccccattggccgttcgcgttccgcgggcgtccgctcccgccccactcccgcccggagggaaaccgggttgggggtgagaggctaaagcagggaggaggatgactggtcctgcggataagggtgtgcgcgagagccaatcaaaag

SEQ ID NO: 359772 - DNA, 555 bp, Homo sapiens
  chr11:13690157-13690712
  hyper
gtcgcgaggtgcggtcggggccggctgacgcgactgcgggcctcagccaatgggcgtgccactgcccgtccgctcttcagcagccggtcgcgggcggtggaaaagcgagtgaagagagcgcgacggcggcggcggcggcggcgcagctattgctggacggccagtgggagagcgaggcctgagcctctgcgtctaggtgagaagggggtgcgccagcgggagcggccgggctgcgggctcctcctcgcctggctcgggaagtggttgcgggagctcgggctgcaggcctggccgaggcgggggcgccgaccagccgtcccgcccccgcccccgcccgggtacgcccagaagtgagggcgcccgcctcaccccgggtggtctctgcccctctttgccccgccgccgcccttcacagggccgggaccgcgtgggggacgtacggtggggcctggtttgcagccgcggagcccggggagccgcctggggtgggaggccgctagaggtggcgaaggtggggcggggtggttagccgagcagcgggctccgcgtgctcgc

SEQ ID NO: 359773 - DNA, 346 bp, Homo sapiens; identical to SEQ ID NO: 202453
  chr11:14665271-14665617
  hyper

SEQ ID NO: 359774 - DNA, 298 bp, Homo sapiens; identical to SEQ ID NO: 202454
  chr11:14665651-14665949
  hyper

SEQ ID NO: 359775 - DNA, 31 bp, Homo sapiens; identical to SEQ ID NO: 202455
  chr11:14665995-14666026
  hyper

SEQ ID NO: 359776 - DNA, 440 bp, Homo sapiens; identical to SEQ ID NO: 287859
  chr11:14666056-14666496
  hyper

SEQ ID NO: 359777 - DNA, 308 bp, Homo sapiens
  chr11:14666531-14666839
  hyper
cagccagttactatggcagttgcaaaatattcaggagaccgtcgttgccttgtatttccagagaacaggtatgttagctggaaggcgaggtctgggacgcgagcgggttcgggtttaccgctgcagtttccgagttgaattcgcttatttcaaagcatgttaactttcagaatggaaaaagggtgtgttgcggggggggggggggaggaaataatgttttattctggaaaggattcttaaaatacaggaagccttttaaaaatgcagaagcaagtagcttttgtcattgaatagaaatcaaatagccc

SEQ ID NO: 359778 - DNA, 520 bp, Homo sapiens
  chr11:16626844-16627364
  hyper
cgcgcccggcggggctgaactacccctcgcccccgctcccgccaggtcaggcaccactgccctcgcggccagggtaaagaggaccacagatcagtcagccttggatttcggatgggcttggaattcggtttgtttattcctgaaaagatcattaaaaagtactgtccaaaaacggggggagggggaaggaagggcgacaagcggagggagctggaggcaactcgagcggtgtcccgaaaaagttgcggcggagcggcggtggggtgagggtgggaggagggagcgcaagcgttttctagcgacccgggttttcttcatgaactcctccgagtaaactttatcccggcgagagagcggcggagatcctcgactcccgcccgccctcaaccagtgtcaaccccacaaacagcctaagtttccaaaccgaaatgggggtggggtgggggtagcattaagaagcccagaagctcagcgggtcctcccgacctcccgcacccagagcctgggtgacactgaagcg

SEQ ID NO: 359779 - DNA, 286 bp, Homo sapiens
  chr11:16627410-16627696
  hyper
cttttcaagaaaacaaaatatttgctaggaaacttactttgcatttagtctctattctttgggggatgcggtttaggtcggctcgcaagggaagcccgttttgtccaggttggatattgtctacgtatggatcagcccttggatgagggtttattttaatttatggcttatgcattcttttaaggtcgatttacatgacctccggctacaactaagacagccgaggagggcactccagtcgtcagtcggccaaacccacaattaaaacagccctccccctagtctc

SEQ ID NO: 359780 - DNA, 74 bp, Homo sapiens
  chr11:16628231-16628305
  hyper
cggacgaatacttaggatggcgataacagctttctgttgtcaaaggttgcgttgtgtccctgtccctgcccttt

SEQ ID NO: 359781 - DNA, 183 bp, Homo sapiens
  chr11:16628933-16629116
  hyper
tgcgctgcgccgcaggagtaaatggcattaaagaaaaagggaaagatacaaataaaaaaaattaaaaggaaggggagtcggtgctaggtcaattgtcacagtccggggagcaagggaacagaaccccccagcgccgcggccggcgtagcccgttaactcaagtctgcgggggtgtcccgcccc

SEQ ID NO: 359782 - DNA, 79 bp, Homo sapiens; identical to SEQ ID NO: 351157
  chr11:16634452-16634531
  hyper

SEQ ID NO: 359783 - DNA, 1596 bp, Homo sapiens; identical to SEQ ID NO: 334182
  chr11:17034991-17036587
  hyper

SEQ ID NO: 359784 - DNA, 107 bp, Homo sapiens; identical to SEQ ID NO: 351159
  chr11:17373019-17373126
  hyper

SEQ ID NO: 359785 - DNA, 166 bp, Homo sapiens; identical to SEQ ID NO: 202465
  chr11:17373405-17373571
  hyper

SEQ ID NO: 359786 - DNA, 116 bp, Homo sapiens; identical to SEQ ID NO: 7948
  chr11:17373642-17373758
  hyper

SEQ ID NO: 359787 - DNA, 203 bp, Homo sapiens; identical to SEQ ID NO: 334184
  chr11:17374000-17374203
  hyper

SEQ ID NO: 359788 - DNA, 126 bp, Homo sapiens
  chr11:17497697-17497823
  hyper
aaagcataggggttagctgggcctccatcccagactccaaagcacaggcttccctcttccctaggcccagctgcggctgacagggaggctgccttgcgggaggggtgacccggctccctaagctgc

SEQ ID NO: 359789 - DNA, 402 bp, Homo sapiens; identical to SEQ ID NO: 287888
  chr11:17742811-17743213
  hyper

SEQ ID NO: 359790 - DNA, 37 bp, Homo sapiens; identical to SEQ ID NO: 351163
  chr11:17743245-17743282
  hyper

SEQ ID NO: 359791 - DNA, 171 bp, Homo sapiens
  chr11:17756064-17756235
  hyper
cgggcccagacgtctctcggagcccccgcccctggagtggcgttccccgagggcggaccgtgggcgggtcccccgggagcagcaggagccgcgcggggcgggcgcccccagcgccgaggttgagggaggccgggctcggtgcggggctgggaggggggcgcggaatcaggg

SEQ ID NO: 359792 - DNA, 183 bp, Homo sapiens
  chr11:17756666-17756849
  hyper
cagcaccgccgcgggagcccaagtccgagcgcagcccagcggaaccccagctcgagcccgggctcacggagagcagcgctcggcgttagccgcacgagcaacaccccgggtgcccctgcccagggggcccgccatctcctccaggaggcggggagaaggaacgaggagggcgggcgggcaggc

SEQ ID NO: 359793 - DNA, 1265 bp, Homo sapiens
  chr11:19733708-19734973
  hyper
cggggtcatggagcctctcccggcttcttcaggccactctaattacagagtctgtggtaggttgcgtggaggagctgtctcggggcgggaagcttccctgcgtattgtatttgcctataaatacttcaaatagttaagtgaaatgtgcagcctttgaaaactggagaggaagccgttgggaggccccccgcccagccggcctggaagagcaggcagagaaatggctggcgcgctcttaaagcgggagacgagcttcggccctgcccaagccagatgggggcagcgaggctgcgggcgtgactccggaagactcaaaccgttaaggtgaccggagcaatttgaaaaaggaaacaaacttccctcgagccgtgcccgcgtggctctggggcggacggttgcgttcgaaagggcatttttcaaaagaagggtttcaggaacgcaggggtgtgggccccccgggaggcgcgcggccggggcagtgccgcaaagcggccaccagcccgctttgtactcgcggccaagcgcggccccagagtttcggcggcggccagagtttaggccacaccctctttgcagtgagacccgcggccgctgattggcgcaccgtggaccaatgggcgcgccggggcggccccggctgtcagcgcgcgccgcagcagcgccggcagcagcctgtcctcccctgcgctgagccccgcagccagcgcagccttcccgggaagcgcggcggccgctcccgagcgcagccctgcccggcccgccagccgcgcgtcccggcgcccgcgccccacggccacagccttgcctctatctagctcacggagcatgtgcagacccgcaggcgctaaggtgctctcagtccgggggccttctgggcagcggtgactgtcaccccaagagagacctttcgggggctcttgccgcacctctgctgcgtcgcgggtgacactgcggtgctcgcgagcagggtggcagctgcctctcggtggagacgtcttgggacccttgcgcccttcttctctccttccttcgctgctgtctcctttccttccttggctgctcgctctttctctcgccggctcagacccgtagcctccggaacgggactcgtgggtcgccgccgcctctgtctcttccaaaggggcctcctcacttcggagatgcagtgacaagttaatatgggcgtccaagcctctgtttcccaggaggaaatttgcaagaggcggcagcccctgagcgcccagagctcttgaaaggccacccag

SEQ ID NO: 359794 - DNA, 338 bp, Homo sapiens; identical to SEQ ID NO: 202485
  chr11:19735066-19735404
  hyper

SEQ ID NO: 359795 - DNA, 917 bp, Homo sapiens; identical to SEQ ID NO: 345381
  chr11:19798519-19799436
  hyper

SEQ ID NO: 359796 - DNA, 66 bp, Homo sapiens; identical to SEQ ID NO: 287911
  chr11:20153468-20153534
  hyper

SEQ ID NO: 359797 - DNA, 86 bp, Homo sapiens; identical to SEQ ID NO: 351168
  chr11:20230312-20230398
  hyper

SEQ ID NO: 359798 - DNA, 53 bp, Homo sapiens; identical to SEQ ID NO: 351169
  chr11:20230510-20230563
  hyper

SEQ ID NO: 359799 - DNA, 38 bp, Homo sapiens; identical to SEQ ID NO: 351170
  chr11:20619974-20620012
  hyper

SEQ ID NO: 359800 - DNA, 100 bp, Homo sapiens; identical to SEQ ID NO: 334203
  chr11:22647396-22647496
  hyper

SEQ ID NO: 359801 - DNA, 405 bp, Homo sapiens; identical to SEQ ID NO: 287938
  chr11:27740493-27740898
  hyper

SEQ ID NO: 359802 - DNA, 178 bp, Homo sapiens
  chr11:27740986-27741164
  hyper
cggtccggaaaggaccttctactcccaggcggaggctcccctttccctgagttaccccgactgactcggacctgggctcagtgaggcatccggcccggctggggagcggagcgcggtctcggcagctccccttcccttgagaaagcgggaaccctctaagccagcgcccgaaactcgc

SEQ ID NO: 359803 - DNA, 473 bp, Homo sapiens; identical to SEQ ID NO: 351172
  chr11:31818829-31819302
  hyper

SEQ ID NO: 359804 - DNA, 224 bp, Homo sapiens; identical to SEQ ID NO: 202495
  chr11:31821778-31822002
  hyper

SEQ ID NO: 359805 - DNA, 43 bp, Homo sapiens; identical to SEQ ID NO: 351174
  chr11:31823122-31823165
  hyper

SEQ ID NO: 359806 - DNA, 100 bp, Homo sapiens; identical to SEQ ID NO: 351175
  chr11:31842276-31842376
  hyper

SEQ ID NO: 359807 - DNA, 76 bp, Homo sapiens; identical to SEQ ID NO: 345383
  chr11:32449104-32449180
  hyper

SEQ ID NO: 359808 - DNA, 214 bp, Homo sapiens; identical to SEQ ID NO: 287961
  chr11:32455062-32455276
  hyper

SEQ ID NO: 359809 - DNA, 384 bp, Homo sapiens; identical to SEQ ID NO: 334231
  chr11:32851566-32851950
  hyper

SEQ ID NO: 359810 - DNA, 929 bp, Homo sapiens; identical to SEQ ID NO: 345384
  chr11:32915113-32916042
  hyper

SEQ ID NO: 359811 - DNA, 250 bp, Homo sapiens; identical to SEQ ID NO: 347147
  chr11:33891709-33891959
  hyper

SEQ ID NO: 359812 - DNA, 119 bp, Homo sapiens; identical to SEQ ID NO: 347148
  chr11:33892127-33892246
  hyper

SEQ ID NO: 359813 - DNA, 742 bp, Homo sapiens; identical to SEQ ID NO: 351182
  chr11:35160331-35161073
  hyper

SEQ ID NO: 359814 - DNA, 202 bp, Homo sapiens; identical to SEQ ID NO: 287979
  chr11:35439896-35440098
  hyper

SEQ ID NO: 359815 - DNA, 238 bp, Homo sapiens; identical to SEQ ID NO: 202513
  chr11:35440137-35440375
  hyper

SEQ ID NO: 359816 - DNA, 56 bp, Homo sapiens; identical to SEQ ID NO: 345385
  chr11:35547041-35547097
  hyper

SEQ ID NO: 359817 - DNA, 208 bp, Homo sapiens; identical to SEQ ID NO: 202515
  chr11:35547127-35547335
  hyper

SEQ ID NO: 359818 - DNA, 623 bp, Homo sapiens
  chr11:35639806-35640429
  hyper
ctctccctctcggaaggagccatcgccgctttaagtggaagaggagaggaagggggcgggggagcggggggcggggagcggaggcggaggagggggagggggatccccctggctcccacgtggtccgggcgcctgtgaatcgcgcccaccggagggtctcacagcgaaatacaaaagcagctgggaagcggcggggactcgagttcccagcgccgggcggagcgccggacagagccccgcagcgccccgcggccgcgatggggccgaagcgcccgaagccccggagcccacaaactgccgggcccgcctcgccgccgggacccgggtgcctgggctcggcttgaagcggcggcggcgcaccggcacagccgcgggagcatgggcaggaggatgcggggcgccgccgccaccgcggggctctggctgctggcgctgggctcgctgctggcgctgtggggagggctcctgccgccgcggaccgagctgcccgcctcccggccgcccgaagaccgactcccacggcgcccggcccggagcggcggccccgcgcccgcgcctcgcttccctctgcccccgcccctggcgtgggacgcccgcggcggctccctgaaaactttccgggc

SEQ ID NO: 359819 - DNA, 55 bp, Homo sapiens; identical to SEQ ID NO: 347151
  chr11:43599961-43600016
  hyper

SEQ ID NO: 359820 - DNA, 238 bp, Homo sapiens; identical to SEQ ID NO: 202528
  chr11:43600215-43600453
  hyper

SEQ ID NO: 359821 - DNA, 230 bp, Homo sapiens; identical to SEQ ID NO: 288003
  chr11:43964015-43964245
  hyper

SEQ ID NO: 359822 - DNA, 61 bp, Homo sapiens
  chr11:43965299-43965360
  hyper
actgcgtctggaggattgatatttatttttgcattgcgatggctgaaggcatttatttaac

SEQ ID NO: 359823 - DNA, 41 bp, Homo sapiens
  chr11:43965463-43965504
  hyper
cggggtccaggctcccaagactcggggaggtgggggaggag

SEQ ID NO: 359824 - DNA, 141 bp, Homo sapiens
  chr11:43966061-43966202
  hyper
ggagggtggggcatgtctttggttagagcctgaagggcacctgggtaccatcgagtccttcccttctccccgcccctgcctttgtttacatatgagaaaacaagcctagggtaacagggagaggagcgcccccagttctcc

SEQ ID NO: 359825 - DNA, 174 bp, Homo sapiens; identical to SEQ ID NO: 351190
  chr11:44087366-44087540
  hyper

SEQ ID NO: 359826 - DNA, 51 bp, Homo sapiens; identical to SEQ ID NO: 345388
  chr11:44337578-44337629
  hyper

SEQ ID NO: 359827 - DNA, 230 bp, Homo sapiens
  chr11:44338552-44338782
  hyper
cgatggaacctggtgccccgccctctctggcaagggcaaggccaagagcgcagggcggggagaggagctccggggacccgcggaaaacctggctcgaaagccctggaggcgagctctccaccgtgttcggtggccaccttaattcttgttgaaccgagaggaagttgttgaaaccggaagtcggcctctggggtctgagcccgtccaccctttgcagatcggtaacagcc

SEQ ID NO: 359828 - DNA, 256 bp, Homo sapiens; identical to SEQ ID NO: 202532
  chr11:44748419-44748675
  hyper

SEQ ID NO: 359829 - DNA, 313 bp, Homo sapiens; identical to SEQ ID NO: 202533
  chr11:44748871-44749184
  hyper

SEQ ID NO: 359830 - DNA, 516 bp, Homo sapiens; identical to SEQ ID NO: 351193
  chr11:44749218-44749734
  hyper

SEQ ID NO: 359831 - DNA, 59 bp, Homo sapiens; identical to SEQ ID NO: 334253
  chr11:45392759-45392818
  hyper

SEQ ID NO: 359832 - DNA, 86 bp, Homo sapiens; identical to SEQ ID NO: 345389
  chr11:47208495-47208581
  hyper

SEQ ID NO: 359833 - DNA, 51 bp, Homo sapiens
  chr11:57056851-57056902
  hyper
cgaaaacaaagggctgggtcaataaatctgccgcagcagccgtggatcagt

SEQ ID NO: 359834 - DNA, 77 bp, Homo sapiens; identical to SEQ ID NO: 351195
  chr11:57194101-57194178
  hyper

SEQ ID NO: 359835 - DNA, 50 bp, Homo sapiens; identical to SEQ ID NO: 334262
  chr11:57334786-57334836
  hyper

SEQ ID NO: 359836 - DNA, 188 bp, Homo sapiens; identical to SEQ ID NO: 345390
  chr11:58940419-58940607
  hyper

SEQ ID NO: 359837 - DNA, 200 bp, Homo sapiens; identical to SEQ ID NO: 202554
  chr11:58940666-58940866
  hyper

SEQ ID NO: 359838 - DNA, 55 bp, Homo sapiens; identical to SEQ ID NO: 345392
  chr11:58940867-58940922
  hyper

SEQ ID NO: 359839 - DNA, 42 bp, Homo sapiens
  chr11:59323829-59323871
  hyper
cgcgaagggaaagaatgcggccacgtggcctattttcctgtg

SEQ ID NO: 359840 - DNA, 60 bp, Homo sapiens; identical to SEQ ID NO: 288078
  chr11:59323899-59323959
  hyper

SEQ ID NO: 359841 - DNA, 187 bp, Homo sapiens
  chr11:59323987-59324174
  hyper
tttccaataaaatggatttgggcgaggctgagagaaaggaacgttatgtgaaacccgcttggggtgcctcctccttgagggaaaccagaacttgctagtgggttcttaccggaagaagtgaaacgtgtggaaaatgccaagaaactttatcttccaatagcaggcttttcttttccaacctttatac

SEQ ID NO: 359842 - DNA, 190 bp, Homo sapiens; identical to SEQ ID NO: 347158
  chr11:59333673-59333863
  hyper

SEQ ID NO: 359843 - DNA, 230 bp, Homo sapiens; identical to SEQ ID NO: 351201
  chr11:61062458-61062688
  hyper

SEQ ID NO: 359844 - DNA, 236 bp, Homo sapiens; identical to SEQ ID NO: 351202
  chr11:61275825-61276061
  hyper

SEQ ID NO: 359845 - DNA, 315 bp, Homo sapiens; identical to SEQ ID NO: 202562
  chr11:61276101-61276416
  hyper

SEQ ID NO: 359846 - DNA, 604 bp, Homo sapiens; identical to SEQ ID NO: 347160
  chr11:61347974-61348578
  hyper

SEQ ID NO: 359847 - DNA, 217 bp, Homo sapiens
  chr11:61355118-61355335
  hyper
cgggggacgaggcgtctccgctcttaatagctgagcgcccgcaaacgcccggcctgggctcgaggcctgcccctccagcgacgggcgcccccaacattgaagtctttctctgcaacttggacggacccaccccgagcgccccgagtatccggcccggggcagagatgcgcgtgcgcggagggggtgccgcggagcccgcgtgagcagacaaattacc

SEQ ID NO: 359848 - DNA, 259 bp, Homo sapiens; identical to SEQ ID NO: 202565
  chr11:61595492-61595751
  hyper

SEQ ID NO: 359849 - DNA, 34 bp, Homo sapiens
  chr11:61596695-61596729
  hyper
ggggaccggcgtccgggattggtggaaggagaac

SEQ ID NO: 359850 - DNA, 176 bp, Homo sapiens; identical to SEQ ID NO: 334274
  chr11:61659371-61659547
  hyper

SEQ ID NO: 359851 - DNA, 205 bp, Homo sapiens; identical to SEQ ID NO: 288109
  chr11:61684832-61685037
  hyper

SEQ ID NO: 359852 - DNA, 128 bp, Homo sapiens
  chr11:61685087-61685215
  hyper
cgccggcccggcgctgggatccggcgcgcgctcccaaggcctggccccacccggcccgccgcgccgggacagggagaccacggcgctcggagggaacccggcccccaacatcccgcgggccgcgccgc

SEQ ID NO: 359853 - DNA, 213 bp, Homo sapiens; identical to SEQ ID NO: 351207
  chr11:62369471-62369684
  hyper

SEQ ID NO: 359854 - DNA, 428 bp, Homo sapiens; identical to SEQ ID NO: 334279
  chr11:62389464-62389892
  hyper

SEQ ID NO: 359855 - DNA, 231 bp, Homo sapiens; identical to SEQ ID NO: 334280
  chr11:63705659-63705890
  hyper

SEQ ID NO: 359856 - DNA, 199 bp, Homo sapiens; identical to SEQ ID NO: 334282
  chr11:63828227-63828426
  hyper

SEQ ID NO: 359857 - DNA, 203 bp, Homo sapiens; identical to SEQ ID NO: 334283
  chr11:64015094-64015297
  hyper

SEQ ID NO: 359858 - DNA, 103 bp, Homo sapiens; identical to SEQ ID NO: 351211
  chr11:64039104-64039207
  hyper

SEQ ID NO: 359859 - DNA, 82 bp, Homo sapiens; identical to SEQ ID NO: 351212
  chr11:64064539-64064621
  hyper

SEQ ID NO: 359860 - DNA, 369 bp, Homo sapiens; identical to SEQ ID NO: 351213
  chr11:64064662-64065031
  hyper

SEQ ID NO: 359861 - DNA, 196 bp, Homo sapiens
  chr11:64067825-64068021
  hyper
cgttgactcccttctcgtctcgaggcctgtggcgtctgggtccgttggggcagaaccatggaggaaaagccttcgaaagtaagacgtctccctaggccccttaccctgtccgctccaacccacccttggtccgactcgggcccctggcgctatttcttactcagccttggctgcccgcagcccccacccaacccca

SEQ ID NO: 359862 - DNA, 679 bp, Homo sapiens
  chr11:64068047-64068726
  hyper
cggctcagttccccagcccgctcttccttcccgctccagccatccgcgacccttggctccctccttgtatgtggcccacaggtgtcgctcaagtcttccgaccgccaaggctcggacgaggagagcgtgcatagcgacactcgggacctgtggaccacgaccacgctgtcccaggcacagctgaacatgccgctgtccgaggtctgcgagggcttcgacgaggagggccgcaacattagcaagacccgcgggtggcacagcccggggcggggctcgttggacgaggggtacaaggccagccacaagccggaggaactggacgagcacgcgctggtggagctggagttgcaccgcggcagctccatggaaatcaatctgggggagaaggacactgcatcccagatcgaggccggtcagtgtggcctcgccaggccgtgggcacccgcagggcaataagctggccagggactcaatttctggagctgtaaaatggggggaagctgatgggatccaagtttctaggattctctgggagaggcgcccgcgccaatctttcgccctttaaatccgccaggcattcttggagcgccccctcccgggcaggcgttgtaacaggcctttcggtcgtgacgcgcagagtccggggaaggacgcaccaaataaattgcgcaaagacccc

SEQ ID NO: 359863 - DNA, 86 bp, Homo sapiens; identical to SEQ ID NO: 351214
  chr11:64509676-64509762
  hyper

SEQ ID NO: 359864 - DNA, 502 bp, Homo sapiens; identical to SEQ ID NO: 351215
  chr11:64509801-64510303
  hyper

SEQ ID NO: 359865 - DNA, 549 bp, Homo sapiens; identical to SEQ ID NO: 345393
  chr11:64512349-64512898
  hyper

SEQ ID NO: 359866 - DNA, 61 bp, Homo sapiens; identical to SEQ ID NO: 345394
  chr11:64513748-64513809
  hyper

SEQ ID NO: 359867 - DNA, 103 bp, Homo sapiens; identical to SEQ ID NO: 334290
  chr11:64655582-64655685
  hyper

SEQ ID NO: 359868 - DNA, 198 bp, Homo sapiens; identical to SEQ ID NO: 351218
  chr11:65185728-65185926
  hyper

SEQ ID NO: 359869 - DNA, 190 bp, Homo sapiens
  chr11:65192973-65193163
  hyper
acttaggtggttgatttgaaactgtgaaggtgtgattttttcaggagctggaagtcttagaaaagccttgtaaatgcctatattgtgggcttttaacgtatttaagggaccacttaagacgagattagatgggctcttctggatttgttcctcatttgtcacaggtgtcttgtgattgaaaatcatgagc

SEQ ID NO: 359870 - DNA, 33 bp, Homo sapiens
  chr11:65307510-65307543
  hyper
cgcggccggagggcccgggcacccagggcgggc

SEQ ID NO: 359871 - DNA, 35 bp, Homo sapiens; identical to SEQ ID NO: 347164
  chr11:65553778-65553813
  hyper

SEQ ID NO: 359872 - DNA, 227 bp, Homo sapiens; identical to SEQ ID NO: 202605
  chr11:65554410-65554637
  hyper

SEQ ID NO: 359873 - DNA, 1028 bp, Homo sapiens; identical to SEQ ID NO: 351221
  chr11:65554723-65555751
  hyper

SEQ ID NO: 359874 - DNA, 48 bp, Homo sapiens; identical to SEQ ID NO: 351222
  chr11:65779604-65779652
  hyper

SEQ ID NO: 359875 - DNA, 288 bp, Homo sapiens; identical to SEQ ID NO: 351223
  chr11:66045216-66045504
  hyper

SEQ ID NO: 359876 - DNA, 1101 bp, Homo sapiens; identical to SEQ ID NO: 347167
  chr11:66079395-66080496
  hyper

SEQ ID NO: 359877 - DNA, 383 bp, Homo sapiens; identical to SEQ ID NO: 334300
  chr11:66176338-66176721
  hyper

SEQ ID NO: 359878 - DNA, 329 bp, Homo sapiens; identical to SEQ ID NO: 202615
  chr11:66187467-66187796
  hyper

SEQ ID NO: 359879 - DNA, 269 bp, Homo sapiens; identical to SEQ ID NO: 202616
  chr11:66187826-66188095
  hyper

SEQ ID NO: 359880 - DNA, 162 bp, Homo sapiens; identical to SEQ ID NO: 351227
  chr11:66189149-66189311
  hyper

SEQ ID NO: 359881 - DNA, 223 bp, Homo sapiens; identical to SEQ ID NO: 347170
  chr11:66725377-66725600
  hyper

SEQ ID NO: 359882 - DNA, 308 bp, Homo sapiens; identical to SEQ ID NO: 288243
  chr11:66725637-66725945
  hyper

SEQ ID NO: 359883 - DNA, 112 bp, Homo sapiens; identical to SEQ ID NO: 351230
  chr11:66886029-66886141
  hyper

SEQ ID NO: 359884 - DNA, 119 bp, Homo sapiens; identical to SEQ ID NO: 202630
  chr11:67232283-67232402
  hyper

SEQ ID NO: 359885 - DNA, 127 bp, Homo sapiens; identical to SEQ ID NO: 345397
  chr11:67232464-67232591
  hyper

SEQ ID NO: 359886 - DNA, 132 bp, Homo sapiens
  chr11:67895663-67895795
  hyper
cgtccgtgtagccttggccgggcccccaagcttcttagaatgccatctaagaaggcagagggggatgagcggcggcggggaggaggggcaggccttgggaagatccactgggtcacagggaagcgaaggcgg

SEQ ID NO: 359887 - DNA, 269 bp, Homo sapiens; identical to SEQ ID NO: 351233
  chr11:68095765-68096034
  hyper

SEQ ID NO: 359888 - DNA, 605 bp, Homo sapiens
  chr11:68606653-68607258
  hyper
cgatcaaagtgcagaagcagcccttggcccgcgcaggctccggtttccgcctcccgccgccgctgccaccgcccctgcgcctttagatttcgggcagcaagtttaattgctcgcttggaaagcgtcctcggaagggcaccgccagcaactgcggcttcgcgccccgccccttcccccaagccccgggcggcgtcacgtgacggctgagaaaagtaggggaaaggtcagcagcagccccgcccccaggctggcgcgtcccaggcgctcggatcctgttccacccgccgtgcccacagagaccttccggagcgagttggcgcgcgtccctgtggccaccccagcgacagcgggagaaatgcaacgcacctctccgtgggaaggtcgagccctgcggtgcccagctgtggggacagctcggtgctcagtgcttctgatgacagatgctgcatccaacgagccagaaacgcaggcaccgcgctcaagagcccagggcgcgtctaaaaggggctcactgtgaagcctcagtgaaaactgacggtgtttttatgaatgagcactcggggccagggttgggtaagggcaggccctcgttccagggctccccg

SEQ ID NO: 359889 - DNA, 156 bp, Homo sapiens; identical to SEQ ID NO: 351234
  chr11:68611259-68611415
  hyper

SEQ ID NO: 359890 - DNA, 231 bp, Homo sapiens
  chr11:69451967-69452198
  hyper
cgcggggatgcggggtcctccccgcagtcttccggaaagggcgggggagggcgcggcaagttccggagtggggcatgccgtgggagcccacgagggcctcagcgcggatcctccgccggaaaaccggctcccgcgagccgccgccgcaggtttcctaggccccgcgagtcccgcagcgaagccctgcgtctccgtccgacgcgggggtctgctcagcctcgggtgggccgc

SEQ ID NO: 359891 - DNA, 368 bp, Homo sapiens; identical to SEQ ID NO: 288280
  chr11:69452289-69452657
  hyper

SEQ ID NO: 359892 - DNA, 57 bp, Homo sapiens
  chr11:69516911-69516968
  hyper
cggctctgggtgggagtcagcgtccagcgtgccgaccaccccctttctctgcagtcc

SEQ ID NO: 359893 - DNA, 258 bp, Homo sapiens; identical to SEQ ID NO: 288285
  chr11:69517461-69517719
  hyper

SEQ ID NO: 359894 - DNA, 74 bp, Homo sapiens
  chr11:71159315-71159389
  hyper
cgcacaccttggccactcacctgcgcacacctcggcccctcacctgcgcccaccttcccctggcctcgcttgcg

SEQ ID NO: 359895 - DNA, 397 bp, Homo sapiens; identical to SEQ ID NO: 288299
  chr11:71951738-71952135
  hyper

SEQ ID NO: 359896 - DNA, 96 bp, Homo sapiens; identical to SEQ ID NO: 334322
  chr11:73358566-73358662
  hyper

SEQ ID NO: 359897 - DNA, 844 bp, Homo sapiens; identical to SEQ ID NO: 345398
  chr11:73693765-73694609
  hyper

SEQ ID NO: 359898 - DNA, 211 bp, Homo sapiens
  chr11:74022468-74022679
  hyper
cgcagccgcgcctcctccccgcgcaggtaccgcctcagcagccccagcagccggcgctcgggcgccagggcgcgcgccacgctggtcagcgccgagaacgtgtcgccccgagccgcagccctttctgggtctcctgtcccgagcgccagcaccgccagcagcgccgccagccgcgccccaggacccatagccagcgctcgcgaacttcccc

SEQ ID NO: 359899 - DNA, 137 bp, Homo sapiens
  chr11:74022716-74022853
  hyper
ccctcgcctgccccgcccctgtctccgccccctcccggctcaggccccgccctctggccccggcccggcccgtcccgtccaccgcccagtctcgctccacgccccctgactccttccttgtttcgacgcctcacctc

SEQ ID NO: 359900 - DNA, 161 bp, Homo sapiens
  chr11:74178245-74178406
  hyper
cgatcactgcgctcgggaggatcggggaggatccgggaggactagcttggtatttgcagcgcccacccctcccccactccccctcggttccacagtctcacggagagcgcgccgtggcccttggaagggaggcgggaagacccctcatttccaccccaggc

SEQ ID NO: 359901 - DNA, 120 bp, Homo sapiens; identical to SEQ ID NO: 288321
  chr11:74178470-74178590
  hyper

SEQ ID NO: 359902 - DNA, 324 bp, Homo sapiens; identical to SEQ ID NO: 202663
  chr11:74951799-74952123
  hyper

SEQ ID NO: 359903 - DNA, 103 bp, Homo sapiens
  chr11:75380110-75380213
  hyper
atgctgctcagcagtgagaaaaaaatccaggaacgatgctgactgaaagagtgctgcagaaaaaaacaaaacaaaacaaaaacacctgctgtcgtcagcttgc

SEQ ID NO: 359904 - DNA, 75 bp, Homo sapiens; identical to SEQ ID NO: 288337
  chr11:76033216-76033291
  hyper

SEQ ID NO: 359905 - DNA, 509 bp, Homo sapiens; identical to SEQ ID NO: 345399
  chr11:76381512-76382021
  hyper

SEQ ID NO: 359906 - DNA, 977 bp, Homo sapiens
  chr11:77184557-77185534
  hyper
cgggacgcgaggggtactgggcggtaggcccgctctcaccttccgcgctcgctcagctcctctcggctcctcctcctcctcccggcggtgggtgccgcctagccgggagtgagggcgcgagtgtgcgcgagctaccgcttcactttctccctcctgccgccgccgccgcgctgcccgtggcggggctcccctcaggacaggggaactgcgagggaagggatgatgggggggcgggagggagcgaggcgacgcgggcggggggggaaggggggactgaggggcgaggtgcgaagggctcagatggcctctgaggcaggaggtggtaactggatgcggagaccaggttcctcgagggggctcacgaaagcgcggggctccgtggaaaagggaatgagagtccaagggggaaggcgtctgtgggggaggactgcagagcctgtgagggaagcgcgatgggcgagcgagggggcgggagcgtgtgggggaagccgtgagggggcgtctactgtgcagccaccaccttcggctccggctgcagccgcgggagggcagcctcccccgcccacagccgcgctattgtacgccgcccggcaggcctgaccgcctagttcactggctcccctactcctcctcctcccgcctcctcctcccctctgccctttccccttctccccctccccctcccccactccccctccccggcgcggcggcggcggctgcggctccggtggagccgtgcccgccccgcctcccgcaggtgagagggggcggggagggcctgaccgacccgtgggagcgaggccaaaccctggcccgcatgagggcgaacgcctgggattacgtcatcggcgcgtgacgccagaggctggggaatcacccgcttgctgcgtgacgtcatcgcgtcgcgtcactgttctcggtccgctgtccgtggcgggttgtttccgtgcagcctttctatcagacaattttgggac

SEQ ID NO: 359907 - DNA, 290 bp, Homo sapiens
  chr11:79150336-79150626
  hyper
aactgcatttctataaaccctctctccacggttagggggtgggagggagttagagatcgggtgggggcttggcgcggtactgttgagggctctgcacccaactgagcagtaatacactcatccacatggacgcgggtgcataaatcgccttaacattttgccctgaaagcggagccaatttccaaagttaaggaccacgcagctgaatttccagtactttccaacctcgcctaggcgggggcaggcagagaaggggcgggcagcgggcagctaactcgcccgaccccccc

SEQ ID NO: 359908 - DNA, 37 bp, Homo sapiens
  chr11:84431917-84431954
  hyper
cgatttggtaaaaagccagtggcttgctgcaatccag

SEQ ID NO: 359909 - DNA, 55 bp, Homo sapiens
  chr11:84432270-84432325
  hyper
agcaaagaaatctggggtagaaaacaggctcaaaatgatttcgctggtgccctac

SEQ ID NO: 359910 - DNA, 48 bp, Homo sapiens; identical to SEQ ID NO: 351239
  chr11:86085693-86085741
  hyper

SEQ ID NO: 359911 - DNA, 239 bp, Homo sapiens; identical to SEQ ID NO: 351240
  chr11:86382607-86382846
  hyper

SEQ ID NO: 359912 - DNA, 62 bp, Homo sapiens; identical to SEQ ID NO: 202679
  chr11:86383105-86383167
  hyper

SEQ ID NO: 359913 - DNA, 675 bp, Homo sapiens; identical to SEQ ID NO: 288384
  chr11:92930674-92931349
  hyper

SEQ ID NO: 359914 - DNA, 47 bp, Homo sapiens; identical to SEQ ID NO: 347178
  chr11:92931379-92931426
  hyper

SEQ ID NO: 359915 - DNA, 217 bp, Homo sapiens; identical to SEQ ID NO: 202694
  chr11:94474139-94474356
  hyper

SEQ ID NO: 359916 - DNA, 104 bp, Homo sapiens; identical to SEQ ID NO: 202695
  chr11:94474385-94474489
  hyper

SEQ ID NO: 359917 - DNA, 220 bp, Homo sapiens
  chr11:94474547-94474767
  hyper
tgccaagtacctggcacgagaaggacgtcgtgtgggtcgtccttaccctgaatttaatgaagtcaggggctgaaaacggcggtgtaatcattaaactgtaagacctaggagctgcttccctccctgatttctattcctcagttagcctgtaggtgtctcgagataggacattccatcctcatgcctgtcatggtaagtggagatttgcgatgggtgaacc

SEQ ID NO: 359918 - DNA, 171 bp, Homo sapiens
  chr11:94501274-94501445
  hyper
cggcaggggacaaaggaagggatgctgtcgccctcctaagtctcagggagacacgtcagcttgagctctgggcaatttcagcctggcagtctcgcggcccggggaggggcggcgggtgtctgcagacgggctctagggcccagcggccgggcgccacggcgggggtggagt

SEQ ID NO: 359919 - DNA, 234 bp, Homo sapiens; identical to SEQ ID NO: 202698
  chr11:94502100-94502334
  hyper

SEQ ID NO: 359920 - DNA, 772 bp, Homo sapiens; identical to SEQ ID NO: 334350
  chr11:94963753-94964525
  hyper

SEQ ID NO: 359921 - DNA, 886 bp, Homo sapiens; identical to SEQ ID NO: 334351
  chr11:96122370-96123256
  hyper

SEQ ID NO: 359922 - DNA, 161 bp, Homo sapiens; identical to SEQ ID NO: 202702
  chr11:100999159-100999320
  hyper

SEQ ID NO: 359923 - DNA, 241 bp, Homo sapiens; identical to SEQ ID NO: 202703
  chr11:100999360-100999601
  hyper

SEQ ID NO: 359924 - DNA, 37 bp, Homo sapiens
  chr11:101918139-101918176
  hyper
cgacacgacggccgccgcgtctccatggaaacggccc

SEQ ID NO: 359925 - DNA, 803 bp, Homo sapiens; identical to SEQ ID NO: 351248
  chr11:101980831-101981634
  hyper

SEQ ID NO: 359926 - DNA, 612 bp, Homo sapiens; identical to SEQ ID NO: 351249
  chr11:101981964-101982576
  hyper

SEQ ID NO: 359927 - DNA, 747 bp, Homo sapiens; identical to SEQ ID NO: 351250
  chr11:102962175-102962922
  hyper

SEQ ID NO: 359928 - DNA, 99 bp, Homo sapiens; identical to SEQ ID NO: 351251
  chr11:102963062-102963161
  hyper

SEQ ID NO: 359929 - DNA, 226 bp, Homo sapiens; identical to SEQ ID NO: 288422
  chr11:106889091-106889317
  hyper

SEQ ID NO: 359930 - DNA, 168 bp, Homo sapiens; identical to SEQ ID NO: 351253
  chr11:107462735-107462903
  hyper

SEQ ID NO: 359931 - DNA, 823 bp, Homo sapiens; identical to SEQ ID NO: 351254
  chr11:110166935-110167758
  hyper

SEQ ID NO: 359932 - DNA, 456 bp, Homo sapiens
  chr11:111169516-111169972
  hyper
cgagttggccgctccggacgtccgcgtaccccaggcccccgcccgccctcccacgtatccactgttgtgtcctgagacacgcggtgcggaccctgcgcgcccagaagctgctacggggggagctagaggctcacagtgagcctgggacgggggcagagcgcaccgactgcactgagccgagctgtggcggtccctgcgcggaccccgaggggcgcccgctgcccgcggagtccggagccgatcggggaacggggtggtggggctgcggtaggctggagcgcggagagggcgcggcgcctgggccctgcgggcggggcacgggattccctgggtccgggctaggaagagcgcaatctcctttcctggggagaccctaactcctggaacccggcttgagggggatccctgctgtccagctgcggtccccgcagtgaccaggcgaggcgctggcatcct

SEQ ID NO: 359933 - DNA, 501 bp, Homo sapiens; identical to SEQ ID NO: 288443
  chr11:113345738-113346239
  hyper

SEQ ID NO: 359934 - DNA, 44 bp, Homo sapiens
  chr11:113930323-113930367
  hyper
cgccagcactaaagatggagaggcgccggggccttgcaggggag

SEQ ID NO: 359935 - DNA, 229 bp, Homo sapiens; identical to SEQ ID NO: 288447
  chr11:113930801-113931030
  hyper

SEQ ID NO: 359936 - DNA, 208 bp, Homo sapiens
  chr11:113931067-113931275
  hyper
aatcggaggagctgacgagtagatctgggggcggaggggagcaggactgggactgcttacgttttgtttctctttgagaaaacgtggtgggctttttcttgattggacttgatccccaccccccttttgcaggggagggagggaagctccagagggtctgcagcgctgcgggccctcctcggctctcggcgggaccggcggtgacacc

SEQ ID NO: 359937 - DNA, 238 bp, Homo sapiens; identical to SEQ ID NO: 202728
  chr11:115374753-115374991
  hyper

SEQ ID NO: 359938 - DNA, 398 bp, Homo sapiens; identical to SEQ ID NO: 202729
  chr11:115375434-115375832
  hyper

SEQ ID NO: 359939 - DNA, 301 bp, Homo sapiens; identical to SEQ ID NO: 347181
  chr11:115375894-115376195
  hyper

SEQ ID NO: 359940 - DNA, 159 bp, Homo sapiens
  chr11:118662849-118663008
  hyper
cgtgcgccgggagaggacggcgggggaccggactgtgagggcgtatcttgggggacctgtctaggaggaaccgggaggtgaaggcacaactgggggtgaggcgggggcaggggccgggctgtgagagtgcgactgaggggggattactccggagagcac

SEQ ID NO: 359941 - DNA, 66 bp, Homo sapiens; identical to SEQ ID NO: 334374
  chr11:119145611-119145677
  hyper

SEQ ID NO: 359942 - DNA, 128 bp, Homo sapiens
  chr11:119234947-119235075
  hyper
gacgtcagcgctggggcggggccaggccctaagccccgccccacctcgcctctaccccgcccccggcgccggcacgcggacccgaacgaggcgacaaggtcggtcctcccccgccgggccttccccgc

SEQ ID NO: 359943 - DNA, 87 bp, Homo sapiens; identical to SEQ ID NO: 351258
  chr11:119293218-119293305
  hyper

SEQ ID NO: 359944 - DNA, 62 bp, Homo sapiens; identical to SEQ ID NO: 202750
  chr11:119294072-119294134
  hyper

SEQ ID NO: 359945 - DNA, 752 bp, Homo sapiens
  chr11:119455153-119455905
  hyper
cgattccctcttccgcggctccgcgcggcggagctcaggggcgcaggctcttagagctgcggtggggcgggggccgcgggacgtccgtttgttctccgcggaggaggcgacgcgccgccaacgaccgcagctccacgtcctggcgcttctgggagccgccccagcgggagccagggagaaaatgaatcgccttgagtgacacaggacatggcagattggatgtttaatttgggtatctctttagaacgccccccacgcccacctcctctgctcccacttagcatccagccggcgagaaagccctgctcctcacaaattgccttgtcggctcggagaaaaatgccagcgtgactgattgctaggtgggtccctccaagtgcgcgggaaggaaccggcacgaccgcacaatgctccttcctacagagacgcggcgtcgtgccagagccggagatttgagtcagacaccgggaaggactgcccgtggaggagggcggctcgtggggctgggggtttgtttaggggtctctcgggtccagagggagggccaggcgaccctggctggggtctggtggctgtggggggcctgcggggcccagaggaaaaggccggcacccggtccgcgagagggggcacgtacggggcgcagaggcagaacgcagcccgcagcagacggacagccttccccagactgcctggagctcggagcccggcgccgaaacctgcagatcacaacctgtcagtcgcgctttccc

SEQ ID NO: 359946 - DNA, 283 bp, Homo sapiens; identical to SEQ ID NO: 334379
  chr11:119587853-119588136
  hyper

SEQ ID NO: 359947 - DNA, 301 bp, Homo sapiens
  chr11:119599011-119599312
  hyper
cggcttctcaacctctttctccgccgtgccacctcccaccccctttacccaagccgtgacccaacttttctggctcctttcactccccacaatccagtcgtgcccgccatccggctcccagccccggggaggcattggatgggggtggggacagcagaggtgagcgctcttacctgggaggaagaatgcggtcaagccgagagcgagtccccaccagcgtccagcggcgcccgcaagccccatccgagccatcgggggccgggggtccggcgagaggggcggcgagggcagcgctcctcgc

SEQ ID NO: 359948 - DNA, 91 bp, Homo sapiens
  chr11:119612432-119612523
  hyper
agtccctccgccacaaagagaccattgattgggaagagcggccgggttgtggtaggaaggctggtggggacacgcacgcacacacacgcgc

SEQ ID NO: 359949 - DNA, 223 bp, Homo sapiens; identical to SEQ ID NO: 351261
  chr11:120110626-120110849
  hyper

SEQ ID NO: 359950 - DNA, 155 bp, Homo sapiens; identical to SEQ ID NO: 351262
  chr11:120110967-120111122
  hyper

SEQ ID NO: 359951 - DNA, 159 bp, Homo sapiens; identical to SEQ ID NO: 351263
  chr11:120435049-120435208
  hyper

SEQ ID NO: 359952 - DNA, 166 bp, Homo sapiens; identical to SEQ ID NO: 345400
  chr11:120894634-120894800
  hyper

SEQ ID NO: 359953 - DNA, 85 bp, Homo sapiens; identical to SEQ ID NO: 345401
  chr11:120895026-120895111
  hyper

SEQ ID NO: 359954 - DNA, 53 bp, Homo sapiens
  chr11:121593326-121593379
  hyper
cgtggtcccgccaaacaaaggaacatgtgtgctgcaaaccatccccctatcac

SEQ ID NO: 359955 - DNA, 223 bp, Homo sapiens
  chr11:121593636-121593859
  hyper
actctcccgggatgctgtcgtgggggagggggcccggcactgtatacagctgtcaaaacgtctccgacaggagacgaaggcacatctgcacaagcctgtctcaggctgcggggcacacagggagcgcctcaaacctatcagtgtaatgccgagcggtaattgcattaggattagttatctcctgtgctctgctcattagcccggaggatggctcgcatccagc

SEQ ID NO: 359956 - DNA, 35 bp, Homo sapiens; identical to SEQ ID NO: 202770
  chr11:123173029-123173064
  hyper

SEQ ID NO: 359957 - DNA, 417 bp, Homo sapiens; identical to SEQ ID NO: 288544
  chr11:123524977-123525394
  hyper

SEQ ID NO: 359958 - DNA, 137 bp, Homo sapiens
  chr11:123525473-123525610
  hyper
cgcgcgctcgctggtctctccaggtctccctctcgcgcctccgcacctcccccgagctcgggcgcaccgccgccctcggctcacgccctccaggcaaacccactccgctcccgcacggacttgccgggtgtagctcc

SEQ ID NO: 359959 - DNA, 191 bp, Homo sapiens; identical to SEQ ID NO: 334392
  chr11:124616924-124617115
  hyper

SEQ ID NO: 359960 - DNA, 71 bp, Homo sapiens; identical to SEQ ID NO: 351268
  chr11:124631910-124631981
  hyper

SEQ ID NO: 359961 - DNA, 617 bp, Homo sapiens; identical to SEQ ID NO: 288557
  chr11:124932779-124933396
  hyper

SEQ ID NO: 359962 - DNA, 365 bp, Homo sapiens
  chr11:125133244-125133609
  hyper
ggcgtgggagcaaatggaggggatctgctggcgggcctagtttaggcaaacagcagggactgctggcgacggctccagcccccactcccgcggtaacagctgcagtccagctgctggcatccctgctgggggagcgtgctaaacctctccggggtcagcactgtggtatgtcggtttccatagcaaccagccaacgggccactttctcagaacaattcccctactcagccgggttctggacttagctcagcccaagggcatgtggctgaggagcagcgcgggagggggagagctgccgagggccagactgggccccacagaacgtggctatctcagtccggtcttcgcacggagggcgtggagcc

SEQ ID NO: 359963 - DNA, 135 bp, Homo sapiens; identical to SEQ ID NO: 345403
  chr11:128391758-128391893
  hyper

SEQ ID NO: 359964 - DNA, 623 bp, Homo sapiens; identical to SEQ ID NO: 345404
  chr11:128392116-128392739
  hyper

SEQ ID NO: 359965 - DNA, 128 bp, Homo sapiens; identical to SEQ ID NO: 351271
  chr11:128562635-128562763
  hyper

SEQ ID NO: 359966 - DNA, 543 bp, Homo sapiens; identical to SEQ ID NO: 345405
  chr11:129148497-129149040
  hyper

SEQ ID NO: 359967 - DNA, 820 bp, Homo sapiens; identical to SEQ ID NO: 345406
  chr11:129149096-129149916
  hyper

SEQ ID NO: 359968 - DNA, 39 bp, Homo sapiens; identical to SEQ ID NO: 334408
  chr11:130083134-130083173
  hyper

SEQ ID NO: 359969 - DNA, 245 bp, Homo sapiens; identical to SEQ ID NO: 334409
  chr11:130183478-130183723
  hyper

SEQ ID NO: 359970 - DNA, 237 bp, Homo sapiens; identical to SEQ ID NO: 288599
  chr11:131781335-131781572
  hyper

SEQ ID NO: 359971 - DNA, 217 bp, Homo sapiens; identical to SEQ ID NO: 334418
  chr11:133920473-133920690
  hyper

SEQ ID NO: 359972 - DNA, 161 bp, Homo sapiens; identical to SEQ ID NO: 345407
  chr11:133939437-133939598
  hyper

SEQ ID NO: 359973 - DNA, 241 bp, Homo sapiens; identical to SEQ ID NO: 202804
  chr11:134201549-134201790
  hyper

SEQ ID NO: 359974 - DNA, 236 bp, Homo sapiens; identical to SEQ ID NO: 345409
  chr11:134202154-134202390
  hyper

SEQ ID NO: 359975 - DNA, 196 bp, Homo sapiens; identical to SEQ ID NO: 334422
  chr11:134230275-134230471
  hyper

SEQ ID NO: 359976 - DNA, 73 bp, Homo sapiens; identical to SEQ ID NO: 351280
  chr11:134281810-134281883
  hyper

SEQ ID NO: 359977 - DNA, 133 bp, Homo sapiens; identical to SEQ ID NO: 351281
  chr12:708894-709027
  hyper

SEQ ID NO: 359978 - DNA, 182 bp, Homo sapiens; identical to SEQ ID NO: 351282
  chr12:709062-709244
  hyper

SEQ ID NO: 359979 - DNA, 235 bp, Homo sapiens; identical to SEQ ID NO: 351283
  chr12:1639655-1639890
  hyper

SEQ ID NO: 359980 - DNA, 344 bp, Homo sapiens; identical to SEQ ID NO: 288628
  chr12:1639977-1640321
  hyper

SEQ ID NO: 359981 - DNA, 273 bp, Homo sapiens; identical to SEQ ID NO: 351285
  chr12:1640476-1640749
  hyper

SEQ ID NO: 359982 - DNA, 64 bp, Homo sapiens; identical to SEQ ID NO: 351286
  chr12:1762097-1762161
  hyper

SEQ ID NO: 359983 - DNA, 145 bp, Homo sapiens; identical to SEQ ID NO: 347192
  chr12:1905625-1905770
  hyper

SEQ ID NO: 359984 - DNA, 204 bp, Homo sapiens; identical to SEQ ID NO: 202815
  chr12:1905826-1906030
  hyper

SEQ ID NO: 359985 - DNA, 114 bp, Homo sapiens; identical to SEQ ID NO: 202816
  chr12:1906322-1906436
  hyper

SEQ ID NO: 359986 - DNA, 99 bp, Homo sapiens; identical to SEQ ID NO: 347195
  chr12:1906476-1906575
  hyper

SEQ ID NO: 359987 - DNA, 226 bp, Homo sapiens
  chr12:2144066-2144292
  hyper
cgaatccaactttgcgggacaggggaagaagccttaggagctggcgaggcgagggggtgaagaggagaaggaggtctgggcactggaagcggcacacgtggaaacggtaaaggccgacgccggttcagagccgcaaccgcgacagccccgtcgtccacctcaggtgccggcgccccctgctggtgcgcggagatgcgcggagaccgcaaggcccgggggcgtggcc

SEQ ID NO: 359988 - DNA, 50 bp, Homo sapiens
  chr12:2144442-2144492
  hyper
tgttttaaggaaacgagaaaaccattctttcctcttaccggatgatgtgc

SEQ ID NO: 359989 - DNA, 90 bp, Homo sapiens
  chr12:2161370-2161460
  hyper
cgtgctcggctgcctccaaggaattattaaacctgggtctaggaatctgttcagacatctgggcaccgctgcctcgcctaccaggctccg

SEQ ID NO: 359990 - DNA, 254 bp, Homo sapiens; identical to SEQ ID NO: 334433
  chr12:2692239-2692493
  hyper

SEQ ID NO: 359991 - DNA, 238 bp, Homo sapiens; identical to SEQ ID NO: 202823
  chr12:2800603-2800841
  hyper

SEQ ID NO: 359992 - DNA, 245 bp, Homo sapiens; identical to SEQ ID NO: 347197
  chr12:2801019-2801264
  hyper

SEQ ID NO: 359993 - DNA, 142 bp, Homo sapiens; identical to SEQ ID NO: 334436
  chr12:3053936-3054078
  hyper

SEQ ID NO: 359994 - DNA, 1049 bp, Homo sapiens
  chr12:3186011-3187060
  hyper
cgcgctgtcagcatctcgcacagtccgcccgaaacaccagggaaggggttcgtaggtgtgggggtggggtggcgaggccaggcagcctggcgcgagggagagagccgaggcctgggccaggaaggcccttgggtgccgtgtgggcgcagagcccaggagagcgcactgccaggcccggacctccccgcccctaccccgggaagaggcccgttcgccgcagggggaaggcgggatcatagcacctcggaggagcggccggtccgggcatgcgggcggcggggcggggagggaggcttccggaaccccgagagagcacccgtgcctcgcgggccccgtgccccgtccccgggctccccttcctctaacgcaggggacccagcccggggcagtgccgggcactggcgctggcgccccgctcagccctgcgatccttctccgccccgcccctccccgctccgccccgcccctccccgctccgcccccgggccgccccgccccgcaggctcgccattcccgggcaggccccgccccctgtttccgctggcggcggcggcggcggcggtgccggagcgcgagcagagcggagacccccaggtcctgcgggcgcggtgagtgcggcccgggcggcgggcggcgaggcgggtctcgagagcgtgcggagtcgcgcggccttgagccggcgccgggcgggctgggcacccccaggccgagacccgagaagggggagcggccgggggcgcccacgggaggcagtgtgggcagggcggcggtgggacgagaggacgaggaacagagtaggcgccgtgcgggaagcgggccgggaaggggagggtgggtgcggggcccgggcaccgagcgaagtggggtcctccaggggatggctccgaggaagaccgtttcagaaagggagtaacccggggccggcaagggtttccgactgtgtgaccccgtgcaccgcttgggacagtccatacaaggaccccagagagggccagggggccttcgggcagggctgggatatggcctgcagccccccggcacccgcgacc

SEQ ID NO: 359995 - DNA, 234 bp, Homo sapiens; identical to SEQ ID NO: 202829
  chr12:3600534-3600768
  hyper

SEQ ID NO: 359996 - DNA, 396 bp, Homo sapiens; identical to SEQ ID NO: 288660
  chr12:3601625-3602021
  hyper

SEQ ID NO: 359997 - DNA, 41 bp, Homo sapiens; identical to SEQ ID NO: 351298
  chr12:3602961-3603002
  hyper

SEQ ID NO: 359998 - DNA, 152 bp, Homo sapiens
  chr12:4140253-4140405
  hyper
cgcagcaatgcgcctccaagccgggcccaggccgagcgcctctcgccgccgcgcacattccggagggggaccgcggggctcaaagggcctgcggcgtaggtggctcagccctttccttggctttccctccagggccatacttgccgaaaccc

SEQ ID NO: 359999 - DNA, 125 bp, Homo sapiens; identical to SEQ ID NO: 347200
  chr12:4273746-4273871
  hyper

SEQ ID NO: 360000 - DNA, 85 bp, Homo sapiens; identical to SEQ ID NO: 345410
  chr12:4377809-4377894
  hyper

SEQ ID NO: 360001 - DNA, 244 bp, Homo sapiens; identical to SEQ ID NO: 202837
  chr12:4378558-4378802
  hyper

SEQ ID NO: 360002 - DNA, 246 bp, Homo sapiens; identical to SEQ ID NO: 202838
  chr12:4379920-4380166
  hyper

SEQ ID NO: 360003 - DNA, 284 bp, Homo sapiens; identical to SEQ ID NO: 202839
  chr12:4380196-4380480
  hyper

SEQ ID NO: 360004 - DNA, 400 bp, Homo sapiens; identical to SEQ ID NO: 288669
  chr12:4381033-4381433
  hyper

SEQ ID NO: 360005 - DNA, 167 bp, Homo sapiens; identical to SEQ ID NO: 347205
  chr12:4382439-4382606
  hyper

SEQ ID NO: 360006 - DNA, 50 bp, Homo sapiens; identical to SEQ ID NO: 345413
  chr12:4382915-4382965
  hyper

SEQ ID NO: 360007 - DNA, 209 bp, Homo sapiens; identical to SEQ ID NO: 202843
  chr12:4382999-4383208
  hyper

SEQ ID NO: 360008 - DNA, 254 bp, Homo sapiens; identical to SEQ ID NO: 202844
  chr12:4384059-4384313
  hyper

SEQ ID NO: 360009 - DNA, 79 bp, Homo sapiens; identical to SEQ ID NO: 351309
  chr12:4384533-4384612
  hyper

SEQ ID NO: 360010 - DNA, 557 bp, Homo sapiens; identical to SEQ ID NO: 334445
  chr12:4920230-4920787
  hyper

SEQ ID NO: 360011 - DNA, 180 bp, Homo sapiens
  chr12:5020472-5020652
  hyper
cacccctggtccctggctgcttcccaccccgggctctctcctggcctcccacccccgcgcccggcttccaccatgacggtgatgtctggggagaacgtggacgaggcttcggccgccccgggccacccccaggatggcagctacccccggcaggccgaccacgacgaccacgagtgctgc

SEQ ID NO: 360012 - DNA, 322 bp, Homo sapiens; identical to SEQ ID NO: 202852
  chr12:5541693-5542015
  hyper

SEQ ID NO: 360013 - DNA, 36 bp, Homo sapiens
  chr12:5542974-5543010
  hyper
ctgtggacttgtttatgtgtgtgaagaggcgggggc

SEQ ID NO: 360014 - DNA, 95 bp, Homo sapiens; identical to SEQ ID NO: 347209
  chr12:6445038-6445133
  hyper

SEQ ID NO: 360015 - DNA, 241 bp, Homo sapiens; identical to SEQ ID NO: 202859
  chr12:6472613-6472854
  hyper

SEQ ID NO: 360016 - DNA, 94 bp, Homo sapiens; identical to SEQ ID NO: 202860
  chr12:6472900-6472994
  hyper

SEQ ID NO: 360017 - DNA, 406 bp, Homo sapiens
  chr12:6492947-6493353
  hyper
cggccttgcagtccccgcgccctgccctctccatgactgcccgtcctgggcccctcgctttccagatcccgcacccagctgtcccttgcgctctctggaactccctctgctctccctgcgaggcttgtccaagggctgaccccgggcccgccgcccttccctcggctgggccagggctgtccgcagtccgctctcccgatcgggcttccgaagaagggaggaggccggttccggccccgcggccctcacgtgctttcccggccgcccctcccgccccgcatcgaggcagacaagcctgttcctcttccctgggctgcgattgcgacaggccggcctggctcccagcgctccctgtccccgccccgcggccagctcgctccactcccacttcctgagctccgccatg

SEQ ID NO: 360018 - DNA, 33 bp, Homo sapiens; identical to SEQ ID NO: 202862
  chr12:6493416-6493449
  hyper

SEQ ID NO: 360019 - DNA, 115 bp, Homo sapiens
  chr12:6493504-6493619
  hyper
cgcctggccgagtggccgccatgctcctgccttgggccacctctgcccccggcctggcctgggggcctctggtgctgggcctcttcgggctcctggcagcatcgcagccccaggc

SEQ ID NO: 360020 - DNA, 539 bp, Homo sapiens
  chr12:7260775-7261314
  hyper
cgccacttcccacaaccccgggaatctccctggccacagtcctggcgggaccccccccatccccagctcactgtgacagagtcccctgcacagtcctgggacggctccaggtcgaagtcctggaagacgagcctcacagcaaagccctctggagccttgatgtccgtgctgctctcttggcctttgccatacggctctgggtacccgggggatgtcagctgctggggtagctcttgggccaagaggacggagccccgggttgggcaagcctggaggactccccagagaagcagccaccacctgtgagttggggggagggcaaggtggggccgcgcagctatggccggaagcctgtgggtgtgggaggagcgggggagccgcgctaggactcagaggcctcgcgaggcagggctagaagctgtggcctcacccttgaggcccgggcacttcccgtctcctcccttgctccccttcctcaccccaatccctacagcctcccgcgcagcctgagctctaggattgtgggttttccatcctcc

SEQ ID NO: 360021 - DNA, 499 bp, Homo sapiens; identical to SEQ ID NO: 334454
  chr12:7282303-7282802
  hyper

SEQ ID NO: 360022 - DNA, 104 bp, Homo sapiens; identical to SEQ ID NO: 334456
  chr12:8113465-8113569
  hyper

SEQ ID NO: 360023 - DNA, 55 bp, Homo sapiens; identical to SEQ ID NO: 345416
  chr12:8123528-8123583
  hyper

SEQ ID NO: 360024 - DNA, 751 bp, Homo sapiens; identical to SEQ ID NO: 351316
  chr12:8849750-8850501
  hyper

SEQ ID NO: 360025 - DNA, 310 bp, Homo sapiens; identical to SEQ ID NO: 202867
  chr12:8850744-8851054
  hyper

SEQ ID NO: 360026 - DNA, 113 bp, Homo sapiens; identical to SEQ ID NO: 347213
  chr12:8851275-8851388
  hyper

SEQ ID NO: 360027 - DNA, 294 bp, Homo sapiens
  chr12:9216950-9217244
  hyper
cggcggcggagcagctgcgggagccgcagtggctgctgtgggacatctgtgcctcgcgtcccctgtgccttgagaccccaaagcagccgactgcgccgccaccatcctcgcgttgccgggtggggcgacgtgctccccggccaggagcctccaccgctccggaccctggccctatgtcgccgctctcgcccgccgccgccgcggagtgggagtggggaggaggggaacagtccttggagccggccccgggagtactcccggagcctgccgccctggaagccgccacgatggacc

SEQ ID NO: 360028 - DNA, 565 bp, Homo sapiens; identical to SEQ ID NO: 334461
  chr12:12502899-12503464
  hyper

SEQ ID NO: 360029 - DNA, 107 bp, Homo sapiens; identical to SEQ ID NO: 345417
  chr12:14928211-14928318
  hyper

SEQ ID NO: 360030 - DNA, 93 bp, Homo sapiens; identical to SEQ ID NO: 351320
  chr12:15374050-15374143
  hyper

SEQ ID NO: 360031 - DNA, 1110 bp, Homo sapiens
  chr12:15941612-15942722
  hyper
cgagggggtaaacgggggtgggaccctgccctaaagggtcattttgaaaagaacccctccccatttgaggcgggttggcagagcagcgcacaaatcccaagtctaacgtaataagccgagatcgggatactcggtctgcagtcgccccacggaccagatgagcgcaggtgtatctgcggaagctcaggttaccatgaatatcactgggccacggcgaaccctccctgcccagcctcccggagccctgggcgcgggtctgcacgggccccacagcttgcccggacccggcgagcggacgcctccggccgcagcgccctaccgcacctggctgccaacaccagttgaaagcagtcaaagtgaagggaggcggacgcggctcctggcaccgctccgattccagcacacaaaggcggatttttaaaatcgagaaagtcaaagccgccggaccccgggaccggcgcctttcgccaaggggctcttacctcggatccgccctcggggccacggctttccccggagacgccgcgagcccagacgaggtgggaggggaccgggagaaagccccccaatctgattcgcgcccagccagtcgtccgcgagccgcggagccgccttctgcacccagctaaagagcagcgatctccgaggcgagcacagcgccggcctcgcgccgggcgagaccgcctcgctagctgctgcctgtgaagtctggagccgcccgcccgctcgcagccagtgccaaccgcgcgccgcgcatgcccagtgcccgcgcgaggaacgagcgagcgggcgggcgggcgagtgcgcgccccgcagccaggagcgaaatccgctatccgggtcttgccggcagccgagccgcagagttctggtcgactccagcgcttgaggcgaagtggccggtgaggccgggtgggcgggagagggaccggaggaaaggagacggggcgctgcgccaagttatcaaggccgcgatcaaagtcggaccaaggcagcgagtcgacagcaggtttccagaagtgccctaacaggactgactagcagccaggaggcgcaggaaggggcaaagagcgtgtggagagcttcgcccccggcgaggatggacgcccc

SEQ ID NO: 360032 - DNA, 81 bp, Homo sapiens; identical to SEQ ID NO: 347215
  chr12:16500402-16500483
  hyper

SEQ ID NO: 360033 - DNA, 393 bp, Homo sapiens; identical to SEQ ID NO: 347216
  chr12:16500621-16501014
  hyper

SEQ ID NO: 360034 - DNA, 869 bp, Homo sapiens
  chr12:16758732-16759601
  hyper
tccttccatcaacatcttccgcctgcatctatttcatgtctcatcataaaaataatgaagcctcacatgatttaaacaaaaccgtctcagtagagctgcagcccgagtgaaagttgcagtgcggagctgggttgcagctccagtttatgcctcattagcagaggttggggaagaaaaaaatacccacatccgcacacgcacgcgcgcacccgcagacacacacaccacaaataagccgacgcgtgtgtacacagttgctgcacttaccttctcaattaagcgatacagggggaggccgttcagtaagcacagtggctgctttgtagcgcttctccttgggaaaggtcaaaaagaagcattgtttgaaaaaaaaaaaaaagacgggggagggaatgtctatttttttttaagtttaaaataatgaggtcctcaaggatacgccaagcaatggtgttgaccgcatctgagccacaggtgtcctccttttaggcaactgcagtccgaggctgtctctctccgtcctggttcaagacaacttaccccagcagcgtgcgaggagccgagctgaaggaagctccggctctcagctgcaaaatgcaatcccttcccagccagacataatacagccaaagaaaaggtcactcagttattagtgagccggcggagcccaggcagcgcttgtcaagaccacagagaagcagctcccttccgatttaagactatttacctctcgcccccacccctcccctcttctttccttctctccctccctctctcgctggctccctcgctcgctctcgtgtgcctgttctgcagctcagtcaagtacagccgccctcggaaagtgcaaagcagccacgagacagatc

SEQ ID NO: 360035 - DNA, 73 bp, Homo sapiens; identical to SEQ ID NO: 345418
  chr12:19282260-19282333
  hyper

SEQ ID NO: 360036 - DNA, 840 bp, Homo sapiens; identical to SEQ ID NO: 202900
  chr12:19282363-19283203
  hyper

SEQ ID NO: 360037 - DNA, 249 bp, Homo sapiens; identical to SEQ ID NO: 202901
  chr12:19283425-19283674
  hyper

SEQ ID NO: 360038 - DNA, 226 bp, Homo sapiens; identical to SEQ ID NO: 351327
  chr12:19283783-19284009
  hyper

SEQ ID NO: 360039 - DNA, 117 bp, Homo sapiens; identical to SEQ ID NO: 347220
  chr12:21681020-21681137
  hyper

SEQ ID NO: 360040 - DNA, 118 bp, Homo sapiens; identical to SEQ ID NO: 347221
  chr12:22488705-22488823
  hyper

SEQ ID NO: 360041 - DNA, 233 bp, Homo sapiens; identical to SEQ ID NO: 334476
  chr12:22778949-22779182
  hyper

SEQ ID NO: 360042 - DNA, 252 bp, Homo sapiens; identical to SEQ ID NO: 202912
  chr12:24715505-24715757
  hyper

SEQ ID NO: 360043 - DNA, 179 bp, Homo sapiens
  chr12:28122886-28123065
  hyper
cgaaccaggccctttcgttccagagccacttgtagcgaaacccacatatatatacatagctgtctgtctacctcctctggtgggctggttgcttccggaaagttgattccacacaccctgagaacaagtttcaagtgcgtgtgtcgtcgatcaggagggccaggtggcggcgagggcgg

SEQ ID NO: 360044 - DNA, 343 bp, Homo sapiens; identical to SEQ ID NO: 288811
  chr12:28123205-28123548
  hyper

SEQ ID NO: 360045 - DNA, 668 bp, Homo sapiens
  chr12:29301988-29302656
  hyper
cgaatggaagcgcggggcgggcctgcgcgcgcggccgccctgcccacgatgctgtcgcccccgcgacctgtagggccttcgctggcccctcaccctcctcccgccccgggctgaggctgccgccggtttcgcgcccagtgccgaggcagcggcggagccggggaaggtcggagggagggtggtttcctcccgccccacacccagtctccgagccggatatatagagtgtcacgtttgggagccgaaagactggagccgtttccttgtggctggagcgcttcccgtagcctcggggaaggagcaggatttagaggaccactagttggaccccatcctcgtgctggaggaacaggtattccagggtccccagccctggcgctcgcagagcccacgcgctccaaaagcagagaccggactgggggtggcccaggagggagggctcggctgggttcgcagggcggggcggttcccggcgggacctcgaggagggtgggtgtgaggccgggtgggaggagagaagcatttgcggaggctctgccccctgaagctgcccccggctgcaccccaatcgtcaccggccgtttacgcgcggttggcgtcggcggagcccgccaaggtggggcgcgcgggggttgcaaagggcagaaagccgggaaggacccagcaag

SEQ ID NO: 360046 - DNA, 85 bp, Homo sapiens; identical to SEQ ID NO: 288816
  chr12:29302688-29302773
  hyper

SEQ ID NO: 360047 - DNA, 143 bp, Homo sapiens
  chr12:29935696-29935839
  hyper
cggctggggccccagggtccctggagaagcctaggctctgcgttacctctctctgcaccttctaaagtctagatccagagaagtctggcagattggagagcctctgggagcagccaagggtgcaaggcgggggctggggggct

SEQ ID NO: 360048 - DNA, 42 bp, Homo sapiens
  chr12:30948583-30948625
  hyper
cgacgcaggggacgcccacttgtctgacgcaggggacgtggc

SEQ ID NO: 360049 - DNA, 307 bp, Homo sapiens; identical to SEQ ID NO: 202926
  chr12:30948670-30948977
  hyper

SEQ ID NO: 360050 - DNA, 490 bp, Homo sapiens
  chr12:30948988-30949478
  hyper
cgatctccccccacctccaacccccttttctcccgggtccacaccgcagttcccaccgctccgggtgtcctccccagtgcgccgcgatttttgtgtccaagccccagagtccctctgagaccaacccccagccagcacagacttcctgccttcccagctcgggtgagtagccctgaaacgcccgcccccgccgccccgcggccgcagcatcctctcgatggccgcgcctccgggacgacgtggtcccctcgagtagtacaggagctgcaagagaggcgcgccggggccagcaagctctagaacagcaggagcggccccagttgggaccccgggacgacgagtggccggcaacgcggcgcccgcatggcccaagcagtgtccgggaggggtcggggccccggactaggggcgcagcgaggaccgcccggaggctttcccttgggcagctaagtccgagtcagctctactcggatttccagcttccagcccc

SEQ ID NO: 360051 - DNA, 191 bp, Homo sapiens; identical to SEQ ID NO: 351332
  chr12:33049135-33049326
  hyper

SEQ ID NO: 360052 - DNA, 234 bp, Homo sapiens; identical to SEQ ID NO: 202933
  chr12:33049390-33049624
  hyper

SEQ ID NO: 360053 - DNA, 316 bp, Homo sapiens; identical to SEQ ID NO: 351334
  chr12:33049652-33049968
  hyper

SEQ ID NO: 360054 - DNA, 40 bp, Homo sapiens; identical to SEQ ID NO: 202942
  chr12:39298516-39298556
  hyper

SEQ ID NO: 360055 - DNA, 221 bp, Homo sapiens; identical to SEQ ID NO: 202943
  chr12:39298687-39298908
  hyper

SEQ ID NO: 360056 - DNA, 76 bp, Homo sapiens; identical to SEQ ID NO: 351335
  chr12:40618264-40618340
  hyper

SEQ ID NO: 360057 - DNA, 35 bp, Homo sapiens; identical to SEQ ID NO: 351336
  chr12:40619048-40619083
  hyper

SEQ ID NO: 360058 - DNA, 53 bp, Homo sapiens
  chr12:41086129-41086182
  hyper
cgctggtcctgggggtgagagtgatatccctgttgtccaatcagagaagcggg

SEQ ID NO: 360059 - DNA, 210 bp, Homo sapiens; identical to SEQ ID NO: 288850
  chr12:41086454-41086664
  hyper

SEQ ID NO: 360060 - DNA, 69 bp, Homo sapiens
  chr12:43944719-43944788
  hyper
cgcataagctgacgacggccttgtaatcctcctgtgagttgacctggccgcggtagaagcagtggcgca

SEQ ID NO: 360061 - DNA, 292 bp, Homo sapiens; identical to SEQ ID NO: 288859
  chr12:45270086-45270378
  hyper

SEQ ID NO: 360062 - DNA, 47 bp, Homo sapiens; identical to SEQ ID NO: 334499
  chr12:46663360-46663407
  hyper

SEQ ID NO: 360063 - DNA, 334 bp, Homo sapiens; identical to SEQ ID NO: 345422
  chr12:46766939-46767273
  hyper

SEQ ID NO: 360064 - DNA, 181 bp, Homo sapiens; identical to SEQ ID NO: 351339
  chr12:48299205-48299386
  hyper

SEQ ID NO: 360065 - DNA, 32 bp, Homo sapiens; identical to SEQ ID NO: 288870
  chr12:48299387-48299419
  hyper

SEQ ID NO: 360066 - DNA, 42 bp, Homo sapiens; identical to SEQ ID NO: 351341
  chr12:48299465-48299507
  hyper

SEQ ID NO: 360067 - DNA, 176 bp, Homo sapiens; identical to SEQ ID NO: 351342
  chr12:48398744-48398920
  hyper

SEQ ID NO: 360068 - DNA, 239 bp, Homo sapiens; identical to SEQ ID NO: 334503
  chr12:48551355-48551594
  hyper

SEQ ID NO: 360069 - DNA, 493 bp, Homo sapiens; identical to SEQ ID NO: 202958
  chr12:48576976-48577469
  hyper

SEQ ID NO: 360070 - DNA, 939 bp, Homo sapiens; identical to SEQ ID NO: 334505
  chr12:48591606-48592545
  hyper

SEQ ID NO: 360071 - DNA, 60 bp, Homo sapiens; identical to SEQ ID NO: 202964
  chr12:49364178-49364238
  hyper

SEQ ID NO: 360072 - DNA, 60 bp, Homo sapiens; identical to SEQ ID NO: 202967
  chr12:49392537-49392597
  hyper

SEQ ID NO: 360073 - DNA, 295 bp, Homo sapiens; identical to SEQ ID NO: 351347
  chr12:49392636-49392931
  hyper

SEQ ID NO: 360074 - DNA, 155 bp, Homo sapiens; identical to SEQ ID NO: 351348
  chr12:49485561-49485716
  hyper

SEQ ID NO: 360075 - DNA, 272 bp, Homo sapiens; identical to SEQ ID NO: 288895
  chr12:49485914-49486186
  hyper

SEQ ID NO: 360076 - DNA, 381 bp, Homo sapiens; identical to SEQ ID NO: 334511
  chr12:49582713-49583094
  hyper

SEQ ID NO: 360077 - DNA, 144 bp, Homo sapiens; identical to SEQ ID NO: 202973
  chr12:49735822-49735966
  hyper

SEQ ID NO: 360078 - DNA, 709 bp, Homo sapiens; identical to SEQ ID NO: 288909
  chr12:49736083-49736792
  hyper

SEQ ID NO: 360079 - DNA, 336 bp, Homo sapiens; identical to SEQ ID NO: 345425
  chr12:49736828-49737164
  hyper

SEQ ID NO: 360080 - DNA, 1805 bp, Homo sapiens
  chr12:49738834-49740639
  hyper
cgagccttagagggatcgatgcggcccgggggccccgcccggggtcgatattcctgattgggaagcggccgcttcgcggagcccgcgtgtaaatcacctgggctgggggagggggcgtggggagcctaccacgtcccaggctcgcgaagccaggaggggtcgggacccgggcggtaccggagggcgacggaatgagaacgacaggccttagagaaccagagagaagcccgcccagggcctccccctcccccgctcagccctgccaactcccccagcaggctccagtctcgcttcagcggccgccacccttcgttgcccctggagccgccggggaggccagtgtcggagccagccatgcggcggctcctctctggccgctcccgcggggccggggcttcggcggctgctgtcacggagccgacaggccgggccggccgggaaggggcgggtggcgggggggagaggcggcggggtgaggctggctcagcgctggcactcagtgggcgcgcaacgtatgtttgccgaattgaaaggctgggacaccgagcggcgcagggcagagggtcggagggcacaggcggggtaggagatggcccagaccgggtgagggcagaagcctcactcacgggggaagaaggcactcgaggtcgctctgaggaccgctgggctgggatagaccacccatcccccgccggggagacccgggtagtaaagaacaagacagaatgggacaggcaggacggtttggaccccacctacaagcgcctccaccaccccagcctccgatccttgtcacgctctgctggggaaaccgaggcagccgatgctgagaatagccaaaaagttaaaagcggggtcagcgacgaagctggggcagcaaccagaattcctgcgtgggttttttggattcctccgcccacgcggggccagtttgcgggtaaatgcaccaccgcgccccgcaccacagctcagaccctttcctctcgctgcagtttgtcagatccccccacctcccactctgcaccagtttatagaacaacaatttggggaaaacaatccgggcggagtgacggccccgtaattgtgacaaagtgagtgcgggcggctggagagagcgctaggccgggagcgctgcagggcgaggcggaggcaggggcgcctccccccgccctgccgccccctcgttcttattccggtcacctcccatccctctccttgactcttcaattcctcttctcccggccccttgcgccttccttcgcttgttcctccatcgctcttccctttcctcccggtaacagctcttctcccgctcccccgaccccgtcgcccctcccccggtgcgctttttcctcgctcacttctcccctctcctctgccctccactcgtttcttcagcttttcctcgcgcttacattgcccttgggcccctggctctccccgcacaatccgcttctctccctccccactcctcccttcctgagatcgaaccctgagccccttcccgacccccactctctgggccgccagcgcagccccgcatttctgggttcctcgggaagtaaacctgggggcgcgctgcggccccgggtgccccggcggccagccccttccctctcccttgtatggctgccgcccccgccccaccacctgagccgggagatagtttgtttgtccagcggcggccgccgccgcccacgctgtttgcaaagcttagcgcgccgtcgcgcagtgcgggcccaattaagtctcattcattattcagcgctcctgtccgcccccgccccccagcagtctgaggcgtc

SEQ ID NO: 360081 - DNA, 300 bp, Homo sapiens; identical to SEQ ID NO: 334520
  chr12:50339307-50339607
  hyper

SEQ ID NO: 360082 - DNA, 660 bp, Homo sapiens; identical to SEQ ID NO: 334522
  chr12:51785160-51785820
  hyper

SEQ ID NO: 360083 - DNA, 213 bp, Homo sapiens; identical to SEQ ID NO: 334523
  chr12:52294173-52294386
  hyper

SEQ ID NO: 360084 - DNA, 54 bp, Homo sapiens; identical to SEQ ID NO: 347231
  chr12:52401605-52401659
  hyper

SEQ ID NO: 360085 - DNA, 71 bp, Homo sapiens; identical to SEQ ID NO: 202986
  chr12:52627438-52627509
  hyper

SEQ ID NO: 360086 - DNA, 125 bp, Homo sapiens; identical to SEQ ID NO: 351358
  chr12:52672849-52672974
  hyper

SEQ ID NO: 360087 - DNA, 311 bp, Homo sapiens; identical to SEQ ID NO: 334529
  chr12:53267978-53268289
  hyper

SEQ ID NO: 360088 - DNA, 156 bp, Homo sapiens; identical to SEQ ID NO: 334530
  chr12:53272458-53272614
  hyper

SEQ ID NO: 360089 - DNA, 194 bp, Homo sapiens
  chr12:53342685-53342879
  hyper
cgtgtccatgcccggttggccaccccgtttctggggggtgagcggggcttggcagggctgcgcggagggcgcgggggtggggcccggggcggagcggcccggggcggagggcgcgggctccgagccgtccacctgtggctccggcttccgaagcggctccggggcgggggcggggcctcactctgcgatataac

SEQ ID NO: 360090 - DNA, 36 bp, Homo sapiens; identical to SEQ ID NO: 202991
  chr12:53342911-53342947
  hyper

SEQ ID NO: 360091 - DNA, 725 bp, Homo sapiens; identical to SEQ ID NO: 351360
  chr12:53613775-53614500
  hyper

SEQ ID NO: 360092 - DNA, 193 bp, Homo sapiens; identical to SEQ ID NO: 351361
  chr12:53719360-53719553
  hyper

SEQ ID NO: 360093 - DNA, 121 bp, Homo sapiens; identical to SEQ ID NO: 288978
  chr12:54088960-54089081
  hyper

SEQ ID NO: 360094 - DNA, 42 bp, Homo sapiens
  chr12:54132526-54132568
  hyper
ggctttctccaggtgggacccatcgcctaggcaggtttcccc

SEQ ID NO: 360095 - DNA, 57 bp, Homo sapiens; identical to SEQ ID NO: 351363
  chr12:54144782-54144839
  hyper

SEQ ID NO: 360096 - DNA, 194 bp, Homo sapiens; identical to SEQ ID NO: 345427
  chr12:54150983-54151177
  hyper

SEQ ID NO: 360097 - DNA, 302 bp, Homo sapiens
  chr12:54332438-54332740
  hyper
cgtgcgcagagcgggtcacgtgggcgcgggaggggtgctgagaggtggagagcgggagccggcggatttcttaatgaagtgtctccgcatgcgtagagggaatgtagggagggaggtggaagcactaggaggaggggaggggtggagagaaaagaggggagggatggggggaggggaaacaggagcgaggtgtctccctagctcgctgcctctggcaagtggagtttttaaaaagctccagcagatcatgtcatgacgacttcgctgctcctgcatccacgctggccggagagccttatgta

SEQ ID NO: 360098 - DNA, 155 bp, Homo sapiens
  chr12:54338511-54338666
  hyper
cgttttgcttttttaaacattgcattaaaatatcgtcttgattactgagtttttggcgccccctcccttaaacttcgagcccagtggcctcatcatagttgtggtcttgctaaaataacagaaatgaaaagcattagggagcttcactatgcagt

SEQ ID NO: 360099 - DNA, 64 bp, Homo sapiens
  chr12:54343505-54343569
  hyper
cgtgactaggtctttctgaccttgacatcacagggagcacagggaaggggggggaggggtggaa

SEQ ID NO: 360100 - DNA, 43 bp, Homo sapiens
  chr12:54348695-54348738
  hyper
cggtcgggccccgcggaaatgggcgagcataatctcctgaatc

SEQ ID NO: 360101 - DNA, 226 bp, Homo sapiens
  chr12:54349391-54349617
  hyper
tgagctagggacgcccagggtgacagaatgtgtggcgaggaagagcttcttataaaatgaagtgcgggtggggggagcctataaacatgtaaacatccccacaaaagaaatggagagtgttcctttttcgtctgcctgcggctggaggcggcagggattccggagttgggggatcctgacggggactccccaggcctgggggtgaggaggtggggacagaaagccc

SEQ ID NO: 360102 - DNA, 192 bp, Homo sapiens
  chr12:54367630-54367822
  hyper
ggaggagaacacaaatcccagctcgtccggttcagcccactccgtggccaaggagccggccaaaggagccgcccccagtaggtagcagcggccggggaacgggcgggcagcgagggagggagcgagagagggagggcgagagaaggggggaggcaaggggagcggggacggcctcgtgttttgggtcagtcc

SEQ ID NO: 360103 - DNA, 215 bp, Homo sapiens; identical to SEQ ID NO: 289008
  chr12:54368432-54368647
  hyper

SEQ ID NO: 360104 - DNA, 257 bp, Homo sapiens; identical to SEQ ID NO: 289009
  chr12:54369002-54369259
  hyper

SEQ ID NO: 360105 - DNA, 354 bp, Homo sapiens
  chr12:54369303-54369657
  hyper
ctgtggccagggctggcccccaccgctgtggccggcactccattccggaacctcctggaccctctatctgactctcgctgtgggacagggaccgggcctggaaagggggtgaagggaagtgtctgatgcacggcgagtgaacaccgttggcgccgaggccaagactttgatttaaaagaaaacacacctcggcgacaatgtcttgctgctcggattaggtgggggaggggcgacagtagtgagcgcctgagccgaacaatcctcgaactaaaagccttcccttgcccatgtgaaaagatccgctaagacagcatgtctgccagcggaaacttctcgagctcccccctctacccc

SEQ ID NO: 360106 - DNA, 333 bp, Homo sapiens; identical to SEQ ID NO: 334550
  chr12:54371976-54372309
  hyper

SEQ ID NO: 360107 - DNA, 326 bp, Homo sapiens; identical to SEQ ID NO: 351366
  chr12:54377527-54377853
  hyper

SEQ ID NO: 360108 - DNA, 393 bp, Homo sapiens; identical to SEQ ID NO: 289013
  chr12:54378327-54378720
  hyper

SEQ ID NO: 360109 - DNA, 377 bp, Homo sapiens; identical to SEQ ID NO: 334552
  chr12:54383388-54383765
  hyper

SEQ ID NO: 360110 - DNA, 250 bp, Homo sapiens; identical to SEQ ID NO: 289016
  chr12:54388354-54388604
  hyper

SEQ ID NO: 360111 - DNA, 320 bp, Homo sapiens; identical to SEQ ID NO: 203012
  chr12:54389321-54389641
  hyper

SEQ ID NO: 360112 - DNA, 55 bp, Homo sapiens
  chr12:54391212-54391267
  hyper
cgagcaagtctcctgggaggggcaggagaggagccctcttccgcctttgtgtcca

SEQ ID NO: 360113 - DNA, 103 bp, Homo sapiens; identical to SEQ ID NO: 351368
  chr12:54393256-54393359
  hyper

SEQ ID NO: 360114 - DNA, 432 bp, Homo sapiens; identical to SEQ ID NO: 334559
  chr12:54400009-54400441
  hyper

SEQ ID NO: 360115 - DNA, 60 bp, Homo sapiens; identical to SEQ ID NO: 289023
  chr12:54402812-54402872
  hyper

SEQ ID NO: 360116 - DNA, 205 bp, Homo sapiens; identical to SEQ ID NO: 203018
  chr12:54422141-54422346
  hyper

SEQ ID NO: 360117 - DNA, 55 bp, Homo sapiens; identical to SEQ ID NO: 203019
  chr12:54422376-54422431
  hyper

SEQ ID NO: 360118 - DNA, 404 bp, Homo sapiens; identical to SEQ ID NO: 351372
  chr12:54422525-54422929
  hyper

SEQ ID NO: 360119 - DNA, 571 bp, Homo sapiens
  chr12:54426536-54427107
  hyper
cgctgtgggcttgttgtcccggctacccccaattccaagaacctttttttttttttccctcccccttccctctttctctctctcactccctctcccccttggttgggctttgccaacatatcgagatgcttttcgccggcttccatcactaacctcccggaggtcatcaagccaaatttatgagtggccgctcgagtcacgtgactctatttaaggctcccttatttgggaagagcgcataggataaagaaagagatatctccacctataaattgtccactttggagaacaaaaaacccctcaacttcaaagagtcacaaatcacccttaatcaaaaagggtgcagaaatttttttgggccctccccgccatgagctcctacgtagccaattcattctataagcagagccccaatatccctgcctataacatgcaaacttgtgggaactatggatcggcctcagaggtgcaggcatccaggtactgctacggcggattggacttaagcatcactttcccaccgcctgcgccttccaactctctccacggggtagacatggctgccaacccc

SEQ ID NO: 360120 - DNA, 329 bp, Homo sapiens; identical to SEQ ID NO: 203022
  chr12:54427307-54427636
  hyper

SEQ ID NO: 360121 - DNA, 91 bp, Homo sapiens; identical to SEQ ID NO: 203023
  chr12:54427974-54428065
  hyper

SEQ ID NO: 360122 - DNA, 56 bp, Homo sapiens; identical to SEQ ID NO: 203024
  chr12:54428083-54428139
  hyper

SEQ ID NO: 360123 - DNA, 43 bp, Homo sapiens; identical to SEQ ID NO: 289037
  chr12:54428224-54428267
  hyper

SEQ ID NO: 360124 - DNA, 205 bp, Homo sapiens
  chr12:54446894-54447099
  hyper
cgagacttctgaactctgcttttgccaaccacttcctgtctctcttcagcgggggctcaacccccagacctccagaaatgacgtcagaatcatttgcatcccgctgcctctacctgcctggtccagctgggaccctgcctcgccggccgcatggccagagggttgggtgagtgtgtatggggaagaggggctggactctggtatc

SEQ ID NO: 360125 - DNA, 219 bp, Homo sapiens; identical to SEQ ID NO: 203026
  chr12:54447599-54447818
  hyper

SEQ ID NO: 360126 - DNA, 261 bp, Homo sapiens
  chr12:54448041-54448302
  hyper
agccccgccagcctgcagccagccagcccccgaccatccctccagcgccgccagcaagcaacccatagtctacccatggatgaaaaaaattcacgttagcacgggtaggcaactttgctttttgctccccccctccctcccttcttccctagcgctccccaccctcctcggccccctctggcccccgtcctcctttctctccttccccctctctctccaggagcgactctgggttagcacaattgaactggatttacgagc

SEQ ID NO: 360127 - DNA, 129 bp, Homo sapiens; identical to SEQ ID NO: 351377
  chr12:54519801-54519930
  hyper

SEQ ID NO: 360128 - DNA, 103 bp, Homo sapiens; identical to SEQ ID NO: 289048
  chr12:54811879-54811982
  hyper

SEQ ID NO: 360129 - DNA, 189 bp, Homo sapiens; identical to SEQ ID NO: 351378
  chr12:57619157-57619346
  hyper

SEQ ID NO: 360130 - DNA, 207 bp, Homo sapiens; identical to SEQ ID NO: 351379
  chr12:57635256-57635463
  hyper

SEQ ID NO: 360131 - DNA, 160 bp, Homo sapiens; identical to SEQ ID NO: 334574
  chr12:57853395-57853555
  hyper

SEQ ID NO: 360132 - DNA, 212 bp, Homo sapiens; identical to SEQ ID NO: 289104
  chr12:58015267-58015479
  hyper

SEQ ID NO: 360133 - DNA, 189 bp, Homo sapiens; identical to SEQ ID NO: 351381
  chr12:58015548-58015737
  hyper

SEQ ID NO: 360134 - DNA, 300 bp, Homo sapiens; identical to SEQ ID NO: 347238
  chr12:58026315-58026615
  hyper

SEQ ID NO: 360135 - DNA, 216 bp, Homo sapiens; identical to SEQ ID NO: 289119
  chr12:59313943-59314159
  hyper

SEQ ID NO: 360136 - DNA, 341 bp, Homo sapiens
  chr12:59314189-59314530
  hyper
cccccaaacagcaggagggaaaccgaaaagaactgccaactgcaacagagttgcagcttgagcagcgtcggctcgccgaagccccttcttgtctgcaaaagaaactttttcgcctccaccccgcggcactgcgccaagtccccgcgcggcggagtagcaaggcgggcgggtagaggccgacgcgcgcccattggccgactcggctgcgggcgtccccgtggccacgtgacaataacaccgctccagccgggggcctacgcgcgggagaaagtggagctgagattgtaggaaattcagagttatattttccagcctctccagccagaagtctccactacgtc

SEQ ID NO: 360137 - DNA, 184 bp, Homo sapiens; identical to SEQ ID NO: 345428
  chr12:63026256-63026440
  hyper

SEQ ID NO: 360138 - DNA, 73 bp, Homo sapiens; identical to SEQ ID NO: 351384
  chr12:63327114-63327187
  hyper

SEQ ID NO: 360139 - DNA, 1078 bp, Homo sapiens; identical to SEQ ID NO: 351385
  chr12:63327326-63328404
  hyper

SEQ ID NO: 360140 - DNA, 112 bp, Homo sapiens
  chr12:63545006-63545118
  hyper
tattttttcctctccctacgtcggtgtttgtcctctgcatcactgtggagggggtggagctgggagactcgcagattcctcctcacagtaggtgggatcgtggcgctttccc

SEQ ID NO: 360141 - DNA, 203 bp, Homo sapiens; identical to SEQ ID NO: 203080
  chr12:66122570-66122773
  hyper

SEQ ID NO: 360142 - DNA, 41 bp, Homo sapiens; identical to SEQ ID NO: 351387
  chr12:66136243-66136284
  hyper

SEQ ID NO: 360143 - DNA, 122 bp, Homo sapiens
  chr12:66217380-66217502
  hyper
cggttgcctctagtctttcctggagaaaaaagttcaatgaagaagctggggcgctctgtgtgtgcacattgtttgcatgtgtctgcgaatgtgcatgtctatctgcgtgcctgtgtgtatgt

SEQ ID NO: 360144 - DNA, 237 bp, Homo sapiens; identical to SEQ ID NO: 203084
  chr12:66217650-66217887
  hyper

SEQ ID NO: 360145 - DNA, 208 bp, Homo sapiens
  chr12:66217920-66218128
  hyper
tccccggcctgtccctttaaccccgccgccgggcgggagcacgtgagcggggctccgggtggcacccgggcgccgccgccgccgaggcagttgtatttcgaacgctgcctctggctagcagccaggcgccttggctcggcggtccgcctggcctccctcctcctcatacttttcttcctgcgcaaccccctcccctttatccgcccac

SEQ ID NO: 360146 - DNA, 257 bp, Homo sapiens
  chr12:66219431-66219688
  hyper
cgctattgtgcacggccccgagtggcgcggtgtcgcccagtgactggaagcgaccgggatccgacaaacccgggctcgcaggcgctttccgagttgcttttgcaactgcccgggaggaaggaggtgccggggacccgggcgcttcggccgatctgggctgaaggggctagagtcttgggggccggaggctctttctcccgcctcccggggctgctcgcgggtcgggggctggcgcgccgcagccgcccccttggcgc

SEQ ID NO: 360147 - DNA, 119 bp, Homo sapiens
  chr12:66220194-66220313
  hyper
gagaacatttaaactccactttctcgggctttaaaacttgctctctgcttagtcttaaatcgcttccttcatggcaaacacgccgattagaaaataatcctagagtcccaaagttgtcc

SEQ ID NO: 360148 - DNA, 499 bp, Homo sapiens; identical to SEQ ID NO: 334595
  chr12:68041644-68042143
  hyper

SEQ ID NO: 360149 - DNA, 277 bp, Homo sapiens
  chr12:68758776-68759053
  hyper
cgcctcagtattgtcgatttccacatccacagcctaacaacgtggtgcaatcgccctttgcgacgccgcagaccaacagacggatgctgccctgctgcagtttcacagcacaccgggtctttccgcttcagctggacagaggcccagccaggccgtagggaggattccgaaggtctctctgcagaggaccggcctctcagaccgagaaggctccacccaggcaggaaaggacactgtatgtggggcagtcggcctgggccccatggctcgtgtttgt

SEQ ID NO: 360150 - DNA, 108 bp, Homo sapiens
  chr12:68759131-68759239
  hyper
tgaggagggctgcttctgcctcttggtgaccacgccctttcccaggctgggcccacaggaagtctggccgggaagggaggaggcactgcaagctgtgggaaccacacc

SEQ ID NO: 360151 - DNA, 126 bp, Homo sapiens; identical to SEQ ID NO: 345429
  chr12:69326527-69326653
  hyper

SEQ ID NO: 360152 - DNA, 90 bp, Homo sapiens; identical to SEQ ID NO: 334598
  chr12:70759026-70759116
  hyper

SEQ ID NO: 360153 - DNA, 478 bp, Homo sapiens; identical to SEQ ID NO: 351390
  chr12:70760478-70760956
  hyper

SEQ ID NO: 360154 - DNA, 82 bp, Homo sapiens; identical to SEQ ID NO: 351391
  chr12:70761129-70761211
  hyper

SEQ ID NO: 360155 - DNA, 207 bp, Homo sapiens; identical to SEQ ID NO: 289178
  chr12:71833930-71834137
  hyper

SEQ ID NO: 360156 - DNA, 500 bp, Homo sapiens; identical to SEQ ID NO: 289179
  chr12:71834289-71834789
  hyper

SEQ ID NO: 360157 - DNA, 119 bp, Homo sapiens
  chr12:77719613-77719732
  hyper
cttccatttcctctttttttctcccctcatttcctttttttcctttcccttttaaagaaaggggaatcgtttgtaaccctttcgttctaccaacgtggaatagctgtgaaacctgcagc

SEQ ID NO: 360158 - DNA, 204 bp, Homo sapiens; identical to SEQ ID NO: 289198
  chr12:79257510-79257714
  hyper

SEQ ID NO: 360159 - DNA, 200 bp, Homo sapiens; identical to SEQ ID NO: 289199
  chr12:79258097-79258297
  hyper

SEQ ID NO: 360160 - DNA, 150 bp, Homo sapiens
  chr12:79259099-79259249
  hyper
ggagttgatgttgggcatcccccatcttcttgcttcctctttccttctcttgttctctctcctccgtcccccacccccaatctcaatcttttctctctttctctcccacacctcccctctcgccctcctcccaccctaagcacgcacagc

SEQ ID NO: 360161 - DNA, 86 bp, Homo sapiens
  chr12:81102562-81102648
  hyper
ggagctgcttcgtgttccttctttgggtgctatgtttgtgtgttgttttttcgctcaggaggagcaagtattgattcgtcagcctc

SEQ ID NO: 360162 - DNA, 385 bp, Homo sapiens; identical to SEQ ID NO: 203112
  chr12:81330352-81330737
  hyper

SEQ ID NO: 360163 - DNA, 312 bp, Homo sapiens; identical to SEQ ID NO: 203113
  chr12:81331319-81331631
  hyper

SEQ ID NO: 360164 - DNA, 56 bp, Homo sapiens
  chr12:85305601-85305657
  hyper
cgccacactctcaaattccaggatgcgcagaaacacaggagccgtgatttctccag

SEQ ID NO: 360165 - DNA, 254 bp, Homo sapiens; identical to SEQ ID NO: 203122
  chr12:85305980-85306234
  hyper

SEQ ID NO: 360166 - DNA, 45 bp, Homo sapiens
  chr12:85430024-85430069
  hyper
cgttcgtttcaatttagaatcgagattgtttgtccttctagagca

SEQ ID NO: 360167 - DNA, 237 bp, Homo sapiens
  chr12:85430099-85430336
  hyper
gtgattggctgttgccatggatacgctttgtgtagcggctatgggcgctgtcttacaacaaagccaaggaatctcgctgctgaggggtgagccggggtcttaagactgggattcccgttgagggaggtgaacagctgtgggagctcaggccgagccgggactctctctgcctggccagacttccagcaaagggagagaccgcgggtcaggggatggctgtgcgactctgcgaagctc

SEQ ID NO: 360168 - DNA, 88 bp, Homo sapiens
  chr12:85674884-85674972
  hyper
acgcgttgaatgtttgttaaacactaaagcacactaaatagcttcgggcaaaccatccccggcctaatcactcattcccagattctac

SEQ ID NO: 360169 - DNA, 437 bp, Homo sapiens
  chr12:89747140-89747577
  hyper
cgccccaccaccaccatcgcctgctgggaggtcgcgctggttaatgatttctgggcaaggagctcggcttctgacgggggagccggtctggcggggctgcctgagcgaggtgtgctgggacgcgccgggccgggccagcagtccccgccatgggcgaggcgtgaggaagtcctcccgcaagacctgcaggctgcgggggctcggcaggggggctcgacgattggttacagttggcagggaggcatgtcagagggggcctccccagccctctcctgccgccgcctcctccctttgtccagcgccgggcactccggggagcaccagccgcgcctgcgcgctgcgctccctgccaccgccccgccgtccccgtctccccgcttgggcacggggctgtgcgcgacgcagtggacgggtgcggggctcagcgagggactccc

SEQ ID NO: 360170 - DNA, 393 bp, Homo sapiens; identical to SEQ ID NO: 334614
  chr12:90101352-90101745
  hyper

SEQ ID NO: 360171 - DNA, 264 bp, Homo sapiens; identical to SEQ ID NO: 347242
  chr12:93966037-93966301
  hyper

SEQ ID NO: 360172 - DNA, 66 bp, Homo sapiens; identical to SEQ ID NO: 351396
  chr12:93967274-93967340
  hyper

SEQ ID NO: 360173 - DNA, 104 bp, Homo sapiens; identical to SEQ ID NO: 351397
  chr12:94541793-94541897
  hyper

SEQ ID NO: 360174 - DNA, 1131 bp, Homo sapiens; identical to SEQ ID NO: 289236
  chr12:94541957-94543088
  hyper

SEQ ID NO: 360175 - DNA, 86 bp, Homo sapiens; identical to SEQ ID NO: 345430
  chr12:94544052-94544138
  hyper

SEQ ID NO: 360176 - DNA, 107 bp, Homo sapiens
  chr12:96183929-96184036
  hyper
cgctctgcgctcgcagccctggctcccctgcacccccgagtcccgagatgggttagagaagcagcgagggaaggggtgggggccccgccgcgtcaccacccacctgc

SEQ ID NO: 360177 - DNA, 73 bp, Homo sapiens
  chr12:96184964-96185037
  hyper
cgcgaaacaggctagcgcctacttcccacatcccccagcgaaacaagccctccctcctcctccagccaccccc

SEQ ID NO: 360178 - DNA, 222 bp, Homo sapiens
  chr12:96185121-96185343
  hyper
ggcgttcgccgcttctctgctgccttttgcgggggtagggggatgtctcggctaaacaatcgctgcctacatgatccgaaggtgtgcccactttggtgtaagaggtattgcctaactcaaactcaaggtgctgaaagaaaagggtcacaggattagctagtcggcagtgtaagaacatcgttgtccagaggcagggcaagggcacgacaaagggaactcttc

SEQ ID NO: 360179 - DNA, 646 bp, Homo sapiens; identical to SEQ ID NO: 203143
  chr12:99287504-99288150
  hyper

SEQ ID NO: 360180 - DNA, 150 bp, Homo sapiens
  chr12:99289349-99289499
  hyper
ggcagtcctcaacttgtgtgcgccggtggccctctcctgtgggacttgcgttccagctgttctcagagcgggtatgatcggcctccagtagacttggagggtcacgggtgagattttgataaggttcaaatactcctcactcctgcctcc

SEQ ID NO: 360181 - DNA, 229 bp, Homo sapiens; identical to SEQ ID NO: 334625
  chr12:101674003-101674232
  hyper

SEQ ID NO: 360182 - DNA, 120 bp, Homo sapiens
  chr12:103311040-103311160
  hyper
cgtggtgcatctccgcacagtaacgcccctcgtgggcgttgtcctgacgcaggaggccagggcagcctgccggatgctccaggtcacctgcccaggacgggccggaggggaggggctgag

SEQ ID NO: 360183 - DNA, 204 bp, Homo sapiens; identical to SEQ ID NO: 203148
  chr12:103311290-103311494
  hyper

SEQ ID NO: 360184 - DNA, 101 bp, Homo sapiens
  chr12:103311495-103311596
  hyper
tgaacgctgagcacagcaggtaaagagcaaatgtaagagcgatctgggtttaaatccagcctggtgttctccagctattcgcacaactgctcctgaagctc

SEQ ID NO: 360185 - DNA, 267 bp, Homo sapiens; identical to SEQ ID NO: 347245
  chr12:103351149-103351416
  hyper

SEQ ID NO: 360186 - DNA, 456 bp, Homo sapiens; identical to SEQ ID NO: 334632
  chr12:104235228-104235684
  hyper

SEQ ID NO: 360187 - DNA, 686 bp, Homo sapiens; identical to SEQ ID NO: 334637
  chr12:104682348-104683034
  hyper

SEQ ID NO: 360188 - DNA, 105 bp, Homo sapiens; identical to SEQ ID NO: 347246
  chr12:104850139-104850244
  hyper

SEQ ID NO: 360189 - DNA, 348 bp, Homo sapiens; identical to SEQ ID NO: 203159
  chr12:104851545-104851893
  hyper

SEQ ID NO: 360190 - DNA, 79 bp, Homo sapiens; identical to SEQ ID NO: 351405
  chr12:106975167-106975246
  hyper

SEQ ID NO: 360191 - DNA, 222 bp, Homo sapiens
  chr12:106976181-106976403
  hyper
cgcttcactccccacgcgtgtctgcggatccgcgtgcaaggggtcaagacataccccctcccgcattctcagggccaccacccgaaatctaacccaggaccaaaatggggggtgggtgggggcgcaagagaaggaagggagtggggccccactcgtggtagcgcaggcgactccccaggctccaggagttccccgcggctccccccccgcccgcgcccccct

SEQ ID NO: 360192 - DNA, 71 bp, Homo sapiens; identical to SEQ ID NO: 351406
  chr12:107486379-107486450
  hyper

SEQ ID NO: 360193 - DNA, 522 bp, Homo sapiens; identical to SEQ ID NO: 203167
  chr12:107486672-107487194
  hyper

SEQ ID NO: 360194 - DNA, 229 bp, Homo sapiens; identical to SEQ ID NO: 351408
  chr12:107711721-107711950
  hyper

SEQ ID NO: 360195 - DNA, 220 bp, Homo sapiens; identical to SEQ ID NO: 351409
  chr12:107712337-107712557
  hyper

SEQ ID NO: 360196 - DNA, 178 bp, Homo sapiens
  chr12:109162554-109162732
  hyper
cggtacacgacggggcgtcgcgcctccagggctaggccgggcggatggagggggtccccggagcccgggggaagtggcgcagtgggcgtctgcatcggcccgaaggcacttgcgcagaggtccggcaggcagcagagcaccttgtgggcgtggtcgctggaggcagcgcctggcaccc

SEQ ID NO: 360197 - DNA, 57 bp, Homo sapiens
  chr12:109162762-109162819
  hyper
ccctggggctgcggaggccacctccacgcccatttgccatccctgagccgcttctgc

SEQ ID NO: 360198 - DNA, 96 bp, Homo sapiens; identical to SEQ ID NO: 351410
  chr12:111284508-111284604
  hyper

SEQ ID NO: 360199 - DNA, 320 bp, Homo sapiens; identical to SEQ ID NO: 351411
  chr12:111844290-111844610
  hyper

SEQ ID NO: 360200 - DNA, 99 bp, Homo sapiens; identical to SEQ ID NO: 351412
  chr12:111844690-111844789
  hyper

SEQ ID NO: 360201 - DNA, 507 bp, Homo sapiens; identical to SEQ ID NO: 289355
  chr12:112204412-112204919
  hyper

SEQ ID NO: 360202 - DNA, 186 bp, Homo sapiens; identical to SEQ ID NO: 345433
  chr12:112204992-112205178
  hyper

SEQ ID NO: 360203 - DNA, 83 bp, Homo sapiens; identical to SEQ ID NO: 345434
  chr12:113495127-113495210
  hyper

SEQ ID NO: 360204 - DNA, 615 bp, Homo sapiens; identical to SEQ ID NO: 334652
  chr12:113796265-113796880
  hyper

SEQ ID NO: 360205 - DNA, 58 bp, Homo sapiens
  chr12:113905322-113905380
  hyper
cgcctcttccgcaccaggactcccccgaggcggggccgggccggattaggccgggagg

SEQ ID NO: 360206 - DNA, 43 bp, Homo sapiens
  chr12:113906434-113906477
  hyper
tccgcgcgtctcagctagtacctgggtaagggtagggggacgc

SEQ ID NO: 360207 - DNA, 213 bp, Homo sapiens
  chr12:115106003-115106216
  hyper
cgggaggcgctggggtgccgagccagctgcggcgacctggacgcattcgtagacgagacagataggtggcactcgaagcccagaaaaaaggcgaaggcgcctgccctgagtggcctctggggcggccgcagccaccataaagcctgcggcgagattgcgaccggcgccaggtgagtaataggcagcaaaatccagagagactgcgagccgttc

SEQ ID NO: 360208 - DNA, 218 bp, Homo sapiens; identical to SEQ ID NO: 289402
  chr12:115106246-115106464
  hyper

SEQ ID NO: 360209 - DNA, 340 bp, Homo sapiens
  chr12:115106502-115106842
  hyper
accaccttctcagaggcgcggacaccgcgcgttgtcgctggatccagagctgcccccttcaggctgtagccgctgcgcagaaggagcgcgccctggaaatctcccagtcctcgggggagccccagcctcaaaggtccccagggcccgtctcagctcaggccctgccacccccgcagcgcaccccgcccctccccccccccgcgactccgcaccaacatactctggttgtctgtcttccctcccacccccggagacatcgcagaggaggctgtaggggtccccacgtgcctggccagagatggaaggggctttgccccgctctccaaaaggtctcgacctc

SEQ ID NO: 360210 - DNA, 804 bp, Homo sapiens; identical to SEQ ID NO: 351417
  chr12:115120701-115121505
  hyper

SEQ ID NO: 360211 - DNA, 341 bp, Homo sapiens; identical to SEQ ID NO: 203214
  chr12:115121544-115121885
  hyper

SEQ ID NO: 360212 - DNA, 221 bp, Homo sapiens; identical to SEQ ID NO: 203215
  chr12:115122015-115122236
  hyper

SEQ ID NO: 360213 - DNA, 420 bp, Homo sapiens
  chr12:115122524-115122944
  hyper
ctctccttcttctccccgccccgggcgagccgggcgggtggccgagcctccccgcgagctgccatccggccactcggttctacaaaagccggcggcagccgagaagcgagcgccgagactccaggcttgcgtgctctccagccccacgtggagccaagctccgcccggccgccgctgaagggctcccgagctcgggtgtctcggtgctggtctcccctgcgtctgggctgggggagcacaaggatgcggccatatctcagcacacgcatgtgtgggcttcctctccactgcgccccacccgcagccatgtgcgggtacccaaacacccccggtgtatctgtactcgaacacgcgccaacacactgggactgaaacacacaccgaaaaacacgtacacacaaacacgtacacagcctgcgc

SEQ ID NO: 360214 - DNA, 58 bp, Homo sapiens; identical to SEQ ID NO: 345435
  chr12:116946548-116946606
  hyper

SEQ ID NO: 360215 - DNA, 161 bp, Homo sapiens
  chr12:117316504-117316665
  hyper
tcagggcgccagaggctgcagaaccctggagggtgtggctgcaggggacgcccgggcgggacaaggcaggtaggagaagaacccagaggtgtgggaagagggtgtctccgagtcagggcgcagcacggaagtaactctggggtagaaggcgagggcggggc

SEQ ID NO: 360216 - DNA, 71 bp, Homo sapiens; identical to SEQ ID NO: 334669
  chr12:117316909-117316980
  hyper

SEQ ID NO: 360217 - DNA, 31 bp, Homo sapiens; identical to SEQ ID NO: 289422
  chr12:117317225-117317256
  hyper

SEQ ID NO: 360218 - DNA, 482 bp, Homo sapiens; identical to SEQ ID NO: 351423
  chr12:117317288-117317770
  hyper

SEQ ID NO: 360219 - DNA, 1016 bp, Homo sapiens; identical to SEQ ID NO: 347252
  chr12:117536372-117537388
  hyper

SEQ ID NO: 360220 - DNA, 344 bp, Homo sapiens; identical to SEQ ID NO: 351425
  chr12:120031912-120032256
  hyper

SEQ ID NO: 360221 - DNA, 723 bp, Homo sapiens; identical to SEQ ID NO: 334679
  chr12:120524652-120525375
  hyper

SEQ ID NO: 360222 - DNA, 751 bp, Homo sapiens; identical to SEQ ID NO: 334681
  chr12:122231543-122232294
  hyper

SEQ ID NO: 360223 - DNA, 62 bp, Homo sapiens; identical to SEQ ID NO: 351426
  chr12:122237462-122237524
  hyper

SEQ ID NO: 360224 - DNA, 582 bp, Homo sapiens; identical to SEQ ID NO: 334683
  chr12:122460955-122461537
  hyper

SEQ ID NO: 360225 - DNA, 88 bp, Homo sapiens
  chr12:122667648-122667736
  hyper
cgcgcacgcgtcctagcggttgccgggcaacgcggcccgggccatggaggcgtcgtacgagtccgagtccgagtccgagtctgaggcc

SEQ ID NO: 360226 - DNA, 64 bp, Homo sapiens; identical to SEQ ID NO: 351427
  chr12:122688584-122688648
  hyper

SEQ ID NO: 360227 - DNA, 551 bp, Homo sapiens; identical to SEQ ID NO: 334686
  chr12:123258823-123259374
  hyper

SEQ ID NO: 360228 - DNA, 90 bp, Homo sapiens; identical to SEQ ID NO: 334687
  chr12:123321244-123321334
  hyper

SEQ ID NO: 360229 - DNA, 473 bp, Homo sapiens; identical to SEQ ID NO: 334688
  chr12:123380333-123380806
  hyper

SEQ ID NO: 360230 - DNA, 345 bp, Homo sapiens; identical to SEQ ID NO: 351430
  chr12:123874193-123874538
  hyper

SEQ ID NO: 360231 - DNA, 258 bp, Homo sapiens
  chr12:124456333-124456591
  hyper
cgtttgtgcattctgctccgtttcacgaatcacaggcaaatcgttactcagagtaaactaaagccgcatcaaagcttcaggaaggggctggcaaggtagtgtacttacggaaaggctaccaggacgggaggcgatacaacttgtcagggagggtctctaaggttccccgggtggtaacaagcatttaaaaaggcgatgtggattcagacggcctcctccccacagcatcccagacaaagccgggctaggccccggggc

SEQ ID NO: 360232 - DNA, 609 bp, Homo sapiens; identical to SEQ ID NO: 289491
  chr12:124779593-124780202
  hyper

SEQ ID NO: 360233 - DNA, 173 bp, Homo sapiens; identical to SEQ ID NO: 334693
  chr12:125093646-125093819
  hyper

SEQ ID NO: 360234 - DNA, 133 bp, Homo sapiens; identical to SEQ ID NO: 334694
  chr12:125477548-125477681
  hyper

SEQ ID NO: 360235 - DNA, 435 bp, Homo sapiens; identical to SEQ ID NO: 334695
  chr12:125815555-125815990
  hyper

SEQ ID NO: 360236 - DNA, 146 bp, Homo sapiens
  chr12:126018005-126018151
  hyper
cgagggaatgttcctaaacgcttgttttccctttgcatagctgattgcagagcccagcaagtctttctctaaatggctttactttgacaaggggtcgcgatggcattttgattggcatccgcctctcctccggggaaggacctcgt

SEQ ID NO: 360237 - DNA, 33 bp, Homo sapiens
  chr12:126018265-126018298
  hyper
cgtcctcaggccctgcgatttccagggattccc

SEQ ID NO: 360238 - DNA, 81 bp, Homo sapiens
  chr12:127865862-127865943
  hyper
tgccaatcaaaacgccatctctactccttgtcaaagtcaagtcatttagcgaaaggcctaatgagctctgcaatcagctac

SEQ ID NO: 360239 - DNA, 405 bp, Homo sapiens
  chr12:128750713-128751118
  hyper
cgcgtggcagaaagagcagagcatgagcatcaggaaccgcacagggaagccgctgagatcacctgggatcaccaccatgagggaggccagccctggagaaatcagagggaaaagatagagagaacgaagtcgggggggggggggggagggcggatcttccttgtctgagtctgcagagaaattgcctattgcaggagcaagtctagagaggggctattctccacccactgaaaagataataaaacacatgctatgggcggcggggagatgattggggagtggaagccccacagacatgcagtgaaaaatgatcctttcttcccctctgcgttctcgtccccttcccagagacaccgctgtgatctcgtgcctcgccccctccgcacacgcacaggtgcacacccg

SEQ ID NO: 360240 - DNA, 131 bp, Homo sapiens; identical to SEQ ID NO: 351434
  chr12:128850403-128850534
  hyper

SEQ ID NO: 360241 - DNA, 263 bp, Homo sapiens; identical to SEQ ID NO: 351435
  chr12:130645806-130646069
  hyper

SEQ ID NO: 360242 - DNA, 54 bp, Homo sapiens; identical to SEQ ID NO: 351436
  chr12:131400919-131400973
  hyper

SEQ ID NO: 360243 - DNA, 107 bp, Homo sapiens; identical to SEQ ID NO: 351437
  chr12:132312451-132312558
  hyper

SEQ ID NO: 360244 - DNA, 246 bp, Homo sapiens; identical to SEQ ID NO: 351438
  chr12:132313659-132313905
  hyper

SEQ ID NO: 360245 - DNA, 479 bp, Homo sapiens; identical to SEQ ID NO: 334707
  chr12:133286733-133287212
  hyper

SEQ ID NO: 360246 - DNA, 133 bp, Homo sapiens; identical to SEQ ID NO: 203264
  chr12:133463975-133464108
  hyper

SEQ ID NO: 360247 - DNA, 237 bp, Homo sapiens; identical to SEQ ID NO: 203265
  chr12:133464166-133464403
  hyper

SEQ ID NO: 360248 - DNA, 218 bp, Homo sapiens; identical to SEQ ID NO: 203266
  chr12:133464555-133464773
  hyper

SEQ ID NO: 360249 - DNA, 261 bp, Homo sapiens; identical to SEQ ID NO: 351443
  chr13:20702234-20702495
  hyper

SEQ ID NO: 360250 - DNA, 253 bp, Homo sapiens; identical to SEQ ID NO: 289542
  chr13:20702531-20702784
  hyper

SEQ ID NO: 360251 - DNA, 208 bp, Homo sapiens; identical to SEQ ID NO: 351445
  chr13:20702913-20703121
  hyper

SEQ ID NO: 360252 - DNA, 167 bp, Homo sapiens; identical to SEQ ID NO: 345438
  chr13:20735265-20735432
  hyper

SEQ ID NO: 360253 - DNA, 674 bp, Homo sapiens; identical to SEQ ID NO: 351447
  chr13:20767087-20767761
  hyper

SEQ ID NO: 360254 - DNA, 81 bp, Homo sapiens; identical to SEQ ID NO: 351448
  chr13:20767827-20767908
  hyper

SEQ ID NO: 360255 - DNA, 143 bp, Homo sapiens
  chr13:22178308-22178451
  hyper
cggcgcttctctcccggcgccgccgcctaccgcttgggaactctcgcgacatccgacaggcttccgccccgcctaccgggcctgcgccgtgggtgcggttgctgaggcgacgctcgcagccgcaagaggtggccttcggttcc

SEQ ID NO: 360256 - DNA, 142 bp, Homo sapiens; identical to SEQ ID NO: 351449
  chr13:22243864-22244006
  hyper

SEQ ID NO: 360257 - DNA, 71 bp, Homo sapiens
  chr13:25592172-25592243
  hyper
cgcctcccgcctctcagcagaaacgcccaacagaaccgttagaaccagcgagcacgcgcaccttagccggc

SEQ ID NO: 360258 - DNA, 81 bp, Homo sapiens; identical to SEQ ID NO: 203288
  chr13:25746000-25746081
  hyper

SEQ ID NO: 360259 - DNA, 281 bp, Homo sapiens; identical to SEQ ID NO: 203291
  chr13:26624917-26625198
  hyper

SEQ ID NO: 360260 - DNA, 70 bp, Homo sapiens; identical to SEQ ID NO: 345439
  chr13:27131483-27131553
  hyper

SEQ ID NO: 360261 - DNA, 127 bp, Homo sapiens; identical to SEQ ID NO: 351453
  chr13:28491488-28491615
  hyper

SEQ ID NO: 360262 - DNA, 177 bp, Homo sapiens; identical to SEQ ID NO: 203300
  chr13:28491616-28491793
  hyper

SEQ ID NO: 360263 - DNA, 37 bp, Homo sapiens; identical to SEQ ID NO: 351455
  chr13:28527202-28527239
  hyper

SEQ ID NO: 360264 - DNA, 461 bp, Homo sapiens; identical to SEQ ID NO: 203304
  chr13:28527384-28527845
  hyper

SEQ ID NO: 360265 - DNA, 468 bp, Homo sapiens
  chr13:28534792-28535260
  hyper
cgttagaagcgcggtggcctcacttgccggagagggtcttggttttgcgcctttttccgtggcccgggaggcttgccaggcgctcgcagcagcgagccgggtgcttgcatctcagagagcagccgagctcccttccctggccccgtacccgcgtgcaaggggaccgagccccgggaaggggaagaacttgtaatcgcttgcagcgggacaatgtcgacttttgaacctctaaccactaagcaaacaacccatgtgctcttgctccactgtccaaacagggtttattgacaggcgtttcacggcaacgcatagcaaccccggcggctagggggcgggcctgtgggcgcggccggggcgcggggagacctgcggggcaccggggctcagaccggccctgacccaggacccctgacccaggacccctcgcccagcggacccggacacggcttcctcctctgcccggcaccc

SEQ ID NO: 360266 - DNA, 37 bp, Homo sapiens
  chr13:28535573-28535610
  hyper
aaaattttaaaggctgcagcccggtccccagtggatc

SEQ ID NO: 360267 - DNA, 57 bp, Homo sapiens
  chr13:28540416-28540473
  hyper
cgcatttgaatggggctgcggccccgaccccgcgcctgctatgaaagtaaagggaac

SEQ ID NO: 360268 - DNA, 112 bp, Homo sapiens
  chr13:28541283-28541395
  hyper
agacaggggctgtagaaagtgggtctttgggagccaggatctgggagcccctgctaggagaaaggcgcctcctctaggagaagggaccaagccaaagctctgaggctcaccc

SEQ ID NO: 360269 - DNA, 227 bp, Homo sapiens; identical to SEQ ID NO: 203308
  chr13:28542128-28542355
  hyper

SEQ ID NO: 360270 - DNA, 258 bp, Homo sapiens; identical to SEQ ID NO: 203309
  chr13:28542395-28542653
  hyper

SEQ ID NO: 360271 - DNA, 37 bp, Homo sapiens; identical to SEQ ID NO: 345440
  chr13:29069851-29069888
  hyper

SEQ ID NO: 360272 - DNA, 200 bp, Homo sapiens; identical to SEQ ID NO: 345441
  chr13:29292491-29292691
  hyper

SEQ ID NO: 360273 - DNA, 242 bp, Homo sapiens; identical to SEQ ID NO: 345442
  chr13:29293342-29293584
  hyper

SEQ ID NO: 360274 - DNA, 97 bp, Homo sapiens; identical to SEQ ID NO: 347263
  chr13:29393559-29393656
  hyper

SEQ ID NO: 360275 - DNA, 177 bp, Homo sapiens; identical to SEQ ID NO: 351461
  chr13:33000891-33001068
  hyper

SEQ ID NO: 360276 - DNA, 204 bp, Homo sapiens; identical to SEQ ID NO: 351462
  chr13:33001228-33001432
  hyper

SEQ ID NO: 360277 - DNA, 276 bp, Homo sapiens
  chr13:35516217-35516493
  hyper
cgccccgcctctgccagcttgccccagtgtctggcagcagtccccatgcacctgctcacctgtctatccgttcggggtggttgggggagggacgaggggtgtcggggtgggtgggtgggaagagaaggagggcagggcaaaagagggggtgcaccgagggctccgcccccccggaggctgtgcgcaggcgcagtggctgctaccgcaggcagggggcggcaacatggcggagtgagcggcggcgtcggggcttcacaacaacagtggtggccgtag

SEQ ID NO: 360278 - DNA, 469 bp, Homo sapiens; identical to SEQ ID NO: 289664
  chr13:35516535-35517004
  hyper

SEQ ID NO: 360279 - DNA, 80 bp, Homo sapiens; identical to SEQ ID NO: 203325
  chr13:35517052-35517132
  hyper

SEQ ID NO: 360280 - DNA, 200 bp, Homo sapiens; identical to SEQ ID NO: 203326
  chr13:35517173-35517373
  hyper

SEQ ID NO: 360281 - DNA, 73 bp, Homo sapiens; identical to SEQ ID NO: 334754
  chr13:39610527-39610600
  hyper

SEQ ID NO: 360282 - DNA, 334 bp, Homo sapiens; identical to SEQ ID NO: 351467
  chr13:39610814-39611148
  hyper

SEQ ID NO: 360283 - DNA, 199 bp, Homo sapiens; identical to SEQ ID NO: 334756
  chr13:41364049-41364248
  hyper

SEQ ID NO: 360284 - DNA, 479 bp, Homo sapiens; identical to SEQ ID NO: 347264
  chr13:42032017-42032496
  hyper

SEQ ID NO: 360285 - DNA, 109 bp, Homo sapiens; identical to SEQ ID NO: 347265
  chr13:42032649-42032758
  hyper

SEQ ID NO: 360286 - DNA, 318 bp, Homo sapiens; identical to SEQ ID NO: 203348
  chr13:44361226-44361544
  hyper

SEQ ID NO: 360287 - DNA, 62 bp, Homo sapiens; identical to SEQ ID NO: 351471
  chr13:44361578-44361640
  hyper

SEQ ID NO: 360288 - DNA, 284 bp, Homo sapiens; identical to SEQ ID NO: 334760
  chr13:44544261-44544545
  hyper

SEQ ID NO: 360289 - DNA, 107 bp, Homo sapiens; identical to SEQ ID NO: 351473
  chr13:45149906-45150013
  hyper

SEQ ID NO: 360290 - DNA, 141 bp, Homo sapiens; identical to SEQ ID NO: 351474
  chr13:45150276-45150417
  hyper

SEQ ID NO: 360291 - DNA, 480 bp, Homo sapiens
  chr13:45491759-45492239
  hyper
cgggtgtatttcggcatgcgaccgcttggttcccccgctttccttcacctctgacctaatctctcacttcaaaaactgacttcaagctgttgccagatacgtcccttccgccgcctgccgcaggtggctagggtctgagcacacttgaacctcacacccgccccaggggtagctccttggttcccttcagccccgatgtgtccctcgtgctttgaaatggaattacagttttggttaaaaacatgccttttccgagttaggaagaatctaaatcgactgaacgccagtctaaaatttcggcgttcccacaccgggagtcgaacccgggccgcctgggtgaaaaccaggaatcctaaccgctagaccatgtgggagacggcaatagcgactccaagcctagacaaattgagtcttctcggtcggcttccgcccactccatcgcgttcatccgtaggcgtcaaacctgctcctgcgcctgcg

SEQ ID NO: 360292 - DNA, 546 bp, Homo sapiens
  chr13:45492271-45492817
  hyper
cgcattctactgtttctctccttgcaggggcccttgaatctttcttcaatctactctcgcgtctttcgtgatctcatccagtctcctggtgctaggtaccatgtcgacaccaatgtagacactagattggatgagtcattgttcacaattcctcacaaaactcctgcaaagtccaaaagaactggggtttgaatgttagaggctggtgaagaagtgaggaccacggggcgtcataacaccgcgcagtggaggccacgctgcactggccggtgtccgccgacagggtgtgtgccacagacgcgcagtgccttgcccgaatctgtccctcccctcagcgctggtccaggctggccacaggcaccaccccgtccctgaaagtggatcttttcctctgaaaaaacaggaatgagaactgcccggaagcctggaacattccaggttctgatgactcagcggctgaaggcaggatttgtgtcaccgaaagcagccagagtggcggtctgtaaatgtagcttagaaaagtggagaaagtctcttactgcaggc

SEQ ID NO: 360293 - DNA, 132 bp, Homo sapiens; identical to SEQ ID NO: 345443
  chr13:46960952-46961084
  hyper

SEQ ID NO: 360294 - DNA, 135 bp, Homo sapiens; identical to SEQ ID NO: 345444
  chr13:46961683-46961818
  hyper

SEQ ID NO: 360295 - DNA, 60 bp, Homo sapiens
  chr13:50070360-50070420
  hyper
cgccggggcggcgctggacgaacttggctcaccactcgcgtgcctgttggtgggggaggg

SEQ ID NO: 360296 - DNA, 49 bp, Homo sapiens
  chr13:50070717-50070766
  hyper
cggccctctacttgagtgggtgggtcttctgatgggttcctgcccttgc

SEQ ID NO: 360297 - DNA, 139 bp, Homo sapiens; identical to SEQ ID NO: 334767
  chr13:50265737-50265876
  hyper

SEQ ID NO: 360298 - DNA, 80 bp, Homo sapiens
  chr13:50701609-50701689
  hyper
cgcgcttttcgcccctactttgttcttgcgcagtcttcccagctgcggagaggagggagcgaaagcaaaacgaaagcacc

SEQ ID NO: 360299 - DNA, 279 bp, Homo sapiens
  chr13:50704210-50704489
  hyper
cgcggctggatgggcgtggggaatgttgccagtgttcggtcccgactcaggggagaaacggggtgggggtgtggggatcccggaaagggccggaaaagccgggagcaccgggaggtgtgaggccagagtttctgctactgggggctcttccagggaagacgctggcgggaataggatggggctggcagctggggagcctcgcggtggctattgcacgtctcggcccccctggacagggttatgtcaggagagcgccctggcaccgagctctggccgctg

SEQ ID NO: 360300 - DNA, 247 bp, Homo sapiens; identical to SEQ ID NO: 289749
  chr13:50704800-50705047
  hyper

SEQ ID NO: 360301 - DNA, 64 bp, Homo sapiens; identical to SEQ ID NO: 203370
  chr13:52980451-52980515
  hyper

SEQ ID NO: 360302 - DNA, 80 bp, Homo sapiens; identical to SEQ ID NO: 351477
  chr13:53422554-53422634
  hyper

SEQ ID NO: 360303 - DNA, 231 bp, Homo sapiens; identical to SEQ ID NO: 203374
  chr13:53422885-53423116
  hyper

SEQ ID NO: 360304 - DNA, 64 bp, Homo sapiens; identical to SEQ ID NO: 351479
  chr13:53423198-53423262
  hyper

SEQ ID NO: 360305 - DNA, 82 bp, Homo sapiens; identical to SEQ ID NO: 351480
  chr13:53424677-53424759
  hyper

SEQ ID NO: 360306 - DNA, 141 bp, Homo sapiens
  chr13:60738352-60738493
  hyper
cgccaccatttgagcagcgctgggatataaaaccatctgctagccctctccttgcacgtctggggctggaaaaagtagttctgggactgggtacggtgctggaaggggtactaggcaggatgaaacgacggggcccacgac

SEQ ID NO: 360307 - DNA, 154 bp, Homo sapiens; identical to SEQ ID NO: 289787
  chr13:67804074-67804228
  hyper

SEQ ID NO: 360308 - DNA, 196 bp, Homo sapiens; identical to SEQ ID NO: 351482
  chr13:67805438-67805634
  hyper

SEQ ID NO: 360309 - DNA, 173 bp, Homo sapiens; identical to SEQ ID NO: 351483
  chr13:72438297-72438470
  hyper

SEQ ID NO: 360310 - DNA, 206 bp, Homo sapiens; identical to SEQ ID NO: 289790
  chr13:72438563-72438769
  hyper

SEQ ID NO: 360311 - DNA, 138 bp, Homo sapiens; identical to SEQ ID NO: 351485
  chr13:74707123-74707261
  hyper

SEQ ID NO: 360312 - DNA, 211 bp, Homo sapiens; identical to SEQ ID NO: 203386
  chr13:74707414-74707625
  hyper

SEQ ID NO: 360313 - DNA, 915 bp, Homo sapiens; identical to SEQ ID NO: 351487
  chr13:74707668-74708583
  hyper

SEQ ID NO: 360314 - DNA, 111 bp, Homo sapiens
  chr13:77459256-77459367
  hyper
cgggcaggagaaggactgggcgctggagtggcgagggggtctggggagctcactccctgcagaagacgtactcggtgtagctggtccagatcttgtcctcgctctggtcgg

SEQ ID NO: 360315 - DNA, 718 bp, Homo sapiens; identical to SEQ ID NO: 347268
  chr13:77459628-77460346
  hyper

SEQ ID NO: 360316 - DNA, 34 bp, Homo sapiens
  chr13:78271860-78271894
  hyper
cggtggtggctgccgcggccggaggcgagggccc

SEQ ID NO: 360317 - DNA, 425 bp, Homo sapiens
  chr13:78272232-78272657
  hyper
tgccgccgccgccgcccgccgcgccgccccccgctggcctgcagcctttgggtcctcggagccccccggccgccacggccaccgccgcggcctcagggggcctggggctcgggctggcgctgggcgcggggggcggtggcggcagcggtagtggcagcggcggtggctccagccccgcgttcccgggcaccttctgcctgcctagccccgcgccctccctgctttgcagcctggcgcagccacccgaggcgcccttcgtctacttcaagccggcagcaggcttcttcggcgcgggcggtggcgggccggagccggggggcgcggggacgccgccaggggcagctgcagcgccgccctcgccgccccccacgctgctggacgaggtggaattgctggatctggagagcgtagccgcctggcgggac

SEQ ID NO: 360318 - DNA, 33 bp, Homo sapiens
  chr13:79160914-79160947
  hyper
cgaaaagccccagacagccactgcagtgccaag

SEQ ID NO: 360319 - DNA, 65 bp, Homo sapiens
  chr13:79161096-79161161
  hyper
cgccaaccagccagccctgccctgtgtagacgggtcgccagagcgcggcgcagggatcgagctcc

SEQ ID NO: 360320 - DNA, 161 bp, Homo sapiens; identical to SEQ ID NO: 203406
  chr13:92050814-92050975
  hyper

SEQ ID NO: 360321 - DNA, 147 bp, Homo sapiens; identical to SEQ ID NO: 345446
  chr13:95201113-95201260
  hyper

SEQ ID NO: 360322 - DNA, 287 bp, Homo sapiens; identical to SEQ ID NO: 203409
  chr13:95201339-95201626
  hyper

SEQ ID NO: 360323 - DNA, 229 bp, Homo sapiens; identical to SEQ ID NO: 203410
  chr13:95201662-95201891
  hyper

SEQ ID NO: 360324 - DNA, 301 bp, Homo sapiens; identical to SEQ ID NO: 203411
  chr13:95202013-95202314
  hyper

SEQ ID NO: 360325 - DNA, 267 bp, Homo sapiens; identical to SEQ ID NO: 345450
  chr13:95202344-95202611
  hyper

SEQ ID NO: 360326 - DNA, 110 bp, Homo sapiens
  chr13:96205363-96205473
  hyper
ggccttagggagccagggacgctcctggtgcccgccctctcctgatggctgtctcgcggggcgcctgttcgagcctgggaccccgggaggggggacacgcagacaggccc

SEQ ID NO: 360327 - DNA, 601 bp, Homo sapiens; identical to SEQ ID NO: 334802
  chr13:96705328-96705929
  hyper

SEQ ID NO: 360328 - DNA, 234 bp, Homo sapiens; identical to SEQ ID NO: 289855
  chr13:96743113-96743347
  hyper

SEQ ID NO: 360329 - DNA, 123 bp, Homo sapiens
  chr13:99404493-99404616
  hyper
cggtgtttctgccgcccctgccgtcacccgctgggtcccgtcccgctccaagcgcactcccggcccgcagggtgggaatacgaggattacagtgccccacgggcgggcgggccaggatcgcaa

SEQ ID NO: 360330 - DNA, 55 bp, Homo sapiens
  chr13:100620289-100620344
  hyper
cgggcccgcgggacggttataaacgggactgggggcacgtgggtcaggaaagggg

SEQ ID NO: 360331 - DNA, 111 bp, Homo sapiens; identical to SEQ ID NO: 289869
  chr13:100620374-100620485
  hyper

SEQ ID NO: 360332 - DNA, 105 bp, Homo sapiens; identical to SEQ ID NO: 203424
  chr13:100620515-100620620
  hyper

SEQ ID NO: 360333 - DNA, 219 bp, Homo sapiens; identical to SEQ ID NO: 203425
  chr13:100620916-100621135
  hyper

SEQ ID NO: 360334 - DNA, 350 bp, Homo sapiens; identical to SEQ ID NO: 203426
  chr13:100621366-100621716
  hyper

SEQ ID NO: 360335 - DNA, 66 bp, Homo sapiens
  chr13:100631544-100631610
  hyper
cgcttaagccgggagaggctgcctgagccggcgcaagagagcccgggttctgccagccatagtgag

SEQ ID NO: 360336 - DNA, 241 bp, Homo sapiens; identical to SEQ ID NO: 289876
  chr13:100631642-100631883
  hyper

SEQ ID NO: 360337 - DNA, 492 bp, Homo sapiens; identical to SEQ ID NO: 289877
  chr13:100631937-100632429
  hyper

SEQ ID NO: 360338 - DNA, 367 bp, Homo sapiens; identical to SEQ ID NO: 351497
  chr13:100632514-100632881
  hyper

SEQ ID NO: 360339 - DNA, 146 bp, Homo sapiens
  chr13:100634131-100634277
  hyper
cgaggcagatccaggcggcggcggaggcggcgggcgcaggagagcggctcccagggctgaagtggccgccaccaccgccgcctgcgcctggagcccggtggccgccggacgcaccgcgcggatcgggagcgggagtcgaggcggcg

SEQ ID NO: 360340 - DNA, 128 bp, Homo sapiens; identical to SEQ ID NO: 203434
  chr13:100634617-100634745
  hyper

SEQ ID NO: 360341 - DNA, 126 bp, Homo sapiens; identical to SEQ ID NO: 351499
  chr13:103046539-103046665
  hyper

SEQ ID NO: 360342 - DNA, 206 bp, Homo sapiens; identical to SEQ ID NO: 351500
  chr13:108518148-108518354
  hyper

SEQ ID NO: 360343 - DNA, 321 bp, Homo sapiens; identical to SEQ ID NO: 203449
  chr13:108518933-108519254
  hyper

SEQ ID NO: 360344 - DNA, 58 bp, Homo sapiens; identical to SEQ ID NO: 203450
  chr13:108519564-108519622
  hyper

SEQ ID NO: 360345 - DNA, 165 bp, Homo sapiens; identical to SEQ ID NO: 203451
  chr13:108519932-108520097
  hyper

SEQ ID NO: 360346 - DNA, 67 bp, Homo sapiens; identical to SEQ ID NO: 203452
  chr13:108520309-108520376
  hyper

SEQ ID NO: 360347 - DNA, 91 bp, Homo sapiens
  chr13:110960603-110960694
  hyper
caaggttctgagaaagcttgctcttccctcatcatgctttccacctttccttccccttgggttcccagcgtcaatcctgtgttttgcaagc

SEQ ID NO: 360348 - DNA, 268 bp, Homo sapiens; identical to SEQ ID NO: 289922
  chr13:111766945-111767213
  hyper

SEQ ID NO: 360349 - DNA, 33 bp, Homo sapiens; identical to SEQ ID NO: 289923
  chr13:111768508-111768541
  hyper

SEQ ID NO: 360350 - DNA, 43 bp, Homo sapiens
  chr13:112716634-112716677
  hyper
gcacgcgcgcgtgcgcgcgcgcgcacacacacatacacacaca

SEQ ID NO: 360351 - DNA, 93 bp, Homo sapiens
  chr13:112716721-112716814
  hyper
accgcccgaaagaaagcctgggtcgcttttgaggagaaggagtttcttgacccttccccgcaaacgctactggaacggcctccaaactaggac

SEQ ID NO: 360352 - DNA, 351 bp, Homo sapiens; identical to SEQ ID NO: 289930
  chr13:112760444-112760795
  hyper

SEQ ID NO: 360353 - DNA, 129 bp, Homo sapiens; identical to SEQ ID NO: 351508
  chr13:113547249-113547378
  hyper

SEQ ID NO: 360354 - DNA, 403 bp, Homo sapiens; identical to SEQ ID NO: 345451
  chr13:113622881-113623284
  hyper

SEQ ID NO: 360355 - DNA, 634 bp, Homo sapiens; identical to SEQ ID NO: 345452
  chr13:113623348-113623982
  hyper

SEQ ID NO: 360356 - DNA, 33 bp, Homo sapiens
  chr13:114017783-114017816
  hyper
cgctgggattacaggcgtgagccaccgcgcccg

SEQ ID NO: 360357 - DNA, 228 bp, Homo sapiens; identical to SEQ ID NO: 203467
  chr13:114017991-114018219
  hyper

SEQ ID NO: 360358 - DNA, 140 bp, Homo sapiens
  chr13:114018330-114018470
  hyper
acacctggggacccgcgagcgctcggcgggctgcatgcggggagggaggcgcgcaccgagcgaggccagcgggtcccaagttcgcctcccggctccggggcgcttaagtccttccggcgggaccgcgggcgcgtgggggc

SEQ ID NO: 360359 - DNA, 302 bp, Homo sapiens; identical to SEQ ID NO: 347277
  chr13:114565969-114566271
  hyper

SEQ ID NO: 360360 - DNA, 114 bp, Homo sapiens; identical to SEQ ID NO: 347278
  chr13:114566409-114566523
  hyper

SEQ ID NO: 360361 - DNA, 38 bp, Homo sapiens
  chr13:114776448-114776486
  hyper
gttcactttaggaggggagaggtgagcgggacggggac

SEQ ID NO: 360362 - DNA, 222 bp, Homo sapiens
  chr13:114776788-114777010
  hyper
cgaggggacgaaatgcaggagtcacctcagagctgctgtggcttgtgcatgagctacggagaaacaggggtagcgacgcagatgggactggagggggtgggcgtcccacagtctcaggagctgctgagaccatcccgcaggcaacatccgacggcaccgcggtgacccactctctcggcccagcgtgcagggtgcatctcaaagtcgaaagcatcaggtggg

SEQ ID NO: 360363 - DNA, 246 bp, Homo sapiens; identical to SEQ ID NO: 351513
  chr14:21098618-21098864
  hyper

SEQ ID NO: 360364 - DNA, 196 bp, Homo sapiens; identical to SEQ ID NO: 351514
  chr14:21099147-21099343
  hyper

SEQ ID NO: 360365 - DNA, 686 bp, Homo sapiens; identical to SEQ ID NO: 334837
  chr14:21099793-21100479
  hyper

SEQ ID NO: 360366 - DNA, 113 bp, Homo sapiens; identical to SEQ ID NO: 345453
  chr14:21101056-21101169
  hyper

SEQ ID NO: 360367 - DNA, 111 bp, Homo sapiens; identical to SEQ ID NO: 345454
  chr14:21439074-21439185
  hyper

SEQ ID NO: 360368 - DNA, 590 bp, Homo sapiens; identical to SEQ ID NO: 345455
  chr14:21439317-21439907
  hyper

SEQ ID NO: 360369 - DNA, 619 bp, Homo sapiens; identical to SEQ ID NO: 351519
  chr14:21539350-21539969
  hyper

SEQ ID NO: 360370 - DNA, 377 bp, Homo sapiens; identical to SEQ ID NO: 347283
  chr14:23291965-23292342
  hyper

SEQ ID NO: 360371 - DNA, 38 bp, Homo sapiens; identical to SEQ ID NO: 351521
  chr14:23355352-23355390
  hyper

SEQ ID NO: 360372 - DNA, 53 bp, Homo sapiens; identical to SEQ ID NO: 351522
  chr14:23355484-23355537
  hyper

SEQ ID NO: 360373 - DNA, 78 bp, Homo sapiens; identical to SEQ ID NO: 351523
  chr14:23835314-23835392
  hyper

SEQ ID NO: 360374 - DNA, 108 bp, Homo sapiens
  chr14:24550913-24551021
  hyper
cgcagtctgtttcggtccagagcccgccccaggccccgacgctccccgggccccccagctgaccgttgctccagtcaggcgggcgccccacggtgcagggccggccac

SEQ ID NO: 360375 - DNA, 76 bp, Homo sapiens; identical to SEQ ID NO: 351524
  chr14:24808635-24808711
  hyper

SEQ ID NO: 360376 - DNA, 84 bp, Homo sapiens; identical to SEQ ID NO: 351525
  chr14:24808863-24808947
  hyper

SEQ ID NO: 360377 - DNA, 207 bp, Homo sapiens; identical to SEQ ID NO: 351526
  chr14:25148242-25148449
  hyper

SEQ ID NO: 360378 - DNA, 270 bp, Homo sapiens; identical to SEQ ID NO: 334851
  chr14:25601990-25602260
  hyper

SEQ ID NO: 360379 - DNA, 78 bp, Homo sapiens
  chr14:27067019-27067097
  hyper
cgcgagggctggcggggcgcggggagaagccgaggaggaggggagagtgagggaaagagtgaatgagcaggaggaggg

SEQ ID NO: 360380 - DNA, 218 bp, Homo sapiens; identical to SEQ ID NO: 203508
  chr14:27067386-27067604
  hyper

SEQ ID NO: 360381 - DNA, 205 bp, Homo sapiens
  chr14:27067699-27067904
  hyper
tagaaggcgggaaggagagattactgacagccgtgccagccaataaaatagaaatgtgagaaaggttcttcgggccccttcccaatcaggaaacttgggtgatgaggggcagcgaaggggtggggtgggatcttggtccagctggtactggagcggcgacaattttggctagtctaagaagggcattcgagtgaccgttgacaac

SEQ ID NO: 360382 - DNA, 265 bp, Homo sapiens; identical to SEQ ID NO: 203510
  chr14:29225768-29226033
  hyper

SEQ ID NO: 360383 - DNA, 60 bp, Homo sapiens; identical to SEQ ID NO: 203511
  chr14:29236194-29236254
  hyper

SEQ ID NO: 360384 - DNA, 60 bp, Homo sapiens; identical to SEQ ID NO: 290053
  chr14:29236614-29236674
  hyper

SEQ ID NO: 360385 - DNA, 87 bp, Homo sapiens; identical to SEQ ID NO: 351530
  chr14:30739859-30739946
  hyper

SEQ ID NO: 360386 - DNA, 69 bp, Homo sapiens; identical to SEQ ID NO: 351531
  chr14:30740003-30740072
  hyper

SEQ ID NO: 360387 - DNA, 96 bp, Homo sapiens
  chr14:32671357-32671453
  hyper
cgcggttcaacgaaggtcgttgggcaagatacggtggtgttcctagaggttgttcaagatctctcggggcctgcattttcctgctcgcgagcttgg

SEQ ID NO: 360388 - DNA, 163 bp, Homo sapiens; identical to SEQ ID NO: 347284
  chr14:36002437-36002600
  hyper

SEQ ID NO: 360389 - DNA, 438 bp, Homo sapiens; identical to SEQ ID NO: 290092
  chr14:36003004-36003442
  hyper

SEQ ID NO: 360390 - DNA, 212 bp, Homo sapiens
  chr14:36789412-36789624
  hyper
cgggttttcacttaggccaacctcacccactcttggggaggacagctgcaaggtaaacgactctgcaaccggtaccgccgtcctcctcactccgaccgaggaggctgggcccgggctccttccacacctcggcttcgggaccgcatcccacacctctgcaggcctagctgcccccggcctctgctagagaaaaagaatggcgaggagggacc

SEQ ID NO: 360391 - DNA, 31 bp, Homo sapiens
  chr14:36977312-36977343
  hyper
cgctggctttgtttggtttcgtttatttgta

SEQ ID NO: 360392 - DNA, 48 bp, Homo sapiens
  chr14:36979694-36979742
  hyper
cgaggttcgctttacacataggcatatccagttccttagacattgact

SEQ ID NO: 360393 - DNA, 48 bp, Homo sapiens
  chr14:36979809-36979857
  hyper
cattatggtaattcacaggtttacttctgcgcgcgcgcactcagcccc

SEQ ID NO: 360394 - DNA, 254 bp, Homo sapiens; identical to SEQ ID NO: 203528
  chr14:37050246-37050500
  hyper

SEQ ID NO: 360395 - DNA, 213 bp, Homo sapiens; identical to SEQ ID NO: 203529
  chr14:37050539-37050752
  hyper

SEQ ID NO: 360396 - DNA, 250 bp, Homo sapiens; identical to SEQ ID NO: 290107
  chr14:37050794-37051044
  hyper

SEQ ID NO: 360397 - DNA, 403 bp, Homo sapiens; identical to SEQ ID NO: 290108
  chr14:37051196-37051599
  hyper

SEQ ID NO: 360398 - DNA, 56 bp, Homo sapiens
  chr14:37116049-37116105
  hyper
cgggacaacttggagcctgcttctggggagccacacacgtcctctcccacttcttg

SEQ ID NO: 360399 - DNA, 119 bp, Homo sapiens; identical to SEQ ID NO: 347286
  chr14:37130817-37130936
  hyper

SEQ ID NO: 360400 - DNA, 187 bp, Homo sapiens
  chr14:37130956-37131143
  hyper
cgctgtcgctcaccgacccgcaccaatcaccatgcagcttgccctcggacccgccccttttagggcgtgtccccagtgagtgatagacggagccgccctgccctgctcagcccagcccacgttgctgcttagattgaaatgcagaactcaagcctctttcatcggggcacagacttccttttacttc

SEQ ID NO: 360401 - DNA, 491 bp, Homo sapiens; identical to SEQ ID NO: 290112
  chr14:37131343-37131834
  hyper

SEQ ID NO: 360402 - DNA, 55 bp, Homo sapiens
  chr14:37131888-37131943
  hyper
cacggcaggaatgagggagggggtccgattggacagtgacggtttggggccgttc

SEQ ID NO: 360403 - DNA, 65 bp, Homo sapiens; identical to SEQ ID NO: 351536
  chr14:37131997-37132062
  hyper

SEQ ID NO: 360404 - DNA, 202 bp, Homo sapiens; identical to SEQ ID NO: 347287
  chr14:37135434-37135636
  hyper

SEQ ID NO: 360405 - DNA, 225 bp, Homo sapiens; identical to SEQ ID NO: 347288
  chr14:38052540-38052765
  hyper

SEQ ID NO: 360406 - DNA, 175 bp, Homo sapiens; identical to SEQ ID NO: 347289
  chr14:38053203-38053378
  hyper

SEQ ID NO: 360407 - DNA, 104 bp, Homo sapiens; identical to SEQ ID NO: 351540
  chr14:38057019-38057123
  hyper

SEQ ID NO: 360408 - DNA, 299 bp, Homo sapiens; identical to SEQ ID NO: 203542
  chr14:38057503-38057802
  hyper

SEQ ID NO: 360409 - DNA, 155 bp, Homo sapiens; identical to SEQ ID NO: 351542
  chr14:38057832-38057987
  hyper

SEQ ID NO: 360410 - DNA, 81 bp, Homo sapiens; identical to SEQ ID NO: 351543
  chr14:38060563-38060644
  hyper

SEQ ID NO: 360411 - DNA, 599 bp, Homo sapiens; identical to SEQ ID NO: 203547
  chr14:38061332-38061931
  hyper

SEQ ID NO: 360412 - DNA, 209 bp, Homo sapiens; identical to SEQ ID NO: 351545
  chr14:38062091-38062300
  hyper

SEQ ID NO: 360413 - DNA, 108 bp, Homo sapiens
  chr14:38063865-38063973
  hyper
cggagtttcctaaaactccctctccggctgcgagagtcgggacagagcagggcagcaggtcccgcttccaggcccggccaaggcccggccggggccacaccggcgggc

SEQ ID NO: 360414 - DNA, 304 bp, Homo sapiens; identical to SEQ ID NO: 290131
  chr14:38064003-38064307
  hyper

SEQ ID NO: 360415 - DNA, 309 bp, Homo sapiens
  chr14:38064549-38064858
  hyper
gcacctacaaagcccgaggtgcacctgcaaggcggccgcccgccagtccggccgccgcgcctcccgccccgccgcttcaccgctgcgcgcgacccctcccccgcgacccctcccccaagcggggccctcactttgtttgcaaagcagtgtaattggtttaggcccggaggctagggaaagagggaaatggggagggagggggtgtaaccccctttggaaaaagaaaaaataggcggggccaggcgggcgggcgggctagggctctggatcggaacctcgcagccggagaaggccgggggcggtggcgtc

SEQ ID NO: 360416 - DNA, 54 bp, Homo sapiens; identical to SEQ ID NO: 347290
  chr14:38072497-38072551
  hyper

SEQ ID NO: 360417 - DNA, 159 bp, Homo sapiens
  chr14:38677154-38677313
  hyper
cggaaaaactcgaatgtcgccctgccgttcctggggttggtgacaggtctggtcatcgcacggcggcagctcctcacctggatttagaagagctggcgtccccgcccgcccaagcctttaaactctcgtctgccagaacccgccaactctccagggtac

SEQ ID NO: 360418 - DNA, 31 bp, Homo sapiens; identical to SEQ ID NO: 203554
  chr14:38677488-38677519
  hyper

SEQ ID NO: 360419 - DNA, 213 bp, Homo sapiens; identical to SEQ ID NO: 203555
  chr14:38677548-38677761
  hyper

SEQ ID NO: 360420 - DNA, 198 bp, Homo sapiens
  chr14:38677790-38677988
  hyper
cagtctggaggttgcgcactttgggtaaggagggcccggaacttccctggcgggtctgagctgcaaggcaagcgagggtgggaagagggaatttagggttctggactgcgggacgggagagaagctggggtctccagagaaaagggcagcaatggagggaaactgagatgaactccagacatccatgttcatggatcc

SEQ ID NO: 360421 - DNA, 52 bp, Homo sapiens; identical to SEQ ID NO: 203558
  chr14:38725469-38725521
  hyper

SEQ ID NO: 360422 - DNA, 242 bp, Homo sapiens; identical to SEQ ID NO: 203561
  chr14:42076386-42076628
  hyper

SEQ ID NO: 360423 - DNA, 201 bp, Homo sapiens; identical to SEQ ID NO: 351548
  chr14:45431382-45431583
  hyper

SEQ ID NO: 360424 - DNA, 586 bp, Homo sapiens; identical to SEQ ID NO: 334893
  chr14:50469917-50470503
  hyper

SEQ ID NO: 360425 - DNA, 77 bp, Homo sapiens; identical to SEQ ID NO: 334894
  chr14:50511831-50511908
  hyper

SEQ ID NO: 360426 - DNA, 711 bp, Homo sapiens; identical to SEQ ID NO: 290161
  chr14:51027134-51027845
  hyper

SEQ ID NO: 360427 - DNA, 104 bp, Homo sapiens
  chr14:51027881-51027985
  hyper
gcagcgatgcggaagaaatcgcggccccgcccgccttgctgctccagacctagttctggacggttagtgtgggcaggctgggcgtctttttgtcgtaggttccc

SEQ ID NO: 360428 - DNA, 101 bp, Homo sapiens
  chr14:51410195-51410296
  hyper
cgggggagtgtgtgtcttcggggaggacgagtccagggcattgcctggccctgggccgcctttgcgaaagactcacggaattccaggagctacacccactc

SEQ ID NO: 360429 - DNA, 224 bp, Homo sapiens; identical to SEQ ID NO: 203569
  chr14:51410345-51410569
  hyper

SEQ ID NO: 360430 - DNA, 293 bp, Homo sapiens; identical to SEQ ID NO: 203570
  chr14:51410740-51411033
  hyper

SEQ ID NO: 360431 - DNA, 223 bp, Homo sapiens; identical to SEQ ID NO: 203572
  chr14:51562012-51562235
  hyper

SEQ ID NO: 360432 - DNA, 260 bp, Homo sapiens; identical to SEQ ID NO: 334898
  chr14:52327346-52327606
  hyper

SEQ ID NO: 360433 - DNA, 314 bp, Homo sapiens; identical to SEQ ID NO: 347295
  chr14:52781114-52781428
  hyper

SEQ ID NO: 360434 - DNA, 79 bp, Homo sapiens; identical to SEQ ID NO: 203582
  chr14:52782046-52782125
  hyper

SEQ ID NO: 360435 - DNA, 509 bp, Homo sapiens
  chr14:53417820-53418329
  hyper
ccgccccctctgtccgagcctggctgggctgggcgcgctggctccctccttcgccgcccgcagagctgccctgagcgggtccggccggcctcgcctctgcccccgccctcccggcgccgcgctcgggggagggggctgcgggtcccgggcggggcggggcggcgtggggcggggcggcgcgggggtggcggggggcgcggcggggcggcaatctcggccccgcggagcgctgcccttttatggaaatgaaggacccggctcaggaattgaatccaacatccgggctctaggcggcgggccctgaggagggggagcgggggagcgcgggcggcctttcccggggcgctggtggccggcggggcgtctagagctcaggctggactggggcccccgcggcgtgtgtccgcgctggcagcagggagagggggcttgtccgtgagaaacggccccaggaaattcccagggcaaggtcgttttcggagaacaaagtcctctcgccccctccccac

SEQ ID NO: 360436 - DNA, 537 bp, Homo sapiens
  chr14:54420542-54421079
  hyper
cgggagcgaggtcgggaaagtctcacccgcccaaagcctcaccaccgagaggcacttaaaaaggaaagcgcagagggaccctgcccacgcgcgtgtacacacacacccccccacacacacacaagcaaacacgagctccccgccacttcctccccagggtctcctcaaggccaaatattgctcccaatgacagccagtcaccccttggcgaacgcctgctaaggctccgaagagccgggccaccgatctagctcccggctgaaagcagccgaccttgtcacgcgcggggccgggaatgggagggagggtgttagagggtgatcgctgtgggaaagtgagagggagcggctgttagtcattgctccgggtccattaccgagaatccccaaacctagtccgccgctgcgtggcccctctccccatgcaaagcagacccccgaagaagccatgccaggctgagggacagacgccggggctcgaagctccgggcagattcagaaagaggcgtcgctgcagaaaggacgcatcacagttttc

SEQ ID NO: 360437 - DNA, 229 bp, Homo sapiens
  chr14:54421301-54421530
  hyper
agagtcgcacgcagcaaatactccttcaagaattttacctacctacagttcaagcagttactgggatgtcctgactaatcgaagatgctgccgcgcgcgtgggtcgctctgcgcaagggcctcttcgaaaacccgactaggcgcaactcagcgttcagcagggccgggagcgccaggtcgtccccggggcccgggccccatgactcctgccccaaagcccactccaccc

SEQ ID NO: 360438 - DNA, 128 bp, Homo sapiens; identical to SEQ ID NO: 203595
  chr14:55595810-55595938
  hyper

SEQ ID NO: 360439 - DNA, 133 bp, Homo sapiens; identical to SEQ ID NO: 203596
  chr14:55595968-55596101
  hyper

SEQ ID NO: 360440 - DNA, 437 bp, Homo sapiens; identical to SEQ ID NO: 347298
  chr14:55596153-55596590
  hyper

SEQ ID NO: 360441 - DNA, 144 bp, Homo sapiens
  chr14:57265912-57266056
  hyper
cgtcatttcagtaccaagtatcaccattattgggcttattaacttcattaaaaccggtcttgactaggagtggagatcggaactctctggatgtctttaagccagtgttcgctccccgcctccttccctccctccgttgccttc

SEQ ID NO: 360442 - DNA, 113 bp, Homo sapiens; identical to SEQ ID NO: 290221
  chr14:58332405-58332518
  hyper

SEQ ID NO: 360443 - DNA, 47 bp, Homo sapiens; identical to SEQ ID NO: 290222
  chr14:58332593-58332640
  hyper

SEQ ID NO: 360444 - DNA, 164 bp, Homo sapiens; identical to SEQ ID NO: 351561
  chr14:58332908-58333072
  hyper

SEQ ID NO: 360445 - DNA, 173 bp, Homo sapiens; identical to SEQ ID NO: 351562
  chr14:60043607-60043780
  hyper

SEQ ID NO: 360446 - DNA, 79 bp, Homo sapiens; identical to SEQ ID NO: 347299
  chr14:60097114-60097193
  hyper

SEQ ID NO: 360447 - DNA, 637 bp, Homo sapiens
  chr14:60337053-60337690
  hyper
actggggggccctggtccccgacgccatttgaggggcagcggcgcccgccttacctgtggatgcagtttccatggcaacgggcgactgccgggcggggcccgagccggcttcccgcgacgccgcttcccgggccctggcgcccaaccccgggctgggctccccagcctgcggcgccggcgtggcccctttcggcgtcaccgcttcgttctccccctccccccggtgcctgagccactgggacccggggccggccagcggcagcagctcgtcctgcggatcccccggcgcggccatggctggcggtcccccggcgcggcgacggcggcttggctgggcagaggctcggtggctgcgcgggcgctccctgctgctgtccccggagggactcggcgctcagggaagctgcggtgtctcagcgtcgccgccgcctctgctgcaactccgccgagccgctgcctgccgctcttcccgcttcagctcctccttctcccccctcctcttcctccggccccgccgcggccgctgcctgcgctcctcctcctactccactcgctgctgccgccgctgcttcgctattcccaatcctgttattacgcaggtgaaaatggcctgcttggtccgggtcctcctgggcac

SEQ ID NO: 360448 - DNA, 44 bp, Homo sapiens; identical to SEQ ID NO: 351564
  chr14:60385935-60385979
  hyper

SEQ ID NO: 360449 - DNA, 61 bp, Homo sapiens; identical to SEQ ID NO: 345458
  chr14:60794412-60794473
  hyper

SEQ ID NO: 360450 - DNA, 44 bp, Homo sapiens
  chr14:60798413-60798457
  hyper
cgctttgtcacccgtgccggaagctcacaggccccggagatccc

SEQ ID NO: 360451 - DNA, 276 bp, Homo sapiens; identical to SEQ ID NO: 290237
  chr14:60974092-60974368
  hyper

SEQ ID NO: 360452 - DNA, 110 bp, Homo sapiens; identical to SEQ ID NO: 351567
  chr14:60974415-60974525
  hyper

SEQ ID NO: 360453 - DNA, 134 bp, Homo sapiens; identical to SEQ ID NO: 351568
  chr14:60982999-60983133
  hyper

SEQ ID NO: 360454 - DNA, 167 bp, Homo sapiens; identical to SEQ ID NO: 345459
  chr14:61104864-61105031
  hyper

SEQ ID NO: 360455 - DNA, 240 bp, Homo sapiens; identical to SEQ ID NO: 290243
  chr14:61110268-61110508
  hyper

SEQ ID NO: 360456 - DNA, 181 bp, Homo sapiens; identical to SEQ ID NO: 347302
  chr14:61113933-61114114
  hyper

SEQ ID NO: 360457 - DNA, 275 bp, Homo sapiens; identical to SEQ ID NO: 290245
  chr14:61114722-61114997
  hyper

SEQ ID NO: 360458 - DNA, 132 bp, Homo sapiens; identical to SEQ ID NO: 351572
  chr14:61116736-61116868
  hyper

SEQ ID NO: 360459 - DNA, 186 bp, Homo sapiens; identical to SEQ ID NO: 351573
  chr14:61117028-61117214
  hyper

SEQ ID NO: 360460 - DNA, 354 bp, Homo sapiens; identical to SEQ ID NO: 351574
  chr14:61123186-61123540
  hyper

SEQ ID NO: 360461 - DNA, 623 bp, Homo sapiens; identical to SEQ ID NO: 290253
  chr14:61123681-61124304
  hyper

SEQ ID NO: 360462 - DNA, 655 bp, Homo sapiens; identical to SEQ ID NO: 345460
  chr14:61188627-61189282
  hyper

SEQ ID NO: 360463 - DNA, 64 bp, Homo sapiens; identical to SEQ ID NO: 203621
  chr14:61748033-61748097
  hyper

SEQ ID NO: 360464 - DNA, 130 bp, Homo sapiens; identical to SEQ ID NO: 334940
  chr14:61943723-61943853
  hyper

SEQ ID NO: 360465 - DNA, 196 bp, Homo sapiens; identical to SEQ ID NO: 334941
  chr14:62105869-62106065
  hyper

SEQ ID NO: 360466 - DNA, 897 bp, Homo sapiens; identical to SEQ ID NO: 334943
  chr14:62162333-62163230
  hyper

SEQ ID NO: 360467 - DNA, 114 bp, Homo sapiens; identical to SEQ ID NO: 347307
  chr14:62584399-62584513
  hyper

SEQ ID NO: 360468 - DNA, 167 bp, Homo sapiens; identical to SEQ ID NO: 334946
  chr14:64805585-64805752
  hyper

SEQ ID NO: 360469 - DNA, 535 bp, Homo sapiens; identical to SEQ ID NO: 290277
  chr14:65006776-65007311
  hyper

SEQ ID NO: 360470 - DNA, 99 bp, Homo sapiens
  chr14:65008577-65008676
  hyper
cgtgctggtgggcggctccactcgtatccccaagatccagaagctgctgcaggatttcttcaacggcaaggagctgaacaagagcatcaaccccgacga

SEQ ID NO: 360471 - DNA, 217 bp, Homo sapiens; identical to SEQ ID NO: 203636
  chr14:65008720-65008937
  hyper

SEQ ID NO: 360472 - DNA, 163 bp, Homo sapiens
  chr14:65009279-65009442
  hyper
caagatcctcgacaagtgtcaggaggtgatcaactggctcgaccgaaaccagatggcagagaaagatgagtatgaacacaagcagaaagagctcgaaagagtttgcaaccccatcatcagcaaactttaccaaggtggtcctggcggcggcagcggcggcggc

SEQ ID NO: 360473 - DNA, 92 bp, Homo sapiens; identical to SEQ ID NO: 347308
  chr14:65016816-65016908
  hyper

SEQ ID NO: 360474 - DNA, 201 bp, Homo sapiens; identical to SEQ ID NO: 203639
  chr14:65171074-65171275
  hyper

SEQ ID NO: 360475 - DNA, 188 bp, Homo sapiens
  chr14:65171373-65171561
  hyper
agccccgcacgccgtgcgcgtcccgagcccgcggggcagctaccgctcggtgagtgtcccctgattctcctctctcccctcttatctccctgcattaggctgagcggcggtgccggcagtcacgctggggccccagtcccttcgcggcccccgtgccagccccctgcggggtgaggaccggggcgacc

SEQ ID NO: 360476 - DNA, 93 bp, Homo sapiens; identical to SEQ ID NO: 334951
  chr14:66869973-66870066
  hyper

SEQ ID NO: 360477 - DNA, 213 bp, Homo sapiens; identical to SEQ ID NO: 334953
  chr14:69259278-69259491
  hyper

SEQ ID NO: 360478 - DNA, 219 bp, Homo sapiens; identical to SEQ ID NO: 347309
  chr14:69261392-69261611
  hyper

SEQ ID NO: 360479 - DNA, 105 bp, Homo sapiens; identical to SEQ ID NO: 351584
  chr14:72399486-72399591
  hyper

SEQ ID NO: 360480 - DNA, 55 bp, Homo sapiens
  chr14:73358909-73358964
  hyper
cggttatgtgatttcggctggaaatggggaaactgaaaatcagttgtgggttcgg

SEQ ID NO: 360481 - DNA, 254 bp, Homo sapiens; identical to SEQ ID NO: 290336
  chr14:73359040-73359294
  hyper

SEQ ID NO: 360482 - DNA, 139 bp, Homo sapiens
  chr14:73359490-73359629
  hyper
cgaaggggtgaggaccccccagcccacctcggatacggagggagccaccctctgccgacatcacccaatagcacccctttcagagcgacactagttttccgaggccacccctggctccgcgatcgcgagcggacttggc

SEQ ID NO: 360483 - DNA, 464 bp, Homo sapiens; identical to SEQ ID NO: 334962
  chr14:73359779-73360243
  hyper

SEQ ID NO: 360484 - DNA, 227 bp, Homo sapiens; identical to SEQ ID NO: 334963
  chr14:73360763-73360990
  hyper

SEQ ID NO: 360485 - DNA, 618 bp, Homo sapiens; identical to SEQ ID NO: 347312
  chr14:73957523-73958141
  hyper

SEQ ID NO: 360486 - DNA, 149 bp, Homo sapiens; identical to SEQ ID NO: 290345
  chr14:73958379-73958528
  hyper

SEQ ID NO: 360487 - DNA, 409 bp, Homo sapiens
  chr14:74100394-74100803
  hyper
cgtccggggtaaactcgcgaggggatcctacctcttccagatggttccacacgggacctctaggagctcaaaggaccctgggccctccgaagtcgtctcttcttgcagcccgttgctaagtggcgccgcaggaccagcccaggtcccatcacgtggccctgcagggttttgccccacagggccacgacctgccaggccgggcccccctcctccctcctcttcagcgcggaacctcggccgccagtgccaggccgcctcgaccttggcggaggtcaaagccgcgacagtcccggaccatgtggccggcggtccgggcagcgctccgagcctctggggtccccctccaggcctggaggccgatatccacatcgtcctttttctcccaaaaggccgcgaccctgaccgtcac

SEQ ID NO: 360488 - DNA, 49 bp, Homo sapiens
  chr14:74208160-74208209
  hyper
cgggcggctctgaagaggaaatctcaggccctagatgctacaggtcatt

SEQ ID NO: 360489 - DNA, 98 bp, Homo sapiens; identical to SEQ ID NO: 334967
  chr14:74238704-74238802
  hyper

SEQ ID NO: 360490 - DNA, 84 bp, Homo sapiens
  chr14:74254318-74254402
  hyper
cgtttggtgttggggctaaaagggtcatgtcagaaagcagtgtgctctatgtgttcttaatgcctaaagtgggccttaaaacaa

SEQ ID NO: 360491 - DNA, 493 bp, Homo sapiens; identical to SEQ ID NO: 334971
  chr14:75517730-75518223
  hyper

SEQ ID NO: 360492 - DNA, 129 bp, Homo sapiens; identical to SEQ ID NO: 351590
  chr14:75894282-75894411
  hyper

SEQ ID NO: 360493 - DNA, 168 bp, Homo sapiens; identical to SEQ ID NO: 347313
  chr14:76597725-76597893
  hyper

SEQ ID NO: 360494 - DNA, 123 bp, Homo sapiens; identical to SEQ ID NO: 334974
  chr14:76603110-76603233
  hyper

SEQ ID NO: 360495 - DNA, 37 bp, Homo sapiens; identical to SEQ ID NO: 351592
  chr14:76819100-76819137
  hyper

SEQ ID NO: 360496 - DNA, 66 bp, Homo sapiens
  chr14:77228490-77228556
  hyper
cgcaggcggggaatgtgcgcgtcggcgcgcgccccctccccgctcccggccagctgcgagtcttgg

SEQ ID NO: 360497 - DNA, 333 bp, Homo sapiens; identical to SEQ ID NO: 334977
  chr14:77428133-77428466
  hyper

SEQ ID NO: 360498 - DNA, 136 bp, Homo sapiens
  chr14:77591037-77591173
  hyper
cgggagctcaggaatggtcgctattgtgacaaatagaaaacccgccaggagacagagaggaggtgggtccctggaccgcggtggcacatgagggctaagaacctcccaggaggggctgggctcggagcgcgctctc

SEQ ID NO: 360499 - DNA, 95 bp, Homo sapiens
  chr14:77591751-77591846
  hyper
ctagtctgtttattaagtacccggcacctgcgagggaatttttgccctcggcggccggcgggtcaggtggaggggccgcgctgccccttagctgc

SEQ ID NO: 360500 - DNA, 82 bp, Homo sapiens; identical to SEQ ID NO: 290405
  chr14:77965137-77965219
  hyper

SEQ ID NO: 360501 - DNA, 180 bp, Homo sapiens; identical to SEQ ID NO: 290406
  chr14:77965244-77965424
  hyper

SEQ ID NO: 360502 - DNA, 535 bp, Homo sapiens
  chr14:81902288-81902823
  hyper
cgtccccagggacacctgttgtcgcctccccactcgggccgatgaagacatcctgggcgtcccaatctcgaagacacccgtcggccagaagtgtctgtgtatggggccaggtgtcgcaggagtcctcctccacccctacctgccttaagcagagtcccctcgtcctcccccaccccgggacgcccgcggctggtggaaacgccgcgcctccgcgtggctcgaccaggcaggctcgggggcgccagggggcacagcggcgctaggacctcgcggccggcccgcccccgcccccgcccccgccccccgcccgctccacctgcggggcccctcttggggggcgcgctcgcctcctgctgcggggcgtgggtgcagttacctgcgccgcggtccgcagggtccccggcgtccgccgaaaggtcgccgcggcaaagccggcttctctggccgcgggatacccacccggccgcactgctctcgccacgatccctcccggccgcagcgccgacgccggctccagactcgagctcgctctgcg

SEQ ID NO: 360503 - DNA, 141 bp, Homo sapiens
  chr14:81903005-81903146
  hyper
accccgaagctgggattcttcccctctgcgcctagtggggccggccgtccaggcacgaggcaacacggaaagcatcgattcgagcgacatggaaatggcgtggaatggggagcgcatgggagtcccacccgctccgcctgc

SEQ ID NO: 360504 - DNA, 163 bp, Homo sapiens; identical to SEQ ID NO: 290421
  chr14:88458964-88459127
  hyper

SEQ ID NO: 360505 - DNA, 239 bp, Homo sapiens; identical to SEQ ID NO: 290422
  chr14:88459170-88459409
  hyper

SEQ ID NO: 360506 - DNA, 57 bp, Homo sapiens; identical to SEQ ID NO: 351598
  chr14:88459631-88459688
  hyper

SEQ ID NO: 360507 - DNA, 197 bp, Homo sapiens; identical to SEQ ID NO: 351599
  chr14:88789765-88789962
  hyper

SEQ ID NO: 360508 - DNA, 406 bp, Homo sapiens
  chr14:89493490-89493896
  hyper
acgcagaacccggacctcggaatgggacgatgcgacgggcggggaaggcctggcccggccgaggtgccctcggccccgccctccaccgagggcagggaggcactgcctccgctccgtccactcgtaactggtgacgctggcagccccgccggggggcggggggagtgcaagaaaatcctgaggtgtgtcgggggacctggaccagatgccctcctgcaccgccctagctccggggaagtcgctctccggctccgcggcgcgggacccgccagcgggcagaggcgcggcgctttgatgtcgcgcggccacacggtggcgctgccgcaccgcccgctggcggagactgggggccaggggtgcccggggtggggtggagccgggacgcgcgcactccccagccacgccc

SEQ ID NO: 360509 - DNA, 67 bp, Homo sapiens; identical to SEQ ID NO: 351600
  chr14:89818034-89818101
  hyper

SEQ ID NO: 360510 - DNA, 216 bp, Homo sapiens; identical to SEQ ID NO: 334989
  chr14:89884061-89884277
  hyper

SEQ ID NO: 360511 - DNA, 485 bp, Homo sapiens; identical to SEQ ID NO: 351602
  chr14:90085312-90085797
  hyper

SEQ ID NO: 360512 - DNA, 144 bp, Homo sapiens
  chr14:90527180-90527324
  hyper
agggcagggccgcggctgccaggaggcccgggaacagtcccgacggagcggcgcggagagggcgctccccggaaggtgagatctgagcgcggcagcggcgccagcgcccgctacaaggcggggtctcggggagggggccccggc

SEQ ID NO: 360513 - DNA, 226 bp, Homo sapiens; identical to SEQ ID NO: 203711
  chr14:90527931-90528157
  hyper

SEQ ID NO: 360514 - DNA, 39 bp, Homo sapiens; identical to SEQ ID NO: 351603
  chr14:90849401-90849440
  hyper

SEQ ID NO: 360515 - DNA, 382 bp, Homo sapiens; identical to SEQ ID NO: 203714
  chr14:90849476-90849858
  hyper

SEQ ID NO: 360516 - DNA, 53 bp, Homo sapiens; identical to SEQ ID NO: 203715
  chr14:90849897-90849950
  hyper

SEQ ID NO: 360517 - DNA, 67 bp, Homo sapiens; identical to SEQ ID NO: 351606
  chr14:90850476-90850543
  hyper

SEQ ID NO: 360518 - DNA, 73 bp, Homo sapiens
  chr14:91580279-91580352
  hyper
cggggagagcaggttaactcttgcagggagaactgggcttgcagggtccagccagctgccagcagctctgcag

SEQ ID NO: 360519 - DNA, 201 bp, Homo sapiens
  chr14:91580494-91580695
  hyper
aaccccccgtggcgcaggagagcagaagaaagggggcctttatgcccttttgagggaagcacacattctgcaaggccgtggaaacaaagggaggaactgtttgtagccctcgtccagacgccccaaacaaacagtaagtcagaagggaacagagcacagcacagtccctccctccgccccaggcagtatccaccttgcccc

SEQ ID NO: 360520 - DNA, 479 bp, Homo sapiens; identical to SEQ ID NO: 334996
  chr14:91581063-91581542
  hyper

SEQ ID NO: 360521 - DNA, 118 bp, Homo sapiens; identical to SEQ ID NO: 290458
  chr14:91883379-91883497
  hyper

SEQ ID NO: 360522 - DNA, 405 bp, Homo sapiens; identical to SEQ ID NO: 351609
  chr14:91883530-91883935
  hyper

SEQ ID NO: 360523 - DNA, 551 bp, Homo sapiens; identical to SEQ ID NO: 335000
  chr14:92302201-92302752
  hyper

SEQ ID NO: 360524 - DNA, 187 bp, Homo sapiens; identical to SEQ ID NO: 203723
  chr14:92980770-92980957
  hyper

SEQ ID NO: 360525 - DNA, 330 bp, Homo sapiens; identical to SEQ ID NO: 335005
  chr14:93214751-93215081
  hyper

SEQ ID NO: 360526 - DNA, 182 bp, Homo sapiens; identical to SEQ ID NO: 345461
  chr14:94406037-94406219
  hyper

SEQ ID NO: 360527 - DNA, 102 bp, Homo sapiens; identical to SEQ ID NO: 347317
  chr14:94889915-94890017
  hyper

SEQ ID NO: 360528 - DNA, 294 bp, Homo sapiens; identical to SEQ ID NO: 290483
  chr14:95235695-95235989
  hyper

SEQ ID NO: 360529 - DNA, 266 bp, Homo sapiens; identical to SEQ ID NO: 290484
  chr14:95236553-95236819
  hyper

SEQ ID NO: 360530 - DNA, 34 bp, Homo sapiens
  chr14:95236848-95236882
  hyper
ccttggttaatctcattaattcctttgtgccgcc

SEQ ID NO: 360531 - DNA, 120 bp, Homo sapiens; identical to SEQ ID NO: 335011
  chr14:95240610-95240730
  hyper

SEQ ID NO: 360532 - DNA, 209 bp, Homo sapiens; identical to SEQ ID NO: 290501
  chr14:96505691-96505900
  hyper

SEQ ID NO: 360533 - DNA, 290 bp, Homo sapiens; identical to SEQ ID NO: 290502
  chr14:96506053-96506343
  hyper

SEQ ID NO: 360534 - DNA, 75 bp, Homo sapiens; identical to SEQ ID NO: 351616
  chr14:99736040-99736115
  hyper

SEQ ID NO: 360535 - DNA, 60 bp, Homo sapiens; identical to SEQ ID NO: 203743
  chr14:99736213-99736273
  hyper

SEQ ID NO: 360536 - DNA, 128 bp, Homo sapiens; identical to SEQ ID NO: 351618
  chr14:99736431-99736559
  hyper

SEQ ID NO: 360537 - DNA, 220 bp, Homo sapiens; identical to SEQ ID NO: 351619
  chr14:99737178-99737398
  hyper

SEQ ID NO: 360538 - DNA, 544 bp, Homo sapiens; identical to SEQ ID NO: 351620
  chr14:99737462-99738006
  hyper

SEQ ID NO: 360539 - DNA, 459 bp, Homo sapiens; identical to SEQ ID NO: 203747
  chr14:99740032-99740491
  hyper

SEQ ID NO: 360540 - DNA, 166 bp, Homo sapiens
  chr14:99740713-99740879
  hyper
ccctcaggaaaagggagcccctccgcgagcggcgcaagggctctcggagtcccagctgcagccgccaccccgcgtgcggtaaggggccgtgcctggggagggggcaccccctccccactcccagcaggaagtagctggcgtgggccggcgcgtgccccacggaccc

SEQ ID NO: 360541 - DNA, 279 bp, Homo sapiens; identical to SEQ ID NO: 203753
  chr14:100259401-100259680
  hyper

SEQ ID NO: 360542 - DNA, 41 bp, Homo sapiens; identical to SEQ ID NO: 351622
  chr14:100438971-100439012
  hyper

SEQ ID NO: 360543 - DNA, 63 bp, Homo sapiens
  chr14:100613205-100613268
  hyper
cggcaggtggtcgtagtactcgggcgcgatcttccgcacctgtagagaggagggcggggctca

SEQ ID NO: 360544 - DNA, 72 bp, Homo sapiens
  chr14:102247600-102247672
  hyper
cgtatttcccgggaccctggcttctgtcctcagggaccccttcagaccttccccaccctccgaagcctcaac

SEQ ID NO: 360545 - DNA, 50 bp, Homo sapiens
  chr14:102248214-102248264
  hyper
cggagcggcacccaggagcccgccctagcacccgctcccgctcccacctc

SEQ ID NO: 360546 - DNA, 377 bp, Homo sapiens; identical to SEQ ID NO: 351623
  chr14:102975682-102976059
  hyper

SEQ ID NO: 360547 - DNA, 212 bp, Homo sapiens; identical to SEQ ID NO: 351624
  chr14:103010929-103011141
  hyper

SEQ ID NO: 360548 - DNA, 99 bp, Homo sapiens; identical to SEQ ID NO: 351625
  chr14:103011360-103011459
  hyper

SEQ ID NO: 360549 - DNA, 142 bp, Homo sapiens; identical to SEQ ID NO: 335034
  chr14:103430237-103430379
  hyper

SEQ ID NO: 360550 - DNA, 34 bp, Homo sapiens; identical to SEQ ID NO: 203774
  chr14:103739884-103739918
  hyper

SEQ ID NO: 360551 - DNA, 84 bp, Homo sapiens
  chr14:103740611-103740695
  hyper
ccaggcctctgtcttcacacaggaggaactccaggccctcgtttaggactccaggccaaaggctgtgtcagccgcgggtccccc

SEQ ID NO: 360552 - DNA, 85 bp, Homo sapiens; identical to SEQ ID NO: 203776
  chr14:103745819-103745904
  hyper

SEQ ID NO: 360553 - DNA, 268 bp, Homo sapiens
  chr14:103988427-103988695
  hyper
cgatgatggggtcgaagagatccttgaacacttcgtaggactcctcgtcgcccgccacgcagcccacggtcatgatgtacgggtggcctgggggagggggcgcgggacggggacagtgacgtcactgccgggcccgagcgcgctgctgaggaccctgcggctgcgcggggggagggggggccgggaccccggccccgaggggtcgcgtacccgggttgtccacgcctgtctggatgacgtcgtccagcgtgaagccgctcggcgtgct

SEQ ID NO: 360554 - DNA, 418 bp, Homo sapiens; identical to SEQ ID NO: 290585
  chr14:103988736-103989154
  hyper

SEQ ID NO: 360555 - DNA, 217 bp, Homo sapiens; identical to SEQ ID NO: 351628
  chr14:104582815-104583032
  hyper

SEQ ID NO: 360556 - DNA, 988 bp, Homo sapiens; identical to SEQ ID NO: 351629
  chr14:104583110-104584098
  hyper

SEQ ID NO: 360557 - DNA, 340 bp, Homo sapiens; identical to SEQ ID NO: 290593
  chr14:104603375-104603715
  hyper

SEQ ID NO: 360558 - DNA, 352 bp, Homo sapiens; identical to SEQ ID NO: 290594
  chr14:104603753-104604105
  hyper

SEQ ID NO: 360559 - DNA, 76 bp, Homo sapiens; identical to SEQ ID NO: 335045
  chr14:105155749-105155825
  hyper

SEQ ID NO: 360560 - DNA, 198 bp, Homo sapiens; identical to SEQ ID NO: 345462
  chr14:105189960-105190158
  hyper

SEQ ID NO: 360561 - DNA, 151 bp, Homo sapiens; identical to SEQ ID NO: 351633
  chr14:105196121-105196272
  hyper

SEQ ID NO: 360562 - DNA, 667 bp, Homo sapiens; identical to SEQ ID NO: 351634
  chr14:105293560-105294227
  hyper

SEQ ID NO: 360563 - DNA, 464 bp, Homo sapiens; identical to SEQ ID NO: 351635
  chr14:105330476-105330940
  hyper

SEQ ID NO: 360564 - DNA, 455 bp, Homo sapiens; identical to SEQ ID NO: 351636
  chr14:105330980-105331435
  hyper

SEQ ID NO: 360565 - DNA, 78 bp, Homo sapiens; identical to SEQ ID NO: 345463
  chr14:105512395-105512473
  hyper

SEQ ID NO: 360566 - DNA, 37 bp, Homo sapiens; identical to SEQ ID NO: 345464
  chr14:105715538-105715575
  hyper

SEQ ID NO: 360567 - DNA, 409 bp, Homo sapiens; identical to SEQ ID NO: 335057
  chr15:26178877-26179286
  hyper

SEQ ID NO: 360568 - DNA, 275 bp, Homo sapiens; identical to SEQ ID NO: 203799
  chr15:28340034-28340309
  hyper

SEQ ID NO: 360569 - DNA, 98 bp, Homo sapiens
  chr15:28341522-28341620
  hyper
cgtagccgtgtctcgggagcctggcggtgtccgcaggagcgatgctgtgaccgttgcatttgaagcattccttctagttcccggatcccagggagggg

SEQ ID NO: 360570 - DNA, 77 bp, Homo sapiens; identical to SEQ ID NO: 351641
  chr15:28351681-28351758
  hyper

SEQ ID NO: 360571 - DNA, 53 bp, Homo sapiens; identical to SEQ ID NO: 347321
  chr15:29130654-29130707
  hyper

SEQ ID NO: 360572 - DNA, 145 bp, Homo sapiens; identical to SEQ ID NO: 335062
  chr15:29432142-29432287
  hyper

SEQ ID NO: 360573 - DNA, 60 bp, Homo sapiens; identical to SEQ ID NO: 290645
  chr15:29561185-29561245
  hyper

SEQ ID NO: 360574 - DNA, 1045 bp, Homo sapiens; identical to SEQ ID NO: 351644
  chr15:29561316-29562361
  hyper

SEQ ID NO: 360575 - DNA, 63 bp, Homo sapiens; identical to SEQ ID NO: 203804
  chr15:29862439-29862502
  hyper

SEQ ID NO: 360576 - DNA, 288 bp, Homo sapiens; identical to SEQ ID NO: 290648
  chr15:29862582-29862870
  hyper

SEQ ID NO: 360577 - DNA, 67 bp, Homo sapiens; identical to SEQ ID NO: 351647
  chr15:29863222-29863289
  hyper

SEQ ID NO: 360578 - DNA, 329 bp, Homo sapiens; identical to SEQ ID NO: 351648
  chr15:30113537-30113866
  hyper

SEQ ID NO: 360579 - DNA, 319 bp, Homo sapiens; identical to SEQ ID NO: 203810
  chr15:30113984-30114303
  hyper

SEQ ID NO: 360580 - DNA, 431 bp, Homo sapiens; identical to SEQ ID NO: 203811
  chr15:30114349-30114780
  hyper

SEQ ID NO: 360581 - DNA, 375 bp, Homo sapiens; identical to SEQ ID NO: 290655
  chr15:30114810-30115185
  hyper

SEQ ID NO: 360582 - DNA, 339 bp, Homo sapiens; identical to SEQ ID NO: 345465
  chr15:31621317-31621656
  hyper

SEQ ID NO: 360583 - DNA, 507 bp, Homo sapiens; identical to SEQ ID NO: 351653
  chr15:31774606-31775113
  hyper

SEQ ID NO: 360584 - DNA, 209 bp, Homo sapiens; identical to SEQ ID NO: 290663
  chr15:32162282-32162491
  hyper

SEQ ID NO: 360585 - DNA, 761 bp, Homo sapiens; identical to SEQ ID NO: 345467
  chr15:32162523-32163284
  hyper

SEQ ID NO: 360586 - DNA, 155 bp, Homo sapiens; identical to SEQ ID NO: 351656
  chr15:32322773-32322928
  hyper

SEQ ID NO: 360587 - DNA, 46 bp, Homo sapiens; identical to SEQ ID NO: 351657
  chr15:34729898-34729944
  hyper

SEQ ID NO: 360588 - DNA, 72 bp, Homo sapiens; identical to SEQ ID NO: 351658
  chr15:34730043-34730115
  hyper

SEQ ID NO: 360589 - DNA, 89 bp, Homo sapiens
  chr15:35014062-35014151
  hyper
cgcgcaactggagagggcccttctgcaggagagaagagggaatgtgctgaatgagttaaagtgccctttgtccaccccccccccccgcc

SEQ ID NO: 360590 - DNA, 110 bp, Homo sapiens
  chr15:35014287-35014397
  hyper
gggctggcgctcacgcaggccgccagcaccctgcgctccaccccaccctgctccctaatgagaagagaggagctgaacccagacagccgctccctgttgacgccttaggc

SEQ ID NO: 360591 - DNA, 88 bp, Homo sapiens
  chr15:35046519-35046607
  hyper
cggactggggattggagcgggagactcagtccaggtgtgagaagggactcccgggggccgcccgacggggccccctgaccgccggctt

SEQ ID NO: 360592 - DNA, 181 bp, Homo sapiens; identical to SEQ ID NO: 290677
  chr15:35046689-35046870
  hyper

SEQ ID NO: 360593 - DNA, 94 bp, Homo sapiens
  chr15:37174944-37175038
  hyper
cgttccgcggtgtagattgacactcgttatgtgggggtctggttgcggttggaagacttatccgagtcagggctgcattgccagcgcctttccc

SEQ ID NO: 360594 - DNA, 240 bp, Homo sapiens
  chr15:37175296-37175536
  hyper
acttcagctaccttttccgtttccagcaaaattgagaagtacgaccccaaaaagaatagacacacccatggaaaagacgtgtgtgtgtgtgtgtgtgtgtgtgtgtgtgtgtgtgtgtgtgtagctatggtgacaacttttaaacactttttctgcttaaaaaaaaagattcggacagggtctggtattgctttgcgttgcaggaaagggtcattctggacaaggaaccgtctgaattcc

SEQ ID NO: 360595 - DNA, 60 bp, Homo sapiens
  chr15:37180043-37180103
  hyper
cgacaccccccttcctgcgttccccccagttatttactgggtgaccccgtcctttctctt

SEQ ID NO: 360596 - DNA, 171 bp, Homo sapiens; identical to SEQ ID NO: 290687
  chr15:37180138-37180309
  hyper

SEQ ID NO: 360597 - DNA, 133 bp, Homo sapiens; identical to SEQ ID NO: 351659
  chr15:37403336-37403469
  hyper

SEQ ID NO: 360598 - DNA, 111 bp, Homo sapiens; identical to SEQ ID NO: 335080
  chr15:38857279-38857390
  hyper

SEQ ID NO: 360599 - DNA, 300 bp, Homo sapiens; identical to SEQ ID NO: 351661
  chr15:39872823-39873123
  hyper

SEQ ID NO: 360600 - DNA, 161 bp, Homo sapiens
  chr15:40575352-40575513
  hyper
cggcgcgggagctgccgcccgcctagatacctgactttatagccttgggggtctccatggcaatggctgtcctgggagcggactgcgccgtcagggcagagacggacggggcgggggagaccgctcctgacccccaccccttcgtgggccacgaagtaggg

SEQ ID NO: 360601 - DNA, 247 bp, Homo sapiens; identical to SEQ ID NO: 335084
  chr15:40762832-40763079
  hyper

SEQ ID NO: 360602 - DNA, 416 bp, Homo sapiens
  chr15:41136701-41137117
  hyper
cggaacccagaggcccgcgctctgaaggtgacccccctggggaggaaggcgatggcccctgcgaggacgatggcccgcgcccgcctcgccccggccggcatccctgccgtcgccttgtggcttctgtgcacgctcggcctccagggcacccaggccgggccaccgcccgcgccccctgggctgcccgcgggagccgactgcctgaacagctttaccgccggggtgcctggcttcgtgctggacaccaacgcctcggtcagcaacggagctaccttcctggagtcccccaccgtgcgccggggctgggactgcgtgcgcgcctgctgcaccacccagaactgcaacttggcgctagtggagctgcagcccgaccgcggggaggacgccatcgccgcctgcttcctcatcaactgcct

SEQ ID NO: 360603 - DNA, 44 bp, Homo sapiens; identical to SEQ ID NO: 203840
  chr15:41137147-41137191
  hyper

SEQ ID NO: 360604 - DNA, 384 bp, Homo sapiens; identical to SEQ ID NO: 345468
  chr15:41786420-41786804
  hyper

SEQ ID NO: 360605 - DNA, 43 bp, Homo sapiens; identical to SEQ ID NO: 351664
  chr15:41788242-41788285
  hyper

SEQ ID NO: 360606 - DNA, 526 bp, Homo sapiens; identical to SEQ ID NO: 290724
  chr15:41804115-41804641
  hyper

SEQ ID NO: 360607 - DNA, 205 bp, Homo sapiens; identical to SEQ ID NO: 290725
  chr15:41805869-41806074
  hyper

SEQ ID NO: 360608 - DNA, 61 bp, Homo sapiens
  chr15:41913266-41913327
  hyper
cgccacactcccataattacccaaaccgtctcattccaagcccaaggaccgggctttcaag

SEQ ID NO: 360609 - DNA, 361 bp, Homo sapiens; identical to SEQ ID NO: 290728
  chr15:41913372-41913733
  hyper

SEQ ID NO: 360610 - DNA, 210 bp, Homo sapiens; identical to SEQ ID NO: 290729
  chr15:41913957-41914167
  hyper

SEQ ID NO: 360611 - DNA, 31 bp, Homo sapiens
  chr15:41914240-41914271
  hyper
gggtggggggcgtggcgggtcacgtgccttc

SEQ ID NO: 360612 - DNA, 135 bp, Homo sapiens; identical to SEQ ID NO: 345469
  chr15:41953174-41953309
  hyper

SEQ ID NO: 360613 - DNA, 447 bp, Homo sapiens; identical to SEQ ID NO: 335091
  chr15:42873450-42873897
  hyper

SEQ ID NO: 360614 - DNA, 41 bp, Homo sapiens; identical to SEQ ID NO: 347332
  chr15:43415157-43415198
  hyper

SEQ ID NO: 360615 - DNA, 279 bp, Homo sapiens; identical to SEQ ID NO: 347333
  chr15:43415273-43415552
  hyper

SEQ ID NO: 360616 - DNA, 353 bp, Homo sapiens
  chr15:43622635-43622988
  hyper
cgttggtgttctgtaccgcgcctgcccgacgctcacggctccgggggcccatggccagaagagactcaggaatggcagtctgtcacggttgtgagccgccccttggttagcacacacctcacggacctcggtagggggaaaaaaaccacccatgctcctggacttccccttccgccggcacttgtgcgtcacttccgggaagagcgcatctcgccaaccagaattgaggagggtgtagccagtgctaagttcgcttgcggctgacctttctttggaatgtcgtgagttccatttgtcccagaatacggtccgctaccgctgtgacatgagtgttagggaaggcgggttgtcac

SEQ ID NO: 360617 - DNA, 257 bp, Homo sapiens
  chr15:43803503-43803760
  hyper
cgtctgcatctccatccctagtgtgcacttcctgagatctgcgcccttgtcacctgcatcttccatgccatgtgtccgtatcctctcgctctactaacatctcgcttgcccatccttactgcacactccatggcgttccgcagtctccctgaggcagcggagctctatgcagcccctggggcccctctggtcacaccctccaccgcagtgttttggaccaggtgtcctgaaagtcctcaccatccctggagaatcca

SEQ ID NO: 360618 - DNA, 133 bp, Homo sapiens
  chr15:43803825-43803958
  hyper
cgtacaaatctcaaatctctgaatgccagtagccaaccactaagtgaccttcgtggctaccagctcctaagtcctcacctccttccccagtgctgtgcctgtggctgtggtgcagtgctgcggagccacctgc

SEQ ID NO: 360619 - DNA, 171 bp, Homo sapiens; identical to SEQ ID NO: 335095
  chr15:43809685-43809856
  hyper

SEQ ID NO: 360620 - DNA, 64 bp, Homo sapiens
  chr15:45404769-45404833
  hyper
cggtgcggttgtggagcgacggcaggccggctatgccccgcgtggctgcgttgctgagccggcg

SEQ ID NO: 360621 - DNA, 232 bp, Homo sapiens
  chr15:45405166-45405398
  hyper
cgggcccccagaacgcaccaacagcaccacgctcgtggtgcctcaggttgttaaaccagccgtcatagcgctgcacttcccagggcagtgagagtgcgtcctgactgcctgtgggcacagagaagggcctcctcagcactacgctcccagctacccctcccgagcaacgaaggccttggccagtccttccccagctcgcggagcgcccctaaccggacccaagtgtcgggcc

SEQ ID NO: 360622 - DNA, 91 bp, Homo sapiens
  chr15:45406361-45406452
  hyper
cgccagtgtgagcatctggacctagggctcaccctcctgccgtggaggtggggcccttatttgcacaacctcttccagctcagaccagccc

SEQ ID NO: 360623 - DNA, 54 bp, Homo sapiens
  chr15:45406895-45406949
  hyper
tttggctctagcagcaagcttcctgctcatcttgccggggatccgtggccactc

SEQ ID NO: 360624 - DNA, 205 bp, Homo sapiens
  chr15:45479833-45480038
  hyper
cgaagtcgcgctcccgctgcagcctgtaggcggccaggatgtccgggggcggcgcggggggcgcggccggagagggcgcaggggggcggtagtcgggctcggggggcgccggcttgctgccccctccgccgccgccccccccgcggaagcccaggtgctcccggagccacttggctactccgccgctgccgccccctcctgggcc

SEQ ID NO: 360625 - DNA, 537 bp, Homo sapiens; identical to SEQ ID NO: 351669
  chr15:45492672-45493209
  hyper

SEQ ID NO: 360626 - DNA, 159 bp, Homo sapiens; identical to SEQ ID NO: 351670
  chr15:45493371-45493530
  hyper

SEQ ID NO: 360627 - DNA, 210 bp, Homo sapiens; identical to SEQ ID NO: 351671
  chr15:45669920-45670130
  hyper

SEQ ID NO: 360628 - DNA, 274 bp, Homo sapiens; identical to SEQ ID NO: 203861
  chr15:45670188-45670462
  hyper

SEQ ID NO: 360629 - DNA, 124 bp, Homo sapiens; identical to SEQ ID NO: 345470
  chr15:45722474-45722598
  hyper

SEQ ID NO: 360630 - DNA, 339 bp, Homo sapiens; identical to SEQ ID NO: 345471
  chr15:45722599-45722938
  hyper

SEQ ID NO: 360631 - DNA, 212 bp, Homo sapiens
  chr15:48009312-48009524
  hyper
cgaaaaggttgcttcgcaggctgcagcacccactgcgagctggatgactgaggcactgggagttgctagaaggagcagctactcagaggtggggagagggagggtgcgcagcagagcgccggagaggagggacgcggaggccaccgaggggtcagcagggccgcggcgccagggtgggggcctccaggcggcgctggccacggttcacccgc

SEQ ID NO: 360632 - DNA, 211 bp, Homo sapiens; identical to SEQ ID NO: 203867
  chr15:48009670-48009881
  hyper

SEQ ID NO: 360633 - DNA, 120 bp, Homo sapiens; identical to SEQ ID NO: 290783
  chr15:48009969-48010089
  hyper

SEQ ID NO: 360634 - DNA, 208 bp, Homo sapiens; identical to SEQ ID NO: 351677
  chr15:48010897-48011105
  hyper

SEQ ID NO: 360635 - DNA, 118 bp, Homo sapiens; identical to SEQ ID NO: 345472
  chr15:48469946-48470064
  hyper

SEQ ID NO: 360636 - DNA, 52 bp, Homo sapiens; identical to SEQ ID NO: 203870
  chr15:48470094-48470146
  hyper

SEQ ID NO: 360637 - DNA, 158 bp, Homo sapiens; identical to SEQ ID NO: 203871
  chr15:48470215-48470373
  hyper

SEQ ID NO: 360638 - DNA, 77 bp, Homo sapiens; identical to SEQ ID NO: 345475
  chr15:48936649-48936726
  hyper

SEQ ID NO: 360639 - DNA, 350 bp, Homo sapiens; identical to SEQ ID NO: 335110
  chr15:50474768-50475118
  hyper

SEQ ID NO: 360640 - DNA, 344 bp, Homo sapiens
  chr15:51386268-51386612
  hyper
gacccctgccccaaccactcgcgaggccttttctgttcagagcccccagtcacgttcttggacccagtcacctgcgccgcagcgcagtcccggcgccccaggttcgaggacccggcccgcgctcggaaagttatttcaaaaggcagatgtgttgcaaccctctctgcagcaaactacagtacgcggattcccgaacccttccccgcccccacccagcccgggcgaccagagcccgccgcgggagactggcagcaaggagagccacccctaaatgcaccttccctccctcccgcgcgcccaagtgcaatggggttgggggaagccccaaagcaaactcacgacgc

SEQ ID NO: 360641 - DNA, 185 bp, Homo sapiens
  chr15:52404388-52404573
  hyper
cggctgcccgtcccgccccgtgtcccggtgtccgccgcgtgctcacccagccgccctgagcctgcagccaggcgcggtgctgccccatgagccgcgagctcagcaaggccaccaggcgctggcagtcccgggcgacgtcgccctcctgctcctttagccgcggctggaagccccacttcttccac

SEQ ID NO: 360642 - DNA, 815 bp, Homo sapiens
  chr15:52587420-52588235
  hyper
cgaggcgctccagtcccgggagatggggacgcacgcgcgacccctgggcactggggattctaggccccgaggccggagcggcggagggggcggcccctcccacagggtcttcccacccacagggcacccaggcgcagcggagccaggagggggcttacccgcgggcagggacggagcacgccggggccctggaggggcgacgctcgctcgtgtccccggtccccgtggcccctccgcggcgcctccgcggcccccagcgcgcgcccgcccgccctgccgtgtcaggtgcgcaggtgtggcaggtgtggcccgggcgccaggtcgagtcagcgttagcagggccggctcccccacagcgctcccaggagcccagcggaccctcctacctgcgtgtacagctcggccaccgccatgggcaggaggggccggggccaggccggggctgccgaacgtgcgaggctcgggggctgggcctgcgccgcagaggccgggcgcaggagagaccgccgcggaaatcaccgccgggccatcttgcccaaagttttccaacggcctcctgttcccgttcccgagttggcggcgaggggagggggcagcggcgggattggtccctccaagcttggcccggctagtcggcgctgccattggccggggccgggcggctgcacctggcgggagcgcgggtggagaaggttggggcccggggcgcgctgccaggcaggaacagatgcatccggaggctgcccggcccgagtgttagctcctcaaagagcagaggatacgaccatttaaatggaagacccaagggaatcaac

SEQ ID NO: 360643 - DNA, 227 bp, Homo sapiens; identical to SEQ ID NO: 203880
  chr15:53078992-53079219
  hyper

SEQ ID NO: 360644 - DNA, 217 bp, Homo sapiens; identical to SEQ ID NO: 203881
  chr15:53080082-53080299
  hyper

SEQ ID NO: 360645 - DNA, 159 bp, Homo sapiens; identical to SEQ ID NO: 203882
  chr15:53082144-53082303
  hyper

SEQ ID NO: 360646 - DNA, 48 bp, Homo sapiens
  chr15:53095580-53095628
  hyper
cgtaaaagacgagaaaaacatcccgggtgctctgcataaaccacacgc

SEQ ID NO: 360647 - DNA, 147 bp, Homo sapiens
  chr15:53489675-53489822
  hyper
cggggctgctgagcacatcgagagcgccccctaggcgctggcacgtggctctgcaggaggaagccaccggtcgatcatccctgcgtttgtcaggcgcccaaacccacacacaaagccctggcacaggcggcgacgcggcctctctcc

SEQ ID NO: 360648 - DNA, 379 bp, Homo sapiens
  chr15:57598802-57599181
  hyper
cgcgcacagcccgaggaggcagagccccagacgggaatgggcttttcagaggtggggtgcgggcgaggggacgatgcattatttttaatatttgatttatttttccaactggacttcttcccggggctctttctgggcccagctgcctttgtgatcccgcgccccggtcctcggcctctcacctccagcgccggggcgccccctgctgtcggaagcggctgtgaccgggcagaggtgctatctgggactctgggttctcagcccggggacagcgaaccgaggggcagatgatccatcagaaaagagccggcactgcccagccccgcgcccctgcccctgcctttttccgggagcgcgccgcgccgcacccgctacggcc

SEQ ID NO: 360649 - DNA, 102 bp, Homo sapiens; identical to SEQ ID NO: 203896
  chr15:59729554-59729656
  hyper

SEQ ID NO: 360650 - DNA, 91 bp, Homo sapiens; identical to SEQ ID NO: 347343
  chr15:59729815-59729906
  hyper

SEQ ID NO: 360651 - DNA, 34 bp, Homo sapiens
  chr15:60288752-60288786
  hyper
cgtcgggccagtgaacgacgtcagccgcaactct

SEQ ID NO: 360652 - DNA, 75 bp, Homo sapiens; identical to SEQ ID NO: 351687
  chr15:60289235-60289310
  hyper

SEQ ID NO: 360653 - DNA, 35 bp, Homo sapiens
  chr15:60298179-60298214
  hyper
cacctcactcgccttccctggctcccagtcctgcc

SEQ ID NO: 360654 - DNA, 1567 bp, Homo sapiens
  chr15:60883782-60885349
  hyper
cgcgactaacccgcgcccgtcggccctcaccacggtctaacctccgcccctgcccgcggatcccgtgggctgccgagttcctccccacctccatccaccagccaaagtgtcaagcggggtgcgccgcggctccctgggccgcccagagcgtcttggcacgctcgaggcgcccgtctcgctccggcccgcgcgctttcggaagtggccgcggcgggacacagcgcgggacacagcgcggacctgcggcacttgcccggccggcggccgctgaggcgctcggggacgcaggggcagggcgcaaggcctggggcgctgaccagtccccggggatgacatcgcgacaacgcgcacgcacggccctgcccggccgcggcgcctccccgacctaggccggagctgtcccgggtgcgggccctggggaccggccgcgggcgtccccggcttcctctgaactccgcagaccctccccttcctttccgaagcgcggcgactcccggcaaactttcttttgggagacccgcccggtgccaagcggacccaagagactgacaggagccggagggggcagcagagggggatccaccccgtgcgcctttgccccccaatcggaggcaggccgatcccgtggccgggctcaggtggcgccgcggcggtggcccagaaggccctggcagggcccccgcgccgagccccgggcagtacgtgcgttcgggcaggcgcgcccacccctccccctgcgcgccctcctccccgccccccggagccgccagcccacccggccccggcggggcgcccgggctcacctttcatcgctgcgatcacaaaatacatcatttaagccgcggtgcggagagcgcagggagagcggatggtccgaccccggagccccctctgccgccgccgcgccgccgccgcccgagccacagcagcagctgccgcagctgcccgcccgccgagagccatcccgagccataagaggctccatgtgaccggctgacatcacggccgccgctctgtttacaccgcgcccctccgcttcctcccggggcgggaggcgggaggcgggaggcgggaggcaggcgcgccccagcgccgcgccccgccccgcccccgcgggcaggtgagtagcagcggcggctctgctggcccaccccggccgggcctgccctcccgcgccccgggccctcgcccgggcgcccgccttcccctcgccttcgggatcacctgtggccgccggtcgcttttctgcacgcagcgccccgcggaacgcgcctctgaccactttctgcccccactcggtggggcaagaggctcgcaacccgacgccactctcccgctggcttgccggagcactcgggggcgataaatgcgccagctcgttggtggaaaagacaggtttggtctggggagctacggtcacccgcatttcctagagtgccccagctctaatcggaaggtacggcccacttctgggccgtggagaacgaagccactgggaccgtccggggagtggagtaagctcctccgaagtctttctggagagactcggcctgggcgggggaactcc

SEQ ID NO: 360655 - DNA, 376 bp, Homo sapiens; identical to SEQ ID NO: 351689
  chr15:61519485-61519861
  hyper

SEQ ID NO: 360656 - DNA, 39 bp, Homo sapiens
  chr15:61520369-61520408
  hyper
cgagagggaaggattcccagagcagaaataagtttcggt

SEQ ID NO: 360657 - DNA, 58 bp, Homo sapiens; identical to SEQ ID NO: 203905
  chr15:61520497-61520555
  hyper

SEQ ID NO: 360658 - DNA, 178 bp, Homo sapiens; identical to SEQ ID NO: 203906
  chr15:61520576-61520754
  hyper

SEQ ID NO: 360659 - DNA, 97 bp, Homo sapiens; identical to SEQ ID NO: 351690
  chr15:62359006-62359103
  hyper

SEQ ID NO: 360660 - DNA, 381 bp, Homo sapiens; identical to SEQ ID NO: 351691
  chr15:62359104-62359485
  hyper

SEQ ID NO: 360661 - DNA, 114 bp, Homo sapiens; identical to SEQ ID NO: 347344
  chr15:62359741-62359855
  hyper

SEQ ID NO: 360662 - DNA, 87 bp, Homo sapiens; identical to SEQ ID NO: 351693
  chr15:62456599-62456686
  hyper

SEQ ID NO: 360663 - DNA, 130 bp, Homo sapiens; identical to SEQ ID NO: 203914
  chr15:62457008-62457138
  hyper

SEQ ID NO: 360664 - DNA, 257 bp, Homo sapiens; identical to SEQ ID NO: 351695
  chr15:62457296-62457553
  hyper

SEQ ID NO: 360665 - DNA, 38 bp, Homo sapiens; identical to SEQ ID NO: 351696
  chr15:62684313-62684351
  hyper

SEQ ID NO: 360666 - DNA, 34 bp, Homo sapiens; identical to SEQ ID NO: 347345
  chr15:63779725-63779759
  hyper

SEQ ID NO: 360667 - DNA, 71 bp, Homo sapiens; identical to SEQ ID NO: 347346
  chr15:63795400-63795471
  hyper

SEQ ID NO: 360668 - DNA, 350 bp, Homo sapiens; identical to SEQ ID NO: 203920
  chr15:63795501-63795851
  hyper

SEQ ID NO: 360669 - DNA, 338 bp, Homo sapiens; identical to SEQ ID NO: 347348
  chr15:63795894-63796232
  hyper

SEQ ID NO: 360670 - DNA, 137 bp, Homo sapiens; identical to SEQ ID NO: 351701
  chr15:64443636-64443773
  hyper

SEQ ID NO: 360671 - DNA, 194 bp, Homo sapiens; identical to SEQ ID NO: 351702
  chr15:67357339-67357533
  hyper

SEQ ID NO: 360672 - DNA, 189 bp, Homo sapiens; identical to SEQ ID NO: 351703
  chr15:67357544-67357733
  hyper

SEQ ID NO: 360673 - DNA, 40 bp, Homo sapiens; identical to SEQ ID NO: 351704
  chr15:68125183-68125223
  hyper

SEQ ID NO: 360674 - DNA, 45 bp, Homo sapiens
  chr15:68126860-68126905
  hyper
cgtgactttcgtttttaataataataataataataataaaagatg

SEQ ID NO: 360675 - DNA, 363 bp, Homo sapiens; identical to SEQ ID NO: 203938
  chr15:68127129-68127492
  hyper

SEQ ID NO: 360676 - DNA, 92 bp, Homo sapiens; identical to SEQ ID NO: 203939
  chr15:68128502-68128594
  hyper

SEQ ID NO: 360677 - DNA, 287 bp, Homo sapiens; identical to SEQ ID NO: 335155
  chr15:68347714-68348001
  hyper

SEQ ID NO: 360678 - DNA, 52 bp, Homo sapiens; identical to SEQ ID NO: 351708
  chr15:68723471-68723523
  hyper

SEQ ID NO: 360679 - DNA, 109 bp, Homo sapiens; identical to SEQ ID NO: 290942
  chr15:68724333-68724442
  hyper

SEQ ID NO: 360680 - DNA, 188 bp, Homo sapiens; identical to SEQ ID NO: 351710
  chr15:68724480-68724668
  hyper

SEQ ID NO: 360681 - DNA, 202 bp, Homo sapiens; identical to SEQ ID NO: 335157
  chr15:68821338-68821540
  hyper

SEQ ID NO: 360682 - DNA, 234 bp, Homo sapiens; identical to SEQ ID NO: 335158
  chr15:69109452-69109686
  hyper

SEQ ID NO: 360683 - DNA, 263 bp, Homo sapiens; identical to SEQ ID NO: 335159
  chr15:69114222-69114485
  hyper

SEQ ID NO: 360684 - DNA, 162 bp, Homo sapiens; identical to SEQ ID NO: 351713
  chr15:69366376-69366538
  hyper

SEQ ID NO: 360685 - DNA, 65 bp, Homo sapiens; identical to SEQ ID NO: 351714
  chr15:69366730-69366795
  hyper

SEQ ID NO: 360686 - DNA, 361 bp, Homo sapiens
  chr15:71055275-71055636
  hyper
cggccgagcgggcgtgggcagcagggcgagcgccgggagaggagagcgacgagggggggtcaacggaaagagcggagtaggggtgccaatcgaggaactttggatttaggaggagggggccagaaccgccccactgaggtttcttccagaagttcggaggcttgggagaaaggggtggggaagagacccgtagaggctcgggtgcggcggcggggaggatccccggggtctctgggctgacggagtctccggcctcagggaggagtcgccagggccgccgaagccgaactggcagaggaaaagcagaggaaggcggcgcgcgaactcgccagcaaaggagggctgcgctgctcccggagcg

SEQ ID NO: 360687 - DNA, 42 bp, Homo sapiens; identical to SEQ ID NO: 203952
  chr15:71055815-71055857
  hyper

SEQ ID NO: 360688 - DNA, 249 bp, Homo sapiens
  chr15:71055980-71056229
  hyper
cgggaatggggcgggacttcccttttaaactgagtaacacccttcctctcccagctggaggaaaagtttgggaactttagcccgggaaggggcggaggaggtgggcggccagaggcgtggagatgcgcgcaggccgggctccaggccaccggcgcccgcccacccggagcttaagatctagagagagcacggggtcccgcctttgccacctctcatcttcccggactcccctcctctttccacccacgc

SEQ ID NO: 360689 - DNA, 114 bp, Homo sapiens; identical to SEQ ID NO: 290970
  chr15:71146199-71146313
  hyper

SEQ ID NO: 360690 - DNA, 81 bp, Homo sapiens; identical to SEQ ID NO: 290971
  chr15:71146345-71146426
  hyper

SEQ ID NO: 360691 - DNA, 65 bp, Homo sapiens
  chr15:71146754-71146819
  hyper
gcccgagaggaggtgtcagggctccctcctcctgcgccttctttcacggcgccgcagggatgggc

SEQ ID NO: 360692 - DNA, 193 bp, Homo sapiens; identical to SEQ ID NO: 351715
  chr15:71184276-71184469
  hyper

SEQ ID NO: 360693 - DNA, 766 bp, Homo sapiens; identical to SEQ ID NO: 290974
  chr15:71184499-71185265
  hyper

SEQ ID NO: 360694 - DNA, 127 bp, Homo sapiens; identical to SEQ ID NO: 351717
  chr15:71185295-71185422
  hyper

SEQ ID NO: 360695 - DNA, 587 bp, Homo sapiens; identical to SEQ ID NO: 345477
  chr15:71407569-71408156
  hyper

SEQ ID NO: 360696 - DNA, 773 bp, Homo sapiens
  chr15:72523255-72524028
  hyper
cggcgctggggacttctgaagagcaggccccaggcgtgaggagccgttctcctctctctgagctccactgcatcccagacgccctggatcctgcgccgccctgcctgcgtgcccggggccggccggcgcgccgggattccgcactagccgggcgactggcccttggtggggactgatggcgtagcctcctgcaccgctcacctccggcgctgaccgactcgggctacgctgcaaagacgaagagatccggagccacggcgcgtgcagctgctgtgcaaggagccactgcctcagcctcaaggttatcccgctgcgggccgccgcaatccctccgccgccccgccctctgcccaatcccggctccgggcgacccgggccccgccccctgcgtccccgcgggcgcagtcaccttcaggaggaagcgcggcggcggcggcggaacgcgcgggcaggttgccctttcggtgggactaaattctgcggcggaaggacacagattcagagtcacattttaagaaacctgatgaccaatggggacgcggcggggcaacggggcccgcccccggagcgactttcctcccagacccccgggcgccgggccacctgttgccgccaagttgggctgccagatggggtgtcttttcttggctctcggcccaggccaccccagctgtcccggcctacctgggcagggcccagatttatgggttccggggcagcattctcccggccccgccctgccactccccactcctccgggtgtctgctctggc

SEQ ID NO: 360697 - DNA, 118 bp, Homo sapiens; identical to SEQ ID NO: 335168
  chr15:72612103-72612221
  hyper

SEQ ID NO: 360698 - DNA, 79 bp, Homo sapiens; identical to SEQ ID NO: 347351
  chr15:72612906-72612985
  hyper

SEQ ID NO: 360699 - DNA, 331 bp, Homo sapiens; identical to SEQ ID NO: 335170
  chr15:72668400-72668731
  hyper

SEQ ID NO: 360700 - DNA, 448 bp, Homo sapiens; identical to SEQ ID NO: 351720
  chr15:73660925-73661373
  hyper

SEQ ID NO: 360701 - DNA, 70 bp, Homo sapiens
  chr15:74219413-74219483
  hyper
cgccgtccctgcccctgccggggcgcgtgggctcggacaccgtgcgcggccaggcgcggcacccattcgg

SEQ ID NO: 360702 - DNA, 56 bp, Homo sapiens
  chr15:74219620-74219676
  hyper
cctaccgccagcagccctcctacccgcagcagttcccctacccgcaggcgcccttc

SEQ ID NO: 360703 - DNA, 264 bp, Homo sapiens; identical to SEQ ID NO: 351721
  chr15:74988539-74988803
  hyper

SEQ ID NO: 360704 - DNA, 457 bp, Homo sapiens; identical to SEQ ID NO: 335177
  chr15:75075794-75076251
  hyper

SEQ ID NO: 360705 - DNA, 247 bp, Homo sapiens; identical to SEQ ID NO: 291013
  chr15:75248843-75249090
  hyper

SEQ ID NO: 360706 - DNA, 49 bp, Homo sapiens; identical to SEQ ID NO: 351722
  chr15:75250996-75251045
  hyper

SEQ ID NO: 360707 - DNA, 86 bp, Homo sapiens; identical to SEQ ID NO: 351723
  chr15:75251811-75251897
  hyper

SEQ ID NO: 360708 - DNA, 138 bp, Homo sapiens
  chr15:75470758-75470896
  hyper
cgtgtggctcggccactgcgccaggtcttggaacatctaaggcagaaacaggaccaacacccgcaagcctccaacagcccctggggctccgtccagccgttggggtggaggggttggggggaggtgcaggggcgggca

SEQ ID NO: 360709 - DNA, 191 bp, Homo sapiens; identical to SEQ ID NO: 335181
  chr15:75976190-75976381
  hyper

SEQ ID NO: 360710 - DNA, 134 bp, Homo sapiens; identical to SEQ ID NO: 203983
  chr15:76629531-76629665
  hyper

SEQ ID NO: 360711 - DNA, 67 bp, Homo sapiens; identical to SEQ ID NO: 351726
  chr15:76638250-76638317
  hyper

SEQ ID NO: 360712 - DNA, 86 bp, Homo sapiens; identical to SEQ ID NO: 351727
  chr15:76639126-76639212
  hyper

SEQ ID NO: 360713 - DNA, 46 bp, Homo sapiens; identical to SEQ ID NO: 351728
  chr15:78236702-78236748
  hyper

SEQ ID NO: 360714 - DNA, 60 bp, Homo sapiens; identical to SEQ ID NO: 203990
  chr15:79383268-79383328
  hyper

SEQ ID NO: 360715 - DNA, 62 bp, Homo sapiens; identical to SEQ ID NO: 351730
  chr15:79384146-79384208
  hyper

SEQ ID NO: 360716 - DNA, 1218 bp, Homo sapiens; identical to SEQ ID NO: 335194
  chr15:80215312-80216530
  hyper

SEQ ID NO: 360717 - DNA, 128 bp, Homo sapiens; identical to SEQ ID NO: 335195
  chr15:80352864-80352992
  hyper

SEQ ID NO: 360718 - DNA, 196 bp, Homo sapiens; identical to SEQ ID NO: 347353
  chr15:81294105-81294301
  hyper

SEQ ID NO: 360719 - DNA, 194 bp, Homo sapiens; identical to SEQ ID NO: 345478
  chr15:82339684-82339878
  hyper

SEQ ID NO: 360720 - DNA, 43 bp, Homo sapiens
  chr15:83315393-83315436
  hyper
gcgtctgcctggcttttctcggtcacggggtcaacgcggggcc

SEQ ID NO: 360721 - DNA, 73 bp, Homo sapiens
  chr15:83377928-83378001
  hyper
cgccttcctgaagaggccccaggctcaagctcaagttcgctgactcagacccctcccccacatttttgggaag

SEQ ID NO: 360722 - DNA, 125 bp, Homo sapiens; identical to SEQ ID NO: 204007
  chr15:83378087-83378212
  hyper

SEQ ID NO: 360723 - DNA, 54 bp, Homo sapiens
  chr15:83620900-83620954
  hyper
cgtggagaacgacaaactgcttagactcacacaggccctggagttgactgcgcc

SEQ ID NO: 360724 - DNA, 319 bp, Homo sapiens
  chr15:83621407-83621726
  hyper
gccgctccattccgcggggctgcgcggctgccactgctgccactgccgccaccgccgccaggcgcgggcgggcgggggctgggcggccgcgctggggcggtgcccgccccgccctccccagccgctacccccgcccggctccttacgtaacctcgtggcccccgggccgcggcagcgagccaagaggcggggggcgcagcactgtgtgcaccgtcccccgcgcagccgcgcagtcgccgcttttctcccgggccacccagtcctcggtgccggccccgcgttggcgcgcccccgccccacgccgacccggggccctggc

SEQ ID NO: 360725 - DNA, 127 bp, Homo sapiens
  chr15:83875521-83875648
  hyper
cggggcaccgggaatcgcgctcagggaaaactcaacaagtctagaaggcaaagagatggatgaatgactgccaagaggctcccgctggcctctggatgaccactaccactttccaggatttactgcc

SEQ ID NO: 360726 - DNA, 59 bp, Homo sapiens; identical to SEQ ID NO: 347355
  chr15:83951722-83951781
  hyper

SEQ ID NO: 360727 - DNA, 227 bp, Homo sapiens; identical to SEQ ID NO: 204012
  chr15:83952822-83953049
  hyper

SEQ ID NO: 360728 - DNA, 181 bp, Homo sapiens
  chr15:84323434-84323615
  hyper
gtggaaagtgggcgtgggggtgaccgggacgcggcggaggcactggaggagcgacttcgaggcagcgggtagtcggaggagtgtgcactcggaaggctggtgcgagcaggcgagggtggcgcagagtcccagggccccgcactggccgcctcccttcagccaggagtcgccgcctcaggtc

SEQ ID NO: 360729 - DNA, 99 bp, Homo sapiens; identical to SEQ ID NO: 351737
  chr15:88801240-88801339
  hyper

SEQ ID NO: 360730 - DNA, 493 bp, Homo sapiens; identical to SEQ ID NO: 291111
  chr15:89437837-89438330
  hyper

SEQ ID NO: 360731 - DNA, 250 bp, Homo sapiens; identical to SEQ ID NO: 204020
  chr15:89438421-89438671
  hyper

SEQ ID NO: 360732 - DNA, 107 bp, Homo sapiens; identical to SEQ ID NO: 204021
  chr15:89438672-89438779
  hyper

SEQ ID NO: 360733 - DNA, 101 bp, Homo sapiens; identical to SEQ ID NO: 345482
  chr15:89438863-89438964
  hyper

SEQ ID NO: 360734 - DNA, 68 bp, Homo sapiens
  chr15:89913879-89913947
  hyper
ggccagaggccaacccatccgatttcggcctcctggtacgaatgcctgcccctactagagcaatgttc

SEQ ID NO: 360735 - DNA, 136 bp, Homo sapiens
  chr15:89921803-89921939
  hyper
cgcggctgcttcccgcccgcgcaggatcaggccggcccccgcgggcctggagctggatccagagctagggaaactggaaaaacaggcacaaactcggaagccgcggtacggcaagagcctaagcaaagaatccttt

SEQ ID NO: 360736 - DNA, 34 bp, Homo sapiens; identical to SEQ ID NO: 351742
  chr15:89942592-89942626
  hyper

SEQ ID NO: 360737 - DNA, 59 bp, Homo sapiens
  chr15:89943816-89943875
  hyper
cgaggcccagtaagatcgccggcctttcccaaaggcgtttggctcacccatctctcctc

SEQ ID NO: 360738 - DNA, 294 bp, Homo sapiens; identical to SEQ ID NO: 291126
  chr15:89949942-89950236
  hyper

SEQ ID NO: 360739 - DNA, 40 bp, Homo sapiens; identical to SEQ ID NO: 335222
  chr15:90016187-90016227
  hyper

SEQ ID NO: 360740 - DNA, 109 bp, Homo sapiens; identical to SEQ ID NO: 351743
  chr15:91427360-91427469
  hyper

SEQ ID NO: 360741 - DNA, 77 bp, Homo sapiens; identical to SEQ ID NO: 351744
  chr15:91427979-91428056
  hyper

SEQ ID NO: 360742 - DNA, 103 bp, Homo sapiens; identical to SEQ ID NO: 347360
  chr15:92459227-92459330
  hyper

SEQ ID NO: 360743 - DNA, 200 bp, Homo sapiens; identical to SEQ ID NO: 347361
  chr15:93199039-93199239
  hyper

SEQ ID NO: 360744 - DNA, 87 bp, Homo sapiens; identical to SEQ ID NO: 335230
  chr15:93352994-93353081
  hyper

SEQ ID NO: 360745 - DNA, 460 bp, Homo sapiens; identical to SEQ ID NO: 351747
  chr15:96873798-96874258
  hyper

SEQ ID NO: 360746 - DNA, 159 bp, Homo sapiens; identical to SEQ ID NO: 351748
  chr15:96874514-96874673
  hyper

SEQ ID NO: 360747 - DNA, 597 bp, Homo sapiens; identical to SEQ ID NO: 291171
  chr15:96883828-96884425
  hyper

SEQ ID NO: 360748 - DNA, 157 bp, Homo sapiens
  chr15:96884499-96884656
  hyper
cgcgagcgccgggctgccaggctcggcagggccgggtaatagaaaacacattggttaccaaaaagaaaaaaaggagggcggggggcgctaaaggccattccgtctgcaggcagaaaacccttttttaaactcttgctggcaagtgagtccggtcctc

SEQ ID NO: 360749 - DNA, 134 bp, Homo sapiens; identical to SEQ ID NO: 351749
  chr15:96960242-96960376
  hyper

SEQ ID NO: 360750 - DNA, 99 bp, Homo sapiens; identical to SEQ ID NO: 291180
  chr15:96960409-96960508
  hyper

SEQ ID NO: 360751 - DNA, 289 bp, Homo sapiens; identical to SEQ ID NO: 351751
  chr15:96960826-96961115
  hyper

SEQ ID NO: 360752 - DNA, 324 bp, Homo sapiens; identical to SEQ ID NO: 351752
  chr15:99090794-99091118
  hyper

SEQ ID NO: 360753 - DNA, 236 bp, Homo sapiens; identical to SEQ ID NO: 204059
  chr15:99091372-99091608
  hyper

SEQ ID NO: 360754 - DNA, 97 bp, Homo sapiens; identical to SEQ ID NO: 204070
  chr15:100881161-100881258
  hyper

SEQ ID NO: 360755 - DNA, 468 bp, Homo sapiens; identical to SEQ ID NO: 345483
  chr15:100882092-100882560
  hyper

SEQ ID NO: 360756 - DNA, 547 bp, Homo sapiens; identical to SEQ ID NO: 335243
  chr15:100889946-100890493
  hyper

SEQ ID NO: 360757 - DNA, 497 bp, Homo sapiens; identical to SEQ ID NO: 335245
  chr15:101458286-101458783
  hyper

SEQ ID NO: 360758 - DNA, 693 bp, Homo sapiens; identical to SEQ ID NO: 291211
  chr15:101459313-101460006
  hyper

SEQ ID NO: 360759 - DNA, 50 bp, Homo sapiens; identical to SEQ ID NO: 351759
  chr15:101460335-101460385
  hyper

SEQ ID NO: 360760 - DNA, 143 bp, Homo sapiens; identical to SEQ ID NO: 291213
  chr15:101513869-101514012
  hyper

SEQ ID NO: 360761 - DNA, 61 bp, Homo sapiens; identical to SEQ ID NO: 351761
  chr15:102028780-102028841
  hyper

SEQ ID NO: 360762 - DNA, 502 bp, Homo sapiens; identical to SEQ ID NO: 291217
  chr15:102028992-102029494
  hyper

SEQ ID NO: 360763 - DNA, 142 bp, Homo sapiens; identical to SEQ ID NO: 351763
  chr15:102030030-102030172
  hyper

SEQ ID NO: 360764 - DNA, 62 bp, Homo sapiens; identical to SEQ ID NO: 351764
  chr16:745060-745122
  hyper

SEQ ID NO: 360765 - DNA, 97 bp, Homo sapiens; identical to SEQ ID NO: 291235
  chr16:745316-745413
  hyper

SEQ ID NO: 360766 - DNA, 179 bp, Homo sapiens
  chr16:1035474-1035653
  hyper
tggctgagctccaagtgcctgctgaagtctgcagggaaacacgcttgctgcccgtggccctcggcctccagatggccacacctctgccgacgacggaccagctccctctcccttctatctttctttttgaggtggtgggattattccacaaagaagggctgccgtttggtccctcttcc

SEQ ID NO: 360767 - DNA, 46 bp, Homo sapiens
  chr16:1383142-1383188
  hyper
caccagagccccagggacgatcgccccacagaccgtccgcgtgggc

SEQ ID NO: 360768 - DNA, 39 bp, Homo sapiens
  chr16:1967780-1967819
  hyper
cggtcccaaccccactgcccggagcgcacccctgctccc

SEQ ID NO: 360769 - DNA, 223 bp, Homo sapiens; identical to SEQ ID NO: 291256
  chr16:1967909-1968132
  hyper

SEQ ID NO: 360770 - DNA, 85 bp, Homo sapiens
  chr16:2040762-2040847
  hyper
cgtccctgggagggccctgctgctccttccctccggcaggggaggtggcagttgggtgccgagctctgggttttgtccaggtggc

SEQ ID NO: 360771 - DNA, 96 bp, Homo sapiens; identical to SEQ ID NO: 204085
  chr16:2042503-2042599
  hyper

SEQ ID NO: 360772 - DNA, 226 bp, Homo sapiens
  chr16:2042617-2042843
  hyper
cgcgccgcactgttcgcaggactctggtccttcctgtggttcgtgggcttctgcttcctcaccaatcagtggcagcgcacggcgccagggccggccacgacgcaggcgggggacgcggcgcgggccgccatcgccttcagcttcttctccatcctcagctgggtgagtgcggggcccgggagggcggggcgaaggggcgggcgctcggctgatcccggctgacccc

SEQ ID NO: 360773 - DNA, 150 bp, Homo sapiens
  chr16:2245386-2245536
  hyper
cgcccagaccccacgtgccgacctgcagagccctgtccgtgcccgcacaggtgccctgacacactgacacggctatacgtgcgcagccgcacacgcggctggtccacacgcccatccatccatctccggcggcccccagggaggctacgc

SEQ ID NO: 360774 - DNA, 208 bp, Homo sapiens; identical to SEQ ID NO: 335262
  chr16:2301873-2302081
  hyper

SEQ ID NO: 360775 - DNA, 274 bp, Homo sapiens; identical to SEQ ID NO: 291274
  chr16:2391769-2392043
  hyper

SEQ ID NO: 360776 - DNA, 102 bp, Homo sapiens; identical to SEQ ID NO: 204091
  chr16:3078252-3078354
  hyper

SEQ ID NO: 360777 - DNA, 335 bp, Homo sapiens; identical to SEQ ID NO: 351770
  chr16:3078384-3078719
  hyper

SEQ ID NO: 360778 - DNA, 304 bp, Homo sapiens; identical to SEQ ID NO: 351771
  chr16:3208795-3209099
  hyper

SEQ ID NO: 360779 - DNA, 212 bp, Homo sapiens; identical to SEQ ID NO: 345485
  chr16:3222239-3222451
  hyper

SEQ ID NO: 360780 - DNA, 48 bp, Homo sapiens; identical to SEQ ID NO: 204097
  chr16:3238043-3238091
  hyper

SEQ ID NO: 360781 - DNA, 282 bp, Homo sapiens; identical to SEQ ID NO: 351774
  chr16:4165534-4165816
  hyper

SEQ ID NO: 360782 - DNA, 1114 bp, Homo sapiens; identical to SEQ ID NO: 351775
  chr16:4165852-4166966
  hyper

SEQ ID NO: 360783 - DNA, 543 bp, Homo sapiens; identical to SEQ ID NO: 345486
  chr16:4233245-4233788
  hyper

SEQ ID NO: 360784 - DNA, 187 bp, Homo sapiens; identical to SEQ ID NO: 335276
  chr16:4234090-4234277
  hyper

SEQ ID NO: 360785 - DNA, 48 bp, Homo sapiens; identical to SEQ ID NO: 345487
  chr16:4363872-4363920
  hyper

SEQ ID NO: 360786 - DNA, 158 bp, Homo sapiens; identical to SEQ ID NO: 345488
  chr16:4364080-4364238
  hyper

SEQ ID NO: 360787 - DNA, 341 bp, Homo sapiens; identical to SEQ ID NO: 291310
  chr16:4377552-4377893
  hyper

SEQ ID NO: 360788 - DNA, 890 bp, Homo sapiens; identical to SEQ ID NO: 345489
  chr16:4986642-4987532
  hyper

SEQ ID NO: 360789 - DNA, 814 bp, Homo sapiens; identical to SEQ ID NO: 335283
  chr16:8767901-8768715
  hyper

SEQ ID NO: 360790 - DNA, 173 bp, Homo sapiens; identical to SEQ ID NO: 335284
  chr16:9056313-9056486
  hyper

SEQ ID NO: 360791 - DNA, 298 bp, Homo sapiens; identical to SEQ ID NO: 335285
  chr16:9186882-9187180
  hyper

SEQ ID NO: 360792 - DNA, 36 bp, Homo sapiens
  chr16:10274229-10274265
  hyper
cggcagcaccagcagggtccaatagcccactctgcc

SEQ ID NO: 360793 - DNA, 90 bp, Homo sapiens
  chr16:12211189-12211279
  hyper
cgaaccgtggaaacaggcgtggtcaatacgtgcttcagtgcggacgaaccgtggaaacaggcgtggtcaatacgtgcttcaatgcggacg

SEQ ID NO: 360794 - DNA, 429 bp, Homo sapiens; identical to SEQ ID NO: 345490
  chr16:12897365-12897794
  hyper

SEQ ID NO: 360795 - DNA, 37 bp, Homo sapiens; identical to SEQ ID NO: 335294
  chr16:14164836-14164873
  hyper

SEQ ID NO: 360796 - DNA, 349 bp, Homo sapiens; identical to SEQ ID NO: 335295
  chr16:14396725-14397074
  hyper

SEQ ID NO: 360797 - DNA, 450 bp, Homo sapiens; identical to SEQ ID NO: 351785
  chr16:19566591-19567041
  hyper

SEQ ID NO: 360798 - DNA, 33 bp, Homo sapiens; identical to SEQ ID NO: 351786
  chr16:20085432-20085465
  hyper

SEQ ID NO: 360799 - DNA, 56 bp, Homo sapiens; identical to SEQ ID NO: 335300
  chr16:21964488-21964544
  hyper

SEQ ID NO: 360800 - DNA, 184 bp, Homo sapiens
  chr16:23193716-23193900
  hyper
cgggagtggaaggaagtcgcggggcagtaatagggggcagcaggcgctttgaggcgccttggggtaagtgccgcagagacccagcgggaatgcaggatggcagggcggcctcggggcggcagcaggcactgcgcggtggcccaggaagacgcagcgcggccgggctggggcgcagggcggcttc

SEQ ID NO: 360801 - DNA, 400 bp, Homo sapiens; identical to SEQ ID NO: 335306
  chr16:25078047-25078447
  hyper

SEQ ID NO: 360802 - DNA, 167 bp, Homo sapiens
  chr16:25704644-25704811
  hyper
gactccagcgaaaggtcactttatttcagggcgaggggaggaggtgtcaccctgccctgcctcccgcgctcctcatccaaggaggtgctgtctgaatctgcccagctccaagcctgggaacccccagccctcctgcctgctgggtgtttccgaaaccaggctcttgc

SEQ ID NO: 360803 - DNA, 443 bp, Homo sapiens; identical to SEQ ID NO: 291420
  chr16:28891072-28891515
  hyper

SEQ ID NO: 360804 - DNA, 88 bp, Homo sapiens; identical to SEQ ID NO: 335311
  chr16:29607025-29607113
  hyper

SEQ ID NO: 360805 - DNA, 533 bp, Homo sapiens; identical to SEQ ID NO: 347376
  chr16:29624651-29625184
  hyper

SEQ ID NO: 360806 - DNA, 76 bp, Homo sapiens; identical to SEQ ID NO: 335313
  chr16:29938107-29938183
  hyper

SEQ ID NO: 360807 - DNA, 188 bp, Homo sapiens; identical to SEQ ID NO: 204162
  chr16:30620879-30621067
  hyper

SEQ ID NO: 360808 - DNA, 891 bp, Homo sapiens; identical to SEQ ID NO: 351793
  chr16:30621123-30622014
  hyper

SEQ ID NO: 360809 - DNA, 549 bp, Homo sapiens; identical to SEQ ID NO: 347378
  chr16:30959765-30960314
  hyper

SEQ ID NO: 360810 - DNA, 464 bp, Homo sapiens; identical to SEQ ID NO: 351795
  chr16:31213480-31213944
  hyper

SEQ ID NO: 360811 - DNA, 63 bp, Homo sapiens
  chr16:31228313-31228376
  hyper
cagcaccttcaggatggcctcgcgcttcgttcccatggctcagccctgcgcctctgagcctcc

SEQ ID NO: 360812 - DNA, 33 bp, Homo sapiens; identical to SEQ ID NO: 335318
  chr16:31483764-31483797
  hyper

SEQ ID NO: 360813 - DNA, 256 bp, Homo sapiens
  chr16:31548824-31549080
  hyper
cggcgtttccccgcggaggtcatgaggtccccacggcccaggccccgtccccggacagccccgggtgccccaggagctccggccgcagctcacctgggaccggcctcccgtggagccaccccttgcccagccgcccccaagttcccgcaggaggaactggcgacagacacgtccagcccgcagccgccggccgcaccggcgctgcactaactgggacgcgccccggggccgcgctggctcggatccgcccagaccc

SEQ ID NO: 360814 - DNA, 63 bp, Homo sapiens; identical to SEQ ID NO: 127134
  chr16:31549116-31549179
  hyper

SEQ ID NO: 360815 - DNA, 397 bp, Homo sapiens; identical to SEQ ID NO: 351796
  chr16:31712178-31712575
  hyper

SEQ ID NO: 360816 - DNA, 304 bp, Homo sapiens; identical to SEQ ID NO: 345492
  chr16:47176468-47176772
  hyper

SEQ ID NO: 360817 - DNA, 65 bp, Homo sapiens; identical to SEQ ID NO: 204185
  chr16:49316711-49316776
  hyper

SEQ ID NO: 360818 - DNA, 156 bp, Homo sapiens; identical to SEQ ID NO: 351799
  chr16:49316844-49317000
  hyper

SEQ ID NO: 360819 - DNA, 76 bp, Homo sapiens; identical to SEQ ID NO: 204189
  chr16:51184601-51184677
  hyper

SEQ ID NO: 360820 - DNA, 756 bp, Homo sapiens; identical to SEQ ID NO: 335327
  chr16:52579636-52580392
  hyper

SEQ ID NO: 360821 - DNA, 781 bp, Homo sapiens
  chr16:54316061-54316842
  hyper
cgcttcctatacctccccggaacgcgcgagatagtcacacgcgccactttgagggtcaaacaccccgcatctggccacactgtacctttactaacgtggggagggggcaaaaaaatgtgtctctccttcttaccccgaggtgtcactcgcccaaacactccctacaacttcttcaagtcaaacttgggcaaggttggctggctgactgcgagaggaaaaagagggcgcggagggggcgcggcgcgcggccgggtgtagaggccacggaggcgaggcgccgagcgtcccctttgtcctgtagagggagctccagccccaaatttccctgctgcctcccccggcccgcccaccccaggcccgcctggagccggaatcccggctggaaaggtgcggcggtctgacacccccgcaacccccgcgccggggccttagcaggatgcctcttctagggcacgtgggaaaacccaccagggtgccaagacgcacagatgctcccaggacccgggctccccaactctcaactagagctgggcagtcacacatcatctagaggattatgtacccctaggcgaccctcttctccatatccgcctccaccgtcaccccacaccctggcatctataaagagggaaggggggcaaccgggttggaaggaggatggaatctgggcttgcacagcctcttataggtaacagtgagaaagcctcaactgtgtcgatcaaagaatggggacgaagggagtgatgagaacacgaccccgccacccgcgcaggctaacccc

SEQ ID NO: 360822 - DNA, 727 bp, Homo sapiens; identical to SEQ ID NO: 351800
  chr16:54319649-54320376
  hyper

SEQ ID NO: 360823 - DNA, 339 bp, Homo sapiens
  chr16:54320400-54320739
  hyper
cgcactcctcttccccccaggatcgcttccgctgcttcgggctcctgcactgccctggacgctatgaaactctcctttctcctctccccttctctttccctttctcacgagggcttttgctctccggtccgttcccttcacttcttcctttctcactacttctattttgtaaatctctctctttactcacacgatactccccgcgacctttccagcctctgcgccctgggctaagtaaggcagccaaaagttgtggacacttagggtgccgcgcggggggtgtgtgtcggtgtctgtctgtccatccccgcccttccaccccctccctcgcctttcccc

SEQ ID NO: 360824 - DNA, 206 bp, Homo sapiens; identical to SEQ ID NO: 204201
  chr16:54321080-54321286
  hyper

SEQ ID NO: 360825 - DNA, 229 bp, Homo sapiens; identical to SEQ ID NO: 351802
  chr16:54962422-54962651
  hyper

SEQ ID NO: 360826 - DNA, 367 bp, Homo sapiens; identical to SEQ ID NO: 351803
  chr16:54962936-54963303
  hyper

SEQ ID NO: 360827 - DNA, 280 bp, Homo sapiens
  chr16:54965796-54966076
  hyper
cgtaatcctatcttcgcaatccgatttgggagtattaaatttctgaaaagtcggtcgagctgcggtgcatccgggatttttcggccgggttgtaacttcggtctggggtagtatttttggagggtgggagtgcgtgggcatggctcagctttttgtttgcatttcttagctgttgaaaaaagaaaaaaagagccttgacttcccttgttttccccccttgcgcccaacgtgcgtccgctcccccgccgagcgcggagtcgcctcagttgcccaggcctct

SEQ ID NO: 360828 - DNA, 106 bp, Homo sapiens; identical to SEQ ID NO: 204205
  chr16:54966659-54966765
  hyper

SEQ ID NO: 360829 - DNA, 114 bp, Homo sapiens; identical to SEQ ID NO: 351805
  chr16:55359125-55359239
  hyper

SEQ ID NO: 360830 - DNA, 92 bp, Homo sapiens
  chr16:55404823-55404915
  hyper
cgcagcctcacctacgggaagatctacatcccctcctccagggctctaccgagggagaaccaaggtagaaaagcatgcctttccggctgctg

SEQ ID NO: 360831 - DNA, 116 bp, Homo sapiens; identical to SEQ ID NO: 351806
  chr16:55513960-55514076
  hyper

SEQ ID NO: 360832 - DNA, 85 bp, Homo sapiens
  chr16:55690809-55690894
  hyper
cgtagtcggcttcgcagtggacctggccaacgtgtggcgcttcccctacctctgctacaagaacggcggcggtgagcgtggggtc

SEQ ID NO: 360833 - DNA, 60 bp, Homo sapiens; identical to SEQ ID NO: 204213
  chr16:56225663-56225723
  hyper

SEQ ID NO: 360834 - DNA, 268 bp, Homo sapiens; identical to SEQ ID NO: 204214
  chr16:56225881-56226149
  hyper

SEQ ID NO: 360835 - DNA, 85 bp, Homo sapiens; identical to SEQ ID NO: 351807
  chr16:56228284-56228369
  hyper

SEQ ID NO: 360836 - DNA, 57 bp, Homo sapiens; identical to SEQ ID NO: 351808
  chr16:56228591-56228648
  hyper

SEQ ID NO: 360837 - DNA, 573 bp, Homo sapiens; identical to SEQ ID NO: 335343
  chr16:56390323-56390896
  hyper

SEQ ID NO: 360838 - DNA, 44 bp, Homo sapiens
  chr16:56659821-56659865
  hyper
atttcccagccctattacagagggtctctgggtttcaggaagtc

SEQ ID NO: 360839 - DNA, 48 bp, Homo sapiens
  chr16:56666592-56666640
  hyper
agcagtcgctccatttatcgcttgagatctccagccttaccgcggctc

SEQ ID NO: 360840 - DNA, 164 bp, Homo sapiens; identical to SEQ ID NO: 351810
  chr16:56671950-56672114
  hyper

SEQ ID NO: 360841 - DNA, 218 bp, Homo sapiens
  chr16:56691542-56691760
  hyper
cgaaggaccggggcggggccggggggcggggcgaaggccaggatctccaggtacccggaaccccaaggggcgggtgtagcaggcaatcttggcgaaactgggaagggcgggcaggagggcagggaagccgctcacccaggcacaaagcgcctcccgcttgagcggactccaaagggacggtccgcggtgtgcagcgagctgcgctcaggggaccttgc

SEQ ID NO: 360842 - DNA, 122 bp, Homo sapiens; identical to SEQ ID NO: 204219
  chr16:56703438-56703560
  hyper

SEQ ID NO: 360843 - DNA, 216 bp, Homo sapiens; identical to SEQ ID NO: 351812
  chr16:56703621-56703837
  hyper

SEQ ID NO: 360844 - DNA, 60 bp, Homo sapiens; identical to SEQ ID NO: 351813
  chr16:56709754-56709814
  hyper

SEQ ID NO: 360845 - DNA, 231 bp, Homo sapiens
  chr16:57318148-57318379
  hyper
cgtccgtgcgggaagcgccctaggggtacgcgcagcgcgtcggtgacagtgtgagcccgggtggggagcgcaaggttcgcgaaaaatgaacgcagcgccggagtccctcacccatcctggccggaccgggagcccccggccaaccccgtgggcccgcgcgtgctctcaccagctgcagcagcatgagcgccccgaggcgggagcgcacgaagcccaggtccgggcgcagcg

SEQ ID NO: 360846 - DNA, 204 bp, Homo sapiens
  chr16:57318412-57318616
  hyper
tgctggtccgcgtgctaactttcgacgggaactcggccatggcggctccgcttgcctcccgaggtcgctacggccgccgtcgccgcccctccagcggtgggtgccggctcccgcgccgcttttcccccaggctccggatccctgtgtggctccaggcgctgcaggaggcgtcggggctgggagcctggggcgccaggtgcggcc

SEQ ID NO: 360847 - DNA, 287 bp, Homo sapiens; identical to SEQ ID NO: 335352
  chr16:57519818-57520105
  hyper

SEQ ID NO: 360848 - DNA, 205 bp, Homo sapiens; identical to SEQ ID NO: 291600
  chr16:65157317-65157522
  hyper

SEQ ID NO: 360849 - DNA, 45 bp, Homo sapiens; identical to SEQ ID NO: 351814
  chr16:66638030-66638075
  hyper

SEQ ID NO: 360850 - DNA, 566 bp, Homo sapiens; identical to SEQ ID NO: 351815
  chr16:66638452-66639018
  hyper

SEQ ID NO: 360851 - DNA, 132 bp, Homo sapiens
  chr16:67184509-67184641
  hyper
cgacggttgagccccttgcgttgttctcctcctcccggccgtgtcgcaccgccgggaccggcagcctgaagggacaagaagttcacccatgtagccaactcccccgcggcctcagctccggcccaggactgc

SEQ ID NO: 360852 - DNA, 130 bp, Homo sapiens; identical to SEQ ID NO: 345493
  chr16:67189038-67189168
  hyper

SEQ ID NO: 360853 - DNA, 377 bp, Homo sapiens; identical to SEQ ID NO: 345494
  chr16:67189259-67189636
  hyper

SEQ ID NO: 360854 - DNA, 299 bp, Homo sapiens; identical to SEQ ID NO: 351818
  chr16:67197294-67197593
  hyper

SEQ ID NO: 360855 - DNA, 270 bp, Homo sapiens; identical to SEQ ID NO: 204245
  chr16:67198282-67198552
  hyper

SEQ ID NO: 360856 - DNA, 59 bp, Homo sapiens; identical to SEQ ID NO: 291619
  chr16:67199532-67199591
  hyper

SEQ ID NO: 360857 - DNA, 292 bp, Homo sapiens; identical to SEQ ID NO: 347382
  chr16:67204024-67204316
  hyper

SEQ ID NO: 360858 - DNA, 490 bp, Homo sapiens; identical to SEQ ID NO: 347383
  chr16:67204317-67204807
  hyper

SEQ ID NO: 360859 - DNA, 81 bp, Homo sapiens; identical to SEQ ID NO: 351822
  chr16:67433472-67433553
  hyper

SEQ ID NO: 360860 - DNA, 255 bp, Homo sapiens; identical to SEQ ID NO: 291637
  chr16:67678786-67679041
  hyper

SEQ ID NO: 360861 - DNA, 134 bp, Homo sapiens; identical to SEQ ID NO: 345495
  chr16:68118915-68119049
  hyper

SEQ ID NO: 360862 - DNA, 65 bp, Homo sapiens; identical to SEQ ID NO: 347385
  chr16:68269820-68269885
  hyper

SEQ ID NO: 360863 - DNA, 112 bp, Homo sapiens; identical to SEQ ID NO: 204263
  chr16:68269896-68270008
  hyper

SEQ ID NO: 360864 - DNA, 105 bp, Homo sapiens; identical to SEQ ID NO: 204264
  chr16:68270022-68270127
  hyper

SEQ ID NO: 360865 - DNA, 125 bp, Homo sapiens; identical to SEQ ID NO: 347388
  chr16:68270157-68270282
  hyper

SEQ ID NO: 360866 - DNA, 637 bp, Homo sapiens; identical to SEQ ID NO: 347389
  chr16:68270868-68271505
  hyper

SEQ ID NO: 360867 - DNA, 102 bp, Homo sapiens; identical to SEQ ID NO: 345496
  chr16:68504292-68504394
  hyper

SEQ ID NO: 360868 - DNA, 709 bp, Homo sapiens
  chr16:68771324-68772033
  hyper
ccttggagccgcagcctctcggcgctgctgctgctgctgcaggtaccccggatcccctgacttgcgagggacgcattcgggccgcaagctccgcgccccagccctgcgccccttcctctcccgtcgtcaccgcttcccttcttccaagaaagttcgggtcctgaggagcggagcggcctggaagcctcgcgcgctccggaccccccagtgatgggagtggggggtgggtggtgaggggcgagcgcggctttcctgccccctccagcgcagaccgaggcgggggcgtctggccgcggagtccgcggggtgggctcgcgcgggcggtgggggcgtgaagcggggtgtagggggtggggtgtggagaaggggtgccctggtgcaagtcgagggggagccaggagtcgtggggacgatcttcgagggaaggagaggggcatccgtagaaataaaggcacctgccatgccaagaaaggtcgtaaataggagtgagggtcccggggataagaaagtgaggtcggaggaggtgggagcgcccctcgctctgaggagtggtgcattcccggtctaaggaaagtggggtactggagaataaagacatctccaataaaatgagaaaggagactgaaagggaacggtgggctaggtcttgagggggtgactcggcggccccctcccgggagttcctgggggctcggcggccgtaggtttc

SEQ ID NO: 360869 - DNA, 909 bp, Homo sapiens
  chr16:71659877-71660786
  hyper
cggctgtgggtcgccccgcccgggtttccagcagcagcaccccagcccccacccagcacacaggcacccctcccgcccgggccccagacgcgctcaggccgccccctgagggcgcccgttctcaggtgagctcccggactagcgcgcatgcgcacaggtgagtgcccgccccgcccccgggcttggccacctgcccaagaaacttgttggttgttgccctcaggtcgctcccgggcggggacacggaacccggccatggaagatccgtcgggggctcgcgagccccgggcccggccgagagagcgggacccgggacggcgcccccacccagaccaaggccgcacccacgatcgaccgcgggaccgacccggggacccgcgcaggaagcgaagcagcgacgggaaccggcgaagggacggggaccgggacccggagagagaccaggagagggacgggaaccgcgaccggaaccgggaccgggagagggagagagagagggaaagagacccggaccgaggcccccgccgggacacacacagggacgcgggccctcgcgcaggtgaacacggagtttgggaaaaaccgcgccaaagccggacgcgggacggagcccggggactgacctgggacgcagccgcgcctcctgggcccgcgccctgggaagccccggagccgccgcagccgcagaggaagggagaccccgggcgccgcagacccgaaaggtgagaggggccggggcgctgcgacctccgcgccggggacacctgtggcccaggccggcccgcgaggccctggcgtccccgggttctcgtcctaggagcccgtttaaatgaacaaatgccgtttctcccttctgcgctctcagaggcgacctggcagggaaggaaaactttagggttcccccttctc

SEQ ID NO: 360870 - DNA, 50 bp, Homo sapiens; identical to SEQ ID NO: 351831
  chr16:73100590-73100640
  hyper

SEQ ID NO: 360871 - DNA, 174 bp, Homo sapiens; identical to SEQ ID NO: 335377
  chr16:74659437-74659611
  hyper

SEQ ID NO: 360872 - DNA, 82 bp, Homo sapiens; identical to SEQ ID NO: 204296
  chr16:77246930-77247012
  hyper

SEQ ID NO: 360873 - DNA, 204 bp, Homo sapiens; identical to SEQ ID NO: 204297
  chr16:77247511-77247715
  hyper

SEQ ID NO: 360874 - DNA, 81 bp, Homo sapiens
  chr16:77469120-77469201
  hyper
ggagtgatagggagggagggaccgaccgccatgagaaggaggggagcgcccagggtcaggcttggaaaacgtaatttaagc

SEQ ID NO: 360875 - DNA, 729 bp, Homo sapiens; identical to SEQ ID NO: 335384
  chr16:77756212-77756941
  hyper

SEQ ID NO: 360876 - DNA, 48 bp, Homo sapiens; identical to SEQ ID NO: 351836
  chr16:77822069-77822117
  hyper

SEQ ID NO: 360877 - DNA, 179 bp, Homo sapiens; identical to SEQ ID NO: 204301
  chr16:79633613-79633792
  hyper

SEQ ID NO: 360878 - DNA, 98 bp, Homo sapiens
  chr16:79633843-79633941
  hyper
gctgcaggagaggggccagcgggctgtgctgggtggccagcgggtgagccagcttgccgggctggggcgcttctagcttgcgcggcggtggctggccc

SEQ ID NO: 360879 - DNA, 385 bp, Homo sapiens; identical to SEQ ID NO: 351837
  chr16:79633949-79634334
  hyper

SEQ ID NO: 360880 - DNA, 394 bp, Homo sapiens; identical to SEQ ID NO: 291732
  chr16:79634364-79634758
  hyper

SEQ ID NO: 360881 - DNA, 85 bp, Homo sapiens; identical to SEQ ID NO: 351839
  chr16:79804157-79804242
  hyper

SEQ ID NO: 360882 - DNA, 101 bp, Homo sapiens; identical to SEQ ID NO: 291736
  chr16:79804457-79804558
  hyper

SEQ ID NO: 360883 - DNA, 97 bp, Homo sapiens; identical to SEQ ID NO: 351841
  chr16:79804596-79804693
  hyper

SEQ ID NO: 360884 - DNA, 67 bp, Homo sapiens; identical to SEQ ID NO: 345498
  chr16:80574541-80574608
  hyper

SEQ ID NO: 360885 - DNA, 72 bp, Homo sapiens; identical to SEQ ID NO: 345499
  chr16:80575052-80575124
  hyper

SEQ ID NO: 360886 - DNA, 538 bp, Homo sapiens; identical to SEQ ID NO: 291740
  chr16:80837424-80837962
  hyper

SEQ ID NO: 360887 - DNA, 762 bp, Homo sapiens; identical to SEQ ID NO: 351845
  chr16:80838193-80838955
  hyper

SEQ ID NO: 360888 - DNA, 60 bp, Homo sapiens; identical to SEQ ID NO: 351846
  chr16:81779788-81779848
  hyper

SEQ ID NO: 360889 - DNA, 123 bp, Homo sapiens; identical to SEQ ID NO: 351847
  chr16:81780013-81780136
  hyper

SEQ ID NO: 360890 - DNA, 275 bp, Homo sapiens; identical to SEQ ID NO: 204317
  chr16:82660904-82661179
  hyper

SEQ ID NO: 360891 - DNA, 115 bp, Homo sapiens
  chr16:84328207-84328322
  hyper
cgccccagcctgcaaggaagtgctcattatggagagtggagagtgacaggccactcccggccacgtctccaagcaagccggtgccccctcctcctgctgccaccgcccactgagc

SEQ ID NO: 360892 - DNA, 811 bp, Homo sapiens; identical to SEQ ID NO: 347395
  chr16:84650982-84651793
  hyper

SEQ ID NO: 360893 - DNA, 190 bp, Homo sapiens
  chr16:84853661-84853851
  hyper
gcccgcgctgtcgccgctgctaccgcgtctgctggacgcgggagacgccagcgagctggtgattggagccctgcggaggtaagtgtgatttccatgcttctcccttttgcaaactgttacccccccgagaagctggaataactaggacagatgccacctcgcagggctgactgtgtgctggcaccacacc

SEQ ID NO: 360894 - DNA, 836 bp, Homo sapiens
  chr16:85202563-85203399
  hyper
cgcgcgcggctccggctggacacaaaatagatagaggagccggccgctattgtgcgcagtttgggacgcggggggaggcggcggcgggcgggagggaggcaggcttggaggaggagggcggggggagggagcgcgcggggagggattcccccgcccgccgcgcgcccgccctccgcccctccccgcccctcccgcccgccgccgccccgccccctcctccccaattaaatgaccccacgccttggcaggcgccggagctcgcacatgcggctgccgctccagccgcccgggccccgccgccgccgccgccgccgccgccgccgccgccgcgttccgggcgcgctcgccgcggcgccgcctcggcccgcgccgccgccggggggtgctcggcaggcccgggggggcgccgctgcgaggggccgtgcgcccgcgcccgcgccggccgcccgccgccaaactttgcggcgcgcacacatgctccaagttgggcgcggcggcggcggcctgggcgggagctgagggcggcccggggcgcgcgggggcccgggcgggcggcgcggcgcggccatgagcgggcggccggccccggtctcccgcaagcagcggctcatggcagccgtgggcgagcgggctgcgggcggcgcgccgctctcctgcttcatctgcggcggcggcatcgggcgcggcaaggagctgaagctgcaggtgaagcagccggcggcgggcgcggggaccccggcgcagcccttcttcccgttcctgcagcagcaggagccggcgcccggcgcgcgcgagctgtccccggccgacggctgcgtgttggtgtgcgccgtgtg

SEQ ID NO: 360895 - DNA, 100 bp, Homo sapiens
  chr16:85203606-85203706
  hyper
ccggctgcgcggggccgcggaggagacgcgagactccgacctgtcggagctgtcggacaccgaccccctttccgagcccgacccgcccgcgcgggacgcc

SEQ ID NO: 360896 - DNA, 772 bp, Homo sapiens; identical to SEQ ID NO: 335399
  chr16:85590112-85590884
  hyper

SEQ ID NO: 360897 - DNA, 177 bp, Homo sapiens; identical to SEQ ID NO: 345500
  chr16:85932121-85932298
  hyper

SEQ ID NO: 360898 - DNA, 245 bp, Homo sapiens; identical to SEQ ID NO: 351851
  chr16:86531701-86531946
  hyper

SEQ ID NO: 360899 - DNA, 562 bp, Homo sapiens; identical to SEQ ID NO: 127698
  chr16:86532408-86532970
  hyper

SEQ ID NO: 360900 - DNA, 270 bp, Homo sapiens
  chr16:86542673-86542943
  hyper
tgcgctttgaaaacggggccgcggggccaaataggcgggttttcagtgtgtgttgggggtgggggagggcaactgaactacgtgtgagttcagatccgagcgtggcgtgtgtacgcgtgagtgggagtgagtgcgaacttaagctcctgtgggccttaagcttccgtgtcaacgagtgcattagtgggtgcgcacatgcctgagcgccctctgcatatgagtgtgcacacacgcatgggtgtgtttacacgtctgtttgcgtaatttacc

SEQ ID NO: 360901 - DNA, 389 bp, Homo sapiens; identical to SEQ ID NO: 335407
  chr16:86609636-86610025
  hyper

SEQ ID NO: 360902 - DNA, 464 bp, Homo sapiens; identical to SEQ ID NO: 351853
  chr16:87417704-87418168
  hyper

SEQ ID NO: 360903 - DNA, 50 bp, Homo sapiens; identical to SEQ ID NO: 351854
  chr16:87418200-87418250
  hyper

SEQ ID NO: 360904 - DNA, 802 bp, Homo sapiens; identical to SEQ ID NO: 345501
  chr16:87525701-87526503
  hyper

SEQ ID NO: 360905 - DNA, 505 bp, Homo sapiens; identical to SEQ ID NO: 335410
  chr16:87526565-87527070
  hyper

SEQ ID NO: 360906 - DNA, 59 bp, Homo sapiens; identical to SEQ ID NO: 351857
  chr16:87635912-87635971
  hyper

SEQ ID NO: 360907 - DNA, 189 bp, Homo sapiens; identical to SEQ ID NO: 291796
  chr16:87636008-87636197
  hyper

SEQ ID NO: 360908 - DNA, 83 bp, Homo sapiens
  chr16:87637320-87637403
  hyper
acagtgcccctgtgccagctgaagggtgttgggggctttccaggggcagagccaggcggggcccagcagagcctccgtgcgtc

SEQ ID NO: 360909 - DNA, 491 bp, Homo sapiens; identical to SEQ ID NO: 127736
  chr16:87902835-87903326
  hyper

SEQ ID NO: 360910 - DNA, 83 bp, Homo sapiens; identical to SEQ ID NO: 335413
  chr16:88292860-88292943
  hyper

SEQ ID NO: 360911 - DNA, 399 bp, Homo sapiens; identical to SEQ ID NO: 291816
  chr16:89006909-89007308
  hyper

SEQ ID NO: 360912 - DNA, 91 bp, Homo sapiens; identical to SEQ ID NO: 204343
  chr16:89007789-89007880
  hyper

SEQ ID NO: 360913 - DNA, 373 bp, Homo sapiens; identical to SEQ ID NO: 204344
  chr16:89007995-89008368
  hyper

SEQ ID NO: 360914 - DNA, 259 bp, Homo sapiens; identical to SEQ ID NO: 347402
  chr16:89189500-89189759
  hyper

SEQ ID NO: 360915 - DNA, 425 bp, Homo sapiens
  chr16:89323587-89324012
  hyper
gacgggcgtgagcgcagaagccgcagagcccctcgcgcgcctcgcgggggtgtggtggggggtggccgcctccggggacgggcgggctgcggggctccgaccccgcggcagcgtctcgcggcgcctgaggccccggtgggcgtgggttccaggctgcacggctggtttgccgtctgggggtggtttgtgctgggacccccgcctcgccgcaaggaccgacgctttccgtatcccgggttcctgcttcggtgtaccggcagaatctgatcacgcgtggcctggagaatgcgcccagggtcgtattgcctggaaggagctctcagccgctgggggagccggaagggagacggttctgccctggacgcgggctgctcggcggccccggctctcctccaaccggccaaaccccgcctggtcccgccgcc

SEQ ID NO: 360916 - DNA, 98 bp, Homo sapiens; identical to SEQ ID NO: 351863
  chr16:89641257-89641355
  hyper

SEQ ID NO: 360917 - DNA, 123 bp, Homo sapiens; identical to SEQ ID NO: 351864
  chr16:89641704-89641827
  hyper

SEQ ID NO: 360918 - DNA, 32 bp, Homo sapiens
  chr16:89985145-89985177
  hyper
cctgggtcctgcacgccgcctggtggcaggcc

SEQ ID NO: 360919 - DNA, 93 bp, Homo sapiens; identical to SEQ ID NO: 351865
  chr16:89992765-89992858
  hyper

SEQ ID NO: 360920 - DNA, 307 bp, Homo sapiens; identical to SEQ ID NO: 335424
  chr17:523549-523856
  hyper

SEQ ID NO: 360921 - DNA, 483 bp, Homo sapiens; identical to SEQ ID NO: 335425
  chr17:576352-576835
  hyper

SEQ ID NO: 360922 - DNA, 145 bp, Homo sapiens; identical to SEQ ID NO: 335426
  chr17:850237-850382
  hyper

SEQ ID NO: 360923 - DNA, 198 bp, Homo sapiens; identical to SEQ ID NO: 351867
  chr17:1011791-1011989
  hyper

SEQ ID NO: 360924 - DNA, 245 bp, Homo sapiens
  chr17:1881128-1881373
  hyper
cggccgcgggccgcccgggtgggagccggggtcgggggcgcatcctgcatcctgcaccccgcatcccgcacctgcatcggagccccgcgtcccgcaccccgcaccctgcaccctggatcctgcatcctgcaccccgcacccctcatcccgcatcttgcaccccggatcccgcaccccgcatcctgcaccccgcatctctcactccgcatccggcaccccgcagctgcacgcaccgcaaccctccc

SEQ ID NO: 360925 - DNA, 158 bp, Homo sapiens; identical to SEQ ID NO: 351868
  chr17:1901335-1901493
  hyper

SEQ ID NO: 360926 - DNA, 100 bp, Homo sapiens; identical to SEQ ID NO: 351869
  chr17:1901970-1902070
  hyper

SEQ ID NO: 360927 - DNA, 328 bp, Homo sapiens
  chr17:1954658-1954986
  hyper
cggcggggtagggggagccgcgcccctgcccagccgacaaggggttaactttccggaaccgcgggcctggggccggggaggcggcgcggaggggcgcggcgggcccttcgagcttattcacgctctccttccggagccccgcggctcctgggggtcttcacgtggcagccccttccccctcctcagttcctggacctgacgtttctgccgtcacaccccgcaaggccactgcggtgtcgccaccctctcgtcctgcagggtgggcaggagaggaagctggactcccgtgggggcctggggcgcagcgagggctgtggcgtcgggggcc

SEQ ID NO: 360928 - DNA, 127 bp, Homo sapiens
  chr17:1957353-1957480
  hyper
cggggcggaggcggagcgtgggccgcggagatccggcgttcgcaggaggcttggtgcgcggcggggctgcacggggccacttccggagtagtactgcgagcagcggcgcgacagtgcggggtcccct

SEQ ID NO: 360929 - DNA, 119 bp, Homo sapiens
  chr17:1957595-1957714
  hyper
agaagtccacgcgggattcttcaaaacggcgtacagggggattctagggccccatggttacttctttggaccccccggaggcgctgtccagccacttccagtcgccctgatgactcgtc

SEQ ID NO: 360930 - DNA, 202 bp, Homo sapiens; identical to SEQ ID NO: 291879
  chr17:2658619-2658821
  hyper

SEQ ID NO: 360931 - DNA, 256 bp, Homo sapiens; identical to SEQ ID NO: 291880
  chr17:2658859-2659115
  hyper

SEQ ID NO: 360932 - DNA, 440 bp, Homo sapiens
  chr17:2756601-2757041
  hyper
ggggaccgcgcgcgggcagtttcgtttggacggaggaggacgcgcgtttcctcttggtgcctgttttctctccctctgttttaaaagcagtgacagcatcggggaagtatccggggccgggccggggagggcggcagccgcctctgcctggggagggagctcggggccgccggcgggagtgcgggcggggaccagaaggagcgggcgaggggaggcagggccggggccggggagggcgcctgggagccgggcaggggggtcccgggagcgctgtccgcctcctcctgcgcttcgcccgctccctgtgccccgcgtcctccaccatccgggcggccgaggccggggcgcgggaggcggggccggggcgggtcccggcgcgggcggcgcgtctgagcgggagccgggagccgccggcccgggccgcgccccgagcgagcctc

SEQ ID NO: 360933 - DNA, 121 bp, Homo sapiens
  chr17:3599052-3599173
  hyper
cgggaaaaccgcgtgcacgcctgcgaattccaggaccctggagaaggacgcggcggctggcacccgccctgcccctcccccgccttcccaaaagtccgcggagaacttacacgaccaggta

SEQ ID NO: 360934 - DNA, 391 bp, Homo sapiens; identical to SEQ ID NO: 291891
  chr17:3599244-3599635
  hyper

SEQ ID NO: 360935 - DNA, 459 bp, Homo sapiens; identical to SEQ ID NO: 351870
  chr17:3867210-3867669
  hyper

SEQ ID NO: 360936 - DNA, 70 bp, Homo sapiens; identical to SEQ ID NO: 351871
  chr17:3908060-3908130
  hyper

SEQ ID NO: 360937 - DNA, 515 bp, Homo sapiens
  chr17:4853391-4853906
  hyper
cggcgggggtgagtcaccgggcgcgcgctgccccggcgccgacgggaagggcctccgagtcgggccgaggcgccgtgtgtcccccgccggtcggctggtatggctgcagaggagctcggggcagaccccgcactggccccagagccggcaaagtggagatctctaccgagggcagagacctacctccccgcagtgctacaagtggggcgccggaagagccccaggcgtgcagaagctcacaaaaggccacccgtcctcggtccattcatttttgttcactgttgattcagccccattcattgatgggctggggccgtgcgctgagcgcccacagtcgatggggaaaggggctctgaccgacagtccccacgccgggcgacaagtgctgtcccagcgttatcagtcgggcgccttgccagccgaaagggcctgtctaaattcgtttcctgtcccctaactcatcccggcgctggctggcctggagagggtaggatggggcggcgccgagaatggcc

SEQ ID NO: 360938 - DNA, 341 bp, Homo sapiens; identical to SEQ ID NO: 335442
  chr17:4890368-4890709
  hyper

SEQ ID NO: 360939 - DNA, 34 bp, Homo sapiens; identical to SEQ ID NO: 345503
  chr17:4981985-4982019
  hyper

SEQ ID NO: 360940 - DNA, 409 bp, Homo sapiens; identical to SEQ ID NO: 335445
  chr17:6939640-6940049
  hyper

SEQ ID NO: 360941 - DNA, 563 bp, Homo sapiens; identical to SEQ ID NO: 351875
  chr17:7165743-7166306
  hyper

SEQ ID NO: 360942 - DNA, 355 bp, Homo sapiens; identical to SEQ ID NO: 351876
  chr17:7166376-7166731
  hyper

SEQ ID NO: 360943 - DNA, 70 bp, Homo sapiens; identical to SEQ ID NO: 335447
  chr17:7198346-7198416
  hyper

SEQ ID NO: 360944 - DNA, 1345 bp, Homo sapiens; identical to SEQ ID NO: 345504
  chr17:7254483-7255828
  hyper

SEQ ID NO: 360945 - DNA, 656 bp, Homo sapiens; identical to SEQ ID NO: 351879
  chr17:7760506-7761162
  hyper

SEQ ID NO: 360946 - DNA, 392 bp, Homo sapiens; identical to SEQ ID NO: 351880
  chr17:7761197-7761589
  hyper

SEQ ID NO: 360947 - DNA, 69 bp, Homo sapiens; identical to SEQ ID NO: 345505
  chr17:8055823-8055892
  hyper

SEQ ID NO: 360948 - DNA, 631 bp, Homo sapiens; identical to SEQ ID NO: 291995
  chr17:8533862-8534493
  hyper

SEQ ID NO: 360949 - DNA, 350 bp, Homo sapiens; identical to SEQ ID NO: 351883
  chr17:8534582-8534932
  hyper

SEQ ID NO: 360950 - DNA, 107 bp, Homo sapiens; identical to SEQ ID NO: 335458
  chr17:8901441-8901548
  hyper

SEQ ID NO: 360951 - DNA, 56 bp, Homo sapiens; identical to SEQ ID NO: 351885
  chr17:9143010-9143066
  hyper

SEQ ID NO: 360952 - DNA, 186 bp, Homo sapiens; identical to SEQ ID NO: 292005
  chr17:9143110-9143296
  hyper

SEQ ID NO: 360953 - DNA, 89 bp, Homo sapiens; identical to SEQ ID NO: 292006
  chr17:9143376-9143465
  hyper

SEQ ID NO: 360954 - DNA, 33 bp, Homo sapiens; identical to SEQ ID NO: 292007
  chr17:9143504-9143537
  hyper

SEQ ID NO: 360955 - DNA, 183 bp, Homo sapiens; identical to SEQ ID NO: 292008
  chr17:9143607-9143790
  hyper

SEQ ID NO: 360956 - DNA, 965 bp, Homo sapiens
  chr17:9548277-9549242
  hyper
cgggggcttttttcacagggcaacacgtggctcccagttcaggtcccgggttggcgggtgcaggcacagactctgcctccccccaaggggcagacggtctggaaggaggtggcgacacctgtccgcacacacctgagcctgcggaggaaccagcggtgcacaaaagcgctccccacccccacacagcgcccagcgcgcgcctctcaccacgcccgaggctgtgctctggagatgcctgccttgcccttttcttcctgcagtagccaggcctttaccatttactaggcgctttcagaatgttcatttctccgtaatttccactgcttgaaggctgctcgaggaacaggagcagcggcgaaacccaggtctgtcggtttacgaggtaaggaagggtggggaatccgaccacgaagactcccagtcagcgcagcgggggcggcaccaggcaggggtaggggtggcccggcgctgccctggagggggctggtcgtgccgccggattcccgcgcggggcggggctgccccgcccttggctccgcctccgccccgtccccgcacacctggcccgcaggtagccggcaccaggagccttagagaagctgtagggcctgctggccgctcgtccgcctcgcgcccgggggctccgcgcctggagctgcgccggcggcagccatggacctgggccccggggacgcggcaggagggggaccgctcgcgccccggccccgccgccgccgctccctgcgccgcctgttcagccgcttcctgctggcgctgggcagccgctcacgccccggggactcaccgccccggccccagccgggacactgtgatggcgacggtgaggggggcttcgcctgcgccccgggcccagttccagcggcccccgggagccccggggaggaacgcccgcccggaccccagccccagctccagctccccgccggcgatggggcgcggccgcc

SEQ ID NO: 360957 - DNA, 173 bp, Homo sapiens; identical to SEQ ID NO: 351890
  chr17:10632714-10632887
  hyper

SEQ ID NO: 360958 - DNA, 245 bp, Homo sapiens; identical to SEQ ID NO: 351891
  chr17:10633350-10633595
  hyper

SEQ ID NO: 360959 - DNA, 199 bp, Homo sapiens; identical to SEQ ID NO: 351892
  chr17:12568526-12568725
  hyper

SEQ ID NO: 360960 - DNA, 381 bp, Homo sapiens; identical to SEQ ID NO: 292017
  chr17:12568791-12569172
  hyper

SEQ ID NO: 360961 - DNA, 35 bp, Homo sapiens; identical to SEQ ID NO: 351894
  chr17:12569402-12569437
  hyper

SEQ ID NO: 360962 - DNA, 531 bp, Homo sapiens; identical to SEQ ID NO: 345506
  chr17:12692672-12693203
  hyper

SEQ ID NO: 360963 - DNA, 126 bp, Homo sapiens; identical to SEQ ID NO: 345507
  chr17:12693500-12693626
  hyper

SEQ ID NO: 360964 - DNA, 260 bp, Homo sapiens; identical to SEQ ID NO: 204436
  chr17:14204242-14204502
  hyper

SEQ ID NO: 360965 - DNA, 168 bp, Homo sapiens; identical to SEQ ID NO: 204437
  chr17:14204834-14205002
  hyper

SEQ ID NO: 360966 - DNA, 75 bp, Homo sapiens; identical to SEQ ID NO: 351897
  chr17:14212398-14212473
  hyper

SEQ ID NO: 360967 - DNA, 266 bp, Homo sapiens; identical to SEQ ID NO: 204441
  chr17:15244586-15244852
  hyper

SEQ ID NO: 360968 - DNA, 264 bp, Homo sapiens; identical to SEQ ID NO: 204442
  chr17:15848879-15849143
  hyper

SEQ ID NO: 360969 - DNA, 198 bp, Homo sapiens
  chr17:15849211-15849409
  hyper
aagcgtcacccccgtgggcgggtggagcccggggcgcgggagttttggtgatcacatctccactcctgccacgaaggccgttcctaacactcgcccgcagcggcggtgcagcggcagtcccgtgagtgctgcggctcccggaggcccgggaggttcccactaagggcaaggcaactttggacgctgggcattcgcacc

SEQ ID NO: 360970 - DNA, 109 bp, Homo sapiens
  chr17:16257038-16257147
  hyper
tgaatccagcgggctcttcgtaccttcccgacctggaggggcctgggttgggcctgaattcgcaggctcatccgagcgggcagcctggggtaacttcgtctccaaaaac

SEQ ID NO: 360971 - DNA, 48 bp, Homo sapiens; identical to SEQ ID NO: 345508
  chr17:16283879-16283927
  hyper

SEQ ID NO: 360972 - DNA, 674 bp, Homo sapiens; identical to SEQ ID NO: 204447
  chr17:16283956-16284630
  hyper

SEQ ID NO: 360973 - DNA, 39 bp, Homo sapiens; identical to SEQ ID NO: 347411
  chr17:16285065-16285104
  hyper

SEQ ID NO: 360974 - DNA, 360 bp, Homo sapiens; identical to SEQ ID NO: 335472
  chr17:16290077-16290437
  hyper

SEQ ID NO: 360975 - DNA, 438 bp, Homo sapiens; identical to SEQ ID NO: 335475
  chr17:16487650-16488088
  hyper

SEQ ID NO: 360976 - DNA, 1754 bp, Homo sapiens; identical to SEQ ID NO: 345510
  chr17:17685255-17687009
  hyper

SEQ ID NO: 360977 - DNA, 367 bp, Homo sapiens; identical to SEQ ID NO: 345511
  chr17:17687055-17687422
  hyper

SEQ ID NO: 360978 - DNA, 363 bp, Homo sapiens; identical to SEQ ID NO: 335479
  chr17:18218758-18219121
  hyper

SEQ ID NO: 360979 - DNA, 811 bp, Homo sapiens; identical to SEQ ID NO: 335480
  chr17:18907431-18908242
  hyper

SEQ ID NO: 360980 - DNA, 410 bp, Homo sapiens; identical to SEQ ID NO: 335482
  chr17:19282076-19282486
  hyper

SEQ ID NO: 360981 - DNA, 51 bp, Homo sapiens; identical to SEQ ID NO: 335484
  chr17:19912429-19912480
  hyper

SEQ ID NO: 360982 - DNA, 150 bp, Homo sapiens
  chr17:26555139-26555289
  hyper
tcgtggaagtggagggtggaggcgtgggggccagaggagagaaaacctactcggacagaggcgctccaggacaaggctggggcgagcgcgggggttccctctgctcggagcccaaggaaaattcgaccacccagcctggggctggacagc

SEQ ID NO: 360983 - DNA, 145 bp, Homo sapiens; identical to SEQ ID NO: 292102
  chr17:26903726-26903871
  hyper

SEQ ID NO: 360984 - DNA, 218 bp, Homo sapiens
  chr17:26903937-26904155
  hyper
cgtgactcctccgggggcgtggcctgcatgccccgccctgaccacaccccctccccaggactggtgtccggggcaagaccacgccctcagaggcggggcggcgaggtggagtgagcgccccgccaggcatccgtggctgttagggactgccctcccacctcggggagcctggccatgaccttgcgttcatttctgccacaatccctttaccacgtgcc

SEQ ID NO: 360985 - DNA, 355 bp, Homo sapiens; identical to SEQ ID NO: 345513
  chr17:27038294-27038649
  hyper

SEQ ID NO: 360986 - DNA, 71 bp, Homo sapiens; identical to SEQ ID NO: 351907
  chr17:27044882-27044953
  hyper

SEQ ID NO: 360987 - DNA, 59 bp, Homo sapiens; identical to SEQ ID NO: 351908
  chr17:27332307-27332366
  hyper

SEQ ID NO: 360988 - DNA, 122 bp, Homo sapiens; identical to SEQ ID NO: 351909
  chr17:27332733-27332855
  hyper

SEQ ID NO: 360989 - DNA, 56 bp, Homo sapiens
  chr17:27893139-27893195
  hyper
cgctcgtagggccagggcaggccggcctcgaaccactctcggcagcgcagcacggg

SEQ ID NO: 360990 - DNA, 387 bp, Homo sapiens
  chr17:27893344-27893731
  hyper
cggacgggtccccgaaaggctgcagccgggggctgaccagtgggcaaccgtggtggccgcggcgatggaagatgaccgggtagtagccgcgctccagggcgagcaagcaaaggccgagcacgttgcgggtgaggcgaccccacgcattggggatcaccagaagcaccgcaggaaggcccccggcgctggtgatccggcggccccgaacacaaggtcctaccacccagtccagggccactagcccatcgtccgccaactgcaggtactcccgggccagctcaggcccaggcgctacgggcaggacgaagtggcagagggtctgcaggtggggcccggagaaccaggagcgcgggccggcctccagcgcctctgagcgccgcagggcgc

SEQ ID NO: 360991 - DNA, 53 bp, Homo sapiens; identical to SEQ ID NO: 347416
  chr17:27940911-27940964
  hyper

SEQ ID NO: 360992 - DNA, 73 bp, Homo sapiens; identical to SEQ ID NO: 204479
  chr17:28088056-28088129
  hyper

SEQ ID NO: 360993 - DNA, 337 bp, Homo sapiens; identical to SEQ ID NO: 351912
  chr17:29248950-29249287
  hyper

SEQ ID NO: 360994 - DNA, 255 bp, Homo sapiens; identical to SEQ ID NO: 345514
  chr17:29297825-29298080
  hyper

SEQ ID NO: 360995 - DNA, 32 bp, Homo sapiens; identical to SEQ ID NO: 347419
  chr17:29718746-29718778
  hyper

SEQ ID NO: 360996 - DNA, 69 bp, Homo sapiens; identical to SEQ ID NO: 351915
  chr17:30846659-30846728
  hyper

SEQ ID NO: 360997 - DNA, 165 bp, Homo sapiens; identical to SEQ ID NO: 335503
  chr17:31264142-31264307
  hyper

SEQ ID NO: 360998 - DNA, 78 bp, Homo sapiens; identical to SEQ ID NO: 204550
  chr17:32907146-32907224
  hyper

SEQ ID NO: 360999 - DNA, 146 bp, Homo sapiens
  chr17:32909146-32909292
  hyper
tttcttaaccagcaaggcgtggcggggttggggggcgggggtgtttcgatgctccacgctgaggggtgagcctcaggcagaatggagggcgcttagatggagggggcagtgggctctccgcattggtggagcgccctcggtgtgcc

SEQ ID NO: 361000 - DNA, 307 bp, Homo sapiens; identical to SEQ ID NO: 204552
  chr17:33700165-33700472
  hyper

SEQ ID NO: 361001 - DNA, 206 bp, Homo sapiens; identical to SEQ ID NO: 204553
  chr17:33701376-33701582
  hyper

SEQ ID NO: 361002 - DNA, 168 bp, Homo sapiens; identical to SEQ ID NO: 345516
  chr17:33701612-33701780
  hyper

SEQ ID NO: 361003 - DNA, 33 bp, Homo sapiens; identical to SEQ ID NO: 347423
  chr17:33775294-33775327
  hyper

SEQ ID NO: 361004 - DNA, 717 bp, Homo sapiens; identical to SEQ ID NO: 335510
  chr17:33814248-33814965
  hyper

SEQ ID NO: 361005 - DNA, 122 bp, Homo sapiens; identical to SEQ ID NO: 351920
  chr17:35078956-35079078
  hyper

SEQ ID NO: 361006 - DNA, 114 bp, Homo sapiens
  chr17:35290220-35290334
  hyper
cggacaagcctcctaacttgggcctcctggccgggaaagtggagatagtacccttctcttccaccccccaccaccctcttgctatacggttcaggggagaccgtgatacaagct

SEQ ID NO: 361007 - DNA, 211 bp, Homo sapiens; identical to SEQ ID NO: 292225
  chr17:35291109-35291320
  hyper

SEQ ID NO: 361008 - DNA, 304 bp, Homo sapiens
  chr17:35293365-35293669
  hyper
cgccagggttgcaactcctcacccgaggcgcttcccggtccactccttcccccgcgccggcgccgcgcctccggtctccccgcccccatcaggaaaccgcccgaatcaactttgcaagagtgctctgcgggagacagacactcagctcgcccaggacccggaccctgtggactttggatggattgggggagggggcacagaaagagggacgggaggagggagattctgctgctaagagcctcctccccctccaaagatgtgcgctgcgcttgggacaaacttccaggtcaagaaagtacggggg

SEQ ID NO: 361009 - DNA, 85 bp, Homo sapiens; identical to SEQ ID NO: 351922
  chr17:36101946-36102031
  hyper

SEQ ID NO: 361010 - DNA, 202 bp, Homo sapiens; identical to SEQ ID NO: 204562
  chr17:36102080-36102282
  hyper

SEQ ID NO: 361011 - DNA, 145 bp, Homo sapiens; identical to SEQ ID NO: 351924
  chr17:36714786-36714931
  hyper

SEQ ID NO: 361012 - DNA, 445 bp, Homo sapiens; identical to SEQ ID NO: 204564
  chr17:36715092-36715537
  hyper

SEQ ID NO: 361013 - DNA, 241 bp, Homo sapiens
  chr17:36716048-36716289
  hyper
tgagcctgggaaggactgggctgggacaaagtcctccctactctccgaccccacacagtagccagagaagcccgtggctctacctgccccaagtggtcagccctaacggtggggaccaaagtgccaggaaaaagacctcttgggctaaggccagtgatgtagctattgcttaatccccactttatagattagaaaacaggctcggagagaacaaggatgggggagggggaggttcactcac

SEQ ID NO: 361014 - DNA, 77 bp, Homo sapiens; identical to SEQ ID NO: 351926
  chr17:36729187-36729264
  hyper

SEQ ID NO: 361015 - DNA, 159 bp, Homo sapiens; identical to SEQ ID NO: 351927
  chr17:36829818-36829977
  hyper

SEQ ID NO: 361016 - DNA, 303 bp, Homo sapiens; identical to SEQ ID NO: 351928
  chr17:36830051-36830354
  hyper

SEQ ID NO: 361017 - DNA, 226 bp, Homo sapiens; identical to SEQ ID NO: 347425
  chr17:36886750-36886976
  hyper

SEQ ID NO: 361018 - DNA, 90 bp, Homo sapiens; identical to SEQ ID NO: 351930
  chr17:37183607-37183697
  hyper

SEQ ID NO: 361019 - DNA, 54 bp, Homo sapiens; identical to SEQ ID NO: 347426
  chr17:37365986-37366040
  hyper

SEQ ID NO: 361020 - DNA, 912 bp, Homo sapiens; identical to SEQ ID NO: 335530
  chr17:37618442-37619354
  hyper

SEQ ID NO: 361021 - DNA, 585 bp, Homo sapiens; identical to SEQ ID NO: 351932
  chr17:37757285-37757870
  hyper

SEQ ID NO: 361022 - DNA, 121 bp, Homo sapiens; identical to SEQ ID NO: 351933
  chr17:37760007-37760128
  hyper

SEQ ID NO: 361023 - DNA, 35 bp, Homo sapiens
  chr17:37794000-37794035
  hyper
cgttccctcaccccgcatttttgggttagtcaatg

SEQ ID NO: 361024 - DNA, 297 bp, Homo sapiens; identical to SEQ ID NO: 335537
  chr17:38020387-38020684
  hyper

SEQ ID NO: 361025 - DNA, 129 bp, Homo sapiens; identical to SEQ ID NO: 347427
  chr17:38478466-38478595
  hyper

SEQ ID NO: 361026 - DNA, 436 bp, Homo sapiens; identical to SEQ ID NO: 204598
  chr17:38498112-38498548
  hyper

SEQ ID NO: 361027 - DNA, 570 bp, Homo sapiens
  chr17:38498596-38499166
  hyper
cggcctgcggacttggggagccgctgtactctgcctcggacgccacgagactctagacgggagtcccctcgaggtgaagccgctgagttcccgggccccgccaggcttccctgggagagccgacggaccccccctcccagcacacacaacttccctgcttttcaccgggactggcggagcggccggcggacttagacgcggggacttcagggcagggggcgccccctgcccgggtcaccagtcggggcgaggggacgtctcctctcccccagctgctctgctcggatggcgccgccggctgagtgacgggggcggcgcgcaggacttcccagctcggacctcttgccttcgaggggaaagatgtacgagagtgtagaagtggggggtcccacccctaatcccttcctagtggtggatttttataaccagaaccgggcctgtttgctcccagagaaggggctccccgccccgggtccgtactccaccccgctccggactccgctttggaatggctcaaaccactgtacgtaccggcctctcagtctgctgttgtagggggtgggagtgggc

SEQ ID NO: 361028 - DNA, 279 bp, Homo sapiens
  chr17:39683530-39683809
  hyper
cgaatgggccccagggcgggagagtgggaggaggccaaagcctgagagggatgaacactagacccttccggccagagaaacggaatgcaggaggccctacgctgcggtggcagagggggcaagactggccccgggtggaccagatcaccaaagccaaactctcgcatcttcctgcggcagcgcggcccctggcctagacctctgggcactctacagccgggtcccatctcctcccactcttcaggcctcgctgacccgcgtcccttcttcgtcccgggg

SEQ ID NO: 361029 - DNA, 794 bp, Homo sapiens
  chr17:39683839-39684633
  hyper
ccccacccacttatctgccctgcccagttctcctcccctttccaccaccccggcctctgcatccagccccgaggtcctgccccgcacgtctcctgtccccctttactcggccccacctgtggaccttcccacgtcctaacgggctcctgcccgccgccccgcctggaacctcgcccggcccgcggggctgggtttccgcggcaggtgcactgcacttcccgcggccgggcctccgcccaccttgtcccgcaggtcctggatggtcgtgtagtagtggctgtagtcgcgggagggcccaggcccctgcttctggtaccagtcgcggatcttcacctctagctcgccgttggccgcctccagggcgcgcaccttgtccaggtaggaggccaggcggtcgttgaggttctgcatggttagcttctcgttgcccgccagcagcccgtcggacgcggtcaggacgccgccgtagccgccgccgtaggcccccgaggaggacgaggacacaaagcgggcggaggacacggatacgccgcggccgccggagcccccgtgaatgctgggcgcgcgaaaggcgacccccggcccaaaacgcacggagccgccgcccaggcctccgaaggacgacgtggccgacgactggcgatagctgtaggaagtcatggcgaggcggagcacggacggagcaaccctggtctcagaagctgcgattcgcgggaggagcggcgaggccctcacctggcgccttttatgcccgcggccggtggaggggggaagggaggaatggtgtcaggggc

SEQ ID NO: 361030 - DNA, 36 bp, Homo sapiens; identical to SEQ ID NO: 347428
  chr17:40332770-40332806
  hyper

SEQ ID NO: 361031 - DNA, 84 bp, Homo sapiens; identical to SEQ ID NO: 345517
  chr17:40558083-40558167
  hyper

SEQ ID NO: 361032 - DNA, 47 bp, Homo sapiens; identical to SEQ ID NO: 345518
  chr17:40558226-40558273
  hyper

SEQ ID NO: 361033 - DNA, 212 bp, Homo sapiens; identical to SEQ ID NO: 204606
  chr17:40573874-40574086
  hyper

SEQ ID NO: 361034 - DNA, 841 bp, Homo sapiens; identical to SEQ ID NO: 335546
  chr17:41245464-41246305
  hyper

SEQ ID NO: 361035 - DNA, 175 bp, Homo sapiens
  chr17:41790849-41791024
  hyper
cgcaatttgtcaccaggggttttgactttccttattgcctcgtgggaggtggcagaggcagcacatctcagaccgagcctcggttcctccccctacctcccaccgctgcgcttgaagaaagatgctgcagcctccccagtccccatgccagcgctcccacttttctctgagcttt

SEQ ID NO: 361036 - DNA, 259 bp, Homo sapiens; identical to SEQ ID NO: 204615
  chr17:41791085-41791344
  hyper

SEQ ID NO: 361037 - DNA, 39 bp, Homo sapiens; identical to SEQ ID NO: 204616
  chr17:41791412-41791451
  hyper

SEQ ID NO: 361038 - DNA, 404 bp, Homo sapiens; identical to SEQ ID NO: 204619
  chr17:41984572-41984976
  hyper

SEQ ID NO: 361039 - DNA, 265 bp, Homo sapiens
  chr17:41985015-41985280
  hyper
gaagtagtctttcccagcagctggtacgggggcagccaggtagtggtttgggagacaccgcacagaccacgacgccctgctggagtcccactgggaagggttagggaggcaggactggtaccagtacccgctggtgcccctcggctcccaaggatcccttaaaggggcgatggtaaaagtgcctaatgagaccggcttgattactccgcccacccatcttggcttagaccggcgttctagttccaggcgtgcctcacttttcctc

SEQ ID NO: 361040 - DNA, 322 bp, Homo sapiens; identical to SEQ ID NO: 335549
  chr17:41995104-41995426
  hyper

SEQ ID NO: 361041 - DNA, 187 bp, Homo sapiens; identical to SEQ ID NO: 351941
  chr17:42061046-42061233
  hyper

SEQ ID NO: 361042 - DNA, 149 bp, Homo sapiens; identical to SEQ ID NO: 351942
  chr17:42061420-42061569
  hyper

SEQ ID NO: 361043 - DNA, 230 bp, Homo sapiens; identical to SEQ ID NO: 351943
  chr17:42081919-42082149
  hyper

SEQ ID NO: 361044 - DNA, 321 bp, Homo sapiens; identical to SEQ ID NO: 347431
  chr17:42083719-42084040
  hyper

SEQ ID NO: 361045 - DNA, 267 bp, Homo sapiens; identical to SEQ ID NO: 204625
  chr17:42091861-42092128
  hyper

SEQ ID NO: 361046 - DNA, 170 bp, Homo sapiens; identical to SEQ ID NO: 345520
  chr17:42092357-42092527
  hyper

SEQ ID NO: 361047 - DNA, 62 bp, Homo sapiens; identical to SEQ ID NO: 204629
  chr17:42402710-42402772
  hyper

SEQ ID NO: 361048 - DNA, 192 bp, Homo sapiens; identical to SEQ ID NO: 347435
  chr17:42402917-42403109
  hyper

SEQ ID NO: 361049 - DNA, 121 bp, Homo sapiens
  chr17:42906461-42906582
  hyper
cgatttcacatcgtcttgatgctaacaaaattaagcatgagcataatgaaatcggtatcactgccagttctcaatgaacaaaaagaaaaccaaattcgcccatttcgcaaaggaaaagtac

SEQ ID NO: 361050 - DNA, 197 bp, Homo sapiens; identical to SEQ ID NO: 204637
  chr17:42988798-42988995
  hyper

SEQ ID NO: 361051 - DNA, 89 bp, Homo sapiens; identical to SEQ ID NO: 345522
  chr17:42989016-42989105
  hyper

SEQ ID NO: 361052 - DNA, 40 bp, Homo sapiens
  chr17:43045529-43045569
  hyper
ggctaggcgcccgcgctcaaggacggtccggcggggctgc

SEQ ID NO: 361053 - DNA, 38 bp, Homo sapiens; identical to SEQ ID NO: 347438
  chr17:43298587-43298625
  hyper

SEQ ID NO: 361054 - DNA, 230 bp, Homo sapiens; identical to SEQ ID NO: 347439
  chr17:43298666-43298896
  hyper

SEQ ID NO: 361055 - DNA, 879 bp, Homo sapiens; identical to SEQ ID NO: 351953
  chr17:43324795-43325674
  hyper

SEQ ID NO: 361056 - DNA, 117 bp, Homo sapiens; identical to SEQ ID NO: 345523
  chr17:44849684-44849801
  hyper

SEQ ID NO: 361057 - DNA, 80 bp, Homo sapiens; identical to SEQ ID NO: 345524
  chr17:44849831-44849911
  hyper

SEQ ID NO: 361058 - DNA, 83 bp, Homo sapiens
  chr17:44919338-44919421
  hyper
cagcgctgaccggcagggggcgctcctgcagaaggctggccgcggtggcgccctcggcggggcctgggctggcctggggaccc

SEQ ID NO: 361059 - DNA, 169 bp, Homo sapiens
  chr17:44928894-44929063
  hyper
cgccgcctgccccgccccacccgggtttaaagtcccgcgggcgggtggtggcggagctgcgagcttgagcggcgcgaggagatgctagagggcgcagcgccgccagcaccatgcgccccccgcccgcgctggccctggccgggctctgcctgctggcgctgcccgccgc

SEQ ID NO: 361060 - DNA, 207 bp, Homo sapiens; identical to SEQ ID NO: 292422
  chr17:44929360-44929567
  hyper

SEQ ID NO: 361061 - DNA, 38 bp, Homo sapiens
  chr17:45055681-45055719
  hyper
cgcgagcgaccgcagtcccaaattgcatctccataccc

SEQ ID NO: 361062 - DNA, 269 bp, Homo sapiens; identical to SEQ ID NO: 292425
  chr17:45056305-45056574
  hyper

SEQ ID NO: 361063 - DNA, 63 bp, Homo sapiens; identical to SEQ ID NO: 345525
  chr17:45330951-45331014
  hyper

SEQ ID NO: 361064 - DNA, 119 bp, Homo sapiens; identical to SEQ ID NO: 204649
  chr17:45331313-45331432
  hyper

SEQ ID NO: 361065 - DNA, 90 bp, Homo sapiens; identical to SEQ ID NO: 345527
  chr17:45331675-45331765
  hyper

SEQ ID NO: 361066 - DNA, 38 bp, Homo sapiens; identical to SEQ ID NO: 351959
  chr17:45500788-45500826
  hyper

SEQ ID NO: 361067 - DNA, 379 bp, Homo sapiens; identical to SEQ ID NO: 292433
  chr17:45500865-45501244
  hyper

SEQ ID NO: 361068 - DNA, 298 bp, Homo sapiens; identical to SEQ ID NO: 292442
  chr17:46089283-46089581
  hyper

SEQ ID NO: 361069 - DNA, 218 bp, Homo sapiens; identical to SEQ ID NO: 345528
  chr17:46124683-46124901
  hyper

SEQ ID NO: 361070 - DNA, 164 bp, Homo sapiens; identical to SEQ ID NO: 345529
  chr17:46125148-46125312
  hyper

SEQ ID NO: 361071 - DNA, 53 bp, Homo sapiens; identical to SEQ ID NO: 347448
  chr17:46620299-46620352
  hyper

SEQ ID NO: 361072 - DNA, 321 bp, Homo sapiens; identical to SEQ ID NO: 204659
  chr17:46621458-46621779
  hyper

SEQ ID NO: 361073 - DNA, 181 bp, Homo sapiens; identical to SEQ ID NO: 351966
  chr17:46659093-46659274
  hyper

SEQ ID NO: 361074 - DNA, 45 bp, Homo sapiens; identical to SEQ ID NO: 204661
  chr17:46659384-46659429
  hyper

SEQ ID NO: 361075 - DNA, 97 bp, Homo sapiens; identical to SEQ ID NO: 351968
  chr17:46670752-46670849
  hyper

SEQ ID NO: 361076 - DNA, 89 bp, Homo sapiens; identical to SEQ ID NO: 351969
  chr17:46675757-46675846
  hyper

SEQ ID NO: 361077 - DNA, 63 bp, Homo sapiens; identical to SEQ ID NO: 345531
  chr17:46687527-46687590
  hyper

SEQ ID NO: 361078 - DNA, 321 bp, Homo sapiens; identical to SEQ ID NO: 351971
  chr17:46688806-46689127
  hyper

SEQ ID NO: 361079 - DNA, 149 bp, Homo sapiens; identical to SEQ ID NO: 347451
  chr17:46690905-46691054
  hyper

SEQ ID NO: 361080 - DNA, 92 bp, Homo sapiens
  chr17:46713841-46713933
  hyper
cggagaattcagaggtgccagaagccgagttcctagaccccagctggattttttttttttttttttttttttttccaatttctggcggcggg

SEQ ID NO: 361081 - DNA, 170 bp, Homo sapiens; identical to SEQ ID NO: 351973
  chr17:46724200-46724370
  hyper

SEQ ID NO: 361082 - DNA, 304 bp, Homo sapiens
  chr17:46755701-46756005
  hyper
caggagatgctcggggtcggggcccagggcagggaaaaccctcagctctggtcaaaagccaagtgagcgaaggaggcgatgcaacgtcaccctggtggccaaggcaggcacccaggtctcgaggttccaggagagggacgcgctgtgaccaccagccccctaggctcctgtctgctcgatgagcgtccactcgccagttccagccgcgagcgcccccagcactcccggagctgggccgggcgccgccttccctcgggcggccggcaggggtcagtgtttggccgcaggtgaacagacagcggcc

SEQ ID NO: 361083 - DNA, 171 bp, Homo sapiens; identical to SEQ ID NO: 351974
  chr17:46801836-46802007
  hyper

SEQ ID NO: 361084 - DNA, 81 bp, Homo sapiens
  chr17:46826849-46826930
  hyper
cggaattccgaccttattgaaaaaaatgaggagaggtttgttttgtttcttaatcatttcttcgccatctctgactctctt

SEQ ID NO: 361085 - DNA, 324 bp, Homo sapiens; identical to SEQ ID NO: 292478
  chr17:46829655-46829979
  hyper

SEQ ID NO: 361086 - DNA, 45 bp, Homo sapiens; identical to SEQ ID NO: 351976
  chr17:46830655-46830700
  hyper

SEQ ID NO: 361087 - DNA, 131 bp, Homo sapiens; identical to SEQ ID NO: 351977
  chr17:46831595-46831726
  hyper

SEQ ID NO: 361088 - DNA, 55 bp, Homo sapiens; identical to SEQ ID NO: 351978
  chr17:46832887-46832942
  hyper

SEQ ID NO: 361089 - DNA, 348 bp, Homo sapiens; identical to SEQ ID NO: 292486
  chr17:47073560-47073908
  hyper

SEQ ID NO: 361090 - DNA, 152 bp, Homo sapiens; identical to SEQ ID NO: 204688
  chr17:47074409-47074561
  hyper

SEQ ID NO: 361091 - DNA, 200 bp, Homo sapiens; identical to SEQ ID NO: 335605
  chr17:47647459-47647659
  hyper

SEQ ID NO: 361092 - DNA, 65 bp, Homo sapiens; identical to SEQ ID NO: 351981
  chr17:47653244-47653309
  hyper

SEQ ID NO: 361093 - DNA, 715 bp, Homo sapiens; identical to SEQ ID NO: 351982
  chr17:47653373-47654088
  hyper

SEQ ID NO: 361094 - DNA, 197 bp, Homo sapiens; identical to SEQ ID NO: 345532
  chr17:48619736-48619933
  hyper

SEQ ID NO: 361095 - DNA, 95 bp, Homo sapiens
  chr17:48639236-48639331
  hyper
cgcgagcaggtctcgtcggtaacccgggcttaccccacctgcgtacacacacctcagtcttcctgggttgggggggtggggatccaggccaggag

SEQ ID NO: 361096 - DNA, 528 bp, Homo sapiens; identical to SEQ ID NO: 351984
  chr17:49021815-49022343
  hyper

SEQ ID NO: 361097 - DNA, 169 bp, Homo sapiens; identical to SEQ ID NO: 292548
  chr17:53341536-53341705
  hyper

SEQ ID NO: 361098 - DNA, 111 bp, Homo sapiens
  chr17:53343657-53343768
  hyper
tggcttgagccctttcttggtaagtcccaaaccttcccaagacaaccttggccttagcagtagaggaggggtacgtgtgatgaggccccaaacccggctaagtgatgccac

SEQ ID NO: 361099 - DNA, 234 bp, Homo sapiens; identical to SEQ ID NO: 292552
  chr17:54673684-54673918
  hyper

SEQ ID NO: 361100 - DNA, 281 bp, Homo sapiens
  chr17:54674073-54674354
  hyper
cctccccacctccctgccacctctccgcgcctccctcccggcgttccttccaccccaccccccaccccccccaaccccccaagtccggagtcccggcgaatctatgctaattatttcaaacctgcgcctggtccccagcgcagtctcaatgcccccggccccgcccgccctgtccctccagcccggcgctttcttccctcccgacgcagcctcgatggctcctcatttcaatagcctggccccggagccgagccccctccccggcgctgcctccgtcagcc

SEQ ID NO: 361101 - DNA, 61 bp, Homo sapiens; identical to SEQ ID NO: 292554
  chr17:54756198-54756259
  hyper

SEQ ID NO: 361102 - DNA, 297 bp, Homo sapiens; identical to SEQ ID NO: 345533
  chr17:54911482-54911779
  hyper

SEQ ID NO: 361103 - DNA, 515 bp, Homo sapiens; identical to SEQ ID NO: 345534
  chr17:54911874-54912389
  hyper

SEQ ID NO: 361104 - DNA, 215 bp, Homo sapiens; identical to SEQ ID NO: 292571
  chr17:56327007-56327222
  hyper

SEQ ID NO: 361105 - DNA, 299 bp, Homo sapiens
  chr17:56405995-56406294
  hyper
cttgctgggtggctgggctggtcctaaggaggcctgggtcgatgggctgcttgcctcatagtctcagcccctgctggcctctgctctggggactgcaggggtcccttacagtccaggagcctcgagatggtgggctccgaggagggctgagcctcagaattgggtgggggggtgagccgggaagagccagccctcccctcctcctcctcctcctcccctcccacccaccaataggaagtcggctgctggtttccatggtgatggcgctggactggtgggctgaaccggctgacagggtc

SEQ ID NO: 361106 - DNA, 85 bp, Homo sapiens; identical to SEQ ID NO: 347456
  chr17:58228397-58228482
  hyper

SEQ ID NO: 361107 - DNA, 79 bp, Homo sapiens; identical to SEQ ID NO: 345535
  chr17:58498618-58498697
  hyper

SEQ ID NO: 361108 - DNA, 81 bp, Homo sapiens; identical to SEQ ID NO: 292594
  chr17:59475276-59475357
  hyper

SEQ ID NO: 361109 - DNA, 38 bp, Homo sapiens; identical to SEQ ID NO: 347458
  chr17:59478678-59478716
  hyper

SEQ ID NO: 361110 - DNA, 310 bp, Homo sapiens
  chr17:59489181-59489491
  hyper
cgaaggccgcagctcccgggcccgcctccccagctgaccgcgaactcctgcgtggggtgctcctggggcgggaggggcgcgctcagcctcgctctccccgggactctcacgctcaagcgccccggcttgaggccgggaccccctatttcccggttatgggacggccccttgagggacagcctctacgagccctggatttataccccgagcctgccttcctccgctctgggaaggacccaaaatccagtcccgcttcctccccctccttcgctgtccttggccccgaggtgcggagcaccggcggtcaggc

SEQ ID NO: 361111 - DNA, 131 bp, Homo sapiens; identical to SEQ ID NO: 292597
  chr17:59532387-59532518
  hyper

SEQ ID NO: 361112 - DNA, 48 bp, Homo sapiens; identical to SEQ ID NO: 351995
  chr17:59539943-59539991
  hyper

SEQ ID NO: 361113 - DNA, 40 bp, Homo sapiens; identical to SEQ ID NO: 347459
  chr17:60885408-60885448
  hyper

SEQ ID NO: 361114 - DNA, 308 bp, Homo sapiens; identical to SEQ ID NO: 347460
  chr17:60885548-60885856
  hyper

SEQ ID NO: 361115 - DNA, 104 bp, Homo sapiens
  chr17:61553834-61553938
  hyper
cggccgccctgagcccctccagcacctcccggaggcgcctgcaagacacctaaggtccccgcctccctcctctcccccccgccacacccctacccccggcaggc

SEQ ID NO: 361116 - DNA, 48 bp, Homo sapiens; identical to SEQ ID NO: 204746
  chr17:61553939-61553987
  hyper

SEQ ID NO: 361117 - DNA, 322 bp, Homo sapiens
  chr17:61554094-61554416
  hyper
gagccggaggccgctaggctcccaggccccggccgaggctgcgcggccgcacggtgggcaggctcgggtgttccggcaaactgccgggtccccatcttctaaagagaggaggccctttctccagcttcctctgcgggagcccgacccagccccatcccgccacccccgggctgcacctcggcccctccccggcccgcgcccctgcccggggcgggccaggaacctcggcccgcgccgctggggactctggagcggaggaggaagcgcggcggggcgggggcgggggtgtgtcgggttttataacccgcagggcggccgcggc

SEQ ID NO: 361118 - DNA, 111 bp, Homo sapiens; identical to SEQ ID NO: 345536
  chr17:61777761-61777872
  hyper

SEQ ID NO: 361119 - DNA, 76 bp, Homo sapiens; identical to SEQ ID NO: 345537
  chr17:61778423-61778499
  hyper

SEQ ID NO: 361120 - DNA, 110 bp, Homo sapiens
  chr17:62776313-62776423
  hyper
cgttcctcgactaggaaagggtatacacttgagtcactaagcacactgggccccggaggcggggtcatcgagctgcccagagccaacaaaccccaaggtggacactgccc

SEQ ID NO: 361121 - DNA, 60 bp, Homo sapiens; identical to SEQ ID NO: 204752
  chr17:62776446-62776506
  hyper

SEQ ID NO: 361122 - DNA, 848 bp, Homo sapiens; identical to SEQ ID NO: 335648
  chr17:63555681-63556529
  hyper

SEQ ID NO: 361123 - DNA, 669 bp, Homo sapiens; identical to SEQ ID NO: 335649
  chr17:64187889-64188558
  hyper

SEQ ID NO: 361124 - DNA, 675 bp, Homo sapiens; identical to SEQ ID NO: 352002
  chr17:64298985-64299660
  hyper

SEQ ID NO: 361125 - DNA, 60 bp, Homo sapiens; identical to SEQ ID NO: 204756
  chr17:64961305-64961365
  hyper

SEQ ID NO: 361126 - DNA, 202 bp, Homo sapiens; identical to SEQ ID NO: 292637
  chr17:64961625-64961827
  hyper

SEQ ID NO: 361127 - DNA, 83 bp, Homo sapiens; identical to SEQ ID NO: 347465
  chr17:64962141-64962224
  hyper

SEQ ID NO: 361128 - DNA, 406 bp, Homo sapiens; identical to SEQ ID NO: 335653
  chr17:65822956-65823362
  hyper

SEQ ID NO: 361129 - DNA, 49 bp, Homo sapiens; identical to SEQ ID NO: 352007
  chr17:68164458-68164507
  hyper

SEQ ID NO: 361130 - DNA, 196 bp, Homo sapiens; identical to SEQ ID NO: 292648
  chr17:68164537-68164733
  hyper

SEQ ID NO: 361131 - DNA, 204 bp, Homo sapiens; identical to SEQ ID NO: 204763
  chr17:68164928-68165132
  hyper

SEQ ID NO: 361132 - DNA, 240 bp, Homo sapiens; identical to SEQ ID NO: 292660
  chr17:71160878-71161118
  hyper

SEQ ID NO: 361133 - DNA, 45 bp, Homo sapiens; identical to SEQ ID NO: 352010
  chr17:71897934-71897979
  hyper

SEQ ID NO: 361134 - DNA, 497 bp, Homo sapiens; identical to SEQ ID NO: 335663
  chr17:72209877-72210374
  hyper

SEQ ID NO: 361135 - DNA, 62 bp, Homo sapiens; identical to SEQ ID NO: 352011
  chr17:72427030-72427092
  hyper

SEQ ID NO: 361136 - DNA, 219 bp, Homo sapiens; identical to SEQ ID NO: 204774
  chr17:72427594-72427813
  hyper

SEQ ID NO: 361137 - DNA, 332 bp, Homo sapiens; identical to SEQ ID NO: 204775
  chr17:72427999-72428331
  hyper

SEQ ID NO: 361138 - DNA, 340 bp, Homo sapiens; identical to SEQ ID NO: 204776
  chr17:72428489-72428829
  hyper

SEQ ID NO: 361139 - DNA, 69 bp, Homo sapiens; identical to SEQ ID NO: 352015
  chr17:72428872-72428941
  hyper

SEQ ID NO: 361140 - DNA, 359 bp, Homo sapiens; identical to SEQ ID NO: 347466
  chr17:72449954-72450313
  hyper

SEQ ID NO: 361141 - DNA, 336 bp, Homo sapiens; identical to SEQ ID NO: 347467
  chr17:72450330-72450666
  hyper

SEQ ID NO: 361142 - DNA, 272 bp, Homo sapiens; identical to SEQ ID NO: 335669
  chr17:72732911-72733183
  hyper

SEQ ID NO: 361143 - DNA, 1416 bp, Homo sapiens; identical to SEQ ID NO: 335672
  chr17:73029792-73031208
  hyper

SEQ ID NO: 361144 - DNA, 65 bp, Homo sapiens; identical to SEQ ID NO: 347468
  chr17:73073967-73074032
  hyper

SEQ ID NO: 361145 - DNA, 80 bp, Homo sapiens; identical to SEQ ID NO: 292709
  chr17:73584287-73584367
  hyper

SEQ ID NO: 361146 - DNA, 170 bp, Homo sapiens; identical to SEQ ID NO: 352021
  chr17:73584951-73585121
  hyper

SEQ ID NO: 361147 - DNA, 813 bp, Homo sapiens
  chr17:74236139-74236952
  hyper
cgaagacccgcggggccccctcaggccgtcccgacccagacccctgcccctgcccctctccctcctcgcggctgcggcgcccgcccgccctcaccggacttgggcgggtagcggtacacggaattagacgggatgtccacctcctccacgcccgcgtgctgccggctcgtcagggcccccatggccgctgcggctgcagccccggcccggccccggtgcccgcgccgccctccgcgcttcaccgcggccgcccgccccgcgcccggtgcgggggccgactgcccgccgcggccggctccgctgcggcgctgcggctctggcggcggggagcccccggcgcgccgcgcaccatcctccgccgggcaccgcggcggcgcctctgccaagggggctgcgggtctgggccgggggcgccgccgccgcctcaggccgcgtgatgtcagcggccgctccgcgcggggaccgcggcggccccagccaatggcgaggcggggcgggagcgcccgcgccggagcagccaatgagcgcgggactgcagcaggagccggcggcgcgtgcctcgcgcggggagccgcggctggactcggcgcgcgtggacgcggcccagggcctcgcggcgggggcgtgggcgtgggcggggactcgcgacggggacgggggcgcggccgggtgcccgcggcggggcggggcgggaccggccggagctgggaccccaggagacgagcgctgcacccggccgggacgcgtcgcccctccgcgcctgtttatcccggctcggattaccgcgcagggagccgccccctcccgcggtcc

SEQ ID NO: 361148 - DNA, 136 bp, Homo sapiens; identical to SEQ ID NO: 335681
  chr17:74620111-74620247
  hyper

SEQ ID NO: 361149 - DNA, 91 bp, Homo sapiens; identical to SEQ ID NO: 347469
  chr17:74965156-74965247
  hyper

SEQ ID NO: 361150 - DNA, 93 bp, Homo sapiens; identical to SEQ ID NO: 352024
  chr17:75447727-75447820
  hyper

SEQ ID NO: 361151 - DNA, 51 bp, Homo sapiens; identical to SEQ ID NO: 352025
  chr17:76123746-76123797
  hyper

SEQ ID NO: 361152 - DNA, 342 bp, Homo sapiens; identical to SEQ ID NO: 352026
  chr17:76123831-76124173
  hyper

SEQ ID NO: 361153 - DNA, 39 bp, Homo sapiens
  chr17:76254688-76254727
  hyper
cgacataagccccaggtgggctgcctttcacggcgcccc

SEQ ID NO: 361154 - DNA, 62 bp, Homo sapiens
  chr17:76254854-76254916
  hyper
tgggaacccagggctggccccgctgagataaagggaggcagcagatcgcagctggagatagc

SEQ ID NO: 361155 - DNA, 170 bp, Homo sapiens; identical to SEQ ID NO: 352027
  chr17:76337740-76337910
  hyper

SEQ ID NO: 361156 - DNA, 192 bp, Homo sapiens; identical to SEQ ID NO: 335693
  chr17:76355660-76355852
  hyper

SEQ ID NO: 361157 - DNA, 360 bp, Homo sapiens; identical to SEQ ID NO: 335694
  chr17:76588327-76588687
  hyper

SEQ ID NO: 361158 - DNA, 226 bp, Homo sapiens
  chr17:77216473-77216699
  hyper
caggtcctctctccctctccctgtgtctctgcctctcgctttatttccccaggttgctcagctccgtgcctgctctccgctcgcccatcgatggggtcctgcccggcactgccctgtcgcagtcactcctgctgcctggatctctgttcagagttgaactacagcgtcctgattccagcgctcatcaagcaggggacccaggggagggtgtgtgtgtgtgtgtgtc

SEQ ID NO: 361159 - DNA, 403 bp, Homo sapiens; identical to SEQ ID NO: 292779
  chr17:77778031-77778434
  hyper

SEQ ID NO: 361160 - DNA, 179 bp, Homo sapiens; identical to SEQ ID NO: 352031
  chr17:77786288-77786467
  hyper

SEQ ID NO: 361161 - DNA, 61 bp, Homo sapiens; identical to SEQ ID NO: 352032
  chr17:77786805-77786866
  hyper

SEQ ID NO: 361162 - DNA, 41 bp, Homo sapiens
  chr17:77788305-77788346
  hyper
cgatcgtatttcctggggacagctcgacccccaggggagca

SEQ ID NO: 361163 - DNA, 233 bp, Homo sapiens; identical to SEQ ID NO: 204826
  chr17:77788400-77788633
  hyper

SEQ ID NO: 361164 - DNA, 257 bp, Homo sapiens; identical to SEQ ID NO: 204828
  chr17:77814493-77814750
  hyper

SEQ ID NO: 361165 - DNA, 221 bp, Homo sapiens; identical to SEQ ID NO: 204829
  chr17:77814929-77815150
  hyper

SEQ ID NO: 361166 - DNA, 50 bp, Homo sapiens; identical to SEQ ID NO: 204830
  chr17:77815935-77815985
  hyper

SEQ ID NO: 361167 - DNA, 187 bp, Homo sapiens; identical to SEQ ID NO: 54699
  chr17:77816033-77816220
  hyper

SEQ ID NO: 361168 - DNA, 1019 bp, Homo sapiens; identical to SEQ ID NO: 335709
  chr17:79007528-79008547
  hyper

SEQ ID NO: 361169 - DNA, 753 bp, Homo sapiens; identical to SEQ ID NO: 352038
  chr17:79008842-79009595
  hyper

SEQ ID NO: 361170 - DNA, 43 bp, Homo sapiens; identical to SEQ ID NO: 352039
  chr17:79009691-79009734
  hyper

SEQ ID NO: 361171 - DNA, 111 bp, Homo sapiens; identical to SEQ ID NO: 352040
  chr17:79988364-79988475
  hyper

SEQ ID NO: 361172 - DNA, 522 bp, Homo sapiens; identical to SEQ ID NO: 352041
  chr17:79989097-79989619
  hyper

SEQ ID NO: 361173 - DNA, 220 bp, Homo sapiens; identical to SEQ ID NO: 347472
  chr17:80186335-80186555
  hyper

SEQ ID NO: 361174 - DNA, 818 bp, Homo sapiens; identical to SEQ ID NO: 292829
  chr17:80186618-80187436
  hyper

SEQ ID NO: 361175 - DNA, 66 bp, Homo sapiens
  chr17:80277699-80277765
  hyper
cgtgtgtgcagagacgggtgcgcgactccatgcgtgtgtgcagaaacgggtgcatgtggacacgtg

SEQ ID NO: 361176 - DNA, 404 bp, Homo sapiens
  chr17:80332292-80332696
  hyper
cctcaacagctcctgggccagcccgaccgagcccagctccctggaggacctggtggccacgggcaccattgggactctgctgtcggccatgggcgtggtgggcgtggtgggcaacgcctacacgctggtggtcacctgccgctccctgcgtgcggtggcctccatgtacgtctacgtggtcaacctggcgctggccgacctgctgtacctgctcagcatccccttcatcgtggccacctacgtcaccaaggagtggcacttcggggacgtgggctgccgcgtgctcttcggcctggacttcctgaccatgcacgccagcatcttcacgctgaccgtcatgagcagcgagcgctacgctgcggtgctgcggccgctggacaccgtgcagcgccccaagggctacc

SEQ ID NO: 361177 - DNA, 1118 bp, Homo sapiens
  chr17:80655727-80656845
  hyper
cttccgcacgcgagtcacctgtgctccttcctctcccccggacacgcgggacccctggcctcgggaccggaccctggtctcccctcccctccgacccacgcgcagacccagcacctgggcgcctgctcgccgcgctccgccccaggagccccggagctcgcgtcccctcccgcccctcctgccccgcggccgaacgcgcacttgcggactcgagcccccgccccgggtccccacagcagcggccccaggtcgggaggagcccagcgcccggcccagccgcgggctcccgctgcgcgcagactgcggagaaggatggagactgcgccgcggggcctcgagtggaactgggggtgcaacagggacgccgcagcacgagggccagggccgggcggagaaaggcccgcccgcgaaccgcgctcctcctcagccccgcgcccccggaccgggactcctaccctccccggccacgcgccccggcctcttcccgacccctgcccggtctcgcgtccccggacccggacccccacccgcaccccctccccagccccgcgcccctccccggccccgcgcccgcaccccggcacgccctccgcccgcgctcacccgccgggtggccgtacggggactcggccgcgccatcctgcaggctcgccaggatctcgcccttgcccacgtcgctgtcgcccaccagcaggaacttgagcagaaagtcgtaggcccggaccgggctgcccagggcgctcatcgtgacggcccggcgcccccacccatgcccggcctgcggggctgagcgcagaggcggcggcccggccccgagaggcgccgcgcgggccccgagtccttgctcgcctccggccccgccccgccgcccagcgctgacagcgcgcatccccgcccggccccgccattggtggaccgcagttgctagggcagctgcgcgctttcactggcttggttgtccgtccatcttactctcgtcaccgcctccgggctgtcgcccacccgcccctcctgaaaggtcgctgtcaccacagccaatggaggcccggagacggggcaggggcggagccagaacaagcaggaggcggggactctgctcccgcagccaatggcggggc

SEQ ID NO: 361178 - DNA, 443 bp, Homo sapiens
  chr17:81036717-81037160
  hyper
cgggggttgctactgatacccagagtgcgggggccagggtgctgccaacatcccaccatgcgcaggacgtccccaccccaagaaccacccggccccgcgtatccggagcgaggagtgggcagcgctcggcagaggccccggcgcggcggctgcacgtcctccgggaggagggagggaagccgggctcaccgccgggcctcccccccggtcaggagggagccgggaactcccgaggcaccaactctgcggaacgcggggcgcccggatcgcccctgatcaccgcccgctggcgaggcgcgggggacccagaaccggcggggccgggagcctcctttaccgctccgcgccggggctgcccgcaggatggggcgcaggatggggcgcaggatgcggccccggcaccgcctcgcgggggtctgcggggggcgaccgcggctcgcgtc

SEQ ID NO: 361179 - DNA, 277 bp, Homo sapiens; identical to SEQ ID NO: 352044
  chr17:81038567-81038844
  hyper

SEQ ID NO: 361180 - DNA, 508 bp, Homo sapiens; identical to SEQ ID NO: 352045
  chr17:81038865-81039373
  hyper

SEQ ID NO: 361181 - DNA, 1315 bp, Homo sapiens; identical to SEQ ID NO: 347474
  chr18:811501-812816
  hyper

SEQ ID NO: 361182 - DNA, 190 bp, Homo sapiens; identical to SEQ ID NO: 347475
  chr18:812869-813059
  hyper

SEQ ID NO: 361183 - DNA, 117 bp, Homo sapiens; identical to SEQ ID NO: 352048
  chr18:907197-907314
  hyper

SEQ ID NO: 361184 - DNA, 238 bp, Homo sapiens; identical to SEQ ID NO: 345538
  chr18:2848166-2848404
  hyper

SEQ ID NO: 361185 - DNA, 369 bp, Homo sapiens
  chr18:2906430-2906799
  hyper
cctttcagtcacttgcgacgcacccgcggtttccgcgtgctgtgaaatcgggaattgttgatgccggagccaagagtgaggccggtttggaaagtgcagccgtctgcgccggagaggctggaaacgccccggccccgggcaggggtccccggcggcgtccgggtggcccgcggcgtcctcggaagatgcgggcggacgcccgtgtgtcccgctggcctgacgtcgcaggggtggccgcagagtcctcacggggaccccgctcgccgggactcatggaggggaccctgacggggcagtcagggctgaggtttcctaatcccgtgtgtttctttctccccgacgcccggcagaggcgccctcgcccccgcc

SEQ ID NO: 361186 - DNA, 160 bp, Homo sapiens; identical to SEQ ID NO: 352050
  chr18:3012406-3012566
  hyper

SEQ ID NO: 361187 - DNA, 2276 bp, Homo sapiens; identical to SEQ ID NO: 335731
  chr18:3449180-3451456
  hyper

SEQ ID NO: 361188 - DNA, 51 bp, Homo sapiens; identical to SEQ ID NO: 352052
  chr18:3498992-3499043
  hyper

SEQ ID NO: 361189 - DNA, 995 bp, Homo sapiens; identical to SEQ ID NO: 335733
  chr18:3879130-3880125
  hyper

SEQ ID NO: 361190 - DNA, 46 bp, Homo sapiens; identical to SEQ ID NO: 292873
  chr18:4454645-4454691
  hyper

SEQ ID NO: 361191 - DNA, 254 bp, Homo sapiens; identical to SEQ ID NO: 292874
  chr18:4454777-4455031
  hyper

SEQ ID NO: 361192 - DNA, 584 bp, Homo sapiens; identical to SEQ ID NO: 345539
  chr18:5237294-5237878
  hyper

SEQ ID NO: 361193 - DNA, 537 bp, Homo sapiens; identical to SEQ ID NO: 345540
  chr18:5238247-5238784
  hyper

SEQ ID NO: 361194 - DNA, 116 bp, Homo sapiens
  chr18:5896132-5896248
  hyper
cccgccgggacgggcgcaccgcgggacgcttggaagcctctgccagatgcgctcgcgctccagccccgccgggctttgtgaccagcctgaccgggacccggcagctggggctcctc

SEQ ID NO: 361195 - DNA, 148 bp, Homo sapiens; identical to SEQ ID NO: 292890
  chr18:7117374-7117522
  hyper

SEQ ID NO: 361196 - DNA, 216 bp, Homo sapiens; identical to SEQ ID NO: 292892
  chr18:7566793-7567009
  hyper

SEQ ID NO: 361197 - DNA, 415 bp, Homo sapiens; identical to SEQ ID NO: 204882
  chr18:7567335-7567750
  hyper

SEQ ID NO: 361198 - DNA, 70 bp, Homo sapiens; identical to SEQ ID NO: 352058
  chr18:7568821-7568891
  hyper

SEQ ID NO: 361199 - DNA, 59 bp, Homo sapiens; identical to SEQ ID NO: 347482
  chr18:9707859-9707918
  hyper

SEQ ID NO: 361200 - DNA, 275 bp, Homo sapiens; identical to SEQ ID NO: 292905
  chr18:9708063-9708338
  hyper

SEQ ID NO: 361201 - DNA, 202 bp, Homo sapiens; identical to SEQ ID NO: 352061
  chr18:9709406-9709608
  hyper

SEQ ID NO: 361202 - DNA, 293 bp, Homo sapiens; identical to SEQ ID NO: 352062
  chr18:10455170-10455463
  hyper

SEQ ID NO: 361203 - DNA, 200 bp, Homo sapiens; identical to SEQ ID NO: 204892
  chr18:11149298-11149498
  hyper

SEQ ID NO: 361204 - DNA, 563 bp, Homo sapiens; identical to SEQ ID NO: 345541
  chr18:11947488-11948051
  hyper

SEQ ID NO: 361205 - DNA, 306 bp, Homo sapiens
  chr18:12407715-12408021
  hyper
cgagcgtcgcctcctacgcccgcggcatctgcagcaagcgcgcatcgcgcaccccagggtagcagcgcaggtctggggctgcgccacagccgcgcccgcagagctatttttagccgctgcagccagcctagccaccagacggggtgggcggcatccaagggcgccccgcccatcgaggccccgcccacgccgcgcccggagccgcgcggcccgaagcacccggcccggatcgcagagcccgcgccctgcgccggcggcaatgaagatctggagctcggagcacgtgtttgggtgaggccgggctga

SEQ ID NO: 361206 - DNA, 206 bp, Homo sapiens; identical to SEQ ID NO: 204898
  chr18:12408117-12408323
  hyper

SEQ ID NO: 361207 - DNA, 435 bp, Homo sapiens; identical to SEQ ID NO: 347485
  chr18:12658128-12658563
  hyper

SEQ ID NO: 361208 - DNA, 928 bp, Homo sapiens; identical to SEQ ID NO: 335756
  chr18:13217150-13218078
  hyper

SEQ ID NO: 361209 - DNA, 93 bp, Homo sapiens
  chr18:13823932-13824025
  hyper
cgaccgacccaccgacccgaccgaccaaccaaccaaccaagcaaccatccaaccattcaagagtgtgttcggggggattttcgctcggggctg

SEQ ID NO: 361210 - DNA, 112 bp, Homo sapiens; identical to SEQ ID NO: 292934
  chr18:13824102-13824214
  hyper

SEQ ID NO: 361211 - DNA, 40 bp, Homo sapiens; identical to SEQ ID NO: 352066
  chr18:18821658-18821698
  hyper

SEQ ID NO: 361212 - DNA, 48 bp, Homo sapiens; identical to SEQ ID NO: 335763
  chr18:19577719-19577767
  hyper

SEQ ID NO: 361213 - DNA, 362 bp, Homo sapiens; identical to SEQ ID NO: 352068
  chr18:19749047-19749409
  hyper

SEQ ID NO: 361214 - DNA, 418 bp, Homo sapiens; identical to SEQ ID NO: 204909
  chr18:19749446-19749864
  hyper

SEQ ID NO: 361215 - DNA, 384 bp, Homo sapiens; identical to SEQ ID NO: 204910
  chr18:19749924-19750308
  hyper

SEQ ID NO: 361216 - DNA, 349 bp, Homo sapiens; identical to SEQ ID NO: 204911
  chr18:19750390-19750739
  hyper

SEQ ID NO: 361217 - DNA, 224 bp, Homo sapiens; identical to SEQ ID NO: 345544
  chr18:19750806-19751030
  hyper

SEQ ID NO: 361218 - DNA, 195 bp, Homo sapiens; identical to SEQ ID NO: 345545
  chr18:20512643-20512838
  hyper

SEQ ID NO: 361219 - DNA, 1232 bp, Homo sapiens; identical to SEQ ID NO: 345546
  chr18:20512902-20514134
  hyper

SEQ ID NO: 361220 - DNA, 458 bp, Homo sapiens
  chr18:20716114-20716572
  hyper
cggggttagccgctgggtccggcccctgcctcccacagccctcgtcgctgccgcccttgattcctggcggccatgcgaccgtgtccggccccggggtggcgcgggggttcgcgagtcccctgggcgccggccgggcgtcgggggagcagtggcagccgccccggccggcgcctctcgccgcctgtgcccaactgcagctgctcgacgggtccggggccgccgggcaggaggagttggaggaggacgatgcctttatcagcgtgcaggtgccggcggccgcctttttgggctccgggacccccgggagtgggagcggcagtcggggacgcctcaactcgttcactcagggaatcctgcccatcgccttctccaggccgacttcgcagaactactgctccctggagcagccaggccagggcggcagcaccagcgccttcgagcagctgcagaggtcccgg

SEQ ID NO: 361221 - DNA, 186 bp, Homo sapiens
  chr18:20716690-20716876
  hyper
cctgtgctccgggcccgaatcccaaaccacgagggcacccaaaagagggggcgtccccagggagtgcggggttacacgtgtttgcacgagcccagcattcgcagaggagcaccgcgcttgtgcagtgggtcgggaattgggagttgcaggagcccagtagaaagcggcgtccgagcctccccacac

SEQ ID NO: 361222 - DNA, 270 bp, Homo sapiens
  chr18:21269079-21269349
  hyper
cgactcaacacttggctgggaaatcgaaatgtctttgatgtgagttctgtaggtagtggcagtttcctctgctctcaaccaaattcgtttacaagcctcctttactcttaggtcacaggtggcttttctggctttgacctgagcggtgagtatccagagaggagaacgatctaattaatttctgtcctggcgcctggagggttcgaagatcccaggctcccgttcccgccgcctgggtgggagcccgggaacgcctctcccattccccgc

SEQ ID NO: 361223 - DNA, 33 bp, Homo sapiens; identical to SEQ ID NO: 204922
  chr18:21269390-21269423
  hyper

SEQ ID NO: 361224 - DNA, 212 bp, Homo sapiens; identical to SEQ ID NO: 204923
  chr18:21269740-21269952
  hyper

SEQ ID NO: 361225 - DNA, 174 bp, Homo sapiens; identical to SEQ ID NO: 204924
  chr18:21270135-21270309
  hyper

SEQ ID NO: 361226 - DNA, 71 bp, Homo sapiens
  chr18:21851454-21851525
  hyper
cgtccaactattcttggatctactcacatccctggatcaagtctggccgccctccccgctccgtcccccgg

SEQ ID NO: 361227 - DNA, 760 bp, Homo sapiens
  chr18:21851561-21852321
  hyper
cgagctgcaaatacacccacctacctgggccagatccgaggaccccggctggcgcgctccaccctgcgctcctcgcaagctccagcgcgaatgcgctcggcctgctcctcctcctcccctccagtcgagccgaggcgagccgatccgggaggcgcgacccagggcggcccgcaaggtctccctaagtcacctttgcgcagcctgcccctggctccggccgggcagcagcgccagccttccccagcgaggtcgggcagaggcgttgcccgccagcggcccaggactcccgcgccgcgcccgcccgggccgcagaggtctgcgctgcccctccgccgccgctggctcggccgcagacccgccctccggggctcgcggggagagcgcgggcgggcggcggcaaggcctgcggcgggcggctccctgcgcgcggcgggcagcgtccgggccgctcctccccttccccagcgccgctggcgggcggaggcgcaggtagggaccgccggggaagcctgcacggccctccgaggagaggtcggggactgctccttgggctctacgtgagtgccgcgccgaggcgcctgcgaggtcctagagctgctgtgcgctcggccctctcctggagacaccggccctggcaactttttttttttcttttttctttttttttttttttaaccaacccgccccttgggaaactctggaaagcaaaggaatcttctctccagtcctgcctgtcacttactccggctcacgctgaagc

SEQ ID NO: 361228 - DNA, 1113 bp, Homo sapiens; identical to SEQ ID NO: 352075
  chr18:23806188-23807301
  hyper

SEQ ID NO: 361229 - DNA, 121 bp, Homo sapiens; identical to SEQ ID NO: 347492
  chr18:24130266-24130387
  hyper

SEQ ID NO: 361230 - DNA, 112 bp, Homo sapiens
  chr18:24764503-24764615
  hyper
cgatcgcacctggcctcccggtccccctaacttccctcccacctctcccgcagcctgcgcctgagcctgagccaggtcgcggagtttgagactgacgcaaaggaggcacccc

SEQ ID NO: 361231 - DNA, 455 bp, Homo sapiens; identical to SEQ ID NO: 204931
  chr18:25756040-25756495
  hyper

SEQ ID NO: 361232 - DNA, 201 bp, Homo sapiens; identical to SEQ ID NO: 292989
  chr18:25756986-25757187
  hyper

SEQ ID NO: 361233 - DNA, 290 bp, Homo sapiens; identical to SEQ ID NO: 292990
  chr18:28622129-28622419
  hyper

SEQ ID NO: 361234 - DNA, 358 bp, Homo sapiens; identical to SEQ ID NO: 204937
  chr18:29077773-29078131
  hyper

SEQ ID NO: 361235 - DNA, 404 bp, Homo sapiens
  chr18:29078255-29078659
  hyper
cctggtaagtgccgcaagcgggacaggggagccaccgccggggagggcgtcggtaggcgaggtctagacctcgcgaccagacttgcccgccgcccttgtgcgcgttacctgcccggcgctccttcctgctgcccgaggggggaaaagggccgggcaggctgcggcgagatccgacctggggcttcggaaaatcctcttggctggagccaggagagtaagttgcgacctatcgaagttgtgttttccttcccgcgtcacccaggccccagcgcccttttctgtggtgtgtgggtgtagtgagccctggggcggggaacaccattgctgggggtcggaggctttgttgagagtctctgggacgagaaacgtggaggcaatagggaacaacctcgcgcttcttccac

SEQ ID NO: 361236 - DNA, 142 bp, Homo sapiens; identical to SEQ ID NO: 335782
  chr18:29598295-29598437
  hyper

SEQ ID NO: 361237 - DNA, 31 bp, Homo sapiens
  chr18:29599824-29599855
  hyper
taaaactcacagttggtgcaaagccgtggtc

SEQ ID NO: 361238 - DNA, 281 bp, Homo sapiens; identical to SEQ ID NO: 293004
  chr18:30349781-30350062
  hyper

SEQ ID NO: 361239 - DNA, 282 bp, Homo sapiens; identical to SEQ ID NO: 293005
  chr18:30351074-30351356
  hyper

SEQ ID NO: 361240 - DNA, 271 bp, Homo sapiens; identical to SEQ ID NO: 293006
  chr18:30351399-30351670
  hyper

SEQ ID NO: 361241 - DNA, 146 bp, Homo sapiens; identical to SEQ ID NO: 204947
  chr18:31157947-31158093
  hyper

SEQ ID NO: 361242 - DNA, 331 bp, Homo sapiens; identical to SEQ ID NO: 204948
  chr18:31158158-31158489
  hyper

SEQ ID NO: 361243 - DNA, 96 bp, Homo sapiens
  chr18:31159050-31159146
  hyper
aactctgtgcacagtctgtgtgtatgttcggcgtttgtgagttcaaacattttacacgtgcatgcatggtgtgtgtccgacacggacttgtggggc

SEQ ID NO: 361244 - DNA, 207 bp, Homo sapiens
  chr18:31802468-31802675
  hyper
cgctagcgctacattcgggctttatgccaataaggagacactgtagactatcgatcagactcgtctgctctcagagcgtgcggccgggcttccagcctggcctttaggcgcggtggcggcggtgggacacgcgccaggcgcccagagaaggacatgggacaatggcccagcccgaggacgccagacgccgccgcccgacccggggaa

SEQ ID NO: 361245 - DNA, 200 bp, Homo sapiens; identical to SEQ ID NO: 204951
  chr18:31803102-31803302
  hyper

SEQ ID NO: 361246 - DNA, 287 bp, Homo sapiens; identical to SEQ ID NO: 345547
  chr18:31804522-31804809
  hyper

SEQ ID NO: 361247 - DNA, 96 bp, Homo sapiens
  chr18:32074337-32074433
  hyper
cgggggcgggtgggcacgggggtgagtgtcttcggcttttatagcctgttgcccacttcgaagttttctgctggacagagggcaggcgggaggttc

SEQ ID NO: 361248 - DNA, 1207 bp, Homo sapiens; identical to SEQ ID NO: 345548
  chr18:32556625-32557832
  hyper

SEQ ID NO: 361249 - DNA, 45 bp, Homo sapiens; identical to SEQ ID NO: 204955
  chr18:32557883-32557928
  hyper

SEQ ID NO: 361250 - DNA, 445 bp, Homo sapiens; identical to SEQ ID NO: 345550
  chr18:32558003-32558448
  hyper

SEQ ID NO: 361251 - DNA, 593 bp, Homo sapiens; identical to SEQ ID NO: 335791
  chr18:32621215-32621808
  hyper

SEQ ID NO: 361252 - DNA, 32 bp, Homo sapiens; identical to SEQ ID NO: 293036
  chr18:34823862-34823894
  hyper

SEQ ID NO: 361253 - DNA, 411 bp, Homo sapiens; identical to SEQ ID NO: 204961
  chr18:35146241-35146652
  hyper

SEQ ID NO: 361254 - DNA, 755 bp, Homo sapiens; identical to SEQ ID NO: 345552
  chr18:42258983-42259738
  hyper

SEQ ID NO: 361255 - DNA, 120 bp, Homo sapiens; identical to SEQ ID NO: 204967
  chr18:42259821-42259941
  hyper

SEQ ID NO: 361256 - DNA, 1164 bp, Homo sapiens; identical to SEQ ID NO: 352089
  chr18:42260083-42261247
  hyper

SEQ ID NO: 361257 - DNA, 190 bp, Homo sapiens
  chr18:43914608-43914798
  hyper
gatcgaaaggagaaagatacatgaccgtgtgtgtgtgtgtgtgtgtgtgtgtgtgtgtgtgtgtgtgtgtgagagagagagagagcgcgcgcgcgagagcatgcttggttttctgtggtttgctttttttgaggtatatgtgtgttttgtgttatgtgtgttttgtattcattttttgttcattagtacc

SEQ ID NO: 361258 - DNA, 79 bp, Homo sapiens; identical to SEQ ID NO: 345553
  chr18:44335955-44336034
  hyper

SEQ ID NO: 361259 - DNA, 61 bp, Homo sapiens
  chr18:44786792-44786853
  hyper
cggagacggggctaggggtgcacccttcgtcccggtcagctcttgcggctgcctacgttcc

SEQ ID NO: 361260 - DNA, 282 bp, Homo sapiens
  chr18:44790173-44790455
  hyper
cggttcgaaaccttagctggggtgggggaagggatgtctttaaccttctgtctaccgtccccctcttccctctctcagcctagaggcaggggatgctgcggaatcagactgggtgcaccaaggcggagggccatgccgggcttcgcccttcctgggtgtcccggagtccgttccggagaaaccctggcattgccagaactgggtccccgcactcactcctccataattcgcggcggatcagcgggaggagggcagagggcgggggcgaggcagcttcctggc

SEQ ID NO: 361261 - DNA, 78 bp, Homo sapiens
  chr18:45275733-45275811
  hyper
gcgatgccgcactgacccgcggacggacgggaggcctacggatccaggatggctccttcgactctccccacgcccccc

SEQ ID NO: 361262 - DNA, 237 bp, Homo sapiens
  chr18:45534410-45534647
  hyper
cggccgggagtcgggtctctgccagcccagcgctcggaatggagctttgtggggctggggaagcaacctttgccaatgggaagggggtgtcacagcgcctcattccctcccagcttgcgctcctcggaataatctccaacagcgtgcctagaagcacagctgcttttgtttcgggcgtcggtgcttcccagaatcccggtgcccggacccagccgccgaaccgaccccgccccgccg

SEQ ID NO: 361263 - DNA, 260 bp, Homo sapiens; identical to SEQ ID NO: 293070
  chr18:45534675-45534935
  hyper

SEQ ID NO: 361264 - DNA, 41 bp, Homo sapiens
  chr18:45534976-45535017
  hyper
cgcacacccgtggcgcgccctccaggggcggtttttctccc

SEQ ID NO: 361265 - DNA, 232 bp, Homo sapiens; identical to SEQ ID NO: 293072
  chr18:45662351-45662583
  hyper

SEQ ID NO: 361266 - DNA, 258 bp, Homo sapiens; identical to SEQ ID NO: 204975
  chr18:45663079-45663337
  hyper

SEQ ID NO: 361267 - DNA, 796 bp, Homo sapiens; identical to SEQ ID NO: 335809
  chr18:45687770-45688566
  hyper

SEQ ID NO: 361268 - DNA, 164 bp, Homo sapiens; identical to SEQ ID NO: 204977
  chr18:45934609-45934773
  hyper

SEQ ID NO: 361269 - DNA, 221 bp, Homo sapiens; identical to SEQ ID NO: 204978
  chr18:45934810-45935031
  hyper

SEQ ID NO: 361270 - DNA, 1885 bp, Homo sapiens; identical to SEQ ID NO: 204979
  chr18:45935196-45937081
  hyper

SEQ ID NO: 361271 - DNA, 75 bp, Homo sapiens; identical to SEQ ID NO: 347503
  chr18:45937111-45937186
  hyper

SEQ ID NO: 361272 - DNA, 556 bp, Homo sapiens; identical to SEQ ID NO: 335811
  chr18:46502500-46503056
  hyper

SEQ ID NO: 361273 - DNA, 72 bp, Homo sapiens
  chr18:47087075-47087147
  hyper
cgaggtcggaacaggatctgctggctccggctcggtttcctcgcacaggtctctccagctggatcctcgacg

SEQ ID NO: 361274 - DNA, 357 bp, Homo sapiens; identical to SEQ ID NO: 204988
  chr18:47087704-47088061
  hyper

SEQ ID NO: 361275 - DNA, 242 bp, Homo sapiens; identical to SEQ ID NO: 347506
  chr18:47088502-47088744
  hyper

SEQ ID NO: 361276 - DNA, 195 bp, Homo sapiens; identical to SEQ ID NO: 345554
  chr18:47339411-47339606
  hyper

SEQ ID NO: 361277 - DNA, 400 bp, Homo sapiens; identical to SEQ ID NO: 204991
  chr18:47339758-47340158
  hyper

SEQ ID NO: 361278 - DNA, 219 bp, Homo sapiens
  chr18:47719964-47720183
  hyper
cgggcgggtgtcccgggaatcgcatacccacgcaacgcgcgtggacaccacacgcacacacaactctgcatggaggcgtgtgcataggcactgttaaacgtgttttggccacccaagaagacgaacaggaaaaccaggcattggactatccaaaacttgttttcttaaaggtgcatagggcacatgtgaagaaaaggcctttgcccctctcactactga

SEQ ID NO: 361279 - DNA, 173 bp, Homo sapiens; identical to SEQ ID NO: 293091
  chr18:47720319-47720492
  hyper

SEQ ID NO: 361280 - DNA, 279 bp, Homo sapiens; identical to SEQ ID NO: 293092
  chr18:47720522-47720801
  hyper

SEQ ID NO: 361281 - DNA, 436 bp, Homo sapiens; identical to SEQ ID NO: 347511
  chr18:47720908-47721344
  hyper

SEQ ID NO: 361282 - DNA, 204 bp, Homo sapiens; identical to SEQ ID NO: 335816
  chr18:47813485-47813689
  hyper

SEQ ID NO: 361283 - DNA, 208 bp, Homo sapiens
  chr18:49868091-49868299
  hyper
cggagctggcggcttcgacggccaaaagaatagaaaagagcaaaatgactcatgataaggtccacttgttttgcgggacctcaccgcaagtgtagatgggcactggggtacagtgagcggtcctggcaaagaaggagaggagagcggctggatgagcattcagagagcccttcggaaacgacctttttccaaatccaaaggaaaaaca

SEQ ID NO: 361284 - DNA, 315 bp, Homo sapiens; identical to SEQ ID NO: 293100
  chr18:49868356-49868671
  hyper

SEQ ID NO: 361285 - DNA, 353 bp, Homo sapiens
  chr18:52495540-52495893
  hyper
cgagaggagtgtgtttctcactgcagcagttgagtcaccagcaagacttgcctgaggtgagctccgcacatccgcgttgggacttgcagacacgccttcttctcacacaaaccttacccagccccgccgccgcggcggactccgagggtggtgccaccagccctgccactcgcagtcctgacgggcaggggctgcggaccgcccggccttggacccatccggagccacaggttggaggagataagtagctgtccccgtgctcatcgccctgtggagcagatcctgtctccttgctgacggtggagcccgggagttccagggcttgggaaggggaaggaaacctctctgaaatc

SEQ ID NO: 361286 - DNA, 50 bp, Homo sapiens
  chr18:52496020-52496070
  hyper
ctctgtgtgtgtgtgtgtgcatgtgtgagtgcgtgtgcaccttcgatcgc

SEQ ID NO: 361287 - DNA, 138 bp, Homo sapiens
  chr18:52989603-52989741
  hyper
cgcagctgcctgagaactcgactcggagaaaggggagggaaaggggagggaagaaaaaaaaaaaaaaaaaaaaaaaaacaccacgtctctgacctcgctcaaaaggagagagggggcagtgttttctgactgcttggt

SEQ ID NO: 361288 - DNA, 448 bp, Homo sapiens
  chr18:53256017-53256465
  hyper
atactttctttcccctcccttttaagtcacagaatagtataactgcaaacttcgaaaaaaaaaaagggcaatttttgggggtggatgttgttttgtttttgcacttgagttcctaggcacgctaagtccctgttcgccagcactgtaagtttttaattcaacatttaccattataggccctgcatgctcttaaaacatactttttcacatcactttttaggataaaatttaagcttcataattctatcgtttcgtaataacaagcgtgctttatccggtatatgcaacataagctattttaacgtgtgtttgaaaaaaaaaacacacattctacaaatcctggtattgctagatgtgcgagtacatacacaaaatgcatgcacacactttttcccattggcaattatttaataggttgtcccttttgttttaataaaacatcgggatc

SEQ ID NO: 361289 - DNA, 53 bp, Homo sapiens; identical to SEQ ID NO: 352104
  chr18:53257322-53257375
  hyper

SEQ ID NO: 361290 - DNA, 44 bp, Homo sapiens; identical to SEQ ID NO: 352105
  chr18:53446783-53446827
  hyper

SEQ ID NO: 361291 - DNA, 34 bp, Homo sapiens; identical to SEQ ID NO: 347512
  chr18:54789287-54789321
  hyper

SEQ ID NO: 361292 - DNA, 154 bp, Homo sapiens
  chr18:55020285-55020439
  hyper
cgggaatttggttgatggggtgtttggggaagggaaggcgtgggggaggggtgttttggcctctccgagactctttgggccagataactgcgcggtccttccactcctctctctaattctcccttccccctccctgttattttttttttaaccc

SEQ ID NO: 361293 - DNA, 118 bp, Homo sapiens; identical to SEQ ID NO: 352107
  chr18:55021430-55021548
  hyper

SEQ ID NO: 361294 - DNA, 49 bp, Homo sapiens; identical to SEQ ID NO: 352108
  chr18:55104759-55104808
  hyper

SEQ ID NO: 361295 - DNA, 279 bp, Homo sapiens; identical to SEQ ID NO: 205011
  chr18:55105185-55105464
  hyper

SEQ ID NO: 361296 - DNA, 57 bp, Homo sapiens; identical to SEQ ID NO: 347514
  chr18:55106090-55106147
  hyper

SEQ ID NO: 361297 - DNA, 234 bp, Homo sapiens
  chr18:55470607-55470841
  hyper
cgggctcggccttctcccctccctttttccctccctagggcggagaggggctggactgcaagccccggggcggcccgaggcggcccaggtccagctcctgccccacgccctccgtgcgtcctggagtcaggtgggcacccctttcagtcttccgagcccagcctacgagcccttgcctcgcccagcctgagacccagttgctgcggctgctcttagctccccgggggccgcact

SEQ ID NO: 361298 - DNA, 246 bp, Homo sapiens
  chr18:55470954-55471200
  hyper
cccgggacctgagctccctcggtaaggggagctgtgtcctcttgatgccaagtcatgtttggggaccggtcaccgaatgcgcgtcaaagttcgccgcgtggagggtgaagaaagaggctgcgcctcaagacttccagaaacgtatcctgtgattgcagccagcaggctttctgccgagtccaaacgctatcgagtttttttgggtttggagtcaaaaggagttaaggtgcggcccgtgaaccacgc

SEQ ID NO: 361299 - DNA, 145 bp, Homo sapiens
  chr18:57069721-57069866
  hyper
cggttcggtgttgaagccaaatctcagtctgtgttgtgacactgccattgctgccgcctgcagtaccactgccgcatctgactcacattctagaaggaaggtaggtttgtcccaatgaatgcagcttggggcagctgccttgtgg

SEQ ID NO: 361300 - DNA, 168 bp, Homo sapiens
  chr18:57069918-57070086
  hyper
atctgccgtgtcagcttggaactgcaggagacgctagaggggaagacggagaaaggaagggaaacaaagattgatatgaccatatggtctgcatattgagcttgctgtcttttacatttgtgacttagaggaacctgtatcaagaaaatgtcattattcttattccac

SEQ ID NO: 361301 - DNA, 152 bp, Homo sapiens; identical to SEQ ID NO: 205022
  chr18:57363523-57363675
  hyper

SEQ ID NO: 361302 - DNA, 133 bp, Homo sapiens; identical to SEQ ID NO: 335839
  chr18:59500732-59500865
  hyper

SEQ ID NO: 361303 - DNA, 78 bp, Homo sapiens
  chr18:59560090-59560168
  hyper
cgtttaggaggcaagaggctgacaggcaggaaacacaattgagactgagctttcttcagcctgcagtgaaatacatgc

SEQ ID NO: 361304 - DNA, 649 bp, Homo sapiens
  chr18:59560572-59561221
  hyper
cgtttgcccctgtccgccacctcatcaagtcaccgccacctcatcaagtcaccgtcacctcatcaagtcaccgtcactctgctttggcgatttctctactctctccagacccaggcagcgctccccaagccatgccccgaccccaggcgggattggggaccgccgcttcccgagcagcgccccacgagtccagctggctttgtcctgccgctgtccttccaggagcaagcgccccaggcgcgtgtgtctgcacaaaagacccccaacatctggcccttcacagcgctctctaatcccgggaggggccctggggcaacttctagggctggagaaggcgcgagacaaggggaccgggagaagatgagccggggtgtgtgcgggccgggggcgcaactggggcgggcgcgcgcgcacgtgcacacccaggggcgcgcgcggcgcgggcacgaggaaagctccctcggaccggagctccagggggcatccgaggactcggccgagcagccgacagcgccgctccccgccgcggccgcccgcccaactccgccagctctcaggagacacgcaactcccgggaccacctcccccgtgccccgccagaccccgcgctcccctccccgggaccctgcggccccgccaccccctccgc

SEQ ID NO: 361305 - DNA, 100 bp, Homo sapiens; identical to SEQ ID NO: 347515
  chr18:60985398-60985498
  hyper

SEQ ID NO: 361306 - DNA, 75 bp, Homo sapiens; identical to SEQ ID NO: 347516
  chr18:60985973-60986048
  hyper

SEQ ID NO: 361307 - DNA, 125 bp, Homo sapiens; identical to SEQ ID NO: 335842
  chr18:60987974-60988099
  hyper

SEQ ID NO: 361308 - DNA, 81 bp, Homo sapiens; identical to SEQ ID NO: 352113
  chr18:61603403-61603484
  hyper

SEQ ID NO: 361309 - DNA, 200 bp, Homo sapiens; identical to SEQ ID NO: 293162
  chr18:61603701-61603901
  hyper

SEQ ID NO: 361310 - DNA, 208 bp, Homo sapiens; identical to SEQ ID NO: 352115
  chr18:61603985-61604193
  hyper

SEQ ID NO: 361311 - DNA, 137 bp, Homo sapiens
  chr18:70210281-70210418
  hyper
cgaaggaccgattccaacgacggaatcccaggcttgggttattctccagctctggtttccagaccacggggattctctctttctcagcggggcggcagcccctgcaggtttctgcgaacttacgcgcccgtctgcac

SEQ ID NO: 361312 - DNA, 52 bp, Homo sapiens; identical to SEQ ID NO: 205039
  chr18:70210508-70210560
  hyper

SEQ ID NO: 361313 - DNA, 65 bp, Homo sapiens; identical to SEQ ID NO: 352116
  chr18:70211724-70211789
  hyper

SEQ ID NO: 361314 - DNA, 122 bp, Homo sapiens; identical to SEQ ID NO: 335849
  chr18:74163260-74163382
  hyper

SEQ ID NO: 361315 - DNA, 817 bp, Homo sapiens; identical to SEQ ID NO: 347518
  chr18:74844285-74845102
  hyper

SEQ ID NO: 361316 - DNA, 62 bp, Homo sapiens
  chr18:77153122-77153184
  hyper
cgctgtgggccagaatgcaaaactgcaggaacagaacattcgcaggaacagaacacagtcgt

SEQ ID NO: 361317 - DNA, 34 bp, Homo sapiens
  chr18:77153516-77153550
  hyper
aaatattggacggggtggatgaacacccaagtgc

SEQ ID NO: 361318 - DNA, 303 bp, Homo sapiens
  chr18:77156459-77156762
  hyper
cgaggtcggccgggtctgtgcgcccagggaggggcgcggcgcggaccgggaacggcgtcccccagctcccagcagcccggttccgagcgcgccttctgccaataggtgtctcctctgccccagcgctgagggcgcgaggcgaggccgccgcgggtcccgccgaggaagcggctcgcaggccggcgatttggggacgggcgaggctgggccgtcaggaccacagagggcacgtgggagggaggaagggaggcttccttgggagtgaaggatgccccgtgtcttcctgagcgaggcagagccacc

SEQ ID NO: 361319 - DNA, 51 bp, Homo sapiens
  chr18:77156828-77156879
  hyper
gtctccctcgcgccgcgcccctgaattccccagggccgagcccgtcacgcc

SEQ ID NO: 361320 - DNA, 583 bp, Homo sapiens; identical to SEQ ID NO: 293194
  chr18:77160022-77160605
  hyper

SEQ ID NO: 361321 - DNA, 67 bp, Homo sapiens; identical to SEQ ID NO: 352120
  chr18:77160661-77160728
  hyper

SEQ ID NO: 361322 - DNA, 75 bp, Homo sapiens; identical to SEQ ID NO: 335859
  chr18:77724415-77724490
  hyper

SEQ ID NO: 361323 - DNA, 251 bp, Homo sapiens; identical to SEQ ID NO: 205052
  chr18:78004742-78004993
  hyper

SEQ ID NO: 361324 - DNA, 33 bp, Homo sapiens; identical to SEQ ID NO: 205053
  chr18:78005051-78005084
  hyper

SEQ ID NO: 361325 - DNA, 405 bp, Homo sapiens; identical to SEQ ID NO: 205054
  chr18:78005162-78005567
  hyper

SEQ ID NO: 361326 - DNA, 330 bp, Homo sapiens; identical to SEQ ID NO: 293207
  chr19:267237-267567
  hyper

SEQ ID NO: 361327 - DNA, 371 bp, Homo sapiens
  chr19:290594-290965
  hyper
cggcctttgttcccgggaccctgcgggaggggggcctcgggatgcccattccgccagtgtggcccgcaaacccgccggacaggtttggttctcctggcctcccggccccccgccaccccgttcacccgaagcctgggacccagccttcatccccagtgtctcccccgcccgagccagcagggcggctgggcctccccgcacgtgcacgggttcgaatcccgccgacgcaccgggtgccaggaccgagggtcagccctctccgcgcgcagcgggagcgcccaccccaggggcggaggcgcggacgtcctgccggggtaacccgcggccgcccccacctcccgggcccgcgtgactcacctcccaggccaggc

SEQ ID NO: 361328 - DNA, 343 bp, Homo sapiens
  chr19:291052-291395
  hyper
ctcgcgacccccatccccctgggcctgggacgcggggacccccgagcctgggagggcgcgcgcagtgcggggcgcggagggaggtctggtcctcacgcgaggtccccgcctccagggtcctcggagggacgagggcgcgcagcctccgcgttcccctgcaaacttgcgcgcagccgggggcgtgtccgtcccgggagggtccccccaacacccgggtccccaaggctcttaccgaccagtaagcacagcacgtcgagcagcacgaagacccacctccgctgcatggtccccgcgacccccgacgccggtcccagcgcgtcccgtcgcgtcccggcccggccgc

SEQ ID NO: 361329 - DNA, 179 bp, Homo sapiens; identical to SEQ ID NO: 352124
  chr19:460121-460300
  hyper

SEQ ID NO: 361330 - DNA, 146 bp, Homo sapiens; identical to SEQ ID NO: 352125
  chr19:460529-460675
  hyper

SEQ ID NO: 361331 - DNA, 405 bp, Homo sapiens; identical to SEQ ID NO: 293214
  chr19:460726-461131
  hyper

SEQ ID NO: 361332 - DNA, 601 bp, Homo sapiens; identical to SEQ ID NO: 293215
  chr19:461187-461788
  hyper

SEQ ID NO: 361333 - DNA, 405 bp, Homo sapiens; identical to SEQ ID NO: 352128
  chr19:603411-603816
  hyper

SEQ ID NO: 361334 - DNA, 159 bp, Homo sapiens; identical to SEQ ID NO: 352129
  chr19:603846-604005
  hyper

SEQ ID NO: 361335 - DNA, 164 bp, Homo sapiens
  chr19:660994-661158
  hyper
cgtccatgattaaatatttgtcaatcactgttccatgctggctccctggccagcctgtaaattctgtgagggcaaagaccacagcggcctgtcaccacagagttcctttcactacaggaaggccctccccaggcccagtgacagtcggaggaggtcaaggtcct

SEQ ID NO: 361336 - DNA, 155 bp, Homo sapiens; identical to SEQ ID NO: 352130
  chr19:661431-661586
  hyper

SEQ ID NO: 361337 - DNA, 296 bp, Homo sapiens; identical to SEQ ID NO: 352131
  chr19:661720-662016
  hyper

SEQ ID NO: 361338 - DNA, 287 bp, Homo sapiens; identical to SEQ ID NO: 293229
  chr19:813409-813696
  hyper

SEQ ID NO: 361339 - DNA, 322 bp, Homo sapiens; identical to SEQ ID NO: 352133
  chr19:813830-814152
  hyper

SEQ ID NO: 361340 - DNA, 161 bp, Homo sapiens
  chr19:919400-919561
  hyper
cgcacacgtagggggatcagcagggcgggcggacagggcaggctcccaaccgcgcaggtggccacacgcccggctggcggctcccgcaggtctcggtgcaggccacgtgtgccactctgaccgccatgagtgtggaccgctggtacgtgacggtgttcccg

SEQ ID NO: 361341 - DNA, 521 bp, Homo sapiens
  chr19:919591-920112
  hyper
ctggcgctggctgtcagcctcagcatctgggtaggtgagtacagctcaggggcctcacgggagaaggcggacacgtcctagtgccctgggcgcccggagccacctgccgcctcggtccagcatctggaaaatgggcgcaatagctctgcctgcctagggccagcgaggctgcagacggggcgcccgggcctttgcagggtggctgggtgaacgcctcccggggaggcacgtgggggaccgctggttccccgagcggggtcttcatcctggcttgtggcacaggctctgcggcggtgtctgcgccggtgctcgccctgcaccgcctgtcacccgggccgcgcgcctactgcagtgaggccttccccagccgcgccctggagcgcgccttcgcactgtacaacctgctggcgctgtacctgctgccgctgctcgccacctgcgcctgctatgcggccatgctgcgccacctgggccgggtcgccgtgcgccccgcgcccgccgatagcgccctgcaggtgcgc

SEQ ID NO: 361342 - DNA, 743 bp, Homo sapiens; identical to SEQ ID NO: 335871
  chr19:941824-942567
  hyper

SEQ ID NO: 361343 - DNA, 152 bp, Homo sapiens; identical to SEQ ID NO: 352135
  chr19:1444961-1445113
  hyper

SEQ ID NO: 361344 - DNA, 120 bp, Homo sapiens
  chr19:1449921-1450041
  hyper
cggggcacccccttccctcgggggggtttcgccccccgcactcacggcccctgagcccgcgcggaggcccgacgccccgcggccgacgccggtccccgccccgggccgccattggctgtt

SEQ ID NO: 361345 - DNA, 107 bp, Homo sapiens
  chr19:1455104-1455211
  hyper
cggcgccgccctctgagcccgcccccgctgacttgctccccaggtgtttcctgctgaatgagattgagaaggaggagaaggagaagctctggtactactctcagctg

SEQ ID NO: 361346 - DNA, 249 bp, Homo sapiens
  chr19:1491131-1491380
  hyper
cggggggccgggggcggacaccggcgcggggccggagcatcgcggctcaggctgcgggaaagcggtgcgcgtgcagcggggtgggtgccctggtccgcgggcgagctcgagcagccaaccccgggcgcgtcggggccatggacggcctgaggcagcgcgtggagcacttcctggagcaaaggaacctggtcaccgaagtgctgggggcgctggaggccaagaccggggtggagaagcggtatctggctg

SEQ ID NO: 361347 - DNA, 296 bp, Homo sapiens; identical to SEQ ID NO: 293267
  chr19:1491429-1491725
  hyper

SEQ ID NO: 361348 - DNA, 191 bp, Homo sapiens; identical to SEQ ID NO: 352136
  chr19:1675929-1676120
  hyper

SEQ ID NO: 361349 - DNA, 98 bp, Homo sapiens; identical to SEQ ID NO: 345556
  chr19:1725428-1725526
  hyper

SEQ ID NO: 361350 - DNA, 280 bp, Homo sapiens; identical to SEQ ID NO: 205085
  chr19:1748599-1748879
  hyper

SEQ ID NO: 361351 - DNA, 349 bp, Homo sapiens; identical to SEQ ID NO: 293279
  chr19:1748939-1749288
  hyper

SEQ ID NO: 361352 - DNA, 200 bp, Homo sapiens; identical to SEQ ID NO: 293280
  chr19:1749318-1749518
  hyper

SEQ ID NO: 361353 - DNA, 220 bp, Homo sapiens; identical to SEQ ID NO: 293281
  chr19:1749556-1749776
  hyper

SEQ ID NO: 361354 - DNA, 217 bp, Homo sapiens; identical to SEQ ID NO: 352141
  chr19:1751192-1751409
  hyper

SEQ ID NO: 361355 - DNA, 112 bp, Homo sapiens; identical to SEQ ID NO: 352142
  chr19:1751497-1751609
  hyper

SEQ ID NO: 361356 - DNA, 286 bp, Homo sapiens; identical to SEQ ID NO: 352143
  chr19:1753216-1753502
  hyper

SEQ ID NO: 361357 - DNA, 197 bp, Homo sapiens
  chr19:1754950-1755147
  hyper
aagccccgcccgtgcgccccggcagcccgggaccccctatcaggaagctagaccgcgatccgcgccgctgcccgtttgtaccgttgccaaaagggagaaagggattgtgccgcctccccgccccccggtcgccgcttctgcccctttcgggagcgcgtaggggttctctagtccttgttagactgctgggaggctcc

SEQ ID NO: 361358 - DNA, 166 bp, Homo sapiens
  chr19:1758062-1758228
  hyper
tcctgccgggcgccggggccaggacagagacggggacagggagggagaaagacccgcaggtgcagacggagagggagggggagacggggagatggagagagagggaggggtcgcgagacaaaaccagagagtggggagggagagaccgggagcgggagaaacagac

SEQ ID NO: 361359 - DNA, 74 bp, Homo sapiens; identical to SEQ ID NO: 347521
  chr19:1761779-1761853
  hyper

SEQ ID NO: 361360 - DNA, 189 bp, Homo sapiens; identical to SEQ ID NO: 205090
  chr19:1761983-1762172
  hyper

SEQ ID NO: 361361 - DNA, 47 bp, Homo sapiens; identical to SEQ ID NO: 345558
  chr19:1762820-1762867
  hyper

SEQ ID NO: 361362 - DNA, 108 bp, Homo sapiens; identical to SEQ ID NO: 352147
  chr19:1765525-1765633
  hyper

SEQ ID NO: 361363 - DNA, 339 bp, Homo sapiens; identical to SEQ ID NO: 352148
  chr19:1766024-1766363
  hyper

SEQ ID NO: 361364 - DNA, 98 bp, Homo sapiens
  chr19:1768372-1768470
  hyper
agagaggcggctggtggtggatggggagagggaagcggctggaagagctcaggagcccaggaaggactggcctgcaccgggacatgcctgaagggggc

SEQ ID NO: 361365 - DNA, 68 bp, Homo sapiens; identical to SEQ ID NO: 352149
  chr19:1769669-1769737
  hyper

SEQ ID NO: 361366 - DNA, 306 bp, Homo sapiens; identical to SEQ ID NO: 352150
  chr19:1775741-1776047
  hyper

SEQ ID NO: 361367 - DNA, 223 bp, Homo sapiens; identical to SEQ ID NO: 205095
  chr19:1776743-1776966
  hyper

SEQ ID NO: 361368 - DNA, 109 bp, Homo sapiens; identical to SEQ ID NO: 345559
  chr19:1857456-1857565
  hyper

SEQ ID NO: 361369 - DNA, 343 bp, Homo sapiens; identical to SEQ ID NO: 335892
  chr19:1862256-1862599
  hyper

SEQ ID NO: 361370 - DNA, 116 bp, Homo sapiens; identical to SEQ ID NO: 345560
  chr19:1979018-1979134
  hyper

SEQ ID NO: 361371 - DNA, 728 bp, Homo sapiens; identical to SEQ ID NO: 335895
  chr19:2164931-2165659
  hyper

SEQ ID NO: 361372 - DNA, 174 bp, Homo sapiens
  chr19:2236297-2236471
  hyper
cgctcaggctggggccggcgccaaaaatgtctcagggcgcagacacggaagcacccccagggctagtgcgcctgcgcaccttgggccagccatgccgcccgcctccgctgcgtggcgctggcgacccgtggctgctggcgtgggcggggtaccggttggtaggagagacggacc

SEQ ID NO: 361373 - DNA, 218 bp, Homo sapiens
  chr19:2273763-2273981
  hyper
cgccgtgttactggccgcccctagggacctgcagcgccgttcggggcagcagcacttccggcggggtcgtggcctggagcgcttccgggtctgcaaccccgccgtctgcccggccgcagcgccacctgccggccgcatccgggagcgccacccggaaaatcagggccaggcctggccgggaaaccggctggaaagaggaggaaaggaggaactcgaaa

SEQ ID NO: 361374 - DNA, 601 bp, Homo sapiens; identical to SEQ ID NO: 335900
  chr19:2461998-2462599
  hyper

SEQ ID NO: 361375 - DNA, 435 bp, Homo sapiens
  chr19:2488689-2489124
  hyper
agcagctcagcaaaagcgtgactcagtttccctcgtccataaaagggaaagccgaatcgccctcccacgtgtcgaggtgaaactagacagtgcactaaggcacttagcaaaacgcgctgccttgagaacccttattacgccttccttccttccacctcaccccctggccagacactctgggggtggagaggggcgctgacccaggccccagacgcccctcccgtccgccctccctagcaggcaggagtcccggctttcccgttccttaaattggataattggagacagaggcgggtgctcgagacggagaaatccccaagtgggcgaaaggcaaggggcctgtcctagtttccctgcactgggggcccccaccctcgccagcgctccctccggtgcgccctgggcgcgcagtctgtgcgctcgggagcccccagc

SEQ ID NO: 361376 - DNA, 598 bp, Homo sapiens; identical to SEQ ID NO: 347527
  chr19:2579147-2579745
  hyper

SEQ ID NO: 361377 - DNA, 72 bp, Homo sapiens; identical to SEQ ID NO: 347528
  chr19:2702445-2702517
  hyper

SEQ ID NO: 361378 - DNA, 453 bp, Homo sapiens; identical to SEQ ID NO: 347529
  chr19:2702553-2703006
  hyper

SEQ ID NO: 361379 - DNA, 229 bp, Homo sapiens; identical to SEQ ID NO: 352158
  chr19:3360723-3360952
  hyper

SEQ ID NO: 361380 - DNA, 46 bp, Homo sapiens; identical to SEQ ID NO: 347530
  chr19:3785511-3785557
  hyper

SEQ ID NO: 361381 - DNA, 265 bp, Homo sapiens; identical to SEQ ID NO: 205120
  chr19:4054040-4054305
  hyper

SEQ ID NO: 361382 - DNA, 55 bp, Homo sapiens; identical to SEQ ID NO: 205121
  chr19:4054380-4054435
  hyper

SEQ ID NO: 361383 - DNA, 170 bp, Homo sapiens; identical to SEQ ID NO: 205122
  chr19:4054471-4054641
  hyper

SEQ ID NO: 361384 - DNA, 520 bp, Homo sapiens; identical to SEQ ID NO: 352163
  chr19:4054917-4055437
  hyper

SEQ ID NO: 361385 - DNA, 36 bp, Homo sapiens; identical to SEQ ID NO: 335909
  chr19:4064382-4064418
  hyper

SEQ ID NO: 361386 - DNA, 97 bp, Homo sapiens; identical to SEQ ID NO: 205124
  chr19:4064872-4064969
  hyper

SEQ ID NO: 361387 - DNA, 33 bp, Homo sapiens
  chr19:4304684-4304717
  hyper
ttggggacccagcgtgcgcggggcccgcgggcc

SEQ ID NO: 361388 - DNA, 107 bp, Homo sapiens; identical to SEQ ID NO: 335912
  chr19:4432865-4432972
  hyper

SEQ ID NO: 361389 - DNA, 242 bp, Homo sapiens; identical to SEQ ID NO: 352167
  chr19:4523777-4524019
  hyper

SEQ ID NO: 361390 - DNA, 303 bp, Homo sapiens; identical to SEQ ID NO: 293400
  chr19:5293673-5293976
  hyper

SEQ ID NO: 361391 - DNA, 541 bp, Homo sapiens
  chr19:5339897-5340438
  hyper
cgtgcgcgtctgcctgccagagcccctggggctgggggctgaggctcgcccctgggtggggaggctggaagggggcgccgaggccgcagaagggtggggcaatgcccgagtgccggaggggcgacctcccataaggcaacgacagggcccggagtgttccaggggagacggcgtagactagggggtctccaggggagggagacccggagagggaaggcggcgggcgcagcagccctggagccaccccgcctggagccacccgtcccggctcctctccgctccggggcgcccgcatgccccccatcccccggcacagcgccccctgcctccaggacccgcccggggacccgggccgggcgccgccggggccggcaccggctccgcacacacgcgcgcccccctccgcgcctctgccccgcccgcagcccggggtggtgcagccggcggcgctgggcagcttccaatgccgcgctctgggcgcttccagcccagccccctcccacgccgcggacgaagcccccccagcaccccctgccgagcg

SEQ ID NO: 361392 - DNA, 438 bp, Homo sapiens; identical to SEQ ID NO: 347531
  chr19:5608081-5608519
  hyper

SEQ ID NO: 361393 - DNA, 407 bp, Homo sapiens; identical to SEQ ID NO: 335919
  chr19:5686667-5687074
  hyper

SEQ ID NO: 361394 - DNA, 290 bp, Homo sapiens; identical to SEQ ID NO: 352169
  chr19:5961947-5962237
  hyper

SEQ ID NO: 361395 - DNA, 45 bp, Homo sapiens; identical to SEQ ID NO: 352170
  chr19:5962455-5962500
  hyper

SEQ ID NO: 361396 - DNA, 306 bp, Homo sapiens
  chr19:6530758-6531064
  hyper
cgggaaagagcggcagagagggagaaccagggcgatggagagacagcagggagaaaggaacctggagccgagcttggaaggccggaaacggaaaggagagcgaaaagcggagagagatccgagtggagaaaattccgcagagtcacggggacgaggggaaaggctctgggctgggaaggggcgtggccgcgggcggaggggcgtggccgcgggcggaggggcgtggcctccttttgtagccaagcagctataaaaagcggcgcgctgtgtcttcccgcagtctctcgtcatggaatacgcctctga

SEQ ID NO: 361397 - DNA, 97 bp, Homo sapiens
  chr19:6531295-6531392
  hyper
cctcttggacctgcggcaggtgagacgtgccccgaccctcggtagctggtctcgcgggagacccctaccgcccctctgggactcccttctccctccc

SEQ ID NO: 361398 - DNA, 65 bp, Homo sapiens
  chr19:6590260-6590325
  hyper
cggcgcgcactggtgattttatttcattttatttttttttactcttaagacttcttaaagaggaa

SEQ ID NO: 361399 - DNA, 323 bp, Homo sapiens
  chr19:6590881-6591204
  hyper
agcctgtgcgaagcgctggatgcacaccacgaggcagatcaccaagcccgcgaccaatgggaccaaagcagcccgcaggacgcacccatagggcctgcgccgcaccgagcagcccgaaccctcctccggcatcgccgcggcgatcacctccgctagcgcaggaggggcgatgggggcgcggagcgctgccgagaaggaaggaaggaaactgcagccccctcccggggctcctgggcgtctacttgcttcaacctgtcaggggaccagcctgcccctctctggggatgtccggccggtcgaggggagggacttgagcaattggc

SEQ ID NO: 361400 - DNA, 150 bp, Homo sapiens; identical to SEQ ID NO: 335923
  chr19:6768009-6768159
  hyper

SEQ ID NO: 361401 - DNA, 1037 bp, Homo sapiens; identical to SEQ ID NO: 335924
  chr19:7459644-7460681
  hyper

SEQ ID NO: 361402 - DNA, 112 bp, Homo sapiens; identical to SEQ ID NO: 335925
  chr19:7701796-7701908
  hyper

SEQ ID NO: 361403 - DNA, 37 bp, Homo sapiens
  chr19:8067303-8067340
  hyper
cgggggcccaggacacagcagcggagcagggagagtc

SEQ ID NO: 361404 - DNA, 72 bp, Homo sapiens
  chr19:8115163-8115235
  hyper
cgtgaaggctgccggcgggacaaacagtgaggggtgaggcagggagggagactcacgttggggacctccccc

SEQ ID NO: 361405 - DNA, 685 bp, Homo sapiens; identical to SEQ ID NO: 335930
  chr19:8274278-8274963
  hyper

SEQ ID NO: 361406 - DNA, 689 bp, Homo sapiens; identical to SEQ ID NO: 335931
  chr19:8372877-8373566
  hyper

SEQ ID NO: 361407 - DNA, 112 bp, Homo sapiens
  chr19:8942745-8942857
  hyper
cgtgctgacctaagctcacagcccgaggcctcatgaaccgaaacacggctccctggagggacgcagggcccgtggctggcggtgtccgcggcccacgtcgccccctggactc

SEQ ID NO: 361408 - DNA, 405 bp, Homo sapiens; identical to SEQ ID NO: 335933
  chr19:9545915-9546320
  hyper

SEQ ID NO: 361409 - DNA, 322 bp, Homo sapiens; identical to SEQ ID NO: 352174
  chr19:10024009-10024331
  hyper

SEQ ID NO: 361410 - DNA, 211 bp, Homo sapiens; identical to SEQ ID NO: 347533
  chr19:10197461-10197672
  hyper

SEQ ID NO: 361411 - DNA, 169 bp, Homo sapiens; identical to SEQ ID NO: 335936
  chr19:10207022-10207191
  hyper

SEQ ID NO: 361412 - DNA, 992 bp, Homo sapiens; identical to SEQ ID NO: 335937
  chr19:10381056-10382048
  hyper

SEQ ID NO: 361413 - DNA, 214 bp, Homo sapiens; identical to SEQ ID NO: 205174
  chr19:10400761-10400975
  hyper

SEQ ID NO: 361414 - DNA, 278 bp, Homo sapiens; identical to SEQ ID NO: 293499
  chr19:10401208-10401486
  hyper

SEQ ID NO: 361415 - DNA, 290 bp, Homo sapiens; identical to SEQ ID NO: 293500
  chr19:10402604-10402894
  hyper

SEQ ID NO: 361416 - DNA, 340 bp, Homo sapiens; identical to SEQ ID NO: 293501
  chr19:10402960-10403300
  hyper

SEQ ID NO: 361417 - DNA, 131 bp, Homo sapiens; identical to SEQ ID NO: 352182
  chr19:10403330-10403461
  hyper

SEQ ID NO: 361418 - DNA, 484 bp, Homo sapiens; identical to SEQ ID NO: 352183
  chr19:10529649-10530133
  hyper

SEQ ID NO: 361419 - DNA, 111 bp, Homo sapiens; identical to SEQ ID NO: 352184
  chr19:10530526-10530637
  hyper

SEQ ID NO: 361420 - DNA, 630 bp, Homo sapiens; identical to SEQ ID NO: 352185
  chr19:10530654-10531284
  hyper

SEQ ID NO: 361421 - DNA, 38 bp, Homo sapiens
  chr19:10616220-10616258
  hyper
cgcgagactacgtctcgaaaggaaaagaaaaaaaaaaa

SEQ ID NO: 361422 - DNA, 115 bp, Homo sapiens; identical to SEQ ID NO: 352186
  chr19:10691764-10691879
  hyper

SEQ ID NO: 361423 - DNA, 177 bp, Homo sapiens; identical to SEQ ID NO: 335952
  chr19:11199850-11200027
  hyper

SEQ ID NO: 361424 - DNA, 146 bp, Homo sapiens; identical to SEQ ID NO: 335953
  chr19:11466008-11466154
  hyper

SEQ ID NO: 361425 - DNA, 597 bp, Homo sapiens; identical to SEQ ID NO: 352189
  chr19:11491655-11492252
  hyper

SEQ ID NO: 361426 - DNA, 134 bp, Homo sapiens; identical to SEQ ID NO: 205186
  chr19:11492528-11492662
  hyper

SEQ ID NO: 361427 - DNA, 163 bp, Homo sapiens; identical to SEQ ID NO: 352191
  chr19:11529251-11529414
  hyper

SEQ ID NO: 361428 - DNA, 50 bp, Homo sapiens; identical to SEQ ID NO: 352192
  chr19:11531278-11531328
  hyper

SEQ ID NO: 361429 - DNA, 37 bp, Homo sapiens; identical to SEQ ID NO: 293533
  chr19:11531888-11531925
  hyper

SEQ ID NO: 361430 - DNA, 284 bp, Homo sapiens; identical to SEQ ID NO: 352194
  chr19:11532739-11533023
  hyper

SEQ ID NO: 361431 - DNA, 69 bp, Homo sapiens
  chr19:11591231-11591300
  hyper
cgccctcagcactctgggcgcggccctgcccactctcaggccccgaggcttggtcctacccccccaacc

SEQ ID NO: 361432 - DNA, 184 bp, Homo sapiens; identical to SEQ ID NO: 293539
  chr19:11591353-11591537
  hyper

SEQ ID NO: 361433 - DNA, 67 bp, Homo sapiens; identical to SEQ ID NO: 352195
  chr19:11592604-11592671
  hyper

SEQ ID NO: 361434 - DNA, 189 bp, Homo sapiens; identical to SEQ ID NO: 347537
  chr19:11593453-11593642
  hyper

SEQ ID NO: 361435 - DNA, 57 bp, Homo sapiens; identical to SEQ ID NO: 293543
  chr19:11689628-11689685
  hyper

SEQ ID NO: 361436 - DNA, 165 bp, Homo sapiens; identical to SEQ ID NO: 347538
  chr19:11805261-11805426
  hyper

SEQ ID NO: 361437 - DNA, 369 bp, Homo sapiens; identical to SEQ ID NO: 347539
  chr19:11805597-11805966
  hyper

SEQ ID NO: 361438 - DNA, 608 bp, Homo sapiens; identical to SEQ ID NO: 335963
  chr19:11877720-11878328
  hyper

SEQ ID NO: 361439 - DNA, 160 bp, Homo sapiens; identical to SEQ ID NO: 345564
  chr19:11909173-11909333
  hyper

SEQ ID NO: 361440 - DNA, 60 bp, Homo sapiens; identical to SEQ ID NO: 205194
  chr19:11909732-11909792
  hyper

SEQ ID NO: 361441 - DNA, 49 bp, Homo sapiens; identical to SEQ ID NO: 345566
  chr19:11959378-11959427
  hyper

SEQ ID NO: 361442 - DNA, 172 bp, Homo sapiens; identical to SEQ ID NO: 352202
  chr19:11999219-11999391
  hyper

SEQ ID NO: 361443 - DNA, 254 bp, Homo sapiens; identical to SEQ ID NO: 205198
  chr19:12075818-12076072
  hyper

SEQ ID NO: 361444 - DNA, 332 bp, Homo sapiens; identical to SEQ ID NO: 347544
  chr19:12098300-12098632
  hyper

SEQ ID NO: 361445 - DNA, 514 bp, Homo sapiens; identical to SEQ ID NO: 352205
  chr19:12146030-12146544
  hyper

SEQ ID NO: 361446 - DNA, 117 bp, Homo sapiens; identical to SEQ ID NO: 205202
  chr19:12163331-12163448
  hyper

SEQ ID NO: 361447 - DNA, 443 bp, Homo sapiens; identical to SEQ ID NO: 352207
  chr19:12250823-12251266
  hyper

SEQ ID NO: 361448 - DNA, 585 bp, Homo sapiens; identical to SEQ ID NO: 335975
  chr19:12444060-12444645
  hyper

SEQ ID NO: 361449 - DNA, 226 bp, Homo sapiens; identical to SEQ ID NO: 352208
  chr19:12551198-12551424
  hyper

SEQ ID NO: 361450 - DNA, 391 bp, Homo sapiens; identical to SEQ ID NO: 352209
  chr19:12551485-12551876
  hyper

SEQ ID NO: 361451 - DNA, 96 bp, Homo sapiens; identical to SEQ ID NO: 347546
  chr19:12595013-12595109
  hyper

SEQ ID NO: 361452 - DNA, 538 bp, Homo sapiens; identical to SEQ ID NO: 205207
  chr19:12595307-12595845
  hyper

SEQ ID NO: 361453 - DNA, 198 bp, Homo sapiens; identical to SEQ ID NO: 352212
  chr19:12595896-12596094
  hyper

SEQ ID NO: 361454 - DNA, 610 bp, Homo sapiens; identical to SEQ ID NO: 335981
  chr19:12900128-12900738
  hyper

SEQ ID NO: 361455 - DNA, 109 bp, Homo sapiens
  chr19:12912808-12912917
  hyper
cgcgtgggtaatgcgcccgccgcagactccgcgcacgactccgcctgggagcgcgttgggggccgttggagtccagcatggcgcggaccccgggggcgctgctgctggc

SEQ ID NO: 361456 - DNA, 159 bp, Homo sapiens; identical to SEQ ID NO: 352213
  chr19:12946904-12947063
  hyper

SEQ ID NO: 361457 - DNA, 259 bp, Homo sapiens; identical to SEQ ID NO: 352214
  chr19:12947127-12947386
  hyper

SEQ ID NO: 361458 - DNA, 199 bp, Homo sapiens; identical to SEQ ID NO: 352215
  chr19:12951477-12951676
  hyper

SEQ ID NO: 361459 - DNA, 220 bp, Homo sapiens; identical to SEQ ID NO: 293597
  chr19:12995851-12996071
  hyper

SEQ ID NO: 361460 - DNA, 60 bp, Homo sapiens; identical to SEQ ID NO: 345568
  chr19:13208370-13208430
  hyper

SEQ ID NO: 361461 - DNA, 205 bp, Homo sapiens; identical to SEQ ID NO: 293612
  chr19:13208478-13208683
  hyper

SEQ ID NO: 361462 - DNA, 284 bp, Homo sapiens; identical to SEQ ID NO: 205227
  chr19:13208945-13209229
  hyper

SEQ ID NO: 361463 - DNA, 446 bp, Homo sapiens; identical to SEQ ID NO: 293614
  chr19:13209259-13209705
  hyper

SEQ ID NO: 361464 - DNA, 189 bp, Homo sapiens; identical to SEQ ID NO: 345572
  chr19:13213427-13213616
  hyper

SEQ ID NO: 361465 - DNA, 112 bp, Homo sapiens; identical to SEQ ID NO: 345573
  chr19:13213834-13213946
  hyper

SEQ ID NO: 361466 - DNA, 1257 bp, Homo sapiens; identical to SEQ ID NO: 345574
  chr19:13265772-13267029
  hyper

SEQ ID NO: 361467 - DNA, 223 bp, Homo sapiens; identical to SEQ ID NO: 352223
  chr19:13983612-13983835
  hyper

SEQ ID NO: 361468 - DNA, 433 bp, Homo sapiens; identical to SEQ ID NO: 293628
  chr19:13983865-13984298
  hyper

SEQ ID NO: 361469 - DNA, 1302 bp, Homo sapiens; identical to SEQ ID NO: 335994
  chr19:14073521-14074823
  hyper

SEQ ID NO: 361470 - DNA, 32 bp, Homo sapiens; identical to SEQ ID NO: 205238
  chr19:14584167-14584199
  hyper

SEQ ID NO: 361471 - DNA, 324 bp, Homo sapiens; identical to SEQ ID NO: 335997
  chr19:15235629-15235953
  hyper

SEQ ID NO: 361472 - DNA, 589 bp, Homo sapiens
  chr19:15334122-15334711
  hyper
cgatcatgcgaggaatcccagcccaagcccccgaggtccccgctcccgccctaaaagatgcacgcgccaagcccttgggccagaaaaaaaaaaaaaaaacgggccgggattggctcaggctgggggaggcgggtctacgacgagacacgattttctattggcttactcgccaggactctgcccaatcgacgcgatcgtcttccccagaagacccccgcctccctcccgccggcggccgcggaggcggaagaaggcgcctttccgtcgccctagcaaccgtcagcggatctccgtcgcccgggcaactgtcccaggcctcccgtcagcctttgcctgggcccctccggtcactcggacaaccgctacccgttccggtcaaccatcaacccgtcccccgtcaccccggcaaccatcgccggacccacctacccctggacgccgtcctggtcctgtccgcaggcctcctcgccccaaacctccgccgcgggctccgacgtccgcgaccccacgtctcaggggctccctcctcctcctgcccgtcttctcgcctccccggggcggggggcattgctcctcccctggcaggggg

SEQ ID NO: 361473 - DNA, 106 bp, Homo sapiens; identical to SEQ ID NO: 352228
  chr19:15695669-15695775
  hyper

SEQ ID NO: 361474 - DNA, 161 bp, Homo sapiens; identical to SEQ ID NO: 345576
  chr19:16186802-16186963
  hyper

SEQ ID NO: 361475 - DNA, 102 bp, Homo sapiens; identical to SEQ ID NO: 205249
  chr19:16187000-16187102
  hyper

SEQ ID NO: 361476 - DNA, 517 bp, Homo sapiens; identical to SEQ ID NO: 205250
  chr19:16187103-16187620
  hyper

SEQ ID NO: 361477 - DNA, 634 bp, Homo sapiens; identical to SEQ ID NO: 345579
  chr19:16187640-16188274
  hyper

SEQ ID NO: 361478 - DNA, 661 bp, Homo sapiens; identical to SEQ ID NO: 352233
  chr19:16772102-16772763
  hyper

SEQ ID NO: 361479 - DNA, 214 bp, Homo sapiens; identical to SEQ ID NO: 345580
  chr19:17008145-17008359
  hyper

SEQ ID NO: 361480 - DNA, 31 bp, Homo sapiens; identical to SEQ ID NO: 55797
  chr19:17008820-17008851
  hyper

SEQ ID NO: 361481 - DNA, 105 bp, Homo sapiens
  chr19:17392397-17392502
  hyper
cgtagctccacccactcgagccgggtgccttcgcgtttcccgtttttaaatgagatagtggcacacccggtggcatcctcccacccgggctcttatcggcggtcc

SEQ ID NO: 361482 - DNA, 239 bp, Homo sapiens; identical to SEQ ID NO: 205266
  chr19:17716539-17716778
  hyper

SEQ ID NO: 361483 - DNA, 129 bp, Homo sapiens; identical to SEQ ID NO: 205270
  chr19:17958346-17958475
  hyper

SEQ ID NO: 361484 - DNA, 161 bp, Homo sapiens; identical to SEQ ID NO: 352238
  chr19:17984912-17985073
  hyper

SEQ ID NO: 361485 - DNA, 106 bp, Homo sapiens; identical to SEQ ID NO: 336015
  chr19:18059933-18060039
  hyper

SEQ ID NO: 361486 - DNA, 353 bp, Homo sapiens; identical to SEQ ID NO: 347564
  chr19:18117804-18118157
  hyper

SEQ ID NO: 361487 - DNA, 262 bp, Homo sapiens; identical to SEQ ID NO: 347565
  chr19:18335414-18335676
  hyper

SEQ ID NO: 361488 - DNA, 90 bp, Homo sapiens; identical to SEQ ID NO: 352241
  chr19:18714365-18714455
  hyper

SEQ ID NO: 361489 - DNA, 68 bp, Homo sapiens; identical to SEQ ID NO: 336022
  chr19:18715135-18715203
  hyper

SEQ ID NO: 361490 - DNA, 451 bp, Homo sapiens
  chr19:18715787-18716238
  hyper
cgggggtccccatctcccgtcccgctggtacctgcagacactttacgacccacccgcctgctggtcaggtgctaagacacaccgtaagtagaaacatattgccgaggtgtgagaatcttttatttaatttcttccccccttaaaggaaaaaacacacttacagtgcccccccaccccctacaccttcgcctgctgctctactggctgaaaacaaagcttggcgctcacagtggcactcacaggcgctgcccaccgcctggcagagccgtcaggggccctgggagggcccgaggtagcccctcacctgaaagccaggggagagccaggctttcagcaagtgcccctagaagatgcccggaccctgccccttcccggaggagccctacaggcagcccgcaaacagcccagcacagggtggatgagcctgggagcagtgtgtgcccggcgaccc

SEQ ID NO: 361491 - DNA, 452 bp, Homo sapiens; identical to SEQ ID NO: 293727
  chr19:18716283-18716735
  hyper

SEQ ID NO: 361492 - DNA, 350 bp, Homo sapiens
  chr19:18716847-18717197
  hyper
cccccgggaccccgggctgcgcgccaggcggccagagcggcccccctgcagccccgccctccccgtggggctcatccctccgcctgggggggcccgctgggggcccgcacccagcgcgccaaccgcgtgcgcccccgcctgggagcggtgccctgcagtcccaggggcccagagtccaccgaagcagacgcgtgcgcccgccacgtcctggcatgcagagggtctcaggccgcgatccccccagcccccgggggcctggcctggcgccctcggcccagctgcccaggtaacagggcctcgggcgcggaagcaggactctctggacagtggactgcggcgccgtgtgcccc

SEQ ID NO: 361493 - DNA, 62 bp, Homo sapiens
  chr19:18899652-18899714
  hyper
tgttgatgcacacggagttggggacgcagttatgttgcccggtctcacactcgttgatgtcc

SEQ ID NO: 361494 - DNA, 90 bp, Homo sapiens; identical to SEQ ID NO: 352243
  chr19:19729161-19729251
  hyper

SEQ ID NO: 361495 - DNA, 135 bp, Homo sapiens; identical to SEQ ID NO: 205291
  chr19:19729395-19729530
  hyper

SEQ ID NO: 361496 - DNA, 147 bp, Homo sapiens; identical to SEQ ID NO: 352245
  chr19:19729585-19729732
  hyper

SEQ ID NO: 361497 - DNA, 50 bp, Homo sapiens; identical to SEQ ID NO: 205293
  chr19:19738572-19738622
  hyper

SEQ ID NO: 361498 - DNA, 504 bp, Homo sapiens; identical to SEQ ID NO: 293751
  chr19:19738668-19739172
  hyper

SEQ ID NO: 361499 - DNA, 247 bp, Homo sapiens; identical to SEQ ID NO: 205295
  chr19:19739428-19739675
  hyper

SEQ ID NO: 361500 - DNA, 261 bp, Homo sapiens; identical to SEQ ID NO: 205296
  chr19:19843330-19843591
  hyper

SEQ ID NO: 361501 - DNA, 47 bp, Homo sapiens; identical to SEQ ID NO: 352250
  chr19:19844044-19844091
  hyper

SEQ ID NO: 361502 - DNA, 243 bp, Homo sapiens; identical to SEQ ID NO: 336034
  chr19:19887245-19887488
  hyper

SEQ ID NO: 361503 - DNA, 74 bp, Homo sapiens; identical to SEQ ID NO: 347566
  chr19:19932106-19932180
  hyper

SEQ ID NO: 361504 - DNA, 693 bp, Homo sapiens; identical to SEQ ID NO: 345583
  chr19:19976556-19977249
  hyper

SEQ ID NO: 361505 - DNA, 35 bp, Homo sapiens; identical to SEQ ID NO: 345584
  chr19:19977294-19977329
  hyper

SEQ ID NO: 361506 - DNA, 69 bp, Homo sapiens; identical to SEQ ID NO: 347569
  chr19:20011652-20011721
  hyper

SEQ ID NO: 361507 - DNA, 48 bp, Homo sapiens; identical to SEQ ID NO: 347570
  chr19:20011722-20011770
  hyper

SEQ ID NO: 361508 - DNA, 53 bp, Homo sapiens; identical to SEQ ID NO: 347571
  chr19:20162601-20162654
  hyper

SEQ ID NO: 361509 - DNA, 76 bp, Homo sapiens; identical to SEQ ID NO: 336043
  chr19:21512126-21512202
  hyper

SEQ ID NO: 361510 - DNA, 117 bp, Homo sapiens; identical to SEQ ID NO: 336044
  chr19:21541712-21541829
  hyper

SEQ ID NO: 361511 - DNA, 171 bp, Homo sapiens; identical to SEQ ID NO: 336045
  chr19:21542078-21542249
  hyper

SEQ ID NO: 361512 - DNA, 309 bp, Homo sapiens; identical to SEQ ID NO: 336046
  chr19:21579832-21580141
  hyper

SEQ ID NO: 361513 - DNA, 101 bp, Homo sapiens; identical to SEQ ID NO: 12199
  chr19:21580233-21580334
  hyper

SEQ ID NO: 361514 - DNA, 159 bp, Homo sapiens; identical to SEQ ID NO: 336048
  chr19:21688303-21688462
  hyper

SEQ ID NO: 361515 - DNA, 73 bp, Homo sapiens; identical to SEQ ID NO: 293780
  chr19:21688741-21688814
  hyper

SEQ ID NO: 361516 - DNA, 60 bp, Homo sapiens; identical to SEQ ID NO: 205321
  chr19:22019028-22019088
  hyper

SEQ ID NO: 361517 - DNA, 102 bp, Homo sapiens; identical to SEQ ID NO: 336054
  chr19:23432614-23432716
  hyper

SEQ ID NO: 361518 - DNA, 129 bp, Homo sapiens; identical to SEQ ID NO: 347575
  chr19:23432833-23432962
  hyper

SEQ ID NO: 361519 - DNA, 120 bp, Homo sapiens; identical to SEQ ID NO: 205325
  chr19:23433023-23433143
  hyper

SEQ ID NO: 361520 - DNA, 118 bp, Homo sapiens; identical to SEQ ID NO: 347577
  chr19:23433296-23433414
  hyper

SEQ ID NO: 361521 - DNA, 105 bp, Homo sapiens; identical to SEQ ID NO: 347578
  chr19:23456510-23456615
  hyper

SEQ ID NO: 361522 - DNA, 216 bp, Homo sapiens; identical to SEQ ID NO: 347579
  chr19:23456881-23457097
  hyper

SEQ ID NO: 361523 - DNA, 38 bp, Homo sapiens
  chr19:23577711-23577749
  hyper
cgcggtgacgcccataaatttttaatagaaaaaaagag

SEQ ID NO: 361524 - DNA, 68 bp, Homo sapiens; identical to SEQ ID NO: 336059
  chr19:23578240-23578308
  hyper

SEQ ID NO: 361525 - DNA, 68 bp, Homo sapiens; identical to SEQ ID NO: 347581
  chr19:23598868-23598936
  hyper

SEQ ID NO: 361526 - DNA, 701 bp, Homo sapiens; identical to SEQ ID NO: 12224
  chr19:24216103-24216804
  hyper

SEQ ID NO: 361527 - DNA, 770 bp, Homo sapiens; identical to SEQ ID NO: 336063
  chr19:28284358-28285128
  hyper

SEQ ID NO: 361528 - DNA, 259 bp, Homo sapiens; identical to SEQ ID NO: 336066
  chr19:30165123-30165382
  hyper

SEQ ID NO: 361529 - DNA, 60 bp, Homo sapiens; identical to SEQ ID NO: 205342
  chr19:30718934-30718994
  hyper

SEQ ID NO: 361530 - DNA, 58 bp, Homo sapiens; identical to SEQ ID NO: 352276
  chr19:31839508-31839566
  hyper

SEQ ID NO: 361531 - DNA, 233 bp, Homo sapiens; identical to SEQ ID NO: 293818
  chr19:31841177-31841410
  hyper

SEQ ID NO: 361532 - DNA, 325 bp, Homo sapiens; identical to SEQ ID NO: 293819
  chr19:31841583-31841908
  hyper

SEQ ID NO: 361533 - DNA, 308 bp, Homo sapiens; identical to SEQ ID NO: 293830
  chr19:33685236-33685544
  hyper

SEQ ID NO: 361534 - DNA, 249 bp, Homo sapiens; identical to SEQ ID NO: 293831
  chr19:33685653-33685902
  hyper

SEQ ID NO: 361535 - DNA, 123 bp, Homo sapiens
  chr19:33686020-33686143
  hyper
cttcgtgcaggcggcagccttcaacccggcccgcccgcgctgagcctggagacgagggggccccgggagctggggacaaaggccaggccggctgtcccctgaagaagaaactgtttccggccc

SEQ ID NO: 361536 - DNA, 298 bp, Homo sapiens
  chr19:33791861-33792159
  hyper
cgggaaggaggcaggaaacctccaaataaaatgacaaggcacgatttgctccccctactcagtaggcattggagcggtgagtttgcatttccaaggcacaaggttatcctaaatactagagttgccgggctcccagctcagccccaagaattctcccctcctcgcagggagaagccaccgcctggccccctcatcttagacgcaccaagtccggcgcagaggaagggaggggacacgcggagcaggccaggctttcaggaggcaccggaatctcctagtcctggctcgcacggctcgg

SEQ ID NO: 361537 - DNA, 1246 bp, Homo sapiens; identical to SEQ ID NO: 205356
  chr19:33792630-33793876
  hyper

SEQ ID NO: 361538 - DNA, 369 bp, Homo sapiens; identical to SEQ ID NO: 352280
  chr19:33793960-33794329
  hyper

SEQ ID NO: 361539 - DNA, 49 bp, Homo sapiens; identical to SEQ ID NO: 352281
  chr19:34114303-34114352
  hyper

SEQ ID NO: 361540 - DNA, 556 bp, Homo sapiens; identical to SEQ ID NO: 352282
  chr19:34310910-34311466
  hyper

SEQ ID NO: 361541 - DNA, 66 bp, Homo sapiens; identical to SEQ ID NO: 352283
  chr19:34311498-34311564
  hyper

SEQ ID NO: 361542 - DNA, 116 bp, Homo sapiens; identical to SEQ ID NO: 205363
  chr19:34972067-34972183
  hyper

SEQ ID NO: 361543 - DNA, 38 bp, Homo sapiens
  chr19:35168869-35168907
  hyper
cgcggggtgatgacggcgccgacctcttggcactgttg

SEQ ID NO: 361544 - DNA, 94 bp, Homo sapiens; identical to SEQ ID NO: 205366
  chr19:35168992-35169086
  hyper

SEQ ID NO: 361545 - DNA, 478 bp, Homo sapiens; identical to SEQ ID NO: 352284
  chr19:35454533-35455011
  hyper

SEQ ID NO: 361546 - DNA, 225 bp, Homo sapiens
  chr19:35531876-35532101
  hyper
gggcaggtgtctggcggtgaccctgcacgtctggtgtttacctggccctgggtctgacgtgggccgcgcctggctgctggcgggacagtgtgttatctgcctgcggacgcttccggccacttggcctgggcctctgcccttagcgctgtgttttcccggccaagccccccatcccccctatctagtgctaggactttctggctccagaggtcaccgcggccgggc

SEQ ID NO: 361547 - DNA, 121 bp, Homo sapiens
  chr19:35581628-35581749
  hyper
cgctgtcccaaccacttaatttattttaacttgcttaaccctcaaagtcagtttgaggtcagtactcttttcggagagatgggtacggagtcctggagaggttaagcaccacgacagagcc

SEQ ID NO: 361548 - DNA, 149 bp, Homo sapiens; identical to SEQ ID NO: 293861
  chr19:35581779-35581928
  hyper

SEQ ID NO: 361549 - DNA, 234 bp, Homo sapiens; identical to SEQ ID NO: 336085
  chr19:35738737-35738971
  hyper

SEQ ID NO: 361550 - DNA, 129 bp, Homo sapiens
  chr19:36347680-36347809
  hyper
cgggggatcccgccctgcgtcccccattcatccgcgtctcagccgcgggagtttctcaacgggaagagggcggagctcccggggggcggacccgggcggggcgagcgggatcgggccctcttggggtct

SEQ ID NO: 361551 - DNA, 35 bp, Homo sapiens
  chr19:36348065-36348100
  hyper
cttcagagggagagcaggtaccgcacgaggggagc

SEQ ID NO: 361552 - DNA, 63 bp, Homo sapiens; identical to SEQ ID NO: 352285
  chr19:36478303-36478366
  hyper

SEQ ID NO: 361553 - DNA, 49 bp, Homo sapiens
  chr19:36736769-36736818
  hyper
gccttggctcaggcggaacccgaccgggatcgccccgcgagatgcagtc

SEQ ID NO: 361554 - DNA, 159 bp, Homo sapiens; identical to SEQ ID NO: 347586
  chr19:36822892-36823051
  hyper

SEQ ID NO: 361555 - DNA, 209 bp, Homo sapiens; identical to SEQ ID NO: 345589
  chr19:36980725-36980934
  hyper

SEQ ID NO: 361556 - DNA, 290 bp, Homo sapiens
  chr19:37063799-37064089
  hyper
cggaaaaaaacgaacaaacaaacaaacaaaaaaaaacaaaaaaacacttctaccccgttcacacttatagttggtcacaacagtgctgtcacacgatcacgtcaccgtagaccagggtcacacgatagaccccgcccctactcaccgtcctgagtccgatcaaacagcacccacggcacacactagggtctccgtctctcacacacacacaccacaatgacgtcgtaaacaatagcactaaccaccatcgtccgcagctcccgcgtacagaggcctcaggctcccggctc

SEQ ID NO: 361557 - DNA, 275 bp, Homo sapiens; identical to SEQ ID NO: 293893
  chr19:37064360-37064635
  hyper

SEQ ID NO: 361558 - DNA, 31 bp, Homo sapiens; identical to SEQ ID NO: 347588
  chr19:37095634-37095665
  hyper

SEQ ID NO: 361559 - DNA, 105 bp, Homo sapiens; identical to SEQ ID NO: 347589
  chr19:37096594-37096699
  hyper

SEQ ID NO: 361560 - DNA, 156 bp, Homo sapiens; identical to SEQ ID NO: 352290
  chr19:37329462-37329618
  hyper

SEQ ID NO: 361561 - DNA, 142 bp, Homo sapiens; identical to SEQ ID NO: 347590
  chr19:37342189-37342331
  hyper

SEQ ID NO: 361562 - DNA, 170 bp, Homo sapiens
  chr19:37407590-37407760
  hyper
ggtgattgtgatatttggttgcgcgggattatgatgaaatgtgtgatatgtgtgtgattatgattaaggctgtagcgagtgtgaacgtggcgaagtgtgcgtgattgtaatatgtctagtagttcttgtcttgagctggcttttctgtagcatttggcacagttggtaac

SEQ ID NO: 361563 - DNA, 41 bp, Homo sapiens; identical to SEQ ID NO: 352292
  chr19:37463952-37463993
  hyper

SEQ ID NO: 361564 - DNA, 295 bp, Homo sapiens; identical to SEQ ID NO: 345590
  chr19:37568994-37569289
  hyper

SEQ ID NO: 361565 - DNA, 182 bp, Homo sapiens; identical to SEQ ID NO: 345591
  chr19:37569554-37569736
  hyper

SEQ ID NO: 361566 - DNA, 100 bp, Homo sapiens
  chr19:37663394-37663494
  hyper
cgtcacaatcaacaacggacgccacagaaccccatcaccgaagcctgaaaccgcaatcactaactccacaggcaacctcgacaccccctattactggctc

SEQ ID NO: 361567 - DNA, 52 bp, Homo sapiens
  chr19:37663804-37663856
  hyper
atatccattccgtagagcagaggaattggccgctggcagggtttcctagagc

SEQ ID NO: 361568 - DNA, 187 bp, Homo sapiens; identical to SEQ ID NO: 336109
  chr19:37708883-37709070
  hyper

SEQ ID NO: 361569 - DNA, 83 bp, Homo sapiens; identical to SEQ ID NO: 345592
  chr19:37957588-37957671
  hyper

SEQ ID NO: 361570 - DNA, 92 bp, Homo sapiens; identical to SEQ ID NO: 352297
  chr19:38085148-38085240
  hyper

SEQ ID NO: 361571 - DNA, 38 bp, Homo sapiens
  chr19:38086162-38086200
  hyper
ggtgcagagtgggtagtggccatgcctgtgtgatgtgc

SEQ ID NO: 361572 - DNA, 424 bp, Homo sapiens; identical to SEQ ID NO: 205389
  chr19:38145586-38146010
  hyper

SEQ ID NO: 361573 - DNA, 37 bp, Homo sapiens; identical to SEQ ID NO: 345593
  chr19:38182720-38182757
  hyper

SEQ ID NO: 361574 - DNA, 188 bp, Homo sapiens; identical to SEQ ID NO: 352300
  chr19:38210751-38210939
  hyper

SEQ ID NO: 361575 - DNA, 104 bp, Homo sapiens; identical to SEQ ID NO: 336118
  chr19:38270338-38270442
  hyper

SEQ ID NO: 361576 - DNA, 295 bp, Homo sapiens; identical to SEQ ID NO: 293923
  chr19:38701255-38701550
  hyper

SEQ ID NO: 361577 - DNA, 31 bp, Homo sapiens; identical to SEQ ID NO: 352303
  chr19:38702212-38702243
  hyper

SEQ ID NO: 361578 - DNA, 85 bp, Homo sapiens; identical to SEQ ID NO: 293926
  chr19:38719834-38719919
  hyper

SEQ ID NO: 361579 - DNA, 263 bp, Homo sapiens; identical to SEQ ID NO: 293927
  chr19:38719956-38720219
  hyper

SEQ ID NO: 361580 - DNA, 187 bp, Homo sapiens; identical to SEQ ID NO: 352306
  chr19:38720439-38720626
  hyper

SEQ ID NO: 361581 - DNA, 389 bp, Homo sapiens; identical to SEQ ID NO: 347597
  chr19:38754883-38755272
  hyper

SEQ ID NO: 361582 - DNA, 175 bp, Homo sapiens; identical to SEQ ID NO: 347598
  chr19:38755344-38755519
  hyper

SEQ ID NO: 361583 - DNA, 181 bp, Homo sapiens
  chr19:38852786-38852967
  hyper
cgcttgcctggaggctctcgccccgctgcccaatcccttcacggtgccgggcgatccctgcagccgtacgcggacccggtgcacgaccccacctggcgctggtgggcgaacaacaaacaagaccaggtaggcggagcggattgggagccgggaaaggggcggcgcccggacacccctcacc

SEQ ID NO: 361584 - DNA, 291 bp, Homo sapiens
  chr19:38853193-38853484
  hyper
tccggacgcagtcagaactcggtctgcgcgggaccagagtggagcccgaagggcggggcgagggctaccagaatctgggagcctggggggcggggacaccatcggaggggcggggcctgtctgtgagggaggccttaaccccgtttactgcccggagcaggcaccgccttccagctgcatagccaggtggacgtgggcgtggtgctggccgaccccggctgcatcgaggcctcggtgaagcaggaggtcctgattaatcgcaactcggtgctattttcggtgaggcccccc

SEQ ID NO: 361585 - DNA, 62 bp, Homo sapiens
  chr19:38976252-38976314
  hyper
cggagcgcctggacctgcagcgcttccactcgcacaccctgcgcctctaccgcgctgtgtgc

SEQ ID NO: 361586 - DNA, 37 bp, Homo sapiens
  chr19:38976790-38976827
  hyper
ctccgtggagttccagtttgtgcctgtgctcaagctc

SEQ ID NO: 361587 - DNA, 668 bp, Homo sapiens
  chr19:39574122-39574790
  hyper
cgactggaaatccgggcccccccagttcttccctgcttctctttttgtggcagccgctcctcacgttcaaacagattgcaaaggtttacaggggagaaccctaacttgttccctagacgtcagtttctggagttcctgcattaatacgattaaaaagaacagctgattcttatccagcccttactctgggccgggccctgttatcggcatgaaatttcatgcagcaactcgtttactcctcacaacagcccacggggtatatacgagcatcacctcctttttacaggtgaaaaaacccaaggtccagcgaggttgaataactcacctaggtcgcacagctcagaaagcccactgcaattccgggattctggttttgttttgaggttgccccgggcttctgaggaggggtcagtgggctcagcatggaaaggaaggaagccggaaggctggaggaagatgcagcgaggctggaaaggttggggatcccccggtcctgcacacctgggtacctggggatcgggcagggccaggataggggccggtgtccgtgccctggggctccccagctgatgagtgggcgcctgagggacgagcgcagggttacctgcctgggctctcacctggtggccggctcagaggtggcgcgccggagacgtatcataaccttc

SEQ ID NO: 361588 - DNA, 45 bp, Homo sapiens
  chr19:39575044-39575089
  hyper
gccggggtccgggagggcgtcccctttcccggatggtcccgaccc

SEQ ID NO: 361589 - DNA, 32 bp, Homo sapiens; identical to SEQ ID NO: 205405
  chr19:39754842-39754874
  hyper

SEQ ID NO: 361590 - DNA, 186 bp, Homo sapiens
  chr19:39989541-39989727
  hyper
cggggccattctctcagatataaggcttggaagccagcagctgcgactcccgagacccccccaccagaaggccatggtctccccacggatgtccgggctcctctcccagactgtgatcctagcgctcattttcctcccccaggtcagagccaggtgggaggtggcgtggaaagggatgaatgcgga

SEQ ID NO: 361591 - DNA, 67 bp, Homo sapiens; identical to SEQ ID NO: 352310
  chr19:39997621-39997688
  hyper

SEQ ID NO: 361592 - DNA, 50 bp, Homo sapiens
  chr19:40005601-40005651
  hyper
cgacagctgcggaggcactggggcaatctgtgtgtttctcagcctggcgt

SEQ ID NO: 361593 - DNA, 258 bp, Homo sapiens; identical to SEQ ID NO: 352311
  chr19:40323996-40324254
  hyper

SEQ ID NO: 361594 - DNA, 989 bp, Homo sapiens; identical to SEQ ID NO: 336133
  chr19:40561486-40562475
  hyper

SEQ ID NO: 361595 - DNA, 423 bp, Homo sapiens; identical to SEQ ID NO: 336134
  chr19:40948768-40949191
  hyper

SEQ ID NO: 361596 - DNA, 106 bp, Homo sapiens
  chr19:40972636-40972742
  hyper
cggggagtgtgcggctgtgtgtgacaggtgcatttgtgtgtgacgccgcgtgggcggtggttaccctattggatttgtgtggtggtgggtgacaccgttccagtgt

SEQ ID NO: 361597 - DNA, 32 bp, Homo sapiens; identical to SEQ ID NO: 205421
  chr19:41060353-41060385
  hyper

SEQ ID NO: 361598 - DNA, 48 bp, Homo sapiens; identical to SEQ ID NO: 347600
  chr19:41105938-41105986
  hyper

SEQ ID NO: 361599 - DNA, 86 bp, Homo sapiens; identical to SEQ ID NO: 347601
  chr19:41106420-41106506
  hyper

SEQ ID NO: 361600 - DNA, 678 bp, Homo sapiens
  chr19:41111116-41111794
  hyper
cgcgacgacgagcacggtgaggaaagggtggccagagtcccctccgacccctgtcaagcatttcactttgcccctgaccctcatatttcccgccttcccgagcacctttgcccagctcgccctccccgccttgtctagccccaccccgtaagaacccgtgtagacatccgtttgcccggccgtgcctcccctaggcgtggcatctatggtgagcgtccacgtggagcacccgcaggaggcgtcggtggtggtgcaccaggtggagcgtgtgtctggcccttgggaggaggcggacgctgaggcggtggcgcgggcggaagcggcggcgcgggcggaggcggcagcgccctacacggtgttggcacagagcgcgccgcgggaggacggctactcagatgcctcgggcttcggttactgctttcgggagctgcgcggaggcgaagtgagaggaggcccgtggggaggggcccggagcttgcctccgcgcgggggcgcgctcacccaacacttccccgcagtgcgcgtccccgctgcccgggctccggacgcaggaggtctgctgccgaggggccggcttggcctggggcgttcacgactgtcagctgtgctccgagcgcctgggtaagccccaggacgtccccgaagtgctcggagctggggagtggtgacaacctcacc

SEQ ID NO: 361601 - DNA, 69 bp, Homo sapiens; identical to SEQ ID NO: 345594
  chr19:41115811-41115880
  hyper

SEQ ID NO: 361602 - DNA, 57 bp, Homo sapiens; identical to SEQ ID NO: 352316
  chr19:41119120-41119177
  hyper

SEQ ID NO: 361603 - DNA, 67 bp, Homo sapiens; identical to SEQ ID NO: 293998
  chr19:41119735-41119802
  hyper

SEQ ID NO: 361604 - DNA, 359 bp, Homo sapiens; identical to SEQ ID NO: 336145
  chr19:41190162-41190521
  hyper

SEQ ID NO: 361605 - DNA, 191 bp, Homo sapiens; identical to SEQ ID NO: 205432
  chr19:41698920-41699111
  hyper

SEQ ID NO: 361606 - DNA, 158 bp, Homo sapiens
  chr19:41699206-41699364
  hyper
tggcgctgctcctgctgctgacgctggcgctgtccgggaccagggcccgaggccacctgccccccgggcccacgccgctaccactgctgggaaacctcctgcagctacggcccggggcgctgtattcagggctcatgcgggtaaggggctctggggac

SEQ ID NO: 361607 - DNA, 121 bp, Homo sapiens; identical to SEQ ID NO: 352319
  chr19:42498155-42498276
  hyper

SEQ ID NO: 361608 - DNA, 126 bp, Homo sapiens
  chr19:42927599-42927725
  hyper
cgaccgtggctccttgagccctctttggcattcttcgaggccggggccatagcggcctcggcgggctccgttcccccggccaactccatcaattccccgcggtcctcccgcgggggccaattccag

SEQ ID NO: 361609 - DNA, 246 bp, Homo sapiens; identical to SEQ ID NO: 352320
  chr19:43967263-43967509
  hyper

SEQ ID NO: 361610 - DNA, 423 bp, Homo sapiens
  chr19:43967731-43968154
  hyper
cggcccggcccccacggacctgccgggtcgagcgcccgcgaggtgaggttgagcttggcgttgcagcgatcctgagcgcattgctgcagctggatgaacgccagaagcccgtgaagatccaggccgcggtcattcttgccggggagtcccgaaccgcaaccccgcactgccagcgagaattgtccgtggactagggagagggacaagggcgggattagctgtgggcgtggtctcagatggggcgtggcccagagttgggtagggtctgggaggggcggggcctcaaataggccaacaccacaggaccgacaggcaggaattggcggatggacgcccccaaagagccgctcagagcggaaagaacgaccgaagcagggaggagcggggtcacggaacgggggcggaacctcaaagagctgagtc

SEQ ID NO: 361611 - DNA, 387 bp, Homo sapiens; identical to SEQ ID NO: 336154
  chr19:44099002-44099389
  hyper

SEQ ID NO: 361612 - DNA, 108 bp, Homo sapiens
  chr19:44302742-44302850
  hyper
cgggtcgggtgctggcaagagagcgtagatgcacactcaggcagtggtaccctggcacagtcgtgcgggctgcgcactgcgccagagcccgcgcctagcacgtctcgg

SEQ ID NO: 361613 - DNA, 33 bp, Homo sapiens
  chr19:44303168-44303201
  hyper
gcttcccgaaacccttctccctccagtctcagc

SEQ ID NO: 361614 - DNA, 91 bp, Homo sapiens; identical to SEQ ID NO: 352321
  chr19:44405817-44405908
  hyper

SEQ ID NO: 361615 - DNA, 48 bp, Homo sapiens; identical to SEQ ID NO: 352322
  chr19:44406123-44406171
  hyper

SEQ ID NO: 361616 - DNA, 269 bp, Homo sapiens; identical to SEQ ID NO: 294061
  chr19:44529438-44529707
  hyper

SEQ ID NO: 361617 - DNA, 48 bp, Homo sapiens; identical to SEQ ID NO: 347605
  chr19:44529774-44529822
  hyper

SEQ ID NO: 361618 - DNA, 68 bp, Homo sapiens; identical to SEQ ID NO: 345595
  chr19:44711963-44712031
  hyper

SEQ ID NO: 361619 - DNA, 782 bp, Homo sapiens; identical to SEQ ID NO: 336161
  chr19:45004129-45004911
  hyper

SEQ ID NO: 361620 - DNA, 150 bp, Homo sapiens; identical to SEQ ID NO: 352326
  chr19:45146966-45147116
  hyper

SEQ ID NO: 361621 - DNA, 332 bp, Homo sapiens; identical to SEQ ID NO: 205468
  chr19:45147367-45147699
  hyper

SEQ ID NO: 361622 - DNA, 95 bp, Homo sapiens; identical to SEQ ID NO: 352328
  chr19:45147734-45147829
  hyper

SEQ ID NO: 361623 - DNA, 272 bp, Homo sapiens; identical to SEQ ID NO: 336163
  chr19:45195351-45195623
  hyper

SEQ ID NO: 361624 - DNA, 1002 bp, Homo sapiens; identical to SEQ ID NO: 352329
  chr19:45349502-45350504
  hyper

SEQ ID NO: 361625 - DNA, 555 bp, Homo sapiens; identical to SEQ ID NO: 336165
  chr19:45579321-45579876
  hyper

SEQ ID NO: 361626 - DNA, 1117 bp, Homo sapiens; identical to SEQ ID NO: 336166
  chr19:45647694-45648811
  hyper

SEQ ID NO: 361627 - DNA, 200 bp, Homo sapiens; identical to SEQ ID NO: 205477
  chr19:45656461-45656661
  hyper

SEQ ID NO: 361628 - DNA, 62 bp, Homo sapiens; identical to SEQ ID NO: 336169
  chr19:45907705-45907767
  hyper

SEQ ID NO: 361629 - DNA, 37 bp, Homo sapiens; identical to SEQ ID NO: 352333
  chr19:45931075-45931112
  hyper

SEQ ID NO: 361630 - DNA, 156 bp, Homo sapiens; identical to SEQ ID NO: 294102
  chr19:45931579-45931735
  hyper

SEQ ID NO: 361631 - DNA, 135 bp, Homo sapiens; identical to SEQ ID NO: 294103
  chr19:45931788-45931923
  hyper

SEQ ID NO: 361632 - DNA, 74 bp, Homo sapiens
  chr19:45996048-45996122
  hyper
cggcgccggtggatgggggaggggccaggtcgcctgaggcgggggctaagtttaggcacgctggggggaggggg

SEQ ID NO: 361633 - DNA, 183 bp, Homo sapiens; identical to SEQ ID NO: 352334
  chr19:46002502-46002685
  hyper

SEQ ID NO: 361634 - DNA, 843 bp, Homo sapiens; identical to SEQ ID NO: 352335
  chr19:46144663-46145506
  hyper

SEQ ID NO: 361635 - DNA, 73 bp, Homo sapiens; identical to SEQ ID NO: 352336
  chr19:46145557-46145630
  hyper

SEQ ID NO: 361636 - DNA, 153 bp, Homo sapiens; identical to SEQ ID NO: 294114
  chr19:46148670-46148823
  hyper

SEQ ID NO: 361637 - DNA, 172 bp, Homo sapiens; identical to SEQ ID NO: 352337
  chr19:46180187-46180359
  hyper

SEQ ID NO: 361638 - DNA, 79 bp, Homo sapiens; identical to SEQ ID NO: 352338
  chr19:46180559-46180638
  hyper

SEQ ID NO: 361639 - DNA, 88 bp, Homo sapiens; identical to SEQ ID NO: 352339
  chr19:46519167-46519255
  hyper

SEQ ID NO: 361640 - DNA, 421 bp, Homo sapiens; identical to SEQ ID NO: 352340
  chr19:46519582-46520003
  hyper

SEQ ID NO: 361641 - DNA, 69 bp, Homo sapiens; identical to SEQ ID NO: 352341
  chr19:46907118-46907187
  hyper

SEQ ID NO: 361642 - DNA, 249 bp, Homo sapiens; identical to SEQ ID NO: 294133
  chr19:46907822-46908071
  hyper

SEQ ID NO: 361643 - DNA, 56 bp, Homo sapiens; identical to SEQ ID NO: 347610
  chr19:46929939-46929995
  hyper

SEQ ID NO: 361644 - DNA, 139 bp, Homo sapiens; identical to SEQ ID NO: 345597
  chr19:46931914-46932053
  hyper

SEQ ID NO: 361645 - DNA, 54 bp, Homo sapiens; identical to SEQ ID NO: 352345
  chr19:46974960-46975014
  hyper

SEQ ID NO: 361646 - DNA, 74 bp, Homo sapiens
  chr19:46992624-46992698
  hyper
cggccctcctcgggccccctgcttgccggacttttgtcccccagcaggtctcaccccctaatgcatggatttcg

SEQ ID NO: 361647 - DNA, 71 bp, Homo sapiens; identical to SEQ ID NO: 352346
  chr19:46996430-46996501
  hyper

SEQ ID NO: 361648 - DNA, 35 bp, Homo sapiens; identical to SEQ ID NO: 352347
  chr19:46997221-46997256
  hyper

SEQ ID NO: 361649 - DNA, 68 bp, Homo sapiens; identical to SEQ ID NO: 336186
  chr19:47040909-47040977
  hyper

SEQ ID NO: 361650 - DNA, 259 bp, Homo sapiens; identical to SEQ ID NO: 352348
  chr19:47523724-47523983
  hyper

SEQ ID NO: 361651 - DNA, 83 bp, Homo sapiens; identical to SEQ ID NO: 336190
  chr19:47676020-47676103
  hyper

SEQ ID NO: 361652 - DNA, 286 bp, Homo sapiens
  chr19:47729538-47729824
  hyper
cggccgcgggccacgggcgcgcagctccactcctcggcggcctagtccctggccctggccctggccctggctcgggctccggctatgccagccgcggcgcggagtccttgggcggctctgcgggcgcgcgattcccccccacccacttaccccccacctgcctgtccgcggagcgacccagccgcgcagggcagcagctgccgcacatctggcgggggccgcctgccgccccctcctccggcggaagtcccacctgccgtctaccccacccccagcactcacccgc

SEQ ID NO: 361653 - DNA, 681 bp, Homo sapiens
  chr19:47729850-47730531
  hyper
cgccatccgccgcagctgggccccgatctcccgggcccactgttcctcctccccgcggactcccggggccgcctgggtgggaccgcccgccagagcccccggggcgctgggcacgggcgactccaggtgctgctccgccagcgagagcgagggctgaggaccttggagaggcagaggggcgcggtcagcacccaccacccctccaggcctcgaggtgtctcggcctgctcccctctttcccagccactgctccccgcctcatttctagtgatcccatcgctagtgagtcaatttctcagcttctcctccacaggcaccagaaagcaagaagtacctggggacgccgctctggggtcacctgtctggccagctacgtccccacggcccttgtcagtgtggaaggtagacggccagagaggtgaccccgggggtggtcaggcttaacgacctctattttccaaaggggccacattttgccttttccatgtgacaggcagggaaactgaggcccgcccttagggagtatcccaaggtcacacagggatacagtgactgaccccacccagatcacaagcctcaggtctcctgccctctcgtgtccaaccacagggaagccacacctccggatgtggcagaggcctagagaccagaaggccagagactgtggcagcttcagagcgc

SEQ ID NO: 361654 - DNA, 287 bp, Homo sapiens; identical to SEQ ID NO: 336192
  chr19:47731303-47731590
  hyper

SEQ ID NO: 361655 - DNA, 202 bp, Homo sapiens
  chr19:47776511-47776713
  hyper
cgaactggatgagagacgtggctagacgggggaggggtgctgggccgggggggaggtgggaagactgctcccctccgctgactcagccccttctctcctcagaggcaggccccgaaggccaggagacggcggagatcaccgacttccagagggtgcgtttctgcaaggtggtggcggcccctccgctgccgggggccgctcg

SEQ ID NO: 361656 - DNA, 423 bp, Homo sapiens
  chr19:47776742-47777165
  hyper
gcgctctgcactaacctcccaccgcctcgctcctctgtcctctgcttctgccacactccagccaggagagggttaaatctaaggggggaggagccagggtctgcgagccgggcggggccagggcagtagtcgggtgcaggccccaccaacgggggacgtcacggcactgggacggctgggacgcttccgcgttagtctcccatggaggccctgggcggctcgagccagtcttcaggccgaatctcccgcctccaggattgcatccgaggcctggcagccggtgacacttccgaagggcttgaattactcgggcgccagccctgtcgtattaaacgcagtgcttccgctcacccttgaactgtgtttctggagggggcaggctgggtcgctgtgcttggcgggcttttctgtggcggaagaggc

SEQ ID NO: 361657 - DNA, 147 bp, Homo sapiens; identical to SEQ ID NO: 352350
  chr19:47922898-47923045
  hyper

SEQ ID NO: 361658 - DNA, 260 bp, Homo sapiens; identical to SEQ ID NO: 294167
  chr19:47923084-47923344
  hyper

SEQ ID NO: 361659 - DNA, 242 bp, Homo sapiens; identical to SEQ ID NO: 336199
  chr19:48229040-48229282
  hyper

SEQ ID NO: 361660 - DNA, 311 bp, Homo sapiens; identical to SEQ ID NO: 347612
  chr19:48901504-48901815
  hyper

SEQ ID NO: 361661 - DNA, 196 bp, Homo sapiens; identical to SEQ ID NO: 352353
  chr19:49014625-49014821
  hyper

SEQ ID NO: 361662 - DNA, 93 bp, Homo sapiens; identical to SEQ ID NO: 345598
  chr19:49127280-49127373
  hyper

SEQ ID NO: 361663 - DNA, 480 bp, Homo sapiens; identical to SEQ ID NO: 336204
  chr19:49199703-49200183
  hyper

SEQ ID NO: 361664 - DNA, 484 bp, Homo sapiens; identical to SEQ ID NO: 345599
  chr19:49217005-49217489
  hyper

SEQ ID NO: 361665 - DNA, 43 bp, Homo sapiens; identical to SEQ ID NO: 345600
  chr19:49217526-49217569
  hyper

SEQ ID NO: 361666 - DNA, 141 bp, Homo sapiens; identical to SEQ ID NO: 294203
  chr19:49242393-49242534
  hyper

SEQ ID NO: 361667 - DNA, 35 bp, Homo sapiens; identical to SEQ ID NO: 294204
  chr19:49242773-49242808
  hyper

SEQ ID NO: 361668 - DNA, 56 bp, Homo sapiens; identical to SEQ ID NO: 352358
  chr19:49244884-49244940
  hyper

SEQ ID NO: 361669 - DNA, 550 bp, Homo sapiens; identical to SEQ ID NO: 336209
  chr19:49467064-49467614
  hyper

SEQ ID NO: 361670 - DNA, 64 bp, Homo sapiens
  chr19:49646052-49646116
  hyper
cgctgcagctgtgggtgggcatgcctgcctggtatgtggccgcctgccgggccaatgtcaagag

SEQ ID NO: 361671 - DNA, 62 bp, Homo sapiens
  chr19:49646245-49646307
  hyper
cgcctcctcccgcactgtgagtgtccggcggccaattccagccttcgcttcctcagagcccc

SEQ ID NO: 361672 - DNA, 781 bp, Homo sapiens; identical to SEQ ID NO: 352360
  chr19:49652265-49653046
  hyper

SEQ ID NO: 361673 - DNA, 435 bp, Homo sapiens; identical to SEQ ID NO: 336213
  chr19:49660929-49661364
  hyper

SEQ ID NO: 361674 - DNA, 333 bp, Homo sapiens
  chr19:50316721-50317054
  hyper
atcctgtaggctttgatgatttacattctaaacggaaaaaacagctgtgcccggatcaaagattgcgatggtcccaaagcattgcctagcaaccacattccctgtaggtttccagtatatagtagtaaacaatgtgccctactcaaagatggcgaccgtggcggggcgttgccaagcaaccaccattcagcctgatatccattccaaggctgtaaacagctgtgccctgctcaaagatggcggcacgtcgaagtccgagcaccctccttggggcgaaatcgagaaaaacaccatctcccctacaaccttcgagggtggttgagtccagcgatc

SEQ ID NO: 361675 - DNA, 218 bp, Homo sapiens; identical to SEQ ID NO: 347617
  chr19:50553779-50553997
  hyper

SEQ ID NO: 361676 - DNA, 347 bp, Homo sapiens; identical to SEQ ID NO: 352363
  chr19:50706517-50706864
  hyper

SEQ ID NO: 361677 - DNA, 188 bp, Homo sapiens; identical to SEQ ID NO: 294243
  chr19:50706894-50707082
  hyper

SEQ ID NO: 361678 - DNA, 91 bp, Homo sapiens; identical to SEQ ID NO: 352365
  chr19:50707093-50707184
  hyper

SEQ ID NO: 361679 - DNA, 378 bp, Homo sapiens; identical to SEQ ID NO: 336220
  chr19:50708476-50708854
  hyper

SEQ ID NO: 361680 - DNA, 380 bp, Homo sapiens; identical to SEQ ID NO: 294246
  chr19:50816051-50816431
  hyper

SEQ ID NO: 361681 - DNA, 330 bp, Homo sapiens; identical to SEQ ID NO: 336223
  chr19:50828897-50829227
  hyper

SEQ ID NO: 361682 - DNA, 446 bp, Homo sapiens; identical to SEQ ID NO: 352368
  chr19:50833970-50834416
  hyper

SEQ ID NO: 361683 - DNA, 88 bp, Homo sapiens; identical to SEQ ID NO: 345602
  chr19:50836203-50836291
  hyper

SEQ ID NO: 361684 - DNA, 588 bp, Homo sapiens; identical to SEQ ID NO: 205542
  chr19:50836451-50837039
  hyper

SEQ ID NO: 361685 - DNA, 88 bp, Homo sapiens; identical to SEQ ID NO: 345604
  chr19:50837389-50837477
  hyper

SEQ ID NO: 361686 - DNA, 153 bp, Homo sapiens; identical to SEQ ID NO: 352372
  chr19:50979533-50979686
  hyper

SEQ ID NO: 361687 - DNA, 77 bp, Homo sapiens; identical to SEQ ID NO: 336229
  chr19:51111319-51111396
  hyper

SEQ ID NO: 361688 - DNA, 96 bp, Homo sapiens
  chr19:51143111-51143207
  hyper
gccggctcggctcctcccctcgccactgtcgcaggtccgcggctcctccccctgcaccccctccttcccccactccgaacccgcggcaagaaagcc

SEQ ID NO: 361689 - DNA, 230 bp, Homo sapiens; identical to SEQ ID NO: 294267
  chr19:51161455-51161685
  hyper

SEQ ID NO: 361690 - DNA, 51 bp, Homo sapiens; identical to SEQ ID NO: 352375
  chr19:51198271-51198322
  hyper

SEQ ID NO: 361691 - DNA, 73 bp, Homo sapiens; identical to SEQ ID NO: 345605
  chr19:51228809-51228882
  hyper

SEQ ID NO: 361692 - DNA, 186 bp, Homo sapiens; identical to SEQ ID NO: 336235
  chr19:51324279-51324465
  hyper

SEQ ID NO: 361693 - DNA, 96 bp, Homo sapiens; identical to SEQ ID NO: 345606
  chr19:51416002-51416098
  hyper

SEQ ID NO: 361694 - DNA, 242 bp, Homo sapiens; identical to SEQ ID NO: 345607
  chr19:51416099-51416341
  hyper

SEQ ID NO: 361695 - DNA, 46 bp, Homo sapiens
  chr19:51520092-51520138
  hyper
cggaccctggcttctatccgttgcaggcaaccacctcctcctagag

SEQ ID NO: 361696 - DNA, 248 bp, Homo sapiens; identical to SEQ ID NO: 294282
  chr19:51520492-51520740
  hyper

SEQ ID NO: 361697 - DNA, 241 bp, Homo sapiens; identical to SEQ ID NO: 205551
  chr19:51522935-51523176
  hyper

SEQ ID NO: 361698 - DNA, 187 bp, Homo sapiens; identical to SEQ ID NO: 336241
  chr19:51842647-51842834
  hyper

SEQ ID NO: 361699 - DNA, 88 bp, Homo sapiens; identical to SEQ ID NO: 352381
  chr19:51925272-51925360
  hyper

SEQ ID NO: 361700 - DNA, 204 bp, Homo sapiens
  chr19:52074533-52074737
  hyper
gcgaccatttagcttctgttgttaagtggatctaagcctatgtcgcttactggacgctgaagtgattgggaatattagcagtgggggttctgtagggtcaggaaggggcggctggctttgggggagtgatgaggggcttgttgggggtgggggtgcgtgataaagggatttctcggctgaagacgaggctgtgaggtgagtgac

SEQ ID NO: 361701 - DNA, 80 bp, Homo sapiens; identical to SEQ ID NO: 352382
  chr19:52511228-52511308
  hyper

SEQ ID NO: 361702 - DNA, 394 bp, Homo sapiens; identical to SEQ ID NO: 352383
  chr19:52511384-52511778
  hyper

SEQ ID NO: 361703 - DNA, 74 bp, Homo sapiens; identical to SEQ ID NO: 205557
  chr19:52531285-52531359
  hyper

SEQ ID NO: 361704 - DNA, 208 bp, Homo sapiens; identical to SEQ ID NO: 345609
  chr19:52531884-52532092
  hyper

SEQ ID NO: 361705 - DNA, 273 bp, Homo sapiens; identical to SEQ ID NO: 352386
  chr19:52551831-52552104
  hyper

SEQ ID NO: 361706 - DNA, 465 bp, Homo sapiens; identical to SEQ ID NO: 352387
  chr19:52552233-52552698
  hyper

SEQ ID NO: 361707 - DNA, 119 bp, Homo sapiens; identical to SEQ ID NO: 336251
  chr19:52715152-52715271
  hyper

SEQ ID NO: 361708 - DNA, 105 bp, Homo sapiens; identical to SEQ ID NO: 347627
  chr19:52800214-52800319
  hyper

SEQ ID NO: 361709 - DNA, 313 bp, Homo sapiens; identical to SEQ ID NO: 294314
  chr19:52800380-52800693
  hyper

SEQ ID NO: 361710 - DNA, 89 bp, Homo sapiens; identical to SEQ ID NO: 352391
  chr19:52800915-52801004
  hyper

SEQ ID NO: 361711 - DNA, 179 bp, Homo sapiens; identical to SEQ ID NO: 294317
  chr19:52956933-52957112
  hyper

SEQ ID NO: 361712 - DNA, 31 bp, Homo sapiens
  chr19:53030704-53030735
  hyper
cgctctcgcctccacaacctaaaaacagaga

SEQ ID NO: 361713 - DNA, 395 bp, Homo sapiens; identical to SEQ ID NO: 294319
  chr19:53030790-53031185
  hyper

SEQ ID NO: 361714 - DNA, 79 bp, Homo sapiens; identical to SEQ ID NO: 294320
  chr19:53031215-53031294
  hyper

SEQ ID NO: 361715 - DNA, 164 bp, Homo sapiens
  chr19:53031347-53031511
  hyper
agggaggccgcgtcctctgcctggtcctgggatcttgcagaccccatccttctcccaaggcgccgtcccccctcctcccacctccctactcgtgccagagcctgcggctccccaggtctctcctccgcagtcaccgcttccattgaacccacactgggaaggac

SEQ ID NO: 361716 - DNA, 263 bp, Homo sapiens; identical to SEQ ID NO: 345610
  chr19:53104083-53104346
  hyper

SEQ ID NO: 361717 - DNA, 62 bp, Homo sapiens; identical to SEQ ID NO: 352393
  chr19:53105086-53105148
  hyper

SEQ ID NO: 361718 - DNA, 60 bp, Homo sapiens; identical to SEQ ID NO: 205570
  chr19:53141353-53141413
  hyper

SEQ ID NO: 361719 - DNA, 56 bp, Homo sapiens; identical to SEQ ID NO: 347630
  chr19:53193139-53193195
  hyper

SEQ ID NO: 361720 - DNA, 818 bp, Homo sapiens; identical to SEQ ID NO: 352396
  chr19:53237625-53238443
  hyper

SEQ ID NO: 361721 - DNA, 273 bp, Homo sapiens; identical to SEQ ID NO: 352397
  chr19:53400792-53401065
  hyper

SEQ ID NO: 361722 - DNA, 351 bp, Homo sapiens; identical to SEQ ID NO: 352398
  chr19:53445359-53445710
  hyper

SEQ ID NO: 361723 - DNA, 231 bp, Homo sapiens; identical to SEQ ID NO: 352399
  chr19:53445822-53446053
  hyper

SEQ ID NO: 361724 - DNA, 148 bp, Homo sapiens; identical to SEQ ID NO: 352400
  chr19:53465713-53465861
  hyper

SEQ ID NO: 361725 - DNA, 263 bp, Homo sapiens; identical to SEQ ID NO: 352401
  chr19:53466513-53466776
  hyper

SEQ ID NO: 361726 - DNA, 104 bp, Homo sapiens; identical to SEQ ID NO: 294336
  chr19:53496055-53496159
  hyper

SEQ ID NO: 361727 - DNA, 35 bp, Homo sapiens; identical to SEQ ID NO: 352403
  chr19:53496405-53496440
  hyper

SEQ ID NO: 361728 - DNA, 180 bp, Homo sapiens; identical to SEQ ID NO: 294338
  chr19:53497109-53497289
  hyper

SEQ ID NO: 361729 - DNA, 139 bp, Homo sapiens; identical to SEQ ID NO: 347631
  chr19:53606073-53606212
  hyper

SEQ ID NO: 361730 - DNA, 221 bp, Homo sapiens; identical to SEQ ID NO: 205580
  chr19:53606354-53606575
  hyper

SEQ ID NO: 361731 - DNA, 427 bp, Homo sapiens; identical to SEQ ID NO: 205581
  chr19:53606605-53607032
  hyper

SEQ ID NO: 361732 - DNA, 111 bp, Homo sapiens; identical to SEQ ID NO: 347634
  chr19:53607111-53607222
  hyper

SEQ ID NO: 361733 - DNA, 83 bp, Homo sapiens
  chr19:53696029-53696112
  hyper
cgggcacctccccaacgcgggctcaggggaaacggtgactgcgaaggggaggcctagggagcagcagggcccggcacgaggag

SEQ ID NO: 361734 - DNA, 197 bp, Homo sapiens
  chr19:53700110-53700307
  hyper
cgcaggctcccacccgccttccttaggtccctcccggccccgccccctgcctgtccaggccccgccccacccttcgcgttttctccccagcccactccctgtgccggtcacgccccgcctaggccccgcccctaggccacctcagtcccctccggccccgccccctgccggtctctccctggccaggccccgcccct

SEQ ID NO: 361735 - DNA, 291 bp, Homo sapiens
  chr19:53868337-53868628
  hyper
cgaggaagggagccctgcgggagggggtgttactttgtcgcccaggctggcctggacccccaggttcagcgatcctcccgccctgcttcctgagtagatgggacctcaggctcccgcgcccgcgtccgcatccttgctgtgtttatccggcaggtggtgacctcactcctcgctggcctgagcactccgtccagcatcccaggcggtggctttagggaagtctctgcagctgagcacagggtggactctccctccggagtgaatggagaatagaaagggagaggatttcta

SEQ ID NO: 361736 - DNA, 90 bp, Homo sapiens; identical to SEQ ID NO: 336275
  chr19:53934944-53935034
  hyper

SEQ ID NO: 361737 - DNA, 113 bp, Homo sapiens; identical to SEQ ID NO: 205589
  chr19:53970643-53970756
  hyper

SEQ ID NO: 361738 - DNA, 84 bp, Homo sapiens; identical to SEQ ID NO: 347635
  chr19:54412564-54412648
  hyper

SEQ ID NO: 361739 - DNA, 33 bp, Homo sapiens
  chr19:54485370-54485403
  hyper
cgccaacgcgggcgagccgggcccgaagcggga

SEQ ID NO: 361740 - DNA, 124 bp, Homo sapiens
  chr19:54486197-54486321
  hyper
ccgtgagcgcgctggagactgctgggcccgccccacgcccaccctccccgcccccctccccctccgaagcagggaccccgagggagggggcaggggagggagggggccgctgtgagggagcgtc

SEQ ID NO: 361741 - DNA, 546 bp, Homo sapiens; identical to SEQ ID NO: 336285
  chr19:55677520-55678066
  hyper

SEQ ID NO: 361742 - DNA, 182 bp, Homo sapiens; identical to SEQ ID NO: 347636
  chr19:55691158-55691340
  hyper

SEQ ID NO: 361743 - DNA, 412 bp, Homo sapiens
  chr19:55866046-55866458
  hyper
ctgtgggatggtcccggggtgccgctcgcttctgagtccgcggggtgcggtcccacccgggtcaggagaaacgcaccccgcggccggattggctaggacgcccgagccccagccaatgggagccgtcgtgcaccgcggggctggtaggggcgcccccaccccaccccttgctcccccgacgccccctcgggggcctgcgcgtgcacacaggcaccgaggtgcgactcgctgagtctcaggctcaagctttaatctctgcgaagttgggcggctccacgggctcgcccccgcccccccccgccccccaatatataaaggcatatccatagttctggtatctaccagagggggcaaatccccccaagcggctttcaacattccgcttcctacagtcggtgcgcacagaaccctc

SEQ ID NO: 361744 - DNA, 132 bp, Homo sapiens; identical to SEQ ID NO: 345612
  chr19:55952964-55953096
  hyper

SEQ ID NO: 361745 - DNA, 134 bp, Homo sapiens; identical to SEQ ID NO: 336290
  chr19:56112791-56112925
  hyper

SEQ ID NO: 361746 - DNA, 396 bp, Homo sapiens; identical to SEQ ID NO: 336291
  chr19:56151971-56152367
  hyper

SEQ ID NO: 361747 - DNA, 245 bp, Homo sapiens; identical to SEQ ID NO: 294401
  chr19:56159669-56159914
  hyper

SEQ ID NO: 361748 - DNA, 68 bp, Homo sapiens; identical to SEQ ID NO: 352417
  chr19:56159950-56160018
  hyper

SEQ ID NO: 361749 - DNA, 152 bp, Homo sapiens
  chr19:56988132-56988284
  hyper
cgcaaagccactgacgctaagtggcagacagacgcccaggcaagtcacacagtaacccaaggctacaataaacgcccacatcagcctgacactgacacacgcacacactccagaaacacaaatcttcacagtcagcgtcacacacccactcc

SEQ ID NO: 361750 - DNA, 139 bp, Homo sapiens; identical to SEQ ID NO: 347638
  chr19:57049638-57049777
  hyper

SEQ ID NO: 361751 - DNA, 34 bp, Homo sapiens; identical to SEQ ID NO: 205611
  chr19:57049807-57049841
  hyper

SEQ ID NO: 361752 - DNA, 46 bp, Homo sapiens; identical to SEQ ID NO: 205612
  chr19:57079253-57079299
  hyper

SEQ ID NO: 361753 - DNA, 77 bp, Homo sapiens
  chr19:57106909-57106986
  hyper
gggaagctgaggggctaaggagaggctgactggaggctgaggggctgaggagaggccggggccagggagggagaggc

SEQ ID NO: 361754 - DNA, 61 bp, Homo sapiens
  chr19:57276931-57276992
  hyper
gtgtgggcgcgtgatgtgtttgaaggtgtgtttgttcgagagggtgtgtgttggggtcaac

SEQ ID NO: 361755 - DNA, 206 bp, Homo sapiens; identical to SEQ ID NO: 205614
  chr19:57683360-57683566
  hyper

SEQ ID NO: 361756 - DNA, 103 bp, Homo sapiens
  chr19:57683899-57684002
  hyper
gctgtaaactaaaaatcaaattctaagctcccagccaactgaatggacccctcctctcagctaagagcatggcaaacttaaccggaaacactagttcggccgc

SEQ ID NO: 361757 - DNA, 56 bp, Homo sapiens; identical to SEQ ID NO: 352420
  chr19:57702696-57702752
  hyper

SEQ ID NO: 361758 - DNA, 39 bp, Homo sapiens; identical to SEQ ID NO: 352421
  chr19:57703385-57703424
  hyper

SEQ ID NO: 361759 - DNA, 85 bp, Homo sapiens
  chr19:57751590-57751675
  hyper
cggaggggaaataatgcaaggtggaagtcagagtccggagcctggtccagggtctctgcactggccctgaccctggcaaatgtcc

SEQ ID NO: 361760 - DNA, 373 bp, Homo sapiens
  chr19:57751755-57752128
  hyper
ggacagaggcaggtctgagccgggctgtaggcccgctgcgacttttacaccgaggcctgccggctcaggatctgtcccctttgcaggtggtttgtagagaaaaactacattaactacaaggcattgccaggtgcgacggcgggccctggggccaatgatggtccaggacaggggcgtttcctgtgggttgcgaagcttggggcgggacttccggcatttggatgggacgtaatttgggagcgacggttccgtccacgccggctctagggagggggcggtgttccgtggccgcctccctggcggcgctggggaaatgagcaggtaggaggccgacagcgacctccgcgtctcggagcgaaccgtgagcctcccc

SEQ ID NO: 361761 - DNA, 70 bp, Homo sapiens; identical to SEQ ID NO: 345613
  chr19:57831543-57831613
  hyper

SEQ ID NO: 361762 - DNA, 460 bp, Homo sapiens; identical to SEQ ID NO: 345614
  chr19:57874412-57874872
  hyper

SEQ ID NO: 361763 - DNA, 217 bp, Homo sapiens; identical to SEQ ID NO: 205623
  chr19:57875005-57875222
  hyper

SEQ ID NO: 361764 - DNA, 43 bp, Homo sapiens; identical to SEQ ID NO: 345616
  chr19:57875252-57875295
  hyper

SEQ ID NO: 361765 - DNA, 62 bp, Homo sapiens; identical to SEQ ID NO: 352426
  chr19:57998890-57998952
  hyper

SEQ ID NO: 361766 - DNA, 34 bp, Homo sapiens
  chr19:58070535-58070569
  hyper
cggaaacaacatcctgagcgacgtccccggaccg

SEQ ID NO: 361767 - DNA, 81 bp, Homo sapiens; identical to SEQ ID NO: 336313
  chr19:58090396-58090477
  hyper

SEQ ID NO: 361768 - DNA, 37 bp, Homo sapiens; identical to SEQ ID NO: 205629
  chr19:58094924-58094961
  hyper

SEQ ID NO: 361769 - DNA, 169 bp, Homo sapiens; identical to SEQ ID NO: 345617
  chr19:58144201-58144370
  hyper

SEQ ID NO: 361770 - DNA, 209 bp, Homo sapiens; identical to SEQ ID NO: 205633
  chr19:58144745-58144954
  hyper

SEQ ID NO: 361771 - DNA, 294 bp, Homo sapiens; identical to SEQ ID NO: 352430
  chr19:58193143-58193437
  hyper

SEQ ID NO: 361772 - DNA, 345 bp, Homo sapiens; identical to SEQ ID NO: 352431
  chr19:58193585-58193930
  hyper

SEQ ID NO: 361773 - DNA, 627 bp, Homo sapiens; identical to SEQ ID NO: 336321
  chr19:58258088-58258715
  hyper

SEQ ID NO: 361774 - DNA, 145 bp, Homo sapiens; identical to SEQ ID NO: 352433
  chr19:58280766-58280911
  hyper

SEQ ID NO: 361775 - DNA, 176 bp, Homo sapiens; identical to SEQ ID NO: 352434
  chr19:58281371-58281547
  hyper

SEQ ID NO: 361776 - DNA, 38 bp, Homo sapiens
  chr19:58446258-58446296
  hyper
cgcctcacacgttgttccctacaggcgcctgtggaccc

SEQ ID NO: 361777 - DNA, 130 bp, Homo sapiens; identical to SEQ ID NO: 345620
  chr19:58610001-58610131
  hyper

SEQ ID NO: 361778 - DNA, 168 bp, Homo sapiens
  chr19:58665973-58666141
  hyper
cgacacactcataagcagccccttcctcgtcctttttttccttctgagctcgggaacgtctgctgggggtgagggggactcgcagaccacccccccccccgccccaggcggaggtcgggggccgtcacctggccaggtgtccggggaacggctcgggcggctgacacc

SEQ ID NO: 361779 - DNA, 224 bp, Homo sapiens; identical to SEQ ID NO: 205646
  chr19:58666733-58666957
  hyper

SEQ ID NO: 361780 - DNA, 343 bp, Homo sapiens; identical to SEQ ID NO: 352436
  chr19:58694209-58694552
  hyper

SEQ ID NO: 361781 - DNA, 43 bp, Homo sapiens; identical to SEQ ID NO: 352437
  chr19:58739694-58739737
  hyper

SEQ ID NO: 361782 - DNA, 404 bp, Homo sapiens
  chr19:59010484-59010888
  hyper
cgcacctggcacgcacacgccatacacgttaacctgttgcaagaagtccacctgcgacaacacgccctccacctcgtgcgtggacacgttctcgcccttccatctgcaaggagggagccggcgcttgtgaccacgcccccgggaaggagaggccccgcctcttgcccccgccccgccccttttggggatcaggaggcccagtcagccccgccccctcgaaaatcgagaagccccgccttcgcgtgagaagtcctgactccaagttccgccctcttacgacaggaaagtcccgcctcttcagcctgactccctctaggatctgaaagcgtccgtggccccgcgccagccccgccccgagaaaccctgcctcggaccggaaggtgtccccgaggcggtcgcggaag

SEQ ID NO: 361783 - DNA, 48 bp, Homo sapiens
  chr19:59010962-59011010
  hyper
gcgcaccagcttccgttccgacagctctcgggggccgcggtagcccac

SEQ ID NO: 361784 - DNA, 538 bp, Homo sapiens; identical to SEQ ID NO: 352438
  chr19:59049765-59050303
  hyper

SEQ ID NO: 361785 - DNA, 210 bp, Homo sapiens; identical to SEQ ID NO: 352439
  chr20:657125-657335
  hyper

SEQ ID NO: 361786 - DNA, 214 bp, Homo sapiens
  chr20:1207191-1207405
  hyper
agccctctctccccacgcccctctcccagggtccccgcccggtccccttccgaccccttcctccctcccttcgctccctccccgccaccgccgccaccctgccctttgcgggccggtttccacggagtggccccatcccggtggcttcacgttgcacgaagtcagttcaatctggagactgaaaaagcctccgggacgtggggcgggagggtgc

SEQ ID NO: 361787 - DNA, 157 bp, Homo sapiens
  chr20:1874963-1875120
  hyper
cggggagcagccgcgcggccggagtccggaggcgaggggaggtcggccgcaacttccccggtccaccttaagaggacgatgtagccagctcgcagcgctgaccttagaaaaacaagtttgcgcaaagtggagcggggacccggcctctgggcagccc

SEQ ID NO: 361788 - DNA, 666 bp, Homo sapiens
  chr20:1875155-1875821
  hyper
cggcgcaggtccgggcccggcagggacggggaggggcagagcgggaccggtcggggctggggaccagccgcgcgggcttctgaacgggcacgctgtcggagccggaggctcgtctagtcccgagccccagcgggccgcggcggctcgcggggccgccttcccgggacagcagccggggcccgggcgccggcgcgggggaggacgctgccctccccggccgggcgcgcagctcgcagccctcgctccctcccccggggcgcgcaggcgggcgctcgctcgcagagaaggtgccggcggggccggagccccgaagcctccccgggcggcgggaagacgggaggaggggaaagggaaggagggagggggtcgggctgccgggagggcgggggcagcggccgggactgcgggccgggagcgagcccagccgcccgcgccgtgtggagcccgggcggggcaggtgggcagcggcgggggcggctccgcgcggccgggctcggccgtgctgcccctcgcccctgctcgcgcggtcctctctcccgcgcggtctgtcggtctgcgcgccgcctcgctcctcgctcctcgctctccccctctttctccccctctcgcctctccgtgtctctggctctctgcctggctcccttgggtctgtttctctctcctgcc

SEQ ID NO: 361789 - DNA, 120 bp, Homo sapiens; identical to SEQ ID NO: 347648
  chr20:2731109-2731229
  hyper

SEQ ID NO: 361790 - DNA, 225 bp, Homo sapiens; identical to SEQ ID NO: 205669
  chr20:2731391-2731616
  hyper

SEQ ID NO: 361791 - DNA, 744 bp, Homo sapiens; identical to SEQ ID NO: 345622
  chr20:2731675-2732419
  hyper

SEQ ID NO: 361792 - DNA, 37 bp, Homo sapiens; identical to SEQ ID NO: 294512
  chr20:2801696-2801733
  hyper

SEQ ID NO: 361793 - DNA, 143 bp, Homo sapiens; identical to SEQ ID NO: 294514
  chr20:2820861-2821004
  hyper

SEQ ID NO: 361794 - DNA, 235 bp, Homo sapiens
  chr20:3026333-3026568
  hyper
cgcagcccgagagccccgccccgccccgccatcctccaataaagtgtgaggttctccgaagctgttgcgtcgagttctgtccttcgtcccctccctgtcttccccgctgagacccttccctgcgtgggggctggagggacgcgggtccggccccgcgggcgggagtaactaagggatggccccgggccctggcgggaaggccgggccagagcctgggggcgggatgcggacgtcc

SEQ ID NO: 361795 - DNA, 67 bp, Homo sapiens; identical to SEQ ID NO: 352444
  chr20:3052452-3052519
  hyper

SEQ ID NO: 361796 - DNA, 283 bp, Homo sapiens; identical to SEQ ID NO: 352445
  chr20:3220266-3220549
  hyper

SEQ ID NO: 361797 - DNA, 125 bp, Homo sapiens; identical to SEQ ID NO: 352446
  chr20:3229128-3229253
  hyper

SEQ ID NO: 361798 - DNA, 154 bp, Homo sapiens; identical to SEQ ID NO: 205676
  chr20:3229326-3229480
  hyper

SEQ ID NO: 361799 - DNA, 31 bp, Homo sapiens; identical to SEQ ID NO: 205677
  chr20:3229526-3229557
  hyper

SEQ ID NO: 361800 - DNA, 144 bp, Homo sapiens; identical to SEQ ID NO: 352449
  chr20:3229659-3229803
  hyper

SEQ ID NO: 361801 - DNA, 450 bp, Homo sapiens; identical to SEQ ID NO: 352450
  chr20:3653532-3653982
  hyper

SEQ ID NO: 361802 - DNA, 414 bp, Homo sapiens; identical to SEQ ID NO: 347652
  chr20:4804008-4804422
  hyper

SEQ ID NO: 361803 - DNA, 1116 bp, Homo sapiens; identical to SEQ ID NO: 347653
  chr20:4981401-4982517
  hyper

SEQ ID NO: 361804 - DNA, 63 bp, Homo sapiens
  chr20:5297756-5297819
  hyper
gaaggtgaccctttcaaggaaagcccggctccgacgagtgcggtgtgggcctttggagatggc

SEQ ID NO: 361805 - DNA, 37 bp, Homo sapiens
  chr20:5891878-5891915
  hyper
cgaagcgggacctcccgcctcccctaccatctcagat

SEQ ID NO: 361806 - DNA, 330 bp, Homo sapiens
  chr20:5892269-5892599
  hyper
gagcggggccatgcagccaacgctgcttctcagcctcctgggagccgtggggctggcgggtgagtgggcgcggcgggccggtcagcaccgcggacagcgccagcctcgctcttccccgccgctcccgcagccaggctggcggatcccgggagagagggagggttgaggggaaggtttacctcttgcttcgtttcttctcctccctgggtgttttccttcagctcctcccacccgtttgacttggaaaaagctagagggcttcctagcccaaccaggggagcctcagtctttctgtatctgagttttcctctagataggaaggaagaaaac

SEQ ID NO: 361807 - DNA, 427 bp, Homo sapiens; identical to SEQ ID NO: 352453
  chr20:6747996-6748423
  hyper

SEQ ID NO: 361808 - DNA, 293 bp, Homo sapiens; identical to SEQ ID NO: 294559
  chr20:6748470-6748763
  hyper

SEQ ID NO: 361809 - DNA, 587 bp, Homo sapiens
  chr20:6749063-6749650
  hyper
ggagccggccccgcgcggggccacgcgtccctcgggcgctggttcctaaggaggacgacagcaccagcttctcctttctcccttcccttccctgccccgcactcctccccctgctcgctgttgttgtgtgtcagcacttggctggggacttcttgaacttgcagggagaataacttgcgcaccccactttgcgccggtgcctttgccccagcggagcctgcttcgccatctccgagccccaccgcccctccactcctcggccttgcccgacactgagacgctgttcccagcgtgaaaagagagactgcgcggccggcacccgggagaaggaggaggcaaagaaaaggaacggacattcggtccttgcgccaggtcctttgaccagagtttttccatgtggacgctctttcaatggacgtgtccccgcgtgcttcttagacggactgcggtctcctaaaggtagaggacgcgggccagggcccggggtgggtggtgggtgggagggggatttgggcagccactgcggtagagcccttccttacgtccaggccagaagtaaacagacccctctccagtccacgtgcaac

SEQ ID NO: 361810 - DNA, 126 bp, Homo sapiens
  chr20:9048369-9048495
  hyper
cggaccggctcaggcggctgagcatgcctagtgcagctgcgagcatggccccagtccccaatgcgcaggtgccacgtctccgggttttggtggccgccggccgggagaaggaggaggcggagtggg

SEQ ID NO: 361811 - DNA, 631 bp, Homo sapiens; identical to SEQ ID NO: 294562
  chr20:9048532-9049163
  hyper

SEQ ID NO: 361812 - DNA, 229 bp, Homo sapiens; identical to SEQ ID NO: 294563
  chr20:9049238-9049467
  hyper

SEQ ID NO: 361813 - DNA, 111 bp, Homo sapiens
  chr20:9049670-9049781
  hyper
aggagggggtggtggcgccgcgccgggagcagtaagtgagctgcaccgccaacaagatctctcacacacagacacacacacgcacacgcacacacgggcgcgcacacacac

SEQ ID NO: 361814 - DNA, 210 bp, Homo sapiens; identical to SEQ ID NO: 205693
  chr20:9489214-9489424
  hyper

SEQ ID NO: 361815 - DNA, 66 bp, Homo sapiens; identical to SEQ ID NO: 352456
  chr20:9489716-9489782
  hyper

SEQ ID NO: 361816 - DNA, 53 bp, Homo sapiens; identical to SEQ ID NO: 205697
  chr20:9496982-9497035
  hyper

SEQ ID NO: 361817 - DNA, 239 bp, Homo sapiens; identical to SEQ ID NO: 294572
  chr20:9497109-9497348
  hyper

SEQ ID NO: 361818 - DNA, 118 bp, Homo sapiens
  chr20:9497378-9497496
  hyper
tttcttatgcgctaaaactgcaagggggcagtgcgactttccttttcagtcaggatgtgatggccttcagtgtctttttgcgcatggcagcatggctcgcacgggatattcagtcatc

SEQ ID NO: 361819 - DNA, 356 bp, Homo sapiens
  chr20:9818833-9819189
  hyper
cgcgcacacacacacgcgcgcacacacacacacacacaaataacaaaggaaaacacagcctcataaaggctcagctattgcatcctccagtccacacctgccaaaagacaaaaaccatgcgggaatcctgctctggcaatatgtccaacacttctcgggaaaagcagcgccgtggcacccccagggcgtgcgctgctgtatacacacaaagaactggtgctgggcttgcgagcagttcggggtaccagcacgctctcagggctggaatccggggttctcctccacgccctcccgcccagcaaaatggaaccatcctttatttggttggtagagagcccaggctggatagtagcgca

SEQ ID NO: 361820 - DNA, 736 bp, Homo sapiens; identical to SEQ ID NO: 347654
  chr20:10415352-10416088
  hyper

SEQ ID NO: 361821 - DNA, 951 bp, Homo sapiens; identical to SEQ ID NO: 336369
  chr20:13976116-13977067
  hyper

SEQ ID NO: 361822 - DNA, 95 bp, Homo sapiens; identical to SEQ ID NO: 347655
  chr20:17919868-17919963
  hyper

SEQ ID NO: 361823 - DNA, 79 bp, Homo sapiens
  chr20:18039568-18039647
  hyper
cgggtgcgcccaggacaaccggcacagcctcttgtgtcgctgcggtcgccctcctccaggaggtcgtcagacgtgtgcc

SEQ ID NO: 361824 - DNA, 94 bp, Homo sapiens
  chr20:18039936-18040030
  hyper
tctgccctcaaggagtcaccctctctggactgaactctgaactccagcttttctctaagaaaaaccagctaagaacgaaaaagactttgatccc

SEQ ID NO: 361825 - DNA, 86 bp, Homo sapiens
  chr20:19186796-19186882
  hyper
catctggacccaatcattctgcagttctggggctggaaacctgggcgatgaactgagatgaggagatggacacagcactgtataac

SEQ ID NO: 361826 - DNA, 153 bp, Homo sapiens
  chr20:19192506-19192659
  hyper
cgggaggcccgcgagaagaggcgaggccagaggctgggcgcgggcagccaagcgcactcgcggcgccccgactccaggtagcacgtagagaggaggctgaagagcccctcggttttccgaaagtttccagcgaatccttcttggtgaagatcg

SEQ ID NO: 361827 - DNA, 267 bp, Homo sapiens; identical to SEQ ID NO: 294620
  chr20:19193616-19193883
  hyper

SEQ ID NO: 361828 - DNA, 78 bp, Homo sapiens; identical to SEQ ID NO: 336375
  chr20:19673407-19673485
  hyper

SEQ ID NO: 361829 - DNA, 145 bp, Homo sapiens
  chr20:19739207-19739352
  hyper
cggagcgcgaggtggccgctggtcccggcagggtcaccgggtgtcctcagctgacctgtgcggggctggggtgagggacagctggagggtgcaggcactatggctcgaggtgcggaggtgcgggtgtgcgtgcgtgtgcaccgga

SEQ ID NO: 361830 - DNA, 151 bp, Homo sapiens
  chr20:19739786-19739937
  hyper
ttgcagaagttcagcttgaaagcctatgatatgttgccaagaaatacagggcaagatcggtcccctgggccctgagaggcgcctgtcttctcagagctcttaaatccctggggctttcctaattccgcagtgtagcggcacttccttgcgc

SEQ ID NO: 361831 - DNA, 148 bp, Homo sapiens; identical to SEQ ID NO: 336377
  chr20:20343543-20343691
  hyper

SEQ ID NO: 361832 - DNA, 62 bp, Homo sapiens; identical to SEQ ID NO: 352462
  chr20:20344267-20344329
  hyper

SEQ ID NO: 361833 - DNA, 79 bp, Homo sapiens; identical to SEQ ID NO: 345625
  chr20:20350750-20350829
  hyper

SEQ ID NO: 361834 - DNA, 205 bp, Homo sapiens; identical to SEQ ID NO: 345626
  chr20:21080357-21080562
  hyper

SEQ ID NO: 361835 - DNA, 184 bp, Homo sapiens; identical to SEQ ID NO: 294634
  chr20:21086682-21086866
  hyper

SEQ ID NO: 361836 - DNA, 107 bp, Homo sapiens
  chr20:21087188-21087295
  hyper
tttgggggctgggggatgtctagccactctagagaaacactgcgagccccacgcgggctggtggagcctcttgcctggaaaaagatgtggaaacgcgcaggctgggc

SEQ ID NO: 361837 - DNA, 221 bp, Homo sapiens; identical to SEQ ID NO: 205736
  chr20:21686742-21686963
  hyper

SEQ ID NO: 361838 - DNA, 101 bp, Homo sapiens
  chr20:22558954-22559055
  hyper
cgaaccccctgcaaaaaaacccaacgccttgagtctcagttggctgagcttaccaccagccaagcccgcccgggcgtccgagccctggaagggagaaggac

SEQ ID NO: 361839 - DNA, 380 bp, Homo sapiens; identical to SEQ ID NO: 205740
  chr20:22559242-22559622
  hyper

SEQ ID NO: 361840 - DNA, 152 bp, Homo sapiens
  chr20:22559772-22559924
  hyper
gtattcggacagaactatatcttatcggccgggatcagtgaaggggggcgcgctaagtagtttaaaacgaccctcgcacaatgggcgtgccatacgaaacatagcaggttagggcagcgctttcagcctccattgtcccccactcggccccc

SEQ ID NO: 361841 - DNA, 330 bp, Homo sapiens
  chr20:22563824-22564154
  hyper
cgttagcaccgcggctggagggtgcccagacctcccacccaccgcccaggcctccgcgtccggggaggcctccggggagccctttcgtccccgatggcccagtctccggactccgagtctgtttcattcagggagagtcatgatcgatcgcccttgggaaggtggcgagcggattgctgcttgggcatgtggcccgttcctagcccttctccacctcgcccagattctagaacaggggtcccatggagtactcccaagccagcaccccaaatacattcccctaccccagagtctccccaaactctcccaccagcatactgagctggcgcc

SEQ ID NO: 361842 - DNA, 47 bp, Homo sapiens; identical to SEQ ID NO: 205746
  chr20:22564188-22564235
  hyper

SEQ ID NO: 361843 - DNA, 982 bp, Homo sapiens
  chr20:22564265-22565247
  hyper
cggtctccctccagggaccccctcccttgtcccagggaaactgcaaggcagtgcctgtgcggagtgcgggggcggctggaggcactgaacggggcaatagggaaagaaccgagacctgaaccacacgcggctgagctttgcaggcaaaaactttctttctctttgtccactagtctttgactctgcctccacttcagcccccaactcctacccatcttctcctcctcagctccccaccccctcgccggccgacctcccacccctccccagccgcgcgctgccaaacataactctgttaggatagtgcgtggctcggccacgaagaggatttggaggcgccgcaagtcaatatttgatcacaaagttaatattatctcaaggctaacagtgtgtcgtataaaaaagagacccatttgattccaaggagggcggaaaaggcggctgcccagaaaggctggggttgtggggcggggtgggggggtgccagcgagggaagcggtcctgaggttggggaaggagcgagcgccgccgctccacttccccctggaaaagacgagcgcttacctcgggctctgcatagtagctgctccagtcggacggctcgtgcccttccatcttcaccgctcccagcatactggaagccgagtgcatggcagtttaaaatttaacagccacaacaaacgaccagcaatcaccccccacccccaccctcttttaaaaaaaagtcagccaaagcaccgtcccctcctccctccctctctcgcgctccctctccctgggctccactccctctctctccctgggcaggccggaggcggtagttggaagtgggcgggaggtgggggggggcgaggagcggaggaggcccaggccagcgccccgcggtagggagcacccgccgccgccgcgctcacgggctgccgggtggcggctgaggttggcagtgccgagctgccccgaggcggcgggaagcgcgcggcgc

SEQ ID NO: 361844 - DNA, 68 bp, Homo sapiens
  chr20:22565361-22565429
  hyper
cgcggagcggacaagtgccgcagtgacgtgggaggctggtgatatagcgcggcgcgctggcgcgggcc

SEQ ID NO: 361845 - DNA, 143 bp, Homo sapiens; identical to SEQ ID NO: 294664
  chr20:22565459-22565602
  hyper

SEQ ID NO: 361846 - DNA, 318 bp, Homo sapiens; identical to SEQ ID NO: 294665
  chr20:22565634-22565952
  hyper

SEQ ID NO: 361847 - DNA, 66 bp, Homo sapiens; identical to SEQ ID NO: 294666
  chr20:22567768-22567834
  hyper

SEQ ID NO: 361848 - DNA, 259 bp, Homo sapiens; identical to SEQ ID NO: 205750
  chr20:23030486-23030745
  hyper

SEQ ID NO: 361849 - DNA, 264 bp, Homo sapiens; identical to SEQ ID NO: 352468
  chr20:23617984-23618248
  hyper

SEQ ID NO: 361850 - DNA, 68 bp, Homo sapiens; identical to SEQ ID NO: 352469
  chr20:23618645-23618713
  hyper

SEQ ID NO: 361851 - DNA, 205 bp, Homo sapiens; identical to SEQ ID NO: 352470
  chr20:25065526-25065731
  hyper

SEQ ID NO: 361852 - DNA, 150 bp, Homo sapiens; identical to SEQ ID NO: 294676
  chr20:25566244-25566394
  hyper

SEQ ID NO: 361853 - DNA, 59 bp, Homo sapiens; identical to SEQ ID NO: 352472
  chr20:25566411-25566470
  hyper

SEQ ID NO: 361854 - DNA, 1002 bp, Homo sapiens; identical to SEQ ID NO: 345628
  chr20:30192854-30193856
  hyper

SEQ ID NO: 361855 - DNA, 189 bp, Homo sapiens; identical to SEQ ID NO: 345629
  chr20:30193992-30194181
  hyper

SEQ ID NO: 361856 - DNA, 262 bp, Homo sapiens; identical to SEQ ID NO: 336415
  chr20:30196349-30196611
  hyper

SEQ ID NO: 361857 - DNA, 482 bp, Homo sapiens; identical to SEQ ID NO: 352476
  chr20:30555404-30555886
  hyper

SEQ ID NO: 361858 - DNA, 248 bp, Homo sapiens; identical to SEQ ID NO: 352477
  chr20:30556403-30556651
  hyper

SEQ ID NO: 361859 - DNA, 61 bp, Homo sapiens; identical to SEQ ID NO: 347665
  chr20:30639044-30639105
  hyper

SEQ ID NO: 361860 - DNA, 138 bp, Homo sapiens; identical to SEQ ID NO: 294696
  chr20:30639494-30639632
  hyper

SEQ ID NO: 361861 - DNA, 94 bp, Homo sapiens
  chr20:30946060-30946154
  hyper
cgactcccaggcgccctttcggtttgtttttgttcaaaaaaaaaaaaccccacactccccctcctcactcttcacacacactcacacacaccca

SEQ ID NO: 361862 - DNA, 112 bp, Homo sapiens; identical to SEQ ID NO: 205764
  chr20:30946218-30946330
  hyper

SEQ ID NO: 361863 - DNA, 285 bp, Homo sapiens
  chr20:30946345-30946630
  hyper
cgactgacgcagcgcgggcgcgtggagccgccgccgcccctcccccaccgccgctctcgcgccagccggtccccgcgtgcccgccccttctccccggccgcacccgagacctcgcgcgccgccgctgccacgcgccccccccaccgccgccgccgccccagccccgcgccaccgccccagcccgcccagcccggaggtcccgcgtggagctgccgccgccgccggggagaaggatgaaggacaaacagaagaagaagaaggagcgcacgtgggccgaggccgcgc

SEQ ID NO: 361864 - DNA, 109 bp, Homo sapiens; identical to SEQ ID NO: 345631
  chr20:32899337-32899446
  hyper

SEQ ID NO: 361865 - DNA, 339 bp, Homo sapiens; identical to SEQ ID NO: 294726
  chr20:32899515-32899854
  hyper

SEQ ID NO: 361866 - DNA, 59 bp, Homo sapiens; identical to SEQ ID NO: 205789
  chr20:34190072-34190131
  hyper

SEQ ID NO: 361867 - DNA, 534 bp, Homo sapiens; identical to SEQ ID NO: 336423
  chr20:34652354-34652888
  hyper

SEQ ID NO: 361868 - DNA, 141 bp, Homo sapiens; identical to SEQ ID NO: 347670
  chr20:35201323-35201464
  hyper

SEQ ID NO: 361869 - DNA, 37 bp, Homo sapiens; identical to SEQ ID NO: 205795
  chr20:35201548-35201585
  hyper

SEQ ID NO: 361870 - DNA, 120 bp, Homo sapiens; identical to SEQ ID NO: 347672
  chr20:35201647-35201767
  hyper

SEQ ID NO: 361871 - DNA, 33 bp, Homo sapiens
  chr20:36793833-36793866
  hyper
cggcggccggacgagggcgccccctgggggagc

SEQ ID NO: 361872 - DNA, 62 bp, Homo sapiens; identical to SEQ ID NO: 345634
  chr20:37274639-37274701
  hyper

SEQ ID NO: 361873 - DNA, 546 bp, Homo sapiens; identical to SEQ ID NO: 205802
  chr20:37274731-37275277
  hyper

SEQ ID NO: 361874 - DNA, 100 bp, Homo sapiens; identical to SEQ ID NO: 352489
  chr20:37303401-37303501
  hyper

SEQ ID NO: 361875 - DNA, 37 bp, Homo sapiens; identical to SEQ ID NO: 347675
  chr20:37358242-37358279
  hyper

SEQ ID NO: 361876 - DNA, 389 bp, Homo sapiens; identical to SEQ ID NO: 345636
  chr20:37433723-37434112
  hyper

SEQ ID NO: 361877 - DNA, 115 bp, Homo sapiens
  chr20:39318166-39318281
  hyper
ccccacctctaggccaaatcaccgctttcccctcctcgcgcactctcctccctcagttccctttgcaccccacccccatcccgtgtcacccccaaggaggctcagaatgagcgcc

SEQ ID NO: 361878 - DNA, 95 bp, Homo sapiens
  chr20:39318288-39318383
  hyper
cgcctcctgggccctttgttcccaagcggcccccgcccagtgggcgacgctctgtgtgtcctcgcggcttctggccgtgtgtgtcgtgcgttcct

SEQ ID NO: 361879 - DNA, 462 bp, Homo sapiens; identical to SEQ ID NO: 294771
  chr20:39318415-39318877
  hyper

SEQ ID NO: 361880 - DNA, 207 bp, Homo sapiens
  chr20:41817010-41817217
  hyper
cgcctattccgcttccattttagtaccaagcaaggaaggctctaaagcatttccaacggaatgtccttccagcggcccttaacctcagacgcagcttgtgcaaagacgctgtacctccccacaggttcgttcttttgctctttctttcttcctttccttctttcggtgaaataataaatgggcacagctgttgcttagcgatccgaa

SEQ ID NO: 361881 - DNA, 220 bp, Homo sapiens; identical to SEQ ID NO: 294785
  chr20:42876305-42876525
  hyper

SEQ ID NO: 361882 - DNA, 124 bp, Homo sapiens
  chr20:43017186-43017310
  hyper
cgagctgtgattggtgatcgaaccgagcaggcctcctctggatttggagagacatagtgcgtctgggcctgtgattggcgggattgctgtgattggtgaagtccctaaggctatctaagtttct

SEQ ID NO: 361883 - DNA, 110 bp, Homo sapiens
  chr20:43017399-43017509
  hyper
gccctccggcccagcgcggtgcctgccctgccctgcgccctggggcaaccgcgggatgaggtggggcggcaaagggtgtcagggctcccagctgcggcccgggtggccac

SEQ ID NO: 361884 - DNA, 135 bp, Homo sapiens; identical to SEQ ID NO: 336443
  chr20:43104449-43104584
  hyper

SEQ ID NO: 361885 - DNA, 57 bp, Homo sapiens; identical to SEQ ID NO: 336444
  chr20:43374349-43374406
  hyper

SEQ ID NO: 361886 - DNA, 108 bp, Homo sapiens; identical to SEQ ID NO: 336447
  chr20:43589121-43589229
  hyper

SEQ ID NO: 361887 - DNA, 47 bp, Homo sapiens; identical to SEQ ID NO: 352493
  chr20:43729515-43729562
  hyper

SEQ ID NO: 361888 - DNA, 215 bp, Homo sapiens; identical to SEQ ID NO: 347677
  chr20:43976984-43977199
  hyper

SEQ ID NO: 361889 - DNA, 71 bp, Homo sapiens; identical to SEQ ID NO: 345637
  chr20:44453063-44453134
  hyper

SEQ ID NO: 361890 - DNA, 171 bp, Homo sapiens; identical to SEQ ID NO: 352496
  chr20:44642198-44642369
  hyper

SEQ ID NO: 361891 - DNA, 578 bp, Homo sapiens; identical to SEQ ID NO: 352497
  chr20:44642532-44643110
  hyper

SEQ ID NO: 361892 - DNA, 32 bp, Homo sapiens; identical to SEQ ID NO: 345638
  chr20:44879699-44879731
  hyper

SEQ ID NO: 361893 - DNA, 66 bp, Homo sapiens; identical to SEQ ID NO: 352499
  chr20:44937643-44937709
  hyper

SEQ ID NO: 361894 - DNA, 50 bp, Homo sapiens; identical to SEQ ID NO: 352500
  chr20:47934774-47934824
  hyper

SEQ ID NO: 361895 - DNA, 982 bp, Homo sapiens; identical to SEQ ID NO: 336464
  chr20:48598700-48599682
  hyper

SEQ ID NO: 361896 - DNA, 164 bp, Homo sapiens; identical to SEQ ID NO: 345639
  chr20:48771177-48771341
  hyper

SEQ ID NO: 361897 - DNA, 139 bp, Homo sapiens
  chr20:48789173-48789312
  hyper
agcgtcctccccatcccgttcggcctctgcctccaccgtcgtctctgtaacccgttccctgtgggagagtctctgttgcggtgttcaggggtttcggttttctggctgaacagtgattaacgcgagggaaggcgctgac

SEQ ID NO: 361898 - DNA, 581 bp, Homo sapiens; identical to SEQ ID NO: 347682
  chr20:49224897-49225478
  hyper

SEQ ID NO: 361899 - DNA, 305 bp, Homo sapiens; identical to SEQ ID NO: 336468
  chr20:49225991-49226296
  hyper

SEQ ID NO: 361900 - DNA, 315 bp, Homo sapiens; identical to SEQ ID NO: 294860
  chr20:50158039-50158354
  hyper

SEQ ID NO: 361901 - DNA, 952 bp, Homo sapiens; identical to SEQ ID NO: 336473
  chr20:50158723-50159675
  hyper

SEQ ID NO: 361902 - DNA, 570 bp, Homo sapiens; identical to SEQ ID NO: 345641
  chr20:50383675-50384245
  hyper

SEQ ID NO: 361903 - DNA, 249 bp, Homo sapiens; identical to SEQ ID NO: 205848
  chr20:50384400-50384649
  hyper

SEQ ID NO: 361904 - DNA, 243 bp, Homo sapiens; identical to SEQ ID NO: 205849
  chr20:50384928-50385171
  hyper

SEQ ID NO: 361905 - DNA, 87 bp, Homo sapiens; identical to SEQ ID NO: 347688
  chr20:50385230-50385317
  hyper

SEQ ID NO: 361906 - DNA, 296 bp, Homo sapiens; identical to SEQ ID NO: 205853
  chr20:50722302-50722598
  hyper

SEQ ID NO: 361907 - DNA, 640 bp, Homo sapiens
  chr20:51589126-51589766
  hyper
cgctcctgtcctctcgcatatcactcacagacggggatctgacagcagccacaaacctacagtgagtgatcgctctccccccggcacgaatccgccatagagatcggcgaggaggaggaggaggaggaggaagaaaagaaggaggaggtggaggaggaggtggaggaggaggaggaggagggaaagaggagaaggaagaagaagaaaaagaagaaacccactaccttcccaggattgccttttttttttccttatctttacgcgcgagtgtgcctgtggcgcgtgtgcgcccctcgtcccttccatccgaacccgggcttggatgtttaataaagaaatcaagtgtctcaacagtcaccaaaaaaaaaaaaaaccgcaaaaacaaaaccaaaaaaattccaaaagcaaaaacaaaaaagagagaggaaaaaaaattcaaaataaacaaacaaacaaacaaggcagaaccaacctctacttcaaagcagccggcacaagccacccgtgtctgccacccagagaggggggtctctggcccgtggtggaggagttgcaggggggatcgtcagggggacagaggccgagtgacgtcctaggagccaccgggcaagaggcggaggagacccagagaggccagaga

SEQ ID NO: 361908 - DNA, 56 bp, Homo sapiens
  chr20:51590002-51590058
  hyper
taaccccgtcctctctcgccttctctggtctcccaaatcctccccttccaagctcc

SEQ ID NO: 361909 - DNA, 372 bp, Homo sapiens; identical to SEQ ID NO: 336479
  chr20:52259577-52259949
  hyper

SEQ ID NO: 361910 - DNA, 171 bp, Homo sapiens
  chr20:52789230-52789401
  hyper
cgcaggtgctgggtgcacagcacggcttttccgtggaccgactctaatctgtacaagagctcagggttgcgatggcacgggagaggggctttggtatccgccctacgtaagaagcttccaaccccagggaactctaactccgcctcttcacaatttccaggcgccgtcagg

SEQ ID NO: 361911 - DNA, 60 bp, Homo sapiens; identical to SEQ ID NO: 205858
  chr20:53092081-53092141
  hyper

SEQ ID NO: 361912 - DNA, 43 bp, Homo sapiens
  chr20:54919370-54919413
  hyper
ctcagctcccaggccagccgtggctcaggaagcctcccacgtc

SEQ ID NO: 361913 - DNA, 275 bp, Homo sapiens; identical to SEQ ID NO: 205862
  chr20:55203829-55204104
  hyper

SEQ ID NO: 361914 - DNA, 216 bp, Homo sapiens; identical to SEQ ID NO: 205863
  chr20:55205088-55205304
  hyper

SEQ ID NO: 361915 - DNA, 135 bp, Homo sapiens; identical to SEQ ID NO: 205864
  chr20:55206463-55206598
  hyper

SEQ ID NO: 361916 - DNA, 95 bp, Homo sapiens; identical to SEQ ID NO: 352515
  chr20:55206774-55206869
  hyper

SEQ ID NO: 361917 - DNA, 56 bp, Homo sapiens
  chr20:55532724-55532780
  hyper
cgggtgtttactgggtcatttaaccgggtttctattttttaaagtttccttttcta

SEQ ID NO: 361918 - DNA, 52 bp, Homo sapiens
  chr20:55532850-55532902
  hyper
cggtggggccgggtggctccctctaattgcctgtgttcctgccttttccctc

SEQ ID NO: 361919 - DNA, 103 bp, Homo sapiens; identical to SEQ ID NO: 294893
  chr20:55588994-55589097
  hyper

SEQ ID NO: 361920 - DNA, 284 bp, Homo sapiens
  chr20:55839319-55839603
  hyper
cgccccaggtgcccagcgtggggcttcagtatcattatttccatgttgacacagcgcccgtgggcgtgagtttgctgtcttgacttggttcgggttttcgcagcaagttacacaagtagaatgaaagcggctcaggaaacagcgctatcggggtgtgttatctcggaaaccaaatatttgatcatcagtcccgcagcgcgctggcgctgccggggggttagtttgagcaagtctggagaatgtgcgcgcacatatggagggggagctccccggccctcgctgca

SEQ ID NO: 361921 - DNA, 535 bp, Homo sapiens; identical to SEQ ID NO: 352516
  chr20:55964187-55964722
  hyper

SEQ ID NO: 361922 - DNA, 410 bp, Homo sapiens; identical to SEQ ID NO: 336492
  chr20:56073588-56073998
  hyper

SEQ ID NO: 361923 - DNA, 117 bp, Homo sapiens; identical to SEQ ID NO: 352517
  chr20:56725940-56726057
  hyper

SEQ ID NO: 361924 - DNA, 174 bp, Homo sapiens
  chr20:57090173-57090347
  hyper
gatgcgctccttgcgtcaaagcgcacccctagccaggccgttccctggaagggcaagcggggcggggagttcctctaagccccgccagtcctgggacccctgaagtttctattcaggtcttccagctactcctggaaaagtcgcgtcaacttggatcccagcaaacccagaagc

SEQ ID NO: 361925 - DNA, 113 bp, Homo sapiens; identical to SEQ ID NO: 345643
  chr20:57225466-57225579
  hyper

SEQ ID NO: 361926 - DNA, 304 bp, Homo sapiens; identical to SEQ ID NO: 336497
  chr20:57227604-57227908
  hyper

SEQ ID NO: 361927 - DNA, 327 bp, Homo sapiens; identical to SEQ ID NO: 336499
  chr20:57797949-57798276
  hyper

SEQ ID NO: 361928 - DNA, 176 bp, Homo sapiens; identical to SEQ ID NO: 205885
  chr20:57875365-57875541
  hyper

SEQ ID NO: 361929 - DNA, 220 bp, Homo sapiens; identical to SEQ ID NO: 352521
  chr20:57875889-57876109
  hyper

SEQ ID NO: 361930 - DNA, 233 bp, Homo sapiens; identical to SEQ ID NO: 347690
  chr20:57978841-57979074
  hyper

SEQ ID NO: 361931 - DNA, 74 bp, Homo sapiens
  chr20:58180712-58180786
  hyper
ggcagagccgccggcagggagacgaagggcgtgcgccaggacagagcccggtttcgtgacagcgtgtggactcc

SEQ ID NO: 361932 - DNA, 115 bp, Homo sapiens; identical to SEQ ID NO: 345644
  chr20:58514400-58514515
  hyper

SEQ ID NO: 361933 - DNA, 109 bp, Homo sapiens
  chr20:58515463-58515572
  hyper
cggagctgcgcgcctccgcctccagctcccctgccgcagcgcgccgcagccgggcgtccccgcgcgggcgccggagaggaaggaaggctggcagcctcgtcacgtgtcc

SEQ ID NO: 361934 - DNA, 33 bp, Homo sapiens; identical to SEQ ID NO: 336506
  chr20:60639846-60639879
  hyper

SEQ ID NO: 361935 - DNA, 43 bp, Homo sapiens
  chr20:60794658-60794701
  hyper
cgggtcccctggtggggcgtgtgcctgcgggagccacccaggt

SEQ ID NO: 361936 - DNA, 70 bp, Homo sapiens
  chr20:61585229-61585299
  hyper
cgccaattagaggggagggctgccctcagcgggccctgccccttgctctcttcctcttcccccacccacg

SEQ ID NO: 361937 - DNA, 84 bp, Homo sapiens; identical to SEQ ID NO: 347693
  chr20:61664570-61664654
  hyper

SEQ ID NO: 361938 - DNA, 192 bp, Homo sapiens; identical to SEQ ID NO: 352526
  chr20:61806216-61806408
  hyper

SEQ ID NO: 361939 - DNA, 247 bp, Homo sapiens; identical to SEQ ID NO: 205902
  chr20:61810310-61810557
  hyper

SEQ ID NO: 361940 - DNA, 270 bp, Homo sapiens
  chr20:61810632-61810902
  hyper
cgccggaccgcatcccgcccccaaagccggctctgggctgtgcaggaccaggcacgtgagactccgcagcccagggagaaaatgacaaatccctcccccgccgccatctgcagccgcagtgacacccactcgggtttgctgcaggggttttttttctgtccccggaagccagcgccacctgctgacgcccggcaccgcctctgcgccgcctcccccgcgcccatcccaggccccggctgggctgtgatgccccggtaacagtcagaggac

SEQ ID NO: 361941 - DNA, 271 bp, Homo sapiens; identical to SEQ ID NO: 352527
  chr20:62185051-62185322
  hyper

SEQ ID NO: 361942 - DNA, 390 bp, Homo sapiens; identical to SEQ ID NO: 347694
  chr20:62273399-62273789
  hyper

SEQ ID NO: 361943 - DNA, 290 bp, Homo sapiens; identical to SEQ ID NO: 347695
  chr20:62368779-62369069
  hyper

SEQ ID NO: 361944 - DNA, 144 bp, Homo sapiens; identical to SEQ ID NO: 336520
  chr20:62371942-62372086
  hyper

SEQ ID NO: 361945 - DNA, 43 bp, Homo sapiens; identical to SEQ ID NO: 352531
  chr20:62461248-62461291
  hyper

SEQ ID NO: 361946 - DNA, 264 bp, Homo sapiens; identical to SEQ ID NO: 352532
  chr20:62461639-62461903
  hyper

SEQ ID NO: 361947 - DNA, 345 bp, Homo sapiens; identical to SEQ ID NO: 345646
  chr20:62495236-62495581
  hyper

SEQ ID NO: 361948 - DNA, 759 bp, Homo sapiens; identical to SEQ ID NO: 205913
  chr20:62600809-62601568
  hyper

SEQ ID NO: 361949 - DNA, 65 bp, Homo sapiens
  chr20:62601569-62601634
  hyper
cacggattgaggcgacctgattccgccgcatcctggcccgcgcggcgagtgtggtctctgggctc

SEQ ID NO: 361950 - DNA, 214 bp, Homo sapiens; identical to SEQ ID NO: 295001
  chr20:62680443-62680657
  hyper

SEQ ID NO: 361951 - DNA, 267 bp, Homo sapiens
  chr20:62680896-62681163
  hyper
ggagcgcgggagcgcggcgggcgggcggcgggcactggggagccgggcgcaagggcaggccaggccgggagggcggatggcggtggggacggcggtggcctcgggccgggcgggcgcccagatatagcggctcagggccaatcggcggcggggcgggcgggcgggggcgggtcggggccgcctcctccccgggggctccctttcttctcaggccgggcgggattccgctgaggcctcccccgcgcacagcccccccacctcccccgc

SEQ ID NO: 361952 - DNA, 58 bp, Homo sapiens; identical to SEQ ID NO: 352534
  chr20:62694227-62694285
  hyper

SEQ ID NO: 361953 - DNA, 251 bp, Homo sapiens; identical to SEQ ID NO: 205918
  chr20:62694767-62695018
  hyper

SEQ ID NO: 361954 - DNA, 197 bp, Homo sapiens; identical to SEQ ID NO: 352536
  chr20:62695048-62695245
  hyper

SEQ ID NO: 361955 - DNA, 208 bp, Homo sapiens
  chr21:15755914-15756122
  hyper
cgagtttgtgttctttcgttttaattccttttaaagcgcgttcgtttgcctgagatctagcttctagatggcgttcctatagcctcccggagccccagccatcctccgtagaagggtccctgccgcagtgcggggcctgagggaagtcggctctggcgtccgtgctccaacgctgggagcagccctgaaactccagtgaccctcagcc

SEQ ID NO: 361956 - DNA, 292 bp, Homo sapiens; identical to SEQ ID NO: 336532
  chr21:18984005-18984297
  hyper

SEQ ID NO: 361957 - DNA, 67 bp, Homo sapiens; identical to SEQ ID NO: 352537
  chr21:22370943-22371010
  hyper

SEQ ID NO: 361958 - DNA, 122 bp, Homo sapiens; identical to SEQ ID NO: 205931
  chr21:27011487-27011609
  hyper

SEQ ID NO: 361959 - DNA, 133 bp, Homo sapiens; identical to SEQ ID NO: 205932
  chr21:27011639-27011772
  hyper

SEQ ID NO: 361960 - DNA, 153 bp, Homo sapiens; identical to SEQ ID NO: 345649
  chr21:27012725-27012878
  hyper

SEQ ID NO: 361961 - DNA, 466 bp, Homo sapiens; identical to SEQ ID NO: 347700
  chr21:30374936-30375402
  hyper

SEQ ID NO: 361962 - DNA, 191 bp, Homo sapiens
  chr21:32716044-32716235
  hyper
cgagcagcgggacagccccgggcaggacgcatcctgggtgggtgacgtgatcccgcagtctcctccccgaccccatatcccatacaatgatcctcgcttacagaagtcaagggggaaagatgacgctttcaaagcccgaatctctttaccctggagccagaaccagcgtcgccgccgtcccctgcagctca

SEQ ID NO: 361963 - DNA, 180 bp, Homo sapiens; identical to SEQ ID NO: 352542
  chr21:33244741-33244921
  hyper

SEQ ID NO: 361964 - DNA, 290 bp, Homo sapiens; identical to SEQ ID NO: 205955
  chr21:33245047-33245337
  hyper

SEQ ID NO: 361965 - DNA, 194 bp, Homo sapiens; identical to SEQ ID NO: 205956
  chr21:33245489-33245683
  hyper

SEQ ID NO: 361966 - DNA, 75 bp, Homo sapiens; identical to SEQ ID NO: 205957
  chr21:33245718-33245793
  hyper

SEQ ID NO: 361967 - DNA, 132 bp, Homo sapiens; identical to SEQ ID NO: 205958
  chr21:33245877-33246009
  hyper

SEQ ID NO: 361968 - DNA, 129 bp, Homo sapiens; identical to SEQ ID NO: 352547
  chr21:33246414-33246543
  hyper

SEQ ID NO: 361969 - DNA, 32 bp, Homo sapiens
  chr21:34401548-34401580
  hyper
gacgcgataccttgggaccggatttggggatc

SEQ ID NO: 361970 - DNA, 300 bp, Homo sapiens; identical to SEQ ID NO: 352548
  chr21:34602438-34602738
  hyper

SEQ ID NO: 361971 - DNA, 613 bp, Homo sapiens; identical to SEQ ID NO: 352549
  chr21:34602763-34603376
  hyper

SEQ ID NO: 361972 - DNA, 881 bp, Homo sapiens; identical to SEQ ID NO: 336551
  chr21:36163875-36164756
  hyper

SEQ ID NO: 361973 - DNA, 237 bp, Homo sapiens; identical to SEQ ID NO: 336554
  chr21:37757666-37757903
  hyper

SEQ ID NO: 361974 - DNA, 156 bp, Homo sapiens; identical to SEQ ID NO: 352551
  chr21:38064301-38064457
  hyper

SEQ ID NO: 361975 - DNA, 283 bp, Homo sapiens; identical to SEQ ID NO: 205987
  chr21:38064683-38064966
  hyper

SEQ ID NO: 361976 - DNA, 111 bp, Homo sapiens; identical to SEQ ID NO: 295100
  chr21:38071905-38072016
  hyper

SEQ ID NO: 361977 - DNA, 234 bp, Homo sapiens
  chr21:38073877-38074111
  hyper
tctcgggcgcagcggtccttcagcccagggcaggttcctccctttcctactcggaacgtggcaaagataccccagtcccagcccctccagctgagagctgttgcccaaggtcgtcgctacttgtccgctcaatggtgaccccttggcagagaactagggatgattccactccggttgatgttttaggggaaattaaaagaacattcggttttctgagtctccttccggggaggc

SEQ ID NO: 361978 - DNA, 146 bp, Homo sapiens; identical to SEQ ID NO: 352554
  chr21:38080753-38080899
  hyper

SEQ ID NO: 361979 - DNA, 293 bp, Homo sapiens; identical to SEQ ID NO: 336563
  chr21:38382182-38382475
  hyper

SEQ ID NO: 361980 - DNA, 210 bp, Homo sapiens
  chr21:38592864-38593074
  hyper
cgctataacgaggtaacatacagcacttagaagacggcctgacccagaataacactaatgttcacatggctgcgagtctcagaccaaaatcaatagccggtatctactgaaactgcagcaaggcgaaaccacgggaatggcgctccgttgagtagagcaacgcacagcacatcacatcgcatcctccgtagcgggaggctctggcctcac

SEQ ID NO: 361981 - DNA, 258 bp, Homo sapiens; identical to SEQ ID NO: 295112
  chr21:38593104-38593362
  hyper

SEQ ID NO: 361982 - DNA, 38 bp, Homo sapiens
  chr21:38593729-38593767
  hyper
actgagaacaccagcatctgctgccgccctgaatcagc

SEQ ID NO: 361983 - DNA, 140 bp, Homo sapiens; identical to SEQ ID NO: 347703
  chr21:38936049-38936189
  hyper

SEQ ID NO: 361984 - DNA, 144 bp, Homo sapiens; identical to SEQ ID NO: 347704
  chr21:38936266-38936410
  hyper

SEQ ID NO: 361985 - DNA, 44 bp, Homo sapiens; identical to SEQ ID NO: 347705
  chr21:39047626-39047670
  hyper

SEQ ID NO: 361986 - DNA, 310 bp, Homo sapiens; identical to SEQ ID NO: 206000
  chr21:39288394-39288704
  hyper

SEQ ID NO: 361987 - DNA, 279 bp, Homo sapiens; identical to SEQ ID NO: 206001
  chr21:39288901-39289180
  hyper

SEQ ID NO: 361988 - DNA, 38 bp, Homo sapiens
  chr21:40032283-40032321
  hyper
cgagccgtccctcccggcgctggacgccccacctgtcc

SEQ ID NO: 361989 - DNA, 158 bp, Homo sapiens; identical to SEQ ID NO: 206003
  chr21:40032367-40032525
  hyper

SEQ ID NO: 361990 - DNA, 65 bp, Homo sapiens
  chr21:40032848-40032913
  hyper
gggccgcgcgggcaggtttggacactacgcgccctgctcgggtttaggacgcggctggcggctcc

SEQ ID NO: 361991 - DNA, 132 bp, Homo sapiens; identical to SEQ ID NO: 206005
  chr21:40032974-40033106
  hyper

SEQ ID NO: 361992 - DNA, 75 bp, Homo sapiens; identical to SEQ ID NO: 206006
  chr21:40033358-40033433
  hyper

SEQ ID NO: 361993 - DNA, 141 bp, Homo sapiens
  chr21:40033449-40033590
  hyper
cggcgtctgcaaccagcagcctccaaagggtgcagccaggaggctcagcttgtccgcctccggggctcggggctaagccccttccagaagttttcgtttctacgcgaattccgaccgcaaaatccagcttacctgagcgcc

SEQ ID NO: 361994 - DNA, 75 bp, Homo sapiens; identical to SEQ ID NO: 352561
  chr21:40105869-40105944
  hyper

SEQ ID NO: 361995 - DNA, 341 bp, Homo sapiens; identical to SEQ ID NO: 206009
  chr21:40105997-40106338
  hyper

SEQ ID NO: 361996 - DNA, 60 bp, Homo sapiens; identical to SEQ ID NO: 352563
  chr21:42688559-42688619
  hyper

SEQ ID NO: 361997 - DNA, 405 bp, Homo sapiens
  chr21:42879240-42879645
  hyper
ccggcacggagcgcaagcggaggagccagaccggctcctcccgggcgggttcctgccggtgccgggtgtccaggaggccccggccctgatcgccgccagcgggtcgccgcaacggggcctgagtcgcgagcagtccctccccgagactgactggccgttcgcacctcgcccgggggccctccagcagcctggcccagcggtccccgccgcgccggccgtatcgttcccggcatctcagcgagtttccagtttctccctacctcagtagggaaccaagaagcagaaggagttcaggtaacactgcgggactgcagagatttcccccaaacaaagaagccaaccgacagcactcccagtcctcctccccaaagagaaaaggcgcaccggtgctcccaggcgggggcc

SEQ ID NO: 361998 - DNA, 113 bp, Homo sapiens; identical to SEQ ID NO: 352564
  chr21:43186321-43186434
  hyper

SEQ ID NO: 361999 - DNA, 106 bp, Homo sapiens; identical to SEQ ID NO: 206022
  chr21:43186592-43186698
  hyper

SEQ ID NO: 362000 - DNA, 493 bp, Homo sapiens; identical to SEQ ID NO: 347707
  chr21:43186889-43187382
  hyper

SEQ ID NO: 362001 - DNA, 285 bp, Homo sapiens; identical to SEQ ID NO: 352567
  chr21:43188170-43188455
  hyper

SEQ ID NO: 362002 - DNA, 603 bp, Homo sapiens; identical to SEQ ID NO: 336575
  chr21:43188777-43189380
  hyper

SEQ ID NO: 362003 - DNA, 93 bp, Homo sapiens; identical to SEQ ID NO: 336576
  chr21:43430373-43430466
  hyper

SEQ ID NO: 362004 - DNA, 33 bp, Homo sapiens; identical to SEQ ID NO: 352569
  chr21:44847478-44847511
  hyper

SEQ ID NO: 362005 - DNA, 56 bp, Homo sapiens; identical to SEQ ID NO: 352570
  chr21:44847864-44847920
  hyper

SEQ ID NO: 362006 - DNA, 196 bp, Homo sapiens; identical to SEQ ID NO: 352571
  chr21:46294041-46294237
  hyper

SEQ ID NO: 362007 - DNA, 216 bp, Homo sapiens; identical to SEQ ID NO: 295181
  chr21:46351437-46351653
  hyper

SEQ ID NO: 362008 - DNA, 394 bp, Homo sapiens; identical to SEQ ID NO: 295182
  chr21:46352279-46352673
  hyper

SEQ ID NO: 362009 - DNA, 347 bp, Homo sapiens
  chr21:46800403-46800750
  hyper
cgtccgtccgtgcacacacgctcacctcgcacccagcgtccgtccgtgcacacgctcacctcgcacccagcgtccgtccgtgcacacgctcacctcgtacccagcgtccgtctgtgcacacatgctcccctcgcaccgagcgtctgtccgtgcacacgcttacctcacacccagcatccatctgtgcacacacgctcccctcgcacccagcatccgtgcacacgctcacctcgcacccagcatctgtccatgcacacactcccctcgcacctagcgtccgtccatgcacatactcaccttgcacccagcatccatctgtgcacacaccctcacctcgcacccagcat

SEQ ID NO: 362010 - DNA, 304 bp, Homo sapiens
  chr21:46800780-46801084
  hyper
cactcccctcgcacccagcgtccgtcggtgcacacacgctcacctcccgcacctcccgtggaggcggcatccaggcagggaagcaaggacactctgcgtccattcctctctctaaacaccaaggcccccgcaatccgaggaatatatttgacagaaacaagaaaaaaggatgaaagtggccaagacaagccgatcccttctatctgttttcaggaacatgattttgtggccccaaactccttgaagcccgatgcttccacctccctcccactccactctcccccgacacatccgtccagctccc

SEQ ID NO: 362011 - DNA, 214 bp, Homo sapiens; identical to SEQ ID NO: 336588
  chr21:46801338-46801552
  hyper

SEQ ID NO: 362012 - DNA, 94 bp, Homo sapiens; identical to SEQ ID NO: 295190
  chr21:46825731-46825825
  hyper

SEQ ID NO: 362013 - DNA, 55 bp, Homo sapiens; identical to SEQ ID NO: 352575
  chr21:47062898-47062953
  hyper

SEQ ID NO: 362014 - DNA, 142 bp, Homo sapiens; identical to SEQ ID NO: 345651
  chr21:47063290-47063432
  hyper

SEQ ID NO: 362015 - DNA, 273 bp, Homo sapiens
  chr21:47649460-47649733
  hyper
cgccgcgtagcttcgccggggggagtggggtaggcgcggtgaggccgtgggcccccacacctggcggaccacaggggccagaagccctggagccccgccagggaagggctgcgtcgctggccaggaccgagcgcggtagagcctcagctgctcacggggtcgctggagttgggggtggccccaggagaaattaaaggtgaaaagccttagcagcagagggaagaggaagatggaggcagagcgagtgaccgaacttggaagggacagccgggc

SEQ ID NO: 362016 - DNA, 237 bp, Homo sapiens; identical to SEQ ID NO: 206052
  chr22:17849877-17850114
  hyper

SEQ ID NO: 362017 - DNA, 129 bp, Homo sapiens; identical to SEQ ID NO: 352578
  chr22:19706042-19706171
  hyper

SEQ ID NO: 362018 - DNA, 390 bp, Homo sapiens; identical to SEQ ID NO: 206060
  chr22:21319195-21319585
  hyper

SEQ ID NO: 362019 - DNA, 67 bp, Homo sapiens
  chr22:21368234-21368301
  hyper
cgccccgcagagggctacgtgccctgctggacagaggtctcctgcctcctcggcggcgccagcccac

SEQ ID NO: 362020 - DNA, 94 bp, Homo sapiens
  chr22:21368697-21368791
  hyper
gtaggttgccgtagaaaccgtggctctcctgcgctgaggctcctcgcctgagaggataaactgcacgcgccacgggctatgcactgggctgggc

SEQ ID NO: 362021 - DNA, 69 bp, Homo sapiens
  chr22:21386510-21386579
  hyper
cgagccggacccggaacaggagccgcggctctgcgtcggggcgggtgtggcccaggcagccacctggcc

SEQ ID NO: 362022 - DNA, 166 bp, Homo sapiens; identical to SEQ ID NO: 345652
  chr22:22006759-22006925
  hyper

SEQ ID NO: 362023 - DNA, 328 bp, Homo sapiens; identical to SEQ ID NO: 352581
  chr22:22012017-22012345
  hyper

SEQ ID NO: 362024 - DNA, 354 bp, Homo sapiens; identical to SEQ ID NO: 336607
  chr22:22292773-22293127
  hyper

SEQ ID NO: 362025 - DNA, 136 bp, Homo sapiens; identical to SEQ ID NO: 345653
  chr22:22862472-22862608
  hyper

SEQ ID NO: 362026 - DNA, 60 bp, Homo sapiens; identical to SEQ ID NO: 352583
  chr22:24181727-24181787
  hyper

SEQ ID NO: 362027 - DNA, 187 bp, Homo sapiens; identical to SEQ ID NO: 295268
  chr22:24552924-24553111
  hyper

SEQ ID NO: 362028 - DNA, 31 bp, Homo sapiens
  chr22:24819665-24819696
  hyper
cgggggatgtggcgcggtccaggcccgtcgc

SEQ ID NO: 362029 - DNA, 173 bp, Homo sapiens; identical to SEQ ID NO: 295271
  chr22:24819901-24820074
  hyper

SEQ ID NO: 362030 - DNA, 61 bp, Homo sapiens; identical to SEQ ID NO: 295272
  chr22:24820486-24820547
  hyper

SEQ ID NO: 362031 - DNA, 240 bp, Homo sapiens; identical to SEQ ID NO: 345654
  chr22:25348202-25348442
  hyper

SEQ ID NO: 362032 - DNA, 787 bp, Homo sapiens; identical to SEQ ID NO: 206075
  chr22:25348485-25349272
  hyper

SEQ ID NO: 362033 - DNA, 395 bp, Homo sapiens; identical to SEQ ID NO: 352589
  chr22:25349348-25349743
  hyper

SEQ ID NO: 362034 - DNA, 60 bp, Homo sapiens; identical to SEQ ID NO: 295278
  chr22:25678186-25678246
  hyper

SEQ ID NO: 362035 - DNA, 1244 bp, Homo sapiens
  chr22:25959837-25961081
  hyper
cgagaccgaagatcaggaagctggaaattccccccagcttcggtgtttgggctgtatctcgcttttccacttccctaaatcaccctcgtggtgcgagtgtgctcgcagcagatgctccctaattgtctcttgtattgaccgtaaaaccctaacgacaggaatactctctctccttctatttctcaacaccatttcaacacccaaactaaaacctctcacctgagtgtaagggagtggtgaccttcttaagcggagagctcttccatcagagggctccctaagggcatctctgttcctagccggggagccgtcaccccactttgttctgcttagcctaagacacgcaactttttccagcttttactcttcgctgaattctcacggtggggttggggggatgttcaggctcaggagcgaggttgggggcccggcccgctgggcgctgttcaccggtagcccggaccagagcaggagtttcatcattacctgctgggataggtgggacacatgtatttccggggccaccccagacctcccggaggatgctgattgacactgtccagtttgagaactactgtgtccagggagcagaggcctccccataaccccttgggttgtggacgtctggcccagggcttctctgggtgagcggggcgggcatcagagcgcgtggaacctggggcgggaggtcggggcagtgaaggaggaggagaaggaggaggcggagaccgagggggagggaggggaggaggaagaggaggaggagtccctcgtggccaccccgaggggagggcgaccgtagagacttggtcgggaggcgccggcccagcgaggccgctgggactgtgcactgaggggcgctgaccgttggacgcgcgctccccgcagaccctcgctgaaggagcagggggcggcgcgcgtgcgcggggcgccgggcggcgcgcgagggggcggagcggggaggcgtgctgcgaccccggccggctacagcctgcggcgcgcgcagagcgctagtggggcgcgcggcgcgcgcgcggggcgggggcgcgcggaggggggggctgccccggggcggcccccccaggtcggggcgcggcgggcggcggcggcgggcgcgcgtcccgtccaggtccggagtaaccgccgccgccgccgccaaagctcgccaacatggcggacctggaggctgtgctggccgatgtcagttacctgatggccatggagaagagcaaggcgaccccggc

SEQ ID NO: 362036 - DNA, 248 bp, Homo sapiens; identical to SEQ ID NO: 57883
  chr22:25961110-25961358
  hyper

SEQ ID NO: 362037 - DNA, 284 bp, Homo sapiens
  chr22:26565999-26566283
  hyper
tttgcagccaaagaggttctccttggagtggggtcgcctccaaaccccaaattcccggcgcttctctgcaaccgcacccggggctaggtgccagataattatcttcctctccgggagaggacaggaaggggggtgagaagctgacccaccctgcaactgaggactagactcaaacagtgcatttgccgctccccccgacaccacagaaacccttgactcctttggttcaggctaccccgagggtctgtgttcctggatcgatctcagccaagcgtcaggatacc

SEQ ID NO: 362038 - DNA, 96 bp, Homo sapiens; identical to SEQ ID NO: 352593
  chr22:27053098-27053194
  hyper

SEQ ID NO: 362039 - DNA, 267 bp, Homo sapiens; identical to SEQ ID NO: 206085
  chr22:27053250-27053517
  hyper

SEQ ID NO: 362040 - DNA, 230 bp, Homo sapiens; identical to SEQ ID NO: 352595
  chr22:27054028-27054258
  hyper

SEQ ID NO: 362041 - DNA, 299 bp, Homo sapiens; identical to SEQ ID NO: 352596
  chr22:27068622-27068921
  hyper

SEQ ID NO: 362042 - DNA, 253 bp, Homo sapiens; identical to SEQ ID NO: 336622
  chr22:28200773-28201026
  hyper

SEQ ID NO: 362043 - DNA, 123 bp, Homo sapiens; identical to SEQ ID NO: 347716
  chr22:28838056-28838179
  hyper

SEQ ID NO: 362044 - DNA, 60 bp, Homo sapiens; identical to SEQ ID NO: 206092
  chr22:28838449-28838509
  hyper

SEQ ID NO: 362045 - DNA, 243 bp, Homo sapiens; identical to SEQ ID NO: 206093
  chr22:28838551-28838794
  hyper

SEQ ID NO: 362046 - DNA, 278 bp, Homo sapiens; identical to SEQ ID NO: 295309
  chr22:28838844-28839122
  hyper

SEQ ID NO: 362047 - DNA, 129 bp, Homo sapiens; identical to SEQ ID NO: 347720
  chr22:28839263-28839392
  hyper

SEQ ID NO: 362048 - DNA, 63 bp, Homo sapiens; identical to SEQ ID NO: 295312
  chr22:29075343-29075406
  hyper

SEQ ID NO: 362049 - DNA, 258 bp, Homo sapiens
  chr22:29426301-29426559
  hyper
cgccgcgacccggccgcggactccagcctctaaagtcgggtacctttaattaggagaaattaagtggggctgctacatattttgagaataagtaacactatttaaacttaggcagccttaaccactaacttaaccgctgaattctcgctgctacatgtctcctaaatagatcagcataatcttaactaggacttaaaatgcatcatcttcgttccggaactcagaacctgcagccgacgggagcctttggaggcttaa

SEQ ID NO: 362050 - DNA, 219 bp, Homo sapiens
  chr22:29426653-29426872
  hyper
ggcagcccgccccgaaagtcccggcccgctggattgggggttcgggggtggggggaacatagagaagcagggctggtggaggggaggagggaccctgcagggcggtacacgacgggtgggagtggggaggaggagggctcctggcgcggggaggagccgcgggaggggggatgttggccgcagggcctcggagttctgagctgtgtttgtggcttcagc

SEQ ID NO: 362051 - DNA, 306 bp, Homo sapiens; identical to SEQ ID NO: 352603
  chr22:29467406-29467712
  hyper

SEQ ID NO: 362052 - DNA, 149 bp, Homo sapiens; identical to SEQ ID NO: 352604
  chr22:29467742-29467891
  hyper

SEQ ID NO: 362053 - DNA, 170 bp, Homo sapiens; identical to SEQ ID NO: 347722
  chr22:29550509-29550679
  hyper

SEQ ID NO: 362054 - DNA, 199 bp, Homo sapiens
  chr22:29876679-29876878
  hyper
cgagctgtacgagcgcgaggtccgcgagatgcgcggcgcggtgctgcgcctgggcgcggcgcgcggtcagctacgcctggagcaggagcacctgctcgaggacatcgcgcacgtgcgccagcgcctagacgacgaggcccggcagcgagaggaggccgaggcggcggcccgcgcgctggcgcgcttcgcgcaggaggcc

SEQ ID NO: 362055 - DNA, 770 bp, Homo sapiens; identical to SEQ ID NO: 336630
  chr22:31090200-31090970
  hyper

SEQ ID NO: 362056 - DNA, 48 bp, Homo sapiens
  chr22:31198444-31198492
  hyper
cgtggaccatccgagggcccctcccctgctgggtccaggcaaagggcc

SEQ ID NO: 362057 - DNA, 395 bp, Homo sapiens
  chr22:31198752-31199147
  hyper
gctccagggggcggagggagcctcctcgggcggtggggaggaggctggaggaatgaggacgcagcacggcgcgcccttgcagcgctcaggctgacgggcgggcgggcggagcgggcgcacggctcctctaggtccggctgctctctgagctcgcgggctggacgctgtccgcggtgctgaagcggcgcccgcggcagggaggcggacccggagccgccgggcagcacacacccaatcccgggaccgccctcctcccaggctcggagaggcggtggcagccggcactgcacccagatggactgagagcgcggcggcgggaaggcggcggcggcggcggcagcagcagcagctgcaagagccctcgcagcctcggggcaggacccacgtccacaccc

SEQ ID NO: 362058 - DNA, 81 bp, Homo sapiens
  chr22:32571858-32571939
  hyper
cgacttggggagggcggacggcaggaaacgcgggaggcgaaggcgaggctgctcagcggcggctcgggatgcctccagcaa

SEQ ID NO: 362059 - DNA, 791 bp, Homo sapiens
  chr22:34316250-34317041
  hyper
cgagccaggggcgccccgcatgggcaggggcctgggtcagcctcgggttgggtccagggagcgaccgccggggccgactccacctcccgcgctccaagccgattcgtcccttcagggcagggcctgcccgcgaacagcccggcgagacgagcgcggccgcgcccccagcttcgggcgcccgggctccggcgcggcggcggggcaggagcagactggccgggccgggcgccgaacgcggcggcgcggggggggctgcaaccggccgcggcgcgctctcccccagggcctgcgccgcccgcccgcggctccgcgggaaagaagcgccggaaaaggcctcgccccggcctggggcgcggggccgggggcgcggggctaggggaggcgccccgggaaggtcacgggagcggaggcgcggcgagtggatcgcggcgcggtgggtgcggggagccgaggcgggcggcccccgccgccgggagcgctcgccggccttggccgccgccgccgcctccgagatgcgccggcttcccggagcgcccggcgctcggagctgggcggccgctgcagccgccgcgggcagccgggcgccgctggccggagccggcgcgcgatccccgcctcccgcgcccggccaggagtgggccgccgcgcgggaaccggcaggggcgggcgctggggtccgggctccgggctggccccgccgcctccgcgtgcccagagcgccggactcgctcagcagctgcagtgactgtgtgtctgtgtcatgtctgtgcagccgggggggaccgcgagcc

SEQ ID NO: 362060 - DNA, 134 bp, Homo sapiens; identical to SEQ ID NO: 295369
  chr22:35420072-35420206
  hyper

SEQ ID NO: 362061 - DNA, 73 bp, Homo sapiens; identical to SEQ ID NO: 352607
  chr22:35420315-35420388
  hyper

SEQ ID NO: 362062 - DNA, 171 bp, Homo sapiens; identical to SEQ ID NO: 352608
  chr22:36847902-36848073
  hyper

SEQ ID NO: 362063 - DNA, 35 bp, Homo sapiens
  chr22:37731278-37731313
  hyper
tcggctcccctctcccgccagactcctgtctctgc

SEQ ID NO: 362064 - DNA, 123 bp, Homo sapiens
  chr22:38966046-38966169
  hyper
cccccctcgtacccacagtctccccgagattttcaaggtgaagcccctctgccccgcccgacctcctcagctgacaggattctaactcgggcctagaacacggagcctggagacccgcgcgcc

SEQ ID NO: 362065 - DNA, 320 bp, Homo sapiens; identical to SEQ ID NO: 352609
  chr22:39549067-39549387
  hyper

SEQ ID NO: 362066 - DNA, 137 bp, Homo sapiens; identical to SEQ ID NO: 352610
  chr22:39549472-39549609
  hyper

SEQ ID NO: 362067 - DNA, 148 bp, Homo sapiens; identical to SEQ ID NO: 345657
  chr22:39852943-39853091
  hyper

SEQ ID NO: 362068 - DNA, 225 bp, Homo sapiens; identical to SEQ ID NO: 295455
  chr22:39853157-39853382
  hyper

SEQ ID NO: 362069 - DNA, 31 bp, Homo sapiens; identical to SEQ ID NO: 295456
  chr22:39853626-39853657
  hyper

SEQ ID NO: 362070 - DNA, 209 bp, Homo sapiens; identical to SEQ ID NO: 295457
  chr22:39853690-39853899
  hyper

SEQ ID NO: 362071 - DNA, 130 bp, Homo sapiens; identical to SEQ ID NO: 345661
  chr22:39853934-39854064
  hyper

SEQ ID NO: 362072 - DNA, 127 bp, Homo sapiens
  chr22:39954151-39954278
  hyper
tcactggggcatttatttatttatttctggggatcgatcctccccacccgcgcgtacccgtcaggtgagccccccatcccgcgccttcggggccatgccttgggaggaaggacaggaaactttgacc

SEQ ID NO: 362073 - DNA, 332 bp, Homo sapiens; identical to SEQ ID NO: 336651
  chr22:41418641-41418973
  hyper

SEQ ID NO: 362074 - DNA, 53 bp, Homo sapiens; identical to SEQ ID NO: 352617
  chr22:42896458-42896511
  hyper

SEQ ID NO: 362075 - DNA, 209 bp, Homo sapiens; identical to SEQ ID NO: 352618
  chr22:43115852-43116061
  hyper

SEQ ID NO: 362076 - DNA, 107 bp, Homo sapiens; identical to SEQ ID NO: 352619
  chr22:43116269-43116376
  hyper

SEQ ID NO: 362077 - DNA, 470 bp, Homo sapiens; identical to SEQ ID NO: 352620
  chr22:43659642-43660112
  hyper

SEQ ID NO: 362078 - DNA, 401 bp, Homo sapiens
  chr22:44208017-44208418
  hyper
cgcgcgtggccaccccgaatacagccttaccgggaacccctcctcgattctccgcctagctgggccggcacccgcgtgcgcggaccccaagccgcggggtctcagaggggctgcccattcggcgtctctaggacgctgttgcccgagagacgacggcagtcgctgactggagaatgagcctacgcgcctggcaagaagctgagctgtgattggtcaattggagataaacgaggagggggcggggccaggtcagtcccgcgcctccgctcccggaagaaatttccgccggaagtcccgttctctggggagcgggaaccctggcgacccgtgtcatgggagcgggtttctgttacgtgggctttagcgcgagctgggcggtcggcccggtcccaccgaactgc

SEQ ID NO: 362079 - DNA, 71 bp, Homo sapiens; identical to SEQ ID NO: 295516
  chr22:44208448-44208519
  hyper

SEQ ID NO: 362080 - DNA, 202 bp, Homo sapiens; identical to SEQ ID NO: 295517
  chr22:44258078-44258280
  hyper

SEQ ID NO: 362081 - DNA, 41 bp, Homo sapiens; identical to SEQ ID NO: 352622
  chr22:44258533-44258574
  hyper

SEQ ID NO: 362082 - DNA, 559 bp, Homo sapiens; identical to SEQ ID NO: 295522
  chr22:44419919-44420478
  hyper

SEQ ID NO: 362083 - DNA, 109 bp, Homo sapiens; identical to SEQ ID NO: 352624
  chr22:44420680-44420789
  hyper

SEQ ID NO: 362084 - DNA, 303 bp, Homo sapiens; identical to SEQ ID NO: 295524
  chr22:44727058-44727361
  hyper

SEQ ID NO: 362085 - DNA, 649 bp, Homo sapiens; identical to SEQ ID NO: 352625
  chr22:44893737-44894386
  hyper

SEQ ID NO: 362086 - DNA, 34 bp, Homo sapiens; identical to SEQ ID NO: 295527
  chr22:45064203-45064237
  hyper

SEQ ID NO: 362087 - DNA, 389 bp, Homo sapiens; identical to SEQ ID NO: 295528
  chr22:45064286-45064675
  hyper

SEQ ID NO: 362088 - DNA, 147 bp, Homo sapiens; identical to SEQ ID NO: 352628
  chr22:45064918-45065065
  hyper

SEQ ID NO: 362089 - DNA, 553 bp, Homo sapiens; identical to SEQ ID NO: 345662
  chr22:45097777-45098330
  hyper

SEQ ID NO: 362090 - DNA, 470 bp, Homo sapiens; identical to SEQ ID NO: 206166
  chr22:45098381-45098851
  hyper

SEQ ID NO: 362091 - DNA, 97 bp, Homo sapiens; identical to SEQ ID NO: 345664
  chr22:45098900-45098997
  hyper

SEQ ID NO: 362092 - DNA, 444 bp, Homo sapiens; identical to SEQ ID NO: 352632
  chr22:45148213-45148657
  hyper

SEQ ID NO: 362093 - DNA, 155 bp, Homo sapiens; identical to SEQ ID NO: 352633
  chr22:45148870-45149025
  hyper

SEQ ID NO: 362094 - DNA, 289 bp, Homo sapiens; identical to SEQ ID NO: 295536
  chr22:45403189-45403478
  hyper

SEQ ID NO: 362095 - DNA, 197 bp, Homo sapiens; identical to SEQ ID NO: 206171
  chr22:45403714-45403911
  hyper

SEQ ID NO: 362096 - DNA, 176 bp, Homo sapiens; identical to SEQ ID NO: 295538
  chr22:45405768-45405944
  hyper

SEQ ID NO: 362097 - DNA, 178 bp, Homo sapiens
  chr22:45406385-45406563
  hyper
gcaagaaaattgatctcttggctcttcctttaatgatttttttttacacgattaaactctcaacagatgtcactggacattttaagactcttgttaagagtcgtaaacaggcccggtcaatgcgacctaaaacaattataattacagctgcggaggtcgcgtttcagaacccccagcc

SEQ ID NO: 362098 - DNA, 236 bp, Homo sapiens; identical to SEQ ID NO: 206176
  chr22:46367124-46367360
  hyper

SEQ ID NO: 362099 - DNA, 120 bp, Homo sapiens; identical to SEQ ID NO: 295551
  chr22:46367867-46367987
  hyper

SEQ ID NO: 362100 - DNA, 1268 bp, Homo sapiens; identical to SEQ ID NO: 336672
  chr22:46933492-46934760
  hyper

SEQ ID NO: 362101 - DNA, 221 bp, Homo sapiens; identical to SEQ ID NO: 345667
  chr22:47199299-47199520
  hyper

SEQ ID NO: 362102 - DNA, 58 bp, Homo sapiens; identical to SEQ ID NO: 352639
  chr22:50170525-50170583
  hyper

SEQ ID NO: 362103 - DNA, 217 bp, Homo sapiens; identical to SEQ ID NO: 352640
  chr22:50453240-50453457
  hyper

SEQ ID NO: 362104 - DNA, 98 bp, Homo sapiens; identical to SEQ ID NO: 352641
  chr22:50453539-50453637
  hyper

SEQ ID NO: 362105 - DNA, 275 bp, Homo sapiens; identical to SEQ ID NO: 336680
  chr22:50690042-50690317
  hyper

SEQ ID NO: 362106 - DNA, 166 bp, Homo sapiens; identical to SEQ ID NO: 347735
  chr22:50982557-50982723
  hyper

SEQ ID NO: 362107 - DNA, 622 bp, Homo sapiens; identical to SEQ ID NO: 336684
  chrX:2815904-2816526
  hyper

SEQ ID NO: 362108 - DNA, 128 bp, Homo sapiens
  chrX:2846679-2846807
  hyper
cggggaacacggccgtgctggaaggcatcgagctggggggttgggggcgggacggggtgcctcttaggaagtggggcgggcaaggctacgcttcgggggatggagccttggggcgggacggggcgcgt

SEQ ID NO: 362109 - DNA, 219 bp, Homo sapiens; identical to SEQ ID NO: 295607
  chrX:2846856-2847075
  hyper

SEQ ID NO: 362110 - DNA, 314 bp, Homo sapiens
  chrX:2847196-2847510
  hyper
tcgccgtgctcgcgaccccctccccaggcccccaccctaggccttagtatgggccgcgtcccggggtcccaggcacctggcggcgggcgcggcgcgtcccctccgcgcggcggatcgcatggccgagcgctggcccagagcgcaggaccttgccctgcgcactccgcgcccgggcgccgctagtgccaaggcttccgccctctcagctgcgggatctgggccgggcgcccgcccctccttcatccgcgtcatctcctggctctcgggacctccgggacctgcgcgtggaaacaggttttcccaggtcgtcacac

SEQ ID NO: 362111 - DNA, 213 bp, Homo sapiens; identical to SEQ ID NO: 206203
  chrX:8699223-8699436
  hyper

SEQ ID NO: 362112 - DNA, 98 bp, Homo sapiens; identical to SEQ ID NO: 206204
  chrX:8699940-8700038
  hyper

SEQ ID NO: 362113 - DNA, 596 bp, Homo sapiens; identical to SEQ ID NO: 352644
  chrX:9432830-9433426
  hyper

SEQ ID NO: 362114 - DNA, 241 bp, Homo sapiens; identical to SEQ ID NO: 206206
  chrX:9433471-9433712
  hyper

SEQ ID NO: 362115 - DNA, 583 bp, Homo sapiens; identical to SEQ ID NO: 206207
  chrX:9433838-9434421
  hyper

SEQ ID NO: 362116 - DNA, 146 bp, Homo sapiens
  chrX:9753679-9753825
  hyper
cggacccgcgcccggctcaggctgctggggggcgcccttcccggctctctaagtccagagtgtgagtgcgcgcagggccgcgcgggacgggcggtccctctgccccggggcagcggccacagcgcgggcaccagggcctcccgcgg

SEQ ID NO: 362117 - DNA, 300 bp, Homo sapiens
  chrX:9753862-9754162
  hyper
cgagaacaaagtgtgggcgccggcgggccgcgcgccccgagacggaggaggccggagactcccgccacgccaccccgcgcccatctcacctgccgcctcacctgcccggtcctggcctccaaccggcgggcgggggcgcccagagcttcgaagcactgcagagctctggcgcgggaggaaaggcccgacctggcgccggggcctccgcccccgtcctcgcccgcgctggctccgccagccccggggcgcgcgctcctcgaccccgaccccgaacccgctgaacggcgcgcgcgcctgagc

SEQ ID NO: 362118 - DNA, 304 bp, Homo sapiens; identical to SEQ ID NO: 352647
  chrX:13706949-13707253
  hyper

SEQ ID NO: 362119 - DNA, 562 bp, Homo sapiens; identical to SEQ ID NO: 347739
  chrX:13707434-13707996
  hyper

SEQ ID NO: 362120 - DNA, 958 bp, Homo sapiens; identical to SEQ ID NO: 336691
  chrX:13752377-13753335
  hyper

SEQ ID NO: 362121 - DNA, 97 bp, Homo sapiens; identical to SEQ ID NO: 352650
  chrX:14048211-14048308
  hyper

SEQ ID NO: 362122 - DNA, 131 bp, Homo sapiens; identical to SEQ ID NO: 347740
  chrX:15511311-15511442
  hyper

SEQ ID NO: 362123 - DNA, 140 bp, Homo sapiens; identical to SEQ ID NO: 347741
  chrX:15511544-15511684
  hyper

SEQ ID NO: 362124 - DNA, 116 bp, Homo sapiens; identical to SEQ ID NO: 352653
  chrX:15755988-15756104
  hyper

SEQ ID NO: 362125 - DNA, 300 bp, Homo sapiens; identical to SEQ ID NO: 352654
  chrX:15756366-15756666
  hyper

SEQ ID NO: 362126 - DNA, 224 bp, Homo sapiens; identical to SEQ ID NO: 206224
  chrX:16730628-16730852
  hyper

SEQ ID NO: 362127 - DNA, 35 bp, Homo sapiens; identical to SEQ ID NO: 345669
  chrX:16730902-16730937
  hyper

SEQ ID NO: 362128 - DNA, 327 bp, Homo sapiens; identical to SEQ ID NO: 206226
  chrX:16888225-16888552
  hyper

SEQ ID NO: 362129 - DNA, 187 bp, Homo sapiens; identical to SEQ ID NO: 336699
  chrX:23801086-23801273
  hyper

SEQ ID NO: 362130 - DNA, 362 bp, Homo sapiens
  chrX:39680202-39680564
  hyper
cgcacggcttggagcgggcgtataaattaaccgggggccgcagagtgaatacattgcacgcggtatttattatgcggccggacctccgaggggttctccggctcccggacgtggcaaatcttgtccggagcgccgctggccgcgctgccaagggctaggacgagaggacccgtggcggggggcggggggcttctcctccagtcctcgggagccccggggcagcccgcttacagcggcggcagcggggagggtttaggcgaggagagacgcggccccgggcgccgctcgggctaggggccgggcggggagggcggggcggtgggagcgggcggcgcgcccggccccttagcattccgccggcg

SEQ ID NO: 362131 - DNA, 172 bp, Homo sapiens
  chrX:39680630-39680802
  hyper
cgcttttgtgctcgccgggcggtgggtgcggggaggcagttctaatagttgtcattagggccgggggaggcggggcgccgggggctgagggtgggagcgcgggggtgggggaggcccgccattccctcgctggctcgcttgttcgctggcggtcccaggcggcgcgcaggcc

SEQ ID NO: 362132 - DNA, 99 bp, Homo sapiens
  chrX:39871661-39871760
  hyper
cgcggccaggaatccctctgcccgcagctgccgcggaggggttgagggttaaacagacaccgggcagaggagcgagcctgccggctgcggccggcgcgg

SEQ ID NO: 362133 - DNA, 187 bp, Homo sapiens
  chrX:39871778-39871965
  hyper
cgggagggaagagggcgcacgctacctagcctcccgacgagaagacgtctcctccccacgtcaggccgggctctcgcccactcggctggccgcctctgctccctggcctctcaagtctcagcggaaagaaacgtagcggctgccaaaagcaccccactccttttattgtccccataagcctatacac

SEQ ID NO: 362134 - DNA, 507 bp, Homo sapiens; identical to SEQ ID NO: 336702
  chrX:39873113-39873620
  hyper

SEQ ID NO: 362135 - DNA, 793 bp, Homo sapiens; identical to SEQ ID NO: 336703
  chrX:39873680-39874473
  hyper

SEQ ID NO: 362136 - DNA, 223 bp, Homo sapiens; identical to SEQ ID NO: 336704
  chrX:39921413-39921636
  hyper

SEQ ID NO: 362137 - DNA, 301 bp, Homo sapiens; identical to SEQ ID NO: 336705
  chrX:39922006-39922307
  hyper

SEQ ID NO: 362138 - DNA, 863 bp, Homo sapiens; identical to SEQ ID NO: 336706
  chrX:39931611-39932474
  hyper

SEQ ID NO: 362139 - DNA, 892 bp, Homo sapiens; identical to SEQ ID NO: 336707
  chrX:39933533-39934425
  hyper

SEQ ID NO: 362140 - DNA, 928 bp, Homo sapiens; identical to SEQ ID NO: 352660
  chrX:39953710-39954638
  hyper

SEQ ID NO: 362141 - DNA, 1938 bp, Homo sapiens; identical to SEQ ID NO: 352661
  chrX:39954918-39956856
  hyper

SEQ ID NO: 362142 - DNA, 878 bp, Homo sapiens; identical to SEQ ID NO: 295679
  chrX:39957026-39957904
  hyper

SEQ ID NO: 362143 - DNA, 514 bp, Homo sapiens
  chrX:39958064-39958578
  hyper
cgcccgagttccccggacgtttcaattgtgtgggaattgtttggaggtgggggaaggggggagcagcccgtggaggcaccgggaggcgtgtggggggcggtcggcgagcggagatccgcctgtatttctcccggttctcgagcattttcacggtctgtacctctgatggttggaggggctgcccaggcccctcgccccggcgttgggagattatctcccgcgttttattttccttgacagggagcaacttttggcttacaccgttcgccccataaatttccactcggtaacgtcgtgctgatcggtgcttggcggcggcgtacagcctgcgcccgcagcagttcaattcaattgacacgtattgagcttctccagcgcacccggcgcggctctgggcgcggggggagggcgggggcaggcgggagggagggggaagcggagaagcgaggttccggcctccccggagcgcaaagcctcaagggcgagccgagaagccctagttggtgaagctggc

SEQ ID NO: 362144 - DNA, 633 bp, Homo sapiens; identical to SEQ ID NO: 347744
  chrX:39963967-39964600
  hyper

SEQ ID NO: 362145 - DNA, 285 bp, Homo sapiens; identical to SEQ ID NO: 347745
  chrX:39964630-39964915
  hyper

SEQ ID NO: 362146 - DNA, 1317 bp, Homo sapiens; identical to SEQ ID NO: 347746
  chrX:39965255-39966572
  hyper

SEQ ID NO: 362147 - DNA, 621 bp, Homo sapiens; identical to SEQ ID NO: 345670
  chrX:39968299-39968920
  hyper

SEQ ID NO: 362148 - DNA, 247 bp, Homo sapiens; identical to SEQ ID NO: 345671
  chrX:39968950-39969197
  hyper

SEQ ID NO: 362149 - DNA, 95 bp, Homo sapiens; identical to SEQ ID NO: 206251
  chrX:40005424-40005519
  hyper

SEQ ID NO: 362150 - DNA, 230 bp, Homo sapiens
  chrX:40005842-40006072
  hyper
gcgatcagcagctctgcacgcgcttcagtgcatgaatggattgcggaagatgcctgcgtccgctccgctcaggaggctctaggagcgccccctccccgcccgccgcgcccgcccccgtggcctccctaggccctgcgggcgcctcggggttcgcaagctgggccctgcggcgcgatcactctcacccagaacccccgccgccgttcccagggccttggcacctcgccacc

SEQ ID NO: 362151 - DNA, 2388 bp, Homo sapiens
  chrX:40012149-40014537
  hyper
cgagagggcgggaggagacagggagacttccgcgggaggccgatggtcaaagtggggggtgaaaccgctcagggtgaccgggctggagacccaggaacccgattcggcgcgaaggtgccgcgcgagttccagcgagcagcctgcccggccaagtggcgcctgcccagccgtcggccgtgccagcttcctgccctgcccaggaccgcggagcagtcggggacgccgccgcaggctggcccggaatcgcaggacagcggcggggggagggggtagccaggccgcaagtaaactcgcactagagctttctgcacacctccgccctagagagggggcccggacccccggtctgtgaggcgtcggctttggccttccaaccttggggtgcgcgaggaagcaaagacccagggggcacccccaccctcgcccaaggcccgagggtgggggacagctgaaatgtctttggtcttgtttgatgaccgcttggcggatctgctcccatccgggttctgccgttccgagagtgccgggtcagtgatacccaggccggtctgagcaggcatgtggatgagcaaaagcaaatctgtcgctcctccgaccgccacccctcacttaacctttcctgcatccaaggaaggggagggcacccagactctgccccaccccccgcggggcgctccctctgcctcggaagctgagactaagagcgagggttttccccctttcccctgggctcgctgggtttctaacttcctctaaacctccctcctcgctccgaaaagccccgaggagaggagctgagaggaagcacgccgctagtgtgcaaaatgaagaccatgtgtgaggacggcggcatcagagtgcagccgcgggggttagggggtggcaaaggcccccgcgcggccggaggctcggggccgcagcagccagtgcctctgctctgcgttggggactcggagccgcagcgagaggcagtggagaggcagggctggcctcgtggcgggaggcgaggagggggtgcgagggctgccgcgccgtggggggcagggggcggggacgcagccccggcttcctgggccgcagctgcgaccgagggcgcaagagcagatcgtgctctgcggcggtggcggctcgggcccgccgctctagcagctgagaatcaacaaagggaggcggcgggggaggggcgccaccgagcgttcgctggctgctctggaataataaaaaataattaataatgataataagagaaaaatcccccggctttcatggctctgggtttccgtgtggctgcagcgggaagcgcgctgtccttgaggcggcctctctcgcctggcctgcccgcccctccccctcctcgccccctcccctccccaggaaccgggaagagaaaggtctgcagctgacaaatattatccattctccccatcgatcgcggagtgtacagatgtgagcgcttgatgtgcccgcggagcggcggatcctccctgctcgctcgctctcgcccaggctccgctcgccgtccccctcctccccctttgttctcctcccctttccctctctttaaatagatttcagggcgctgcctgttggagagcagctggcgatctctcccgagagagggagcgagcgaagcccgaggtgccctgtcaccagcctcccctcccccacctcggcttttctctacgtcccccccaccccacctttctccagtttccaaaatagaaaacaccgggaacacccacgtccactgcaccgcgagcccctgggagcctttggacccctcgtgctgttccttgtgtctgtgtctgtgcagaggaagggcagtgcagggaggggacccagggccgcggcagaagagccaagggtccggatctttccctggcagcagcagggacgcagcgtgggtcacgctaacagggtacagtttacccattagggaaagtcggcggagacggccctgttattcctcttttgcagatggcagattaatccggcagcacccggcctcaaagggaccggctgctcggcaaagggttaacccgtcggccggtaatcgtggacacgcgcgcacacacacacacgcacgcgcgcgcgcgtcctctccgcctgcccgagcgcccgccgcggcccgcagtgcgcccggggctgggggagtagctgcgggaggggagggggtcgggggaggggcggggcgggcttaaccaggccgctcgactgagccggggccacctcgccgtctgtcacttaaatgattgtcctccgctccgctcagtgcggtcagtacgggctgttaacaggcagttgcaatcagtttccgaaaggtcagccaaggtcctccggctctcgcagacggaaggcattacgaaaccgcttttgtatctgcaggca

SEQ ID NO: 362152 - DNA, 621 bp, Homo sapiens; identical to SEQ ID NO: 352672
  chrX:40014669-40015290
  hyper

SEQ ID NO: 362153 - DNA, 144 bp, Homo sapiens; identical to SEQ ID NO: 352673
  chrX:40017447-40017591
  hyper

SEQ ID NO: 362154 - DNA, 32 bp, Homo sapiens; identical to SEQ ID NO: 352674
  chrX:40017968-40018000
  hyper

SEQ ID NO: 362155 - DNA, 226 bp, Homo sapiens; identical to SEQ ID NO: 352675
  chrX:40030835-40031061
  hyper

SEQ ID NO: 362156 - DNA, 215 bp, Homo sapiens; identical to SEQ ID NO: 206256
  chrX:40031175-40031390
  hyper

SEQ ID NO: 362157 - DNA, 662 bp, Homo sapiens; identical to SEQ ID NO: 352677
  chrX:40031434-40032096
  hyper

SEQ ID NO: 362158 - DNA, 281 bp, Homo sapiens; identical to SEQ ID NO: 336717
  chrX:40033593-40033874
  hyper

SEQ ID NO: 362159 - DNA, 186 bp, Homo sapiens; identical to SEQ ID NO: 352678
  chrX:40034239-40034425
  hyper

SEQ ID NO: 362160 - DNA, 667 bp, Homo sapiens; identical to SEQ ID NO: 295697
  chrX:40035057-40035724
  hyper

SEQ ID NO: 362161 - DNA, 721 bp, Homo sapiens; identical to SEQ ID NO: 347751
  chrX:40035852-40036573
  hyper

SEQ ID NO: 362162 - DNA, 60 bp, Homo sapiens
  chrX:40126403-40126463
  hyper
cgggacgcgcagccgcccggcgcagaggaagcccgggacgctggggacaccgcctggagc

SEQ ID NO: 362163 - DNA, 205 bp, Homo sapiens; identical to SEQ ID NO: 336720
  chrX:40506434-40506639
  hyper

SEQ ID NO: 362164 - DNA, 203 bp, Homo sapiens; identical to SEQ ID NO: 336721
  chrX:40595088-40595291
  hyper

SEQ ID NO: 362165 - DNA, 264 bp, Homo sapiens; identical to SEQ ID NO: 336722
  chrX:41112874-41113138
  hyper

SEQ ID NO: 362166 - DNA, 75 bp, Homo sapiens; identical to SEQ ID NO: 352683
  chrX:68758240-68758315
  hyper

SEQ ID NO: 362167 - DNA, 562 bp, Homo sapiens
  chrX:71525281-71525843
  hyper
cgttgtttgcggacagctcggctgccctcctcgccgcatcccagatggagccgcggaaccgggggcggccgggagcatcccttgcacggcgggcgcgtgcacccaggccaccggggccctgagcgtccgttcccgcaagtgctgtatcaggaactgatcttagagacaggatggacaggcaggaaggggcacggggtgtcggcctccgcggcgagtccgcactccggcgccggctgctgccactctcgcgcctgatcaacacttactgagcgcccgctgagcatccgacgcggcagcaggctgagcctaccccctagccaagccgcctgcggtcagtgctaaaaccccgctaggagaagagtgagagaggctcggagaggtgcggtaacttgcccaaggtcacagcgctagaaagtggcggagccgggattcgcagccaggtctctctgactccaagtccggtgctctgcgaagcagggactcggcgcgcggctcgccagcccgcgtttatagggagaggggtgtgcgcgtgggtgtgtgtgtgtgggcgtgtgtcggggga

SEQ ID NO: 362168 - DNA, 885 bp, Homo sapiens; identical to SEQ ID NO: 295715
  chrX:71525998-71526883
  hyper

SEQ ID NO: 362169 - DNA, 249 bp, Homo sapiens
  chrX:71526917-71527166
  hyper
cctcaccgagaactgcccctcgccggcggactacaagagggcagccgggcagagcgagcttcctctcggcagctcagcggtgccccttctgcagctttgccgccgggcacatttttatagcagcggctggcgtctgtggccctttaaaggcgctcgagctggtgcagtcaccgcggatcgtgtgaaagcaaagggccggctggggaacggagtccacgcggccacgcgagtccggcagccctgtggacc

SEQ ID NO: 362170 - DNA, 244 bp, Homo sapiens; identical to SEQ ID NO: 352686
  chrX:95940048-95940292
  hyper

SEQ ID NO: 362171 - DNA, 393 bp, Homo sapiens; identical to SEQ ID NO: 336727
  chrX:102862914-102863307
  hyper

SEQ ID NO: 362172 - DNA, 83 bp, Homo sapiens; identical to SEQ ID NO: 352688
  chrX:110924337-110924420
  hyper

SEQ ID NO: 362173 - DNA, 157 bp, Homo sapiens; identical to SEQ ID NO: 352689
  chrX:110924466-110924623
  hyper

SEQ ID NO: 362174 - DNA, 84 bp, Homo sapiens
  chrX:123094093-123094177
  hyper
cgcggctcgatcgggtccgcggcggaagcgcggccaaacgaatgagtaagtcaggcgcgggcacggcaccttgtttaccccact

SEQ ID NO: 362175 - DNA, 87 bp, Homo sapiens
  chrX:123094335-123094422
  hyper
cgctccctcccaacgggagccgggcgcgggttcgtggccgacagatggcgcctgcgcgttccattcgcctccaagtcgccgaagagc

SEQ ID NO: 362176 - DNA, 198 bp, Homo sapiens; identical to SEQ ID NO: 336730
  chrX:123094505-123094703
  hyper

SEQ ID NO: 362177 - DNA, 856 bp, Homo sapiens; identical to SEQ ID NO: 336731
  chrX:129146935-129147791
  hyper

SEQ ID NO: 362178 - DNA, 89 bp, Homo sapiens; identical to SEQ ID NO: 345674
  chrY:2655227-2655316
  hyper

SEQ ID NO: 362179 - DNA, 596 bp, Homo sapiens; identical to SEQ ID NO: 345675
  chrY:2655346-2655942
  hyper

SEQ ID NO: 362180 - DNA, 51 bp, Homo sapiens; identical to SEQ ID NO: 347756
  chrY:4869596-4869647
  hyper

SEQ ID NO: 362181 - DNA, 49 bp, Homo sapiens; identical to SEQ ID NO: 347757
  chrY:4869714-4869763
  hyper

SEQ ID NO: 362182 - DNA, 246 bp, Homo sapiens; identical to SEQ ID NO: 345676
  chrY:7140850-7141096
  hyper

SEQ ID NO: 362183 - DNA, 237 bp, Homo sapiens; identical to SEQ ID NO: 336737
  chrY:14532909-14533146
  hyper

SEQ ID NO: 362184 - DNA, 240 bp, Homo sapiens; identical to SEQ ID NO: 347759
  chrY:14533316-14533556
  hyper

SEQ ID NO: 362185 - DNA, 41 bp, Homo sapiens; identical to SEQ ID NO: 347760
  chrY:14533613-14533654
  hyper

SEQ ID NO: 362186 - DNA, 218 bp, Homo sapiens; identical to SEQ ID NO: 352699
  chrY:15863192-15863410
  hyper

SEQ ID NO: 362187 - DNA, 461 bp, Homo sapiens; identical to SEQ ID NO: 345677
  chrY:15863654-15864115
  hyper

SEQ ID NO: 362188 - DNA, 73 bp, Homo sapiens; identical to SEQ ID NO: 295805
  chrY:16635744-16635817
  hyper

SEQ ID NO: 362189 - DNA, 1082 bp, Homo sapiens; identical to SEQ ID NO: 345679
  chrY:16636060-16637142
  hyper

SEQ ID NO: 362190 - DNA, 584 bp, Homo sapiens; identical to SEQ ID NO: 336742
  AC211344.3_7702-13588:3943-4527
  hyper

SEQ ID NO: 362191 - DNA, 59 bp, Homo sapiens
  AC241851.2_88-34049:15074-15133
  hyper
cggcgccgcggctttttgcggctttttgccgccgcgggtttttcctgccgcggcttctt

SEQ ID NO: 362192 - DNA, 43 bp, Homo sapiens
  AC241851.2_88-34049:15553-15596
  hyper
gctttttgcccccgccaccgcggcttcttacccccgccaccgc

SEQ ID NO: 362193 - DNA, 89 bp, Homo sapiens
  AC241851.2_88-34049:15853-15942
  hyper
cgctggcgccccgggctctgctcctgggccgctgcagcctgcatagagcagcgctgcgctcggccgcgttgggagagaagaaggagggc

SEQ ID NO: 362194 - DNA, 111 bp, Homo sapiens; identical to SEQ ID NO: 336746
  JH636052.4:789300-789411
  hyper

SEQ ID NO: 362195 - DNA, 523 bp, Homo sapiens; identical to SEQ ID NO: 336748
  chr1:896874-897397
  hypo

SEQ ID NO: 362196 - DNA, 409 bp, Homo sapiens; identical to SEQ ID NO: 352705
  chr1:898245-898654
  hypo

SEQ ID NO: 362197 - DNA, 38 bp, Homo sapiens; identical to SEQ ID NO: 206360
  chr1:898690-898728
  hypo

SEQ ID NO: 362198 - DNA, 88 bp, Homo sapiens; identical to SEQ ID NO: 352707
  chr1:898776-898864
  hypo

SEQ ID NO: 362199 - DNA, 514 bp, Homo sapiens; identical to SEQ ID NO: 352708
  chr1:1047017-1047531
  hypo

SEQ ID NO: 362200 - DNA, 584 bp, Homo sapiens; identical to SEQ ID NO: 352709
  chr1:1047619-1048203
  hypo

SEQ ID NO: 362201 - DNA, 489 bp, Homo sapiens; identical to SEQ ID NO: 336756
  chr1:1096415-1096904
  hypo

SEQ ID NO: 362202 - DNA, 360 bp, Homo sapiens; identical to SEQ ID NO: 336758
  chr1:1152902-1153262
  hypo

SEQ ID NO: 362203 - DNA, 559 bp, Homo sapiens
  chr1:1160631-1161190
  hypo
cgaggtcttgagaccccggctggtgcgtttgccggaggcatccccgagagtagggtgccctggccccttgcctctatgctccgctcaggggcagccgcggccacgttatgaggtggcaagcaggccctcgtcaggcaggtgtggcctctgggacctgggccaggcaagcttcgagggtgcacacaccgcaggcacggctcagaagcactgggcagagatcctcatggaagaaggccaggctgccgctcacacgcgcccctccctcagcagccgcagcagcccagaggtggacgggcctgggaggcaccctcagctccacagtccccaaaacacaccggctggggacggggccacccgggtggccatgtggcaggtggggcacctggtgggtctcacgtggacacgtgcatcctcgaatgctccggtcacgctccacacgcgccacagacacaggccacacgctccacacgccacagacacgggccacacactccacatgccacagacacgggccacacactccacacgctctacacactccacagacacagacacacac

SEQ ID NO: 362204 - DNA, 75 bp, Homo sapiens; identical to SEQ ID NO: 345681
  chr1:1168275-1168350
  hypo

SEQ ID NO: 362205 - DNA, 462 bp, Homo sapiens; identical to SEQ ID NO: 345682
  chr1:1168984-1169446
  hypo

SEQ ID NO: 362206 - DNA, 367 bp, Homo sapiens; identical to SEQ ID NO: 336762
  chr1:1194390-1194757
  hypo

SEQ ID NO: 362207 - DNA, 189 bp, Homo sapiens; identical to SEQ ID NO: 336763
  chr1:1200473-1200662
  hypo

SEQ ID NO: 362208 - DNA, 32 bp, Homo sapiens; identical to SEQ ID NO: 336764
  chr1:1206802-1206834
  hypo

SEQ ID NO: 362209 - DNA, 394 bp, Homo sapiens
  chr1:1234784-1235178
  hypo
cggctgccaactcctggtgactggtggacccgtccccaactcctggtgactggtggacccgtccccaactcctggggggctctcccctatcccaaaatagccactcctgcctgcagccaacctctgcccgggatggtggccggggctgctgtcccacaggcaagcaaaggccccgcaaggagccagtgactgaggccacagaggtgaccaccgcctcaaaaggagatcccagcagcggccccacccacacgtgcccctccactgcacacatcaaagggagcagccttggtcccctagagagggtgtgggcagggcaggtgggagacaggcaggaggaaggggcggggagggtgtgccgggcatggggtgaggacgcaggggcctcccaggcgcc

SEQ ID NO: 362210 - DNA, 269 bp, Homo sapiens; identical to SEQ ID NO: 336767
  chr1:1246145-1246414
  hypo

SEQ ID NO: 362211 - DNA, 607 bp, Homo sapiens; identical to SEQ ID NO: 336768
  chr1:1247740-1248347
  hypo

SEQ ID NO: 362212 - DNA, 115 bp, Homo sapiens
  chr1:1253130-1253245
  hypo
cgttgtttgcaaagtgcagagacaaaatactgtcaacctaaaatcttacacacctaagggaaaaaaagtcctttaagaacgaggataaagtaaatccatttgcaggcaaataaat

SEQ ID NO: 362213 - DNA, 126 bp, Homo sapiens
  chr1:1271745-1271871
  hypo
cggccggacgctctcgccagctgctccccaccccactcggtgccgtgtgatccgattcactgccactgcccccagctcccgccgcccgacgctccttctcacggcccggggcccggcggctgctcc

SEQ ID NO: 362214 - DNA, 369 bp, Homo sapiens; identical to SEQ ID NO: 336771
  chr1:1354536-1354905
  hypo

SEQ ID NO: 362215 - DNA, 137 bp, Homo sapiens; identical to SEQ ID NO: 336773
  chr1:1492373-1492510
  hypo

SEQ ID NO: 362216 - DNA, 109 bp, Homo sapiens; identical to SEQ ID NO: 352716
  chr1:1502406-1502515
  hypo

SEQ ID NO: 362217 - DNA, 130 bp, Homo sapiens; identical to SEQ ID NO: 352717
  chr1:1502555-1502685
  hypo

SEQ ID NO: 362218 - DNA, 575 bp, Homo sapiens; identical to SEQ ID NO: 345683
  chr1:1562211-1562786
  hypo

SEQ ID NO: 362219 - DNA, 431 bp, Homo sapiens; identical to SEQ ID NO: 344930
  chr1:1713574-1714005
  hypo

SEQ ID NO: 362220 - DNA, 232 bp, Homo sapiens; identical to SEQ ID NO: 344931
  chr1:1714067-1714299
  hypo

SEQ ID NO: 362221 - DNA, 80 bp, Homo sapiens; identical to SEQ ID NO: 336777
  chr1:1717283-1717363
  hypo

SEQ ID NO: 362222 - DNA, 139 bp, Homo sapiens; identical to SEQ ID NO: 352722
  chr1:1910184-1910323
  hypo

SEQ ID NO: 362223 - DNA, 48 bp, Homo sapiens; identical to SEQ ID NO: 295971
  chr1:1910367-1910415
  hypo

SEQ ID NO: 362224 - DNA, 71 bp, Homo sapiens
  chr1:1974777-1974848
  hypo
cgcagcgcaggagtggcagggcccgtctgcagtgcaggagtggcagggcgtgtccgcggtgctgaccggtt

SEQ ID NO: 362225 - DNA, 162 bp, Homo sapiens
  chr1:1974925-1975087
  hypo
gaaggggacgcgcggcgtgttccccagtggtctggaccctggggtcccgccccatccctgccctgcccaggccctgccccctgctggtgtgtgtccctggaccaggcatggagcgaccccggccctggtgtctcatccacagaatagggtcatgattctcac

SEQ ID NO: 362226 - DNA, 119 bp, Homo sapiens
  chr1:1986115-1986234
  hypo
cgccacttcaccgctggcaccgtcgaggtctgggggcaggtctgactggtttcctttaccttagtgaagccggcggcctgcaccgacccggctcgcgcccatcccggggtcacccacat

SEQ ID NO: 362227 - DNA, 549 bp, Homo sapiens
  chr1:2025644-2026193
  hypo
cgggagctggaagggacgtggttccagtcctgctgtgccaagcctggtgacccgagggtaccctcggcctcccggcctgaactcttctcctaccatgatggtgcctgggatgctgtgtggtgcccgtgggcagtggcggaggcagtggccccggctcgttgaaccttgggcactgcccattctgaggcgcccgctgtgcccggctcgttgaaccttgggcgctgcccgttctgaggcacccgctgtgcccggctcgttgaaccttgggcgctgcccgttctgaggcgccctctgtgcccggctcgttgaaccttgggcgctgcccgttctgaggcgccctctgtgcccggctcgatgaaccttgggcgctgcccgttctgaggcgcccgctgtgcccggctcgatgaaccttgggcgctgcccgttctgaggcgcccgctgtgcccggctcgttgaaccttgggcgctgcccgttctgaggcgcccgctgtgcccggctcgttgaaccttgggcgctgcccgttctgaggcgcccgctgtgcccggctc

SEQ ID NO: 362228 - DNA, 102 bp, Homo sapiens; identical to SEQ ID NO: 352724
  chr1:2141684-2141786
  hypo

SEQ ID NO: 362229 - DNA, 221 bp, Homo sapiens; identical to SEQ ID NO: 336787
  chr1:2142332-2142553
  hypo

SEQ ID NO: 362230 - DNA, 574 bp, Homo sapiens; identical to SEQ ID NO: 336789
  chr1:2239631-2240205
  hypo

SEQ ID NO: 362231 - DNA, 476 bp, Homo sapiens
  chr1:2257929-2258405
  hypo
cggtgccccacagacggcgagcaggcccgaggccagtgtccacagggaccgcacatggggaggtggtgcaggagccctgggcggtggactgggggtgcgtctgggcacccactgcgtgcctgggactgcaccttcatgcgggtgctggtccctcactcctgtccctcacgcgctggccatgacggccctggcaccggctgccctctggaggccccagtaagtccgcaccaccccggcgccatctcctgccagttctgcctgaggcagcagctgccaccaccgcgcagacacatcctgctccctcctgactttcggaggcctggcctggcatcggcctggcagtctcggcctccccgtcggggttggtgtctggggatcagggtgaagacacagcgacccgggcctcacccagggtctgtgtgtggctgttctgcagcgctggacgtctgaggcctgtgtcgtccccacagacgcgc

SEQ ID NO: 362232 - DNA, 83 bp, Homo sapiens
  chr1:2263423-2263506
  hypo
tgcgcctctcccgccgctgcgcctctcccgccgctgcgcctctcccgaaattacaggctggtgtgtcacttttcatctttgtc

SEQ ID NO: 362233 - DNA, 226 bp, Homo sapiens
  chr1:2267752-2267978
  hypo
cgggggggctctctggagcgaggcccgtgtaggctcactgtcttcccagaccaggcccttggctcccctgggccttccccgtcctcctggcccagctgatgaggaggccacagctgaccctccgaacacctgcaggtggggtgggctcatcctacctgctgcctccaggaggctcctgtgccgtgggtggtgtccccctggggtgcaggccgcctctggatctgcc

SEQ ID NO: 362234 - DNA, 254 bp, Homo sapiens; identical to SEQ ID NO: 206459
  chr1:2275835-2276089
  hypo

SEQ ID NO: 362235 - DNA, 821 bp, Homo sapiens; identical to SEQ ID NO: 352727
  chr1:2276200-2277021
  hypo

SEQ ID NO: 362236 - DNA, 490 bp, Homo sapiens; identical to SEQ ID NO: 352728
  chr1:2303837-2304327
  hypo

SEQ ID NO: 362237 - DNA, 63 bp, Homo sapiens; identical to SEQ ID NO: 352729
  chr1:2304481-2304544
  hypo

SEQ ID NO: 362238 - DNA, 93 bp, Homo sapiens; identical to SEQ ID NO: 336796
  chr1:2330473-2330566
  hypo

SEQ ID NO: 362239 - DNA, 47 bp, Homo sapiens; identical to SEQ ID NO: 345686
  chr1:2331316-2331363
  hypo

SEQ ID NO: 362240 - DNA, 183 bp, Homo sapiens; identical to SEQ ID NO: 345687
  chr1:2331437-2331620
  hypo

SEQ ID NO: 362241 - DNA, 35 bp, Homo sapiens; identical to SEQ ID NO: 336798
  chr1:2331916-2331951
  hypo

SEQ ID NO: 362242 - DNA, 205 bp, Homo sapiens
  chr1:2377210-2377415
  hypo
cggcacacacggattgccgtaagccgcagcagccaggtctgacaatacgagttgtaattggattttaatttttaatgtccacaacacatgaagagcttcggaccaatttgtgtatcttctgttactctgcgcctaataggaccgcttcattagctgctgtcgcacccacagtgccgtctgtccgggaacggagggagcctggccc

SEQ ID NO: 362243 - DNA, 443 bp, Homo sapiens; identical to SEQ ID NO: 344934
  chr1:2461988-2462431
  hypo

SEQ ID NO: 362244 - DNA, 55 bp, Homo sapiens; identical to SEQ ID NO: 352734
  chr1:2483785-2483840
  hypo

SEQ ID NO: 362245 - DNA, 74 bp, Homo sapiens; identical to SEQ ID NO: 352735
  chr1:2483873-2483947
  hypo

SEQ ID NO: 362246 - DNA, 37 bp, Homo sapiens; identical to SEQ ID NO: 296084
  chr1:2520987-2521024
  hypo

SEQ ID NO: 362247 - DNA, 39 bp, Homo sapiens; identical to SEQ ID NO: 352737
  chr1:2521063-2521102
  hypo

SEQ ID NO: 362248 - DNA, 177 bp, Homo sapiens
  chr1:2716559-2716736
  hypo
cgggggcagctttcaccctggctctgcaggggccatgccgtcctcctaccttggggttcgctgccggtgggatgggcctcgagggcccggctgcatgctgccaggcagtcctcaaacctgccgctgtggagcagagcttcaggtgacagggtgtcactccgggtgcccctggggtcc

SEQ ID NO: 362249 - DNA, 39 bp, Homo sapiens
  chr1:2717239-2717278
  hypo
ggccagggcagtgcgcacactctgcagggctgagggggc

SEQ ID NO: 362250 - DNA, 215 bp, Homo sapiens; identical to SEQ ID NO: 336811
  chr1:2726383-2726598
  hypo

SEQ ID NO: 362251 - DNA, 43 bp, Homo sapiens; identical to SEQ ID NO: 352738
  chr1:2846750-2846793
  hypo

SEQ ID NO: 362252 - DNA, 547 bp, Homo sapiens; identical to SEQ ID NO: 352739
  chr1:2846823-2847370
  hypo

SEQ ID NO: 362253 - DNA, 449 bp, Homo sapiens; identical to SEQ ID NO: 352740
  chr1:2850546-2850995
  hypo

SEQ ID NO: 362254 - DNA, 32 bp, Homo sapiens; identical to SEQ ID NO: 352741
  chr1:2851025-2851057
  hypo

SEQ ID NO: 362255 - DNA, 528 bp, Homo sapiens
  chr1:2938633-2939161
  hypo
cgagaacttcggcgtgcccgctttctacctgtcggaccaggcggtgctggctctctacgcctctgcctgtgtcacgggcctggtggtggacagcggggatgcggtcacctgcactgtccccatctttgagggttactccctgccccacgcagtcaccaagctccacgtggcgggcagggacatcacggagctcctcatgcagctgctcctggccagcggccacaccttcccctgccagctggacaagggtctcgtggacgacatcaaaaagaagctgtgctacgtggccttggagcccgagaaggagctttcccggaggccggaggaggtcctgagggagtacaagctgcccgacgggaacatcatcagcctcggggacccgctgcaccaggcgcccgaggccctgttcgtgccccagcagctgggcagccagagccccgggctctcgaatatggtctccagcagcatcaccaagtgtgataccgacatccagaagatcctctttggggagattgtgctgtcgggggg

SEQ ID NO: 362256 - DNA, 169 bp, Homo sapiens
  chr1:2939191-2939360
  hypo
gcttctcaaggagctggagcagctggcctccaaggacacccccatcaagatcacggctccccccgaccggtggttctccacctggattggagcctccatcgtcacctctctgagtagcttcaagcagatgtgggtcaccgccgcagacttcaaggagtttgggacctcc

SEQ ID NO: 362257 - DNA, 32 bp, Homo sapiens; identical to SEQ ID NO: 352742
  chr1:2999791-2999823
  hypo

SEQ ID NO: 362258 - DNA, 83 bp, Homo sapiens; identical to SEQ ID NO: 352743
  chr1:2999864-2999947
  hypo

SEQ ID NO: 362259 - DNA, 107 bp, Homo sapiens
  chr1:3008438-3008545
  hypo
cgggggtgatggacagttcgcaggtggtcagatgcgagagaattcacatcgcagaacctgccaggaaaatcaatgggaccgtgaggactgctaggtttgggaggccc

SEQ ID NO: 362260 - DNA, 68 bp, Homo sapiens
  chr1:3008575-3008643
  hypo
gggacgcaggtccccatgtagaggataagatggagccagccgtgggtaagggtggaccacgcaggatc

SEQ ID NO: 362261 - DNA, 252 bp, Homo sapiens
  chr1:3032644-3032896
  hypo
cggcaggcgtcaggttgagtccttggggttcagggaggtcaaggtcaggcctagcgtgggtggtcatctcaggggcagcactggtggccgttgaattgttccttaccggggagaacaggtggcagggagggatggttccagaccccatggcacccgtgtctctgcagtgtgtccctctcatggggggacagtaggcagagctccccggctgccctgcgccggcgtgctcactccgcggtgcgtgcttaatac

SEQ ID NO: 362262 - DNA, 177 bp, Homo sapiens
  chr1:3032979-3033156
  hypo
ccctgctcccttcctgtgagaattttgccctcaagatggcagcccagcctggatgcccagaccccattcccaagccgcaggtcctggtctgggctctgtcactcggggacgcgcctgcttgtctttccccggctggggcagtgcctggtctgctcagcccttcctctctccccgccc

SEQ ID NO: 362263 - DNA, 145 bp, Homo sapiens; identical to SEQ ID NO: 336823
  chr1:3050813-3050958
  hypo

SEQ ID NO: 362264 - DNA, 303 bp, Homo sapiens; identical to SEQ ID NO: 345689
  chr1:3052594-3052897
  hypo

SEQ ID NO: 362265 - DNA, 40 bp, Homo sapiens; identical to SEQ ID NO: 345690
  chr1:3052927-3052967
  hypo

SEQ ID NO: 362266 - DNA, 119 bp, Homo sapiens; identical to SEQ ID NO: 347776
  chr1:3111118-3111237
  hypo

SEQ ID NO: 362267 - DNA, 326 bp, Homo sapiens; identical to SEQ ID NO: 347777
  chr1:3111463-3111789
  hypo

SEQ ID NO: 362268 - DNA, 683 bp, Homo sapiens
  chr1:3114432-3115115
  hypo
cgcgtgaacctcgcactcctcagggggcagtggcaggtcccactgccctcccgccaggcctgctgctggtcagagcttctcctgtggcaggaattctcatgggccgggtcatcagctggggtaggaatgtgctctcagggtgctacgggccaccttggcctcaaccagagatgagggtgacgcaactgctcacaggcccgctgaggggcagcgacctgaggacaactcctgtgggctgcctgtctctgctgcctcctgcacgcgggtagaatctgctcgggtcaggggcgggcactccatgcgttctctggacccccgagctgcagtgtggctgggttgctgtggttgaaggcacctgccttaaggggccaggtcggcgcagggcagcgtctctctggggtgaggagtttatctgagtgccttagagaaggccctttggagaatggctgcaagccggcacccttgctgcatggagggtttgttctgcgtggccttggctgggcctttcctgtcgtttgggacatatgtgagtagaattgcctcaaagtgactattctcactcagctgccaggatgccgtgagtgtgtctgctgtgcaggggagcgtggtctcttcttgcttttgcagctccgggcccacctggagtgcttggcgtggcactgggccgtggccttctgggacgc

SEQ ID NO: 362269 - DNA, 128 bp, Homo sapiens; identical to SEQ ID NO: 336827
  chr1:3124802-3124930
  hypo

SEQ ID NO: 362270 - DNA, 188 bp, Homo sapiens; identical to SEQ ID NO: 352749
  chr1:3125905-3126093
  hypo

SEQ ID NO: 362271 - DNA, 187 bp, Homo sapiens; identical to SEQ ID NO: 336829
  chr1:3172404-3172591
  hypo

SEQ ID NO: 362272 - DNA, 473 bp, Homo sapiens; identical to SEQ ID NO: 336832
  chr1:3195292-3195765
  hypo

SEQ ID NO: 362273 - DNA, 550 bp, Homo sapiens; identical to SEQ ID NO: 336834
  chr1:3228695-3229245
  hypo

SEQ ID NO: 362274 - DNA, 866 bp, Homo sapiens
  chr1:3321132-3321998
  hypo
cggccacggcagagaggaggtgggcagggagacaccagcatgtgctctgatccctcggcagcgtggtgggggctccgaaggggcactgggaacaagctgtatggttggggtcccctcccgggcagagggcaggtagtcgggccccgcagtgagcctcgtcctctgcgcagcctggagcagcacatggtcatccacacggaggagcgcgagtacaaatgcgaccagtgtcccaaggccttcaactggaagtccaacctcatccgccaccagatgtcccacgacagcggcaaacgcttcgaatgtgaaaactgcgtgaaggtaacctgcggggcggccccgtctcagccccggggcagcaggaggctgcagacgggcgcccgcccccgtgctccctacaccccctggtccaaatgtagatggagtgcggcagagtgggtaggaggcccctgcggtggctcgggcccttccgtgtgactaggaaggaaaggaagtctcagggaagaccgtgtcccccaggtcagaaggatcagggccgagaccagaacccaggcccctccagagcgcggctcctgtcctcccgccggtgtggaaggaagaggctggcggggctgagccgagcctccaccccgagcccgccagggtctcagcaccacagctgaaaacgctttctgcagccctgtctcacgcagcctcagttcaggaattgttcttgaggaaagcagccggggaggctctgcggctcacttaaggccctgcagcgggtccttgctacacagagacctgtcccggcctgcttggtgcagactgcaacgtggcaagagagacaggcagggccctgccccccacagccggttggtccgccagcc

SEQ ID NO: 362275 - DNA, 121 bp, Homo sapiens
  chr1:3322260-3322381
  hypo
cgtggcggtcgggccgaggtgggccatcccccaaggtctcccccgatccgaggggccccagtttgttcataaagcactcatggcaggttctgacatctctgccgcgtgcagcctggtcccc

SEQ ID NO: 362276 - DNA, 42 bp, Homo sapiens; identical to SEQ ID NO: 349148
  chr1:3325196-3325238
  hypo

SEQ ID NO: 362277 - DNA, 214 bp, Homo sapiens; identical to SEQ ID NO: 296175
  chr1:3328319-3328533
  hypo

SEQ ID NO: 362278 - DNA, 644 bp, Homo sapiens
  chr1:3328625-3329269
  hypo
gctcggacctggacagcgacgtggacagcgaccctgacaaggacaagggcaagggcaagtccgccgagggccagcccaagtttgggggcggcttggcgcccccgggggccccgaacagcgtggccgaggtgcctgtcttctattcccagcactcattcttcccgccacccgacgagcagctgctgactgcaacgggcgccgccggggactccatcaaggccatcgcatccattgccgagaagtactttggccccggcttcatggggatgcaggagaagaagctgggctcgctcccctaccactcggcgttccccttccagttcctgcccaacttcccccactccctttaccccttcacggaccgagccctcgcccacaacttgctggtcaaggccgagccaaagtcaccccgggacgccctcaaggtgggcggccccagtgccgagtgcccctttgatctcaccaccaagcccaaagacgtgaagcccatcctgcccatgcccaagggcccctcggcccccgcatccggcgaggagcagccgctggacctgagcatcggcagccgggcccgtgccagccaaaacggcggcgggcgggagccccgcaagaaccacgtctatggggaacgcaagctgggcgccggc

SEQ ID NO: 362279 - DNA, 152 bp, Homo sapiens; identical to SEQ ID NO: 336839
  chr1:3331040-3331192
  hypo

SEQ ID NO: 362280 - DNA, 238 bp, Homo sapiens
  chr1:3343487-3343725
  hypo
cgtgcactcatgcacacacgtgtacataacatgtgcgtgcataaacatgcctgcctagatctacacacacgcatatgcacacatgcaagtacatgcacatggacagtgtgtgcacatacacatgcgtgacggacagccgtgtgcgtacacctagagacacatgtacacgcatgggcgcacgtgcgtctagacacacagcagcagaacgatggtggaattcggatccaggaatgtcggc

SEQ ID NO: 362281 - DNA, 226 bp, Homo sapiens
  chr1:3349863-3350089
  hypo
cggggagaatccgggtcttagtccctcttgttccttctgccccctgtggcccagggcaaggttgagccaggccagggccacgggaggctgggaacggacgaggcttggccctgctggccggggatggcctgtcctgcccacacactcacctgcctgtccaggatggcctgccctgcccatctgctgcctgtctgggatggcccgccctgcccacgcgctcacctgc

SEQ ID NO: 362282 - DNA, 249 bp, Homo sapiens; identical to SEQ ID NO: 296183
  chr1:3350158-3350407
  hypo

SEQ ID NO: 362283 - DNA, 271 bp, Homo sapiens
  chr1:3350462-3350733
  hypo
ctgcgtgtggccactcctcagcatcctccccacccaccatggttcattccgacttttccaatggaaactcagatcccaaaagtccctaaagcagtcgtagagtctcaccatctccaaggattggtcttgagaacactgttcagtgacggccatgcaggtggccgtccaaagacagccaacggagctgcctcgcagaatcagccagtgggcaggtggacgctctgctgagacagaagctggtggccactgccgggtgcccgcgtggggtcgc

SEQ ID NO: 362284 - DNA, 561 bp, Homo sapiens; identical to SEQ ID NO: 336844
  chr1:3351144-3351705
  hypo

SEQ ID NO: 362285 - DNA, 168 bp, Homo sapiens; identical to SEQ ID NO: 336845
  chr1:3361098-3361266
  hypo

SEQ ID NO: 362286 - DNA, 87 bp, Homo sapiens; identical to SEQ ID NO: 336846
  chr1:3377848-3377935
  hypo

SEQ ID NO: 362287 - DNA, 353 bp, Homo sapiens; identical to SEQ ID NO: 336847
  chr1:3379762-3380115
  hypo

SEQ ID NO: 362288 - DNA, 68 bp, Homo sapiens
  chr1:3408704-3408772
  hypo
actgggtgccacacacatgtactggcacacatgcacacacaccctgctgtacgcactgttgcacgtgc

SEQ ID NO: 362289 - DNA, 617 bp, Homo sapiens; identical to SEQ ID NO: 336852
  chr1:3435632-3436249
  hypo

SEQ ID NO: 362290 - DNA, 207 bp, Homo sapiens; identical to SEQ ID NO: 336856
  chr1:3646542-3646749
  hypo

SEQ ID NO: 362291 - DNA, 38 bp, Homo sapiens; identical to SEQ ID NO: 352756
  chr1:3659512-3659550
  hypo

SEQ ID NO: 362292 - DNA, 178 bp, Homo sapiens; identical to SEQ ID NO: 346305
  chr1:3663338-3663516
  hypo

SEQ ID NO: 362293 - DNA, 101 bp, Homo sapiens; identical to SEQ ID NO: 346306
  chr1:3663983-3664084
  hypo

SEQ ID NO: 362294 - DNA, 204 bp, Homo sapiens; identical to SEQ ID NO: 206546
  chr1:3680100-3680304
  hypo

SEQ ID NO: 362295 - DNA, 129 bp, Homo sapiens; identical to SEQ ID NO: 352760
  chr1:3680359-3680488
  hypo

SEQ ID NO: 362296 - DNA, 125 bp, Homo sapiens; identical to SEQ ID NO: 336862
  chr1:3697578-3697703
  hypo

SEQ ID NO: 362297 - DNA, 173 bp, Homo sapiens
  chr1:3700211-3700384
  hypo
cgcacggtatggataaaatgctgtgggttgggctggcatttatgtctgtttcctaatggctagtttatatcctgtcctgtcccatcctgagggccacccgccccctgtggaatggccaatacctccgctcctaacaccttccacttccctcacgtcagggccatctagatgac

SEQ ID NO: 362298 - DNA, 608 bp, Homo sapiens; identical to SEQ ID NO: 296241
  chr1:3700414-3701022
  hypo

SEQ ID NO: 362299 - DNA, 36 bp, Homo sapiens
  chr1:3701052-3701088
  hypo
ccctactgccaaccccacgcaaacggttttactatc

SEQ ID NO: 362300 - DNA, 307 bp, Homo sapiens; identical to SEQ ID NO: 336864
  chr1:3705404-3705711
  hypo

SEQ ID NO: 362301 - DNA, 339 bp, Homo sapiens; identical to SEQ ID NO: 336867
  chr1:4673912-4674251
  hypo

SEQ ID NO: 362302 - DNA, 707 bp, Homo sapiens; identical to SEQ ID NO: 352763
  chr1:5918390-5919097
  hypo

SEQ ID NO: 362303 - DNA, 141 bp, Homo sapiens
  chr1:5950824-5950965
  hypo
cgggatagcgcccgctccttccaagcagacagacgctggaagcgtgactcgtcccatgagggacgcagcacccactgtgcctgtccttccagagagccgctaccttcatctggacggcagcagatccgatgagcagcaggg

SEQ ID NO: 362304 - DNA, 121 bp, Homo sapiens; identical to SEQ ID NO: 352764
  chr1:6046277-6046398
  hypo

SEQ ID NO: 362305 - DNA, 896 bp, Homo sapiens; identical to SEQ ID NO: 330665
  chr1:6052426-6053322
  hypo

SEQ ID NO: 362306 - DNA, 56 bp, Homo sapiens; identical to SEQ ID NO: 352765
  chr1:6131658-6131714
  hypo

SEQ ID NO: 362307 - DNA, 71 bp, Homo sapiens
  chr1:6148944-6149015
  hypo
cgactccacacggcatttgctgaccctgtttttgcgtctaacattgcatcgtaaacgttttttgggagggg

SEQ ID NO: 362308 - DNA, 595 bp, Homo sapiens
  chr1:6149045-6149640
  hypo
acgcggtcggcctgttttccagggcggagacggagcggggcctgtccaggaagcacataatcgaaggtgaggacgcgctcgggcacctcagggcccccatacctgtgggatcatcctcggaggccaaagtgatggcagcacagggcccgacccccccagttaacccactgagggcccaatcccggggcacccggtgctctggcctgaccttctccttccacccaggtagcacagcgggacgctgcagagaacgagggcagcccggtggctgagcacagaccacagaccagcctgggtttcaatccaggtttggccccacactggctgagtgggtcttcagcaggggcaccctgccccatgcctctgccacagtatctgtgcaatagggacagtaagagcgcacccggcgagggtggctgggatgcctgcagcgcccaggagaaggtgccacacagcccggggctcagcactcgcaggcaccggagcaaggcaccggggtgtctggctcttgctgtatctttattgtcttcatgcctttcctgtccgtgttcattttcttcgaggtaatagatcattccattgaaaatcacctggc

SEQ ID NO: 362309 - DNA, 67 bp, Homo sapiens; identical to SEQ ID NO: 347782
  chr1:6171947-6172014
  hypo

SEQ ID NO: 362310 - DNA, 100 bp, Homo sapiens; identical to SEQ ID NO: 352767
  chr1:6281676-6281776
  hypo

SEQ ID NO: 362311 - DNA, 75 bp, Homo sapiens; identical to SEQ ID NO: 352768
  chr1:6281825-6281900
  hypo

SEQ ID NO: 362312 - DNA, 32 bp, Homo sapiens; identical to SEQ ID NO: 352769
  chr1:6284796-6284828
  hypo

SEQ ID NO: 362313 - DNA, 280 bp, Homo sapiens; identical to SEQ ID NO: 352770
  chr1:6284858-6285138
  hypo

SEQ ID NO: 362314 - DNA, 501 bp, Homo sapiens; identical to SEQ ID NO: 352771
  chr1:6331654-6332155
  hypo

SEQ ID NO: 362315 - DNA, 304 bp, Homo sapiens; identical to SEQ ID NO: 336883
  chr1:6345513-6345817
  hypo

SEQ ID NO: 362316 - DNA, 56 bp, Homo sapiens
  chr1:6391374-6391430
  hypo
cgggccctgagcccagtgacccgtactccggtaagcaggccgtgcgaagatggagg

SEQ ID NO: 362317 - DNA, 94 bp, Homo sapiens
  chr1:6391541-6391635
  hypo
atacctttgcacttctggcctccagaactgtgacagaatcaacttctattgtttgagagctacccagtcagtggcactttgtcacagcagcccc

SEQ ID NO: 362318 - DNA, 116 bp, Homo sapiens; identical to SEQ ID NO: 336887
  chr1:6623403-6623519
  hypo

SEQ ID NO: 362319 - DNA, 35 bp, Homo sapiens; identical to SEQ ID NO: 336888
  chr1:6707164-6707199
  hypo

SEQ ID NO: 362320 - DNA, 318 bp, Homo sapiens; identical to SEQ ID NO: 336889
  chr1:6711983-6712301
  hypo

SEQ ID NO: 362321 - DNA, 106 bp, Homo sapiens; identical to SEQ ID NO: 345693
  chr1:6713808-6713914
  hypo

SEQ ID NO: 362322 - DNA, 307 bp, Homo sapiens; identical to SEQ ID NO: 206600
  chr1:6714041-6714348
  hypo

SEQ ID NO: 362323 - DNA, 105 bp, Homo sapiens; identical to SEQ ID NO: 336891
  chr1:6738127-6738232
  hypo

SEQ ID NO: 362324 - DNA, 115 bp, Homo sapiens; identical to SEQ ID NO: 352777
  chr1:6750362-6750477
  hypo

SEQ ID NO: 362325 - DNA, 1286 bp, Homo sapiens
  chr1:7723202-7724488
  hypo
cgtgggacggcccccgggcttggggtacgtgtccaagggctgagagtctgtggcctgcctggggtaccgggcctggactttgccagggaccccagccgctgtggggcaggtccaccacggtcctagctctgactctcttttgtgtgtgcatgtgtgtgtgcacatgtgtgcctgcgtgtgcgtgcgcgtgttgtgttccgatctccgcaggagctggcggcagcgtgcatcacaagtgtaacagcgccaaacaccgcatcatctcgcccaaggtggagccacggacaggggggtacgggagccactcggaggtgcagcacaatgacgtgtcggagggcaagcacgagcacagccacagcaagggctccagccgtgagaagaggaacggcaaggtggccaagcccgtgctcctgcaccagagcagcaccgaggtctcctccaccaaccaggtggaagtccccgacaccacccagagctcccctgtgtccatcagcagcgggctcaacagcgacccggacatggtggacagcccggtggtcacaggtgtgtccggtatggcggtggcctctgtgatggggagcttgtcccagagcgccacggtgttcatgtcagaggtcaccaatgaggccgtgtacaccatgtcccccaccgctggccccaaccaccacctcctctcacctgacgcctctcagggcctcgtcctggccgtgagctctgatggccacaagttcgcctttcccaccacgggcagctcggagagcctgtccatgctgcccaccaacgtgtccgaagagctggtcctctccaccaccctcgacggtggccggaagattccagaaaccaccatgaactttgaccccgactgtttccttaataacccaaagcagggccagacgtacgggggtggaggcctgaaagccgagatggtcagctccaacatccggcactcgccacccggggagcggagcttcagctttaccaccgtcctcaccaaggagatcaagaccgaggacacctccttcgagcagcagatggccaaagaagcgtactcctcctccgcggcggctgtggcagccagctccctcaccctgaccgccggctccagcctcctgccgtcgggcggcggcctgagtcccagcaccaccctggagcagatggacttcagcgccatcgactccaacaaggactacacgtccagcttcagccagacgggccacagcccccacatccaccagaccccctccccgagcttcttcctgcaggacgccagcaaacccctccccgtc

SEQ ID NO: 362326 - DNA, 199 bp, Homo sapiens; identical to SEQ ID NO: 349163
  chr1:7764988-7765187
  hypo

SEQ ID NO: 362327 - DNA, 108 bp, Homo sapiens; identical to SEQ ID NO: 330679
  chr1:7843510-7843618
  hypo

SEQ ID NO: 362328 - DNA, 179 bp, Homo sapiens; identical to SEQ ID NO: 349165
  chr1:7844224-7844403
  hypo

SEQ ID NO: 362329 - DNA, 377 bp, Homo sapiens; identical to SEQ ID NO: 277921
  chr1:8085715-8086092
  hypo

SEQ ID NO: 362330 - DNA, 132 bp, Homo sapiens
  chr1:9402333-9402465
  hypo
cgatccctccgtgagaatgaagaaatgcaacccatgagaagaggtttgcgtagtgacaagtccagaaactgtgtgcatcagcctggggcacccctagctgtgggcagaagctccatggtgcagctcatagtg

SEQ ID NO: 362331 - DNA, 177 bp, Homo sapiens
  chr1:9402616-9402793
  hypo
acgtccctctcccgcctcatcctgccttgttcccagtgtagtgatcaccctgacatcggttctcccatgtcctcatcccccgccagcccgcggggtcatcccctccccagaccacagtttgggcccaggggtctggggcacacatccgagatgcaggcacacatcccggactcctcc

SEQ ID NO: 362332 - DNA, 39 bp, Homo sapiens; identical to SEQ ID NO: 336900
  chr1:9654089-9654128
  hypo

SEQ ID NO: 362333 - DNA, 425 bp, Homo sapiens; identical to SEQ ID NO: 344939
  chr1:9711649-9712074
  hypo

SEQ ID NO: 362334 - DNA, 89 bp, Homo sapiens; identical to SEQ ID NO: 336902
  chr1:9725455-9725544
  hypo

SEQ ID NO: 362335 - DNA, 70 bp, Homo sapiens; identical to SEQ ID NO: 352784
  chr1:9795925-9795995
  hypo

SEQ ID NO: 362336 - DNA, 367 bp, Homo sapiens; identical to SEQ ID NO: 336905
  chr1:10495109-10495476
  hypo

SEQ ID NO: 362337 - DNA, 350 bp, Homo sapiens; identical to SEQ ID NO: 336907
  chr1:10676484-10676834
  hypo

SEQ ID NO: 362338 - DNA, 378 bp, Homo sapiens; identical to SEQ ID NO: 336908
  chr1:10680904-10681282
  hypo

SEQ ID NO: 362339 - DNA, 182 bp, Homo sapiens; identical to SEQ ID NO: 352788
  chr1:10692798-10692980
  hypo

SEQ ID NO: 362340 - DNA, 1313 bp, Homo sapiens; identical to SEQ ID NO: 336913
  chr1:10719300-10720613
  hypo

SEQ ID NO: 362341 - DNA, 386 bp, Homo sapiens; identical to SEQ ID NO: 349172
  chr1:10854661-10855047
  hypo

SEQ ID NO: 362342 - DNA, 259 bp, Homo sapiens; identical to SEQ ID NO: 336915
  chr1:11020521-11020780
  hypo

SEQ ID NO: 362343 - DNA, 119 bp, Homo sapiens; identical to SEQ ID NO: 352792
  chr1:11091195-11091314
  hypo

SEQ ID NO: 362344 - DNA, 162 bp, Homo sapiens
  chr1:11131899-11132061
  hypo
cattagactgccttctccaaccaccaacgagacagctacagcacctccagcactccccaccaatctctctgcacagcacctgctgccatctgccaggatagatactgattgcccaccatccctcagcagaagggaagccccacaggggcttcattcatcgcc

SEQ ID NO: 362345 - DNA, 247 bp, Homo sapiens; identical to SEQ ID NO: 352793
  chr1:11141000-11141247
  hypo

SEQ ID NO: 362346 - DNA, 52 bp, Homo sapiens; identical to SEQ ID NO: 197314
  chr1:11538821-11538873
  hypo

SEQ ID NO: 362347 - DNA, 102 bp, Homo sapiens; identical to SEQ ID NO: 352795
  chr1:11596382-11596484
  hypo

SEQ ID NO: 362348 - DNA, 367 bp, Homo sapiens; identical to SEQ ID NO: 352796
  chr1:11596583-11596950
  hypo

SEQ ID NO: 362349 - DNA, 217 bp, Homo sapiens; identical to SEQ ID NO: 336922
  chr1:11856166-11856383
  hypo

SEQ ID NO: 362350 - DNA, 64 bp, Homo sapiens; identical to SEQ ID NO: 346318
  chr1:12123950-12124014
  hypo

SEQ ID NO: 362351 - DNA, 516 bp, Homo sapiens; identical to SEQ ID NO: 349175
  chr1:12226892-12227408
  hypo

SEQ ID NO: 362352 - DNA, 206 bp, Homo sapiens; identical to SEQ ID NO: 197324
  chr1:12227438-12227644
  hypo

SEQ ID NO: 362353 - DNA, 142 bp, Homo sapiens; identical to SEQ ID NO: 336927
  chr1:12241609-12241751
  hypo

SEQ ID NO: 362354 - DNA, 93 bp, Homo sapiens; identical to SEQ ID NO: 347792
  chr1:12251958-12252051
  hypo

SEQ ID NO: 362355 - DNA, 240 bp, Homo sapiens
  chr1:12304451-12304691
  hypo
cgtaagaaagcactacttcaagccctggaggagaaatggaaggcaaggcagagatcttctgggccataagagcagttgtggtgacacgtgtaagatgagcaagaacactagattgagctaatgctgactcttgtctttgtagaatgaccgccagcagaaaggggagtcctattggtattcagttaccgcctccgtagttacaaggattgtggagaatattgaagtaagtcctgctgactt

SEQ ID NO: 362356 - DNA, 152 bp, Homo sapiens; identical to SEQ ID NO: 345697
  chr1:12460147-12460299
  hypo

SEQ ID NO: 362357 - DNA, 174 bp, Homo sapiens; identical to SEQ ID NO: 336931
  chr1:12573235-12573409
  hypo

SEQ ID NO: 362358 - DNA, 186 bp, Homo sapiens; identical to SEQ ID NO: 336932
  chr1:12630214-12630400
  hypo

SEQ ID NO: 362359 - DNA, 315 bp, Homo sapiens; identical to SEQ ID NO: 336933
  chr1:12638803-12639118
  hypo

SEQ ID NO: 362360 - DNA, 264 bp, Homo sapiens; identical to SEQ ID NO: 197328
  chr1:13840257-13840521
  hypo

SEQ ID NO: 362361 - DNA, 121 bp, Homo sapiens; identical to SEQ ID NO: 336936
  chr1:14114676-14114797
  hypo

SEQ ID NO: 362362 - DNA, 76 bp, Homo sapiens; identical to SEQ ID NO: 352806
  chr1:14125492-14125568
  hypo

SEQ ID NO: 362363 - DNA, 54 bp, Homo sapiens; identical to SEQ ID NO: 352807
  chr1:14125622-14125676
  hypo

SEQ ID NO: 362364 - DNA, 121 bp, Homo sapiens; identical to SEQ ID NO: 336939
  chr1:15102346-15102467
  hypo

SEQ ID NO: 362365 - DNA, 167 bp, Homo sapiens; identical to SEQ ID NO: 336940
  chr1:15178306-15178473
  hypo

SEQ ID NO: 362366 - DNA, 296 bp, Homo sapiens; identical to SEQ ID NO: 336941
  chr1:15194468-15194764
  hypo

SEQ ID NO: 362367 - DNA, 220 bp, Homo sapiens; identical to SEQ ID NO: 336942
  chr1:15283890-15284110
  hypo

SEQ ID NO: 362368 - DNA, 383 bp, Homo sapiens; identical to SEQ ID NO: 336943
  chr1:15374975-15375358
  hypo

SEQ ID NO: 362369 - DNA, 128 bp, Homo sapiens; identical to SEQ ID NO: 352809
  chr1:16058899-16059027
  hypo

SEQ ID NO: 362370 - DNA, 125 bp, Homo sapiens; identical to SEQ ID NO: 336945
  chr1:16270113-16270238
  hypo

SEQ ID NO: 362371 - DNA, 517 bp, Homo sapiens
  chr1:16464269-16464786
  hypo
cgagccccagatggccgtcctccttaagccccacctgggcaggccccatagggcacagctgccacccctggacctcacctgtctggttgatgctgacactggcagtacggaagctgcggctggttaccaggcctgagacgccattgcgggcctccacggtgaaggtgtagttcatgtggggctccaggtcgctcactgtcacactggtgcgggtcagtccgtgaggaggctccgagtagcgcacactggcctcacacggcccgcattccccagactcgggccagcactgttcgcaggtgacgctgtagacaatgtcctcgcggcccccgctgtcctgagggggcgtccagcgcagctccaccttggcacccatgcccacggctgtgaggtagtgtggggcggaggggggtcctgcacagacaggaggagtcagtgctgtgctggacccaggcggacacgtcaccctcagtcacgccaccctgacccactgcaagactcacgtgtgcaaggcatcgac

SEQ ID NO: 362372 - DNA, 169 bp, Homo sapiens; identical to SEQ ID NO: 347795
  chr1:16474862-16475031
  hypo

SEQ ID NO: 362373 - DNA, 75 bp, Homo sapiens; identical to SEQ ID NO: 347796
  chr1:16475432-16475507
  hypo

SEQ ID NO: 362374 - DNA, 175 bp, Homo sapiens
  chr1:16534331-16534506
  hypo
cggcccaggcaccctgacggcctcaggcggccggtgagtgggcatcgcccacccccacccccacccggcatctggctgccctcagggcccatgggaggagctggtaccttcccgggctgctccggtgcctgacccagagatgagtgcccgggctgctgaattccgccccaggcgc

SEQ ID NO: 362375 - DNA, 148 bp, Homo sapiens; identical to SEQ ID NO: 336949
  chr1:16640899-16641047
  hypo

SEQ ID NO: 362376 - DNA, 193 bp, Homo sapiens; identical to SEQ ID NO: 336950
  chr1:17292904-17293097
  hypo

SEQ ID NO: 362377 - DNA, 44 bp, Homo sapiens; identical to SEQ ID NO: 336951
  chr1:17294741-17294785
  hypo

SEQ ID NO: 362378 - DNA, 310 bp, Homo sapiens; identical to SEQ ID NO: 336953
  chr1:18023481-18023791
  hypo

SEQ ID NO: 362379 - DNA, 247 bp, Homo sapiens; identical to SEQ ID NO: 336954
  chr1:18026186-18026433
  hypo

SEQ ID NO: 362380 - DNA, 204 bp, Homo sapiens; identical to SEQ ID NO: 349181
  chr1:18434105-18434309
  hypo

SEQ ID NO: 362381 - DNA, 37 bp, Homo sapiens; identical to SEQ ID NO: 349182
  chr1:18434816-18434853
  hypo

SEQ ID NO: 362382 - DNA, 132 bp, Homo sapiens; identical to SEQ ID NO: 336957
  chr1:19436878-19437010
  hypo

SEQ ID NO: 362383 - DNA, 34 bp, Homo sapiens; identical to SEQ ID NO: 336958
  chr1:19518000-19518034
  hypo

SEQ ID NO: 362384 - DNA, 215 bp, Homo sapiens; identical to SEQ ID NO: 336959
  chr1:19659439-19659654
  hypo

SEQ ID NO: 362385 - DNA, 333 bp, Homo sapiens; identical to SEQ ID NO: 347797
  chr1:19676386-19676719
  hypo

SEQ ID NO: 362386 - DNA, 51 bp, Homo sapiens; identical to SEQ ID NO: 347798
  chr1:19676822-19676873
  hypo

SEQ ID NO: 362387 - DNA, 263 bp, Homo sapiens; identical to SEQ ID NO: 336961
  chr1:19711526-19711789
  hypo

SEQ ID NO: 362388 - DNA, 110 bp, Homo sapiens; identical to SEQ ID NO: 336963
  chr1:19767182-19767292
  hypo

SEQ ID NO: 362389 - DNA, 65 bp, Homo sapiens; identical to SEQ ID NO: 336964
  chr1:19774229-19774294
  hypo

SEQ ID NO: 362390 - DNA, 83 bp, Homo sapiens; identical to SEQ ID NO: 352820
  chr1:21568244-21568327
  hypo

SEQ ID NO: 362391 - DNA, 234 bp, Homo sapiens; identical to SEQ ID NO: 206784
  chr1:21573434-21573668
  hypo

SEQ ID NO: 362392 - DNA, 108 bp, Homo sapiens; identical to SEQ ID NO: 336971
  chr1:21889603-21889711
  hypo

SEQ ID NO: 362393 - DNA, 189 bp, Homo sapiens; identical to SEQ ID NO: 336973
  chr1:22023693-22023882
  hypo

SEQ ID NO: 362394 - DNA, 123 bp, Homo sapiens
  chr1:22777390-22777513
  hypo
cgtaactgtcagggacagaaaaagtggctgcatgtcagtgacagggtgactgtgttcagtgggccagcgcggaggtgactcagtttgttactgctggatctgatttaaatgtttgtgtaagga

SEQ ID NO: 362395 - DNA, 150 bp, Homo sapiens
  chr1:22777697-22777847
  hypo
acaaagagtgcgggctggggacgcggctcaggtcgcctctccgcctcgcacgtgaatgtgttgttttggaaaaacgaagccttttgtgttcacttccttgccctcctttgaaacaaaatcctaatcctagagctgccggagcgagactgc

SEQ ID NO: 362396 - DNA, 160 bp, Homo sapiens; identical to SEQ ID NO: 336977
  chr1:23411446-23411606
  hypo

SEQ ID NO: 362397 - DNA, 158 bp, Homo sapiens
  chr1:23693515-23693673
  hypo
aggtagaatccttacttacctagtgagacaacatttccataattctcctgcataacatcccggtaaaggtccctctgtgcagcgtccagaggtctccattcttcccgggtgagatacatggccatatcttcaaacgtcacaggtgcctgaaatcacac

SEQ ID NO: 362398 - DNA, 385 bp, Homo sapiens; identical to SEQ ID NO: 349190
  chr1:24126326-24126711
  hypo

SEQ ID NO: 362399 - DNA, 155 bp, Homo sapiens
  chr1:24434944-24435099
  hypo
cggggaccctgtggctcccacctgctgcggaaggtccgcctccgcacagaggagcccatgcgcaggctgtgctgccgctcctccttctgctcctcctcctgccggtgctccagcctgtgaacctccatggcctgggggggccgggggtcccccgc

SEQ ID NO: 362400 - DNA, 38 bp, Homo sapiens
  chr1:24435146-24435184
  hypo
gtgaaggccaaggtccacggtcattccaccaggtgccc

SEQ ID NO: 362401 - DNA, 247 bp, Homo sapiens; identical to SEQ ID NO: 336983
  chr1:25070663-25070910
  hypo

SEQ ID NO: 362402 - DNA, 320 bp, Homo sapiens; identical to SEQ ID NO: 349193
  chr1:25255291-25255611
  hypo

SEQ ID NO: 362403 - DNA, 164 bp, Homo sapiens; identical to SEQ ID NO: 336985
  chr1:25854484-25854648
  hypo

SEQ ID NO: 362404 - DNA, 102 bp, Homo sapiens
  chr1:25919205-25919307
  hypo
cgctctatatccagcacctagaacagcgcctggcacctaagcaggcatttggtaaaactgtgccaaatgagtgagtgcggacagcgtcctagtccttcacca

SEQ ID NO: 362405 - DNA, 120 bp, Homo sapiens
  chr1:25919337-25919457
  hypo
cagctgtgtctcccgcacgggccggcgggcgctgtgatggaggcagtgcaggatgccgtgtgagcccgaggaaggacttgcagccctgctgaggggacgaggcgaggcttcttggatgac

SEQ ID NO: 362406 - DNA, 807 bp, Homo sapiens; identical to SEQ ID NO: 330733
  chr1:26662538-26663345
  hypo

SEQ ID NO: 362407 - DNA, 88 bp, Homo sapiens; identical to SEQ ID NO: 336990
  chr1:27058003-27058091
  hypo

SEQ ID NO: 362408 - DNA, 247 bp, Homo sapiens; identical to SEQ ID NO: 336991
  chr1:27183370-27183617
  hypo

SEQ ID NO: 362409 - DNA, 233 bp, Homo sapiens; identical to SEQ ID NO: 352830
  chr1:27189675-27189908
  hypo

SEQ ID NO: 362410 - DNA, 256 bp, Homo sapiens; identical to SEQ ID NO: 336993
  chr1:27220862-27221118
  hypo

SEQ ID NO: 362411 - DNA, 308 bp, Homo sapiens; identical to SEQ ID NO: 349195
  chr1:27332673-27332981
  hypo

SEQ ID NO: 362412 - DNA, 140 bp, Homo sapiens; identical to SEQ ID NO: 352833
  chr1:27628429-27628569
  hypo

SEQ ID NO: 362413 - DNA, 195 bp, Homo sapiens; identical to SEQ ID NO: 352834
  chr1:27844793-27844988
  hypo

SEQ ID NO: 362414 - DNA, 237 bp, Homo sapiens; identical to SEQ ID NO: 352835
  chr1:27875852-27876089
  hypo

SEQ ID NO: 362415 - DNA, 111 bp, Homo sapiens; identical to SEQ ID NO: 296950
  chr1:27876333-27876444
  hypo

SEQ ID NO: 362416 - DNA, 698 bp, Homo sapiens; identical to SEQ ID NO: 330736
  chr1:27901989-27902687
  hypo

SEQ ID NO: 362417 - DNA, 202 bp, Homo sapiens; identical to SEQ ID NO: 337000
  chr1:27921349-27921551
  hypo

SEQ ID NO: 362418 - DNA, 191 bp, Homo sapiens
  chr1:28293404-28293595
  hypo
tgacagcattctcctggtggccacctgggtgactcatagctcctggctgcccagcgggattccactgcagctgtggctgcctgtgggatgcggctgcttctttctgggcctggctctgcggcttgtgtactaccactggctgcaccctagctgctgctggaagcccgaccctgaccaggtagacggggccc

SEQ ID NO: 362419 - DNA, 114 bp, Homo sapiens; identical to SEQ ID NO: 296991
  chr1:29463501-29463615
  hypo

SEQ ID NO: 362420 - DNA, 86 bp, Homo sapiens; identical to SEQ ID NO: 337004
  chr1:31474705-31474791
  hypo

SEQ ID NO: 362421 - DNA, 80 bp, Homo sapiens; identical to SEQ ID NO: 347804
  chr1:31863055-31863135
  hypo

SEQ ID NO: 362422 - DNA, 317 bp, Homo sapiens; identical to SEQ ID NO: 352840
  chr1:32826720-32827037
  hypo

SEQ ID NO: 362423 - DNA, 62 bp, Homo sapiens; identical to SEQ ID NO: 337008
  chr1:33016544-33016606
  hypo

SEQ ID NO: 362424 - DNA, 33 bp, Homo sapiens; identical to SEQ ID NO: 349208
  chr1:33438467-33438500
  hypo

SEQ ID NO: 362425 - DNA, 289 bp, Homo sapiens; identical to SEQ ID NO: 352842
  chr1:33441642-33441931
  hypo

SEQ ID NO: 362426 - DNA, 168 bp, Homo sapiens
  chr1:33741929-33742097
  hypo
cgtcctcttcttcccgcagctggacaacctggttctgattaacaagatcaaggagcagctgatggccgagaagatcaggccgcctcacctgccgcccacgtcggcctcgtcgcagcagccgttgctagtgccgccggcacccgccgagagcagccaggccgtcatgtc

SEQ ID NO: 362427 - DNA, 638 bp, Homo sapiens; identical to SEQ ID NO: 278237
  chr1:33896186-33896824
  hypo

SEQ ID NO: 362428 - DNA, 224 bp, Homo sapiens; identical to SEQ ID NO: 197453
  chr1:34629913-34630137
  hypo

SEQ ID NO: 362429 - DNA, 252 bp, Homo sapiens; identical to SEQ ID NO: 278242
  chr1:35394790-35395042
  hypo

SEQ ID NO: 362430 - DNA, 138 bp, Homo sapiens; identical to SEQ ID NO: 337016
  chr1:35650183-35650321
  hypo

SEQ ID NO: 362431 - DNA, 423 bp, Homo sapiens; identical to SEQ ID NO: 349217
  chr1:38512641-38513064
  hypo

SEQ ID NO: 362432 - DNA, 62 bp, Homo sapiens; identical to SEQ ID NO: 356737
  chr1:39043982-39044044
  hypo

SEQ ID NO: 362433 - DNA, 66 bp, Homo sapiens; identical to SEQ ID NO: 356738
  chr1:39044466-39044532
  hypo

SEQ ID NO: 362434 - DNA, 696 bp, Homo sapiens; identical to SEQ ID NO: 349219
  chr1:39956640-39957336
  hypo

SEQ ID NO: 362435 - DNA, 93 bp, Homo sapiens; identical to SEQ ID NO: 337029
  chr1:40030094-40030187
  hypo

SEQ ID NO: 362436 - DNA, 130 bp, Homo sapiens; identical to SEQ ID NO: 337031
  chr1:40771005-40771135
  hypo

SEQ ID NO: 362437 - DNA, 334 bp, Homo sapiens; identical to SEQ ID NO: 337032
  chr1:41281568-41281902
  hypo

SEQ ID NO: 362438 - DNA, 69 bp, Homo sapiens
  chr1:41451907-41451976
  hypo
cggggagtctcccaagagaggccatttgagctgagaggccagtcacagcgagagtggaatgagaagtgc

SEQ ID NO: 362439 - DNA, 99 bp, Homo sapiens; identical to SEQ ID NO: 345702
  chr1:41485949-41486048
  hypo

SEQ ID NO: 362440 - DNA, 91 bp, Homo sapiens; identical to SEQ ID NO: 345703
  chr1:41486164-41486255
  hypo

SEQ ID NO: 362441 - DNA, 462 bp, Homo sapiens; identical to SEQ ID NO: 330784
  chr1:41832027-41832489
  hypo

SEQ ID NO: 362442 - DNA, 132 bp, Homo sapiens; identical to SEQ ID NO: 352851
  chr1:42633144-42633276
  hypo

SEQ ID NO: 362443 - DNA, 37 bp, Homo sapiens; identical to SEQ ID NO: 347810
  chr1:43842627-43842664
  hypo

SEQ ID NO: 362444 - DNA, 856 bp, Homo sapiens; identical to SEQ ID NO: 337041
  chr1:43888937-43889793
  hypo

SEQ ID NO: 362445 - DNA, 148 bp, Homo sapiens; identical to SEQ ID NO: 337042
  chr1:44132677-44132825
  hypo

SEQ ID NO: 362446 - DNA, 254 bp, Homo sapiens
  chr1:44170219-44170473
  hypo
cgagccatttctgggcacgtggcagcagtcgctgatctcccagctgaggggctgagcactggaatgctgtggctgcactggccccagtccatagaggggtcaactatgctggctggactggctgccttgttcctggcctaggacttagcttcataactatcacctgcaccgactaggctgaggtgctggtacttgccccaacccctacttttgtatttatatgtgtgtgtgtgtgtgcgtgcgtgcgtgcgtgc

SEQ ID NO: 362447 - DNA, 59 bp, Homo sapiens; identical to SEQ ID NO: 347811
  chr1:44351032-44351091
  hypo

SEQ ID NO: 362448 - DNA, 140 bp, Homo sapiens; identical to SEQ ID NO: 352855
  chr1:44717932-44718072
  hypo

SEQ ID NO: 362449 - DNA, 138 bp, Homo sapiens; identical to SEQ ID NO: 352856
  chr1:44718164-44718302
  hypo

SEQ ID NO: 362450 - DNA, 105 bp, Homo sapiens; identical to SEQ ID NO: 347812
  chr1:44726788-44726893
  hypo

SEQ ID NO: 362451 - DNA, 361 bp, Homo sapiens; identical to SEQ ID NO: 337050
  chr1:44971165-44971526
  hypo

SEQ ID NO: 362452 - DNA, 335 bp, Homo sapiens; identical to SEQ ID NO: 337051
  chr1:45087586-45087921
  hypo

SEQ ID NO: 362453 - DNA, 559 bp, Homo sapiens
  chr1:45106068-45106627
  hypo
cgcctgttgggaggggtgaggagaggtggcaaggagcaaggcaccttctgtcccccgtggcaactgatgggatttaatcgccttttggaacacaattgttaagctaggacagagggagtgcaggcagaaggagcaagtatcaatggttttaaacggcgtctgtctctctgcgtctctcctgacgtgaggcagtgaaacgcgttatcgaggaggcccggaaagtggctaagtgcgtttgacacacgccaactccctgcctccacactggataattgcattgtcaactgttcagcgaggtggcaggtgacactgcaggccgattgattgtcccgcatcgcagctccccagactgtcagctccccaatcgatggcgtttacacaagacaccgtaactgcatctgtaactaattccagtgtaaaactcgccggaagctgctgcccctgccctccgtgttggagagcacaggcccctggagggccccgagacgtttcctttctccctgggctctggttttgttgggagcagcaggtgaggaaatcgatgcctccttttttgtgg

SEQ ID NO: 362454 - DNA, 174 bp, Homo sapiens; identical to SEQ ID NO: 337055
  chr1:45268631-45268805
  hypo

SEQ ID NO: 362455 - DNA, 93 bp, Homo sapiens; identical to SEQ ID NO: 337056
  chr1:46111798-46111891
  hypo

SEQ ID NO: 362456 - DNA, 267 bp, Homo sapiens; identical to SEQ ID NO: 337057
  chr1:46500322-46500589
  hypo

SEQ ID NO: 362457 - DNA, 48 bp, Homo sapiens
  chr1:46744609-46744657
  hypo
cggagccgccggatggcttccctggctgtgactgcatcctggtccagc

SEQ ID NO: 362458 - DNA, 209 bp, Homo sapiens; identical to SEQ ID NO: 337062
  chr1:46963465-46963674
  hypo

SEQ ID NO: 362459 - DNA, 97 bp, Homo sapiens; identical to SEQ ID NO: 352861
  chr1:47035276-47035373
  hypo

SEQ ID NO: 362460 - DNA, 233 bp, Homo sapiens; identical to SEQ ID NO: 352862
  chr1:47035403-47035636
  hypo

SEQ ID NO: 362461 - DNA, 232 bp, Homo sapiens; identical to SEQ ID NO: 352863
  chr1:47041011-47041243
  hypo

SEQ ID NO: 362462 - DNA, 37 bp, Homo sapiens; identical to SEQ ID NO: 352864
  chr1:47041273-47041310
  hypo

SEQ ID NO: 362463 - DNA, 430 bp, Homo sapiens; identical to SEQ ID NO: 345705
  chr1:47685395-47685825
  hypo

SEQ ID NO: 362464 - DNA, 159 bp, Homo sapiens; identical to SEQ ID NO: 349233
  chr1:48190715-48190874
  hypo

SEQ ID NO: 362465 - DNA, 428 bp, Homo sapiens; identical to SEQ ID NO: 337069
  chr1:48459812-48460240
  hypo

SEQ ID NO: 362466 - DNA, 677 bp, Homo sapiens; identical to SEQ ID NO: 356759
  chr1:48462497-48463174
  hypo

SEQ ID NO: 362467 - DNA, 268 bp, Homo sapiens; identical to SEQ ID NO: 337074
  chr1:51439584-51439852
  hypo

SEQ ID NO: 362468 - DNA, 196 bp, Homo sapiens; identical to SEQ ID NO: 345706
  chr1:51763389-51763585
  hypo

SEQ ID NO: 362469 - DNA, 189 bp, Homo sapiens; identical to SEQ ID NO: 330827
  chr1:52081941-52082130
  hypo

SEQ ID NO: 362470 - DNA, 322 bp, Homo sapiens; identical to SEQ ID NO: 197534
  chr1:52194968-52195290
  hypo

SEQ ID NO: 362471 - DNA, 108 bp, Homo sapiens; identical to SEQ ID NO: 337078
  chr1:52659468-52659576
  hypo

SEQ ID NO: 362472 - DNA, 52 bp, Homo sapiens; identical to SEQ ID NO: 337079
  chr1:52879577-52879629
  hypo

SEQ ID NO: 362473 - DNA, 153 bp, Homo sapiens; identical to SEQ ID NO: 337082
  chr1:53238160-53238313
  hypo

SEQ ID NO: 362474 - DNA, 605 bp, Homo sapiens; identical to SEQ ID NO: 349244
  chr1:54204704-54205309
  hypo

SEQ ID NO: 362475 - DNA, 238 bp, Homo sapiens; identical to SEQ ID NO: 337086
  chr1:54408693-54408931
  hypo

SEQ ID NO: 362476 - DNA, 206 bp, Homo sapiens; identical to SEQ ID NO: 337087
  chr1:54474577-54474783
  hypo

SEQ ID NO: 362477 - DNA, 122 bp, Homo sapiens; identical to SEQ ID NO: 352876
  chr1:54694091-54694213
  hypo

SEQ ID NO: 362478 - DNA, 148 bp, Homo sapiens; identical to SEQ ID NO: 337089
  chr1:55066953-55067101
  hypo

SEQ ID NO: 362479 - DNA, 164 bp, Homo sapiens; identical to SEQ ID NO: 337091
  chr1:55620065-55620229
  hypo

SEQ ID NO: 362480 - DNA, 211 bp, Homo sapiens; identical to SEQ ID NO: 337094
  chr1:61601555-61601766
  hypo

SEQ ID NO: 362481 - DNA, 92 bp, Homo sapiens; identical to SEQ ID NO: 337096
  chr1:61833628-61833720
  hypo

SEQ ID NO: 362482 - DNA, 391 bp, Homo sapiens; identical to SEQ ID NO: 337097
  chr1:61913163-61913554
  hypo

SEQ ID NO: 362483 - DNA, 420 bp, Homo sapiens; identical to SEQ ID NO: 197564
  chr1:62207842-62208262
  hypo

SEQ ID NO: 362484 - DNA, 203 bp, Homo sapiens; identical to SEQ ID NO: 356781
  chr1:62208291-62208494
  hypo

SEQ ID NO: 362485 - DNA, 205 bp, Homo sapiens; identical to SEQ ID NO: 356782
  chr1:62784150-62784355
  hypo

SEQ ID NO: 362486 - DNA, 47 bp, Homo sapiens; identical to SEQ ID NO: 349260
  chr1:67773780-67773827
  hypo

SEQ ID NO: 362487 - DNA, 34 bp, Homo sapiens
  chr1:70710406-70710440
  hypo
tctaggagtcggcgacgatccaaaagcccaaggc

SEQ ID NO: 362488 - DNA, 59 bp, Homo sapiens; identical to SEQ ID NO: 337104
  chr1:78463740-78463799
  hypo

SEQ ID NO: 362489 - DNA, 800 bp, Homo sapiens; identical to SEQ ID NO: 356819
  chr1:85462482-85463282
  hypo

SEQ ID NO: 362490 - DNA, 155 bp, Homo sapiens; identical to SEQ ID NO: 337108
  chr1:85743342-85743497
  hypo

SEQ ID NO: 362491 - DNA, 77 bp, Homo sapiens; identical to SEQ ID NO: 337109
  chr1:86277780-86277857
  hypo

SEQ ID NO: 362492 - DNA, 1156 bp, Homo sapiens; identical to SEQ ID NO: 330887
  chr1:90098160-90099316
  hypo

SEQ ID NO: 362493 - DNA, 437 bp, Homo sapiens; identical to SEQ ID NO: 344960
  chr1:90308855-90309292
  hypo

SEQ ID NO: 362494 - DNA, 154 bp, Homo sapiens; identical to SEQ ID NO: 356828
  chr1:91183993-91184147
  hypo

SEQ ID NO: 362495 - DNA, 181 bp, Homo sapiens
  chr1:94047877-94048058
  hypo
cgtgctgggcgatgaccttggggtcgttgttggtgaacagttcttttgcacgtttcaacattgctgtttccaggggcttattctcagggggaaggaactttgactcaaactcgttgggcctgaaggaggagacagtctccaggaggggcgtcacaaactcgcccttgtcccactgcccctt

SEQ ID NO: 362496 - DNA, 329 bp, Homo sapiens; identical to SEQ ID NO: 297512
  chr1:94048088-94048417
  hypo

SEQ ID NO: 362497 - DNA, 37 bp, Homo sapiens; identical to SEQ ID NO: 337119
  chr1:94354617-94354654
  hypo

SEQ ID NO: 362498 - DNA, 244 bp, Homo sapiens; identical to SEQ ID NO: 337120
  chr1:94495968-94496212
  hypo

SEQ ID NO: 362499 - DNA, 501 bp, Homo sapiens; identical to SEQ ID NO: 346354
  chr1:94702434-94702935
  hypo

SEQ ID NO: 362500 - DNA, 88 bp, Homo sapiens; identical to SEQ ID NO: 197650
  chr1:94702990-94703078
  hypo

SEQ ID NO: 362501 - DNA, 221 bp, Homo sapiens; identical to SEQ ID NO: 197651
  chr1:94703103-94703324
  hypo

SEQ ID NO: 362502 - DNA, 157 bp, Homo sapiens; identical to SEQ ID NO: 356839
  chr1:94703357-94703514
  hypo

SEQ ID NO: 362503 - DNA, 759 bp, Homo sapiens; identical to SEQ ID NO: 349289
  chr1:99126872-99127631
  hypo

SEQ ID NO: 362504 - DNA, 325 bp, Homo sapiens; identical to SEQ ID NO: 344965
  chr1:99127671-99127996
  hypo

SEQ ID NO: 362505 - DNA, 78 bp, Homo sapiens
  chr1:100928315-100928393
  hypo
cgctggcttcgagcactatgacctcttcttcatagatggcagcacacccagtgacaacatcgtgcgaaggttcctgaa

SEQ ID NO: 362506 - DNA, 60 bp, Homo sapiens
  chr1:100928423-100928483
  hypo
cgttcactgcaaaggtgtgtgcaaggcctcggtggtggtggctgtgcttatcgaaggggc

SEQ ID NO: 362507 - DNA, 288 bp, Homo sapiens; identical to SEQ ID NO: 278688
  chr1:101702081-101702369
  hypo

SEQ ID NO: 362508 - DNA, 392 bp, Homo sapiens; identical to SEQ ID NO: 278689
  chr1:101702796-101703188
  hypo

SEQ ID NO: 362509 - DNA, 1045 bp, Homo sapiens; identical to SEQ ID NO: 356848
  chr1:107599205-107600250
  hypo

SEQ ID NO: 362510 - DNA, 49 bp, Homo sapiens; identical to SEQ ID NO: 349294
  chr1:107684495-107684544
  hypo

SEQ ID NO: 362511 - DNA, 113 bp, Homo sapiens; identical to SEQ ID NO: 349296
  chr1:109204221-109204334
  hypo

SEQ ID NO: 362512 - DNA, 229 bp, Homo sapiens; identical to SEQ ID NO: 337133
  chr1:110170726-110170955
  hypo

SEQ ID NO: 362513 - DNA, 364 bp, Homo sapiens; identical to SEQ ID NO: 349303
  chr1:110753530-110753894
  hypo

SEQ ID NO: 362514 - DNA, 46 bp, Homo sapiens; identical to SEQ ID NO: 197698
  chr1:110753957-110754003
  hypo

SEQ ID NO: 362515 - DNA, 243 bp, Homo sapiens; identical to SEQ ID NO: 337139
  chr1:110771992-110772235
  hypo

SEQ ID NO: 362516 - DNA, 818 bp, Homo sapiens; identical to SEQ ID NO: 330937
  chr1:113498720-113499538
  hypo

SEQ ID NO: 362517 - DNA, 699 bp, Homo sapiens; identical to SEQ ID NO: 349308
  chr1:113932580-113933279
  hypo

SEQ ID NO: 362518 - DNA, 264 bp, Homo sapiens; identical to SEQ ID NO: 349309
  chr1:113933305-113933569
  hypo

SEQ ID NO: 362519 - DNA, 330 bp, Homo sapiens
  chr1:114522986-114523316
  hypo
cggcatgctgctgagctgcgggacttcaagaacaagatgctgccactgctggaggtggcagagaaggagcgggaggcactcagaactgaggccgacaccatctccgggagagtggatcgtctggagcgggaggtagactatctggagacccagaacccagctctgccctgtgtagagtttgatgagaaggtgactggaggccctgggaccaaaggcaagggaagaaggaatgagaagtacgatatggtgacaggtaaataatctgaaagcaggcccctaactcttctcagaaccgatattcttccttccttgcttcttactctttttttc

SEQ ID NO: 362520 - DNA, 76 bp, Homo sapiens
  chr1:115261261-115261337
  hypo
cgaagaaccattaggcgaggagcactggcatcatccagagtgatattcttcaagcgattgaccaaccgatcaggtc

SEQ ID NO: 362521 - DNA, 1132 bp, Homo sapiens; identical to SEQ ID NO: 330944
  chr1:116184428-116185560
  hypo

SEQ ID NO: 362522 - DNA, 51 bp, Homo sapiens; identical to SEQ ID NO: 207134
  chr1:116214053-116214104
  hypo

SEQ ID NO: 362523 - DNA, 118 bp, Homo sapiens; identical to SEQ ID NO: 337151
  chr1:116219361-116219479
  hypo

SEQ ID NO: 362524 - DNA, 200 bp, Homo sapiens; identical to SEQ ID NO: 337153
  chr1:117630364-117630564
  hypo

SEQ ID NO: 362525 - DNA, 144 bp, Homo sapiens; identical to SEQ ID NO: 337154
  chr1:117918966-117919110
  hypo

SEQ ID NO: 362526 - DNA, 204 bp, Homo sapiens; identical to SEQ ID NO: 337155
  chr1:118163688-118163892
  hypo

SEQ ID NO: 362527 - DNA, 109 bp, Homo sapiens; identical to SEQ ID NO: 337157
  chr1:118172998-118173107
  hypo

SEQ ID NO: 362528 - DNA, 208 bp, Homo sapiens
  chr1:118173578-118173786
  hypo
cgcccagaatctagggagctggagcctgtcgggaggcttggtttcataccattcctcacccagctcagagcaacgcaggctacctgttctggccatgactggatcacaggtctcccagctcagggcattttcaccacagcaggccatcccagggccaccttttacttaggaagtttccgaaaatgggaaatgtccctaagggaaaggc

SEQ ID NO: 362529 - DNA, 63 bp, Homo sapiens
  chr1:118173816-118173879
  hypo
gggtgcttccctggaaaaaaggtatccgaggctatagtgttcgagagagagagagatggagac

SEQ ID NO: 362530 - DNA, 49 bp, Homo sapiens; identical to SEQ ID NO: 337160
  chr1:150935078-150935127
  hypo

SEQ ID NO: 362531 - DNA, 68 bp, Homo sapiens; identical to SEQ ID NO: 337162
  chr1:151373761-151373829
  hypo

SEQ ID NO: 362532 - DNA, 271 bp, Homo sapiens; identical to SEQ ID NO: 337163
  chr1:151378250-151378521
  hypo

SEQ ID NO: 362533 - DNA, 77 bp, Homo sapiens; identical to SEQ ID NO: 337164
  chr1:151597643-151597720
  hypo

SEQ ID NO: 362534 - DNA, 369 bp, Homo sapiens; identical to SEQ ID NO: 337167
  chr1:152192964-152193333
  hypo

SEQ ID NO: 362535 - DNA, 298 bp, Homo sapiens; identical to SEQ ID NO: 337168
  chr1:152733117-152733415
  hypo

SEQ ID NO: 362536 - DNA, 253 bp, Homo sapiens; identical to SEQ ID NO: 347831
  chr1:153540242-153540495
  hypo

SEQ ID NO: 362537 - DNA, 193 bp, Homo sapiens; identical to SEQ ID NO: 337172
  chr1:154179803-154179996
  hypo

SEQ ID NO: 362538 - DNA, 447 bp, Homo sapiens; identical to SEQ ID NO: 346369
  chr1:154297543-154297990
  hypo

SEQ ID NO: 362539 - DNA, 72 bp, Homo sapiens; identical to SEQ ID NO: 278861
  chr1:154298038-154298110
  hypo

SEQ ID NO: 362540 - DNA, 244 bp, Homo sapiens; identical to SEQ ID NO: 349324
  chr1:154474305-154474549
  hypo

SEQ ID NO: 362541 - DNA, 178 bp, Homo sapiens
  chr1:154685569-154685747
  hypo
cgttaccgtctggtccttgctagcatgcttcacagccgtgcaaactcaagcccaacctcaggagtccctcaatgtgcagctcataaaatgacacggaaaaggtttagtcagctcattaatttcacgcagagacacacctgagcgatttcacttaagaaacaaacaccaagtttcaaaa

SEQ ID NO: 362542 - DNA, 78 bp, Homo sapiens
  chr1:154685777-154685855
  hypo
gaaacaaacttgagcctaggtatttttgaaccaagcagaaatttttctttgcttgcctggtcccgcgctgtccagtgc

SEQ ID NO: 362543 - DNA, 223 bp, Homo sapiens; identical to SEQ ID NO: 337176
  chr1:154931252-154931475
  hypo

SEQ ID NO: 362544 - DNA, 140 bp, Homo sapiens; identical to SEQ ID NO: 352914
  chr1:154954433-154954573
  hypo

SEQ ID NO: 362545 - DNA, 207 bp, Homo sapiens; identical to SEQ ID NO: 337178
  chr1:155012870-155013077
  hypo

SEQ ID NO: 362546 - DNA, 269 bp, Homo sapiens; identical to SEQ ID NO: 356888
  chr1:155164146-155164415
  hypo

SEQ ID NO: 362547 - DNA, 594 bp, Homo sapiens; identical to SEQ ID NO: 356889
  chr1:155164455-155165049
  hypo

SEQ ID NO: 362548 - DNA, 58 bp, Homo sapiens; identical to SEQ ID NO: 352915
  chr1:155311726-155311784
  hypo

SEQ ID NO: 362549 - DNA, 353 bp, Homo sapiens; identical to SEQ ID NO: 352916
  chr1:155911571-155911924
  hypo

SEQ ID NO: 362550 - DNA, 83 bp, Homo sapiens; identical to SEQ ID NO: 352917
  chr1:155911954-155912037
  hypo

SEQ ID NO: 362551 - DNA, 467 bp, Homo sapiens; identical to SEQ ID NO: 337188
  chr1:156255276-156255743
  hypo

SEQ ID NO: 362552 - DNA, 91 bp, Homo sapiens; identical to SEQ ID NO: 352918
  chr1:156432033-156432124
  hypo

SEQ ID NO: 362553 - DNA, 202 bp, Homo sapiens; identical to SEQ ID NO: 197783
  chr1:156594227-156594429
  hypo

SEQ ID NO: 362554 - DNA, 47 bp, Homo sapiens; identical to SEQ ID NO: 352919
  chr1:158669657-158669704
  hypo

SEQ ID NO: 362555 - DNA, 58 bp, Homo sapiens
  chr1:158710986-158711044
  hypo
tgtgcagatttgttacacggggattttgcgtgaagctgaggtttggagtacggatctc

SEQ ID NO: 362556 - DNA, 62 bp, Homo sapiens
  chr1:159869545-159869607
  hypo
cgcgcccggcccaccagtgctttttcccacaccacatccacaatctttggtccacagaggcc

SEQ ID NO: 362557 - DNA, 329 bp, Homo sapiens; identical to SEQ ID NO: 278955
  chr1:160370270-160370599
  hypo

SEQ ID NO: 362558 - DNA, 232 bp, Homo sapiens; identical to SEQ ID NO: 356902
  chr1:160370629-160370861
  hypo

SEQ ID NO: 362559 - DNA, 86 bp, Homo sapiens; identical to SEQ ID NO: 337203
  chr1:160878353-160878439
  hypo

SEQ ID NO: 362560 - DNA, 287 bp, Homo sapiens; identical to SEQ ID NO: 337204
  chr1:160953524-160953811
  hypo

SEQ ID NO: 362561 - DNA, 158 bp, Homo sapiens; identical to SEQ ID NO: 337206
  chr1:161367435-161367593
  hypo

SEQ ID NO: 362562 - DNA, 293 bp, Homo sapiens; identical to SEQ ID NO: 344978
  chr1:161369566-161369859
  hypo

SEQ ID NO: 362563 - DNA, 299 bp, Homo sapiens; identical to SEQ ID NO: 344979
  chr1:161369945-161370244
  hypo

SEQ ID NO: 362564 - DNA, 712 bp, Homo sapiens; identical to SEQ ID NO: 349339
  chr1:161409991-161410703
  hypo

SEQ ID NO: 362565 - DNA, 59 bp, Homo sapiens
  chr1:161450487-161450546
  hypo
cctccttacactcggggcacgtgagcttgtcctgcactggctgcgctcccacgcatgac

SEQ ID NO: 362566 - DNA, 903 bp, Homo sapiens; identical to SEQ ID NO: 331011
  chr1:162039148-162040051
  hypo

SEQ ID NO: 362567 - DNA, 55 bp, Homo sapiens; identical to SEQ ID NO: 331013
  chr1:163378364-163378419
  hypo

SEQ ID NO: 362568 - DNA, 180 bp, Homo sapiens
  chr1:163392854-163393034
  hypo
cgccagtggtattgtggtattgccggcccccacctcccgcacagcggtgcttcacggaattcctgaggcgtactgggagcaccggcacagccgccgccatttcccggcaggggcacatgggagcgacagcgaggcgtcagggccggaagtgtccctgtctttgccctcgttggctactgc

SEQ ID NO: 362569 - DNA, 35 bp, Homo sapiens
  chr1:163393064-163393099
  hypo
aggcctttggtggctgcgcacgttggggaggggac

SEQ ID NO: 362570 - DNA, 132 bp, Homo sapiens; identical to SEQ ID NO: 337214
  chr1:164604732-164604864
  hypo

SEQ ID NO: 362571 - DNA, 55 bp, Homo sapiens
  chr1:164637890-164637945
  hypo
cgccttaccttccccaggcgcagccaacacttgacatctttttatcagatgagct

SEQ ID NO: 362572 - DNA, 198 bp, Homo sapiens
  chr1:164637985-164638183
  hypo
agccacagcccctcagcttgttagactgaaagaatgtgccgttttaattaatgatatgtaaatatccttgaatgggccgcatttgcatattaagagagatttgcggaatctgcggagtaatatattttaattaaggattaattaaaaataatgggaatttcatttcgcctggcagaatccgtttagattttagcacac

SEQ ID NO: 362573 - DNA, 295 bp, Homo sapiens; identical to SEQ ID NO: 337216
  chr1:164761703-164761998
  hypo

SEQ ID NO: 362574 - DNA, 515 bp, Homo sapiens; identical to SEQ ID NO: 337217
  chr1:164768766-164769281
  hypo

SEQ ID NO: 362575 - DNA, 103 bp, Homo sapiens; identical to SEQ ID NO: 278995
  chr1:165204594-165204697
  hypo

SEQ ID NO: 362576 - DNA, 93 bp, Homo sapiens; identical to SEQ ID NO: 278996
  chr1:165204732-165204825
  hypo

SEQ ID NO: 362577 - DNA, 629 bp, Homo sapiens; identical to SEQ ID NO: 356926
  chr1:166135586-166136215
  hypo

SEQ ID NO: 362578 - DNA, 238 bp, Homo sapiens; identical to SEQ ID NO: 337221
  chr1:167096217-167096455
  hypo

SEQ ID NO: 362579 - DNA, 81 bp, Homo sapiens; identical to SEQ ID NO: 337222
  chr1:167221039-167221120
  hypo

SEQ ID NO: 362580 - DNA, 31 bp, Homo sapiens; identical to SEQ ID NO: 352929
  chr1:167393552-167393583
  hypo

SEQ ID NO: 362581 - DNA, 187 bp, Homo sapiens; identical to SEQ ID NO: 352930
  chr1:167393613-167393800
  hypo

SEQ ID NO: 362582 - DNA, 205 bp, Homo sapiens
  chr1:167430238-167430443
  hypo
cgcgctgtgagcattcgcctatgacgtactttgcgtggatcaaaggccccacaaagcctgccgtgcctgcagctgccacgctggggacatgctggggacgtgggcgatcgtgggctgagaggcagactgctgggctgccgcctcccatggcagctttctcccatgggagggagttcaccttgcggcttccaaactcagccgggcc

SEQ ID NO: 362583 - DNA, 200 bp, Homo sapiens; identical to SEQ ID NO: 337225
  chr1:167486836-167487036
  hypo

SEQ ID NO: 362584 - DNA, 160 bp, Homo sapiens; identical to SEQ ID NO: 352932
  chr1:168150817-168150977
  hypo

SEQ ID NO: 362585 - DNA, 69 bp, Homo sapiens; identical to SEQ ID NO: 347838
  chr1:171554936-171555005
  hypo

SEQ ID NO: 362586 - DNA, 122 bp, Homo sapiens; identical to SEQ ID NO: 347839
  chr1:171555061-171555183
  hypo

SEQ ID NO: 362587 - DNA, 181 bp, Homo sapiens; identical to SEQ ID NO: 337233
  chr1:171570080-171570261
  hypo

SEQ ID NO: 362588 - DNA, 426 bp, Homo sapiens
  chr1:172357766-172358192
  hypo
cgcaaggcccacatccggccgaggaccagctcctgccattccctctcctggcccccactctggggctcctccagtcccattccgtccaggcccattacctcctttccccagcagcagtgactccttcggagcccctccacaagttccatctaggcctacgagggccccgcccagtgtcccaaggtaaggcatggagcagaaattgggggggtagtgcgccttggttctcttctcatagaatgacagacaaaatttatttgaaagagaaaattgcaaagatcttatcgtacgtgtttgcagttttcacaatgaacagagactataggaaaattgccaaccctgttatgccatttaaaaatcacttgtgatcattgaaatttctcatttatcaattggcacagactaaataggactaaagaacactcc

SEQ ID NO: 362589 - DNA, 301 bp, Homo sapiens; identical to SEQ ID NO: 349355
  chr1:175048508-175048809
  hypo

SEQ ID NO: 362590 - DNA, 180 bp, Homo sapiens; identical to SEQ ID NO: 347840
  chr1:175372314-175372494
  hypo

SEQ ID NO: 362591 - DNA, 145 bp, Homo sapiens; identical to SEQ ID NO: 347841
  chr1:175372572-175372717
  hypo

SEQ ID NO: 362592 - DNA, 152 bp, Homo sapiens; identical to SEQ ID NO: 347842
  chr1:175375048-175375200
  hypo

SEQ ID NO: 362593 - DNA, 111 bp, Homo sapiens; identical to SEQ ID NO: 337242
  chr1:175957595-175957706
  hypo

SEQ ID NO: 362594 - DNA, 693 bp, Homo sapiens; identical to SEQ ID NO: 356940
  chr1:178062419-178063112
  hypo

SEQ ID NO: 362595 - DNA, 475 bp, Homo sapiens; identical to SEQ ID NO: 197861
  chr1:178063150-178063625
  hypo

SEQ ID NO: 362596 - DNA, 112 bp, Homo sapiens; identical to SEQ ID NO: 356942
  chr1:178063733-178063845
  hypo

SEQ ID NO: 362597 - DNA, 109 bp, Homo sapiens; identical to SEQ ID NO: 207313
  chr1:178531644-178531753
  hypo

SEQ ID NO: 362598 - DNA, 51 bp, Homo sapiens
  chr1:178531798-178531849
  hypo
tctaactgtatcctagaggctctaggttcaggctgaacggaagtacatgtc

SEQ ID NO: 362599 - DNA, 62 bp, Homo sapiens; identical to SEQ ID NO: 337246
  chr1:179333937-179333999
  hypo

SEQ ID NO: 362600 - DNA, 43 bp, Homo sapiens; identical to SEQ ID NO: 337247
  chr1:179835828-179835871
  hypo

SEQ ID NO: 362601 - DNA, 194 bp, Homo sapiens; identical to SEQ ID NO: 356943
  chr1:180123493-180123687
  hypo

SEQ ID NO: 362602 - DNA, 587 bp, Homo sapiens; identical to SEQ ID NO: 356944
  chr1:180123700-180124287
  hypo

SEQ ID NO: 362603 - DNA, 131 bp, Homo sapiens
  chr1:180235795-180235926
  hypo
gtgcccttctcatggcgtcccacctgcccatccctcagagccctactcatgcaccgccacctctgagaagcgtcccagatctccacactgagagtaaatgctgaacacctccccggccgttagcactcgcc

SEQ ID NO: 362604 - DNA, 67 bp, Homo sapiens; identical to SEQ ID NO: 337250
  chr1:180478120-180478187
  hypo

SEQ ID NO: 362605 - DNA, 75 bp, Homo sapiens; identical to SEQ ID NO: 337251
  chr1:180892057-180892132
  hypo

SEQ ID NO: 362606 - DNA, 128 bp, Homo sapiens; identical to SEQ ID NO: 352945
  chr1:180919554-180919682
  hypo

SEQ ID NO: 362607 - DNA, 47 bp, Homo sapiens; identical to SEQ ID NO: 352946
  chr1:180919718-180919765
  hypo

SEQ ID NO: 362608 - DNA, 192 bp, Homo sapiens; identical to SEQ ID NO: 337254
  chr1:180945775-180945967
  hypo

SEQ ID NO: 362609 - DNA, 226 bp, Homo sapiens
  chr1:181382621-181382847
  hypo
cggcgcgggggcctcatcgagcagcgcgacatcatcaaggcccacgaggcgcacaagatgcagagcaccccgcaggcccggcgcaaggaatgggagtgagtatggcggggacgcgggggcgggcatggctggctgggcctgaggtcggggtgggttcctggagcggatgggccccgtgaggccgccctggagggtcgggagatgctttcgctgtgctgcgactaac

SEQ ID NO: 362610 - DNA, 121 bp, Homo sapiens; identical to SEQ ID NO: 337256
  chr1:181765823-181765944
  hypo

SEQ ID NO: 362611 - DNA, 202 bp, Homo sapiens; identical to SEQ ID NO: 352947
  chr1:181767556-181767758
  hypo

SEQ ID NO: 362612 - DNA, 85 bp, Homo sapiens; identical to SEQ ID NO: 352948
  chr1:181767807-181767892
  hypo

SEQ ID NO: 362613 - DNA, 110 bp, Homo sapiens; identical to SEQ ID NO: 331048
  chr1:182361452-182361562
  hypo

SEQ ID NO: 362614 - DNA, 249 bp, Homo sapiens; identical to SEQ ID NO: 344982
  chr1:182583799-182584048
  hypo

SEQ ID NO: 362615 - DNA, 40 bp, Homo sapiens; identical to SEQ ID NO: 344983
  chr1:182584613-182584653
  hypo

SEQ ID NO: 362616 - DNA, 151 bp, Homo sapiens; identical to SEQ ID NO: 331054
  chr1:184722819-184722970
  hypo

SEQ ID NO: 362617 - DNA, 388 bp, Homo sapiens; identical to SEQ ID NO: 337262
  chr1:193149436-193149824
  hypo

SEQ ID NO: 362618 - DNA, 146 bp, Homo sapiens; identical to SEQ ID NO: 337264
  chr1:197191306-197191452
  hypo

SEQ ID NO: 362619 - DNA, 255 bp, Homo sapiens; identical to SEQ ID NO: 331068
  chr1:200379717-200379972
  hypo

SEQ ID NO: 362620 - DNA, 135 bp, Homo sapiens; identical to SEQ ID NO: 337267
  chr1:200971336-200971471
  hypo

SEQ ID NO: 362621 - DNA, 329 bp, Homo sapiens; identical to SEQ ID NO: 337268
  chr1:201194921-201195250
  hypo

SEQ ID NO: 362622 - DNA, 133 bp, Homo sapiens
  chr1:201851148-201851281
  hypo
cctttagttagcagtcacgggaaaattccccattctcacggggatttagactaggtcttaaccatactttaccaagattccagtagcaaagcacccaaaagtaatcgcaataaaattccaatttttgtaggcc

SEQ ID NO: 362623 - DNA, 44 bp, Homo sapiens; identical to SEQ ID NO: 337271
  chr1:202009839-202009883
  hypo

SEQ ID NO: 362624 - DNA, 302 bp, Homo sapiens; identical to SEQ ID NO: 337275
  chr1:203134410-203134712
  hypo

SEQ ID NO: 362625 - DNA, 189 bp, Homo sapiens; identical to SEQ ID NO: 337279
  chr1:204124923-204125112
  hypo

SEQ ID NO: 362626 - DNA, 370 bp, Homo sapiens; identical to SEQ ID NO: 337281
  chr1:204197954-204198324
  hypo

SEQ ID NO: 362627 - DNA, 154 bp, Homo sapiens; identical to SEQ ID NO: 337282
  chr1:204199556-204199710
  hypo

SEQ ID NO: 362628 - DNA, 383 bp, Homo sapiens; identical to SEQ ID NO: 337283
  chr1:204226544-204226927
  hypo

SEQ ID NO: 362629 - DNA, 277 bp, Homo sapiens; identical to SEQ ID NO: 337284
  chr1:204228369-204228646
  hypo

SEQ ID NO: 362630 - DNA, 279 bp, Homo sapiens; identical to SEQ ID NO: 345722
  chr1:204530924-204531203
  hypo

SEQ ID NO: 362631 - DNA, 79 bp, Homo sapiens; identical to SEQ ID NO: 345723
  chr1:204531757-204531836
  hypo

SEQ ID NO: 362632 - DNA, 137 bp, Homo sapiens; identical to SEQ ID NO: 337288
  chr1:204537877-204538014
  hypo

SEQ ID NO: 362633 - DNA, 80 bp, Homo sapiens; identical to SEQ ID NO: 337289
  chr1:204540741-204540821
  hypo

SEQ ID NO: 362634 - DNA, 75 bp, Homo sapiens; identical to SEQ ID NO: 337290
  chr1:204913459-204913534
  hypo

SEQ ID NO: 362635 - DNA, 315 bp, Homo sapiens; identical to SEQ ID NO: 345724
  chr1:204955352-204955667
  hypo

SEQ ID NO: 362636 - DNA, 368 bp, Homo sapiens; identical to SEQ ID NO: 337293
  chr1:205038784-205039152
  hypo

SEQ ID NO: 362637 - DNA, 225 bp, Homo sapiens; identical to SEQ ID NO: 337294
  chr1:205245793-205246018
  hypo

SEQ ID NO: 362638 - DNA, 292 bp, Homo sapiens; identical to SEQ ID NO: 337295
  chr1:205273331-205273623
  hypo

SEQ ID NO: 362639 - DNA, 483 bp, Homo sapiens; identical to SEQ ID NO: 356986
  chr1:205313006-205313489
  hypo

SEQ ID NO: 362640 - DNA, 60 bp, Homo sapiens; identical to SEQ ID NO: 197925
  chr1:205425836-205425896
  hypo

SEQ ID NO: 362641 - DNA, 455 bp, Homo sapiens; identical to SEQ ID NO: 356989
  chr1:205425997-205426452
  hypo

SEQ ID NO: 362642 - DNA, 817 bp, Homo sapiens; identical to SEQ ID NO: 337301
  chr1:205631783-205632600
  hypo

SEQ ID NO: 362643 - DNA, 256 bp, Homo sapiens; identical to SEQ ID NO: 337302
  chr1:207195396-207195652
  hypo

SEQ ID NO: 362644 - DNA, 213 bp, Homo sapiens
  chr1:207200605-207200818
  hypo
cggcggaaaaagtctcatttgcccagttgctctctaaggtcgtcccatcctattctctatagagccagggctgactcaggcagaaagcacccactggtgttgtgaatcactccccaacaatgaaagagaaggtgcagtgagccaggatgggtggcaggaaaggatagggcagggcagggcagggcaggtgtgcagagagcagaccaggttgcg

SEQ ID NO: 362645 - DNA, 92 bp, Homo sapiens; identical to SEQ ID NO: 337304
  chr1:207240948-207241040
  hypo

SEQ ID NO: 362646 - DNA, 112 bp, Homo sapiens
  chr1:207936524-207936636
  hypo
cgtccggcctcccacctccagctgcaattgcattctgacctgggcaagtaggaacacgtagtggagatcctgatggagacctgagccaggcgtcccggagtgctggccaggc

SEQ ID NO: 362647 - DNA, 168 bp, Homo sapiens
  chr1:212605105-212605273
  hypo
cgggcatcctcattcctccgcatttatgcacctgatcctttgaccaaagtgctcttccctctagaccgcctccttcgcctcctgtagatttttatgcaaataccctgttctcagtgaggccttccctaacctgcctatttaaaatgaccatccccataaccgggcacc

SEQ ID NO: 362648 - DNA, 257 bp, Homo sapiens; identical to SEQ ID NO: 356993
  chr1:212873467-212873724
  hypo

SEQ ID NO: 362649 - DNA, 224 bp, Homo sapiens; identical to SEQ ID NO: 197940
  chr1:212873750-212873974
  hypo

SEQ ID NO: 362650 - DNA, 456 bp, Homo sapiens; identical to SEQ ID NO: 337312
  chr1:213030005-213030461
  hypo

SEQ ID NO: 362651 - DNA, 279 bp, Homo sapiens; identical to SEQ ID NO: 331104
  chr1:214453844-214454123
  hypo

SEQ ID NO: 362652 - DNA, 204 bp, Homo sapiens; identical to SEQ ID NO: 352965
  chr1:214637813-214638017
  hypo

SEQ ID NO: 362653 - DNA, 34 bp, Homo sapiens; identical to SEQ ID NO: 352966
  chr1:214638090-214638124
  hypo

SEQ ID NO: 362654 - DNA, 592 bp, Homo sapiens; identical to SEQ ID NO: 331107
  chr1:216774207-216774799
  hypo

SEQ ID NO: 362655 - DNA, 55 bp, Homo sapiens; identical to SEQ ID NO: 344990
  chr1:219347516-219347571
  hypo

SEQ ID NO: 362656 - DNA, 91 bp, Homo sapiens; identical to SEQ ID NO: 357010
  chr1:220102055-220102146
  hypo

SEQ ID NO: 362657 - DNA, 592 bp, Homo sapiens; identical to SEQ ID NO: 357012
  chr1:220701523-220702115
  hypo

SEQ ID NO: 362658 - DNA, 198 bp, Homo sapiens; identical to SEQ ID NO: 349403
  chr1:220921368-220921566
  hypo

SEQ ID NO: 362659 - DNA, 63 bp, Homo sapiens; identical to SEQ ID NO: 337325
  chr1:224300452-224300515
  hypo

SEQ ID NO: 362660 - DNA, 234 bp, Homo sapiens; identical to SEQ ID NO: 337326
  chr1:224345162-224345396
  hypo

SEQ ID NO: 362661 - DNA, 64 bp, Homo sapiens; identical to SEQ ID NO: 337327
  chr1:224368640-224368704
  hypo

SEQ ID NO: 362662 - DNA, 99 bp, Homo sapiens; identical to SEQ ID NO: 197977
  chr1:225117651-225117750
  hypo

SEQ ID NO: 362663 - DNA, 66 bp, Homo sapiens; identical to SEQ ID NO: 346403
  chr1:225117751-225117817
  hypo

SEQ ID NO: 362664 - DNA, 380 bp, Homo sapiens; identical to SEQ ID NO: 337330
  chr1:225597858-225598238
  hypo

SEQ ID NO: 362665 - DNA, 936 bp, Homo sapiens; identical to SEQ ID NO: 331128
  chr1:225614356-225615292
  hypo

SEQ ID NO: 362666 - DNA, 84 bp, Homo sapiens; identical to SEQ ID NO: 352974
  chr1:226062794-226062878
  hypo

SEQ ID NO: 362667 - DNA, 248 bp, Homo sapiens
  chr1:226077130-226077378
  hypo
cgttctctgcaagaggctcagttcccccagctgctggtaagtggacctagagtcttgttccttgctgcaaccaaacaactgacaggaaccagaatggctcaggcaacgccagggctctaagggccaatccagtctgcagggatgagcatccgggcccgtgctcagagggtcccggggcctcatgagatcctgagctggtggtccccagttgtgaaaccagatttcccactgttctggggggaccttcc

SEQ ID NO: 362668 - DNA, 135 bp, Homo sapiens; identical to SEQ ID NO: 352975
  chr1:226163215-226163350
  hypo

SEQ ID NO: 362669 - DNA, 54 bp, Homo sapiens; identical to SEQ ID NO: 337335
  chr1:226311830-226311884
  hypo

SEQ ID NO: 362670 - DNA, 294 bp, Homo sapiens
  chr1:226826337-226826631
  hypo
cgagccgctgcagcagcaacacacaagacagaactttgtcatgaacttgtacaacccacactcctggactcggagacagctcgccagctcttgctggcagggagcagcgtgacctcgggcacacaagatggggacaagcaggtctacccacagcaggtctgctgtgaagatttgctgcacgcttggcatgacacctggcagacggcgggcactgttctctctctcagggcatgggaaatgctctctggagctatggggccgatggctaagggagagtcagtgagtgtccgccaa

SEQ ID NO: 362671 - DNA, 311 bp, Homo sapiens; identical to SEQ ID NO: 337339
  chr1:226827405-226827716
  hypo

SEQ ID NO: 362672 - DNA, 84 bp, Homo sapiens
  chr1:226908290-226908374
  hypo
cggaacatgcctggcacataataggcacttctgaaatcattgctgctattatttttattattattgtgcatcctaagactgttt

SEQ ID NO: 362673 - DNA, 1206 bp, Homo sapiens; identical to SEQ ID NO: 197984
  chr1:226925659-226926865
  hypo

SEQ ID NO: 362674 - DNA, 49 bp, Homo sapiens; identical to SEQ ID NO: 344995
  chr1:226926951-226927000
  hypo

SEQ ID NO: 362675 - DNA, 269 bp, Homo sapiens; identical to SEQ ID NO: 352979
  chr1:228081860-228082129
  hypo

SEQ ID NO: 362676 - DNA, 46 bp, Homo sapiens; identical to SEQ ID NO: 352980
  chr1:228083620-228083666
  hypo

SEQ ID NO: 362677 - DNA, 264 bp, Homo sapiens; identical to SEQ ID NO: 337348
  chr1:228112950-228113214
  hypo

SEQ ID NO: 362678 - DNA, 330 bp, Homo sapiens; identical to SEQ ID NO: 337350
  chr1:228280981-228281311
  hypo

SEQ ID NO: 362679 - DNA, 203 bp, Homo sapiens; identical to SEQ ID NO: 337351
  chr1:228361379-228361582
  hypo

SEQ ID NO: 362680 - DNA, 829 bp, Homo sapiens; identical to SEQ ID NO: 337353
  chr1:228461610-228462439
  hypo

SEQ ID NO: 362681 - DNA, 199 bp, Homo sapiens; identical to SEQ ID NO: 352981
  chr1:228473703-228473902
  hypo

SEQ ID NO: 362682 - DNA, 110 bp, Homo sapiens; identical to SEQ ID NO: 352982
  chr1:228473932-228474042
  hypo

SEQ ID NO: 362683 - DNA, 69 bp, Homo sapiens; identical to SEQ ID NO: 352983
  chr1:228504692-228504761
  hypo

SEQ ID NO: 362684 - DNA, 358 bp, Homo sapiens; identical to SEQ ID NO: 347857
  chr1:228528433-228528791
  hypo

SEQ ID NO: 362685 - DNA, 50 bp, Homo sapiens; identical to SEQ ID NO: 347858
  chr1:228529382-228529432
  hypo

SEQ ID NO: 362686 - DNA, 253 bp, Homo sapiens; identical to SEQ ID NO: 279361
  chr1:228646941-228647194
  hypo

SEQ ID NO: 362687 - DNA, 117 bp, Homo sapiens; identical to SEQ ID NO: 279362
  chr1:228647317-228647434
  hypo

SEQ ID NO: 362688 - DNA, 328 bp, Homo sapiens; identical to SEQ ID NO: 198004
  chr1:228870899-228871227
  hypo

SEQ ID NO: 362689 - DNA, 128 bp, Homo sapiens; identical to SEQ ID NO: 337363
  chr1:229038524-229038652
  hypo

SEQ ID NO: 362690 - DNA, 129 bp, Homo sapiens; identical to SEQ ID NO: 337364
  chr1:229160222-229160351
  hypo

SEQ ID NO: 362691 - DNA, 109 bp, Homo sapiens; identical to SEQ ID NO: 337365
  chr1:229606426-229606535
  hypo

SEQ ID NO: 362692 - DNA, 273 bp, Homo sapiens; identical to SEQ ID NO: 337366
  chr1:230256241-230256514
  hypo

SEQ ID NO: 362693 - DNA, 262 bp, Homo sapiens; identical to SEQ ID NO: 337367
  chr1:230266303-230266565
  hypo

SEQ ID NO: 362694 - DNA, 85 bp, Homo sapiens; identical to SEQ ID NO: 337368
  chr1:230272610-230272695
  hypo

SEQ ID NO: 362695 - DNA, 219 bp, Homo sapiens; identical to SEQ ID NO: 337369
  chr1:230308302-230308521
  hypo

SEQ ID NO: 362696 - DNA, 248 bp, Homo sapiens; identical to SEQ ID NO: 337370
  chr1:230346868-230347116
  hypo

SEQ ID NO: 362697 - DNA, 193 bp, Homo sapiens; identical to SEQ ID NO: 352994
  chr1:230404024-230404217
  hypo

SEQ ID NO: 362698 - DNA, 196 bp, Homo sapiens; identical to SEQ ID NO: 352995
  chr1:230404365-230404561
  hypo

SEQ ID NO: 362699 - DNA, 189 bp, Homo sapiens; identical to SEQ ID NO: 337373
  chr1:230529557-230529746
  hypo

SEQ ID NO: 362700 - DNA, 89 bp, Homo sapiens; identical to SEQ ID NO: 337374
  chr1:230821556-230821645
  hypo

SEQ ID NO: 362701 - DNA, 184 bp, Homo sapiens; identical to SEQ ID NO: 337375
  chr1:231037680-231037864
  hypo

SEQ ID NO: 362702 - DNA, 173 bp, Homo sapiens; identical to SEQ ID NO: 337378
  chr1:231122207-231122380
  hypo

SEQ ID NO: 362703 - DNA, 587 bp, Homo sapiens; identical to SEQ ID NO: 349427
  chr1:231175062-231175649
  hypo

SEQ ID NO: 362704 - DNA, 709 bp, Homo sapiens; identical to SEQ ID NO: 349428
  chr1:231175692-231176401
  hypo

SEQ ID NO: 362705 - DNA, 61 bp, Homo sapiens; identical to SEQ ID NO: 357047
  chr1:231297736-231297797
  hypo

SEQ ID NO: 362706 - DNA, 124 bp, Homo sapiens; identical to SEQ ID NO: 337381
  chr1:232104144-232104268
  hypo

SEQ ID NO: 362707 - DNA, 411 bp, Homo sapiens; identical to SEQ ID NO: 349432
  chr1:232765595-232766006
  hypo

SEQ ID NO: 362708 - DNA, 175 bp, Homo sapiens; identical to SEQ ID NO: 337383
  chr1:233085208-233085383
  hypo

SEQ ID NO: 362709 - DNA, 314 bp, Homo sapiens; identical to SEQ ID NO: 198020
  chr1:233749768-233750082
  hypo

SEQ ID NO: 362710 - DNA, 215 bp, Homo sapiens; identical to SEQ ID NO: 353002
  chr1:234724591-234724806
  hypo

SEQ ID NO: 362711 - DNA, 209 bp, Homo sapiens; identical to SEQ ID NO: 353003
  chr1:234724836-234725045
  hypo

SEQ ID NO: 362712 - DNA, 174 bp, Homo sapiens; identical to SEQ ID NO: 349435
  chr1:234736252-234736426
  hypo

SEQ ID NO: 362713 - DNA, 138 bp, Homo sapiens; identical to SEQ ID NO: 347862
  chr1:234795508-234795646
  hypo

SEQ ID NO: 362714 - DNA, 324 bp, Homo sapiens; identical to SEQ ID NO: 207594
  chr1:234845143-234845467
  hypo

SEQ ID NO: 362715 - DNA, 104 bp, Homo sapiens; identical to SEQ ID NO: 337392
  chr1:234868862-234868966
  hypo

SEQ ID NO: 362716 - DNA, 184 bp, Homo sapiens; identical to SEQ ID NO: 279411
  chr1:235813161-235813345
  hypo

SEQ ID NO: 362717 - DNA, 32 bp, Homo sapiens; identical to SEQ ID NO: 353007
  chr1:235872558-235872590
  hypo

SEQ ID NO: 362718 - DNA, 499 bp, Homo sapiens; identical to SEQ ID NO: 337400
  chr1:236156658-236157157
  hypo

SEQ ID NO: 362719 - DNA, 71 bp, Homo sapiens; identical to SEQ ID NO: 337401
  chr1:236187380-236187451
  hypo

SEQ ID NO: 362720 - DNA, 145 bp, Homo sapiens; identical to SEQ ID NO: 337402
  chr1:236274591-236274736
  hypo

SEQ ID NO: 362721 - DNA, 98 bp, Homo sapiens; identical to SEQ ID NO: 349438
  chr1:236850212-236850310
  hypo

SEQ ID NO: 362722 - DNA, 36 bp, Homo sapiens; identical to SEQ ID NO: 198032
  chr1:237205188-237205224
  hypo

SEQ ID NO: 362723 - DNA, 116 bp, Homo sapiens
  chr1:241051980-241052096
  hypo
cgcgcgttgagaagaggtgctatcaactttcccattttgctgatgaggcaatttaggctggatgagaggacgagactgagtactactttcttggtggaggcgacagtcaaagccag

SEQ ID NO: 362724 - DNA, 50 bp, Homo sapiens; identical to SEQ ID NO: 198037
  chr1:241520533-241520583
  hypo

SEQ ID NO: 362725 - DNA, 147 bp, Homo sapiens; identical to SEQ ID NO: 198038
  chr1:241520612-241520759
  hypo

SEQ ID NO: 362726 - DNA, 91 bp, Homo sapiens; identical to SEQ ID NO: 349442
  chr1:241520789-241520880
  hypo

SEQ ID NO: 362727 - DNA, 650 bp, Homo sapiens; identical to SEQ ID NO: 337414
  chr1:243637544-243638194
  hypo

SEQ ID NO: 362728 - DNA, 307 bp, Homo sapiens; identical to SEQ ID NO: 337415
  chr1:243652455-243652762
  hypo

SEQ ID NO: 362729 - DNA, 168 bp, Homo sapiens; identical to SEQ ID NO: 279435
  chr1:244080795-244080963
  hypo

SEQ ID NO: 362730 - DNA, 45 bp, Homo sapiens; identical to SEQ ID NO: 337419
  chr1:244815271-244815316
  hypo

SEQ ID NO: 362731 - DNA, 317 bp, Homo sapiens; identical to SEQ ID NO: 207644
  chr1:245032200-245032517
  hypo

SEQ ID NO: 362732 - DNA, 69 bp, Homo sapiens; identical to SEQ ID NO: 347864
  chr1:245032603-245032672
  hypo

SEQ ID NO: 362733 - DNA, 253 bp, Homo sapiens; identical to SEQ ID NO: 353018
  chr1:245254446-245254699
  hypo

SEQ ID NO: 362734 - DNA, 31 bp, Homo sapiens
  chr1:245281788-245281819
  hypo
cgtgctgtaaaacaatgacagtaagccgggc

SEQ ID NO: 362735 - DNA, 442 bp, Homo sapiens; identical to SEQ ID NO: 353019
  chr1:245499151-245499593
  hypo

SEQ ID NO: 362736 - DNA, 129 bp, Homo sapiens; identical to SEQ ID NO: 353020
  chr1:245499775-245499904
  hypo

SEQ ID NO: 362737 - DNA, 365 bp, Homo sapiens; identical to SEQ ID NO: 337425
  chr1:245530148-245530513
  hypo

SEQ ID NO: 362738 - DNA, 587 bp, Homo sapiens
  chr1:245848539-245849126
  hypo
cgggcgcgcgggcatggcaccccgagtggcccacgtgcgggaggccaacgggggtggctgtcagtagcctgtgtcgtcaggggccttcaccacttgccgcgcacagctgggctcccggggaaactgccacggaaaggccaccacattaactgccgtctcactcacagtacacatccagctcgtccggcggggagagctcctgcgaagaaggccgcatgcgcaggcccacccagctgagacccttccacaccagggccacggtggaccctgacttccccatcgctcacctgtccagcgaccccgactactcctccagcagcgagcagtcctgcgacaccgtcatctacatcgggcccaacggcacggccctctctgacaaggagctcaccgacaacgagggccccccagactttgtccctatcgtgccagccctgcagaagacccggggcgacagccggcccgcagaggcaggagaggctgcagccggcaagtcagaaagggactgcctgaagtgcaacacgtttgccgagctgcaggagaggctggactgcatcgacggcagcgaggagcccagcagctttcctttc

SEQ ID NO: 362739 - DNA, 531 bp, Homo sapiens; identical to SEQ ID NO: 337429
  chr1:245925703-245926234
  hypo

SEQ ID NO: 362740 - DNA, 105 bp, Homo sapiens; identical to SEQ ID NO: 337431
  chr1:246160284-246160389
  hypo

SEQ ID NO: 362741 - DNA, 186 bp, Homo sapiens; identical to SEQ ID NO: 337434
  chr1:246324319-246324505
  hypo

SEQ ID NO: 362742 - DNA, 96 bp, Homo sapiens
  chr1:246330213-246330309
  hypo
cgatacccactgaaggcagctgctctcgggtgccccttcccacaagccctagcgaccatcaatctgcactccgtctctatggattcatctactttg

SEQ ID NO: 362743 - DNA, 298 bp, Homo sapiens; identical to SEQ ID NO: 337438
  chr1:246930862-246931160
  hypo

SEQ ID NO: 362744 - DNA, 137 bp, Homo sapiens; identical to SEQ ID NO: 349444
  chr1:247170868-247171005
  hypo

SEQ ID NO: 362745 - DNA, 209 bp, Homo sapiens; identical to SEQ ID NO: 337441
  chr1:247348636-247348845
  hypo

SEQ ID NO: 362746 - DNA, 248 bp, Homo sapiens; identical to SEQ ID NO: 337443
  chr1:247614695-247614943
  hypo

SEQ ID NO: 362747 - DNA, 124 bp, Homo sapiens; identical to SEQ ID NO: 353025
  chr1:248074927-248075051
  hypo

SEQ ID NO: 362748 - DNA, 331 bp, Homo sapiens; identical to SEQ ID NO: 347865
  chr1:248099374-248099705
  hypo

SEQ ID NO: 362749 - DNA, 46 bp, Homo sapiens
  chr1:248328627-248328673
  hypo
cggctccagtcctcagggggctccagtcctcaggagggcgctccag

SEQ ID NO: 362750 - DNA, 399 bp, Homo sapiens; identical to SEQ ID NO: 337449
  chr1:248469372-248469771
  hypo

SEQ ID NO: 362751 - DNA, 130 bp, Homo sapiens; identical to SEQ ID NO: 353027
  chr2:314855-314985
  hypo

SEQ ID NO: 362752 - DNA, 189 bp, Homo sapiens; identical to SEQ ID NO: 353028
  chr2:315015-315204
  hypo

SEQ ID NO: 362753 - DNA, 248 bp, Homo sapiens; identical to SEQ ID NO: 337455
  chr2:318873-319121
  hypo

SEQ ID NO: 362754 - DNA, 425 bp, Homo sapiens; identical to SEQ ID NO: 337456
  chr2:319186-319611
  hypo

SEQ ID NO: 362755 - DNA, 295 bp, Homo sapiens; identical to SEQ ID NO: 337457
  chr2:364121-364416
  hypo

SEQ ID NO: 362756 - DNA, 184 bp, Homo sapiens; identical to SEQ ID NO: 353030
  chr2:502892-503076
  hypo

SEQ ID NO: 362757 - DNA, 96 bp, Homo sapiens; identical to SEQ ID NO: 353031
  chr2:503145-503241
  hypo

SEQ ID NO: 362758 - DNA, 352 bp, Homo sapiens; identical to SEQ ID NO: 337459
  chr2:582796-583148
  hypo

SEQ ID NO: 362759 - DNA, 161 bp, Homo sapiens; identical to SEQ ID NO: 337460
  chr2:817641-817802
  hypo

SEQ ID NO: 362760 - DNA, 70 bp, Homo sapiens; identical to SEQ ID NO: 353032
  chr2:875867-875937
  hypo

SEQ ID NO: 362761 - DNA, 147 bp, Homo sapiens; identical to SEQ ID NO: 337463
  chr2:1282750-1282897
  hypo

SEQ ID NO: 362762 - DNA, 291 bp, Homo sapiens; identical to SEQ ID NO: 337464
  chr2:1482094-1482385
  hypo

SEQ ID NO: 362763 - DNA, 230 bp, Homo sapiens; identical to SEQ ID NO: 337465
  chr2:1488408-1488638
  hypo

SEQ ID NO: 362764 - DNA, 91 bp, Homo sapiens; identical to SEQ ID NO: 337466
  chr2:1520228-1520319
  hypo

SEQ ID NO: 362765 - DNA, 237 bp, Homo sapiens; identical to SEQ ID NO: 337467
  chr2:1543326-1543563
  hypo

SEQ ID NO: 362766 - DNA, 238 bp, Homo sapiens; identical to SEQ ID NO: 337468
  chr2:1647077-1647315
  hypo

SEQ ID NO: 362767 - DNA, 237 bp, Homo sapiens
  chr2:1651995-1652232
  hypo
cgaacgtgtgtgccgccgatagattgcagtagaccctgtagtcgtggtagggtgggatcccgtggtcccggccccgctggatgttgatggccgccaggtccagagccaccgtgtgtgccatggagaacagccgctccgtgagctccgtgttcagcagctgcgagggcacacgcattttccccgccaccccgaacagccccctgagaagcggatcgatgccgccctcattcacaatcc

SEQ ID NO: 362768 - DNA, 122 bp, Homo sapiens; identical to SEQ ID NO: 347867
  chr2:1688962-1689084
  hypo

SEQ ID NO: 362769 - DNA, 86 bp, Homo sapiens; identical to SEQ ID NO: 347868
  chr2:1689123-1689209
  hypo

SEQ ID NO: 362770 - DNA, 279 bp, Homo sapiens; identical to SEQ ID NO: 337473
  chr2:1771840-1772119
  hypo

SEQ ID NO: 362771 - DNA, 559 bp, Homo sapiens; identical to SEQ ID NO: 337474
  chr2:1846385-1846944
  hypo

SEQ ID NO: 362772 - DNA, 605 bp, Homo sapiens
  chr2:1863600-1864205
  hypo
cgttggggacagcgcgccggatgagaggggctctgggaaaggggacccgggccgcgctggtgacaggtctgtctccactcctgggcttgttttctggggattctctcgctgcggtttggctgtttggggagcacccaggggctgccacggcagcgtcactgtccatgctgcatgcagtttgtctgtttcccgaccatgcagcctaggactcttcacttatccctctgtgttgatcatgctgccctcgttgccaacactgcgaaccgctgcagggccgaaaggcgccccaagtacatccagcaataggctcctgtccagtgcggcagaacgtacctagcacatcctgacgtcccattcacttaacgggatgtgtccatgggaactgctgccagagcacatgcacgtccagcagcagtggagcggctaagcaagaggctggggccgccggagccagtattggggttggactcggaggacccatgcaaaaaaaaaatacaaaaggtgactggtgcagctgacgcaaggcaacagaaacgccaccccagcctctcgccctcgcgtggaagagtgagtttcatccagggcctgacgcattcaaaccacac

SEQ ID NO: 362773 - DNA, 444 bp, Homo sapiens; identical to SEQ ID NO: 337476
  chr2:1895697-1896141
  hypo

SEQ ID NO: 362774 - DNA, 617 bp, Homo sapiens; identical to SEQ ID NO: 353040
  chr2:2189479-2190096
  hypo

SEQ ID NO: 362775 - DNA, 33 bp, Homo sapiens; identical to SEQ ID NO: 353041
  chr2:2190245-2190278
  hypo

SEQ ID NO: 362776 - DNA, 116 bp, Homo sapiens; identical to SEQ ID NO: 353042
  chr2:2193566-2193682
  hypo

SEQ ID NO: 362777 - DNA, 321 bp, Homo sapiens; identical to SEQ ID NO: 353043
  chr2:2575361-2575682
  hypo

SEQ ID NO: 362778 - DNA, 57 bp, Homo sapiens; identical to SEQ ID NO: 353044
  chr2:2575769-2575826
  hypo

SEQ ID NO: 362779 - DNA, 41 bp, Homo sapiens
  chr2:2673043-2673084
  hypo
cgaggagtcagggcccccgaatctctgggaggacgcatcct

SEQ ID NO: 362780 - DNA, 205 bp, Homo sapiens
  chr2:2673114-2673319
  hypo
aggacttaatgacgtcccttcccatgcgcacagtgtcccaggcacgtgcctcagcctcacatgccggggcacagggctgccctgcgaggtgggaggaagacctaggtgaggacccggagccaagggctttcctgaccgtgaaattgcaggtgaggacctggagccgagggccggttctagctgctccaagcgcccgagggccaac

SEQ ID NO: 362781 - DNA, 249 bp, Homo sapiens; identical to SEQ ID NO: 337484
  chr2:2737154-2737403
  hypo

SEQ ID NO: 362782 - DNA, 228 bp, Homo sapiens; identical to SEQ ID NO: 337485
  chr2:2769802-2770030
  hypo

SEQ ID NO: 362783 - DNA, 97 bp, Homo sapiens; identical to SEQ ID NO: 353045
  chr2:2854244-2854341
  hypo

SEQ ID NO: 362784 - DNA, 160 bp, Homo sapiens; identical to SEQ ID NO: 353046
  chr2:2854463-2854623
  hypo

SEQ ID NO: 362785 - DNA, 392 bp, Homo sapiens; identical to SEQ ID NO: 337488
  chr2:2893376-2893768
  hypo

SEQ ID NO: 362786 - DNA, 94 bp, Homo sapiens; identical to SEQ ID NO: 353047
  chr2:3294552-3294646
  hypo

SEQ ID NO: 362787 - DNA, 163 bp, Homo sapiens; identical to SEQ ID NO: 337490
  chr2:3321063-3321226
  hypo

SEQ ID NO: 362788 - DNA, 42 bp, Homo sapiens; identical to SEQ ID NO: 337491
  chr2:3349551-3349593
  hypo

SEQ ID NO: 362789 - DNA, 93 bp, Homo sapiens; identical to SEQ ID NO: 337493
  chr2:3372645-3372738
  hypo

SEQ ID NO: 362790 - DNA, 488 bp, Homo sapiens; identical to SEQ ID NO: 345732
  chr2:3418350-3418838
  hypo

SEQ ID NO: 362791 - DNA, 289 bp, Homo sapiens; identical to SEQ ID NO: 337495
  chr2:3469110-3469399
  hypo

SEQ ID NO: 362792 - DNA, 314 bp, Homo sapiens; identical to SEQ ID NO: 337496
  chr2:3582036-3582350
  hypo

SEQ ID NO: 362793 - DNA, 270 bp, Homo sapiens; identical to SEQ ID NO: 357079
  chr2:7005163-7005433
  hypo

SEQ ID NO: 362794 - DNA, 728 bp, Homo sapiens; identical to SEQ ID NO: 349448
  chr2:7005469-7006197
  hypo

SEQ ID NO: 362795 - DNA, 291 bp, Homo sapiens; identical to SEQ ID NO: 344998
  chr2:7057762-7058053
  hypo

SEQ ID NO: 362796 - DNA, 41 bp, Homo sapiens; identical to SEQ ID NO: 344999
  chr2:7058391-7058432
  hypo

SEQ ID NO: 362797 - DNA, 247 bp, Homo sapiens; identical to SEQ ID NO: 337500
  chr2:7073094-7073341
  hypo

SEQ ID NO: 362798 - DNA, 154 bp, Homo sapiens; identical to SEQ ID NO: 337503
  chr2:7907371-7907525
  hypo

SEQ ID NO: 362799 - DNA, 84 bp, Homo sapiens; identical to SEQ ID NO: 337504
  chr2:8647920-8648004
  hypo

SEQ ID NO: 362800 - DNA, 97 bp, Homo sapiens
  chr2:8658450-8658547
  hypo
aagctcggaacctggaggctcagaatgcggcggctgctagctgtgtgacaatggacaggtcactgaggtccctggcaatgggtgggaggtcgttagc

SEQ ID NO: 362801 - DNA, 100 bp, Homo sapiens; identical to SEQ ID NO: 353056
  chr2:8736064-8736164
  hypo

SEQ ID NO: 362802 - DNA, 254 bp, Homo sapiens
  chr2:8834468-8834722
  hypo
cggagcaaggcagccaggggcccagtgcgaggagaggagaacggacaggatgggggaggcccatcacacccagcctcacaggccgcgctaagagctttggcctttactttgtgtaaactgggaccttggagagctttgcgcaggagagtgatggaaccaaactatttagcagccacatttcttttaatgtttctcgtttataggttacacatttgttgttattattattgatttaataatactgtgtcaagata

SEQ ID NO: 362803 - DNA, 121 bp, Homo sapiens
  chr2:8834896-8835017
  hypo
accaacctaaatattataactaaggaaacgaatagaatggtgtgcatcagaggtacctccgccagtgcttaccccgtttgttatagagggacgggttgtccctgctgcttttttatggagc

SEQ ID NO: 362804 - DNA, 210 bp, Homo sapiens; identical to SEQ ID NO: 337511
  chr2:8860527-8860737
  hypo

SEQ ID NO: 362805 - DNA, 46 bp, Homo sapiens; identical to SEQ ID NO: 337512
  chr2:8868792-8868838
  hypo

SEQ ID NO: 362806 - DNA, 146 bp, Homo sapiens; identical to SEQ ID NO: 345735
  chr2:8870193-8870339
  hypo

SEQ ID NO: 362807 - DNA, 57 bp, Homo sapiens; identical to SEQ ID NO: 207777
  chr2:8978298-8978355
  hypo

SEQ ID NO: 362808 - DNA, 348 bp, Homo sapiens; identical to SEQ ID NO: 337515
  chr2:9078588-9078936
  hypo

SEQ ID NO: 362809 - DNA, 90 bp, Homo sapiens; identical to SEQ ID NO: 337516
  chr2:9135660-9135750
  hypo

SEQ ID NO: 362810 - DNA, 783 bp, Homo sapiens; identical to SEQ ID NO: 353062
  chr2:9236530-9237313
  hypo

SEQ ID NO: 362811 - DNA, 234 bp, Homo sapiens; identical to SEQ ID NO: 337519
  chr2:9245045-9245279
  hypo

SEQ ID NO: 362812 - DNA, 221 bp, Homo sapiens
  chr2:9481652-9481873
  hypo
cgctctgattaatatgcgcggcacgaacagtgttagcggtgttgtcacatgatttcaccacttactttgtgcagggctttttttctcccccaaatcaatagacgtatttcttggttgtgcagttgagtctcctgacaggtttatttttagtctttcacagagacgctgtacaggtgagcagtatttctccacattccttccacagcattgttctcagcaac

SEQ ID NO: 362813 - DNA, 372 bp, Homo sapiens; identical to SEQ ID NO: 337522
  chr2:9609477-9609849
  hypo

SEQ ID NO: 362814 - DNA, 201 bp, Homo sapiens; identical to SEQ ID NO: 337523
  chr2:9720456-9720657
  hypo

SEQ ID NO: 362815 - DNA, 123 bp, Homo sapiens; identical to SEQ ID NO: 337524
  chr2:10047588-10047711
  hypo

SEQ ID NO: 362816 - DNA, 300 bp, Homo sapiens; identical to SEQ ID NO: 207797
  chr2:10150735-10151035
  hypo

SEQ ID NO: 362817 - DNA, 166 bp, Homo sapiens; identical to SEQ ID NO: 331200
  chr2:10152421-10152587
  hypo

SEQ ID NO: 362818 - DNA, 90 bp, Homo sapiens; identical to SEQ ID NO: 353068
  chr2:10152958-10153048
  hypo

SEQ ID NO: 362819 - DNA, 326 bp, Homo sapiens; identical to SEQ ID NO: 353069
  chr2:10153562-10153888
  hypo

SEQ ID NO: 362820 - DNA, 89 bp, Homo sapiens; identical to SEQ ID NO: 207804
  chr2:10155175-10155264
  hypo

SEQ ID NO: 362821 - DNA, 166 bp, Homo sapiens; identical to SEQ ID NO: 337532
  chr2:10155780-10155946
  hypo

SEQ ID NO: 362822 - DNA, 58 bp, Homo sapiens; identical to SEQ ID NO: 207806
  chr2:10156255-10156313
  hypo

SEQ ID NO: 362823 - DNA, 201 bp, Homo sapiens; identical to SEQ ID NO: 357084
  chr2:10183602-10183803
  hypo

SEQ ID NO: 362824 - DNA, 439 bp, Homo sapiens; identical to SEQ ID NO: 357085
  chr2:10183814-10184253
  hypo

SEQ ID NO: 362825 - DNA, 158 bp, Homo sapiens
  chr2:10306915-10307073
  hypo
tgcgtccccgcctgtgtcctaagcactccacaagcatgagcgtgtctagatggtgatggtttgctcatggtctctctctcagagcttttaccctggcggggttgggagcgtggcaatgggtcaccactgaccctgttaggaaacaagtgtgtctgtac

SEQ ID NO: 362826 - DNA, 126 bp, Homo sapiens; identical to SEQ ID NO: 337536
  chr2:10328941-10329067
  hypo

SEQ ID NO: 362827 - DNA, 614 bp, Homo sapiens; identical to SEQ ID NO: 337537
  chr2:10334473-10335087
  hypo

SEQ ID NO: 362828 - DNA, 203 bp, Homo sapiens; identical to SEQ ID NO: 337540
  chr2:10517952-10518155
  hypo

SEQ ID NO: 362829 - DNA, 213 bp, Homo sapiens; identical to SEQ ID NO: 331202
  chr2:10587836-10588049
  hypo

SEQ ID NO: 362830 - DNA, 178 bp, Homo sapiens; identical to SEQ ID NO: 345000
  chr2:10588876-10589054
  hypo

SEQ ID NO: 362831 - DNA, 117 bp, Homo sapiens; identical to SEQ ID NO: 198078
  chr2:10589055-10589172
  hypo

SEQ ID NO: 362832 - DNA, 55 bp, Homo sapiens; identical to SEQ ID NO: 347881
  chr2:10600813-10600868
  hypo

SEQ ID NO: 362833 - DNA, 291 bp, Homo sapiens; identical to SEQ ID NO: 337546
  chr2:10666473-10666764
  hypo

SEQ ID NO: 362834 - DNA, 200 bp, Homo sapiens; identical to SEQ ID NO: 353077
  chr2:10742503-10742703
  hypo

SEQ ID NO: 362835 - DNA, 270 bp, Homo sapiens; identical to SEQ ID NO: 337550
  chr2:11965015-11965285
  hypo

SEQ ID NO: 362836 - DNA, 184 bp, Homo sapiens; identical to SEQ ID NO: 357094
  chr2:12857960-12858144
  hypo

SEQ ID NO: 362837 - DNA, 255 bp, Homo sapiens; identical to SEQ ID NO: 198088
  chr2:14774684-14774939
  hypo

SEQ ID NO: 362838 - DNA, 426 bp, Homo sapiens; identical to SEQ ID NO: 337553
  chr2:15307089-15307515
  hypo

SEQ ID NO: 362839 - DNA, 101 bp, Homo sapiens; identical to SEQ ID NO: 353080
  chr2:15783084-15783185
  hypo

SEQ ID NO: 362840 - DNA, 93 bp, Homo sapiens
  chr2:20456228-20456321
  hypo
cttgctgtatttaaactgtcttcactgtgtaaatcatccgctaatatttatcgggcggtaactaacatgactaattcagaattacacacttcc

SEQ ID NO: 362841 - DNA, 387 bp, Homo sapiens; identical to SEQ ID NO: 357118
  chr2:20646879-20647266
  hypo

SEQ ID NO: 362842 - DNA, 314 bp, Homo sapiens; identical to SEQ ID NO: 337564
  chr2:23785024-23785338
  hypo

SEQ ID NO: 362843 - DNA, 308 bp, Homo sapiens
  chr2:24584022-24584330
  hypo
cgctagtcacactccgccgagcagtaggaagactctgtccccatagagcatagcacgacgaagctaaactttcctccccacccctcgccaagggacaggcgaagctcctactcagaatttgtctcttttctcccctcccggttcctggtctcctcacaaaagaccagacttcaactcaagccgccaccgtatcccaaaaccccaaaggtttgcccttgacaagaagcttcttcaaggggaaaggctttcttttgattggggtgagggaggagttagtgtttcctaatgaacgtaaccaaatgtcggcc

SEQ ID NO: 362844 - DNA, 243 bp, Homo sapiens; identical to SEQ ID NO: 357127
  chr2:24714924-24715167
  hypo

SEQ ID NO: 362845 - DNA, 496 bp, Homo sapiens
  chr2:25044264-25044760
  hypo
cgtgaacctccccacccgaattgcctcagttgtcctgagcctcatgtctctcctggtggtgggccaggcccctgcatgggaagggagcctgctgcggggcaggccagctgggggtgctcacctatgcgcagcatgaagttattgaaggactggttgttgatgttggtgagcgtatccttcatggccagcgcgaagtcggccaggtcagccaggtgctgccagcgctctctctcggacttgtcttcctgtgccaggggaccgtggagaaagtgtcaggggccgctcactgcagcagcctgctctgctgccttccctggcagtgttctgggggtggattccctacacctagatgttcaaggccttacttttcctcccacaaaggagtcgcagccacgctagctctgacttgccactgtgacaaagttcacgtagcaggtctaggcaaagactgggcaattgagcagaggagacggacctgtgagtctgaccacgaggc

SEQ ID NO: 362846 - DNA, 185 bp, Homo sapiens; identical to SEQ ID NO: 337568
  chr2:25047277-25047462
  hypo

SEQ ID NO: 362847 - DNA, 252 bp, Homo sapiens; identical to SEQ ID NO: 337569
  chr2:25075413-25075665
  hypo

SEQ ID NO: 362848 - DNA, 93 bp, Homo sapiens; identical to SEQ ID NO: 331235
  chr2:25464444-25464537
  hypo

SEQ ID NO: 362849 - DNA, 116 bp, Homo sapiens; identical to SEQ ID NO: 337575
  chr2:26524687-26524803
  hypo

SEQ ID NO: 362850 - DNA, 35 bp, Homo sapiens; identical to SEQ ID NO: 337576
  chr2:26688538-26688573
  hypo

SEQ ID NO: 362851 - DNA, 446 bp, Homo sapiens; identical to SEQ ID NO: 337577
  chr2:26986225-26986671
  hypo

SEQ ID NO: 362852 - DNA, 99 bp, Homo sapiens; identical to SEQ ID NO: 337578
  chr2:27007597-27007696
  hypo

SEQ ID NO: 362853 - DNA, 206 bp, Homo sapiens; identical to SEQ ID NO: 337580
  chr2:27303557-27303763
  hypo

SEQ ID NO: 362854 - DNA, 250 bp, Homo sapiens; identical to SEQ ID NO: 198140
  chr2:27308893-27309143
  hypo

SEQ ID NO: 362855 - DNA, 111 bp, Homo sapiens; identical to SEQ ID NO: 1396
  chr2:27309206-27309317
  hypo

SEQ ID NO: 362856 - DNA, 115 bp, Homo sapiens; identical to SEQ ID NO: 345738
  chr2:27433190-27433305
  hypo

SEQ ID NO: 362857 - DNA, 229 bp, Homo sapiens
  chr2:27668586-27668815
  hypo
cggttttccaaccctgtgcccttaccggtacatgctgcttagctgggagtggcacctcaaagggaatgtctgtatcctgaaaatcagagtggtcaaggccatctagagtcccttcctcgattgcctgcagtagagtgggcaaccatgaactaggcacagctcgcgactggcaaaaacctccaccctcggggcacagcttccctactcacatcggtcaggtccaaaaagc

SEQ ID NO: 362858 - DNA, 58 bp, Homo sapiens; identical to SEQ ID NO: 346425
  chr2:27938267-27938325
  hypo

SEQ ID NO: 362859 - DNA, 225 bp, Homo sapiens; identical to SEQ ID NO: 337586
  chr2:28065720-28065945
  hypo

SEQ ID NO: 362860 - DNA, 51 bp, Homo sapiens; identical to SEQ ID NO: 349481
  chr2:29033285-29033336
  hypo

SEQ ID NO: 362861 - DNA, 37 bp, Homo sapiens; identical to SEQ ID NO: 345005
  chr2:30453530-30453567
  hypo

SEQ ID NO: 362862 - DNA, 68 bp, Homo sapiens; identical to SEQ ID NO: 198154
  chr2:31361021-31361089
  hypo

SEQ ID NO: 362863 - DNA, 178 bp, Homo sapiens; identical to SEQ ID NO: 198155
  chr2:31361118-31361296
  hypo

SEQ ID NO: 362864 - DNA, 70 bp, Homo sapiens; identical to SEQ ID NO: 346429
  chr2:31361690-31361760
  hypo

SEQ ID NO: 362865 - DNA, 75 bp, Homo sapiens; identical to SEQ ID NO: 337592
  chr2:31550134-31550209
  hypo

SEQ ID NO: 362866 - DNA, 34 bp, Homo sapiens; identical to SEQ ID NO: 337593
  chr2:32367753-32367787
  hypo

SEQ ID NO: 362867 - DNA, 125 bp, Homo sapiens; identical to SEQ ID NO: 337595
  chr2:37287740-37287865
  hypo

SEQ ID NO: 362868 - DNA, 702 bp, Homo sapiens; identical to SEQ ID NO: 357151
  chr2:37899247-37899949
  hypo

SEQ ID NO: 362869 - DNA, 204 bp, Homo sapiens; identical to SEQ ID NO: 353097
  chr2:38742658-38742862
  hypo

SEQ ID NO: 362870 - DNA, 228 bp, Homo sapiens
  chr2:38762412-38762640
  hypo
agacaggtctggatgaggggtgaggccctgccttggaggggctgccctccctctgtggcacggaagccctgctgcctgtgacaggaggcgactgcacctcacccgcggcctgtatgctgcaggacccagcgaagagcttccttagcttgcagctgtgcagacactaggaaagggagcacctaccagggagatttgccttcttggtccggtagcaaatgcagtcccgcc

SEQ ID NO: 362871 - DNA, 226 bp, Homo sapiens; identical to SEQ ID NO: 345742
  chr2:39186687-39186913
  hypo

SEQ ID NO: 362872 - DNA, 250 bp, Homo sapiens; identical to SEQ ID NO: 337602
  chr2:39944194-39944444
  hypo

SEQ ID NO: 362873 - DNA, 1085 bp, Homo sapiens; identical to SEQ ID NO: 279692
  chr2:42274691-42275776
  hypo

SEQ ID NO: 362874 - DNA, 281 bp, Homo sapiens; identical to SEQ ID NO: 357157
  chr2:42721246-42721527
  hypo

SEQ ID NO: 362875 - DNA, 395 bp, Homo sapiens; identical to SEQ ID NO: 345010
  chr2:43452443-43452838
  hypo

SEQ ID NO: 362876 - DNA, 71 bp, Homo sapiens
  chr2:44497628-44497699
  hypo
cgcagcaaagaaagaatgaagcaacaaaagaacgaaagcagctctctcggctttcggctcggaggaggcca

SEQ ID NO: 362877 - DNA, 686 bp, Homo sapiens; identical to SEQ ID NO: 337611
  chr2:44553759-44554445
  hypo

SEQ ID NO: 362878 - DNA, 65 bp, Homo sapiens
  chr2:47200517-47200582
  hypo
cgagagccttccagccaccgcatggtgcagggaaacccttgctaccctcatttatcccccgtcag

SEQ ID NO: 362879 - DNA, 73 bp, Homo sapiens; identical to SEQ ID NO: 331292
  chr2:47656947-47657020
  hypo

SEQ ID NO: 362880 - DNA, 59 bp, Homo sapiens; identical to SEQ ID NO: 357170
  chr2:47747991-47748050
  hypo

SEQ ID NO: 362881 - DNA, 203 bp, Homo sapiens; identical to SEQ ID NO: 279765
  chr2:47748523-47748726
  hypo

SEQ ID NO: 362882 - DNA, 41 bp, Homo sapiens; identical to SEQ ID NO: 345744
  chr2:55289053-55289094
  hypo

SEQ ID NO: 362883 - DNA, 121 bp, Homo sapiens; identical to SEQ ID NO: 337622
  chr2:60598584-60598705
  hypo

SEQ ID NO: 362884 - DNA, 124 bp, Homo sapiens
  chr2:60706396-60706520
  hypo
cgtggggactcagcctatggacacctggcctctgcgggcacagcggccacacaccacggtgggacccggagaccattttttgttttgagtctctctaagactgcttgggaaatgaggtctctca

SEQ ID NO: 362885 - DNA, 207 bp, Homo sapiens; identical to SEQ ID NO: 207992
  chr2:60706550-60706757
  hypo

SEQ ID NO: 362886 - DNA, 373 bp, Homo sapiens; identical to SEQ ID NO: 349503
  chr2:60784505-60784878
  hypo

SEQ ID NO: 362887 - DNA, 128 bp, Homo sapiens; identical to SEQ ID NO: 337625
  chr2:61074853-61074981
  hypo

SEQ ID NO: 362888 - DNA, 428 bp, Homo sapiens; identical to SEQ ID NO: 357184
  chr2:61175657-61176085
  hypo

SEQ ID NO: 362889 - DNA, 90 bp, Homo sapiens; identical to SEQ ID NO: 337627
  chr2:61505031-61505121
  hypo

SEQ ID NO: 362890 - DNA, 66 bp, Homo sapiens; identical to SEQ ID NO: 337628
  chr2:62116634-62116700
  hypo

SEQ ID NO: 362891 - DNA, 43 bp, Homo sapiens; identical to SEQ ID NO: 353106
  chr2:62497692-62497735
  hypo

SEQ ID NO: 362892 - DNA, 92 bp, Homo sapiens; identical to SEQ ID NO: 337630
  chr2:64538788-64538880
  hypo

SEQ ID NO: 362893 - DNA, 99 bp, Homo sapiens; identical to SEQ ID NO: 337633
  chr2:65251127-65251226
  hypo

SEQ ID NO: 362894 - DNA, 311 bp, Homo sapiens; identical to SEQ ID NO: 353107
  chr2:68672378-68672689
  hypo

SEQ ID NO: 362895 - DNA, 122 bp, Homo sapiens; identical to SEQ ID NO: 337639
  chr2:69928507-69928629
  hypo

SEQ ID NO: 362896 - DNA, 205 bp, Homo sapiens; identical to SEQ ID NO: 337640
  chr2:70165952-70166157
  hypo

SEQ ID NO: 362897 - DNA, 224 bp, Homo sapiens; identical to SEQ ID NO: 337641
  chr2:70224820-70225044
  hypo

SEQ ID NO: 362898 - DNA, 317 bp, Homo sapiens; identical to SEQ ID NO: 346441
  chr2:70351179-70351496
  hypo

SEQ ID NO: 362899 - DNA, 280 bp, Homo sapiens; identical to SEQ ID NO: 331330
  chr2:70369049-70369329
  hypo

SEQ ID NO: 362900 - DNA, 125 bp, Homo sapiens; identical to SEQ ID NO: 337645
  chr2:72310184-72310309
  hypo

SEQ ID NO: 362901 - DNA, 346 bp, Homo sapiens; identical to SEQ ID NO: 337646
  chr2:72359340-72359686
  hypo

SEQ ID NO: 362902 - DNA, 127 bp, Homo sapiens; identical to SEQ ID NO: 345014
  chr2:72374248-72374375
  hypo

SEQ ID NO: 362903 - DNA, 259 bp, Homo sapiens; identical to SEQ ID NO: 345015
  chr2:72374932-72375191
  hypo

SEQ ID NO: 362904 - DNA, 698 bp, Homo sapiens; identical to SEQ ID NO: 357207
  chr2:73052641-73053339
  hypo

SEQ ID NO: 362905 - DNA, 135 bp, Homo sapiens; identical to SEQ ID NO: 349527
  chr2:73520107-73520242
  hypo

SEQ ID NO: 362906 - DNA, 228 bp, Homo sapiens; identical to SEQ ID NO: 331345
  chr2:74211299-74211527
  hypo

SEQ ID NO: 362907 - DNA, 218 bp, Homo sapiens; identical to SEQ ID NO: 337654
  chr2:74327579-74327797
  hypo

SEQ ID NO: 362908 - DNA, 275 bp, Homo sapiens; identical to SEQ ID NO: 345016
  chr2:74425444-74425719
  hypo

SEQ ID NO: 362909 - DNA, 395 bp, Homo sapiens; identical to SEQ ID NO: 198298
  chr2:74425790-74426185
  hypo

SEQ ID NO: 362910 - DNA, 228 bp, Homo sapiens; identical to SEQ ID NO: 345018
  chr2:74426214-74426442
  hypo

SEQ ID NO: 362911 - DNA, 235 bp, Homo sapiens; identical to SEQ ID NO: 345022
  chr2:74781700-74781935
  hypo

SEQ ID NO: 362912 - DNA, 1609 bp, Homo sapiens; identical to SEQ ID NO: 357224
  chr2:75060920-75062529
  hypo

SEQ ID NO: 362913 - DNA, 61 bp, Homo sapiens; identical to SEQ ID NO: 347902
  chr2:85280346-85280407
  hypo

SEQ ID NO: 362914 - DNA, 104 bp, Homo sapiens; identical to SEQ ID NO: 337662
  chr2:85356682-85356786
  hypo

SEQ ID NO: 362915 - DNA, 104 bp, Homo sapiens; identical to SEQ ID NO: 337664
  chr2:85776352-85776456
  hypo

SEQ ID NO: 362916 - DNA, 74 bp, Homo sapiens; identical to SEQ ID NO: 337665
  chr2:85819578-85819652
  hypo

SEQ ID NO: 362917 - DNA, 95 bp, Homo sapiens; identical to SEQ ID NO: 337667
  chr2:85878703-85878798
  hypo

SEQ ID NO: 362918 - DNA, 342 bp, Homo sapiens; identical to SEQ ID NO: 353127
  chr2:85890530-85890872
  hypo

SEQ ID NO: 362919 - DNA, 81 bp, Homo sapiens; identical to SEQ ID NO: 353128
  chr2:85890902-85890983
  hypo

SEQ ID NO: 362920 - DNA, 64 bp, Homo sapiens; identical to SEQ ID NO: 337669
  chr2:86914559-86914623
  hypo

SEQ ID NO: 362921 - DNA, 163 bp, Homo sapiens; identical to SEQ ID NO: 349538
  chr2:87018396-87018559
  hypo

SEQ ID NO: 362922 - DNA, 86 bp, Homo sapiens; identical to SEQ ID NO: 337671
  chr2:88591078-88591164
  hypo

SEQ ID NO: 362923 - DNA, 58 bp, Homo sapiens; identical to SEQ ID NO: 353131
  chr2:95941852-95941910
  hypo

SEQ ID NO: 362924 - DNA, 578 bp, Homo sapiens; identical to SEQ ID NO: 280006
  chr2:96011863-96012441
  hypo

SEQ ID NO: 362925 - DNA, 48 bp, Homo sapiens; identical to SEQ ID NO: 346460
  chr2:96012683-96012731
  hypo

SEQ ID NO: 362926 - DNA, 42 bp, Homo sapiens; identical to SEQ ID NO: 346464
  chr2:97203334-97203376
  hypo

SEQ ID NO: 362927 - DNA, 39 bp, Homo sapiens; identical to SEQ ID NO: 346465
  chr2:97203545-97203584
  hypo

SEQ ID NO: 362928 - DNA, 76 bp, Homo sapiens
  chr2:97427378-97427454
  hypo
cgcatcgtgcagaactgtggcaccgagaaggagaggcgctatgcccgcaagattgagcccatccggcgcaagggca

SEQ ID NO: 362929 - DNA, 262 bp, Homo sapiens; identical to SEQ ID NO: 353136
  chr2:97435378-97435640
  hypo

SEQ ID NO: 362930 - DNA, 185 bp, Homo sapiens
  chr2:97437985-97438170
  hypo
cgcttacacaccccatgcgcgcacacacactcatacccccacataggcacaggcaggctctactcccacccgtgcgcacacacactcatacccctcacataggcacaggcaggtgctcacacacacgtgcgcacacacactcatgccccccacgtaggcacaggcaggcgctcacacacacatgc

SEQ ID NO: 362931 - DNA, 436 bp, Homo sapiens; identical to SEQ ID NO: 353137
  chr2:97544651-97545087
  hypo

SEQ ID NO: 362932 - DNA, 200 bp, Homo sapiens; identical to SEQ ID NO: 337684
  chr2:97545395-97545595
  hypo

SEQ ID NO: 362933 - DNA, 305 bp, Homo sapiens; identical to SEQ ID NO: 337685
  chr2:97576055-97576360
  hypo

SEQ ID NO: 362934 - DNA, 249 bp, Homo sapiens; identical to SEQ ID NO: 337687
  chr2:97589058-97589307
  hypo

SEQ ID NO: 362935 - DNA, 382 bp, Homo sapiens
  chr2:98350752-98351134
  hypo
cgcccctagagtccaccctcatgtggcttcatggggcacccacagctgtggccaggagtgtatgccagtgtgtgcgtgtggatgtgcaggaacacgcatgggcacccacctgcttgtgcatgctccagggacggcacccttgtctggggcaggtgcttgtgggggctgaggctgccttgctccccacacccctgcccctgacctgggagtgtaccgctgtgtgtgcccagcacgcataacgtccccagacaaaccgcggccgatgcccatggacacgagcgtgtatgagagcccctacagcgacccagaggagctcaaggacaagaagctcttcctgaagcgcgataacctcctcatagctgacattgaacttggctgcggc

SEQ ID NO: 362936 - DNA, 316 bp, Homo sapiens; identical to SEQ ID NO: 353140
  chr2:98377004-98377320
  hypo

SEQ ID NO: 362937 - DNA, 572 bp, Homo sapiens; identical to SEQ ID NO: 337691
  chr2:98408820-98409392
  hypo

SEQ ID NO: 362938 - DNA, 163 bp, Homo sapiens; identical to SEQ ID NO: 337692
  chr2:99097200-99097363
  hypo

SEQ ID NO: 362939 - DNA, 146 bp, Homo sapiens; identical to SEQ ID NO: 345030
  chr2:101033445-101033591
  hypo

SEQ ID NO: 362940 - DNA, 134 bp, Homo sapiens; identical to SEQ ID NO: 337696
  chr2:101696603-101696737
  hypo

SEQ ID NO: 362941 - DNA, 143 bp, Homo sapiens; identical to SEQ ID NO: 337698
  chr2:102683385-102683528
  hypo

SEQ ID NO: 362942 - DNA, 519 bp, Homo sapiens; identical to SEQ ID NO: 331387
  chr2:102758965-102759484
  hypo

SEQ ID NO: 362943 - DNA, 96 bp, Homo sapiens; identical to SEQ ID NO: 349556
  chr2:105468467-105468563
  hypo

SEQ ID NO: 362944 - DNA, 144 bp, Homo sapiens; identical to SEQ ID NO: 345031
  chr2:105471069-105471213
  hypo

SEQ ID NO: 362945 - DNA, 115 bp, Homo sapiens
  chr2:105719504-105719619
  hypo
cgatagctgattggctgcaggagagctgggggcgggtattcggtatgagatccacaggctgctgggaatgcaaagagccaggaagacaggaagaaaagttgatgggaggaggagg

SEQ ID NO: 362946 - DNA, 264 bp, Homo sapiens
  chr2:105719654-105719918
  hypo
cggggccacctcatatgagatgcttgaaataattggactgtgactcaggcgacgggtcagcctgctgacagatttgggaggctgctgcgtggaaggggaatttgaaacgtgggctggatcagcacggaggattgggcagggagaaggccaaggctcaagtggagaaacagccatcaagtttaaagtaggaaggagggaagagccagcaaagggggtggtgagcggtgataggaagacagcaagccaggcacagcggtcagggac

SEQ ID NO: 362947 - DNA, 200 bp, Homo sapiens; identical to SEQ ID NO: 337706
  chr2:105987680-105987880
  hypo

SEQ ID NO: 362948 - DNA, 64 bp, Homo sapiens
  chr2:106016398-106016462
  hypo
gaatacatcctccagagaaggcgggaagaactccgtgattgctttcttttaattgatactctcc

SEQ ID NO: 362949 - DNA, 85 bp, Homo sapiens; identical to SEQ ID NO: 353149
  chr2:106730126-106730211
  hypo

SEQ ID NO: 362950 - DNA, 160 bp, Homo sapiens; identical to SEQ ID NO: 353150
  chr2:106730256-106730416
  hypo

SEQ ID NO: 362951 - DNA, 35 bp, Homo sapiens; identical to SEQ ID NO: 337709
  chr2:106742088-106742123
  hypo

SEQ ID NO: 362952 - DNA, 44 bp, Homo sapiens
  chr2:106959115-106959159
  hypo
cgcttcacgtgctccaggcagagacgagctcaagagcctctggt

SEQ ID NO: 362953 - DNA, 59 bp, Homo sapiens; identical to SEQ ID NO: 353151
  chr2:106959841-106959900
  hypo

SEQ ID NO: 362954 - DNA, 386 bp, Homo sapiens
  chr2:107459644-107460030
  hypo
cgtccgcacgcgcgcgcggctccgcagctggcacagcagctgtgccctgctcagcccggcctcccgcttcccgcggaagcgcaccccgtgcttgttggcggtcaggtaatccttcatcgccttctgcaggcgcgggttcagcattttggaagagacgttccccttccagagccggtacaggaaggccctggacatggaggagtacagcctgtcgccgtcgtcgccctcctccaacacgtggctccttctctgcctccggtgcctcttcttcacccgcctcctctggacctgtgcagccggaaaagccccctcccgtgggcctggctccccgggggaagggaatcccaatgtcccctgagtgtggctgtgccaccctggctgaccag

SEQ ID NO: 362955 - DNA, 156 bp, Homo sapiens; identical to SEQ ID NO: 337713
  chr2:108085842-108085998
  hypo

SEQ ID NO: 362956 - DNA, 701 bp, Homo sapiens
  chr2:108160925-108161626
  hypo
gtggagatggaaggagacctggtgcactgagaggcggatgtgaaactgaggggagatggaaggagacctggcgcactgagaggcggatgtgaaactcaagagagatagaaggagacgtggcgcactgagagccggatgtgaaactgagggaagatggaaggagacctgacgcactgagagccggatgtgaaactgaggggagatggaaggagacgcggcgcactgagagccggatgtgaaactcaggggagatggaaggagacctggtgcactgagaggcggatgtgaaactgaggggagatggaaggagactgggcacactgagagacggatgtgaaactcaggagagatggaaggagacgtggtgcactgagagccggatgtgaaactgagggaagatggaaggggacctggcgcactgagaggcggatgtgaaactcaggagagatggaaggagacgtggcgcactgagagccggatgtgaaactgagtggagatggaaggagactgggcacactgagagacggatgtgaaactcaggagagatggaaggacacatggcgcactgagagccggatgtgaaagtgagtggagatggaggcggggcgcactgagaggcggctgtgaaactcaggagagatggaaggagacgtggcacactgagagccggatgtgaaagtgagtggagatggagacggagc

SEQ ID NO: 362957 - DNA, 73 bp, Homo sapiens; identical to SEQ ID NO: 353153
  chr2:109260013-109260086
  hypo

SEQ ID NO: 362958 - DNA, 65 bp, Homo sapiens; identical to SEQ ID NO: 349561
  chr2:109647974-109648039
  hypo

SEQ ID NO: 362959 - DNA, 205 bp, Homo sapiens; identical to SEQ ID NO: 337718
  chr2:110011299-110011504
  hypo

SEQ ID NO: 362960 - DNA, 186 bp, Homo sapiens; identical to SEQ ID NO: 353156
  chr2:110015134-110015320
  hypo

SEQ ID NO: 362961 - DNA, 112 bp, Homo sapiens; identical to SEQ ID NO: 353157
  chr2:110015364-110015476
  hypo

SEQ ID NO: 362962 - DNA, 215 bp, Homo sapiens
  chr2:110016725-110016940
  hypo
cgcacatatgcactcccacgcacatgtgcactcatacacatggcacacacatatacctgcacacccacacatgtgcacttacatacaccgccatccacatgcacacctacacatatacacatgcacgcacatatacacatatacacctgtgcacatatgtgcacttatatgcaccccttccacatgcacacacatacacatgtgcacacacatgc

SEQ ID NO: 362963 - DNA, 452 bp, Homo sapiens; identical to SEQ ID NO: 337722
  chr2:110021654-110022106
  hypo

SEQ ID NO: 362964 - DNA, 73 bp, Homo sapiens; identical to SEQ ID NO: 337723
  chr2:110022456-110022529
  hypo

SEQ ID NO: 362965 - DNA, 124 bp, Homo sapiens; identical to SEQ ID NO: 337724
  chr2:110028510-110028634
  hypo

SEQ ID NO: 362966 - DNA, 146 bp, Homo sapiens; identical to SEQ ID NO: 337725
  chr2:110048964-110049110
  hypo

SEQ ID NO: 362967 - DNA, 70 bp, Homo sapiens; identical to SEQ ID NO: 349569
  chr2:112656507-112656577
  hypo

SEQ ID NO: 362968 - DNA, 32 bp, Homo sapiens; identical to SEQ ID NO: 280126
  chr2:112657092-112657124
  hypo

SEQ ID NO: 362969 - DNA, 208 bp, Homo sapiens; identical to SEQ ID NO: 353163
  chr2:113103038-113103246
  hypo

SEQ ID NO: 362970 - DNA, 89 bp, Homo sapiens; identical to SEQ ID NO: 353164
  chr2:113103431-113103520
  hypo

SEQ ID NO: 362971 - DNA, 682 bp, Homo sapiens; identical to SEQ ID NO: 337730
  chr2:114736479-114737161
  hypo

SEQ ID NO: 362972 - DNA, 56 bp, Homo sapiens; identical to SEQ ID NO: 337732
  chr2:118736298-118736354
  hypo

SEQ ID NO: 362973 - DNA, 143 bp, Homo sapiens; identical to SEQ ID NO: 345757
  chr2:120005222-120005365
  hypo

SEQ ID NO: 362974 - DNA, 119 bp, Homo sapiens; identical to SEQ ID NO: 337737
  chr2:120754234-120754353
  hypo

SEQ ID NO: 362975 - DNA, 330 bp, Homo sapiens; identical to SEQ ID NO: 353167
  chr2:120974105-120974435
  hypo

SEQ ID NO: 362976 - DNA, 223 bp, Homo sapiens; identical to SEQ ID NO: 337741
  chr2:121108610-121108833
  hypo

SEQ ID NO: 362977 - DNA, 213 bp, Homo sapiens
  chr2:121549381-121549594
  hypo
cgtctgtgactttaatgcggtgtgcacgtgtgtgtgtggcctgcgtgcaggtgtatgcatgtgtgtggctgtgtatatggtttgtcggcgtatgttctgtgtgctgtgtgagtgtgtgagcctgcgtgtgtgtgtgcatccatgtgtgcctatgcgtgtgggtcctgggcacgcatgccgcacgactgagatcacagcagaggtgagaacacc

SEQ ID NO: 362978 - DNA, 140 bp, Homo sapiens; identical to SEQ ID NO: 337745
  chr2:122010702-122010842
  hypo

SEQ ID NO: 362979 - DNA, 248 bp, Homo sapiens; identical to SEQ ID NO: 337747
  chr2:122094622-122094870
  hypo

SEQ ID NO: 362980 - DNA, 317 bp, Homo sapiens; identical to SEQ ID NO: 337749
  chr2:122187647-122187964
  hypo

SEQ ID NO: 362981 - DNA, 381 bp, Homo sapiens; identical to SEQ ID NO: 280195
  chr2:127413347-127413728
  hypo

SEQ ID NO: 362982 - DNA, 255 bp, Homo sapiens; identical to SEQ ID NO: 349581
  chr2:127414108-127414363
  hypo

SEQ ID NO: 362983 - DNA, 97 bp, Homo sapiens; identical to SEQ ID NO: 353172
  chr2:127428888-127428985
  hypo

SEQ ID NO: 362984 - DNA, 244 bp, Homo sapiens; identical to SEQ ID NO: 353173
  chr2:127435291-127435535
  hypo

SEQ ID NO: 362985 - DNA, 107 bp, Homo sapiens; identical to SEQ ID NO: 300156
  chr2:127438526-127438633
  hypo

SEQ ID NO: 362986 - DNA, 121 bp, Homo sapiens; identical to SEQ ID NO: 357296
  chr2:127863367-127863488
  hypo

SEQ ID NO: 362987 - DNA, 427 bp, Homo sapiens; identical to SEQ ID NO: 357297
  chr2:127863878-127864305
  hypo

SEQ ID NO: 362988 - DNA, 268 bp, Homo sapiens
  chr2:127895375-127895643
  hypo
cgacccattccttgaggccgcctcccatagagccactccgcacgcgtgggggtgtgggcacggcctaccctgctggccacaggacagagtgctgggcacatctcctcagccgcgctcgcagacagctgtcttccaagttcagggtgggacgcaggtcactggtcaccaccactcgcccagcagacaggctgagcctagttatgcagcagcaccagccagtgaggaggaacacctttgagaacatcctgtcatgaaccctcgcccaaac

SEQ ID NO: 362989 - DNA, 164 bp, Homo sapiens; identical to SEQ ID NO: 337759
  chr2:128127780-128127944
  hypo

SEQ ID NO: 362990 - DNA, 105 bp, Homo sapiens; identical to SEQ ID NO: 357301
  chr2:128459397-128459502
  hypo

SEQ ID NO: 362991 - DNA, 197 bp, Homo sapiens; identical to SEQ ID NO: 337762
  chr2:128583666-128583863
  hypo

SEQ ID NO: 362992 - DNA, 154 bp, Homo sapiens; identical to SEQ ID NO: 337763
  chr2:130512142-130512296
  hypo

SEQ ID NO: 362993 - DNA, 110 bp, Homo sapiens; identical to SEQ ID NO: 353176
  chr2:131487004-131487114
  hypo

SEQ ID NO: 362994 - DNA, 174 bp, Homo sapiens; identical to SEQ ID NO: 337769
  chr2:132269055-132269229
  hypo

SEQ ID NO: 362995 - DNA, 268 bp, Homo sapiens; identical to SEQ ID NO: 337770
  chr2:132270135-132270403
  hypo

SEQ ID NO: 362996 - DNA, 295 bp, Homo sapiens; identical to SEQ ID NO: 337771
  chr2:132301071-132301366
  hypo

SEQ ID NO: 362997 - DNA, 484 bp, Homo sapiens
  chr2:133174959-133175443
  hypo
cgaggcctgcagctacgctacgctgctgcacgtgctgacactcagctttgagcgctacatcgccatctgtcaccccttcaggtacaaggctgtgtcgggaccttgccaggtgaagctgctgattggcttcgtctgggtcacctccgccctggtggcactgcccttgctgtttgccatgggtactgagtaccccctggtgaacgtgcccagccaccggggtctcacttgcaaccgctccagcacccgccaccacgagcagcccgagacctccaatatgtccatctgtaccaacctctccagccgctggaccgtgttccagtccagcatcttcggcgccttcgtggtctacctcgtggtcctgctctccgtagccttcatgtgctggaacatgatgcaggtgctcatgaaaagccagaagggctcgctggccgggggcacgcggcctccgcagctgaggaagtccgagagcgaagagagcaggacc

SEQ ID NO: 362998 - DNA, 74 bp, Homo sapiens; identical to SEQ ID NO: 337773
  chr2:135293582-135293656
  hypo

SEQ ID NO: 362999 - DNA, 353 bp, Homo sapiens; identical to SEQ ID NO: 198445
  chr2:135476396-135476749
  hypo

SEQ ID NO: 363000 - DNA, 912 bp, Homo sapiens; identical to SEQ ID NO: 198448
  chr2:136874020-136874932
  hypo

SEQ ID NO: 363001 - DNA, 482 bp, Homo sapiens; identical to SEQ ID NO: 198449
  chr2:136875399-136875881
  hypo

SEQ ID NO: 363002 - DNA, 60 bp, Homo sapiens; identical to SEQ ID NO: 198452
  chr2:137523039-137523099
  hypo

SEQ ID NO: 363003 - DNA, 69 bp, Homo sapiens; identical to SEQ ID NO: 357317
  chr2:139538166-139538235
  hypo

SEQ ID NO: 363004 - DNA, 186 bp, Homo sapiens; identical to SEQ ID NO: 331461
  chr2:148602743-148602929
  hypo

SEQ ID NO: 363005 - DNA, 169 bp, Homo sapiens; identical to SEQ ID NO: 337783
  chr2:149525294-149525463
  hypo

SEQ ID NO: 363006 - DNA, 50 bp, Homo sapiens; identical to SEQ ID NO: 345044
  chr2:149632592-149632642
  hypo

SEQ ID NO: 363007 - DNA, 170 bp, Homo sapiens; identical to SEQ ID NO: 337786
  chr2:152295736-152295906
  hypo

SEQ ID NO: 363008 - DNA, 593 bp, Homo sapiens; identical to SEQ ID NO: 357332
  chr2:153192142-153192735
  hypo

SEQ ID NO: 363009 - DNA, 60 bp, Homo sapiens; identical to SEQ ID NO: 357335
  chr2:155553956-155554016
  hypo

SEQ ID NO: 363010 - DNA, 612 bp, Homo sapiens; identical to SEQ ID NO: 198483
  chr2:155554076-155554688
  hypo

SEQ ID NO: 363011 - DNA, 349 bp, Homo sapiens; identical to SEQ ID NO: 198484
  chr2:155554689-155555038
  hypo

SEQ ID NO: 363012 - DNA, 461 bp, Homo sapiens; identical to SEQ ID NO: 349603
  chr2:157292161-157292622
  hypo

SEQ ID NO: 363013 - DNA, 1811 bp, Homo sapiens; identical to SEQ ID NO: 331475
  chr2:159313069-159314880
  hypo

SEQ ID NO: 363014 - DNA, 125 bp, Homo sapiens; identical to SEQ ID NO: 337792
  chr2:159528162-159528287
  hypo

SEQ ID NO: 363015 - DNA, 126 bp, Homo sapiens; identical to SEQ ID NO: 337793
  chr2:159994731-159994857
  hypo

SEQ ID NO: 363016 - DNA, 123 bp, Homo sapiens; identical to SEQ ID NO: 357340
  chr2:161264043-161264166
  hypo

SEQ ID NO: 363017 - DNA, 203 bp, Homo sapiens; identical to SEQ ID NO: 198498
  chr2:161264419-161264622
  hypo

SEQ ID NO: 363018 - DNA, 625 bp, Homo sapiens; identical to SEQ ID NO: 357344
  chr2:162271677-162272302
  hypo

SEQ ID NO: 363019 - DNA, 262 bp, Homo sapiens; identical to SEQ ID NO: 198502
  chr2:162930659-162930921
  hypo

SEQ ID NO: 363020 - DNA, 37 bp, Homo sapiens; identical to SEQ ID NO: 198509
  chr2:166650106-166650143
  hypo

SEQ ID NO: 363021 - DNA, 723 bp, Homo sapiens; identical to SEQ ID NO: 345049
  chr2:166650508-166651231
  hypo

SEQ ID NO: 363022 - DNA, 100 bp, Homo sapiens; identical to SEQ ID NO: 349612
  chr2:168148871-168148971
  hypo

SEQ ID NO: 363023 - DNA, 239 bp, Homo sapiens; identical to SEQ ID NO: 198512
  chr2:168149264-168149503
  hypo

SEQ ID NO: 363024 - DNA, 220 bp, Homo sapiens; identical to SEQ ID NO: 198513
  chr2:168149556-168149776
  hypo

SEQ ID NO: 363025 - DNA, 401 bp, Homo sapiens; identical to SEQ ID NO: 349615
  chr2:169312417-169312818
  hypo

SEQ ID NO: 363026 - DNA, 904 bp, Homo sapiens; identical to SEQ ID NO: 349616
  chr2:169312881-169313785
  hypo

SEQ ID NO: 363027 - DNA, 82 bp, Homo sapiens; identical to SEQ ID NO: 353197
  chr2:170282893-170282975
  hypo

SEQ ID NO: 363028 - DNA, 127 bp, Homo sapiens; identical to SEQ ID NO: 337805
  chr2:170569589-170569716
  hypo

SEQ ID NO: 363029 - DNA, 133 bp, Homo sapiens; identical to SEQ ID NO: 337806
  chr2:171730981-171731114
  hypo

SEQ ID NO: 363030 - DNA, 98 bp, Homo sapiens; identical to SEQ ID NO: 337807
  chr2:171815760-171815858
  hypo

SEQ ID NO: 363031 - DNA, 632 bp, Homo sapiens; identical to SEQ ID NO: 353201
  chr2:171822567-171823199
  hypo

SEQ ID NO: 363032 - DNA, 32 bp, Homo sapiens; identical to SEQ ID NO: 357368
  chr2:172379091-172379123
  hypo

SEQ ID NO: 363033 - DNA, 50 bp, Homo sapiens
  chr2:172411075-172411125
  hypo
cgtaaatacgcttggccttctgatcctggtgttcggggccctcatttttt

SEQ ID NO: 363034 - DNA, 219 bp, Homo sapiens; identical to SEQ ID NO: 280446
  chr2:177052744-177052963
  hypo

SEQ ID NO: 363035 - DNA, 55 bp, Homo sapiens; identical to SEQ ID NO: 357397
  chr2:177502170-177502225
  hypo

SEQ ID NO: 363036 - DNA, 60 bp, Homo sapiens; identical to SEQ ID NO: 198583
  chr2:177502920-177502980
  hypo

SEQ ID NO: 363037 - DNA, 794 bp, Homo sapiens; identical to SEQ ID NO: 331546
  chr2:178257227-178258021
  hypo

SEQ ID NO: 363038 - DNA, 90 bp, Homo sapiens; identical to SEQ ID NO: 345055
  chr2:183902312-183902402
  hypo

SEQ ID NO: 363039 - DNA, 568 bp, Homo sapiens; identical to SEQ ID NO: 198600
  chr2:183902442-183903010
  hypo

SEQ ID NO: 363040 - DNA, 587 bp, Homo sapiens; identical to SEQ ID NO: 346507
  chr2:183903037-183903624
  hypo

SEQ ID NO: 363041 - DNA, 86 bp, Homo sapiens; identical to SEQ ID NO: 345058
  chr2:191044988-191045074
  hypo

SEQ ID NO: 363042 - DNA, 513 bp, Homo sapiens; identical to SEQ ID NO: 345059
  chr2:191045505-191046018
  hypo

SEQ ID NO: 363043 - DNA, 204 bp, Homo sapiens; identical to SEQ ID NO: 353208
  chr2:191796737-191796941
  hypo

SEQ ID NO: 363044 - DNA, 447 bp, Homo sapiens; identical to SEQ ID NO: 345060
  chr2:192109730-192110177
  hypo

SEQ ID NO: 363045 - DNA, 253 bp, Homo sapiens; identical to SEQ ID NO: 198625
  chr2:192110303-192110556
  hypo

SEQ ID NO: 363046 - DNA, 439 bp, Homo sapiens; identical to SEQ ID NO: 345062
  chr2:192110584-192111023
  hypo

SEQ ID NO: 363047 - DNA, 64 bp, Homo sapiens; identical to SEQ ID NO: 337829
  chr2:196411561-196411625
  hypo

SEQ ID NO: 363048 - DNA, 86 bp, Homo sapiens; identical to SEQ ID NO: 337831
  chr2:198276053-198276139
  hypo

SEQ ID NO: 363049 - DNA, 897 bp, Homo sapiens; identical to SEQ ID NO: 331573
  chr2:200320451-200321348
  hypo

SEQ ID NO: 363050 - DNA, 62 bp, Homo sapiens; identical to SEQ ID NO: 357429
  chr2:200322611-200322673
  hypo

SEQ ID NO: 363051 - DNA, 57 bp, Homo sapiens; identical to SEQ ID NO: 357439
  chr2:207307406-207307463
  hypo

SEQ ID NO: 363052 - DNA, 239 bp, Homo sapiens; identical to SEQ ID NO: 198669
  chr2:207308960-207309199
  hypo

SEQ ID NO: 363053 - DNA, 118 bp, Homo sapiens; identical to SEQ ID NO: 337841
  chr2:208688685-208688803
  hypo

SEQ ID NO: 363054 - DNA, 187 bp, Homo sapiens; identical to SEQ ID NO: 353215
  chr2:209224972-209225159
  hypo

SEQ ID NO: 363055 - DNA, 479 bp, Homo sapiens; identical to SEQ ID NO: 353216
  chr2:209225393-209225872
  hypo

SEQ ID NO: 363056 - DNA, 67 bp, Homo sapiens; identical to SEQ ID NO: 337845
  chr2:216179504-216179571
  hypo

SEQ ID NO: 363057 - DNA, 502 bp, Homo sapiens; identical to SEQ ID NO: 337847
  chr2:217528438-217528940
  hypo

SEQ ID NO: 363058 - DNA, 410 bp, Homo sapiens; identical to SEQ ID NO: 280629
  chr2:217559556-217559966
  hypo

SEQ ID NO: 363059 - DNA, 180 bp, Homo sapiens; identical to SEQ ID NO: 337849
  chr2:217674486-217674666
  hypo

SEQ ID NO: 363060 - DNA, 84 bp, Homo sapiens; identical to SEQ ID NO: 353219
  chr2:217674965-217675049
  hypo

SEQ ID NO: 363061 - DNA, 181 bp, Homo sapiens; identical to SEQ ID NO: 337851
  chr2:217691004-217691185
  hypo

SEQ ID NO: 363062 - DNA, 93 bp, Homo sapiens; identical to SEQ ID NO: 337852
  chr2:218678441-218678534
  hypo

SEQ ID NO: 363063 - DNA, 839 bp, Homo sapiens; identical to SEQ ID NO: 337853
  chr2:218682490-218683329
  hypo

SEQ ID NO: 363064 - DNA, 138 bp, Homo sapiens; identical to SEQ ID NO: 337854
  chr2:218686231-218686369
  hypo

SEQ ID NO: 363065 - DNA, 267 bp, Homo sapiens; identical to SEQ ID NO: 337855
  chr2:218694781-218695048
  hypo

SEQ ID NO: 363066 - DNA, 56 bp, Homo sapiens
  chr2:218697833-218697889
  hypo
cggtcattcatggaataaccacgaagcagccccagcccacaggtacgcgcatgttt

SEQ ID NO: 363067 - DNA, 178 bp, Homo sapiens
  chr2:218697937-218698115
  hypo
cggacgagaggaccagacagggcaggagctctctcttggttcctcccttgttcacctccagctcctgaattcctcgttcccccagttcctgggcaattgggcccttctgctgaggcagatgagtgggcgacgctaaagccaggcaagtcttttgcttcctgagagaaaaattccacac

SEQ ID NO: 363068 - DNA, 79 bp, Homo sapiens; identical to SEQ ID NO: 337857
  chr2:218700747-218700826
  hypo

SEQ ID NO: 363069 - DNA, 288 bp, Homo sapiens; identical to SEQ ID NO: 337858
  chr2:218704299-218704587
  hypo

SEQ ID NO: 363070 - DNA, 1042 bp, Homo sapiens; identical to SEQ ID NO: 337859
  chr2:218712694-218713736
  hypo

SEQ ID NO: 363071 - DNA, 171 bp, Homo sapiens; identical to SEQ ID NO: 337860
  chr2:218765473-218765644
  hypo

SEQ ID NO: 363072 - DNA, 302 bp, Homo sapiens; identical to SEQ ID NO: 337861
  chr2:219145053-219145355
  hypo

SEQ ID NO: 363073 - DNA, 324 bp, Homo sapiens; identical to SEQ ID NO: 280633
  chr2:219232221-219232545
  hypo

SEQ ID NO: 363074 - DNA, 32 bp, Homo sapiens; identical to SEQ ID NO: 357453
  chr2:219232859-219232891
  hypo

SEQ ID NO: 363075 - DNA, 113 bp, Homo sapiens
  chr2:219294067-219294180
  hypo
gtggtggacggagagaatgaattggcatccccgaagctgatggaggtgatgaaccacgtgctgggcaagcgcagggagctgaaggcggccgtgcccgacacggtggtggagcc

SEQ ID NO: 363076 - DNA, 594 bp, Homo sapiens; identical to SEQ ID NO: 346517
  chr2:219757371-219757965
  hypo

SEQ ID NO: 363077 - DNA, 832 bp, Homo sapiens; identical to SEQ ID NO: 357460
  chr2:219845565-219846397
  hypo

SEQ ID NO: 363078 - DNA, 41 bp, Homo sapiens; identical to SEQ ID NO: 357462
  chr2:219857682-219857723
  hypo

SEQ ID NO: 363079 - DNA, 177 bp, Homo sapiens
  chr2:220150664-220150841
  hypo
cgctgacgctctctcctgtcaccccgcccctgctctctccccagatgtgttctgagctggatgccgggttccagaatcgctgcacagttccaacaggacagcgccttcccccatgcgctgggaggggaccctccatttctccccctcacccatgctgagtgtagagccggggcctgg

SEQ ID NO: 363080 - DNA, 336 bp, Homo sapiens
  chr2:220150871-220151207
  hypo
agtagtcttagcctgtgcactctcttccttgggtgtttggtgctggctcctggggactacaaatcccagagtgcggtgtgcccggcctcatttctgatagatcccgcttgggggaggtggtgtatggttacggagctgtgcatcttgggacatgtagtagcccaggtcggcttgtcactcgctgtgagatggggagattttgtcttttgatttatccctgtagggctggcagggttgtagatgaagggggaatgatctgagccttggttcccctgacacgtcttgctagccccagggttagagtgggcagggcagagccgcgcagcacctgggagc

SEQ ID NO: 363081 - DNA, 98 bp, Homo sapiens; identical to SEQ ID NO: 357468
  chr2:220378995-220379093
  hypo

SEQ ID NO: 363082 - DNA, 360 bp, Homo sapiens; identical to SEQ ID NO: 337877
  chr2:220427099-220427459
  hypo

SEQ ID NO: 363083 - DNA, 123 bp, Homo sapiens
  chr2:220428136-220428259
  hypo
cgtctgagggctgggtggcgggcagcaccaggcggcgatggggcccctcattctccagcaccacgaagtcactctcctccacctcctgcccgtccttgtaccaacgcacaggggcgtcctctc

SEQ ID NO: 363084 - DNA, 81 bp, Homo sapiens; identical to SEQ ID NO: 357470
  chr2:220435308-220435389
  hypo

SEQ ID NO: 363085 - DNA, 406 bp, Homo sapiens; identical to SEQ ID NO: 198725
  chr2:222436961-222437367
  hypo

SEQ ID NO: 363086 - DNA, 806 bp, Homo sapiens; identical to SEQ ID NO: 346522
  chr2:222437421-222438227
  hypo

SEQ ID NO: 363087 - DNA, 94 bp, Homo sapiens; identical to SEQ ID NO: 349691
  chr2:223185036-223185130
  hypo

SEQ ID NO: 363088 - DNA, 372 bp, Homo sapiens; identical to SEQ ID NO: 331638
  chr2:224808923-224809295
  hypo

SEQ ID NO: 363089 - DNA, 236 bp, Homo sapiens; identical to SEQ ID NO: 198740
  chr2:225906168-225906404
  hypo

SEQ ID NO: 363090 - DNA, 337 bp, Homo sapiens; identical to SEQ ID NO: 337887
  chr2:227841945-227842282
  hypo

SEQ ID NO: 363091 - DNA, 91 bp, Homo sapiens
  chr2:230795444-230795535
  hypo
cgacagtgagatgccgtctcaaaacaaaaacaaaagagagatgctttaccccttcgccactgcacctgagaacctcagcccagctcagctg

SEQ ID NO: 363092 - DNA, 131 bp, Homo sapiens; identical to SEQ ID NO: 337890
  chr2:231676894-231677025
  hypo

SEQ ID NO: 363093 - DNA, 54 bp, Homo sapiens; identical to SEQ ID NO: 337892
  chr2:231977489-231977543
  hypo

SEQ ID NO: 363094 - DNA, 104 bp, Homo sapiens; identical to SEQ ID NO: 280744
  chr2:232479181-232479285
  hypo

SEQ ID NO: 363095 - DNA, 227 bp, Homo sapiens; identical to SEQ ID NO: 349701
  chr2:232479454-232479681
  hypo

SEQ ID NO: 363096 - DNA, 115 bp, Homo sapiens; identical to SEQ ID NO: 357491
  chr2:232527239-232527354
  hypo

SEQ ID NO: 363097 - DNA, 623 bp, Homo sapiens; identical to SEQ ID NO: 346527
  chr2:232790030-232790653
  hypo

SEQ ID NO: 363098 - DNA, 263 bp, Homo sapiens; identical to SEQ ID NO: 280754
  chr2:232790784-232791047
  hypo

SEQ ID NO: 363099 - DNA, 117 bp, Homo sapiens; identical to SEQ ID NO: 337897
  chr2:232850673-232850790
  hypo

SEQ ID NO: 363100 - DNA, 98 bp, Homo sapiens; identical to SEQ ID NO: 353239
  chr2:233198455-233198553
  hypo

SEQ ID NO: 363101 - DNA, 129 bp, Homo sapiens; identical to SEQ ID NO: 353240
  chr2:233198583-233198712
  hypo

SEQ ID NO: 363102 - DNA, 254 bp, Homo sapiens; identical to SEQ ID NO: 357495
  chr2:233283897-233284151
  hypo

SEQ ID NO: 363103 - DNA, 339 bp, Homo sapiens; identical to SEQ ID NO: 280765
  chr2:233497841-233498180
  hypo

SEQ ID NO: 363104 - DNA, 135 bp, Homo sapiens; identical to SEQ ID NO: 337903
  chr2:234206672-234206807
  hypo

SEQ ID NO: 363105 - DNA, 626 bp, Homo sapiens; identical to SEQ ID NO: 353241
  chr2:234372729-234373355
  hypo

SEQ ID NO: 363106 - DNA, 339 bp, Homo sapiens; identical to SEQ ID NO: 353242
  chr2:234373385-234373724
  hypo

SEQ ID NO: 363107 - DNA, 48 bp, Homo sapiens
  chr2:234737283-234737331
  hypo
cggcccagttctgtaccaggagaagctgctgaagccggcagctttgct

SEQ ID NO: 363108 - DNA, 273 bp, Homo sapiens
  chr2:234737409-234737682
  hypo
gggcgcccccaagaaggtactgtgcctggccctgggcccaggtcccgggagctgagggtgcaggccgggtgccctggtcagcctgggagggagggtgcaggctgagggctgcccatgcccctccaggtgaagcagtaccggaaggtcttgctggagaagtgcctgggccccctgagggagcccgtgagcaacagcgtgactgccgagggcatggaggccctgaccaagatcctggctgagctccgggaaggggatgtggggtcctctttcgac

SEQ ID NO: 363109 - DNA, 321 bp, Homo sapiens; identical to SEQ ID NO: 337906
  chr2:234751574-234751895
  hypo

SEQ ID NO: 363110 - DNA, 592 bp, Homo sapiens; identical to SEQ ID NO: 198764
  chr2:235860154-235860746
  hypo

SEQ ID NO: 363111 - DNA, 350 bp, Homo sapiens; identical to SEQ ID NO: 337908
  chr2:235950041-235950391
  hypo

SEQ ID NO: 363112 - DNA, 412 bp, Homo sapiens; identical to SEQ ID NO: 337909
  chr2:235961011-235961423
  hypo

SEQ ID NO: 363113 - DNA, 297 bp, Homo sapiens; identical to SEQ ID NO: 198767
  chr2:236402404-236402701
  hypo

SEQ ID NO: 363114 - DNA, 216 bp, Homo sapiens; identical to SEQ ID NO: 337911
  chr2:236452983-236453199
  hypo

SEQ ID NO: 363115 - DNA, 172 bp, Homo sapiens; identical to SEQ ID NO: 337912
  chr2:236459184-236459356
  hypo

SEQ ID NO: 363116 - DNA, 168 bp, Homo sapiens; identical to SEQ ID NO: 337913
  chr2:236603384-236603552
  hypo

SEQ ID NO: 363117 - DNA, 640 bp, Homo sapiens; identical to SEQ ID NO: 337914
  chr2:236648390-236649030
  hypo

SEQ ID NO: 363118 - DNA, 160 bp, Homo sapiens; identical to SEQ ID NO: 337915
  chr2:236672645-236672805
  hypo

SEQ ID NO: 363119 - DNA, 366 bp, Homo sapiens; identical to SEQ ID NO: 337917
  chr2:236685979-236686345
  hypo

SEQ ID NO: 363120 - DNA, 137 bp, Homo sapiens; identical to SEQ ID NO: 337918
  chr2:236722564-236722701
  hypo

SEQ ID NO: 363121 - DNA, 317 bp, Homo sapiens; identical to SEQ ID NO: 337920
  chr2:236801881-236802198
  hypo

SEQ ID NO: 363122 - DNA, 348 bp, Homo sapiens; identical to SEQ ID NO: 337921
  chr2:236826196-236826544
  hypo

SEQ ID NO: 363123 - DNA, 544 bp, Homo sapiens; identical to SEQ ID NO: 337922
  chr2:236839051-236839595
  hypo

SEQ ID NO: 363124 - DNA, 211 bp, Homo sapiens; identical to SEQ ID NO: 337925
  chr2:236949342-236949553
  hypo

SEQ ID NO: 363125 - DNA, 139 bp, Homo sapiens; identical to SEQ ID NO: 337926
  chr2:237018173-237018312
  hypo

SEQ ID NO: 363126 - DNA, 389 bp, Homo sapiens; identical to SEQ ID NO: 337927
  chr2:237032665-237033054
  hypo

SEQ ID NO: 363127 - DNA, 137 bp, Homo sapiens; identical to SEQ ID NO: 337929
  chr2:237999682-237999819
  hypo

SEQ ID NO: 363128 - DNA, 66 bp, Homo sapiens; identical to SEQ ID NO: 347950
  chr2:238280432-238280498
  hypo

SEQ ID NO: 363129 - DNA, 235 bp, Homo sapiens; identical to SEQ ID NO: 347951
  chr2:238280812-238281047
  hypo

SEQ ID NO: 363130 - DNA, 226 bp, Homo sapiens; identical to SEQ ID NO: 331671
  chr2:238617178-238617404
  hypo

SEQ ID NO: 363131 - DNA, 158 bp, Homo sapiens; identical to SEQ ID NO: 337932
  chr2:238625990-238626148
  hypo

SEQ ID NO: 363132 - DNA, 34 bp, Homo sapiens; identical to SEQ ID NO: 337934
  chr2:238934785-238934819
  hypo

SEQ ID NO: 363133 - DNA, 270 bp, Homo sapiens; identical to SEQ ID NO: 345782
  chr2:239074309-239074579
  hypo

SEQ ID NO: 363134 - DNA, 147 bp, Homo sapiens; identical to SEQ ID NO: 353252
  chr2:239079151-239079298
  hypo

SEQ ID NO: 363135 - DNA, 67 bp, Homo sapiens; identical to SEQ ID NO: 347954
  chr2:239082208-239082275
  hypo

SEQ ID NO: 363136 - DNA, 42 bp, Homo sapiens; identical to SEQ ID NO: 345783
  chr2:239083093-239083135
  hypo

SEQ ID NO: 363137 - DNA, 193 bp, Homo sapiens; identical to SEQ ID NO: 337942
  chr2:239316302-239316495
  hypo

SEQ ID NO: 363138 - DNA, 448 bp, Homo sapiens; identical to SEQ ID NO: 337943
  chr2:239800534-239800982
  hypo

SEQ ID NO: 363139 - DNA, 104 bp, Homo sapiens
  chr2:239888414-239888518
  hypo
cgtggctccccgtccctccggtgaccaggtgggcactggctcctgatggttcgaagccccggtcagcccccgccatccctaaactagtgacttccacttgcgtt

SEQ ID NO: 363140 - DNA, 76 bp, Homo sapiens
  chr2:239888789-239888865
  hypo
cccgtgcctctgtctaggagcgactgtggcttcgggttaagcctctgtctttacctgtagtgggagatgtctgctc

SEQ ID NO: 363141 - DNA, 314 bp, Homo sapiens; identical to SEQ ID NO: 337945
  chr2:239949585-239949899
  hypo

SEQ ID NO: 363142 - DNA, 902 bp, Homo sapiens; identical to SEQ ID NO: 337947
  chr2:239969842-239970744
  hypo

SEQ ID NO: 363143 - DNA, 811 bp, Homo sapiens; identical to SEQ ID NO: 337948
  chr2:239973912-239974723
  hypo

SEQ ID NO: 363144 - DNA, 161 bp, Homo sapiens; identical to SEQ ID NO: 337949
  chr2:240061326-240061487
  hypo

SEQ ID NO: 363145 - DNA, 139 bp, Homo sapiens
  chr2:240165157-240165296
  hypo
acattctaaagtgtgtttggtggggggttgctgacatagacaaaaacaatgaaaccgctgtgactcaagagtagtataggtcacacctcactgtgcacaccccactgtgctaacagagctgcttttcagacacgggaac

SEQ ID NO: 363146 - DNA, 120 bp, Homo sapiens; identical to SEQ ID NO: 353256
  chr2:240167455-240167575
  hypo

SEQ ID NO: 363147 - DNA, 310 bp, Homo sapiens; identical to SEQ ID NO: 353257
  chr2:240167605-240167915
  hypo

SEQ ID NO: 363148 - DNA, 49 bp, Homo sapiens
  chr2:240169135-240169184
  hypo
aacgaggcacacagtacgtgcggggcgagagactccctttgctcctccc

SEQ ID NO: 363149 - DNA, 141 bp, Homo sapiens; identical to SEQ ID NO: 353258
  chr2:240213554-240213695
  hypo

SEQ ID NO: 363150 - DNA, 31 bp, Homo sapiens; identical to SEQ ID NO: 353259
  chr2:240213811-240213842
  hypo

SEQ ID NO: 363151 - DNA, 287 bp, Homo sapiens; identical to SEQ ID NO: 347956
  chr2:240226690-240226977
  hypo

SEQ ID NO: 363152 - DNA, 154 bp, Homo sapiens; identical to SEQ ID NO: 347957
  chr2:240227007-240227161
  hypo

SEQ ID NO: 363153 - DNA, 82 bp, Homo sapiens
  chr2:240270283-240270365
  hypo
cgtgggctttccgtccacactcccggtttcatgccagggactctggcttcaaggcagaggctctgtgtcctgacaaacgcat

SEQ ID NO: 363154 - DNA, 516 bp, Homo sapiens
  chr2:240270511-240271027
  hypo
aaatcgttctttagagcaataaaatcccaacagttaagcagctttgacgtcagagaaccagggcctggctctggcaaagttcagcgggaacagcaataaaaccgtaacacaaaactcacccagcagcagaggactttcacagaacacaggagaggaaagccacacacactgcactagaagggcacttcatcagcagggcaaagccaagtcacatgacaaatgtgagagggggcccatgggcggctggactcccccagcccggcctgcccagggagtgagggcggcacgggcacccacaccaggccacacaggagcagggcccccatgccagatgggcaggcaagggtgagccaggcaggcaagagtgagccgggtgggcagggcgaaggacagggccagctagcagaggacggcacgagagacacacggagggaggggaggtgcagccaggtaggccccgaacaccacgttgccaggactcggctcctcggctcaaggaaaagggacagcggttcc

SEQ ID NO: 363155 - DNA, 95 bp, Homo sapiens; identical to SEQ ID NO: 353262
  chr2:240316126-240316221
  hypo

SEQ ID NO: 363156 - DNA, 80 bp, Homo sapiens; identical to SEQ ID NO: 337957
  chr2:240319796-240319876
  hypo

SEQ ID NO: 363157 - DNA, 155 bp, Homo sapiens; identical to SEQ ID NO: 337958
  chr2:240567524-240567679
  hypo

SEQ ID NO: 363158 - DNA, 107 bp, Homo sapiens
  chr2:240672200-240672307
  hypo
cggcgcttgtccctgggatctccctgggcagggccaagccaggcgggtcattctcctgggagcaccgcactcattcccaggctctacctagcggcgctgtccggacc

SEQ ID NO: 363159 - DNA, 43 bp, Homo sapiens
  chr2:240690358-240690401
  hypo
cggtggctcggcaaagtcagtccctcacacatcctcgatccag

SEQ ID NO: 363160 - DNA, 296 bp, Homo sapiens; identical to SEQ ID NO: 337965
  chr2:240906462-240906758
  hypo

SEQ ID NO: 363161 - DNA, 100 bp, Homo sapiens; identical to SEQ ID NO: 337966
  chr2:240928864-240928964
  hypo

SEQ ID NO: 363162 - DNA, 213 bp, Homo sapiens; identical to SEQ ID NO: 337967
  chr2:240930596-240930809
  hypo

SEQ ID NO: 363163 - DNA, 84 bp, Homo sapiens
  chr2:240965878-240965962
  hypo
cgattgtaaaacagtgggaatgcagctgtgtaaactacggccggttctatggatgtttctataattgaagaattgctttttgtc

SEQ ID NO: 363164 - DNA, 209 bp, Homo sapiens; identical to SEQ ID NO: 353265
  chr2:241157300-241157509
  hypo

SEQ ID NO: 363165 - DNA, 116 bp, Homo sapiens
  chr2:241262542-241262658
  hypo
cgggagacgaaatgacggggcatccaataagccccaagtcggcccgcccctccctaccggagggcagtggaggccccgccgggagtccaggctccgccaccgccatcagacccgac

SEQ ID NO: 363166 - DNA, 788 bp, Homo sapiens
  chr2:241380563-241381351
  hypo
cgcctccctacagcaggacggggggcatacctacctggtggccgaaccgcagggctgcacatcagacctcggaggagagcttagtgggtgtctgagcatgcccatgtctgttctatggcatccatgtgcatggcacaggtgtcagccatgggctggcactagacaggagacgagccaggggaggggctcacccgaagccacactggtcaggtctggcctggggccccacatctgccgtgcccgggccagtgagaggctggacgccttttcttaagccagaccgtcctcacagggcctggctcagttatttcagatcaagactggacccgtggtggaggctggggtgggcactcctacatgcggggcctctgcccagccctggccctgtccagtgtcgacgtgcccagagccctgagccggcctggatcttgccagtcgccagcacagccctgtggggcccgggatcttgcccactttacgtgggggctccagacaggagccgcctgcccggagcctgggctcctcgctgccgtgcctgtggtggcttttctttgtctgggaacaggcctgggcaggtgccctgagccgcttgaagtctcctgacggggtggggggtgcagtgtagggtgttgaggcttgggccagggaagcgggcggttctccctccacctccaggccccacacccaggcgggagcacgcagcagccaggtgttgggtgagggctatgctgaggagcagggcccagagctgcagcctccttggctgcccttggcccgccgtgggtggc

SEQ ID NO: 363167 - DNA, 112 bp, Homo sapiens; identical to SEQ ID NO: 357518
  chr2:241393469-241393581
  hypo

SEQ ID NO: 363168 - DNA, 360 bp, Homo sapiens; identical to SEQ ID NO: 347959
  chr2:241542357-241542717
  hypo

SEQ ID NO: 363169 - DNA, 136 bp, Homo sapiens
  chr2:241697788-241697924
  hypo
cggaaccaggggaagcggtcatagaaggggtctccgccggtcaccacgttgtcacagtcctcgatgacactggagggcacctctgcagcgcggtcgtacatctcccgcatcaggtccagacgctgcctgcagggac

SEQ ID NO: 363170 - DNA, 196 bp, Homo sapiens; identical to SEQ ID NO: 353267
  chr2:241989264-241989460
  hypo

SEQ ID NO: 363171 - DNA, 462 bp, Homo sapiens; identical to SEQ ID NO: 345784
  chr2:242004407-242004869
  hypo

SEQ ID NO: 363172 - DNA, 56 bp, Homo sapiens
  chr2:242148880-242148936
  hypo
agggccgccactgagcaccggctcccttccaggagaggcctcggccccagtttgcc

SEQ ID NO: 363173 - DNA, 339 bp, Homo sapiens; identical to SEQ ID NO: 337986
  chr2:242169887-242170226
  hypo

SEQ ID NO: 363174 - DNA, 131 bp, Homo sapiens; identical to SEQ ID NO: 337987
  chr2:242190665-242190796
  hypo

SEQ ID NO: 363175 - DNA, 82 bp, Homo sapiens; identical to SEQ ID NO: 331676
  chr2:242269474-242269556
  hypo

SEQ ID NO: 363176 - DNA, 131 bp, Homo sapiens; identical to SEQ ID NO: 337989
  chr2:242277184-242277315
  hypo

SEQ ID NO: 363177 - DNA, 477 bp, Homo sapiens; identical to SEQ ID NO: 337990
  chr2:242350123-242350600
  hypo

SEQ ID NO: 363178 - DNA, 241 bp, Homo sapiens; identical to SEQ ID NO: 345785
  chr2:242436503-242436744
  hypo

SEQ ID NO: 363179 - DNA, 326 bp, Homo sapiens; identical to SEQ ID NO: 337992
  chr2:242440848-242441174
  hypo

SEQ ID NO: 363180 - DNA, 145 bp, Homo sapiens; identical to SEQ ID NO: 353273
  chr2:242523762-242523907
  hypo

SEQ ID NO: 363181 - DNA, 222 bp, Homo sapiens; identical to SEQ ID NO: 208696
  chr2:242524147-242524369
  hypo

SEQ ID NO: 363182 - DNA, 46 bp, Homo sapiens; identical to SEQ ID NO: 347964
  chr2:242554503-242554549
  hypo

SEQ ID NO: 363183 - DNA, 54 bp, Homo sapiens; identical to SEQ ID NO: 347965
  chr2:242554624-242554678
  hypo

SEQ ID NO: 363184 - DNA, 276 bp, Homo sapiens; identical to SEQ ID NO: 337996
  chr2:242566832-242567108
  hypo

SEQ ID NO: 363185 - DNA, 373 bp, Homo sapiens; identical to SEQ ID NO: 337997
  chr2:242572260-242572633
  hypo

SEQ ID NO: 363186 - DNA, 222 bp, Homo sapiens; identical to SEQ ID NO: 251927
  chr2:242599563-242599785
  hypo

SEQ ID NO: 363187 - DNA, 43 bp, Homo sapiens
  chr2:242602207-242602250
  hypo
cgggccgggcgcggtggctcacgcctataatcccaacttcaaa

SEQ ID NO: 363188 - DNA, 39 bp, Homo sapiens
  chr2:242602349-242602388
  hypo
cttcaaaaccaataaagcgggccgggcgcggtggctcac

SEQ ID NO: 363189 - DNA, 567 bp, Homo sapiens; identical to SEQ ID NO: 338000
  chr2:242616820-242617387
  hypo

SEQ ID NO: 363190 - DNA, 130 bp, Homo sapiens; identical to SEQ ID NO: 347966
  chr2:242617764-242617894
  hypo

SEQ ID NO: 363191 - DNA, 531 bp, Homo sapiens; identical to SEQ ID NO: 347967
  chr2:242617924-242618455
  hypo

SEQ ID NO: 363192 - DNA, 726 bp, Homo sapiens; identical to SEQ ID NO: 338003
  chr2:242664623-242665349
  hypo

SEQ ID NO: 363193 - DNA, 75 bp, Homo sapiens; identical to SEQ ID NO: 353281
  chr2:242735082-242735157
  hypo

SEQ ID NO: 363194 - DNA, 268 bp, Homo sapiens; identical to SEQ ID NO: 353282
  chr2:242735246-242735514
  hypo

SEQ ID NO: 363195 - DNA, 113 bp, Homo sapiens; identical to SEQ ID NO: 353283
  chr2:242815156-242815269
  hypo

SEQ ID NO: 363196 - DNA, 180 bp, Homo sapiens; identical to SEQ ID NO: 353284
  chr2:242925676-242925856
  hypo

SEQ ID NO: 363197 - DNA, 212 bp, Homo sapiens; identical to SEQ ID NO: 353285
  chr2:242933459-242933671
  hypo

SEQ ID NO: 363198 - DNA, 191 bp, Homo sapiens; identical to SEQ ID NO: 338015
  chr3:4347767-4347958
  hypo

SEQ ID NO: 363199 - DNA, 326 bp, Homo sapiens; identical to SEQ ID NO: 349725
  chr3:4909962-4910288
  hypo

SEQ ID NO: 363200 - DNA, 210 bp, Homo sapiens; identical to SEQ ID NO: 349726
  chr3:4910550-4910760
  hypo

SEQ ID NO: 363201 - DNA, 231 bp, Homo sapiens; identical to SEQ ID NO: 345076
  chr3:5018754-5018985
  hypo

SEQ ID NO: 363202 - DNA, 143 bp, Homo sapiens; identical to SEQ ID NO: 345077
  chr3:5019132-5019275
  hypo

SEQ ID NO: 363203 - DNA, 58 bp, Homo sapiens; identical to SEQ ID NO: 338018
  chr3:5165843-5165901
  hypo

SEQ ID NO: 363204 - DNA, 76 bp, Homo sapiens; identical to SEQ ID NO: 357538
  chr3:6903188-6903264
  hypo

SEQ ID NO: 363205 - DNA, 58 bp, Homo sapiens; identical to SEQ ID NO: 338023
  chr3:10011425-10011483
  hypo

SEQ ID NO: 363206 - DNA, 110 bp, Homo sapiens; identical to SEQ ID NO: 338024
  chr3:10131952-10132062
  hypo

SEQ ID NO: 363207 - DNA, 208 bp, Homo sapiens; identical to SEQ ID NO: 338025
  chr3:10541012-10541220
  hypo

SEQ ID NO: 363208 - DNA, 97 bp, Homo sapiens; identical to SEQ ID NO: 338026
  chr3:10638636-10638733
  hypo

SEQ ID NO: 363209 - DNA, 165 bp, Homo sapiens; identical to SEQ ID NO: 353292
  chr3:11581157-11581322
  hypo

SEQ ID NO: 363210 - DNA, 546 bp, Homo sapiens; identical to SEQ ID NO: 338029
  chr3:11655438-11655984
  hypo

SEQ ID NO: 363211 - DNA, 79 bp, Homo sapiens; identical to SEQ ID NO: 338032
  chr3:12605281-12605360
  hypo

SEQ ID NO: 363212 - DNA, 94 bp, Homo sapiens; identical to SEQ ID NO: 338033
  chr3:12626586-12626680
  hypo

SEQ ID NO: 363213 - DNA, 33 bp, Homo sapiens; identical to SEQ ID NO: 338034
  chr3:12743274-12743307
  hypo

SEQ ID NO: 363214 - DNA, 79 bp, Homo sapiens; identical to SEQ ID NO: 353297
  chr3:12976966-12977045
  hypo

SEQ ID NO: 363215 - DNA, 192 bp, Homo sapiens; identical to SEQ ID NO: 353298
  chr3:12977144-12977336
  hypo

SEQ ID NO: 363216 - DNA, 32 bp, Homo sapiens
  chr3:13367336-13367368
  hypo
cgtcacggatcccacggcccgggccacagcca

SEQ ID NO: 363217 - DNA, 156 bp, Homo sapiens
  chr3:13367420-13367576
  hypo
tcctgagaggcctggagaggaagcacaggtgtcagccccctttccatagctggacactccagtcaaagcccagctcacctggatgacaggccagcttcctcgctggctgccgctacccccatgggggctcactcagcagcctcaggagacagccac

SEQ ID NO: 363218 - DNA, 270 bp, Homo sapiens
  chr3:13611739-13612009
  hypo
cgcgtgcgtgccggtgtgcaccgtgtctgtgtgtgcacacccagtactgacaggcttcctttctgattcccccagggtcttacaggagaggggaccgtcctgggctggcctggaccatggtgctgctctgggagcctgcaggagcctggcttgctctgggcctggccctggccctgggccccagcgtggccgcagctgcccctcggcaggactgcacgggcgtggagtgcccgccgctggagaactgcattgaggaggcgctggagccgg

SEQ ID NO: 363219 - DNA, 186 bp, Homo sapiens
  chr3:13612341-13612527
  hypo
cctgacgccggtggagagctcatctgctaccagctccccggttgccacgggaacttctcagatgccgaggagggtgaccccgagcgacactacgaagacccctacagctatgaccaggaggtggccgaggtggaagcagcaacagccctggggggtgaggtccaggcgggtgcagtccaggcaggc

SEQ ID NO: 363220 - DNA, 478 bp, Homo sapiens; identical to SEQ ID NO: 349738
  chr3:13936742-13937220
  hypo

SEQ ID NO: 363221 - DNA, 124 bp, Homo sapiens; identical to SEQ ID NO: 349739
  chr3:13937250-13937374
  hypo

SEQ ID NO: 363222 - DNA, 150 bp, Homo sapiens; identical to SEQ ID NO: 338042
  chr3:14386858-14387008
  hypo

SEQ ID NO: 363223 - DNA, 92 bp, Homo sapiens; identical to SEQ ID NO: 331702
  chr3:14443834-14443926
  hypo

SEQ ID NO: 363224 - DNA, 578 bp, Homo sapiens; identical to SEQ ID NO: 331703
  chr3:14443998-14444576
  hypo

SEQ ID NO: 363225 - DNA, 53 bp, Homo sapiens; identical to SEQ ID NO: 338047
  chr3:15079942-15079995
  hypo

SEQ ID NO: 363226 - DNA, 78 bp, Homo sapiens; identical to SEQ ID NO: 345789
  chr3:15123770-15123848
  hypo

SEQ ID NO: 363227 - DNA, 42 bp, Homo sapiens; identical to SEQ ID NO: 345790
  chr3:15123992-15124034
  hypo

SEQ ID NO: 363228 - DNA, 78 bp, Homo sapiens; identical to SEQ ID NO: 345081
  chr3:16555426-16555504
  hypo

SEQ ID NO: 363229 - DNA, 107 bp, Homo sapiens; identical to SEQ ID NO: 357559
  chr3:16925425-16925532
  hypo

SEQ ID NO: 363230 - DNA, 73 bp, Homo sapiens; identical to SEQ ID NO: 280940
  chr3:16925583-16925656
  hypo

SEQ ID NO: 363231 - DNA, 230 bp, Homo sapiens; identical to SEQ ID NO: 280941
  chr3:16925705-16925935
  hypo

SEQ ID NO: 363232 - DNA, 255 bp, Homo sapiens; identical to SEQ ID NO: 280942
  chr3:16925965-16926220
  hypo

SEQ ID NO: 363233 - DNA, 340 bp, Homo sapiens; identical to SEQ ID NO: 349744
  chr3:16926663-16927003
  hypo

SEQ ID NO: 363234 - DNA, 102 bp, Homo sapiens; identical to SEQ ID NO: 338052
  chr3:18462342-18462444
  hypo

SEQ ID NO: 363235 - DNA, 269 bp, Homo sapiens; identical to SEQ ID NO: 331711
  chr3:23957838-23958107
  hypo

SEQ ID NO: 363236 - DNA, 400 bp, Homo sapiens; identical to SEQ ID NO: 338054
  chr3:24160995-24161395
  hypo

SEQ ID NO: 363237 - DNA, 989 bp, Homo sapiens; identical to SEQ ID NO: 331712
  chr3:24536360-24537349
  hypo

SEQ ID NO: 363238 - DNA, 295 bp, Homo sapiens
  chr3:25728355-25728650
  hypo
cgccgccgccagcaccggacccggagccgccatgcccaagtgccccaagtgcgacaaggaagtttacttcgccgagagggtgacctctctgggcaaggacttgcctcggccctgcctgaagtgcgagaatgtgggaagacgctgacctccgagggccacgctgagcacgaaagcaagccctactgcaaccacttgctatgccgccatgtttgggcaaaaaggctctggccggggtgaagccgacagccacactttcaagtaaatcgggtggtggagacctcatccttggccgctc

SEQ ID NO: 363239 - DNA, 123 bp, Homo sapiens; identical to SEQ ID NO: 338060
  chr3:31494150-31494273
  hypo

SEQ ID NO: 363240 - DNA, 168 bp, Homo sapiens; identical to SEQ ID NO: 357574
  chr3:32279558-32279726
  hypo

SEQ ID NO: 363241 - DNA, 558 bp, Homo sapiens; identical to SEQ ID NO: 345084
  chr3:32433054-32433612
  hypo

SEQ ID NO: 363242 - DNA, 200 bp, Homo sapiens; identical to SEQ ID NO: 198867
  chr3:32433665-32433865
  hypo

SEQ ID NO: 363243 - DNA, 81 bp, Homo sapiens; identical to SEQ ID NO: 345086
  chr3:32434068-32434149
  hypo

SEQ ID NO: 363244 - DNA, 328 bp, Homo sapiens; identical to SEQ ID NO: 338063
  chr3:33216338-33216666
  hypo

SEQ ID NO: 363245 - DNA, 92 bp, Homo sapiens; identical to SEQ ID NO: 338065
  chr3:33437677-33437769
  hypo

SEQ ID NO: 363246 - DNA, 123 bp, Homo sapiens; identical to SEQ ID NO: 338066
  chr3:33689123-33689246
  hypo

SEQ ID NO: 363247 - DNA, 173 bp, Homo sapiens; identical to SEQ ID NO: 338067
  chr3:33818924-33819097
  hypo

SEQ ID NO: 363248 - DNA, 118 bp, Homo sapiens; identical to SEQ ID NO: 353315
  chr3:36984260-36984378
  hypo

SEQ ID NO: 363249 - DNA, 240 bp, Homo sapiens; identical to SEQ ID NO: 357579
  chr3:36985571-36985811
  hypo

SEQ ID NO: 363250 - DNA, 1420 bp, Homo sapiens; identical to SEQ ID NO: 331732
  chr3:37033979-37035399
  hypo

SEQ ID NO: 363251 - DNA, 119 bp, Homo sapiens; identical to SEQ ID NO: 338072
  chr3:37438337-37438456
  hypo

SEQ ID NO: 363252 - DNA, 136 bp, Homo sapiens
  chr3:41289199-41289335
  hypo
gtgtgacagaaggaatgcgtttgaacttggcccacccctggctgagtctaggctagactagtggggccatgctgcgcccccgcacacagcaggcccagtgaggctggaaaggacaaactactggcagagcagcatc

SEQ ID NO: 363253 - DNA, 242 bp, Homo sapiens; identical to SEQ ID NO: 338079
  chr3:42190950-42191192
  hypo

SEQ ID NO: 363254 - DNA, 98 bp, Homo sapiens
  chr3:42222621-42222719
  hypo
cgtttgtgtgctggaagccttccgcatccttcaggtgctctggcagtcccttgccatgcctgagccatcttcattattatgctgtgtgcttgatttgt

SEQ ID NO: 363255 - DNA, 243 bp, Homo sapiens; identical to SEQ ID NO: 345088
  chr3:43147038-43147281
  hypo

SEQ ID NO: 363256 - DNA, 105 bp, Homo sapiens; identical to SEQ ID NO: 345089
  chr3:43147607-43147712
  hypo

SEQ ID NO: 363257 - DNA, 149 bp, Homo sapiens; identical to SEQ ID NO: 345798
  chr3:43655492-43655641
  hypo

SEQ ID NO: 363258 - DNA, 219 bp, Homo sapiens; identical to SEQ ID NO: 338086
  chr3:44945281-44945500
  hypo

SEQ ID NO: 363259 - DNA, 255 bp, Homo sapiens; identical to SEQ ID NO: 338088
  chr3:45719334-45719589
  hypo

SEQ ID NO: 363260 - DNA, 114 bp, Homo sapiens; identical to SEQ ID NO: 338089
  chr3:45750569-45750683
  hypo

SEQ ID NO: 363261 - DNA, 396 bp, Homo sapiens; identical to SEQ ID NO: 353322
  chr3:46009350-46009746
  hypo

SEQ ID NO: 363262 - DNA, 316 bp, Homo sapiens; identical to SEQ ID NO: 353323
  chr3:46009776-46010092
  hypo

SEQ ID NO: 363263 - DNA, 118 bp, Homo sapiens
  chr3:48731393-48731511
  hypo
cgtttcagcaggtgccgacgagcgccttacaaacgactggctgaacacctttcctcccaggcctctctgccccagcatcactcaatctgctcagtcctcgactgctgcaggggaatgc

SEQ ID NO: 363264 - DNA, 97 bp, Homo sapiens; identical to SEQ ID NO: 338098
  chr3:49662414-49662511
  hypo

SEQ ID NO: 363265 - DNA, 557 bp, Homo sapiens; identical to SEQ ID NO: 347983
  chr3:49720262-49720819
  hypo

SEQ ID NO: 363266 - DNA, 37 bp, Homo sapiens
  chr3:49755498-49755535
  hypo
cggccattgaggcccctccggcctggctccagaaaga

SEQ ID NO: 363267 - DNA, 233 bp, Homo sapiens
  chr3:49755593-49755826
  hypo
tactgaggactgtgcgctcagctcttggagcgggctgggtgtttggggccagcggcggcagcggcaggcacggcggcagcagcggcagggtggggcgaacaggtagagcagcacgagcacaaggcccacggcacagcccagcagtgtggtgaagcctgtgttgaaagcctcgggctctgggcgcggaaagtgcacgctcacgttgtactcgtgcgtctggttgtggtgcaggc

SEQ ID NO: 363268 - DNA, 233 bp, Homo sapiens; identical to SEQ ID NO: 349767
  chr3:49906737-49906970
  hypo

SEQ ID NO: 363269 - DNA, 49 bp, Homo sapiens; identical to SEQ ID NO: 349768
  chr3:49907379-49907428
  hypo

SEQ ID NO: 363270 - DNA, 143 bp, Homo sapiens; identical to SEQ ID NO: 338103
  chr3:50144939-50145082
  hypo

SEQ ID NO: 363271 - DNA, 356 bp, Homo sapiens; identical to SEQ ID NO: 346562
  chr3:50374299-50374655
  hypo

SEQ ID NO: 363272 - DNA, 62 bp, Homo sapiens; identical to SEQ ID NO: 338107
  chr3:51623983-51624045
  hypo

SEQ ID NO: 363273 - DNA, 138 bp, Homo sapiens; identical to SEQ ID NO: 357614
  chr3:51990500-51990638
  hypo

SEQ ID NO: 363274 - DNA, 76 bp, Homo sapiens
  chr3:52415754-52415830
  hypo
cgcatcagccgcaccctacgccaggcgctgggcaatgcactcctgctgggcgtgggtggcagcggccgcagctccc

SEQ ID NO: 363275 - DNA, 232 bp, Homo sapiens; identical to SEQ ID NO: 338110
  chr3:52440854-52441086
  hypo

SEQ ID NO: 363276 - DNA, 551 bp, Homo sapiens
  chr3:52899918-52900469
  hypo
cggtggggggacacaaaccgtcacatgctttacacgttgtctaaccttcctgctctcacctactgtacacatggctccattttctttcattagaggctacatggcatcccacagtgtggctgtgccatctcatttactctatgagctgctgccgcgaatgtccctgccatgtgctacctctgcctgtgtgggcccatatctgaggggcagattcctagaggcacacttgctacatcaaaagctatgtgcggcttattctgtggcgccgctctccacagaggctgtgccaactcacactcccactaatagcacgagtacccattcccacattcttgccagcatggtgtactagcaaaccttctcactctgacaatttgatcgctgaagaggctgtctcagcacggctgcggcgtgcacccatcaggccacttgggtgccagggcacctgcggggcttgccaccgtctaccgccttgaggggcctggcagggctcccagtcccaccccatctcacctgctctctcctctcggacatgagcccagagcccctcc

SEQ ID NO: 363277 - DNA, 215 bp, Homo sapiens; identical to SEQ ID NO: 208907
  chr3:52900499-52900714
  hypo

SEQ ID NO: 363278 - DNA, 329 bp, Homo sapiens; identical to SEQ ID NO: 208908
  chr3:53032404-53032733
  hypo

SEQ ID NO: 363279 - DNA, 199 bp, Homo sapiens; identical to SEQ ID NO: 331773
  chr3:53195788-53195987
  hypo

SEQ ID NO: 363280 - DNA, 572 bp, Homo sapiens; identical to SEQ ID NO: 357616
  chr3:53527829-53528401
  hypo

SEQ ID NO: 363281 - DNA, 157 bp, Homo sapiens; identical to SEQ ID NO: 338116
  chr3:54237704-54237861
  hypo

SEQ ID NO: 363282 - DNA, 506 bp, Homo sapiens; identical to SEQ ID NO: 338117
  chr3:54660189-54660695
  hypo

SEQ ID NO: 363283 - DNA, 148 bp, Homo sapiens; identical to SEQ ID NO: 345800
  chr3:56718095-56718243
  hypo

SEQ ID NO: 363284 - DNA, 170 bp, Homo sapiens; identical to SEQ ID NO: 345801
  chr3:56718281-56718451
  hypo

SEQ ID NO: 363285 - DNA, 261 bp, Homo sapiens; identical to SEQ ID NO: 338120
  chr3:57679351-57679612
  hypo

SEQ ID NO: 363286 - DNA, 111 bp, Homo sapiens; identical to SEQ ID NO: 338121
  chr3:57679987-57680098
  hypo

SEQ ID NO: 363287 - DNA, 143 bp, Homo sapiens; identical to SEQ ID NO: 66140
  chr3:58136696-58136839
  hypo

SEQ ID NO: 363288 - DNA, 962 bp, Homo sapiens; identical to SEQ ID NO: 357625
  chr3:61547191-61548153
  hypo

SEQ ID NO: 363289 - DNA, 129 bp, Homo sapiens; identical to SEQ ID NO: 357631
  chr3:64673134-64673263
  hypo

SEQ ID NO: 363290 - DNA, 507 bp, Homo sapiens; identical to SEQ ID NO: 357632
  chr3:64673419-64673926
  hypo

SEQ ID NO: 363291 - DNA, 1318 bp, Homo sapiens; identical to SEQ ID NO: 281269
  chr3:66024122-66025440
  hypo

SEQ ID NO: 363292 - DNA, 56 bp, Homo sapiens; identical to SEQ ID NO: 349784
  chr3:66025506-66025562
  hypo

SEQ ID NO: 363293 - DNA, 435 bp, Homo sapiens; identical to SEQ ID NO: 338126
  chr3:66452230-66452665
  hypo

SEQ ID NO: 363294 - DNA, 1570 bp, Homo sapiens; identical to SEQ ID NO: 331800
  chr3:66550318-66551888
  hypo

SEQ ID NO: 363295 - DNA, 1076 bp, Homo sapiens; identical to SEQ ID NO: 331801
  chr3:67048291-67049367
  hypo

SEQ ID NO: 363296 - DNA, 221 bp, Homo sapiens; identical to SEQ ID NO: 349787
  chr3:69434926-69435147
  hypo

SEQ ID NO: 363297 - DNA, 264 bp, Homo sapiens; identical to SEQ ID NO: 338134
  chr3:71036199-71036463
  hypo

SEQ ID NO: 363298 - DNA, 1710 bp, Homo sapiens; identical to SEQ ID NO: 331806
  chr3:71113110-71114820
  hypo

SEQ ID NO: 363299 - DNA, 76 bp, Homo sapiens; identical to SEQ ID NO: 353343
  chr3:71187313-71187389
  hypo

SEQ ID NO: 363300 - DNA, 123 bp, Homo sapiens; identical to SEQ ID NO: 353344
  chr3:71187419-71187542
  hypo

SEQ ID NO: 363301 - DNA, 1327 bp, Homo sapiens; identical to SEQ ID NO: 349789
  chr3:71630573-71631900
  hypo

SEQ ID NO: 363302 - DNA, 45 bp, Homo sapiens; identical to SEQ ID NO: 338139
  chr3:72420279-72420324
  hypo

SEQ ID NO: 363303 - DNA, 178 bp, Homo sapiens; identical to SEQ ID NO: 338140
  chr3:72618825-72619003
  hypo

SEQ ID NO: 363304 - DNA, 63 bp, Homo sapiens; identical to SEQ ID NO: 338141
  chr3:72703941-72704004
  hypo

SEQ ID NO: 363305 - DNA, 69 bp, Homo sapiens; identical to SEQ ID NO: 338144
  chr3:87297469-87297538
  hypo

SEQ ID NO: 363306 - DNA, 280 bp, Homo sapiens; identical to SEQ ID NO: 345095
  chr3:98619774-98620054
  hypo

SEQ ID NO: 363307 - DNA, 58 bp, Homo sapiens; identical to SEQ ID NO: 345096
  chr3:98621126-98621184
  hypo

SEQ ID NO: 363308 - DNA, 101 bp, Homo sapiens; identical to SEQ ID NO: 346575
  chr3:99594790-99594891
  hypo

SEQ ID NO: 363309 - DNA, 299 bp, Homo sapiens; identical to SEQ ID NO: 349796
  chr3:101497996-101498295
  hypo

SEQ ID NO: 363310 - DNA, 98 bp, Homo sapiens; identical to SEQ ID NO: 349797
  chr3:101498512-101498610
  hypo

SEQ ID NO: 363311 - DNA, 459 bp, Homo sapiens; identical to SEQ ID NO: 346577
  chr3:105088087-105088546
  hypo

SEQ ID NO: 363312 - DNA, 196 bp, Homo sapiens; identical to SEQ ID NO: 338151
  chr3:106362774-106362970
  hypo

SEQ ID NO: 363313 - DNA, 69 bp, Homo sapiens; identical to SEQ ID NO: 338152
  chr3:107520023-107520092
  hypo

SEQ ID NO: 363314 - DNA, 92 bp, Homo sapiens; identical to SEQ ID NO: 353355
  chr3:107530307-107530399
  hypo

SEQ ID NO: 363315 - DNA, 151 bp, Homo sapiens; identical to SEQ ID NO: 199044
  chr3:112930655-112930806
  hypo

SEQ ID NO: 363316 - DNA, 1176 bp, Homo sapiens; identical to SEQ ID NO: 331832
  chr3:113251180-113252356
  hypo

SEQ ID NO: 363317 - DNA, 137 bp, Homo sapiens; identical to SEQ ID NO: 338158
  chr3:119535947-119536084
  hypo

SEQ ID NO: 363318 - DNA, 59 bp, Homo sapiens; identical to SEQ ID NO: 199059
  chr3:120627258-120627317
  hypo

SEQ ID NO: 363319 - DNA, 84 bp, Homo sapiens; identical to SEQ ID NO: 345809
  chr3:121500635-121500719
  hypo

SEQ ID NO: 363320 - DNA, 32 bp, Homo sapiens
  chr3:121637776-121637808
  hypo
cgcctctgtctgggccttgctctggcccactg

SEQ ID NO: 363321 - DNA, 154 bp, Homo sapiens; identical to SEQ ID NO: 357668
  chr3:123168102-123168256
  hypo

SEQ ID NO: 363322 - DNA, 731 bp, Homo sapiens; identical to SEQ ID NO: 346580
  chr3:123751654-123752385
  hypo

SEQ ID NO: 363323 - DNA, 167 bp, Homo sapiens; identical to SEQ ID NO: 338168
  chr3:124281735-124281902
  hypo

SEQ ID NO: 363324 - DNA, 360 bp, Homo sapiens; identical to SEQ ID NO: 338169
  chr3:124515276-124515636
  hypo

SEQ ID NO: 363325 - DNA, 438 bp, Homo sapiens; identical to SEQ ID NO: 345099
  chr3:124773932-124774370
  hypo

SEQ ID NO: 363326 - DNA, 224 bp, Homo sapiens; identical to SEQ ID NO: 338172
  chr3:126090337-126090561
  hypo

SEQ ID NO: 363327 - DNA, 93 bp, Homo sapiens
  chr3:126261836-126261929
  hypo
cgcccaccctggcaaggacagctgcggccaaggacgaaagccctcccttggctggcctcacgatggggccgtcccgggagccaggtgggagct

SEQ ID NO: 363328 - DNA, 187 bp, Homo sapiens; identical to SEQ ID NO: 338174
  chr3:126472179-126472366
  hypo

SEQ ID NO: 363329 - DNA, 174 bp, Homo sapiens; identical to SEQ ID NO: 338175
  chr3:127326124-127326298
  hypo

SEQ ID NO: 363330 - DNA, 113 bp, Homo sapiens
  chr3:127395778-127395891
  hypo
cgcaggccctcatcctccccactgcccccaggccgcctggacattggcgtagagcatgtgagtgactgtgagcgcctggccaagcaatgccagctgtgggacctgctcagcga

SEQ ID NO: 363331 - DNA, 154 bp, Homo sapiens; identical to SEQ ID NO: 338178
  chr3:127505560-127505714
  hypo

SEQ ID NO: 363332 - DNA, 70 bp, Homo sapiens; identical to SEQ ID NO: 353363
  chr3:127534744-127534814
  hypo

SEQ ID NO: 363333 - DNA, 67 bp, Homo sapiens; identical to SEQ ID NO: 209038
  chr3:127534897-127534964
  hypo

SEQ ID NO: 363334 - DNA, 122 bp, Homo sapiens; identical to SEQ ID NO: 345100
  chr3:127794271-127794393
  hypo

SEQ ID NO: 363335 - DNA, 61 bp, Homo sapiens; identical to SEQ ID NO: 338182
  chr3:128004552-128004613
  hypo

SEQ ID NO: 363336 - DNA, 175 bp, Homo sapiens; identical to SEQ ID NO: 338185
  chr3:128340992-128341167
  hypo

SEQ ID NO: 363337 - DNA, 185 bp, Homo sapiens; identical to SEQ ID NO: 338187
  chr3:128737561-128737746
  hypo

SEQ ID NO: 363338 - DNA, 130 bp, Homo sapiens; identical to SEQ ID NO: 338188
  chr3:129231161-129231291
  hypo

SEQ ID NO: 363339 - DNA, 334 bp, Homo sapiens; identical to SEQ ID NO: 338189
  chr3:129290351-129290685
  hypo

SEQ ID NO: 363340 - DNA, 131 bp, Homo sapiens
  chr3:129982901-129983032
  hypo
cgagggcttccacttgaccacctatggcaaccggaagcagatgcagagacatgtgcgcgaggcttcagcccgccccttacagggaaccgccccccctgggccacgccctggagtggacgctggagaatgtg

SEQ ID NO: 363341 - DNA, 237 bp, Homo sapiens
  chr3:129983103-129983340
  hypo
ggacagggagaagctatggactctgtccctggaggccaaatgcaagggcattaccctctttgtgctggccttgggtccgggtgtggggacccatgagctagccgagctagccgagctggtcagtgctccctctgagcagcatctactgcgcctacaaggggtctcagagccagaggttaactacgctcagggattcactcgggccttcctgaacctcctaaaaagtgagcagtcccc

SEQ ID NO: 363342 - DNA, 216 bp, Homo sapiens; identical to SEQ ID NO: 338193
  chr3:130424529-130424745
  hypo

SEQ ID NO: 363343 - DNA, 92 bp, Homo sapiens; identical to SEQ ID NO: 338194
  chr3:130460761-130460853
  hypo

SEQ ID NO: 363344 - DNA, 196 bp, Homo sapiens; identical to SEQ ID NO: 346590
  chr3:132756116-132756312
  hypo

SEQ ID NO: 363345 - DNA, 39 bp, Homo sapiens; identical to SEQ ID NO: 346591
  chr3:132756477-132756516
  hypo

SEQ ID NO: 363346 - DNA, 80 bp, Homo sapiens; identical to SEQ ID NO: 281503
  chr3:133748401-133748481
  hypo

SEQ ID NO: 363347 - DNA, 72 bp, Homo sapiens; identical to SEQ ID NO: 281504
  chr3:133748576-133748648
  hypo

SEQ ID NO: 363348 - DNA, 92 bp, Homo sapiens
  chr3:134080498-134080590
  hypo
cgcagctcctcttcggctcgagctgcccggccctgcgcattgcccagagcctgctccagcagctcggcacgccgccgctggtcctcgatggc

SEQ ID NO: 363349 - DNA, 295 bp, Homo sapiens; identical to SEQ ID NO: 345106
  chr3:135684609-135684904
  hypo

SEQ ID NO: 363350 - DNA, 703 bp, Homo sapiens; identical to SEQ ID NO: 199114
  chr3:138067014-138067717
  hypo

SEQ ID NO: 363351 - DNA, 106 bp, Homo sapiens; identical to SEQ ID NO: 346595
  chr3:138067747-138067853
  hypo

SEQ ID NO: 363352 - DNA, 267 bp, Homo sapiens; identical to SEQ ID NO: 349830
  chr3:139258672-139258939
  hypo

SEQ ID NO: 363353 - DNA, 79 bp, Homo sapiens; identical to SEQ ID NO: 338207
  chr3:139352994-139353073
  hypo

SEQ ID NO: 363354 - DNA, 1495 bp, Homo sapiens; identical to SEQ ID NO: 331891
  chr3:140660238-140661733
  hypo

SEQ ID NO: 363355 - DNA, 123 bp, Homo sapiens; identical to SEQ ID NO: 353379
  chr3:141174173-141174296
  hypo

SEQ ID NO: 363356 - DNA, 81 bp, Homo sapiens; identical to SEQ ID NO: 338212
  chr3:141495392-141495473
  hypo

SEQ ID NO: 363357 - DNA, 147 bp, Homo sapiens; identical to SEQ ID NO: 338213
  chr3:141622422-141622569
  hypo

SEQ ID NO: 363358 - DNA, 203 bp, Homo sapiens; identical to SEQ ID NO: 353381
  chr3:141656829-141657032
  hypo

SEQ ID NO: 363359 - DNA, 106 bp, Homo sapiens; identical to SEQ ID NO: 353382
  chr3:141657079-141657185
  hypo

SEQ ID NO: 363360 - DNA, 33 bp, Homo sapiens; identical to SEQ ID NO: 338215
  chr3:141664320-141664353
  hypo

SEQ ID NO: 363361 - DNA, 185 bp, Homo sapiens; identical to SEQ ID NO: 338216
  chr3:141868994-141869179
  hypo

SEQ ID NO: 363362 - DNA, 68 bp, Homo sapiens; identical to SEQ ID NO: 338217
  chr3:142103585-142103653
  hypo

SEQ ID NO: 363363 - DNA, 43 bp, Homo sapiens; identical to SEQ ID NO: 338220
  chr3:142683691-142683734
  hypo

SEQ ID NO: 363364 - DNA, 307 bp, Homo sapiens; identical to SEQ ID NO: 353385
  chr3:142895557-142895864
  hypo

SEQ ID NO: 363365 - DNA, 322 bp, Homo sapiens; identical to SEQ ID NO: 338223
  chr3:143316169-143316491
  hypo

SEQ ID NO: 363366 - DNA, 173 bp, Homo sapiens; identical to SEQ ID NO: 281571
  chr3:145878695-145878868
  hypo

SEQ ID NO: 363367 - DNA, 349 bp, Homo sapiens; identical to SEQ ID NO: 349836
  chr3:145878937-145879286
  hypo

SEQ ID NO: 363368 - DNA, 86 bp, Homo sapiens
  chr3:148705325-148705411
  hypo
cgggagatttcctctttgaactccttgaccgaggctcgatcgcagatcacaatttcctccttgtccttgggggtcttgacggtgac

SEQ ID NO: 363369 - DNA, 66 bp, Homo sapiens
  chr3:148705462-148705528
  hypo
gccacccggccgcccgccagcccgcccggctcctcctcctccccgctcgcccggccggcccggctc

SEQ ID NO: 363370 - DNA, 216 bp, Homo sapiens; identical to SEQ ID NO: 338226
  chr3:148804777-148804993
  hypo

SEQ ID NO: 363371 - DNA, 106 bp, Homo sapiens; identical to SEQ ID NO: 338227
  chr3:149360184-149360290
  hypo

SEQ ID NO: 363372 - DNA, 77 bp, Homo sapiens; identical to SEQ ID NO: 338228
  chr3:150187009-150187086
  hypo

SEQ ID NO: 363373 - DNA, 141 bp, Homo sapiens; identical to SEQ ID NO: 338229
  chr3:150237458-150237599
  hypo

SEQ ID NO: 363374 - DNA, 85 bp, Homo sapiens; identical to SEQ ID NO: 349841
  chr3:150802802-150802887
  hypo

SEQ ID NO: 363375 - DNA, 70 bp, Homo sapiens; identical to SEQ ID NO: 357722
  chr3:150805097-150805167
  hypo

SEQ ID NO: 363376 - DNA, 72 bp, Homo sapiens; identical to SEQ ID NO: 338232
  chr3:150848450-150848522
  hypo

SEQ ID NO: 363377 - DNA, 52 bp, Homo sapiens
  chr3:156396583-156396635
  hypo
cggacaatgaaagttttacgatttgaacaattcatatgtcagttcaacgtgc

SEQ ID NO: 363378 - DNA, 109 bp, Homo sapiens; identical to SEQ ID NO: 353392
  chr3:156543195-156543304
  hypo

SEQ ID NO: 363379 - DNA, 123 bp, Homo sapiens; identical to SEQ ID NO: 338237
  chr3:168608983-168609106
  hypo

SEQ ID NO: 363380 - DNA, 241 bp, Homo sapiens; identical to SEQ ID NO: 199188
  chr3:169482439-169482680
  hypo

SEQ ID NO: 363381 - DNA, 54 bp, Homo sapiens; identical to SEQ ID NO: 345815
  chr3:169540679-169540733
  hypo

SEQ ID NO: 363382 - DNA, 104 bp, Homo sapiens; identical to SEQ ID NO: 338240
  chr3:170588570-170588674
  hypo

SEQ ID NO: 363383 - DNA, 282 bp, Homo sapiens; identical to SEQ ID NO: 281698
  chr3:170626174-170626456
  hypo

SEQ ID NO: 363384 - DNA, 508 bp, Homo sapiens; identical to SEQ ID NO: 357752
  chr3:170626710-170627218
  hypo

SEQ ID NO: 363385 - DNA, 191 bp, Homo sapiens; identical to SEQ ID NO: 338242
  chr3:171362739-171362930
  hypo

SEQ ID NO: 363386 - DNA, 83 bp, Homo sapiens; identical to SEQ ID NO: 338243
  chr3:171976039-171976122
  hypo

SEQ ID NO: 363387 - DNA, 99 bp, Homo sapiens; identical to SEQ ID NO: 338247
  chr3:177238893-177238992
  hypo

SEQ ID NO: 363388 - DNA, 97 bp, Homo sapiens; identical to SEQ ID NO: 338249
  chr3:179377859-179377956
  hypo

SEQ ID NO: 363389 - DNA, 206 bp, Homo sapiens; identical to SEQ ID NO: 346614
  chr3:180397104-180397310
  hypo

SEQ ID NO: 363390 - DNA, 581 bp, Homo sapiens; identical to SEQ ID NO: 338253
  chr3:180546449-180547030
  hypo

SEQ ID NO: 363391 - DNA, 36 bp, Homo sapiens; identical to SEQ ID NO: 199220
  chr3:181430331-181430367
  hypo

SEQ ID NO: 363392 - DNA, 252 bp, Homo sapiens; identical to SEQ ID NO: 199221
  chr3:181430443-181430695
  hypo

SEQ ID NO: 363393 - DNA, 114 bp, Homo sapiens; identical to SEQ ID NO: 338256
  chr3:182656917-182657031
  hypo

SEQ ID NO: 363394 - DNA, 809 bp, Homo sapiens; identical to SEQ ID NO: 345120
  chr3:183165024-183165833
  hypo

SEQ ID NO: 363395 - DNA, 237 bp, Homo sapiens; identical to SEQ ID NO: 338260
  chr3:183209981-183210218
  hypo

SEQ ID NO: 363396 - DNA, 217 bp, Homo sapiens; identical to SEQ ID NO: 338261
  chr3:183217407-183217624
  hypo

SEQ ID NO: 363397 - DNA, 117 bp, Homo sapiens; identical to SEQ ID NO: 338262
  chr3:183275024-183275141
  hypo

SEQ ID NO: 363398 - DNA, 140 bp, Homo sapiens; identical to SEQ ID NO: 338263
  chr3:183419820-183419960
  hypo

SEQ ID NO: 363399 - DNA, 54 bp, Homo sapiens
  chr3:183643595-183643649
  hypo
agttttacactatctattgttttcttttctttcttttttttttttttttgagac

SEQ ID NO: 363400 - DNA, 195 bp, Homo sapiens; identical to SEQ ID NO: 338266
  chr3:183703570-183703765
  hypo

SEQ ID NO: 363401 - DNA, 107 bp, Homo sapiens; identical to SEQ ID NO: 338268
  chr3:183891953-183892060
  hypo

SEQ ID NO: 363402 - DNA, 52 bp, Homo sapiens; identical to SEQ ID NO: 338270
  chr3:184042674-184042726
  hypo

SEQ ID NO: 363403 - DNA, 124 bp, Homo sapiens; identical to SEQ ID NO: 338271
  chr3:184057066-184057190
  hypo

SEQ ID NO: 363404 - DNA, 131 bp, Homo sapiens
  chr3:184059893-184060024
  hypo
cgccatggcccagggccgagtggctcacctcattgagtggaagggctggagcaagccgagtgactcacctgctgccctggaatcagccttttcctcctattcagacctcagcgagggcgaacaagaggctc

SEQ ID NO: 363405 - DNA, 177 bp, Homo sapiens; identical to SEQ ID NO: 338273
  chr3:184225995-184226172
  hypo

SEQ ID NO: 363406 - DNA, 185 bp, Homo sapiens
  chr3:184784962-184785147
  hypo
cgagatcttctacactgccggaattttctcactgttaacaagttttgcaaaggtggtttcaaatggatgcgtctatatcacacctgaagatagttacagtcaatttccagcttcacggaattctcccctgcgcctttttcttccctttgagcctccaggattgctcaatcgttcccttgggcaag

SEQ ID NO: 363407 - DNA, 301 bp, Homo sapiens; identical to SEQ ID NO: 199246
  chr3:184870307-184870608
  hypo

SEQ ID NO: 363408 - DNA, 393 bp, Homo sapiens; identical to SEQ ID NO: 338281
  chr3:185360808-185361201
  hypo

SEQ ID NO: 363409 - DNA, 34 bp, Homo sapiens; identical to SEQ ID NO: 353408
  chr3:185363305-185363339
  hypo

SEQ ID NO: 363410 - DNA, 129 bp, Homo sapiens; identical to SEQ ID NO: 338283
  chr3:185365800-185365929
  hypo

SEQ ID NO: 363411 - DNA, 477 bp, Homo sapiens; identical to SEQ ID NO: 338284
  chr3:185374988-185375465
  hypo

SEQ ID NO: 363412 - DNA, 243 bp, Homo sapiens; identical to SEQ ID NO: 338285
  chr3:185407229-185407472
  hypo

SEQ ID NO: 363413 - DNA, 98 bp, Homo sapiens; identical to SEQ ID NO: 338286
  chr3:185441721-185441819
  hypo

SEQ ID NO: 363414 - DNA, 196 bp, Homo sapiens; identical to SEQ ID NO: 345819
  chr3:185445861-185446057
  hypo

SEQ ID NO: 363415 - DNA, 290 bp, Homo sapiens; identical to SEQ ID NO: 199253
  chr3:186079331-186079621
  hypo

SEQ ID NO: 363416 - DNA, 90 bp, Homo sapiens; identical to SEQ ID NO: 338290
  chr3:186442824-186442914
  hypo

SEQ ID NO: 363417 - DNA, 139 bp, Homo sapiens; identical to SEQ ID NO: 338291
  chr3:186697410-186697549
  hypo

SEQ ID NO: 363418 - DNA, 334 bp, Homo sapiens; identical to SEQ ID NO: 338292
  chr3:187443068-187443402
  hypo

SEQ ID NO: 363419 - DNA, 45 bp, Homo sapiens; identical to SEQ ID NO: 345123
  chr3:187455297-187455342
  hypo

SEQ ID NO: 363420 - DNA, 446 bp, Homo sapiens; identical to SEQ ID NO: 199256
  chr3:187456666-187457112
  hypo

SEQ ID NO: 363421 - DNA, 134 bp, Homo sapiens; identical to SEQ ID NO: 338297
  chr3:193391768-193391902
  hypo

SEQ ID NO: 363422 - DNA, 61 bp, Homo sapiens; identical to SEQ ID NO: 209288
  chr3:193419641-193419702
  hypo

SEQ ID NO: 363423 - DNA, 275 bp, Homo sapiens; identical to SEQ ID NO: 345825
  chr3:193419732-193420007
  hypo

SEQ ID NO: 363424 - DNA, 346 bp, Homo sapiens; identical to SEQ ID NO: 338299
  chr3:193455077-193455423
  hypo

SEQ ID NO: 363425 - DNA, 370 bp, Homo sapiens; identical to SEQ ID NO: 338300
  chr3:193586985-193587355
  hypo

SEQ ID NO: 363426 - DNA, 352 bp, Homo sapiens; identical to SEQ ID NO: 357789
  chr3:193852659-193853011
  hypo

SEQ ID NO: 363427 - DNA, 74 bp, Homo sapiens; identical to SEQ ID NO: 338304
  chr3:193903180-193903254
  hypo

SEQ ID NO: 363428 - DNA, 153 bp, Homo sapiens; identical to SEQ ID NO: 353419
  chr3:193922622-193922775
  hypo

SEQ ID NO: 363429 - DNA, 296 bp, Homo sapiens; identical to SEQ ID NO: 338306
  chr3:193969977-193970273
  hypo

SEQ ID NO: 363430 - DNA, 324 bp, Homo sapiens; identical to SEQ ID NO: 338308
  chr3:194048948-194049272
  hypo

SEQ ID NO: 363431 - DNA, 296 bp, Homo sapiens; identical to SEQ ID NO: 338312
  chr3:194786359-194786655
  hypo

SEQ ID NO: 363432 - DNA, 97 bp, Homo sapiens; identical to SEQ ID NO: 338314
  chr3:195172966-195173063
  hypo

SEQ ID NO: 363433 - DNA, 362 bp, Homo sapiens
  chr3:195536308-195536670
  hypo
cgcccttggtgactgcttttcctgccaaggccctggtcatgcccggtcagatgtgtgggtgccatctcccagccacgaccatctcctctcctggcccagctccacttggtccccttagcgacgcaaaggactcagcgctccacgacatgcctagcttcttcgggtcgtcatggagacgcccttgcacaccaacagtccttcactccttctccgggtcacgcccccgtgcttttccacgcccaccccaggtcttgcccctctgcgctcctctccacagaccccacttcctggctccacatggagctgagtgtccagctggtacccagcacatttgggctcagctttaaatcacagatttggaa

SEQ ID NO: 363434 - DNA, 393 bp, Homo sapiens; identical to SEQ ID NO: 338318
  chr3:195597835-195598228
  hypo

SEQ ID NO: 363435 - DNA, 582 bp, Homo sapiens; identical to SEQ ID NO: 345130
  chr3:195599104-195599686
  hypo

SEQ ID NO: 363436 - DNA, 246 bp, Homo sapiens; identical to SEQ ID NO: 209343
  chr3:195599840-195600086
  hypo

SEQ ID NO: 363437 - DNA, 49 bp, Homo sapiens; identical to SEQ ID NO: 345828
  chr3:195601363-195601412
  hypo

SEQ ID NO: 363438 - DNA, 666 bp, Homo sapiens; identical to SEQ ID NO: 353426
  chr3:195602576-195603242
  hypo

SEQ ID NO: 363439 - DNA, 339 bp, Homo sapiens; identical to SEQ ID NO: 302575
  chr3:195603923-195604262
  hypo

SEQ ID NO: 363440 - DNA, 159 bp, Homo sapiens
  chr3:195604388-195604547
  hypo
tcctccacttcactcttcttcctggtcctcaatactgcccctgcctcaaaggtacctgaaacctgccctgccccagccagttgctcagacaccctggggatcagccagcacaaggcagggccagcagtggtggggcctcagggcaggcgctagaactgc

SEQ ID NO: 363441 - DNA, 83 bp, Homo sapiens; identical to SEQ ID NO: 353427
  chr3:195637425-195637508
  hypo

SEQ ID NO: 363442 - DNA, 32 bp, Homo sapiens; identical to SEQ ID NO: 353428
  chr3:195709683-195709715
  hypo

SEQ ID NO: 363443 - DNA, 473 bp, Homo sapiens; identical to SEQ ID NO: 338325
  chr3:195750601-195751074
  hypo

SEQ ID NO: 363444 - DNA, 76 bp, Homo sapiens; identical to SEQ ID NO: 338326
  chr3:195855364-195855440
  hypo

SEQ ID NO: 363445 - DNA, 106 bp, Homo sapiens; identical to SEQ ID NO: 338328
  chr3:196263362-196263468
  hypo

SEQ ID NO: 363446 - DNA, 78 bp, Homo sapiens
  chr3:196387781-196387859
  hypo
ccaatgctaggaacatcactacacttgacatgagccacaatcagatctcactttgtcccctgccagctgcctcggacc

SEQ ID NO: 363447 - DNA, 284 bp, Homo sapiens; identical to SEQ ID NO: 353430
  chr3:196728448-196728732
  hypo

SEQ ID NO: 363448 - DNA, 104 bp, Homo sapiens
  chr3:196754412-196754516
  hypo
cgccctctgagcagcgggtcctcctgaggctcccacctcctggcctgggcccggcgggaggcaagctggcctcgtggccagggagactcgggagatcctatcgg

SEQ ID NO: 363449 - DNA, 118 bp, Homo sapiens
  chr3:196754758-196754876
  hypo
ccgcacctccatgccaccgagcactgcgggcaggggaccgtgaggcccggctcccccgccctgcccagccccggcccaccatggagggtggctccagcagttctgtgtgagcccattc

SEQ ID NO: 363450 - DNA, 80 bp, Homo sapiens; identical to SEQ ID NO: 353431
  chr3:197330147-197330227
  hypo

SEQ ID NO: 363451 - DNA, 307 bp, Homo sapiens; identical to SEQ ID NO: 338336
  chr3:197582093-197582400
  hypo

SEQ ID NO: 363452 - DNA, 79 bp, Homo sapiens; identical to SEQ ID NO: 338337
  chr3:197612493-197612572
  hypo

SEQ ID NO: 363453 - DNA, 409 bp, Homo sapiens; identical to SEQ ID NO: 353433
  chr4:512569-512978
  hypo

SEQ ID NO: 363454 - DNA, 696 bp, Homo sapiens; identical to SEQ ID NO: 209394
  chr4:513008-513704
  hypo

SEQ ID NO: 363455 - DNA, 221 bp, Homo sapiens; identical to SEQ ID NO: 353435
  chr4:513734-513955
  hypo

SEQ ID NO: 363456 - DNA, 76 bp, Homo sapiens; identical to SEQ ID NO: 338340
  chr4:529368-529444
  hypo

SEQ ID NO: 363457 - DNA, 32 bp, Homo sapiens; identical to SEQ ID NO: 353437
  chr4:619879-619911
  hypo

SEQ ID NO: 363458 - DNA, 43 bp, Homo sapiens; identical to SEQ ID NO: 209400
  chr4:628787-628830
  hypo

SEQ ID NO: 363459 - DNA, 420 bp, Homo sapiens; identical to SEQ ID NO: 302690
  chr4:628950-629370
  hypo

SEQ ID NO: 363460 - DNA, 171 bp, Homo sapiens; identical to SEQ ID NO: 357802
  chr4:657350-657521
  hypo

SEQ ID NO: 363461 - DNA, 114 bp, Homo sapiens; identical to SEQ ID NO: 281896
  chr4:657552-657666
  hypo

SEQ ID NO: 363462 - DNA, 139 bp, Homo sapiens; identical to SEQ ID NO: 357804
  chr4:657712-657851
  hypo

SEQ ID NO: 363463 - DNA, 151 bp, Homo sapiens; identical to SEQ ID NO: 353440
  chr4:717901-718052
  hypo

SEQ ID NO: 363464 - DNA, 49 bp, Homo sapiens; identical to SEQ ID NO: 302701
  chr4:718112-718161
  hypo

SEQ ID NO: 363465 - DNA, 160 bp, Homo sapiens
  chr4:738129-738289
  hypo
cgccggctccggctgccccgtctctgtctcctgtgctccccacgcctgcaccccacaggcccacacgcccgttctgcatcctggggagacccctgcagacactttgcggacggctttcctttgacgcttactccgctccgggggtccagagtctcttaat

SEQ ID NO: 363466 - DNA, 328 bp, Homo sapiens
  chr4:759841-760169
  hypo
acagacccaagatggacttgctgtgaatggtgccacacagcgcccacagactgggccctcgcacccttgggtgctcccggccgccgcgcttaagaacattgcctctgggtgtcatgtggaccagacttctgaatagagaatatttataacttttgtatgagagagaattcacactcaacaagacactaccagcaccacgtttacagaggatgaaaacacttcacagtctcccagagccgatcgtcctctcccccgccccaccccgtgcttcagccttgcagggagagtgatgctccaggcaacacggttctgagtcaccttctgacac

SEQ ID NO: 363467 - DNA, 289 bp, Homo sapiens; identical to SEQ ID NO: 332005
  chr4:819440-819729
  hypo

SEQ ID NO: 363468 - DNA, 188 bp, Homo sapiens; identical to SEQ ID NO: 345829
  chr4:905682-905870
  hypo

SEQ ID NO: 363469 - DNA, 127 bp, Homo sapiens; identical to SEQ ID NO: 302740
  chr4:955057-955184
  hypo

SEQ ID NO: 363470 - DNA, 307 bp, Homo sapiens; identical to SEQ ID NO: 302741
  chr4:955544-955851
  hypo

SEQ ID NO: 363471 - DNA, 250 bp, Homo sapiens
  chr4:957050-957300
  hypo
gacagctgtctgggggcagcttcgcgtgctgacagacagggggctgggttaggatggggacccaaggtggggtgtccccactgctggggttgccaggcagtgcccagcccccaaccctgagcccacctggcttggaccagccccctccccaggaaggcgtggccagcaccctcacatctgaggcctcacacatgagctgcgtggtcaccccatctcgctgctggccagcagggcggcactgaggacagcc

SEQ ID NO: 363472 - DNA, 315 bp, Homo sapiens; identical to SEQ ID NO: 338357
  chr4:968846-969161
  hypo

SEQ ID NO: 363473 - DNA, 220 bp, Homo sapiens; identical to SEQ ID NO: 209429
  chr4:1016366-1016586
  hypo

SEQ ID NO: 363474 - DNA, 69 bp, Homo sapiens; identical to SEQ ID NO: 349899
  chr4:1036539-1036608
  hypo

SEQ ID NO: 363475 - DNA, 493 bp, Homo sapiens; identical to SEQ ID NO: 338362
  chr4:1204224-1204717
  hypo

SEQ ID NO: 363476 - DNA, 129 bp, Homo sapiens; identical to SEQ ID NO: 353445
  chr4:1205845-1205974
  hypo

SEQ ID NO: 363477 - DNA, 269 bp, Homo sapiens; identical to SEQ ID NO: 353446
  chr4:1206025-1206294
  hypo

SEQ ID NO: 363478 - DNA, 73 bp, Homo sapiens; identical to SEQ ID NO: 353447
  chr4:1214821-1214894
  hypo

SEQ ID NO: 363479 - DNA, 253 bp, Homo sapiens; identical to SEQ ID NO: 209439
  chr4:1215162-1215415
  hypo

SEQ ID NO: 363480 - DNA, 73 bp, Homo sapiens; identical to SEQ ID NO: 353449
  chr4:1215451-1215524
  hypo

SEQ ID NO: 363481 - DNA, 464 bp, Homo sapiens; identical to SEQ ID NO: 338366
  chr4:1225310-1225774
  hypo

SEQ ID NO: 363482 - DNA, 70 bp, Homo sapiens; identical to SEQ ID NO: 353451
  chr4:1282403-1282473
  hypo

SEQ ID NO: 363483 - DNA, 663 bp, Homo sapiens; identical to SEQ ID NO: 338371
  chr4:1317015-1317678
  hypo

SEQ ID NO: 363484 - DNA, 129 bp, Homo sapiens; identical to SEQ ID NO: 338373
  chr4:1326104-1326233
  hypo

SEQ ID NO: 363485 - DNA, 167 bp, Homo sapiens; identical to SEQ ID NO: 338374
  chr4:1326509-1326676
  hypo

SEQ ID NO: 363486 - DNA, 115 bp, Homo sapiens
  chr4:1330895-1331010
  hypo
cgagctcccgtgtgctgcacttgcgtggtgtctggatggtcggggtggggccgtgttgaggggcctcggatgcgtcgtgcagccttcactctgggaagtggcgcgcttcctctct

SEQ ID NO: 363487 - DNA, 372 bp, Homo sapiens; identical to SEQ ID NO: 209459
  chr4:1331896-1332268
  hypo

SEQ ID NO: 363488 - DNA, 218 bp, Homo sapiens; identical to SEQ ID NO: 199294
  chr4:1332660-1332878
  hypo

SEQ ID NO: 363489 - DNA, 520 bp, Homo sapiens; identical to SEQ ID NO: 353456
  chr4:1333183-1333703
  hypo

SEQ ID NO: 363490 - DNA, 136 bp, Homo sapiens; identical to SEQ ID NO: 345830
  chr4:1336902-1337038
  hypo

SEQ ID NO: 363491 - DNA, 53 bp, Homo sapiens; identical to SEQ ID NO: 353458
  chr4:1338812-1338865
  hypo

SEQ ID NO: 363492 - DNA, 276 bp, Homo sapiens; identical to SEQ ID NO: 338380
  chr4:1541591-1541867
  hypo

SEQ ID NO: 363493 - DNA, 473 bp, Homo sapiens
  chr4:1556847-1557320
  hypo
ggctccgagctgagggagaagcacacgccgcccctgccctgtgagctggcgttccaggacagaatcggatatcaaacgagcacacggataccaagtaaaggccccaccgtcacacagcagccgccgctggaaactgagtttggtgggggaggggcctctctgcccagggactgagaccctgggatggtgacaaaggccagcaccgggtcccacacggagatgacgccatttaaccctccccaagacgccagggaagaggcgtccttgttcgtccattttacagaagagtacactgaggcctccagacgctggtggggacctcccaagccaggctccccatgtctctttctgggcctccgaccaccgttgatcagagaagcaaatctgttgggagaaatctcggagccacagagccctggcagggtgctcctggtggggaccagtccgggctggcccgacacttcctgcacgcc

SEQ ID NO: 363494 - DNA, 507 bp, Homo sapiens
  chr4:1578103-1578610
  hypo
cataaccgtgatttgaggggacagcccagagcaccccacagctgcctgcagcacagcgacgtgtcctgataaaacatccttcccaatttacggggccgcgcttgactaatctgcctccgcgcgcacactgtctaatcatgccatcagcaccgcgagaaggggctcaattgggactccaatgaaaggagattggaaaactaccctcaattgaaattacatttgtaaatgaggcagagttttctgttcagagtgtgaacgttacggtaaatctgctccagaaagtcgaagaggcggcagcggtgggcaggccggggacgccgcaggggcgactgggactgtgccccggctggggccagggtccacattctggagaggtgcccggcaccatgctggcccctggggacagccccaggagaggagaggggctgtggcggaagcccggagagttgggcctagtttgtcagacatcagacttcacttcccactctgtaaaatggggcgcagggc

SEQ ID NO: 363495 - DNA, 329 bp, Homo sapiens; identical to SEQ ID NO: 338384
  chr4:1738699-1739028
  hypo

SEQ ID NO: 363496 - DNA, 40 bp, Homo sapiens
  chr4:1791229-1791269
  hypo
cgcctgccctgggttccaggtctccaagcctcggcctccc

SEQ ID NO: 363497 - DNA, 107 bp, Homo sapiens
  chr4:1791344-1791451
  hypo
actgtgctgggaatgtcctctctgccgaaggcgcctctgccattttccgagtacctgcaagggagacgcaggagacgcgggtgtgagcggggccatgggcaacctgc

SEQ ID NO: 363498 - DNA, 186 bp, Homo sapiens; identical to SEQ ID NO: 357810
  chr4:1796303-1796489
  hypo

SEQ ID NO: 363499 - DNA, 139 bp, Homo sapiens
  chr4:1807117-1807256
  hypo
cggccaggtggtcatggcggaggccatcggcattgacaaggaccgggccgccaagcctgtcaccgtagccgtgaagatgctgaaaggtgaggagggggcggccaggggtgcagagcagggctgggggcgccgccgccgc

SEQ ID NO: 363500 - DNA, 304 bp, Homo sapiens; identical to SEQ ID NO: 338389
  chr4:1814436-1814740
  hypo

SEQ ID NO: 363501 - DNA, 78 bp, Homo sapiens
  chr4:1827219-1827297
  hypo
cgagtggcctttcgaggctgatgtttcccttgagcccgtgccggcctggcaccaggccaatattcacgcacctgcttc

SEQ ID NO: 363502 - DNA, 58 bp, Homo sapiens; identical to SEQ ID NO: 338392
  chr4:1911667-1911725
  hypo

SEQ ID NO: 363503 - DNA, 63 bp, Homo sapiens; identical to SEQ ID NO: 338394
  chr4:1960880-1960943
  hypo

SEQ ID NO: 363504 - DNA, 299 bp, Homo sapiens; identical to SEQ ID NO: 302881
  chr4:1977126-1977425
  hypo

SEQ ID NO: 363505 - DNA, 56 bp, Homo sapiens
  chr4:1977525-1977581
  hypo
acttgcccttcttataagagcactggtcctgttgacttagcgcctgccctgctacc

SEQ ID NO: 363506 - DNA, 390 bp, Homo sapiens; identical to SEQ ID NO: 338396
  chr4:1986329-1986719
  hypo

SEQ ID NO: 363507 - DNA, 56 bp, Homo sapiens; identical to SEQ ID NO: 348040
  chr4:1993659-1993715
  hypo

SEQ ID NO: 363508 - DNA, 410 bp, Homo sapiens; identical to SEQ ID NO: 209497
  chr4:1994335-1994745
  hypo

SEQ ID NO: 363509 - DNA, 206 bp, Homo sapiens; identical to SEQ ID NO: 353464
  chr4:1994830-1995036
  hypo

SEQ ID NO: 363510 - DNA, 197 bp, Homo sapiens; identical to SEQ ID NO: 357812
  chr4:2061279-2061476
  hypo

SEQ ID NO: 363511 - DNA, 82 bp, Homo sapiens
  chr4:2459899-2459981
  hypo
tttgctcattgtctggttgactgagacgggaatcttggtattttttggtgcccactttcttcacctcatatttctacacaac

SEQ ID NO: 363512 - DNA, 101 bp, Homo sapiens
  chr4:2460372-2460473
  hypo
cgccctgggctggggcgggaccaggcagggaagccggagcagccccactcaccgtggcaggtccgctgtctgggcagatggccaagctgatgctgcagcgt

SEQ ID NO: 363513 - DNA, 76 bp, Homo sapiens
  chr4:2460503-2460579
  hypo
aggaaggagctggtggagcaggtgatagaggggcagaagaacgccaaggcggcccagacgaagctcgcgaagggcc

SEQ ID NO: 363514 - DNA, 43 bp, Homo sapiens
  chr4:2514728-2514771
  hypo
ggataggggccactcacgtgacagggtataataaaatgtttgc

SEQ ID NO: 363515 - DNA, 120 bp, Homo sapiens; identical to SEQ ID NO: 253463
  chr4:2524746-2524866
  hypo

SEQ ID NO: 363516 - DNA, 50 bp, Homo sapiens; identical to SEQ ID NO: 338406
  chr4:2622600-2622650
  hypo

SEQ ID NO: 363517 - DNA, 72 bp, Homo sapiens; identical to SEQ ID NO: 338407
  chr4:2638080-2638152
  hypo

SEQ ID NO: 363518 - DNA, 211 bp, Homo sapiens; identical to SEQ ID NO: 338408
  chr4:2639936-2640147
  hypo

SEQ ID NO: 363519 - DNA, 118 bp, Homo sapiens; identical to SEQ ID NO: 338409
  chr4:2640614-2640732
  hypo

SEQ ID NO: 363520 - DNA, 81 bp, Homo sapiens; identical to SEQ ID NO: 338410
  chr4:2672891-2672972
  hypo

SEQ ID NO: 363521 - DNA, 855 bp, Homo sapiens; identical to SEQ ID NO: 338412
  chr4:2704088-2704943
  hypo

SEQ ID NO: 363522 - DNA, 124 bp, Homo sapiens
  chr4:2907414-2907538
  hypo
cggccatagtggcgagtcaccttctgactcctgttgggtgcggcatgacccaagtgcagcgcaggccatctgcaggcaccagcgacagacgctgcaaggggtgcttcgtttcagcgttaatgcc

SEQ ID NO: 363523 - DNA, 55 bp, Homo sapiens; identical to SEQ ID NO: 353470
  chr4:2926396-2926451
  hypo

SEQ ID NO: 363524 - DNA, 102 bp, Homo sapiens; identical to SEQ ID NO: 345831
  chr4:3217005-3217107
  hypo

SEQ ID NO: 363525 - DNA, 56 bp, Homo sapiens; identical to SEQ ID NO: 345832
  chr4:3217154-3217210
  hypo

SEQ ID NO: 363526 - DNA, 149 bp, Homo sapiens; identical to SEQ ID NO: 338417
  chr4:3220650-3220799
  hypo

SEQ ID NO: 363527 - DNA, 242 bp, Homo sapiens; identical to SEQ ID NO: 338418
  chr4:3245192-3245434
  hypo

SEQ ID NO: 363528 - DNA, 526 bp, Homo sapiens; identical to SEQ ID NO: 353474
  chr4:3252217-3252743
  hypo

SEQ ID NO: 363529 - DNA, 201 bp, Homo sapiens; identical to SEQ ID NO: 353475
  chr4:3252797-3252998
  hypo

SEQ ID NO: 363530 - DNA, 221 bp, Homo sapiens; identical to SEQ ID NO: 209533
  chr4:3446222-3446443
  hypo

SEQ ID NO: 363531 - DNA, 68 bp, Homo sapiens; identical to SEQ ID NO: 353477
  chr4:3447170-3447238
  hypo

SEQ ID NO: 363532 - DNA, 33 bp, Homo sapiens
  chr4:3467499-3467532
  hypo
ccaccgcgtcctcactgcggaatgcgtgtctgc

SEQ ID NO: 363533 - DNA, 105 bp, Homo sapiens
  chr4:3514612-3514717
  hypo
cggcgggctgtccacggaaatgccacggccaagagcccaggtccttcacgctggcctcttccctgccgggctgggctccccaatgccttcagagttcgttgtgcc

SEQ ID NO: 363534 - DNA, 275 bp, Homo sapiens; identical to SEQ ID NO: 349902
  chr4:3768207-3768482
  hypo

SEQ ID NO: 363535 - DNA, 77 bp, Homo sapiens; identical to SEQ ID NO: 353479
  chr4:4417408-4417485
  hypo

SEQ ID NO: 363536 - DNA, 57 bp, Homo sapiens; identical to SEQ ID NO: 357820
  chr4:5052378-5052435
  hypo

SEQ ID NO: 363537 - DNA, 289 bp, Homo sapiens; identical to SEQ ID NO: 199324
  chr4:5052556-5052845
  hypo

SEQ ID NO: 363538 - DNA, 145 bp, Homo sapiens; identical to SEQ ID NO: 349905
  chr4:5890606-5890751
  hypo

SEQ ID NO: 363539 - DNA, 230 bp, Homo sapiens; identical to SEQ ID NO: 338432
  chr4:6058789-6059019
  hypo

SEQ ID NO: 363540 - DNA, 821 bp, Homo sapiens; identical to SEQ ID NO: 332029
  chr4:6271360-6272181
  hypo

SEQ ID NO: 363541 - DNA, 127 bp, Homo sapiens; identical to SEQ ID NO: 357829
  chr4:6717788-6717915
  hypo

SEQ ID NO: 363542 - DNA, 496 bp, Homo sapiens; identical to SEQ ID NO: 338435
  chr4:6733162-6733658
  hypo

SEQ ID NO: 363543 - DNA, 164 bp, Homo sapiens
  chr4:6950171-6950335
  hypo
cggctgtatgggtatcccactctttgttctcccatgtgtggaggtttgatttgttcagggtccaatggttacaaataatgcccaccatggtgttctcacggatgtcactggcgtgtgcgtgcctggggggtgggacaggtgggtctcccgtgggtcccactcgc

SEQ ID NO: 363544 - DNA, 149 bp, Homo sapiens; identical to SEQ ID NO: 338439
  chr4:7004195-7004344
  hypo

SEQ ID NO: 363545 - DNA, 199 bp, Homo sapiens; identical to SEQ ID NO: 353481
  chr4:7047283-7047482
  hypo

SEQ ID NO: 363546 - DNA, 273 bp, Homo sapiens; identical to SEQ ID NO: 338444
  chr4:8070965-8071238
  hypo

SEQ ID NO: 363547 - DNA, 142 bp, Homo sapiens; identical to SEQ ID NO: 357835
  chr4:8160429-8160571
  hypo

SEQ ID NO: 363548 - DNA, 82 bp, Homo sapiens; identical to SEQ ID NO: 338448
  chr4:8386747-8386829
  hypo

SEQ ID NO: 363549 - DNA, 115 bp, Homo sapiens; identical to SEQ ID NO: 332040
  chr4:8609457-8609572
  hypo

SEQ ID NO: 363550 - DNA, 173 bp, Homo sapiens; identical to SEQ ID NO: 353484
  chr4:8615920-8616093
  hypo

SEQ ID NO: 363551 - DNA, 342 bp, Homo sapiens; identical to SEQ ID NO: 353485
  chr4:10087759-10088101
  hypo

SEQ ID NO: 363552 - DNA, 207 bp, Homo sapiens; identical to SEQ ID NO: 332046
  chr4:10090148-10090355
  hypo

SEQ ID NO: 363553 - DNA, 413 bp, Homo sapiens; identical to SEQ ID NO: 338460
  chr4:10120458-10120871
  hypo

SEQ ID NO: 363554 - DNA, 140 bp, Homo sapiens; identical to SEQ ID NO: 199357
  chr4:16228990-16229130
  hypo

SEQ ID NO: 363555 - DNA, 273 bp, Homo sapiens; identical to SEQ ID NO: 357845
  chr4:16229202-16229475
  hypo

SEQ ID NO: 363556 - DNA, 108 bp, Homo sapiens; identical to SEQ ID NO: 338466
  chr4:24534559-24534667
  hypo

SEQ ID NO: 363557 - DNA, 144 bp, Homo sapiens; identical to SEQ ID NO: 357848
  chr4:24914262-24914406
  hypo

SEQ ID NO: 363558 - DNA, 72 bp, Homo sapiens; identical to SEQ ID NO: 357849
  chr4:24914804-24914876
  hypo

SEQ ID NO: 363559 - DNA, 64 bp, Homo sapiens; identical to SEQ ID NO: 353487
  chr4:25013897-25013961
  hypo

SEQ ID NO: 363560 - DNA, 609 bp, Homo sapiens; identical to SEQ ID NO: 332064
  chr4:25863681-25864290
  hypo

SEQ ID NO: 363561 - DNA, 122 bp, Homo sapiens; identical to SEQ ID NO: 338470
  chr4:26855447-26855569
  hypo

SEQ ID NO: 363562 - DNA, 785 bp, Homo sapiens; identical to SEQ ID NO: 349925
  chr4:36245423-36246208
  hypo

SEQ ID NO: 363563 - DNA, 131 bp, Homo sapiens; identical to SEQ ID NO: 349926
  chr4:36246257-36246388
  hypo

SEQ ID NO: 363564 - DNA, 308 bp, Homo sapiens; identical to SEQ ID NO: 353491
  chr4:39447953-39448261
  hypo

SEQ ID NO: 363565 - DNA, 43 bp, Homo sapiens; identical to SEQ ID NO: 338475
  chr4:40261237-40261280
  hypo

SEQ ID NO: 363566 - DNA, 96 bp, Homo sapiens; identical to SEQ ID NO: 353492
  chr4:42317342-42317438
  hypo

SEQ ID NO: 363567 - DNA, 1067 bp, Homo sapiens; identical to SEQ ID NO: 346638
  chr4:42657902-42658969
  hypo

SEQ ID NO: 363568 - DNA, 145 bp, Homo sapiens; identical to SEQ ID NO: 338485
  chr4:48572780-48572925
  hypo

SEQ ID NO: 363569 - DNA, 133 bp, Homo sapiens; identical to SEQ ID NO: 338486
  chr4:48678686-48678819
  hypo

SEQ ID NO: 363570 - DNA, 172 bp, Homo sapiens; identical to SEQ ID NO: 338487
  chr4:48679706-48679878
  hypo

SEQ ID NO: 363571 - DNA, 70 bp, Homo sapiens; identical to SEQ ID NO: 338488
  chr4:48887296-48887366
  hypo

SEQ ID NO: 363572 - DNA, 76 bp, Homo sapiens; identical to SEQ ID NO: 338489
  chr4:56222936-56223012
  hypo

SEQ ID NO: 363573 - DNA, 864 bp, Homo sapiens
  chr4:57179991-57180855
  hypo
cgcggaaacagaatacacgtccttttctccattcgcacgacagagtcttgcgtggggtgaccgatgcctgagtttagctatccctgaacttgagaatacctgcttccaggtgttcttgagaaattaagagggtcgctggcactgtgaataggaaaaggaacgactgtgggtggagaaagcaaaaggctaattgtgttttcctttccaatgttaggatccacaacatgagcaaggcggccttgagagtcggccctgcctggaccagaacggacacccaggcgaggacaagccaacgtggcacgaagaggaacccaatccgctggattccgaggaagagagaagacgccaagaagactactggcgagaactggaggccaagtgcaagcggcaaaaggcggaagcagccgagaagagacgcctagaggagcagaggctgcaggcgctggagaggaggctttgggaagagaacagaaggcaggagctcttggaggaggagggcgaggggcaggagccgcctctagaggcggaaagggcgccgcgggaagagcagcagcggagcctggaagcgccaggttgggaggacgcggagcggagggagcgtgaggagcgcgagcgcctggaggcggaggaggagcgaaggcgtctgcaggcccaggcccaagcggaggagaggcggcggctggaggaggacgccaggctggaggagcggaggcggcaggaggaggaggaaggaagatgcgcggaggagctcaaaaggcaggaggaggaggaggctgagggatgggaagagctggaacagcaggaggcggaggtgcaggggccgcccgaggcgttggaggagactggggagggccggcggggcgc

SEQ ID NO: 363574 - DNA, 1211 bp, Homo sapiens; identical to SEQ ID NO: 209665
  chr4:57180972-57182183
  hypo

SEQ ID NO: 363575 - DNA, 510 bp, Homo sapiens; identical to SEQ ID NO: 353496
  chr4:57182262-57182772
  hypo

SEQ ID NO: 363576 - DNA, 93 bp, Homo sapiens; identical to SEQ ID NO: 346642
  chr4:57687545-57687638
  hypo

SEQ ID NO: 363577 - DNA, 173 bp, Homo sapiens
  chr4:57777264-57777437
  hypo
cgaagaccaaaccctttcgctgtaagccatgccaatatgaagcagaatctgaagaacagtttgtgcatcacatcagagttcacagtgctaagaaattttttgtggaagagagtgcagagaagcaggcaaaagccagggaatctggctcttccactgcagaagagggagatttc

SEQ ID NO: 363578 - DNA, 85 bp, Homo sapiens; identical to SEQ ID NO: 338498
  chr4:57896316-57896401
  hypo

SEQ ID NO: 363579 - DNA, 37 bp, Homo sapiens; identical to SEQ ID NO: 338501
  chr4:71566942-71566979
  hypo

SEQ ID NO: 363580 - DNA, 115 bp, Homo sapiens; identical to SEQ ID NO: 338502
  chr4:71706531-71706646
  hypo

SEQ ID NO: 363581 - DNA, 108 bp, Homo sapiens; identical to SEQ ID NO: 338503
  chr4:71857989-71858097
  hypo

SEQ ID NO: 363582 - DNA, 361 bp, Homo sapiens; identical to SEQ ID NO: 357892
  chr4:77227668-77228029
  hypo

SEQ ID NO: 363583 - DNA, 78 bp, Homo sapiens; identical to SEQ ID NO: 357893
  chr4:77228452-77228530
  hypo

SEQ ID NO: 363584 - DNA, 151 bp, Homo sapiens; identical to SEQ ID NO: 357899
  chr4:81124731-81124882
  hypo

SEQ ID NO: 363585 - DNA, 51 bp, Homo sapiens
  chr4:83839357-83839408
  hypo
cgaaggaaagacttggcgctttggacagttcaacgtcagtatggtgtcagc

SEQ ID NO: 363586 - DNA, 250 bp, Homo sapiens; identical to SEQ ID NO: 199476
  chr4:85503985-85504235
  hypo

SEQ ID NO: 363587 - DNA, 306 bp, Homo sapiens; identical to SEQ ID NO: 357912
  chr4:85886808-85887114
  hypo

SEQ ID NO: 363588 - DNA, 678 bp, Homo sapiens; identical to SEQ ID NO: 282305
  chr4:85887200-85887878
  hypo

SEQ ID NO: 363589 - DNA, 192 bp, Homo sapiens; identical to SEQ ID NO: 357914
  chr4:85887927-85888119
  hypo

SEQ ID NO: 363590 - DNA, 56 bp, Homo sapiens; identical to SEQ ID NO: 338514
  chr4:87946924-87946980
  hypo

SEQ ID NO: 363591 - DNA, 90 bp, Homo sapiens; identical to SEQ ID NO: 338515
  chr4:87993079-87993169
  hypo

SEQ ID NO: 363592 - DNA, 310 bp, Homo sapiens; identical to SEQ ID NO: 338518
  chr4:99399725-99400035
  hypo

SEQ ID NO: 363593 - DNA, 57 bp, Homo sapiens; identical to SEQ ID NO: 338519
  chr4:99936215-99936272
  hypo

SEQ ID NO: 363594 - DNA, 113 bp, Homo sapiens; identical to SEQ ID NO: 338520
  chr4:100555198-100555311
  hypo

SEQ ID NO: 363595 - DNA, 1017 bp, Homo sapiens; identical to SEQ ID NO: 338521
  chr4:100573606-100574623
  hypo

SEQ ID NO: 363596 - DNA, 258 bp, Homo sapiens; identical to SEQ ID NO: 345138
  chr4:100867945-100868203
  hypo

SEQ ID NO: 363597 - DNA, 168 bp, Homo sapiens; identical to SEQ ID NO: 338523
  chr4:103421142-103421310
  hypo

SEQ ID NO: 363598 - DNA, 692 bp, Homo sapiens; identical to SEQ ID NO: 349957
  chr4:103997179-103997871
  hypo

SEQ ID NO: 363599 - DNA, 60 bp, Homo sapiens; identical to SEQ ID NO: 338525
  chr4:104854506-104854566
  hypo

SEQ ID NO: 363600 - DNA, 269 bp, Homo sapiens; identical to SEQ ID NO: 349958
  chr4:106067220-106067489
  hypo

SEQ ID NO: 363601 - DNA, 971 bp, Homo sapiens; identical to SEQ ID NO: 357933
  chr4:106156519-106157490
  hypo

SEQ ID NO: 363602 - DNA, 185 bp, Homo sapiens; identical to SEQ ID NO: 338528
  chr4:106335558-106335743
  hypo

SEQ ID NO: 363603 - DNA, 232 bp, Homo sapiens; identical to SEQ ID NO: 199554
  chr4:111543735-111543967
  hypo

SEQ ID NO: 363604 - DNA, 242 bp, Homo sapiens; identical to SEQ ID NO: 199560
  chr4:113436585-113436827
  hypo

SEQ ID NO: 363605 - DNA, 228 bp, Homo sapiens; identical to SEQ ID NO: 199561
  chr4:113438278-113438506
  hypo

SEQ ID NO: 363606 - DNA, 215 bp, Homo sapiens; identical to SEQ ID NO: 349969
  chr4:115520945-115521160
  hypo

SEQ ID NO: 363607 - DNA, 276 bp, Homo sapiens; identical to SEQ ID NO: 199580
  chr4:121843731-121844007
  hypo

SEQ ID NO: 363608 - DNA, 170 bp, Homo sapiens; identical to SEQ ID NO: 357955
  chr4:121844206-121844376
  hypo

SEQ ID NO: 363609 - DNA, 281 bp, Homo sapiens; identical to SEQ ID NO: 338537
  chr4:123300379-123300660
  hypo

SEQ ID NO: 363610 - DNA, 1233 bp, Homo sapiens; identical to SEQ ID NO: 357960
  chr4:124317751-124318984
  hypo

SEQ ID NO: 363611 - DNA, 132 bp, Homo sapiens; identical to SEQ ID NO: 338541
  chr4:130168471-130168603
  hypo

SEQ ID NO: 363612 - DNA, 189 bp, Homo sapiens; identical to SEQ ID NO: 338542
  chr4:141007383-141007572
  hypo

SEQ ID NO: 363613 - DNA, 1351 bp, Homo sapiens; identical to SEQ ID NO: 338544
  chr4:141563919-141565270
  hypo

SEQ ID NO: 363614 - DNA, 60 bp, Homo sapiens; identical to SEQ ID NO: 199612
  chr4:142054594-142054654
  hypo

SEQ ID NO: 363615 - DNA, 155 bp, Homo sapiens; identical to SEQ ID NO: 357972
  chr4:142054757-142054912
  hypo

SEQ ID NO: 363616 - DNA, 824 bp, Homo sapiens; identical to SEQ ID NO: 332200
  chr4:142557243-142558067
  hypo

SEQ ID NO: 363617 - DNA, 223 bp, Homo sapiens; identical to SEQ ID NO: 346657
  chr4:149364661-149364884
  hypo

SEQ ID NO: 363618 - DNA, 346 bp, Homo sapiens; identical to SEQ ID NO: 357982
  chr4:149365911-149366257
  hypo

SEQ ID NO: 363619 - DNA, 1048 bp, Homo sapiens; identical to SEQ ID NO: 332213
  chr4:152329824-152330872
  hypo

SEQ ID NO: 363620 - DNA, 116 bp, Homo sapiens; identical to SEQ ID NO: 338551
  chr4:152591291-152591407
  hypo

SEQ ID NO: 363621 - DNA, 373 bp, Homo sapiens
  chr4:153943334-153943707
  hypo
tgactgggacacgggagggctccagacagccgctatttgccacacggaaccaaagcatttcactgttttaacaagcggttcagctggtccggagtatccctgctggctctcagccctaaagtggcgtgagggctgggcacgtcgacagcacttgatccgctccttccctctggaaatgcatttccttccattaccagaacagcctctcacagtttggcctgcctcttctcatgctatgtcgaaacaaagccacctgcctcccatgaaagacggcattgtttttccacctgagccacccacacctgggcaggtagaacagcgggtccccactccagggagctctcccactcgggcctgtcatggctcacacccc

SEQ ID NO: 363622 - DNA, 352 bp, Homo sapiens; identical to SEQ ID NO: 209824
  chr4:154216898-154217250
  hypo

SEQ ID NO: 363623 - DNA, 111 bp, Homo sapiens; identical to SEQ ID NO: 338557
  chr4:154421947-154422058
  hypo

SEQ ID NO: 363624 - DNA, 192 bp, Homo sapiens; identical to SEQ ID NO: 350003
  chr4:154714010-154714202
  hypo

SEQ ID NO: 363625 - DNA, 40 bp, Homo sapiens; identical to SEQ ID NO: 350004
  chr4:156298073-156298113
  hypo

SEQ ID NO: 363626 - DNA, 144 bp, Homo sapiens; identical to SEQ ID NO: 338563
  chr4:170043204-170043348
  hypo

SEQ ID NO: 363627 - DNA, 1342 bp, Homo sapiens; identical to SEQ ID NO: 358018
  chr4:174090080-174091422
  hypo

SEQ ID NO: 363628 - DNA, 132 bp, Homo sapiens; identical to SEQ ID NO: 338567
  chr4:183808118-183808250
  hypo

SEQ ID NO: 363629 - DNA, 290 bp, Homo sapiens; identical to SEQ ID NO: 338569
  chr4:183815970-183816260
  hypo

SEQ ID NO: 363630 - DNA, 206 bp, Homo sapiens; identical to SEQ ID NO: 199699
  chr4:184019900-184020106
  hypo

SEQ ID NO: 363631 - DNA, 155 bp, Homo sapiens; identical to SEQ ID NO: 338571
  chr4:184278181-184278336
  hypo

SEQ ID NO: 363632 - DNA, 125 bp, Homo sapiens; identical to SEQ ID NO: 353523
  chr4:184667665-184667790
  hypo

SEQ ID NO: 363633 - DNA, 365 bp, Homo sapiens; identical to SEQ ID NO: 332268
  chr4:185747631-185747996
  hypo

SEQ ID NO: 363634 - DNA, 219 bp, Homo sapiens; identical to SEQ ID NO: 358037
  chr4:185939454-185939673
  hypo

SEQ ID NO: 363635 - DNA, 128 bp, Homo sapiens; identical to SEQ ID NO: 338576
  chr4:186348212-186348340
  hypo

SEQ ID NO: 363636 - DNA, 393 bp, Homo sapiens; identical to SEQ ID NO: 199720
  chr4:187647669-187648062
  hypo

SEQ ID NO: 363637 - DNA, 239 bp, Homo sapiens; identical to SEQ ID NO: 350024
  chr4:187648119-187648358
  hypo

SEQ ID NO: 363638 - DNA, 346 bp, Homo sapiens; identical to SEQ ID NO: 338579
  chr4:188427955-188428301
  hypo

SEQ ID NO: 363639 - DNA, 482 bp, Homo sapiens; identical to SEQ ID NO: 338580
  chr4:189552385-189552867
  hypo

SEQ ID NO: 363640 - DNA, 203 bp, Homo sapiens; identical to SEQ ID NO: 338581
  chr4:189717765-189717968
  hypo

SEQ ID NO: 363641 - DNA, 183 bp, Homo sapiens; identical to SEQ ID NO: 338582
  chr4:190345382-190345565
  hypo

SEQ ID NO: 363642 - DNA, 702 bp, Homo sapiens; identical to SEQ ID NO: 338583
  chr4:190462487-190463189
  hypo

SEQ ID NO: 363643 - DNA, 240 bp, Homo sapiens; identical to SEQ ID NO: 338584
  chr5:110225-110465
  hypo

SEQ ID NO: 363644 - DNA, 49 bp, Homo sapiens; identical to SEQ ID NO: 353530
  chr5:139637-139686
  hypo

SEQ ID NO: 363645 - DNA, 248 bp, Homo sapiens; identical to SEQ ID NO: 209893
  chr5:139745-139993
  hypo

SEQ ID NO: 363646 - DNA, 111 bp, Homo sapiens; identical to SEQ ID NO: 353532
  chr5:140023-140134
  hypo

SEQ ID NO: 363647 - DNA, 331 bp, Homo sapiens; identical to SEQ ID NO: 338589
  chr5:453948-454279
  hypo

SEQ ID NO: 363648 - DNA, 173 bp, Homo sapiens; identical to SEQ ID NO: 338590
  chr5:462216-462389
  hypo

SEQ ID NO: 363649 - DNA, 758 bp, Homo sapiens; identical to SEQ ID NO: 353534
  chr5:465064-465822
  hypo

SEQ ID NO: 363650 - DNA, 258 bp, Homo sapiens; identical to SEQ ID NO: 353535
  chr5:465852-466110
  hypo

SEQ ID NO: 363651 - DNA, 1660 bp, Homo sapiens; identical to SEQ ID NO: 332275
  chr5:472600-474260
  hypo

SEQ ID NO: 363652 - DNA, 368 bp, Homo sapiens; identical to SEQ ID NO: 338593
  chr5:476496-476864
  hypo

SEQ ID NO: 363653 - DNA, 351 bp, Homo sapiens
  chr5:488144-488495
  hypo
cgctctggggaccaggagggcgggatttcaacagcgccatcattaaccctgaagctatggagtgggcgggcagggcctgggaactgtggaagatacaaagaagcctcgcgaaagctgccagtcgttctgagctgggaggaaggaggtggagggacgggacgcccccgggaggggagtttgaggacagggtttcacgccctcctttgctgactgaccgatggggggtgagacggggcccaggcctcccacggctcgcccgctctggagcggtggctccgttgctcaccacggtgactgcgtcgttcagcagcgactccccgaagacgatgatgaacaggacctcgttgacat

SEQ ID NO: 363654 - DNA, 52 bp, Homo sapiens
  chr5:488553-488605
  hypo
aaacaggaggaagtccagcagcccaatctgcaggtcgcctggaagacaagcc

SEQ ID NO: 363655 - DNA, 329 bp, Homo sapiens; identical to SEQ ID NO: 358043
  chr5:490894-491223
  hypo

SEQ ID NO: 363656 - DNA, 386 bp, Homo sapiens
  chr5:510026-510412
  hypo
cgggcagccggcgttgtccctcctgcagtcagcgctccactgccccacactcagctggcttcccagggcctgagcaaggatgggggaggcttcgggagaagaggggctccaacgatgtggaggagaatgtgttggggagacaggtgctgggctggaccggggagccgctggaggcctgggggcattggaagcaggaggatccgtgggtgcttgggcccctggcggagcgcggcagcttgttgggagctgggagcagagccacttactgtgagctcagagaggctgccaagagcagcgacagagaccatcgttccctccaggcaaagccagatgctgtgtgggaaaggaaacgtggccgtacgctgccacggagctctaaggtgttc

SEQ ID NO: 363657 - DNA, 201 bp, Homo sapiens; identical to SEQ ID NO: 353537
  chr5:520018-520219
  hypo

SEQ ID NO: 363658 - DNA, 60 bp, Homo sapiens; identical to SEQ ID NO: 209918
  chr5:554571-554631
  hypo

SEQ ID NO: 363659 - DNA, 60 bp, Homo sapiens; identical to SEQ ID NO: 209919
  chr5:554751-554811
  hypo

SEQ ID NO: 363660 - DNA, 140 bp, Homo sapiens
  chr5:554931-555071
  hypo
acgggatgaacggggttgggggctgggtcacgggatgaacggggggtgggtcacgggatgaacagggggtgggtcacgggataaaccggggtggggggctgggtcatgggatgaacggggggtgggtcacgggatgaacc

SEQ ID NO: 363661 - DNA, 160 bp, Homo sapiens; identical to SEQ ID NO: 353538
  chr5:600977-601137
  hypo

SEQ ID NO: 363662 - DNA, 263 bp, Homo sapiens; identical to SEQ ID NO: 353539
  chr5:601222-601485
  hypo

SEQ ID NO: 363663 - DNA, 54 bp, Homo sapiens; identical to SEQ ID NO: 338603
  chr5:667302-667356
  hypo

SEQ ID NO: 363664 - DNA, 258 bp, Homo sapiens; identical to SEQ ID NO: 350027
  chr5:676510-676768
  hypo

SEQ ID NO: 363665 - DNA, 356 bp, Homo sapiens; identical to SEQ ID NO: 350028
  chr5:676926-677282
  hypo

SEQ ID NO: 363666 - DNA, 432 bp, Homo sapiens; identical to SEQ ID NO: 338606
  chr5:883821-884253
  hypo

SEQ ID NO: 363667 - DNA, 187 bp, Homo sapiens; identical to SEQ ID NO: 338607
  chr5:913200-913387
  hypo

SEQ ID NO: 363668 - DNA, 150 bp, Homo sapiens; identical to SEQ ID NO: 338609
  chr5:1032302-1032452
  hypo

SEQ ID NO: 363669 - DNA, 338 bp, Homo sapiens; identical to SEQ ID NO: 353544
  chr5:1033274-1033612
  hypo

SEQ ID NO: 363670 - DNA, 40 bp, Homo sapiens; identical to SEQ ID NO: 353545
  chr5:1033674-1033714
  hypo

SEQ ID NO: 363671 - DNA, 143 bp, Homo sapiens; identical to SEQ ID NO: 353546
  chr5:1037852-1037995
  hypo

SEQ ID NO: 363672 - DNA, 454 bp, Homo sapiens; identical to SEQ ID NO: 353547
  chr5:1038035-1038489
  hypo

SEQ ID NO: 363673 - DNA, 318 bp, Homo sapiens; identical to SEQ ID NO: 353548
  chr5:1039295-1039613
  hypo

SEQ ID NO: 363674 - DNA, 132 bp, Homo sapiens; identical to SEQ ID NO: 353549
  chr5:1039683-1039815
  hypo

SEQ ID NO: 363675 - DNA, 236 bp, Homo sapiens; identical to SEQ ID NO: 338614
  chr5:1049758-1049994
  hypo

SEQ ID NO: 363676 - DNA, 263 bp, Homo sapiens; identical to SEQ ID NO: 338615
  chr5:1051312-1051575
  hypo

SEQ ID NO: 363677 - DNA, 1232 bp, Homo sapiens; identical to SEQ ID NO: 338616
  chr5:1051905-1053137
  hypo

SEQ ID NO: 363678 - DNA, 1614 bp, Homo sapiens; identical to SEQ ID NO: 338617
  chr5:1053406-1055020
  hypo

SEQ ID NO: 363679 - DNA, 123 bp, Homo sapiens; identical to SEQ ID NO: 353554
  chr5:1055426-1055549
  hypo

SEQ ID NO: 363680 - DNA, 1823 bp, Homo sapiens; identical to SEQ ID NO: 338620
  chr5:1056108-1057931
  hypo

SEQ ID NO: 363681 - DNA, 327 bp, Homo sapiens; identical to SEQ ID NO: 345841
  chr5:1058847-1059174
  hypo

SEQ ID NO: 363682 - DNA, 98 bp, Homo sapiens; identical to SEQ ID NO: 209967
  chr5:1059425-1059523
  hypo

SEQ ID NO: 363683 - DNA, 317 bp, Homo sapiens; identical to SEQ ID NO: 345843
  chr5:1059556-1059873
  hypo

SEQ ID NO: 363684 - DNA, 97 bp, Homo sapiens; identical to SEQ ID NO: 338622
  chr5:1060676-1060773
  hypo

SEQ ID NO: 363685 - DNA, 342 bp, Homo sapiens; identical to SEQ ID NO: 338623
  chr5:1060864-1061206
  hypo

SEQ ID NO: 363686 - DNA, 811 bp, Homo sapiens; identical to SEQ ID NO: 338625
  chr5:1062902-1063713
  hypo

SEQ ID NO: 363687 - DNA, 860 bp, Homo sapiens; identical to SEQ ID NO: 332282
  chr5:1064412-1065272
  hypo

SEQ ID NO: 363688 - DNA, 890 bp, Homo sapiens; identical to SEQ ID NO: 338627
  chr5:1065329-1066219
  hypo

SEQ ID NO: 363689 - DNA, 1417 bp, Homo sapiens; identical to SEQ ID NO: 345846
  chr5:1068627-1070044
  hypo

SEQ ID NO: 363690 - DNA, 806 bp, Homo sapiens; identical to SEQ ID NO: 353565
  chr5:1074389-1075195
  hypo

SEQ ID NO: 363691 - DNA, 4905 bp, Homo sapiens; identical to SEQ ID NO: 338632
  chr5:1075478-1080383
  hypo

SEQ ID NO: 363692 - DNA, 69 bp, Homo sapiens; identical to SEQ ID NO: 338633
  chr5:1081429-1081498
  hypo

SEQ ID NO: 363693 - DNA, 304 bp, Homo sapiens; identical to SEQ ID NO: 338634
  chr5:1081824-1082128
  hypo

SEQ ID NO: 363694 - DNA, 708 bp, Homo sapiens; identical to SEQ ID NO: 338635
  chr5:1083641-1084349
  hypo

SEQ ID NO: 363695 - DNA, 545 bp, Homo sapiens; identical to SEQ ID NO: 353570
  chr5:1084386-1084931
  hypo

SEQ ID NO: 363696 - DNA, 1665 bp, Homo sapiens
  chr5:1085196-1086861
  hypo
cgagcccacgggggttcccgccacggtcacacccagcccaccccttgcggggagctcggcgtcaaggatgatggacgagaggcgggcagagcccatgggacctggccccagccccacacccacccacggctcagaggccccgagactcacgggatgtccggggggtcgaaggcagacttgatgacgccggcatagatggccaggatggacagcacgacgcaggccaggaagaccagcgccagcttgttgacatacttgacgcccacgaagaccaccagggccatgagcacgagcgtgcacgtgccgtacacacgcatgttgtgcagcatggcggccgcctcgccacctgcagcctccgcctggaagatggccgcacccggggagatgtacgtctgtgggaacaaggccggtcgggaggccgtccccggacacaactccccagtgcccgtccctcccgcaagcccccagcgccacacaggggcctcctcccaacaggtgccggggccatcgggacgcatccgtgctggacggagcccgcgggggtcagcgcacaggcaagggacggagcccgcgggggtcagcgcacaggcgagggacggagcccgcgggggtcagcgcacaggcgagggacggagcccgcgggggtcagcgcacaggccatggacagccaggggcctgaacgtttcccaggaaccacccgggagccttagagtaaagcaacttcaggacccggggcatccgcatgtccgcactcaaaagaaacaccttctgctaagaggaatgtgactgctgcccagagagctcggcccaccccggctggacgtcctggacacacacagggtctgaccacgccggcggggggcaacctctgttctgcccagattcaagggaagggacggagacgtgagacagtgctgctcagctccctcaagaccaggacaggactggggtgcagcaggcatggagggcatggcacccacccccaccaaaggggatcctgggagtgcggcagccacggcacccggggcaggtggaaagatggagggacatggccaggggactcgggttgggacgggtgtgggtgcgaccccactgaaaggtttcagaaccttcttggccatgtggctctcttcaggaacccaggaggccaggaaccaggtctggcagcagagggaggggcagaaagactggggacaggggctcaggtgagcgtctctgaagccctgcagggacagcgggtttcagaacctcagcaggaaggacagcacccgtcggccagagaagggcggttcccgtccccacgaggaccaaggaactcaggccacagctctcagctgtgctcaggtgatgtgggacatgctttgagcatgcctgttttgagaaggtgatgacatcacctggttgtacattgctgggctctgggaccctcggccaagtgcccagatcaggcagagaagaggctgggatcctggcaaaaggttcttctaagccgagttccagccctgctcctaaaacagctccgactgcaggactgcacctacgcggggctcagatctacagtccagatgtctacccagctcatgccaggcacgcctcacggagggcagcaatggtgctcaagggggacacaggtcgctgctgagtggacgctgcccagtggcttcc

SEQ ID NO: 363697 - DNA, 2187 bp, Homo sapiens; identical to SEQ ID NO: 338638
  chr5:1087088-1089275
  hypo

SEQ ID NO: 363698 - DNA, 212 bp, Homo sapiens; identical to SEQ ID NO: 338639
  chr5:1090437-1090649
  hypo

SEQ ID NO: 363699 - DNA, 247 bp, Homo sapiens; identical to SEQ ID NO: 338640
  chr5:1091634-1091881
  hypo

SEQ ID NO: 363700 - DNA, 134 bp, Homo sapiens; identical to SEQ ID NO: 348073
  chr5:1094049-1094183
  hypo

SEQ ID NO: 363701 - DNA, 625 bp, Homo sapiens
  chr5:1094563-1095188
  hypo
cgctagtcccaggacacatgctagccccaatgcgcaagctatccccagaacacaagctatccctaggacacaagctatccccagaacacacgctagctccagggcatacgctatcccccacacacatcatcattgaagacaaagcccctgaaagcctcggcaagtgagctgttcagcccagggcaagggtacctccctctggcgttgaaaatctctcattcagccaaatgtgggcaaaattctcactcttaaaagtcggggtggcacctcctagccttgctgcttaatccgccatttcggagggacacagaggacttcccactgttccctgttgaggacgccgcccacaggctctctaggtaaatgagcccctcctgagtctttcaggaaggctgggccggcgacccctccatggggctgagcccaggcttcgaaccagggggtaatcctagcagctgcccgagagcatgagcaagggaattggtggggaggaggacttgaggctccctggcaggttgaggcccgatggcccatgtgacggtgttagaagatagggtcggtaggaggtgggggcggtaggaggcggggggccggtaggaggcggggccggtaggaggtggggccc

SEQ ID NO: 363702 - DNA, 390 bp, Homo sapiens; identical to SEQ ID NO: 338643
  chr5:1095619-1096009
  hypo

SEQ ID NO: 363703 - DNA, 991 bp, Homo sapiens; identical to SEQ ID NO: 332283
  chr5:1111396-1112387
  hypo

SEQ ID NO: 363704 - DNA, 239 bp, Homo sapiens; identical to SEQ ID NO: 338645
  chr5:1114657-1114896
  hypo

SEQ ID NO: 363705 - DNA, 635 bp, Homo sapiens; identical to SEQ ID NO: 338646
  chr5:1115157-1115792
  hypo

SEQ ID NO: 363706 - DNA, 191 bp, Homo sapiens; identical to SEQ ID NO: 353578
  chr5:1120359-1120550
  hypo

SEQ ID NO: 363707 - DNA, 103 bp, Homo sapiens
  chr5:1120577-1120680
  hypo
cggggacaccacggtgtgctggccagatgctcacagccgctgtacctccccacacaactggaggtccgtggaatgcacggccactgtggaaaactccagacac

SEQ ID NO: 363708 - DNA, 178 bp, Homo sapiens; identical to SEQ ID NO: 338650
  chr5:1122647-1122825
  hypo

SEQ ID NO: 363709 - DNA, 343 bp, Homo sapiens; identical to SEQ ID NO: 338655
  chr5:1409813-1410156
  hypo

SEQ ID NO: 363710 - DNA, 373 bp, Homo sapiens; identical to SEQ ID NO: 338656
  chr5:1476334-1476707
  hypo

SEQ ID NO: 363711 - DNA, 327 bp, Homo sapiens; identical to SEQ ID NO: 338658
  chr5:1553050-1553377
  hypo

SEQ ID NO: 363712 - DNA, 131 bp, Homo sapiens
  chr5:1641261-1641392
  hypo
cggctgtggggctgcccgccgccctcctcctcccacgctaggctgcccgccgccctcctcctcccaccctaggctacctgacccatggagaccggcctgagacagacgcatccccgaacaccaggtgcccc

SEQ ID NO: 363713 - DNA, 277 bp, Homo sapiens; identical to SEQ ID NO: 338660
  chr5:1702104-1702381
  hypo

SEQ ID NO: 363714 - DNA, 41 bp, Homo sapiens
  chr5:1729774-1729815
  hypo
cgcggctgtgttagaggaggcgccggggcctgggtgcagaa

SEQ ID NO: 363715 - DNA, 330 bp, Homo sapiens; identical to SEQ ID NO: 210022
  chr5:1729886-1730216
  hypo

SEQ ID NO: 363716 - DNA, 56 bp, Homo sapiens
  chr5:1730252-1730308
  hypo
cctggcaggctggcacccgcgcgtgggctggggctcactctagctgttcccttggc

SEQ ID NO: 363717 - DNA, 185 bp, Homo sapiens; identical to SEQ ID NO: 338665
  chr5:1808331-1808516
  hypo

SEQ ID NO: 363718 - DNA, 625 bp, Homo sapiens; identical to SEQ ID NO: 353582
  chr5:1809065-1809690
  hypo

SEQ ID NO: 363719 - DNA, 160 bp, Homo sapiens
  chr5:1922827-1922987
  hypo
cgctgctgctcagggacccctcctcccattctggaaaccatcggcaaaacctcagcagaccacggggccattactgtgggctccggtttccagccactgcacttccagacttttctcttcggagccagtgggaatttagcaaatgactggatggggtctg

SEQ ID NO: 363720 - DNA, 48 bp, Homo sapiens
  chr5:1923074-1923122
  hypo
cctgccagggcggccatgcctgctgctagagcctctgagaaaacagcc

SEQ ID NO: 363721 - DNA, 194 bp, Homo sapiens; identical to SEQ ID NO: 353583
  chr5:2007541-2007735
  hypo

SEQ ID NO: 363722 - DNA, 36 bp, Homo sapiens; identical to SEQ ID NO: 353584
  chr5:2007797-2007833
  hypo

SEQ ID NO: 363723 - DNA, 61 bp, Homo sapiens; identical to SEQ ID NO: 353585
  chr5:2225378-2225439
  hypo

SEQ ID NO: 363724 - DNA, 133 bp, Homo sapiens; identical to SEQ ID NO: 353586
  chr5:2225469-2225602
  hypo

SEQ ID NO: 363725 - DNA, 297 bp, Homo sapiens; identical to SEQ ID NO: 304031
  chr5:2261313-2261610
  hypo

SEQ ID NO: 363726 - DNA, 418 bp, Homo sapiens; identical to SEQ ID NO: 338677
  chr5:2371462-2371880
  hypo

SEQ ID NO: 363727 - DNA, 47 bp, Homo sapiens
  chr5:2547115-2547162
  hypo
cggtgttagtgcccaccagcctccccggtcaccctgttagcccagac

SEQ ID NO: 363728 - DNA, 128 bp, Homo sapiens
  chr5:2547192-2547320
  hypo
gataaatgcagagatgatgaatcgaaatgcaaatgacggtgaagtgcctcagccatcagcgctgaatatcattaataccttcccactgttaaatcgatcactgtcatccccggatgccggcgtgcggc

SEQ ID NO: 363729 - DNA, 36 bp, Homo sapiens; identical to SEQ ID NO: 353589
  chr5:3221011-3221047
  hypo

SEQ ID NO: 363730 - DNA, 142 bp, Homo sapiens; identical to SEQ ID NO: 353590
  chr5:3221181-3221323
  hypo

SEQ ID NO: 363731 - DNA, 317 bp, Homo sapiens; identical to SEQ ID NO: 338683
  chr5:3282952-3283269
  hypo

SEQ ID NO: 363732 - DNA, 51 bp, Homo sapiens; identical to SEQ ID NO: 348077
  chr5:3324702-3324753
  hypo

SEQ ID NO: 363733 - DNA, 283 bp, Homo sapiens; identical to SEQ ID NO: 348078
  chr5:3325333-3325616
  hypo

SEQ ID NO: 363734 - DNA, 130 bp, Homo sapiens; identical to SEQ ID NO: 338685
  chr5:3326328-3326458
  hypo

SEQ ID NO: 363735 - DNA, 75 bp, Homo sapiens
  chr5:3454429-3454504
  hypo
cacgctcccgctagcacggtgggcgtcacccactaacacacacggcagccctggactcttctttcctggatgtcc

SEQ ID NO: 363736 - DNA, 113 bp, Homo sapiens; identical to SEQ ID NO: 304098
  chr5:3740590-3740703
  hypo

SEQ ID NO: 363737 - DNA, 327 bp, Homo sapiens; identical to SEQ ID NO: 304099
  chr5:3761240-3761567
  hypo

SEQ ID NO: 363738 - DNA, 301 bp, Homo sapiens; identical to SEQ ID NO: 353596
  chr5:3761623-3761924
  hypo

SEQ ID NO: 363739 - DNA, 130 bp, Homo sapiens; identical to SEQ ID NO: 338690
  chr5:3781386-3781516
  hypo

SEQ ID NO: 363740 - DNA, 208 bp, Homo sapiens; identical to SEQ ID NO: 353598
  chr5:3932149-3932357
  hypo

SEQ ID NO: 363741 - DNA, 520 bp, Homo sapiens; identical to SEQ ID NO: 304106
  chr5:4144516-4145036
  hypo

SEQ ID NO: 363742 - DNA, 146 bp, Homo sapiens
  chr5:4145066-4145212
  hypo
gtatgttctgtgtgccacactcttgcctgcacgtggaatgctgactgcacagcttactacctgtgttctgtgtgtgacgctcttgtgtgcatgtggaatgctgatggcacaacttactctgtgtgttatgtttgccacactctcgc

SEQ ID NO: 363743 - DNA, 382 bp, Homo sapiens; identical to SEQ ID NO: 338696
  chr5:9122712-9123094
  hypo

SEQ ID NO: 363744 - DNA, 158 bp, Homo sapiens; identical to SEQ ID NO: 338697
  chr5:9497496-9497654
  hypo

SEQ ID NO: 363745 - DNA, 176 bp, Homo sapiens; identical to SEQ ID NO: 338699
  chr5:10256093-10256269
  hypo

SEQ ID NO: 363746 - DNA, 125 bp, Homo sapiens
  chr5:10479713-10479838
  hypo
cggctggcagctgcttcgggcgtctcaccttgtgactatttcctgggcactgtgggagaggaggcctcttgcctgagctcctgtccctactgtctcctctcactaaatgcacggcacggctttgc

SEQ ID NO: 363747 - DNA, 170 bp, Homo sapiens; identical to SEQ ID NO: 345154
  chr5:10564301-10564471
  hypo

SEQ ID NO: 363748 - DNA, 359 bp, Homo sapiens; identical to SEQ ID NO: 338703
  chr5:12794972-12795331
  hypo

SEQ ID NO: 363749 - DNA, 453 bp, Homo sapiens; identical to SEQ ID NO: 338705
  chr5:14328256-14328709
  hypo

SEQ ID NO: 363750 - DNA, 274 bp, Homo sapiens; identical to SEQ ID NO: 338706
  chr5:14332870-14333144
  hypo

SEQ ID NO: 363751 - DNA, 259 bp, Homo sapiens; identical to SEQ ID NO: 338707
  chr5:14461130-14461389
  hypo

SEQ ID NO: 363752 - DNA, 157 bp, Homo sapiens
  chr5:14492755-14492912
  hypo
cgtctaccaaggagaggtcgttcaaattctggccagcaaccagcagaacatgtttctggtgttccgagccgccactgaccagtgccccgcagctgagggctggattccaggctttgtcctgggccacaccagtgcagtcatcgtggagaacccggac

SEQ ID NO: 363753 - DNA, 112 bp, Homo sapiens; identical to SEQ ID NO: 338709
  chr5:14681608-14681720
  hypo

SEQ ID NO: 363754 - DNA, 88 bp, Homo sapiens; identical to SEQ ID NO: 358074
  chr5:16935468-16935556
  hypo

SEQ ID NO: 363755 - DNA, 266 bp, Homo sapiens; identical to SEQ ID NO: 199773
  chr5:16935617-16935883
  hypo

SEQ ID NO: 363756 - DNA, 33 bp, Homo sapiens; identical to SEQ ID NO: 199774
  chr5:16936321-16936354
  hypo

SEQ ID NO: 363757 - DNA, 70 bp, Homo sapiens; identical to SEQ ID NO: 199775
  chr5:16936514-16936584
  hypo

SEQ ID NO: 363758 - DNA, 52 bp, Homo sapiens; identical to SEQ ID NO: 350050
  chr5:17217629-17217681
  hypo

SEQ ID NO: 363759 - DNA, 216 bp, Homo sapiens
  chr5:17275369-17275585
  hypo
cgacgagaaagccaaggagaaagacaagaaggccgagggcgcggcgacggaagaggaggggaccccgaaggagagtgagccccaggcggccgcagagcccgccgaggccaaggagggcaaggagaagcccgaccaggacgccgagggcaaggccgaggagaaggagggcgagaaggacgcggcggctgccaaggaggaggccccgaaggcggagcc

SEQ ID NO: 363760 - DNA, 380 bp, Homo sapiens
  chr5:17275617-17275997
  hypo
ctgagcccccgaaggcgcccgagcaggagcaggcggcccccggccccgctgcgggcggcgaggcccccaaagctgctgaggccgccgcggccccggccgagagcgcggcccctgccgccggggaggagcccagcaaggaggaaggggaacccaaaaagactgaggcgcccgcagctcctgccgcccaggagaccaaaagtgacggggccccagcttcagactcaaaacccggcagctcggaggctgccccctcttccaaggagacccccgcagccacggaagcgcctagttccacacccaaggcccagggccccgcagcctctgcagaagagcccaagccggtggaggccccggcagctaattccgaccaaaccgtaacc

SEQ ID NO: 363761 - DNA, 71 bp, Homo sapiens; identical to SEQ ID NO: 338718
  chr5:31410355-31410426
  hypo

SEQ ID NO: 363762 - DNA, 478 bp, Homo sapiens; identical to SEQ ID NO: 346679
  chr5:31854462-31854940
  hypo

SEQ ID NO: 363763 - DNA, 799 bp, Homo sapiens; identical to SEQ ID NO: 350063
  chr5:41870076-41870875
  hypo

SEQ ID NO: 363764 - DNA, 277 bp, Homo sapiens; identical to SEQ ID NO: 358097
  chr5:42424338-42424615
  hypo

SEQ ID NO: 363765 - DNA, 328 bp, Homo sapiens; identical to SEQ ID NO: 332354
  chr5:43557434-43557762
  hypo

SEQ ID NO: 363766 - DNA, 214 bp, Homo sapiens; identical to SEQ ID NO: 350071
  chr5:43603571-43603785
  hypo

SEQ ID NO: 363767 - DNA, 50 bp, Homo sapiens; identical to SEQ ID NO: 345162
  chr5:49737299-49737349
  hypo

SEQ ID NO: 363768 - DNA, 552 bp, Homo sapiens; identical to SEQ ID NO: 358113
  chr5:56112644-56113196
  hypo

SEQ ID NO: 363769 - DNA, 111 bp, Homo sapiens; identical to SEQ ID NO: 345853
  chr5:67590957-67591068
  hypo

SEQ ID NO: 363770 - DNA, 114 bp, Homo sapiens; identical to SEQ ID NO: 304477
  chr5:67591157-67591271
  hypo

SEQ ID NO: 363771 - DNA, 96 bp, Homo sapiens; identical to SEQ ID NO: 338733
  chr5:67717809-67717905
  hypo

SEQ ID NO: 363772 - DNA, 143 bp, Homo sapiens; identical to SEQ ID NO: 338734
  chr5:71714802-71714945
  hypo

SEQ ID NO: 363773 - DNA, 216 bp, Homo sapiens; identical to SEQ ID NO: 199888
  chr5:72744481-72744697
  hypo

SEQ ID NO: 363774 - DNA, 64 bp, Homo sapiens; identical to SEQ ID NO: 338739
  chr5:73205673-73205737
  hypo

SEQ ID NO: 363775 - DNA, 164 bp, Homo sapiens; identical to SEQ ID NO: 332389
  chr5:73843900-73844064
  hypo

SEQ ID NO: 363776 - DNA, 62 bp, Homo sapiens; identical to SEQ ID NO: 338743
  chr5:74753672-74753734
  hypo

SEQ ID NO: 363777 - DNA, 373 bp, Homo sapiens; identical to SEQ ID NO: 199901
  chr5:75379694-75380067
  hypo

SEQ ID NO: 363778 - DNA, 50 bp, Homo sapiens; identical to SEQ ID NO: 283051
  chr5:75698194-75698244
  hypo

SEQ ID NO: 363779 - DNA, 1185 bp, Homo sapiens; identical to SEQ ID NO: 199902
  chr5:75698274-75699459
  hypo

SEQ ID NO: 363780 - DNA, 80 bp, Homo sapiens; identical to SEQ ID NO: 338746
  chr5:76327297-76327377
  hypo

SEQ ID NO: 363781 - DNA, 96 bp, Homo sapiens; identical to SEQ ID NO: 358151
  chr5:76507202-76507298
  hypo

SEQ ID NO: 363782 - DNA, 37 bp, Homo sapiens; identical to SEQ ID NO: 346704
  chr5:77268330-77268367
  hypo

SEQ ID NO: 363783 - DNA, 173 bp, Homo sapiens; identical to SEQ ID NO: 338750
  chr5:77291967-77292140
  hypo

SEQ ID NO: 363784 - DNA, 35 bp, Homo sapiens; identical to SEQ ID NO: 338751
  chr5:77425063-77425098
  hypo

SEQ ID NO: 363785 - DNA, 43 bp, Homo sapiens; identical to SEQ ID NO: 353623
  chr5:78105396-78105439
  hypo

SEQ ID NO: 363786 - DNA, 70 bp, Homo sapiens; identical to SEQ ID NO: 353624
  chr5:78105545-78105615
  hypo

SEQ ID NO: 363787 - DNA, 41 bp, Homo sapiens; identical to SEQ ID NO: 199922
  chr5:79865662-79865703
  hypo

SEQ ID NO: 363788 - DNA, 90 bp, Homo sapiens; identical to SEQ ID NO: 199923
  chr5:79865744-79865834
  hypo

SEQ ID NO: 363789 - DNA, 240 bp, Homo sapiens
  chr5:79911325-79911565
  hypo
ggtctccaaacagacaattacccggttccacttaacagagtgactcaaggacggatctgagggctgggtcttgtgaacgcgggctgttgtcctgccctctcccagctctaacattgtgctgaaaagttaaaatacaaaacgccaaagctccccaatcccatcccacgcccctgcctgcgcagcctttcatgcattgaatgggcagcttcatgatgctgctgcgacaatagcgacaatagc

SEQ ID NO: 363790 - DNA, 112 bp, Homo sapiens; identical to SEQ ID NO: 338757
  chr5:86672217-86672329
  hypo

SEQ ID NO: 363791 - DNA, 735 bp, Homo sapiens; identical to SEQ ID NO: 345179
  chr5:87436769-87437504
  hypo

SEQ ID NO: 363792 - DNA, 52 bp, Homo sapiens; identical to SEQ ID NO: 338762
  chr5:90672526-90672578
  hypo

SEQ ID NO: 363793 - DNA, 446 bp, Homo sapiens; identical to SEQ ID NO: 338765
  chr5:96111437-96111883
  hypo

SEQ ID NO: 363794 - DNA, 71 bp, Homo sapiens; identical to SEQ ID NO: 353628
  chr5:96114516-96114587
  hypo

SEQ ID NO: 363795 - DNA, 53 bp, Homo sapiens; identical to SEQ ID NO: 353629
  chr5:96114632-96114685
  hypo

SEQ ID NO: 363796 - DNA, 132 bp, Homo sapiens; identical to SEQ ID NO: 338767
  chr5:96121466-96121598
  hypo

SEQ ID NO: 363797 - DNA, 70 bp, Homo sapiens; identical to SEQ ID NO: 338768
  chr5:96362713-96362783
  hypo

SEQ ID NO: 363798 - DNA, 44 bp, Homo sapiens
  chr5:98200950-98200994
  hypo
cgctggaaccaagtaagtcagagaagtggccggcaacgatggga

SEQ ID NO: 363799 - DNA, 91 bp, Homo sapiens; identical to SEQ ID NO: 338770
  chr5:98239940-98240031
  hypo

SEQ ID NO: 363800 - DNA, 298 bp, Homo sapiens; identical to SEQ ID NO: 199969
  chr5:107005685-107005983
  hypo

SEQ ID NO: 363801 - DNA, 449 bp, Homo sapiens; identical to SEQ ID NO: 199970
  chr5:107006260-107006709
  hypo

SEQ ID NO: 363802 - DNA, 309 bp, Homo sapiens; identical to SEQ ID NO: 338773
  chr5:107703589-107703898
  hypo

SEQ ID NO: 363803 - DNA, 281 bp, Homo sapiens; identical to SEQ ID NO: 350137
  chr5:109024730-109025011
  hypo

SEQ ID NO: 363804 - DNA, 738 bp, Homo sapiens; identical to SEQ ID NO: 332448
  chr5:110847638-110848376
  hypo

SEQ ID NO: 363805 - DNA, 213 bp, Homo sapiens; identical to SEQ ID NO: 350143
  chr5:114506308-114506521
  hypo

SEQ ID NO: 363806 - DNA, 497 bp, Homo sapiens; identical to SEQ ID NO: 338778
  chr5:115783187-115783684
  hypo

SEQ ID NO: 363807 - DNA, 37 bp, Homo sapiens; identical to SEQ ID NO: 346733
  chr5:124084158-124084195
  hypo

SEQ ID NO: 363808 - DNA, 60 bp, Homo sapiens; identical to SEQ ID NO: 346734
  chr5:124084302-124084362
  hypo

SEQ ID NO: 363809 - DNA, 111 bp, Homo sapiens; identical to SEQ ID NO: 345192
  chr5:124084660-124084771
  hypo

SEQ ID NO: 363810 - DNA, 64 bp, Homo sapiens; identical to SEQ ID NO: 345193
  chr5:124084977-124085041
  hypo

SEQ ID NO: 363811 - DNA, 246 bp, Homo sapiens; identical to SEQ ID NO: 338782
  chr5:126213748-126213994
  hypo

SEQ ID NO: 363812 - DNA, 269 bp, Homo sapiens; identical to SEQ ID NO: 338783
  chr5:126250520-126250789
  hypo

SEQ ID NO: 363813 - DNA, 34 bp, Homo sapiens; identical to SEQ ID NO: 200020
  chr5:129240901-129240935
  hypo

SEQ ID NO: 363814 - DNA, 143 bp, Homo sapiens; identical to SEQ ID NO: 200021
  chr5:129240962-129241105
  hypo

SEQ ID NO: 363815 - DNA, 273 bp, Homo sapiens; identical to SEQ ID NO: 200022
  chr5:129241140-129241413
  hypo

SEQ ID NO: 363816 - DNA, 160 bp, Homo sapiens; identical to SEQ ID NO: 338787
  chr5:131037398-131037558
  hypo

SEQ ID NO: 363817 - DNA, 431 bp, Homo sapiens; identical to SEQ ID NO: 304697
  chr5:131607799-131608230
  hypo

SEQ ID NO: 363818 - DNA, 241 bp, Homo sapiens; identical to SEQ ID NO: 358234
  chr5:131831522-131831763
  hypo

SEQ ID NO: 363819 - DNA, 104 bp, Homo sapiens
  chr5:132083964-132084068
  hypo
aggctcctgctgctgggggaccaggagtggccgctagcgaccttcctcgccccacctgctcttcttcctagcaggatgaaatctgcgacgccttcgaggaagtc

SEQ ID NO: 363820 - DNA, 805 bp, Homo sapiens; identical to SEQ ID NO: 332483
  chr5:132386973-132387778
  hypo

SEQ ID NO: 363821 - DNA, 873 bp, Homo sapiens; identical to SEQ ID NO: 332486
  chr5:133862738-133863611
  hypo

SEQ ID NO: 363822 - DNA, 63 bp, Homo sapiens; identical to SEQ ID NO: 353650
  chr5:134273891-134273954
  hypo

SEQ ID NO: 363823 - DNA, 128 bp, Homo sapiens; identical to SEQ ID NO: 338797
  chr5:134278947-134279075
  hypo

SEQ ID NO: 363824 - DNA, 172 bp, Homo sapiens; identical to SEQ ID NO: 358243
  chr5:134370281-134370453
  hypo

SEQ ID NO: 363825 - DNA, 38 bp, Homo sapiens; identical to SEQ ID NO: 358244
  chr5:134370508-134370546
  hypo

SEQ ID NO: 363826 - DNA, 192 bp, Homo sapiens
  chr5:134524773-134524965
  hypo
cgaatgggaacatgcgccgatcaccagtcagtgacttgggaatttttcaggaggcatattttcttacgttaatgcttttgtagattccatcgatgttcagacatcaaagggcatgcaattaataatgggcatctggagggccgatcacatgtttccgatgttaaagtggtgaacgacaggaaaatcggccac

SEQ ID NO: 363827 - DNA, 257 bp, Homo sapiens; identical to SEQ ID NO: 338800
  chr5:134579620-134579877
  hypo

SEQ ID NO: 363828 - DNA, 391 bp, Homo sapiens; identical to SEQ ID NO: 338801
  chr5:135091190-135091581
  hypo

SEQ ID NO: 363829 - DNA, 145 bp, Homo sapiens; identical to SEQ ID NO: 338802
  chr5:135188298-135188443
  hypo

SEQ ID NO: 363830 - DNA, 102 bp, Homo sapiens; identical to SEQ ID NO: 338804
  chr5:136983271-136983373
  hypo

SEQ ID NO: 363831 - DNA, 196 bp, Homo sapiens; identical to SEQ ID NO: 338805
  chr5:137895663-137895859
  hypo

SEQ ID NO: 363832 - DNA, 118 bp, Homo sapiens; identical to SEQ ID NO: 338806
  chr5:137912556-137912674
  hypo

SEQ ID NO: 363833 - DNA, 469 bp, Homo sapiens; identical to SEQ ID NO: 332510
  chr5:139088846-139089315
  hypo

SEQ ID NO: 363834 - DNA, 276 bp, Homo sapiens; identical to SEQ ID NO: 332516
  chr5:139554306-139554582
  hypo

SEQ ID NO: 363835 - DNA, 127 bp, Homo sapiens; identical to SEQ ID NO: 338810
  chr5:140905588-140905715
  hypo

SEQ ID NO: 363836 - DNA, 689 bp, Homo sapiens; identical to SEQ ID NO: 338811
  chr5:141248116-141248805
  hypo

SEQ ID NO: 363837 - DNA, 65 bp, Homo sapiens; identical to SEQ ID NO: 338812
  chr5:141355864-141355929
  hypo

SEQ ID NO: 363838 - DNA, 31 bp, Homo sapiens
  chr5:142625544-142625575
  hypo
cggtcatgccaagtctcagtgccccctccgc

SEQ ID NO: 363839 - DNA, 624 bp, Homo sapiens; identical to SEQ ID NO: 283411
  chr5:142781875-142782499
  hypo

SEQ ID NO: 363840 - DNA, 124 bp, Homo sapiens; identical to SEQ ID NO: 283412
  chr5:142782625-142782749
  hypo

SEQ ID NO: 363841 - DNA, 410 bp, Homo sapiens; identical to SEQ ID NO: 345197
  chr5:142782794-142783204
  hypo

SEQ ID NO: 363842 - DNA, 1069 bp, Homo sapiens; identical to SEQ ID NO: 350188
  chr5:142783606-142784675
  hypo

SEQ ID NO: 363843 - DNA, 110 bp, Homo sapiens; identical to SEQ ID NO: 350190
  chr5:148206075-148206185
  hypo

SEQ ID NO: 363844 - DNA, 36 bp, Homo sapiens; identical to SEQ ID NO: 350191
  chr5:148206432-148206468
  hypo

SEQ ID NO: 363845 - DNA, 252 bp, Homo sapiens; identical to SEQ ID NO: 346754
  chr5:148650971-148651223
  hypo

SEQ ID NO: 363846 - DNA, 87 bp, Homo sapiens; identical to SEQ ID NO: 332540
  chr5:148724812-148724899
  hypo

SEQ ID NO: 363847 - DNA, 100 bp, Homo sapiens; identical to SEQ ID NO: 338820
  chr5:148821027-148821127
  hypo

SEQ ID NO: 363848 - DNA, 413 bp, Homo sapiens; identical to SEQ ID NO: 338821
  chr5:149323779-149324192
  hypo

SEQ ID NO: 363849 - DNA, 41 bp, Homo sapiens
  chr5:150911164-150911205
  hypo
cggaacctgccttgctcgttcccgctgaccacgcggtagcc

SEQ ID NO: 363850 - DNA, 293 bp, Homo sapiens; identical to SEQ ID NO: 200114
  chr5:151150270-151150563
  hypo

SEQ ID NO: 363851 - DNA, 229 bp, Homo sapiens; identical to SEQ ID NO: 346758
  chr5:151150681-151150910
  hypo

SEQ ID NO: 363852 - DNA, 79 bp, Homo sapiens; identical to SEQ ID NO: 338829
  chr5:156485569-156485648
  hypo

SEQ ID NO: 363853 - DNA, 61 bp, Homo sapiens
  chr5:156558383-156558444
  hypo
cgctatgcggagatgtgtattatgtttaccattgttaaggaaattgagttttatggaagtt

SEQ ID NO: 363854 - DNA, 116 bp, Homo sapiens; identical to SEQ ID NO: 338831
  chr5:156811500-156811616
  hypo

SEQ ID NO: 363855 - DNA, 225 bp, Homo sapiens; identical to SEQ ID NO: 338832
  chr5:156895577-156895802
  hypo

SEQ ID NO: 363856 - DNA, 290 bp, Homo sapiens; identical to SEQ ID NO: 346761
  chr5:157002817-157003107
  hypo

SEQ ID NO: 363857 - DNA, 135 bp, Homo sapiens; identical to SEQ ID NO: 338834
  chr5:158139227-158139362
  hypo

SEQ ID NO: 363858 - DNA, 1199 bp, Homo sapiens; identical to SEQ ID NO: 350208
  chr5:158634816-158636015
  hypo

SEQ ID NO: 363859 - DNA, 172 bp, Homo sapiens; identical to SEQ ID NO: 350209
  chr5:159343215-159343387
  hypo

SEQ ID NO: 363860 - DNA, 152 bp, Homo sapiens; identical to SEQ ID NO: 350210
  chr5:159343648-159343800
  hypo

SEQ ID NO: 363861 - DNA, 168 bp, Homo sapiens; identical to SEQ ID NO: 338839
  chr5:159489238-159489406
  hypo

SEQ ID NO: 363862 - DNA, 58 bp, Homo sapiens; identical to SEQ ID NO: 338840
  chr5:159659095-159659153
  hypo

SEQ ID NO: 363863 - DNA, 398 bp, Homo sapiens; identical to SEQ ID NO: 338842
  chr5:159707402-159707800
  hypo

SEQ ID NO: 363864 - DNA, 162 bp, Homo sapiens; identical to SEQ ID NO: 353677
  chr5:159776164-159776326
  hypo

SEQ ID NO: 363865 - DNA, 147 bp, Homo sapiens; identical to SEQ ID NO: 353678
  chr5:159776588-159776735
  hypo

SEQ ID NO: 363866 - DNA, 72 bp, Homo sapiens; identical to SEQ ID NO: 283509
  chr5:160974540-160974612
  hypo

SEQ ID NO: 363867 - DNA, 210 bp, Homo sapiens; identical to SEQ ID NO: 283510
  chr5:160974861-160975071
  hypo

SEQ ID NO: 363868 - DNA, 196 bp, Homo sapiens; identical to SEQ ID NO: 338845
  chr5:168112681-168112877
  hypo

SEQ ID NO: 363869 - DNA, 214 bp, Homo sapiens; identical to SEQ ID NO: 338846
  chr5:168189525-168189739
  hypo

SEQ ID NO: 363870 - DNA, 129 bp, Homo sapiens; identical to SEQ ID NO: 348113
  chr5:168195266-168195395
  hypo

SEQ ID NO: 363871 - DNA, 144 bp, Homo sapiens; identical to SEQ ID NO: 338848
  chr5:168284824-168284968
  hypo

SEQ ID NO: 363872 - DNA, 226 bp, Homo sapiens; identical to SEQ ID NO: 283530
  chr5:169930945-169931171
  hypo

SEQ ID NO: 363873 - DNA, 243 bp, Homo sapiens; identical to SEQ ID NO: 283532
  chr5:170171140-170171383
  hypo

SEQ ID NO: 363874 - DNA, 388 bp, Homo sapiens; identical to SEQ ID NO: 350214
  chr5:170171413-170171801
  hypo

SEQ ID NO: 363875 - DNA, 266 bp, Homo sapiens
  chr5:171523258-171523524
  hypo
cggcccacatgccatcttacgttacctgcagcgtgggagtctgcaacctctgagctggcaataaattgcctgagccagagtcctggccttccctgcccctcccacaccagcagggccagctgagatcctgtcctcccagcccccgctaagccccactctccctggccttacggaggcggcatccacggcgtcctcctcttccccctcatcccggccgtcttcgatctcttccatcacctcggccttggcctcagccaccagctccc

SEQ ID NO: 363876 - DNA, 173 bp, Homo sapiens; identical to SEQ ID NO: 348114
  chr5:171533446-171533619
  hypo

SEQ ID NO: 363877 - DNA, 50 bp, Homo sapiens; identical to SEQ ID NO: 353685
  chr5:171724013-171724063
  hypo

SEQ ID NO: 363878 - DNA, 465 bp, Homo sapiens; identical to SEQ ID NO: 338857
  chr5:171766390-171766855
  hypo

SEQ ID NO: 363879 - DNA, 306 bp, Homo sapiens; identical to SEQ ID NO: 338859
  chr5:171916875-171917181
  hypo

SEQ ID NO: 363880 - DNA, 108 bp, Homo sapiens; identical to SEQ ID NO: 338860
  chr5:172191069-172191177
  hypo

SEQ ID NO: 363881 - DNA, 258 bp, Homo sapiens; identical to SEQ ID NO: 348116
  chr5:172353785-172354043
  hypo

SEQ ID NO: 363882 - DNA, 84 bp, Homo sapiens; identical to SEQ ID NO: 348117
  chr5:172354118-172354202
  hypo

SEQ ID NO: 363883 - DNA, 291 bp, Homo sapiens; identical to SEQ ID NO: 338862
  chr5:172461494-172461785
  hypo

SEQ ID NO: 363884 - DNA, 142 bp, Homo sapiens; identical to SEQ ID NO: 358314
  chr5:172665306-172665448
  hypo

SEQ ID NO: 363885 - DNA, 297 bp, Homo sapiens; identical to SEQ ID NO: 358315
  chr5:172665949-172666246
  hypo

SEQ ID NO: 363886 - DNA, 224 bp, Homo sapiens; identical to SEQ ID NO: 338865
  chr5:172724564-172724788
  hypo

SEQ ID NO: 363887 - DNA, 501 bp, Homo sapiens; identical to SEQ ID NO: 338866
  chr5:172744598-172745099
  hypo

SEQ ID NO: 363888 - DNA, 78 bp, Homo sapiens; identical to SEQ ID NO: 358328
  chr5:174220739-174220817
  hypo

SEQ ID NO: 363889 - DNA, 93 bp, Homo sapiens; identical to SEQ ID NO: 338870
  chr5:175578331-175578424
  hypo

SEQ ID NO: 363890 - DNA, 211 bp, Homo sapiens; identical to SEQ ID NO: 338871
  chr5:175777496-175777707
  hypo

SEQ ID NO: 363891 - DNA, 90 bp, Homo sapiens
  chr5:175831167-175831257
  hypo
cgccacatagtagctaatagggcccaaagtcacttctgtgacgcatagtttgtgtgcctgcttgtcttcctctcaagacaagactagaga

SEQ ID NO: 363892 - DNA, 460 bp, Homo sapiens
  chr5:175831326-175831786
  hypo
caccctcagctcgcctaggggctgggtcaggagtttgtgagaagcgtccggggctgcagagcacttttttccacagccctttggggcagcggagcggagcctctaattcgcattttacaaatgagaagccaggctcagagtagttaagtgactagcccacagccagccagctgggaaaaagcagaaagtgaagtccaggtcttctgactccatctaaacctccgctgcagcctgcagtctgggtgtgggaacagccttaaggaaactcagcccccacggtgtcctgccccagtcccaaggtgccaagcctggccaaactgggcccacatctccgccacctgccaccagctgcaaggcccactgatgcactctagtgggggctatgcagggctcacccgaaacctttggcctctcctggcacgtccctttgtgcagcaggtcccgggctccggtgaacccc

SEQ ID NO: 363893 - DNA, 209 bp, Homo sapiens; identical to SEQ ID NO: 200186
  chr5:176057164-176057373
  hypo

SEQ ID NO: 363894 - DNA, 113 bp, Homo sapiens; identical to SEQ ID NO: 353693
  chr5:176225713-176225826
  hypo

SEQ ID NO: 363895 - DNA, 194 bp, Homo sapiens; identical to SEQ ID NO: 345870
  chr5:176558657-176558851
  hypo

SEQ ID NO: 363896 - DNA, 144 bp, Homo sapiens; identical to SEQ ID NO: 345871
  chr5:176558908-176559052
  hypo

SEQ ID NO: 363897 - DNA, 248 bp, Homo sapiens; identical to SEQ ID NO: 283604
  chr5:176560001-176560249
  hypo

SEQ ID NO: 363898 - DNA, 290 bp, Homo sapiens; identical to SEQ ID NO: 345203
  chr5:176560318-176560608
  hypo

SEQ ID NO: 363899 - DNA, 59 bp, Homo sapiens; identical to SEQ ID NO: 338880
  chr5:176596473-176596532
  hypo

SEQ ID NO: 363900 - DNA, 50 bp, Homo sapiens; identical to SEQ ID NO: 338881
  chr5:176663899-176663949
  hypo

SEQ ID NO: 363901 - DNA, 192 bp, Homo sapiens; identical to SEQ ID NO: 345874
  chr5:176764238-176764430
  hypo

SEQ ID NO: 363902 - DNA, 76 bp, Homo sapiens; identical to SEQ ID NO: 210489
  chr5:176795049-176795125
  hypo

SEQ ID NO: 363903 - DNA, 238 bp, Homo sapiens; identical to SEQ ID NO: 348125
  chr5:176795288-176795526
  hypo

SEQ ID NO: 363904 - DNA, 130 bp, Homo sapiens; identical to SEQ ID NO: 338885
  chr5:176901651-176901781
  hypo

SEQ ID NO: 363905 - DNA, 121 bp, Homo sapiens
  chr5:176911172-176911293
  hypo
tcagggcgtgcatgatctcctggaaggaggtcccagtcactcggcaggctcaggcccctcctgccctgccctgggtcacgggaacacaggagggctggccgcaagccctgttccttctcgc

SEQ ID NO: 363906 - DNA, 842 bp, Homo sapiens; identical to SEQ ID NO: 353703
  chr5:176918897-176919739
  hypo

SEQ ID NO: 363907 - DNA, 59 bp, Homo sapiens; identical to SEQ ID NO: 338888
  chr5:176922905-176922964
  hypo

SEQ ID NO: 363908 - DNA, 158 bp, Homo sapiens; identical to SEQ ID NO: 338890
  chr5:177310267-177310425
  hypo

SEQ ID NO: 363909 - DNA, 294 bp, Homo sapiens; identical to SEQ ID NO: 353705
  chr5:177650761-177651055
  hypo

SEQ ID NO: 363910 - DNA, 165 bp, Homo sapiens; identical to SEQ ID NO: 338893
  chr5:177654009-177654174
  hypo

SEQ ID NO: 363911 - DNA, 90 bp, Homo sapiens; identical to SEQ ID NO: 305156
  chr5:177680784-177680874
  hypo

SEQ ID NO: 363912 - DNA, 87 bp, Homo sapiens
  chr5:177882646-177882733
  hypo
cgccatcgcttctgtgtgtttcctctctgccacgcggacggaccgcacctcaaggccgagagctggcacctatcccctgcccaccca

SEQ ID NO: 363913 - DNA, 57 bp, Homo sapiens
  chr5:177882763-177882820
  hypo
ggaggaccagccctctacagtggccctatgtctgacactggctccctcagctcgccc

SEQ ID NO: 363914 - DNA, 421 bp, Homo sapiens; identical to SEQ ID NO: 338897
  chr5:177892711-177893132
  hypo

SEQ ID NO: 363915 - DNA, 143 bp, Homo sapiens; identical to SEQ ID NO: 338899
  chr5:178259527-178259670
  hypo

SEQ ID NO: 363916 - DNA, 93 bp, Homo sapiens; identical to SEQ ID NO: 353706
  chr5:178411761-178411854
  hypo

SEQ ID NO: 363917 - DNA, 112 bp, Homo sapiens; identical to SEQ ID NO: 353707
  chr5:178580401-178580513
  hypo

SEQ ID NO: 363918 - DNA, 118 bp, Homo sapiens; identical to SEQ ID NO: 353708
  chr5:178580543-178580661
  hypo

SEQ ID NO: 363919 - DNA, 184 bp, Homo sapiens; identical to SEQ ID NO: 358338
  chr5:178594471-178594655
  hypo

SEQ ID NO: 363920 - DNA, 128 bp, Homo sapiens; identical to SEQ ID NO: 338904
  chr5:178651199-178651327
  hypo

SEQ ID NO: 363921 - DNA, 288 bp, Homo sapiens; identical to SEQ ID NO: 350229
  chr5:178770455-178770743
  hypo

SEQ ID NO: 363922 - DNA, 121 bp, Homo sapiens; identical to SEQ ID NO: 338907
  chr5:179023553-179023674
  hypo

SEQ ID NO: 363923 - DNA, 727 bp, Homo sapiens; identical to SEQ ID NO: 332613
  chr5:179245848-179246575
  hypo

SEQ ID NO: 363924 - DNA, 422 bp, Homo sapiens; identical to SEQ ID NO: 353712
  chr5:179401775-179402197
  hypo

SEQ ID NO: 363925 - DNA, 205 bp, Homo sapiens; identical to SEQ ID NO: 305254
  chr5:179448886-179449091
  hypo

SEQ ID NO: 363926 - DNA, 243 bp, Homo sapiens; identical to SEQ ID NO: 350231
  chr5:179498011-179498254
  hypo

SEQ ID NO: 363927 - DNA, 504 bp, Homo sapiens; identical to SEQ ID NO: 200203
  chr5:179498363-179498867
  hypo

SEQ ID NO: 363928 - DNA, 137 bp, Homo sapiens
  chr5:179546922-179547059
  hypo
cgctcgggacttcagacccctgtgatgcgcagaaccacaccatgtccttccccagccatcctgggctgcagctggctccctggggggctcaggccaggcttcgcccaggctcggccctctcgcctgcagccagcggc

SEQ ID NO: 363929 - DNA, 149 bp, Homo sapiens
  chr5:179564196-179564345
  hypo
cggtagagccctaccgacgcgtgtgcaatagaggcagcccgcaggacccggccaggactgggaaggtggagcggatgtgctgggggaaggaagcccaccagaggcagcaggccctcccggccacagatgggtcctactgaccgggctcc

SEQ ID NO: 363930 - DNA, 108 bp, Homo sapiens; identical to SEQ ID NO: 338914
  chr5:179708846-179708954
  hypo

SEQ ID NO: 363931 - DNA, 165 bp, Homo sapiens; identical to SEQ ID NO: 338915
  chr5:179743768-179743933
  hypo

SEQ ID NO: 363932 - DNA, 127 bp, Homo sapiens; identical to SEQ ID NO: 350235
  chr5:180018679-180018806
  hypo

SEQ ID NO: 363933 - DNA, 280 bp, Homo sapiens; identical to SEQ ID NO: 338918
  chr5:180036597-180036877
  hypo

SEQ ID NO: 363934 - DNA, 365 bp, Homo sapiens; identical to SEQ ID NO: 358348
  chr5:180046947-180047312
  hypo

SEQ ID NO: 363935 - DNA, 366 bp, Homo sapiens
  chr5:180055788-180056154
  hypo
cggggaggacgctgcccgtcttcccctatggtctgttttgcccctggacttggaagggtatcggcggggtcggtggggagccagggctgttaccactggaactcgggcggggggtacgctgccagcttcacgggcagcttcaccagctcgtctcctgccgtggcctccaggatgggtcctttgagccactcgacgctgatgaagggattttctgccggacaggagaagtcactgtaaatccaggactgacccgtcgtggactgaccagggactccccccacggcccctgcagccccggcagccggacatccgcagactggggctggccatgccgcccggtgcaggagctgggcagctcctctgctc

SEQ ID NO: 363936 - DNA, 596 bp, Homo sapiens; identical to SEQ ID NO: 338922
  chr5:180218508-180219104
  hypo

SEQ ID NO: 363937 - DNA, 418 bp, Homo sapiens; identical to SEQ ID NO: 353718
  chr5:180326156-180326574
  hypo

SEQ ID NO: 363938 - DNA, 594 bp, Homo sapiens; identical to SEQ ID NO: 350238
  chr5:180479644-180480238
  hypo

SEQ ID NO: 363939 - DNA, 829 bp, Homo sapiens; identical to SEQ ID NO: 346765
  chr5:180480302-180481131
  hypo

SEQ ID NO: 363940 - DNA, 55 bp, Homo sapiens; identical to SEQ ID NO: 346767
  chr6:393764-393819
  hypo

SEQ ID NO: 363941 - DNA, 120 bp, Homo sapiens; identical to SEQ ID NO: 338926
  chr6:550612-550732
  hypo

SEQ ID NO: 363942 - DNA, 393 bp, Homo sapiens; identical to SEQ ID NO: 346768
  chr6:710660-711053
  hypo

SEQ ID NO: 363943 - DNA, 543 bp, Homo sapiens; identical to SEQ ID NO: 338928
  chr6:1080648-1081191
  hypo

SEQ ID NO: 363944 - DNA, 175 bp, Homo sapiens
  chr6:1708438-1708613
  hypo
cgtgaaacaaaatgcggcatctgggtatatctcaaaggtagggaaggaaacaactcgaaggctgtaactttcccgacacttgagacgtcactcctttgcaaggcagcattcccagcaggcagcgaagcgtgtttggagaagctggagggcagatgaggagtggagggaaggcggg

SEQ ID NO: 363945 - DNA, 96 bp, Homo sapiens
  chr6:1708643-1708739
  hypo
aggcgttgtcaatacagcaacagcaacgaggacaaacatgccacacggtgggtccaagtctgaactgcccggggctaagtcagtcaccgcacaatc

SEQ ID NO: 363946 - DNA, 96 bp, Homo sapiens
  chr6:1726588-1726684
  hypo
cgcatttgcccagccagccagccaaatgtggccacgcactgggtggccagagagtccttaccacttcagttggccggtagtacttgagatccacag

SEQ ID NO: 363947 - DNA, 48 bp, Homo sapiens
  chr6:1726859-1726907
  hypo
accacagcagcacaggctgatgctccagctgattattaaagcaacggc

SEQ ID NO: 363948 - DNA, 155 bp, Homo sapiens; identical to SEQ ID NO: 338934
  chr6:2108917-2109072
  hypo

SEQ ID NO: 363949 - DNA, 197 bp, Homo sapiens; identical to SEQ ID NO: 353723
  chr6:2920938-2921135
  hypo

SEQ ID NO: 363950 - DNA, 138 bp, Homo sapiens; identical to SEQ ID NO: 338938
  chr6:3263649-3263787
  hypo

SEQ ID NO: 363951 - DNA, 266 bp, Homo sapiens; identical to SEQ ID NO: 345875
  chr6:3285535-3285801
  hypo

SEQ ID NO: 363952 - DNA, 182 bp, Homo sapiens; identical to SEQ ID NO: 353725
  chr6:3333155-3333337
  hypo

SEQ ID NO: 363953 - DNA, 684 bp, Homo sapiens; identical to SEQ ID NO: 332639
  chr6:3457545-3458229
  hypo

SEQ ID NO: 363954 - DNA, 504 bp, Homo sapiens; identical to SEQ ID NO: 353727
  chr6:3618094-3618598
  hypo

SEQ ID NO: 363955 - DNA, 349 bp, Homo sapiens; identical to SEQ ID NO: 338946
  chr6:3646980-3647329
  hypo

SEQ ID NO: 363956 - DNA, 114 bp, Homo sapiens; identical to SEQ ID NO: 338947
  chr6:3654816-3654930
  hypo

SEQ ID NO: 363957 - DNA, 307 bp, Homo sapiens; identical to SEQ ID NO: 338948
  chr6:3724319-3724626
  hypo

SEQ ID NO: 363958 - DNA, 416 bp, Homo sapiens; identical to SEQ ID NO: 338949
  chr6:3725763-3726179
  hypo

SEQ ID NO: 363959 - DNA, 699 bp, Homo sapiens; identical to SEQ ID NO: 332640
  chr6:3750702-3751401
  hypo

SEQ ID NO: 363960 - DNA, 126 bp, Homo sapiens; identical to SEQ ID NO: 338953
  chr6:4061573-4061699
  hypo

SEQ ID NO: 363961 - DNA, 406 bp, Homo sapiens; identical to SEQ ID NO: 338954
  chr6:4559591-4559997
  hypo

SEQ ID NO: 363962 - DNA, 95 bp, Homo sapiens; identical to SEQ ID NO: 200248
  chr6:4775543-4775638
  hypo

SEQ ID NO: 363963 - DNA, 358 bp, Homo sapiens; identical to SEQ ID NO: 200249
  chr6:4775639-4775997
  hypo

SEQ ID NO: 363964 - DNA, 76 bp, Homo sapiens; identical to SEQ ID NO: 358382
  chr6:4776187-4776263
  hypo

SEQ ID NO: 363965 - DNA, 96 bp, Homo sapiens
  chr6:4874031-4874127
  hypo
cgagagcctggtttgaaaccgccaagtaggaacatcgcacaggggacaccttcacatgcgccgcagctgtgcagatttcacctcctgccactgctt

SEQ ID NO: 363966 - DNA, 37 bp, Homo sapiens; identical to SEQ ID NO: 345876
  chr6:4910947-4910984
  hypo

SEQ ID NO: 363967 - DNA, 465 bp, Homo sapiens; identical to SEQ ID NO: 332643
  chr6:4948996-4949461
  hypo

SEQ ID NO: 363968 - DNA, 123 bp, Homo sapiens; identical to SEQ ID NO: 338962
  chr6:5108225-5108348
  hypo

SEQ ID NO: 363969 - DNA, 80 bp, Homo sapiens; identical to SEQ ID NO: 350268
  chr6:6009552-6009632
  hypo

SEQ ID NO: 363970 - DNA, 119 bp, Homo sapiens; identical to SEQ ID NO: 350269
  chr6:6546401-6546520
  hypo

SEQ ID NO: 363971 - DNA, 90 bp, Homo sapiens; identical to SEQ ID NO: 350270
  chr6:6547222-6547312
  hypo

SEQ ID NO: 363972 - DNA, 108 bp, Homo sapiens; identical to SEQ ID NO: 338967
  chr6:6984882-6984990
  hypo

SEQ ID NO: 363973 - DNA, 133 bp, Homo sapiens
  chr6:7204388-7204521
  hypo
tcctccacaccctgggagagctggtgtgacctgccttccggacaagcatgactgaacccatacaacacctgaattactagaaggtgcctctgtactttacaggtggggccacaccaggaattgctcagttgcc

SEQ ID NO: 363974 - DNA, 184 bp, Homo sapiens; identical to SEQ ID NO: 353738
  chr6:7237796-7237980
  hypo

SEQ ID NO: 363975 - DNA, 194 bp, Homo sapiens; identical to SEQ ID NO: 338970
  chr6:7247353-7247547
  hypo

SEQ ID NO: 363976 - DNA, 348 bp, Homo sapiens; identical to SEQ ID NO: 338972
  chr6:7882630-7882978
  hypo

SEQ ID NO: 363977 - DNA, 327 bp, Homo sapiens; identical to SEQ ID NO: 338973
  chr6:7887548-7887875
  hypo

SEQ ID NO: 363978 - DNA, 861 bp, Homo sapiens; identical to SEQ ID NO: 338974
  chr6:7888481-7889342
  hypo

SEQ ID NO: 363979 - DNA, 127 bp, Homo sapiens; identical to SEQ ID NO: 338976
  chr6:7891513-7891640
  hypo

SEQ ID NO: 363980 - DNA, 242 bp, Homo sapiens; identical to SEQ ID NO: 338978
  chr6:7893721-7893963
  hypo

SEQ ID NO: 363981 - DNA, 181 bp, Homo sapiens; identical to SEQ ID NO: 338979
  chr6:7898587-7898768
  hypo

SEQ ID NO: 363982 - DNA, 123 bp, Homo sapiens; identical to SEQ ID NO: 353743
  chr6:7920003-7920126
  hypo

SEQ ID NO: 363983 - DNA, 451 bp, Homo sapiens; identical to SEQ ID NO: 338981
  chr6:10319622-10320073
  hypo

SEQ ID NO: 363984 - DNA, 77 bp, Homo sapiens; identical to SEQ ID NO: 346777
  chr6:11043624-11043701
  hypo

SEQ ID NO: 363985 - DNA, 249 bp, Homo sapiens; identical to SEQ ID NO: 338985
  chr6:12338243-12338492
  hypo

SEQ ID NO: 363986 - DNA, 230 bp, Homo sapiens; identical to SEQ ID NO: 338986
  chr6:13318572-13318802
  hypo

SEQ ID NO: 363987 - DNA, 144 bp, Homo sapiens; identical to SEQ ID NO: 338987
  chr6:13386531-13386675
  hypo

SEQ ID NO: 363988 - DNA, 394 bp, Homo sapiens; identical to SEQ ID NO: 345879
  chr6:15513386-15513780
  hypo

SEQ ID NO: 363989 - DNA, 48 bp, Homo sapiens; identical to SEQ ID NO: 345880
  chr6:15513981-15514029
  hypo

SEQ ID NO: 363990 - DNA, 120 bp, Homo sapiens; identical to SEQ ID NO: 338991
  chr6:16322061-16322181
  hypo

SEQ ID NO: 363991 - DNA, 564 bp, Homo sapiens; identical to SEQ ID NO: 200295
  chr6:17281534-17282098
  hypo

SEQ ID NO: 363992 - DNA, 1440 bp, Homo sapiens; identical to SEQ ID NO: 332674
  chr6:18263786-18265226
  hypo

SEQ ID NO: 363993 - DNA, 235 bp, Homo sapiens; identical to SEQ ID NO: 338995
  chr6:18368676-18368911
  hypo

SEQ ID NO: 363994 - DNA, 187 bp, Homo sapiens; identical to SEQ ID NO: 338998
  chr6:20686909-20687096
  hypo

SEQ ID NO: 363995 - DNA, 162 bp, Homo sapiens; identical to SEQ ID NO: 338999
  chr6:21202340-21202502
  hypo

SEQ ID NO: 363996 - DNA, 94 bp, Homo sapiens; identical to SEQ ID NO: 339001
  chr6:24662806-24662900
  hypo

SEQ ID NO: 363997 - DNA, 412 bp, Homo sapiens; identical to SEQ ID NO: 353755
  chr6:25726863-25727275
  hypo

SEQ ID NO: 363998 - DNA, 255 bp, Homo sapiens; identical to SEQ ID NO: 353756
  chr6:25727391-25727646
  hypo

SEQ ID NO: 363999 - DNA, 200 bp, Homo sapiens; identical to SEQ ID NO: 339003
  chr6:26025541-26025741
  hypo

SEQ ID NO: 364000 - DNA, 213 bp, Homo sapiens; identical to SEQ ID NO: 200330
  chr6:26198924-26199137
  hypo

SEQ ID NO: 364001 - DNA, 125 bp, Homo sapiens; identical to SEQ ID NO: 283866
  chr6:26241269-26241394
  hypo

SEQ ID NO: 364002 - DNA, 104 bp, Homo sapiens; identical to SEQ ID NO: 339007
  chr6:27428748-27428852
  hypo

SEQ ID NO: 364003 - DNA, 133 bp, Homo sapiens; identical to SEQ ID NO: 358478
  chr6:27805774-27805907
  hypo

SEQ ID NO: 364004 - DNA, 535 bp, Homo sapiens; identical to SEQ ID NO: 358479
  chr6:27805936-27806471
  hypo

SEQ ID NO: 364005 - DNA, 149 bp, Homo sapiens; identical to SEQ ID NO: 339011
  chr6:33914107-33914256
  hypo

SEQ ID NO: 364006 - DNA, 96 bp, Homo sapiens; identical to SEQ ID NO: 353761
  chr6:33995852-33995948
  hypo

SEQ ID NO: 364007 - DNA, 54 bp, Homo sapiens; identical to SEQ ID NO: 339015
  chr6:34219827-34219881
  hypo

SEQ ID NO: 364008 - DNA, 52 bp, Homo sapiens
  chr6:34518788-34518840
  hypo
cgggccctcccagctggggcagccagcattattcccacttgacggacaaggg

SEQ ID NO: 364009 - DNA, 70 bp, Homo sapiens
  chr6:34518870-34518940
  hypo
tgcgtgagtgagcagggactcgaactcaagactcggctccaccctcctttctgctggtgctggcagaccc

SEQ ID NO: 364010 - DNA, 144 bp, Homo sapiens; identical to SEQ ID NO: 353763
  chr6:34520750-34520894
  hypo

SEQ ID NO: 364011 - DNA, 1248 bp, Homo sapiens; identical to SEQ ID NO: 332764
  chr6:35655519-35656767
  hypo

SEQ ID NO: 364012 - DNA, 109 bp, Homo sapiens; identical to SEQ ID NO: 339022
  chr6:36165692-36165801
  hypo

SEQ ID NO: 364013 - DNA, 223 bp, Homo sapiens; identical to SEQ ID NO: 339024
  chr6:36198250-36198473
  hypo

SEQ ID NO: 364014 - DNA, 49 bp, Homo sapiens
  chr6:36214794-36214843
  hypo
tcctcctgccccctgcctggtggtttcaccatccacttaccagcccgcc

SEQ ID NO: 364015 - DNA, 107 bp, Homo sapiens; identical to SEQ ID NO: 353767
  chr6:36238212-36238319
  hypo

SEQ ID NO: 364016 - DNA, 97 bp, Homo sapiens; identical to SEQ ID NO: 339027
  chr6:36939067-36939164
  hypo

SEQ ID NO: 364017 - DNA, 313 bp, Homo sapiens; identical to SEQ ID NO: 348142
  chr6:37023826-37024139
  hypo

SEQ ID NO: 364018 - DNA, 90 bp, Homo sapiens; identical to SEQ ID NO: 353769
  chr6:37275483-37275573
  hypo

SEQ ID NO: 364019 - DNA, 60 bp, Homo sapiens; identical to SEQ ID NO: 353770
  chr6:37358463-37358523
  hypo

SEQ ID NO: 364020 - DNA, 321 bp, Homo sapiens; identical to SEQ ID NO: 353771
  chr6:37358553-37358874
  hypo

SEQ ID NO: 364021 - DNA, 70 bp, Homo sapiens; identical to SEQ ID NO: 339031
  chr6:37450290-37450360
  hypo

SEQ ID NO: 364022 - DNA, 158 bp, Homo sapiens; identical to SEQ ID NO: 339032
  chr6:37450665-37450823
  hypo

SEQ ID NO: 364023 - DNA, 462 bp, Homo sapiens; identical to SEQ ID NO: 358502
  chr6:37665241-37665703
  hypo

SEQ ID NO: 364024 - DNA, 369 bp, Homo sapiens; identical to SEQ ID NO: 345232
  chr6:37666475-37666844
  hypo

SEQ ID NO: 364025 - DNA, 218 bp, Homo sapiens; identical to SEQ ID NO: 345233
  chr6:37666866-37667084
  hypo

SEQ ID NO: 364026 - DNA, 49 bp, Homo sapiens; identical to SEQ ID NO: 339035
  chr6:38020529-38020578
  hypo

SEQ ID NO: 364027 - DNA, 132 bp, Homo sapiens; identical to SEQ ID NO: 339036
  chr6:38084382-38084514
  hypo

SEQ ID NO: 364028 - DNA, 219 bp, Homo sapiens; identical to SEQ ID NO: 339037
  chr6:38118812-38119031
  hypo

SEQ ID NO: 364029 - DNA, 802 bp, Homo sapiens; identical to SEQ ID NO: 339039
  chr6:39158588-39159390
  hypo

SEQ ID NO: 364030 - DNA, 261 bp, Homo sapiens; identical to SEQ ID NO: 339041
  chr6:39895099-39895360
  hypo

SEQ ID NO: 364031 - DNA, 291 bp, Homo sapiens
  chr6:40360252-40360543
  hypo
ggcgggccctgcggcggggccccggctggtgcgctgcttggaggcggtggctgggcgccgttggtctgcgagtacacattgctcacggccgctgccatcttgctgggggcctcgtggttgcagaccttgtagcgcaccatgaggatgacgatgaagaccagcagcgtggccacgatgatgcccccgatgaccaggatcatggtgccgcccagaatctggctgtgcatggactggcactgcgggtagtcagccttggtgaagaactgggcgcagcccacgatgttggtggcc

SEQ ID NO: 364032 - DNA, 707 bp, Homo sapiens; identical to SEQ ID NO: 353774
  chr6:40399988-40400695
  hypo

SEQ ID NO: 364033 - DNA, 156 bp, Homo sapiens; identical to SEQ ID NO: 358507
  chr6:40554364-40554520
  hypo

SEQ ID NO: 364034 - DNA, 315 bp, Homo sapiens; identical to SEQ ID NO: 284013
  chr6:40554860-40555175
  hypo

SEQ ID NO: 364035 - DNA, 151 bp, Homo sapiens; identical to SEQ ID NO: 200432
  chr6:41339070-41339221
  hypo

SEQ ID NO: 364036 - DNA, 360 bp, Homo sapiens; identical to SEQ ID NO: 358510
  chr6:41340027-41340387
  hypo

SEQ ID NO: 364037 - DNA, 312 bp, Homo sapiens; identical to SEQ ID NO: 339048
  chr6:41620850-41621162
  hypo

SEQ ID NO: 364038 - DNA, 249 bp, Homo sapiens; identical to SEQ ID NO: 339049
  chr6:41715240-41715489
  hypo

SEQ ID NO: 364039 - DNA, 556 bp, Homo sapiens; identical to SEQ ID NO: 210797
  chr6:41773903-41774459
  hypo

SEQ ID NO: 364040 - DNA, 171 bp, Homo sapiens; identical to SEQ ID NO: 339051
  chr6:41827211-41827382
  hypo

SEQ ID NO: 364041 - DNA, 96 bp, Homo sapiens
  chr6:42762779-42762875
  hypo
cgcatgaacgacagtcaaggtaactgaaaagatctacatctattgttagaaagttgtctaacttgttttccaaaactttctgctattagatttaaa

SEQ ID NO: 364042 - DNA, 236 bp, Homo sapiens; identical to SEQ ID NO: 339054
  chr6:43096747-43096983
  hypo

SEQ ID NO: 364043 - DNA, 57 bp, Homo sapiens
  chr6:43478745-43478802
  hypo
caatacaaagaaggtgccagggccagggccctggagcactggtgaggacgtgaaggc

SEQ ID NO: 364044 - DNA, 278 bp, Homo sapiens; identical to SEQ ID NO: 339058
  chr6:43745076-43745354
  hypo

SEQ ID NO: 364045 - DNA, 173 bp, Homo sapiens; identical to SEQ ID NO: 345885
  chr6:43748290-43748463
  hypo

SEQ ID NO: 364046 - DNA, 126 bp, Homo sapiens; identical to SEQ ID NO: 339060
  chr6:43752469-43752595
  hypo

SEQ ID NO: 364047 - DNA, 85 bp, Homo sapiens; identical to SEQ ID NO: 339061
  chr6:43814642-43814727
  hypo

SEQ ID NO: 364048 - DNA, 176 bp, Homo sapiens; identical to SEQ ID NO: 346816
  chr6:44044201-44044377
  hypo

SEQ ID NO: 364049 - DNA, 97 bp, Homo sapiens; identical to SEQ ID NO: 346817
  chr6:44044450-44044547
  hypo

SEQ ID NO: 364050 - DNA, 116 bp, Homo sapiens; identical to SEQ ID NO: 339063
  chr6:44077041-44077157
  hypo

SEQ ID NO: 364051 - DNA, 57 bp, Homo sapiens; identical to SEQ ID NO: 358531
  chr6:45390807-45390864
  hypo

SEQ ID NO: 364052 - DNA, 38 bp, Homo sapiens; identical to SEQ ID NO: 350372
  chr6:45631098-45631136
  hypo

SEQ ID NO: 364053 - DNA, 372 bp, Homo sapiens; identical to SEQ ID NO: 345236
  chr6:46097250-46097622
  hypo

SEQ ID NO: 364054 - DNA, 521 bp, Homo sapiens; identical to SEQ ID NO: 345237
  chr6:46097694-46098215
  hypo

SEQ ID NO: 364055 - DNA, 357 bp, Homo sapiens; identical to SEQ ID NO: 353786
  chr6:47202003-47202360
  hypo

SEQ ID NO: 364056 - DNA, 155 bp, Homo sapiens; identical to SEQ ID NO: 353787
  chr6:47202453-47202608
  hypo

SEQ ID NO: 364057 - DNA, 198 bp, Homo sapiens; identical to SEQ ID NO: 339069
  chr6:52141070-52141268
  hypo

SEQ ID NO: 364058 - DNA, 636 bp, Homo sapiens; identical to SEQ ID NO: 346822
  chr6:52227115-52227751
  hypo

SEQ ID NO: 364059 - DNA, 72 bp, Homo sapiens; identical to SEQ ID NO: 348152
  chr6:52344303-52344375
  hypo

SEQ ID NO: 364060 - DNA, 159 bp, Homo sapiens; identical to SEQ ID NO: 348153
  chr6:52344405-52344564
  hypo

SEQ ID NO: 364061 - DNA, 110 bp, Homo sapiens; identical to SEQ ID NO: 339072
  chr6:52409363-52409473
  hypo

SEQ ID NO: 364062 - DNA, 115 bp, Homo sapiens; identical to SEQ ID NO: 339073
  chr6:53139871-53139986
  hypo

SEQ ID NO: 364063 - DNA, 126 bp, Homo sapiens; identical to SEQ ID NO: 339076
  chr6:56894243-56894369
  hypo

SEQ ID NO: 364064 - DNA, 294 bp, Homo sapiens; identical to SEQ ID NO: 200490
  chr6:69344649-69344943
  hypo

SEQ ID NO: 364065 - DNA, 570 bp, Homo sapiens; identical to SEQ ID NO: 350396
  chr6:71123134-71123704
  hypo

SEQ ID NO: 364066 - DNA, 289 bp, Homo sapiens; identical to SEQ ID NO: 350397
  chr6:71123746-71124035
  hypo

SEQ ID NO: 364067 - DNA, 222 bp, Homo sapiens; identical to SEQ ID NO: 200499
  chr6:71665723-71665945
  hypo

SEQ ID NO: 364068 - DNA, 71 bp, Homo sapiens; identical to SEQ ID NO: 353797
  chr6:71955569-71955640
  hypo

SEQ ID NO: 364069 - DNA, 155 bp, Homo sapiens; identical to SEQ ID NO: 350399
  chr6:72129577-72129732
  hypo

SEQ ID NO: 364070 - DNA, 40 bp, Homo sapiens; identical to SEQ ID NO: 346834
  chr6:74019373-74019413
  hypo

SEQ ID NO: 364071 - DNA, 102 bp, Homo sapiens; identical to SEQ ID NO: 346835
  chr6:74020094-74020196
  hypo

SEQ ID NO: 364072 - DNA, 192 bp, Homo sapiens; identical to SEQ ID NO: 339088
  chr6:74079530-74079722
  hypo

SEQ ID NO: 364073 - DNA, 178 bp, Homo sapiens; identical to SEQ ID NO: 200507
  chr6:74161321-74161499
  hypo

SEQ ID NO: 364074 - DNA, 290 bp, Homo sapiens; identical to SEQ ID NO: 284165
  chr6:74405623-74405913
  hypo

SEQ ID NO: 364075 - DNA, 174 bp, Homo sapiens; identical to SEQ ID NO: 358578
  chr6:74406015-74406189
  hypo

SEQ ID NO: 364076 - DNA, 63 bp, Homo sapiens; identical to SEQ ID NO: 339091
  chr6:75985977-75986040
  hypo

SEQ ID NO: 364077 - DNA, 83 bp, Homo sapiens; identical to SEQ ID NO: 350409
  chr6:80657600-80657683
  hypo

SEQ ID NO: 364078 - DNA, 53 bp, Homo sapiens; identical to SEQ ID NO: 339094
  chr6:86325389-86325442
  hypo

SEQ ID NO: 364079 - DNA, 129 bp, Homo sapiens; identical to SEQ ID NO: 339096
  chr6:89554102-89554231
  hypo

SEQ ID NO: 364080 - DNA, 304 bp, Homo sapiens; identical to SEQ ID NO: 200552
  chr6:90121293-90121597
  hypo

SEQ ID NO: 364081 - DNA, 255 bp, Homo sapiens; identical to SEQ ID NO: 346839
  chr6:90142647-90142902
  hypo

SEQ ID NO: 364082 - DNA, 206 bp, Homo sapiens; identical to SEQ ID NO: 339101
  chr6:90367697-90367903
  hypo

SEQ ID NO: 364083 - DNA, 1051 bp, Homo sapiens; identical to SEQ ID NO: 284249
  chr6:91005702-91006753
  hypo

SEQ ID NO: 364084 - DNA, 134 bp, Homo sapiens; identical to SEQ ID NO: 358617
  chr6:105628083-105628217
  hypo

SEQ ID NO: 364085 - DNA, 35 bp, Homo sapiens
  chr6:105750354-105750389
  hypo
cgggtacggccgctccttccgcggctgctgcttgg

SEQ ID NO: 364086 - DNA, 83 bp, Homo sapiens
  chr6:105750646-105750729
  hypo
gcagcaactctttctccttcccgtgaaggtcccgagacttgatcttagccattgctgcacaggccgcccccgccgcctgctcc

SEQ ID NO: 364087 - DNA, 142 bp, Homo sapiens; identical to SEQ ID NO: 339108
  chr6:106456830-106456972
  hypo

SEQ ID NO: 364088 - DNA, 352 bp, Homo sapiens; identical to SEQ ID NO: 346842
  chr6:106533693-106534045
  hypo

SEQ ID NO: 364089 - DNA, 155 bp, Homo sapiens; identical to SEQ ID NO: 345249
  chr6:106961023-106961178
  hypo

SEQ ID NO: 364090 - DNA, 314 bp, Homo sapiens; identical to SEQ ID NO: 200609
  chr6:107810308-107810622
  hypo

SEQ ID NO: 364091 - DNA, 430 bp, Homo sapiens; identical to SEQ ID NO: 350445
  chr6:107810665-107811095
  hypo

SEQ ID NO: 364092 - DNA, 85 bp, Homo sapiens; identical to SEQ ID NO: 339113
  chr6:109053387-109053472
  hypo

SEQ ID NO: 364093 - DNA, 121 bp, Homo sapiens; identical to SEQ ID NO: 339114
  chr6:109058656-109058777
  hypo

SEQ ID NO: 364094 - DNA, 114 bp, Homo sapiens; identical to SEQ ID NO: 339115
  chr6:109059982-109060096
  hypo

SEQ ID NO: 364095 - DNA, 120 bp, Homo sapiens; identical to SEQ ID NO: 353814
  chr6:109647757-109647877
  hypo

SEQ ID NO: 364096 - DNA, 94 bp, Homo sapiens; identical to SEQ ID NO: 339117
  chr6:110768091-110768185
  hypo

SEQ ID NO: 364097 - DNA, 93 bp, Homo sapiens; identical to SEQ ID NO: 339118
  chr6:110842285-110842378
  hypo

SEQ ID NO: 364098 - DNA, 572 bp, Homo sapiens; identical to SEQ ID NO: 358635
  chr6:111408744-111409316
  hypo

SEQ ID NO: 364099 - DNA, 273 bp, Homo sapiens; identical to SEQ ID NO: 200623
  chr6:111409368-111409641
  hypo

SEQ ID NO: 364100 - DNA, 184 bp, Homo sapiens; identical to SEQ ID NO: 339120
  chr6:111751880-111752064
  hypo

SEQ ID NO: 364101 - DNA, 135 bp, Homo sapiens; identical to SEQ ID NO: 339121
  chr6:111766152-111766287
  hypo

SEQ ID NO: 364102 - DNA, 66 bp, Homo sapiens; identical to SEQ ID NO: 339122
  chr6:112021634-112021700
  hypo

SEQ ID NO: 364103 - DNA, 73 bp, Homo sapiens; identical to SEQ ID NO: 353821
  chr6:119510833-119510906
  hypo

SEQ ID NO: 364104 - DNA, 70 bp, Homo sapiens; identical to SEQ ID NO: 353822
  chr6:119510942-119511012
  hypo

SEQ ID NO: 364105 - DNA, 439 bp, Homo sapiens; identical to SEQ ID NO: 284440
  chr6:127836226-127836665
  hypo

SEQ ID NO: 364106 - DNA, 31 bp, Homo sapiens; identical to SEQ ID NO: 350458
  chr6:127837749-127837780
  hypo

SEQ ID NO: 364107 - DNA, 428 bp, Homo sapiens; identical to SEQ ID NO: 348167
  chr6:128901277-128901705
  hypo

SEQ ID NO: 364108 - DNA, 89 bp, Homo sapiens; identical to SEQ ID NO: 339129
  chr6:130499429-130499518
  hypo

SEQ ID NO: 364109 - DNA, 365 bp, Homo sapiens; identical to SEQ ID NO: 332922
  chr6:131383375-131383740
  hypo

SEQ ID NO: 364110 - DNA, 103 bp, Homo sapiens; identical to SEQ ID NO: 348168
  chr6:131455849-131455952
  hypo

SEQ ID NO: 364111 - DNA, 41 bp, Homo sapiens; identical to SEQ ID NO: 339134
  chr6:136552688-136552729
  hypo

SEQ ID NO: 364112 - DNA, 132 bp, Homo sapiens; identical to SEQ ID NO: 348169
  chr6:136556331-136556463
  hypo

SEQ ID NO: 364113 - DNA, 135 bp, Homo sapiens; identical to SEQ ID NO: 339137
  chr6:136901469-136901604
  hypo

SEQ ID NO: 364114 - DNA, 97 bp, Homo sapiens; identical to SEQ ID NO: 339138
  chr6:136980882-136980979
  hypo

SEQ ID NO: 364115 - DNA, 48 bp, Homo sapiens; identical to SEQ ID NO: 200668
  chr6:137243410-137243458
  hypo

SEQ ID NO: 364116 - DNA, 249 bp, Homo sapiens; identical to SEQ ID NO: 332941
  chr6:138724531-138724780
  hypo

SEQ ID NO: 364117 - DNA, 131 bp, Homo sapiens; identical to SEQ ID NO: 358662
  chr6:142622583-142622714
  hypo

SEQ ID NO: 364118 - DNA, 486 bp, Homo sapiens; identical to SEQ ID NO: 358663
  chr6:142622963-142623449
  hypo

SEQ ID NO: 364119 - DNA, 528 bp, Homo sapiens; identical to SEQ ID NO: 346860
  chr6:146136035-146136563
  hypo

SEQ ID NO: 364120 - DNA, 232 bp, Homo sapiens; identical to SEQ ID NO: 346861
  chr6:146136564-146136796
  hypo

SEQ ID NO: 364121 - DNA, 455 bp, Homo sapiens; identical to SEQ ID NO: 339145
  chr6:149915200-149915655
  hypo

SEQ ID NO: 364122 - DNA, 462 bp, Homo sapiens; identical to SEQ ID NO: 339146
  chr6:150654152-150654614
  hypo

SEQ ID NO: 364123 - DNA, 752 bp, Homo sapiens; identical to SEQ ID NO: 332955
  chr6:150921277-150922029
  hypo

SEQ ID NO: 364124 - DNA, 44 bp, Homo sapiens
  chr6:151346267-151346311
  hypo
cggttaccctcaccgcaccccaggtttgccgtagaaggatgaga

SEQ ID NO: 364125 - DNA, 37 bp, Homo sapiens
  chr6:151346372-151346409
  hypo
ctccatgcccactgagcaggctcgtggacgtcggcac

SEQ ID NO: 364126 - DNA, 69 bp, Homo sapiens; identical to SEQ ID NO: 358678
  chr6:151562596-151562665
  hypo

SEQ ID NO: 364127 - DNA, 256 bp, Homo sapiens; identical to SEQ ID NO: 339150
  chr6:151687263-151687519
  hypo

SEQ ID NO: 364128 - DNA, 96 bp, Homo sapiens; identical to SEQ ID NO: 339151
  chr6:152527379-152527475
  hypo

SEQ ID NO: 364129 - DNA, 101 bp, Homo sapiens; identical to SEQ ID NO: 339154
  chr6:154727653-154727754
  hypo

SEQ ID NO: 364130 - DNA, 146 bp, Homo sapiens; identical to SEQ ID NO: 339155
  chr6:154826922-154827068
  hypo

SEQ ID NO: 364131 - DNA, 296 bp, Homo sapiens; identical to SEQ ID NO: 210964
  chr6:155568912-155569208
  hypo

SEQ ID NO: 364132 - DNA, 140 bp, Homo sapiens; identical to SEQ ID NO: 353840
  chr6:155569349-155569489
  hypo

SEQ ID NO: 364133 - DNA, 63 bp, Homo sapiens; identical to SEQ ID NO: 339159
  chr6:157159632-157159695
  hypo

SEQ ID NO: 364134 - DNA, 210 bp, Homo sapiens; identical to SEQ ID NO: 339161
  chr6:157351875-157352085
  hypo

SEQ ID NO: 364135 - DNA, 55 bp, Homo sapiens; identical to SEQ ID NO: 353843
  chr6:157478478-157478533
  hypo

SEQ ID NO: 364136 - DNA, 253 bp, Homo sapiens
  chr6:157502185-157502438
  hypo
cgaccgatacctcaccttcatggaagagagaggctctcctgtctcaagtctgcctgccgtgggcaagaagcccctggacctgttccgactctacgtctgcgtcaaagagatcgggggtttggcccaggtaagaatgagtgagggagggggtgaaaaaggaagcattgtggataagttcttacagtggctttctttgaatgtgtggactcattttttttctcacaaaggaaaagctaagcctgtgtgaaagtcg

SEQ ID NO: 364137 - DNA, 693 bp, Homo sapiens; identical to SEQ ID NO: 339166
  chr6:158024060-158024753
  hypo

SEQ ID NO: 364138 - DNA, 62 bp, Homo sapiens; identical to SEQ ID NO: 339167
  chr6:158057907-158057969
  hypo

SEQ ID NO: 364139 - DNA, 138 bp, Homo sapiens; identical to SEQ ID NO: 348174
  chr6:158093637-158093775
  hypo

SEQ ID NO: 364140 - DNA, 172 bp, Homo sapiens; identical to SEQ ID NO: 348175
  chr6:158094082-158094254
  hypo

SEQ ID NO: 364141 - DNA, 56 bp, Homo sapiens; identical to SEQ ID NO: 339169
  chr6:158321417-158321473
  hypo

SEQ ID NO: 364142 - DNA, 520 bp, Homo sapiens; identical to SEQ ID NO: 346865
  chr6:158402113-158402633
  hypo

SEQ ID NO: 364143 - DNA, 172 bp, Homo sapiens; identical to SEQ ID NO: 339171
  chr6:158651816-158651988
  hypo

SEQ ID NO: 364144 - DNA, 39 bp, Homo sapiens; identical to SEQ ID NO: 358683
  chr6:158957708-158957747
  hypo

SEQ ID NO: 364145 - DNA, 206 bp, Homo sapiens; identical to SEQ ID NO: 284595
  chr6:158957988-158958194
  hypo

SEQ ID NO: 364146 - DNA, 433 bp, Homo sapiens; identical to SEQ ID NO: 339173
  chr6:159045072-159045505
  hypo

SEQ ID NO: 364147 - DNA, 69 bp, Homo sapiens; identical to SEQ ID NO: 339175
  chr6:159203076-159203145
  hypo

SEQ ID NO: 364148 - DNA, 41 bp, Homo sapiens; identical to SEQ ID NO: 346866
  chr6:159591277-159591318
  hypo

SEQ ID NO: 364149 - DNA, 50 bp, Homo sapiens; identical to SEQ ID NO: 339180
  chr6:160455514-160455564
  hypo

SEQ ID NO: 364150 - DNA, 255 bp, Homo sapiens; identical to SEQ ID NO: 353852
  chr6:160512209-160512464
  hypo

SEQ ID NO: 364151 - DNA, 447 bp, Homo sapiens; identical to SEQ ID NO: 339182
  chr6:160679377-160679824
  hypo

SEQ ID NO: 364152 - DNA, 155 bp, Homo sapiens
  chr6:161585085-161585240
  hypo
aggtgggatgggcgtgctgttgacttgctttcccgccatcagcgctcccgcccttatgctcagagttgtaaagtgatcatggattcggaagcctttgggagcaaaaccctaaacggtgctgagattaaattcccgctccgtgaatgtctcttccc

SEQ ID NO: 364153 - DNA, 238 bp, Homo sapiens; identical to SEQ ID NO: 200741
  chr6:163837231-163837469
  hypo

SEQ ID NO: 364154 - DNA, 228 bp, Homo sapiens; identical to SEQ ID NO: 284635
  chr6:166667296-166667524
  hypo

SEQ ID NO: 364155 - DNA, 263 bp, Homo sapiens
  chr6:167140099-167140362
  hypo
cgtgatcaccttaaatcacataaacatgatcaccttaaacagagaactggatctcgtgtactgatgctgctggcagcattggaaagtgactcttacaacttcagttgcgataccggtttccataagcttctgtgaattcttgtcaaagctttaaaactgaacacggcaacaactctaggtgaggagtgtttggcagatgaaacccctccaccagggaggtgacgggtctcagggagtgtgtctggcgggtggggaggaatccc

SEQ ID NO: 364156 - DNA, 1300 bp, Homo sapiens
  chr6:167314769-167316069
  hypo
cgggtgaacacacagaggggagagctccgtgtgaacacaaagggaggagaacgcctggtgagcacacacggggagagaacaccgcgcggacccacaagggggagaatgcctggtgaacgtacagcgggaggggagaacgctggtgaacgcacagcggggaaaacgccatgtgaacgcacaaaggaaggagaacgccaggtgaactcatacagggggtaggaacgccagaggaaagcacacagtaaagagaaggccgtgggaacgcgcaggggagagaacgccgggagaacacagagggaggaaaatgccaggtgaacgcacaagggggaaaacgcctggtgaacgcacaaaggagaaagccaggtgaacgcacaagcagcagaacgccaagtgaacgcacgaggggagaatgctgcgccaacacacacgggaaacacaaccgcgcgagcacgcagtggggagaacggcacgcgaacgctcagcaagaagaacgtaagttgaacggacagcggggagaacgccgccctaacacacgcgggaaataacgacgcgtgaacacacagcagggagaacgccgcgtgaaagcacaggggggagaacgccgcgtgaatgcacacacgggaaataacgccgtgtgaacacacagcggggagaacgccgcgtgaacgcacacaggggaaataacgccgcgcgaacacacagggggaagaacgtcacagggacgcacagtggggaaacgccatgtgaacgcacaaagaaagaacgccacgtgaactcgcacacgcggggagaacgccggggaaacgcacacagtaaagagaacgcagtttgaacgcacaggggagagaacgccacgtgaacacacagaagggagaatgcagtgcgaacacacagaagggagaacacctggtgaaggcacagaggggagaacgccgagcgaacgcacagggtggagaatgccatgtgaacgcacaaagaaaggagaacccctggtgaacgcacacaggagaaagaatgccgaggaacgcacagagtaaagagaccgccgtgggaacacacaggggagagaacgccacgtgaacacatggggagaacgccgcgggaacacacagaagggcgaccgcctggtggatgcacagaggggagaacgccaggggaacacacacaggggagaacgctgggcgatcacacagggtggagaacgccgggtaaatacacactggggaaaacgctgtgcaatcgcatagagggaagaacgccgggtgaacacacagggtgcgttcttccatcatgcggctgc

SEQ ID NO: 364157 - DNA, 105 bp, Homo sapiens
  chr6:167834910-167835015
  hypo
cgtgcctgcacccgccaccgctccaatccccacgcagcccggtcacccggtgcctccactgccttggctggcgctgggccggggcctccaggtttctgtgtccaa

SEQ ID NO: 364158 - DNA, 722 bp, Homo sapiens; identical to SEQ ID NO: 339200
  chr6:168062973-168063695
  hypo

SEQ ID NO: 364159 - DNA, 233 bp, Homo sapiens; identical to SEQ ID NO: 339201
  chr6:168137821-168138054
  hypo

SEQ ID NO: 364160 - DNA, 35 bp, Homo sapiens
  chr6:168462450-168462485
  hypo
cggctgcggagcccagcatacccagcccagcccca

SEQ ID NO: 364161 - DNA, 186 bp, Homo sapiens
  chr6:168462521-168462707
  hypo
gtgggccgcacgcggaggtggagctggtggctggcgcgcagcaggtgcagcaggtgcctggaccgccaggtgcaccccgtgtagtaaaccagcttctgtgctgcgggcagcccatccagctggatctccagcttctttccctgagcaaacaggagagaagttgccactccacaggtggaaaaccac

SEQ ID NO: 364162 - DNA, 513 bp, Homo sapiens; identical to SEQ ID NO: 339204
  chr6:168529700-168530213
  hypo

SEQ ID NO: 364163 - DNA, 365 bp, Homo sapiens; identical to SEQ ID NO: 339205
  chr6:168672446-168672811
  hypo

SEQ ID NO: 364164 - DNA, 611 bp, Homo sapiens; identical to SEQ ID NO: 339206
  chr6:168709592-168710203
  hypo

SEQ ID NO: 364165 - DNA, 314 bp, Homo sapiens; identical to SEQ ID NO: 339208
  chr6:169641077-169641391
  hypo

SEQ ID NO: 364166 - DNA, 506 bp, Homo sapiens; identical to SEQ ID NO: 345259
  chr6:170124879-170125385
  hypo

SEQ ID NO: 364167 - DNA, 226 bp, Homo sapiens; identical to SEQ ID NO: 211060
  chr6:170339178-170339404
  hypo

SEQ ID NO: 364168 - DNA, 229 bp, Homo sapiens; identical to SEQ ID NO: 353862
  chr6:170339543-170339772
  hypo

SEQ ID NO: 364169 - DNA, 271 bp, Homo sapiens; identical to SEQ ID NO: 353863
  chr6:170474572-170474843
  hypo

SEQ ID NO: 364170 - DNA, 163 bp, Homo sapiens; identical to SEQ ID NO: 353864
  chr6:170531590-170531753
  hypo

SEQ ID NO: 364171 - DNA, 148 bp, Homo sapiens; identical to SEQ ID NO: 339216
  chr6:170871281-170871429
  hypo

SEQ ID NO: 364172 - DNA, 190 bp, Homo sapiens; identical to SEQ ID NO: 339217
  chr7:84219-84409
  hypo

SEQ ID NO: 364173 - DNA, 86 bp, Homo sapiens; identical to SEQ ID NO: 350497
  chr7:149024-149110
  hypo

SEQ ID NO: 364174 - DNA, 575 bp, Homo sapiens; identical to SEQ ID NO: 350498
  chr7:149220-149795
  hypo

SEQ ID NO: 364175 - DNA, 255 bp, Homo sapiens; identical to SEQ ID NO: 339220
  chr7:170034-170289
  hypo

SEQ ID NO: 364176 - DNA, 272 bp, Homo sapiens; identical to SEQ ID NO: 306667
  chr7:173194-173466
  hypo

SEQ ID NO: 364177 - DNA, 163 bp, Homo sapiens
  chr7:173496-173659
  hypo
cgtctgtcgggaaggggcacggccacaggatttaggggcagtttggacacactggtccggtgagcttgatttcagattccgggatctggtttcggagtggagttgtggactctccaggacccatcgctgaggagcaggaggttctccaggggccatggggccc

SEQ ID NO: 364178 - DNA, 437 bp, Homo sapiens; identical to SEQ ID NO: 358708
  chr7:191993-192430
  hypo

SEQ ID NO: 364179 - DNA, 362 bp, Homo sapiens; identical to SEQ ID NO: 284670
  chr7:192614-192976
  hypo

SEQ ID NO: 364180 - DNA, 511 bp, Homo sapiens; identical to SEQ ID NO: 284671
  chr7:193101-193612
  hypo

SEQ ID NO: 364181 - DNA, 34 bp, Homo sapiens; identical to SEQ ID NO: 358711
  chr7:193708-193742
  hypo

SEQ ID NO: 364182 - DNA, 321 bp, Homo sapiens; identical to SEQ ID NO: 339223
  chr7:212459-212780
  hypo

SEQ ID NO: 364183 - DNA, 550 bp, Homo sapiens; identical to SEQ ID NO: 348180
  chr7:287728-288278
  hypo

SEQ ID NO: 364184 - DNA, 468 bp, Homo sapiens; identical to SEQ ID NO: 348181
  chr7:288328-288796
  hypo

SEQ ID NO: 364185 - DNA, 217 bp, Homo sapiens; identical to SEQ ID NO: 339227
  chr7:290557-290774
  hypo

SEQ ID NO: 364186 - DNA, 427 bp, Homo sapiens
  chr7:293618-294045
  hypo
cgcttcccgggcgaggggctgggcacagagcagggaggcacttgcctgaggtcacacagctccaagccctcctaaccccgcccgggaggcccctttaatacccgatttggatctgcaaagagaaatggctgtgggcccgagaaatgcctttctcttttaacacgataccatctgaaaccggcttaggcgaggacgggaggctgttaacagcagacgaattttaagcctccagccaatgagcgctcagatgaagattttcctcctgaaatggagctcctgccccggtgggggctgcctcgtccgactgtgggctgccgactaatctgtatcagcacgagacaggattgcagctggtctttccttgatcgttcgttcttacaataatgacccagcgttggcagtggggtgagggggcgcgggaaggagg

SEQ ID NO: 364187 - DNA, 829 bp, Homo sapiens
  chr7:294114-294943
  hypo
gggccaggtcggcctggcacccaccccgtttcctctccgaacctcagcttgttcagctaagaaagggcagccgggaccggccaccctcctgttcactccgctgggaagcgccctgccgaacctgccttctgatcccacggggagcctgccctgcagccaggagagacccctggaatcactcagcctggctgcataggaatgctgggactgggggagctgtgagtgaggttcggggctccggccccaacaaaaccacgttctcaccagttctacagccccaggctttccagagtttctccacaaacaaataaagcaagaaaaactagatttaatcagcaaataaatacaggaatagcgccgtcggccgggcctccagcatcagagcagtgaacccgcactgctagcgggcctggacagcgcttgcatttttctgattattctttctttattaaggtataattcatgtaccacaaaatttaccatttaaaagcgtacagttccgtggtttttagtatatccacaatggtgtgcaaccatcaccactgtctaaatccagaatgtcctgctgaccccaaaaaggagccccgtaccatgagcaggcggtcaccgttcctcaccccgcagccctcgacgagcagcgtcccacccccagtctatctggatttgcctgttctgggcgtttcatattaagagggtcatacgacgtgtggcctcctctgtctggcctccttcgcggagcacagggttctcgggttcagtgagggcttcattcctcttcttgtttcatttcgtttcgtgtcatcgcacggatggaccatgttcacctggc

SEQ ID NO: 364188 - DNA, 705 bp, Homo sapiens; identical to SEQ ID NO: 353870
  chr7:300272-300977
  hypo

SEQ ID NO: 364189 - DNA, 45 bp, Homo sapiens; identical to SEQ ID NO: 353871
  chr7:345250-345295
  hypo

SEQ ID NO: 364190 - DNA, 147 bp, Homo sapiens; identical to SEQ ID NO: 353872
  chr7:345608-345755
  hypo

SEQ ID NO: 364191 - DNA, 246 bp, Homo sapiens; identical to SEQ ID NO: 339233
  chr7:373783-374029
  hypo

SEQ ID NO: 364192 - DNA, 100 bp, Homo sapiens
  chr7:409502-409602
  hypo
cgccgtggccagacgcccggcgatcgtccactgtgccgaggccccgggccccaggctggctgcagaggcgaacgacgcggccggccccgcgctgcagacg

SEQ ID NO: 364193 - DNA, 45 bp, Homo sapiens; identical to SEQ ID NO: 306721
  chr7:409781-409826
  hypo

SEQ ID NO: 364194 - DNA, 94 bp, Homo sapiens; identical to SEQ ID NO: 306722
  chr7:409892-409986
  hypo

SEQ ID NO: 364195 - DNA, 52 bp, Homo sapiens
  chr7:431783-431835
  hypo
gatctgagaggggctttcccggagccaggcagggaggcggccgtgcacctgc

SEQ ID NO: 364196 - DNA, 302 bp, Homo sapiens; identical to SEQ ID NO: 353873
  chr7:455133-455435
  hypo

SEQ ID NO: 364197 - DNA, 561 bp, Homo sapiens
  chr7:462752-463313
  hypo
cggagacccccgagactcccccaacacgcccagcatcggatggaacccgggtgttggttccaggggtccccgccctatgcaccgcaccccctgctcaggccggcttatcttcgagggaataagaaagcatcgtgtccaccccaagacccccgcaggcccagtgtccccagagggccgggcgccccaggcctagtgaggaaggggcacccactgaggctgctgggagctttcagggtgaggggtgtggcaccggggacggaacgcccaggccaggtttcaggctgggattaagggtcctccagaccctccttgaattttaggagaagcacgaaggggtgggggcgtctctctcttctcttaggagatctggaggagacttcgggcactgcactgtggcctccacgacaagccgaggaacaaggccgtccacccctgagaaggccacgcagaccactcaccgagggtcctgggggctatggacagaatgtttgtgccccaaactcctgctctgaaatcctcactcctaaggtgttggtgtttggagcggggccttggggaagc

SEQ ID NO: 364198 - DNA, 291 bp, Homo sapiens; identical to SEQ ID NO: 339242
  chr7:479019-479310
  hypo

SEQ ID NO: 364199 - DNA, 504 bp, Homo sapiens
  chr7:503100-503604
  hypo
agcccagaaaggcgacggggtggcccaaggtcacacccacgccaggcccagcactctgctcttcccgctcacccactcggccgggcctgtgccctcccgcccggccaagtgggggctccaggaagggcagcgagtgccccgcggccccggccccactgcgggcggccggaacacagagggcggtgaggaaggaggcgttccctgccgggtgccctccagcaggattcgcgaacccaggggagcgagcgggaggattttccatgtgaggccggcttcctggggcgaggcccacccggcgccagcgtggagagaggagaggagcaaagcgcctcgacacattctccctcggtgatttaatggccggagcattcgtgcgatatttatgcagtaaatccttccactggggggtttcactgtgtcacgggaggctcctcccagcccgtccccatcccgtcccccccaaaaaaagaatcctgagaaaatctcatttcacagtttcccatc

SEQ ID NO: 364200 - DNA, 265 bp, Homo sapiens; identical to SEQ ID NO: 339246
  chr7:540536-540801
  hypo

SEQ ID NO: 364201 - DNA, 99 bp, Homo sapiens; identical to SEQ ID NO: 353875
  chr7:551473-551572
  hypo

SEQ ID NO: 364202 - DNA, 256 bp, Homo sapiens; identical to SEQ ID NO: 306754
  chr7:551697-551953
  hypo

SEQ ID NO: 364203 - DNA, 116 bp, Homo sapiens; identical to SEQ ID NO: 353877
  chr7:552019-552135
  hypo

SEQ ID NO: 364204 - DNA, 294 bp, Homo sapiens; identical to SEQ ID NO: 200769
  chr7:557697-557991
  hypo

SEQ ID NO: 364205 - DNA, 252 bp, Homo sapiens; identical to SEQ ID NO: 339255
  chr7:716729-716981
  hypo

SEQ ID NO: 364206 - DNA, 90 bp, Homo sapiens; identical to SEQ ID NO: 72679
  chr7:778947-779037
  hypo

SEQ ID NO: 364207 - DNA, 136 bp, Homo sapiens
  chr7:808392-808528
  hypo
cgtcagcgtgcttctttttcccatcccaggagttggacttgacctgtggacatttggctgttttctttttgtttttaagccagaaacactgtcttgtttccagtttaagatgtagagagggtgaaacagtcagaaa

SEQ ID NO: 364208 - DNA, 241 bp, Homo sapiens; identical to SEQ ID NO: 211121
  chr7:808577-808818
  hypo

SEQ ID NO: 364209 - DNA, 382 bp, Homo sapiens
  chr7:808848-809230
  hypo
cacagttgcttggataagccagtggacgctccctctacactggcccggggccagagcgcctccttctgcggccccaacccagtccccaccctgagccttcagctcctgggcctgcaggctgagcctggcaggagacgctgcagggactctcagagctgtccttgccctgtcattcatggagacttacagggaggcggggcggccctactgcagtggggaccccttggggcgtaggatgcacagtgcaggcgcccaagcctcgcgcccaccggagagcagccacggtgcaggagcttggccctgagtgtgggcggggtgagggctgcaacgctgagaagcagatattaaagaagttctttcactgaaacaattgattttggtc

SEQ ID NO: 364210 - DNA, 245 bp, Homo sapiens
  chr7:818254-818499
  hypo
cgcgccagcaggaggcctcggaggatcctgtccgggcccatagatgtttgctagcgggacaagcttgggtgagttgagcatctgactccgtccttcctcctgagacacgtgcagcgagggcacccactgtgcagcgagggctcccgccgtgcagtgagcataccccctgtgcagtgagggcacctgccgtgcagtgagcataccccccatgcagcaaaagcaccccccatgcagcgagggctccc

SEQ ID NO: 364211 - DNA, 238 bp, Homo sapiens; identical to SEQ ID NO: 332992
  chr7:822395-822633
  hypo

SEQ ID NO: 364212 - DNA, 58 bp, Homo sapiens; identical to SEQ ID NO: 353880
  chr7:834245-834303
  hypo

SEQ ID NO: 364213 - DNA, 317 bp, Homo sapiens; identical to SEQ ID NO: 353881
  chr7:834873-835190
  hypo

SEQ ID NO: 364214 - DNA, 274 bp, Homo sapiens; identical to SEQ ID NO: 332994
  chr7:889360-889634
  hypo

SEQ ID NO: 364215 - DNA, 372 bp, Homo sapiens; identical to SEQ ID NO: 353882
  chr7:907709-908081
  hypo

SEQ ID NO: 364216 - DNA, 176 bp, Homo sapiens; identical to SEQ ID NO: 348182
  chr7:920980-921156
  hypo

SEQ ID NO: 364217 - DNA, 594 bp, Homo sapiens; identical to SEQ ID NO: 339268
  chr7:943355-943949
  hypo

SEQ ID NO: 364218 - DNA, 170 bp, Homo sapiens
  chr7:965802-965972
  hypo
cgtccgctcccgccctgaggagccagggcaggccccgaaacaacagccgcccctcccgttcccctcccagaccgccaggagcacctgggagggcccctcagatccacccgagacccccaaggcctcagcgaacctgggtgggctgtagctactgatgcacaatgaccttc

SEQ ID NO: 364219 - DNA, 501 bp, Homo sapiens
  chr7:966009-966510
  hypo
gcccggtggtggccagcagacacaggcggcacctcggggtctgggggacgcagctgcggctggcttctccccgaccctgtgggcggcacccaactccccaccctgccgggtcctcccggggccatctcggagccacccagcacttgaccatggccctgacaaggcccctttgtactcactggcagtcggagggcgtgggccggtagtagaaggagggtactttggactcaaacctggctctcgcggcgtcgttcccgtgggaggccatgaactgcaagagaggaggggccgggtcagaggcctggggtcccaggggcagcctaggaggtgccagctgcccttggggccgtcaccacagtgacccgcagacccaaggctctgagggctccaccagcaccaggacgggaacgccacctcctcctgccccagggacaccatttctgagtgatcgaccctcccctgggacagggaaggagccagcgtccctaacgacggggtccc

SEQ ID NO: 364220 - DNA, 333 bp, Homo sapiens; identical to SEQ ID NO: 332995
  chr7:1001822-1002155
  hypo

SEQ ID NO: 364221 - DNA, 91 bp, Homo sapiens
  chr7:1029909-1030000
  hypo
cggcagtgtgacagtggcgcgtgtgctgggggtggtgtggtcggcagtgtgacagtggcgcgtgtgctgggggcggtgtggtcggcagtgt

SEQ ID NO: 364222 - DNA, 114 bp, Homo sapiens
  chr7:1115608-1115722
  hypo
cggggctgccactctccagggcgccccactcccagctccagcggctgagtccaccaagccaggacaggcccaaggaccagagggcgaggtgattcacagtggagctcggaaaga

SEQ ID NO: 364223 - DNA, 420 bp, Homo sapiens; identical to SEQ ID NO: 339277
  chr7:1202650-1203070
  hypo

SEQ ID NO: 364224 - DNA, 123 bp, Homo sapiens; identical to SEQ ID NO: 353887
  chr7:1308164-1308287
  hypo

SEQ ID NO: 364225 - DNA, 139 bp, Homo sapiens; identical to SEQ ID NO: 211166
  chr7:1315705-1315844
  hypo

SEQ ID NO: 364226 - DNA, 178 bp, Homo sapiens
  chr7:1333680-1333858
  hypo
cccgaggggctgtgggaccccgggaccgggtgctcgctgagggacggcccttgtctgcggtcatccctcccctcctgagtggaaggtgatgccgtgggcccagggctggctgcgtctgccaggcatgccctgcattcaggcagaactcgagggaggactcatctccaaacagaagagc

SEQ ID NO: 364227 - DNA, 422 bp, Homo sapiens
  chr7:1370055-1370477
  hypo
cgtgatggctcaggtgcgtcttccacgcagatcactctggcagggagcgcggatggagacccgaggctggggcctgctggctttgcccctctacgcgaacagaatggcctctgccctgcaggaatcttgagtccaggagaggagagtttccctggaggtggaggtcaggcccggcagtcagcaggccaagctccttcgggccagggcaagccggagggcttcccagagcgggcacagtggacagctgagcaggccagactctgacatgaggtctggacaggcccttccgcccttccggatgccagtccccctgcttgtctgaccactggcccgcctgcccacggggcggctgagatgctggcgtgtgcgtgcgcatgtgcacgtgtgtttgtgtgcgcgtggggctttctgacagccgataa

SEQ ID NO: 364228 - DNA, 101 bp, Homo sapiens; identical to SEQ ID NO: 353889
  chr7:1460672-1460773
  hypo

SEQ ID NO: 364229 - DNA, 576 bp, Homo sapiens; identical to SEQ ID NO: 339288
  chr7:1473784-1474360
  hypo

SEQ ID NO: 364230 - DNA, 882 bp, Homo sapiens; identical to SEQ ID NO: 339290
  chr7:1476273-1477155
  hypo

SEQ ID NO: 364231 - DNA, 524 bp, Homo sapiens; identical to SEQ ID NO: 339292
  chr7:1479741-1480265
  hypo

SEQ ID NO: 364232 - DNA, 1005 bp, Homo sapiens; identical to SEQ ID NO: 333003
  chr7:1498587-1499592
  hypo

SEQ ID NO: 364233 - DNA, 532 bp, Homo sapiens; identical to SEQ ID NO: 339294
  chr7:1533923-1534455
  hypo

SEQ ID NO: 364234 - DNA, 336 bp, Homo sapiens; identical to SEQ ID NO: 339297
  chr7:1584054-1584390
  hypo

SEQ ID NO: 364235 - DNA, 297 bp, Homo sapiens; identical to SEQ ID NO: 211199
  chr7:1615093-1615390
  hypo

SEQ ID NO: 364236 - DNA, 113 bp, Homo sapiens
  chr7:1615444-1615557
  hypo
ctgtgtgtcacggtccctggatgaacgtttgtggaactggattgaattaaacaagacgtgcaaagcaagtggttcacgaggtagtgtgggggtgtagggatggggactgaccc

SEQ ID NO: 364237 - DNA, 421 bp, Homo sapiens; identical to SEQ ID NO: 353892
  chr7:1641978-1642399
  hypo

SEQ ID NO: 364238 - DNA, 233 bp, Homo sapiens; identical to SEQ ID NO: 284724
  chr7:1705153-1705386
  hypo

SEQ ID NO: 364239 - DNA, 502 bp, Homo sapiens; identical to SEQ ID NO: 284725
  chr7:1705693-1706195
  hypo

SEQ ID NO: 364240 - DNA, 147 bp, Homo sapiens; identical to SEQ ID NO: 358727
  chr7:1708913-1709060
  hypo

SEQ ID NO: 364241 - DNA, 35 bp, Homo sapiens
  chr7:1733131-1733166
  hypo
cgatgtgtggtgtggggcgtgacccacttcctggt

SEQ ID NO: 364242 - DNA, 206 bp, Homo sapiens; identical to SEQ ID NO: 348186
  chr7:1931663-1931869
  hypo

SEQ ID NO: 364243 - DNA, 212 bp, Homo sapiens; identical to SEQ ID NO: 339312
  chr7:1932177-1932389
  hypo

SEQ ID NO: 364244 - DNA, 45 bp, Homo sapiens; identical to SEQ ID NO: 348187
  chr7:1970797-1970842
  hypo

SEQ ID NO: 364245 - DNA, 88 bp, Homo sapiens; identical to SEQ ID NO: 348188
  chr7:1970921-1971009
  hypo

SEQ ID NO: 364246 - DNA, 307 bp, Homo sapiens
  chr7:1997037-1997344
  hypo
cgtgtgggtggtgcgggccgcagaggactccagaggcagccagtgcaggcctgtcagcggcatggcctccctgccaggcaagggggtgcacatgggagggaggagagttcagacagacgagccagaaaacgggtgttctgtggcagcaggaaccacggtcgttcacgacgcccaaagaaatgagaggcccaggcagtgcctcacccagaggctgccccgccctcacctgcagagctcgccgctccagctgtgcctccagcatcctcttttcctcctccagccgactccgctcgccttccagctcctc

SEQ ID NO: 364247 - DNA, 171 bp, Homo sapiens
  chr7:2006407-2006578
  hypo
cgcggtgaggaggaggaacgccgcaatcgtggcgtgctgggaggcgagggccgcgggccgcgctgcgtgcgcagggcagagctccttcaggaacacgagaggaataaagacggacccacccgagggaaaccgtgaggaatcgtagccacctgctctccaggagaggctgcc

SEQ ID NO: 364248 - DNA, 108 bp, Homo sapiens; identical to SEQ ID NO: 353897
  chr7:2024704-2024812
  hypo

SEQ ID NO: 364249 - DNA, 384 bp, Homo sapiens; identical to SEQ ID NO: 353898
  chr7:2024842-2025226
  hypo

SEQ ID NO: 364250 - DNA, 147 bp, Homo sapiens; identical to SEQ ID NO: 339320
  chr7:2068947-2069094
  hypo

SEQ ID NO: 364251 - DNA, 109 bp, Homo sapiens; identical to SEQ ID NO: 339321
  chr7:2069789-2069898
  hypo

SEQ ID NO: 364252 - DNA, 253 bp, Homo sapiens; identical to SEQ ID NO: 348189
  chr7:2071776-2072029
  hypo

SEQ ID NO: 364253 - DNA, 309 bp, Homo sapiens; identical to SEQ ID NO: 339324
  chr7:2102525-2102834
  hypo

SEQ ID NO: 364254 - DNA, 382 bp, Homo sapiens; identical to SEQ ID NO: 339325
  chr7:2113550-2113932
  hypo

SEQ ID NO: 364255 - DNA, 177 bp, Homo sapiens; identical to SEQ ID NO: 339326
  chr7:2158537-2158714
  hypo

SEQ ID NO: 364256 - DNA, 403 bp, Homo sapiens; identical to SEQ ID NO: 353901
  chr7:2196807-2197210
  hypo

SEQ ID NO: 364257 - DNA, 326 bp, Homo sapiens; identical to SEQ ID NO: 345891
  chr7:2208344-2208670
  hypo

SEQ ID NO: 364258 - DNA, 91 bp, Homo sapiens; identical to SEQ ID NO: 345892
  chr7:2208844-2208935
  hypo

SEQ ID NO: 364259 - DNA, 199 bp, Homo sapiens; identical to SEQ ID NO: 339330
  chr7:2222256-2222455
  hypo

SEQ ID NO: 364260 - DNA, 236 bp, Homo sapiens; identical to SEQ ID NO: 211252
  chr7:2233056-2233292
  hypo

SEQ ID NO: 364261 - DNA, 114 bp, Homo sapiens; identical to SEQ ID NO: 339333
  chr7:2237109-2237223
  hypo

SEQ ID NO: 364262 - DNA, 136 bp, Homo sapiens; identical to SEQ ID NO: 345894
  chr7:2237982-2238118
  hypo

SEQ ID NO: 364263 - DNA, 475 bp, Homo sapiens; identical to SEQ ID NO: 339336
  chr7:2264018-2264493
  hypo

SEQ ID NO: 364264 - DNA, 289 bp, Homo sapiens; identical to SEQ ID NO: 211260
  chr7:2265241-2265530
  hypo

SEQ ID NO: 364265 - DNA, 392 bp, Homo sapiens; identical to SEQ ID NO: 339338
  chr7:2298049-2298441
  hypo

SEQ ID NO: 364266 - DNA, 316 bp, Homo sapiens; identical to SEQ ID NO: 353908
  chr7:2349432-2349748
  hypo

SEQ ID NO: 364267 - DNA, 242 bp, Homo sapiens; identical to SEQ ID NO: 339340
  chr7:2448743-2448985
  hypo

SEQ ID NO: 364268 - DNA, 468 bp, Homo sapiens; identical to SEQ ID NO: 348195
  chr7:2472811-2473279
  hypo

SEQ ID NO: 364269 - DNA, 328 bp, Homo sapiens; identical to SEQ ID NO: 345896
  chr7:2473779-2474107
  hypo

SEQ ID NO: 364270 - DNA, 254 bp, Homo sapiens; identical to SEQ ID NO: 339342
  chr7:2477361-2477615
  hypo

SEQ ID NO: 364271 - DNA, 171 bp, Homo sapiens
  chr7:2566658-2566829
  hypo
tagaggtgtcccccggagtcctgcttgctcggggtggggccgccagtgttgtgggactgcaaatgggagctcagcacctgcctgccacccacgcagaccagcccctgctctgttcccacaggttccgctccatccactgccacctgtacccggacacaccctggtgtcccc

SEQ ID NO: 364272 - DNA, 440 bp, Homo sapiens; identical to SEQ ID NO: 257151
  chr7:2643038-2643478
  hypo

SEQ ID NO: 364273 - DNA, 327 bp, Homo sapiens; identical to SEQ ID NO: 339345
  chr7:2679783-2680110
  hypo

SEQ ID NO: 364274 - DNA, 43 bp, Homo sapiens; identical to SEQ ID NO: 284742
  chr7:2728259-2728302
  hypo

SEQ ID NO: 364275 - DNA, 361 bp, Homo sapiens
  chr7:2751985-2752346
  hypo
cggtggtggggacgtggcccagccaggaggcgggggagccgtcagtgtgggaggacaccccgcctgccagcgccgactcgggcatgtgctgtgagagtgactcggagcccggcaccagtgtgtcggagcccctcacccctgatgccgggagtcacaccttcgcctcggggccagaggaagggctgagctacctggcagcctcagaggctccgctgccacctgggggccctgcggaggccatcaaggagcatgaacggtggctggccatgtgcatccaggccctgcagcgggaagtggcagaggaggacctggtgcaggtggacagagccgtggacgccctcgaccgctgggagatgttcac

SEQ ID NO: 364276 - DNA, 399 bp, Homo sapiens
  chr7:2770640-2771039
  hypo
gtccttttgcctagagctcgctggctggctggtctgacagcattcctgagccaggtattccagggcacggatccgagaaacccactcaaggaccacacagacaacacacacccaagagtctgaccgacagccgtgggggctgctcaacgacgacaaaccccggggcttcctcgctcactgcagcatgatgtccttcaggttctcctgcaggatggtgtctttcacagcatggaacacgaagcggacgttctcggtgtcgatggcggtggtgaagtggtggaagagtggcttgctgcggttccgtctcttcctgtcgaagcactggaccaggtagcgctggacgtcctccagcctgtgcgggtcgcccctgaagtccgggaagtgcttcttgatgctcac

SEQ ID NO: 364277 - DNA, 145 bp, Homo sapiens; identical to SEQ ID NO: 339351
  chr7:2804422-2804567
  hypo

SEQ ID NO: 364278 - DNA, 157 bp, Homo sapiens; identical to SEQ ID NO: 339352
  chr7:2959057-2959214
  hypo

SEQ ID NO: 364279 - DNA, 84 bp, Homo sapiens; identical to SEQ ID NO: 350505
  chr7:3083602-3083686
  hypo

SEQ ID NO: 364280 - DNA, 43 bp, Homo sapiens; identical to SEQ ID NO: 353916
  chr7:3283455-3283498
  hypo

SEQ ID NO: 364281 - DNA, 761 bp, Homo sapiens; identical to SEQ ID NO: 339359
  chr7:4219149-4219910
  hypo

SEQ ID NO: 364282 - DNA, 203 bp, Homo sapiens; identical to SEQ ID NO: 339360
  chr7:4243576-4243779
  hypo

SEQ ID NO: 364283 - DNA, 123 bp, Homo sapiens; identical to SEQ ID NO: 339361
  chr7:4254687-4254810
  hypo

SEQ ID NO: 364284 - DNA, 304 bp, Homo sapiens
  chr7:4349444-4349748
  hypo
cgccctcacttttgacgccaattgcgagttcagaggccctcgagaccacccttaggttcgacgatttgctggaaagactcggaactcgctggaagctgtgatagtcccagctatggtttatcacagggaaaagacaccgattaaaatcagcatgcaggggcagagcccacgagggttccacacactgagcgtctgctgtcctctcctgtggagctgcggacagcgttacccctctgacaatgtgcgatcatacgcacaaaacacggtcagccaggaaggttcctccacaccagggcttccctgc

SEQ ID NO: 364285 - DNA, 49 bp, Homo sapiens
  chr7:4771516-4771565
  hypo
cgcttgctacgtgccagccgtccggtcaggactgatgttcacggcatgg

SEQ ID NO: 364286 - DNA, 105 bp, Homo sapiens
  chr7:4800779-4800884
  hypo
cggggtccccggacacacggtcaccatcctgcagcccgccacacccgtgaccctcgggcagcaccaccttccagtccgggccgtgacccagaacggaaagcatgc

SEQ ID NO: 364287 - DNA, 902 bp, Homo sapiens; identical to SEQ ID NO: 353918
  chr7:4801650-4802552
  hypo

SEQ ID NO: 364288 - DNA, 430 bp, Homo sapiens
  chr7:4802589-4803019
  hypo
cctctccgcccggaacgtgacatagagagtgttggcattaactcggggggtgtccgatttcacttcagaccccaagtttttctttgtttgtttaaacatggaattcagacttcattgtacacctgagacagacacaaaagggatcatgtatttttgaggattttacctgttgacgtctgatgaccggccgtaggtccagggttcccgctgggtttaatcccctcgaagagtaaacctgccgctctgtctgataacttcaagtaagagcagcggcttcctgggttggcgttcgcggtggaaggttcctaggatgaaaggtgagcctggatccgccggccgcagacatcgcgctgctggggacgattggggccgctgctctgcagaccagaccttcccgaattatccgtggctccgatgtcccggtgctgac

SEQ ID NO: 364289 - DNA, 224 bp, Homo sapiens; identical to SEQ ID NO: 345897
  chr7:4856619-4856843
  hypo

SEQ ID NO: 364290 - DNA, 100 bp, Homo sapiens; identical to SEQ ID NO: 345898
  chr7:4857296-4857396
  hypo

SEQ ID NO: 364291 - DNA, 111 bp, Homo sapiens; identical to SEQ ID NO: 353921
  chr7:4857860-4857971
  hypo

SEQ ID NO: 364292 - DNA, 258 bp, Homo sapiens; identical to SEQ ID NO: 339371
  chr7:4913172-4913430
  hypo

SEQ ID NO: 364293 - DNA, 527 bp, Homo sapiens; identical to SEQ ID NO: 353922
  chr7:4917102-4917629
  hypo

SEQ ID NO: 364294 - DNA, 237 bp, Homo sapiens; identical to SEQ ID NO: 339373
  chr7:5230941-5231178
  hypo

SEQ ID NO: 364295 - DNA, 55 bp, Homo sapiens; identical to SEQ ID NO: 339374
  chr7:5240151-5240206
  hypo

SEQ ID NO: 364296 - DNA, 344 bp, Homo sapiens
  chr7:5262623-5262967
  hypo
cacaccctcccctttaaaggccacgctctgagaacctgttccagctctccagctccgcctccaccctcagcaaatggcattggccccttcttttaacccagaagccgcagcctggagttctcttgtcttcctccctccaggctgcaaagcttccctcatcggtgcttacatgcctcctgtggcgcctgctttggaggcaggactgtccctccctcgtcggacagtagagcgggggaggcctcgggctctggagcccgtgcctcagattggagccctagggagcactttcagtcgcatggccgtggtcggcgggaccccacctcaggtctgtggctccacgtctc

SEQ ID NO: 364297 - DNA, 545 bp, Homo sapiens
  chr7:5428491-5429036
  hypo
cgtgcgccgcagcagccgcgcgccctcgtcctgccgggcagcctccttggcacccccgcgccccgcttcggccaccagcgcgggcagccccacgtccccggcgccgccgttgcacatggtcagtaccgacggctgcagcgccgcattcttggtcttggactcagccaggaagggcgacaggcgctcagccaggcgcgggggcccccggtcctggcggccctcggcgcgcgcctcctgggtcaggtccaccacgccccgtggccccgaggcctcctcgccccgggcgcgcgggtccttcttgccgaaaagcggaggcggctccccgccgcggcccgcccgctccttggctggaccgtcccgcgacgacgagcctttggccggggcgcccgaggagtggccgccgccaggggtccgggccgagggcgcgtgagagtgcagggagcccggagcccccgcggtgggcaggtagaaaccgtctgcggagaagggaacagcaggcagtgagcgagcgccacctcccctcccacccctgcctgggcggaggc

SEQ ID NO: 364298 - DNA, 635 bp, Homo sapiens; identical to SEQ ID NO: 346875
  chr7:5632268-5632903
  hypo

SEQ ID NO: 364299 - DNA, 123 bp, Homo sapiens; identical to SEQ ID NO: 350511
  chr7:5633472-5633595
  hypo

SEQ ID NO: 364300 - DNA, 145 bp, Homo sapiens; identical to SEQ ID NO: 339383
  chr7:6058662-6058807
  hypo

SEQ ID NO: 364301 - DNA, 67 bp, Homo sapiens; identical to SEQ ID NO: 353926
  chr7:6060523-6060590
  hypo

SEQ ID NO: 364302 - DNA, 104 bp, Homo sapiens; identical to SEQ ID NO: 211371
  chr7:6060612-6060716
  hypo

SEQ ID NO: 364303 - DNA, 71 bp, Homo sapiens; identical to SEQ ID NO: 353928
  chr7:6060772-6060843
  hypo

SEQ ID NO: 364304 - DNA, 521 bp, Homo sapiens; identical to SEQ ID NO: 339388
  chr7:6207763-6208284
  hypo

SEQ ID NO: 364305 - DNA, 183 bp, Homo sapiens; identical to SEQ ID NO: 339389
  chr7:6222712-6222895
  hypo

SEQ ID NO: 364306 - DNA, 107 bp, Homo sapiens; identical to SEQ ID NO: 211378
  chr7:6443719-6443826
  hypo

SEQ ID NO: 364307 - DNA, 100 bp, Homo sapiens; identical to SEQ ID NO: 211379
  chr7:6443856-6443956
  hypo

SEQ ID NO: 364308 - DNA, 60 bp, Homo sapiens; identical to SEQ ID NO: 211380
  chr7:6443990-6444050
  hypo

SEQ ID NO: 364309 - DNA, 177 bp, Homo sapiens; identical to SEQ ID NO: 339393
  chr7:6448767-6448944
  hypo

SEQ ID NO: 364310 - DNA, 61 bp, Homo sapiens; identical to SEQ ID NO: 358742
  chr7:6570393-6570454
  hypo

SEQ ID NO: 364311 - DNA, 62 bp, Homo sapiens; identical to SEQ ID NO: 284778
  chr7:6655356-6655418
  hypo

SEQ ID NO: 364312 - DNA, 220 bp, Homo sapiens; identical to SEQ ID NO: 284779
  chr7:6655448-6655668
  hypo

SEQ ID NO: 364313 - DNA, 153 bp, Homo sapiens; identical to SEQ ID NO: 358745
  chr7:6655854-6656007
  hypo

SEQ ID NO: 364314 - DNA, 162 bp, Homo sapiens; identical to SEQ ID NO: 339401
  chr7:6694972-6695134
  hypo

SEQ ID NO: 364315 - DNA, 56 bp, Homo sapiens
  chr7:7102882-7102938
  hypo
cggggggagtcagtgatattggcaatatcacagggtgtgtacaccacacctgttat

SEQ ID NO: 364316 - DNA, 37 bp, Homo sapiens
  chr7:7102968-7103005
  hypo
tgatactattgtcaaaacagaatgcgcggtacacccc

SEQ ID NO: 364317 - DNA, 209 bp, Homo sapiens; identical to SEQ ID NO: 211394
  chr7:7605822-7606031
  hypo

SEQ ID NO: 364318 - DNA, 76 bp, Homo sapiens; identical to SEQ ID NO: 339406
  chr7:7612745-7612821
  hypo

SEQ ID NO: 364319 - DNA, 157 bp, Homo sapiens; identical to SEQ ID NO: 339407
  chr7:7613138-7613295
  hypo

SEQ ID NO: 364320 - DNA, 31 bp, Homo sapiens; identical to SEQ ID NO: 339408
  chr7:7839208-7839239
  hypo

SEQ ID NO: 364321 - DNA, 271 bp, Homo sapiens; identical to SEQ ID NO: 350515
  chr7:16793071-16793342
  hypo

SEQ ID NO: 364322 - DNA, 182 bp, Homo sapiens; identical to SEQ ID NO: 114656
  chr7:16793380-16793562
  hypo

SEQ ID NO: 364323 - DNA, 104 bp, Homo sapiens; identical to SEQ ID NO: 346877
  chr7:18125868-18125972
  hypo

SEQ ID NO: 364324 - DNA, 218 bp, Homo sapiens; identical to SEQ ID NO: 200838
  chr7:18126225-18126443
  hypo

SEQ ID NO: 364325 - DNA, 59 bp, Homo sapiens; identical to SEQ ID NO: 200840
  chr7:19156644-19156703
  hypo

SEQ ID NO: 364326 - DNA, 297 bp, Homo sapiens; identical to SEQ ID NO: 200847
  chr7:20826202-20826499
  hypo

SEQ ID NO: 364327 - DNA, 1116 bp, Homo sapiens; identical to SEQ ID NO: 350525
  chr7:21984770-21985886
  hypo

SEQ ID NO: 364328 - DNA, 140 bp, Homo sapiens; identical to SEQ ID NO: 345262
  chr7:22893437-22893577
  hypo

SEQ ID NO: 364329 - DNA, 1088 bp, Homo sapiens; identical to SEQ ID NO: 345263
  chr7:22893607-22894695
  hypo

SEQ ID NO: 364330 - DNA, 209 bp, Homo sapiens; identical to SEQ ID NO: 346882
  chr7:23052818-23053027
  hypo

SEQ ID NO: 364331 - DNA, 713 bp, Homo sapiens; identical to SEQ ID NO: 284856
  chr7:23053080-23053793
  hypo

SEQ ID NO: 364332 - DNA, 246 bp, Homo sapiens; identical to SEQ ID NO: 350530
  chr7:23053819-23054065
  hypo

SEQ ID NO: 364333 - DNA, 760 bp, Homo sapiens; identical to SEQ ID NO: 350533
  chr7:23510081-23510841
  hypo

SEQ ID NO: 364334 - DNA, 228 bp, Homo sapiens; identical to SEQ ID NO: 346885
  chr7:23513246-23513474
  hypo

SEQ ID NO: 364335 - DNA, 221 bp, Homo sapiens; identical to SEQ ID NO: 333064
  chr7:23570157-23570378
  hypo

SEQ ID NO: 364336 - DNA, 133 bp, Homo sapiens; identical to SEQ ID NO: 353950
  chr7:23749573-23749706
  hypo

SEQ ID NO: 364337 - DNA, 364 bp, Homo sapiens; identical to SEQ ID NO: 353951
  chr7:23749829-23750193
  hypo

SEQ ID NO: 364338 - DNA, 845 bp, Homo sapiens; identical to SEQ ID NO: 358785
  chr7:25019409-25020254
  hypo

SEQ ID NO: 364339 - DNA, 188 bp, Homo sapiens; identical to SEQ ID NO: 200878
  chr7:25892243-25892431
  hypo

SEQ ID NO: 364340 - DNA, 79 bp, Homo sapiens; identical to SEQ ID NO: 339428
  chr7:26198616-26198695
  hypo

SEQ ID NO: 364341 - DNA, 164 bp, Homo sapiens; identical to SEQ ID NO: 348217
  chr7:26283815-26283979
  hypo

SEQ ID NO: 364342 - DNA, 108 bp, Homo sapiens; identical to SEQ ID NO: 339430
  chr7:26667960-26668068
  hypo

SEQ ID NO: 364343 - DNA, 142 bp, Homo sapiens; identical to SEQ ID NO: 345270
  chr7:27136790-27136932
  hypo

SEQ ID NO: 364344 - DNA, 37 bp, Homo sapiens; identical to SEQ ID NO: 350552
  chr7:27278957-27278994
  hypo

SEQ ID NO: 364345 - DNA, 136 bp, Homo sapiens; identical to SEQ ID NO: 350553
  chr7:27279659-27279795
  hypo

SEQ ID NO: 364346 - DNA, 456 bp, Homo sapiens; identical to SEQ ID NO: 353956
  chr7:27531253-27531709
  hypo

SEQ ID NO: 364347 - DNA, 31 bp, Homo sapiens; identical to SEQ ID NO: 211454
  chr7:27686737-27686768
  hypo

SEQ ID NO: 364348 - DNA, 45 bp, Homo sapiens; identical to SEQ ID NO: 353958
  chr7:27686815-27686860
  hypo

SEQ ID NO: 364349 - DNA, 126 bp, Homo sapiens; identical to SEQ ID NO: 339438
  chr7:27831654-27831780
  hypo

SEQ ID NO: 364350 - DNA, 189 bp, Homo sapiens; identical to SEQ ID NO: 348220
  chr7:27907637-27907826
  hypo

SEQ ID NO: 364351 - DNA, 70 bp, Homo sapiens; identical to SEQ ID NO: 348221
  chr7:27908068-27908138
  hypo

SEQ ID NO: 364352 - DNA, 120 bp, Homo sapiens; identical to SEQ ID NO: 339440
  chr7:27914823-27914943
  hypo

SEQ ID NO: 364353 - DNA, 37 bp, Homo sapiens; identical to SEQ ID NO: 200915
  chr7:29186197-29186234
  hypo

SEQ ID NO: 364354 - DNA, 496 bp, Homo sapiens; identical to SEQ ID NO: 200916
  chr7:29234008-29234504
  hypo

SEQ ID NO: 364355 - DNA, 159 bp, Homo sapiens; identical to SEQ ID NO: 345272
  chr7:29234886-29235045
  hypo

SEQ ID NO: 364356 - DNA, 62 bp, Homo sapiens; identical to SEQ ID NO: 339445
  chr7:29390389-29390451
  hypo

SEQ ID NO: 364357 - DNA, 54 bp, Homo sapiens; identical to SEQ ID NO: 339448
  chr7:30599500-30599554
  hypo

SEQ ID NO: 364358 - DNA, 126 bp, Homo sapiens; identical to SEQ ID NO: 339450
  chr7:30656768-30656894
  hypo

SEQ ID NO: 364359 - DNA, 175 bp, Homo sapiens; identical to SEQ ID NO: 339453
  chr7:30972844-30973019
  hypo

SEQ ID NO: 364360 - DNA, 89 bp, Homo sapiens; identical to SEQ ID NO: 339457
  chr7:32609681-32609770
  hypo

SEQ ID NO: 364361 - DNA, 338 bp, Homo sapiens; identical to SEQ ID NO: 358822
  chr7:32981774-32982112
  hypo

SEQ ID NO: 364362 - DNA, 344 bp, Homo sapiens; identical to SEQ ID NO: 358823
  chr7:32982270-32982614
  hypo

SEQ ID NO: 364363 - DNA, 212 bp, Homo sapiens; identical to SEQ ID NO: 358824
  chr7:32996732-32996944
  hypo

SEQ ID NO: 364364 - DNA, 155 bp, Homo sapiens; identical to SEQ ID NO: 358825
  chr7:32997454-32997609
  hypo

SEQ ID NO: 364365 - DNA, 254 bp, Homo sapiens; identical to SEQ ID NO: 339463
  chr7:36124398-36124652
  hypo

SEQ ID NO: 364366 - DNA, 490 bp, Homo sapiens; identical to SEQ ID NO: 339464
  chr7:36338992-36339482
  hypo

SEQ ID NO: 364367 - DNA, 543 bp, Homo sapiens
  chr7:36894954-36895497
  hypo
cgaggaacagaatcagggcggtgagcaagatgccagctaggggctgaaagttgccagggctagaggtgatgctgaagggaatgtggacccacagcttccctttaccaaaggacggttccaaggcgtgggtgtgttttcattcctctctcctgttagctaggtgttccagttttggaaggggcatgtctgggcccggccacttcagttacagtcatagacgaagtcatagttgctgggctccttgggaatcggcggaggtgcgtcagggatctggatgttttccaggtccaggaggcggagcttgatttccatgctgagcagggtgtccaggtcattccgcgtcaggtcgctcatcatgtccttcccgagtagcgcattcagtccatccgtccagatacagtactggcaggaagggaggcaacagcgatcattactggtggcaattacagaagtattaatagtaaaaatagctaacagtgaatactcatccctcagtaggctgtgcgctaagggctctgcctacttcgtcatttcatatttggc

SEQ ID NO: 364368 - DNA, 168 bp, Homo sapiens; identical to SEQ ID NO: 345273
  chr7:37960958-37961126
  hypo

SEQ ID NO: 364369 - DNA, 257 bp, Homo sapiens; identical to SEQ ID NO: 339469
  chr7:38725412-38725669
  hypo

SEQ ID NO: 364370 - DNA, 41 bp, Homo sapiens; identical to SEQ ID NO: 339471
  chr7:39503999-39504040
  hypo

SEQ ID NO: 364371 - DNA, 259 bp, Homo sapiens
  chr7:42237185-42237444
  hypo
cgtgctactggagcacggagcccttactcagtacagagaaggatgggggcctttgtcacctgaaattcaccactttgctatgttccggtcagcgggaggtacagttcgctactcacaggcctaaaagcagtgtcgggcttagctaccccagacaggagagtcagcgcctgctcatgcattgagactgaaacaatggtctgggcgtcacagcagctgtgcaaatccctgaaaattcagtccacgttaacgcaaggctctc

SEQ ID NO: 364372 - DNA, 408 bp, Homo sapiens; identical to SEQ ID NO: 200954
  chr7:42276904-42277312
  hypo

SEQ ID NO: 364373 - DNA, 60 bp, Homo sapiens; identical to SEQ ID NO: 200955
  chr7:42277588-42277648
  hypo

SEQ ID NO: 364374 - DNA, 180 bp, Homo sapiens; identical to SEQ ID NO: 339474
  chr7:42834387-42834567
  hypo

SEQ ID NO: 364375 - DNA, 271 bp, Homo sapiens; identical to SEQ ID NO: 353972
  chr7:44153157-44153428
  hypo

SEQ ID NO: 364376 - DNA, 38 bp, Homo sapiens; identical to SEQ ID NO: 350573
  chr7:44364447-44364485
  hypo

SEQ ID NO: 364377 - DNA, 369 bp, Homo sapiens; identical to SEQ ID NO: 346904
  chr7:44365258-44365627
  hypo

SEQ ID NO: 364378 - DNA, 190 bp, Homo sapiens
  chr7:44431034-44431224
  hypo
agacaatccagatacaccacaaggtaaggttcctccaagagacaaaatgagaagaaaatatcgatcagcgatcttcagggggaggaggcggtccgtgtttacagaacaaaaataaggagactgtgcccagcagatgacccctccccactgactcaaggctgcactgcgtccgcgtgccctgctgtactgc

SEQ ID NO: 364379 - DNA, 112 bp, Homo sapiens; identical to SEQ ID NO: 339481
  chr7:44611096-44611208
  hypo

SEQ ID NO: 364380 - DNA, 51 bp, Homo sapiens; identical to SEQ ID NO: 348228
  chr7:44740672-44740723
  hypo

SEQ ID NO: 364381 - DNA, 366 bp, Homo sapiens
  chr7:44746549-44746915
  hypo
cgaagtctgagccaagctgttttgaaggctagcctggtgttacttgatacccagagctggccatgtctgctgtgtatttgttacacgtaacgtgcttttcaaagtgtgcctggtctgagcaaatacagggcatcagaggctggtgaaggggaagcatctctaacccttgaaagctgcgtctcctggcagcagtccctggcacagccctgggcccaggagagctctcagccacatacctgagagaaccagcctagccatgggaactctcttgtaggaacccacttccagcgggtgatcccagaagatggccctgcagctcagaacccagaaaatgtcaaaaggcttctcttctgcaccggcaaagtg

SEQ ID NO: 364382 - DNA, 79 bp, Homo sapiens
  chr7:44746945-44747024
  hypo
cgcgacatggtggggcaggtggccatcacaaggattgagcaggtgagggcaggtggtgccatcagggtgtccccccagc

SEQ ID NO: 364383 - DNA, 160 bp, Homo sapiens; identical to SEQ ID NO: 350576
  chr7:44924093-44924253
  hypo

SEQ ID NO: 364384 - DNA, 309 bp, Homo sapiens; identical to SEQ ID NO: 200961
  chr7:44924469-44924778
  hypo

SEQ ID NO: 364385 - DNA, 149 bp, Homo sapiens; identical to SEQ ID NO: 339487
  chr7:45091550-45091699
  hypo

SEQ ID NO: 364386 - DNA, 47 bp, Homo sapiens
  chr7:45222971-45223018
  hypo
ggtggtgtggcgcagcaaacgcaccgacacgctgctgtgagggtccc

SEQ ID NO: 364387 - DNA, 168 bp, Homo sapiens; identical to SEQ ID NO: 358843
  chr7:45299683-45299851
  hypo

SEQ ID NO: 364388 - DNA, 93 bp, Homo sapiens; identical to SEQ ID NO: 339491
  chr7:47370861-47370954
  hypo

SEQ ID NO: 364389 - DNA, 77 bp, Homo sapiens; identical to SEQ ID NO: 353979
  chr7:47515282-47515359
  hypo

SEQ ID NO: 364390 - DNA, 147 bp, Homo sapiens; identical to SEQ ID NO: 353980
  chr7:47515405-47515552
  hypo

SEQ ID NO: 364391 - DNA, 437 bp, Homo sapiens; identical to SEQ ID NO: 339493
  chr7:47605260-47605697
  hypo

SEQ ID NO: 364392 - DNA, 94 bp, Homo sapiens; identical to SEQ ID NO: 339497
  chr7:48147036-48147130
  hypo

SEQ ID NO: 364393 - DNA, 95 bp, Homo sapiens; identical to SEQ ID NO: 353982
  chr7:50251628-50251723
  hypo

SEQ ID NO: 364394 - DNA, 102 bp, Homo sapiens; identical to SEQ ID NO: 345274
  chr7:50344738-50344840
  hypo

SEQ ID NO: 364395 - DNA, 56 bp, Homo sapiens; identical to SEQ ID NO: 345910
  chr7:50560501-50560557
  hypo

SEQ ID NO: 364396 - DNA, 220 bp, Homo sapiens; identical to SEQ ID NO: 345911
  chr7:50560663-50560883
  hypo

SEQ ID NO: 364397 - DNA, 590 bp, Homo sapiens; identical to SEQ ID NO: 339503
  chr7:50660402-50660992
  hypo

SEQ ID NO: 364398 - DNA, 178 bp, Homo sapiens; identical to SEQ ID NO: 339504
  chr7:50687526-50687704
  hypo

SEQ ID NO: 364399 - DNA, 177 bp, Homo sapiens
  chr7:50715837-50716014
  hypo
cgcagagaggggagacggagcaccaaggcccagtgactgaagagccagcaacgatggctgagaaggaaagtccagcaaagagggtggaaacccagacggagctgtggaaaggagagcagcgagcgacaggagccctcatgctgctgcaggcccggcaagcggaagacagagaacccc

SEQ ID NO: 364400 - DNA, 332 bp, Homo sapiens; identical to SEQ ID NO: 339507
  chr7:51092672-51093004
  hypo

SEQ ID NO: 364401 - DNA, 154 bp, Homo sapiens; identical to SEQ ID NO: 353987
  chr7:52736911-52737065
  hypo

SEQ ID NO: 364402 - DNA, 587 bp, Homo sapiens; identical to SEQ ID NO: 307760
  chr7:53103586-53104173
  hypo

SEQ ID NO: 364403 - DNA, 64 bp, Homo sapiens; identical to SEQ ID NO: 353989
  chr7:53104233-53104297
  hypo

SEQ ID NO: 364404 - DNA, 619 bp, Homo sapiens; identical to SEQ ID NO: 353990
  chr7:55145980-55146599
  hypo

SEQ ID NO: 364405 - DNA, 573 bp, Homo sapiens; identical to SEQ ID NO: 339513
  chr7:55553240-55553813
  hypo

SEQ ID NO: 364406 - DNA, 131 bp, Homo sapiens; identical to SEQ ID NO: 339515
  chr7:56037272-56037403
  hypo

SEQ ID NO: 364407 - DNA, 294 bp, Homo sapiens; identical to SEQ ID NO: 339518
  chr7:57324312-57324606
  hypo

SEQ ID NO: 364408 - DNA, 188 bp, Homo sapiens; identical to SEQ ID NO: 339519
  chr7:57706384-57706572
  hypo

SEQ ID NO: 364409 - DNA, 247 bp, Homo sapiens; identical to SEQ ID NO: 339520
  chr7:57706651-57706898
  hypo

SEQ ID NO: 364410 - DNA, 118 bp, Homo sapiens; identical to SEQ ID NO: 339521
  chr7:63569143-63569261
  hypo

SEQ ID NO: 364411 - DNA, 53 bp, Homo sapiens
  chr7:63652630-63652683
  hypo
cgccttgggcacctcggcctgcgtcattgcgctctgcctggctgcggccgctg

SEQ ID NO: 364412 - DNA, 122 bp, Homo sapiens
  chr7:63652839-63652961
  hypo
cagttttgctgcccccgcttcctgaagatcgcagctggagccacctgggcgcagcgtttgatgtggcacctgcagtggccaaagtgacacccaaccgtgaggacgctgcagggagtcggcac

SEQ ID NO: 364413 - DNA, 60 bp, Homo sapiens; identical to SEQ ID NO: 200992
  chr7:64974448-64974508
  hypo

SEQ ID NO: 364414 - DNA, 51 bp, Homo sapiens; identical to SEQ ID NO: 346909
  chr7:65037711-65037762
  hypo

SEQ ID NO: 364415 - DNA, 91 bp, Homo sapiens; identical to SEQ ID NO: 353996
  chr7:65553884-65553975
  hypo

SEQ ID NO: 364416 - DNA, 314 bp, Homo sapiens; identical to SEQ ID NO: 353997
  chr7:65554018-65554332
  hypo

SEQ ID NO: 364417 - DNA, 54 bp, Homo sapiens; identical to SEQ ID NO: 339532
  chr7:65562589-65562643
  hypo

SEQ ID NO: 364418 - DNA, 245 bp, Homo sapiens; identical to SEQ ID NO: 353998
  chr7:65877904-65878149
  hypo

SEQ ID NO: 364419 - DNA, 96 bp, Homo sapiens; identical to SEQ ID NO: 339534
  chr7:66204269-66204365
  hypo

SEQ ID NO: 364420 - DNA, 90 bp, Homo sapiens; identical to SEQ ID NO: 354000
  chr7:66293278-66293368
  hypo

SEQ ID NO: 364421 - DNA, 156 bp, Homo sapiens; identical to SEQ ID NO: 350587
  chr7:69062203-69062359
  hypo

SEQ ID NO: 364422 - DNA, 421 bp, Homo sapiens; identical to SEQ ID NO: 201000
  chr7:69063038-69063459
  hypo

SEQ ID NO: 364423 - DNA, 318 bp, Homo sapiens; identical to SEQ ID NO: 201001
  chr7:69063552-69063870
  hypo

SEQ ID NO: 364424 - DNA, 282 bp, Homo sapiens; identical to SEQ ID NO: 201002
  chr7:69063900-69064182
  hypo

SEQ ID NO: 364425 - DNA, 112 bp, Homo sapiens; identical to SEQ ID NO: 339539
  chr7:70543004-70543116
  hypo

SEQ ID NO: 364426 - DNA, 121 bp, Homo sapiens
  chr7:76106210-76106331
  hypo
cgtgccttcgtggaaagttttagctgatgtcctcgcctgtatttcccaggctgtttttgcagagttgtgagagttggttcatccgggccatgaggacatgttgggacataccccgtgtgcc

SEQ ID NO: 364427 - DNA, 102 bp, Homo sapiens
  chr7:76106380-76106482
  hypo
taattggcttggaaggcagtcctctgatttgtacctcattgtggttacagaaacttccaattgaagacactgagctgaaccattccgcccgcccgcccgccc

SEQ ID NO: 364428 - DNA, 75 bp, Homo sapiens
  chr7:76631604-76631679
  hypo
gtgcctcctggccatgtactgcaacggcaataaggtgcccccactggcccggggcggaggcgggtggcctgcccc

SEQ ID NO: 364429 - DNA, 87 bp, Homo sapiens
  chr7:77309610-77309697
  hypo
gatagatggattctttttttttttttttttttttgagcaaattgagctacttgagcctcggcctcccaaagtgctgggattactggc

SEQ ID NO: 364430 - DNA, 163 bp, Homo sapiens; identical to SEQ ID NO: 354005
  chr7:77324199-77324362
  hypo

SEQ ID NO: 364431 - DNA, 441 bp, Homo sapiens; identical to SEQ ID NO: 285106
  chr7:79082579-79083020
  hypo

SEQ ID NO: 364432 - DNA, 236 bp, Homo sapiens; identical to SEQ ID NO: 358878
  chr7:80548021-80548257
  hypo

SEQ ID NO: 364433 - DNA, 446 bp, Homo sapiens; identical to SEQ ID NO: 358879
  chr7:80548403-80548849
  hypo

SEQ ID NO: 364434 - DNA, 492 bp, Homo sapiens
  chr7:86415591-86416083
  hypo
cggctcttccagatccctcagatcagctacgcatccaccagcgccaaactcagtgataagtcgcgctatgattactttgccaggaccgtgccccccgacttctaccaggccaaagccatggctgagatcttgcgcttcttcaactggacctacgtgtccacagtagcctccgagggtgattacggggagacagggatcgaggccttcgagcaggaagcccgcctgcgcaacatctgcatcgctacggcggagaaggtgggccgctccaacatccgcaagtcctacgacagcgtgatccgagaactgttgcagaagcccaacgcgcgcgtcgtggtcctcttcatgcgcagcgacgactcgcgggagctcattgcagccgccagccgcgccaatgcctccttcacctgggtggccagcgacggctggggcgcgcaggagagcatcatcaagggcagcgagcatgtggcctacggcgccatcaccctggagctg

SEQ ID NO: 364435 - DNA, 37 bp, Homo sapiens
  chr7:86416125-86416162
  hypo
ctcaacccctacaacaaccaccgcaacccctggttcc

SEQ ID NO: 364436 - DNA, 45 bp, Homo sapiens; identical to SEQ ID NO: 346914
  chr7:87258398-87258443
  hypo

SEQ ID NO: 364437 - DNA, 215 bp, Homo sapiens; identical to SEQ ID NO: 285133
  chr7:87563614-87563829
  hypo

SEQ ID NO: 364438 - DNA, 439 bp, Homo sapiens; identical to SEQ ID NO: 285134
  chr7:87563890-87564329
  hypo

SEQ ID NO: 364439 - DNA, 207 bp, Homo sapiens; identical to SEQ ID NO: 350608
  chr7:87564359-87564566
  hypo

SEQ ID NO: 364440 - DNA, 636 bp, Homo sapiens; identical to SEQ ID NO: 358892
  chr7:90225109-90225745
  hypo

SEQ ID NO: 364441 - DNA, 211 bp, Homo sapiens; identical to SEQ ID NO: 201040
  chr7:90226057-90226268
  hypo

SEQ ID NO: 364442 - DNA, 352 bp, Homo sapiens; identical to SEQ ID NO: 354013
  chr7:97925221-97925573
  hypo

SEQ ID NO: 364443 - DNA, 235 bp, Homo sapiens; identical to SEQ ID NO: 358902
  chr7:98030416-98030651
  hypo

SEQ ID NO: 364444 - DNA, 216 bp, Homo sapiens; identical to SEQ ID NO: 339561
  chr7:98955444-98955660
  hypo

SEQ ID NO: 364445 - DNA, 47 bp, Homo sapiens; identical to SEQ ID NO: 354015
  chr7:98966410-98966457
  hypo

SEQ ID NO: 364446 - DNA, 77 bp, Homo sapiens; identical to SEQ ID NO: 201060
  chr7:98971600-98971677
  hypo

SEQ ID NO: 364447 - DNA, 396 bp, Homo sapiens; identical to SEQ ID NO: 346916
  chr7:98971810-98972206
  hypo

SEQ ID NO: 364448 - DNA, 215 bp, Homo sapiens; identical to SEQ ID NO: 339565
  chr7:99084631-99084846
  hypo

SEQ ID NO: 364449 - DNA, 215 bp, Homo sapiens; identical to SEQ ID NO: 201064
  chr7:99156600-99156815
  hypo

SEQ ID NO: 364450 - DNA, 77 bp, Homo sapiens; identical to SEQ ID NO: 345277
  chr7:99156982-99157059
  hypo

SEQ ID NO: 364451 - DNA, 70 bp, Homo sapiens
  chr7:99723240-99723310
  hypo
caacatagtgaaaccccaattctacacacacacacacacacaaagaagactgcagggctggtggtgcagc

SEQ ID NO: 364452 - DNA, 260 bp, Homo sapiens; identical to SEQ ID NO: 339568
  chr7:99819908-99820168
  hypo

SEQ ID NO: 364453 - DNA, 87 bp, Homo sapiens; identical to SEQ ID NO: 339569
  chr7:100030648-100030735
  hypo

SEQ ID NO: 364454 - DNA, 342 bp, Homo sapiens
  chr7:100034752-100035094
  hypo
cgcacctggccataaatggggcagctttaaggtaacggtccagtgtgccctgacctcccactcagacctgcacagcatttccggtgttccgttgcctccaaactcggaccggagttggcctgtatgagtgcgggcgagggtcgccgaccccatcccggactcccttctgggacacagcaactcttgcagctttttgtgactacttttaccttcgagagttccctgaaatattaatttgtataaaaagtagatatctggcacgggtgcggtagcgcatacctgcaattccaactctgggaggccaaggcgggaagatgtcttgaaaccctgagctggagacaa

SEQ ID NO: 364455 - DNA, 42 bp, Homo sapiens
  chr7:100035124-100035166
  hypo
ccattcccaatctctaccaaaagaatttaattttagccgggc

SEQ ID NO: 364456 - DNA, 236 bp, Homo sapiens; identical to SEQ ID NO: 339571
  chr7:100064586-100064822
  hypo

SEQ ID NO: 364457 - DNA, 157 bp, Homo sapiens; identical to SEQ ID NO: 339572
  chr7:100179313-100179470
  hypo

SEQ ID NO: 364458 - DNA, 188 bp, Homo sapiens; identical to SEQ ID NO: 354023
  chr7:100179940-100180128
  hypo

SEQ ID NO: 364459 - DNA, 831 bp, Homo sapiens; identical to SEQ ID NO: 339574
  chr7:100402457-100403288
  hypo

SEQ ID NO: 364460 - DNA, 217 bp, Homo sapiens; identical to SEQ ID NO: 339575
  chr7:100405032-100405249
  hypo

SEQ ID NO: 364461 - DNA, 380 bp, Homo sapiens; identical to SEQ ID NO: 339576
  chr7:100421158-100421538
  hypo

SEQ ID NO: 364462 - DNA, 487 bp, Homo sapiens; identical to SEQ ID NO: 350630
  chr7:101460542-101461029
  hypo

SEQ ID NO: 364463 - DNA, 116 bp, Homo sapiens; identical to SEQ ID NO: 354027
  chr7:101475674-101475790
  hypo

SEQ ID NO: 364464 - DNA, 236 bp, Homo sapiens; identical to SEQ ID NO: 354028
  chr7:101475858-101476094
  hypo

SEQ ID NO: 364465 - DNA, 132 bp, Homo sapiens; identical to SEQ ID NO: 339582
  chr7:101536683-101536815
  hypo

SEQ ID NO: 364466 - DNA, 332 bp, Homo sapiens; identical to SEQ ID NO: 354030
  chr7:101566736-101567068
  hypo

SEQ ID NO: 364467 - DNA, 196 bp, Homo sapiens; identical to SEQ ID NO: 345915
  chr7:101603073-101603269
  hypo

SEQ ID NO: 364468 - DNA, 242 bp, Homo sapiens; identical to SEQ ID NO: 345916
  chr7:101603308-101603550
  hypo

SEQ ID NO: 364469 - DNA, 288 bp, Homo sapiens; identical to SEQ ID NO: 339585
  chr7:101616410-101616698
  hypo

SEQ ID NO: 364470 - DNA, 81 bp, Homo sapiens; identical to SEQ ID NO: 354033
  chr7:101627660-101627741
  hypo

SEQ ID NO: 364471 - DNA, 282 bp, Homo sapiens; identical to SEQ ID NO: 354034
  chr7:101627846-101628128
  hypo

SEQ ID NO: 364472 - DNA, 429 bp, Homo sapiens; identical to SEQ ID NO: 339587
  chr7:101649223-101649652
  hypo

SEQ ID NO: 364473 - DNA, 311 bp, Homo sapiens; identical to SEQ ID NO: 348244
  chr7:101652279-101652590
  hypo

SEQ ID NO: 364474 - DNA, 115 bp, Homo sapiens; identical to SEQ ID NO: 354037
  chr7:102782159-102782274
  hypo

SEQ ID NO: 364475 - DNA, 465 bp, Homo sapiens; identical to SEQ ID NO: 339593
  chr7:105254063-105254528
  hypo

SEQ ID NO: 364476 - DNA, 31 bp, Homo sapiens; identical to SEQ ID NO: 354039
  chr7:105279344-105279375
  hypo

SEQ ID NO: 364477 - DNA, 75 bp, Homo sapiens; identical to SEQ ID NO: 339595
  chr7:105280248-105280323
  hypo

SEQ ID NO: 364478 - DNA, 147 bp, Homo sapiens; identical to SEQ ID NO: 354041
  chr7:106622687-106622834
  hypo

SEQ ID NO: 364479 - DNA, 251 bp, Homo sapiens; identical to SEQ ID NO: 201131
  chr7:106684920-106685171
  hypo

SEQ ID NO: 364480 - DNA, 118 bp, Homo sapiens; identical to SEQ ID NO: 345917
  chr7:107483576-107483694
  hypo

SEQ ID NO: 364481 - DNA, 482 bp, Homo sapiens; identical to SEQ ID NO: 285340
  chr7:113726887-113727369
  hypo

SEQ ID NO: 364482 - DNA, 750 bp, Homo sapiens; identical to SEQ ID NO: 350641
  chr7:120496826-120497576
  hypo

SEQ ID NO: 364483 - DNA, 51 bp, Homo sapiens; identical to SEQ ID NO: 350645
  chr7:126891155-126891206
  hypo

SEQ ID NO: 364484 - DNA, 37 bp, Homo sapiens; identical to SEQ ID NO: 285393
  chr7:126988120-126988157
  hypo

SEQ ID NO: 364485 - DNA, 56 bp, Homo sapiens; identical to SEQ ID NO: 350648
  chr7:126988206-126988262
  hypo

SEQ ID NO: 364486 - DNA, 87 bp, Homo sapiens; identical to SEQ ID NO: 354049
  chr7:127371042-127371129
  hypo

SEQ ID NO: 364487 - DNA, 252 bp, Homo sapiens; identical to SEQ ID NO: 354050
  chr7:127371249-127371501
  hypo

SEQ ID NO: 364488 - DNA, 174 bp, Homo sapiens; identical to SEQ ID NO: 339608
  chr7:127670460-127670634
  hypo

SEQ ID NO: 364489 - DNA, 208 bp, Homo sapiens; identical to SEQ ID NO: 285400
  chr7:127671450-127671658
  hypo

SEQ ID NO: 364490 - DNA, 67 bp, Homo sapiens; identical to SEQ ID NO: 339610
  chr7:127673475-127673542
  hypo

SEQ ID NO: 364491 - DNA, 90 bp, Homo sapiens; identical to SEQ ID NO: 339611
  chr7:127679932-127680022
  hypo

SEQ ID NO: 364492 - DNA, 56 bp, Homo sapiens; identical to SEQ ID NO: 339617
  chr7:128602091-128602147
  hypo

SEQ ID NO: 364493 - DNA, 264 bp, Homo sapiens; identical to SEQ ID NO: 285416
  chr7:128828640-128828904
  hypo

SEQ ID NO: 364494 - DNA, 46 bp, Homo sapiens; identical to SEQ ID NO: 348248
  chr7:129330248-129330294
  hypo

SEQ ID NO: 364495 - DNA, 89 bp, Homo sapiens; identical to SEQ ID NO: 348249
  chr7:129330351-129330440
  hypo

SEQ ID NO: 364496 - DNA, 194 bp, Homo sapiens; identical to SEQ ID NO: 339621
  chr7:129470923-129471117
  hypo

SEQ ID NO: 364497 - DNA, 177 bp, Homo sapiens; identical to SEQ ID NO: 348251
  chr7:129483449-129483626
  hypo

SEQ ID NO: 364498 - DNA, 311 bp, Homo sapiens; identical to SEQ ID NO: 339623
  chr7:129780417-129780728
  hypo

SEQ ID NO: 364499 - DNA, 31 bp, Homo sapiens
  chr7:129800434-129800465
  hypo
tccccactaggaacacaaggggcctttcttc

SEQ ID NO: 364500 - DNA, 55 bp, Homo sapiens; identical to SEQ ID NO: 354057
  chr7:129846024-129846079
  hypo

SEQ ID NO: 364501 - DNA, 72 bp, Homo sapiens; identical to SEQ ID NO: 354058
  chr7:129846109-129846181
  hypo

SEQ ID NO: 364502 - DNA, 31 bp, Homo sapiens; identical to SEQ ID NO: 345918
  chr7:131041484-131041515
  hypo

SEQ ID NO: 364503 - DNA, 61 bp, Homo sapiens; identical to SEQ ID NO: 345919
  chr7:132418888-132418949
  hypo

SEQ ID NO: 364504 - DNA, 42 bp, Homo sapiens; identical to SEQ ID NO: 345920
  chr7:132419066-132419108
  hypo

SEQ ID NO: 364505 - DNA, 141 bp, Homo sapiens; identical to SEQ ID NO: 339631
  chr7:133630779-133630920
  hypo

SEQ ID NO: 364506 - DNA, 163 bp, Homo sapiens; identical to SEQ ID NO: 339633
  chr7:134613459-134613622
  hypo

SEQ ID NO: 364507 - DNA, 157 bp, Homo sapiens; identical to SEQ ID NO: 348255
  chr7:134880754-134880911
  hypo

SEQ ID NO: 364508 - DNA, 211 bp, Homo sapiens; identical to SEQ ID NO: 348256
  chr7:134880941-134881152
  hypo

SEQ ID NO: 364509 - DNA, 177 bp, Homo sapiens; identical to SEQ ID NO: 339636
  chr7:134898284-134898461
  hypo

SEQ ID NO: 364510 - DNA, 85 bp, Homo sapiens; identical to SEQ ID NO: 345921
  chr7:134918319-134918404
  hypo

SEQ ID NO: 364511 - DNA, 132 bp, Homo sapiens; identical to SEQ ID NO: 345922
  chr7:134918661-134918793
  hypo

SEQ ID NO: 364512 - DNA, 209 bp, Homo sapiens
  chr7:135412177-135412386
  hypo
gcaggagcgggacgcagacgaccagcagcagcttccggactcggagcaggccctgcagcaggcccatcgcgcctctgtcctctccagctcgtccttggaccccgctctgccggcgaaaggcttcctgcctgggcactgctctctatccagaaagacttcttaaacctttcttggcttccgagagtcctccttcgtcttgggggcagaac

SEQ ID NO: 364513 - DNA, 165 bp, Homo sapiens; identical to SEQ ID NO: 339639
  chr7:135611103-135611268
  hypo

SEQ ID NO: 364514 - DNA, 151 bp, Homo sapiens; identical to SEQ ID NO: 339640
  chr7:137564632-137564783
  hypo

SEQ ID NO: 364515 - DNA, 169 bp, Homo sapiens
  chr7:138042035-138042204
  hypo
cggccaggtttttttttttaacaaaagaatcaaccgatgcctcacaagaaacaaacgcagcgcctgcttcagtaccagtccaaggagtggtcctgtttacctttttgcccctccctgcctccctgcctgtgtctgctttttttgcaaggaaaaaaaaaatcaagacaaa

SEQ ID NO: 364516 - DNA, 75 bp, Homo sapiens; identical to SEQ ID NO: 339642
  chr7:138993466-138993541
  hypo

SEQ ID NO: 364517 - DNA, 256 bp, Homo sapiens; identical to SEQ ID NO: 339645
  chr7:139257804-139258060
  hypo

SEQ ID NO: 364518 - DNA, 241 bp, Homo sapiens; identical to SEQ ID NO: 339646
  chr7:139690720-139690961
  hypo

SEQ ID NO: 364519 - DNA, 176 bp, Homo sapiens; identical to SEQ ID NO: 339647
  chr7:139717431-139717607
  hypo

SEQ ID NO: 364520 - DNA, 362 bp, Homo sapiens; identical to SEQ ID NO: 345285
  chr7:139930346-139930708
  hypo

SEQ ID NO: 364521 - DNA, 31 bp, Homo sapiens; identical to SEQ ID NO: 345924
  chr7:140156493-140156524
  hypo

SEQ ID NO: 364522 - DNA, 88 bp, Homo sapiens; identical to SEQ ID NO: 339650
  chr7:140156968-140157056
  hypo

SEQ ID NO: 364523 - DNA, 183 bp, Homo sapiens; identical to SEQ ID NO: 285462
  chr7:140340368-140340551
  hypo

SEQ ID NO: 364524 - DNA, 999 bp, Homo sapiens; identical to SEQ ID NO: 333283
  chr7:142985430-142986429
  hypo

SEQ ID NO: 364525 - DNA, 669 bp, Homo sapiens; identical to SEQ ID NO: 333286
  chr7:148036392-148037061
  hypo

SEQ ID NO: 364526 - DNA, 202 bp, Homo sapiens; identical to SEQ ID NO: 339658
  chr7:148079472-148079674
  hypo

SEQ ID NO: 364527 - DNA, 125 bp, Homo sapiens; identical to SEQ ID NO: 339659
  chr7:148448819-148448944
  hypo

SEQ ID NO: 364528 - DNA, 503 bp, Homo sapiens; identical to SEQ ID NO: 339660
  chr7:148480954-148481457
  hypo

SEQ ID NO: 364529 - DNA, 168 bp, Homo sapiens; identical to SEQ ID NO: 333288
  chr7:148523540-148523708
  hypo

SEQ ID NO: 364530 - DNA, 163 bp, Homo sapiens; identical to SEQ ID NO: 345926
  chr7:148851234-148851397
  hypo

SEQ ID NO: 364531 - DNA, 98 bp, Homo sapiens; identical to SEQ ID NO: 339664
  chr7:148907697-148907795
  hypo

SEQ ID NO: 364532 - DNA, 135 bp, Homo sapiens
  chr7:149418013-149418148
  hypo
cgctatggacagccccgagagcgagagccggggagccagcctggatggagagagagcgagccccgagggtaagtcagacagtggggcagtgcacgcagcctcctctgcactccgcatgatgaagcacaagtccac

SEQ ID NO: 364533 - DNA, 117 bp, Homo sapiens; identical to SEQ ID NO: 339668
  chr7:150006604-150006721
  hypo

SEQ ID NO: 364534 - DNA, 112 bp, Homo sapiens; identical to SEQ ID NO: 339669
  chr7:150006790-150006902
  hypo

SEQ ID NO: 364535 - DNA, 99 bp, Homo sapiens; identical to SEQ ID NO: 211907
  chr7:150069580-150069679
  hypo

SEQ ID NO: 364536 - DNA, 114 bp, Homo sapiens; identical to SEQ ID NO: 211908
  chr7:150069820-150069934
  hypo

SEQ ID NO: 364537 - DNA, 115 bp, Homo sapiens
  chr7:150079390-150079505
  hypo
aggcttgccgccctgtggtgctcctcccaaactcagggagcaggtatttccgttcacctgcgccttcaagaacctgagctcaaagcgctgcaatgactggccagggactagcagc

SEQ ID NO: 364538 - DNA, 127 bp, Homo sapiens
  chr7:150081308-150081435
  hypo
aggaaaggtggtccggtaggggcccgggggcccttgtgcgatagacaaagcggccttccaagacttggtgtgggcactggtgggagatggcgcatctggcccttgatgcctgtcttccagccggggc

SEQ ID NO: 364539 - DNA, 846 bp, Homo sapiens; identical to SEQ ID NO: 333298
  chr7:150671471-150672317
  hypo

SEQ ID NO: 364540 - DNA, 351 bp, Homo sapiens; identical to SEQ ID NO: 333299
  chr7:150676178-150676529
  hypo

SEQ ID NO: 364541 - DNA, 112 bp, Homo sapiens; identical to SEQ ID NO: 346943
  chr7:150714968-150715080
  hypo

SEQ ID NO: 364542 - DNA, 295 bp, Homo sapiens; identical to SEQ ID NO: 285522
  chr7:150715323-150715618
  hypo

SEQ ID NO: 364543 - DNA, 340 bp, Homo sapiens; identical to SEQ ID NO: 345927
  chr7:150758626-150758966
  hypo

SEQ ID NO: 364544 - DNA, 148 bp, Homo sapiens; identical to SEQ ID NO: 348269
  chr7:150774065-150774213
  hypo

SEQ ID NO: 364545 - DNA, 346 bp, Homo sapiens; identical to SEQ ID NO: 308623
  chr7:150774358-150774704
  hypo

SEQ ID NO: 364546 - DNA, 312 bp, Homo sapiens
  chr7:150812868-150813180
  hypo
cgtctggggtcttcggcagtggccgaggaggacaggccggagggggagctctcgggtgcggcccaggaaaggaagaggagactcaccagagtcagagggctctgggctaggccagacacctttcctagttccctgtcggggcagcgcgctcgcctccggttgcccctgtgcatgaggttagggactgctgtggacctggtcgtcataactgctctttgacacaaacttgggacagtgcctctgggagccagggagggaagcagtgctgcccagctagagaggggttcccagagctagcccgagcacccatgt

SEQ ID NO: 364547 - DNA, 114 bp, Homo sapiens
  chr7:150813210-150813324
  hypo
ggctgtcggagggctctgggtaaagggacttgccagtcaggttctgaggacagactgaagggaagggagcccaggaggcggcctccctgctaaggaggagcttagagaggaggc

SEQ ID NO: 364548 - DNA, 557 bp, Homo sapiens; identical to SEQ ID NO: 339682
  chr7:150816833-150817390
  hypo

SEQ ID NO: 364549 - DNA, 370 bp, Homo sapiens
  chr7:150889157-150889527
  hypo
cgaggaattagagcctcggaggacatagaccacctgctcgcgtccacagagccaaagccaggacccaggccactgggctgcttgtccagcagcccttccagaagaccgggctgtgggggtgagggctcgcagcagcaatggggtatggggcgggaggtgggcaggctttggtaggcgcagccgtccccacatccccaggcctcaccatagcgggatgcgtagtcaggccggggcatgaagaggatccgctcgtagacccggcacagaccccgcatctcggccagctgtggccgggaggttgtcccaatcagcatcacacggtctccgggagtcagcagccgcaaggccttggtgaggtccttctttatcc

SEQ ID NO: 364550 - DNA, 370 bp, Homo sapiens; identical to SEQ ID NO: 333305
  chr7:151038589-151038959
  hypo

SEQ ID NO: 364551 - DNA, 271 bp, Homo sapiens; identical to SEQ ID NO: 339686
  chr7:151165408-151165679
  hypo

SEQ ID NO: 364552 - DNA, 211 bp, Homo sapiens; identical to SEQ ID NO: 339687
  chr7:151411325-151411536
  hypo

SEQ ID NO: 364553 - DNA, 137 bp, Homo sapiens; identical to SEQ ID NO: 339688
  chr7:151506379-151506516
  hypo

SEQ ID NO: 364554 - DNA, 968 bp, Homo sapiens; identical to SEQ ID NO: 358996
  chr7:151572574-151573542
  hypo

SEQ ID NO: 364555 - DNA, 697 bp, Homo sapiens; identical to SEQ ID NO: 346946
  chr7:151722447-151723144
  hypo

SEQ ID NO: 364556 - DNA, 34 bp, Homo sapiens; identical to SEQ ID NO: 346947
  chr7:151723206-151723240
  hypo

SEQ ID NO: 364557 - DNA, 195 bp, Homo sapiens; identical to SEQ ID NO: 339691
  chr7:151791364-151791559
  hypo

SEQ ID NO: 364558 - DNA, 146 bp, Homo sapiens; identical to SEQ ID NO: 339693
  chr7:152152776-152152922
  hypo

SEQ ID NO: 364559 - DNA, 313 bp, Homo sapiens; identical to SEQ ID NO: 339694
  chr7:152273159-152273472
  hypo

SEQ ID NO: 364560 - DNA, 273 bp, Homo sapiens
  chr7:154540240-154540513
  hypo
ttagtaataatgagataataacttaatgaaaaacccctgcgagccctgcggggcggggagggagacctggtgtgtggtgctggacgcttcctgagcacctccctgcacagcctgcctctggagtttctcgcgcatggcggtaagcagggccaggcctcactctttccccttcacagtggagggtgtgagcagggcttcgatgccttttgctcacggtgtccagcagtggatgcgctggttggaacggacgtgcctataaccatgactcccacc

SEQ ID NO: 364561 - DNA, 127 bp, Homo sapiens; identical to SEQ ID NO: 354095
  chr7:154541944-154542071
  hypo

SEQ ID NO: 364562 - DNA, 135 bp, Homo sapiens; identical to SEQ ID NO: 354096
  chr7:154542290-154542425
  hypo

SEQ ID NO: 364563 - DNA, 172 bp, Homo sapiens; identical to SEQ ID NO: 339700
  chr7:155079954-155080126
  hypo

SEQ ID NO: 364564 - DNA, 139 bp, Homo sapiens; identical to SEQ ID NO: 339705
  chr7:155502704-155502843
  hypo

SEQ ID NO: 364565 - DNA, 238 bp, Homo sapiens; identical to SEQ ID NO: 211970
  chr7:155581980-155582218
  hypo

SEQ ID NO: 364566 - DNA, 593 bp, Homo sapiens; identical to SEQ ID NO: 339709
  chr7:155679115-155679708
  hypo

SEQ ID NO: 364567 - DNA, 78 bp, Homo sapiens; identical to SEQ ID NO: 354099
  chr7:155898307-155898385
  hypo

SEQ ID NO: 364568 - DNA, 288 bp, Homo sapiens; identical to SEQ ID NO: 339712
  chr7:155916075-155916363
  hypo

SEQ ID NO: 364569 - DNA, 31 bp, Homo sapiens; identical to SEQ ID NO: 339715
  chr7:156734692-156734723
  hypo

SEQ ID NO: 364570 - DNA, 50 bp, Homo sapiens
  chr7:156744799-156744849
  hypo
aggttcttgtatgctactgtgcctgcagtaagttaaggccgagcaaaagc

SEQ ID NO: 364571 - DNA, 169 bp, Homo sapiens; identical to SEQ ID NO: 339717
  chr7:156782599-156782768
  hypo

SEQ ID NO: 364572 - DNA, 249 bp, Homo sapiens; identical to SEQ ID NO: 201268
  chr7:156802164-156802413
  hypo

SEQ ID NO: 364573 - DNA, 213 bp, Homo sapiens; identical to SEQ ID NO: 359013
  chr7:156802537-156802750
  hypo

SEQ ID NO: 364574 - DNA, 179 bp, Homo sapiens
  chr7:156832501-156832680
  hypo
cgcgggaccatcttataaggacacagtcacatcgaattgggggcccatcctactcctgcacagctaatcactaaccacatcttgttccgcagtaaagtcccattccgagacactggggctaggacttccacctgtctcttggacacatttcaacccgcagcaccaccactgaggaaacg

SEQ ID NO: 364575 - DNA, 131 bp, Homo sapiens; identical to SEQ ID NO: 339721
  chr7:156974878-156975009
  hypo

SEQ ID NO: 364576 - DNA, 458 bp, Homo sapiens; identical to SEQ ID NO: 339722
  chr7:157052694-157053152
  hypo

SEQ ID NO: 364577 - DNA, 150 bp, Homo sapiens
  chr7:157086147-157086297
  hypo
ggagcagcgctgtgcacgttccactcacctgaacggcatcgtctgagtcgcgtttgataaaattcgtaggaggccactggtctggcctgagctcctgcaggaggcctggcagaacagaccaaaacgcagccactcgtgctagagctccac

SEQ ID NO: 364578 - DNA, 144 bp, Homo sapiens; identical to SEQ ID NO: 339724
  chr7:157100035-157100179
  hypo

SEQ ID NO: 364579 - DNA, 53 bp, Homo sapiens; identical to SEQ ID NO: 339725
  chr7:157128236-157128289
  hypo

SEQ ID NO: 364580 - DNA, 650 bp, Homo sapiens; identical to SEQ ID NO: 348277
  chr7:157202474-157203124
  hypo

SEQ ID NO: 364581 - DNA, 41 bp, Homo sapiens
  chr7:157262486-157262527
  hypo
cggcggcgcctaattccaccttgtgtgccagtgcagttcat

SEQ ID NO: 364582 - DNA, 215 bp, Homo sapiens; identical to SEQ ID NO: 354106
  chr7:157263471-157263686
  hypo

SEQ ID NO: 364583 - DNA, 309 bp, Homo sapiens; identical to SEQ ID NO: 339733
  chr7:157336700-157337009
  hypo

SEQ ID NO: 364584 - DNA, 475 bp, Homo sapiens; identical to SEQ ID NO: 354107
  chr7:157347322-157347797
  hypo

SEQ ID NO: 364585 - DNA, 158 bp, Homo sapiens; identical to SEQ ID NO: 354108
  chr7:157404210-157404368
  hypo

SEQ ID NO: 364586 - DNA, 46 bp, Homo sapiens; identical to SEQ ID NO: 354109
  chr7:157404566-157404612
  hypo

SEQ ID NO: 364587 - DNA, 152 bp, Homo sapiens; identical to SEQ ID NO: 339739
  chr7:157414227-157414379
  hypo

SEQ ID NO: 364588 - DNA, 296 bp, Homo sapiens; identical to SEQ ID NO: 348278
  chr7:157445780-157446076
  hypo

SEQ ID NO: 364589 - DNA, 69 bp, Homo sapiens; identical to SEQ ID NO: 339741
  chr7:157446148-157446217
  hypo

SEQ ID NO: 364590 - DNA, 267 bp, Homo sapiens; identical to SEQ ID NO: 339742
  chr7:157446450-157446717
  hypo

SEQ ID NO: 364591 - DNA, 75 bp, Homo sapiens
  chr7:157448328-157448403
  hypo
cgtctccagtgcgggaaacagcacagccaggcacggtcacccaccaggacgacgcctacggcctggagatccagg

SEQ ID NO: 364592 - DNA, 39 bp, Homo sapiens
  chr7:157448526-157448565
  hypo
aggccgctgaagccgcgtcgccgtgagcctctggccggc

SEQ ID NO: 364593 - DNA, 36 bp, Homo sapiens
  chr7:157464624-157464660
  hypo
cgctgtaccccaagaaggggacgggtggggcagcag

SEQ ID NO: 364594 - DNA, 232 bp, Homo sapiens; identical to SEQ ID NO: 339746
  chr7:157507378-157507610
  hypo

SEQ ID NO: 364595 - DNA, 284 bp, Homo sapiens; identical to SEQ ID NO: 339747
  chr7:157510178-157510462
  hypo

SEQ ID NO: 364596 - DNA, 115 bp, Homo sapiens; identical to SEQ ID NO: 354113
  chr7:157511495-157511610
  hypo

SEQ ID NO: 364597 - DNA, 408 bp, Homo sapiens; identical to SEQ ID NO: 339749
  chr7:157513007-157513415
  hypo

SEQ ID NO: 364598 - DNA, 44 bp, Homo sapiens
  chr7:157550880-157550924
  hypo
cggtgtcgtaattgactggacaggtactaatgccgaccacatcc

SEQ ID NO: 364599 - DNA, 262 bp, Homo sapiens; identical to SEQ ID NO: 308881
  chr7:157550958-157551220
  hypo

SEQ ID NO: 364600 - DNA, 250 bp, Homo sapiens; identical to SEQ ID NO: 339753
  chr7:157589680-157589930
  hypo

SEQ ID NO: 364601 - DNA, 242 bp, Homo sapiens; identical to SEQ ID NO: 333344
  chr7:157594777-157595019
  hypo

SEQ ID NO: 364602 - DNA, 332 bp, Homo sapiens; identical to SEQ ID NO: 339756
  chr7:157621949-157622281
  hypo

SEQ ID NO: 364603 - DNA, 469 bp, Homo sapiens; identical to SEQ ID NO: 339757
  chr7:157625840-157626309
  hypo

SEQ ID NO: 364604 - DNA, 203 bp, Homo sapiens; identical to SEQ ID NO: 339758
  chr7:157642963-157643166
  hypo

SEQ ID NO: 364605 - DNA, 230 bp, Homo sapiens; identical to SEQ ID NO: 339759
  chr7:157653875-157654105
  hypo

SEQ ID NO: 364606 - DNA, 79 bp, Homo sapiens; identical to SEQ ID NO: 354119
  chr7:157703411-157703490
  hypo

SEQ ID NO: 364607 - DNA, 227 bp, Homo sapiens; identical to SEQ ID NO: 339763
  chr7:157736806-157737033
  hypo

SEQ ID NO: 364608 - DNA, 273 bp, Homo sapiens; identical to SEQ ID NO: 339764
  chr7:157738113-157738386
  hypo

SEQ ID NO: 364609 - DNA, 145 bp, Homo sapiens; identical to SEQ ID NO: 339765
  chr7:157744287-157744432
  hypo

SEQ ID NO: 364610 - DNA, 410 bp, Homo sapiens; identical to SEQ ID NO: 339766
  chr7:157853839-157854249
  hypo

SEQ ID NO: 364611 - DNA, 337 bp, Homo sapiens; identical to SEQ ID NO: 339767
  chr7:157860325-157860662
  hypo

SEQ ID NO: 364612 - DNA, 74 bp, Homo sapiens
  chr7:157877353-157877427
  hypo
cgcccatccacacccacgacgcccatccacacccaccacgcccatccacacccacgacactcatccacacccac

SEQ ID NO: 364613 - DNA, 425 bp, Homo sapiens; identical to SEQ ID NO: 308937
  chr7:157890859-157891284
  hypo

SEQ ID NO: 364614 - DNA, 98 bp, Homo sapiens
  chr7:157891519-157891617
  hypo
gcagtgggggacggggaacggggccgcggggagggccggagaagatggtagaaggtgacagtgcggggtgcagcgttcctgggtccttgaggggagcc

SEQ ID NO: 364615 - DNA, 218 bp, Homo sapiens; identical to SEQ ID NO: 339770
  chr7:157916520-157916738
  hypo

SEQ ID NO: 364616 - DNA, 241 bp, Homo sapiens; identical to SEQ ID NO: 339771
  chr7:157919964-157920205
  hypo

SEQ ID NO: 364617 - DNA, 234 bp, Homo sapiens; identical to SEQ ID NO: 339772
  chr7:157929571-157929805
  hypo

SEQ ID NO: 364618 - DNA, 111 bp, Homo sapiens; identical to SEQ ID NO: 339773
  chr7:157934031-157934142
  hypo

SEQ ID NO: 364619 - DNA, 38 bp, Homo sapiens; identical to SEQ ID NO: 348284
  chr7:157934555-157934593
  hypo

SEQ ID NO: 364620 - DNA, 92 bp, Homo sapiens; identical to SEQ ID NO: 348285
  chr7:157934659-157934751
  hypo

SEQ ID NO: 364621 - DNA, 119 bp, Homo sapiens
  chr7:157935699-157935818
  hypo
cgcaaccgagccaccgagccacgagcccagagcaaccttttcattctcattcactgcagtctcctcccaccacagatctttttctttcccagcgattatcatcgcgacagtcttatctc

SEQ ID NO: 364622 - DNA, 264 bp, Homo sapiens; identical to SEQ ID NO: 339776
  chr7:157936035-157936299
  hypo

SEQ ID NO: 364623 - DNA, 224 bp, Homo sapiens; identical to SEQ ID NO: 339777
  chr7:157949173-157949397
  hypo

SEQ ID NO: 364624 - DNA, 105 bp, Homo sapiens; identical to SEQ ID NO: 339779
  chr7:157959868-157959973
  hypo

SEQ ID NO: 364625 - DNA, 392 bp, Homo sapiens
  chr7:158037726-158038118
  hypo
ctcgtgaggcggcggtgggcatgaaatgagatgaggcgtccagccctgcatctgcagcgtggtcagcacagaggctgacatccatggtcatgccggaatccgtggtcatgccagaatccgtggccatgccggaatccatggccatgccggaatccgtggtcatgctggaatccacggtcatgccggaacccatggccatgccggaatccgtggtcatgctggaatccacggtcatgccggaacccatggccatgccagaatccgtggtcatgccagaatccgtggtcatgccggaatccactgatggtgcacgtgacccacgatgggaaaagtcacaagacagcttcagagctggtcaaacgggactgagaggggctgcaccaggaatgcgc

SEQ ID NO: 364626 - DNA, 142 bp, Homo sapiens
  chr7:158039908-158040050
  hypo
cgaggcgcacgctgggctctgagacgccccctggccaagaggggtggaggaagggggcaggcgccaggatctggaaggagatttccaacccacgtggggtctcacaggagaaggccgtgatgggaggtggggaagtggggag

SEQ ID NO: 364627 - DNA, 787 bp, Homo sapiens; identical to SEQ ID NO: 354133
  chr7:158066162-158066949
  hypo

SEQ ID NO: 364628 - DNA, 219 bp, Homo sapiens; identical to SEQ ID NO: 348289
  chr7:158067069-158067288
  hypo

SEQ ID NO: 364629 - DNA, 264 bp, Homo sapiens; identical to SEQ ID NO: 339783
  chr7:158072920-158073184
  hypo

SEQ ID NO: 364630 - DNA, 195 bp, Homo sapiens
  chr7:158103405-158103600
  hypo
cggacagagcgcaagtcccacggagggcaagccctgagccggacagagcgcaagtcccacggagggcgagccctgagccggacagagcgcaagtcccacggagggcgagccctgagccggacagagcgcaaatcccacggagggcgagccctgagcctgacagagcgcgagtcacacggagggtgagcaccacgc

SEQ ID NO: 364631 - DNA, 338 bp, Homo sapiens; identical to SEQ ID NO: 339787
  chr7:158136094-158136432
  hypo

SEQ ID NO: 364632 - DNA, 479 bp, Homo sapiens; identical to SEQ ID NO: 354136
  chr7:158270795-158271274
  hypo

SEQ ID NO: 364633 - DNA, 514 bp, Homo sapiens; identical to SEQ ID NO: 308995
  chr7:158282327-158282841
  hypo

SEQ ID NO: 364634 - DNA, 162 bp, Homo sapiens
  chr7:158282873-158283035
  hypo
ggctgccgggcgccggggagcggaggcttccagggaggtaacgagctccgcggggagcccggctgcgtgggaagcaaaccgtggcgtccgtggccacagacaagagacgcaggagagggtcgggagaggaaaggaggcagcggaggcagcagagacgaagac

SEQ ID NO: 364635 - DNA, 69 bp, Homo sapiens; identical to SEQ ID NO: 354137
  chr7:158349387-158349456
  hypo

SEQ ID NO: 364636 - DNA, 361 bp, Homo sapiens; identical to SEQ ID NO: 354138
  chr7:158349747-158350108
  hypo

SEQ ID NO: 364637 - DNA, 107 bp, Homo sapiens; identical to SEQ ID NO: 350690
  chr7:158379699-158379806
  hypo

SEQ ID NO: 364638 - DNA, 177 bp, Homo sapiens; identical to SEQ ID NO: 339795
  chr7:158451052-158451229
  hypo

SEQ ID NO: 364639 - DNA, 140 bp, Homo sapiens; identical to SEQ ID NO: 339798
  chr7:158556274-158556414
  hypo

SEQ ID NO: 364640 - DNA, 207 bp, Homo sapiens; identical to SEQ ID NO: 348291
  chr7:158570568-158570775
  hypo

SEQ ID NO: 364641 - DNA, 210 bp, Homo sapiens; identical to SEQ ID NO: 339800
  chr7:158583831-158584041
  hypo

SEQ ID NO: 364642 - DNA, 33 bp, Homo sapiens; identical to SEQ ID NO: 354144
  chr7:158713060-158713093
  hypo

SEQ ID NO: 364643 - DNA, 171 bp, Homo sapiens
  chr7:158741267-158741438
  hypo
ctcagtgaaggtggcgcgggggatggctgagtggcagttgtgtctgcagggcagagtcatatcggaatgtacaagcgcaactggatatgcagacttttattcctggaggctacagtctggtccctcaatgaccccacaccccccacaattatttacaaaattccatttgac

SEQ ID NO: 364644 - DNA, 42 bp, Homo sapiens; identical to SEQ ID NO: 350693
  chr8:495481-495523
  hypo

SEQ ID NO: 364645 - DNA, 68 bp, Homo sapiens; identical to SEQ ID NO: 201278
  chr8:495635-495703
  hypo

SEQ ID NO: 364646 - DNA, 260 bp, Homo sapiens; identical to SEQ ID NO: 354147
  chr8:591683-591943
  hypo

SEQ ID NO: 364647 - DNA, 366 bp, Homo sapiens
  chr8:644802-645168
  hypo
tcaggtgcaaggaagagaccggttacactttatggggtgggcggcagcgagagttccccgtcccatcatctcctccgccggacgcacagagaatgcagcgtctgtgagcacagctgccctggacctggcatctaagagtcagggtcagagaggggcagtcagaaacccacctccctgctggacaagtcacaagcaccagcatccctcgggaaaggcagaggggcgtggtggctcggagccctagggtgataggcggttggctgccctgtgggtttcaccagtgtcacctcttcgcaggtgtcattgacctggctcctttctccccgtcaggttcccctcagctcctctgggctgctcctggcagcc

SEQ ID NO: 364648 - DNA, 376 bp, Homo sapiens
  chr8:972329-972705
  hypo
cggtcccgtgccgaggtagacactctaaacaccacccaccctccctgggagtggacagtcccgtgccaaggtagacgctccaaacagcacccaccctccctgggagtggacggtcccgtgccaaggtagacactccagccgccatccatcctccctgggattggacggtcccatgccgaggtagacactccagccgccacccatcctccctgggagtggacggtcacgtgccgaggtagacactccagccgccacccatcctccctgggagtggacactcccgtgcttaggtagatgctccaaacagcacccaccctccctgggagtggacggtcccgtgccgaggtagacgctccaaacagcacccaccctccct

SEQ ID NO: 364649 - DNA, 233 bp, Homo sapiens; identical to SEQ ID NO: 354148
  chr8:1078113-1078346
  hypo

SEQ ID NO: 364650 - DNA, 438 bp, Homo sapiens
  chr8:1132651-1133089
  hypo
cgtggtgagttgggcattgagctgccgtaggtcactgagtctgccctgccatcacgtctgcgctgccctgagacacggagctccagcacattctgcagagctcacactatcgagtccagcgcgcatgtgagaggcaggaagggagagtccacgggtcggcaactctgggcagtggcgcgtgggggacggactccgcagcctgtgggatcggcagcatccagtgaggtggagcggggctcaggggcactcaggatgcagtgagcgcacagccctgcggtggcatgggtgggagacgcgcaccatggagccggtggaaggtagacattcgagcgagctggggccagttcctggaagtgtgtcactgccagtgcggggaacgtgagatttactcacccagcagcgggacctactggagtgctttcggtaagagctgggatg

SEQ ID NO: 364651 - DNA, 117 bp, Homo sapiens
  chr8:1326617-1326734
  hypo
cgcacacctgacttcgcctgtccatcctgcacacacctggcctcacctgtctttcctgcgcacacctgacctcacctgtccctgacacacacagctgacttcgcctgtctgtcctgc

SEQ ID NO: 364652 - DNA, 131 bp, Homo sapiens
  chr8:1471350-1471481
  hypo
cgggcccatggtcctgccaggggcccacagcatgaagatgtagctccctcacacacacgttgaatttggatttgcttgtctggcttctgctggggcgcaggatgtggggatggaaggaccaagacacacga

SEQ ID NO: 364653 - DNA, 49 bp, Homo sapiens
  chr8:1471664-1471713
  hypo
agctgtgccttagacgggggggaaggactccctgccccaggccggcacc

SEQ ID NO: 364654 - DNA, 104 bp, Homo sapiens; identical to SEQ ID NO: 339820
  chr8:1724066-1724170
  hypo

SEQ ID NO: 364655 - DNA, 169 bp, Homo sapiens; identical to SEQ ID NO: 339824
  chr8:3509598-3509767
  hypo

SEQ ID NO: 364656 - DNA, 313 bp, Homo sapiens; identical to SEQ ID NO: 339825
  chr8:6414561-6414874
  hypo

SEQ ID NO: 364657 - DNA, 95 bp, Homo sapiens; identical to SEQ ID NO: 339827
  chr8:6633002-6633097
  hypo

SEQ ID NO: 364658 - DNA, 110 bp, Homo sapiens; identical to SEQ ID NO: 354150
  chr8:8560686-8560796
  hypo

SEQ ID NO: 364659 - DNA, 42 bp, Homo sapiens; identical to SEQ ID NO: 354151
  chr8:8561032-8561074
  hypo

SEQ ID NO: 364660 - DNA, 106 bp, Homo sapiens; identical to SEQ ID NO: 350705
  chr8:8639980-8640086
  hypo

SEQ ID NO: 364661 - DNA, 166 bp, Homo sapiens; identical to SEQ ID NO: 339830
  chr8:8651879-8652045
  hypo

SEQ ID NO: 364662 - DNA, 110 bp, Homo sapiens; identical to SEQ ID NO: 339831
  chr8:8680452-8680562
  hypo

SEQ ID NO: 364663 - DNA, 59 bp, Homo sapiens; identical to SEQ ID NO: 339832
  chr8:8680894-8680953
  hypo

SEQ ID NO: 364664 - DNA, 416 bp, Homo sapiens; identical to SEQ ID NO: 339834
  chr8:8731310-8731726
  hypo

SEQ ID NO: 364665 - DNA, 124 bp, Homo sapiens; identical to SEQ ID NO: 354154
  chr8:8748226-8748350
  hypo

SEQ ID NO: 364666 - DNA, 533 bp, Homo sapiens; identical to SEQ ID NO: 354155
  chr8:8749088-8749621
  hypo

SEQ ID NO: 364667 - DNA, 143 bp, Homo sapiens; identical to SEQ ID NO: 339836
  chr8:8780059-8780202
  hypo

SEQ ID NO: 364668 - DNA, 101 bp, Homo sapiens; identical to SEQ ID NO: 339837
  chr8:8898512-8898613
  hypo

SEQ ID NO: 364669 - DNA, 260 bp, Homo sapiens; identical to SEQ ID NO: 285637
  chr8:9761155-9761415
  hypo

SEQ ID NO: 364670 - DNA, 206 bp, Homo sapiens; identical to SEQ ID NO: 359041
  chr8:10587216-10587422
  hypo

SEQ ID NO: 364671 - DNA, 240 bp, Homo sapiens; identical to SEQ ID NO: 201296
  chr8:10873649-10873889
  hypo

SEQ ID NO: 364672 - DNA, 376 bp, Homo sapiens; identical to SEQ ID NO: 285647
  chr8:11058799-11059175
  hypo

SEQ ID NO: 364673 - DNA, 251 bp, Homo sapiens; identical to SEQ ID NO: 285656
  chr8:11550368-11550619
  hypo

SEQ ID NO: 364674 - DNA, 81 bp, Homo sapiens
  chr8:11708345-11708426
  hypo
cgcttccccgccagccagcagggccttacccagcaggagccacaggagccctggtctctgatctctttgatggtgggacac

SEQ ID NO: 364675 - DNA, 140 bp, Homo sapiens; identical to SEQ ID NO: 333372
  chr8:11726011-11726151
  hypo

SEQ ID NO: 364676 - DNA, 130 bp, Homo sapiens; identical to SEQ ID NO: 339848
  chr8:12959279-12959409
  hypo

SEQ ID NO: 364677 - DNA, 84 bp, Homo sapiens; identical to SEQ ID NO: 201316
  chr8:16884239-16884323
  hypo

SEQ ID NO: 364678 - DNA, 78 bp, Homo sapiens; identical to SEQ ID NO: 339850
  chr8:18541368-18541446
  hypo

SEQ ID NO: 364679 - DNA, 1070 bp, Homo sapiens; identical to SEQ ID NO: 333379
  chr8:18870226-18871296
  hypo

SEQ ID NO: 364680 - DNA, 590 bp, Homo sapiens; identical to SEQ ID NO: 359062
  chr8:19796843-19797433
  hypo

SEQ ID NO: 364681 - DNA, 45 bp, Homo sapiens; identical to SEQ ID NO: 339853
  chr8:21624023-21624068
  hypo

SEQ ID NO: 364682 - DNA, 229 bp, Homo sapiens
  chr8:21959610-21959839
  hypo
ggcaccttgctgggggagtgcaaaaatactcaccagccctgccagccctcggctctgtccaccatgttcctacagccatacagcctgaacctgcaggtgacctcggtcctgtcccggcttgccctcttcccccacccccatattcatgagtacctgctggatccgtacatcagcctggcccccggctgcaggagcctattctccgtgttggtgagggtgaggacgcctc

SEQ ID NO: 364683 - DNA, 878 bp, Homo sapiens; identical to SEQ ID NO: 346966
  chr8:22436855-22437733
  hypo

SEQ ID NO: 364684 - DNA, 429 bp, Homo sapiens; identical to SEQ ID NO: 339858
  chr8:22874780-22875209
  hypo

SEQ ID NO: 364685 - DNA, 127 bp, Homo sapiens; identical to SEQ ID NO: 345299
  chr8:23021590-23021717
  hypo

SEQ ID NO: 364686 - DNA, 196 bp, Homo sapiens; identical to SEQ ID NO: 345934
  chr8:23423722-23423918
  hypo

SEQ ID NO: 364687 - DNA, 311 bp, Homo sapiens; identical to SEQ ID NO: 350731
  chr8:26148757-26149068
  hypo

SEQ ID NO: 364688 - DNA, 167 bp, Homo sapiens
  chr8:26193961-26194128
  hypo
cgtggaatgtgccttcccaccccacccctcagtctcaaatctcaattgttttactgtaatgctgtccttactgacttaatcatctctaggttttacgtgttcagttcacttaaggaatattaaggtttcttccttattagaaattgagcccggctgggtatggtagc

SEQ ID NO: 364689 - DNA, 106 bp, Homo sapiens; identical to SEQ ID NO: 339867
  chr8:26267649-26267755
  hypo

SEQ ID NO: 364690 - DNA, 576 bp, Homo sapiens; identical to SEQ ID NO: 333408
  chr8:26436208-26436784
  hypo

SEQ ID NO: 364691 - DNA, 319 bp, Homo sapiens; identical to SEQ ID NO: 354167
  chr8:27779460-27779779
  hypo

SEQ ID NO: 364692 - DNA, 92 bp, Homo sapiens; identical to SEQ ID NO: 339874
  chr8:28237888-28237980
  hypo

SEQ ID NO: 364693 - DNA, 138 bp, Homo sapiens; identical to SEQ ID NO: 354168
  chr8:28938419-28938557
  hypo

SEQ ID NO: 364694 - DNA, 136 bp, Homo sapiens; identical to SEQ ID NO: 212229
  chr8:28938587-28938723
  hypo

SEQ ID NO: 364695 - DNA, 1886 bp, Homo sapiens; identical to SEQ ID NO: 333411
  chr8:29205985-29207871
  hypo

SEQ ID NO: 364696 - DNA, 267 bp, Homo sapiens; identical to SEQ ID NO: 339878
  chr8:30561955-30562222
  hypo

SEQ ID NO: 364697 - DNA, 231 bp, Homo sapiens; identical to SEQ ID NO: 359092
  chr8:33372206-33372437
  hypo

SEQ ID NO: 364698 - DNA, 795 bp, Homo sapiens; identical to SEQ ID NO: 350734
  chr8:37553381-37554176
  hypo

SEQ ID NO: 364699 - DNA, 402 bp, Homo sapiens; identical to SEQ ID NO: 339882
  chr8:37702286-37702688
  hypo

SEQ ID NO: 364700 - DNA, 226 bp, Homo sapiens; identical to SEQ ID NO: 201396
  chr8:38326050-38326276
  hypo

SEQ ID NO: 364701 - DNA, 85 bp, Homo sapiens; identical to SEQ ID NO: 339884
  chr8:38697075-38697160
  hypo

SEQ ID NO: 364702 - DNA, 95 bp, Homo sapiens
  chr8:41478653-41478748
  hypo
cggctttcgccgagccgcagcgggatccctgtgcacccggcgcagcctacccttggtggtctaaacggatgctgctgggtgttgcgacccaggac

SEQ ID NO: 364703 - DNA, 49 bp, Homo sapiens; identical to SEQ ID NO: 354174
  chr8:41553941-41553990
  hypo

SEQ ID NO: 364704 - DNA, 39 bp, Homo sapiens; identical to SEQ ID NO: 354175
  chr8:41668308-41668347
  hypo

SEQ ID NO: 364705 - DNA, 65 bp, Homo sapiens; identical to SEQ ID NO: 339891
  chr8:42134216-42134281
  hypo

SEQ ID NO: 364706 - DNA, 100 bp, Homo sapiens; identical to SEQ ID NO: 339894
  chr8:42316852-42316952
  hypo

SEQ ID NO: 364707 - DNA, 293 bp, Homo sapiens; identical to SEQ ID NO: 354177
  chr8:42333256-42333549
  hypo

SEQ ID NO: 364708 - DNA, 172 bp, Homo sapiens; identical to SEQ ID NO: 348297
  chr8:42750012-42750184
  hypo

SEQ ID NO: 364709 - DNA, 45 bp, Homo sapiens
  chr8:48044665-48044710
  hypo
cgacgaacgccaagccaagccgttacatacgcatgcgcagaacac

SEQ ID NO: 364710 - DNA, 410 bp, Homo sapiens; identical to SEQ ID NO: 339898
  chr8:48292766-48293176
  hypo

SEQ ID NO: 364711 - DNA, 198 bp, Homo sapiens; identical to SEQ ID NO: 339899
  chr8:48396539-48396737
  hypo

SEQ ID NO: 364712 - DNA, 166 bp, Homo sapiens; identical to SEQ ID NO: 339901
  chr8:48801168-48801334
  hypo

SEQ ID NO: 364713 - DNA, 207 bp, Homo sapiens; identical to SEQ ID NO: 339902
  chr8:49241546-49241753
  hypo

SEQ ID NO: 364714 - DNA, 68 bp, Homo sapiens; identical to SEQ ID NO: 345936
  chr8:49334914-49334982
  hypo

SEQ ID NO: 364715 - DNA, 201 bp, Homo sapiens; identical to SEQ ID NO: 339904
  chr8:49339738-49339939
  hypo

SEQ ID NO: 364716 - DNA, 31 bp, Homo sapiens; identical to SEQ ID NO: 354182
  chr8:49382262-49382293
  hypo

SEQ ID NO: 364717 - DNA, 439 bp, Homo sapiens; identical to SEQ ID NO: 354183
  chr8:49382383-49382822
  hypo

SEQ ID NO: 364718 - DNA, 96 bp, Homo sapiens
  chr8:49390203-49390299
  hypo
cggacactcactacagcccggtgcctgcggagtattccgaacgcgagatccaaggaaaccacgaaggctcctctgcgggctcccttgcccctctgc

SEQ ID NO: 364719 - DNA, 52 bp, Homo sapiens
  chr8:49390625-49390677
  hypo
gccctggagaccaggccaagggaagccttggagtgaacctggtcgcaggtgc

SEQ ID NO: 364720 - DNA, 143 bp, Homo sapiens
  chr8:49496420-49496563
  hypo
agtcctcgcctgactggcctcttccctacatgctgttctccacgttgccttcccgtgagctttcctttttgcctaaacacatttttcagctccatgtttctgacagactggttactaaaatccaacccaacaacgtgtaggac

SEQ ID NO: 364721 - DNA, 187 bp, Homo sapiens; identical to SEQ ID NO: 354184
  chr8:49571728-49571915
  hypo

SEQ ID NO: 364722 - DNA, 256 bp, Homo sapiens; identical to SEQ ID NO: 339913
  chr8:50313987-50314243
  hypo

SEQ ID NO: 364723 - DNA, 127 bp, Homo sapiens; identical to SEQ ID NO: 359106
  chr8:53853387-53853514
  hypo

SEQ ID NO: 364724 - DNA, 116 bp, Homo sapiens; identical to SEQ ID NO: 201413
  chr8:56014011-56014127
  hypo

SEQ ID NO: 364725 - DNA, 156 bp, Homo sapiens; identical to SEQ ID NO: 354187
  chr8:56602062-56602218
  hypo

SEQ ID NO: 364726 - DNA, 72 bp, Homo sapiens; identical to SEQ ID NO: 354188
  chr8:56602280-56602352
  hypo

SEQ ID NO: 364727 - DNA, 172 bp, Homo sapiens; identical to SEQ ID NO: 359111
  chr8:56791852-56792024
  hypo

SEQ ID NO: 364728 - DNA, 1176 bp, Homo sapiens; identical to SEQ ID NO: 359112
  chr8:56792065-56793241
  hypo

SEQ ID NO: 364729 - DNA, 606 bp, Homo sapiens; identical to SEQ ID NO: 333447
  chr8:57122656-57123262
  hypo

SEQ ID NO: 364730 - DNA, 238 bp, Homo sapiens; identical to SEQ ID NO: 201421
  chr8:60030908-60031146
  hypo

SEQ ID NO: 364731 - DNA, 349 bp, Homo sapiens; identical to SEQ ID NO: 201422
  chr8:60031791-60032140
  hypo

SEQ ID NO: 364732 - DNA, 114 bp, Homo sapiens; identical to SEQ ID NO: 339934
  chr8:61156160-61156274
  hypo

SEQ ID NO: 364733 - DNA, 292 bp, Homo sapiens; identical to SEQ ID NO: 201424
  chr8:61193765-61194057
  hypo

SEQ ID NO: 364734 - DNA, 144 bp, Homo sapiens; identical to SEQ ID NO: 201426
  chr8:61822883-61823027
  hypo

SEQ ID NO: 364735 - DNA, 267 bp, Homo sapiens; identical to SEQ ID NO: 350760
  chr8:65494311-65494578
  hypo

SEQ ID NO: 364736 - DNA, 69 bp, Homo sapiens; identical to SEQ ID NO: 339940
  chr8:66877733-66877802
  hypo

SEQ ID NO: 364737 - DNA, 349 bp, Homo sapiens; identical to SEQ ID NO: 339943
  chr8:68115303-68115652
  hypo

SEQ ID NO: 364738 - DNA, 42 bp, Homo sapiens; identical to SEQ ID NO: 350765
  chr8:69242761-69242803
  hypo

SEQ ID NO: 364739 - DNA, 56 bp, Homo sapiens; identical to SEQ ID NO: 201448
  chr8:69243011-69243067
  hypo

SEQ ID NO: 364740 - DNA, 110 bp, Homo sapiens; identical to SEQ ID NO: 339945
  chr8:70246389-70246499
  hypo

SEQ ID NO: 364741 - DNA, 1459 bp, Homo sapiens; identical to SEQ ID NO: 350767
  chr8:70745324-70746783
  hypo

SEQ ID NO: 364742 - DNA, 31 bp, Homo sapiens; identical to SEQ ID NO: 354200
  chr8:71017208-71017239
  hypo

SEQ ID NO: 364743 - DNA, 311 bp, Homo sapiens; identical to SEQ ID NO: 333477
  chr8:71316520-71316831
  hypo

SEQ ID NO: 364744 - DNA, 145 bp, Homo sapiens; identical to SEQ ID NO: 354201
  chr8:71447942-71448087
  hypo

SEQ ID NO: 364745 - DNA, 50 bp, Homo sapiens; identical to SEQ ID NO: 354202
  chr8:71448124-71448174
  hypo

SEQ ID NO: 364746 - DNA, 100 bp, Homo sapiens; identical to SEQ ID NO: 339951
  chr8:71522547-71522647
  hypo

SEQ ID NO: 364747 - DNA, 55 bp, Homo sapiens; identical to SEQ ID NO: 346990
  chr8:72756949-72757004
  hypo

SEQ ID NO: 364748 - DNA, 94 bp, Homo sapiens; identical to SEQ ID NO: 359138
  chr8:73448692-73448786
  hypo

SEQ ID NO: 364749 - DNA, 252 bp, Homo sapiens; identical to SEQ ID NO: 285959
  chr8:73448832-73449084
  hypo

SEQ ID NO: 364750 - DNA, 263 bp, Homo sapiens; identical to SEQ ID NO: 285960
  chr8:73449114-73449377
  hypo

SEQ ID NO: 364751 - DNA, 207 bp, Homo sapiens; identical to SEQ ID NO: 285961
  chr8:73449432-73449639
  hypo

SEQ ID NO: 364752 - DNA, 145 bp, Homo sapiens; identical to SEQ ID NO: 339955
  chr8:73979624-73979769
  hypo

SEQ ID NO: 364753 - DNA, 90 bp, Homo sapiens; identical to SEQ ID NO: 348305
  chr8:74674345-74674435
  hypo

SEQ ID NO: 364754 - DNA, 194 bp, Homo sapiens; identical to SEQ ID NO: 350770
  chr8:77589904-77590098
  hypo

SEQ ID NO: 364755 - DNA, 208 bp, Homo sapiens; identical to SEQ ID NO: 201482
  chr8:80803900-80804108
  hypo

SEQ ID NO: 364756 - DNA, 141 bp, Homo sapiens; identical to SEQ ID NO: 354208
  chr8:81213177-81213318
  hypo

SEQ ID NO: 364757 - DNA, 327 bp, Homo sapiens; identical to SEQ ID NO: 354209
  chr8:81213356-81213683
  hypo

SEQ ID NO: 364758 - DNA, 273 bp, Homo sapiens; identical to SEQ ID NO: 201484
  chr8:81398155-81398428
  hypo

SEQ ID NO: 364759 - DNA, 917 bp, Homo sapiens; identical to SEQ ID NO: 350777
  chr8:81785915-81786832
  hypo

SEQ ID NO: 364760 - DNA, 196 bp, Homo sapiens; identical to SEQ ID NO: 350778
  chr8:82192428-82192624
  hypo

SEQ ID NO: 364761 - DNA, 99 bp, Homo sapiens; identical to SEQ ID NO: 345308
  chr8:82193698-82193797
  hypo

SEQ ID NO: 364762 - DNA, 33 bp, Homo sapiens
  chr8:82903010-82903043
  hypo
cgctttacgtattcaagcctcagcaatggcaga

SEQ ID NO: 364763 - DNA, 245 bp, Homo sapiens; identical to SEQ ID NO: 350781
  chr8:91657421-91657666
  hypo

SEQ ID NO: 364764 - DNA, 71 bp, Homo sapiens; identical to SEQ ID NO: 339971
  chr8:92120822-92120893
  hypo

SEQ ID NO: 364765 - DNA, 107 bp, Homo sapiens; identical to SEQ ID NO: 339972
  chr8:94684099-94684206
  hypo

SEQ ID NO: 364766 - DNA, 136 bp, Homo sapiens; identical to SEQ ID NO: 339973
  chr8:94685462-94685598
  hypo

SEQ ID NO: 364767 - DNA, 248 bp, Homo sapiens; identical to SEQ ID NO: 286033
  chr8:94712881-94713129
  hypo

SEQ ID NO: 364768 - DNA, 60 bp, Homo sapiens; identical to SEQ ID NO: 339975
  chr8:94747749-94747809
  hypo

SEQ ID NO: 364769 - DNA, 58 bp, Homo sapiens
  chr8:95816370-95816428
  hypo
cgttttcatttatagccactgttagtaatgaggaaagacagcagaaaagaaagctcag

SEQ ID NO: 364770 - DNA, 78 bp, Homo sapiens; identical to SEQ ID NO: 339978
  chr8:95848311-95848389
  hypo

SEQ ID NO: 364771 - DNA, 765 bp, Homo sapiens; identical to SEQ ID NO: 286064
  chr8:98881052-98881817
  hypo

SEQ ID NO: 364772 - DNA, 43 bp, Homo sapiens; identical to SEQ ID NO: 359180
  chr8:98881884-98881927
  hypo

SEQ ID NO: 364773 - DNA, 74 bp, Homo sapiens; identical to SEQ ID NO: 286069
  chr8:99438739-99438813
  hypo

SEQ ID NO: 364774 - DNA, 418 bp, Homo sapiens; identical to SEQ ID NO: 201528
  chr8:99954762-99955180
  hypo

SEQ ID NO: 364775 - DNA, 826 bp, Homo sapiens; identical to SEQ ID NO: 346999
  chr8:99956460-99957286
  hypo

SEQ ID NO: 364776 - DNA, 448 bp, Homo sapiens; identical to SEQ ID NO: 354219
  chr8:100796506-100796954
  hypo

SEQ ID NO: 364777 - DNA, 76 bp, Homo sapiens; identical to SEQ ID NO: 339988
  chr8:100851164-100851240
  hypo

SEQ ID NO: 364778 - DNA, 39 bp, Homo sapiens
  chr8:101717122-101717161
  hypo
agaggcaacttggtaaataaatttaaatcaccttagaac

SEQ ID NO: 364779 - DNA, 162 bp, Homo sapiens; identical to SEQ ID NO: 354221
  chr8:102039330-102039492
  hypo

SEQ ID NO: 364780 - DNA, 160 bp, Homo sapiens; identical to SEQ ID NO: 339991
  chr8:102190390-102190550
  hypo

SEQ ID NO: 364781 - DNA, 40 bp, Homo sapiens; identical to SEQ ID NO: 201544
  chr8:102506365-102506405
  hypo

SEQ ID NO: 364782 - DNA, 89 bp, Homo sapiens; identical to SEQ ID NO: 339994
  chr8:103315038-103315127
  hypo

SEQ ID NO: 364783 - DNA, 126 bp, Homo sapiens
  chr8:103572766-103572892
  hypo
cgatcaagtcaaagttcgagtgaaggatggaaaggtatgtgtgtcggctgagcgggagaacaggtacgactgccttggatcgaaaaagtacagctacatgaacatctgcaaagagttcagcttgcc

SEQ ID NO: 364784 - DNA, 429 bp, Homo sapiens; identical to SEQ ID NO: 201548
  chr8:104511554-104511983
  hypo

SEQ ID NO: 364785 - DNA, 622 bp, Homo sapiens; identical to SEQ ID NO: 347003
  chr8:107669381-107670003
  hypo

SEQ ID NO: 364786 - DNA, 225 bp, Homo sapiens; identical to SEQ ID NO: 350815
  chr8:109799189-109799414
  hypo

SEQ ID NO: 364787 - DNA, 42 bp, Homo sapiens; identical to SEQ ID NO: 350816
  chr8:109799903-109799945
  hypo

SEQ ID NO: 364788 - DNA, 120 bp, Homo sapiens; identical to SEQ ID NO: 340001
  chr8:117631330-117631450
  hypo

SEQ ID NO: 364789 - DNA, 221 bp, Homo sapiens; identical to SEQ ID NO: 340002
  chr8:118531602-118531823
  hypo

SEQ ID NO: 364790 - DNA, 194 bp, Homo sapiens; identical to SEQ ID NO: 350823
  chr8:119123513-119123707
  hypo

SEQ ID NO: 364791 - DNA, 123 bp, Homo sapiens
  chr8:120846246-120846369
  hypo
cgaagccatcgtgtttgtatttcatgttcatgacaataaaacttgtaaacttcagtaacagttaaaccttctttaattatggattagccattaacatttttgaaacgtggaccatttaacctc

SEQ ID NO: 364792 - DNA, 540 bp, Homo sapiens; identical to SEQ ID NO: 347007
  chr8:121823361-121823901
  hypo

SEQ ID NO: 364793 - DNA, 211 bp, Homo sapiens; identical to SEQ ID NO: 347008
  chr8:121824481-121824692
  hypo

SEQ ID NO: 364794 - DNA, 233 bp, Homo sapiens; identical to SEQ ID NO: 340008
  chr8:123830706-123830939
  hypo

SEQ ID NO: 364795 - DNA, 149 bp, Homo sapiens; identical to SEQ ID NO: 340009
  chr8:123865814-123865963
  hypo

SEQ ID NO: 364796 - DNA, 308 bp, Homo sapiens; identical to SEQ ID NO: 340013
  chr8:124730010-124730318
  hypo

SEQ ID NO: 364797 - DNA, 62 bp, Homo sapiens; identical to SEQ ID NO: 340014
  chr8:125498221-125498283
  hypo

SEQ ID NO: 364798 - DNA, 104 bp, Homo sapiens; identical to SEQ ID NO: 354234
  chr8:125580698-125580802
  hypo

SEQ ID NO: 364799 - DNA, 73 bp, Homo sapiens; identical to SEQ ID NO: 340018
  chr8:125680364-125680437
  hypo

SEQ ID NO: 364800 - DNA, 132 bp, Homo sapiens; identical to SEQ ID NO: 340020
  chr8:126042734-126042866
  hypo

SEQ ID NO: 364801 - DNA, 43 bp, Homo sapiens; identical to SEQ ID NO: 348315
  chr8:126044399-126044442
  hypo

SEQ ID NO: 364802 - DNA, 354 bp, Homo sapiens; identical to SEQ ID NO: 340025
  chr8:128867892-128868246
  hypo

SEQ ID NO: 364803 - DNA, 630 bp, Homo sapiens; identical to SEQ ID NO: 345945
  chr8:128871653-128872283
  hypo

SEQ ID NO: 364804 - DNA, 191 bp, Homo sapiens; identical to SEQ ID NO: 345946
  chr8:128872459-128872650
  hypo

SEQ ID NO: 364805 - DNA, 61 bp, Homo sapiens; identical to SEQ ID NO: 345947
  chr8:128888848-128888909
  hypo

SEQ ID NO: 364806 - DNA, 43 bp, Homo sapiens; identical to SEQ ID NO: 345948
  chr8:128889422-128889465
  hypo

SEQ ID NO: 364807 - DNA, 440 bp, Homo sapiens; identical to SEQ ID NO: 340028
  chr8:128893135-128893575
  hypo

SEQ ID NO: 364808 - DNA, 85 bp, Homo sapiens
  chr8:128931048-128931133
  hypo
cgctgcattcttttctaaccacccaagagataagttgaacccccactcgtagcaacctggccacttgtctgtttagtcagccctg

SEQ ID NO: 364809 - DNA, 142 bp, Homo sapiens
  chr8:128931261-128931403
  hypo
gacacccttcttcagatgaccgctgtcaggttggtgaaggcagtgcgcgttgggccttccctccctagagatgtgattgcacgtcgggtaccaggagcctggccagccctcagcttctgctaaccagggagcagtgaagccc

SEQ ID NO: 364810 - DNA, 107 bp, Homo sapiens; identical to SEQ ID NO: 340030
  chr8:128957492-128957599
  hypo

SEQ ID NO: 364811 - DNA, 159 bp, Homo sapiens; identical to SEQ ID NO: 340032
  chr8:131064030-131064189
  hypo

SEQ ID NO: 364812 - DNA, 105 bp, Homo sapiens; identical to SEQ ID NO: 359228
  chr8:131455079-131455184
  hypo

SEQ ID NO: 364813 - DNA, 310 bp, Homo sapiens; identical to SEQ ID NO: 286199
  chr8:133493185-133493495
  hypo

SEQ ID NO: 364814 - DNA, 171 bp, Homo sapiens; identical to SEQ ID NO: 340039
  chr8:134335659-134335830
  hypo

SEQ ID NO: 364815 - DNA, 435 bp, Homo sapiens; identical to SEQ ID NO: 359231
  chr8:134582738-134583173
  hypo

SEQ ID NO: 364816 - DNA, 926 bp, Homo sapiens; identical to SEQ ID NO: 359232
  chr8:134583293-134584219
  hypo

SEQ ID NO: 364817 - DNA, 66 bp, Homo sapiens; identical to SEQ ID NO: 340041
  chr8:135805728-135805794
  hypo

SEQ ID NO: 364818 - DNA, 392 bp, Homo sapiens; identical to SEQ ID NO: 359233
  chr8:136469763-136470155
  hypo

SEQ ID NO: 364819 - DNA, 206 bp, Homo sapiens; identical to SEQ ID NO: 359234
  chr8:136470313-136470519
  hypo

SEQ ID NO: 364820 - DNA, 102 bp, Homo sapiens; identical to SEQ ID NO: 286213
  chr8:139509549-139509651
  hypo

SEQ ID NO: 364821 - DNA, 368 bp, Homo sapiens; identical to SEQ ID NO: 340046
  chr8:140785341-140785709
  hypo

SEQ ID NO: 364822 - DNA, 482 bp, Homo sapiens; identical to SEQ ID NO: 340048
  chr8:140815079-140815561
  hypo

SEQ ID NO: 364823 - DNA, 131 bp, Homo sapiens; identical to SEQ ID NO: 340049
  chr8:140932087-140932218
  hypo

SEQ ID NO: 364824 - DNA, 641 bp, Homo sapiens; identical to SEQ ID NO: 340050
  chr8:140937017-140937658
  hypo

SEQ ID NO: 364825 - DNA, 110 bp, Homo sapiens; identical to SEQ ID NO: 340051
  chr8:140950018-140950128
  hypo

SEQ ID NO: 364826 - DNA, 147 bp, Homo sapiens; identical to SEQ ID NO: 354246
  chr8:140963396-140963543
  hypo

SEQ ID NO: 364827 - DNA, 320 bp, Homo sapiens; identical to SEQ ID NO: 348321
  chr8:140971025-140971345
  hypo

SEQ ID NO: 364828 - DNA, 148 bp, Homo sapiens; identical to SEQ ID NO: 348322
  chr8:140971375-140971523
  hypo

SEQ ID NO: 364829 - DNA, 90 bp, Homo sapiens; identical to SEQ ID NO: 340054
  chr8:140992426-140992516
  hypo

SEQ ID NO: 364830 - DNA, 139 bp, Homo sapiens
  chr8:141107001-141107140
  hypo
tgctgagaagtcaagaagaatgtgtcctcgcagctcctcctgcagcacctcacagtgcacaaccggctgggccagcccatccagcatagagatgtgaaaacctgtccaggtcgctggtgtatagccagaacaatggcac

SEQ ID NO: 364831 - DNA, 392 bp, Homo sapiens; identical to SEQ ID NO: 340057
  chr8:141147354-141147746
  hypo

SEQ ID NO: 364832 - DNA, 46 bp, Homo sapiens; identical to SEQ ID NO: 354251
  chr8:141159949-141159995
  hypo

SEQ ID NO: 364833 - DNA, 140 bp, Homo sapiens; identical to SEQ ID NO: 354252
  chr8:141249621-141249761
  hypo

SEQ ID NO: 364834 - DNA, 261 bp, Homo sapiens; identical to SEQ ID NO: 340060
  chr8:141458771-141459032
  hypo

SEQ ID NO: 364835 - DNA, 48 bp, Homo sapiens; identical to SEQ ID NO: 340061
  chr8:141525521-141525569
  hypo

SEQ ID NO: 364836 - DNA, 107 bp, Homo sapiens; identical to SEQ ID NO: 345951
  chr8:141534525-141534632
  hypo

SEQ ID NO: 364837 - DNA, 49 bp, Homo sapiens; identical to SEQ ID NO: 354255
  chr8:141559645-141559694
  hypo

SEQ ID NO: 364838 - DNA, 35 bp, Homo sapiens; identical to SEQ ID NO: 354256
  chr8:141559724-141559759
  hypo

SEQ ID NO: 364839 - DNA, 296 bp, Homo sapiens; identical to SEQ ID NO: 345952
  chr8:141599879-141600175
  hypo

SEQ ID NO: 364840 - DNA, 50 bp, Homo sapiens; identical to SEQ ID NO: 345953
  chr8:141600284-141600334
  hypo

SEQ ID NO: 364841 - DNA, 62 bp, Homo sapiens; identical to SEQ ID NO: 354259
  chr8:141623736-141623798
  hypo

SEQ ID NO: 364842 - DNA, 82 bp, Homo sapiens; identical to SEQ ID NO: 340069
  chr8:141624866-141624948
  hypo

SEQ ID NO: 364843 - DNA, 104 bp, Homo sapiens; identical to SEQ ID NO: 340070
  chr8:141634072-141634176
  hypo

SEQ ID NO: 364844 - DNA, 1631 bp, Homo sapiens; identical to SEQ ID NO: 333579
  chr8:142138208-142139839
  hypo

SEQ ID NO: 364845 - DNA, 327 bp, Homo sapiens; identical to SEQ ID NO: 354261
  chr8:142227279-142227606
  hypo

SEQ ID NO: 364846 - DNA, 934 bp, Homo sapiens; identical to SEQ ID NO: 340073
  chr8:142235190-142236124
  hypo

SEQ ID NO: 364847 - DNA, 840 bp, Homo sapiens; identical to SEQ ID NO: 340074
  chr8:142240180-142241020
  hypo

SEQ ID NO: 364848 - DNA, 190 bp, Homo sapiens
  chr8:142242748-142242938
  hypo
cgggaacacagacattcagtggctcccaggtgagcgctcaccagctgcaacgggaacacagacattcagtggctcaacacagacattcagtggctcccaggtgagcactcacaagctgcaacgggaacacacacactcagtggctcccaggtgagcgctcgcgagctgcaacgggaacacacgcactcaa

SEQ ID NO: 364849 - DNA, 88 bp, Homo sapiens; identical to SEQ ID NO: 354263
  chr8:142243860-142243948
  hypo

SEQ ID NO: 364850 - DNA, 66 bp, Homo sapiens; identical to SEQ ID NO: 354264
  chr8:142244214-142244280
  hypo

SEQ ID NO: 364851 - DNA, 204 bp, Homo sapiens; identical to SEQ ID NO: 340078
  chr8:142248320-142248524
  hypo

SEQ ID NO: 364852 - DNA, 593 bp, Homo sapiens; identical to SEQ ID NO: 340079
  chr8:142262690-142263283
  hypo

SEQ ID NO: 364853 - DNA, 449 bp, Homo sapiens; identical to SEQ ID NO: 345316
  chr8:142317706-142318155
  hypo

SEQ ID NO: 364854 - DNA, 415 bp, Homo sapiens; identical to SEQ ID NO: 345317
  chr8:142318184-142318599
  hypo

SEQ ID NO: 364855 - DNA, 192 bp, Homo sapiens; identical to SEQ ID NO: 345956
  chr8:142367176-142367368
  hypo

SEQ ID NO: 364856 - DNA, 287 bp, Homo sapiens; identical to SEQ ID NO: 212577
  chr8:142367824-142368111
  hypo

SEQ ID NO: 364857 - DNA, 106 bp, Homo sapiens; identical to SEQ ID NO: 350835
  chr8:142427489-142427595
  hypo

SEQ ID NO: 364858 - DNA, 327 bp, Homo sapiens; identical to SEQ ID NO: 286229
  chr8:142427700-142428027
  hypo

SEQ ID NO: 364859 - DNA, 73 bp, Homo sapiens
  chr8:142439127-142439200
  hypo
cgcacctgaggctgcgctggtcaggacaggttgggccatgctgcggaaacagccaggcctgaaccccaacgac

SEQ ID NO: 364860 - DNA, 76 bp, Homo sapiens
  chr8:142630171-142630247
  hypo
cgagggtggtgggcgccccggagcgctggtggggattgggcaaagacgtcaacaccagggctgtggaaggaggcga

SEQ ID NO: 364861 - DNA, 337 bp, Homo sapiens
  chr8:142630288-142630625
  hypo
tggtggggattgggcaaagacgtcaacaccagggctgtggaaggaggcgagggccttcaggtgccgagggtggtgggcgccccggagcgctggtggggattgggcaaagacgtcaacaccagggctgtggaaggaggcgaggggccttcaggtgccgagggtggtgggcgccccggagcgctggtggggattgggcaaagacgtcaacaccagggctgtggaaggaggcgaggggccttcaggtgccgagggtggtgcgcacccagggatgctggtggggattgggcaaagacgtcaactccagggctgtggaaggaggcgagggccttcaggtgcc

SEQ ID NO: 364862 - DNA, 181 bp, Homo sapiens
  chr8:142880985-142881166
  hypo
cggccacccctccttgcctggccatcctccttgccatgtcacccctcaacgccaacccgtgcatgtgggggtgcatgaccagctgacatgggagtgtgggtcagccccagggccaagggggaagtgggtgagccaagatcccggagcatgacaagggccctggcagctgattggcagggga

SEQ ID NO: 364863 - DNA, 122 bp, Homo sapiens
  chr8:142881196-142881318
  hypo
tcactgcggctggagggtctgggtgggaaggtgggtacagggagcaggcatgtcggactatgaatgcggagtgggaaacacagaacgactcgttgtggggagactagggatggacggggtcc

SEQ ID NO: 364864 - DNA, 120 bp, Homo sapiens; identical to SEQ ID NO: 212589
  chr8:143054871-143054991
  hypo

SEQ ID NO: 364865 - DNA, 219 bp, Homo sapiens
  chr8:143089100-143089319
  hypo
cctcagtgaaggagctgggctcagacaggatgcccaagagaagaatgacctgaaatgacatctccgctgatgcccagctcagtgtgcagaggctattgtctccccgtccacccacccctgaggaagccagcctgtagctatcccctcaggcccttccctgacctgctgggctctgctgttagcccctgagcagccaccactcgcacctggacacaccgc

SEQ ID NO: 364866 - DNA, 241 bp, Homo sapiens; identical to SEQ ID NO: 340094
  chr8:143234575-143234816
  hypo

SEQ ID NO: 364867 - DNA, 55 bp, Homo sapiens; identical to SEQ ID NO: 354273
  chr8:143333267-143333322
  hypo

SEQ ID NO: 364868 - DNA, 36 bp, Homo sapiens
  chr8:143334502-143334538
  hypo
cgggtgagagtgcggaggtggacaggctggcgacag

SEQ ID NO: 364869 - DNA, 301 bp, Homo sapiens
  chr8:143386497-143386798
  hypo
cgggcgagtgagatggccaggtggagaaggcaccacaggacgttctgtgcgatgttccctggacttgggggtttcagtgacagctccccaggagctgtgggcagagggtgccaggcacccatggagacctgcctcggatctgtgccttgggattgatgccacctcctgcatgtggagaaggggaagctcaggaggataggggagggcgcaggggtgggaggggggtgcaaacggggttccgtgtggacgcccaggaaagcggccaggctggggtgcgggctgtgtggacacccaggaaggc

SEQ ID NO: 364870 - DNA, 388 bp, Homo sapiens
  chr8:143386940-143387328
  hypo
tgcaggacaaaagccaggggaggaagagatggcttagacgcccgggtccctccgcggcctcctcctgaaaggctcacaaagcgctcctttattctccccacaaaggcccaatttgggtcttgagctccgaggctgggattagggatttgctggcaaggtgctggggcaagcgcagaggggacggccctgtgatagttttccagctcaagaggcagacagacaaaggcggctttctcctccccacagggctcagggcctgggtccctgttccgacacgtagggaagagacatgctctaacgtgagtgctggagacagggcacacacggtttcccgtgggaagagactccgctctgccaggcattcagaaagcagggacccgaggccggc

SEQ ID NO: 364871 - DNA, 162 bp, Homo sapiens
  chr8:143397305-143397467
  hypo
cgtgcacccaccaagccgcgtgaaggagccattcgcttcacgaggaaactgcctgcacggaccacccaactctgctctcaccccacagaaacgcctctcagaatcgcaaccctccaccatgtggggccttgctcagcacctcacgtaagcgcagcgcctccc

SEQ ID NO: 364872 - DNA, 141 bp, Homo sapiens
  chr8:143436836-143436977
  hypo
cggccgtccctggaatggggagctgggcatcccgcccaaacctctcctcccgtgggctgcagctccagggactcagagcaaatgaccagaggataacgggagctctcctgcccagacactgccagagcgtcctccctgtgt

SEQ ID NO: 364873 - DNA, 107 bp, Homo sapiens
  chr8:143509044-143509151
  hypo
cggttcttcccacgtgggatattctggctgtacgcgcgtgaccgtgactgtggggactggcccagggcttgactgtggggactggcccagggcttttcagggttgga

SEQ ID NO: 364874 - DNA, 64 bp, Homo sapiens; identical to SEQ ID NO: 359243
  chr8:143531771-143531835
  hypo

SEQ ID NO: 364875 - DNA, 120 bp, Homo sapiens; identical to SEQ ID NO: 347012
  chr8:143531858-143531978
  hypo

SEQ ID NO: 364876 - DNA, 296 bp, Homo sapiens; identical to SEQ ID NO: 117271
  chr8:143556722-143557018
  hypo

SEQ ID NO: 364877 - DNA, 68 bp, Homo sapiens; identical to SEQ ID NO: 345958
  chr8:143558643-143558711
  hypo

SEQ ID NO: 364878 - DNA, 220 bp, Homo sapiens; identical to SEQ ID NO: 340107
  chr8:143582357-143582577
  hypo

SEQ ID NO: 364879 - DNA, 311 bp, Homo sapiens
  chr8:143614687-143614998
  hypo
cgctgctggcgctgacctggatgtcggctgtgctcgccgtcaccgaccgccgctccgccctcttccagatcctcttcgctgtcttcgactcgctggagggcttcgtcatcgtcatggtgcactgtatcctccgtagagaggtgggtgaggcagcctctgtcgggccgggctcctgcggggtcctggggctgccgagtggcctcctccttccccgaggacctcggcagggagattgtgggtaggcgcagcatccatgaccctgacacatctgcaggcctcggtggtccacagagcggggcctgcaggtgagc

SEQ ID NO: 364880 - DNA, 241 bp, Homo sapiens
  chr8:143660391-143660632
  hypo
cgtcagagagagcctcaaaccgtcagcgttggccaccgccttgcactgcgcccatgcttggagccccgagccccaggccaggccctgcccgcccgctcagccctgctcgccatgctcccgcccttgctgctggggcggccggcagggagcccacctgaggcgcagagggaggccattgccgggcgctgccaccatgaggagtcccgagtcctggggagacaggtcctgtgcagggaacaga

SEQ ID NO: 364881 - DNA, 260 bp, Homo sapiens; identical to SEQ ID NO: 354278
  chr8:143662794-143663054
  hypo

SEQ ID NO: 364882 - DNA, 321 bp, Homo sapiens; identical to SEQ ID NO: 340114
  chr8:144178383-144178704
  hypo

SEQ ID NO: 364883 - DNA, 423 bp, Homo sapiens; identical to SEQ ID NO: 354279
  chr8:144205313-144205736
  hypo

SEQ ID NO: 364884 - DNA, 112 bp, Homo sapiens
  chr8:144222962-144223074
  hypo
tccgacaacgttcacgcgaccaaagaaatgaactcgagccccaccttctgcagccacagggacctcgaatgctgcggagcttcccacggacacttcgcttctcccagtggcc

SEQ ID NO: 364885 - DNA, 41 bp, Homo sapiens
  chr8:144292304-144292345
  hypo
cgcaccatcccaggtggcaccttctgtaggggctggaccag

SEQ ID NO: 364886 - DNA, 254 bp, Homo sapiens
  chr8:144292470-144292724
  hypo
cctgggctgggcagtttgcacctgggctgaagaggagctgggcccagagggaggcaacgtgcaagggcctgggcccctgtggaggggaggcggcaggtggaggccccttgagaatcccagtagcgcccttcctaggagcagctcctgcagcactagattcaagggcctgtagcggtagccggggcggggcgcgggggaggtagggcagcaggaaagcggggcaccagggaagcggggcgacagggaggcggggc

SEQ ID NO: 364887 - DNA, 202 bp, Homo sapiens
  chr8:144293893-144294095
  hypo
tagagacaggtattcccagcctcaggcgctgtcctaagcccagcaggtactgacccttgatggtcacctcaccctatgagggagctgaggcctggggaacccaaggggctagtccagaacccacagccgggggaaggaggaaccgggtcttaaacccaggtagctcactccagaaccaactcaacctctgttacaggtggcc

SEQ ID NO: 364888 - DNA, 65 bp, Homo sapiens; identical to SEQ ID NO: 310299
  chr8:144343416-144343481
  hypo

SEQ ID NO: 364889 - DNA, 227 bp, Homo sapiens; identical to SEQ ID NO: 212625
  chr8:144343992-144344219
  hypo

SEQ ID NO: 364890 - DNA, 231 bp, Homo sapiens; identical to SEQ ID NO: 340121
  chr8:144351704-144351935
  hypo

SEQ ID NO: 364891 - DNA, 283 bp, Homo sapiens; identical to SEQ ID NO: 345959
  chr8:144359694-144359977
  hypo

SEQ ID NO: 364892 - DNA, 91 bp, Homo sapiens; identical to SEQ ID NO: 345960
  chr8:144360545-144360636
  hypo

SEQ ID NO: 364893 - DNA, 307 bp, Homo sapiens; identical to SEQ ID NO: 354285
  chr8:144380308-144380615
  hypo

SEQ ID NO: 364894 - DNA, 214 bp, Homo sapiens; identical to SEQ ID NO: 354286
  chr8:144380645-144380859
  hypo

SEQ ID NO: 364895 - DNA, 129 bp, Homo sapiens; identical to SEQ ID NO: 354287
  chr8:144383407-144383536
  hypo

SEQ ID NO: 364896 - DNA, 236 bp, Homo sapiens; identical to SEQ ID NO: 354288
  chr8:144413516-144413752
  hypo

SEQ ID NO: 364897 - DNA, 244 bp, Homo sapiens; identical to SEQ ID NO: 354289
  chr8:144413782-144414026
  hypo

SEQ ID NO: 364898 - DNA, 207 bp, Homo sapiens; identical to SEQ ID NO: 348337
  chr8:144414283-144414490
  hypo

SEQ ID NO: 364899 - DNA, 51 bp, Homo sapiens; identical to SEQ ID NO: 354291
  chr8:144457685-144457736
  hypo

SEQ ID NO: 364900 - DNA, 70 bp, Homo sapiens; identical to SEQ ID NO: 354292
  chr8:144457835-144457905
  hypo

SEQ ID NO: 364901 - DNA, 538 bp, Homo sapiens
  chr8:144461002-144461540
  hypo
cgggcggaggcaccctggggaggggaggcccagctgcgggaaccgtgggaactccacccagcctgacccaacactgcaggtacgactcgcttactggggtcccggcccagcagcgtgccctggccttcgagaagggcagcgttctcttcaacatcggtgccctccacacgcagattggggcgcgccaggaccgctcctgcaccgagggtgcccgccgcgctatggaggccttccagagggccgctggtgagggcggcccgggccgcggtggggcacggcgcggtgccagggtgttgcagagccccttttgcagggcaggagctggggagtggttaggacatcagtccctcaggtagggggagtgagcacatcaggtccatatgtgtcccaggagcatccctagctggccgccctgagtgctgcatggggcagagatgggcaggtacagggccctgcctgtgtgagcacccctccctccgcaggggccttcagcctcctgagggagaacttctcccatgcgccgagcccagacatgagc

SEQ ID NO: 364902 - DNA, 47 bp, Homo sapiens
  chr8:144589930-144589977
  hypo
cgccgggcccgccaggagggcagagacagggggaagggcggggcgct

SEQ ID NO: 364903 - DNA, 220 bp, Homo sapiens
  chr8:144590082-144590302
  hypo
ccagggcacagacatgggtcagggaaggccggcaagggtagggtcagagaggccacccacagtgccagctctgcccaccgcctccgccggagcttgaagaccctccatcgccccgtggataaaaccctcaacccatgtggcacacacatccccagggcgcctggcagccgacgcttcaggagctagccagtgcagcctctgagaggcgggcaccagcccc

SEQ ID NO: 364904 - DNA, 161 bp, Homo sapiens; identical to SEQ ID NO: 340134
  chr8:144621169-144621330
  hypo

SEQ ID NO: 364905 - DNA, 120 bp, Homo sapiens; identical to SEQ ID NO: 286253
  chr8:144636569-144636689
  hypo

SEQ ID NO: 364906 - DNA, 394 bp, Homo sapiens; identical to SEQ ID NO: 350842
  chr8:144640377-144640771
  hypo

SEQ ID NO: 364907 - DNA, 214 bp, Homo sapiens; identical to SEQ ID NO: 354295
  chr8:144658291-144658505
  hypo

SEQ ID NO: 364908 - DNA, 88 bp, Homo sapiens; identical to SEQ ID NO: 345961
  chr8:144676118-144676206
  hypo

SEQ ID NO: 364909 - DNA, 93 bp, Homo sapiens
  chr8:144683804-144683897
  hypo
tttcatttccaacctttcttcccatctcagcccttttgttggcccgggtcccaggaggctggtgtcggtgagggcaggcccgctcctctcatc

SEQ ID NO: 364910 - DNA, 270 bp, Homo sapiens; identical to SEQ ID NO: 340143
  chr8:145226085-145226355
  hypo

SEQ ID NO: 364911 - DNA, 154 bp, Homo sapiens; identical to SEQ ID NO: 340144
  chr8:145661380-145661534
  hypo

SEQ ID NO: 364912 - DNA, 429 bp, Homo sapiens; identical to SEQ ID NO: 333598
  chr8:145733644-145734073
  hypo

SEQ ID NO: 364913 - DNA, 41 bp, Homo sapiens
  chr8:145758485-145758526
  hypo
cggcgcccggggttgccgtggcacctgaagatgccctctgt

SEQ ID NO: 364914 - DNA, 36 bp, Homo sapiens
  chr8:145758692-145758728
  hypo
ttgggcttcttcagcccctgtgaagacagaggctcc

SEQ ID NO: 364915 - DNA, 541 bp, Homo sapiens; identical to SEQ ID NO: 340149
  chr8:145813621-145814162
  hypo

SEQ ID NO: 364916 - DNA, 632 bp, Homo sapiens; identical to SEQ ID NO: 340150
  chr8:145845229-145845861
  hypo

SEQ ID NO: 364917 - DNA, 96 bp, Homo sapiens; identical to SEQ ID NO: 340151
  chr8:145854692-145854788
  hypo

SEQ ID NO: 364918 - DNA, 526 bp, Homo sapiens; identical to SEQ ID NO: 333600
  chr8:145910996-145911522
  hypo

SEQ ID NO: 364919 - DNA, 63 bp, Homo sapiens; identical to SEQ ID NO: 340154
  chr8:146105109-146105172
  hypo

SEQ ID NO: 364920 - DNA, 81 bp, Homo sapiens; identical to SEQ ID NO: 340155
  chr8:146176654-146176735
  hypo

SEQ ID NO: 364921 - DNA, 65 bp, Homo sapiens; identical to SEQ ID NO: 340157
  chr9:173878-173943
  hypo

SEQ ID NO: 364922 - DNA, 92 bp, Homo sapiens; identical to SEQ ID NO: 359261
  chr9:214559-214651
  hypo

SEQ ID NO: 364923 - DNA, 878 bp, Homo sapiens; identical to SEQ ID NO: 333605
  chr9:503936-504814
  hypo

SEQ ID NO: 364924 - DNA, 200 bp, Homo sapiens; identical to SEQ ID NO: 354303
  chr9:2876419-2876619
  hypo

SEQ ID NO: 364925 - DNA, 167 bp, Homo sapiens; identical to SEQ ID NO: 340170
  chr9:4864421-4864588
  hypo

SEQ ID NO: 364926 - DNA, 70 bp, Homo sapiens; identical to SEQ ID NO: 359268
  chr9:6412900-6412970
  hypo

SEQ ID NO: 364927 - DNA, 201 bp, Homo sapiens; identical to SEQ ID NO: 354305
  chr9:6868324-6868525
  hypo

SEQ ID NO: 364928 - DNA, 205 bp, Homo sapiens; identical to SEQ ID NO: 340173
  chr9:6997072-6997277
  hypo

SEQ ID NO: 364929 - DNA, 229 bp, Homo sapiens; identical to SEQ ID NO: 340174
  chr9:7028698-7028927
  hypo

SEQ ID NO: 364930 - DNA, 203 bp, Homo sapiens; identical to SEQ ID NO: 340175
  chr9:7172217-7172420
  hypo

SEQ ID NO: 364931 - DNA, 347 bp, Homo sapiens; identical to SEQ ID NO: 286324
  chr9:13278956-13279303
  hypo

SEQ ID NO: 364932 - DNA, 227 bp, Homo sapiens; identical to SEQ ID NO: 201670
  chr9:13279406-13279633
  hypo

SEQ ID NO: 364933 - DNA, 125 bp, Homo sapiens; identical to SEQ ID NO: 354307
  chr9:13323322-13323447
  hypo

SEQ ID NO: 364934 - DNA, 194 bp, Homo sapiens; identical to SEQ ID NO: 340178
  chr9:14232126-14232320
  hypo

SEQ ID NO: 364935 - DNA, 2011 bp, Homo sapiens; identical to SEQ ID NO: 350852
  chr9:14313785-14315796
  hypo

SEQ ID NO: 364936 - DNA, 43 bp, Homo sapiens
  chr9:19374763-19374806
  hypo
cgcagtgcacacctgtagttcccaggcggtcaaggctgcagtg

SEQ ID NO: 364937 - DNA, 591 bp, Homo sapiens; identical to SEQ ID NO: 350855
  chr9:20620754-20621345
  hypo

SEQ ID NO: 364938 - DNA, 184 bp, Homo sapiens; identical to SEQ ID NO: 340185
  chr9:27212729-27212913
  hypo

SEQ ID NO: 364939 - DNA, 568 bp, Homo sapiens; identical to SEQ ID NO: 345323
  chr9:27528536-27529104
  hypo

SEQ ID NO: 364940 - DNA, 182 bp, Homo sapiens; identical to SEQ ID NO: 201692
  chr9:27529157-27529339
  hypo

SEQ ID NO: 364941 - DNA, 567 bp, Homo sapiens; identical to SEQ ID NO: 345325
  chr9:27529340-27529907
  hypo

SEQ ID NO: 364942 - DNA, 299 bp, Homo sapiens; identical to SEQ ID NO: 286381
  chr9:29212828-29213127
  hypo

SEQ ID NO: 364943 - DNA, 70 bp, Homo sapiens; identical to SEQ ID NO: 340188
  chr9:33023517-33023587
  hypo

SEQ ID NO: 364944 - DNA, 665 bp, Homo sapiens; identical to SEQ ID NO: 340190
  chr9:34318282-34318947
  hypo

SEQ ID NO: 364945 - DNA, 729 bp, Homo sapiens; identical to SEQ ID NO: 354317
  chr9:34372076-34372805
  hypo

SEQ ID NO: 364946 - DNA, 264 bp, Homo sapiens; identical to SEQ ID NO: 359298
  chr9:34591191-34591455
  hypo

SEQ ID NO: 364947 - DNA, 31 bp, Homo sapiens; identical to SEQ ID NO: 359299
  chr9:34591656-34591687
  hypo

SEQ ID NO: 364948 - DNA, 282 bp, Homo sapiens; identical to SEQ ID NO: 350864
  chr9:35161771-35162053
  hypo

SEQ ID NO: 364949 - DNA, 294 bp, Homo sapiens; identical to SEQ ID NO: 354319
  chr9:35711931-35712225
  hypo

SEQ ID NO: 364950 - DNA, 41 bp, Homo sapiens; identical to SEQ ID NO: 340196
  chr9:35712966-35713007
  hypo

SEQ ID NO: 364951 - DNA, 241 bp, Homo sapiens; identical to SEQ ID NO: 286422
  chr9:37035886-37036127
  hypo

SEQ ID NO: 364952 - DNA, 83 bp, Homo sapiens; identical to SEQ ID NO: 340200
  chr9:37118395-37118478
  hypo

SEQ ID NO: 364953 - DNA, 60 bp, Homo sapiens; identical to SEQ ID NO: 340201
  chr9:37118799-37118859
  hypo

SEQ ID NO: 364954 - DNA, 360 bp, Homo sapiens; identical to SEQ ID NO: 340203
  chr9:37950454-37950814
  hypo

SEQ ID NO: 364955 - DNA, 380 bp, Homo sapiens; identical to SEQ ID NO: 350871
  chr9:71788570-71788950
  hypo

SEQ ID NO: 364956 - DNA, 149 bp, Homo sapiens; identical to SEQ ID NO: 359313
  chr9:74061513-74061662
  hypo

SEQ ID NO: 364957 - DNA, 163 bp, Homo sapiens; identical to SEQ ID NO: 333671
  chr9:74640002-74640165
  hypo

SEQ ID NO: 364958 - DNA, 472 bp, Homo sapiens; identical to SEQ ID NO: 201742
  chr9:79630544-79631016
  hypo

SEQ ID NO: 364959 - DNA, 96 bp, Homo sapiens; identical to SEQ ID NO: 340216
  chr9:80007524-80007620
  hypo

SEQ ID NO: 364960 - DNA, 110 bp, Homo sapiens; identical to SEQ ID NO: 340217
  chr9:80475592-80475702
  hypo

SEQ ID NO: 364961 - DNA, 421 bp, Homo sapiens; identical to SEQ ID NO: 201747
  chr9:80645902-80646323
  hypo

SEQ ID NO: 364962 - DNA, 662 bp, Homo sapiens; identical to SEQ ID NO: 201748
  chr9:80646509-80647171
  hypo

SEQ ID NO: 364963 - DNA, 35 bp, Homo sapiens
  chr9:80833898-80833933
  hypo
cgtctgtggggatccgcaaagatatgggatccagt

SEQ ID NO: 364964 - DNA, 182 bp, Homo sapiens
  chr9:80834011-80834193
  hypo
catttcctgcagtgtgccagcaggatggcccacaagccatctactactcggacaagtacttcgacgagcactacaagtaccggcatgttatgttacccagagaactttccaaacaagcacctgaaactcatctgatgtctgaagaggagtggaggagacttatgtccaatggcgtctaggcc

SEQ ID NO: 364965 - DNA, 330 bp, Homo sapiens; identical to SEQ ID NO: 340220
  chr9:81892891-81893221
  hypo

SEQ ID NO: 364966 - DNA, 260 bp, Homo sapiens; identical to SEQ ID NO: 286495
  chr9:82185383-82185643
  hypo

SEQ ID NO: 364967 - DNA, 469 bp, Homo sapiens; identical to SEQ ID NO: 347033
  chr9:82185703-82186172
  hypo

SEQ ID NO: 364968 - DNA, 64 bp, Homo sapiens; identical to SEQ ID NO: 333690
  chr9:82188495-82188559
  hypo

SEQ ID NO: 364969 - DNA, 42 bp, Homo sapiens; identical to SEQ ID NO: 340223
  chr9:82275758-82275800
  hypo

SEQ ID NO: 364970 - DNA, 128 bp, Homo sapiens; identical to SEQ ID NO: 340224
  chr9:85843823-85843951
  hypo

SEQ ID NO: 364971 - DNA, 396 bp, Homo sapiens; identical to SEQ ID NO: 354332
  chr9:86590191-86590587
  hypo

SEQ ID NO: 364972 - DNA, 218 bp, Homo sapiens; identical to SEQ ID NO: 333696
  chr9:88355794-88356012
  hypo

SEQ ID NO: 364973 - DNA, 92 bp, Homo sapiens; identical to SEQ ID NO: 340227
  chr9:88661274-88661366
  hypo

SEQ ID NO: 364974 - DNA, 431 bp, Homo sapiens; identical to SEQ ID NO: 201763
  chr9:89561318-89561749
  hypo

SEQ ID NO: 364975 - DNA, 494 bp, Homo sapiens; identical to SEQ ID NO: 350894
  chr9:89561779-89562273
  hypo

SEQ ID NO: 364976 - DNA, 276 bp, Homo sapiens; identical to SEQ ID NO: 350895
  chr9:90112514-90112790
  hypo

SEQ ID NO: 364977 - DNA, 167 bp, Homo sapiens; identical to SEQ ID NO: 354336
  chr9:91993499-91993666
  hypo

SEQ ID NO: 364978 - DNA, 62 bp, Homo sapiens; identical to SEQ ID NO: 348354
  chr9:91996203-91996265
  hypo

SEQ ID NO: 364979 - DNA, 152 bp, Homo sapiens; identical to SEQ ID NO: 354338
  chr9:92227900-92228052
  hypo

SEQ ID NO: 364980 - DNA, 544 bp, Homo sapiens; identical to SEQ ID NO: 347038
  chr9:93955385-93955929
  hypo

SEQ ID NO: 364981 - DNA, 267 bp, Homo sapiens; identical to SEQ ID NO: 201780
  chr9:93956177-93956444
  hypo

SEQ ID NO: 364982 - DNA, 221 bp, Homo sapiens
  chr9:95417651-95417872
  hypo
caagcaagctctgcttcactttgtcggtatcttaaggcagaggaaatgcgctcacaggcggccttgtgggttgagccctgtttgctgtgggttcattactgtgacccttcccactgaggacaaacctggagccagactgctcattgctggaaatgctcccctatcctgtcccctcagagcagtccctaacgctcaccccaccaggttgccaatgggacctc

SEQ ID NO: 364983 - DNA, 310 bp, Homo sapiens; identical to SEQ ID NO: 340239
  chr9:95492133-95492443
  hypo

SEQ ID NO: 364984 - DNA, 370 bp, Homo sapiens; identical to SEQ ID NO: 340241
  chr9:96069038-96069408
  hypo

SEQ ID NO: 364985 - DNA, 55 bp, Homo sapiens; identical to SEQ ID NO: 340242
  chr9:96155825-96155880
  hypo

SEQ ID NO: 364986 - DNA, 280 bp, Homo sapiens; identical to SEQ ID NO: 340243
  chr9:96348822-96349102
  hypo

SEQ ID NO: 364987 - DNA, 139 bp, Homo sapiens; identical to SEQ ID NO: 354343
  chr9:96435988-96436127
  hypo

SEQ ID NO: 364988 - DNA, 280 bp, Homo sapiens; identical to SEQ ID NO: 354344
  chr9:96573430-96573710
  hypo

SEQ ID NO: 364989 - DNA, 174 bp, Homo sapiens; identical to SEQ ID NO: 201793
  chr9:96717633-96717807
  hypo

SEQ ID NO: 364990 - DNA, 429 bp, Homo sapiens; identical to SEQ ID NO: 347043
  chr9:97767434-97767863
  hypo

SEQ ID NO: 364991 - DNA, 124 bp, Homo sapiens; identical to SEQ ID NO: 340250
  chr9:97808146-97808270
  hypo

SEQ ID NO: 364992 - DNA, 182 bp, Homo sapiens; identical to SEQ ID NO: 348359
  chr9:97865087-97865269
  hypo

SEQ ID NO: 364993 - DNA, 293 bp, Homo sapiens
  chr9:97867233-97867526
  hypo
cgcgtctggcttatttcgctcagtgtaaagccctctaggttgggccgcattgttgcaggtgtgcattttataagagtacacaatagattctcgaaagcattctcgctgtgctggggccgggcccaaagaggtggcacctggcatgtggcagccagtcgtctttagccctgggccaccctcatgactcggattcgtcttagctgagacaccagcacctgggaggcacagcctgggcccactccacaggactgtcctaccaggatggagacaatctcctggccctggttcttggc

SEQ ID NO: 364994 - DNA, 37 bp, Homo sapiens
  chr9:97867556-97867593
  hypo
catggacattcacgtttcagtcaggcccggcctggac

SEQ ID NO: 364995 - DNA, 1264 bp, Homo sapiens; identical to SEQ ID NO: 333721
  chr9:98272643-98273907
  hypo

SEQ ID NO: 364996 - DNA, 262 bp, Homo sapiens; identical to SEQ ID NO: 340254
  chr9:99139238-99139500
  hypo

SEQ ID NO: 364997 - DNA, 723 bp, Homo sapiens
  chr9:99258639-99259362
  hypo
cgctggaaaagggaggagatggacagcgctgtacttaccaccaccaccaccaccacagggcctgtctcagggcttgagtttgtgtggacggcaaggactagcttcctgggccgctaactctcaaccgcaaggcaaacttgggttggggcccagaacggccgtcagccgttaccctccagcctggccagtgagtgctgagtggacactccgcggctacttaaggacacgccaaccgcggtcctgccggggcgctccgtgcgtctccctccggctgggtcccggctgaccccgcaatccaggcgcaggcaagggagaccccgctggctccaccgcccaggccaccctgaagtccccgctggaggaggtgcagcggacccgctcccggggagcccgtcccgcgccctccctccgagaagccccttcctccagctccttcctctgcccgccggcccgagagcaccgaggcggcttctctgtcctgtgtactgcccaggacaagcggcattggaagcgagtgagccgttcccagctgggggcagcaacagcccggggccagggaaacgcatgggggcctggaccgtccggtggcaccgagtaggcgggtgccaggacgccagacacgctgcattccccggagtcccacgccagggagaacggccccgcctgaaaagacgtcgtttaacacagagaaacacacccagggccaggagaaaccattgtcct

SEQ ID NO: 364998 - DNA, 251 bp, Homo sapiens
  chr9:99259405-99259656
  hypo
gcggagtcgtctacccctttagaaacagacttggcccattagagcctccgcggccaggccggggcctccttacctggggatttaggtgtggacccagcacgcgtcgtccagaagcgtgtcaaagccatgcagacttgctgccaaagagtcaggcggggttagaggcggggaggcaggggcggggaggcagaggcgggaggccccccactcccacacaggccagggacccccgaggcgctggggaggaatcc

SEQ ID NO: 364999 - DNA, 41 bp, Homo sapiens; identical to SEQ ID NO: 359367
  chr9:99984107-99984148
  hypo

SEQ ID NO: 365000 - DNA, 107 bp, Homo sapiens; identical to SEQ ID NO: 340259
  chr9:100299592-100299699
  hypo

SEQ ID NO: 365001 - DNA, 131 bp, Homo sapiens; identical to SEQ ID NO: 354350
  chr9:100843158-100843289
  hypo

SEQ ID NO: 365002 - DNA, 150 bp, Homo sapiens; identical to SEQ ID NO: 340263
  chr9:100849678-100849828
  hypo

SEQ ID NO: 365003 - DNA, 703 bp, Homo sapiens; identical to SEQ ID NO: 333740
  chr9:101569830-101570533
  hypo

SEQ ID NO: 365004 - DNA, 148 bp, Homo sapiens; identical to SEQ ID NO: 201823
  chr9:104248697-104248845
  hypo

SEQ ID NO: 365005 - DNA, 499 bp, Homo sapiens; identical to SEQ ID NO: 201824
  chr9:104248975-104249474
  hypo

SEQ ID NO: 365006 - DNA, 181 bp, Homo sapiens; identical to SEQ ID NO: 340270
  chr9:109689799-109689980
  hypo

SEQ ID NO: 365007 - DNA, 321 bp, Homo sapiens; identical to SEQ ID NO: 340272
  chr9:110390680-110391001
  hypo

SEQ ID NO: 365008 - DNA, 130 bp, Homo sapiens; identical to SEQ ID NO: 201836
  chr9:112081563-112081693
  hypo

SEQ ID NO: 365009 - DNA, 860 bp, Homo sapiens; identical to SEQ ID NO: 350926
  chr9:112081773-112082633
  hypo

SEQ ID NO: 365010 - DNA, 178 bp, Homo sapiens; identical to SEQ ID NO: 333756
  chr9:113017465-113017643
  hypo

SEQ ID NO: 365011 - DNA, 188 bp, Homo sapiens; identical to SEQ ID NO: 340276
  chr9:114556879-114557067
  hypo

SEQ ID NO: 365012 - DNA, 273 bp, Homo sapiens; identical to SEQ ID NO: 345966
  chr9:116059825-116060098
  hypo

SEQ ID NO: 365013 - DNA, 631 bp, Homo sapiens; identical to SEQ ID NO: 345967
  chr9:116060128-116060759
  hypo

SEQ ID NO: 365014 - DNA, 190 bp, Homo sapiens; identical to SEQ ID NO: 354358
  chr9:116065600-116065790
  hypo

SEQ ID NO: 365015 - DNA, 302 bp, Homo sapiens; identical to SEQ ID NO: 354359
  chr9:116065827-116066129
  hypo

SEQ ID NO: 365016 - DNA, 395 bp, Homo sapiens; identical to SEQ ID NO: 333758
  chr9:116111663-116112058
  hypo

SEQ ID NO: 365017 - DNA, 106 bp, Homo sapiens
  chr9:116299412-116299518
  hypo
cgacagagccaaattaagcgtggcccatcagttctgcactctgttcttcggtttgcctatggcaaggtttaattcgggctggcctccctgatgctgcctggcatgc

SEQ ID NO: 365018 - DNA, 149 bp, Homo sapiens; identical to SEQ ID NO: 340283
  chr9:116708859-116709008
  hypo

SEQ ID NO: 365019 - DNA, 280 bp, Homo sapiens; identical to SEQ ID NO: 340286
  chr9:116750660-116750940
  hypo

SEQ ID NO: 365020 - DNA, 134 bp, Homo sapiens; identical to SEQ ID NO: 340287
  chr9:116761540-116761674
  hypo

SEQ ID NO: 365021 - DNA, 244 bp, Homo sapiens
  chr9:116770596-116770840
  hypo
cggctgccgcctcctgcccgggcgcagtgtttagtgtggaaggggcccctgagaaccgggcaggtaagtccttggtgtctgcttgtcacctcccctgtccccggctgggctcctgagacctgggggaccagggtgctaagggccgtgtgttctcccacagaccccttcgaccaaggtgtcgtggccacggacgaggtgaaggaggagcccccggagccattccagaaaatcgggccaagtatgc

SEQ ID NO: 365022 - DNA, 299 bp, Homo sapiens; identical to SEQ ID NO: 340289
  chr9:116790949-116791248
  hypo

SEQ ID NO: 365023 - DNA, 113 bp, Homo sapiens; identical to SEQ ID NO: 340290
  chr9:116796590-116796703
  hypo

SEQ ID NO: 365024 - DNA, 42 bp, Homo sapiens; identical to SEQ ID NO: 354364
  chr9:116800647-116800689
  hypo

SEQ ID NO: 365025 - DNA, 563 bp, Homo sapiens; identical to SEQ ID NO: 354365
  chr9:116800730-116801293
  hypo

SEQ ID NO: 365026 - DNA, 1421 bp, Homo sapiens; identical to SEQ ID NO: 340292
  chr9:116810967-116812388
  hypo

SEQ ID NO: 365027 - DNA, 390 bp, Homo sapiens; identical to SEQ ID NO: 340293
  chr9:116813618-116814008
  hypo

SEQ ID NO: 365028 - DNA, 216 bp, Homo sapiens; identical to SEQ ID NO: 340294
  chr9:116857267-116857483
  hypo

SEQ ID NO: 365029 - DNA, 124 bp, Homo sapiens; identical to SEQ ID NO: 340296
  chr9:117045899-117046023
  hypo

SEQ ID NO: 365030 - DNA, 88 bp, Homo sapiens; identical to SEQ ID NO: 340297
  chr9:119976921-119977009
  hypo

SEQ ID NO: 365031 - DNA, 126 bp, Homo sapiens; identical to SEQ ID NO: 340300
  chr9:123176142-123176268
  hypo

SEQ ID NO: 365032 - DNA, 398 bp, Homo sapiens; identical to SEQ ID NO: 340301
  chr9:123210124-123210522
  hypo

SEQ ID NO: 365033 - DNA, 1023 bp, Homo sapiens; identical to SEQ ID NO: 333767
  chr9:124131788-124132811
  hypo

SEQ ID NO: 365034 - DNA, 250 bp, Homo sapiens; identical to SEQ ID NO: 340303
  chr9:124289769-124290019
  hypo

SEQ ID NO: 365035 - DNA, 55 bp, Homo sapiens; identical to SEQ ID NO: 340304
  chr9:124639413-124639468
  hypo

SEQ ID NO: 365036 - DNA, 90 bp, Homo sapiens
  chr9:124751515-124751605
  hypo
ctggtagaagactttgagctctggagtcagcgcgatgaccgtcttaatcaccacggagatgatgtcagaccagaccttcttgatgtcaac

SEQ ID NO: 365037 - DNA, 99 bp, Homo sapiens
  chr9:124816011-124816110
  hypo
cgcgtgcaaggactgctctgacagttcacacacttcacagtgcccttccctcctgcccgtgggctacattcctgtctcacctccgccaggttcctagtc

SEQ ID NO: 365038 - DNA, 82 bp, Homo sapiens; identical to SEQ ID NO: 345328
  chr9:124990438-124990520
  hypo

SEQ ID NO: 365039 - DNA, 142 bp, Homo sapiens; identical to SEQ ID NO: 345329
  chr9:124991012-124991154
  hypo

SEQ ID NO: 365040 - DNA, 78 bp, Homo sapiens; identical to SEQ ID NO: 340308
  chr9:125126554-125126632
  hypo

SEQ ID NO: 365041 - DNA, 60 bp, Homo sapiens; identical to SEQ ID NO: 340309
  chr9:125986796-125986856
  hypo

SEQ ID NO: 365042 - DNA, 179 bp, Homo sapiens; identical to SEQ ID NO: 340310
  chr9:126092355-126092534
  hypo

SEQ ID NO: 365043 - DNA, 146 bp, Homo sapiens
  chr9:126139066-126139212
  hypo
cgtcctccccttctctgcggtcttaggcctcggtgtcgtgtctcttgcagaagggcctgcccctgccgctgccattcccactgctggaggtggccgtacctgcagcctgtgcctgcctcctcctcctcctcctgggcctcctttca

SEQ ID NO: 365044 - DNA, 121 bp, Homo sapiens
  chr9:126153103-126153224
  hypo
gaggctctccagtcgccctcacgtccaccttggttgcctttccgacacctatccaagcacgggcccccacctctggctctgacaagagagcacagatcacagcttgacacgttggtgcaac

SEQ ID NO: 365045 - DNA, 166 bp, Homo sapiens; identical to SEQ ID NO: 354372
  chr9:126158115-126158281
  hypo

SEQ ID NO: 365046 - DNA, 203 bp, Homo sapiens; identical to SEQ ID NO: 340315
  chr9:126180763-126180966
  hypo

SEQ ID NO: 365047 - DNA, 109 bp, Homo sapiens; identical to SEQ ID NO: 340316
  chr9:126321044-126321153
  hypo

SEQ ID NO: 365048 - DNA, 137 bp, Homo sapiens; identical to SEQ ID NO: 354375
  chr9:126348901-126349038
  hypo

SEQ ID NO: 365049 - DNA, 40 bp, Homo sapiens; identical to SEQ ID NO: 212977
  chr9:126349104-126349144
  hypo

SEQ ID NO: 365050 - DNA, 90 bp, Homo sapiens; identical to SEQ ID NO: 340320
  chr9:127120340-127120430
  hypo

SEQ ID NO: 365051 - DNA, 55 bp, Homo sapiens; identical to SEQ ID NO: 340321
  chr9:128103464-128103519
  hypo

SEQ ID NO: 365052 - DNA, 33 bp, Homo sapiens
  chr9:128118022-128118055
  hypo
cgcgagtgaagaacagcttcaagatgcacagct

SEQ ID NO: 365053 - DNA, 36 bp, Homo sapiens
  chr9:128118095-128118131
  hypo
gccttctaccctaatcaagatggggacatacttcgc

SEQ ID NO: 365054 - DNA, 445 bp, Homo sapiens; identical to SEQ ID NO: 340323
  chr9:128200066-128200511
  hypo

SEQ ID NO: 365055 - DNA, 57 bp, Homo sapiens; identical to SEQ ID NO: 340325
  chr9:128274789-128274846
  hypo

SEQ ID NO: 365056 - DNA, 125 bp, Homo sapiens; identical to SEQ ID NO: 354380
  chr9:128759727-128759852
  hypo

SEQ ID NO: 365057 - DNA, 380 bp, Homo sapiens; identical to SEQ ID NO: 340328
  chr9:129455261-129455641
  hypo

SEQ ID NO: 365058 - DNA, 275 bp, Homo sapiens; identical to SEQ ID NO: 340329
  chr9:129458627-129458902
  hypo

SEQ ID NO: 365059 - DNA, 116 bp, Homo sapiens; identical to SEQ ID NO: 340330
  chr9:129645183-129645299
  hypo

SEQ ID NO: 365060 - DNA, 196 bp, Homo sapiens; identical to SEQ ID NO: 354383
  chr9:130496563-130496759
  hypo

SEQ ID NO: 365061 - DNA, 233 bp, Homo sapiens; identical to SEQ ID NO: 340332
  chr9:130637231-130637464
  hypo

SEQ ID NO: 365062 - DNA, 233 bp, Homo sapiens; identical to SEQ ID NO: 340335
  chr9:130907031-130907264
  hypo

SEQ ID NO: 365063 - DNA, 66 bp, Homo sapiens
  chr9:131399183-131399249
  hypo
cgctgccactcaccggccgtaggcacaggccaccacagagccagtggagttccaggagatgctggt

SEQ ID NO: 365064 - DNA, 36 bp, Homo sapiens; identical to SEQ ID NO: 340337
  chr9:131461564-131461600
  hypo

SEQ ID NO: 365065 - DNA, 83 bp, Homo sapiens; identical to SEQ ID NO: 340338
  chr9:131675071-131675154
  hypo

SEQ ID NO: 365066 - DNA, 165 bp, Homo sapiens
  chr9:131821444-131821609
  hypo
cggaaggagtttgcagagaagctggagtccctgctgcaccgtgcctaccacctgcaggaggagttcggctccaccttccccgcagacagcatgctgctagacctcggtgagctgggcccagtgcaggtggggtgggcgtggagggtggcagggatggaggtgagg

SEQ ID NO: 365067 - DNA, 41 bp, Homo sapiens
  chr9:131821644-131821685
  hypo
gcgtccaatgaatcagaatccccagggctctccgacctcgc

SEQ ID NO: 365068 - DNA, 704 bp, Homo sapiens; identical to SEQ ID NO: 350949
  chr9:131842946-131843650
  hypo

SEQ ID NO: 365069 - DNA, 269 bp, Homo sapiens; identical to SEQ ID NO: 340341
  chr9:132071041-132071310
  hypo

SEQ ID NO: 365070 - DNA, 280 bp, Homo sapiens; identical to SEQ ID NO: 333801
  chr9:132145475-132145755
  hypo

SEQ ID NO: 365071 - DNA, 728 bp, Homo sapiens; identical to SEQ ID NO: 359438
  chr9:132245345-132246073
  hypo

SEQ ID NO: 365072 - DNA, 690 bp, Homo sapiens; identical to SEQ ID NO: 333804
  chr9:132258226-132258916
  hypo

SEQ ID NO: 365073 - DNA, 355 bp, Homo sapiens
  chr9:132393701-132394056
  hypo
cgcccaactgtcatcgctgtcctgaagggtgaggtgggcctgggctctgctgccaggacccagctgaggctttctagttctctctccttctaccgtggcaaccgtctcctcatccccctgccatctccaccgccgccagcagtcttcagaagcatcggtcttcccgggccactctctgttgggcctcagggtggttgactcattgctctgtaggatgcagtcgaaactgctagagttgactgtgagaccaggaactggcagccgcgagggctgtctgtccttccctccaggagcagtgccgtcgccctccacctactgcgcttattcttgcccatccatcggtttcagcttacgc

SEQ ID NO: 365074 - DNA, 294 bp, Homo sapiens; identical to SEQ ID NO: 340349
  chr9:132501760-132502054
  hypo

SEQ ID NO: 365075 - DNA, 277 bp, Homo sapiens; identical to SEQ ID NO: 340350
  chr9:132633604-132633881
  hypo

SEQ ID NO: 365076 - DNA, 35 bp, Homo sapiens
  chr9:132643756-132643791
  hypo
cggggcgtgggtggggaaggggctctgggaccaga

SEQ ID NO: 365077 - DNA, 193 bp, Homo sapiens
  chr9:132643821-132644014
  hypo
cagtctttgtagaagcaggtggtggtggaaattccagcaggtgggtcccgcagaggccctgaggcctcacttttcggatcttctgtcccagatcctgctccctccctgctgagcctggggttcccctggcattggccccagccttctgaaagccggcgctgcagccagaggccgcacgctgcactgtcgcgac

SEQ ID NO: 365078 - DNA, 112 bp, Homo sapiens; identical to SEQ ID NO: 345331
  chr9:132804293-132804405
  hypo

SEQ ID NO: 365079 - DNA, 207 bp, Homo sapiens; identical to SEQ ID NO: 201905
  chr9:132804455-132804662
  hypo

SEQ ID NO: 365080 - DNA, 292 bp, Homo sapiens; identical to SEQ ID NO: 201908
  chr9:132805445-132805737
  hypo

SEQ ID NO: 365081 - DNA, 477 bp, Homo sapiens; identical to SEQ ID NO: 340353
  chr9:132874127-132874604
  hypo

SEQ ID NO: 365082 - DNA, 77 bp, Homo sapiens; identical to SEQ ID NO: 340354
  chr9:132874650-132874727
  hypo

SEQ ID NO: 365083 - DNA, 343 bp, Homo sapiens; identical to SEQ ID NO: 348378
  chr9:132881052-132881395
  hypo

SEQ ID NO: 365084 - DNA, 35 bp, Homo sapiens; identical to SEQ ID NO: 348379
  chr9:132881495-132881530
  hypo

SEQ ID NO: 365085 - DNA, 113 bp, Homo sapiens; identical to SEQ ID NO: 340356
  chr9:133300407-133300520
  hypo

SEQ ID NO: 365086 - DNA, 140 bp, Homo sapiens; identical to SEQ ID NO: 359446
  chr9:133308607-133308747
  hypo

SEQ ID NO: 365087 - DNA, 67 bp, Homo sapiens; identical to SEQ ID NO: 286803
  chr9:133308769-133308836
  hypo

SEQ ID NO: 365088 - DNA, 344 bp, Homo sapiens
  chr9:133366650-133366994
  hypo
gattttagttacaaagtgagagagtcattaagacgtggcggaggagagagcacctggccgggctgctccggggcctccacggaggctgatcccaccgtggccgcggccacggctgccacttatcctgccatcttgctgctaggctctgagctgggcacctgatggggtattatctaatattagctgcgcagaggtgaggaaacggaggcccccaggtgaagacactcacccaggctctcctggctggtgatgggcagctttgagccggggacaggccagctgtagcggccaagttcccagttactccaacagattccaggatgctcgtgatcaaggggcacggc

SEQ ID NO: 365089 - DNA, 108 bp, Homo sapiens; identical to SEQ ID NO: 340359
  chr9:133484764-133484872
  hypo

SEQ ID NO: 365090 - DNA, 131 bp, Homo sapiens; identical to SEQ ID NO: 340360
  chr9:133513763-133513894
  hypo

SEQ ID NO: 365091 - DNA, 1351 bp, Homo sapiens; identical to SEQ ID NO: 333814
  chr9:133710055-133711406
  hypo

SEQ ID NO: 365092 - DNA, 458 bp, Homo sapiens; identical to SEQ ID NO: 340368
  chr9:133760420-133760878
  hypo

SEQ ID NO: 365093 - DNA, 63 bp, Homo sapiens
  chr9:133799052-133799115
  hypo
cggaatgcccgggttcaggtacacagcctcacggtccccggtgcctgccctgccgcccgccca

SEQ ID NO: 365094 - DNA, 399 bp, Homo sapiens
  chr9:133799196-133799595
  hypo
aaagacagagtagacgccatcgtcctgctgtccgcttaggaggacgtccagacagtctcggggccgggagcctgagggaggcaaggctgtcagggtggctgcggccccagcacgttcctgcccagccccctggccaaactgtctgtccatcgataatgcatgtggggtcccatggggttgagagagcactggccttggagtccgaccttggctctgccactccctgctgtggctgggtgagagaatcaccctctctgggacttactctcctcatctggagaatggaccgagagggcttcagcgcaggccacatggaagtagggtcgggccctggagtctcatggctggggaaccctcaccccaacttccccgctccccagagctgggacccgaggcacc

SEQ ID NO: 365095 - DNA, 53 bp, Homo sapiens; identical to SEQ ID NO: 354398
  chr9:134126741-134126794
  hypo

SEQ ID NO: 365096 - DNA, 123 bp, Homo sapiens; identical to SEQ ID NO: 359451
  chr9:135037440-135037563
  hypo

SEQ ID NO: 365097 - DNA, 329 bp, Homo sapiens; identical to SEQ ID NO: 340378
  chr9:135267105-135267434
  hypo

SEQ ID NO: 365098 - DNA, 630 bp, Homo sapiens; identical to SEQ ID NO: 345338
  chr9:135286324-135286954
  hypo

SEQ ID NO: 365099 - DNA, 553 bp, Homo sapiens
  chr9:135513114-135513667
  hypo
ggagccgccaaaaaactggcaacatgagttagcgtaactgagtaaacagcaaacaatctccaaatgatctttccattaacgaaacaaaataaaacgaaaaagatacactttacctaaaaagcataccccagagaaaagcacgaaagtctacatttatttgggacacagaactgacattgtgactcttcacagccgtatctcctttgtctcctagcctcctggcacggtggaaattccccaggaggagaggaaattaagaactgcacagacagaacagtatgcttcaagcggaaaaaaatacggagaaggtggaggaaagcagcacaggtgatttaggtgcatcttctgaaaaagaaatgcacgcgccggacagccaaggaggatgccaagggacagttggcgcccagggcgggctgcaggtatctttcctttctgggaaaaaggtgactgcactccatccagggacaatcaaggacagccaccggagaccaacagaaaacctaatgtcagccttaaaatcaggtggcttagaaactccattttccggccattc

SEQ ID NO: 365100 - DNA, 141 bp, Homo sapiens; identical to SEQ ID NO: 340384
  chr9:135523845-135523986
  hypo

SEQ ID NO: 365101 - DNA, 33 bp, Homo sapiens; identical to SEQ ID NO: 354401
  chr9:135548276-135548309
  hypo

SEQ ID NO: 365102 - DNA, 95 bp, Homo sapiens; identical to SEQ ID NO: 354402
  chr9:135767923-135768018
  hypo

SEQ ID NO: 365103 - DNA, 203 bp, Homo sapiens; identical to SEQ ID NO: 340387
  chr9:135781263-135781466
  hypo

SEQ ID NO: 365104 - DNA, 33 bp, Homo sapiens; identical to SEQ ID NO: 348382
  chr9:135865230-135865263
  hypo

SEQ ID NO: 365105 - DNA, 113 bp, Homo sapiens; identical to SEQ ID NO: 340390
  chr9:135908551-135908664
  hypo

SEQ ID NO: 365106 - DNA, 222 bp, Homo sapiens; identical to SEQ ID NO: 340392
  chr9:135945862-135946084
  hypo

SEQ ID NO: 365107 - DNA, 381 bp, Homo sapiens; identical to SEQ ID NO: 340393
  chr9:136372653-136373034
  hypo

SEQ ID NO: 365108 - DNA, 321 bp, Homo sapiens; identical to SEQ ID NO: 340395
  chr9:136380597-136380918
  hypo

SEQ ID NO: 365109 - DNA, 115 bp, Homo sapiens; identical to SEQ ID NO: 345980
  chr9:136384021-136384136
  hypo

SEQ ID NO: 365110 - DNA, 574 bp, Homo sapiens; identical to SEQ ID NO: 340397
  chr9:136385211-136385785
  hypo

SEQ ID NO: 365111 - DNA, 146 bp, Homo sapiens; identical to SEQ ID NO: 340398
  chr9:136393635-136393781
  hypo

SEQ ID NO: 365112 - DNA, 313 bp, Homo sapiens; identical to SEQ ID NO: 340399
  chr9:136397028-136397341
  hypo

SEQ ID NO: 365113 - DNA, 643 bp, Homo sapiens; identical to SEQ ID NO: 340400
  chr9:136402186-136402829
  hypo

SEQ ID NO: 365114 - DNA, 188 bp, Homo sapiens; identical to SEQ ID NO: 340401
  chr9:136508536-136508724
  hypo

SEQ ID NO: 365115 - DNA, 211 bp, Homo sapiens; identical to SEQ ID NO: 340402
  chr9:136667535-136667746
  hypo

SEQ ID NO: 365116 - DNA, 106 bp, Homo sapiens; identical to SEQ ID NO: 348385
  chr9:136698796-136698902
  hypo

SEQ ID NO: 365117 - DNA, 105 bp, Homo sapiens
  chr9:136728494-136728599
  hypo
acctgtttgtcaacctggagtcagcgcaaaggccccaggtcgggtcgtacagatggaaccgggtcgtacagatggaaccggagacagagaggaggcgtggcgggc

SEQ ID NO: 365118 - DNA, 351 bp, Homo sapiens; identical to SEQ ID NO: 340406
  chr9:137620493-137620844
  hypo

SEQ ID NO: 365119 - DNA, 50 bp, Homo sapiens; identical to SEQ ID NO: 345981
  chr9:137623301-137623351
  hypo

SEQ ID NO: 365120 - DNA, 153 bp, Homo sapiens; identical to SEQ ID NO: 345982
  chr9:137623543-137623696
  hypo

SEQ ID NO: 365121 - DNA, 473 bp, Homo sapiens; identical to SEQ ID NO: 354414
  chr9:137642188-137642661
  hypo

SEQ ID NO: 365122 - DNA, 305 bp, Homo sapiens; identical to SEQ ID NO: 340409
  chr9:137645508-137645813
  hypo

SEQ ID NO: 365123 - DNA, 163 bp, Homo sapiens; identical to SEQ ID NO: 340410
  chr9:137646079-137646242
  hypo

SEQ ID NO: 365124 - DNA, 191 bp, Homo sapiens
  chr9:137648346-137648537
  hypo
cgtgatccccctttgacagtctgggatgacgtggtccggaaagaccagccccgtgtgttccatccgttggtgtgaggcacagaacagccccgcccgggctcctggatctgggtcctcgcagcagcccggccactcgggctgtgaccttgggggtgggcgcggctctggtggaacgctcaacttggtttaac

SEQ ID NO: 365125 - DNA, 1004 bp, Homo sapiens; identical to SEQ ID NO: 340412
  chr9:138011461-138012465
  hypo

SEQ ID NO: 365126 - DNA, 335 bp, Homo sapiens; identical to SEQ ID NO: 340413
  chr9:138143914-138144249
  hypo

SEQ ID NO: 365127 - DNA, 172 bp, Homo sapiens
  chr9:138247974-138248146
  hypo
cgggatggacgctcagacccttgcaaggcagcactgacgggagccacggcggagcaatggcctcgatagtgaccgggcactgacgggagccacggcggagcaacggcctcgatagtgacctggcactgacgggagccacggcggagcaacggcctcgatagtgaccgggcac

SEQ ID NO: 365128 - DNA, 79 bp, Homo sapiens
  chr9:138265272-138265351
  hypo
ttagagtctgacctgagtccatttgtactggcagcttccacaacacccactgagacccacgccaacgcgccccgcccac

SEQ ID NO: 365129 - DNA, 52 bp, Homo sapiens
  chr9:138563280-138563332
  hypo
ctcctggcactgcagagcggatggcggatgcagatcccactttggggatggc

SEQ ID NO: 365130 - DNA, 274 bp, Homo sapiens; identical to SEQ ID NO: 354416
  chr9:138660497-138660771
  hypo

SEQ ID NO: 365131 - DNA, 51 bp, Homo sapiens; identical to SEQ ID NO: 354417
  chr9:138661962-138662013
  hypo

SEQ ID NO: 365132 - DNA, 323 bp, Homo sapiens; identical to SEQ ID NO: 354418
  chr9:138662685-138663008
  hypo

SEQ ID NO: 365133 - DNA, 134 bp, Homo sapiens
  chr9:138663353-138663487
  hypo
cggttggcagctcaaccggaggctcctggtggtcccatcagcccggagggtctgcttcacgtgtgtccctcaaacagtcgggagtcctgacgtccactggggccaggagttggcggaatgaggtcgcagtggcc

SEQ ID NO: 365134 - DNA, 141 bp, Homo sapiens; identical to SEQ ID NO: 311724
  chr9:138670510-138670651
  hypo

SEQ ID NO: 365135 - DNA, 33 bp, Homo sapiens; identical to SEQ ID NO: 354420
  chr9:138670778-138670811
  hypo

SEQ ID NO: 365136 - DNA, 185 bp, Homo sapiens; identical to SEQ ID NO: 340424
  chr9:138719269-138719454
  hypo

SEQ ID NO: 365137 - DNA, 98 bp, Homo sapiens; identical to SEQ ID NO: 354422
  chr9:138743599-138743697
  hypo

SEQ ID NO: 365138 - DNA, 142 bp, Homo sapiens; identical to SEQ ID NO: 340426
  chr9:138774077-138774219
  hypo

SEQ ID NO: 365139 - DNA, 90 bp, Homo sapiens; identical to SEQ ID NO: 340427
  chr9:138774525-138774615
  hypo

SEQ ID NO: 365140 - DNA, 179 bp, Homo sapiens
  chr9:138873235-138873414
  hypo
cgcaggttgtcgcaggacacgtgttcgtgtccaggtgcgctgggaagggtcctggcggtgctcctctcagcgcaggtcccgaggagctacaggcatgacgctgccttcagaactcccccgagcctgctccttcccagccttggctcgtgaggctcctccgaggaccacgggccttccac

SEQ ID NO: 365141 - DNA, 538 bp, Homo sapiens; identical to SEQ ID NO: 340430
  chr9:138877542-138878080
  hypo

SEQ ID NO: 365142 - DNA, 99 bp, Homo sapiens; identical to SEQ ID NO: 359460
  chr9:138986173-138986272
  hypo

SEQ ID NO: 365143 - DNA, 824 bp, Homo sapiens; identical to SEQ ID NO: 201927
  chr9:138986333-138987157
  hypo

SEQ ID NO: 365144 - DNA, 563 bp, Homo sapiens; identical to SEQ ID NO: 359462
  chr9:138987167-138987730
  hypo

SEQ ID NO: 365145 - DNA, 93 bp, Homo sapiens; identical to SEQ ID NO: 340434
  chr9:139079359-139079452
  hypo

SEQ ID NO: 365146 - DNA, 33 bp, Homo sapiens
  chr9:139103631-139103664
  hypo
accagtcttccagccgtctgtgccagaacgccc

SEQ ID NO: 365147 - DNA, 264 bp, Homo sapiens; identical to SEQ ID NO: 345984
  chr9:139110897-139111161
  hypo

SEQ ID NO: 365148 - DNA, 81 bp, Homo sapiens; identical to SEQ ID NO: 345985
  chr9:139111384-139111465
  hypo

SEQ ID NO: 365149 - DNA, 195 bp, Homo sapiens; identical to SEQ ID NO: 354428
  chr9:139268627-139268822
  hypo

SEQ ID NO: 365150 - DNA, 127 bp, Homo sapiens; identical to SEQ ID NO: 311797
  chr9:139268912-139269039
  hypo

SEQ ID NO: 365151 - DNA, 441 bp, Homo sapiens; identical to SEQ ID NO: 354430
  chr9:139269121-139269562
  hypo

SEQ ID NO: 365152 - DNA, 144 bp, Homo sapiens; identical to SEQ ID NO: 213214
  chr9:139317510-139317654
  hypo

SEQ ID NO: 365153 - DNA, 380 bp, Homo sapiens; identical to SEQ ID NO: 345987
  chr9:139317866-139318246
  hypo

SEQ ID NO: 365154 - DNA, 233 bp, Homo sapiens; identical to SEQ ID NO: 340442
  chr9:139374838-139375071
  hypo

SEQ ID NO: 365155 - DNA, 357 bp, Homo sapiens; identical to SEQ ID NO: 333839
  chr9:139401232-139401589
  hypo

SEQ ID NO: 365156 - DNA, 291 bp, Homo sapiens; identical to SEQ ID NO: 354434
  chr9:139506149-139506440
  hypo

SEQ ID NO: 365157 - DNA, 205 bp, Homo sapiens; identical to SEQ ID NO: 345988
  chr9:139698453-139698658
  hypo

SEQ ID NO: 365158 - DNA, 174 bp, Homo sapiens; identical to SEQ ID NO: 340453
  chr9:139730175-139730349
  hypo

SEQ ID NO: 365159 - DNA, 106 bp, Homo sapiens; identical to SEQ ID NO: 354436
  chr9:139793021-139793127
  hypo

SEQ ID NO: 365160 - DNA, 53 bp, Homo sapiens; identical to SEQ ID NO: 354437
  chr9:139793190-139793243
  hypo

SEQ ID NO: 365161 - DNA, 309 bp, Homo sapiens; identical to SEQ ID NO: 340455
  chr9:139803935-139804244
  hypo

SEQ ID NO: 365162 - DNA, 344 bp, Homo sapiens
  chr9:139804283-139804627
  hypo
cgctgcccagcctgagcactgtgtgccgccctccacccgcgcctggcattggcgtccaccctcacactcctgatcccttcttttgaaggcgcaccacgaggtctgccccaagttccccttaacttgtgacggctgcggcaagaagaagatcccccgggagaaggtgagtgtccttcacctccttggaggaccgcagggcggggcccatgtgttggacgtgagggtcccgtgggtgggggtggggcaggttatgacccttgtgcccaaaggaacagcagtgcaaagcccctgtaacgttgggtcatggatgcgttcagggtggcggccgctctcctgagtgggcc

SEQ ID NO: 365163 - DNA, 42 bp, Homo sapiens; identical to SEQ ID NO: 354439
  chr9:139809677-139809719
  hypo

SEQ ID NO: 365164 - DNA, 37 bp, Homo sapiens; identical to SEQ ID NO: 354440
  chr9:139818622-139818659
  hypo

SEQ ID NO: 365165 - DNA, 154 bp, Homo sapiens; identical to SEQ ID NO: 340459
  chr9:139833922-139834076
  hypo

SEQ ID NO: 365166 - DNA, 1801 bp, Homo sapiens; identical to SEQ ID NO: 354441
  chr9:139834961-139836762
  hypo

SEQ ID NO: 365167 - DNA, 594 bp, Homo sapiens; identical to SEQ ID NO: 354442
  chr9:139836968-139837562
  hypo

SEQ ID NO: 365168 - DNA, 650 bp, Homo sapiens; identical to SEQ ID NO: 354443
  chr9:139846908-139847558
  hypo

SEQ ID NO: 365169 - DNA, 33 bp, Homo sapiens; identical to SEQ ID NO: 348397
  chr9:139889104-139889137
  hypo

SEQ ID NO: 365170 - DNA, 216 bp, Homo sapiens
  chr9:139901954-139902170
  hypo
cgggactgacccagctccgcccacagcccgctctcggcatcagccttcatcgtaagagagaaaagctggttccgaggccgggcaggagaaaggccagcagtgcctggtccagccggcgtcgccttgggcggtgagcagtgccaggcaggggcgaggggccgggcagaccccgaggctttaaggcaaagcagggcaagggtgtacgcagcccgggcc

SEQ ID NO: 365171 - DNA, 482 bp, Homo sapiens
  chr9:139902492-139902974
  hypo
cgccccggccctcctgcaggctgggcctggacgcagggtctccccacgagctccctctgtgtctgggctctcccgggcctccgtctgccgagtctgggggccactgagtctacatcggtcccctgttccccggctctggtcccctctgccccacccttgctctgtgcccctcaaagactctagcaagtctggaccatgcagttacgtctctccaggcctatctgcaagtgtccctcgcccactctgcccccttgacctctggacagcaagcatcctggggccagttctcccccgaccccacccgcggctggagccaccaggcagcctgggtccagtgggcagagccctggacagccatgagagcagcctgctcacccgctcctcctcgaagctgatgaggccctcgtcctccgtgtccaggtcctcgggctcgtctgccacaagtgcccggagctccgtgggggcagaccggggccggagca

SEQ ID NO: 365172 - DNA, 195 bp, Homo sapiens
  chr9:139903035-139903230
  hypo
caggttgtcactctgcttcttggcaaagttcacgaacacctggtgggtggcgcaggcgtgtggggagggggctggtctggggtgaggaggggcagggcgggtgaggggaggggcaggtgtggtgcgcagtgcccttggggcgctcacattgtccagtgtggtctggctgaccgagtagtcctcgatgcccagcac

SEQ ID NO: 365173 - DNA, 159 bp, Homo sapiens; identical to SEQ ID NO: 354445
  chr9:139904532-139904691
  hypo

SEQ ID NO: 365174 - DNA, 126 bp, Homo sapiens; identical to SEQ ID NO: 340466
  chr9:139909050-139909176
  hypo

SEQ ID NO: 365175 - DNA, 520 bp, Homo sapiens; identical to SEQ ID NO: 350968
  chr9:139948370-139948890
  hypo

SEQ ID NO: 365176 - DNA, 375 bp, Homo sapiens; identical to SEQ ID NO: 350969
  chr9:140024237-140024612
  hypo

SEQ ID NO: 365177 - DNA, 53 bp, Homo sapiens
  chr9:140041698-140041751
  hypo
cgccacacacacacctggacacgtactcaggtgcgctcctcacacacacacct

SEQ ID NO: 365178 - DNA, 302 bp, Homo sapiens; identical to SEQ ID NO: 311906
  chr9:140107736-140108038
  hypo

SEQ ID NO: 365179 - DNA, 180 bp, Homo sapiens; identical to SEQ ID NO: 348399
  chr9:140108461-140108641
  hypo

SEQ ID NO: 365180 - DNA, 613 bp, Homo sapiens; identical to SEQ ID NO: 340474
  chr9:140110575-140111188
  hypo

SEQ ID NO: 365181 - DNA, 42 bp, Homo sapiens; identical to SEQ ID NO: 340475
  chr9:140166945-140166987
  hypo

SEQ ID NO: 365182 - DNA, 292 bp, Homo sapiens; identical to SEQ ID NO: 311918
  chr9:140167091-140167383
  hypo

SEQ ID NO: 365183 - DNA, 322 bp, Homo sapiens; identical to SEQ ID NO: 354452
  chr9:140167413-140167735
  hypo

SEQ ID NO: 365184 - DNA, 636 bp, Homo sapiens; identical to SEQ ID NO: 347066
  chr9:140196486-140197122
  hypo

SEQ ID NO: 365185 - DNA, 155 bp, Homo sapiens; identical to SEQ ID NO: 347067
  chr9:140197263-140197418
  hypo

SEQ ID NO: 365186 - DNA, 373 bp, Homo sapiens; identical to SEQ ID NO: 348402
  chr9:140265361-140265734
  hypo

SEQ ID NO: 365187 - DNA, 183 bp, Homo sapiens; identical to SEQ ID NO: 348403
  chr9:140265902-140266085
  hypo

SEQ ID NO: 365188 - DNA, 422 bp, Homo sapiens
  chr9:140267962-140268384
  hypo
cgctggccccggcagctctccagcatgtccagaagcccggccagggggtcgtccaaggcagcaaacccccgccaggcttcctcccggagctgtggagacacaaaaccacactggcactttgtcttgcactcaaagcctcctggcaaggcctccccaccgcagagaggttttttaaaatttaatccattcagaaggtagctgtggccattcagccgccatctgcgcctccgtgacttttcatgccgccgttctggtccgctgcaccccaggcccccaggggcggtggtcattgtctgcactaattatcccataaagacagagggcctgttctccaggcagacagagggccgctggcctgggaggcaaccgtagcccgagccacaggttcacaagtcactttacctgcggcactcgcgggacac

SEQ ID NO: 365189 - DNA, 153 bp, Homo sapiens
  chr9:140333146-140333299
  hypo
aggaccactccccaggagccacgcctgccaggggtgccatgggcatcagagggccctgtgggaggggggcggggggcagcagaggcctcgtctggggacacagccccagcaggatccaagtagccccctcggaccccctcggatgggactcgc

SEQ ID NO: 365190 - DNA, 240 bp, Homo sapiens
  chr9:140379693-140379933
  hypo
cggagcgactgaaaggaatgtgaggctcagagtaaaccagacaaacgctgcaggtgaggcctcatcggagtaaaccagacaaacgctgcaggtaaggcctcactggagtaaaccagacaaacgctgcaggtgaggcctcatcggagtaaaccagacaaacgctgcaggtgaggcctcatcggagtaaaccagacaaacgctgcaggtgaggcctcattggagtaaaccagacacactctc

SEQ ID NO: 365191 - DNA, 105 bp, Homo sapiens
  chr9:140379963-140380068
  hypo
atactctccaggtgaggccttatcctctgaaccaatcgtcgcagggctttccaccactcactccaggaacagtaaacaacacacgggctagacatcaataggccc

SEQ ID NO: 365192 - DNA, 319 bp, Homo sapiens
  chr9:140382238-140382557
  hypo
cgagaggccgtcccatccagcctccacctgcctgtcaggggcatctcaggagcctgggccaccaccacaacctggcacgccctgcgaggtgtccccagcatcaccttcaccgcacgcacttcagcccctcactgcagctgagccttggccacacgggaggagcgggggactcaggcccagatgatgtgtctccgcctctaggcgctgagtggaaggcaggtggcttctataatcaggaggaaataactcccagatagcaaacaaacaatgcacacacacaccaaagtgctgctgagcacagaaagacggagaaccgcct

SEQ ID NO: 365193 - DNA, 78 bp, Homo sapiens
  chr9:140382625-140382703
  hypo
gtctgatgtctcgtcccgagcttcggcccgaacgcggctctcgcggtctgatgtctcgtcccgagcttcggcccgaac

SEQ ID NO: 365194 - DNA, 308 bp, Homo sapiens; identical to SEQ ID NO: 311951
  chr9:140389001-140389309
  hypo

SEQ ID NO: 365195 - DNA, 120 bp, Homo sapiens
  chr9:140389523-140389643
  hypo
cggcagcttggccaattctgagtcccgaacggcatgcaccgtggtcgcccgggcctggtgggtcagtgtctccacctgaggacaggagccggctgctggggccgcgggcttgggagggcc

SEQ ID NO: 365196 - DNA, 150 bp, Homo sapiens; identical to SEQ ID NO: 354457
  chr9:140392858-140393008
  hypo

SEQ ID NO: 365197 - DNA, 240 bp, Homo sapiens; identical to SEQ ID NO: 213279
  chr9:140396742-140396982
  hypo

SEQ ID NO: 365198 - DNA, 201 bp, Homo sapiens
  chr9:140397203-140397404
  hypo
agccggccacggtgacatggacgaggccgctggacaggggggcactgaacgcacggctgaagtcatttggccattttaaggattactgttaagtattcagaaatgataagagtattgtggttagagatgaatcctgaaatatccaccagtgacgtgctatgatgatgggatttgcttcaagggggggcacccgaacggtac

SEQ ID NO: 365199 - DNA, 183 bp, Homo sapiens
  chr9:140400692-140400875
  hypo
cggcatctgcctcaatggctctgtgacccaccagctacaggttttctccgcagcttaaacccacacggtgccttcaacatttctgggcactgataaaggtagcccggtcggtacctaaaacacggaaggaaaccagccctggtcctgagccaaattcctcaaaccttgccatgcgtgccacac

SEQ ID NO: 365200 - DNA, 516 bp, Homo sapiens; identical to SEQ ID NO: 311957
  chr9:140400905-140401421
  hypo

SEQ ID NO: 365201 - DNA, 249 bp, Homo sapiens; identical to SEQ ID NO: 348404
  chr9:140582119-140582368
  hypo

SEQ ID NO: 365202 - DNA, 233 bp, Homo sapiens; identical to SEQ ID NO: 340488
  chr9:140623363-140623596
  hypo

SEQ ID NO: 365203 - DNA, 232 bp, Homo sapiens; identical to SEQ ID NO: 340489
  chr9:140645189-140645421
  hypo

SEQ ID NO: 365204 - DNA, 68 bp, Homo sapiens
  chr9:140682727-140682795
  hypo
cggtggcagatgaccgagcggctggtaggactggcatgcagcactcagggggcccaggacgttggcga

SEQ ID NO: 365205 - DNA, 175 bp, Homo sapiens
  chr9:140682922-140683097
  hypo
tagggagattgcaggtgtagggaagttgcaggtgtaggggtccttgcaggtgcagggatcttgtaggtgaagggaggttgcaggtgtagggggccttgcgggcttagagggcctcacaggtgtaggggattgccgtgctgcaggtgtctcttgtcccctcggggactgggagagc

SEQ ID NO: 365206 - DNA, 306 bp, Homo sapiens; identical to SEQ ID NO: 340492
  chr9:140692095-140692401
  hypo

SEQ ID NO: 365207 - DNA, 188 bp, Homo sapiens; identical to SEQ ID NO: 345339
  chr9:140703858-140704046
  hypo

SEQ ID NO: 365208 - DNA, 327 bp, Homo sapiens; identical to SEQ ID NO: 345340
  chr9:140704131-140704458
  hypo

SEQ ID NO: 365209 - DNA, 90 bp, Homo sapiens; identical to SEQ ID NO: 354463
  chr9:140704673-140704763
  hypo

SEQ ID NO: 365210 - DNA, 133 bp, Homo sapiens; identical to SEQ ID NO: 354464
  chr9:140707377-140707510
  hypo

SEQ ID NO: 365211 - DNA, 58 bp, Homo sapiens; identical to SEQ ID NO: 354465
  chr9:140707900-140707958
  hypo

SEQ ID NO: 365212 - DNA, 479 bp, Homo sapiens; identical to SEQ ID NO: 345993
  chr9:140708213-140708692
  hypo

SEQ ID NO: 365213 - DNA, 215 bp, Homo sapiens; identical to SEQ ID NO: 213315
  chr9:140708771-140708986
  hypo

SEQ ID NO: 365214 - DNA, 781 bp, Homo sapiens; identical to SEQ ID NO: 340498
  chr9:140937919-140938700
  hypo

SEQ ID NO: 365215 - DNA, 479 bp, Homo sapiens; identical to SEQ ID NO: 340504
  chr10:425893-426372
  hypo

SEQ ID NO: 365216 - DNA, 249 bp, Homo sapiens
  chr10:482039-482288
  hypo
cgaattcagttcagaccgggcgcacttcatgtactcagccaccacgtgtggtgagtgacagagatcatcttgcatgtgtgtccacattttactgcctttttcttgaccacagattctacctccggtttctctgtgtatgcagtgattgtttgcttaatattgcacattgtgggtaacgtgttgagcacgctcaggatcccataagcttcttcggaagctttccagctcttgttttagcaggcagcgcag

SEQ ID NO: 365217 - DNA, 137 bp, Homo sapiens
  chr10:482318-482455
  hypo
gcttggattgatttgctgctggtgtggatgggtggagagctccagtcctgcacccactccgatctccgcctcctggacttggcagggtggcatgctccgcccacaccagagctctctccgagctccgcctcctggac

SEQ ID NO: 365218 - DNA, 46 bp, Homo sapiens; identical to SEQ ID NO: 354469
  chr10:518263-518309
  hypo

SEQ ID NO: 365219 - DNA, 131 bp, Homo sapiens; identical to SEQ ID NO: 354470
  chr10:518339-518470
  hypo

SEQ ID NO: 365220 - DNA, 101 bp, Homo sapiens; identical to SEQ ID NO: 348411
  chr10:524407-524508
  hypo

SEQ ID NO: 365221 - DNA, 83 bp, Homo sapiens; identical to SEQ ID NO: 213327
  chr10:524671-524754
  hypo

SEQ ID NO: 365222 - DNA, 270 bp, Homo sapiens; identical to SEQ ID NO: 340508
  chr10:630309-630579
  hypo

SEQ ID NO: 365223 - DNA, 141 bp, Homo sapiens; identical to SEQ ID NO: 354473
  chr10:851108-851249
  hypo

SEQ ID NO: 365224 - DNA, 175 bp, Homo sapiens; identical to SEQ ID NO: 354474
  chr10:851504-851679
  hypo

SEQ ID NO: 365225 - DNA, 258 bp, Homo sapiens; identical to SEQ ID NO: 340510
  chr10:851928-852186
  hypo

SEQ ID NO: 365226 - DNA, 256 bp, Homo sapiens; identical to SEQ ID NO: 340511
  chr10:894796-895052
  hypo

SEQ ID NO: 365227 - DNA, 148 bp, Homo sapiens; identical to SEQ ID NO: 354476
  chr10:978663-978811
  hypo

SEQ ID NO: 365228 - DNA, 225 bp, Homo sapiens; identical to SEQ ID NO: 340513
  chr10:1053566-1053791
  hypo

SEQ ID NO: 365229 - DNA, 49 bp, Homo sapiens; identical to SEQ ID NO: 354477
  chr10:1120729-1120778
  hypo

SEQ ID NO: 365230 - DNA, 357 bp, Homo sapiens; identical to SEQ ID NO: 340515
  chr10:1167479-1167836
  hypo

SEQ ID NO: 365231 - DNA, 155 bp, Homo sapiens; identical to SEQ ID NO: 354479
  chr10:1443319-1443474
  hypo

SEQ ID NO: 365232 - DNA, 311 bp, Homo sapiens; identical to SEQ ID NO: 354480
  chr10:1443566-1443877
  hypo

SEQ ID NO: 365233 - DNA, 101 bp, Homo sapiens; identical to SEQ ID NO: 354481
  chr10:1506151-1506252
  hypo

SEQ ID NO: 365234 - DNA, 51 bp, Homo sapiens
  chr10:1558541-1558592
  hypo
cggctttccctgctccctttcccgaggtgcagctggattcagagcttccca

SEQ ID NO: 365235 - DNA, 46 bp, Homo sapiens
  chr10:1558836-1558882
  hypo
taagggctagaaagaaaacattttcctcgagctgcatgcgaatatc

SEQ ID NO: 365236 - DNA, 53 bp, Homo sapiens; identical to SEQ ID NO: 213365
  chr10:1585239-1585292
  hypo

SEQ ID NO: 365237 - DNA, 73 bp, Homo sapiens
  chr10:1585421-1585494
  hypo
ccctcctctaccaggcctcatctggagggctgcgccaggtccttccaacttcaaagagttgcctgtgaagggc

SEQ ID NO: 365238 - DNA, 96 bp, Homo sapiens
  chr10:1708231-1708327
  hypo
cgggcatggaggctccaggctgagaccagcattggatagggtgggtgggcagggattacttaggtgccaataacccaggagtagaggagatggcac

SEQ ID NO: 365239 - DNA, 173 bp, Homo sapiens; identical to SEQ ID NO: 213368
  chr10:1708478-1708651
  hypo

SEQ ID NO: 365240 - DNA, 130 bp, Homo sapiens
  chr10:1708689-1708819
  hypo
cgaggatttttgtcatgcacacgccgctgccagcccattagctctccctgcttcccatggtctgccgcatctggggtatccagcgtcctcctgcagccgagggggaattctgaatgttttgctagaaacc

SEQ ID NO: 365241 - DNA, 45 bp, Homo sapiens; identical to SEQ ID NO: 354482
  chr10:1789180-1789225
  hypo

SEQ ID NO: 365242 - DNA, 139 bp, Homo sapiens; identical to SEQ ID NO: 354483
  chr10:1789266-1789405
  hypo

SEQ ID NO: 365243 - DNA, 264 bp, Homo sapiens; identical to SEQ ID NO: 340524
  chr10:1994498-1994762
  hypo

SEQ ID NO: 365244 - DNA, 166 bp, Homo sapiens; identical to SEQ ID NO: 340525
  chr10:2006696-2006862
  hypo

SEQ ID NO: 365245 - DNA, 416 bp, Homo sapiens; identical to SEQ ID NO: 340526
  chr10:2932075-2932491
  hypo

SEQ ID NO: 365246 - DNA, 192 bp, Homo sapiens; identical to SEQ ID NO: 286895
  chr10:3109168-3109360
  hypo

SEQ ID NO: 365247 - DNA, 1896 bp, Homo sapiens; identical to SEQ ID NO: 359478
  chr10:3109459-3111355
  hypo

SEQ ID NO: 365248 - DNA, 542 bp, Homo sapiens; identical to SEQ ID NO: 340528
  chr10:3121888-3122430
  hypo

SEQ ID NO: 365249 - DNA, 445 bp, Homo sapiens
  chr10:3151595-3152040
  hypo
cggacaccccagcttgcgtcgtgtcactgaacgggaaccacgccgtgcgcctgccgctgatggagtgcgtgcagatggtgagtgggcagcccatggccaagggcagggcggagacggctgggacagaagctgcttgtcaggccagcctgggcaccttgggtgtctcgtcggtgcacgatgcattacacggcctttctgagaaggaggtgagctgcccgtggggagggagaaggcttatgttctctcccacacctgcagagcctgcgccgtcttcgctctttggttttctaagttaccatccatctgtgtggcacatagtcgtaacctcccctgagtgggggtctagagcatcgggatcctcaacagtcgaggatccaggtggccccagtgcaccaggtgctgcagaaggacagagtgcagggaggcagccgagagagagagatcc

SEQ ID NO: 365250 - DNA, 161 bp, Homo sapiens; identical to SEQ ID NO: 354486
  chr10:3160827-3160988
  hypo

SEQ ID NO: 365251 - DNA, 125 bp, Homo sapiens; identical to SEQ ID NO: 354487
  chr10:3161171-3161296
  hypo

SEQ ID NO: 365252 - DNA, 227 bp, Homo sapiens; identical to SEQ ID NO: 340531
  chr10:3194438-3194665
  hypo

SEQ ID NO: 365253 - DNA, 114 bp, Homo sapiens; identical to SEQ ID NO: 354489
  chr10:3196890-3197004
  hypo

SEQ ID NO: 365254 - DNA, 294 bp, Homo sapiens; identical to SEQ ID NO: 354490
  chr10:3197113-3197407
  hypo

SEQ ID NO: 365255 - DNA, 307 bp, Homo sapiens; identical to SEQ ID NO: 213394
  chr10:3329809-3330116
  hypo

SEQ ID NO: 365256 - DNA, 226 bp, Homo sapiens; identical to SEQ ID NO: 312172
  chr10:3330188-3330414
  hypo

SEQ ID NO: 365257 - DNA, 297 bp, Homo sapiens; identical to SEQ ID NO: 354493
  chr10:3678862-3679159
  hypo

SEQ ID NO: 365258 - DNA, 54 bp, Homo sapiens; identical to SEQ ID NO: 354494
  chr10:5523206-5523260
  hypo

SEQ ID NO: 365259 - DNA, 69 bp, Homo sapiens; identical to SEQ ID NO: 348413
  chr10:5538706-5538775
  hypo

SEQ ID NO: 365260 - DNA, 192 bp, Homo sapiens; identical to SEQ ID NO: 348414
  chr10:5538938-5539130
  hypo

SEQ ID NO: 365261 - DNA, 380 bp, Homo sapiens; identical to SEQ ID NO: 348415
  chr10:5540271-5540651
  hypo

SEQ ID NO: 365262 - DNA, 198 bp, Homo sapiens; identical to SEQ ID NO: 348416
  chr10:5541528-5541726
  hypo

SEQ ID NO: 365263 - DNA, 145 bp, Homo sapiens; identical to SEQ ID NO: 213410
  chr10:5576085-5576230
  hypo

SEQ ID NO: 365264 - DNA, 277 bp, Homo sapiens
  chr10:5638918-5639195
  hypo
cggtttcagccacccggagcggccgccccacccgcctcctgcaaagaggtgagctgcccctgcccactgctgctccagctcacacccgtcatccgtgagccattactgactacctacagggtgcgcccgccgtggtctgcatgtcccacagaaattacccagggctggcccagcggctcccagcagacggccaggcatgtgctcccaggggcactggtcctagacagatgaggacacatagggactgacacccctgaaaacgcctggggcagcaggc

SEQ ID NO: 365265 - DNA, 421 bp, Homo sapiens; identical to SEQ ID NO: 340545
  chr10:5960358-5960779
  hypo

SEQ ID NO: 365266 - DNA, 134 bp, Homo sapiens; identical to SEQ ID NO: 354500
  chr10:6003855-6003989
  hypo

SEQ ID NO: 365267 - DNA, 130 bp, Homo sapiens; identical to SEQ ID NO: 340547
  chr10:6023448-6023578
  hypo

SEQ ID NO: 365268 - DNA, 145 bp, Homo sapiens; identical to SEQ ID NO: 354502
  chr10:6161993-6162138
  hypo

SEQ ID NO: 365269 - DNA, 666 bp, Homo sapiens; identical to SEQ ID NO: 350978
  chr10:6621854-6622520
  hypo

SEQ ID NO: 365270 - DNA, 87 bp, Homo sapiens; identical to SEQ ID NO: 350979
  chr10:6622706-6622793
  hypo

SEQ ID NO: 365271 - DNA, 70 bp, Homo sapiens
  chr10:7202899-7202969
  hypo
cggagagatggcacagagacaactttcatggcgacgccaggctgcgccctcctgtgcagtggtcccagcc

SEQ ID NO: 365272 - DNA, 34 bp, Homo sapiens; identical to SEQ ID NO: 354505
  chr10:7212711-7212745
  hypo

SEQ ID NO: 365273 - DNA, 122 bp, Homo sapiens
  chr10:7214457-7214579
  hypo
tcccccgagcccgcggtgaagtccacggcagaagacctccgtttcttctgcacgaaaatggatttccgtcgcttcctccgcctggcgggtttggggtgtccgctgtcggggttgctttcccc

SEQ ID NO: 365274 - DNA, 35 bp, Homo sapiens; identical to SEQ ID NO: 354506
  chr10:7409523-7409558
  hypo

SEQ ID NO: 365275 - DNA, 151 bp, Homo sapiens; identical to SEQ ID NO: 354507
  chr10:7409632-7409783
  hypo

SEQ ID NO: 365276 - DNA, 60 bp, Homo sapiens; identical to SEQ ID NO: 201967
  chr10:7453036-7453096
  hypo

SEQ ID NO: 365277 - DNA, 85 bp, Homo sapiens
  chr10:7608166-7608251
  hypo
cccagctccccaccaccacactctggttgcaggggagcaccagtctgtccccaccatccaagatgactctgctcggtgtgatctc

SEQ ID NO: 365278 - DNA, 297 bp, Homo sapiens; identical to SEQ ID NO: 340559
  chr10:7618377-7618674
  hypo

SEQ ID NO: 365279 - DNA, 112 bp, Homo sapiens; identical to SEQ ID NO: 354510
  chr10:7985048-7985160
  hypo

SEQ ID NO: 365280 - DNA, 115 bp, Homo sapiens; identical to SEQ ID NO: 354511
  chr10:7985194-7985309
  hypo

SEQ ID NO: 365281 - DNA, 183 bp, Homo sapiens; identical to SEQ ID NO: 354512
  chr10:8055498-8055681
  hypo

SEQ ID NO: 365282 - DNA, 86 bp, Homo sapiens; identical to SEQ ID NO: 354513
  chr10:8055764-8055850
  hypo

SEQ ID NO: 365283 - DNA, 117 bp, Homo sapiens; identical to SEQ ID NO: 350982
  chr10:8075813-8075930
  hypo

SEQ ID NO: 365284 - DNA, 51 bp, Homo sapiens; identical to SEQ ID NO: 286936
  chr10:8097537-8097588
  hypo

SEQ ID NO: 365285 - DNA, 198 bp, Homo sapiens
  chr10:10965181-10965379
  hypo
ctgtgacgtctaggaaaaatggaaaaatgcaactcaggcaactgccaactagtgatatgtggctgggaaggaagacggtggcatttgagaacagttttatggtttggttttcattggctatgactgtcttgaaatgttccgaaagaccatttacacgggttgcataagggtggagtatttccaccgtaattaccttac

SEQ ID NO: 365286 - DNA, 42 bp, Homo sapiens; identical to SEQ ID NO: 350990
  chr10:11060746-11060788
  hypo

SEQ ID NO: 365287 - DNA, 124 bp, Homo sapiens; identical to SEQ ID NO: 350993
  chr10:12390701-12390825
  hypo

SEQ ID NO: 365288 - DNA, 875 bp, Homo sapiens; identical to SEQ ID NO: 201983
  chr10:12390995-12391870
  hypo

SEQ ID NO: 365289 - DNA, 324 bp, Homo sapiens; identical to SEQ ID NO: 345344
  chr10:12392327-12392651
  hypo

SEQ ID NO: 365290 - DNA, 60 bp, Homo sapiens; identical to SEQ ID NO: 340572
  chr10:13711305-13711365
  hypo

SEQ ID NO: 365291 - DNA, 275 bp, Homo sapiens; identical to SEQ ID NO: 354520
  chr10:13771131-13771406
  hypo

SEQ ID NO: 365292 - DNA, 127 bp, Homo sapiens; identical to SEQ ID NO: 354521
  chr10:13771447-13771574
  hypo

SEQ ID NO: 365293 - DNA, 190 bp, Homo sapiens; identical to SEQ ID NO: 201987
  chr10:13933246-13933436
  hypo

SEQ ID NO: 365294 - DNA, 76 bp, Homo sapiens; identical to SEQ ID NO: 359505
  chr10:14646259-14646335
  hypo

SEQ ID NO: 365295 - DNA, 87 bp, Homo sapiens; identical to SEQ ID NO: 359506
  chr10:14646653-14646740
  hypo

SEQ ID NO: 365296 - DNA, 411 bp, Homo sapiens; identical to SEQ ID NO: 340577
  chr10:14816098-14816509
  hypo

SEQ ID NO: 365297 - DNA, 139 bp, Homo sapiens; identical to SEQ ID NO: 340579
  chr10:14979037-14979176
  hypo

SEQ ID NO: 365298 - DNA, 193 bp, Homo sapiens
  chr10:15254646-15254839
  hypo
cggatacgccgagtcctcggaaggacatctggacaccactttcagccacctccttgcaggggcgacatccgccaaagtcatcctttattccgagtaataactttaattcctttctaacatttacacggcaaacaggaatgcagtaaacgtccacgtccgtcccacggctgggctgccgttccgtttcctccac

SEQ ID NO: 365299 - DNA, 184 bp, Homo sapiens; identical to SEQ ID NO: 340581
  chr10:15255054-15255238
  hypo

SEQ ID NO: 365300 - DNA, 174 bp, Homo sapiens; identical to SEQ ID NO: 359507
  chr10:15762154-15762328
  hypo

SEQ ID NO: 365301 - DNA, 157 bp, Homo sapiens; identical to SEQ ID NO: 340584
  chr10:15828305-15828462
  hypo

SEQ ID NO: 365302 - DNA, 313 bp, Homo sapiens; identical to SEQ ID NO: 340585
  chr10:16716483-16716796
  hypo

SEQ ID NO: 365303 - DNA, 80 bp, Homo sapiens; identical to SEQ ID NO: 340586
  chr10:16806491-16806571
  hypo

SEQ ID NO: 365304 - DNA, 90 bp, Homo sapiens; identical to SEQ ID NO: 340587
  chr10:17157485-17157575
  hypo

SEQ ID NO: 365305 - DNA, 208 bp, Homo sapiens; identical to SEQ ID NO: 201993
  chr10:17270445-17270653
  hypo

SEQ ID NO: 365306 - DNA, 259 bp, Homo sapiens; identical to SEQ ID NO: 351000
  chr10:17495133-17495392
  hypo

SEQ ID NO: 365307 - DNA, 322 bp, Homo sapiens; identical to SEQ ID NO: 201996
  chr10:17495680-17496002
  hypo

SEQ ID NO: 365308 - DNA, 458 bp, Homo sapiens
  chr10:21797632-21798090
  hypo
cggagcctgctctgccccgcagaccctgcggtctccaggcccggtaggctttttcaggttccgcaggcctggccgaaccggccagatcccgcgttccaagcgtctggagaactggagacaaagcccaagatccaatcccaccgcagagcggctcaagccggcgcccgggacccgcgggcctaggcgcgacccccagcagcctgtgaccgaagaggggagcccgggacccctccgcctctccgcagccctctcgggcggggtcccccaggcccgcccggttccccctgccgcactcagccagctgcttttggaggcctgcgagttccaaacacgccttcccattaattaaaacctggaaagcctggccactttcttctcaggccgaggcagcatctccagaggtccccgcggcactctcggccggcaacggctcccgcgcggggccttggaggccgagc

SEQ ID NO: 365309 - DNA, 873 bp, Homo sapiens; identical to SEQ ID NO: 347076
  chr10:21815648-21816521
  hypo

SEQ ID NO: 365310 - DNA, 127 bp, Homo sapiens; identical to SEQ ID NO: 340594
  chr10:21915244-21915371
  hypo

SEQ ID NO: 365311 - DNA, 277 bp, Homo sapiens; identical to SEQ ID NO: 340595
  chr10:22042735-22043012
  hypo

SEQ ID NO: 365312 - DNA, 91 bp, Homo sapiens; identical to SEQ ID NO: 354532
  chr10:22047245-22047336
  hypo

SEQ ID NO: 365313 - DNA, 62 bp, Homo sapiens; identical to SEQ ID NO: 351007
  chr10:22540645-22540707
  hypo

SEQ ID NO: 365314 - DNA, 82 bp, Homo sapiens
  chr10:22833864-22833946
  hypo
cgcacactcctccccagtgacacggggcctcgctgcacattcattttgttggagtatttgagcgacttctctctttcccaag

SEQ ID NO: 365315 - DNA, 70 bp, Homo sapiens
  chr10:22834010-22834080
  hypo
agagggctcgggaaagtattcggcacttgttggacaagtgaatgggatgcttgttacttcttccctatcc

SEQ ID NO: 365316 - DNA, 149 bp, Homo sapiens
  chr10:22869787-22869936
  hypo
cgatggtaatgtctcgctttacagactcgacaggtgcagtgctctaatgcggcccgggaggctcctttgtagaatggatgagtctgccaactcctgtctgcagacactttgaagtcccaaggcagatgaggctgcaaatggaccaaaca

SEQ ID NO: 365317 - DNA, 87 bp, Homo sapiens; identical to SEQ ID NO: 340601
  chr10:22883126-22883213
  hypo

SEQ ID NO: 365318 - DNA, 214 bp, Homo sapiens; identical to SEQ ID NO: 287005
  chr10:23001984-23002198
  hypo

SEQ ID NO: 365319 - DNA, 286 bp, Homo sapiens; identical to SEQ ID NO: 351010
  chr10:23002228-23002514
  hypo

SEQ ID NO: 365320 - DNA, 211 bp, Homo sapiens; identical to SEQ ID NO: 354537
  chr10:24841853-24842064
  hypo

SEQ ID NO: 365321 - DNA, 223 bp, Homo sapiens; identical to SEQ ID NO: 340607
  chr10:24863037-24863260
  hypo

SEQ ID NO: 365322 - DNA, 66 bp, Homo sapiens
  chr10:24908462-24908528
  hypo
ctccattctttttatgtggacctctcgacgtgcatcattgggcagccagcaggtagtgtctgaccc

SEQ ID NO: 365323 - DNA, 56 bp, Homo sapiens; identical to SEQ ID NO: 340612
  chr10:27144571-27144627
  hypo

SEQ ID NO: 365324 - DNA, 54 bp, Homo sapiens; identical to SEQ ID NO: 340613
  chr10:27825982-27826036
  hypo

SEQ ID NO: 365325 - DNA, 111 bp, Homo sapiens; identical to SEQ ID NO: 340617
  chr10:29581547-29581658
  hypo

SEQ ID NO: 365326 - DNA, 59 bp, Homo sapiens; identical to SEQ ID NO: 340618
  chr10:29666997-29667056
  hypo

SEQ ID NO: 365327 - DNA, 734 bp, Homo sapiens; identical to SEQ ID NO: 202032
  chr10:30024793-30025527
  hypo

SEQ ID NO: 365328 - DNA, 137 bp, Homo sapiens; identical to SEQ ID NO: 340620
  chr10:30736731-30736868
  hypo

SEQ ID NO: 365329 - DNA, 105 bp, Homo sapiens
  chr10:31134746-31134851
  hypo
cgcatctgtcccaggcgagctaactcgtctttggttaccacagggacaggagcaatcacgtggaagagtcacgtaagagcgcgtgaagggcacgggaacaccctc

SEQ ID NO: 365330 - DNA, 790 bp, Homo sapiens; identical to SEQ ID NO: 345352
  chr10:31607954-31608744
  hypo

SEQ ID NO: 365331 - DNA, 252 bp, Homo sapiens; identical to SEQ ID NO: 202037
  chr10:31609416-31609668
  hypo

SEQ ID NO: 365332 - DNA, 68 bp, Homo sapiens; identical to SEQ ID NO: 340623
  chr10:35043989-35044057
  hypo

SEQ ID NO: 365333 - DNA, 544 bp, Homo sapiens; identical to SEQ ID NO: 202046
  chr10:35103534-35104078
  hypo

SEQ ID NO: 365334 - DNA, 96 bp, Homo sapiens
  chr10:35152237-35152333
  hypo
cgttatcaaataacaaatacttaatttcttttctttttttttttttgagacggagtcttgccaccatacctggcctatttacaggcatcctgttta

SEQ ID NO: 365335 - DNA, 217 bp, Homo sapiens; identical to SEQ ID NO: 354546
  chr10:44163386-44163603
  hypo

SEQ ID NO: 365336 - DNA, 70 bp, Homo sapiens; identical to SEQ ID NO: 340633
  chr10:44163720-44163790
  hypo

SEQ ID NO: 365337 - DNA, 413 bp, Homo sapiens; identical to SEQ ID NO: 340634
  chr10:44198155-44198568
  hypo

SEQ ID NO: 365338 - DNA, 269 bp, Homo sapiens; identical to SEQ ID NO: 340635
  chr10:44874128-44874397
  hypo

SEQ ID NO: 365339 - DNA, 94 bp, Homo sapiens; identical to SEQ ID NO: 351040
  chr10:50606762-50606856
  hypo

SEQ ID NO: 365340 - DNA, 215 bp, Homo sapiens; identical to SEQ ID NO: 359568
  chr10:50969681-50969896
  hypo

SEQ ID NO: 365341 - DNA, 192 bp, Homo sapiens; identical to SEQ ID NO: 359569
  chr10:50970412-50970604
  hypo

SEQ ID NO: 365342 - DNA, 398 bp, Homo sapiens; identical to SEQ ID NO: 340646
  chr10:70184294-70184692
  hypo

SEQ ID NO: 365343 - DNA, 139 bp, Homo sapiens; identical to SEQ ID NO: 340647
  chr10:70218986-70219125
  hypo

SEQ ID NO: 365344 - DNA, 1236 bp, Homo sapiens; identical to SEQ ID NO: 333960
  chr10:71078140-71079376
  hypo

SEQ ID NO: 365345 - DNA, 634 bp, Homo sapiens; identical to SEQ ID NO: 340649
  chr10:71133924-71134558
  hypo

SEQ ID NO: 365346 - DNA, 204 bp, Homo sapiens
  chr10:71158354-71158558
  hypo
cgattagcactgctccaggtccgggctatcctccagcagctaggtctgaatagcacctgcgatgacagtatcctcgtcaagacagtgtgcggggtggtgtccaggagggccgcacagctgtgtggcgcaggcatggctgcggttgtggataagatccgcgagaacagaggactggaccgtctgaatgtgactgtgggagtggac

SEQ ID NO: 365347 - DNA, 643 bp, Homo sapiens; identical to SEQ ID NO: 351052
  chr10:71892158-71892801
  hypo

SEQ ID NO: 365348 - DNA, 323 bp, Homo sapiens; identical to SEQ ID NO: 347095
  chr10:72238261-72238584
  hypo

SEQ ID NO: 365349 - DNA, 217 bp, Homo sapiens; identical to SEQ ID NO: 340656
  chr10:72765340-72765557
  hypo

SEQ ID NO: 365350 - DNA, 95 bp, Homo sapiens
  chr10:72784980-72785075
  hypo
cgaactgcatgcagcaacttgtatgaatcgcaaaggcttatgctgagcagaagccactatcacaaggttaccttctgcatgattttatctatact

SEQ ID NO: 365351 - DNA, 162 bp, Homo sapiens; identical to SEQ ID NO: 340658
  chr10:73445891-73446053
  hypo

SEQ ID NO: 365352 - DNA, 238 bp, Homo sapiens; identical to SEQ ID NO: 340659
  chr10:73514960-73515198
  hypo

SEQ ID NO: 365353 - DNA, 134 bp, Homo sapiens; identical to SEQ ID NO: 340660
  chr10:73591528-73591662
  hypo

SEQ ID NO: 365354 - DNA, 412 bp, Homo sapiens; identical to SEQ ID NO: 345356
  chr10:74079281-74079693
  hypo

SEQ ID NO: 365355 - DNA, 179 bp, Homo sapiens; identical to SEQ ID NO: 345357
  chr10:74079752-74079931
  hypo

SEQ ID NO: 365356 - DNA, 61 bp, Homo sapiens
  chr10:74100516-74100577
  hypo
cgcgctgtccctggcgccctcctcactcacatcaccctggttgtccctgcggtcctgcctt

SEQ ID NO: 365357 - DNA, 38 bp, Homo sapiens; identical to SEQ ID NO: 354557
  chr10:74451119-74451157
  hypo

SEQ ID NO: 365358 - DNA, 116 bp, Homo sapiens; identical to SEQ ID NO: 340667
  chr10:75574077-75574193
  hypo

SEQ ID NO: 365359 - DNA, 102 bp, Homo sapiens; identical to SEQ ID NO: 340668
  chr10:76287784-76287886
  hypo

SEQ ID NO: 365360 - DNA, 74 bp, Homo sapiens
  chr10:76784656-76784730
  hypo
cgactcaaccatttaatttctcatgagctcttatgtgttatgtttggaattaatttcagaggccttttgtacta

SEQ ID NO: 365361 - DNA, 73 bp, Homo sapiens; identical to SEQ ID NO: 340671
  chr10:76966489-76966562
  hypo

SEQ ID NO: 365362 - DNA, 404 bp, Homo sapiens; identical to SEQ ID NO: 340672
  chr10:76998426-76998830
  hypo

SEQ ID NO: 365363 - DNA, 918 bp, Homo sapiens; identical to SEQ ID NO: 351062
  chr10:77160017-77160935
  hypo

SEQ ID NO: 365364 - DNA, 42 bp, Homo sapiens
  chr10:77892406-77892448
  hypo
cgtgtatgtttacatgtgtaggtgagcgcatgagtacgagta

SEQ ID NO: 365365 - DNA, 112 bp, Homo sapiens; identical to SEQ ID NO: 312774
  chr10:77892478-77892590
  hypo

SEQ ID NO: 365366 - DNA, 499 bp, Homo sapiens; identical to SEQ ID NO: 340677
  chr10:79601557-79602056
  hypo

SEQ ID NO: 365367 - DNA, 76 bp, Homo sapiens; identical to SEQ ID NO: 340679
  chr10:79770259-79770335
  hypo

SEQ ID NO: 365368 - DNA, 138 bp, Homo sapiens; identical to SEQ ID NO: 340680
  chr10:80848861-80848999
  hypo

SEQ ID NO: 365369 - DNA, 226 bp, Homo sapiens; identical to SEQ ID NO: 340681
  chr10:80855265-80855491
  hypo

SEQ ID NO: 365370 - DNA, 423 bp, Homo sapiens; identical to SEQ ID NO: 340682
  chr10:80878255-80878678
  hypo

SEQ ID NO: 365371 - DNA, 253 bp, Homo sapiens; identical to SEQ ID NO: 340683
  chr10:80921761-80922014
  hypo

SEQ ID NO: 365372 - DNA, 178 bp, Homo sapiens; identical to SEQ ID NO: 340684
  chr10:80928401-80928579
  hypo

SEQ ID NO: 365373 - DNA, 80 bp, Homo sapiens
  chr10:81023804-81023884
  hypo
cgaggaaaaattacatgcggaatggaaagcaggcgctcagggtggctcctgctggaatgagagctggagtgcaggctccg

SEQ ID NO: 365374 - DNA, 69 bp, Homo sapiens
  chr10:81023914-81023983
  hypo
tctcaccttgcagatggagtgggactgttgacccaggccagcctggggactgcctcctcacctccctgc

SEQ ID NO: 365375 - DNA, 240 bp, Homo sapiens; identical to SEQ ID NO: 340687
  chr10:81032458-81032698
  hypo

SEQ ID NO: 365376 - DNA, 197 bp, Homo sapiens; identical to SEQ ID NO: 340688
  chr10:81036003-81036200
  hypo

SEQ ID NO: 365377 - DNA, 261 bp, Homo sapiens; identical to SEQ ID NO: 340689
  chr10:81050762-81051023
  hypo

SEQ ID NO: 365378 - DNA, 82 bp, Homo sapiens; identical to SEQ ID NO: 340690
  chr10:81060524-81060606
  hypo

SEQ ID NO: 365379 - DNA, 447 bp, Homo sapiens; identical to SEQ ID NO: 340691
  chr10:81063491-81063938
  hypo

SEQ ID NO: 365380 - DNA, 366 bp, Homo sapiens; identical to SEQ ID NO: 340692
  chr10:81065719-81066085
  hypo

SEQ ID NO: 365381 - DNA, 137 bp, Homo sapiens; identical to SEQ ID NO: 340693
  chr10:81142199-81142336
  hypo

SEQ ID NO: 365382 - DNA, 186 bp, Homo sapiens; identical to SEQ ID NO: 340694
  chr10:88200334-88200520
  hypo

SEQ ID NO: 365383 - DNA, 635 bp, Homo sapiens; identical to SEQ ID NO: 348435
  chr10:88441134-88441769
  hypo

SEQ ID NO: 365384 - DNA, 740 bp, Homo sapiens; identical to SEQ ID NO: 340696
  chr10:88702294-88703034
  hypo

SEQ ID NO: 365385 - DNA, 118 bp, Homo sapiens; identical to SEQ ID NO: 340697
  chr10:88857179-88857297
  hypo

SEQ ID NO: 365386 - DNA, 81 bp, Homo sapiens; identical to SEQ ID NO: 287311
  chr10:92617016-92617097
  hypo

SEQ ID NO: 365387 - DNA, 508 bp, Homo sapiens; identical to SEQ ID NO: 287312
  chr10:92617539-92618047
  hypo

SEQ ID NO: 365388 - DNA, 64 bp, Homo sapiens; identical to SEQ ID NO: 359627
  chr10:92618077-92618141
  hypo

SEQ ID NO: 365389 - DNA, 141 bp, Homo sapiens
  chr10:93567138-93567279
  hypo
cgaggtaaagcttctcggcagcgcggctgaactcctcccaggtctggtactgcggcatcgtggcctagagtggaaaagtaaagagaagcaaggcctcagaacccggcccaacaaactacctacgtccgggagtcgccaacc

SEQ ID NO: 365390 - DNA, 185 bp, Homo sapiens; identical to SEQ ID NO: 340700
  chr10:93572713-93572898
  hypo

SEQ ID NO: 365391 - DNA, 57 bp, Homo sapiens; identical to SEQ ID NO: 345362
  chr10:93647662-93647719
  hypo

SEQ ID NO: 365392 - DNA, 79 bp, Homo sapiens; identical to SEQ ID NO: 287325
  chr10:94449318-94449397
  hypo

SEQ ID NO: 365393 - DNA, 384 bp, Homo sapiens; identical to SEQ ID NO: 287332
  chr10:94833649-94834033
  hypo

SEQ ID NO: 365394 - DNA, 112 bp, Homo sapiens; identical to SEQ ID NO: 359634
  chr10:95753372-95753484
  hypo

SEQ ID NO: 365395 - DNA, 372 bp, Homo sapiens; identical to SEQ ID NO: 287338
  chr10:95753760-95754132
  hypo

SEQ ID NO: 365396 - DNA, 51 bp, Homo sapiens; identical to SEQ ID NO: 340707
  chr10:97322758-97322809
  hypo

SEQ ID NO: 365397 - DNA, 51 bp, Homo sapiens
  chr10:98292796-98292847
  hypo
attctctttaccattttttctccggtataggacgaggcacagcattgacac

SEQ ID NO: 365398 - DNA, 82 bp, Homo sapiens; identical to SEQ ID NO: 354577
  chr10:98364552-98364634
  hypo

SEQ ID NO: 365399 - DNA, 32 bp, Homo sapiens; identical to SEQ ID NO: 340711
  chr10:98983004-98983036
  hypo

SEQ ID NO: 365400 - DNA, 114 bp, Homo sapiens; identical to SEQ ID NO: 359641
  chr10:99474279-99474393
  hypo

SEQ ID NO: 365401 - DNA, 62 bp, Homo sapiens; identical to SEQ ID NO: 359642
  chr10:99474467-99474529
  hypo

SEQ ID NO: 365402 - DNA, 194 bp, Homo sapiens; identical to SEQ ID NO: 359643
  chr10:99530903-99531097
  hypo

SEQ ID NO: 365403 - DNA, 107 bp, Homo sapiens; identical to SEQ ID NO: 340716
  chr10:100171106-100171213
  hypo

SEQ ID NO: 365404 - DNA, 287 bp, Homo sapiens; identical to SEQ ID NO: 287412
  chr10:102507993-102508280
  hypo

SEQ ID NO: 365405 - DNA, 569 bp, Homo sapiens; identical to SEQ ID NO: 334036
  chr10:102822304-102822873
  hypo

SEQ ID NO: 365406 - DNA, 246 bp, Homo sapiens; identical to SEQ ID NO: 287435
  chr10:102988365-102988611
  hypo

SEQ ID NO: 365407 - DNA, 42 bp, Homo sapiens; identical to SEQ ID NO: 354580
  chr10:103425908-103425950
  hypo

SEQ ID NO: 365408 - DNA, 211 bp, Homo sapiens; identical to SEQ ID NO: 202239
  chr10:103535916-103536127
  hypo

SEQ ID NO: 365409 - DNA, 168 bp, Homo sapiens; identical to SEQ ID NO: 340728
  chr10:103817648-103817816
  hypo

SEQ ID NO: 365410 - DNA, 279 bp, Homo sapiens; identical to SEQ ID NO: 354581
  chr10:104416719-104416998
  hypo

SEQ ID NO: 365411 - DNA, 142 bp, Homo sapiens; identical to SEQ ID NO: 354582
  chr10:104417062-104417204
  hypo

SEQ ID NO: 365412 - DNA, 124 bp, Homo sapiens; identical to SEQ ID NO: 340732
  chr10:105403473-105403597
  hypo

SEQ ID NO: 365413 - DNA, 722 bp, Homo sapiens; identical to SEQ ID NO: 351100
  chr10:106097237-106097959
  hypo

SEQ ID NO: 365414 - DNA, 165 bp, Homo sapiens; identical to SEQ ID NO: 351101
  chr10:106098025-106098190
  hypo

SEQ ID NO: 365415 - DNA, 737 bp, Homo sapiens; identical to SEQ ID NO: 334066
  chr10:111767130-111767867
  hypo

SEQ ID NO: 365416 - DNA, 37 bp, Homo sapiens; identical to SEQ ID NO: 351106
  chr10:112431835-112431872
  hypo

SEQ ID NO: 365417 - DNA, 235 bp, Homo sapiens; identical to SEQ ID NO: 202288
  chr10:112432125-112432360
  hypo

SEQ ID NO: 365418 - DNA, 164 bp, Homo sapiens; identical to SEQ ID NO: 340740
  chr10:114200406-114200570
  hypo

SEQ ID NO: 365419 - DNA, 65 bp, Homo sapiens; identical to SEQ ID NO: 340741
  chr10:114252654-114252719
  hypo

SEQ ID NO: 365420 - DNA, 45 bp, Homo sapiens; identical to SEQ ID NO: 340742
  chr10:114343145-114343190
  hypo

SEQ ID NO: 365421 - DNA, 208 bp, Homo sapiens; identical to SEQ ID NO: 340743
  chr10:114591706-114591914
  hypo

SEQ ID NO: 365422 - DNA, 169 bp, Homo sapiens; identical to SEQ ID NO: 359682
  chr10:114711931-114712100
  hypo

SEQ ID NO: 365423 - DNA, 427 bp, Homo sapiens; identical to SEQ ID NO: 359683
  chr10:114712446-114712873
  hypo

SEQ ID NO: 365424 - DNA, 98 bp, Homo sapiens; identical to SEQ ID NO: 354591
  chr10:116045880-116045978
  hypo

SEQ ID NO: 365425 - DNA, 180 bp, Homo sapiens; identical to SEQ ID NO: 354592
  chr10:116046022-116046202
  hypo

SEQ ID NO: 365426 - DNA, 115 bp, Homo sapiens; identical to SEQ ID NO: 340746
  chr10:116050056-116050171
  hypo

SEQ ID NO: 365427 - DNA, 916 bp, Homo sapiens; identical to SEQ ID NO: 334075
  chr10:116527415-116528331
  hypo

SEQ ID NO: 365428 - DNA, 51 bp, Homo sapiens; identical to SEQ ID NO: 359690
  chr10:119001564-119001615
  hypo

SEQ ID NO: 365429 - DNA, 93 bp, Homo sapiens; identical to SEQ ID NO: 354593
  chr10:119807131-119807224
  hypo

SEQ ID NO: 365430 - DNA, 79 bp, Homo sapiens; identical to SEQ ID NO: 340753
  chr10:120601836-120601915
  hypo

SEQ ID NO: 365431 - DNA, 239 bp, Homo sapiens; identical to SEQ ID NO: 354595
  chr10:121265805-121266044
  hypo

SEQ ID NO: 365432 - DNA, 131 bp, Homo sapiens; identical to SEQ ID NO: 347121
  chr10:121301363-121301494
  hypo

SEQ ID NO: 365433 - DNA, 760 bp, Homo sapiens; identical to SEQ ID NO: 345370
  chr10:121301911-121302671
  hypo

SEQ ID NO: 365434 - DNA, 216 bp, Homo sapiens
  chr10:121398054-121398270
  hypo
gggcacctggctgccaacaccaagattggcccccaccacatccacacagtccgtgtgcggggaggtaacaataaatacggtgccctgaggcgggacatggggaatttctcctggggttcagagtgttgtactcgcaaaacaaggatcactgatgttgtctacgatgcgcccaatagcaagctggtccgtaccaagaccctggtggagaactgcttc

SEQ ID NO: 365435 - DNA, 43 bp, Homo sapiens; identical to SEQ ID NO: 340757
  chr10:121591491-121591534
  hypo

SEQ ID NO: 365436 - DNA, 137 bp, Homo sapiens; identical to SEQ ID NO: 340758
  chr10:121702253-121702390
  hypo

SEQ ID NO: 365437 - DNA, 276 bp, Homo sapiens; identical to SEQ ID NO: 359707
  chr10:124134313-124134589
  hypo

SEQ ID NO: 365438 - DNA, 134 bp, Homo sapiens; identical to SEQ ID NO: 340762
  chr10:125017540-125017674
  hypo

SEQ ID NO: 365439 - DNA, 271 bp, Homo sapiens; identical to SEQ ID NO: 354600
  chr10:125617057-125617328
  hypo

SEQ ID NO: 365440 - DNA, 1193 bp, Homo sapiens; identical to SEQ ID NO: 334112
  chr10:126106668-126107861
  hypo

SEQ ID NO: 365441 - DNA, 48 bp, Homo sapiens; identical to SEQ ID NO: 340765
  chr10:126190228-126190276
  hypo

SEQ ID NO: 365442 - DNA, 57 bp, Homo sapiens
  chr10:126198892-126198949
  hypo
cgcactttggtatgcggagcccacaagctggcctggacaggcatcactgctccaggc

SEQ ID NO: 365443 - DNA, 358 bp, Homo sapiens; identical to SEQ ID NO: 340767
  chr10:126296075-126296433
  hypo

SEQ ID NO: 365444 - DNA, 69 bp, Homo sapiens; identical to SEQ ID NO: 354604
  chr10:126314669-126314738
  hypo

SEQ ID NO: 365445 - DNA, 185 bp, Homo sapiens; identical to SEQ ID NO: 213781
  chr10:126332086-126332271
  hypo

SEQ ID NO: 365446 - DNA, 319 bp, Homo sapiens; identical to SEQ ID NO: 340771
  chr10:126354246-126354565
  hypo

SEQ ID NO: 365447 - DNA, 229 bp, Homo sapiens; identical to SEQ ID NO: 340772
  chr10:126696804-126697033
  hypo

SEQ ID NO: 365448 - DNA, 114 bp, Homo sapiens; identical to SEQ ID NO: 340773
  chr10:126711488-126711602
  hypo

SEQ ID NO: 365449 - DNA, 1801 bp, Homo sapiens; identical to SEQ ID NO: 340774
  chr10:126714633-126716434
  hypo

SEQ ID NO: 365450 - DNA, 261 bp, Homo sapiens; identical to SEQ ID NO: 340776
  chr10:126767714-126767975
  hypo

SEQ ID NO: 365451 - DNA, 549 bp, Homo sapiens; identical to SEQ ID NO: 340777
  chr10:126771776-126772325
  hypo

SEQ ID NO: 365452 - DNA, 92 bp, Homo sapiens; identical to SEQ ID NO: 340778
  chr10:126775448-126775540
  hypo

SEQ ID NO: 365453 - DNA, 409 bp, Homo sapiens; identical to SEQ ID NO: 340779
  chr10:126794880-126795289
  hypo

SEQ ID NO: 365454 - DNA, 392 bp, Homo sapiens; identical to SEQ ID NO: 340780
  chr10:126819324-126819716
  hypo

SEQ ID NO: 365455 - DNA, 379 bp, Homo sapiens; identical to SEQ ID NO: 340782
  chr10:126830153-126830532
  hypo

SEQ ID NO: 365456 - DNA, 143 bp, Homo sapiens; identical to SEQ ID NO: 340783
  chr10:127415629-127415772
  hypo

SEQ ID NO: 365457 - DNA, 141 bp, Homo sapiens; identical to SEQ ID NO: 346009
  chr10:127451818-127451959
  hypo

SEQ ID NO: 365458 - DNA, 38 bp, Homo sapiens; identical to SEQ ID NO: 346010
  chr10:127452067-127452105
  hypo

SEQ ID NO: 365459 - DNA, 307 bp, Homo sapiens; identical to SEQ ID NO: 340787
  chr10:129195296-129195603
  hypo

SEQ ID NO: 365460 - DNA, 413 bp, Homo sapiens; identical to SEQ ID NO: 340788
  chr10:129195681-129196094
  hypo

SEQ ID NO: 365461 - DNA, 105 bp, Homo sapiens
  chr10:129228001-129228106
  hypo
cgaggtgtgcagggccccagggatgagcccgtgagcacctgccacgttcggcattggcccccgtgccctcaccggcccacagcgccacgttcggcattggccccc

SEQ ID NO: 365462 - DNA, 176 bp, Homo sapiens; identical to SEQ ID NO: 340790
  chr10:129241072-129241248
  hypo

SEQ ID NO: 365463 - DNA, 166 bp, Homo sapiens; identical to SEQ ID NO: 340791
  chr10:129242401-129242567
  hypo

SEQ ID NO: 365464 - DNA, 37 bp, Homo sapiens
  chr10:129897014-129897051
  hypo
cgctcatccattcattcgtgtttaccgagtgcctgct

SEQ ID NO: 365465 - DNA, 175 bp, Homo sapiens; identical to SEQ ID NO: 340794
  chr10:130300191-130300366
  hypo

SEQ ID NO: 365466 - DNA, 105 bp, Homo sapiens
  chr10:131348408-131348513
  hypo
cgtacagttgagcgacattagttggtgccatctgtgagtgcacagtgcagcaactttagggggttcacaatgttccgcagccatcaccgccgcccagcactggca

SEQ ID NO: 365467 - DNA, 161 bp, Homo sapiens; identical to SEQ ID NO: 340796
  chr10:131566947-131567108
  hypo

SEQ ID NO: 365468 - DNA, 351 bp, Homo sapiens; identical to SEQ ID NO: 340797
  chr10:131638488-131638839
  hypo

SEQ ID NO: 365469 - DNA, 295 bp, Homo sapiens
  chr10:131647424-131647719
  hypo
cggccgggactccgtccgactgcacacactgtgtttaacaagctttataaggagccatcgggctttattatggctctgcctgactccaacaaaaactgagcctggaggcccggggacacgagttaagatgaaaatacttattggagtacattacttcttgatgtagatggcgttttccgtggagtcactccacggtgcgtggcacaacataaatcagaggtttttcggagactaataagacctgccaccatctattcattactctgcctgcaatttgggccatcactcattagta

SEQ ID NO: 365470 - DNA, 260 bp, Homo sapiens; identical to SEQ ID NO: 313321
  chr10:131844765-131845025
  hypo

SEQ ID NO: 365471 - DNA, 135 bp, Homo sapiens; identical to SEQ ID NO: 354615
  chr10:131987142-131987277
  hypo

SEQ ID NO: 365472 - DNA, 98 bp, Homo sapiens; identical to SEQ ID NO: 340805
  chr10:132869762-132869860
  hypo

SEQ ID NO: 365473 - DNA, 202 bp, Homo sapiens; identical to SEQ ID NO: 213827
  chr10:133783038-133783240
  hypo

SEQ ID NO: 365474 - DNA, 238 bp, Homo sapiens; identical to SEQ ID NO: 340810
  chr10:133834585-133834823
  hypo

SEQ ID NO: 365475 - DNA, 348 bp, Homo sapiens
  chr10:133920829-133921177
  hypo
cgccccgagggacacacgctccttgatggtcaacaggccaggcttgcgggctccccaggtgccggcaaggttccagggccggcgtctgagggctgcaacccagacccgctgggcaccctgcggggcatgtttagttgtacctggaggagaggatgtgctctcttggcacaacgtgcagaaggcaccggaggaaaggaatggagaagaagcctgtttgcctcagagctcctcatcctggacgccctcgccagagggttcatgttatggtttcctgcataagcgatctgagccctgcctcctcaagcgtaactgacagcatgctggatgcacaggcagcaactccctttt

SEQ ID NO: 365476 - DNA, 163 bp, Homo sapiens
  chr10:133921207-133921370
  hypo
gttccacgtggaacagtgcagctggcacaagctcgtccatgttattcacatgccccaccgtggtgggcctgtcgacggcatccaggctgattcgattctcggctgatactgcagccctgtacctgggtcttggactacatgcaaaagaactcctgcaggagac

SEQ ID NO: 365477 - DNA, 429 bp, Homo sapiens; identical to SEQ ID NO: 340815
  chr10:134049521-134049950
  hypo

SEQ ID NO: 365478 - DNA, 128 bp, Homo sapiens; identical to SEQ ID NO: 359725
  chr10:134209485-134209613
  hypo

SEQ ID NO: 365479 - DNA, 126 bp, Homo sapiens; identical to SEQ ID NO: 359726
  chr10:134209650-134209776
  hypo

SEQ ID NO: 365480 - DNA, 381 bp, Homo sapiens
  chr10:134212590-134212971
  hypo
cggttctctgcccttgtattccgagtcccagggctcctgtttccagccctgcctcggaccgcagggtgctgacctgccttccccaggtgccagtttctcatcagggcgtggtgcccgcccttatcccctgcatgtgacagtggaggcccagtccccaagtgtgggtgctgactcacagggaagagctgctgggagccctatgacaggtgtccgcccacctcagggaacctgtgggtcccagcacaaccggcgctgttgagcgcaggcggcgggcagccaggcacctgttcagagcaatcccacgggaatggcggccccgctcacacaggcgccgggatgcagggctgaggtgggcccagcagccagcgtttgttgtcggcc

SEQ ID NO: 365481 - DNA, 167 bp, Homo sapiens; identical to SEQ ID NO: 340821
  chr10:134298551-134298718
  hypo

SEQ ID NO: 365482 - DNA, 199 bp, Homo sapiens; identical to SEQ ID NO: 354619
  chr10:134477298-134477497
  hypo

SEQ ID NO: 365483 - DNA, 267 bp, Homo sapiens
  chr10:134491114-134491381
  hypo
aggccatctcgttccatttcagttgctcctcaccgtggtaatcggaaatgttaacgggcgcactcgtctggtggaatttatcgtggccagcgagggcgattaagcggctggtatgtggcgtgtttaccctcgtgtcagcatgactggtgttccaccctggcagatgaaggcccggtccttcctgggctcctaattggggacactacatccaagagccgtgacagggttcagcaacccgcgtgcagaatgccggcttccacggggcac

SEQ ID NO: 365484 - DNA, 591 bp, Homo sapiens; identical to SEQ ID NO: 354620
  chr10:134527015-134527606
  hypo

SEQ ID NO: 365485 - DNA, 345 bp, Homo sapiens; identical to SEQ ID NO: 354621
  chr10:134527839-134528184
  hypo

SEQ ID NO: 365486 - DNA, 529 bp, Homo sapiens; identical to SEQ ID NO: 340827
  chr10:134529092-134529621
  hypo

SEQ ID NO: 365487 - DNA, 252 bp, Homo sapiens; identical to SEQ ID NO: 348449
  chr10:134562467-134562719
  hypo

SEQ ID NO: 365488 - DNA, 324 bp, Homo sapiens; identical to SEQ ID NO: 313431
  chr10:134562783-134563107
  hypo

SEQ ID NO: 365489 - DNA, 417 bp, Homo sapiens; identical to SEQ ID NO: 354624
  chr10:134592912-134593329
  hypo

SEQ ID NO: 365490 - DNA, 134 bp, Homo sapiens; identical to SEQ ID NO: 354625
  chr10:134593416-134593550
  hypo

SEQ ID NO: 365491 - DNA, 117 bp, Homo sapiens
  chr10:134607715-134607832
  hypo
cgccccctgctgatgggcacctcccgacaatggcgcctcccagtgatggacgcctccacaggtcctcggggccccttcccgtccaggtcttcacagaggccccggcactgggtgccc

SEQ ID NO: 365492 - DNA, 40 bp, Homo sapiens; identical to SEQ ID NO: 354626
  chr10:134610534-134610574
  hypo

SEQ ID NO: 365493 - DNA, 195 bp, Homo sapiens
  chr10:134639765-134639960
  hypo
cggagccaggcaggagccggagccgcagagacccaccacagagccaggcaggagtcggagccacggagccaggcaggaactggagccacagagaccagccacggagccaggcaggagccagagccacagagaccagccatggagccaggcaggagccagagccacagagaccagccacggagccaggcaggagcc

SEQ ID NO: 365494 - DNA, 118 bp, Homo sapiens
  chr10:134680051-134680169
  hypo
cggctgtgcacccggccttgctagggcgccccgggtgtgggccggtggctgagcccctgcactaggatctgggcctaccccgcatccccccagcctctcctcgctaagcagagccccc

SEQ ID NO: 365495 - DNA, 119 bp, Homo sapiens; identical to SEQ ID NO: 340838
  chr10:134694283-134694402
  hypo

SEQ ID NO: 365496 - DNA, 242 bp, Homo sapiens; identical to SEQ ID NO: 313464
  chr10:134699406-134699648
  hypo

SEQ ID NO: 365497 - DNA, 230 bp, Homo sapiens; identical to SEQ ID NO: 313470
  chr10:134733835-134734065
  hypo

SEQ ID NO: 365498 - DNA, 162 bp, Homo sapiens; identical to SEQ ID NO: 313471
  chr10:134734534-134734696
  hypo

SEQ ID NO: 365499 - DNA, 116 bp, Homo sapiens
  chr10:134738029-134738145
  hypo
cgacgtgcctggcccggagctgggacagagggtggcccttattgagtacagggggagtctgttgcttgtggcactgtcatggcaagggggcttgggccaccttctcctcctctgtc

SEQ ID NO: 365500 - DNA, 298 bp, Homo sapiens
  chr10:134738688-134738986
  hypo
gcctgtgctcgctacgcttcccacccccagaatgcctcctccggtctgtgctacacgggcccttcccaggacaaaggctttggccaggatttcagtggagcagtctccccacactcccacctcccacaagccctgctggaccgcccaccgtcctgggctcacttggccacgtccccacagcctgtggcttccacgggggcctagccctcacgctgcccctgggctgggtggggcctgaacctcacaactccatcctgccacttggctgctgggtctgaaagcctcgtacgccggtgcc

SEQ ID NO: 365501 - DNA, 152 bp, Homo sapiens; identical to SEQ ID NO: 340844
  chr10:134758138-134758290
  hypo

SEQ ID NO: 365502 - DNA, 288 bp, Homo sapiens; identical to SEQ ID NO: 354629
  chr10:134790715-134791003
  hypo

SEQ ID NO: 365503 - DNA, 50 bp, Homo sapiens; identical to SEQ ID NO: 346011
  chr10:134793882-134793932
  hypo

SEQ ID NO: 365504 - DNA, 144 bp, Homo sapiens; identical to SEQ ID NO: 346012
  chr10:134793968-134794112
  hypo

SEQ ID NO: 365505 - DNA, 202 bp, Homo sapiens; identical to SEQ ID NO: 348453
  chr10:134794144-134794346
  hypo

SEQ ID NO: 365506 - DNA, 133 bp, Homo sapiens; identical to SEQ ID NO: 354633
  chr10:134796042-134796175
  hypo

SEQ ID NO: 365507 - DNA, 488 bp, Homo sapiens; identical to SEQ ID NO: 340850
  chr10:134829387-134829875
  hypo

SEQ ID NO: 365508 - DNA, 386 bp, Homo sapiens; identical to SEQ ID NO: 354634
  chr10:134830248-134830634
  hypo

SEQ ID NO: 365509 - DNA, 79 bp, Homo sapiens; identical to SEQ ID NO: 354635
  chr10:134830671-134830750
  hypo

SEQ ID NO: 365510 - DNA, 120 bp, Homo sapiens; identical to SEQ ID NO: 354636
  chr10:134875690-134875810
  hypo

SEQ ID NO: 365511 - DNA, 66 bp, Homo sapiens; identical to SEQ ID NO: 340855
  chr10:134878532-134878598
  hypo

SEQ ID NO: 365512 - DNA, 557 bp, Homo sapiens; identical to SEQ ID NO: 213891
  chr10:134941895-134942452
  hypo

SEQ ID NO: 365513 - DNA, 179 bp, Homo sapiens; identical to SEQ ID NO: 340859
  chr10:135001623-135001802
  hypo

SEQ ID NO: 365514 - DNA, 218 bp, Homo sapiens
  chr10:135002202-135002420
  hypo
ctgctgttccaccccccaccgccgtcccacacccccgccgtcccaccccccacaccgtcccacgcccccccactgtcccatcacccctgccgtcccatgcgtaactggcccccacctgaaccaagggacccaggggcagccaggacagtgtctccggtgaacggaacaggcggctcccgtctggagcaccttgtgggtgcctgctgggttgcagcacc

SEQ ID NO: 365515 - DNA, 54 bp, Homo sapiens
  chr10:135016995-135017049
  hypo
cgcacacggtgcagcgagggccgttctctggggcggctggagcagccggtgggc

SEQ ID NO: 365516 - DNA, 361 bp, Homo sapiens
  chr10:135017612-135017973
  hypo
ggccccatggtgcaggccatgggggaacgtggccaccaccatcctcagaagccaggaccaggtgccccggcagcagaacacagctccatggggacacctgcgtttaccaacctcaacctgcccagcccggtaggtccttccttgatgatggaatgttctagacgctgtccaccgggtagccaacagccacgtgtggctactgagctctggaaacatggcccacgtgactgaggacctgatgttttaatttcactgcactttaggcagccacggcagcctgcagctcagtgtgggaggcagggtcgcacttggctgggtggcagcggggtccggagggcttggggaacctggcttagtggcc

SEQ ID NO: 365517 - DNA, 85 bp, Homo sapiens
  chr10:135022978-135023063
  hypo
cgcgtgtgtggtgtgcgcgtctggttgtggagttctgtgtggctttgtgcatgtgtgtggtgtgcgcgtctggttgtcgagttct

SEQ ID NO: 365518 - DNA, 155 bp, Homo sapiens
  chr10:135025560-135025715
  hypo
cgtgcacatatgcatgcaccttcacacaatccacacgtgcacatgcgtgcacactcaatccacacgtgcacacgcacgtgcaccttcacacagccatacatgcactcgtgtgcaccctcacacatatccacacctacacgtgtgcaccctcacac

SEQ ID NO: 365519 - DNA, 145 bp, Homo sapiens
  chr10:135025748-135025893
  hypo
atccacacatgcacacacgtgcacccgcacacgcatccacacacacacgcatgcaccctcacatccacacgtgcacactcacataccccctccatgttcccggtcccaggcagccctgctgcgctggcacctcctgcaccatccc

SEQ ID NO: 365520 - DNA, 200 bp, Homo sapiens
  chr10:135030373-135030573
  hypo
cgcctgcggcagcacgatgaacctcgagggactcaggctcagggaaacgagccagtcgcgaagcacggacagtggacggctccacgtacacgaggcgcctggaggcgcaagattcacggagacaaagtagcagggtgggcgccgggggctgggagtggggcacggggagctcgtgttgaacggggaccgagtttccgttt

SEQ ID NO: 365521 - DNA, 179 bp, Homo sapiens
  chr10:135087233-135087412
  hypo
cgggagccctggcgttcgtccgccacacccacctgaggccggcacaggtgctgaggctggcggctgagtccgggtacccctctacgtggccctggtagaagcagtggtcctgcgggggaagcaggagaggggtccacaggctgtgcccccatggccccacaggctcggggagggccgcc

SEQ ID NO: 365522 - DNA, 100 bp, Homo sapiens
  chr10:135087645-135087745
  hypo
acccgagacccactcacctgttcttccgcaggtggagggtgaagttgtgccctgtggccccaaggacgtagctcaccctctctgggtgcaggccctgagc

SEQ ID NO: 365523 - DNA, 171 bp, Homo sapiens; identical to SEQ ID NO: 340869
  chr10:135107049-135107220
  hypo

SEQ ID NO: 365524 - DNA, 514 bp, Homo sapiens; identical to SEQ ID NO: 340870
  chr10:135120335-135120849
  hypo

SEQ ID NO: 365525 - DNA, 70 bp, Homo sapiens; identical to SEQ ID NO: 340872
  chr10:135125649-135125719
  hypo

SEQ ID NO: 365526 - DNA, 234 bp, Homo sapiens; identical to SEQ ID NO: 348456
  chr10:135153722-135153956
  hypo

SEQ ID NO: 365527 - DNA, 34 bp, Homo sapiens; identical to SEQ ID NO: 348457
  chr10:135154001-135154035
  hypo

SEQ ID NO: 365528 - DNA, 107 bp, Homo sapiens; identical to SEQ ID NO: 340874
  chr10:135229000-135229107
  hypo

SEQ ID NO: 365529 - DNA, 150 bp, Homo sapiens; identical to SEQ ID NO: 346014
  chr11:233062-233212
  hypo

SEQ ID NO: 365530 - DNA, 175 bp, Homo sapiens; identical to SEQ ID NO: 340879
  chr11:380592-380767
  hypo

SEQ ID NO: 365531 - DNA, 943 bp, Homo sapiens; identical to SEQ ID NO: 359736
  chr11:416597-417540
  hypo

SEQ ID NO: 365532 - DNA, 162 bp, Homo sapiens; identical to SEQ ID NO: 340884
  chr11:455954-456116
  hypo

SEQ ID NO: 365533 - DNA, 91 bp, Homo sapiens; identical to SEQ ID NO: 348459
  chr11:487212-487303
  hypo

SEQ ID NO: 365534 - DNA, 279 bp, Homo sapiens; identical to SEQ ID NO: 313597
  chr11:487548-487827
  hypo

SEQ ID NO: 365535 - DNA, 649 bp, Homo sapiens
  chr11:487857-488506
  hypo
tgccttgtttgctgacagtcgtacatcgaggctgctggaggggcagccacccaccccacgctcaccctgagacctcactgggggccctgccagtgctgtcgactccaagaatgctgccagccggggtgggggctgcacgcacccgtgggcagggccgggcgtggcctgcgtcccatactctggctgccagccgggtgggggctgcacgcacccgtgggcagggccgggcgtggccggcgtcccatactctggctgccagccggggtgggggctgcacgcacccgtgggcagggccgggtgtggccggcgtcccatactctggctgaccctggcgcccacagaccctgatgatccgagactggtggatgtgcatgatcatcagcgtgatgttcgagttcctggagtacagcctggagcaccagctgcccaacttcagcgagtgctggtgggatcacgtaggtgccagcacagcccccggggcagtcggtgcaggctgaggggcattctcggaacccctgtgcccagcgcggcccctggaccccctcattctccccggggggcagtgggtgcaggctgaggggcattctcggttcccctgtgctcttccggggtcctcctcggggggctcgttacccctcacccctgcaac

SEQ ID NO: 365536 - DNA, 574 bp, Homo sapiens
  chr11:492571-493145
  hypo
cgggagccatttgcacccacacccccgggtctgcctcggggccccgggcgtcaaaaagctttacttttagtatttttccttgactacttttggggaaaatttcaagccctctaagtcaagggctgtaatgtggagcacacacaagagcagcctctggggctcagcaggaagacgtccggtgtggccaccgcgcctagcagtcctctttccagtcacggccactcacagctttggcctccgtggccctgcacggatgagttcttccagctgccctgccctgcgtgctgcaggacacatggggccttagcattctgctctttgcaggtggcagctttgatcgctcaggaggaactgccacctgatctccccactgcaggggcccccactccccccctcacgcgctgcgggtcctgtcactccacccacgctgtccatccccgctgatgctctgagccaggtggtagcaggtgggggtggcgccccgctcacggtctccatctgctcttcccgaggagggcgaggcagggcttgtgattaaagtcctgtgttccggcgcccgtgtcccaaaggcagc

SEQ ID NO: 365537 - DNA, 60 bp, Homo sapiens
  chr11:493199-493259
  hypo
gttcctcacgcgctgagatgctccggactcaccttgggcatctctcgccccaggcctggc

SEQ ID NO: 365538 - DNA, 343 bp, Homo sapiens; identical to SEQ ID NO: 354648
  chr11:561903-562246
  hypo

SEQ ID NO: 365539 - DNA, 627 bp, Homo sapiens; identical to SEQ ID NO: 354649
  chr11:562884-563511
  hypo

SEQ ID NO: 365540 - DNA, 37 bp, Homo sapiens; identical to SEQ ID NO: 354650
  chr11:567195-567232
  hypo

SEQ ID NO: 365541 - DNA, 48 bp, Homo sapiens; identical to SEQ ID NO: 354651
  chr11:567262-567310
  hypo

SEQ ID NO: 365542 - DNA, 171 bp, Homo sapiens; identical to SEQ ID NO: 340889
  chr11:591108-591279
  hypo

SEQ ID NO: 365543 - DNA, 672 bp, Homo sapiens; identical to SEQ ID NO: 334150
  chr11:705963-706635
  hypo

SEQ ID NO: 365544 - DNA, 110 bp, Homo sapiens; identical to SEQ ID NO: 354653
  chr11:763192-763302
  hypo

SEQ ID NO: 365545 - DNA, 62 bp, Homo sapiens; identical to SEQ ID NO: 354654
  chr11:764018-764080
  hypo

SEQ ID NO: 365546 - DNA, 364 bp, Homo sapiens; identical to SEQ ID NO: 340894
  chr11:799220-799584
  hypo

SEQ ID NO: 365547 - DNA, 305 bp, Homo sapiens
  chr11:799826-800131
  hypo
cggatgcgctgcacctcccggtaggacacccccaggtgcagggccacggctggccagtccagacccagacgcccagccacactcagcaggttgctctgcgtcagaaagccggtctcggcatctcccagattcaagggtgccaaggagaggccagccccccgccgtggcccctcggaccctcgaagtctctgttggaaggaaaaagtgcattaagccctgggctccacccccaactccaccatgtcaccctggtcacccctgggcctcggtcctgccccgcccctctgctgtccctcagtcccacc

SEQ ID NO: 365548 - DNA, 38 bp, Homo sapiens; identical to SEQ ID NO: 354655
  chr11:823426-823464
  hypo

SEQ ID NO: 365549 - DNA, 409 bp, Homo sapiens; identical to SEQ ID NO: 313646
  chr11:823494-823903
  hypo

SEQ ID NO: 365550 - DNA, 102 bp, Homo sapiens; identical to SEQ ID NO: 354657
  chr11:850444-850546
  hypo

SEQ ID NO: 365551 - DNA, 258 bp, Homo sapiens; identical to SEQ ID NO: 354658
  chr11:859386-859644
  hypo

SEQ ID NO: 365552 - DNA, 513 bp, Homo sapiens; identical to SEQ ID NO: 340902
  chr11:993208-993721
  hypo

SEQ ID NO: 365553 - DNA, 186 bp, Homo sapiens
  chr11:1015850-1016036
  hypo
cgtgtggtaggcgacaaggtgggaccagggtgcctggtggtaaggttggtgactggagaggtggggatacccgtcacccccgaggtgagtgacacaaagcctgatgtgggaactcgggtggtgagagaagtggaccgcgaggtggtggactgagaggagaaggcaggggcggtgtgggtgctggcc

SEQ ID NO: 365554 - DNA, 136 bp, Homo sapiens
  chr11:1082528-1082664
  hypo
cgccgggccacactctgcctccctgcctcactgcccgtccaccttgctctgtcgcccagaggtgcaaatatgacacgtgtaactgtcagaacaatgaggactgcctgtgcgccgccctgtcctcctacgcgcgcgc

SEQ ID NO: 365555 - DNA, 166 bp, Homo sapiens
  chr11:1082694-1082860
  hypo
ctggcgggagcatgtctgcagtgagtgccgtccccgtgggctgcatcctggggatggggtccgggctttgagctcctgggacggggctgggggccctgagcacgggtggtccagggagaggggtcggccccctgcagccacggaccaggctccagcttcgtcagcc

SEQ ID NO: 365556 - DNA, 157 bp, Homo sapiens; identical to SEQ ID NO: 354659
  chr11:1095394-1095551
  hypo

SEQ ID NO: 365557 - DNA, 498 bp, Homo sapiens; identical to SEQ ID NO: 354660
  chr11:1103476-1103974
  hypo

SEQ ID NO: 365558 - DNA, 313 bp, Homo sapiens
  chr11:1104214-1104527
  hypo
cacctcccgccgggcccggcgctcccctaggcatctggggagcgggtgagcggggtgggcacagcccccttcactgccctcgacagctttacctcccccggaccctctgagcctcctaagctcggcttcctctcttcagatatttattgtctgagtctttgttcagtccttgctttccaataataaactcagggggacatgctgtactgtgtggtttaggttggtgctgcaggggtgcggcttggccactgtgcatggcggaggccaccaggctctgcgtgcaggacacgggggcaccacacacacgccacgc

SEQ ID NO: 365559 - DNA, 65 bp, Homo sapiens; identical to SEQ ID NO: 354661
  chr11:1254274-1254339
  hypo

SEQ ID NO: 365560 - DNA, 70 bp, Homo sapiens; identical to SEQ ID NO: 354662
  chr11:1254423-1254493
  hypo

SEQ ID NO: 365561 - DNA, 182 bp, Homo sapiens; identical to SEQ ID NO: 354663
  chr11:1262998-1263180
  hypo

SEQ ID NO: 365562 - DNA, 123 bp, Homo sapiens; identical to SEQ ID NO: 354664
  chr11:1263764-1263887
  hypo

SEQ ID NO: 365563 - DNA, 98 bp, Homo sapiens
  chr11:1275538-1275636
  hypo
cgtcctcactgtcaccatggtgcatgggaaggaggagggcctggtgagtccaggctgcgggtggcacagtgttggcccagtcccaaccgcacctgggc

SEQ ID NO: 365564 - DNA, 525 bp, Homo sapiens; identical to SEQ ID NO: 313718
  chr11:1275755-1276280
  hypo

SEQ ID NO: 365565 - DNA, 90 bp, Homo sapiens
  chr11:1301047-1301137
  hypo
cgcagcatggtaagtcccggccgccggtgggcaggggagcatcagccctgctcaggctgaaggcatgtggccctgggctccagacgtctc

SEQ ID NO: 365566 - DNA, 731 bp, Homo sapiens; identical to SEQ ID NO: 347133
  chr11:1410711-1411442
  hypo

SEQ ID NO: 365567 - DNA, 181 bp, Homo sapiens
  chr11:1446149-1446330
  hypo
cgggaggggtgttctccccgcctccatgggcaaagaatctggggcccttgtcagagaccgcggggtcagtgggattggcgcccaggccctgctgtgacgccacgtgtttcccactcagcgaggctgttcctgccaggcgtggggactcggaccctggtcctgagtgctgccccgaggcccg

SEQ ID NO: 365568 - DNA, 50 bp, Homo sapiens
  chr11:1446400-1446450
  hypo
gagtctcagctccccgggtcatcagtccaagccactcagcaggtggcttc

SEQ ID NO: 365569 - DNA, 45 bp, Homo sapiens
  chr11:1464971-1465016
  hypo
gtgtgtgggtcggtgcccaggtgtgtggacgtgtgcacaggtgtc

SEQ ID NO: 365570 - DNA, 350 bp, Homo sapiens; identical to SEQ ID NO: 354666
  chr11:1466353-1466703
  hypo

SEQ ID NO: 365571 - DNA, 104 bp, Homo sapiens; identical to SEQ ID NO: 354667
  chr11:1471460-1471564
  hypo

SEQ ID NO: 365572 - DNA, 101 bp, Homo sapiens
  chr11:1477651-1477752
  hypo
cgtgttccagaagccggtcaagttccaggttgatatcacctacacggagggtggggaggcgcagaaggagaacggcatctactccgtcaccttcaccctgc

SEQ ID NO: 365573 - DNA, 66 bp, Homo sapiens
  chr11:1478347-1478413
  hypo
cctgagcagggccctccatgcccacccacaggtctcggccctggacaggccaagcatgccccgggc

SEQ ID NO: 365574 - DNA, 227 bp, Homo sapiens; identical to SEQ ID NO: 354668
  chr11:1521171-1521398
  hypo

SEQ ID NO: 365575 - DNA, 705 bp, Homo sapiens
  chr11:1535842-1536547
  hypo
cgggagcacccagggaacacaagtgcaccatgacgcggagcccttcatcaccgcaggccacggcgcttgtccttcccagaggcccccaaccacagctgctgagcgacacccacaccgcttctctcttcacacagcggactgatgaggagtcccgccaagcaggagctctgagccacagcacagagtgtgctggcccaagtccacgcctgcatgcaagctcagccatgcgtctaatggcaataaccgtggaatgagctcgtgaggttcggagagtcccaccccgacggggagagccacagggagccccaatctcggcagtgaccggctccaggtccccacgtaccgtgagagtggggacagcggtggacagcagcccttgagcagggcacaaccttcagagagacctcgacaagtgaacacttaaaccaaggtcgaccctgggggaaacgcagacctcctcccagtgcccccttcagaaaaggtactcaaacactggctcccatcatgagctgggcacggaaccaggcatgggtactacctgcctccagggcttggagctcgggaggggaaccaatcccgggccctcgacctgggaggtgccagaaggccctcacacaagactccagcactagggtggggaggttaaagtaaacaggacagaggggttcaactaagacaatacctttgctcacggtcagaggcgaa

SEQ ID NO: 365576 - DNA, 95 bp, Homo sapiens
  chr11:1536583-1536678
  hypo
cacaagctctcccgccgcggctgcaccacatgcctgataaagggacagccctggatgtctagttcctcaggcacgtgtgcacacatgtgtgctgc

SEQ ID NO: 365577 - DNA, 167 bp, Homo sapiens; identical to SEQ ID NO: 340924
  chr11:1552182-1552349
  hypo

SEQ ID NO: 365578 - DNA, 189 bp, Homo sapiens; identical to SEQ ID NO: 340925
  chr11:1795707-1795896
  hypo

SEQ ID NO: 365579 - DNA, 150 bp, Homo sapiens; identical to SEQ ID NO: 340926
  chr11:1800836-1800986
  hypo

SEQ ID NO: 365580 - DNA, 400 bp, Homo sapiens; identical to SEQ ID NO: 340928
  chr11:1824649-1825049
  hypo

SEQ ID NO: 365581 - DNA, 34 bp, Homo sapiens
  chr11:1975930-1975964
  hypo
cgcgcaggaatgaagggcgcacgacatgagaggc

SEQ ID NO: 365582 - DNA, 282 bp, Homo sapiens; identical to SEQ ID NO: 340936
  chr11:2026733-2027015
  hypo

SEQ ID NO: 365583 - DNA, 331 bp, Homo sapiens; identical to SEQ ID NO: 340938
  chr11:2117541-2117872
  hypo

SEQ ID NO: 365584 - DNA, 42 bp, Homo sapiens
  chr11:2122493-2122535
  hypo
gctgggtccctggactcaccaccttccctcactggacccctc

SEQ ID NO: 365585 - DNA, 450 bp, Homo sapiens; identical to SEQ ID NO: 340940
  chr11:2124971-2125421
  hypo

SEQ ID NO: 365586 - DNA, 62 bp, Homo sapiens
  chr11:2225626-2225688
  hypo
cgtgcgtccctagcctggcggcaggtgctctgggccctctccctgggactatctgcctggac

SEQ ID NO: 365587 - DNA, 305 bp, Homo sapiens; identical to SEQ ID NO: 313846
  chr11:2278017-2278322
  hypo

SEQ ID NO: 365588 - DNA, 98 bp, Homo sapiens
  chr11:2278839-2278937
  hypo
tggaatgcctccctgcctgcacagcaggagtgtttggctgaggtctgcagccccgacacaggtcacctcccacgcctatgggggcttcagaaagtccc

SEQ ID NO: 365589 - DNA, 339 bp, Homo sapiens
  chr11:2334660-2334999
  hypo
cggccattgtgtgaaggccccatcgttgatgttgggaagcactgtgactggctgcccagggacccaggttccgctttggggagatccacctgctacaaggagggcagtgctgggacgtcactcagcactaagggcccactagcgtttgggatgtcgtggggagggggctgtgtccccggatctcccaccagggccaggacctccctgtggtctctcggtgcaggtggaggacgccatgctggacacctacgacctggtatatgagcaggcgatgaaaggtacgtcccacgtccggcggcaggagctggcggccatccaggacgtggtgagcgtggggac

SEQ ID NO: 365590 - DNA, 380 bp, Homo sapiens; identical to SEQ ID NO: 348466
  chr11:2337172-2337552
  hypo

SEQ ID NO: 365591 - DNA, 564 bp, Homo sapiens; identical to SEQ ID NO: 359743
  chr11:2398759-2399323
  hypo

SEQ ID NO: 365592 - DNA, 401 bp, Homo sapiens; identical to SEQ ID NO: 351145
  chr11:2399399-2399800
  hypo

SEQ ID NO: 365593 - DNA, 558 bp, Homo sapiens; identical to SEQ ID NO: 340950
  chr11:2412921-2413479
  hypo

SEQ ID NO: 365594 - DNA, 407 bp, Homo sapiens; identical to SEQ ID NO: 214016
  chr11:2436014-2436421
  hypo

SEQ ID NO: 365595 - DNA, 136 bp, Homo sapiens
  chr11:2436611-2436747
  hypo
cacgtctgcgccgttgtccacaaagaggcgcacaaactcgggcttgttgctgaccagggcgtccaccatcacctcctccaggtcacaggacttggcggccatgggcacccgagggaagggggacaagagagtgagc

SEQ ID NO: 365596 - DNA, 55 bp, Homo sapiens; identical to SEQ ID NO: 340955
  chr11:2987095-2987150
  hypo

SEQ ID NO: 365597 - DNA, 285 bp, Homo sapiens
  chr11:3110995-3111280
  hypo
cccacctcccgccctagctctaccaggtctctcgcactctctgacccggagtctggatggacaccctgagtgtggcccacctgtgcagctcctgctgggcctctcggatggagaggatggcctcgtgcagggcctgcagccgccgcgcctccttcctgcaccgagggcatgggctctcaccgcctgggacggccccgagtgagacaaaggaggggaggggaggagtgaggatgagctggaggtccagtggggctggcacgtgggtcacagggtcatatccagctc

SEQ ID NO: 365598 - DNA, 253 bp, Homo sapiens; identical to SEQ ID NO: 340959
  chr11:3145131-3145384
  hypo

SEQ ID NO: 365599 - DNA, 93 bp, Homo sapiens; identical to SEQ ID NO: 354678
  chr11:3164459-3164552
  hypo

SEQ ID NO: 365600 - DNA, 290 bp, Homo sapiens; identical to SEQ ID NO: 202417
  chr11:3186311-3186601
  hypo

SEQ ID NO: 365601 - DNA, 716 bp, Homo sapiens; identical to SEQ ID NO: 340964
  chr11:3243313-3244029
  hypo

SEQ ID NO: 365602 - DNA, 103 bp, Homo sapiens; identical to SEQ ID NO: 348470
  chr11:3697491-3697594
  hypo

SEQ ID NO: 365603 - DNA, 318 bp, Homo sapiens; identical to SEQ ID NO: 340968
  chr11:3845131-3845449
  hypo

SEQ ID NO: 365604 - DNA, 156 bp, Homo sapiens
  chr11:5950927-5951083
  hypo
cgcaccgcccacttcctcacgggtccctccttcgccaatcacgccacctcctcctccacctccatcatctcctcctcctccaccactaccctcacctgcccctcccaagtcccctgtggccgcacacacccaggccaggccggcactccttgcccc

SEQ ID NO: 365605 - DNA, 344 bp, Homo sapiens; identical to SEQ ID NO: 287800
  chr11:8041149-8041493
  hypo

SEQ ID NO: 365606 - DNA, 126 bp, Homo sapiens; identical to SEQ ID NO: 340974
  chr11:8255472-8255598
  hypo

SEQ ID NO: 365607 - DNA, 129 bp, Homo sapiens; identical to SEQ ID NO: 351149
  chr11:8615887-8616016
  hypo

SEQ ID NO: 365608 - DNA, 60 bp, Homo sapiens; identical to SEQ ID NO: 287811
  chr11:9112971-9113031
  hypo

SEQ ID NO: 365609 - DNA, 121 bp, Homo sapiens; identical to SEQ ID NO: 348471
  chr11:9405271-9405392
  hypo

SEQ ID NO: 365610 - DNA, 68 bp, Homo sapiens; identical to SEQ ID NO: 340978
  chr11:9548334-9548402
  hypo

SEQ ID NO: 365611 - DNA, 309 bp, Homo sapiens; identical to SEQ ID NO: 340980
  chr11:9554672-9554981
  hypo

SEQ ID NO: 365612 - DNA, 151 bp, Homo sapiens; identical to SEQ ID NO: 340982
  chr11:10519332-10519483
  hypo

SEQ ID NO: 365613 - DNA, 350 bp, Homo sapiens; identical to SEQ ID NO: 340983
  chr11:11833053-11833403
  hypo

SEQ ID NO: 365614 - DNA, 83 bp, Homo sapiens; identical to SEQ ID NO: 340984
  chr11:11960229-11960312
  hypo

SEQ ID NO: 365615 - DNA, 262 bp, Homo sapiens; identical to SEQ ID NO: 202440
  chr11:12030561-12030823
  hypo

SEQ ID NO: 365616 - DNA, 53 bp, Homo sapiens; identical to SEQ ID NO: 359760
  chr11:12031006-12031059
  hypo

SEQ ID NO: 365617 - DNA, 287 bp, Homo sapiens; identical to SEQ ID NO: 202443
  chr11:12132212-12132499
  hypo

SEQ ID NO: 365618 - DNA, 357 bp, Homo sapiens; identical to SEQ ID NO: 340988
  chr11:12182020-12182377
  hypo

SEQ ID NO: 365619 - DNA, 372 bp, Homo sapiens; identical to SEQ ID NO: 340989
  chr11:12183631-12184003
  hypo

SEQ ID NO: 365620 - DNA, 78 bp, Homo sapiens; identical to SEQ ID NO: 340990
  chr11:12225829-12225907
  hypo

SEQ ID NO: 365621 - DNA, 62 bp, Homo sapiens
  chr11:12230977-12231039
  hypo
cggggggtataatcattctcttcccacctctctctgccaactcatctcatttctctgtcctg

SEQ ID NO: 365622 - DNA, 58 bp, Homo sapiens
  chr11:12231069-12231127
  hypo
cctacagaccattctctgtcggagtttgagtttgacgtcatcattggtgccgatggcc

SEQ ID NO: 365623 - DNA, 258 bp, Homo sapiens; identical to SEQ ID NO: 340992
  chr11:12240017-12240275
  hypo

SEQ ID NO: 365624 - DNA, 251 bp, Homo sapiens; identical to SEQ ID NO: 340993
  chr11:12247662-12247913
  hypo

SEQ ID NO: 365625 - DNA, 97 bp, Homo sapiens; identical to SEQ ID NO: 340995
  chr11:12262569-12262666
  hypo

SEQ ID NO: 365626 - DNA, 180 bp, Homo sapiens; identical to SEQ ID NO: 340996
  chr11:12267687-12267867
  hypo

SEQ ID NO: 365627 - DNA, 352 bp, Homo sapiens; identical to SEQ ID NO: 340997
  chr11:12278228-12278580
  hypo

SEQ ID NO: 365628 - DNA, 141 bp, Homo sapiens; identical to SEQ ID NO: 340998
  chr11:12279396-12279537
  hypo

SEQ ID NO: 365629 - DNA, 301 bp, Homo sapiens; identical to SEQ ID NO: 340999
  chr11:12281112-12281413
  hypo

SEQ ID NO: 365630 - DNA, 434 bp, Homo sapiens; identical to SEQ ID NO: 341000
  chr11:12283321-12283755
  hypo

SEQ ID NO: 365631 - DNA, 366 bp, Homo sapiens; identical to SEQ ID NO: 341001
  chr11:12284011-12284377
  hypo

SEQ ID NO: 365632 - DNA, 202 bp, Homo sapiens; identical to SEQ ID NO: 351154
  chr11:13300232-13300434
  hypo

SEQ ID NO: 365633 - DNA, 657 bp, Homo sapiens; identical to SEQ ID NO: 359771
  chr11:13689464-13690121
  hypo

SEQ ID NO: 365634 - DNA, 555 bp, Homo sapiens; identical to SEQ ID NO: 359772
  chr11:13690157-13690712
  hypo

SEQ ID NO: 365635 - DNA, 1596 bp, Homo sapiens; identical to SEQ ID NO: 334182
  chr11:17034991-17036587
  hypo

SEQ ID NO: 365636 - DNA, 402 bp, Homo sapiens; identical to SEQ ID NO: 287888
  chr11:17742811-17743213
  hypo

SEQ ID NO: 365637 - DNA, 37 bp, Homo sapiens; identical to SEQ ID NO: 351163
  chr11:17743245-17743282
  hypo

SEQ ID NO: 365638 - DNA, 70 bp, Homo sapiens
  chr11:18512439-18512509
  hypo
atcatcatagcgctcagcctgctcagtgagttggctttctgtaccagctcacttttatccagtcgttccc

SEQ ID NO: 365639 - DNA, 65 bp, Homo sapiens; identical to SEQ ID NO: 341009
  chr11:19247033-19247098
  hypo

SEQ ID NO: 365640 - DNA, 200 bp, Homo sapiens; identical to SEQ ID NO: 341010
  chr11:19256446-19256646
  hypo

SEQ ID NO: 365641 - DNA, 1265 bp, Homo sapiens; identical to SEQ ID NO: 359793
  chr11:19733708-19734973
  hypo

SEQ ID NO: 365642 - DNA, 338 bp, Homo sapiens; identical to SEQ ID NO: 202485
  chr11:19735066-19735404
  hypo

SEQ ID NO: 365643 - DNA, 302 bp, Homo sapiens; identical to SEQ ID NO: 341016
  chr11:30445742-30446044
  hypo

SEQ ID NO: 365644 - DNA, 171 bp, Homo sapiens; identical to SEQ ID NO: 341017
  chr11:31808842-31809013
  hypo

SEQ ID NO: 365645 - DNA, 384 bp, Homo sapiens; identical to SEQ ID NO: 334231
  chr11:32851566-32851950
  hypo

SEQ ID NO: 365646 - DNA, 929 bp, Homo sapiens; identical to SEQ ID NO: 345384
  chr11:32915113-32916042
  hypo

SEQ ID NO: 365647 - DNA, 48 bp, Homo sapiens
  chr11:34535248-34535296
  hypo
aagaggaggctttcaaggcaagagaaggcaggcgctcccagcaccagc

SEQ ID NO: 365648 - DNA, 202 bp, Homo sapiens; identical to SEQ ID NO: 287979
  chr11:35439896-35440098
  hypo

SEQ ID NO: 365649 - DNA, 238 bp, Homo sapiens; identical to SEQ ID NO: 202513
  chr11:35440137-35440375
  hypo

SEQ ID NO: 365650 - DNA, 155 bp, Homo sapiens; identical to SEQ ID NO: 341033
  chr11:36476175-36476330
  hypo

SEQ ID NO: 365651 - DNA, 210 bp, Homo sapiens; identical to SEQ ID NO: 354712
  chr11:43543814-43544024
  hypo

SEQ ID NO: 365652 - DNA, 98 bp, Homo sapiens; identical to SEQ ID NO: 354713
  chr11:43544070-43544168
  hypo

SEQ ID NO: 365653 - DNA, 61 bp, Homo sapiens; identical to SEQ ID NO: 359822
  chr11:43965299-43965360
  hypo

SEQ ID NO: 365654 - DNA, 41 bp, Homo sapiens; identical to SEQ ID NO: 359823
  chr11:43965463-43965504
  hypo

SEQ ID NO: 365655 - DNA, 142 bp, Homo sapiens; identical to SEQ ID NO: 341039
  chr11:44608911-44609053
  hypo

SEQ ID NO: 365656 - DNA, 151 bp, Homo sapiens; identical to SEQ ID NO: 341040
  chr11:44621715-44621866
  hypo

SEQ ID NO: 365657 - DNA, 237 bp, Homo sapiens; identical to SEQ ID NO: 341041
  chr11:44625100-44625337
  hypo

SEQ ID NO: 365658 - DNA, 457 bp, Homo sapiens; identical to SEQ ID NO: 341042
  chr11:44639755-44640212
  hypo

SEQ ID NO: 365659 - DNA, 495 bp, Homo sapiens; identical to SEQ ID NO: 341043
  chr11:44640545-44641040
  hypo

SEQ ID NO: 365660 - DNA, 313 bp, Homo sapiens; identical to SEQ ID NO: 202533
  chr11:44748871-44749184
  hypo

SEQ ID NO: 365661 - DNA, 541 bp, Homo sapiens; identical to SEQ ID NO: 341047
  chr11:46337908-46338449
  hypo

SEQ ID NO: 365662 - DNA, 606 bp, Homo sapiens; identical to SEQ ID NO: 341048
  chr11:46391523-46392129
  hypo

SEQ ID NO: 365663 - DNA, 151 bp, Homo sapiens; identical to SEQ ID NO: 341050
  chr11:46783074-46783225
  hypo

SEQ ID NO: 365664 - DNA, 117 bp, Homo sapiens; identical to SEQ ID NO: 348489
  chr11:46920042-46920159
  hypo

SEQ ID NO: 365665 - DNA, 106 bp, Homo sapiens; identical to SEQ ID NO: 348490
  chr11:47359237-47359343
  hypo

SEQ ID NO: 365666 - DNA, 116 bp, Homo sapiens
  chr11:57071417-57071533
  hypo
cgccctgtccagcggccactccccaaaatgacacattcacattcatcaccatcacacacactcaggcagagagcttgtgcgctgtttgtcactcccccagatggacctcgcaccca

SEQ ID NO: 365667 - DNA, 365 bp, Homo sapiens; identical to SEQ ID NO: 341057
  chr11:57182515-57182880
  hypo

SEQ ID NO: 365668 - DNA, 233 bp, Homo sapiens; identical to SEQ ID NO: 341058
  chr11:57188507-57188740
  hypo

SEQ ID NO: 365669 - DNA, 46 bp, Homo sapiens; identical to SEQ ID NO: 354724
  chr11:57235458-57235504
  hypo

SEQ ID NO: 365670 - DNA, 93 bp, Homo sapiens; identical to SEQ ID NO: 341062
  chr11:57580261-57580354
  hypo

SEQ ID NO: 365671 - DNA, 172 bp, Homo sapiens; identical to SEQ ID NO: 341064
  chr11:60648561-60648733
  hypo

SEQ ID NO: 365672 - DNA, 101 bp, Homo sapiens; identical to SEQ ID NO: 348491
  chr11:61036547-61036648
  hypo

SEQ ID NO: 365673 - DNA, 230 bp, Homo sapiens; identical to SEQ ID NO: 351201
  chr11:61062458-61062688
  hypo

SEQ ID NO: 365674 - DNA, 315 bp, Homo sapiens; identical to SEQ ID NO: 202562
  chr11:61276101-61276416
  hypo

SEQ ID NO: 365675 - DNA, 604 bp, Homo sapiens; identical to SEQ ID NO: 347160
  chr11:61347974-61348578
  hypo

SEQ ID NO: 365676 - DNA, 169 bp, Homo sapiens; identical to SEQ ID NO: 341070
  chr11:61490202-61490371
  hypo

SEQ ID NO: 365677 - DNA, 173 bp, Homo sapiens
  chr11:61490870-61491043
  hypo
cgcccctacctaatgcctcccactgctgcccgcaggaatggttgtctgcaactgggtagtcatcctcagtgtgtgcatcactgtcctctgcgtcttcgaccccacgggccgcacctttgtcaagctgagagccaccaagaggaggcagcgtaacctgcggacctacaacctgc

SEQ ID NO: 365678 - DNA, 259 bp, Homo sapiens; identical to SEQ ID NO: 202565
  chr11:61595492-61595751
  hypo

SEQ ID NO: 365679 - DNA, 34 bp, Homo sapiens; identical to SEQ ID NO: 359849
  chr11:61596695-61596729
  hypo

SEQ ID NO: 365680 - DNA, 176 bp, Homo sapiens; identical to SEQ ID NO: 334274
  chr11:61659371-61659547
  hypo

SEQ ID NO: 365681 - DNA, 139 bp, Homo sapiens; identical to SEQ ID NO: 341076
  chr11:61662946-61663085
  hypo

SEQ ID NO: 365682 - DNA, 200 bp, Homo sapiens; identical to SEQ ID NO: 341078
  chr11:61668820-61669020
  hypo

SEQ ID NO: 365683 - DNA, 214 bp, Homo sapiens; identical to SEQ ID NO: 341079
  chr11:61672924-61673138
  hypo

SEQ ID NO: 365684 - DNA, 371 bp, Homo sapiens; identical to SEQ ID NO: 341080
  chr11:61673908-61674279
  hypo

SEQ ID NO: 365685 - DNA, 96 bp, Homo sapiens; identical to SEQ ID NO: 348497
  chr11:61674760-61674856
  hypo

SEQ ID NO: 365686 - DNA, 85 bp, Homo sapiens; identical to SEQ ID NO: 348498
  chr11:61675100-61675185
  hypo

SEQ ID NO: 365687 - DNA, 213 bp, Homo sapiens; identical to SEQ ID NO: 351207
  chr11:62369471-62369684
  hypo

SEQ ID NO: 365688 - DNA, 137 bp, Homo sapiens; identical to SEQ ID NO: 341083
  chr11:63325873-63326010
  hypo

SEQ ID NO: 365689 - DNA, 119 bp, Homo sapiens; identical to SEQ ID NO: 341084
  chr11:63431997-63432116
  hypo

SEQ ID NO: 365690 - DNA, 180 bp, Homo sapiens; identical to SEQ ID NO: 263582
  chr11:63562759-63562939
  hypo

SEQ ID NO: 365691 - DNA, 197 bp, Homo sapiens; identical to SEQ ID NO: 341086
  chr11:63675233-63675430
  hypo

SEQ ID NO: 365692 - DNA, 95 bp, Homo sapiens; identical to SEQ ID NO: 341087
  chr11:63675675-63675770
  hypo

SEQ ID NO: 365693 - DNA, 88 bp, Homo sapiens
  chr11:63779256-63779344
  hypo
actcctgtaggagggatgtccagggaccccacgggaagatgggtgtgtctgggcagagtcagatggggtctaacttgggcaggtaggc

SEQ ID NO: 365694 - DNA, 210 bp, Homo sapiens
  chr11:63849170-63849380
  hypo
cgtgtggctgaagcctgttcctgcttgggggttggccacacagcatcccaactccaggtccagagccgagcctgacagccctcctccactgcctcctggagctgccggagagaggtccgggtccgttctccccaattcacagacatgaagactgaggccgtggttccagtggctgctcggtggtggggctggagcttggcagcatcctgc

SEQ ID NO: 365695 - DNA, 61 bp, Homo sapiens
  chr11:63849634-63849695
  hypo
agccaggagcaggccagagccaggagcaggcgcgaaacatcccttaaatattggtgctctc

SEQ ID NO: 365696 - DNA, 80 bp, Homo sapiens; identical to SEQ ID NO: 341093
  chr11:63864329-63864409
  hypo

SEQ ID NO: 365697 - DNA, 305 bp, Homo sapiens; identical to SEQ ID NO: 341094
  chr11:63885581-63885886
  hypo

SEQ ID NO: 365698 - DNA, 374 bp, Homo sapiens; identical to SEQ ID NO: 341095
  chr11:63908860-63909234
  hypo

SEQ ID NO: 365699 - DNA, 203 bp, Homo sapiens; identical to SEQ ID NO: 334283
  chr11:64015094-64015297
  hypo

SEQ ID NO: 365700 - DNA, 47 bp, Homo sapiens
  chr11:64054239-64054286
  hypo
cgagatactccccgcgccaaccgcctggggcccttgcccttctggct

SEQ ID NO: 365701 - DNA, 300 bp, Homo sapiens; identical to SEQ ID NO: 341098
  chr11:64088230-64088530
  hypo

SEQ ID NO: 365702 - DNA, 305 bp, Homo sapiens; identical to SEQ ID NO: 354745
  chr11:64129097-64129402
  hypo

SEQ ID NO: 365703 - DNA, 634 bp, Homo sapiens; identical to SEQ ID NO: 354746
  chr11:64135647-64136281
  hypo

SEQ ID NO: 365704 - DNA, 179 bp, Homo sapiens
  chr11:64323500-64323679
  hypo
cggaggcgtgggcctcttccagaccctgcaggtgctcaccttcatcctcccctgcctcatgataccttcccagatgctcctggagaacttctcagccgccatcccaggccaccgatgctggacacacatgctggacaatggctctgcggtttccacaaacatgacccccaaggcccttc

SEQ ID NO: 365705 - DNA, 322 bp, Homo sapiens
  chr11:64323741-64324063
  hypo
ccacagtggcagctcttggaccccaatgccacggccaccagctggagcgaagctgacacggagccgtgtgtggacggctgggtctatgaccgcagcgtcttcacctccaccatcgtggccaaggtagggcctcccccagagccactcgagtcccgtcaccttggaggtcagagtcatggatcaggttggttggactccaaggtccagtcctgggagggacccgcctcctctcgagcctctcagcccctcgtcagccacacacaggggagtgggcggcagggatcagtctacagatggggccagcccaggctcctggtagtgc

SEQ ID NO: 365706 - DNA, 549 bp, Homo sapiens; identical to SEQ ID NO: 345393
  chr11:64512349-64512898
  hypo

SEQ ID NO: 365707 - DNA, 395 bp, Homo sapiens; identical to SEQ ID NO: 314515
  chr11:64875426-64875821
  hypo

SEQ ID NO: 365708 - DNA, 189 bp, Homo sapiens; identical to SEQ ID NO: 354749
  chr11:64876158-64876347
  hypo

SEQ ID NO: 365709 - DNA, 389 bp, Homo sapiens; identical to SEQ ID NO: 354750
  chr11:64951346-64951735
  hypo

SEQ ID NO: 365710 - DNA, 190 bp, Homo sapiens; identical to SEQ ID NO: 354751
  chr11:64951894-64952084
  hypo

SEQ ID NO: 365711 - DNA, 297 bp, Homo sapiens; identical to SEQ ID NO: 348502
  chr11:64977165-64977462
  hypo

SEQ ID NO: 365712 - DNA, 52 bp, Homo sapiens; identical to SEQ ID NO: 348503
  chr11:64977534-64977586
  hypo

SEQ ID NO: 365713 - DNA, 443 bp, Homo sapiens; identical to SEQ ID NO: 341113
  chr11:65123957-65124400
  hypo

SEQ ID NO: 365714 - DNA, 33 bp, Homo sapiens; identical to SEQ ID NO: 359870
  chr11:65307510-65307543
  hypo

SEQ ID NO: 365715 - DNA, 559 bp, Homo sapiens; identical to SEQ ID NO: 341114
  chr11:65386927-65387486
  hypo

SEQ ID NO: 365716 - DNA, 893 bp, Homo sapiens; identical to SEQ ID NO: 354755
  chr11:65397153-65398046
  hypo

SEQ ID NO: 365717 - DNA, 32 bp, Homo sapiens
  chr11:65413830-65413862
  hypo
cgccacacaccacctacaggtgggcaccggag

SEQ ID NO: 365718 - DNA, 188 bp, Homo sapiens; identical to SEQ ID NO: 314552
  chr11:65414113-65414301
  hypo

SEQ ID NO: 365719 - DNA, 58 bp, Homo sapiens
  chr11:65511334-65511392
  hypo
cggcagcccgtcgggagctgcagctgccaagatgcaggctgcagcgtgggagtcgcag

SEQ ID NO: 365720 - DNA, 35 bp, Homo sapiens; identical to SEQ ID NO: 347164
  chr11:65553778-65553813
  hypo

SEQ ID NO: 365721 - DNA, 227 bp, Homo sapiens; identical to SEQ ID NO: 202605
  chr11:65554410-65554637
  hypo

SEQ ID NO: 365722 - DNA, 1028 bp, Homo sapiens; identical to SEQ ID NO: 351221
  chr11:65554723-65555751
  hypo

SEQ ID NO: 365723 - DNA, 167 bp, Homo sapiens; identical to SEQ ID NO: 346030
  chr11:65685172-65685339
  hypo

SEQ ID NO: 365724 - DNA, 168 bp, Homo sapiens; identical to SEQ ID NO: 341121
  chr11:65761126-65761294
  hypo

SEQ ID NO: 365725 - DNA, 288 bp, Homo sapiens; identical to SEQ ID NO: 351223
  chr11:66045216-66045504
  hypo

SEQ ID NO: 365726 - DNA, 1101 bp, Homo sapiens; identical to SEQ ID NO: 347167
  chr11:66079395-66080496
  hypo

SEQ ID NO: 365727 - DNA, 383 bp, Homo sapiens; identical to SEQ ID NO: 334300
  chr11:66176338-66176721
  hypo

SEQ ID NO: 365728 - DNA, 78 bp, Homo sapiens; identical to SEQ ID NO: 354762
  chr11:66410904-66410982
  hypo

SEQ ID NO: 365729 - DNA, 356 bp, Homo sapiens; identical to SEQ ID NO: 214346
  chr11:66411012-66411368
  hypo

SEQ ID NO: 365730 - DNA, 141 bp, Homo sapiens; identical to SEQ ID NO: 348509
  chr11:66513646-66513787
  hypo

SEQ ID NO: 365731 - DNA, 338 bp, Homo sapiens; identical to SEQ ID NO: 314614
  chr11:66626187-66626525
  hypo

SEQ ID NO: 365732 - DNA, 284 bp, Homo sapiens; identical to SEQ ID NO: 348511
  chr11:66633455-66633739
  hypo

SEQ ID NO: 365733 - DNA, 185 bp, Homo sapiens; identical to SEQ ID NO: 348512
  chr11:66633833-66634018
  hypo

SEQ ID NO: 365734 - DNA, 32 bp, Homo sapiens; identical to SEQ ID NO: 341135
  chr11:66658557-66658589
  hypo

SEQ ID NO: 365735 - DNA, 112 bp, Homo sapiens; identical to SEQ ID NO: 351230
  chr11:66886029-66886141
  hypo

SEQ ID NO: 365736 - DNA, 329 bp, Homo sapiens; identical to SEQ ID NO: 341138
  chr11:67078663-67078992
  hypo

SEQ ID NO: 365737 - DNA, 250 bp, Homo sapiens; identical to SEQ ID NO: 341139
  chr11:67432668-67432918
  hypo

SEQ ID NO: 365738 - DNA, 74 bp, Homo sapiens; identical to SEQ ID NO: 341140
  chr11:67450470-67450544
  hypo

SEQ ID NO: 365739 - DNA, 71 bp, Homo sapiens; identical to SEQ ID NO: 354770
  chr11:67462547-67462618
  hypo

SEQ ID NO: 365740 - DNA, 394 bp, Homo sapiens; identical to SEQ ID NO: 354771
  chr11:67462833-67463227
  hypo

SEQ ID NO: 365741 - DNA, 112 bp, Homo sapiens; identical to SEQ ID NO: 348513
  chr11:67781084-67781196
  hypo

SEQ ID NO: 365742 - DNA, 188 bp, Homo sapiens; identical to SEQ ID NO: 341144
  chr11:67850488-67850676
  hypo

SEQ ID NO: 365743 - DNA, 132 bp, Homo sapiens; identical to SEQ ID NO: 359886
  chr11:67895663-67895795
  hypo

SEQ ID NO: 365744 - DNA, 78 bp, Homo sapiens; identical to SEQ ID NO: 354774
  chr11:68133213-68133291
  hypo

SEQ ID NO: 365745 - DNA, 71 bp, Homo sapiens; identical to SEQ ID NO: 354775
  chr11:68564274-68564345
  hypo

SEQ ID NO: 365746 - DNA, 167 bp, Homo sapiens; identical to SEQ ID NO: 354776
  chr11:68564381-68564548
  hypo

SEQ ID NO: 365747 - DNA, 605 bp, Homo sapiens; identical to SEQ ID NO: 359888
  chr11:68606653-68607258
  hypo

SEQ ID NO: 365748 - DNA, 260 bp, Homo sapiens; identical to SEQ ID NO: 341153
  chr11:68822128-68822388
  hypo

SEQ ID NO: 365749 - DNA, 170 bp, Homo sapiens; identical to SEQ ID NO: 354778
  chr11:69206214-69206384
  hypo

SEQ ID NO: 365750 - DNA, 299 bp, Homo sapiens; identical to SEQ ID NO: 354779
  chr11:69206414-69206713
  hypo

SEQ ID NO: 365751 - DNA, 267 bp, Homo sapiens; identical to SEQ ID NO: 341156
  chr11:69931095-69931362
  hypo

SEQ ID NO: 365752 - DNA, 476 bp, Homo sapiens; identical to SEQ ID NO: 341157
  chr11:69946965-69947441
  hypo

SEQ ID NO: 365753 - DNA, 422 bp, Homo sapiens; identical to SEQ ID NO: 341158
  chr11:69962357-69962779
  hypo

SEQ ID NO: 365754 - DNA, 205 bp, Homo sapiens
  chr11:70016958-70017163
  hypo
cggggtgctgactagcactgggctctctctgcagtcatccagtttggcttcgtcaccctgtttgtcgcctccttccccctggccccactgtttgcgctgctgaacaacatcatcgagatccgcctggacgccaaaaagtttgtcactgagctccgaaggccggtagctgtcagagccaaagacatcggtgagtgaccccacgggc

SEQ ID NO: 365755 - DNA, 196 bp, Homo sapiens; identical to SEQ ID NO: 341164
  chr11:70028548-70028744
  hypo

SEQ ID NO: 365756 - DNA, 297 bp, Homo sapiens; identical to SEQ ID NO: 341165
  chr11:70031529-70031826
  hypo

SEQ ID NO: 365757 - DNA, 255 bp, Homo sapiens; identical to SEQ ID NO: 341166
  chr11:70054500-70054755
  hypo

SEQ ID NO: 365758 - DNA, 141 bp, Homo sapiens; identical to SEQ ID NO: 341167
  chr11:70164164-70164305
  hypo

SEQ ID NO: 365759 - DNA, 130 bp, Homo sapiens
  chr11:70189848-70189978
  hypo
cgagagtgatgctgacgtgtctgatggtgaagatgacagggacactctcctcagctcagttgacctgctatcgcccagcgggcaggccgacgcgcacacactagccatgatgcttcaggagcagctggac

SEQ ID NO: 365760 - DNA, 302 bp, Homo sapiens; identical to SEQ ID NO: 341169
  chr11:71169280-71169582
  hypo

SEQ ID NO: 365761 - DNA, 189 bp, Homo sapiens; identical to SEQ ID NO: 341170
  chr11:71185648-71185837
  hypo

SEQ ID NO: 365762 - DNA, 197 bp, Homo sapiens
  chr11:71188519-71188716
  hypo
cgcgcaaggtggccacggccatcctgtgaaccgccgcagtggtgcaggtgctgttcccgctgtcccacactcgtgtttagcaaggcaacactcaggaacacaatttgataaagatattttttcatgaaggaataacccctatgagttaaaacctcatttctgcatataccgcaattggcagaacccctaccatagcc

SEQ ID NO: 365763 - DNA, 521 bp, Homo sapiens; identical to SEQ ID NO: 348515
  chr11:71192127-71192648
  hypo

SEQ ID NO: 365764 - DNA, 169 bp, Homo sapiens; identical to SEQ ID NO: 348516
  chr11:71192889-71193058
  hypo

SEQ ID NO: 365765 - DNA, 835 bp, Homo sapiens; identical to SEQ ID NO: 341173
  chr11:71229615-71230450
  hypo

SEQ ID NO: 365766 - DNA, 191 bp, Homo sapiens
  chr11:71507748-71507939
  hypo
cgacaaagacactaggacacacagaggacaagcaacccccgagctcccacagactgctgcccggccacctggctcttgtgcctccactctacacccaagccccccattgccaccagcctttgccccagctccccctgagcacagcccctcctggcagccatgtgcacagatgtacccgcagcagcctctgc

SEQ ID NO: 365767 - DNA, 751 bp, Homo sapiens; identical to SEQ ID NO: 341175
  chr11:71724337-71725088
  hypo

SEQ ID NO: 365768 - DNA, 731 bp, Homo sapiens; identical to SEQ ID NO: 341176
  chr11:71725587-71726318
  hypo

SEQ ID NO: 365769 - DNA, 120 bp, Homo sapiens
  chr11:72466088-72466208
  hypo
cgggctctgctccgggtgcagccacggcttgaagtgaggcaggtgcttctgtttccactcggggtacttgaggcacgccttgtacatcttcttcatggcctgtgggcccgccgccccgcc

SEQ ID NO: 365770 - DNA, 138 bp, Homo sapiens
  chr11:72475539-72475677
  hypo
cgcaggtgaagaaactgaggcaggccgggtcgtgggggtcaggtaagtgtccacaggcctccctagcctggcctggctcgtgccctttccatagcccccagcaggcagcactgctgcgctaagcagaagaaattacac

SEQ ID NO: 365771 - DNA, 317 bp, Homo sapiens
  chr11:72475723-72476040
  hypo
attctaagaggcttggggagggacaggtggcggggtagggctgagtctctggagagcaccaggtgggcgggccggtaccaggaacccccagctattaggccctggctgagtgagtgtccacaccagatgttgccgtcaggtgttgcctggtaggccatcttggctgcccccggagaaactccccctggaaacaggaacccaaggggtgttgctccaccaaggagccatgctgggcttgagtacgtttaaagcctggtgacagcagggaccccgacatgcagtggtattacatttgagaaaacaggccagccaggtgc

SEQ ID NO: 365772 - DNA, 63 bp, Homo sapiens; identical to SEQ ID NO: 354789
  chr11:73073669-73073732
  hypo

SEQ ID NO: 365773 - DNA, 87 bp, Homo sapiens; identical to SEQ ID NO: 341186
  chr11:73491527-73491614
  hypo

SEQ ID NO: 365774 - DNA, 284 bp, Homo sapiens; identical to SEQ ID NO: 348518
  chr11:73685845-73686129
  hypo

SEQ ID NO: 365775 - DNA, 211 bp, Homo sapiens; identical to SEQ ID NO: 359898
  chr11:74022468-74022679
  hypo

SEQ ID NO: 365776 - DNA, 137 bp, Homo sapiens; identical to SEQ ID NO: 359899
  chr11:74022716-74022853
  hypo

SEQ ID NO: 365777 - DNA, 233 bp, Homo sapiens; identical to SEQ ID NO: 341192
  chr11:74994376-74994609
  hypo

SEQ ID NO: 365778 - DNA, 217 bp, Homo sapiens
  chr11:75152263-75152480
  hypo
cggatgggacccccgcacaccacagcagggagaagagccacggtgcgttgactgtgtagaggttcacactcaggttccaggacgcgtagtccctgtggggcaggggagaggcaggtcagcatgcggaccctggcagctccaggcccagtgtcggggctggtaaagcacgtcctgttcacgacctcacagccatgcccggggcaaggaacattggctc

SEQ ID NO: 365779 - DNA, 359 bp, Homo sapiens
  chr11:75152536-75152895
  hypo
ctttgaaccatgtgtgcctgattcctctgtgtgcccatccctctgcccgaccgtgtgtgtgtgtgtgtgtgtgtgtgttggggggtggtggtggcaggactgggagagactcagtcccaccctctcctggaggagcccagggcagggcaggcacctgagctcctggcgggacacctgagtgtagcgcaggttcagccgctggatgtggcctctccgcaggctggcgactgcctccttggagcctgatgtctgttggaagccgggagccaccttccgcaccaggggcctctgcctgctaggcagccacatgacctgcaggcagaagagaggcagcctcagacttctcttctgcacgatgc

SEQ ID NO: 365780 - DNA, 211 bp, Homo sapiens
  chr11:75167782-75167993
  hypo
cggccgaggcggcccttaccttgtgcagccagtgcaggttcatctgctgccccacggcaatgtgacatagtgccaggacctgaggagggacccacagggtgattgtcaggcccgtgtgggcgggaaggctttgccagtttctcagacaccctgctccccactgcggctctgggcctgaccctgggcagaggcagcgaacctccctccaggc

SEQ ID NO: 365781 - DNA, 103 bp, Homo sapiens; identical to SEQ ID NO: 359903
  chr11:75380110-75380213
  hypo

SEQ ID NO: 365782 - DNA, 133 bp, Homo sapiens; identical to SEQ ID NO: 348519
  chr11:75858240-75858373
  hypo

SEQ ID NO: 365783 - DNA, 40 bp, Homo sapiens; identical to SEQ ID NO: 341199
  chr11:76164370-76164410
  hypo

SEQ ID NO: 365784 - DNA, 135 bp, Homo sapiens; identical to SEQ ID NO: 354795
  chr11:76371492-76371627
  hypo

SEQ ID NO: 365785 - DNA, 71 bp, Homo sapiens; identical to SEQ ID NO: 354796
  chr11:76372236-76372307
  hypo

SEQ ID NO: 365786 - DNA, 509 bp, Homo sapiens; identical to SEQ ID NO: 345399
  chr11:76381512-76382021
  hypo

SEQ ID NO: 365787 - DNA, 977 bp, Homo sapiens; identical to SEQ ID NO: 359906
  chr11:77184557-77185534
  hypo

SEQ ID NO: 365788 - DNA, 118 bp, Homo sapiens; identical to SEQ ID NO: 341203
  chr11:77383112-77383230
  hypo

SEQ ID NO: 365789 - DNA, 366 bp, Homo sapiens; identical to SEQ ID NO: 341204
  chr11:78534109-78534475
  hypo

SEQ ID NO: 365790 - DNA, 57 bp, Homo sapiens; identical to SEQ ID NO: 354800
  chr11:85906179-85906236
  hypo

SEQ ID NO: 365791 - DNA, 208 bp, Homo sapiens; identical to SEQ ID NO: 354801
  chr11:85906275-85906483
  hypo

SEQ ID NO: 365792 - DNA, 250 bp, Homo sapiens; identical to SEQ ID NO: 341208
  chr11:85989397-85989647
  hypo

SEQ ID NO: 365793 - DNA, 675 bp, Homo sapiens; identical to SEQ ID NO: 288384
  chr11:92930674-92931349
  hypo

SEQ ID NO: 365794 - DNA, 51 bp, Homo sapiens; identical to SEQ ID NO: 341212
  chr11:93425646-93425697
  hypo

SEQ ID NO: 365795 - DNA, 89 bp, Homo sapiens; identical to SEQ ID NO: 354804
  chr11:93911562-93911651
  hypo

SEQ ID NO: 365796 - DNA, 81 bp, Homo sapiens; identical to SEQ ID NO: 354805
  chr11:93911800-93911881
  hypo

SEQ ID NO: 365797 - DNA, 80 bp, Homo sapiens
  chr11:94895741-94895821
  hypo
aaaaaaaaataggcatcccccaactctgggccacagctggagacctaagtgctgctgcactctggccaggttggacagcc

SEQ ID NO: 365798 - DNA, 886 bp, Homo sapiens; identical to SEQ ID NO: 334351
  chr11:96122370-96123256
  hypo

SEQ ID NO: 365799 - DNA, 174 bp, Homo sapiens; identical to SEQ ID NO: 341217
  chr11:97588960-97589134
  hypo

SEQ ID NO: 365800 - DNA, 226 bp, Homo sapiens; identical to SEQ ID NO: 288422
  chr11:106889091-106889317
  hypo

SEQ ID NO: 365801 - DNA, 67 bp, Homo sapiens; identical to SEQ ID NO: 341222
  chr11:107931221-107931288
  hypo

SEQ ID NO: 365802 - DNA, 158 bp, Homo sapiens; identical to SEQ ID NO: 341223
  chr11:108031546-108031704
  hypo

SEQ ID NO: 365803 - DNA, 171 bp, Homo sapiens; identical to SEQ ID NO: 341224
  chr11:110144196-110144367
  hypo

SEQ ID NO: 365804 - DNA, 238 bp, Homo sapiens
  chr11:112370546-112370784
  hypo
cgtgcaggaagggtctcccaggtggccggagaacccacaggcgtgtacggacaaggtgccctgggtgccctggctgacccctggtcagcccggccaggggtagagaccttcccggaaggcgaagatcgcataggtaactgggaaagtgtgttttttgaggtgggggaaccccatgcagccaggtcagggctgcagggtaggccgcctgccccacaatcagagcactgcctcgttaccc

SEQ ID NO: 365805 - DNA, 340 bp, Homo sapiens; identical to SEQ ID NO: 214533
  chr11:114112625-114112965
  hypo

SEQ ID NO: 365806 - DNA, 199 bp, Homo sapiens
  chr11:114113052-114113251
  hypo
catacaggtaggtcagtccagctgatgggtggatctgggtctctgggagccagcgtctatatttacctccaaggacgtaaagtggaggtggtgggctgagtcagccttcagtccttctgctcaaggcttggacgtgcagaggctgcccgtcgtgcaggtaaatgtggacagttctcccagtcccctcctgtggaccgtc

SEQ ID NO: 365807 - DNA, 81 bp, Homo sapiens
  chr11:114115648-114115729
  hypo
tctcacgtggccttggctttatttatttatttataccttaatgaggatactgaatctttgattaaagtcgtaatcgttgcc

SEQ ID NO: 365808 - DNA, 238 bp, Homo sapiens; identical to SEQ ID NO: 202728
  chr11:115374753-115374991
  hypo

SEQ ID NO: 365809 - DNA, 398 bp, Homo sapiens; identical to SEQ ID NO: 202729
  chr11:115375434-115375832
  hypo

SEQ ID NO: 365810 - DNA, 317 bp, Homo sapiens; identical to SEQ ID NO: 341235
  chr11:116691767-116692084
  hypo

SEQ ID NO: 365811 - DNA, 320 bp, Homo sapiens; identical to SEQ ID NO: 341237
  chr11:117073762-117074082
  hypo

SEQ ID NO: 365812 - DNA, 126 bp, Homo sapiens
  chr11:117075032-117075158
  hypo
cggcatgacaggctacggacgacctcggcagatcatcagttagagcggagagggctagccctgagcccggccctcccccagctccttggctgcagccatcccgcttagcctgcctcacccacaccc

SEQ ID NO: 365813 - DNA, 206 bp, Homo sapiens; identical to SEQ ID NO: 341239
  chr11:117076092-117076298
  hypo

SEQ ID NO: 365814 - DNA, 59 bp, Homo sapiens; identical to SEQ ID NO: 341240
  chr11:117188555-117188614
  hypo

SEQ ID NO: 365815 - DNA, 159 bp, Homo sapiens; identical to SEQ ID NO: 359940
  chr11:118662849-118663008
  hypo

SEQ ID NO: 365816 - DNA, 66 bp, Homo sapiens; identical to SEQ ID NO: 334374
  chr11:119145611-119145677
  hypo

SEQ ID NO: 365817 - DNA, 257 bp, Homo sapiens; identical to SEQ ID NO: 341244
  chr11:119290824-119291081
  hypo

SEQ ID NO: 365818 - DNA, 261 bp, Homo sapiens; identical to SEQ ID NO: 341246
  chr11:119506104-119506365
  hypo

SEQ ID NO: 365819 - DNA, 130 bp, Homo sapiens; identical to SEQ ID NO: 341247
  chr11:119506981-119507111
  hypo

SEQ ID NO: 365820 - DNA, 750 bp, Homo sapiens; identical to SEQ ID NO: 341248
  chr11:119535401-119536151
  hypo

SEQ ID NO: 365821 - DNA, 471 bp, Homo sapiens; identical to SEQ ID NO: 341250
  chr11:119579320-119579791
  hypo

SEQ ID NO: 365822 - DNA, 283 bp, Homo sapiens; identical to SEQ ID NO: 334379
  chr11:119587853-119588136
  hypo

SEQ ID NO: 365823 - DNA, 128 bp, Homo sapiens; identical to SEQ ID NO: 341253
  chr11:119590586-119590714
  hypo

SEQ ID NO: 365824 - DNA, 301 bp, Homo sapiens; identical to SEQ ID NO: 359947
  chr11:119599011-119599312
  hypo

SEQ ID NO: 365825 - DNA, 83 bp, Homo sapiens; identical to SEQ ID NO: 341255
  chr11:119606553-119606636
  hypo

SEQ ID NO: 365826 - DNA, 291 bp, Homo sapiens; identical to SEQ ID NO: 341256
  chr11:119970240-119970531
  hypo

SEQ ID NO: 365827 - DNA, 79 bp, Homo sapiens; identical to SEQ ID NO: 341257
  chr11:119993701-119993780
  hypo

SEQ ID NO: 365828 - DNA, 47 bp, Homo sapiens
  chr11:120008024-120008071
  hypo
cggtctggcagaagagctccatcgtcttgccatgcacgggacacttg

SEQ ID NO: 365829 - DNA, 223 bp, Homo sapiens; identical to SEQ ID NO: 351261
  chr11:120110626-120110849
  hypo

SEQ ID NO: 365830 - DNA, 155 bp, Homo sapiens; identical to SEQ ID NO: 351262
  chr11:120110967-120111122
  hypo

SEQ ID NO: 365831 - DNA, 151 bp, Homo sapiens; identical to SEQ ID NO: 341260
  chr11:120338518-120338669
  hypo

SEQ ID NO: 365832 - DNA, 53 bp, Homo sapiens
  chr11:120367550-120367603
  hypo
cgattaaactccgctttgtttcagagatgatcataatttggccagcttcattt

SEQ ID NO: 365833 - DNA, 65 bp, Homo sapiens; identical to SEQ ID NO: 214601
  chr11:120367696-120367761
  hypo

SEQ ID NO: 365834 - DNA, 150 bp, Homo sapiens; identical to SEQ ID NO: 354822
  chr11:120998452-120998602
  hypo

SEQ ID NO: 365835 - DNA, 210 bp, Homo sapiens; identical to SEQ ID NO: 354823
  chr11:120998833-120999043
  hypo

SEQ ID NO: 365836 - DNA, 151 bp, Homo sapiens; identical to SEQ ID NO: 354824
  chr11:121023460-121023611
  hypo

SEQ ID NO: 365837 - DNA, 326 bp, Homo sapiens; identical to SEQ ID NO: 341265
  chr11:121349234-121349560
  hypo

SEQ ID NO: 365838 - DNA, 171 bp, Homo sapiens; identical to SEQ ID NO: 341268
  chr11:124071504-124071675
  hypo

SEQ ID NO: 365839 - DNA, 67 bp, Homo sapiens; identical to SEQ ID NO: 341269
  chr11:124387399-124387466
  hypo

SEQ ID NO: 365840 - DNA, 268 bp, Homo sapiens; identical to SEQ ID NO: 341271
  chr11:124794665-124794933
  hypo

SEQ ID NO: 365841 - DNA, 400 bp, Homo sapiens; identical to SEQ ID NO: 341272
  chr11:125817639-125818039
  hypo

SEQ ID NO: 365842 - DNA, 168 bp, Homo sapiens; identical to SEQ ID NO: 341273
  chr11:125971144-125971312
  hypo

SEQ ID NO: 365843 - DNA, 439 bp, Homo sapiens; identical to SEQ ID NO: 341274
  chr11:126055123-126055562
  hypo

SEQ ID NO: 365844 - DNA, 135 bp, Homo sapiens; identical to SEQ ID NO: 345403
  chr11:128391758-128391893
  hypo

SEQ ID NO: 365845 - DNA, 623 bp, Homo sapiens; identical to SEQ ID NO: 345404
  chr11:128392116-128392739
  hypo

SEQ ID NO: 365846 - DNA, 543 bp, Homo sapiens; identical to SEQ ID NO: 345405
  chr11:129148497-129149040
  hypo

SEQ ID NO: 365847 - DNA, 820 bp, Homo sapiens; identical to SEQ ID NO: 345406
  chr11:129149096-129149916
  hypo

SEQ ID NO: 365848 - DNA, 125 bp, Homo sapiens; identical to SEQ ID NO: 341281
  chr11:129803851-129803976
  hypo

SEQ ID NO: 365849 - DNA, 181 bp, Homo sapiens; identical to SEQ ID NO: 354832
  chr11:129993371-129993552
  hypo

SEQ ID NO: 365850 - DNA, 176 bp, Homo sapiens; identical to SEQ ID NO: 354833
  chr11:129993759-129993935
  hypo

SEQ ID NO: 365851 - DNA, 453 bp, Homo sapiens
  chr11:130060407-130060860
  hypo
ggcttccctgacagcccctaccccgctcatgcccgctgccagtgggccctgcggggggacgccgactcagtgctgagcctcaccttccgcagctttgaccttgcgtcctgcgacgagcgcggcagcgacctggtgacggtgtacaacaccctgagccccatggagccccacgccctggtgcagtgagtaccccggggggcgggtagggctgtgggagcttggcggctgccctgtagggggccagcttcttcaacgattgggatacagtttatgactcttggccgcaggccactgctaaacatccaggcagcaggaggcacgtgtggtgtgatcctcagctgcagctccaggggagtctgggaggtgatttttctcagccttggcaaagcagaggaaggctctatagtccccagataccaaatccagcctgtgcggcctgtgccctgaaccgcc

SEQ ID NO: 365852 - DNA, 129 bp, Homo sapiens; identical to SEQ ID NO: 354834
  chr11:130079199-130079328
  hypo

SEQ ID NO: 365853 - DNA, 430 bp, Homo sapiens; identical to SEQ ID NO: 354835
  chr11:130079388-130079818
  hypo

SEQ ID NO: 365854 - DNA, 39 bp, Homo sapiens; identical to SEQ ID NO: 334408
  chr11:130083134-130083173
  hypo

SEQ ID NO: 365855 - DNA, 37 bp, Homo sapiens; identical to SEQ ID NO: 354836
  chr11:130089793-130089830
  hypo

SEQ ID NO: 365856 - DNA, 112 bp, Homo sapiens; identical to SEQ ID NO: 354837
  chr11:130089881-130089993
  hypo

SEQ ID NO: 365857 - DNA, 123 bp, Homo sapiens; identical to SEQ ID NO: 346038
  chr11:130781427-130781550
  hypo

SEQ ID NO: 365858 - DNA, 66 bp, Homo sapiens; identical to SEQ ID NO: 354839
  chr11:130785392-130785458
  hypo

SEQ ID NO: 365859 - DNA, 184 bp, Homo sapiens
  chr11:133703500-133703684
  hypo
cgcggccgcgcggcgccctgatcgcgcgtctcaggccccgctggaacccggggcctccctgcccgctccactccttcccgcggcgcacccccgccctccgcctgcccctgccctgctggccccccgccaggcagcctctcccgcatcggagaccacccgcccggttttcatgtcccggtttggc

SEQ ID NO: 365860 - DNA, 139 bp, Homo sapiens
  chr11:133703714-133703853
  hypo
gacagagccccaccccacctcgcagtggacaccccaggacagtggcttggtcttcacaacactgggtgcggttcatggagcagcacctcgcattgctccctgcagtgacccacgcaggaggccgcctgccctggtggac

SEQ ID NO: 365861 - DNA, 902 bp, Homo sapiens; identical to SEQ ID NO: 354840
  chr11:133734500-133735402
  hypo

SEQ ID NO: 365862 - DNA, 720 bp, Homo sapiens; identical to SEQ ID NO: 341294
  chr11:133790547-133791267
  hypo

SEQ ID NO: 365863 - DNA, 161 bp, Homo sapiens; identical to SEQ ID NO: 345407
  chr11:133939437-133939598
  hypo

SEQ ID NO: 365864 - DNA, 138 bp, Homo sapiens; identical to SEQ ID NO: 341297
  chr11:134011321-134011459
  hypo

SEQ ID NO: 365865 - DNA, 73 bp, Homo sapiens; identical to SEQ ID NO: 351280
  chr11:134281810-134281883
  hypo

SEQ ID NO: 365866 - DNA, 175 bp, Homo sapiens; identical to SEQ ID NO: 341301
  chr11:134317588-134317763
  hypo

SEQ ID NO: 365867 - DNA, 258 bp, Homo sapiens; identical to SEQ ID NO: 354844
  chr11:134458219-134458477
  hypo

SEQ ID NO: 365868 - DNA, 157 bp, Homo sapiens; identical to SEQ ID NO: 341304
  chr11:134852683-134852840
  hypo

SEQ ID NO: 365869 - DNA, 151 bp, Homo sapiens; identical to SEQ ID NO: 341305
  chr12:287260-287411
  hypo

SEQ ID NO: 365870 - DNA, 235 bp, Homo sapiens; identical to SEQ ID NO: 341306
  chr12:417402-417637
  hypo

SEQ ID NO: 365871 - DNA, 133 bp, Homo sapiens; identical to SEQ ID NO: 351281
  chr12:708894-709027
  hypo

SEQ ID NO: 365872 - DNA, 182 bp, Homo sapiens; identical to SEQ ID NO: 351282
  chr12:709062-709244
  hypo

SEQ ID NO: 365873 - DNA, 209 bp, Homo sapiens; identical to SEQ ID NO: 341308
  chr12:939108-939317
  hypo

SEQ ID NO: 365874 - DNA, 235 bp, Homo sapiens; identical to SEQ ID NO: 351283
  chr12:1639655-1639890
  hypo

SEQ ID NO: 365875 - DNA, 344 bp, Homo sapiens; identical to SEQ ID NO: 288628
  chr12:1639977-1640321
  hypo

SEQ ID NO: 365876 - DNA, 273 bp, Homo sapiens; identical to SEQ ID NO: 351285
  chr12:1640476-1640749
  hypo

SEQ ID NO: 365877 - DNA, 454 bp, Homo sapiens; identical to SEQ ID NO: 341312
  chr12:1943616-1944070
  hypo

SEQ ID NO: 365878 - DNA, 155 bp, Homo sapiens; identical to SEQ ID NO: 341313
  chr12:1992067-1992222
  hypo

SEQ ID NO: 365879 - DNA, 94 bp, Homo sapiens; identical to SEQ ID NO: 346040
  chr12:2017667-2017761
  hypo

SEQ ID NO: 365880 - DNA, 213 bp, Homo sapiens; identical to SEQ ID NO: 214702
  chr12:2017874-2018087
  hypo

SEQ ID NO: 365881 - DNA, 75 bp, Homo sapiens; identical to SEQ ID NO: 354855
  chr12:2023599-2023674
  hypo

SEQ ID NO: 365882 - DNA, 226 bp, Homo sapiens; identical to SEQ ID NO: 359987
  chr12:2144066-2144292
  hypo

SEQ ID NO: 365883 - DNA, 50 bp, Homo sapiens; identical to SEQ ID NO: 359988
  chr12:2144442-2144492
  hypo

SEQ ID NO: 365884 - DNA, 90 bp, Homo sapiens; identical to SEQ ID NO: 359989
  chr12:2161370-2161460
  hypo

SEQ ID NO: 365885 - DNA, 116 bp, Homo sapiens; identical to SEQ ID NO: 341321
  chr12:2613903-2614019
  hypo

SEQ ID NO: 365886 - DNA, 248 bp, Homo sapiens; identical to SEQ ID NO: 341322
  chr12:2788614-2788862
  hypo

SEQ ID NO: 365887 - DNA, 194 bp, Homo sapiens; identical to SEQ ID NO: 341325
  chr12:2972300-2972494
  hypo

SEQ ID NO: 365888 - DNA, 72 bp, Homo sapiens; identical to SEQ ID NO: 341326
  chr12:2995019-2995091
  hypo

SEQ ID NO: 365889 - DNA, 120 bp, Homo sapiens; identical to SEQ ID NO: 341327
  chr12:3030601-3030721
  hypo

SEQ ID NO: 365890 - DNA, 482 bp, Homo sapiens; identical to SEQ ID NO: 341328
  chr12:3103789-3104271
  hypo

SEQ ID NO: 365891 - DNA, 1049 bp, Homo sapiens; identical to SEQ ID NO: 359994
  chr12:3186011-3187060
  hypo

SEQ ID NO: 365892 - DNA, 408 bp, Homo sapiens; identical to SEQ ID NO: 341330
  chr12:3392272-3392680
  hypo

SEQ ID NO: 365893 - DNA, 234 bp, Homo sapiens; identical to SEQ ID NO: 202829
  chr12:3600534-3600768
  hypo

SEQ ID NO: 365894 - DNA, 396 bp, Homo sapiens; identical to SEQ ID NO: 288660
  chr12:3601625-3602021
  hypo

SEQ ID NO: 365895 - DNA, 74 bp, Homo sapiens; identical to SEQ ID NO: 341335
  chr12:3901132-3901206
  hypo

SEQ ID NO: 365896 - DNA, 85 bp, Homo sapiens; identical to SEQ ID NO: 345410
  chr12:4377809-4377894
  hypo

SEQ ID NO: 365897 - DNA, 244 bp, Homo sapiens; identical to SEQ ID NO: 202837
  chr12:4378558-4378802
  hypo

SEQ ID NO: 365898 - DNA, 284 bp, Homo sapiens; identical to SEQ ID NO: 202839
  chr12:4380196-4380480
  hypo

SEQ ID NO: 365899 - DNA, 440 bp, Homo sapiens
  chr12:4554361-4554801
  hypo
cgtcccgactggctgcagctggcactcactgtaggggttctcctcgtgggtcccgctgatccggccgtcggggagcacctggaggtgaaagccgatgcccacgttgcagtagagcctccgctgccgcttgatccccaccaaatagccactttcccagttcaccccggcaatctctccagctagcccggcgcgagacctggacagcagggtgccccagcccctcgagtccagcagcgtgttgttggcacgggtgcctgcaggcgagggcaccaccatgcccactaggatgcctaggaagacgagagcccacagcgtgccctgcagacgtcctgctccccgggacatagtgatgaacagtttctgtcccagggccatccaccttgcctctcaggcacgtggtcagaattaatggccctaaaaataccgcccttcttgttttt

SEQ ID NO: 365900 - DNA, 89 bp, Homo sapiens
  chr12:4554937-4555026
  hypo
ctcggggacgctctctagctcgcccgcttgctccgtccctagttgatgatatttgatttgacctatctttatagttgcttcagcagccc

SEQ ID NO: 365901 - DNA, 182 bp, Homo sapiens; identical to SEQ ID NO: 341338
  chr12:4672181-4672363
  hypo

SEQ ID NO: 365902 - DNA, 113 bp, Homo sapiens; identical to SEQ ID NO: 354864
  chr12:4734902-4735015
  hypo

SEQ ID NO: 365903 - DNA, 557 bp, Homo sapiens; identical to SEQ ID NO: 334445
  chr12:4920230-4920787
  hypo

SEQ ID NO: 365904 - DNA, 322 bp, Homo sapiens; identical to SEQ ID NO: 202852
  chr12:5541693-5542015
  hypo

SEQ ID NO: 365905 - DNA, 466 bp, Homo sapiens; identical to SEQ ID NO: 341346
  chr12:5603587-5604053
  hypo

SEQ ID NO: 365906 - DNA, 299 bp, Homo sapiens
  chr12:6334298-6334597
  hypo
cgtgtagctagagttactcgttttcactgctgtatagtgttctgttgcctataaaataccccttcagccaatgggcggcaggtaggtcactgtttattcctcgcttgctggtatttttagtacctgcatgaatcaaacacaccccgtaatggcatctacaactaccaggcgtatatgaggggcagagaccaagggtggtcacaaagtcctttgcaagtctcacccttaagcgcgtggggactgtgttgttgctggcagccagaattaatgctgatgtcctgtatgtcttgcagcttgcc

SEQ ID NO: 365907 - DNA, 218 bp, Homo sapiens; identical to SEQ ID NO: 341349
  chr12:6391196-6391414
  hypo

SEQ ID NO: 365908 - DNA, 72 bp, Homo sapiens
  chr12:6483496-6483568
  hypo
cgcaggcaccagggaaggggcagagggactaaccgacctgtagggattgagggtgcagatggtcactgcggg

SEQ ID NO: 365909 - DNA, 406 bp, Homo sapiens; identical to SEQ ID NO: 360017
  chr12:6492947-6493353
  hypo

SEQ ID NO: 365910 - DNA, 33 bp, Homo sapiens; identical to SEQ ID NO: 202862
  chr12:6493416-6493449
  hypo

SEQ ID NO: 365911 - DNA, 115 bp, Homo sapiens; identical to SEQ ID NO: 360019
  chr12:6493504-6493619
  hypo

SEQ ID NO: 365912 - DNA, 99 bp, Homo sapiens; identical to SEQ ID NO: 354866
  chr12:6686943-6687042
  hypo

SEQ ID NO: 365913 - DNA, 267 bp, Homo sapiens; identical to SEQ ID NO: 354867
  chr12:7858581-7858848
  hypo

SEQ ID NO: 365914 - DNA, 55 bp, Homo sapiens; identical to SEQ ID NO: 345416
  chr12:8123528-8123583
  hypo

SEQ ID NO: 365915 - DNA, 231 bp, Homo sapiens; identical to SEQ ID NO: 214776
  chr12:8757695-8757926
  hypo

SEQ ID NO: 365916 - DNA, 162 bp, Homo sapiens; identical to SEQ ID NO: 354870
  chr12:8757966-8758128
  hypo

SEQ ID NO: 365917 - DNA, 72 bp, Homo sapiens; identical to SEQ ID NO: 341358
  chr12:8906544-8906616
  hypo

SEQ ID NO: 365918 - DNA, 215 bp, Homo sapiens; identical to SEQ ID NO: 341359
  chr12:9108820-9109035
  hypo

SEQ ID NO: 365919 - DNA, 294 bp, Homo sapiens; identical to SEQ ID NO: 360027
  chr12:9216950-9217244
  hypo

SEQ ID NO: 365920 - DNA, 565 bp, Homo sapiens; identical to SEQ ID NO: 334461
  chr12:12502899-12503464
  hypo

SEQ ID NO: 365921 - DNA, 156 bp, Homo sapiens; identical to SEQ ID NO: 341362
  chr12:12605374-12605530
  hypo

SEQ ID NO: 365922 - DNA, 86 bp, Homo sapiens; identical to SEQ ID NO: 354873
  chr12:13215310-13215396
  hypo

SEQ ID NO: 365923 - DNA, 1110 bp, Homo sapiens; identical to SEQ ID NO: 360031
  chr12:15941612-15942722
  hypo

SEQ ID NO: 365924 - DNA, 73 bp, Homo sapiens; identical to SEQ ID NO: 345418
  chr12:19282260-19282333
  hypo

SEQ ID NO: 365925 - DNA, 840 bp, Homo sapiens; identical to SEQ ID NO: 202900
  chr12:19282363-19283203
  hypo

SEQ ID NO: 365926 - DNA, 249 bp, Homo sapiens; identical to SEQ ID NO: 202901
  chr12:19283425-19283674
  hypo

SEQ ID NO: 365927 - DNA, 117 bp, Homo sapiens; identical to SEQ ID NO: 347220
  chr12:21681020-21681137
  hypo

SEQ ID NO: 365928 - DNA, 118 bp, Homo sapiens; identical to SEQ ID NO: 347221
  chr12:22488705-22488823
  hypo

SEQ ID NO: 365929 - DNA, 252 bp, Homo sapiens; identical to SEQ ID NO: 202912
  chr12:24715505-24715757
  hypo

SEQ ID NO: 365930 - DNA, 45 bp, Homo sapiens; identical to SEQ ID NO: 354881
  chr12:25344059-25344104
  hypo

SEQ ID NO: 365931 - DNA, 138 bp, Homo sapiens; identical to SEQ ID NO: 341375
  chr12:26398950-26399088
  hypo

SEQ ID NO: 365932 - DNA, 59 bp, Homo sapiens; identical to SEQ ID NO: 341376
  chr12:27742262-27742321
  hypo

SEQ ID NO: 365933 - DNA, 343 bp, Homo sapiens; identical to SEQ ID NO: 288811
  chr12:28123205-28123548
  hypo

SEQ ID NO: 365934 - DNA, 668 bp, Homo sapiens; identical to SEQ ID NO: 360045
  chr12:29301988-29302656
  hypo

SEQ ID NO: 365935 - DNA, 85 bp, Homo sapiens; identical to SEQ ID NO: 288816
  chr12:29302688-29302773
  hypo

SEQ ID NO: 365936 - DNA, 83 bp, Homo sapiens; identical to SEQ ID NO: 346049
  chr12:29373882-29373965
  hypo

SEQ ID NO: 365937 - DNA, 161 bp, Homo sapiens; identical to SEQ ID NO: 341380
  chr12:30861053-30861214
  hypo

SEQ ID NO: 365938 - DNA, 263 bp, Homo sapiens; identical to SEQ ID NO: 341382
  chr12:31255691-31255954
  hypo

SEQ ID NO: 365939 - DNA, 34 bp, Homo sapiens; identical to SEQ ID NO: 214842
  chr12:32831540-32831574
  hypo

SEQ ID NO: 365940 - DNA, 164 bp, Homo sapiens; identical to SEQ ID NO: 341385
  chr12:32864298-32864462
  hypo

SEQ ID NO: 365941 - DNA, 316 bp, Homo sapiens; identical to SEQ ID NO: 351334
  chr12:33049652-33049968
  hypo

SEQ ID NO: 365942 - DNA, 90 bp, Homo sapiens; identical to SEQ ID NO: 214858
  chr12:38595391-38595481
  hypo

SEQ ID NO: 365943 - DNA, 37 bp, Homo sapiens
  chr12:38595561-38595598
  hypo
cagctggcgaggcggccagggtggaccccagggacac

SEQ ID NO: 365944 - DNA, 76 bp, Homo sapiens; identical to SEQ ID NO: 351335
  chr12:40618264-40618340
  hypo

SEQ ID NO: 365945 - DNA, 35 bp, Homo sapiens; identical to SEQ ID NO: 351336
  chr12:40619048-40619083
  hypo

SEQ ID NO: 365946 - DNA, 237 bp, Homo sapiens; identical to SEQ ID NO: 214866
  chr12:47628809-47629046
  hypo

SEQ ID NO: 365947 - DNA, 141 bp, Homo sapiens; identical to SEQ ID NO: 214867
  chr12:47629208-47629349
  hypo

SEQ ID NO: 365948 - DNA, 111 bp, Homo sapiens; identical to SEQ ID NO: 214868
  chr12:47629379-47629490
  hypo

SEQ ID NO: 365949 - DNA, 243 bp, Homo sapiens; identical to SEQ ID NO: 348555
  chr12:47629544-47629787
  hypo

SEQ ID NO: 365950 - DNA, 181 bp, Homo sapiens; identical to SEQ ID NO: 351339
  chr12:48299205-48299386
  hypo

SEQ ID NO: 365951 - DNA, 32 bp, Homo sapiens; identical to SEQ ID NO: 288870
  chr12:48299387-48299419
  hypo

SEQ ID NO: 365952 - DNA, 42 bp, Homo sapiens; identical to SEQ ID NO: 351341
  chr12:48299465-48299507
  hypo

SEQ ID NO: 365953 - DNA, 493 bp, Homo sapiens; identical to SEQ ID NO: 202958
  chr12:48576976-48577469
  hypo

SEQ ID NO: 365954 - DNA, 97 bp, Homo sapiens; identical to SEQ ID NO: 341398
  chr12:49065604-49065701
  hypo

SEQ ID NO: 365955 - DNA, 60 bp, Homo sapiens; identical to SEQ ID NO: 202964
  chr12:49364178-49364238
  hypo

SEQ ID NO: 365956 - DNA, 165 bp, Homo sapiens; identical to SEQ ID NO: 354898
  chr12:49416380-49416545
  hypo

SEQ ID NO: 365957 - DNA, 221 bp, Homo sapiens; identical to SEQ ID NO: 341401
  chr12:49422776-49422997
  hypo

SEQ ID NO: 365958 - DNA, 43 bp, Homo sapiens; identical to SEQ ID NO: 354900
  chr12:49989816-49989859
  hypo

SEQ ID NO: 365959 - DNA, 180 bp, Homo sapiens; identical to SEQ ID NO: 341405
  chr12:50037818-50037998
  hypo

SEQ ID NO: 365960 - DNA, 71 bp, Homo sapiens; identical to SEQ ID NO: 341406
  chr12:50322856-50322927
  hypo

SEQ ID NO: 365961 - DNA, 104 bp, Homo sapiens; identical to SEQ ID NO: 341407
  chr12:50484317-50484421
  hypo

SEQ ID NO: 365962 - DNA, 37 bp, Homo sapiens; identical to SEQ ID NO: 348557
  chr12:51421646-51421683
  hypo

SEQ ID NO: 365963 - DNA, 70 bp, Homo sapiens
  chr12:51844685-51844755
  hypo
cggatgccgcttggccggcagagccatcggcatcaccgcactcatggccagaagcaccggagacgagggc

SEQ ID NO: 365964 - DNA, 213 bp, Homo sapiens; identical to SEQ ID NO: 334523
  chr12:52294173-52294386
  hypo

SEQ ID NO: 365965 - DNA, 39 bp, Homo sapiens; identical to SEQ ID NO: 354902
  chr12:52387815-52387854
  hypo

SEQ ID NO: 365966 - DNA, 195 bp, Homo sapiens
  chr12:52467443-52467638
  hypo
cgctcggaggtgctggaggtgtcggtggaggggcggcaggtggaggaggccatgctggctgtgctgcacacggtgcttctgcaccgcagcacaggcaagttccactacaagaaggagggcacctactccattggcaccgtgggcacccaggatgttgactgtgacttcatcgacttcacttatgtgcgtgtctct

SEQ ID NO: 365967 - DNA, 227 bp, Homo sapiens
  chr12:52913581-52913808
  hypo
cggtcctcaccctctggatgctggggtcgatttgcaggttgaggggagtcaggagactctggttgacagtgacctcttggatacctccaggagggcagacaggaaagccagggccaccgaagccacctccaaagccagctccgccaccgagcccaaagccaccaccagctccaccgccgaaaccaaatccactaccggcaccacctccaaagccatagccgcctcca

SEQ ID NO: 365968 - DNA, 219 bp, Homo sapiens; identical to SEQ ID NO: 214902
  chr12:52913838-52914057
  hypo

SEQ ID NO: 365969 - DNA, 101 bp, Homo sapiens
  chr12:52914087-52914188
  hypo
tgttcctggtggagcaagagaaccaggcactagtgggttgggaggtgctggagagaacagagctcagcaggacgcagaaggtggctctgttacccaggaac

SEQ ID NO: 365970 - DNA, 144 bp, Homo sapiens; identical to SEQ ID NO: 341417
  chr12:53007462-53007606
  hypo

SEQ ID NO: 365971 - DNA, 156 bp, Homo sapiens; identical to SEQ ID NO: 334530
  chr12:53272458-53272614
  hypo

SEQ ID NO: 365972 - DNA, 172 bp, Homo sapiens; identical to SEQ ID NO: 341421
  chr12:53474309-53474481
  hypo

SEQ ID NO: 365973 - DNA, 193 bp, Homo sapiens; identical to SEQ ID NO: 351361
  chr12:53719360-53719553
  hypo

SEQ ID NO: 365974 - DNA, 114 bp, Homo sapiens; identical to SEQ ID NO: 341425
  chr12:54122178-54122292
  hypo

SEQ ID NO: 365975 - DNA, 57 bp, Homo sapiens; identical to SEQ ID NO: 351363
  chr12:54144782-54144839
  hypo

SEQ ID NO: 365976 - DNA, 302 bp, Homo sapiens; identical to SEQ ID NO: 360097
  chr12:54332438-54332740
  hypo

SEQ ID NO: 365977 - DNA, 103 bp, Homo sapiens; identical to SEQ ID NO: 351368
  chr12:54393256-54393359
  hypo

SEQ ID NO: 365978 - DNA, 432 bp, Homo sapiens; identical to SEQ ID NO: 334559
  chr12:54400009-54400441
  hypo

SEQ ID NO: 365979 - DNA, 571 bp, Homo sapiens; identical to SEQ ID NO: 360119
  chr12:54426536-54427107
  hypo

SEQ ID NO: 365980 - DNA, 329 bp, Homo sapiens; identical to SEQ ID NO: 203022
  chr12:54427307-54427636
  hypo

SEQ ID NO: 365981 - DNA, 136 bp, Homo sapiens; identical to SEQ ID NO: 341435
  chr12:56183329-56183465
  hypo

SEQ ID NO: 365982 - DNA, 359 bp, Homo sapiens; identical to SEQ ID NO: 346055
  chr12:56558022-56558381
  hypo

SEQ ID NO: 365983 - DNA, 166 bp, Homo sapiens; identical to SEQ ID NO: 341438
  chr12:56604107-56604273
  hypo

SEQ ID NO: 365984 - DNA, 74 bp, Homo sapiens; identical to SEQ ID NO: 341439
  chr12:56610588-56610662
  hypo

SEQ ID NO: 365985 - DNA, 172 bp, Homo sapiens; identical to SEQ ID NO: 341440
  chr12:57625988-57626160
  hypo

SEQ ID NO: 365986 - DNA, 146 bp, Homo sapiens
  chr12:58262601-58262747
  hypo
cgttcaccacccactggcgatgccccattcacaagggggcccggctggccacgcgacccagcagcatccatttgaaggcagcaagcaacaagctggctccattcacaaaccctgtcctcctttgaaaaccaatcaccgtgcgaagc

SEQ ID NO: 365987 - DNA, 171 bp, Homo sapiens; identical to SEQ ID NO: 341443
  chr12:58263143-58263314
  hypo

SEQ ID NO: 365988 - DNA, 185 bp, Homo sapiens; identical to SEQ ID NO: 341444
  chr12:58284105-58284290
  hypo

SEQ ID NO: 365989 - DNA, 216 bp, Homo sapiens; identical to SEQ ID NO: 289119
  chr12:59313943-59314159
  hypo

SEQ ID NO: 365990 - DNA, 341 bp, Homo sapiens; identical to SEQ ID NO: 360136
  chr12:59314189-59314530
  hypo

SEQ ID NO: 365991 - DNA, 116 bp, Homo sapiens
  chr12:63195619-63195735
  hypo
cgctccgatgaccaggcactcatggggaatcttcttctcggtaaagaagcgtgtggggggcgtgctgggggagcccggggcccccacccctccgcgcagggaggctgcccgggtca

SEQ ID NO: 365992 - DNA, 160 bp, Homo sapiens
  chr12:63195813-63195973
  hypo
tgtccacgatgtcctgcagctgctccgtgatgtggtgctgcagcaggcgtgacgccaccaccgcggccccggaccccgcgtgcccgtcaaacagcgaccaatagtggcaggaaacaccctcggattcctgtgggagaggacgacagggaggagtgagaac

SEQ ID NO: 365993 - DNA, 111 bp, Homo sapiens; identical to SEQ ID NO: 354914
  chr12:69999239-69999350
  hypo

SEQ ID NO: 365994 - DNA, 55 bp, Homo sapiens
  chr12:72165436-72165491
  hypo
gacatagtttaagtattttattaagagaagattgaggccaggcacagtggctcac

SEQ ID NO: 365995 - DNA, 91 bp, Homo sapiens; identical to SEQ ID NO: 341456
  chr12:76878986-76879077
  hypo

SEQ ID NO: 365996 - DNA, 259 bp, Homo sapiens; identical to SEQ ID NO: 341458
  chr12:77216021-77216280
  hypo

SEQ ID NO: 365997 - DNA, 255 bp, Homo sapiens
  chr12:79842637-79842892
  hypo
tatagtcgggccttatctctagagctagatgattcatattcatttcatggcttctttcagaaagtgcaggtggtggtaactgttttggactatgacaagattggcaagaacgatgccatcggcaaagtctttgtgggctacaacagcaccggcgcggagctgcgacactggtcagacatgctggccaaccccaggcgacctattgcccagtggcacaccctgcaggtagaggaggaagttgatgccatgctggcc

SEQ ID NO: 365998 - DNA, 385 bp, Homo sapiens; identical to SEQ ID NO: 203112
  chr12:81330352-81330737
  hypo

SEQ ID NO: 365999 - DNA, 437 bp, Homo sapiens; identical to SEQ ID NO: 360169
  chr12:89747140-89747577
  hypo

SEQ ID NO: 366000 - DNA, 122 bp, Homo sapiens; identical to SEQ ID NO: 341462
  chr12:90025699-90025821
  hypo

SEQ ID NO: 366001 - DNA, 39 bp, Homo sapiens; identical to SEQ ID NO: 354918
  chr12:90313473-90313512
  hypo

SEQ ID NO: 366002 - DNA, 122 bp, Homo sapiens
  chr12:93710959-93711081
  hypo
cgacccaggactcccgcttctctttacaccatatactgttctttatgtgccgctgtttttctctttatagtttttctaggacaaaaaccaagctccatcagaaggttaaacctgtgtcaggt

SEQ ID NO: 366003 - DNA, 264 bp, Homo sapiens; identical to SEQ ID NO: 347242
  chr12:93966037-93966301
  hypo

SEQ ID NO: 366004 - DNA, 117 bp, Homo sapiens; identical to SEQ ID NO: 341466
  chr12:94145777-94145894
  hypo

SEQ ID NO: 366005 - DNA, 104 bp, Homo sapiens; identical to SEQ ID NO: 351397
  chr12:94541793-94541897
  hypo

SEQ ID NO: 366006 - DNA, 1131 bp, Homo sapiens; identical to SEQ ID NO: 289236
  chr12:94541957-94543088
  hypo

SEQ ID NO: 366007 - DNA, 86 bp, Homo sapiens; identical to SEQ ID NO: 345430
  chr12:94544052-94544138
  hypo

SEQ ID NO: 366008 - DNA, 124 bp, Homo sapiens; identical to SEQ ID NO: 341468
  chr12:95602750-95602874
  hypo

SEQ ID NO: 366009 - DNA, 107 bp, Homo sapiens; identical to SEQ ID NO: 360176
  chr12:96183929-96184036
  hypo

SEQ ID NO: 366010 - DNA, 73 bp, Homo sapiens; identical to SEQ ID NO: 360177
  chr12:96184964-96185037
  hypo

SEQ ID NO: 366011 - DNA, 222 bp, Homo sapiens; identical to SEQ ID NO: 360178
  chr12:96185121-96185343
  hypo

SEQ ID NO: 366012 - DNA, 133 bp, Homo sapiens; identical to SEQ ID NO: 341471
  chr12:96566303-96566436
  hypo

SEQ ID NO: 366013 - DNA, 324 bp, Homo sapiens; identical to SEQ ID NO: 341473
  chr12:102301906-102302230
  hypo

SEQ ID NO: 366014 - DNA, 348 bp, Homo sapiens; identical to SEQ ID NO: 203159
  chr12:104851545-104851893
  hypo

SEQ ID NO: 366015 - DNA, 214 bp, Homo sapiens
  chr12:105392597-105392811
  hypo
cgtgtgcttacatgggtagcagtggccactcagggtaagggggcgggctgctggtctccatgcatagtttcacaccactggcagtgttgacacaggggcagggtactggtggctgcgggactggtgccaaatgtgcgcacgtttatgctggctgcagtggctgcacagggcgcagggcaggtccactggtcactgtgcctagttttgcagctgg

SEQ ID NO: 366016 - DNA, 50 bp, Homo sapiens
  chr12:105392841-105392891
  hypo
gtggtctccgtacctgcagatactccagtggcagtggcagcatggtggtc

SEQ ID NO: 366017 - DNA, 178 bp, Homo sapiens; identical to SEQ ID NO: 341481
  chr12:109050967-109051145
  hypo

SEQ ID NO: 366018 - DNA, 32 bp, Homo sapiens
  chr12:109208584-109208616
  hypo
cggggtgccgaggggaggcaaagggaggagag

SEQ ID NO: 366019 - DNA, 137 bp, Homo sapiens
  chr12:109208674-109208811
  hypo
cagccaggcagcagcggagtgggatgcgcatgtgggcatctaaggcatgcccgtgactgctggcctgtgagctctgtgagactgtaggtgtgtctgccgtgctccctgatgtggccccagcacctggcggggcgccc

SEQ ID NO: 366020 - DNA, 152 bp, Homo sapiens
  chr12:109488367-109488519
  hypo
cggagaaagcgattgaaagggagggaaaaatcttgctggctctaatgctttataaactgtgctgtccaatacggtagctgctggccacttggggctattgagcacatgaaaagtgggtactccaaactgagaggtacttagtaccaaaaaac

SEQ ID NO: 366021 - DNA, 226 bp, Homo sapiens; identical to SEQ ID NO: 341484
  chr12:109507780-109508006
  hypo

SEQ ID NO: 366022 - DNA, 367 bp, Homo sapiens
  chr12:109873137-109873504
  hypo
cgccgtttcagttctcgtttggatcagattctgttgttcactactagggtgtaaaaccgtgagagaccagccccttgaaattaaagtttacaaaacttcacttgtctgcgtgtctgatgttggaaagtttagcttcaaagcctgcagcctgggtgtttgctgggaatggtcaatgagaaaagttagatggggaaatgcaaaaagtaaaaaatcaaaactgcggggggagggagcgtctcttttgaaatgtaaccggtctgtcaagaactacgcttgagtcatttgagggcctgctgtgcgccaggtgaacactaagtcctttaaaccatggtctcattctgttctgagaacagacctgtaagggagg

SEQ ID NO: 366023 - DNA, 159 bp, Homo sapiens; identical to SEQ ID NO: 354925
  chr12:109970799-109970958
  hypo

SEQ ID NO: 366024 - DNA, 149 bp, Homo sapiens; identical to SEQ ID NO: 341488
  chr12:110019861-110020010
  hypo

SEQ ID NO: 366025 - DNA, 113 bp, Homo sapiens
  chr12:110258862-110258975
  hypo
tcatggaaaccctggcaaacatttgtcaaatcccatcctcctgattacgtgaccaaggaaagctgcttaaatctgggggcaagtttgggcatgcaaacctgctccgccccagc

SEQ ID NO: 366026 - DNA, 634 bp, Homo sapiens; identical to SEQ ID NO: 316194
  chr12:110352780-110353414
  hypo

SEQ ID NO: 366027 - DNA, 113 bp, Homo sapiens; identical to SEQ ID NO: 354928
  chr12:110783979-110784092
  hypo

SEQ ID NO: 366028 - DNA, 113 bp, Homo sapiens; identical to SEQ ID NO: 341495
  chr12:110784858-110784971
  hypo

SEQ ID NO: 366029 - DNA, 114 bp, Homo sapiens; identical to SEQ ID NO: 341496
  chr12:110915439-110915553
  hypo

SEQ ID NO: 366030 - DNA, 60 bp, Homo sapiens; identical to SEQ ID NO: 354931
  chr12:110983646-110983706
  hypo

SEQ ID NO: 366031 - DNA, 136 bp, Homo sapiens; identical to SEQ ID NO: 354932
  chr12:110983736-110983872
  hypo

SEQ ID NO: 366032 - DNA, 96 bp, Homo sapiens; identical to SEQ ID NO: 351410
  chr12:111284508-111284604
  hypo

SEQ ID NO: 366033 - DNA, 51 bp, Homo sapiens; identical to SEQ ID NO: 354934
  chr12:111725459-111725510
  hypo

SEQ ID NO: 366034 - DNA, 63 bp, Homo sapiens; identical to SEQ ID NO: 215057
  chr12:111725564-111725627
  hypo

SEQ ID NO: 366035 - DNA, 390 bp, Homo sapiens; identical to SEQ ID NO: 354936
  chr12:111800610-111801000
  hypo

SEQ ID NO: 366036 - DNA, 320 bp, Homo sapiens; identical to SEQ ID NO: 351411
  chr12:111844290-111844610
  hypo

SEQ ID NO: 366037 - DNA, 86 bp, Homo sapiens
  chr12:112591890-112591976
  hypo
cagttctttgcagaggcaggtctctgaaaagaattatcctgagagaaaaaagcttcgtctgcatgcactcgcgcacacacacaaac

SEQ ID NO: 366038 - DNA, 182 bp, Homo sapiens
  chr12:112610173-112610355
  hypo
cggggcctccaggcagcggcctgggcattccccgcagccgtgcatttctgtatctgctccctggctttgttgtcactggcattaaaaaaggccccagactaattaggccacagtcctggctccctgccttgccctccctgtttcgtcagcccactcttccttgcacacctggcgcatagcag

SEQ ID NO: 366039 - DNA, 215 bp, Homo sapiens
  chr12:112610446-112610661
  hypo
gggaggggataggcccagggccacatactcaggagacaggccactctggggtcagcagcatccgcggggtccaggtacacctcatggggatggagccgtgcgggtgtgatggcgaggtggcggcatagctggttgatgtactgcacaagtgccacgtccatctccagggtccactttcttgaggccttctgtgcatgtcggacatcgatgcatgc

SEQ ID NO: 366040 - DNA, 175 bp, Homo sapiens; identical to SEQ ID NO: 354938
  chr12:112681200-112681375
  hypo

SEQ ID NO: 366041 - DNA, 73 bp, Homo sapiens; identical to SEQ ID NO: 341510
  chr12:112684738-112684811
  hypo

SEQ ID NO: 366042 - DNA, 235 bp, Homo sapiens
  chr12:112743068-112743303
  hypo
cggtgtggatctaaagcgccgtggctcccagctgcttcttgccccaagccctcctcctctctctgcattccagccactctggcccactttttctccctaaaacatgctgcctcctgccacagacactttgcacgtgtggtatcctctttctggaatgttcttccctcacctactccccagcctcttcatctggtacatgactacttttccttcactaattacgattatctcgtgc

SEQ ID NO: 366043 - DNA, 83 bp, Homo sapiens; identical to SEQ ID NO: 345434
  chr12:113495127-113495210
  hypo

SEQ ID NO: 366044 - DNA, 788 bp, Homo sapiens; identical to SEQ ID NO: 341513
  chr12:113685206-113685994
  hypo

SEQ ID NO: 366045 - DNA, 58 bp, Homo sapiens; identical to SEQ ID NO: 341514
  chr12:113704033-113704091
  hypo

SEQ ID NO: 366046 - DNA, 291 bp, Homo sapiens; identical to SEQ ID NO: 354941
  chr12:113725566-113725857
  hypo

SEQ ID NO: 366047 - DNA, 615 bp, Homo sapiens; identical to SEQ ID NO: 334652
  chr12:113796265-113796880
  hypo

SEQ ID NO: 366048 - DNA, 554 bp, Homo sapiens
  chr12:114273212-114273766
  hypo
cgtgagcacctgacggcaggctgtggtactcgaggaggaccaggggaggggcatgacaagggaatcacgaaaaggagaggtgtgggggaaaagctgcatctttgacactctggctgggaggcagtgggggccggggtcagtgggggctgccgggaccagggctctagcaagcaggctccttccctgctcctcgcgaggctgggagggtgactgtttgctggaggccggcgacccatggggacagccacccgtctgtgccggaagagcacttctccgggcactctgctcatagatctcccgccccagcccaacctggcttgggcaggcgggggaaggccccactgccagccactcgccatgctggtcatgtctgcgctcccagctctggaggtgaaaggtagagacgctaaccacagcccatcagtcctccccagctggaataagacaacatgggaagcagagccacgctcccagccaaataaaagcctgtttgcccagcctccctggctgtgagtgctgtaaaacacagggttctgcgcacggatttcttccat

SEQ ID NO: 366049 - DNA, 134 bp, Homo sapiens
  chr12:114273850-114273984
  hypo
ttgtaacacgctcaggaagaaaaggacacagccagcggcggactttcctctttcttccctccttgctctctcttttcaaactcccacatgcaaggcagtgaagaatagcacttcacctaccacggggctgctgc

SEQ ID NO: 366050 - DNA, 72 bp, Homo sapiens; identical to SEQ ID NO: 354943
  chr12:114290596-114290668
  hypo

SEQ ID NO: 366051 - DNA, 146 bp, Homo sapiens; identical to SEQ ID NO: 341524
  chr12:114334084-114334230
  hypo

SEQ ID NO: 366052 - DNA, 284 bp, Homo sapiens; identical to SEQ ID NO: 354944
  chr12:114337479-114337763
  hypo

SEQ ID NO: 366053 - DNA, 146 bp, Homo sapiens; identical to SEQ ID NO: 215093
  chr12:114337793-114337939
  hypo

SEQ ID NO: 366054 - DNA, 169 bp, Homo sapiens; identical to SEQ ID NO: 341528
  chr12:116394813-116394982
  hypo

SEQ ID NO: 366055 - DNA, 230 bp, Homo sapiens; identical to SEQ ID NO: 341529
  chr12:116443638-116443868
  hypo

SEQ ID NO: 366056 - DNA, 154 bp, Homo sapiens; identical to SEQ ID NO: 341531
  chr12:116756230-116756384
  hypo

SEQ ID NO: 366057 - DNA, 237 bp, Homo sapiens; identical to SEQ ID NO: 354947
  chr12:117155351-117155588
  hypo

SEQ ID NO: 366058 - DNA, 187 bp, Homo sapiens; identical to SEQ ID NO: 354948
  chr12:117155627-117155814
  hypo

SEQ ID NO: 366059 - DNA, 71 bp, Homo sapiens; identical to SEQ ID NO: 334669
  chr12:117316909-117316980
  hypo

SEQ ID NO: 366060 - DNA, 31 bp, Homo sapiens; identical to SEQ ID NO: 289422
  chr12:117317225-117317256
  hypo

SEQ ID NO: 366061 - DNA, 482 bp, Homo sapiens; identical to SEQ ID NO: 351423
  chr12:117317288-117317770
  hypo

SEQ ID NO: 366062 - DNA, 140 bp, Homo sapiens; identical to SEQ ID NO: 341535
  chr12:117392984-117393124
  hypo

SEQ ID NO: 366063 - DNA, 272 bp, Homo sapiens
  chr12:117407834-117408106
  hypo
cgaaggttctgagtaatgagcagatgctgctaatgcagggacggcggagaccttgccaggactccatctgctccgtgcttgcctgcctttggcctcgtgccacagcattagggaatggcagtgtgcttcgaaacccgctccctggtcaccgagtttgtcttgaaatctcgctctttggtgagaaatgagattacacacttcttaggtgcaaagaagtttttatttgtccccctcagtagagagaggagagacgcgatctggtgcatattagc

SEQ ID NO: 366064 - DNA, 50 bp, Homo sapiens
  chr12:117408136-117408186
  hypo
tcctctttatatggtgccatcaagcacggcaaagtggcttatccacctcc

SEQ ID NO: 366065 - DNA, 129 bp, Homo sapiens; identical to SEQ ID NO: 341537
  chr12:117408233-117408362
  hypo

SEQ ID NO: 366066 - DNA, 218 bp, Homo sapiens; identical to SEQ ID NO: 341538
  chr12:117466159-117466377
  hypo

SEQ ID NO: 366067 - DNA, 99 bp, Homo sapiens; identical to SEQ ID NO: 354952
  chr12:117531122-117531221
  hypo

SEQ ID NO: 366068 - DNA, 328 bp, Homo sapiens; identical to SEQ ID NO: 341543
  chr12:117600052-117600380
  hypo

SEQ ID NO: 366069 - DNA, 413 bp, Homo sapiens
  chr12:118198873-118199286
  hypo
gatgcagcgcggtgaatcccgggatcaagtgtatcagttttcgggaggagggcggtggggtccccgggggcttcagcttgttcttcttcctcatgggcggcgtgcccggcggggtcacggtggtgacgatgttgggggtgcgcggcggggtgcggaccgcgtgccgctgccggggcgatgggggcagggaacggtggcccgactccagtggcgggggcgggcacaagcccgggtaggcgtccacggtaagcctgtccacgtgggtgtacacaggggccccgggagtggggctggtgtgacaatagtgctggacgcacttggacgggaccctggggctctgggagagatgggtgcggatccacggggtgggctccggggggcacacgggattgttctccttccccgtctctgtc

SEQ ID NO: 366070 - DNA, 79 bp, Homo sapiens; identical to SEQ ID NO: 341546
  chr12:118461377-118461456
  hypo

SEQ ID NO: 366071 - DNA, 396 bp, Homo sapiens; identical to SEQ ID NO: 348568
  chr12:120147746-120148142
  hypo

SEQ ID NO: 366072 - DNA, 335 bp, Homo sapiens; identical to SEQ ID NO: 215132
  chr12:120148396-120148731
  hypo

SEQ ID NO: 366073 - DNA, 70 bp, Homo sapiens; identical to SEQ ID NO: 341548
  chr12:120165264-120165334
  hypo

SEQ ID NO: 366074 - DNA, 64 bp, Homo sapiens; identical to SEQ ID NO: 346059
  chr12:120172992-120173056
  hypo

SEQ ID NO: 366075 - DNA, 136 bp, Homo sapiens; identical to SEQ ID NO: 346060
  chr12:120173137-120173273
  hypo

SEQ ID NO: 366076 - DNA, 276 bp, Homo sapiens; identical to SEQ ID NO: 341550
  chr12:120186357-120186633
  hypo

SEQ ID NO: 366077 - DNA, 46 bp, Homo sapiens; identical to SEQ ID NO: 354958
  chr12:120574393-120574439
  hypo

SEQ ID NO: 366078 - DNA, 143 bp, Homo sapiens; identical to SEQ ID NO: 341555
  chr12:120613510-120613653
  hypo

SEQ ID NO: 366079 - DNA, 97 bp, Homo sapiens; identical to SEQ ID NO: 341556
  chr12:121200066-121200163
  hypo

SEQ ID NO: 366080 - DNA, 206 bp, Homo sapiens; identical to SEQ ID NO: 341557
  chr12:121203947-121204153
  hypo

SEQ ID NO: 366081 - DNA, 200 bp, Homo sapiens; identical to SEQ ID NO: 341558
  chr12:121205162-121205362
  hypo

SEQ ID NO: 366082 - DNA, 81 bp, Homo sapiens; identical to SEQ ID NO: 341559
  chr12:121328606-121328687
  hypo

SEQ ID NO: 366083 - DNA, 49 bp, Homo sapiens; identical to SEQ ID NO: 316435
  chr12:121622576-121622625
  hypo

SEQ ID NO: 366084 - DNA, 703 bp, Homo sapiens; identical to SEQ ID NO: 348573
  chr12:121687598-121688301
  hypo

SEQ ID NO: 366085 - DNA, 239 bp, Homo sapiens; identical to SEQ ID NO: 348574
  chr12:121688331-121688570
  hypo

SEQ ID NO: 366086 - DNA, 124 bp, Homo sapiens; identical to SEQ ID NO: 341563
  chr12:121756071-121756195
  hypo

SEQ ID NO: 366087 - DNA, 124 bp, Homo sapiens; identical to SEQ ID NO: 341564
  chr12:122179060-122179184
  hypo

SEQ ID NO: 366088 - DNA, 39 bp, Homo sapiens; identical to SEQ ID NO: 346061
  chr12:122192684-122192723
  hypo

SEQ ID NO: 366089 - DNA, 116 bp, Homo sapiens; identical to SEQ ID NO: 215161
  chr12:122192843-122192959
  hypo

SEQ ID NO: 366090 - DNA, 45 bp, Homo sapiens; identical to SEQ ID NO: 346063
  chr12:122192989-122193034
  hypo

SEQ ID NO: 366091 - DNA, 94 bp, Homo sapiens; identical to SEQ ID NO: 341566
  chr12:122206347-122206441
  hypo

SEQ ID NO: 366092 - DNA, 496 bp, Homo sapiens; identical to SEQ ID NO: 354971
  chr12:122208807-122209303
  hypo

SEQ ID NO: 366093 - DNA, 108 bp, Homo sapiens; identical to SEQ ID NO: 354972
  chr12:122213693-122213801
  hypo

SEQ ID NO: 366094 - DNA, 751 bp, Homo sapiens; identical to SEQ ID NO: 334681
  chr12:122231543-122232294
  hypo

SEQ ID NO: 366095 - DNA, 60 bp, Homo sapiens
  chr12:122285108-122285168
  hypo
tttttcaggtacctgtagggtgggcggtggaacacatatgctctgagcgcctccagggac

SEQ ID NO: 366096 - DNA, 276 bp, Homo sapiens; identical to SEQ ID NO: 354973
  chr12:122439511-122439787
  hypo

SEQ ID NO: 366097 - DNA, 582 bp, Homo sapiens; identical to SEQ ID NO: 334683
  chr12:122460955-122461537
  hypo

SEQ ID NO: 366098 - DNA, 61 bp, Homo sapiens; identical to SEQ ID NO: 341575
  chr12:122463078-122463139
  hypo

SEQ ID NO: 366099 - DNA, 67 bp, Homo sapiens; identical to SEQ ID NO: 341576
  chr12:122474899-122474966
  hypo

SEQ ID NO: 366100 - DNA, 407 bp, Homo sapiens; identical to SEQ ID NO: 341577
  chr12:122480960-122481367
  hypo

SEQ ID NO: 366101 - DNA, 375 bp, Homo sapiens; identical to SEQ ID NO: 341578
  chr12:122481629-122482004
  hypo

SEQ ID NO: 366102 - DNA, 70 bp, Homo sapiens; identical to SEQ ID NO: 354976
  chr12:122602792-122602862
  hypo

SEQ ID NO: 366103 - DNA, 458 bp, Homo sapiens; identical to SEQ ID NO: 341580
  chr12:122614584-122615042
  hypo

SEQ ID NO: 366104 - DNA, 209 bp, Homo sapiens; identical to SEQ ID NO: 215185
  chr12:122622385-122622594
  hypo

SEQ ID NO: 366105 - DNA, 261 bp, Homo sapiens
  chr12:122622642-122622903
  hypo
ctggcccttgggcacccaggatcagcgtagggggtgaggaagggtggacagtgtgcctgcaatgtgcctgtcttagtgaccagcgggttctccagcagaaccggcagatgaagcacatctcagctgagcagaaaaggcgcttcaacatcaagatgtgcttcgacatgctcaacagcctcatctccaacaattccaagctggtgagttgccaagagcgtgggctgtggcagggcaggggagctggcaggacgtgctccctgc

SEQ ID NO: 366106 - DNA, 163 bp, Homo sapiens
  chr12:122623827-122623990
  hypo
cggtcctcgaagccacagggagggtgagtgccacccctgctgtgacaggcggaaaccaggactccctccactgagtggtagagcccaatttgaagcctaatggagcatgtccacctctaggggctctcgtgccaaggccaccttgcactcagccttccaggtg

SEQ ID NO: 366107 - DNA, 64 bp, Homo sapiens; identical to SEQ ID NO: 351427
  chr12:122688584-122688648
  hypo

SEQ ID NO: 366108 - DNA, 123 bp, Homo sapiens; identical to SEQ ID NO: 341584
  chr12:122970391-122970514
  hypo

SEQ ID NO: 366109 - DNA, 551 bp, Homo sapiens; identical to SEQ ID NO: 334686
  chr12:123258823-123259374
  hypo

SEQ ID NO: 366110 - DNA, 303 bp, Homo sapiens; identical to SEQ ID NO: 341587
  chr12:123325625-123325928
  hypo

SEQ ID NO: 366111 - DNA, 473 bp, Homo sapiens; identical to SEQ ID NO: 334688
  chr12:123380333-123380806
  hypo

SEQ ID NO: 366112 - DNA, 255 bp, Homo sapiens; identical to SEQ ID NO: 341589
  chr12:123434339-123434594
  hypo

SEQ ID NO: 366113 - DNA, 203 bp, Homo sapiens; identical to SEQ ID NO: 341590
  chr12:123434957-123435160
  hypo

SEQ ID NO: 366114 - DNA, 202 bp, Homo sapiens; identical to SEQ ID NO: 354982
  chr12:123997867-123998069
  hypo

SEQ ID NO: 366115 - DNA, 158 bp, Homo sapiens; identical to SEQ ID NO: 341593
  chr12:124171347-124171505
  hypo

SEQ ID NO: 366116 - DNA, 192 bp, Homo sapiens; identical to SEQ ID NO: 341594
  chr12:124335343-124335535
  hypo

SEQ ID NO: 366117 - DNA, 84 bp, Homo sapiens; identical to SEQ ID NO: 341596
  chr12:124832004-124832088
  hypo

SEQ ID NO: 366118 - DNA, 642 bp, Homo sapiens; identical to SEQ ID NO: 316598
  chr12:124832318-124832960
  hypo

SEQ ID NO: 366119 - DNA, 257 bp, Homo sapiens; identical to SEQ ID NO: 354986
  chr12:124832990-124833247
  hypo

SEQ ID NO: 366120 - DNA, 286 bp, Homo sapiens; identical to SEQ ID NO: 341598
  chr12:124843509-124843795
  hypo

SEQ ID NO: 366121 - DNA, 723 bp, Homo sapiens; identical to SEQ ID NO: 354988
  chr12:124850157-124850880
  hypo

SEQ ID NO: 366122 - DNA, 170 bp, Homo sapiens
  chr12:124869706-124869876
  hypo
cgctggcgaggcgagcctgcaccttctgtgcttgtggaggagggaagggtctcagcctcccgtggcctgcctcaagccctccaggatgctggggctgagacgtccgcccccgcccccccagacctgtccctccccaaccacggcagccctaaagctgtgaggtcaaatgg

SEQ ID NO: 366123 - DNA, 326 bp, Homo sapiens
  chr12:124870152-124870478
  hypo
agaagctgagttctaacaaggcggcataatagcccctccctggcccatgcctcctggggtgcagagacatctcctgaggcagtctgggctcctctcccagcttcccagaggcgcggtgcagcgtgactgggggctcaccatcttcagcttgtgctgctgcaagatctcatcgaggttctgcctcttcttgtagttgaagtagaagttcttacactgcgacacagtcttggagcccaccatccgggcgatggccgaccagttgcggccgtgttccaggagacctgtctcaggagaggagggcagtgagaagaggccaggcccggcac

SEQ ID NO: 366124 - DNA, 250 bp, Homo sapiens
  chr12:124879871-124880121
  hypo
cgccccacccccgctccctcctgccatcgcctggaacacacagccattagcagccaccctgagcagtaattgtccagattgctgtaattcacggcagacgaacatgctgctgctcacgacattattacaaatgtcactgagcagggcctccgcgtgcacggcccccaggggacgctcactgccgtctccatgggcaggacccaggatgagctcactgtcatcactgaggacccaaccttgagatggtggg

SEQ ID NO: 366125 - DNA, 220 bp, Homo sapiens; identical to SEQ ID NO: 341602
  chr12:124886252-124886472
  hypo

SEQ ID NO: 366126 - DNA, 73 bp, Homo sapiens
  chr12:124893329-124893402
  hypo
cgaaggttacaagcactccaagggcattgcttcctgatcatctggctacatggagctacgaagtcatccgtgc

SEQ ID NO: 366127 - DNA, 188 bp, Homo sapiens
  chr12:124893570-124893758
  hypo
acgcagcttccccctacagaaagctggttgttaaacatttaccagcactctacggcagaaagatgcgtgtcgacagaacgtgagcaacatttaacacgcacatggaagcctgttccgcctgtacagatgtgtgctgtgccagccgaggctctgttgtaaatcctaattcagatcccgacccgcaactc

SEQ ID NO: 366128 - DNA, 178 bp, Homo sapiens; identical to SEQ ID NO: 354989
  chr12:124970986-124971164
  hypo

SEQ ID NO: 366129 - DNA, 703 bp, Homo sapiens; identical to SEQ ID NO: 341605
  chr12:124979300-124980003
  hypo

SEQ ID NO: 366130 - DNA, 32 bp, Homo sapiens
  chr12:124989213-124989245
  hypo
cgcagtctgtccatcaatggactacgattcag

SEQ ID NO: 366131 - DNA, 108 bp, Homo sapiens
  chr12:125092496-125092604
  hypo
agccatcccgtggccagggcgcagagtgacctcccagatctacgtttcatgtggcgtttctgccgtgtatttttaaacccggggacaaatgtatgcgtagtaaaggtc

SEQ ID NO: 366132 - DNA, 139 bp, Homo sapiens; identical to SEQ ID NO: 354991
  chr12:125102589-125102728
  hypo

SEQ ID NO: 366133 - DNA, 150 bp, Homo sapiens; identical to SEQ ID NO: 354992
  chr12:125500633-125500783
  hypo

SEQ ID NO: 366134 - DNA, 286 bp, Homo sapiens; identical to SEQ ID NO: 341611
  chr12:125605555-125605841
  hypo

SEQ ID NO: 366135 - DNA, 146 bp, Homo sapiens; identical to SEQ ID NO: 360236
  chr12:126018005-126018151
  hypo

SEQ ID NO: 366136 - DNA, 33 bp, Homo sapiens; identical to SEQ ID NO: 360237
  chr12:126018265-126018298
  hypo

SEQ ID NO: 366137 - DNA, 122 bp, Homo sapiens; identical to SEQ ID NO: 341613
  chr12:128247754-128247876
  hypo

SEQ ID NO: 366138 - DNA, 405 bp, Homo sapiens; identical to SEQ ID NO: 360239
  chr12:128750713-128751118
  hypo

SEQ ID NO: 366139 - DNA, 150 bp, Homo sapiens; identical to SEQ ID NO: 354993
  chr12:128899867-128900017
  hypo

SEQ ID NO: 366140 - DNA, 229 bp, Homo sapiens
  chr12:129189650-129189879
  hypo
cgtggctgcagttcagtgatggctctgtgacgcccctggacatctacgacaccaaggacttctccctggcagccacctcccaggacgaggctgtcgtgtcagtcccccagccccgctctcccaggtggcccgttgtggtggccgaaggggaaggccagggcccactgatccgagtggacatgacgatcgccgaggcctgccagaaatctaaacgcaagagcatcctggc

SEQ ID NO: 366141 - DNA, 205 bp, Homo sapiens; identical to SEQ ID NO: 215265
  chr12:129189909-129190114
  hypo

SEQ ID NO: 366142 - DNA, 63 bp, Homo sapiens
  chr12:129190144-129190207
  hypo
aggctggcaggagaggggcagctgcagaacatccccattgacttcaccaacttccctgcccac

SEQ ID NO: 366143 - DNA, 152 bp, Homo sapiens; identical to SEQ ID NO: 354994
  chr12:130037501-130037653
  hypo

SEQ ID NO: 366144 - DNA, 483 bp, Homo sapiens; identical to SEQ ID NO: 354995
  chr12:130184247-130184730
  hypo

SEQ ID NO: 366145 - DNA, 91 bp, Homo sapiens; identical to SEQ ID NO: 354996
  chr12:130184760-130184851
  hypo

SEQ ID NO: 366146 - DNA, 263 bp, Homo sapiens; identical to SEQ ID NO: 351435
  chr12:130645806-130646069
  hypo

SEQ ID NO: 366147 - DNA, 71 bp, Homo sapiens; identical to SEQ ID NO: 341624
  chr12:130663584-130663655
  hypo

SEQ ID NO: 366148 - DNA, 73 bp, Homo sapiens; identical to SEQ ID NO: 354998
  chr12:130909511-130909584
  hypo

SEQ ID NO: 366149 - DNA, 475 bp, Homo sapiens; identical to SEQ ID NO: 354999
  chr12:130909737-130910212
  hypo

SEQ ID NO: 366150 - DNA, 573 bp, Homo sapiens; identical to SEQ ID NO: 341628
  chr12:130933888-130934461
  hypo

SEQ ID NO: 366151 - DNA, 429 bp, Homo sapiens; identical to SEQ ID NO: 341630
  chr12:131095743-131096172
  hypo

SEQ ID NO: 366152 - DNA, 229 bp, Homo sapiens; identical to SEQ ID NO: 341631
  chr12:131110936-131111165
  hypo

SEQ ID NO: 366153 - DNA, 78 bp, Homo sapiens; identical to SEQ ID NO: 348582
  chr12:131159367-131159445
  hypo

SEQ ID NO: 366154 - DNA, 260 bp, Homo sapiens; identical to SEQ ID NO: 215290
  chr12:131159530-131159790
  hypo

SEQ ID NO: 366155 - DNA, 174 bp, Homo sapiens; identical to SEQ ID NO: 341633
  chr12:131193281-131193455
  hypo

SEQ ID NO: 366156 - DNA, 394 bp, Homo sapiens; identical to SEQ ID NO: 355005
  chr12:131265535-131265929
  hypo

SEQ ID NO: 366157 - DNA, 198 bp, Homo sapiens
  chr12:131268482-131268680
  hypo
tttcacaggttgagcctgggcaagttaccaacgaagaaaggaattaaaaatgaacaatcaaaaacgcagcaacaacaatcatcttcgcggatccaattccaaaattactacattactaaaaacatccagctttaaacaaatgatacatgcaaagaaacatgaaagtggaactcatccatgaaagcataaaaaagcagc

SEQ ID NO: 366158 - DNA, 236 bp, Homo sapiens; identical to SEQ ID NO: 346066
  chr12:131271740-131271976
  hypo

SEQ ID NO: 366159 - DNA, 298 bp, Homo sapiens; identical to SEQ ID NO: 316760
  chr12:131272032-131272330
  hypo

SEQ ID NO: 366160 - DNA, 1060 bp, Homo sapiens
  chr12:131272367-131273427
  hypo
tctactcacagggcaacctgctttagcaaactcaacgacacattaaaaagtacaatttgcaaaggagagctaccacctggctgggtgttctgcgcctagagactgggccccgggagagcgctccacagtgaacttgcgaaggatggaatttacataaagaaggcaccgtctttagtcctggaaaggcaccctgggattctctacctccgtccgtctttttcacaggcagggaactgaggtcccaggaggcccaggtcaccccacccaaggaggcagggcctcccctgcactctctggaacctctccctgccaagaagccagaggccctgttttctcaggcttaggaatctgcactctcttgttcaaagactgtgagtcagaagaggagggccaagtgccgccttgaatttctcttactgctcaaatggaaaacaatgaaacagggctgtccacatcacagcctgccacctgccagtcatttagagcctggcgcgcatttccatagctcctctgacgccaggacaatcagacccgtctccggagggctcctgcctctggatgtctaaatgttcttgccttaaacccggtgtgacgctccacccctcccacaccgcacacatacgaattttaacaaaatcttcaaagcagaacttaacaaaaggttgcgtggtaccaggtccatttggttccatgtgaaaccaactaggaagatccgcattaggctcttcctcagctgcgccgagggcctggtttctattcatttgagaagctgtgtgcgcccctgtatggtctgttctttcctttagggctcgcttttaacagtgagtgttgttgtggcaactaaaataaggagccggccagtgctcctagggaggaaaacctcggcaactccgcaggtgcaggcaccggccacagacccacgcctggggcactcgcgtttgcattagcagagcgcaggagtcagggagcgcgggcaggggcgggaggaggggtctgcgcactggccacggtgtgggggacccagccctaccccttcccggggctgagtgggactcgccac

SEQ ID NO: 366161 - DNA, 322 bp, Homo sapiens; identical to SEQ ID NO: 341637
  chr12:131288908-131289230
  hypo

SEQ ID NO: 366162 - DNA, 221 bp, Homo sapiens; identical to SEQ ID NO: 341638
  chr12:131314814-131315035
  hypo

SEQ ID NO: 366163 - DNA, 185 bp, Homo sapiens; identical to SEQ ID NO: 355009
  chr12:131418203-131418388
  hypo

SEQ ID NO: 366164 - DNA, 62 bp, Homo sapiens; identical to SEQ ID NO: 355010
  chr12:131418430-131418492
  hypo

SEQ ID NO: 366165 - DNA, 105 bp, Homo sapiens; identical to SEQ ID NO: 355011
  chr12:131623219-131623324
  hypo

SEQ ID NO: 366166 - DNA, 145 bp, Homo sapiens; identical to SEQ ID NO: 215298
  chr12:131623397-131623542
  hypo

SEQ ID NO: 366167 - DNA, 623 bp, Homo sapiens
  chr12:132218722-132219345
  hypo
cgctggctcctgccgccctcgaggacttgaaggctgacgttgggctgggtgtggctcgtacataggacagggcccacacactggattcacgtttttcctcacaacttagaatagcaaagttacagactttggattcttacgaagacaagaatgaatgtcttggctaaccatgatcttacccaagaggacttaaaatgaatgtgcaggagaaatgagaagaggacttaagatcaaaaagagagtgactaggaggtcagagaggcagccgcccaccccacgcactccctgcttgtaagccggggccgcattgttgtgttaccacacttctgttttagagcctgttacggttttgagttacacagacatgtgtgggcttgtgcatgtttgaatgccctgtggacccggagctctgtgaggcaaaggctgggactgtcttactagccagcgtgctccttgcacctcgatccaaggggccacggggctcccaggaacattcaccgagtaacttcagaaaagtgaagagcagaagttccaaaagcacctggtgcttcctgggagaagtcacctgcacaggtaccttggatccaactgacaggtgagatgaacgagctctccctgcgtgc

SEQ ID NO: 366168 - DNA, 129 bp, Homo sapiens; identical to SEQ ID NO: 348587
  chr12:132222124-132222253
  hypo

SEQ ID NO: 366169 - DNA, 325 bp, Homo sapiens; identical to SEQ ID NO: 341646
  chr12:132247422-132247747
  hypo

SEQ ID NO: 366170 - DNA, 234 bp, Homo sapiens; identical to SEQ ID NO: 341647
  chr12:132249441-132249675
  hypo

SEQ ID NO: 366171 - DNA, 200 bp, Homo sapiens; identical to SEQ ID NO: 341648
  chr12:132250682-132250882
  hypo

SEQ ID NO: 366172 - DNA, 311 bp, Homo sapiens; identical to SEQ ID NO: 341649
  chr12:132270193-132270504
  hypo

SEQ ID NO: 366173 - DNA, 107 bp, Homo sapiens; identical to SEQ ID NO: 351437
  chr12:132312451-132312558
  hypo

SEQ ID NO: 366174 - DNA, 91 bp, Homo sapiens
  chr12:132329469-132329560
  hypo
cggcccccgcccgctgaagcggtggacaggcacccccgttttaatttgcctttagcagacctctaggcaaggataggggctccacacaagg

SEQ ID NO: 366175 - DNA, 109 bp, Homo sapiens; identical to SEQ ID NO: 346069
  chr12:132378083-132378192
  hypo

SEQ ID NO: 366176 - DNA, 99 bp, Homo sapiens; identical to SEQ ID NO: 341656
  chr12:132411621-132411720
  hypo

SEQ ID NO: 366177 - DNA, 173 bp, Homo sapiens; identical to SEQ ID NO: 355019
  chr12:132423854-132424027
  hypo

SEQ ID NO: 366178 - DNA, 816 bp, Homo sapiens; identical to SEQ ID NO: 341659
  chr12:132536813-132537629
  hypo

SEQ ID NO: 366179 - DNA, 280 bp, Homo sapiens; identical to SEQ ID NO: 341661
  chr12:132603391-132603671
  hypo

SEQ ID NO: 366180 - DNA, 65 bp, Homo sapiens
  chr12:132617118-132617183
  hypo
cgcaacccccaggccttcctggagtgggcgcctggtgttgcctcccacccctgcccggcgcagcc

SEQ ID NO: 366181 - DNA, 159 bp, Homo sapiens
  chr12:132643296-132643455
  hypo
cggatctcacgggggctaacgtgtcccccggaaagagatgtccccgtcctggcccccagcatcggcgagtggaccttatttggaaatagggtctttgcagattaaggagccagctgagatcatcctgcattcagggtgggccatcagtccggtggccgg

SEQ ID NO: 366182 - DNA, 320 bp, Homo sapiens; identical to SEQ ID NO: 215334
  chr12:132643525-132643845
  hypo

SEQ ID NO: 366183 - DNA, 92 bp, Homo sapiens
  chr12:132644008-132644100
  hypo
gatactgcaggtggcaggtcccctgaaggcatagtcagaggctttgctctgggctggcatggaggtatgggcgtggcggggtgtggctgggc

SEQ ID NO: 366184 - DNA, 424 bp, Homo sapiens
  chr12:132665953-132666377
  hypo
cgcacagtacacacacccaacacaactcaaaccacacacacactcagtacacacacccaacacaactcacacagcacacacacacacactcggtacacacacccagcacgcacacatagtacacacacccagcacaactcacactcagtacacacacccagcacatgtacccacccagcacacgttcactcgcaccctgcacagcccagcgcgcacacacccagcagacagcacatgctctcacatgctggcatcagccgtcagcctcagctgctggagggtgtggtggaggcgggcggtgagcgctgggtgctggggtccacgtccttccaagcccctgcatagcggccgccttggctggcgatgactggagggggtgaggggtgaggccaccagcacaggtgtgtcccttcactgtttccac

SEQ ID NO: 366185 - DNA, 86 bp, Homo sapiens
  chr12:132666502-132666588
  hypo
tgcaccctccaggcctgggggccccggggctgaccttgaccttcccacccgcccaggtgtggccgggacagcaccgcagttgtggc

SEQ ID NO: 366186 - DNA, 126 bp, Homo sapiens; identical to SEQ ID NO: 341665
  chr12:132675105-132675231
  hypo

SEQ ID NO: 366187 - DNA, 209 bp, Homo sapiens
  chr12:132983184-132983393
  hypo
cgccgccctcgacatccccagcacagacgccgccgtcgacgttcccagtgcagacaccgccctcgacgttttcccagccaggacgccgccctcaacattcccagaggggacgccgccctcgacattcccagcaggcgcagctcaggagcaccttgccatctgcagctccctgggggacgagaagaaacagcagccacccctttctcggg

SEQ ID NO: 366188 - DNA, 224 bp, Homo sapiens
  chr12:132983766-132983990
  hypo
ccgtctcccacctccctcctcttacctccccccacctccccagggcacgcactccctggctcctgcgcgatgcccagcagggtccaaaatgcacctggatgcccgggagccgtcgtccgccccacaggcagccccaggagccatcgcccgccccaaaggcccccccgggagccgtcacctgccccacaggcccccccaggagccgtcgtgcgctcagtcgggtc

SEQ ID NO: 366189 - DNA, 177 bp, Homo sapiens
  chr12:132986274-132986451
  hypo
cgcagagagccgcggtgccatctccaccctggctttccaggccctggagggcaaaggtcagtcagatggagggagcccggggtccctggcaggagtgtggccaagtcccagcagcgctgccccgagagaggaggacggcgcagctccattgctccacctgcccggctcagggatgga

SEQ ID NO: 366190 - DNA, 268 bp, Homo sapiens
  chr12:132986701-132986969
  hypo
cgcccacaccccacctccgtggtgacccctgaacccccggagctcaccatccacaccagggtgagaggagaggatgggcaaggaaccgtcaaccagaggggatgctcagctgcgtgcacgtggcgggtggtacatgggggctcggggaggcacccagagaggatgcgtgtgtagtgcagaaaatgaggctttggggcccgcacaccgagcccaggacagcacggaggcgggagacactgccaagcccccctcaccctccttgatggac

SEQ ID NO: 366191 - DNA, 136 bp, Homo sapiens; identical to SEQ ID NO: 341669
  chr12:133097814-133097950
  hypo

SEQ ID NO: 366192 - DNA, 477 bp, Homo sapiens; identical to SEQ ID NO: 215344
  chr12:133101020-133101497
  hypo

SEQ ID NO: 366193 - DNA, 497 bp, Homo sapiens
  chr12:133101527-133102024
  hypo
aaaatagtttctactcggggccaccgtgtgagcaaatgtgtgagtgtgtgcaaagcgcccgggccaggccctggcacgcatcggcgcccatgttggctggtgtcaggggtggtggcggtgggcgtggggcgtgggggtggggtgaagggagtatgggtgctcccttcagcaggtgatgaaactgaggcacggggaggccgagcagtggcccaagggcccatggccagggtcaggcaggtcccaccaccacctcgctgcttgctctggcatggagccgaccgaaggaggtgctgtgggcacagccaggggacagtgggtggcactgaggctcgacctggaggtcatagccctgtacagccagatggggtggtgcgaaccagccagggtgtgggtggaggccctgcctgtggtccctagcacccccaggatgccttcaaagtcagcggcttgtggaaggggcggctccaagcacgtggcggttctcgtgtcactgagcc

SEQ ID NO: 366194 - DNA, 413 bp, Homo sapiens; identical to SEQ ID NO: 341671
  chr12:133111693-133112106
  hypo

SEQ ID NO: 366195 - DNA, 500 bp, Homo sapiens
  chr12:133121644-133122144
  hypo
cgcccagcatggggccgtgcggcacggagctcagggcctcgcccagtgtggggcagtgcggcacagagcgggcgtcttctttggagcctgagtcttggcctcctgaccatgcccagcatgtcccttcggggcctggggtctgtcctctgctcccaggcattcctgcctatcacaaacccacaccagggtgacgttccctgagcccccgagcccagccccggcgccgtgaatggtcgcctcactcgggcagcttccgagaggtggatgtgtctctccttttctcctcgccctgattaattgcctcattcaatgccgactccactgcagttaaacattaattcagtaggacttaataacacgaattcattcacgcccctgcctgcgcctggctgacagtgccgtgctatttggttaatgagaggatccatgcagcgtcctctggtgcgcttgctggaaagcacccctcagtgtctccttgctgttggatgcattaaaccctc

SEQ ID NO: 366196 - DNA, 915 bp, Homo sapiens; identical to SEQ ID NO: 341673
  chr12:133147764-133148679
  hypo

SEQ ID NO: 366197 - DNA, 179 bp, Homo sapiens; identical to SEQ ID NO: 355023
  chr12:133199822-133200001
  hypo

SEQ ID NO: 366198 - DNA, 226 bp, Homo sapiens; identical to SEQ ID NO: 355024
  chr12:133200090-133200316
  hypo

SEQ ID NO: 366199 - DNA, 135 bp, Homo sapiens; identical to SEQ ID NO: 355025
  chr12:133280443-133280578
  hypo

SEQ ID NO: 366200 - DNA, 479 bp, Homo sapiens; identical to SEQ ID NO: 334707
  chr12:133286733-133287212
  hypo

SEQ ID NO: 366201 - DNA, 1071 bp, Homo sapiens; identical to SEQ ID NO: 341677
  chr12:133353501-133354572
  hypo

SEQ ID NO: 366202 - DNA, 358 bp, Homo sapiens; identical to SEQ ID NO: 341680
  chr12:133435596-133435954
  hypo

SEQ ID NO: 366203 - DNA, 237 bp, Homo sapiens; identical to SEQ ID NO: 203265
  chr12:133464166-133464403
  hypo

SEQ ID NO: 366204 - DNA, 218 bp, Homo sapiens; identical to SEQ ID NO: 203266
  chr12:133464555-133464773
  hypo

SEQ ID NO: 366205 - DNA, 261 bp, Homo sapiens; identical to SEQ ID NO: 355030
  chr13:20392445-20392706
  hypo

SEQ ID NO: 366206 - DNA, 167 bp, Homo sapiens; identical to SEQ ID NO: 345438
  chr13:20735265-20735432
  hypo

SEQ ID NO: 366207 - DNA, 506 bp, Homo sapiens; identical to SEQ ID NO: 341686
  chr13:20979799-20980305
  hypo

SEQ ID NO: 366208 - DNA, 142 bp, Homo sapiens; identical to SEQ ID NO: 351449
  chr13:22243864-22244006
  hypo

SEQ ID NO: 366209 - DNA, 190 bp, Homo sapiens; identical to SEQ ID NO: 341693
  chr13:25026495-25026685
  hypo

SEQ ID NO: 366210 - DNA, 81 bp, Homo sapiens; identical to SEQ ID NO: 203288
  chr13:25746000-25746081
  hypo

SEQ ID NO: 366211 - DNA, 40 bp, Homo sapiens; identical to SEQ ID NO: 341698
  chr13:28152529-28152569
  hypo

SEQ ID NO: 366212 - DNA, 123 bp, Homo sapiens; identical to SEQ ID NO: 341702
  chr13:28745545-28745668
  hypo

SEQ ID NO: 366213 - DNA, 200 bp, Homo sapiens; identical to SEQ ID NO: 345441
  chr13:29292491-29292691
  hypo

SEQ ID NO: 366214 - DNA, 242 bp, Homo sapiens; identical to SEQ ID NO: 345442
  chr13:29293342-29293584
  hypo

SEQ ID NO: 366215 - DNA, 282 bp, Homo sapiens
  chr13:30107122-30107404
  hypo
ccacaaagcacacacaacagaggagatgtgaggacaactgttagccaggtatttgtagtggagctccatgttgataacatcattgcaggagtcaccgacggtgcactggaatctggcagcagcagccagaccacagtgtatgctgagccagaagtgacggtcgactagtgctaagtgcgagaaggcttctagggcctacagaggaatgcacttcacatcctacccaatatacacaggtgtattctatcaaatatatatatccgaataaaaagttcgcaaaac

SEQ ID NO: 366216 - DNA, 100 bp, Homo sapiens; identical to SEQ ID NO: 346075
  chr13:30123381-30123481
  hypo

SEQ ID NO: 366217 - DNA, 309 bp, Homo sapiens; identical to SEQ ID NO: 355041
  chr13:30707770-30708079
  hypo

SEQ ID NO: 366218 - DNA, 52 bp, Homo sapiens; identical to SEQ ID NO: 341713
  chr13:30910073-30910125
  hypo

SEQ ID NO: 366219 - DNA, 242 bp, Homo sapiens; identical to SEQ ID NO: 341714
  chr13:31002082-31002324
  hypo

SEQ ID NO: 366220 - DNA, 165 bp, Homo sapiens; identical to SEQ ID NO: 355043
  chr13:32526656-32526821
  hypo

SEQ ID NO: 366221 - DNA, 116 bp, Homo sapiens; identical to SEQ ID NO: 341718
  chr13:32983242-32983358
  hypo

SEQ ID NO: 366222 - DNA, 177 bp, Homo sapiens; identical to SEQ ID NO: 351461
  chr13:33000891-33001068
  hypo

SEQ ID NO: 366223 - DNA, 204 bp, Homo sapiens; identical to SEQ ID NO: 351462
  chr13:33001228-33001432
  hypo

SEQ ID NO: 366224 - DNA, 85 bp, Homo sapiens; identical to SEQ ID NO: 348601
  chr13:37643604-37643689
  hypo

SEQ ID NO: 366225 - DNA, 199 bp, Homo sapiens; identical to SEQ ID NO: 334756
  chr13:41364049-41364248
  hypo

SEQ ID NO: 366226 - DNA, 91 bp, Homo sapiens; identical to SEQ ID NO: 341725
  chr13:41453098-41453189
  hypo

SEQ ID NO: 366227 - DNA, 479 bp, Homo sapiens; identical to SEQ ID NO: 347264
  chr13:42032017-42032496
  hypo

SEQ ID NO: 366228 - DNA, 109 bp, Homo sapiens; identical to SEQ ID NO: 347265
  chr13:42032649-42032758
  hypo

SEQ ID NO: 366229 - DNA, 112 bp, Homo sapiens
  chr13:43543227-43543339
  hypo
acctagccgtctgggcaccaggtgaaccggtttagctctgttctgctccttccacttctccaggttggccagctcctgctccgcaactaagccaggcgagaaatatcaaatc

SEQ ID NO: 366230 - DNA, 86 bp, Homo sapiens; identical to SEQ ID NO: 341729
  chr13:43620991-43621077
  hypo

SEQ ID NO: 366231 - DNA, 284 bp, Homo sapiens; identical to SEQ ID NO: 334760
  chr13:44544261-44544545
  hypo

SEQ ID NO: 366232 - DNA, 64 bp, Homo sapiens; identical to SEQ ID NO: 341731
  chr13:44981967-44982031
  hypo

SEQ ID NO: 366233 - DNA, 72 bp, Homo sapiens; identical to SEQ ID NO: 341735
  chr13:46948519-46948591
  hypo

SEQ ID NO: 366234 - DNA, 298 bp, Homo sapiens; identical to SEQ ID NO: 341736
  chr13:49879457-49879755
  hypo

SEQ ID NO: 366235 - DNA, 123 bp, Homo sapiens; identical to SEQ ID NO: 341737
  chr13:50027700-50027823
  hypo

SEQ ID NO: 366236 - DNA, 97 bp, Homo sapiens; identical to SEQ ID NO: 341738
  chr13:50050867-50050964
  hypo

SEQ ID NO: 366237 - DNA, 141 bp, Homo sapiens; identical to SEQ ID NO: 341739
  chr13:52335934-52336075
  hypo

SEQ ID NO: 366238 - DNA, 82 bp, Homo sapiens; identical to SEQ ID NO: 341741
  chr13:52493838-52493920
  hypo

SEQ ID NO: 366239 - DNA, 73 bp, Homo sapiens; identical to SEQ ID NO: 341743
  chr13:60267291-60267364
  hypo

SEQ ID NO: 366240 - DNA, 54 bp, Homo sapiens; identical to SEQ ID NO: 341745
  chr13:73324122-73324176
  hypo

SEQ ID NO: 366241 - DNA, 61 bp, Homo sapiens
  chr13:73809567-73809628
  hypo
cgacggtgcggccggtcacaagcatgcgtccctttggcaggcaatcgctcgtctccacgac

SEQ ID NO: 366242 - DNA, 915 bp, Homo sapiens; identical to SEQ ID NO: 351487
  chr13:74707668-74708583
  hypo

SEQ ID NO: 366243 - DNA, 130 bp, Homo sapiens; identical to SEQ ID NO: 341749
  chr13:76352659-76352789
  hypo

SEQ ID NO: 366244 - DNA, 111 bp, Homo sapiens; identical to SEQ ID NO: 360314
  chr13:77459256-77459367
  hypo

SEQ ID NO: 366245 - DNA, 718 bp, Homo sapiens; identical to SEQ ID NO: 347268
  chr13:77459628-77460346
  hypo

SEQ ID NO: 366246 - DNA, 425 bp, Homo sapiens; identical to SEQ ID NO: 360317
  chr13:78272232-78272657
  hypo

SEQ ID NO: 366247 - DNA, 287 bp, Homo sapiens; identical to SEQ ID NO: 203409
  chr13:95201339-95201626
  hypo

SEQ ID NO: 366248 - DNA, 229 bp, Homo sapiens; identical to SEQ ID NO: 203410
  chr13:95201662-95201891
  hypo

SEQ ID NO: 366249 - DNA, 438 bp, Homo sapiens; identical to SEQ ID NO: 341762
  chr13:96085837-96086275
  hypo

SEQ ID NO: 366250 - DNA, 73 bp, Homo sapiens; identical to SEQ ID NO: 355060
  chr13:96409644-96409717
  hypo

SEQ ID NO: 366251 - DNA, 601 bp, Homo sapiens; identical to SEQ ID NO: 334802
  chr13:96705328-96705929
  hypo

SEQ ID NO: 366252 - DNA, 152 bp, Homo sapiens
  chr13:98829232-98829384
  hypo
cgccgcctcctcgcccctcctgtcgccgtgagccgccttctgccagctgtggaggccccggggcctcggtgccacccgcgggggctgagccactgtgtcgccctcgtccccgctgctgctgctctctccgtgctcggggtcgcaggccgggc

SEQ ID NO: 366253 - DNA, 351 bp, Homo sapiens; identical to SEQ ID NO: 348609
  chr13:98869699-98870050
  hypo

SEQ ID NO: 366254 - DNA, 220 bp, Homo sapiens; identical to SEQ ID NO: 348610
  chr13:98870098-98870318
  hypo

SEQ ID NO: 366255 - DNA, 234 bp, Homo sapiens; identical to SEQ ID NO: 355064
  chr13:99034903-99035137
  hypo

SEQ ID NO: 366256 - DNA, 355 bp, Homo sapiens; identical to SEQ ID NO: 355065
  chr13:99104223-99104578
  hypo

SEQ ID NO: 366257 - DNA, 82 bp, Homo sapiens; identical to SEQ ID NO: 341769
  chr13:99115936-99116018
  hypo

SEQ ID NO: 366258 - DNA, 97 bp, Homo sapiens; identical to SEQ ID NO: 355067
  chr13:99851706-99851803
  hypo

SEQ ID NO: 366259 - DNA, 105 bp, Homo sapiens; identical to SEQ ID NO: 341771
  chr13:100068654-100068759
  hypo

SEQ ID NO: 366260 - DNA, 55 bp, Homo sapiens; identical to SEQ ID NO: 360330
  chr13:100620289-100620344
  hypo

SEQ ID NO: 366261 - DNA, 111 bp, Homo sapiens; identical to SEQ ID NO: 289869
  chr13:100620374-100620485
  hypo

SEQ ID NO: 366262 - DNA, 105 bp, Homo sapiens; identical to SEQ ID NO: 203424
  chr13:100620515-100620620
  hypo

SEQ ID NO: 366263 - DNA, 367 bp, Homo sapiens; identical to SEQ ID NO: 351497
  chr13:100632514-100632881
  hypo

SEQ ID NO: 366264 - DNA, 146 bp, Homo sapiens; identical to SEQ ID NO: 360339
  chr13:100634131-100634277
  hypo

SEQ ID NO: 366265 - DNA, 219 bp, Homo sapiens; identical to SEQ ID NO: 341777
  chr13:101194483-101194702
  hypo

SEQ ID NO: 366266 - DNA, 126 bp, Homo sapiens; identical to SEQ ID NO: 351499
  chr13:103046539-103046665
  hypo

SEQ ID NO: 366267 - DNA, 617 bp, Homo sapiens; identical to SEQ ID NO: 341781
  chr13:106912373-106912990
  hypo

SEQ ID NO: 366268 - DNA, 58 bp, Homo sapiens; identical to SEQ ID NO: 203450
  chr13:108519564-108519622
  hypo

SEQ ID NO: 366269 - DNA, 165 bp, Homo sapiens; identical to SEQ ID NO: 203451
  chr13:108519932-108520097
  hypo

SEQ ID NO: 366270 - DNA, 67 bp, Homo sapiens; identical to SEQ ID NO: 203452
  chr13:108520309-108520376
  hypo

SEQ ID NO: 366271 - DNA, 181 bp, Homo sapiens; identical to SEQ ID NO: 341786
  chr13:110008382-110008563
  hypo

SEQ ID NO: 366272 - DNA, 95 bp, Homo sapiens; identical to SEQ ID NO: 355075
  chr13:110486576-110486671
  hypo

SEQ ID NO: 366273 - DNA, 400 bp, Homo sapiens; identical to SEQ ID NO: 355076
  chr13:111277855-111278255
  hypo

SEQ ID NO: 366274 - DNA, 278 bp, Homo sapiens; identical to SEQ ID NO: 355077
  chr13:111278426-111278704
  hypo

SEQ ID NO: 366275 - DNA, 139 bp, Homo sapiens
  chr13:111289028-111289167
  hypo
cggtggaggcctcgctcggtgttgccctgtatggttgagctgtggtttaaggtgaactctggagtgtgggctgcaggtgagggctccgtccctgggagctggtgggaggagctggaggctggcgccgccctgctcagag

SEQ ID NO: 366276 - DNA, 269 bp, Homo sapiens; identical to SEQ ID NO: 355078
  chr13:111330283-111330552
  hypo

SEQ ID NO: 366277 - DNA, 37 bp, Homo sapiens; identical to SEQ ID NO: 215584
  chr13:111363843-111363880
  hypo

SEQ ID NO: 366278 - DNA, 95 bp, Homo sapiens
  chr13:111978023-111978118
  hypo
cgtgcaggaaaataacggtgggtgtggagggaaaatgggacaccggaggaggcgcgggaggactgccgggattcgacggctgggcggtcagatgc

SEQ ID NO: 366279 - DNA, 195 bp, Homo sapiens; identical to SEQ ID NO: 341798
  chr13:112022971-112023166
  hypo

SEQ ID NO: 366280 - DNA, 53 bp, Homo sapiens; identical to SEQ ID NO: 355081
  chr13:112690683-112690736
  hypo

SEQ ID NO: 366281 - DNA, 204 bp, Homo sapiens; identical to SEQ ID NO: 341800
  chr13:112691506-112691710
  hypo

SEQ ID NO: 366282 - DNA, 193 bp, Homo sapiens; identical to SEQ ID NO: 341805
  chr13:113233687-113233880
  hypo

SEQ ID NO: 366283 - DNA, 123 bp, Homo sapiens; identical to SEQ ID NO: 341806
  chr13:113244578-113244701
  hypo

SEQ ID NO: 366284 - DNA, 191 bp, Homo sapiens; identical to SEQ ID NO: 341807
  chr13:113255726-113255917
  hypo

SEQ ID NO: 366285 - DNA, 134 bp, Homo sapiens; identical to SEQ ID NO: 341808
  chr13:113274734-113274868
  hypo

SEQ ID NO: 366286 - DNA, 34 bp, Homo sapiens
  chr13:113350364-113350398
  hypo
cgtctcggctgacggctgcgtggccttggcaagt

SEQ ID NO: 366287 - DNA, 647 bp, Homo sapiens
  chr13:113350643-113351290
  hypo
gtggagagtgggtgaccttgccctgctctcccggggagagcggtggtcactggtgggaacgcccctgccacgcccagcagcctttctgcctctgcgcttgcctcctccggttggagcgagtgacccgttctgccgaagtccagtcccgtgtgtgctgcggccccgtctctctccctctctgagtgacactgtctgccctgctgcttgccgtcccgctgttggcaccgctttagaccccatatttcccagcggtcaccgtgctcatttttggcttccagctaccgtttttcttaggttaccccgcgtagctggcccgtccttccttctcctgtctcttctgtgcctaccgcggggggttcccttaccaaggtctccatcacccccaggcccacctccctcgggcccctctctgcccttgccctccacctcagcgactccgtggggcttttgtgatcccagctgcagttagcgagcgcccctgtgtgctcagagacacgccagtgagccgggaaggacagagacccaagtcccatccctctggggcccccttggaatgggggaggcgaacaggaaaccaccacagtgagtgttggggtgccccgcaggcgacggtgctgagaaaaagagagtggggttgggggcagtgc

SEQ ID NO: 366288 - DNA, 137 bp, Homo sapiens; identical to SEQ ID NO: 341811
  chr13:113369414-113369551
  hypo

SEQ ID NO: 366289 - DNA, 251 bp, Homo sapiens; identical to SEQ ID NO: 341812
  chr13:113379254-113379505
  hypo

SEQ ID NO: 366290 - DNA, 318 bp, Homo sapiens
  chr13:113383516-113383834
  hypo
cgtctggttggcggtcagctcatttatgattgagcctgaccttatgacaggccacctcgttaacgattggatgttgtttttatcactctttactacgtttgctttcccacccctgctgtttccatgggtttatccgactctgcccactgaggcagcacagtcccctcgccttagcattgcgggcccagagtatctaacgcgtccgagtgcgaacagtgtcagaaggcactgaggcagcgcggttcccacctcggcattgcaggcccagagtatctaacgcgtctgcgtgtgaacagtgtcggaaggcactgaggcagc

SEQ ID NO: 366291 - DNA, 233 bp, Homo sapiens
  chr13:113400167-113400400
  hypo
cgtgcagcggaactccagaaattctccgtcttgcaaaactcagcctctgggccgttaaactaggtgtccccacctcccctcccccaggccctggtgaccaccgttctgctttctctgtctgtgattttgaccactttagatacgtcatttcagtggactcatcctgtgtcgttttgtggcggaatcacgttctgttgtgtgtatacaccacgtttttcttgtccgttcacctg

SEQ ID NO: 366292 - DNA, 101 bp, Homo sapiens
  chr13:113400733-113400834
  hypo
ccggctccccgcgtcctccccgggtaactggggctctggttccccacgtcctcaccggcacttggcactgtctagtgttttggtagcagccatcctgctcc

SEQ ID NO: 366293 - DNA, 91 bp, Homo sapiens; identical to SEQ ID NO: 341815
  chr13:113413685-113413776
  hypo

SEQ ID NO: 366294 - DNA, 133 bp, Homo sapiens; identical to SEQ ID NO: 355085
  chr13:113424750-113424883
  hypo

SEQ ID NO: 366295 - DNA, 68 bp, Homo sapiens; identical to SEQ ID NO: 355086
  chr13:113424935-113425003
  hypo

SEQ ID NO: 366296 - DNA, 183 bp, Homo sapiens; identical to SEQ ID NO: 341817
  chr13:113461159-113461342
  hypo

SEQ ID NO: 366297 - DNA, 306 bp, Homo sapiens; identical to SEQ ID NO: 341818
  chr13:113477621-113477927
  hypo

SEQ ID NO: 366298 - DNA, 535 bp, Homo sapiens; identical to SEQ ID NO: 341819
  chr13:113497181-113497716
  hypo

SEQ ID NO: 366299 - DNA, 162 bp, Homo sapiens; identical to SEQ ID NO: 341820
  chr13:113507123-113507285
  hypo

SEQ ID NO: 366300 - DNA, 146 bp, Homo sapiens; identical to SEQ ID NO: 355089
  chr13:113508784-113508930
  hypo

SEQ ID NO: 366301 - DNA, 319 bp, Homo sapiens; identical to SEQ ID NO: 341824
  chr13:113627865-113628184
  hypo

SEQ ID NO: 366302 - DNA, 288 bp, Homo sapiens
  chr13:113667314-113667602
  hypo
cggacggtgcccccacggtctgtgaggcaggcaggggattgaggacagtgcctcctggtttcctctcaggtcacagtcgctcctggtgagagagaaaaacttaccgtaaaatctgaacatccaactgcgcagtctaggctgccgtcggctgcaccagacacacattccagagaggtgtgcaccagtggaagtcaccttgccaggagcatgagatagtatttcatgctttactgattgactgtttctgtctttctcccacaaaagaagccatcgccgagacgtggttgc

SEQ ID NO: 366303 - DNA, 241 bp, Homo sapiens; identical to SEQ ID NO: 341827
  chr13:113796043-113796284
  hypo

SEQ ID NO: 366304 - DNA, 177 bp, Homo sapiens; identical to SEQ ID NO: 348613
  chr13:113797753-113797930
  hypo

SEQ ID NO: 366305 - DNA, 112 bp, Homo sapiens; identical to SEQ ID NO: 348614
  chr13:113797960-113798072
  hypo

SEQ ID NO: 366306 - DNA, 120 bp, Homo sapiens
  chr13:113825842-113825962
  hypo
cgtttgagcattatgtccccttgaaaatcagactgtaaagaactgacgattgttcatgatttcagattttaacagaacgagccaagacccgctgatgatcaagataacgcacgtccatgt

SEQ ID NO: 366307 - DNA, 173 bp, Homo sapiens
  chr13:113825992-113826165
  hypo
gaatgacctgtcactgctggagctggagtggcccatccagtgcccaggtgcggggctccccgtgtgcacccctgagaaagacttcgctgagcacctcctcatcccacgcaccaggggcctcctcagcggctgggcacgcaatggcactgacctgggcaactcgctgaccacgc

SEQ ID NO: 366308 - DNA, 93 bp, Homo sapiens; identical to SEQ ID NO: 341830
  chr13:113887577-113887670
  hypo

SEQ ID NO: 366309 - DNA, 51 bp, Homo sapiens
  chr13:113984308-113984359
  hypo
cgggtgcgtgcatgggagcccaggtgcgtacatggaaacccaggtgcctgc

SEQ ID NO: 366310 - DNA, 86 bp, Homo sapiens
  chr13:113984409-113984495
  hypo
gggtgtgtgcatggaaacccgggtgtgtgcatggaaacccaggagtgtgcatggaaactcaggtgcgtgcatgggagcccaggtgc

SEQ ID NO: 366311 - DNA, 44 bp, Homo sapiens
  chr13:113985425-113985469
  hypo
cgggtgtgtgcacgaaagcctaggtgtgtgcatgggaacccggg

SEQ ID NO: 366312 - DNA, 228 bp, Homo sapiens; identical to SEQ ID NO: 203467
  chr13:114017991-114018219
  hypo

SEQ ID NO: 366313 - DNA, 279 bp, Homo sapiens
  chr13:114055661-114055940
  hypo
cgtgtgcttcgtgagagaggggaccctgtcctcctagcaggggtccagcggcaccacagcaagacttctgtggccaagtacacgccatgctcagctctgcccccacccgcacccccggaccatcctgtgtgcagctgggctgccccgggacccacacgcgcgaggggcacccggtgctcaggagcctccacacacagcagctcgcacttagaacccacacgccaagcagaaacccctcgaagcgggctgggagcacggacccctgatttatagaggagg

SEQ ID NO: 366314 - DNA, 357 bp, Homo sapiens; identical to SEQ ID NO: 317653
  chr13:114056151-114056508
  hypo

SEQ ID NO: 366315 - DNA, 32 bp, Homo sapiens
  chr13:114056544-114056576
  hypo
accgagtggcctgggacgatggatcgcgacac

SEQ ID NO: 366316 - DNA, 163 bp, Homo sapiens; identical to SEQ ID NO: 355095
  chr13:114123291-114123454
  hypo

SEQ ID NO: 366317 - DNA, 38 bp, Homo sapiens; identical to SEQ ID NO: 346080
  chr13:114188365-114188403
  hypo

SEQ ID NO: 366318 - DNA, 46 bp, Homo sapiens; identical to SEQ ID NO: 348616
  chr13:114189691-114189737
  hypo

SEQ ID NO: 366319 - DNA, 303 bp, Homo sapiens; identical to SEQ ID NO: 215680
  chr13:114189809-114190112
  hypo

SEQ ID NO: 366320 - DNA, 278 bp, Homo sapiens; identical to SEQ ID NO: 348618
  chr13:114190142-114190420
  hypo

SEQ ID NO: 366321 - DNA, 189 bp, Homo sapiens
  chr13:114193080-114193269
  hypo
cggtgtcagccgtgcgtcatccggaaggctgccataagcctgcgtttcgcagagctgcgctgaggctcccgtgtcgcggccgtccggccggcgcgctgatgtggctgcaaacctgggtatcagatcagccgccgtggacacgccgatgcttctcgctggcttcgtgccctcccggggctgttgcttgtc

SEQ ID NO: 366322 - DNA, 161 bp, Homo sapiens; identical to SEQ ID NO: 346081
  chr13:114271763-114271924
  hypo

SEQ ID NO: 366323 - DNA, 932 bp, Homo sapiens
  chr13:114283923-114284855
  hypo
cgactgggctaacatgcgtgatctgagcacgtgtaaggtaggctggctaagctgtgatgtgtggtaggagaggtggatgacgtgcatttcgacttagggtattttcagctcatgcgggtttatcgggatgttccttgtaagttcctcgttgtaagtcagttcctcgttgtaagtccactctttgtgagtaggtttgctcctgcctggaggacagcggcacggtgacggcatctgttttggggccaagatccagtgccttgcgtggtcctgggattcctggggaagggagtggacccatgaggtgggttagaatcgtgtgtgggattctccagccccctgtacctgtgcgtgtggtatgcgcggagccagccagcactgcctggcgtggagctggcgggttctcagtctgacatcaactcccggagaatggcatctgctgaactcaacgtaggaagccgtgcggggccagcgcgctctcaggcagcctgagtggcagggtccttttgtcagctgtttggatctcccacgtggcccagtgccccagcagcacacacacacacacacacacacacacgcgtattgaacaaaacaagtttcacaggacatttatccacgcccaggagatttatcttttgtatggcttcattttgcagaaaattcacttgtttgatttcatggcctggtgatccacagaaggccgcactctgatgagtctctgatcatcggagagatgagtgtcaatgaaaagatcagtccttgaaatgtttttcttctccggagctgacaggtgatctggcctagggataattggaaagtgtccccgtcagctgctcccagggccaccgcaggtgatgcatttatccccgtaagaaggggagctgggggggcccagcttagagtagctcagggcatcggccacatgaagccccccc

SEQ ID NO: 366324 - DNA, 39 bp, Homo sapiens; identical to SEQ ID NO: 341847
  chr13:114294965-114295004
  hypo

SEQ ID NO: 366325 - DNA, 131 bp, Homo sapiens; identical to SEQ ID NO: 341848
  chr13:114295766-114295897
  hypo

SEQ ID NO: 366326 - DNA, 206 bp, Homo sapiens; identical to SEQ ID NO: 348620
  chr13:114302352-114302558
  hypo

SEQ ID NO: 366327 - DNA, 115 bp, Homo sapiens; identical to SEQ ID NO: 341851
  chr13:114302660-114302775
  hypo

SEQ ID NO: 366328 - DNA, 284 bp, Homo sapiens
  chr13:114303512-114303796
  hypo
cgcgagcaggtccttcagatgtgggcgcttctctggagttcgcacactgacaacaccgttgctccaaaccactttggggatgatttggcagggaactgacgggcaaggtaagcccaaccaggagggtgtccttgagcgaccccgcaggcgtgcccaggacccctgcgcaaaccgtttcacttctcaatcttgagtttgaactccactttcccttcatacgggtcgtggggattgttgaaggtcacgtgctccgccatgaccttgcacacgatggcgacctcagc

SEQ ID NO: 366329 - DNA, 61 bp, Homo sapiens; identical to SEQ ID NO: 355103
  chr13:114502726-114502787
  hypo

SEQ ID NO: 366330 - DNA, 168 bp, Homo sapiens
  chr13:114504658-114504826
  hypo
cggcgtcagcggctgccaggacgtgctgcacctgtaccgcctgctctgggcctctgcagttctgaacgtcctgggcctgttcctgggcatcatcaccgccgccgtcctgggggccttcaaggacatggtgaggccccttggtgggacccccgctgctcactgggagcc

SEQ ID NO: 366331 - DNA, 218 bp, Homo sapiens
  chr13:114537027-114537245
  hypo
cggtgtgacaggtcggtgtgacaggcaccagtgtgacaggtaggtcatgctgtgataggccccggtgtgacaggtcggtgtgacaggcaccagtgtgacaggccccggtgtgacaggtaggtcatgctgtgacaggcaccggtgtgacaggccccggtgtgacaggtcggtgtgacaggcaccggtgtgacaggtcggtcacgttggctccctggcac

SEQ ID NO: 366332 - DNA, 302 bp, Homo sapiens; identical to SEQ ID NO: 347277
  chr13:114565969-114566271
  hypo

SEQ ID NO: 366333 - DNA, 114 bp, Homo sapiens; identical to SEQ ID NO: 347278
  chr13:114566409-114566523
  hypo

SEQ ID NO: 366334 - DNA, 150 bp, Homo sapiens; identical to SEQ ID NO: 355106
  chr13:114616940-114617090
  hypo

SEQ ID NO: 366335 - DNA, 148 bp, Homo sapiens; identical to SEQ ID NO: 341862
  chr13:114617363-114617511
  hypo

SEQ ID NO: 366336 - DNA, 74 bp, Homo sapiens; identical to SEQ ID NO: 341863
  chr13:114747445-114747519
  hypo

SEQ ID NO: 366337 - DNA, 138 bp, Homo sapiens; identical to SEQ ID NO: 348623
  chr13:114748186-114748324
  hypo

SEQ ID NO: 366338 - DNA, 307 bp, Homo sapiens; identical to SEQ ID NO: 317732
  chr13:114751053-114751360
  hypo

SEQ ID NO: 366339 - DNA, 86 bp, Homo sapiens; identical to SEQ ID NO: 355108
  chr13:114769900-114769986
  hypo

SEQ ID NO: 366340 - DNA, 45 bp, Homo sapiens
  chr13:114776257-114776302
  hypo
cgtggggaggagggggccgcgaggggagtagggggctgcgtgacg

SEQ ID NO: 366341 - DNA, 38 bp, Homo sapiens; identical to SEQ ID NO: 360361
  chr13:114776448-114776486
  hypo

SEQ ID NO: 366342 - DNA, 222 bp, Homo sapiens; identical to SEQ ID NO: 360362
  chr13:114776788-114777010
  hypo

SEQ ID NO: 366343 - DNA, 130 bp, Homo sapiens; identical to SEQ ID NO: 341870
  chr13:114777587-114777717
  hypo

SEQ ID NO: 366344 - DNA, 92 bp, Homo sapiens; identical to SEQ ID NO: 346082
  chr13:114807847-114807939
  hypo

SEQ ID NO: 366345 - DNA, 133 bp, Homo sapiens; identical to SEQ ID NO: 341876
  chr13:114887185-114887318
  hypo

SEQ ID NO: 366346 - DNA, 62 bp, Homo sapiens
  chr13:114917508-114917570
  hypo
cgccttgaggaacggcatcgtctgtgctgaagcaggcagcgcccagctgacgactgtcaatg

SEQ ID NO: 366347 - DNA, 96 bp, Homo sapiens
  chr13:114917600-114917696
  hypo
ccatccagggtcctgtccagtgctgtgctaagcacttcacgtggtgacagctagctgcacaccaggcacggtcaggtgcttagcgtttattaagtc

SEQ ID NO: 366348 - DNA, 219 bp, Homo sapiens; identical to SEQ ID NO: 341880
  chr13:115052309-115052528
  hypo

SEQ ID NO: 366349 - DNA, 528 bp, Homo sapiens; identical to SEQ ID NO: 341881
  chr14:21560027-21560555
  hypo

SEQ ID NO: 366350 - DNA, 120 bp, Homo sapiens; identical to SEQ ID NO: 215731
  chr14:21689077-21689197
  hypo

SEQ ID NO: 366351 - DNA, 68 bp, Homo sapiens
  chr14:21943040-21943108
  hypo
cagtttgatttgttttccatcaatgttgaccatacgagctccaaactccacacctgtcggtaaagacc

SEQ ID NO: 366352 - DNA, 91 bp, Homo sapiens; identical to SEQ ID NO: 341885
  chr14:21969884-21969975
  hypo

SEQ ID NO: 366353 - DNA, 237 bp, Homo sapiens; identical to SEQ ID NO: 341886
  chr14:23315027-23315264
  hypo

SEQ ID NO: 366354 - DNA, 38 bp, Homo sapiens; identical to SEQ ID NO: 351521
  chr14:23355352-23355390
  hypo

SEQ ID NO: 366355 - DNA, 53 bp, Homo sapiens; identical to SEQ ID NO: 351522
  chr14:23355484-23355537
  hypo

SEQ ID NO: 366356 - DNA, 78 bp, Homo sapiens; identical to SEQ ID NO: 351523
  chr14:23835314-23835392
  hypo

SEQ ID NO: 366357 - DNA, 97 bp, Homo sapiens
  chr14:23884191-23884288
  hypo
cgcccgtcgcacctggtaggtgagctccttgatgcgccgctcgctcttcctcatgcccttcaccgactctgcgttgcgcttctgctcggcctccagc

SEQ ID NO: 366358 - DNA, 108 bp, Homo sapiens; identical to SEQ ID NO: 360374
  chr14:24550913-24551021
  hypo

SEQ ID NO: 366359 - DNA, 60 bp, Homo sapiens; identical to SEQ ID NO: 290053
  chr14:29236614-29236674
  hypo

SEQ ID NO: 366360 - DNA, 38 bp, Homo sapiens
  chr14:31027396-31027434
  hypo
cgtgagccaccgcgcccggccctcaaactgtatttttg

SEQ ID NO: 366361 - DNA, 55 bp, Homo sapiens; identical to SEQ ID NO: 215754
  chr14:32597657-32597712
  hypo

SEQ ID NO: 366362 - DNA, 438 bp, Homo sapiens; identical to SEQ ID NO: 290092
  chr14:36003004-36003442
  hypo

SEQ ID NO: 366363 - DNA, 313 bp, Homo sapiens; identical to SEQ ID NO: 341900
  chr14:39648102-39648415
  hypo

SEQ ID NO: 366364 - DNA, 201 bp, Homo sapiens; identical to SEQ ID NO: 351548
  chr14:45431382-45431583
  hypo

SEQ ID NO: 366365 - DNA, 36 bp, Homo sapiens; identical to SEQ ID NO: 348627
  chr14:50287178-50287214
  hypo

SEQ ID NO: 366366 - DNA, 50 bp, Homo sapiens; identical to SEQ ID NO: 341904
  chr14:50574258-50574308
  hypo

SEQ ID NO: 366367 - DNA, 711 bp, Homo sapiens; identical to SEQ ID NO: 290161
  chr14:51027134-51027845
  hypo

SEQ ID NO: 366368 - DNA, 104 bp, Homo sapiens; identical to SEQ ID NO: 360427
  chr14:51027881-51027985
  hypo

SEQ ID NO: 366369 - DNA, 459 bp, Homo sapiens; identical to SEQ ID NO: 341906
  chr14:51171654-51172113
  hypo

SEQ ID NO: 366370 - DNA, 224 bp, Homo sapiens; identical to SEQ ID NO: 203569
  chr14:51410345-51410569
  hypo

SEQ ID NO: 366371 - DNA, 293 bp, Homo sapiens; identical to SEQ ID NO: 203570
  chr14:51410740-51411033
  hypo

SEQ ID NO: 366372 - DNA, 223 bp, Homo sapiens; identical to SEQ ID NO: 203572
  chr14:51562012-51562235
  hypo

SEQ ID NO: 366373 - DNA, 64 bp, Homo sapiens; identical to SEQ ID NO: 341909
  chr14:52216051-52216115
  hypo

SEQ ID NO: 366374 - DNA, 85 bp, Homo sapiens
  chr14:53259056-53259141
  hypo
cgggaatactgcttcacgccttacagtgcgcaggacagcgccgcacaacaaagaattacctggcctgaaatgtctggagtgctga

SEQ ID NO: 366375 - DNA, 126 bp, Homo sapiens; identical to SEQ ID NO: 341912
  chr14:55522633-55522759
  hypo

SEQ ID NO: 366376 - DNA, 296 bp, Homo sapiens; identical to SEQ ID NO: 215787
  chr14:55765714-55766010
  hypo

SEQ ID NO: 366377 - DNA, 55 bp, Homo sapiens; identical to SEQ ID NO: 346085
  chr14:55766084-55766139
  hypo

SEQ ID NO: 366378 - DNA, 193 bp, Homo sapiens; identical to SEQ ID NO: 341914
  chr14:55817984-55818177
  hypo

SEQ ID NO: 366379 - DNA, 144 bp, Homo sapiens; identical to SEQ ID NO: 360441
  chr14:57265912-57266056
  hypo

SEQ ID NO: 366380 - DNA, 79 bp, Homo sapiens; identical to SEQ ID NO: 347299
  chr14:60097114-60097193
  hypo

SEQ ID NO: 366381 - DNA, 44 bp, Homo sapiens; identical to SEQ ID NO: 351564
  chr14:60385935-60385979
  hypo

SEQ ID NO: 366382 - DNA, 276 bp, Homo sapiens; identical to SEQ ID NO: 290237
  chr14:60974092-60974368
  hypo

SEQ ID NO: 366383 - DNA, 354 bp, Homo sapiens; identical to SEQ ID NO: 351574
  chr14:61123186-61123540
  hypo

SEQ ID NO: 366384 - DNA, 623 bp, Homo sapiens; identical to SEQ ID NO: 290253
  chr14:61123681-61124304
  hypo

SEQ ID NO: 366385 - DNA, 196 bp, Homo sapiens; identical to SEQ ID NO: 334941
  chr14:62105869-62106065
  hypo

SEQ ID NO: 366386 - DNA, 897 bp, Homo sapiens; identical to SEQ ID NO: 334943
  chr14:62162333-62163230
  hypo

SEQ ID NO: 366387 - DNA, 101 bp, Homo sapiens; identical to SEQ ID NO: 341932
  chr14:63857003-63857104
  hypo

SEQ ID NO: 366388 - DNA, 119 bp, Homo sapiens; identical to SEQ ID NO: 341933
  chr14:64385274-64385393
  hypo

SEQ ID NO: 366389 - DNA, 227 bp, Homo sapiens
  chr14:65207965-65208192
  hypo
cgaggaggaagaagaaatgggaggtgccgcccaggagcctgagagccttctgccaccctctgtgctggaccaggccagcgtcattgcggagcgatttgtcagcagcttctctcggcggagcagcgtggcacaggaggacagcaagtccagtggctttgggagcccgcggctggtcagccggagcagcagcgtgctcagcctggagggcagcgagaagggcctggccc

SEQ ID NO: 366390 - DNA, 291 bp, Homo sapiens
  chr14:65233479-65233770
  hypo
tggagcctcccctgctgtctcgccttcctcctcttgaggcctaaggaagacacagtctctctttagaaacaagcacccctctgaggccagtgcctcctgcgaggcctggcttttcacctgcgcccacagggaggagcaccaaatagctccccctccagtcagccggcagcctggatggtgcttggcaaggagccgcccagcgacttcttcggaaaagccaaggcagattcttcagaagggagccaggttccaggcagaacggcctgtggggccccgtgttcaggtggctcc

SEQ ID NO: 366391 - DNA, 127 bp, Homo sapiens; identical to SEQ ID NO: 341937
  chr14:65236155-65236282
  hypo

SEQ ID NO: 366392 - DNA, 50 bp, Homo sapiens; identical to SEQ ID NO: 355132
  chr14:65239794-65239844
  hypo

SEQ ID NO: 366393 - DNA, 185 bp, Homo sapiens; identical to SEQ ID NO: 341939
  chr14:65271617-65271802
  hypo

SEQ ID NO: 366394 - DNA, 52 bp, Homo sapiens; identical to SEQ ID NO: 341942
  chr14:69070536-69070588
  hypo

SEQ ID NO: 366395 - DNA, 71 bp, Homo sapiens
  chr14:69245863-69245934
  hypo
cgtgggctcttagaagctatgacacctgtaccaatagaaaaatcatccattcagtaggtaagtgcctgctg

SEQ ID NO: 366396 - DNA, 213 bp, Homo sapiens; identical to SEQ ID NO: 334953
  chr14:69259278-69259491
  hypo

SEQ ID NO: 366397 - DNA, 230 bp, Homo sapiens; identical to SEQ ID NO: 355135
  chr14:69278049-69278279
  hypo

SEQ ID NO: 366398 - DNA, 211 bp, Homo sapiens; identical to SEQ ID NO: 341947
  chr14:69354686-69354897
  hypo

SEQ ID NO: 366399 - DNA, 241 bp, Homo sapiens; identical to SEQ ID NO: 341949
  chr14:69666624-69666865
  hypo

SEQ ID NO: 366400 - DNA, 419 bp, Homo sapiens; identical to SEQ ID NO: 355138
  chr14:70236294-70236713
  hypo

SEQ ID NO: 366401 - DNA, 138 bp, Homo sapiens; identical to SEQ ID NO: 348632
  chr14:73146636-73146774
  hypo

SEQ ID NO: 366402 - DNA, 99 bp, Homo sapiens; identical to SEQ ID NO: 348633
  chr14:73147150-73147249
  hypo

SEQ ID NO: 366403 - DNA, 48 bp, Homo sapiens; identical to SEQ ID NO: 355141
  chr14:73167899-73167947
  hypo

SEQ ID NO: 366404 - DNA, 148 bp, Homo sapiens; identical to SEQ ID NO: 355142
  chr14:73238412-73238560
  hypo

SEQ ID NO: 366405 - DNA, 55 bp, Homo sapiens; identical to SEQ ID NO: 360480
  chr14:73358909-73358964
  hypo

SEQ ID NO: 366406 - DNA, 254 bp, Homo sapiens; identical to SEQ ID NO: 290336
  chr14:73359040-73359294
  hypo

SEQ ID NO: 366407 - DNA, 139 bp, Homo sapiens; identical to SEQ ID NO: 360482
  chr14:73359490-73359629
  hypo

SEQ ID NO: 366408 - DNA, 464 bp, Homo sapiens; identical to SEQ ID NO: 334962
  chr14:73359779-73360243
  hypo

SEQ ID NO: 366409 - DNA, 62 bp, Homo sapiens; identical to SEQ ID NO: 341964
  chr14:73390972-73391034
  hypo

SEQ ID NO: 366410 - DNA, 420 bp, Homo sapiens; identical to SEQ ID NO: 341965
  chr14:73391900-73392320
  hypo

SEQ ID NO: 366411 - DNA, 409 bp, Homo sapiens; identical to SEQ ID NO: 360487
  chr14:74100394-74100803
  hypo

SEQ ID NO: 366412 - DNA, 262 bp, Homo sapiens; identical to SEQ ID NO: 341969
  chr14:75567786-75568048
  hypo

SEQ ID NO: 366413 - DNA, 145 bp, Homo sapiens; identical to SEQ ID NO: 355145
  chr14:75749334-75749479
  hypo

SEQ ID NO: 366414 - DNA, 95 bp, Homo sapiens; identical to SEQ ID NO: 341972
  chr14:76446078-76446173
  hypo

SEQ ID NO: 366415 - DNA, 136 bp, Homo sapiens; identical to SEQ ID NO: 360498
  chr14:77591037-77591173
  hypo

SEQ ID NO: 366416 - DNA, 95 bp, Homo sapiens; identical to SEQ ID NO: 360499
  chr14:77591751-77591846
  hypo

SEQ ID NO: 366417 - DNA, 82 bp, Homo sapiens; identical to SEQ ID NO: 290405
  chr14:77965137-77965219
  hypo

SEQ ID NO: 366418 - DNA, 180 bp, Homo sapiens; identical to SEQ ID NO: 290406
  chr14:77965244-77965424
  hypo

SEQ ID NO: 366419 - DNA, 274 bp, Homo sapiens; identical to SEQ ID NO: 341975
  chr14:81879122-81879396
  hypo

SEQ ID NO: 366420 - DNA, 163 bp, Homo sapiens; identical to SEQ ID NO: 290421
  chr14:88458964-88459127
  hypo

SEQ ID NO: 366421 - DNA, 239 bp, Homo sapiens; identical to SEQ ID NO: 290422
  chr14:88459170-88459409
  hypo

SEQ ID NO: 366422 - DNA, 57 bp, Homo sapiens; identical to SEQ ID NO: 351598
  chr14:88459631-88459688
  hypo

SEQ ID NO: 366423 - DNA, 197 bp, Homo sapiens; identical to SEQ ID NO: 351599
  chr14:88789765-88789962
  hypo

SEQ ID NO: 366424 - DNA, 82 bp, Homo sapiens; identical to SEQ ID NO: 341978
  chr14:89291884-89291966
  hypo

SEQ ID NO: 366425 - DNA, 437 bp, Homo sapiens
  chr14:89627946-89628383
  hypo
gtgcacagggccaatcttcaggcttatggcttttggaacattttcttaatttaatagagaacagaattcaatgattagcaacatcactaaaaatttaccccatttcttctccatgagtcactgacacccgatgcgcatgaacagtccaacgtccacctcgtaagatgtcatcgggcttcagggttcagaagcatcgaggactggtggccggccctctgtgctcgccgtgtgacaattccagtggctttcctggcaccatcagatgcctggtgccacaagcttgggtctgctcctagggggacgaggggttcctcctcctcctcaattgctttatgtgccttcactcagtgaacccaatgggatggacaacctgactttttaaacctaagggttgggcctgaacgatgattactttgcccacgtgccttctaggtgcc

SEQ ID NO: 366426 - DNA, 67 bp, Homo sapiens
  chr14:89657793-89657860
  hypo
ttcccttgcagattactgcctctgtgtccgccaaacccaatgactaatgatgggggacaaggggctc

SEQ ID NO: 366427 - DNA, 111 bp, Homo sapiens; identical to SEQ ID NO: 341982
  chr14:89875711-89875822
  hypo

SEQ ID NO: 366428 - DNA, 165 bp, Homo sapiens; identical to SEQ ID NO: 355153
  chr14:89895069-89895234
  hypo

SEQ ID NO: 366429 - DNA, 485 bp, Homo sapiens; identical to SEQ ID NO: 351602
  chr14:90085312-90085797
  hypo

SEQ ID NO: 366430 - DNA, 144 bp, Homo sapiens; identical to SEQ ID NO: 360512
  chr14:90527180-90527324
  hypo

SEQ ID NO: 366431 - DNA, 226 bp, Homo sapiens; identical to SEQ ID NO: 203711
  chr14:90527931-90528157
  hypo

SEQ ID NO: 366432 - DNA, 153 bp, Homo sapiens
  chr14:90754255-90754408
  hypo
cgtgacggcttctcagcattcccgtgatctgacagccaccacccatgcacacagaaacaacattcatactccccagaagcacacccaggcgacagccaccaacccccctcctgagaggcgccgctactttgtgtctcgcttgcctttcaatcc

SEQ ID NO: 366433 - DNA, 382 bp, Homo sapiens; identical to SEQ ID NO: 203714
  chr14:90849476-90849858
  hypo

SEQ ID NO: 366434 - DNA, 53 bp, Homo sapiens; identical to SEQ ID NO: 203715
  chr14:90849897-90849950
  hypo

SEQ ID NO: 366435 - DNA, 136 bp, Homo sapiens; identical to SEQ ID NO: 341990
  chr14:90871545-90871681
  hypo

SEQ ID NO: 366436 - DNA, 97 bp, Homo sapiens
  chr14:91691066-91691163
  hypo
cggagtggcgtctcgggcatcgtgggcatggaggtggatgggctgcccttccacaacacccacgccgagatgatccagaagctggtggacgtcacca

SEQ ID NO: 366437 - DNA, 40 bp, Homo sapiens
  chr14:91731774-91731814
  hypo
cggctggcatagctgcgtacaccttaggacggtcagctcc

SEQ ID NO: 366438 - DNA, 145 bp, Homo sapiens; identical to SEQ ID NO: 341993
  chr14:91750824-91750969
  hypo

SEQ ID NO: 366439 - DNA, 259 bp, Homo sapiens; identical to SEQ ID NO: 341995
  chr14:91757493-91757752
  hypo

SEQ ID NO: 366440 - DNA, 857 bp, Homo sapiens; identical to SEQ ID NO: 355160
  chr14:91805557-91806414
  hypo

SEQ ID NO: 366441 - DNA, 203 bp, Homo sapiens; identical to SEQ ID NO: 355161
  chr14:91808058-91808261
  hypo

SEQ ID NO: 366442 - DNA, 118 bp, Homo sapiens; identical to SEQ ID NO: 290458
  chr14:91883379-91883497
  hypo

SEQ ID NO: 366443 - DNA, 405 bp, Homo sapiens; identical to SEQ ID NO: 351609
  chr14:91883530-91883935
  hypo

SEQ ID NO: 366444 - DNA, 187 bp, Homo sapiens; identical to SEQ ID NO: 203723
  chr14:92980770-92980957
  hypo

SEQ ID NO: 366445 - DNA, 159 bp, Homo sapiens; identical to SEQ ID NO: 318289
  chr14:93154728-93154887
  hypo

SEQ ID NO: 366446 - DNA, 108 bp, Homo sapiens; identical to SEQ ID NO: 342003
  chr14:93415131-93415239
  hypo

SEQ ID NO: 366447 - DNA, 328 bp, Homo sapiens; identical to SEQ ID NO: 355166
  chr14:93425284-93425612
  hypo

SEQ ID NO: 366448 - DNA, 236 bp, Homo sapiens; identical to SEQ ID NO: 355167
  chr14:93706483-93706719
  hypo

SEQ ID NO: 366449 - DNA, 329 bp, Homo sapiens; identical to SEQ ID NO: 342007
  chr14:94209931-94210260
  hypo

SEQ ID NO: 366450 - DNA, 206 bp, Homo sapiens; identical to SEQ ID NO: 342009
  chr14:94404864-94405070
  hypo

SEQ ID NO: 366451 - DNA, 182 bp, Homo sapiens; identical to SEQ ID NO: 345461
  chr14:94406037-94406219
  hypo

SEQ ID NO: 366452 - DNA, 70 bp, Homo sapiens; identical to SEQ ID NO: 355170
  chr14:94603670-94603740
  hypo

SEQ ID NO: 366453 - DNA, 209 bp, Homo sapiens; identical to SEQ ID NO: 290501
  chr14:96505691-96505900
  hypo

SEQ ID NO: 366454 - DNA, 290 bp, Homo sapiens; identical to SEQ ID NO: 290502
  chr14:96506053-96506343
  hypo

SEQ ID NO: 366455 - DNA, 123 bp, Homo sapiens; identical to SEQ ID NO: 355173
  chr14:99849764-99849887
  hypo

SEQ ID NO: 366456 - DNA, 286 bp, Homo sapiens; identical to SEQ ID NO: 355174
  chr14:99850063-99850349
  hypo

SEQ ID NO: 366457 - DNA, 132 bp, Homo sapiens; identical to SEQ ID NO: 342019
  chr14:99902515-99902647
  hypo

SEQ ID NO: 366458 - DNA, 63 bp, Homo sapiens; identical to SEQ ID NO: 360543
  chr14:100613205-100613268
  hypo

SEQ ID NO: 366459 - DNA, 128 bp, Homo sapiens
  chr14:100644271-100644399
  hypo
cgcggttccccccccgggagcattgatacccccgcccctgggagcattgatcctcctgcccctgcagcccggagcccggagcagcccacgttgctcccgctgcggcccagcccagcccagcccagccc

SEQ ID NO: 366460 - DNA, 243 bp, Homo sapiens; identical to SEQ ID NO: 342026
  chr14:100747027-100747270
  hypo

SEQ ID NO: 366461 - DNA, 208 bp, Homo sapiens; identical to SEQ ID NO: 342027
  chr14:100748335-100748543
  hypo

SEQ ID NO: 366462 - DNA, 205 bp, Homo sapiens; identical to SEQ ID NO: 215982
  chr14:100749240-100749445
  hypo

SEQ ID NO: 366463 - DNA, 137 bp, Homo sapiens; identical to SEQ ID NO: 355178
  chr14:100749475-100749612
  hypo

SEQ ID NO: 366464 - DNA, 150 bp, Homo sapiens; identical to SEQ ID NO: 342032
  chr14:101134041-101134191
  hypo

SEQ ID NO: 366465 - DNA, 469 bp, Homo sapiens
  chr14:101200752-101201221
  hypo
gcagcacacccaggtgagctacgagtgtctgtgcaagcccgagttcacaggtctcacctgtgtcaagaagcgcgcgctgagcccccagcaggtcacccgtctgcccagcggctatgggctggcctaccgcctgacccctggggtgcacgagctgccggtgcagcagccggagcaccgcatcctgaaggtgtccatgaaagagctcaacaagaaaacccctctcctcaccgagggccaggccatctgcttcaccatcctgggcgtgctcaccagcctggtggtgctgggcactgtgggtatcgtcttcctcaacaagtgcgagacctgggtgtccaacctgcgctacaaccacatgctgcggaagaagaagaacctgctgcttcagtacaacagcggggaggacctggccgtcaacatcatcttccccgagaagatcgacatgaccaccttcagcaaggaggccggcgac

SEQ ID NO: 366466 - DNA, 419 bp, Homo sapiens
  chr14:101349283-101349702
  hypo
cgcggtggagggacactcgtaaaaggtctcgctgtgatcactgtctccagcctgctgaagctcagagggctctgattcagaaagatcatcggatccgtctgagcttggctggtcggaagtctcatcatctgcttccttcgggttaaacacgtcggccaggtctgagtatgggtgtggcagtccgggtagcaggctcatgccgtgcctctctagggcaatgcatggcgggggcgggcggaagcagttcttcaggcagtagggagagtggaaggtgcagcggcctttgatccagtcgacttcgggggcgtggactcggagccagcggatgcctaggaccacagagaagttcggtgaaggtacgatgtcaaattcgatggactcctggtggttctggtggatacacaccaggggctccgtgt

SEQ ID NO: 366467 - DNA, 246 bp, Homo sapiens
  chr14:101349750-101349996
  hypo
ccggctgtgggtacggcttctcgtagagctcgacgtagtgctcttgggcgaacttctcatccatgaagttgccgtcagctcccgaatccaccagggcctggaccgcgacgctgtggtaggggttcactctcaccatgagcagcaggaagaggtgggcgcgattgatgtccggatggacttcgctgggcaaccagctgctgaccatccacctctctggagcaggtgagtcgatccaggtcaggttcc

SEQ ID NO: 366468 - DNA, 415 bp, Homo sapiens; identical to SEQ ID NO: 342036
  chr14:101489771-101490186
  hypo

SEQ ID NO: 366469 - DNA, 183 bp, Homo sapiens; identical to SEQ ID NO: 342037
  chr14:101492091-101492274
  hypo

SEQ ID NO: 366470 - DNA, 204 bp, Homo sapiens; identical to SEQ ID NO: 342038
  chr14:101970419-101970623
  hypo

SEQ ID NO: 366471 - DNA, 247 bp, Homo sapiens; identical to SEQ ID NO: 342040
  chr14:102230139-102230386
  hypo

SEQ ID NO: 366472 - DNA, 245 bp, Homo sapiens; identical to SEQ ID NO: 355181
  chr14:102355922-102356167
  hypo

SEQ ID NO: 366473 - DNA, 188 bp, Homo sapiens; identical to SEQ ID NO: 355182
  chr14:102356197-102356385
  hypo

SEQ ID NO: 366474 - DNA, 265 bp, Homo sapiens
  chr14:102467362-102467627
  hypo
tatgagtttgttcagaggcttctgaaaggttacatgaaggtaggtggccagtatcgcacggtgatgagtgtccattagaaacgcacctgcacagatcactttgtttactttctccacagataaatatgctggtgattgaactgaaatccgaagcacttaaagaccgccattggaaacagctcatgaaaaggcttcacgttaattgggttgtttctgagctaacccttggccaaatctgggatgttgacttgcagaaaaatgaagc

SEQ ID NO: 366475 - DNA, 116 bp, Homo sapiens; identical to SEQ ID NO: 355183
  chr14:102493497-102493613
  hypo

SEQ ID NO: 366476 - DNA, 348 bp, Homo sapiens; identical to SEQ ID NO: 355184
  chr14:102493651-102493999
  hypo

SEQ ID NO: 366477 - DNA, 492 bp, Homo sapiens; identical to SEQ ID NO: 355185
  chr14:102500550-102501042
  hypo

SEQ ID NO: 366478 - DNA, 362 bp, Homo sapiens
  chr14:102523351-102523713
  hypo
cgcacaggtgcacacgcgcacacacatgctgcacagttgcacacacgtgcagacacgctgcgcagatgcacacgtgcacacacatgcacacccacacgctgcagttgcacacacgtgcacacgcacacccacatgcacagttgcaaacgtgcacacactgcagatgcacacacgtgcacacacatgcacagccacaagctgcatagttgcacacgtgcacacgctgcgcagatgcacacacgtgcacacatgctgcacagttgcacacacgtgcacactacacagatgcacacacgctgcacagatgcacacacgtgcacacatgcacacccacacgctgcacagttgcacacacacgctgc

SEQ ID NO: 366479 - DNA, 119 bp, Homo sapiens; identical to SEQ ID NO: 355186
  chr14:102691860-102691979
  hypo

SEQ ID NO: 366480 - DNA, 604 bp, Homo sapiens; identical to SEQ ID NO: 342054
  chr14:102939202-102939806
  hypo

SEQ ID NO: 366481 - DNA, 466 bp, Homo sapiens; identical to SEQ ID NO: 355188
  chr14:102973268-102973734
  hypo

SEQ ID NO: 366482 - DNA, 377 bp, Homo sapiens; identical to SEQ ID NO: 351623
  chr14:102975682-102976059
  hypo

SEQ ID NO: 366483 - DNA, 367 bp, Homo sapiens; identical to SEQ ID NO: 342059
  chr14:103369461-103369828
  hypo

SEQ ID NO: 366484 - DNA, 365 bp, Homo sapiens; identical to SEQ ID NO: 342061
  chr14:103409913-103410278
  hypo

SEQ ID NO: 366485 - DNA, 279 bp, Homo sapiens; identical to SEQ ID NO: 342063
  chr14:103423623-103423902
  hypo

SEQ ID NO: 366486 - DNA, 142 bp, Homo sapiens; identical to SEQ ID NO: 335034
  chr14:103430237-103430379
  hypo

SEQ ID NO: 366487 - DNA, 241 bp, Homo sapiens; identical to SEQ ID NO: 342065
  chr14:103433137-103433378
  hypo

SEQ ID NO: 366488 - DNA, 239 bp, Homo sapiens; identical to SEQ ID NO: 342066
  chr14:103433869-103434108
  hypo

SEQ ID NO: 366489 - DNA, 36 bp, Homo sapiens
  chr14:103977769-103977805
  hypo
cgggacgctcacagcccgcccccaggacctgtgggg

SEQ ID NO: 366490 - DNA, 87 bp, Homo sapiens; identical to SEQ ID NO: 216051
  chr14:103977835-103977922
  hypo

SEQ ID NO: 366491 - DNA, 147 bp, Homo sapiens
  chr14:103986352-103986499
  hypo
cgcccaccgcagccgtgtccacaccgcctggggagacagcaagtcagggcggaggaaacagggctgcccaaaggccacgggaagccgcagcacctgccctgctcacctgtgcctcgcttctgaagtcgcagccgcttaagcacctcc

SEQ ID NO: 366492 - DNA, 268 bp, Homo sapiens; identical to SEQ ID NO: 360553
  chr14:103988427-103988695
  hypo

SEQ ID NO: 366493 - DNA, 418 bp, Homo sapiens; identical to SEQ ID NO: 290585
  chr14:103988736-103989154
  hypo

SEQ ID NO: 366494 - DNA, 138 bp, Homo sapiens; identical to SEQ ID NO: 355194
  chr14:104000003-104000141
  hypo

SEQ ID NO: 366495 - DNA, 734 bp, Homo sapiens; identical to SEQ ID NO: 355195
  chr14:104000403-104001137
  hypo

SEQ ID NO: 366496 - DNA, 993 bp, Homo sapiens; identical to SEQ ID NO: 355196
  chr14:104047919-104048912
  hypo

SEQ ID NO: 366497 - DNA, 127 bp, Homo sapiens; identical to SEQ ID NO: 346089
  chr14:104048982-104049109
  hypo

SEQ ID NO: 366498 - DNA, 78 bp, Homo sapiens; identical to SEQ ID NO: 342075
  chr14:104158805-104158883
  hypo

SEQ ID NO: 366499 - DNA, 120 bp, Homo sapiens; identical to SEQ ID NO: 355198
  chr14:104159197-104159317
  hypo

SEQ ID NO: 366500 - DNA, 106 bp, Homo sapiens; identical to SEQ ID NO: 355199
  chr14:104159437-104159543
  hypo

SEQ ID NO: 366501 - DNA, 129 bp, Homo sapiens; identical to SEQ ID NO: 355200
  chr14:104159892-104160021
  hypo

SEQ ID NO: 366502 - DNA, 123 bp, Homo sapiens; identical to SEQ ID NO: 355201
  chr14:104160134-104160257
  hypo

SEQ ID NO: 366503 - DNA, 280 bp, Homo sapiens; identical to SEQ ID NO: 355202
  chr14:104194172-104194452
  hypo

SEQ ID NO: 366504 - DNA, 204 bp, Homo sapiens; identical to SEQ ID NO: 216067
  chr14:104194491-104194695
  hypo

SEQ ID NO: 366505 - DNA, 90 bp, Homo sapiens; identical to SEQ ID NO: 355204
  chr14:104194750-104194840
  hypo

SEQ ID NO: 366506 - DNA, 335 bp, Homo sapiens; identical to SEQ ID NO: 348640
  chr14:104202370-104202705
  hypo

SEQ ID NO: 366507 - DNA, 236 bp, Homo sapiens; identical to SEQ ID NO: 216079
  chr14:104618440-104618676
  hypo

SEQ ID NO: 366508 - DNA, 100 bp, Homo sapiens; identical to SEQ ID NO: 348642
  chr14:104623761-104623861
  hypo

SEQ ID NO: 366509 - DNA, 137 bp, Homo sapiens; identical to SEQ ID NO: 355208
  chr14:104640046-104640183
  hypo

SEQ ID NO: 366510 - DNA, 101 bp, Homo sapiens; identical to SEQ ID NO: 355209
  chr14:104640582-104640683
  hypo

SEQ ID NO: 366511 - DNA, 139 bp, Homo sapiens; identical to SEQ ID NO: 346091
  chr14:104641166-104641305
  hypo

SEQ ID NO: 366512 - DNA, 211 bp, Homo sapiens; identical to SEQ ID NO: 318617
  chr14:104642243-104642454
  hypo

SEQ ID NO: 366513 - DNA, 119 bp, Homo sapiens
  chr14:104642742-104642861
  hypo
ccactccagcctcccccggaaaccgaggactgcctctgccaccacccgtgtgggctgtgctcgcctgggccagagcccacctggccgtggaggcctgtttgaggacccatggctgctcc

SEQ ID NO: 366514 - DNA, 79 bp, Homo sapiens; identical to SEQ ID NO: 355211
  chr14:104645047-104645126
  hypo

SEQ ID NO: 366515 - DNA, 163 bp, Homo sapiens; identical to SEQ ID NO: 346092
  chr14:104645553-104645716
  hypo

SEQ ID NO: 366516 - DNA, 563 bp, Homo sapiens; identical to SEQ ID NO: 342094
  chr14:104746303-104746866
  hypo

SEQ ID NO: 366517 - DNA, 198 bp, Homo sapiens; identical to SEQ ID NO: 345462
  chr14:105189960-105190158
  hypo

SEQ ID NO: 366518 - DNA, 151 bp, Homo sapiens; identical to SEQ ID NO: 351633
  chr14:105196121-105196272
  hypo

SEQ ID NO: 366519 - DNA, 35 bp, Homo sapiens; identical to SEQ ID NO: 342099
  chr14:105214103-105214138
  hypo

SEQ ID NO: 366520 - DNA, 167 bp, Homo sapiens; identical to SEQ ID NO: 348646
  chr14:105240770-105240937
  hypo

SEQ ID NO: 366521 - DNA, 132 bp, Homo sapiens; identical to SEQ ID NO: 318662
  chr14:105241177-105241309
  hypo

SEQ ID NO: 366522 - DNA, 227 bp, Homo sapiens; identical to SEQ ID NO: 348648
  chr14:105241428-105241655
  hypo

SEQ ID NO: 366523 - DNA, 127 bp, Homo sapiens; identical to SEQ ID NO: 342101
  chr14:105244222-105244349
  hypo

SEQ ID NO: 366524 - DNA, 64 bp, Homo sapiens; identical to SEQ ID NO: 355219
  chr14:105268589-105268653
  hypo

SEQ ID NO: 366525 - DNA, 455 bp, Homo sapiens; identical to SEQ ID NO: 351636
  chr14:105330980-105331435
  hypo

SEQ ID NO: 366526 - DNA, 85 bp, Homo sapiens; identical to SEQ ID NO: 355221
  chr14:105472075-105472160
  hypo

SEQ ID NO: 366527 - DNA, 640 bp, Homo sapiens; identical to SEQ ID NO: 342110
  chr14:105687735-105688375
  hypo

SEQ ID NO: 366528 - DNA, 421 bp, Homo sapiens; identical to SEQ ID NO: 342111
  chr14:105689523-105689944
  hypo

SEQ ID NO: 366529 - DNA, 37 bp, Homo sapiens
  chr14:105723707-105723744
  hypo
cgcaagaacctcgcaagcaatcagatggttaggacgc

SEQ ID NO: 366530 - DNA, 250 bp, Homo sapiens
  chr14:105723873-105724123
  hypo
cccccaggacggctgggacgtgagcggtgaggcccgtgaacaaaggtgcatctgaaggcaggcagtcccagagggccgagacaacgggcaggaccgactgcagcacagccaacagcctcacaagaggcactatgagaagaccggcggcaggggtggggccagtgacatcaaaggaaaccaaaggaaagcagtaagaactacctggggaaacgcccgtgacagccaacacacaccaacgggaaaagtgaac

SEQ ID NO: 366531 - DNA, 396 bp, Homo sapiens; identical to SEQ ID NO: 342114
  chr14:105728110-105728506
  hypo

SEQ ID NO: 366532 - DNA, 193 bp, Homo sapiens
  chr15:22876766-22876959
  hypo
cgcacgagcaccacagcctctggcatggctaaaataaaaagaccggcatgtcaaataattttcaaggatttagagcaactggaaattacaagatggtacaagcacttggggaaactatatggcattttcttacaaaggttaacatgtatctacccctgagaagcagcagttcacccttaggtatttatccaag

SEQ ID NO: 366533 - DNA, 130 bp, Homo sapiens
  chr15:22877052-22877182
  hypo
tggatcaacactgaagtatatgcacgcagtggaatgcagttcagctgtgaaaacacagctcatccacataacgacataagagaattccaggaactttatgtcgaaaaaaaagccagacttaaaaggatcc

SEQ ID NO: 366534 - DNA, 418 bp, Homo sapiens; identical to SEQ ID NO: 342118
  chr15:22927774-22928192
  hypo

SEQ ID NO: 366535 - DNA, 203 bp, Homo sapiens; identical to SEQ ID NO: 342119
  chr15:26026151-26026354
  hypo

SEQ ID NO: 366536 - DNA, 144 bp, Homo sapiens; identical to SEQ ID NO: 355226
  chr15:26234718-26234862
  hypo

SEQ ID NO: 366537 - DNA, 363 bp, Homo sapiens; identical to SEQ ID NO: 342121
  chr15:27128193-27128556
  hypo

SEQ ID NO: 366538 - DNA, 115 bp, Homo sapiens; identical to SEQ ID NO: 346095
  chr15:28516961-28517076
  hypo

SEQ ID NO: 366539 - DNA, 177 bp, Homo sapiens; identical to SEQ ID NO: 346096
  chr15:28517198-28517375
  hypo

SEQ ID NO: 366540 - DNA, 53 bp, Homo sapiens; identical to SEQ ID NO: 347321
  chr15:29130654-29130707
  hypo

SEQ ID NO: 366541 - DNA, 245 bp, Homo sapiens; identical to SEQ ID NO: 342128
  chr15:29417894-29418139
  hypo

SEQ ID NO: 366542 - DNA, 67 bp, Homo sapiens; identical to SEQ ID NO: 342129
  chr15:29418595-29418662
  hypo

SEQ ID NO: 366543 - DNA, 329 bp, Homo sapiens; identical to SEQ ID NO: 351648
  chr15:30113537-30113866
  hypo

SEQ ID NO: 366544 - DNA, 319 bp, Homo sapiens; identical to SEQ ID NO: 203810
  chr15:30113984-30114303
  hypo

SEQ ID NO: 366545 - DNA, 431 bp, Homo sapiens; identical to SEQ ID NO: 203811
  chr15:30114349-30114780
  hypo

SEQ ID NO: 366546 - DNA, 375 bp, Homo sapiens; identical to SEQ ID NO: 290655
  chr15:30114810-30115185
  hypo

SEQ ID NO: 366547 - DNA, 100 bp, Homo sapiens; identical to SEQ ID NO: 342131
  chr15:31188921-31189021
  hypo

SEQ ID NO: 366548 - DNA, 139 bp, Homo sapiens; identical to SEQ ID NO: 342133
  chr15:31453201-31453340
  hypo

SEQ ID NO: 366549 - DNA, 250 bp, Homo sapiens; identical to SEQ ID NO: 342134
  chr15:31561317-31561567
  hypo

SEQ ID NO: 366550 - DNA, 185 bp, Homo sapiens; identical to SEQ ID NO: 342135
  chr15:31564302-31564487
  hypo

SEQ ID NO: 366551 - DNA, 136 bp, Homo sapiens; identical to SEQ ID NO: 355237
  chr15:31571220-31571356
  hypo

SEQ ID NO: 366552 - DNA, 218 bp, Homo sapiens; identical to SEQ ID NO: 342138
  chr15:31668823-31669041
  hypo

SEQ ID NO: 366553 - DNA, 507 bp, Homo sapiens; identical to SEQ ID NO: 351653
  chr15:31774606-31775113
  hypo

SEQ ID NO: 366554 - DNA, 209 bp, Homo sapiens; identical to SEQ ID NO: 290663
  chr15:32162282-32162491
  hypo

SEQ ID NO: 366555 - DNA, 761 bp, Homo sapiens; identical to SEQ ID NO: 345467
  chr15:32162523-32163284
  hypo

SEQ ID NO: 366556 - DNA, 375 bp, Homo sapiens; identical to SEQ ID NO: 348660
  chr15:34635788-34636163
  hypo

SEQ ID NO: 366557 - DNA, 46 bp, Homo sapiens; identical to SEQ ID NO: 351657
  chr15:34729898-34729944
  hypo

SEQ ID NO: 366558 - DNA, 225 bp, Homo sapiens; identical to SEQ ID NO: 342149
  chr15:34873206-34873431
  hypo

SEQ ID NO: 366559 - DNA, 88 bp, Homo sapiens; identical to SEQ ID NO: 360591
  chr15:35046519-35046607
  hypo

SEQ ID NO: 366560 - DNA, 181 bp, Homo sapiens; identical to SEQ ID NO: 290677
  chr15:35046689-35046870
  hypo

SEQ ID NO: 366561 - DNA, 111 bp, Homo sapiens; identical to SEQ ID NO: 335080
  chr15:38857279-38857390
  hypo

SEQ ID NO: 366562 - DNA, 196 bp, Homo sapiens
  chr15:40423149-40423345
  hypo
cgattgttaataataattattaatattattcctgatatccagggggtcgaggatgacattgcttcctatacctcagaacacgtacacccccatgtgatgttgttcctaataaccagggggtagaggatgacgttactccaaatatcgccgtgggtgtacatcccttctgcgatcttgttgctaatacccaggcggg

SEQ ID NO: 366563 - DNA, 90 bp, Homo sapiens; identical to SEQ ID NO: 355244
  chr15:40532821-40532911
  hypo

SEQ ID NO: 366564 - DNA, 161 bp, Homo sapiens; identical to SEQ ID NO: 360600
  chr15:40575352-40575513
  hypo

SEQ ID NO: 366565 - DNA, 103 bp, Homo sapiens; identical to SEQ ID NO: 355245
  chr15:40676583-40676686
  hypo

SEQ ID NO: 366566 - DNA, 87 bp, Homo sapiens
  chr15:41091052-41091139
  hypo
cgttaactcacgacttaatccttcattctggcagccgtggtgccccgccttgtgagtgtgtgtgtaagaatttggcgcttgctggct

SEQ ID NO: 366567 - DNA, 416 bp, Homo sapiens; identical to SEQ ID NO: 360602
  chr15:41136701-41137117
  hypo

SEQ ID NO: 366568 - DNA, 44 bp, Homo sapiens; identical to SEQ ID NO: 203840
  chr15:41137147-41137191
  hypo

SEQ ID NO: 366569 - DNA, 77 bp, Homo sapiens; identical to SEQ ID NO: 342161
  chr15:41769434-41769511
  hypo

SEQ ID NO: 366570 - DNA, 133 bp, Homo sapiens; identical to SEQ ID NO: 342162
  chr15:42162038-42162171
  hypo

SEQ ID NO: 366571 - DNA, 234 bp, Homo sapiens; identical to SEQ ID NO: 355246
  chr15:43020360-43020594
  hypo

SEQ ID NO: 366572 - DNA, 89 bp, Homo sapiens; identical to SEQ ID NO: 342165
  chr15:45440539-45440628
  hypo

SEQ ID NO: 366573 - DNA, 563 bp, Homo sapiens; identical to SEQ ID NO: 355247
  chr15:45444141-45444704
  hypo

SEQ ID NO: 366574 - DNA, 205 bp, Homo sapiens; identical to SEQ ID NO: 360624
  chr15:45479833-45480038
  hypo

SEQ ID NO: 366575 - DNA, 274 bp, Homo sapiens; identical to SEQ ID NO: 203861
  chr15:45670188-45670462
  hypo

SEQ ID NO: 366576 - DNA, 339 bp, Homo sapiens; identical to SEQ ID NO: 345471
  chr15:45722599-45722938
  hypo

SEQ ID NO: 366577 - DNA, 143 bp, Homo sapiens
  chr15:48666272-48666415
  hypo
cgccatgcttgcttttcccccactacctccctcctcctccccatttctccccagacagattgtgaagtctctttgcttggtccactccctgcctgtctccaatcctctgattgcttcaccttcccccggctgccattatctgt

SEQ ID NO: 366578 - DNA, 77 bp, Homo sapiens; identical to SEQ ID NO: 345475
  chr15:48936649-48936726
  hypo

SEQ ID NO: 366579 - DNA, 234 bp, Homo sapiens; identical to SEQ ID NO: 342173
  chr15:49268662-49268896
  hypo

SEQ ID NO: 366580 - DNA, 350 bp, Homo sapiens; identical to SEQ ID NO: 335110
  chr15:50474768-50475118
  hypo

SEQ ID NO: 366581 - DNA, 185 bp, Homo sapiens; identical to SEQ ID NO: 360641
  chr15:52404388-52404573
  hypo

SEQ ID NO: 366582 - DNA, 815 bp, Homo sapiens; identical to SEQ ID NO: 360642
  chr15:52587420-52588235
  hypo

SEQ ID NO: 366583 - DNA, 76 bp, Homo sapiens; identical to SEQ ID NO: 342179
  chr15:54191760-54191836
  hypo

SEQ ID NO: 366584 - DNA, 86 bp, Homo sapiens; identical to SEQ ID NO: 342183
  chr15:55965701-55965787
  hypo

SEQ ID NO: 366585 - DNA, 85 bp, Homo sapiens; identical to SEQ ID NO: 342184
  chr15:56363533-56363618
  hypo

SEQ ID NO: 366586 - DNA, 379 bp, Homo sapiens; identical to SEQ ID NO: 360648
  chr15:57598802-57599181
  hypo

SEQ ID NO: 366587 - DNA, 94 bp, Homo sapiens; identical to SEQ ID NO: 342187
  chr15:58028020-58028114
  hypo

SEQ ID NO: 366588 - DNA, 113 bp, Homo sapiens; identical to SEQ ID NO: 342188
  chr15:58839542-58839655
  hypo

SEQ ID NO: 366589 - DNA, 34 bp, Homo sapiens; identical to SEQ ID NO: 360651
  chr15:60288752-60288786
  hypo

SEQ ID NO: 366590 - DNA, 75 bp, Homo sapiens; identical to SEQ ID NO: 351687
  chr15:60289235-60289310
  hypo

SEQ ID NO: 366591 - DNA, 1567 bp, Homo sapiens; identical to SEQ ID NO: 360654
  chr15:60883782-60885349
  hypo

SEQ ID NO: 366592 - DNA, 129 bp, Homo sapiens; identical to SEQ ID NO: 342192
  chr15:61931851-61931980
  hypo

SEQ ID NO: 366593 - DNA, 87 bp, Homo sapiens; identical to SEQ ID NO: 351693
  chr15:62456599-62456686
  hypo

SEQ ID NO: 366594 - DNA, 130 bp, Homo sapiens; identical to SEQ ID NO: 203914
  chr15:62457008-62457138
  hypo

SEQ ID NO: 366595 - DNA, 257 bp, Homo sapiens; identical to SEQ ID NO: 351695
  chr15:62457296-62457553
  hypo

SEQ ID NO: 366596 - DNA, 497 bp, Homo sapiens; identical to SEQ ID NO: 342195
  chr15:62753676-62754173
  hypo

SEQ ID NO: 366597 - DNA, 66 bp, Homo sapiens; identical to SEQ ID NO: 342196
  chr15:62832519-62832585
  hypo

SEQ ID NO: 366598 - DNA, 310 bp, Homo sapiens; identical to SEQ ID NO: 342198
  chr15:62993112-62993422
  hypo

SEQ ID NO: 366599 - DNA, 222 bp, Homo sapiens; identical to SEQ ID NO: 342199
  chr15:63000769-63000991
  hypo

SEQ ID NO: 366600 - DNA, 220 bp, Homo sapiens; identical to SEQ ID NO: 342200
  chr15:63029125-63029345
  hypo

SEQ ID NO: 366601 - DNA, 290 bp, Homo sapiens; identical to SEQ ID NO: 342201
  chr15:63030480-63030770
  hypo

SEQ ID NO: 366602 - DNA, 67 bp, Homo sapiens; identical to SEQ ID NO: 342202
  chr15:63059828-63059895
  hypo

SEQ ID NO: 366603 - DNA, 153 bp, Homo sapiens; identical to SEQ ID NO: 342203
  chr15:63066085-63066238
  hypo

SEQ ID NO: 366604 - DNA, 131 bp, Homo sapiens
  chr15:63072875-63073006
  hypo
cgtggatagccatggactcgaccattcctcaggaagtgcttcctgatggagagtctgcctcctttcccacctcatcttctggcactttgcgcttccctagaagtgtcaggctggctcccgcctccatgtac

SEQ ID NO: 366605 - DNA, 374 bp, Homo sapiens; identical to SEQ ID NO: 342205
  chr15:63075618-63075992
  hypo

SEQ ID NO: 366606 - DNA, 222 bp, Homo sapiens; identical to SEQ ID NO: 342207
  chr15:63088341-63088563
  hypo

SEQ ID NO: 366607 - DNA, 741 bp, Homo sapiens; identical to SEQ ID NO: 342208
  chr15:63089582-63090323
  hypo

SEQ ID NO: 366608 - DNA, 142 bp, Homo sapiens; identical to SEQ ID NO: 342209
  chr15:63115985-63116127
  hypo

SEQ ID NO: 366609 - DNA, 1024 bp, Homo sapiens; identical to SEQ ID NO: 342210
  chr15:63132478-63133502
  hypo

SEQ ID NO: 366610 - DNA, 206 bp, Homo sapiens; identical to SEQ ID NO: 342211
  chr15:63597968-63598174
  hypo

SEQ ID NO: 366611 - DNA, 76 bp, Homo sapiens; identical to SEQ ID NO: 342212
  chr15:63695768-63695844
  hypo

SEQ ID NO: 366612 - DNA, 350 bp, Homo sapiens; identical to SEQ ID NO: 203920
  chr15:63795501-63795851
  hypo

SEQ ID NO: 366613 - DNA, 338 bp, Homo sapiens; identical to SEQ ID NO: 347348
  chr15:63795894-63796232
  hypo

SEQ ID NO: 366614 - DNA, 218 bp, Homo sapiens; identical to SEQ ID NO: 342214
  chr15:63889834-63890052
  hypo

SEQ ID NO: 366615 - DNA, 64 bp, Homo sapiens; identical to SEQ ID NO: 342218
  chr15:64683091-64683155
  hypo

SEQ ID NO: 366616 - DNA, 82 bp, Homo sapiens; identical to SEQ ID NO: 342219
  chr15:65242083-65242165
  hypo

SEQ ID NO: 366617 - DNA, 421 bp, Homo sapiens; identical to SEQ ID NO: 342221
  chr15:66946036-66946457
  hypo

SEQ ID NO: 366618 - DNA, 115 bp, Homo sapiens; identical to SEQ ID NO: 342224
  chr15:68888212-68888327
  hypo

SEQ ID NO: 366619 - DNA, 99 bp, Homo sapiens; identical to SEQ ID NO: 342225
  chr15:68893753-68893852
  hypo

SEQ ID NO: 366620 - DNA, 102 bp, Homo sapiens
  chr15:68908928-68909030
  hypo
cgcggtcgaatgattctgacaagcggtgagtacggctgtgtcagcgcgtgggccccagcgcaagcaggcaatcccatgtcatctgcgagatctcccatgggc

SEQ ID NO: 366621 - DNA, 174 bp, Homo sapiens; identical to SEQ ID NO: 342227
  chr15:68937507-68937681
  hypo

SEQ ID NO: 366622 - DNA, 410 bp, Homo sapiens; identical to SEQ ID NO: 342228
  chr15:70352928-70353338
  hypo

SEQ ID NO: 366623 - DNA, 57 bp, Homo sapiens; identical to SEQ ID NO: 342230
  chr15:70355607-70355664
  hypo

SEQ ID NO: 366624 - DNA, 214 bp, Homo sapiens
  chr15:70718600-70718814
  hypo
cgcctcgggggcccgtcgactcactccccagaggtgcctctgcctccggcttcggttcagcgctggctcctcgaggtgccaggtggaatcccaacattttttccgccttcctcaggcctggcaagtggagcccaaaaacagatgcctagcaccttgttcttggcgagaatgacagattttcgagtccccttccaggagccgtgctcgcttcccc

SEQ ID NO: 366625 - DNA, 37 bp, Homo sapiens
  chr15:71164699-71164736
  hypo
gctcggcatcagagggagaccgcggaaagtgggagac

SEQ ID NO: 366626 - DNA, 193 bp, Homo sapiens; identical to SEQ ID NO: 351715
  chr15:71184276-71184469
  hypo

SEQ ID NO: 366627 - DNA, 766 bp, Homo sapiens; identical to SEQ ID NO: 290974
  chr15:71184499-71185265
  hypo

SEQ ID NO: 366628 - DNA, 587 bp, Homo sapiens; identical to SEQ ID NO: 345477
  chr15:71407569-71408156
  hypo

SEQ ID NO: 366629 - DNA, 203 bp, Homo sapiens
  chr15:72462436-72462639
  hypo
cgcaggcagaggttctgggatggctgacggagtaggcgggtctcacacagcgtctttcccgaaagccagaagttctgcttatgcctaggctgggaggaaaatcaacctgtctacctcatctccagtgccaggcagctcgtaggccaggctgagtgaggcctctagccccacccttgaggaggcacactgagagggaggaccct

SEQ ID NO: 366630 - DNA, 114 bp, Homo sapiens
  chr15:72462669-72462783
  hypo
ccaaagtacccgcgcagcatgactgtaaaccatcaggttccgggaaagtaggctgagcacaggaggccttatcaaagctcaggagctgatgcgctgaaggtgtgggaggtggac

SEQ ID NO: 366631 - DNA, 181 bp, Homo sapiens; identical to SEQ ID NO: 342239
  chr15:72992573-72992754
  hypo

SEQ ID NO: 366632 - DNA, 209 bp, Homo sapiens
  chr15:73615717-73615926
  hypo
cggctatggtggtggcggctacgccagctgatggtgtgggagccgagggggagccacaggccccggggggtggggaggagctggatgagggcaggagtgggctcagtccagcgggggcagagaatccagccagctgttggatgtggaaggaggatgaagacggtgtgtccacctgggacgggctgctggcgggcgaggcggagcccagc

SEQ ID NO: 366633 - DNA, 247 bp, Homo sapiens; identical to SEQ ID NO: 291013
  chr15:75248843-75249090
  hypo

SEQ ID NO: 366634 - DNA, 191 bp, Homo sapiens; identical to SEQ ID NO: 335181
  chr15:75976190-75976381
  hypo

SEQ ID NO: 366635 - DNA, 48 bp, Homo sapiens
  chr15:76197521-76197569
  hypo
tcccttcacctgcttcccttgaagcaactttttgttgtctgttttacc

SEQ ID NO: 366636 - DNA, 96 bp, Homo sapiens; identical to SEQ ID NO: 342245
  chr15:76558876-76558972
  hypo

SEQ ID NO: 366637 - DNA, 31 bp, Homo sapiens; identical to SEQ ID NO: 355280
  chr15:77906720-77906751
  hypo

SEQ ID NO: 366638 - DNA, 106 bp, Homo sapiens; identical to SEQ ID NO: 355281
  chr15:77906998-77907104
  hypo

SEQ ID NO: 366639 - DNA, 238 bp, Homo sapiens; identical to SEQ ID NO: 342252
  chr15:79163927-79164165
  hypo

SEQ ID NO: 366640 - DNA, 58 bp, Homo sapiens; identical to SEQ ID NO: 342253
  chr15:79208280-79208338
  hypo

SEQ ID NO: 366641 - DNA, 1218 bp, Homo sapiens; identical to SEQ ID NO: 335194
  chr15:80215312-80216530
  hypo

SEQ ID NO: 366642 - DNA, 152 bp, Homo sapiens; identical to SEQ ID NO: 342257
  chr15:80295619-80295771
  hypo

SEQ ID NO: 366643 - DNA, 188 bp, Homo sapiens; identical to SEQ ID NO: 355284
  chr15:80471858-80472046
  hypo

SEQ ID NO: 366644 - DNA, 196 bp, Homo sapiens; identical to SEQ ID NO: 347353
  chr15:81294105-81294301
  hypo

SEQ ID NO: 366645 - DNA, 194 bp, Homo sapiens; identical to SEQ ID NO: 345478
  chr15:82339684-82339878
  hypo

SEQ ID NO: 366646 - DNA, 73 bp, Homo sapiens; identical to SEQ ID NO: 360721
  chr15:83377928-83378001
  hypo

SEQ ID NO: 366647 - DNA, 125 bp, Homo sapiens; identical to SEQ ID NO: 204007
  chr15:83378087-83378212
  hypo

SEQ ID NO: 366648 - DNA, 83 bp, Homo sapiens
  chr15:83523579-83523662
  hypo
cggggtgggtgctgtcccgtctggctccgcccgcgtggggaaggggactccgccatccctcagcacacccctggggggcccac

SEQ ID NO: 366649 - DNA, 113 bp, Homo sapiens; identical to SEQ ID NO: 342264
  chr15:83572358-83572471
  hypo

SEQ ID NO: 366650 - DNA, 181 bp, Homo sapiens; identical to SEQ ID NO: 360728
  chr15:84323434-84323615
  hypo

SEQ ID NO: 366651 - DNA, 305 bp, Homo sapiens; identical to SEQ ID NO: 342268
  chr15:86306299-86306604
  hypo

SEQ ID NO: 366652 - DNA, 121 bp, Homo sapiens; identical to SEQ ID NO: 342271
  chr15:89386721-89386842
  hypo

SEQ ID NO: 366653 - DNA, 47 bp, Homo sapiens; identical to SEQ ID NO: 355289
  chr15:89876331-89876378
  hypo

SEQ ID NO: 366654 - DNA, 47 bp, Homo sapiens
  chr15:90501233-90501280
  hypo
cgactgagcgacgtgcagtaatttgaaggaacgcattactggtgcac

SEQ ID NO: 366655 - DNA, 106 bp, Homo sapiens; identical to SEQ ID NO: 342275
  chr15:90501638-90501744
  hypo

SEQ ID NO: 366656 - DNA, 505 bp, Homo sapiens; identical to SEQ ID NO: 268065
  chr15:90611268-90611773
  hypo

SEQ ID NO: 366657 - DNA, 183 bp, Homo sapiens
  chr15:90755573-90755756
  hypo
cggggtggagggagagggttcaccctgaatgggaaaaccggccgcagcctcggcgtgccctgctttcttcatactggactaacccactggatagatggatttagaggatgtccgagcagcacaggcagcccaggagagcgagcgagacactctttgacacaagggagagcataaaagcttaag

SEQ ID NO: 366658 - DNA, 42 bp, Homo sapiens
  chr15:90756079-90756121
  hypo
atgagaccctcgtgtgaccaggtgcgtgcctaagttagaatc

SEQ ID NO: 366659 - DNA, 364 bp, Homo sapiens; identical to SEQ ID NO: 348675
  chr15:90903993-90904357
  hypo

SEQ ID NO: 366660 - DNA, 86 bp, Homo sapiens; identical to SEQ ID NO: 342281
  chr15:91423329-91423415
  hypo

SEQ ID NO: 366661 - DNA, 109 bp, Homo sapiens; identical to SEQ ID NO: 351743
  chr15:91427360-91427469
  hypo

SEQ ID NO: 366662 - DNA, 77 bp, Homo sapiens; identical to SEQ ID NO: 351744
  chr15:91427979-91428056
  hypo

SEQ ID NO: 366663 - DNA, 387 bp, Homo sapiens; identical to SEQ ID NO: 342283
  chr15:91503650-91504037
  hypo

SEQ ID NO: 366664 - DNA, 297 bp, Homo sapiens; identical to SEQ ID NO: 348676
  chr15:91840031-91840328
  hypo

SEQ ID NO: 366665 - DNA, 103 bp, Homo sapiens; identical to SEQ ID NO: 347360
  chr15:92459227-92459330
  hypo

SEQ ID NO: 366666 - DNA, 145 bp, Homo sapiens; identical to SEQ ID NO: 342288
  chr15:93433733-93433878
  hypo

SEQ ID NO: 366667 - DNA, 67 bp, Homo sapiens; identical to SEQ ID NO: 342289
  chr15:93504252-93504319
  hypo

SEQ ID NO: 366668 - DNA, 229 bp, Homo sapiens; identical to SEQ ID NO: 319557
  chr15:93595181-93595410
  hypo

SEQ ID NO: 366669 - DNA, 121 bp, Homo sapiens; identical to SEQ ID NO: 355299
  chr15:93595508-93595629
  hypo

SEQ ID NO: 366670 - DNA, 351 bp, Homo sapiens; identical to SEQ ID NO: 342291
  chr15:94048797-94049148
  hypo

SEQ ID NO: 366671 - DNA, 353 bp, Homo sapiens; identical to SEQ ID NO: 342293
  chr15:94881658-94882011
  hypo

SEQ ID NO: 366672 - DNA, 460 bp, Homo sapiens; identical to SEQ ID NO: 351747
  chr15:96873798-96874258
  hypo

SEQ ID NO: 366673 - DNA, 223 bp, Homo sapiens; identical to SEQ ID NO: 342298
  chr15:99256135-99256358
  hypo

SEQ ID NO: 366674 - DNA, 182 bp, Homo sapiens; identical to SEQ ID NO: 342299
  chr15:99276224-99276406
  hypo

SEQ ID NO: 366675 - DNA, 453 bp, Homo sapiens; identical to SEQ ID NO: 342300
  chr15:99434503-99434956
  hypo

SEQ ID NO: 366676 - DNA, 58 bp, Homo sapiens
  chr15:99454579-99454637
  hypo
cgtcgaagaatcgcatcatcataacctggcaccggtaccggccccctgactacaggga

SEQ ID NO: 366677 - DNA, 321 bp, Homo sapiens
  chr15:99459893-99460214
  hypo
cgagaagacaaaatccccatcaggaagtatgccgacggcaccatcgacattgaggaggtcacagagaaccccaagactgaggtgtgtggtggggagaaagggccttgctgcgcctgccccaaaactgaagccgagaagcaggccgagaaggaggaggctgaataccgcaaagtctttgagaatttcctgcacaactccatcttcgtgcccaggtacccagctcatgtgaaatttcagttggcaaaacccactgctcaggccggttctgttgcctttctccccaccaggtagtgtgtaagtcagcagctggggggtacaata

SEQ ID NO: 366678 - DNA, 209 bp, Homo sapiens; identical to SEQ ID NO: 342305
  chr15:99465447-99465656
  hypo

SEQ ID NO: 366679 - DNA, 226 bp, Homo sapiens; identical to SEQ ID NO: 355304
  chr15:99497132-99497358
  hypo

SEQ ID NO: 366680 - DNA, 254 bp, Homo sapiens
  chr15:99504104-99504358
  hypo
gtggccggcgccgaggctcgtggcgtcacgccccccccgccagggctgtacctccgtctccctggtcctgctgctcacaggacagacggctcgctcccctcttccagcagctgctcttacaggcactgatgatttcgctgggaagtgtggcgggcagctttgcctaagcgtggatggctcctcggcaattccagcctaagtgaaggcgctcaggagcctcctgctggaacgcgacccatctctcccaggacccc

SEQ ID NO: 366681 - DNA, 130 bp, Homo sapiens; identical to SEQ ID NO: 342309
  chr15:99505061-99505191
  hypo

SEQ ID NO: 366682 - DNA, 85 bp, Homo sapiens; identical to SEQ ID NO: 346105
  chr15:99506062-99506147
  hypo

SEQ ID NO: 366683 - DNA, 468 bp, Homo sapiens; identical to SEQ ID NO: 345483
  chr15:100882092-100882560
  hypo

SEQ ID NO: 366684 - DNA, 497 bp, Homo sapiens; identical to SEQ ID NO: 335245
  chr15:101458286-101458783
  hypo

SEQ ID NO: 366685 - DNA, 693 bp, Homo sapiens; identical to SEQ ID NO: 291211
  chr15:101459313-101460006
  hypo

SEQ ID NO: 366686 - DNA, 148 bp, Homo sapiens; identical to SEQ ID NO: 342314
  chr15:101464778-101464926
  hypo

SEQ ID NO: 366687 - DNA, 157 bp, Homo sapiens; identical to SEQ ID NO: 342316
  chr15:101845367-101845524
  hypo

SEQ ID NO: 366688 - DNA, 409 bp, Homo sapiens; identical to SEQ ID NO: 342317
  chr15:101910626-101911035
  hypo

SEQ ID NO: 366689 - DNA, 247 bp, Homo sapiens; identical to SEQ ID NO: 342318
  chr15:101938625-101938872
  hypo

SEQ ID NO: 366690 - DNA, 216 bp, Homo sapiens; identical to SEQ ID NO: 342319
  chr15:102020345-102020561
  hypo

SEQ ID NO: 366691 - DNA, 152 bp, Homo sapiens; identical to SEQ ID NO: 355314
  chr15:102043329-102043481
  hypo

SEQ ID NO: 366692 - DNA, 544 bp, Homo sapiens; identical to SEQ ID NO: 342321
  chr15:102076822-102077366
  hypo

SEQ ID NO: 366693 - DNA, 124 bp, Homo sapiens; identical to SEQ ID NO: 342322
  chr15:102226045-102226169
  hypo

SEQ ID NO: 366694 - DNA, 295 bp, Homo sapiens; identical to SEQ ID NO: 342323
  chr16:94400-94695
  hypo

SEQ ID NO: 366695 - DNA, 179 bp, Homo sapiens; identical to SEQ ID NO: 348681
  chr16:142447-142626
  hypo

SEQ ID NO: 366696 - DNA, 117 bp, Homo sapiens; identical to SEQ ID NO: 342326
  chr16:189554-189671
  hypo

SEQ ID NO: 366697 - DNA, 358 bp, Homo sapiens; identical to SEQ ID NO: 355318
  chr16:311205-311563
  hypo

SEQ ID NO: 366698 - DNA, 367 bp, Homo sapiens; identical to SEQ ID NO: 342333
  chr16:350669-351036
  hypo

SEQ ID NO: 366699 - DNA, 195 bp, Homo sapiens; identical to SEQ ID NO: 355320
  chr16:410000-410195
  hypo

SEQ ID NO: 366700 - DNA, 281 bp, Homo sapiens; identical to SEQ ID NO: 319736
  chr16:410714-410995
  hypo

SEQ ID NO: 366701 - DNA, 111 bp, Homo sapiens; identical to SEQ ID NO: 346109
  chr16:411606-411717
  hypo

SEQ ID NO: 366702 - DNA, 72 bp, Homo sapiens; identical to SEQ ID NO: 342335
  chr16:440413-440485
  hypo

SEQ ID NO: 366703 - DNA, 214 bp, Homo sapiens; identical to SEQ ID NO: 355325
  chr16:521925-522139
  hypo

SEQ ID NO: 366704 - DNA, 309 bp, Homo sapiens
  chr16:524299-524608
  hypo
cgcagtgctcacaccggggtggtcgggtaaaatgtgcagttagtcatggccgagctagtgggtctgctggctcgcactgttttcccagggatcctttcagcaggcagcttataacgggaaagttgctgctatggtgtctgagtaagtggggagagtagaaggggatggactgtggcgccgctgagttcctgggcatggtgatgtctgaggatctgagcaggtggagcccagggggtggtggggctgtttgtcgggtttctggaagagcgaagggaaagtcagggagtgtaaggcgcatctcacagaatc

SEQ ID NO: 366705 - DNA, 128 bp, Homo sapiens; identical to SEQ ID NO: 355326
  chr16:533135-533263
  hypo

SEQ ID NO: 366706 - DNA, 142 bp, Homo sapiens; identical to SEQ ID NO: 342340
  chr16:537542-537684
  hypo

SEQ ID NO: 366707 - DNA, 124 bp, Homo sapiens
  chr16:571590-571714
  hypo
cgggcaggagcctctggggcctccactccgacatcaggacctgagatgaccgctgtgtggcgctctctccctgggcagggtggatgccacaggcccctctggctcccaggtgctgcttctccac

SEQ ID NO: 366708 - DNA, 133 bp, Homo sapiens
  chr16:571959-572092
  hypo
ctgccccaacccccagcattcccgggtgggcccagaccccatcaccaagactggccacccgctgcgtgtgtgtgcgcgcgcgtgtacgtgtggccccacatccgccgccttccacgctaggatgtaagaggtc

SEQ ID NO: 366709 - DNA, 576 bp, Homo sapiens; identical to SEQ ID NO: 342342
  chr16:594129-594705
  hypo

SEQ ID NO: 366710 - DNA, 150 bp, Homo sapiens; identical to SEQ ID NO: 355328
  chr16:611800-611950
  hypo

SEQ ID NO: 366711 - DNA, 83 bp, Homo sapiens; identical to SEQ ID NO: 355329
  chr16:612320-612403
  hypo

SEQ ID NO: 366712 - DNA, 77 bp, Homo sapiens; identical to SEQ ID NO: 216551
  chr16:667407-667484
  hypo

SEQ ID NO: 366713 - DNA, 200 bp, Homo sapiens; identical to SEQ ID NO: 346112
  chr16:668074-668274
  hypo

SEQ ID NO: 366714 - DNA, 80 bp, Homo sapiens; identical to SEQ ID NO: 342346
  chr16:672467-672547
  hypo

SEQ ID NO: 366715 - DNA, 70 bp, Homo sapiens; identical to SEQ ID NO: 348687
  chr16:677367-677437
  hypo

SEQ ID NO: 366716 - DNA, 34 bp, Homo sapiens; identical to SEQ ID NO: 348688
  chr16:677803-677837
  hypo

SEQ ID NO: 366717 - DNA, 63 bp, Homo sapiens; identical to SEQ ID NO: 216557
  chr16:677909-677972
  hypo

SEQ ID NO: 366718 - DNA, 106 bp, Homo sapiens; identical to SEQ ID NO: 348690
  chr16:678084-678190
  hypo

SEQ ID NO: 366719 - DNA, 512 bp, Homo sapiens; identical to SEQ ID NO: 342349
  chr16:717202-717714
  hypo

SEQ ID NO: 366720 - DNA, 255 bp, Homo sapiens; identical to SEQ ID NO: 319806
  chr16:740914-741169
  hypo

SEQ ID NO: 366721 - DNA, 62 bp, Homo sapiens; identical to SEQ ID NO: 351764
  chr16:745060-745122
  hypo

SEQ ID NO: 366722 - DNA, 97 bp, Homo sapiens; identical to SEQ ID NO: 291235
  chr16:745316-745413
  hypo

SEQ ID NO: 366723 - DNA, 341 bp, Homo sapiens; identical to SEQ ID NO: 355339
  chr16:810054-810395
  hypo

SEQ ID NO: 366724 - DNA, 126 bp, Homo sapiens; identical to SEQ ID NO: 355340
  chr16:845724-845850
  hypo

SEQ ID NO: 366725 - DNA, 293 bp, Homo sapiens
  chr16:894572-894865
  hypo
cgagctccaacatgtccacgggtgaacatcagcgtggccaccaccaggtccagagcacagtagaccctgtgccgccagtgtccgtcgccttccacacgtggccgcagttctgtgcatggggccgcccgccatcctgccgcctctgacctgggctgtgggctcgtgacacgtgtctgagctttccagtcgtggccgtgacgctctgtgcggaggctccgtccgcgtgctgcctccgtcccctctgccctggacggccactcactacctttgtctctcaccctgggggtttcatg

SEQ ID NO: 366726 - DNA, 237 bp, Homo sapiens
  chr16:945437-945674
  hypo
cgggagggccttcggggcggccgtgggcccctagccggggccaggcaggacgggagccgccgggttctctggctacatgtgaccgagaaggcagcaggctctgctgctgtctgtgcaggacgacctgggcaggggaggggcgtgtccaattccaacgtgtttggaacatggggctcgcgagactggcgggggagtgggagagccaggagaggctgcaccgcgccctgaaggacggca

SEQ ID NO: 366727 - DNA, 258 bp, Homo sapiens; identical to SEQ ID NO: 355341
  chr16:981471-981729
  hypo

SEQ ID NO: 366728 - DNA, 226 bp, Homo sapiens; identical to SEQ ID NO: 216583
  chr16:981843-982069
  hypo

SEQ ID NO: 366729 - DNA, 278 bp, Homo sapiens; identical to SEQ ID NO: 355343
  chr16:982099-982377
  hypo

SEQ ID NO: 366730 - DNA, 50 bp, Homo sapiens
  chr16:1019685-1019735
  hypo
cggagccctctgggacggtgactgcccacgcgccccgctggctgcatctc

SEQ ID NO: 366731 - DNA, 179 bp, Homo sapiens; identical to SEQ ID NO: 360766
  chr16:1035474-1035653
  hypo

SEQ ID NO: 366732 - DNA, 226 bp, Homo sapiens
  chr16:1036850-1037076
  hypo
cgtctcccttggcaccgcgttcggaggacgcaccctcactcccctgctgccttcactcctttctgaccaagcaacgctaacttttgtacagatcgatttgataaaattaaacaaagtgctttttatggacgtgggctgcattttgtgtgttgctttgtgtgagcctggggctcccggggtaaagatgtccggcaaaggcaggatcaggccgtgccacgcggccgcc

SEQ ID NO: 366733 - DNA, 223 bp, Homo sapiens; identical to SEQ ID NO: 355344
  chr16:1061203-1061426
  hypo

SEQ ID NO: 366734 - DNA, 81 bp, Homo sapiens; identical to SEQ ID NO: 355345
  chr16:1154990-1155071
  hypo

SEQ ID NO: 366735 - DNA, 131 bp, Homo sapiens; identical to SEQ ID NO: 355346
  chr16:1248221-1248352
  hypo

SEQ ID NO: 366736 - DNA, 88 bp, Homo sapiens; identical to SEQ ID NO: 355347
  chr16:1248922-1249010
  hypo

SEQ ID NO: 366737 - DNA, 189 bp, Homo sapiens
  chr16:1250534-1250723
  hypo
cgacaacatcggctacgcctggattgccatcttccaggtgggcggcaagatggtgggacggggaccctggggcacggcaggggagcgggtgcaggactcgccccccccagcccagaccccaggggcacggggaggaggaggaggggtcgtgcgggcccaagtcaagccactgcccccccaggtgatcac

SEQ ID NO: 366738 - DNA, 319 bp, Homo sapiens
  chr16:1251835-1252154
  hypo
gtacgtgggccacatattccgcaaggtcaagcggcgcagcttgcgcctctacgcccgctggcagagccgctggcgcaagaaggtggaccccagtgctgtgcaaggccagggtcccgggcaccgccagcgccgggcaggcaggcacacagcctcggtgcaccacctggtctaccaccaccatcaccaccaccaccaccactaccatttcagccatggcagcccccgcaggcccggccccgagccaggcgcctgcgacaccaggctggtccgagctggcgcgcccccctcgccaccttccccaggccgcggaccccccgac

SEQ ID NO: 366739 - DNA, 89 bp, Homo sapiens
  chr16:1265061-1265150
  hypo
cgtcggttcttcaaggacaggtgtgtgtggtggggccgtcttgggttctgggggcccctcagggctctgggggctgggggcaggtgagg

SEQ ID NO: 366740 - DNA, 224 bp, Homo sapiens
  chr16:1265333-1265557
  hypo
ccaccatcatccgcatcatgcgcgtgcttcgcattgcccgtggtaggtgcccgcgtgcccgccaggttctctctgcgggtggagggtgggggctcagccatgggtgggagtgaggggcggggcggccagggtccccgcgcagcagggagggtccgcccagccctgctgacgctcagctcccggccctagtgctgaagctgctgaagatggctacgggcatgcgc

SEQ ID NO: 366741 - DNA, 61 bp, Homo sapiens
  chr16:1271094-1271155
  hypo
cgtcgtgagcagaaaggcccggggaggatgacggcccaggccctggttctctgcccagcga

SEQ ID NO: 366742 - DNA, 385 bp, Homo sapiens; identical to SEQ ID NO: 355348
  chr16:1397859-1398244
  hypo

SEQ ID NO: 366743 - DNA, 36 bp, Homo sapiens
  chr16:1407334-1407370
  hypo
cgggccagcaccccagaggtctcagtggcattagcc

SEQ ID NO: 366744 - DNA, 132 bp, Homo sapiens; identical to SEQ ID NO: 355349
  chr16:1424307-1424439
  hypo

SEQ ID NO: 366745 - DNA, 177 bp, Homo sapiens; identical to SEQ ID NO: 355350
  chr16:1424469-1424646
  hypo

SEQ ID NO: 366746 - DNA, 472 bp, Homo sapiens; identical to SEQ ID NO: 348691
  chr16:1424928-1425400
  hypo

SEQ ID NO: 366747 - DNA, 407 bp, Homo sapiens; identical to SEQ ID NO: 346114
  chr16:1425684-1426091
  hypo

SEQ ID NO: 366748 - DNA, 53 bp, Homo sapiens; identical to SEQ ID NO: 342385
  chr16:1472227-1472280
  hypo

SEQ ID NO: 366749 - DNA, 232 bp, Homo sapiens; identical to SEQ ID NO: 355354
  chr16:1493342-1493574
  hypo

SEQ ID NO: 366750 - DNA, 563 bp, Homo sapiens; identical to SEQ ID NO: 355355
  chr16:1493691-1494254
  hypo

SEQ ID NO: 366751 - DNA, 135 bp, Homo sapiens; identical to SEQ ID NO: 342388
  chr16:1651481-1651616
  hypo

SEQ ID NO: 366752 - DNA, 301 bp, Homo sapiens; identical to SEQ ID NO: 342389
  chr16:1652282-1652583
  hypo

SEQ ID NO: 366753 - DNA, 90 bp, Homo sapiens; identical to SEQ ID NO: 342390
  chr16:1677046-1677136
  hypo

SEQ ID NO: 366754 - DNA, 102 bp, Homo sapiens
  chr16:1704554-1704656
  hypo
cgatcacattgttctgtggccaccgtctctgtccagctccagagcattttcatgacgctagaagaggccctgtgcacctcagcactcactcctctattctcc

SEQ ID NO: 366755 - DNA, 38 bp, Homo sapiens
  chr16:1704800-1704838
  hypo
gttcacccatcatagcgcatcagtacttcattccttcc

SEQ ID NO: 366756 - DNA, 194 bp, Homo sapiens; identical to SEQ ID NO: 346115
  chr16:1730112-1730306
  hypo

SEQ ID NO: 366757 - DNA, 105 bp, Homo sapiens; identical to SEQ ID NO: 346116
  chr16:1730761-1730866
  hypo

SEQ ID NO: 366758 - DNA, 727 bp, Homo sapiens
  chr16:1737575-1738302
  hypo
cggtaccactttgcccgttccacatggtctcatgcccagtggggagcccggccccttgcggttagtgagccagcctctactcctggtcacagtgtgtggtgccagccatcatggctccccatgccaggttcctgcttctcatggtccttctcacggttgttgggagttttcctatctctccagtgctcttggaagacggtttatggtatattatcaagggaagcctgaaagggaaactgctagttgtgttcaccacccaacgagatctggagtcctgccttctttctacacttagtcacacagacctagccccacagccctctagttgcagggcttgattgagaaaagtatgcagaggccgagagtgtgtgtgaccgaccacatcatagccatcgaatgtttatcaattcccattcagtgtttcagtgaatcttcagtagtctctgtgttctttgttagtcacctggtttagatgttccatgaattgttcttcctcttctagcaatgatgaccaacgtctatgaattgttaatatttaccggggactgtgctaagtgctttgcatgtgtatttttcatttggtgttcgctataactaggagtaggttgttttgctcctttcacagaggaggaaacaggcttggaaaaggtcactggcatgcataaatcccaagctagtcagtagcagagctagtcggtagcagaactagtccgtagcagagctagtc

SEQ ID NO: 366759 - DNA, 131 bp, Homo sapiens; identical to SEQ ID NO: 355361
  chr16:1753650-1753781
  hypo

SEQ ID NO: 366760 - DNA, 1258 bp, Homo sapiens; identical to SEQ ID NO: 342398
  chr16:1796052-1797310
  hypo

SEQ ID NO: 366761 - DNA, 159 bp, Homo sapiens
  chr16:1807721-1807880
  hypo
cgtctgcggtgtctccctcgccgctctctccctcgcccacgctggggggcttttggagactgggtacctgccacaccctgccacacacactctcctcttcacaggcctgcatcatgggggctgcggggggcctgccctcctgatgggcgatgggagcag

SEQ ID NO: 366762 - DNA, 431 bp, Homo sapiens
  chr16:1807999-1808430
  hypo
gctgctccctctctctcctgccctgcaacatgggagcagccgaatcattgctgggttttctgtaataagaatgtattgttagttccagtccctaattgacctttgtcccttccttcccctgcctctctgtgcgtcgctggactcgccaggggagttctcaggtgagtatctcactctcctgtctgtctcccctctgtgtgacggggggagtgggtggacgggggatgccccgagctatcccgtcaccgtggctgtgtggactgccccccacgtcgccgcagcgcctctgcttctgctcgcagccaccgccgctcggaagcttgttcggtttgctccaccagccacttgacaatgacctggatatccaacccccccagcctgaggagtcccccgcgggccatttctgaaggccctgcggagccctaagccac

SEQ ID NO: 366763 - DNA, 346 bp, Homo sapiens; identical to SEQ ID NO: 355362
  chr16:1812272-1812618
  hypo

SEQ ID NO: 366764 - DNA, 53 bp, Homo sapiens
  chr16:1812929-1812982
  hypo
cggcttcagccagcgccgcaaccatgccatgtgcccgatctcggcaggcagcc

SEQ ID NO: 366765 - DNA, 183 bp, Homo sapiens; identical to SEQ ID NO: 346117
  chr16:1813299-1813482
  hypo

SEQ ID NO: 366766 - DNA, 216 bp, Homo sapiens; identical to SEQ ID NO: 216640
  chr16:1814037-1814253
  hypo

SEQ ID NO: 366767 - DNA, 112 bp, Homo sapiens; identical to SEQ ID NO: 355365
  chr16:1814369-1814481
  hypo

SEQ ID NO: 366768 - DNA, 43 bp, Homo sapiens; identical to SEQ ID NO: 342404
  chr16:1994730-1994773
  hypo

SEQ ID NO: 366769 - DNA, 280 bp, Homo sapiens; identical to SEQ ID NO: 342406
  chr16:2035689-2035969
  hypo

SEQ ID NO: 366770 - DNA, 96 bp, Homo sapiens; identical to SEQ ID NO: 204085
  chr16:2042503-2042599
  hypo

SEQ ID NO: 366771 - DNA, 226 bp, Homo sapiens; identical to SEQ ID NO: 360772
  chr16:2042617-2042843
  hypo

SEQ ID NO: 366772 - DNA, 228 bp, Homo sapiens; identical to SEQ ID NO: 348700
  chr16:2042997-2043225
  hypo

SEQ ID NO: 366773 - DNA, 74 bp, Homo sapiens; identical to SEQ ID NO: 348701
  chr16:2104688-2104762
  hypo

SEQ ID NO: 366774 - DNA, 187 bp, Homo sapiens; identical to SEQ ID NO: 348702
  chr16:2105384-2105571
  hypo

SEQ ID NO: 366775 - DNA, 67 bp, Homo sapiens; identical to SEQ ID NO: 346120
  chr16:2106533-2106600
  hypo

SEQ ID NO: 366776 - DNA, 62 bp, Homo sapiens; identical to SEQ ID NO: 216652
  chr16:2106641-2106703
  hypo

SEQ ID NO: 366777 - DNA, 426 bp, Homo sapiens; identical to SEQ ID NO: 346122
  chr16:2107057-2107483
  hypo

SEQ ID NO: 366778 - DNA, 440 bp, Homo sapiens; identical to SEQ ID NO: 342413
  chr16:2108531-2108971
  hypo

SEQ ID NO: 366779 - DNA, 183 bp, Homo sapiens; identical to SEQ ID NO: 355374
  chr16:2129581-2129764
  hypo

SEQ ID NO: 366780 - DNA, 228 bp, Homo sapiens; identical to SEQ ID NO: 355375
  chr16:2131440-2131668
  hypo

SEQ ID NO: 366781 - DNA, 49 bp, Homo sapiens; identical to SEQ ID NO: 355376
  chr16:2141860-2141909
  hypo

SEQ ID NO: 366782 - DNA, 574 bp, Homo sapiens; identical to SEQ ID NO: 216662
  chr16:2141972-2142546
  hypo

SEQ ID NO: 366783 - DNA, 391 bp, Homo sapiens; identical to SEQ ID NO: 355378
  chr16:2142628-2143019
  hypo

SEQ ID NO: 366784 - DNA, 168 bp, Homo sapiens; identical to SEQ ID NO: 355379
  chr16:2146195-2146363
  hypo

SEQ ID NO: 366785 - DNA, 302 bp, Homo sapiens; identical to SEQ ID NO: 216667
  chr16:2213343-2213645
  hypo

SEQ ID NO: 366786 - DNA, 267 bp, Homo sapiens
  chr16:2213723-2213990
  hypo
ttgcctcctagaggcctgcctgagccggggctggtggtggaaggctgctgcggcggccccacggtgccccacagcaggtctgcacacttgcagcagcccgtctgactcacaggggcctgggctccatctctcaagcccctcatttgtgctccacccacaggaggtgcttcccaaggaccgtagatgcctctctagagcatgagctcaggcaagagtgcccgctacaaccgcttctccggggggcccagcaatcttcccaccccagac

SEQ ID NO: 366787 - DNA, 371 bp, Homo sapiens; identical to SEQ ID NO: 342419
  chr16:2226433-2226804
  hypo

SEQ ID NO: 366788 - DNA, 75 bp, Homo sapiens; identical to SEQ ID NO: 346123
  chr16:2229615-2229690
  hypo

SEQ ID NO: 366789 - DNA, 265 bp, Homo sapiens; identical to SEQ ID NO: 216670
  chr16:2230223-2230488
  hypo

SEQ ID NO: 366790 - DNA, 182 bp, Homo sapiens; identical to SEQ ID NO: 355382
  chr16:2231183-2231365
  hypo

SEQ ID NO: 366791 - DNA, 152 bp, Homo sapiens
  chr16:2235039-2235191
  hypo
caacccagaaaccccggcttgtcacctgctcccagccctggccaccctggccctggccactaccccacctaccttgacgccttcagagcccgcgtgtagggcgtgacccccgctgccccggccgccagccatgccgctaatgctgccgcttc

SEQ ID NO: 366792 - DNA, 72 bp, Homo sapiens; identical to SEQ ID NO: 346125
  chr16:2278311-2278383
  hypo

SEQ ID NO: 366793 - DNA, 388 bp, Homo sapiens; identical to SEQ ID NO: 346126
  chr16:2280815-2281203
  hypo

SEQ ID NO: 366794 - DNA, 237 bp, Homo sapiens; identical to SEQ ID NO: 216674
  chr16:2281402-2281639
  hypo

SEQ ID NO: 366795 - DNA, 61 bp, Homo sapiens; identical to SEQ ID NO: 346128
  chr16:2281702-2281763
  hypo

SEQ ID NO: 366796 - DNA, 810 bp, Homo sapiens; identical to SEQ ID NO: 346129
  chr16:2282326-2283136
  hypo

SEQ ID NO: 366797 - DNA, 512 bp, Homo sapiens; identical to SEQ ID NO: 342425
  chr16:2358246-2358758
  hypo

SEQ ID NO: 366798 - DNA, 482 bp, Homo sapiens; identical to SEQ ID NO: 342427
  chr16:2485948-2486430
  hypo

SEQ ID NO: 366799 - DNA, 40 bp, Homo sapiens
  chr16:2497839-2497879
  hypo
cgctgggctctcattggccactgacatcttgtctttttgg

SEQ ID NO: 366800 - DNA, 76 bp, Homo sapiens
  chr16:2498053-2498129
  hypo
ttggcgctggttgacaacagagaacagggtgaccatcgcctagagacagtcaggattcctgcggccacacagtgcc

SEQ ID NO: 366801 - DNA, 394 bp, Homo sapiens; identical to SEQ ID NO: 346130
  chr16:2540434-2540828
  hypo

SEQ ID NO: 366802 - DNA, 60 bp, Homo sapiens; identical to SEQ ID NO: 346131
  chr16:2540933-2540993
  hypo

SEQ ID NO: 366803 - DNA, 135 bp, Homo sapiens; identical to SEQ ID NO: 342431
  chr16:2544830-2544965
  hypo

SEQ ID NO: 366804 - DNA, 272 bp, Homo sapiens
  chr16:2546133-2546405
  hypo
cgagcacagcggcgctatggactctccaggatacaactgcttcgtggacaaagacaagatggacgctgccatccaggacctggggcccaaggagctgagctgcactgaactgcaggaactgaagcagctggcgcgccagggctactgggcccaaagccacgccctgcggggaaaggtgtaccagcgcctgatccgggacattccctgccgcacggtcacgcctgacgccagcgtgtacagcgacatcgtgggcaagatcgtgggcaagcaca

SEQ ID NO: 366805 - DNA, 532 bp, Homo sapiens
  chr16:2546506-2547038
  hypo
tgcctggccaaccagttccccgacatctccttctgccccgccctgccggccgtggtggccctgctgctgcactacagcatcgacgaggccgagtgcttcgagaaggcctgccgcatcctggcctgcaatgaccccggcaggaggctgatcgaccagagcttcctggcctttgagtcgtcctgcatgacgtttggggacctggtgaacaagtactgccaggcggcccacaagctgatggtggccgtgtcggaggatgtcctgcaggtctatgcggactggcagcgctggctgtttggggagctgcccctctgctacttcgcccgggtctttgacgtcttcctggtggagggctacaaggtgctgtaccgcgtggcgctggccatcctcaagttcttccacaaggtgagggccgggcagccgctggagtcggacagcgtgaagcaggacatccgcacgttcgtcagagacatcgcgaagacggtgtcccctgagaagctgctggagaaagcgttcgccatccgcctcttctccc

SEQ ID NO: 366806 - DNA, 383 bp, Homo sapiens; identical to SEQ ID NO: 355392
  chr16:2642765-2643148
  hypo

SEQ ID NO: 366807 - DNA, 49 bp, Homo sapiens; identical to SEQ ID NO: 346132
  chr16:2770043-2770092
  hypo

SEQ ID NO: 366808 - DNA, 173 bp, Homo sapiens; identical to SEQ ID NO: 346133
  chr16:2806405-2806578
  hypo

SEQ ID NO: 366809 - DNA, 47 bp, Homo sapiens
  chr16:2849309-2849356
  hypo
cggtccagctgggcgagctgacttccaggccaactccttggaacctg

SEQ ID NO: 366810 - DNA, 173 bp, Homo sapiens; identical to SEQ ID NO: 348719
  chr16:2974650-2974823
  hypo

SEQ ID NO: 366811 - DNA, 326 bp, Homo sapiens; identical to SEQ ID NO: 346134
  chr16:3021581-3021907
  hypo

SEQ ID NO: 366812 - DNA, 52 bp, Homo sapiens; identical to SEQ ID NO: 348721
  chr16:3139033-3139085
  hypo

SEQ ID NO: 366813 - DNA, 608 bp, Homo sapiens; identical to SEQ ID NO: 348722
  chr16:3139367-3139975
  hypo

SEQ ID NO: 366814 - DNA, 304 bp, Homo sapiens; identical to SEQ ID NO: 351771
  chr16:3208795-3209099
  hypo

SEQ ID NO: 366815 - DNA, 97 bp, Homo sapiens
  chr16:3537877-3537974
  hypo
cgctggtgccctgggaggccaggcagctgggcgcgctggacccatgtccaaagccatggggtgagtgaaaccagattaacccgctgagcttgcccac

SEQ ID NO: 366816 - DNA, 203 bp, Homo sapiens; identical to SEQ ID NO: 348723
  chr16:3696491-3696694
  hypo

SEQ ID NO: 366817 - DNA, 62 bp, Homo sapiens; identical to SEQ ID NO: 348724
  chr16:3696802-3696864
  hypo

SEQ ID NO: 366818 - DNA, 362 bp, Homo sapiens; identical to SEQ ID NO: 342448
  chr16:3741902-3742264
  hypo

SEQ ID NO: 366819 - DNA, 163 bp, Homo sapiens
  chr16:3772855-3773018
  hypo
cggcaaagcactgtcatctactcatcaaagctcctcagaatctactttgctagtctgggcattacactcacttaaatttcttcagtatcttataagggacctatgttttcccacctctgcctatttattatgaagtgtatacaagtaattcatgtggaattaa

SEQ ID NO: 366820 - DNA, 179 bp, Homo sapiens; identical to SEQ ID NO: 342450
  chr16:3811586-3811765
  hypo

SEQ ID NO: 366821 - DNA, 263 bp, Homo sapiens; identical to SEQ ID NO: 342451
  chr16:3821348-3821611
  hypo

SEQ ID NO: 366822 - DNA, 147 bp, Homo sapiens; identical to SEQ ID NO: 355403
  chr16:3900217-3900364
  hypo

SEQ ID NO: 366823 - DNA, 122 bp, Homo sapiens; identical to SEQ ID NO: 89770
  chr16:4092845-4092967
  hypo

SEQ ID NO: 366824 - DNA, 282 bp, Homo sapiens; identical to SEQ ID NO: 351774
  chr16:4165534-4165816
  hypo

SEQ ID NO: 366825 - DNA, 1114 bp, Homo sapiens; identical to SEQ ID NO: 351775
  chr16:4165852-4166966
  hypo

SEQ ID NO: 366826 - DNA, 193 bp, Homo sapiens; identical to SEQ ID NO: 348725
  chr16:4203995-4204188
  hypo

SEQ ID NO: 366827 - DNA, 543 bp, Homo sapiens; identical to SEQ ID NO: 345486
  chr16:4233245-4233788
  hypo

SEQ ID NO: 366828 - DNA, 187 bp, Homo sapiens; identical to SEQ ID NO: 335276
  chr16:4234090-4234277
  hypo

SEQ ID NO: 366829 - DNA, 68 bp, Homo sapiens; identical to SEQ ID NO: 355410
  chr16:4430998-4431066
  hypo

SEQ ID NO: 366830 - DNA, 298 bp, Homo sapiens; identical to SEQ ID NO: 216731
  chr16:4431189-4431487
  hypo

SEQ ID NO: 366831 - DNA, 313 bp, Homo sapiens; identical to SEQ ID NO: 355412
  chr16:4431516-4431829
  hypo

SEQ ID NO: 366832 - DNA, 847 bp, Homo sapiens; identical to SEQ ID NO: 342461
  chr16:4431854-4432701
  hypo

SEQ ID NO: 366833 - DNA, 176 bp, Homo sapiens; identical to SEQ ID NO: 342463
  chr16:4478626-4478802
  hypo

SEQ ID NO: 366834 - DNA, 226 bp, Homo sapiens; identical to SEQ ID NO: 342464
  chr16:4513533-4513759
  hypo

SEQ ID NO: 366835 - DNA, 116 bp, Homo sapiens; identical to SEQ ID NO: 342465
  chr16:4557910-4558026
  hypo

SEQ ID NO: 366836 - DNA, 103 bp, Homo sapiens
  chr16:4645033-4645136
  hypo
accagagagagggccgtggccacaggaccatggcctgtgacgaaggacgatgagctaggaaaggtgctgggctggtgccaagggacgccagtccacggaggac

SEQ ID NO: 366837 - DNA, 59 bp, Homo sapiens; identical to SEQ ID NO: 342467
  chr16:4719497-4719556
  hypo

SEQ ID NO: 366838 - DNA, 308 bp, Homo sapiens; identical to SEQ ID NO: 342469
  chr16:4779967-4780275
  hypo

SEQ ID NO: 366839 - DNA, 256 bp, Homo sapiens; identical to SEQ ID NO: 342470
  chr16:4787730-4787986
  hypo

SEQ ID NO: 366840 - DNA, 568 bp, Homo sapiens; identical to SEQ ID NO: 342471
  chr16:4802468-4803036
  hypo

SEQ ID NO: 366841 - DNA, 160 bp, Homo sapiens
  chr16:4845976-4846136
  hypo
cgtcgcccactgctgctgctgcagctcccccgggccccgcagggaaagccccaggaaggtgagcccctggaaggtgagccctgccggcctctgggacctgcacggaactgtactgggggtggaggcggaaggtgaggggagtggcgggaagggtgctcat

SEQ ID NO: 366842 - DNA, 118 bp, Homo sapiens; identical to SEQ ID NO: 348727
  chr16:4920116-4920234
  hypo

SEQ ID NO: 366843 - DNA, 200 bp, Homo sapiens; identical to SEQ ID NO: 216748
  chr16:4920289-4920489
  hypo

SEQ ID NO: 366844 - DNA, 314 bp, Homo sapiens; identical to SEQ ID NO: 348729
  chr16:4920526-4920840
  hypo

SEQ ID NO: 366845 - DNA, 166 bp, Homo sapiens
  chr16:4931957-4932123
  hypo
cgtaccattgcgcgtgcagctggagcagaataccctcatttttaggaatctagtgatgcctcttgcctcagggaaacgtttctttgatggggagtttgagatttcttttccttgtttatgctttatttgtggtaatgaaagagcgaatgactgaacagccatggca

SEQ ID NO: 366846 - DNA, 126 bp, Homo sapiens
  chr16:4932153-4932279
  hypo
gggtggggcagagcagcctcggggtctgggggctgcaggggtttccctggcgcagcgaaagtctctgagcacttaccgggcgtgaccgtttcttaggtgtgagaggggctgtggcttttgtgcagc

SEQ ID NO: 366847 - DNA, 367 bp, Homo sapiens
  chr16:5703287-5703654
  hypo
cgtgtgctgggcttcagtgcagaaggtggggtgctgagttgtgtgctgggcctttgtgcggaaggtggggtgtggagccatgtgctgggcctatatgcggaaggtggggtgctgagccgtgtgctgggtttctttgaggcaggtggggtgtggagccgtgtgctccacctttgtacggaaggtggggtgctgagccgtgtgctgcgtctttgaggaagttggggtgcggagccgtgtgctgcgcctttgtgcagaaggtggggtgctgagccgtatgcgggcctggggtgattgcctctccctgacctcctttgcctctccctccgctaacagaccagaagcctgttctgccgcatgtgcagctgcc

SEQ ID NO: 366848 - DNA, 814 bp, Homo sapiens; identical to SEQ ID NO: 335283
  chr16:8767901-8768715
  hypo

SEQ ID NO: 366849 - DNA, 414 bp, Homo sapiens; identical to SEQ ID NO: 342478
  chr16:8995963-8996377
  hypo

SEQ ID NO: 366850 - DNA, 64 bp, Homo sapiens; identical to SEQ ID NO: 355422
  chr16:9005277-9005341
  hypo

SEQ ID NO: 366851 - DNA, 298 bp, Homo sapiens; identical to SEQ ID NO: 335285
  chr16:9186882-9187180
  hypo

SEQ ID NO: 366852 - DNA, 85 bp, Homo sapiens; identical to SEQ ID NO: 342483
  chr16:10823594-10823679
  hypo

SEQ ID NO: 366853 - DNA, 42 bp, Homo sapiens; identical to SEQ ID NO: 342484
  chr16:11037121-11037163
  hypo

SEQ ID NO: 366854 - DNA, 321 bp, Homo sapiens; identical to SEQ ID NO: 342485
  chr16:11151051-11151372
  hypo

SEQ ID NO: 366855 - DNA, 129 bp, Homo sapiens
  chr16:11178526-11178655
  hypo
cgccggctatatgagtcatctccactgtggagggaggcaattttaaactggaaaggtcaatcgacatgtcagaatatctagtaaatcattcgcgttccacctggtgccccttccattcccctgaaaaag

SEQ ID NO: 366856 - DNA, 620 bp, Homo sapiens
  chr16:11178685-11179305
  hypo
ctgtggagaaagaggtagccggggctgggtggtgatttacctcgaggaaaattaatatggtgccatcaattctgaaggcagaaagggcccatggccagaaggctgcacgcaggctggaataactcacggcccatgagggccctgagtttggggaggcctctccttggccctggatataaatcagcagcccttttgcagagagagagtcggagttttgtcaggcctgggggaagggagccagcaccagaagcccctcttccccaggagcctgtcgttgtctgaagggttgaaaggcacctctgtgccacccttctcggccagcaccaagcactggactcatttacagacgaggccatgaagcccccaccctgggttccaggaggatcacgggaagggggctttcagcctggctgtcagagaagaatgtgacaggcccattttcactccacaggccttaattggatggtcagagggcacatctgtggcttataagaaacagatggcgggatgggttagtgaaggagaaagcacgcttgcttcaggttgagtgcccgtggaggtgctggggcagcacgctggcaagcaggcagactcggccaagacccagctttgtcacgtgc

SEQ ID NO: 366857 - DNA, 587 bp, Homo sapiens; identical to SEQ ID NO: 342488
  chr16:11219568-11220155
  hypo

SEQ ID NO: 366858 - DNA, 74 bp, Homo sapiens; identical to SEQ ID NO: 342490
  chr16:11974709-11974783
  hypo

SEQ ID NO: 366859 - DNA, 146 bp, Homo sapiens; identical to SEQ ID NO: 355426
  chr16:12132253-12132399
  hypo

SEQ ID NO: 366860 - DNA, 376 bp, Homo sapiens; identical to SEQ ID NO: 355427
  chr16:12132450-12132826
  hypo

SEQ ID NO: 366861 - DNA, 150 bp, Homo sapiens; identical to SEQ ID NO: 348732
  chr16:12210622-12210772
  hypo

SEQ ID NO: 366862 - DNA, 91 bp, Homo sapiens; identical to SEQ ID NO: 348733
  chr16:12210896-12210987
  hypo

SEQ ID NO: 366863 - DNA, 90 bp, Homo sapiens; identical to SEQ ID NO: 360793
  chr16:12211189-12211279
  hypo

SEQ ID NO: 366864 - DNA, 96 bp, Homo sapiens; identical to SEQ ID NO: 342495
  chr16:12289463-12289559
  hypo

SEQ ID NO: 366865 - DNA, 429 bp, Homo sapiens; identical to SEQ ID NO: 345490
  chr16:12897365-12897794
  hypo

SEQ ID NO: 366866 - DNA, 349 bp, Homo sapiens; identical to SEQ ID NO: 335295
  chr16:14396725-14397074
  hypo

SEQ ID NO: 366867 - DNA, 108 bp, Homo sapiens; identical to SEQ ID NO: 342503
  chr16:15129362-15129470
  hypo

SEQ ID NO: 366868 - DNA, 75 bp, Homo sapiens
  chr16:15767635-15767710
  hypo
cggcatgaggcaccgcacctggctctgggtgtttggtgaaggaaagtaatttggaagcagagcaggaatagaatc

SEQ ID NO: 366869 - DNA, 262 bp, Homo sapiens
  chr16:15820563-15820825
  hypo
cgcctctcctccaggaacgcaactagaggaaaggacttgccttgcagcaagagagacctcagcgagccgggaagaggctcctccccacagaactgggcaccacccagcactgcccaccacaccaccgcgccacctcctcacctgcagcttgtggactttgtcattgagctccgcccgggcccgctccccatcgctgcacttggactgcagctcctgcacctgcgcctccagcttcttcttcttatgttccacctcctgcttg

SEQ ID NO: 366870 - DNA, 160 bp, Homo sapiens; identical to SEQ ID NO: 342508
  chr16:16103307-16103467
  hypo

SEQ ID NO: 366871 - DNA, 63 bp, Homo sapiens; identical to SEQ ID NO: 342509
  chr16:16188327-16188390
  hypo

SEQ ID NO: 366872 - DNA, 94 bp, Homo sapiens
  chr16:18804320-18804414
  hypo
cgctgggtaagaaaagtcaaaacactaatgagttgtccatgaagccaactgctaagaacgcgctcaactatacgcgacatgaagacactatgca

SEQ ID NO: 366873 - DNA, 117 bp, Homo sapiens; identical to SEQ ID NO: 355434
  chr16:19708387-19708504
  hypo

SEQ ID NO: 366874 - DNA, 47 bp, Homo sapiens; identical to SEQ ID NO: 216831
  chr16:19708561-19708608
  hypo

SEQ ID NO: 366875 - DNA, 41 bp, Homo sapiens; identical to SEQ ID NO: 342516
  chr16:21515452-21515493
  hypo

SEQ ID NO: 366876 - DNA, 64 bp, Homo sapiens; identical to SEQ ID NO: 342518
  chr16:21567027-21567091
  hypo

SEQ ID NO: 366877 - DNA, 169 bp, Homo sapiens
  chr16:21569179-21569348
  hypo
cgtcatcatctcactacagcagagatccgcagttccccgaaacaaataccacgagtctcaaggtaagacctgcacgtaaggatgtcgaaagataaatatgtcttaagaacatgtccatgagaaggggctttgccagccatgcaagcataaaagaagaaaagtccctcat

SEQ ID NO: 366878 - DNA, 370 bp, Homo sapiens
  chr16:21569399-21569769
  hypo
gtacgggggacagagggaggaggctctaggctctgacttgcccttgcagagcttggaatccaggagtgtcagacggtggtagagataaaaagctgtgtgtctgagaggtgagggcgtgggctttggggccctaaacttgcttgggacgcccgggagggcccccgtggaagcggcgtttcagtggagccctgaagatgggtttctatttgtcaggtgaagataatggcagctccaggcagaaagggacgaccagcggaaaggaccctggtgagagcagccaccacgacggaacaggcagaagcaccagctggcaaaggcactgtcaggggcagcgggagatgggattggaagggcaacagggttggcgccc

SEQ ID NO: 366879 - DNA, 394 bp, Homo sapiens
  chr16:22326003-22326397
  hypo
cggggaacacgggcgtaatggacatggaggtggcgcagggagctcatcctgttctctccgtagcttattaggaccttagaaactcccttccgctctggggaacttagaaaaggcatcctgggcctgtctgctttaaggactctgctggctctggcgcctgggactctaatccccctcaagcctctgggctgggcaggcacgagcaagtataagccgttccctggcgtgtgcaggcagctctgggagggacacggttggaacggaatttaaacgacctgtgctaggaaaggaagggagagtggaaaacccctatacggagttctctggtcttctggcaggggctgagacggcagtccagcaagggtcacaggcctgacggtatgacctcttcccc

SEQ ID NO: 366880 - DNA, 304 bp, Homo sapiens
  chr16:22326427-22326731
  hypo
gagtcagagcaggcccgccagcgccgtgtgcagtcctatgagttcctgcagaagaagcacgcagaggagccctgggtccacctgcattactatggcctgagggtgagcggggcttcgtggggtcctgggggaaacacctcggtgcccggaagggtcatggtgtggcctccgtgtctcaccttgaacttaagtcaaattcatgagtcatagccacagatagaggatcgagtcctgtgggcagtttacacttcactccagccgagccacttagcgtgggccccaggagagcaagaggaaaagatgc

SEQ ID NO: 366881 - DNA, 184 bp, Homo sapiens; identical to SEQ ID NO: 360800
  chr16:23193716-23193900
  hypo

SEQ ID NO: 366882 - DNA, 156 bp, Homo sapiens; identical to SEQ ID NO: 342524
  chr16:23402123-23402279
  hypo

SEQ ID NO: 366883 - DNA, 106 bp, Homo sapiens; identical to SEQ ID NO: 342525
  chr16:23497832-23497938
  hypo

SEQ ID NO: 366884 - DNA, 239 bp, Homo sapiens; identical to SEQ ID NO: 342526
  chr16:23539152-23539391
  hypo

SEQ ID NO: 366885 - DNA, 148 bp, Homo sapiens; identical to SEQ ID NO: 342528
  chr16:24739345-24739493
  hypo

SEQ ID NO: 366886 - DNA, 713 bp, Homo sapiens; identical to SEQ ID NO: 342529
  chr16:24837143-24837856
  hypo

SEQ ID NO: 366887 - DNA, 43 bp, Homo sapiens; identical to SEQ ID NO: 355440
  chr16:27539990-27540033
  hypo

SEQ ID NO: 366888 - DNA, 168 bp, Homo sapiens
  chr16:27750033-27750201
  hypo
gagtccagaagttacctacaggctgccttgaggcagtggtcctcacacggcatcctcctggctcccttccaactgcagctgccgtgaacatgggacagtccccgcatgtggacagtgccctgcctcaggtgctcgtggggtgctctgccgtgggagcacactcagctc

SEQ ID NO: 366889 - DNA, 211 bp, Homo sapiens; identical to SEQ ID NO: 342537
  chr16:27791003-27791214
  hypo

SEQ ID NO: 366890 - DNA, 64 bp, Homo sapiens; identical to SEQ ID NO: 342539
  chr16:28183893-28183957
  hypo

SEQ ID NO: 366891 - DNA, 43 bp, Homo sapiens; identical to SEQ ID NO: 216882
  chr16:28887802-28887845
  hypo

SEQ ID NO: 366892 - DNA, 100 bp, Homo sapiens; identical to SEQ ID NO: 342542
  chr16:28925777-28925877
  hypo

SEQ ID NO: 366893 - DNA, 54 bp, Homo sapiens; identical to SEQ ID NO: 216888
  chr16:29153320-29153374
  hypo

SEQ ID NO: 366894 - DNA, 276 bp, Homo sapiens; identical to SEQ ID NO: 355443
  chr16:29170096-29170372
  hypo

SEQ ID NO: 366895 - DNA, 533 bp, Homo sapiens; identical to SEQ ID NO: 347376
  chr16:29624651-29625184
  hypo

SEQ ID NO: 366896 - DNA, 173 bp, Homo sapiens; identical to SEQ ID NO: 342548
  chr16:29857096-29857269
  hypo

SEQ ID NO: 366897 - DNA, 76 bp, Homo sapiens; identical to SEQ ID NO: 335313
  chr16:29938107-29938183
  hypo

SEQ ID NO: 366898 - DNA, 60 bp, Homo sapiens
  chr16:30017168-30017228
  hypo
cgacctcctccctgttgggggagagggacggggcagcgtggagaggcaggagtgaggagc

SEQ ID NO: 366899 - DNA, 42 bp, Homo sapiens
  chr16:30017858-30017900
  hypo
gagccagctccccagcccctccctggcctccctccatgtccc

SEQ ID NO: 366900 - DNA, 189 bp, Homo sapiens; identical to SEQ ID NO: 342551
  chr16:30061428-30061617
  hypo

SEQ ID NO: 366901 - DNA, 75 bp, Homo sapiens; identical to SEQ ID NO: 355446
  chr16:30354637-30354712
  hypo

SEQ ID NO: 366902 - DNA, 70 bp, Homo sapiens; identical to SEQ ID NO: 355447
  chr16:30354742-30354812
  hypo

SEQ ID NO: 366903 - DNA, 670 bp, Homo sapiens
  chr16:30566776-30567446
  hypo
cgcccgcagtccgggcacgggtagggcttctcgccggtgtgggtgcgcacgtggcgccgcaggtccgaggggtaggcgaaggcgcggccacagtccgggcaggggaagggggtctcgccgctgtgcacgcgccggtgctggtagagggcagagctctggctgaagcggcggccacagtcggcgcagccatagggtttctcgccggtgtggacgcgcaggtgcgaagtcagcgccgagcgctgcgtgaaggcccggccacactccagacagcggtggggccgctccccacgatggatggcccggtgtttgctcagggaggaagcgtggccgaagcccttgccgcagtcagtgcagtggaagggcttctcgccagtgtgactgtagacgtgctccaccagtgtggagcgccaggcaaagctcttcccgcacacgtagcagccatgacgctggtcagctcgggggacaggggggtgggcacagagggaggggcgtccccggtgcggtgccttggacagctgctcccaaccataagggggcccggccgagggggcttggggagacttcagcccaggagacccggcggccacagggtcgggcttctccagggctcccgtcccttccctttgtctttcctttttcttgtttctggaatctgctgagagataaagag

SEQ ID NO: 366904 - DNA, 105 bp, Homo sapiens
  chr16:30567509-30567614
  hypo
gcctgctggatccccggctgctcctgggagatggaggagtgacacctgttcctcggctgcagagccagacagagccgggagggagagaacagcccattccgcctc

SEQ ID NO: 366905 - DNA, 47 bp, Homo sapiens; identical to SEQ ID NO: 216915
  chr16:30907062-30907109
  hypo

SEQ ID NO: 366906 - DNA, 549 bp, Homo sapiens; identical to SEQ ID NO: 347378
  chr16:30959765-30960314
  hypo

SEQ ID NO: 366907 - DNA, 284 bp, Homo sapiens; identical to SEQ ID NO: 342562
  chr16:31131573-31131857
  hypo

SEQ ID NO: 366908 - DNA, 200 bp, Homo sapiens; identical to SEQ ID NO: 355451
  chr16:31138407-31138607
  hypo

SEQ ID NO: 366909 - DNA, 61 bp, Homo sapiens; identical to SEQ ID NO: 355452
  chr16:31447348-31447409
  hypo

SEQ ID NO: 366910 - DNA, 266 bp, Homo sapiens; identical to SEQ ID NO: 355453
  chr16:31500256-31500522
  hypo

SEQ ID NO: 366911 - DNA, 78 bp, Homo sapiens; identical to SEQ ID NO: 355454
  chr16:31500673-31500751
  hypo

SEQ ID NO: 366912 - DNA, 397 bp, Homo sapiens; identical to SEQ ID NO: 351796
  chr16:31712178-31712575
  hypo

SEQ ID NO: 366913 - DNA, 507 bp, Homo sapiens; identical to SEQ ID NO: 342569
  chr16:46683305-46683812
  hypo

SEQ ID NO: 366914 - DNA, 277 bp, Homo sapiens; identical to SEQ ID NO: 342570
  chr16:46934659-46934936
  hypo

SEQ ID NO: 366915 - DNA, 304 bp, Homo sapiens; identical to SEQ ID NO: 345492
  chr16:47176468-47176772
  hypo

SEQ ID NO: 366916 - DNA, 121 bp, Homo sapiens; identical to SEQ ID NO: 342574
  chr16:48663537-48663658
  hypo

SEQ ID NO: 366917 - DNA, 399 bp, Homo sapiens
  chr16:50335368-50335767
  hypo
cgagcgaggccttcacagtgcgcctggcacgtcacagcattctatgtattctcgtcactcttggtttattttccatgaggtggttattaatctcccagatttccgagagacacactttcaaaacaagctttggatgaaactcaggaaagcagggagtggcctgggagccactgggcaggagcctctgagtgtcctgggtgctgactgcaggtcccctggtggctccaggaccccacggtggaggaggcagttccactgccctggccaggtggggcccgccttggcctgtctgctgcccgaccctggcctgcttcagggagtccggcacgtctggccacttctctgtgaatcatccatgaggcttgctcaagaatgtcggcccagccagcgagtggctcc

SEQ ID NO: 366918 - DNA, 190 bp, Homo sapiens
  chr16:50335818-50336008
  hypo
gggggaccaagggctggcctgtgagcctccctacacatctgctggcctcactctgcccccagcacccccagtgctgcaccatccatactgagccagcatctgggaaaacccctgccggtacctgtgtcccattccaccaccctcctagaatagggccctgatcctcgccctgtaccccggccctggcccc

SEQ ID NO: 366919 - DNA, 257 bp, Homo sapiens
  chr16:53563654-53563911
  hypo
tacagaagcttgcagcaaagctcttgataatgttactcttgataaagttgcctggccaccctctctaagtaaataaaggggagaggaatatgacgcatattaattcacccagtttgcagcctactggaggacgagaggggaaaaaaaagttgcaatgggttcagcgcgtggcattttatatgaataccaaaattgcattcatgattcacatagactttacgataatatattaatattaaaactaaaggtcattccac

SEQ ID NO: 366920 - DNA, 116 bp, Homo sapiens; identical to SEQ ID NO: 351806
  chr16:55513960-55514076
  hypo

SEQ ID NO: 366921 - DNA, 60 bp, Homo sapiens; identical to SEQ ID NO: 204213
  chr16:56225663-56225723
  hypo

SEQ ID NO: 366922 - DNA, 268 bp, Homo sapiens; identical to SEQ ID NO: 204214
  chr16:56225881-56226149
  hypo

SEQ ID NO: 366923 - DNA, 85 bp, Homo sapiens; identical to SEQ ID NO: 351807
  chr16:56228284-56228369
  hypo

SEQ ID NO: 366924 - DNA, 57 bp, Homo sapiens; identical to SEQ ID NO: 351808
  chr16:56228591-56228648
  hypo

SEQ ID NO: 366925 - DNA, 345 bp, Homo sapiens; identical to SEQ ID NO: 342588
  chr16:56398009-56398354
  hypo

SEQ ID NO: 366926 - DNA, 48 bp, Homo sapiens; identical to SEQ ID NO: 360839
  chr16:56666592-56666640
  hypo

SEQ ID NO: 366927 - DNA, 107 bp, Homo sapiens; identical to SEQ ID NO: 342590
  chr16:56782274-56782381
  hypo

SEQ ID NO: 366928 - DNA, 101 bp, Homo sapiens
  chr16:56857042-56857143
  hypo
cgctcctttcctgggaggcgtcttttgaagggagtgagtgggaaggaaaatgggaggctgtgacgctcaccaagtaacgtaagagcggtggcccctggagc

SEQ ID NO: 366929 - DNA, 204 bp, Homo sapiens; identical to SEQ ID NO: 360846
  chr16:57318412-57318616
  hypo

SEQ ID NO: 366930 - DNA, 246 bp, Homo sapiens; identical to SEQ ID NO: 342593
  chr16:57559728-57559974
  hypo

SEQ ID NO: 366931 - DNA, 1300 bp, Homo sapiens; identical to SEQ ID NO: 342595
  chr16:58030214-58031514
  hypo

SEQ ID NO: 366932 - DNA, 72 bp, Homo sapiens; identical to SEQ ID NO: 342600
  chr16:58558309-58558381
  hypo

SEQ ID NO: 366933 - DNA, 57 bp, Homo sapiens; identical to SEQ ID NO: 342601
  chr16:58633220-58633277
  hypo

SEQ ID NO: 366934 - DNA, 205 bp, Homo sapiens; identical to SEQ ID NO: 291600
  chr16:65157317-65157522
  hypo

SEQ ID NO: 366935 - DNA, 566 bp, Homo sapiens; identical to SEQ ID NO: 351815
  chr16:66638452-66639018
  hypo

SEQ ID NO: 366936 - DNA, 161 bp, Homo sapiens; identical to SEQ ID NO: 342604
  chr16:67006210-67006371
  hypo

SEQ ID NO: 366937 - DNA, 109 bp, Homo sapiens; identical to SEQ ID NO: 342605
  chr16:67175573-67175682
  hypo

SEQ ID NO: 366938 - DNA, 132 bp, Homo sapiens; identical to SEQ ID NO: 360851
  chr16:67184509-67184641
  hypo

SEQ ID NO: 366939 - DNA, 130 bp, Homo sapiens; identical to SEQ ID NO: 345493
  chr16:67189038-67189168
  hypo

SEQ ID NO: 366940 - DNA, 377 bp, Homo sapiens; identical to SEQ ID NO: 345494
  chr16:67189259-67189636
  hypo

SEQ ID NO: 366941 - DNA, 177 bp, Homo sapiens; identical to SEQ ID NO: 342608
  chr16:67221106-67221283
  hypo

SEQ ID NO: 366942 - DNA, 93 bp, Homo sapiens; identical to SEQ ID NO: 348746
  chr16:67313759-67313852
  hypo

SEQ ID NO: 366943 - DNA, 115 bp, Homo sapiens; identical to SEQ ID NO: 348747
  chr16:67313958-67314073
  hypo

SEQ ID NO: 366944 - DNA, 62 bp, Homo sapiens; identical to SEQ ID NO: 342611
  chr16:67472428-67472490
  hypo

SEQ ID NO: 366945 - DNA, 255 bp, Homo sapiens; identical to SEQ ID NO: 291637
  chr16:67678786-67679041
  hypo

SEQ ID NO: 366946 - DNA, 189 bp, Homo sapiens
  chr16:67681423-67681612
  hypo
cgactggcccaggcgctggcgggacactcaagctctgggctgcgggagctcagcctcgcggggaacctgctggatgaccgaggtatgactgagcctggggaccgcaggggtgggcagcaggaggaggtgagacccacgtggctgttcccaccccccaaggcatgactgcactcagcagacacctcgagc

SEQ ID NO: 366947 - DNA, 260 bp, Homo sapiens; identical to SEQ ID NO: 342615
  chr16:67709104-67709364
  hypo

SEQ ID NO: 366948 - DNA, 134 bp, Homo sapiens; identical to SEQ ID NO: 345495
  chr16:68118915-68119049
  hypo

SEQ ID NO: 366949 - DNA, 65 bp, Homo sapiens; identical to SEQ ID NO: 347385
  chr16:68269820-68269885
  hypo

SEQ ID NO: 366950 - DNA, 112 bp, Homo sapiens; identical to SEQ ID NO: 204263
  chr16:68269896-68270008
  hypo

SEQ ID NO: 366951 - DNA, 105 bp, Homo sapiens; identical to SEQ ID NO: 204264
  chr16:68270022-68270127
  hypo

SEQ ID NO: 366952 - DNA, 125 bp, Homo sapiens; identical to SEQ ID NO: 347388
  chr16:68270157-68270282
  hypo

SEQ ID NO: 366953 - DNA, 637 bp, Homo sapiens; identical to SEQ ID NO: 347389
  chr16:68270868-68271505
  hypo

SEQ ID NO: 366954 - DNA, 167 bp, Homo sapiens; identical to SEQ ID NO: 355475
  chr16:68386187-68386354
  hypo

SEQ ID NO: 366955 - DNA, 782 bp, Homo sapiens; identical to SEQ ID NO: 342621
  chr16:69143292-69144074
  hypo

SEQ ID NO: 366956 - DNA, 217 bp, Homo sapiens; identical to SEQ ID NO: 217042
  chr16:69352349-69352566
  hypo

SEQ ID NO: 366957 - DNA, 378 bp, Homo sapiens
  chr16:69352596-69352974
  hypo
tgcaagaacagctgatgggtaagtggctcgcggccctgtggcagcggcaggggatgagagtgggtccgctgctgggttggctcatgccccttggccgggcccgggcccgggccggcctccctctcgcaggtgccgtcgtgatggagaagcccaacatacggtggaacgacgtggccgggctggagggggccaaggaggccctcaaagaagctgtcattttgccaatcaaattcccacacttgttcacaggtgagagttgagccatttcaaaccccaatgtaaaaattccaggcttccgcagggctggcactccgaggcacccgggagtcagtggcgactcagcccccggggcctgcagagggccaggcctggctgctc

SEQ ID NO: 366958 - DNA, 574 bp, Homo sapiens
  chr16:69354730-69355304
  hypo
cgcctgctgctggcagcccgggtgcagcctggccccttttccctggagtcttcccgtctgcctgccaagcagagccctttgtgaggctggcttgttgaggatgtgccgccagcatcactggcccatgaaatgcgtccgtttcactcaaatcttcgtgcctccccttccgtgaataccattccatcatccgctgtcaactcctgccgtgtgctgggctctctaggtttgaaaaacgaatttatatccccttgccggaggaagctgcccgcgcccagatgttccggttgcatctcgggagcactccccacaacctcacggatgcaaacatccacgagctggcccggaagacggaaggctactcgggcgcggacatcagcatcatcgtgcgggactctctcatgcagcccgtgaggaaggtgcagtcggccacacacttcaaaaaggtgagtgcccgcggccactgctgagaaaaatctcatagtaagagcgggatgttcggttttttttttcccagctcctggtcctgctccccggctgctcaggtgacacagtctctgaggcctcctggagagcc

SEQ ID NO: 366959 - DNA, 144 bp, Homo sapiens; identical to SEQ ID NO: 342625
  chr16:69383506-69383650
  hypo

SEQ ID NO: 366960 - DNA, 411 bp, Homo sapiens; identical to SEQ ID NO: 342626
  chr16:69833676-69834087
  hypo

SEQ ID NO: 366961 - DNA, 96 bp, Homo sapiens; identical to SEQ ID NO: 342627
  chr16:69906932-69907028
  hypo

SEQ ID NO: 366962 - DNA, 166 bp, Homo sapiens; identical to SEQ ID NO: 342628
  chr16:69921972-69922138
  hypo

SEQ ID NO: 366963 - DNA, 111 bp, Homo sapiens; identical to SEQ ID NO: 342629
  chr16:69922460-69922571
  hypo

SEQ ID NO: 366964 - DNA, 364 bp, Homo sapiens; identical to SEQ ID NO: 342631
  chr16:70754664-70755028
  hypo

SEQ ID NO: 366965 - DNA, 352 bp, Homo sapiens; identical to SEQ ID NO: 342633
  chr16:70808012-70808364
  hypo

SEQ ID NO: 366966 - DNA, 310 bp, Homo sapiens; identical to SEQ ID NO: 355481
  chr16:70811523-70811833
  hypo

SEQ ID NO: 366967 - DNA, 78 bp, Homo sapiens; identical to SEQ ID NO: 348755
  chr16:71715666-71715744
  hypo

SEQ ID NO: 366968 - DNA, 116 bp, Homo sapiens; identical to SEQ ID NO: 342637
  chr16:71754757-71754873
  hypo

SEQ ID NO: 366969 - DNA, 48 bp, Homo sapiens
  chr16:72460075-72460123
  hypo
agcacagcggatgttttcacacccagcaagacaaaggccgtcgtctcc

SEQ ID NO: 366970 - DNA, 477 bp, Homo sapiens
  chr16:72991953-72992430
  hypo
cggctccgggtgcttctccttcatgtgtgcctccagggtctgctggtacttatagtgccagttgcacttggggcacttgagtgtcttacacgagttacgagaatgcatcatggtcatgtggccgcccagcgagcgggaggagcccaggaccgtgtcgcatttggggcactccacgccactccccgaggggcactccccaaccccaagctcgcagagggagccagcgtgctggtgatggggaacgaagcccccatcgtcaccctctgtgctttcatttggttctggtgctgtggcattgtctttattggcactttcgtcagcgaagtccagcctcctgccgccctctgccacattggccctgacgccctcactgttaaagcttaaacgattcctcctgttcgcaccatcaaagacaacaaaggaagaagcagaattagaactagtagaagctgtgcccctcgacagggtctggagcac

SEQ ID NO: 366971 - DNA, 174 bp, Homo sapiens; identical to SEQ ID NO: 335377
  chr16:74659437-74659611
  hypo

SEQ ID NO: 366972 - DNA, 234 bp, Homo sapiens; identical to SEQ ID NO: 342643
  chr16:74908874-74909108
  hypo

SEQ ID NO: 366973 - DNA, 86 bp, Homo sapiens; identical to SEQ ID NO: 342644
  chr16:74984568-74984654
  hypo

SEQ ID NO: 366974 - DNA, 166 bp, Homo sapiens; identical to SEQ ID NO: 342646
  chr16:75127929-75128095
  hypo

SEQ ID NO: 366975 - DNA, 60 bp, Homo sapiens; identical to SEQ ID NO: 348758
  chr16:75148493-75148553
  hypo

SEQ ID NO: 366976 - DNA, 136 bp, Homo sapiens; identical to SEQ ID NO: 348759
  chr16:75149151-75149287
  hypo

SEQ ID NO: 366977 - DNA, 222 bp, Homo sapiens
  chr16:75222813-75223035
  hypo
cgtagccagttgtacccgtgacattttgatggcccatatgggaagtgctcgcggactgcttagggagtcctcccctcctctctccctttcttctccaactccagcctctcagtggacagcgcccaagcctggagacaactgaaggtccccagccaggtctactccctagtggaccagaaggtcccggtggagagatgcctgaccacccgaccaccgaccacc

SEQ ID NO: 366978 - DNA, 120 bp, Homo sapiens
  chr16:75469119-75469239
  hypo
ttttgttaattttggataatgctacaatccattgctgcaaagaactcgaaaatgcacacgccaacataggagttctttttatgcccccaaacactaagtctctcatccaacccctcaatc

SEQ ID NO: 366979 - DNA, 82 bp, Homo sapiens; identical to SEQ ID NO: 204296
  chr16:77246930-77247012
  hypo

SEQ ID NO: 366980 - DNA, 204 bp, Homo sapiens; identical to SEQ ID NO: 204297
  chr16:77247511-77247715
  hypo

SEQ ID NO: 366981 - DNA, 81 bp, Homo sapiens; identical to SEQ ID NO: 360874
  chr16:77469120-77469201
  hypo

SEQ ID NO: 366982 - DNA, 553 bp, Homo sapiens; identical to SEQ ID NO: 355492
  chr16:77753318-77753871
  hypo

SEQ ID NO: 366983 - DNA, 48 bp, Homo sapiens; identical to SEQ ID NO: 351836
  chr16:77822069-77822117
  hypo

SEQ ID NO: 366984 - DNA, 101 bp, Homo sapiens; identical to SEQ ID NO: 291736
  chr16:79804457-79804558
  hypo

SEQ ID NO: 366985 - DNA, 97 bp, Homo sapiens; identical to SEQ ID NO: 351841
  chr16:79804596-79804693
  hypo

SEQ ID NO: 366986 - DNA, 538 bp, Homo sapiens; identical to SEQ ID NO: 291740
  chr16:80837424-80837962
  hypo

SEQ ID NO: 366987 - DNA, 213 bp, Homo sapiens; identical to SEQ ID NO: 342665
  chr16:81533335-81533548
  hypo

SEQ ID NO: 366988 - DNA, 260 bp, Homo sapiens; identical to SEQ ID NO: 355497
  chr16:81563939-81564199
  hypo

SEQ ID NO: 366989 - DNA, 162 bp, Homo sapiens; identical to SEQ ID NO: 217146
  chr16:81564229-81564391
  hypo

SEQ ID NO: 366990 - DNA, 240 bp, Homo sapiens; identical to SEQ ID NO: 355499
  chr16:81564541-81564781
  hypo

SEQ ID NO: 366991 - DNA, 606 bp, Homo sapiens; identical to SEQ ID NO: 342667
  chr16:81565589-81566195
  hypo

SEQ ID NO: 366992 - DNA, 140 bp, Homo sapiens; identical to SEQ ID NO: 342668
  chr16:81580491-81580631
  hypo

SEQ ID NO: 366993 - DNA, 77 bp, Homo sapiens; identical to SEQ ID NO: 355502
  chr16:81632835-81632912
  hypo

SEQ ID NO: 366994 - DNA, 108 bp, Homo sapiens; identical to SEQ ID NO: 342671
  chr16:81688971-81689079
  hypo

SEQ ID NO: 366995 - DNA, 129 bp, Homo sapiens
  chr16:81694554-81694683
  hypo
cgggattgctgagctggggctgtggctgcaggaagtaacctccctctgtgcgcataccagggattgggtttgcacagaaaggccaaaaacctgggccccaccgtcttgggtcacggtcccagacacagg

SEQ ID NO: 366996 - DNA, 346 bp, Homo sapiens
  chr16:81694713-81695059
  hypo
gggctacacccacgtctctgccagacaggtgacaaagagtcacaaggggaacatcttgcttttccttggaatcacttcccggctgtcttaggagacaggttgctgcagatttcctgggctcatgacgtcagagctgggttattattagccaaggttcctctgcgcagtggctggcccacggtggggtgcggctgtggggctttccctgaacacgggaggcagcacggtgctccaggttagcttagaggagctgtggagcagggcatccgctgccgggcacccggcgccagccttgcagtgggattcacataggacatgtccagggcacatctttgtggctcaggcc

SEQ ID NO: 366997 - DNA, 110 bp, Homo sapiens; identical to SEQ ID NO: 342673
  chr16:81700929-81701039
  hypo

SEQ ID NO: 366998 - DNA, 385 bp, Homo sapiens; identical to SEQ ID NO: 342674
  chr16:81703552-81703937
  hypo

SEQ ID NO: 366999 - DNA, 189 bp, Homo sapiens; identical to SEQ ID NO: 342677
  chr16:83934496-83934685
  hypo

SEQ ID NO: 367000 - DNA, 543 bp, Homo sapiens; identical to SEQ ID NO: 342678
  chr16:84132267-84132810
  hypo

SEQ ID NO: 367001 - DNA, 109 bp, Homo sapiens; identical to SEQ ID NO: 342679
  chr16:84170884-84170993
  hypo

SEQ ID NO: 367002 - DNA, 96 bp, Homo sapiens
  chr16:84483346-84483442
  hypo
cgtgggtggcagctgcttttgtcatggttgatacgaccaagccattcagtagctccctgttcttgtcacatcacgcctctgctgacgaaatggctc

SEQ ID NO: 367003 - DNA, 251 bp, Homo sapiens
  chr16:84483472-84483723
  hypo
atcccacgtggcactggcctctaaatctgcacctggcacttgggccccacttgtgtgctgggcaccaggttaagtgcctgtgtgaggccacgccctgaatccccaccgggcagaggagccggcccaggtgacacagccctgcctagtgcagccagcgccttcgcccggatgtctgctgcggagcgtaatgacgcgttccagggacttgctccaggccttgcgggagagcgtaatgagaacgggtcagtggc

SEQ ID NO: 367004 - DNA, 811 bp, Homo sapiens; identical to SEQ ID NO: 347395
  chr16:84650982-84651793
  hypo

SEQ ID NO: 367005 - DNA, 69 bp, Homo sapiens; identical to SEQ ID NO: 355504
  chr16:84780671-84780740
  hypo

SEQ ID NO: 367006 - DNA, 346 bp, Homo sapiens; identical to SEQ ID NO: 342684
  chr16:84813536-84813882
  hypo

SEQ ID NO: 367007 - DNA, 591 bp, Homo sapiens; identical to SEQ ID NO: 342685
  chr16:84822987-84823578
  hypo

SEQ ID NO: 367008 - DNA, 176 bp, Homo sapiens
  chr16:85009963-85010139
  hypo
cgggccaccttttctgggtctcgtgggcagtcgcctaaatcggaagcccacaaagggattcatccagaggagtgaggggggccccccaaagacggacttcatcccttcccatcgcagcctccgctcccatgtgggcttctcacttttcaatcgctcgatctcctggaagcagaaag

SEQ ID NO: 367009 - DNA, 233 bp, Homo sapiens
  chr16:85010169-85010402
  hypo
cggcagaccccaccaagcctcagaatcacaccgtgctcaagcacagtgtgggctcgatggagggtaggtgagtgaactctccttcccagctctgccccgatccagaccccgtggcctctgtgagcccagcccggctgcagccacgtggccagcccagactaccacaatggccctcccagccaggcaccaacatttgtcgctcgttagttactgtgtacagacatttactgagc

SEQ ID NO: 367010 - DNA, 92 bp, Homo sapiens; identical to SEQ ID NO: 355506
  chr16:85033902-85033994
  hypo

SEQ ID NO: 367011 - DNA, 836 bp, Homo sapiens; identical to SEQ ID NO: 360894
  chr16:85202563-85203399
  hypo

SEQ ID NO: 367012 - DNA, 166 bp, Homo sapiens
  chr16:85328796-85328962
  hypo
cgcttcccagggcctccgcacacaccggtccaccttctgcctgaggatggcctgtgctgggcatttcctgggaatggaatcctgcagtacaagctcttttgtggcttctctcactcgggaccagcctggggcgaaaccctgtctctactaaaaatacaaacaaatc

SEQ ID NO: 367013 - DNA, 121 bp, Homo sapiens
  chr16:85328994-85329115
  hypo
gtcagcacatcagcccttttatggctgagtgattattccaccgtgcgcgtagaccgcgtcctttttgcccatccaccgccgatggccgtttgggctgtctccacctttcggctgctgtcac

SEQ ID NO: 367014 - DNA, 257 bp, Homo sapiens; identical to SEQ ID NO: 342694
  chr16:85407706-85407963
  hypo

SEQ ID NO: 367015 - DNA, 87 bp, Homo sapiens; identical to SEQ ID NO: 342695
  chr16:85453282-85453369
  hypo

SEQ ID NO: 367016 - DNA, 65 bp, Homo sapiens
  chr16:85464302-85464367
  hypo
gcggcggcagtctagggcattcgtctgaagggcaccgctggggaaatcctgacgtaggcacacac

SEQ ID NO: 367017 - DNA, 49 bp, Homo sapiens; identical to SEQ ID NO: 355509
  chr16:85517169-85517218
  hypo

SEQ ID NO: 367018 - DNA, 137 bp, Homo sapiens; identical to SEQ ID NO: 355510
  chr16:85517620-85517757
  hypo

SEQ ID NO: 367019 - DNA, 772 bp, Homo sapiens; identical to SEQ ID NO: 335399
  chr16:85590112-85590884
  hypo

SEQ ID NO: 367020 - DNA, 66 bp, Homo sapiens; identical to SEQ ID NO: 355511
  chr16:85617682-85617748
  hypo

SEQ ID NO: 367021 - DNA, 143 bp, Homo sapiens; identical to SEQ ID NO: 342702
  chr16:85618063-85618206
  hypo

SEQ ID NO: 367022 - DNA, 259 bp, Homo sapiens; identical to SEQ ID NO: 217217
  chr16:85671775-85672034
  hypo

SEQ ID NO: 367023 - DNA, 97 bp, Homo sapiens; identical to SEQ ID NO: 355514
  chr16:85672078-85672175
  hypo

SEQ ID NO: 367024 - DNA, 356 bp, Homo sapiens; identical to SEQ ID NO: 355515
  chr16:85673482-85673838
  hypo

SEQ ID NO: 367025 - DNA, 237 bp, Homo sapiens; identical to SEQ ID NO: 217221
  chr16:85673886-85674123
  hypo

SEQ ID NO: 367026 - DNA, 140 bp, Homo sapiens; identical to SEQ ID NO: 355517
  chr16:85674334-85674474
  hypo

SEQ ID NO: 367027 - DNA, 114 bp, Homo sapiens
  chr16:85679455-85679569
  hypo
cattctacctgcttctaccatgcttcctatgcatgcattctaccatgcttctaccatgctttctatgcatgcattctgcctgcttctaccacgcattctacctgcttctaccac

SEQ ID NO: 367028 - DNA, 44 bp, Homo sapiens
  chr16:85683926-85683970
  hypo
cgactcaaacagctgaggctccttgcgccccactggtggggcct

SEQ ID NO: 367029 - DNA, 208 bp, Homo sapiens; identical to SEQ ID NO: 348765
  chr16:85699437-85699645
  hypo

SEQ ID NO: 367030 - DNA, 42 bp, Homo sapiens
  chr16:85731408-85731450
  hypo
cgggagcgtcacctgaggttggatccccaaacaggatccaag

SEQ ID NO: 367031 - DNA, 177 bp, Homo sapiens; identical to SEQ ID NO: 345500
  chr16:85932121-85932298
  hypo

SEQ ID NO: 367032 - DNA, 270 bp, Homo sapiens; identical to SEQ ID NO: 360900
  chr16:86542673-86542943
  hypo

SEQ ID NO: 367033 - DNA, 389 bp, Homo sapiens; identical to SEQ ID NO: 335407
  chr16:86609636-86610025
  hypo

SEQ ID NO: 367034 - DNA, 38 bp, Homo sapiens
  chr16:86903437-86903475
  hypo
cgtagaggtgacggcggcgcaggcgcagtttagaactg

SEQ ID NO: 367035 - DNA, 169 bp, Homo sapiens
  chr16:87311888-87312057
  hypo
ccaggcagcaggccaggaccacgccgcatgttcacaggctcagttatagccgtcgaccacgccacggcgcccaaccacgccacggagcccgaccacgcctcgaccatgccacggcgcctgaacttttatctccatttctcaggtgaggacctgaggctcgggtggcccc

SEQ ID NO: 367036 - DNA, 464 bp, Homo sapiens; identical to SEQ ID NO: 351853
  chr16:87417704-87418168
  hypo

SEQ ID NO: 367037 - DNA, 50 bp, Homo sapiens; identical to SEQ ID NO: 351854
  chr16:87418200-87418250
  hypo

SEQ ID NO: 367038 - DNA, 274 bp, Homo sapiens; identical to SEQ ID NO: 342721
  chr16:87444932-87445206
  hypo

SEQ ID NO: 367039 - DNA, 105 bp, Homo sapiens; identical to SEQ ID NO: 342722
  chr16:87471750-87471855
  hypo

SEQ ID NO: 367040 - DNA, 802 bp, Homo sapiens; identical to SEQ ID NO: 345501
  chr16:87525701-87526503
  hypo

SEQ ID NO: 367041 - DNA, 505 bp, Homo sapiens; identical to SEQ ID NO: 335410
  chr16:87526565-87527070
  hypo

SEQ ID NO: 367042 - DNA, 66 bp, Homo sapiens; identical to SEQ ID NO: 355525
  chr16:87594891-87594957
  hypo

SEQ ID NO: 367043 - DNA, 59 bp, Homo sapiens; identical to SEQ ID NO: 351857
  chr16:87635912-87635971
  hypo

SEQ ID NO: 367044 - DNA, 189 bp, Homo sapiens; identical to SEQ ID NO: 291796
  chr16:87636008-87636197
  hypo

SEQ ID NO: 367045 - DNA, 728 bp, Homo sapiens; identical to SEQ ID NO: 342728
  chr16:87739334-87740062
  hypo

SEQ ID NO: 367046 - DNA, 426 bp, Homo sapiens; identical to SEQ ID NO: 342729
  chr16:87744572-87744998
  hypo

SEQ ID NO: 367047 - DNA, 199 bp, Homo sapiens; identical to SEQ ID NO: 342730
  chr16:87776441-87776640
  hypo

SEQ ID NO: 367048 - DNA, 491 bp, Homo sapiens; identical to SEQ ID NO: 127736
  chr16:87902835-87903326
  hypo

SEQ ID NO: 367049 - DNA, 126 bp, Homo sapiens; identical to SEQ ID NO: 342733
  chr16:87934247-87934373
  hypo

SEQ ID NO: 367050 - DNA, 353 bp, Homo sapiens; identical to SEQ ID NO: 355530
  chr16:88037900-88038253
  hypo

SEQ ID NO: 367051 - DNA, 136 bp, Homo sapiens; identical to SEQ ID NO: 342735
  chr16:88048979-88049115
  hypo

SEQ ID NO: 367052 - DNA, 298 bp, Homo sapiens
  chr16:88096563-88096861
  hypo
cgtgacctcatttttgctgcttcacgtttaagatctgactgctgagttgtcctcatcaccaatttcaaatcaagcccaaatccacaaactatatctcagcctcctgtgtgttttaagaggctgcgccgtgcatggaggtgccctcagcctgcagcagcgcagccaagcggagggcgcaccgcggccttctgtgtgactgttctcagagcacgctgtgccttcatttctgcgtgtttcacggcgttgcccttgtggtatctgctgaccccggttcccttatttctaggcccagtgcctc

SEQ ID NO: 367053 - DNA, 170 bp, Homo sapiens; identical to SEQ ID NO: 346150
  chr16:88106152-88106322
  hypo

SEQ ID NO: 367054 - DNA, 96 bp, Homo sapiens; identical to SEQ ID NO: 346151
  chr16:88106398-88106494
  hypo

SEQ ID NO: 367055 - DNA, 328 bp, Homo sapiens; identical to SEQ ID NO: 342740
  chr16:88111298-88111626
  hypo

SEQ ID NO: 367056 - DNA, 184 bp, Homo sapiens
  chr16:88512691-88512875
  hypo
tggctctgcactggcgtgtcctctcctcgaggcggctgagtctgccgttcggggacctccctcgctcccctgcctggtgtcctctcctcgaggcggccgagtctgccgttcagggacctccctcgctcccctgcctggtgaaggtcatggggtcccgggcctcttcaccctctgtgttgtctcc

SEQ ID NO: 367057 - DNA, 31 bp, Homo sapiens; identical to SEQ ID NO: 217301
  chr16:88757496-88757527
  hypo

SEQ ID NO: 367058 - DNA, 31 bp, Homo sapiens; identical to SEQ ID NO: 355535
  chr16:88757686-88757717
  hypo

SEQ ID NO: 367059 - DNA, 103 bp, Homo sapiens; identical to SEQ ID NO: 355536
  chr16:88791422-88791525
  hypo

SEQ ID NO: 367060 - DNA, 354 bp, Homo sapiens; identical to SEQ ID NO: 355537
  chr16:88791819-88792173
  hypo

SEQ ID NO: 367061 - DNA, 517 bp, Homo sapiens; identical to SEQ ID NO: 348771
  chr16:88792758-88793275
  hypo

SEQ ID NO: 367062 - DNA, 339 bp, Homo sapiens; identical to SEQ ID NO: 217306
  chr16:88793673-88794012
  hypo

SEQ ID NO: 367063 - DNA, 394 bp, Homo sapiens
  chr16:88797394-88797788
  hypo
cgcccctgagccggccacgtgcacaaatgtgactccccatctcagaccgcagggtgctgtgtgccttgagcagacctgcagcaccaggacagccacgcaaatccagtctcacggcgtcagcaacgctaccggcctccctccggaacttcccaagagacaggagaggcgggggcggcttagacccaagacaagagactagagcaaacatcagaccagatcccgtctgaaaaccaaatggccacaaagaagggtgctgaggccggggctgtttgaatgcagaggacacgtttgacgatggcactgccaggagacgggaccacgggtgtggggctgtgggctcagacaccctcacccaggagacgcatgctcgaggcagcacttgggtgtgaggcat

SEQ ID NO: 367064 - DNA, 225 bp, Homo sapiens
  chr16:88800137-88800362
  hypo
ccccacttggctgcccctgtgatggtgtgagggtcagtgcggggcacaaacggggattcccgggtcccctgtgaggaagaggctctggagcccagaggggactctgccaacgccccccgagctgggacatggcacagcagactgggtggcagctgtgctctgcccgcccaacccaccttcaggcacctgcgtggcctggtggggagtggccacgcccagcccctc

SEQ ID NO: 367065 - DNA, 286 bp, Homo sapiens
  chr16:88802345-88802631
  hypo
cgtgccaacacaaggttgtctgtttattcagtcaacaaacgctcactgagaagctactctgggctggctctgggtgggcagaaggggacagacagacacatctgccttcttggcgctgccactcccccgggcaagtggacattgaacaggacgacaaccctgatgggtctgcgcacccaggcacccccggatgtggtggtgcacactcaccatggcaccaaggtccagacaggggtagcgggtgtgctccagccccagctggcgcaggctgacggggcccagggtg

SEQ ID NO: 367066 - DNA, 459 bp, Homo sapiens
  chr16:88802685-88803144
  hypo
gtcatcccatacagcaggatgcagggcgagcacagcatggccagttggtggcggctgcgcaccgtccagatgaggcaggcccagagcagcagtacgaaggtcagccagctgtggtaggtgatgctccatacctgcgcggcagagagggctgcacagctgcccagcgcaccccacccaggcgatgccccacacctgcgcggcagagggggctgcacagctgcccagcgcaccccacccaggcgatgccccacacctgcgcggcagagggggctgcacagctgcccagcgcaccccacccaggcgatgccccacacctgcgcggcagagggggccgcccaccccaacccccacagccgcctaccatcatggcaatgagcgcgcacacatagctctggtccatgatgaggtggcccaggctgtggagcggagacgcctccctgggctcagcccgcttgggcc

SEQ ID NO: 367067 - DNA, 219 bp, Homo sapiens; identical to SEQ ID NO: 342758
  chr16:88892602-88892821
  hypo

SEQ ID NO: 367068 - DNA, 662 bp, Homo sapiens; identical to SEQ ID NO: 342759
  chr16:88898125-88898787
  hypo

SEQ ID NO: 367069 - DNA, 279 bp, Homo sapiens; identical to SEQ ID NO: 348772
  chr16:88946079-88946358
  hypo

SEQ ID NO: 367070 - DNA, 366 bp, Homo sapiens; identical to SEQ ID NO: 355541
  chr16:88956712-88957078
  hypo

SEQ ID NO: 367071 - DNA, 274 bp, Homo sapiens; identical to SEQ ID NO: 342767
  chr16:88959987-88960261
  hypo

SEQ ID NO: 367072 - DNA, 399 bp, Homo sapiens; identical to SEQ ID NO: 291816
  chr16:89006909-89007308
  hypo

SEQ ID NO: 367073 - DNA, 91 bp, Homo sapiens; identical to SEQ ID NO: 204343
  chr16:89007789-89007880
  hypo

SEQ ID NO: 367074 - DNA, 373 bp, Homo sapiens; identical to SEQ ID NO: 204344
  chr16:89007995-89008368
  hypo

SEQ ID NO: 367075 - DNA, 152 bp, Homo sapiens; identical to SEQ ID NO: 342773
  chr16:89028925-89029077
  hypo

SEQ ID NO: 367076 - DNA, 33 bp, Homo sapiens; identical to SEQ ID NO: 321533
  chr16:89109415-89109448
  hypo

SEQ ID NO: 367077 - DNA, 121 bp, Homo sapiens
  chr16:89109659-89109780
  hypo
agctctgctcgctcagcctcgtccccgcctctgacatccttccattcccgctcatggccctctctgtctgccaccaccctccccgccatgggtgcttaaagcccccggcagctgccctccc

SEQ ID NO: 367078 - DNA, 213 bp, Homo sapiens
  chr16:89141710-89141923
  hypo
cgggtacctgccgtagctatgtccagcccaggtcactgagtgtgtaaacacacctcacgtccgcgtcgagaaggcgtcaccagtgcctgctgaacaaagaaggtctggcccagtgtggctgcagccaggaggccaaggagaccagtgagagcaccgccctcgccactgacgctcttgctgggctcattgttgtgctgggcccagtggagcaaa

SEQ ID NO: 367079 - DNA, 148 bp, Homo sapiens
  chr16:89141953-89142101
  hypo
caactctgcacccttgattgaaatgcaatgtctgcggctgacggccacgtgactgcaacccaccctcccggctgccgattaattttaccttttgtgctgccagctgcagtgggttcatggtgagagctgagttgatgcatgcgagtgc

SEQ ID NO: 367080 - DNA, 315 bp, Homo sapiens; identical to SEQ ID NO: 342779
  chr16:89169100-89169415
  hypo

SEQ ID NO: 367081 - DNA, 542 bp, Homo sapiens; identical to SEQ ID NO: 342780
  chr16:89169538-89170080
  hypo

SEQ ID NO: 367082 - DNA, 259 bp, Homo sapiens; identical to SEQ ID NO: 347402
  chr16:89189500-89189759
  hypo

SEQ ID NO: 367083 - DNA, 48 bp, Homo sapiens; identical to SEQ ID NO: 355547
  chr16:89202519-89202567
  hypo

SEQ ID NO: 367084 - DNA, 112 bp, Homo sapiens; identical to SEQ ID NO: 355548
  chr16:89203215-89203327
  hypo

SEQ ID NO: 367085 - DNA, 75 bp, Homo sapiens
  chr16:89216581-89216656
  hypo
cgcaccctcctgcctccaccctgacttgccgtctcctgagcactgaagatatttttggcttgtccgatgtgactc

SEQ ID NO: 367086 - DNA, 354 bp, Homo sapiens
  chr16:89216686-89217040
  hypo
ggcagcatcagggcaccacacatgcctgggcttgcacaacacagcgggagcactgccactcagcagcagctgctgctttcattaaacagttaccttgagaagaaaagataggtgtcgagggctgagagctgtgctagagtttcagggtccgagttggcaggaactgaagtcccgatgctcctcagcccttggctgtcctcagggctgccctctgcgtggggacaccaggccgcccctgcccagggacaccaggccgcctgctcctgctctgtgcatctctcacatcaggctcctcacccagcattgtttgggctatgacagtggctgtgacaagaccctaagacgggaagctgc

SEQ ID NO: 367087 - DNA, 225 bp, Homo sapiens; identical to SEQ ID NO: 217355
  chr16:89219372-89219597
  hypo

SEQ ID NO: 367088 - DNA, 90 bp, Homo sapiens; identical to SEQ ID NO: 355550
  chr16:89220237-89220327
  hypo

SEQ ID NO: 367089 - DNA, 78 bp, Homo sapiens; identical to SEQ ID NO: 355551
  chr16:89254530-89254608
  hypo

SEQ ID NO: 367090 - DNA, 144 bp, Homo sapiens; identical to SEQ ID NO: 355552
  chr16:89254764-89254908
  hypo

SEQ ID NO: 367091 - DNA, 210 bp, Homo sapiens; identical to SEQ ID NO: 342790
  chr16:89354795-89355005
  hypo

SEQ ID NO: 367092 - DNA, 400 bp, Homo sapiens
  chr16:89409913-89410313
  hypo
cgagcaaatgagacagagctcgaggtgggctggaggcatgtgagggtgcacgcgaaacacagtgcctcctcttggagttgccagaattcacctcgttcagaacctcaccccagtcagaaaacacaaggcagcaactggccggaacttggtcagtcacatccataaaccaccaattaccttcacagaccacgactaacaggtttattacagatgagtcacagctcatgttttcaaggaagggtctccaactgagcagtcaccagtgcagcctgcgtcagggcgcgcctccctccagcggtccccgcgtcgcccatgtctgacacagtttatgcttcgcaggcggtaaggctccgctcctcactcccatggaccaacagagtagggaaaacgaaggcacgtt

SEQ ID NO: 367093 - DNA, 107 bp, Homo sapiens; identical to SEQ ID NO: 342793
  chr16:89442354-89442461
  hypo

SEQ ID NO: 367094 - DNA, 254 bp, Homo sapiens; identical to SEQ ID NO: 342794
  chr16:89445385-89445639
  hypo

SEQ ID NO: 367095 - DNA, 58 bp, Homo sapiens; identical to SEQ ID NO: 342795
  chr16:89446081-89446139
  hypo

SEQ ID NO: 367096 - DNA, 70 bp, Homo sapiens
  chr16:89504482-89504552
  hypo
cgctggccaggagggcaccgcaagcttggacacagcaggggcactggagatgggtccacgaaccgcgtgc

SEQ ID NO: 367097 - DNA, 64 bp, Homo sapiens; identical to SEQ ID NO: 342800
  chr16:89577046-89577110
  hypo

SEQ ID NO: 367098 - DNA, 98 bp, Homo sapiens; identical to SEQ ID NO: 355555
  chr16:89647563-89647661
  hypo

SEQ ID NO: 367099 - DNA, 374 bp, Homo sapiens
  chr16:89650291-89650665
  hypo
cggcagctacacagccccgggggtacacagacacctcctctcaggccccgctgggtggggtcagccagcctggggcctctggtcccccacggtggggtcaggccccacctggccaagcctggagcccgggcgtccccctgccaggtgatcgccgaggacatctcggggaacaacggctacgtggagctctccttccgggccaggaagctggacgacaaggtgagtgcaggtgccgggcacgcctggctcaggctgaggtccgggaaccggttcgaaaacccggtccctgcccagcgctgacctcgcgtggctatgtcccgtgtgagacgtgtgcggagtgtgcctggggctgggcgtgctgccgtcacggtcgc

SEQ ID NO: 367100 - DNA, 141 bp, Homo sapiens
  chr16:89650710-89650851
  hypo
ctgggctggggctggggcagctccctcctgtggggaccactcatgaccctgctcagggatggggaaataggcccagcacccccgaggccactgtcgtgacaggaggaactggaacagcgcgcggttctgcgggctcgtcac

SEQ ID NO: 367101 - DNA, 45 bp, Homo sapiens
  chr16:89763790-89763835
  hypo
cgctgtagccacaagcgccgctgggcgtcgccaagcagcacacgc

SEQ ID NO: 367102 - DNA, 823 bp, Homo sapiens
  chr16:89763872-89764695
  hypo
agtgggcagcatgcagctggcgacaggtgtcgcagcagagggtgggcagggcgccaggggacaggcagctgtgtgcctggtagcctgggggctccgagacagacctataggctgaggctggtaccccctctgcccgaatacgcctcgggctggccgctgcagagctttcaggggtggccaggtccccaggcctactcagctcacggcgcagagagaggaaggagaaggcggaaggttcaggttccagcccctcctccaaggccccatatggtgggctgctggcctgcggcagctcctcagctgggggctcccaggcccggcccccagtgccccacagtttggcactctgctcccagagtggtggcctgtaggccagctccgccgggggcgagtcagggcctggtgacggctccccatacaggctggcgtcctccgacccctcgtcttcctgcaagtcccggtataagtccagtggggccctgtaagcagcaggggagcctcgggggggcaggggtggcggctcctcatcctgggccagccgctgctgcagccaggccacacaggaggccacgtccccgctggcacgccgtgcctgcagcagctcctcagctggcagcacactggtgcccagctgggccagcacctcacccaggatctcacactccagccggagggcgaagcagcccagggccacctgcaccagctggcaggcggggggcagggcggtcaccatgagccgatggctgtctctgcgtacgtagcccatcttctggaagctcttcaggaggaggtcgtctgagagcacacccttcagcacgtgcac

SEQ ID NO: 367103 - DNA, 170 bp, Homo sapiens; identical to SEQ ID NO: 342805
  chr16:89770184-89770354
  hypo

SEQ ID NO: 367104 - DNA, 311 bp, Homo sapiens; identical to SEQ ID NO: 342806
  chr16:89871398-89871709
  hypo

SEQ ID NO: 367105 - DNA, 737 bp, Homo sapiens; identical to SEQ ID NO: 321648
  chr16:89900815-89901552
  hypo

SEQ ID NO: 367106 - DNA, 81 bp, Homo sapiens; identical to SEQ ID NO: 348779
  chr16:89901590-89901671
  hypo

SEQ ID NO: 367107 - DNA, 179 bp, Homo sapiens; identical to SEQ ID NO: 342809
  chr16:89947451-89947630
  hypo

SEQ ID NO: 367108 - DNA, 393 bp, Homo sapiens
  chr16:89971731-89972124
  hypo
cgggtgcctcgggctggagtggtgccttcgggtcttgcagtgtttccacatgagctgtgagatgatgacgagtctctcacagcagcatcttgggagtaaagaaatctggcagagacgagaaagagtctcctgtcctgtgtgtgaacacttcggaggctcatgccctaatatgctgcaactgacaggcatccccttgctgttcttgtctcgtttgtctgcgcccttggccctgtgctagttctgtgcatcagcaccgtggctctgtgcagtggtgtggccaggctcaggaccgcctgggagtggtgcccatttgcatctccacagtgaagtctgtgtgccgcggacatgaggtgtgcccgggggtgcccaagaggcgctggtgcccccagccgc

SEQ ID NO: 367109 - DNA, 440 bp, Homo sapiens; identical to SEQ ID NO: 217401
  chr16:89972235-89972675
  hypo

SEQ ID NO: 367110 - DNA, 482 bp, Homo sapiens; identical to SEQ ID NO: 355559
  chr16:89972802-89973284
  hypo

SEQ ID NO: 367111 - DNA, 307 bp, Homo sapiens; identical to SEQ ID NO: 335424
  chr17:523549-523856
  hypo

SEQ ID NO: 367112 - DNA, 483 bp, Homo sapiens; identical to SEQ ID NO: 335425
  chr17:576352-576835
  hypo

SEQ ID NO: 367113 - DNA, 139 bp, Homo sapiens
  chr17:597508-597647
  hypo
cgacctgctctgctgcggcaacctgtaacctattaatacgggatgggggagaacgccgacattcctgcagactgtcgaattctgggtctgactctgtaataccgctagtttgcaagagtccagaaccacaggttgaaac

SEQ ID NO: 367114 - DNA, 64 bp, Homo sapiens; identical to SEQ ID NO: 355561
  chr17:692558-692622
  hypo

SEQ ID NO: 367115 - DNA, 306 bp, Homo sapiens; identical to SEQ ID NO: 355562
  chr17:692652-692958
  hypo

SEQ ID NO: 367116 - DNA, 145 bp, Homo sapiens; identical to SEQ ID NO: 335426
  chr17:850237-850382
  hypo

SEQ ID NO: 367117 - DNA, 539 bp, Homo sapiens; identical to SEQ ID NO: 342817
  chr17:951725-952264
  hypo

SEQ ID NO: 367118 - DNA, 270 bp, Homo sapiens; identical to SEQ ID NO: 342821
  chr17:1407895-1408165
  hypo

SEQ ID NO: 367119 - DNA, 141 bp, Homo sapiens; identical to SEQ ID NO: 346153
  chr17:1412249-1412390
  hypo

SEQ ID NO: 367120 - DNA, 84 bp, Homo sapiens; identical to SEQ ID NO: 346154
  chr17:1412463-1412547
  hypo

SEQ ID NO: 367121 - DNA, 299 bp, Homo sapiens; identical to SEQ ID NO: 342824
  chr17:1454071-1454370
  hypo

SEQ ID NO: 367122 - DNA, 194 bp, Homo sapiens; identical to SEQ ID NO: 342825
  chr17:1462644-1462838
  hypo

SEQ ID NO: 367123 - DNA, 272 bp, Homo sapiens; identical to SEQ ID NO: 342828
  chr17:1775571-1775843
  hypo

SEQ ID NO: 367124 - DNA, 402 bp, Homo sapiens; identical to SEQ ID NO: 217450
  chr17:1783887-1784289
  hypo

SEQ ID NO: 367125 - DNA, 109 bp, Homo sapiens
  chr17:1784817-1784926
  hypo
cggtccacacgtatctgccgaactgcagggcccgttcatagtctgaccagaactagccacagatttgcttttttcttattgcttgattttcttttaggctctggagttc

SEQ ID NO: 367126 - DNA, 328 bp, Homo sapiens; identical to SEQ ID NO: 360927
  chr17:1954658-1954986
  hypo

SEQ ID NO: 367127 - DNA, 115 bp, Homo sapiens; identical to SEQ ID NO: 342837
  chr17:2326357-2326472
  hypo

SEQ ID NO: 367128 - DNA, 440 bp, Homo sapiens; identical to SEQ ID NO: 360932
  chr17:2756601-2757041
  hypo

SEQ ID NO: 367129 - DNA, 121 bp, Homo sapiens; identical to SEQ ID NO: 360933
  chr17:3599052-3599173
  hypo

SEQ ID NO: 367130 - DNA, 391 bp, Homo sapiens; identical to SEQ ID NO: 291891
  chr17:3599244-3599635
  hypo

SEQ ID NO: 367131 - DNA, 593 bp, Homo sapiens; identical to SEQ ID NO: 342841
  chr17:3716199-3716792
  hypo

SEQ ID NO: 367132 - DNA, 138 bp, Homo sapiens; identical to SEQ ID NO: 342842
  chr17:3860438-3860576
  hypo

SEQ ID NO: 367133 - DNA, 459 bp, Homo sapiens; identical to SEQ ID NO: 351870
  chr17:3867210-3867669
  hypo

SEQ ID NO: 367134 - DNA, 322 bp, Homo sapiens; identical to SEQ ID NO: 342846
  chr17:4048756-4049078
  hypo

SEQ ID NO: 367135 - DNA, 60 bp, Homo sapiens; identical to SEQ ID NO: 355574
  chr17:4236565-4236625
  hypo

SEQ ID NO: 367136 - DNA, 336 bp, Homo sapiens; identical to SEQ ID NO: 342850
  chr17:4392128-4392464
  hypo

SEQ ID NO: 367137 - DNA, 73 bp, Homo sapiens; identical to SEQ ID NO: 355575
  chr17:4436345-4436418
  hypo

SEQ ID NO: 367138 - DNA, 164 bp, Homo sapiens; identical to SEQ ID NO: 355576
  chr17:4436450-4436614
  hypo

SEQ ID NO: 367139 - DNA, 36 bp, Homo sapiens; identical to SEQ ID NO: 355577
  chr17:4446272-4446308
  hypo

SEQ ID NO: 367140 - DNA, 138 bp, Homo sapiens; identical to SEQ ID NO: 355578
  chr17:4446376-4446514
  hypo

SEQ ID NO: 367141 - DNA, 520 bp, Homo sapiens; identical to SEQ ID NO: 342853
  chr17:4500096-4500616
  hypo

SEQ ID NO: 367142 - DNA, 238 bp, Homo sapiens; identical to SEQ ID NO: 342854
  chr17:4685696-4685934
  hypo

SEQ ID NO: 367143 - DNA, 507 bp, Homo sapiens; identical to SEQ ID NO: 342855
  chr17:4795549-4796056
  hypo

SEQ ID NO: 367144 - DNA, 515 bp, Homo sapiens; identical to SEQ ID NO: 360937
  chr17:4853391-4853906
  hypo

SEQ ID NO: 367145 - DNA, 341 bp, Homo sapiens; identical to SEQ ID NO: 335442
  chr17:4890368-4890709
  hypo

SEQ ID NO: 367146 - DNA, 34 bp, Homo sapiens; identical to SEQ ID NO: 345503
  chr17:4981985-4982019
  hypo

SEQ ID NO: 367147 - DNA, 213 bp, Homo sapiens; identical to SEQ ID NO: 342859
  chr17:5269074-5269287
  hypo

SEQ ID NO: 367148 - DNA, 61 bp, Homo sapiens; identical to SEQ ID NO: 355584
  chr17:7187868-7187929
  hypo

SEQ ID NO: 367149 - DNA, 93 bp, Homo sapiens; identical to SEQ ID NO: 342862
  chr17:7188345-7188438
  hypo

SEQ ID NO: 367150 - DNA, 569 bp, Homo sapiens; identical to SEQ ID NO: 355585
  chr17:7224752-7225321
  hypo

SEQ ID NO: 367151 - DNA, 1345 bp, Homo sapiens; identical to SEQ ID NO: 345504
  chr17:7254483-7255828
  hypo

SEQ ID NO: 367152 - DNA, 282 bp, Homo sapiens; identical to SEQ ID NO: 342865
  chr17:7320371-7320653
  hypo

SEQ ID NO: 367153 - DNA, 156 bp, Homo sapiens; identical to SEQ ID NO: 346157
  chr17:7369222-7369378
  hypo

SEQ ID NO: 367154 - DNA, 73 bp, Homo sapiens; identical to SEQ ID NO: 342868
  chr17:7493149-7493222
  hypo

SEQ ID NO: 367155 - DNA, 442 bp, Homo sapiens; identical to SEQ ID NO: 342869
  chr17:7493709-7494151
  hypo

SEQ ID NO: 367156 - DNA, 178 bp, Homo sapiens; identical to SEQ ID NO: 342871
  chr17:7806544-7806722
  hypo

SEQ ID NO: 367157 - DNA, 101 bp, Homo sapiens; identical to SEQ ID NO: 342872
  chr17:7807194-7807295
  hypo

SEQ ID NO: 367158 - DNA, 206 bp, Homo sapiens; identical to SEQ ID NO: 342873
  chr17:7951722-7951928
  hypo

SEQ ID NO: 367159 - DNA, 261 bp, Homo sapiens; identical to SEQ ID NO: 342874
  chr17:8012317-8012578
  hypo

SEQ ID NO: 367160 - DNA, 272 bp, Homo sapiens; identical to SEQ ID NO: 217545
  chr17:8104639-8104911
  hypo

SEQ ID NO: 367161 - DNA, 439 bp, Homo sapiens; identical to SEQ ID NO: 342876
  chr17:8197565-8198004
  hypo

SEQ ID NO: 367162 - DNA, 212 bp, Homo sapiens; identical to SEQ ID NO: 355592
  chr17:8383605-8383817
  hypo

SEQ ID NO: 367163 - DNA, 143 bp, Homo sapiens; identical to SEQ ID NO: 348789
  chr17:8384370-8384513
  hypo

SEQ ID NO: 367164 - DNA, 186 bp, Homo sapiens; identical to SEQ ID NO: 342883
  chr17:8977478-8977664
  hypo

SEQ ID NO: 367165 - DNA, 32 bp, Homo sapiens
  chr17:9154702-9154734
  hypo
cgcttgcccagtatttaacgagtgtttaccac

SEQ ID NO: 367166 - DNA, 965 bp, Homo sapiens; identical to SEQ ID NO: 360956
  chr17:9548277-9549242
  hypo

SEQ ID NO: 367167 - DNA, 196 bp, Homo sapiens; identical to SEQ ID NO: 342886
  chr17:9631380-9631576
  hypo

SEQ ID NO: 367168 - DNA, 33 bp, Homo sapiens; identical to SEQ ID NO: 342887
  chr17:9719665-9719698
  hypo

SEQ ID NO: 367169 - DNA, 173 bp, Homo sapiens; identical to SEQ ID NO: 351890
  chr17:10632714-10632887
  hypo

SEQ ID NO: 367170 - DNA, 245 bp, Homo sapiens; identical to SEQ ID NO: 351891
  chr17:10633350-10633595
  hypo

SEQ ID NO: 367171 - DNA, 119 bp, Homo sapiens; identical to SEQ ID NO: 342890
  chr17:12032523-12032642
  hypo

SEQ ID NO: 367172 - DNA, 239 bp, Homo sapiens; identical to SEQ ID NO: 342891
  chr17:12890262-12890501
  hypo

SEQ ID NO: 367173 - DNA, 260 bp, Homo sapiens; identical to SEQ ID NO: 204436
  chr17:14204242-14204502
  hypo

SEQ ID NO: 367174 - DNA, 168 bp, Homo sapiens; identical to SEQ ID NO: 204437
  chr17:14204834-14205002
  hypo

SEQ ID NO: 367175 - DNA, 75 bp, Homo sapiens; identical to SEQ ID NO: 351897
  chr17:14212398-14212473
  hypo

SEQ ID NO: 367176 - DNA, 109 bp, Homo sapiens; identical to SEQ ID NO: 360970
  chr17:16257038-16257147
  hypo

SEQ ID NO: 367177 - DNA, 104 bp, Homo sapiens; identical to SEQ ID NO: 355601
  chr17:16282523-16282627
  hypo

SEQ ID NO: 367178 - DNA, 674 bp, Homo sapiens; identical to SEQ ID NO: 204447
  chr17:16283956-16284630
  hypo

SEQ ID NO: 367179 - DNA, 39 bp, Homo sapiens; identical to SEQ ID NO: 347411
  chr17:16285065-16285104
  hypo

SEQ ID NO: 367180 - DNA, 209 bp, Homo sapiens; identical to SEQ ID NO: 342899
  chr17:16923475-16923684
  hypo

SEQ ID NO: 367181 - DNA, 430 bp, Homo sapiens; identical to SEQ ID NO: 342901
  chr17:17045715-17046145
  hypo

SEQ ID NO: 367182 - DNA, 300 bp, Homo sapiens; identical to SEQ ID NO: 217585
  chr17:17062274-17062574
  hypo

SEQ ID NO: 367183 - DNA, 282 bp, Homo sapiens; identical to SEQ ID NO: 355605
  chr17:17062763-17063045
  hypo

SEQ ID NO: 367184 - DNA, 210 bp, Homo sapiens; identical to SEQ ID NO: 342903
  chr17:17104713-17104923
  hypo

SEQ ID NO: 367185 - DNA, 226 bp, Homo sapiens
  chr17:17120248-17120474
  hypo
cgcccccagtggagaccgtgtggtgcacagcggttctgtgctgggcagtcggtgcaccttggcatccccacctgacgccaggcaccaggccaatactgccctgcgccgcacacctaaggaaaagatgttctcacccgaagtacttcaaaagctgactggacgaggtccacgtctctgcttttccagatcacctggttccccatgagaacgtgccaggccagcatgc

SEQ ID NO: 367186 - DNA, 208 bp, Homo sapiens; identical to SEQ ID NO: 342905
  chr17:17224346-17224554
  hypo

SEQ ID NO: 367187 - DNA, 199 bp, Homo sapiens; identical to SEQ ID NO: 342909
  chr17:17637969-17638168
  hypo

SEQ ID NO: 367188 - DNA, 246 bp, Homo sapiens; identical to SEQ ID NO: 355609
  chr17:18024621-18024867
  hypo

SEQ ID NO: 367189 - DNA, 142 bp, Homo sapiens; identical to SEQ ID NO: 342912
  chr17:18083378-18083520
  hypo

SEQ ID NO: 367190 - DNA, 602 bp, Homo sapiens; identical to SEQ ID NO: 355611
  chr17:18854647-18855249
  hypo

SEQ ID NO: 367191 - DNA, 64 bp, Homo sapiens
  chr17:18855505-18855569
  hypo
cggcaggacagccatggccgccaactccaccagcgacctccacactcccgggacgcagctgagc

SEQ ID NO: 367192 - DNA, 410 bp, Homo sapiens; identical to SEQ ID NO: 335482
  chr17:19282076-19282486
  hypo

SEQ ID NO: 367193 - DNA, 112 bp, Homo sapiens; identical to SEQ ID NO: 342918
  chr17:19513145-19513257
  hypo

SEQ ID NO: 367194 - DNA, 338 bp, Homo sapiens; identical to SEQ ID NO: 342920
  chr17:19646495-19646833
  hypo

SEQ ID NO: 367195 - DNA, 101 bp, Homo sapiens
  chr17:19771712-19771813
  hypo
ttctgcaccttttgggggtcccttgactgcgagaagctggtgacagctcagggccctcttcgcagagaatcgtttctgcacaccgactcagaatcgcacac

SEQ ID NO: 367196 - DNA, 64 bp, Homo sapiens; identical to SEQ ID NO: 342922
  chr17:19842333-19842397
  hypo

SEQ ID NO: 367197 - DNA, 226 bp, Homo sapiens; identical to SEQ ID NO: 342923
  chr17:20903670-20903896
  hypo

SEQ ID NO: 367198 - DNA, 232 bp, Homo sapiens; identical to SEQ ID NO: 355615
  chr17:21104115-21104347
  hypo

SEQ ID NO: 367199 - DNA, 117 bp, Homo sapiens; identical to SEQ ID NO: 342925
  chr17:25619839-25619956
  hypo

SEQ ID NO: 367200 - DNA, 309 bp, Homo sapiens
  chr17:25620264-25620573
  hypo
cggctatgcaacactctactctgtcccatgaatatctgccacatatttgaattcccagtcttatacgccccaggcctttgcaatgtttagggtccacacgagaagccattaaaatgcaaatacgtcatctgtgaccgggaaccaagctggcatctagcagatactgacacatttatcagtctgatgtgtggacaactaggtgcctcccagaggccttcaggtaaggtggaggaagggccaattctgagctgacacagtgggatccatcttggccaggacagtgggatccatcttggccaggacaaaggc

SEQ ID NO: 367201 - DNA, 125 bp, Homo sapiens; identical to SEQ ID NO: 342928
  chr17:25842444-25842569
  hypo

SEQ ID NO: 367202 - DNA, 62 bp, Homo sapiens; identical to SEQ ID NO: 348797
  chr17:25931759-25931821
  hypo

SEQ ID NO: 367203 - DNA, 200 bp, Homo sapiens; identical to SEQ ID NO: 342930
  chr17:25934818-25935018
  hypo

SEQ ID NO: 367204 - DNA, 317 bp, Homo sapiens; identical to SEQ ID NO: 355619
  chr17:25936178-25936495
  hypo

SEQ ID NO: 367205 - DNA, 110 bp, Homo sapiens
  chr17:26594091-26594201
  hypo
cgtcactctcaggaaaacgaaacctaactaacgccgcccttgccccaccccgactccgcccctacatcacctagtgtccatataagcgtgctgcaactacaacacagtgc

SEQ ID NO: 367206 - DNA, 300 bp, Homo sapiens; identical to SEQ ID NO: 342933
  chr17:26851601-26851901
  hypo

SEQ ID NO: 367207 - DNA, 48 bp, Homo sapiens; identical to SEQ ID NO: 348798
  chr17:26961722-26961770
  hypo

SEQ ID NO: 367208 - DNA, 168 bp, Homo sapiens
  chr17:27085337-27085505
  hypo
cgggggctcggttgccaggggctcggtgggccttgctcagcatggccaggctctgttctcggaagcaggcctgttggaaatccccacttaggtaatccactgtttgcatcaagctgttctggcttgccactggaccgcccccggtccctgctcggtagtgggccccgg

SEQ ID NO: 367209 - DNA, 52 bp, Homo sapiens
  chr17:27085535-27085587
  hypo
tgggctgcccaccgtggaacggcatggcaaggtcctgagaccccgagctgtc

SEQ ID NO: 367210 - DNA, 181 bp, Homo sapiens; identical to SEQ ID NO: 342936
  chr17:27207684-27207865
  hypo

SEQ ID NO: 367211 - DNA, 59 bp, Homo sapiens; identical to SEQ ID NO: 351908
  chr17:27332307-27332366
  hypo

SEQ ID NO: 367212 - DNA, 122 bp, Homo sapiens; identical to SEQ ID NO: 351909
  chr17:27332733-27332855
  hypo

SEQ ID NO: 367213 - DNA, 56 bp, Homo sapiens; identical to SEQ ID NO: 360989
  chr17:27893139-27893195
  hypo

SEQ ID NO: 367214 - DNA, 387 bp, Homo sapiens; identical to SEQ ID NO: 360990
  chr17:27893344-27893731
  hypo

SEQ ID NO: 367215 - DNA, 125 bp, Homo sapiens; identical to SEQ ID NO: 355623
  chr17:27909050-27909175
  hypo

SEQ ID NO: 367216 - DNA, 157 bp, Homo sapiens; identical to SEQ ID NO: 355624
  chr17:27909205-27909362
  hypo

SEQ ID NO: 367217 - DNA, 228 bp, Homo sapiens
  chr17:28299376-28299604
  hypo
ttaaatggattcctggctccttttaaaatggggatcactcacttgtgagctaggagtgctcataaatattgtgtagtcattgtttctaggcccttcaggactaaaacatataatttttagagtcaatgacccgtgaccagacatcacctgcagcctcttcaggcgtgccaccgctgccgggcctgctgtacgacccgcgggctctgggccatgcctgctcttgcgccc

SEQ ID NO: 367218 - DNA, 337 bp, Homo sapiens; identical to SEQ ID NO: 351912
  chr17:29248950-29249287
  hypo

SEQ ID NO: 367219 - DNA, 32 bp, Homo sapiens; identical to SEQ ID NO: 347419
  chr17:29718746-29718778
  hypo

SEQ ID NO: 367220 - DNA, 121 bp, Homo sapiens; identical to SEQ ID NO: 342948
  chr17:29773391-29773512
  hypo

SEQ ID NO: 367221 - DNA, 60 bp, Homo sapiens; identical to SEQ ID NO: 355627
  chr17:30333052-30333112
  hypo

SEQ ID NO: 367222 - DNA, 126 bp, Homo sapiens; identical to SEQ ID NO: 342952
  chr17:30804383-30804509
  hypo

SEQ ID NO: 367223 - DNA, 261 bp, Homo sapiens; identical to SEQ ID NO: 346160
  chr17:33344328-33344589
  hypo

SEQ ID NO: 367224 - DNA, 38 bp, Homo sapiens; identical to SEQ ID NO: 342957
  chr17:33351154-33351192
  hypo

SEQ ID NO: 367225 - DNA, 717 bp, Homo sapiens; identical to SEQ ID NO: 335510
  chr17:33814248-33814965
  hypo

SEQ ID NO: 367226 - DNA, 130 bp, Homo sapiens; identical to SEQ ID NO: 342960
  chr17:35545278-35545408
  hypo

SEQ ID NO: 367227 - DNA, 93 bp, Homo sapiens; identical to SEQ ID NO: 342962
  chr17:36864049-36864142
  hypo

SEQ ID NO: 367228 - DNA, 36 bp, Homo sapiens; identical to SEQ ID NO: 355631
  chr17:36875885-36875921
  hypo

SEQ ID NO: 367229 - DNA, 406 bp, Homo sapiens; identical to SEQ ID NO: 355632
  chr17:36876379-36876785
  hypo

SEQ ID NO: 367230 - DNA, 226 bp, Homo sapiens; identical to SEQ ID NO: 347425
  chr17:36886750-36886976
  hypo

SEQ ID NO: 367231 - DNA, 194 bp, Homo sapiens
  chr17:37074886-37075080
  hypo
cgccgccgacgaggacgaggtctccttccaggacggggacaccatcgtcaacgtgcagcagatcgacgacggctggatgtacgggacggtggagcgcaccggcgacacggggatgctgccggccaactacgtggaggccatctgaacccgcagcgcccccatctgtcttcagcacattccacggcatcgcatcc

SEQ ID NO: 367232 - DNA, 123 bp, Homo sapiens; identical to SEQ ID NO: 342967
  chr17:37583075-37583198
  hypo

SEQ ID NO: 367233 - DNA, 179 bp, Homo sapiens; identical to SEQ ID NO: 342970
  chr17:37819059-37819238
  hypo

SEQ ID NO: 367234 - DNA, 99 bp, Homo sapiens; identical to SEQ ID NO: 217757
  chr17:37881018-37881117
  hypo

SEQ ID NO: 367235 - DNA, 124 bp, Homo sapiens
  chr17:38179119-38179243
  hypo
cgggatctggggctcctacaccctgccaccccagcatggctgtccagtaaggcccgcagagggggccccagatgttgctccgcccctcaggctgaatcccagtctctggccagagctccccaag

SEQ ID NO: 367236 - DNA, 124 bp, Homo sapiens; identical to SEQ ID NO: 322397
  chr17:38179273-38179397
  hypo

SEQ ID NO: 367237 - DNA, 133 bp, Homo sapiens
  chr17:38179430-38179563
  hypo
gggtgtcaaagatgtggatggagcggctgtccacccagcccttctccagcaccttggcaaaaatgtccgtcagcacctctttgatgggccgcttggggggcagcaggttccagtagggcattgtgtccacccc

SEQ ID NO: 367238 - DNA, 436 bp, Homo sapiens; identical to SEQ ID NO: 204598
  chr17:38498112-38498548
  hypo

SEQ ID NO: 367239 - DNA, 570 bp, Homo sapiens; identical to SEQ ID NO: 361027
  chr17:38498596-38499166
  hypo

SEQ ID NO: 367240 - DNA, 508 bp, Homo sapiens; identical to SEQ ID NO: 342975
  chr17:39658629-39659137
  hypo

SEQ ID NO: 367241 - DNA, 104 bp, Homo sapiens; identical to SEQ ID NO: 342976
  chr17:39659216-39659320
  hypo

SEQ ID NO: 367242 - DNA, 279 bp, Homo sapiens; identical to SEQ ID NO: 361028
  chr17:39683530-39683809
  hypo

SEQ ID NO: 367243 - DNA, 794 bp, Homo sapiens; identical to SEQ ID NO: 361029
  chr17:39683839-39684633
  hypo

SEQ ID NO: 367244 - DNA, 191 bp, Homo sapiens; identical to SEQ ID NO: 355636
  chr17:39788236-39788427
  hypo

SEQ ID NO: 367245 - DNA, 36 bp, Homo sapiens; identical to SEQ ID NO: 347428
  chr17:40332770-40332806
  hypo

SEQ ID NO: 367246 - DNA, 649 bp, Homo sapiens; identical to SEQ ID NO: 348804
  chr17:40371760-40372409
  hypo

SEQ ID NO: 367247 - DNA, 139 bp, Homo sapiens; identical to SEQ ID NO: 342982
  chr17:40372634-40372773
  hypo

SEQ ID NO: 367248 - DNA, 418 bp, Homo sapiens; identical to SEQ ID NO: 342983
  chr17:40375292-40375710
  hypo

SEQ ID NO: 367249 - DNA, 199 bp, Homo sapiens
  chr17:40436563-40436762
  hypo
cgtgagccaccatgcccggccctttgggataattctcttaatccataaactcaaacccaccttcatgtaagtgtgcacagagcacactgtcccattcaatagagcaggggtgtaggctgggcgagaatggagatgccatgctccgcaccgcagaaaaatggtgggctagcccagcccagggaggcctcttcactccgcc

SEQ ID NO: 367250 - DNA, 841 bp, Homo sapiens; identical to SEQ ID NO: 335546
  chr17:41245464-41246305
  hypo

SEQ ID NO: 367251 - DNA, 170 bp, Homo sapiens; identical to SEQ ID NO: 345520
  chr17:42092357-42092527
  hypo

SEQ ID NO: 367252 - DNA, 325 bp, Homo sapiens; identical to SEQ ID NO: 92817
  chr17:42097490-42097815
  hypo

SEQ ID NO: 367253 - DNA, 343 bp, Homo sapiens; identical to SEQ ID NO: 355641
  chr17:42254319-42254662
  hypo

SEQ ID NO: 367254 - DNA, 92 bp, Homo sapiens
  chr17:42335362-42335454
  hypo
cgccgaaggtgatggcgggtgacagtgcagcaaagtagatgaagatgacggcagccaggacctgggggctgaatgcatctgtgatgtcactc

SEQ ID NO: 367255 - DNA, 99 bp, Homo sapiens; identical to SEQ ID NO: 342995
  chr17:42338019-42338118
  hypo

SEQ ID NO: 367256 - DNA, 62 bp, Homo sapiens; identical to SEQ ID NO: 204629
  chr17:42402710-42402772
  hypo

SEQ ID NO: 367257 - DNA, 192 bp, Homo sapiens; identical to SEQ ID NO: 347435
  chr17:42402917-42403109
  hypo

SEQ ID NO: 367258 - DNA, 121 bp, Homo sapiens; identical to SEQ ID NO: 361049
  chr17:42906461-42906582
  hypo

SEQ ID NO: 367259 - DNA, 40 bp, Homo sapiens; identical to SEQ ID NO: 361052
  chr17:43045529-43045569
  hypo

SEQ ID NO: 367260 - DNA, 111 bp, Homo sapiens; identical to SEQ ID NO: 343000
  chr17:43121686-43121797
  hypo

SEQ ID NO: 367261 - DNA, 230 bp, Homo sapiens; identical to SEQ ID NO: 343001
  chr17:43180339-43180569
  hypo

SEQ ID NO: 367262 - DNA, 425 bp, Homo sapiens; identical to SEQ ID NO: 348809
  chr17:43246865-43247290
  hypo

SEQ ID NO: 367263 - DNA, 38 bp, Homo sapiens; identical to SEQ ID NO: 347438
  chr17:43298587-43298625
  hypo

SEQ ID NO: 367264 - DNA, 230 bp, Homo sapiens; identical to SEQ ID NO: 347439
  chr17:43298666-43298896
  hypo

SEQ ID NO: 367265 - DNA, 879 bp, Homo sapiens; identical to SEQ ID NO: 351953
  chr17:43324795-43325674
  hypo

SEQ ID NO: 367266 - DNA, 107 bp, Homo sapiens; identical to SEQ ID NO: 343008
  chr17:46006406-46006513
  hypo

SEQ ID NO: 367267 - DNA, 298 bp, Homo sapiens; identical to SEQ ID NO: 292442
  chr17:46089283-46089581
  hypo

SEQ ID NO: 367268 - DNA, 218 bp, Homo sapiens; identical to SEQ ID NO: 345528
  chr17:46124683-46124901
  hypo

SEQ ID NO: 367269 - DNA, 164 bp, Homo sapiens; identical to SEQ ID NO: 345529
  chr17:46125148-46125312
  hypo

SEQ ID NO: 367270 - DNA, 31 bp, Homo sapiens; identical to SEQ ID NO: 348815
  chr17:46152418-46152449
  hypo

SEQ ID NO: 367271 - DNA, 181 bp, Homo sapiens; identical to SEQ ID NO: 351966
  chr17:46659093-46659274
  hypo

SEQ ID NO: 367272 - DNA, 45 bp, Homo sapiens; identical to SEQ ID NO: 204661
  chr17:46659384-46659429
  hypo

SEQ ID NO: 367273 - DNA, 63 bp, Homo sapiens; identical to SEQ ID NO: 345531
  chr17:46687527-46687590
  hypo

SEQ ID NO: 367274 - DNA, 170 bp, Homo sapiens; identical to SEQ ID NO: 351973
  chr17:46724200-46724370
  hypo

SEQ ID NO: 367275 - DNA, 348 bp, Homo sapiens; identical to SEQ ID NO: 292486
  chr17:47073560-47073908
  hypo

SEQ ID NO: 367276 - DNA, 152 bp, Homo sapiens; identical to SEQ ID NO: 204688
  chr17:47074409-47074561
  hypo

SEQ ID NO: 367277 - DNA, 65 bp, Homo sapiens; identical to SEQ ID NO: 351981
  chr17:47653244-47653309
  hypo

SEQ ID NO: 367278 - DNA, 715 bp, Homo sapiens; identical to SEQ ID NO: 351982
  chr17:47653373-47654088
  hypo

SEQ ID NO: 367279 - DNA, 284 bp, Homo sapiens; identical to SEQ ID NO: 343021
  chr17:48565138-48565422
  hypo

SEQ ID NO: 367280 - DNA, 146 bp, Homo sapiens; identical to SEQ ID NO: 355663
  chr17:48687012-48687158
  hypo

SEQ ID NO: 367281 - DNA, 78 bp, Homo sapiens; identical to SEQ ID NO: 355664
  chr17:48687246-48687324
  hypo

SEQ ID NO: 367282 - DNA, 197 bp, Homo sapiens; identical to SEQ ID NO: 343024
  chr17:48776811-48777008
  hypo

SEQ ID NO: 367283 - DNA, 120 bp, Homo sapiens; identical to SEQ ID NO: 343025
  chr17:48845008-48845128
  hypo

SEQ ID NO: 367284 - DNA, 134 bp, Homo sapiens; identical to SEQ ID NO: 343028
  chr17:49281042-49281176
  hypo

SEQ ID NO: 367285 - DNA, 297 bp, Homo sapiens; identical to SEQ ID NO: 345533
  chr17:54911482-54911779
  hypo

SEQ ID NO: 367286 - DNA, 515 bp, Homo sapiens; identical to SEQ ID NO: 345534
  chr17:54911874-54912389
  hypo

SEQ ID NO: 367287 - DNA, 132 bp, Homo sapiens; identical to SEQ ID NO: 343033
  chr17:55664904-55665036
  hypo

SEQ ID NO: 367288 - DNA, 348 bp, Homo sapiens; identical to SEQ ID NO: 343034
  chr17:55753412-55753760
  hypo

SEQ ID NO: 367289 - DNA, 266 bp, Homo sapiens; identical to SEQ ID NO: 343035
  chr17:55917220-55917486
  hypo

SEQ ID NO: 367290 - DNA, 215 bp, Homo sapiens; identical to SEQ ID NO: 292571
  chr17:56327007-56327222
  hypo

SEQ ID NO: 367291 - DNA, 49 bp, Homo sapiens
  chr17:56435251-56435300
  hypo
cgtcaactgggccaggggctggctcagggagggccctggggcactgtgg

SEQ ID NO: 367292 - DNA, 215 bp, Homo sapiens
  chr17:56435330-56435545
  hypo
gttggatctggtgacttgctgatcaggagaaggtggctctggctggggctgtgtccgaggaataggaggcctggactgggggactccggtttctgggccaggcttcctgccatgccactggaaccgctttttgtagtggtggtgccggtggcggtggtagtggacatggctggaaacctgggtttcccctgtgggcaccaccgagtccaaggaac

SEQ ID NO: 367293 - DNA, 80 bp, Homo sapiens; identical to SEQ ID NO: 343039
  chr17:56439864-56439944
  hypo

SEQ ID NO: 367294 - DNA, 136 bp, Homo sapiens; identical to SEQ ID NO: 348819
  chr17:56743008-56743144
  hypo

SEQ ID NO: 367295 - DNA, 48 bp, Homo sapiens; identical to SEQ ID NO: 348820
  chr17:57297129-57297177
  hypo

SEQ ID NO: 367296 - DNA, 145 bp, Homo sapiens; identical to SEQ ID NO: 343043
  chr17:57787150-57787295
  hypo

SEQ ID NO: 367297 - DNA, 235 bp, Homo sapiens; identical to SEQ ID NO: 343046
  chr17:59239030-59239265
  hypo

SEQ ID NO: 367298 - DNA, 218 bp, Homo sapiens
  chr17:60744620-60744838
  hypo
gcaccaggcttcccgaactggctcaggcttccgagggagcagagggaggtaggaggttctgagcagggccccgggagccacggtgtgagcttctctctccgggggtgctggcgccctgccctccccacagaccagccggacaaccccagtgaggagaactgtggagtgatccgcactgagtcctcgggcggctggcagaaccgtgactgcagcatcgc

SEQ ID NO: 367299 - DNA, 214 bp, Homo sapiens; identical to SEQ ID NO: 348821
  chr17:60754652-60754866
  hypo

SEQ ID NO: 367300 - DNA, 207 bp, Homo sapiens; identical to SEQ ID NO: 343051
  chr17:60766578-60766785
  hypo

SEQ ID NO: 367301 - DNA, 102 bp, Homo sapiens; identical to SEQ ID NO: 348822
  chr17:60766832-60766934
  hypo

SEQ ID NO: 367302 - DNA, 224 bp, Homo sapiens; identical to SEQ ID NO: 348823
  chr17:60767107-60767331
  hypo

SEQ ID NO: 367303 - DNA, 40 bp, Homo sapiens; identical to SEQ ID NO: 347459
  chr17:60885408-60885448
  hypo

SEQ ID NO: 367304 - DNA, 308 bp, Homo sapiens; identical to SEQ ID NO: 347460
  chr17:60885548-60885856
  hypo

SEQ ID NO: 367305 - DNA, 104 bp, Homo sapiens; identical to SEQ ID NO: 361115
  chr17:61553834-61553938
  hypo

SEQ ID NO: 367306 - DNA, 48 bp, Homo sapiens; identical to SEQ ID NO: 204746
  chr17:61553939-61553987
  hypo

SEQ ID NO: 367307 - DNA, 322 bp, Homo sapiens; identical to SEQ ID NO: 361117
  chr17:61554094-61554416
  hypo

SEQ ID NO: 367308 - DNA, 111 bp, Homo sapiens; identical to SEQ ID NO: 345536
  chr17:61777761-61777872
  hypo

SEQ ID NO: 367309 - DNA, 76 bp, Homo sapiens; identical to SEQ ID NO: 345537
  chr17:61778423-61778499
  hypo

SEQ ID NO: 367310 - DNA, 243 bp, Homo sapiens; identical to SEQ ID NO: 343059
  chr17:62783342-62783585
  hypo

SEQ ID NO: 367311 - DNA, 220 bp, Homo sapiens; identical to SEQ ID NO: 343060
  chr17:63152527-63152747
  hypo

SEQ ID NO: 367312 - DNA, 848 bp, Homo sapiens; identical to SEQ ID NO: 335648
  chr17:63555681-63556529
  hypo

SEQ ID NO: 367313 - DNA, 669 bp, Homo sapiens; identical to SEQ ID NO: 335649
  chr17:64187889-64188558
  hypo

SEQ ID NO: 367314 - DNA, 675 bp, Homo sapiens; identical to SEQ ID NO: 352002
  chr17:64298985-64299660
  hypo

SEQ ID NO: 367315 - DNA, 416 bp, Homo sapiens
  chr17:64751203-64751619
  hypo
tcagctagccttaccgaagagctaaaaagagattcatcccaaacaagagcttccttggaagcattccatgaagacttgaaacggtgctgcctcccaccacctgacccagtattgtcagtgcctcctctgaggatcgcagaaaatcgcaccccacgcccccccagtgcacattccagacttggagaagcgcggcatggggtggcggtggggagaacacctttctgccagatcaaaagcccagcactttattcagagttttatttatggctccttcagaaggttagtccagtcacgcctccttaataaccgcctcatcacacatgattcaggtgtcctggggccacttcacgctcctggcttcctggcccaaagcccaggagaccgctgaaccccactgcctggcattatttgcgggc

SEQ ID NO: 367316 - DNA, 272 bp, Homo sapiens
  chr17:65040729-65041001
  hypo
cgcagccgccggaccctgcccagggcacccacgcctcggcgaccaccatgtcccagaccaaaatgctgaaggtccgcgtgaccctcttctgcatcctggcaggcatcgtgctggccatgacagccgtggtaaccgaccactgggctgtgctgagcccccacatggagcaccacaacactacctgcgaggcggcccacttcggcctctggcggatttgtaccaagcgcatccccatggacgacagcaagacctgcgggcccatcaccctgccc

SEQ ID NO: 367317 - DNA, 293 bp, Homo sapiens; identical to SEQ ID NO: 355684
  chr17:66420425-66420718
  hypo

SEQ ID NO: 367318 - DNA, 425 bp, Homo sapiens; identical to SEQ ID NO: 343072
  chr17:66440125-66440550
  hypo

SEQ ID NO: 367319 - DNA, 57 bp, Homo sapiens; identical to SEQ ID NO: 343073
  chr17:66913081-66913138
  hypo

SEQ ID NO: 367320 - DNA, 204 bp, Homo sapiens; identical to SEQ ID NO: 204763
  chr17:68164928-68165132
  hypo

SEQ ID NO: 367321 - DNA, 133 bp, Homo sapiens; identical to SEQ ID NO: 343075
  chr17:70220156-70220289
  hypo

SEQ ID NO: 367322 - DNA, 335 bp, Homo sapiens
  chr17:70713689-70714024
  hypo
cgtgtccctgtgtggccacggggcactgtcctctccgcatgtgtcatccctccttgttttataagggtacccagtcatgttggacttaggcccaccctaatccagtacgagctgatcttaactaattacatctgcaaagatcctaccgccaaataaggttacagtcacaggtcctggggattaagacttccatacctttctggggtgcatgacttcagcatcgctccttattctggaacttacaggacaggtcactcttgctctgtagctctccctcggagtgaccctgcacatcggctgtctaggaggtgaggctggagaagtgagtcatgacc

SEQ ID NO: 367323 - DNA, 240 bp, Homo sapiens; identical to SEQ ID NO: 292660
  chr17:71160878-71161118
  hypo

SEQ ID NO: 367324 - DNA, 201 bp, Homo sapiens; identical to SEQ ID NO: 355689
  chr17:71201650-71201851
  hypo

SEQ ID NO: 367325 - DNA, 256 bp, Homo sapiens; identical to SEQ ID NO: 343083
  chr17:71431621-71431877
  hypo

SEQ ID NO: 367326 - DNA, 308 bp, Homo sapiens; identical to SEQ ID NO: 343084
  chr17:71548553-71548861
  hypo

SEQ ID NO: 367327 - DNA, 398 bp, Homo sapiens; identical to SEQ ID NO: 343085
  chr17:71744668-71745066
  hypo

SEQ ID NO: 367328 - DNA, 197 bp, Homo sapiens; identical to SEQ ID NO: 355692
  chr17:72220057-72220254
  hypo

SEQ ID NO: 367329 - DNA, 183 bp, Homo sapiens; identical to SEQ ID NO: 355693
  chr17:72367880-72368063
  hypo

SEQ ID NO: 367330 - DNA, 345 bp, Homo sapiens; identical to SEQ ID NO: 355694
  chr17:72368130-72368475
  hypo

SEQ ID NO: 367331 - DNA, 359 bp, Homo sapiens; identical to SEQ ID NO: 347466
  chr17:72449954-72450313
  hypo

SEQ ID NO: 367332 - DNA, 336 bp, Homo sapiens; identical to SEQ ID NO: 347467
  chr17:72450330-72450666
  hypo

SEQ ID NO: 367333 - DNA, 207 bp, Homo sapiens; identical to SEQ ID NO: 343092
  chr17:72811689-72811896
  hypo

SEQ ID NO: 367334 - DNA, 79 bp, Homo sapiens; identical to SEQ ID NO: 343093
  chr17:72823386-72823465
  hypo

SEQ ID NO: 367335 - DNA, 508 bp, Homo sapiens; identical to SEQ ID NO: 355697
  chr17:72824032-72824540
  hypo

SEQ ID NO: 367336 - DNA, 230 bp, Homo sapiens
  chr17:72875508-72875738
  hypo
cgcccccagcccagccctcgactaccttcaggcacatgttatcagagagcctggggaatagatggtgttccacatggcagctgatgatcgagtggccgaacgcccagtccagcacgggcagccgggccaggttaagcacccccaggctcatcatgtgaatccgacggggcttgttgtcccgggagaacatgggcagtccgatgtgctgtgacagacacgtgggtcacgcc

SEQ ID NO: 367337 - DNA, 65 bp, Homo sapiens; identical to SEQ ID NO: 347468
  chr17:73073967-73074032
  hypo

SEQ ID NO: 367338 - DNA, 84 bp, Homo sapiens; identical to SEQ ID NO: 355699
  chr17:73090991-73091075
  hypo

SEQ ID NO: 367339 - DNA, 257 bp, Homo sapiens; identical to SEQ ID NO: 322977
  chr17:73091180-73091437
  hypo

SEQ ID NO: 367340 - DNA, 127 bp, Homo sapiens; identical to SEQ ID NO: 343099
  chr17:73100161-73100288
  hypo

SEQ ID NO: 367341 - DNA, 59 bp, Homo sapiens
  chr17:73124823-73124882
  hypo
cgcaggaggtgtcccactcatcatcaactgcctatccagccccaatgaggagacggtgc

SEQ ID NO: 367342 - DNA, 166 bp, Homo sapiens
  chr17:73124912-73125078
  hypo
gcccgccgggccgcagctttctcccagagctgaccgccacgcccgtggtgcagtgcatgcttcgcttctccctctcggccagcgccaggctccggaacctggcacagatcttcctggaggacttctgctccccccgccaggtggccgaggcccgcagccggcaggc

SEQ ID NO: 367343 - DNA, 48 bp, Homo sapiens; identical to SEQ ID NO: 346169
  chr17:73215386-73215434
  hypo

SEQ ID NO: 367344 - DNA, 104 bp, Homo sapiens
  chr17:73236302-73236406
  hypo
ttccccgctgcagctggcacgctctggagggaaggacagctaactgcagcccaggagacatgacgctggaaagtggaggtccttggcacagtagtgctgtcacc

SEQ ID NO: 367345 - DNA, 141 bp, Homo sapiens; identical to SEQ ID NO: 343103
  chr17:73242514-73242655
  hypo

SEQ ID NO: 367346 - DNA, 80 bp, Homo sapiens; identical to SEQ ID NO: 292709
  chr17:73584287-73584367
  hypo

SEQ ID NO: 367347 - DNA, 170 bp, Homo sapiens; identical to SEQ ID NO: 352021
  chr17:73584951-73585121
  hypo

SEQ ID NO: 367348 - DNA, 270 bp, Homo sapiens
  chr17:73607997-73608267
  hypo
cgagtgcctgccgcctgaggttcctgcccggcccagcctgactctcccagcagacattgacctgttccctttctccagcttcgtcgccatcggctttcaggtgggcgcccaggcctaagctcttcccgctggcctcaccgctctgagttagcacctgcctgacagatgctgcgtttttttccccgctgtcagctcttgccctccttcctccccagcctttggggctgtgagtagcgctgaattgctctgaaaataaccgttgaatgtaat

SEQ ID NO: 367349 - DNA, 535 bp, Homo sapiens
  chr17:73612827-73613362
  hypo
cgcccgggccccgtgcctgtgcccgtgcagccatccaggtgggcccccacggggaggtggccagggctgtcccgctcctcggggaatcaccctatgaacttagtgacctcttgcttctcccacgaggcctcccaaagctttcctgaggaaaatcgaccccaaggacgaggctctggccaagctgggtatcaacggtgcccactcgtccccgccggtgagcaccccagcctgtctcccccagagtgtgtgctgctgcactggggagctcaaggctctctggggcgaacttggccttgtgctgtgactcagcccgtgtactttctccgtatccccccagatgctgtcccccagcccaggaaagggccccccgccagctgtggctcctcgacccaaggccccgctacagcttgggccctctagctccatcaaggaaaagcaggggccccttctggacctgtttggccagaagctgcctattgcccacacacccccacctccaccagcgccaccactgcctctgcccgaggacccaggg

SEQ ID NO: 367350 - DNA, 527 bp, Homo sapiens
  chr17:73613424-73613951
  hypo
ggcagaggcagggttcgcacagactctcggtgcccagggctgaaggcatttctgcgtggctgaggccagctgttcgggcttctggactttggagccatacgtagctggggagtcccagcttccgcgttcccacccagggcagggcctgggcatctttggggctgtcatcgagaggctgtcacacacagggtgttgtccctgacacatacccgacagctctgtgaggaagttagtggccctggctgacatggtcatagaagacccacgagcctcacggacgccagggaaagtttagggcccaaaatggaggcaggagatggtgccatggaaggagtaaggcagctggaggttgggagagccgggcccttggaaggctcgtggggatgaaggtcttccctcccgtgcccccatcactctggctctgcagcccctcactgaggctcctcaccccctcctctctgccaggcttgacacagcccgtggaggaccagggggtctccacccagctactcgcgccctctggcagc

SEQ ID NO: 367351 - DNA, 192 bp, Homo sapiens; identical to SEQ ID NO: 348834
  chr17:73615737-73615929
  hypo

SEQ ID NO: 367352 - DNA, 109 bp, Homo sapiens; identical to SEQ ID NO: 348835
  chr17:73616587-73616696
  hypo

SEQ ID NO: 367353 - DNA, 149 bp, Homo sapiens; identical to SEQ ID NO: 343110
  chr17:73635145-73635294
  hypo

SEQ ID NO: 367354 - DNA, 153 bp, Homo sapiens; identical to SEQ ID NO: 355708
  chr17:73808671-73808824
  hypo

SEQ ID NO: 367355 - DNA, 194 bp, Homo sapiens; identical to SEQ ID NO: 355709
  chr17:73811214-73811408
  hypo

SEQ ID NO: 367356 - DNA, 220 bp, Homo sapiens; identical to SEQ ID NO: 343114
  chr17:73821496-73821716
  hypo

SEQ ID NO: 367357 - DNA, 506 bp, Homo sapiens; identical to SEQ ID NO: 343117
  chr17:74003908-74004414
  hypo

SEQ ID NO: 367358 - DNA, 269 bp, Homo sapiens; identical to SEQ ID NO: 355711
  chr17:74005186-74005455
  hypo

SEQ ID NO: 367359 - DNA, 154 bp, Homo sapiens; identical to SEQ ID NO: 355712
  chr17:74005497-74005651
  hypo

SEQ ID NO: 367360 - DNA, 194 bp, Homo sapiens; identical to SEQ ID NO: 343119
  chr17:74013689-74013883
  hypo

SEQ ID NO: 367361 - DNA, 185 bp, Homo sapiens; identical to SEQ ID NO: 343121
  chr17:74042063-74042248
  hypo

SEQ ID NO: 367362 - DNA, 386 bp, Homo sapiens; identical to SEQ ID NO: 343124
  chr17:74086716-74087102
  hypo

SEQ ID NO: 367363 - DNA, 813 bp, Homo sapiens; identical to SEQ ID NO: 361147
  chr17:74236139-74236952
  hypo

SEQ ID NO: 367364 - DNA, 306 bp, Homo sapiens
  chr17:74269555-74269861
  hypo
cggctgtctctgcagcagcccactcaagggagagaagcggagggcggcaaacagaaacctgcccagccggctgcaggggttcgcctccagccattggcactgcttccccggaatcccacgccaggggtcaggaaccaccctgagccagcagcaagagcgcagcaggcagctgccaccctcacccccagagtgctggacactgacagcacgggccccagcaccccaggctagaaggcaggtctagagccagaaggcagggcacccccaatctagctgaggccaggagagagctggtggggtgagcac

SEQ ID NO: 367365 - DNA, 264 bp, Homo sapiens; identical to SEQ ID NO: 343127
  chr17:74387398-74387662
  hypo

SEQ ID NO: 367366 - DNA, 81 bp, Homo sapiens; identical to SEQ ID NO: 343128
  chr17:74388687-74388768
  hypo

SEQ ID NO: 367367 - DNA, 118 bp, Homo sapiens; identical to SEQ ID NO: 348836
  chr17:74390245-74390363
  hypo

SEQ ID NO: 367368 - DNA, 182 bp, Homo sapiens; identical to SEQ ID NO: 348837
  chr17:74390459-74390641
  hypo

SEQ ID NO: 367369 - DNA, 149 bp, Homo sapiens; identical to SEQ ID NO: 343130
  chr17:74391568-74391717
  hypo

SEQ ID NO: 367370 - DNA, 127 bp, Homo sapiens; identical to SEQ ID NO: 343132
  chr17:74435202-74435329
  hypo

SEQ ID NO: 367371 - DNA, 48 bp, Homo sapiens; identical to SEQ ID NO: 343133
  chr17:74475354-74475402
  hypo

SEQ ID NO: 367372 - DNA, 269 bp, Homo sapiens; identical to SEQ ID NO: 343136
  chr17:74621445-74621714
  hypo

SEQ ID NO: 367373 - DNA, 119 bp, Homo sapiens; identical to SEQ ID NO: 343137
  chr17:74625074-74625193
  hypo

SEQ ID NO: 367374 - DNA, 103 bp, Homo sapiens; identical to SEQ ID NO: 355721
  chr17:74908627-74908730
  hypo

SEQ ID NO: 367375 - DNA, 132 bp, Homo sapiens; identical to SEQ ID NO: 355722
  chr17:74908814-74908946
  hypo

SEQ ID NO: 367376 - DNA, 122 bp, Homo sapiens; identical to SEQ ID NO: 343141
  chr17:75132773-75132895
  hypo

SEQ ID NO: 367377 - DNA, 657 bp, Homo sapiens; identical to SEQ ID NO: 346170
  chr17:75206857-75207514
  hypo

SEQ ID NO: 367378 - DNA, 209 bp, Homo sapiens; identical to SEQ ID NO: 323128
  chr17:75207630-75207839
  hypo

SEQ ID NO: 367379 - DNA, 328 bp, Homo sapiens; identical to SEQ ID NO: 346172
  chr17:75207987-75208315
  hypo

SEQ ID NO: 367380 - DNA, 689 bp, Homo sapiens; identical to SEQ ID NO: 343143
  chr17:75213347-75214036
  hypo

SEQ ID NO: 367381 - DNA, 148 bp, Homo sapiens; identical to SEQ ID NO: 343148
  chr17:76034983-76035131
  hypo

SEQ ID NO: 367382 - DNA, 83 bp, Homo sapiens
  chr17:76100954-76101037
  hypo
cgacccctcccgggacccctcccggctgggcggccccacagacccgctggaacccagcagcggccgcccttttgagtacctct

SEQ ID NO: 367383 - DNA, 282 bp, Homo sapiens; identical to SEQ ID NO: 343151
  chr17:76167747-76168029
  hypo

SEQ ID NO: 367384 - DNA, 330 bp, Homo sapiens; identical to SEQ ID NO: 348843
  chr17:76187077-76187407
  hypo

SEQ ID NO: 367385 - DNA, 478 bp, Homo sapiens; identical to SEQ ID NO: 343153
  chr17:76215753-76216231
  hypo

SEQ ID NO: 367386 - DNA, 170 bp, Homo sapiens; identical to SEQ ID NO: 352027
  chr17:76337740-76337910
  hypo

SEQ ID NO: 367387 - DNA, 488 bp, Homo sapiens; identical to SEQ ID NO: 355732
  chr17:76395100-76395588
  hypo

SEQ ID NO: 367388 - DNA, 50 bp, Homo sapiens; identical to SEQ ID NO: 355733
  chr17:76395713-76395763
  hypo

SEQ ID NO: 367389 - DNA, 187 bp, Homo sapiens; identical to SEQ ID NO: 343158
  chr17:76482434-76482621
  hypo

SEQ ID NO: 367390 - DNA, 443 bp, Homo sapiens; identical to SEQ ID NO: 343159
  chr17:76818622-76819065
  hypo

SEQ ID NO: 367391 - DNA, 244 bp, Homo sapiens; identical to SEQ ID NO: 343160
  chr17:76851787-76852031
  hypo

SEQ ID NO: 367392 - DNA, 511 bp, Homo sapiens
  chr17:76991011-76991522
  hypo
cggttttggaggcaaatgcaggaggaagcaggttcccagcgactgggctgtggaagccacactgtgggctggggcaggcgtctcttacctggcggctggatgccggcagcagcccgcagggcgttgtagttggacacccagttctcgtggtccacgctgcccttgtagcccaccaccttcacccactccgggttctcgttcaccacatcacccgtagtggtcgtccactccttgcccaggccgcccacgtacagacgctcgtccttcactgccagccattcggccttgaagcctggccaagcagagtgtccttaggccccgcacccagctcccgccgcacccctgcacctggctcccacccggccccgcacctgtccttagaccccgcacctgactcccgcccggctccacacctgcctcccctccggcccgcacctggctcccgcccagggccggccggctgccctcccctcagctcctgaaggttcagtgaccactctcaagtctcctc

SEQ ID NO: 367393 - DNA, 631 bp, Homo sapiens; identical to SEQ ID NO: 348845
  chr17:76992727-76993358
  hypo

SEQ ID NO: 367394 - DNA, 478 bp, Homo sapiens; identical to SEQ ID NO: 218133
  chr17:76993419-76993897
  hypo

SEQ ID NO: 367395 - DNA, 285 bp, Homo sapiens; identical to SEQ ID NO: 355737
  chr17:76996197-76996482
  hypo

SEQ ID NO: 367396 - DNA, 412 bp, Homo sapiens; identical to SEQ ID NO: 218135
  chr17:76996567-76996979
  hypo

SEQ ID NO: 367397 - DNA, 530 bp, Homo sapiens; identical to SEQ ID NO: 218136
  chr17:76997041-76997571
  hypo

SEQ ID NO: 367398 - DNA, 261 bp, Homo sapiens; identical to SEQ ID NO: 343164
  chr17:76998502-76998763
  hypo

SEQ ID NO: 367399 - DNA, 116 bp, Homo sapiens; identical to SEQ ID NO: 343166
  chr17:77070114-77070230
  hypo

SEQ ID NO: 367400 - DNA, 377 bp, Homo sapiens; identical to SEQ ID NO: 343168
  chr17:77073688-77074065
  hypo

SEQ ID NO: 367401 - DNA, 375 bp, Homo sapiens; identical to SEQ ID NO: 343169
  chr17:77074650-77075025
  hypo

SEQ ID NO: 367402 - DNA, 287 bp, Homo sapiens; identical to SEQ ID NO: 355741
  chr17:77113248-77113535
  hypo

SEQ ID NO: 367403 - DNA, 46 bp, Homo sapiens
  chr17:77126804-77126850
  hypo
cgataccgagcagtcttctgacacagtccctggaacgagtggagtg

SEQ ID NO: 367404 - DNA, 244 bp, Homo sapiens; identical to SEQ ID NO: 323275
  chr17:77126880-77127124
  hypo

SEQ ID NO: 367405 - DNA, 295 bp, Homo sapiens
  chr17:77127177-77127472
  hypo
ccccgtgtgtgcacatgtgcgccccgtgtgtgctgtgtgacccgtgtgcttgtgtgtaccgtgtgtgagccatgtgctgcgtgtgctgtatgctgtgtgctccgtgtgttctgtgcactgtgtgtgccctgcgtgtactgtgtgctctgtgcccatgtgtgctccgctcagtctccatgtgccctccgtgtgtattccatgtgccctccgtgtgctgtgctctgtgcacgctgggaacagcgctagagcgtctgtgcttctggacaggaaaacaagcccctcgtctaccttcacc

SEQ ID NO: 367406 - DNA, 184 bp, Homo sapiens; identical to SEQ ID NO: 348849
  chr17:77769064-77769248
  hypo

SEQ ID NO: 367407 - DNA, 403 bp, Homo sapiens; identical to SEQ ID NO: 292779
  chr17:77778031-77778434
  hypo

SEQ ID NO: 367408 - DNA, 41 bp, Homo sapiens; identical to SEQ ID NO: 361162
  chr17:77788305-77788346
  hypo

SEQ ID NO: 367409 - DNA, 233 bp, Homo sapiens; identical to SEQ ID NO: 204826
  chr17:77788400-77788633
  hypo

SEQ ID NO: 367410 - DNA, 50 bp, Homo sapiens; identical to SEQ ID NO: 355744
  chr17:77808028-77808078
  hypo

SEQ ID NO: 367411 - DNA, 188 bp, Homo sapiens
  chr17:77825812-77826000
  hypo
agcttgaagccagctatggctggagcttttactcaacagaaattggtaaacacgacaaatcgtgacttgattttttcttttgttgattgtctatactttagaaagtgatagaaaaaaaaaaaagaaagtgatgaaaaagtgttaatcatgcagattaaacttaaaagtgtgtcctgttggctgggcac

SEQ ID NO: 367412 - DNA, 105 bp, Homo sapiens; identical to SEQ ID NO: 346174
  chr17:77899559-77899664
  hypo

SEQ ID NO: 367413 - DNA, 556 bp, Homo sapiens
  chr17:77918873-77919429
  hypo
cgcgcaggtacagctgggggtgaggccgtcacgcgttagttagctccggtcccatgcggcctgctgcccaggaagcccactcccactggggcccttccctgggccaccccagcctggaaaagcacacccaggggcctctacctgctgcatgtgcctgcccccccaacgctccattccgccgctggaatcggctcacacctgcctctgccagttcctcccagatctgactgttccggaggctgtggtgtggtccagggtgaggcagagtgttgtgcccgggcgtggcaggacgctggcagccgctccatggccaggaaggctccccaccctcagtgcacacttgggggctgtttcccacgtccactcctcctggtgaggtgagtggatcatccagggagcccccccacccctcttcggctacgctcacccagatctatcatcttccagagctgttttagggcaggaaggggacgtatctgagccccaggatgctcgattcctgccattaaggtcatctcccaatgatgtgggacaagatcggggctatttctggcag

SEQ ID NO: 367414 - DNA, 207 bp, Homo sapiens
  chr17:77919477-77919684
  hypo
ctccagcattcagtgagtcacccagccatgcgctgccatgagccgtcagaggcgaatggcgttggacactgtaactgcctccccaagcaatgtggacacccgacgtcacacacacccgttgatgcagagtgagcaggcttggctgggttcagccccccggcccaggtggagttagatcacagctggggggatcctggggcagagctc

SEQ ID NO: 367415 - DNA, 580 bp, Homo sapiens; identical to SEQ ID NO: 343185
  chr17:77921147-77921727
  hypo

SEQ ID NO: 367416 - DNA, 151 bp, Homo sapiens
  chr17:77923970-77924121
  hypo
cggtatccccccaaaccctcgagggaggtgttgtgttttgtttttttttttcaacgcagcagctttgattgctttatcggtgtgttcacagagagcctcacacaagaaaacggggccctcacgaggaggtggcccgtgggtgcgggcgggc

SEQ ID NO: 367417 - DNA, 445 bp, Homo sapiens; identical to SEQ ID NO: 343188
  chr17:77928738-77929183
  hypo

SEQ ID NO: 367418 - DNA, 75 bp, Homo sapiens
  chr17:77930343-77930418
  hypo
cgctgggcccggtggtcgctttaagttgctgagtttgagggcggtttgtttcacagcaacggatcactgacacac

SEQ ID NO: 367419 - DNA, 352 bp, Homo sapiens
  chr17:78041114-78041466
  hypo
cggcccgcagtcactagaaccccctcccaagacaagcaaaggcacctggttttctgggatcccctgcctaacttgtgtgcaattgcaagaaagcatatgcgttcacccggagtcttccttccctctcttgctccgtgggagcacaccacactcactgttctgcacctctttgctttttccatttaacagcgtgtccctagagcgcttcccaagtcaaaatataaacaccgctcgttcccgcctttctaccacatggcattccgctgggatacttctacggggaagcttcctgcccggggcatcgagggcgttcgcgtccgtctgttatggcggtgctgctgtagataaccgg

SEQ ID NO: 367420 - DNA, 200 bp, Homo sapiens
  chr17:78041496-78041696
  hypo
tatatagccttttttatattgcctatcaagcccggaatgtctgggtctagcgggtattgctaagtaggattgtgacagtcacgcccccggcagcggtgtttcaaagtcccctgacagctcagcatgttgtcacacttcaggactgtgccaatccgattgatgaagaaaatagataatcttgttttataaaacgtgcatgc

SEQ ID NO: 367421 - DNA, 116 bp, Homo sapiens; identical to SEQ ID NO: 355746
  chr17:78143796-78143912
  hypo

SEQ ID NO: 367422 - DNA, 399 bp, Homo sapiens; identical to SEQ ID NO: 355747
  chr17:78163400-78163799
  hypo

SEQ ID NO: 367423 - DNA, 561 bp, Homo sapiens; identical to SEQ ID NO: 218184
  chr17:78271717-78272278
  hypo

SEQ ID NO: 367424 - DNA, 77 bp, Homo sapiens; identical to SEQ ID NO: 348852
  chr17:78272313-78272390
  hypo

SEQ ID NO: 367425 - DNA, 162 bp, Homo sapiens; identical to SEQ ID NO: 343198
  chr17:78590602-78590764
  hypo

SEQ ID NO: 367426 - DNA, 310 bp, Homo sapiens; identical to SEQ ID NO: 343199
  chr17:78598720-78599030
  hypo

SEQ ID NO: 367427 - DNA, 557 bp, Homo sapiens; identical to SEQ ID NO: 343201
  chr17:78611023-78611580
  hypo

SEQ ID NO: 367428 - DNA, 273 bp, Homo sapiens
  chr17:78668243-78668516
  hypo
tggagtgagagtgtcttccatatgtggggccgtggtgctgaaggcttgtgcgttgagtgcctcctttcccgtgaatgtgttggttctggtgaccagggtggagcctccctgcgccccttccttccatccagcatcaggttcccagttctctgcctgccaggcaggcgtgcacatatggagtgtctgggaacctgcagctgttgatcacggctggtggtagctccgcacttaagtaaggaggagtgattttcccgaggagatgtggtattggtc

SEQ ID NO: 367429 - DNA, 522 bp, Homo sapiens; identical to SEQ ID NO: 343205
  chr17:78775515-78776037
  hypo

SEQ ID NO: 367430 - DNA, 446 bp, Homo sapiens; identical to SEQ ID NO: 355752
  chr17:78935167-78935613
  hypo

SEQ ID NO: 367431 - DNA, 1019 bp, Homo sapiens; identical to SEQ ID NO: 335709
  chr17:79007528-79008547
  hypo

SEQ ID NO: 367432 - DNA, 753 bp, Homo sapiens; identical to SEQ ID NO: 352038
  chr17:79008842-79009595
  hypo

SEQ ID NO: 367433 - DNA, 195 bp, Homo sapiens; identical to SEQ ID NO: 343212
  chr17:79045500-79045695
  hypo

SEQ ID NO: 367434 - DNA, 403 bp, Homo sapiens; identical to SEQ ID NO: 343215
  chr17:79053502-79053905
  hypo

SEQ ID NO: 367435 - DNA, 60 bp, Homo sapiens; identical to SEQ ID NO: 343216
  chr17:79060187-79060247
  hypo

SEQ ID NO: 367436 - DNA, 196 bp, Homo sapiens; identical to SEQ ID NO: 343217
  chr17:79060680-79060876
  hypo

SEQ ID NO: 367437 - DNA, 264 bp, Homo sapiens; identical to SEQ ID NO: 343218
  chr17:79072884-79073148
  hypo

SEQ ID NO: 367438 - DNA, 257 bp, Homo sapiens; identical to SEQ ID NO: 343219
  chr17:79074754-79075011
  hypo

SEQ ID NO: 367439 - DNA, 241 bp, Homo sapiens
  chr17:79084476-79084717
  hypo
cgggctctgcggggggccgtctgcagctgaggcaggctcctggctccctccaggcccgcaagtgaggcaggctccgcaggcgccgtccagggagagccagagccccagctgtgtgccgactccgagtgctccagggttctaggtctcctggcagctcgcccgtggtcccccctcctctgcacccccgagtcctcagaccccatgctgcctccaactgagccttgtgtttccttgcagcgcc

SEQ ID NO: 367440 - DNA, 168 bp, Homo sapiens
  chr17:79086354-79086522
  hypo
cggaggcccaagcgcccacgctggacccgattccagaagggcccaccttctgaagacacgaagaaacagctgacgcgagaagacagaaaacaggtgctgtccgcccggctctgggtctggagtcacccaactggtcgaaatgcatttgtgacggctccgtttcttctc

SEQ ID NO: 367441 - DNA, 158 bp, Homo sapiens; identical to SEQ ID NO: 343224
  chr17:79086890-79087048
  hypo

SEQ ID NO: 367442 - DNA, 44 bp, Homo sapiens
  chr17:79093912-79093956
  hypo
cggccgccaggagccgcggccgctcccaccccttcctgcgggag

SEQ ID NO: 367443 - DNA, 255 bp, Homo sapiens; identical to SEQ ID NO: 218236
  chr17:79099929-79100184
  hypo

SEQ ID NO: 367444 - DNA, 79 bp, Homo sapiens
  chr17:79100259-79100338
  hypo
acgccacaggccacctcacaggccatgcgctgcagggtccgggggtcgggagccatggactccgccacccggcagctcc

SEQ ID NO: 367445 - DNA, 516 bp, Homo sapiens; identical to SEQ ID NO: 355756
  chr17:79166571-79167087
  hypo

SEQ ID NO: 367446 - DNA, 415 bp, Homo sapiens; identical to SEQ ID NO: 343228
  chr17:79175952-79176367
  hypo

SEQ ID NO: 367447 - DNA, 169 bp, Homo sapiens; identical to SEQ ID NO: 343229
  chr17:79253772-79253941
  hypo

SEQ ID NO: 367448 - DNA, 421 bp, Homo sapiens; identical to SEQ ID NO: 343230
  chr17:79542407-79542828
  hypo

SEQ ID NO: 367449 - DNA, 388 bp, Homo sapiens; identical to SEQ ID NO: 355758
  chr17:79612376-79612764
  hypo

SEQ ID NO: 367450 - DNA, 253 bp, Homo sapiens; identical to SEQ ID NO: 343233
  chr17:79648960-79649213
  hypo

SEQ ID NO: 367451 - DNA, 821 bp, Homo sapiens
  chr17:79655508-79656329
  hypo
cgcggcgttgtttggctccagcaagtagaggcaggcgtgaggtttgaactcagggtctgggaacaggttggtgcatggcccccacgccccactcggggggccctccctggcctctgtgtcagccccatctgctcagaggctgaggtctgccagctgcttcctcacaccgaggcctctggcgcctggagtgtcctgcgaccctcacccccttctccctgcctgcagagacaagtggaggtaaacgtccgtaacaagatcctgtacctgatccaggcctgggcgcatgccttccggaacgagcccaagtacaaggtggtccaggacacctaccagatcatgaaggtggagggtgagtcaggactgaggttgggaccaggttgaggcttggaactgctgggcagtcaggctcaacgggcacagtggcgaggggcctgggaagatgggttgttccctgtgttgggagggaggagggcggtggcctggagccagggaagaccgtgcatgtgagggcgggttcagaccggctcctgcctttctggacccacggcccacgggcaggggcaggcagtgatggcagacaacacacaggtgaaaaggcagcagacagcctgtttcagagtggcaggactcctgggggccgggttgggctgtgcagtcagggaaggcctctgaaggagctgtcccaagtgtcgagactggaacagaagccagagccggcgtgagcaggcaggcagcacccgtgggcagacactcagggttgaggccccagggcagaaaggtggccagcgtgccagaggagagtgcagccgggcctgtgcgcc

SEQ ID NO: 367452 - DNA, 95 bp, Homo sapiens; identical to SEQ ID NO: 355760
  chr17:79826882-79826977
  hypo

SEQ ID NO: 367453 - DNA, 140 bp, Homo sapiens; identical to SEQ ID NO: 355761
  chr17:79827029-79827169
  hypo

SEQ ID NO: 367454 - DNA, 309 bp, Homo sapiens
  chr17:79870549-79870858
  hypo
cccagctcgggaaagctgtctgcggtccctgccttcccatccccttccctcccgtgtcaactgcggcggggctctggttggcggcagcttcattgttaccaagctgcagaacggatgtgggagaggtcacctcttaggtggtgactcaaaggtcggcacccacactagctcggtctcctcaaaactccgtgtccttgtccaccactgagcggcgtgcacacacagggtggggcagcagtggccccagggctgcctccgtctccagggatgagtcactagcaactctgggccccaccttccacttgtacc

SEQ ID NO: 367455 - DNA, 398 bp, Homo sapiens; identical to SEQ ID NO: 343239
  chr17:79873436-79873834
  hypo

SEQ ID NO: 367456 - DNA, 168 bp, Homo sapiens; identical to SEQ ID NO: 348854
  chr17:79887422-79887590
  hypo

SEQ ID NO: 367457 - DNA, 56 bp, Homo sapiens; identical to SEQ ID NO: 348855
  chr17:79887849-79887905
  hypo

SEQ ID NO: 367458 - DNA, 274 bp, Homo sapiens; identical to SEQ ID NO: 218273
  chr17:79913170-79913444
  hypo

SEQ ID NO: 367459 - DNA, 522 bp, Homo sapiens; identical to SEQ ID NO: 352041
  chr17:79989097-79989619
  hypo

SEQ ID NO: 367460 - DNA, 764 bp, Homo sapiens; identical to SEQ ID NO: 343243
  chr17:80019114-80019878
  hypo

SEQ ID NO: 367461 - DNA, 863 bp, Homo sapiens
  chr17:80045799-80046662
  hypo
cgcagctcccgtgccaccggccctgcttaccactcactaccaggttgccgttctctgacacctcgaaggcacgggaggcctccaggagccgtacctccagggacactgtccctgcagagcgggagagttggagatcagagggcagcacccgccccccagctacccccgccttggtcctggggtacccctcaccagtcttgggcaggatggtggcctggtgcagcaccacatcctcaaacaccacaggcagctgctcgacgcccaggcccagggcgcgggccagcgtcttccacactatgctcaggtagccagtggcggggaagaggacgcgaccgtcgagggtgtggtccaccaggtagtggtcaggagactcggagctggtgtctgcgggagggcacaggcctcagcacagagcgggcgtctgtggggagggaagagtctgcccacccgccgggcccctgctcaccgatgttgtagatggcggctgagggggaacctgaaccgttggggaagtcctcggcggccggcacgtcccaggccaggctgtggtcccacttgatgagtggggagatgaggggagttcctcggggagctgggaactccacaggtgggaacaaggcattggggttggcgtcgatgctacggagaagggaggcatgggtagcacacccgtcaccggggtccaggggctctgggttcagcccacccactgcctgcggtggaccatccagggctgctgccaccggcctgggtcagtgaggggcccgcagccccgctcacccaccccacgccgtccccgactccgggagacgagacccgggctgggaagggacccaccctgagaggtgcagcctgccgatgcc

SEQ ID NO: 367462 - DNA, 940 bp, Homo sapiens; identical to SEQ ID NO: 343246
  chr17:80050751-80051691
  hypo

SEQ ID NO: 367463 - DNA, 220 bp, Homo sapiens; identical to SEQ ID NO: 347472
  chr17:80186335-80186555
  hypo

SEQ ID NO: 367464 - DNA, 818 bp, Homo sapiens; identical to SEQ ID NO: 292829
  chr17:80186618-80187436
  hypo

SEQ ID NO: 367465 - DNA, 514 bp, Homo sapiens; identical to SEQ ID NO: 355770
  chr17:80201427-80201941
  hypo

SEQ ID NO: 367466 - DNA, 91 bp, Homo sapiens; identical to SEQ ID NO: 355771
  chr17:80201971-80202062
  hypo

SEQ ID NO: 367467 - DNA, 66 bp, Homo sapiens; identical to SEQ ID NO: 361175
  chr17:80277699-80277765
  hypo

SEQ ID NO: 367468 - DNA, 520 bp, Homo sapiens
  chr17:80294473-80294993
  hypo
tttgtaacttgattctctgggttcccttgcctttcatccttgcccacccacgtgactgcagcctgtggggcttcctcctaatgtcccgaagataactcgtcatccttgaccccgccgccacctcgggttctagtggaggatgtggcccgcctgccacccccacaggcaccgggtcctccaggcctccttgacccacttccaacccacctgggatgtctgcgcgttaccagcccagatgcctcttggagccttccacctgcaccccatctcctgtcccaacaggctgggcccctcctcccgggctggccaagccagtacctccgcaggggccgcaggtgcagcaccctctgtgggggagctagggggatcgctcctctgctctgcgcacttttatgaaagggcctctgaccctcccactgtcctgctcactctgcccgcgcacccccggccacctgggggccgccccccaaagccctcggcccgtggacagactcgcagcctcctgggagccgagccaacc

SEQ ID NO: 367469 - DNA, 67 bp, Homo sapiens
  chr17:80332182-80332249
  hypo
cgtcgtgaggggtcagagatggcgctgacccccgagtccccgagcagcttccctgggctggccgcca

SEQ ID NO: 367470 - DNA, 404 bp, Homo sapiens; identical to SEQ ID NO: 361176
  chr17:80332292-80332696
  hypo

SEQ ID NO: 367471 - DNA, 229 bp, Homo sapiens; identical to SEQ ID NO: 355772
  chr17:80394871-80395100
  hypo

SEQ ID NO: 367472 - DNA, 82 bp, Homo sapiens; identical to SEQ ID NO: 355773
  chr17:80395146-80395228
  hypo

SEQ ID NO: 367473 - DNA, 522 bp, Homo sapiens; identical to SEQ ID NO: 343253
  chr17:80445750-80446272
  hypo

SEQ ID NO: 367474 - DNA, 223 bp, Homo sapiens; identical to SEQ ID NO: 343256
  chr17:80517124-80517347
  hypo

SEQ ID NO: 367475 - DNA, 478 bp, Homo sapiens; identical to SEQ ID NO: 343259
  chr17:80554494-80554972
  hypo

SEQ ID NO: 367476 - DNA, 295 bp, Homo sapiens; identical to SEQ ID NO: 343260
  chr17:80563218-80563513
  hypo

SEQ ID NO: 367477 - DNA, 243 bp, Homo sapiens; identical to SEQ ID NO: 355777
  chr17:80571137-80571380
  hypo

SEQ ID NO: 367478 - DNA, 271 bp, Homo sapiens; identical to SEQ ID NO: 355778
  chr17:80571776-80572047
  hypo

SEQ ID NO: 367479 - DNA, 82 bp, Homo sapiens; identical to SEQ ID NO: 343262
  chr17:80600131-80600213
  hypo

SEQ ID NO: 367480 - DNA, 112 bp, Homo sapiens; identical to SEQ ID NO: 355779
  chr17:80654614-80654726
  hypo

SEQ ID NO: 367481 - DNA, 1118 bp, Homo sapiens; identical to SEQ ID NO: 361177
  chr17:80655727-80656845
  hypo

SEQ ID NO: 367482 - DNA, 329 bp, Homo sapiens; identical to SEQ ID NO: 343267
  chr17:80712025-80712354
  hypo

SEQ ID NO: 367483 - DNA, 58 bp, Homo sapiens; identical to SEQ ID NO: 355781
  chr17:80747254-80747312
  hypo

SEQ ID NO: 367484 - DNA, 62 bp, Homo sapiens; identical to SEQ ID NO: 355782
  chr17:80747754-80747816
  hypo

SEQ ID NO: 367485 - DNA, 95 bp, Homo sapiens; identical to SEQ ID NO: 355783
  chr17:80747890-80747985
  hypo

SEQ ID NO: 367486 - DNA, 121 bp, Homo sapiens; identical to SEQ ID NO: 343271
  chr17:80749629-80749750
  hypo

SEQ ID NO: 367487 - DNA, 96 bp, Homo sapiens
  chr17:80762951-80763047
  hypo
cggcccgccctgcactcacccttggcaggagcagctgtgtacgcgggggccttgctcagcgcagggctgggctgcacgccgagcgcagactctgac

SEQ ID NO: 367488 - DNA, 139 bp, Homo sapiens; identical to SEQ ID NO: 343273
  chr17:80763321-80763460
  hypo

SEQ ID NO: 367489 - DNA, 137 bp, Homo sapiens; identical to SEQ ID NO: 355785
  chr17:80772735-80772872
  hypo

SEQ ID NO: 367490 - DNA, 513 bp, Homo sapiens; identical to SEQ ID NO: 355786
  chr17:80772941-80773454
  hypo

SEQ ID NO: 367491 - DNA, 52 bp, Homo sapiens; identical to SEQ ID NO: 343275
  chr17:80794418-80794470
  hypo

SEQ ID NO: 367492 - DNA, 32 bp, Homo sapiens; identical to SEQ ID NO: 348859
  chr17:80797632-80797664
  hypo

SEQ ID NO: 367493 - DNA, 69 bp, Homo sapiens
  chr17:80832134-80832203
  hypo
cgcactgtgggctgcaggcttgaagaaggatgtgagtttctggagtagcctggactgcacagccagggc

SEQ ID NO: 367494 - DNA, 86 bp, Homo sapiens
  chr17:80832796-80832882
  hypo
cagtgggtgcttgggatcagagcatcagagtggaattttcgcagggaaatggaaatgcctgatcgagctgggcggtggcagcagcc

SEQ ID NO: 367495 - DNA, 177 bp, Homo sapiens; identical to SEQ ID NO: 343278
  chr17:80859381-80859558
  hypo

SEQ ID NO: 367496 - DNA, 178 bp, Homo sapiens; identical to SEQ ID NO: 343279
  chr17:80860241-80860419
  hypo

SEQ ID NO: 367497 - DNA, 99 bp, Homo sapiens; identical to SEQ ID NO: 343280
  chr17:80867234-80867333
  hypo

SEQ ID NO: 367498 - DNA, 308 bp, Homo sapiens; identical to SEQ ID NO: 343281
  chr17:80879354-80879662
  hypo

SEQ ID NO: 367499 - DNA, 269 bp, Homo sapiens; identical to SEQ ID NO: 348861
  chr17:80965953-80966222
  hypo

SEQ ID NO: 367500 - DNA, 169 bp, Homo sapiens; identical to SEQ ID NO: 343283
  chr17:80968060-80968229
  hypo

SEQ ID NO: 367501 - DNA, 443 bp, Homo sapiens; identical to SEQ ID NO: 361178
  chr17:81036717-81037160
  hypo

SEQ ID NO: 367502 - DNA, 277 bp, Homo sapiens; identical to SEQ ID NO: 352044
  chr17:81038567-81038844
  hypo

SEQ ID NO: 367503 - DNA, 508 bp, Homo sapiens; identical to SEQ ID NO: 352045
  chr17:81038865-81039373
  hypo

SEQ ID NO: 367504 - DNA, 63 bp, Homo sapiens
  chr17:81049931-81049994
  hypo
cgcagggttcaggggcttcagagggggttctgtgagcagggcttggcttgaaagccatttggg

SEQ ID NO: 367505 - DNA, 78 bp, Homo sapiens
  chr17:81050575-81050653
  hypo
cgaaggccctgggacatggccggactgagggtcttgctctcggacatgtgcccatcatggccgaggtgcaggtgcctt

SEQ ID NO: 367506 - DNA, 205 bp, Homo sapiens; identical to SEQ ID NO: 323751
  chr17:81050716-81050921
  hypo

SEQ ID NO: 367507 - DNA, 188 bp, Homo sapiens; identical to SEQ ID NO: 323753
  chr17:81062393-81062581
  hypo

SEQ ID NO: 367508 - DNA, 216 bp, Homo sapiens; identical to SEQ ID NO: 343293
  chr18:196827-197043
  hypo

SEQ ID NO: 367509 - DNA, 74 bp, Homo sapiens; identical to SEQ ID NO: 343295
  chr18:635725-635799
  hypo

SEQ ID NO: 367510 - DNA, 1315 bp, Homo sapiens; identical to SEQ ID NO: 347474
  chr18:811501-812816
  hypo

SEQ ID NO: 367511 - DNA, 190 bp, Homo sapiens; identical to SEQ ID NO: 347475
  chr18:812869-813059
  hypo

SEQ ID NO: 367512 - DNA, 238 bp, Homo sapiens; identical to SEQ ID NO: 345538
  chr18:2848166-2848404
  hypo

SEQ ID NO: 367513 - DNA, 369 bp, Homo sapiens; identical to SEQ ID NO: 361185
  chr18:2906430-2906799
  hypo

SEQ ID NO: 367514 - DNA, 120 bp, Homo sapiens; identical to SEQ ID NO: 343299
  chr18:3051295-3051415
  hypo

SEQ ID NO: 367515 - DNA, 94 bp, Homo sapiens; identical to SEQ ID NO: 343300
  chr18:3119830-3119924
  hypo

SEQ ID NO: 367516 - DNA, 205 bp, Homo sapiens; identical to SEQ ID NO: 346176
  chr18:3214837-3215042
  hypo

SEQ ID NO: 367517 - DNA, 137 bp, Homo sapiens; identical to SEQ ID NO: 346177
  chr18:3215256-3215393
  hypo

SEQ ID NO: 367518 - DNA, 125 bp, Homo sapiens
  chr18:3330588-3330713
  hypo
cggcagctgtgccaatagaaaaggaaaaggactacctgggggcggccatgtccaacatggaggctccatcttctctttttttgttatcacgtgtacagtaataaagaaatgggcaacatggtgca

SEQ ID NO: 367519 - DNA, 310 bp, Homo sapiens
  chr18:3360395-3360705
  hypo
cgacccctgctgtggaagagccctgcgtccttcagcagcaaagtagggccacgcccctcgggcccggcctctggcctccgtcacgctcccttctcactgccgctccaggcctcccggacccaggtcaccttcgcttggattataagaaccaatgccccttttaggcttccggggcaggctgacttccattgctctttatccccggaaatgaccgcacatcagccttcccagctctaagctgggaaagaaaatccttaagtgatttccccagtagaggctcttagccgggactgccgatctacagctggcc

SEQ ID NO: 367520 - DNA, 2276 bp, Homo sapiens; identical to SEQ ID NO: 335731
  chr18:3449180-3451456
  hypo

SEQ ID NO: 367521 - DNA, 69 bp, Homo sapiens; identical to SEQ ID NO: 343305
  chr18:3580264-3580333
  hypo

SEQ ID NO: 367522 - DNA, 185 bp, Homo sapiens; identical to SEQ ID NO: 343306
  chr18:3580794-3580979
  hypo

SEQ ID NO: 367523 - DNA, 995 bp, Homo sapiens; identical to SEQ ID NO: 335733
  chr18:3879130-3880125
  hypo

SEQ ID NO: 367524 - DNA, 166 bp, Homo sapiens; identical to SEQ ID NO: 343309
  chr18:3986877-3987043
  hypo

SEQ ID NO: 367525 - DNA, 254 bp, Homo sapiens; identical to SEQ ID NO: 292874
  chr18:4454777-4455031
  hypo

SEQ ID NO: 367526 - DNA, 216 bp, Homo sapiens; identical to SEQ ID NO: 292892
  chr18:7566793-7567009
  hypo

SEQ ID NO: 367527 - DNA, 415 bp, Homo sapiens; identical to SEQ ID NO: 204882
  chr18:7567335-7567750
  hypo

SEQ ID NO: 367528 - DNA, 153 bp, Homo sapiens; identical to SEQ ID NO: 355807
  chr18:8612051-8612204
  hypo

SEQ ID NO: 367529 - DNA, 789 bp, Homo sapiens; identical to SEQ ID NO: 355808
  chr18:8659297-8660086
  hypo

SEQ ID NO: 367530 - DNA, 533 bp, Homo sapiens; identical to SEQ ID NO: 343319
  chr18:8799980-8800513
  hypo

SEQ ID NO: 367531 - DNA, 113 bp, Homo sapiens; identical to SEQ ID NO: 343321
  chr18:9196896-9197009
  hypo

SEQ ID NO: 367532 - DNA, 391 bp, Homo sapiens
  chr18:9417386-9417777
  hypo
cgcccagagcaccgccacgccggccacccctggggccagtggcagggtgccaggcgtgttcacgctctgaggctccagaaattaatctgacctcttgaaagaacacattcctactgactaggaatcttgaatgaaattcaagcagtgcaggtgttcagcaattctgaagacaaaattcagacagcagagctgctgccttctctggcagatggaggagtgtccgtgaaggagggcccttcgcaccccatggagctcctgatgtccgtgcctttatcagagactctcctcctcctctctttgattgctcttttttttttttccttttttcccttttttaagagacagagtctcgctctgtcgcccaagcagctggactgccctggcctgatct

SEQ ID NO: 367533 - DNA, 467 bp, Homo sapiens; identical to SEQ ID NO: 343324
  chr18:9478452-9478919
  hypo

SEQ ID NO: 367534 - DNA, 81 bp, Homo sapiens; identical to SEQ ID NO: 343325
  chr18:9514129-9514210
  hypo

SEQ ID NO: 367535 - DNA, 225 bp, Homo sapiens; identical to SEQ ID NO: 343326
  chr18:9539475-9539700
  hypo

SEQ ID NO: 367536 - DNA, 65 bp, Homo sapiens; identical to SEQ ID NO: 348873
  chr18:9547721-9547786
  hypo

SEQ ID NO: 367537 - DNA, 176 bp, Homo sapiens; identical to SEQ ID NO: 348874
  chr18:9547816-9547992
  hypo

SEQ ID NO: 367538 - DNA, 196 bp, Homo sapiens; identical to SEQ ID NO: 343328
  chr18:9569216-9569412
  hypo

SEQ ID NO: 367539 - DNA, 275 bp, Homo sapiens; identical to SEQ ID NO: 292905
  chr18:9708063-9708338
  hypo

SEQ ID NO: 367540 - DNA, 257 bp, Homo sapiens; identical to SEQ ID NO: 343334
  chr18:10485485-10485742
  hypo

SEQ ID NO: 367541 - DNA, 498 bp, Homo sapiens; identical to SEQ ID NO: 343336
  chr18:10725385-10725883
  hypo

SEQ ID NO: 367542 - DNA, 192 bp, Homo sapiens; identical to SEQ ID NO: 343337
  chr18:11992166-11992358
  hypo

SEQ ID NO: 367543 - DNA, 160 bp, Homo sapiens; identical to SEQ ID NO: 343338
  chr18:11992771-11992931
  hypo

SEQ ID NO: 367544 - DNA, 46 bp, Homo sapiens; identical to SEQ ID NO: 348877
  chr18:12277197-12277243
  hypo

SEQ ID NO: 367545 - DNA, 111 bp, Homo sapiens; identical to SEQ ID NO: 348878
  chr18:12277273-12277384
  hypo

SEQ ID NO: 367546 - DNA, 140 bp, Homo sapiens; identical to SEQ ID NO: 355820
  chr18:12375127-12375267
  hypo

SEQ ID NO: 367547 - DNA, 60 bp, Homo sapiens; identical to SEQ ID NO: 218438
  chr18:12375294-12375354
  hypo

SEQ ID NO: 367548 - DNA, 115 bp, Homo sapiens; identical to SEQ ID NO: 343343
  chr18:12375778-12375893
  hypo

SEQ ID NO: 367549 - DNA, 306 bp, Homo sapiens; identical to SEQ ID NO: 361205
  chr18:12407715-12408021
  hypo

SEQ ID NO: 367550 - DNA, 206 bp, Homo sapiens; identical to SEQ ID NO: 204898
  chr18:12408117-12408323
  hypo

SEQ ID NO: 367551 - DNA, 423 bp, Homo sapiens; identical to SEQ ID NO: 343345
  chr18:12433995-12434418
  hypo

SEQ ID NO: 367552 - DNA, 165 bp, Homo sapiens; identical to SEQ ID NO: 343346
  chr18:13033480-13033645
  hypo

SEQ ID NO: 367553 - DNA, 32 bp, Homo sapiens; identical to SEQ ID NO: 348880
  chr18:13036746-13036778
  hypo

SEQ ID NO: 367554 - DNA, 333 bp, Homo sapiens
  chr18:13131747-13132080
  hypo
cgacggtgcctaattgatacatacaaatcaatagtcttcctatacataaggaaataatgaacgaccagaaaacagcggaagacaaaacagcagaaataagtttagaaatgtgtgaagtgtatacaaaggaaactgtcaggttcctctggagcacatcggagacttgagtaggagtaacttaccggactgcactgggggccttcttccgtagcatgaacagcacccatgagtggggatggggctggggccgcaccagtccaggcagcatttcccccagtggagggggagctctgcaggtgcccagcctcccacgctgtttcagtagcttgttag

SEQ ID NO: 367555 - DNA, 110 bp, Homo sapiens; identical to SEQ ID NO: 355824
  chr18:13135194-13135304
  hypo

SEQ ID NO: 367556 - DNA, 130 bp, Homo sapiens
  chr18:13195846-13195976
  hypo
tagacatttttaaaaagagataagaggaaaaagataagcagacatgggagacacacggctcctacgtgtacagagaatcaggctgtttgtttacttcacctccgttggtctttggggctccacgctgccc

SEQ ID NO: 367557 - DNA, 928 bp, Homo sapiens; identical to SEQ ID NO: 335756
  chr18:13217150-13218078
  hypo

SEQ ID NO: 367558 - DNA, 82 bp, Homo sapiens
  chr18:13233060-13233142
  hypo
cgatggcagaggatctgcttgtcgccacacacagtgcgttagggatggagcttgccaccagtggcgccacctctttgcaggc

SEQ ID NO: 367559 - DNA, 58 bp, Homo sapiens
  chr18:13233182-13233240
  hypo
tctgcttggacacgggtcactggccgctaagaaggcaaatgccatgccgttcagatac

SEQ ID NO: 367560 - DNA, 35 bp, Homo sapiens
  chr18:13425955-13425990
  hypo
cgagggcaggacggtggaccacagtgaccctgtgg

SEQ ID NO: 367561 - DNA, 340 bp, Homo sapiens; identical to SEQ ID NO: 343354
  chr18:13442504-13442844
  hypo

SEQ ID NO: 367562 - DNA, 56 bp, Homo sapiens; identical to SEQ ID NO: 343356
  chr18:13499663-13499719
  hypo

SEQ ID NO: 367563 - DNA, 93 bp, Homo sapiens; identical to SEQ ID NO: 361209
  chr18:13823932-13824025
  hypo

SEQ ID NO: 367564 - DNA, 112 bp, Homo sapiens; identical to SEQ ID NO: 292934
  chr18:13824102-13824214
  hypo

SEQ ID NO: 367565 - DNA, 51 bp, Homo sapiens; identical to SEQ ID NO: 355827
  chr18:13826252-13826303
  hypo

SEQ ID NO: 367566 - DNA, 79 bp, Homo sapiens; identical to SEQ ID NO: 355828
  chr18:13826592-13826671
  hypo

SEQ ID NO: 367567 - DNA, 195 bp, Homo sapiens; identical to SEQ ID NO: 345545
  chr18:20512643-20512838
  hypo

SEQ ID NO: 367568 - DNA, 1232 bp, Homo sapiens; identical to SEQ ID NO: 345546
  chr18:20512902-20514134
  hypo

SEQ ID NO: 367569 - DNA, 458 bp, Homo sapiens; identical to SEQ ID NO: 361220
  chr18:20716114-20716572
  hypo

SEQ ID NO: 367570 - DNA, 186 bp, Homo sapiens; identical to SEQ ID NO: 361221
  chr18:20716690-20716876
  hypo

SEQ ID NO: 367571 - DNA, 310 bp, Homo sapiens; identical to SEQ ID NO: 355831
  chr18:20911034-20911344
  hypo

SEQ ID NO: 367572 - DNA, 157 bp, Homo sapiens; identical to SEQ ID NO: 355832
  chr18:22804909-22805066
  hypo

SEQ ID NO: 367573 - DNA, 1113 bp, Homo sapiens; identical to SEQ ID NO: 352075
  chr18:23806188-23807301
  hypo

SEQ ID NO: 367574 - DNA, 201 bp, Homo sapiens; identical to SEQ ID NO: 292989
  chr18:25756986-25757187
  hypo

SEQ ID NO: 367575 - DNA, 142 bp, Homo sapiens; identical to SEQ ID NO: 335782
  chr18:29598295-29598437
  hypo

SEQ ID NO: 367576 - DNA, 281 bp, Homo sapiens; identical to SEQ ID NO: 293004
  chr18:30349781-30350062
  hypo

SEQ ID NO: 367577 - DNA, 200 bp, Homo sapiens; identical to SEQ ID NO: 204951
  chr18:31803102-31803302
  hypo

SEQ ID NO: 367578 - DNA, 1207 bp, Homo sapiens; identical to SEQ ID NO: 345548
  chr18:32556625-32557832
  hypo

SEQ ID NO: 367579 - DNA, 45 bp, Homo sapiens; identical to SEQ ID NO: 204955
  chr18:32557883-32557928
  hypo

SEQ ID NO: 367580 - DNA, 411 bp, Homo sapiens; identical to SEQ ID NO: 204961
  chr18:35146241-35146652
  hypo

SEQ ID NO: 367581 - DNA, 414 bp, Homo sapiens; identical to SEQ ID NO: 343373
  chr18:35249615-35250029
  hypo

SEQ ID NO: 367582 - DNA, 755 bp, Homo sapiens; identical to SEQ ID NO: 345552
  chr18:42258983-42259738
  hypo

SEQ ID NO: 367583 - DNA, 120 bp, Homo sapiens; identical to SEQ ID NO: 204967
  chr18:42259821-42259941
  hypo

SEQ ID NO: 367584 - DNA, 1164 bp, Homo sapiens; identical to SEQ ID NO: 352089
  chr18:42260083-42261247
  hypo

SEQ ID NO: 367585 - DNA, 190 bp, Homo sapiens; identical to SEQ ID NO: 361257
  chr18:43914608-43914798
  hypo

SEQ ID NO: 367586 - DNA, 105 bp, Homo sapiens; identical to SEQ ID NO: 343377
  chr18:44260345-44260450
  hypo

SEQ ID NO: 367587 - DNA, 58 bp, Homo sapiens; identical to SEQ ID NO: 343381
  chr18:45353804-45353862
  hypo

SEQ ID NO: 367588 - DNA, 796 bp, Homo sapiens; identical to SEQ ID NO: 335809
  chr18:45687770-45688566
  hypo

SEQ ID NO: 367589 - DNA, 164 bp, Homo sapiens; identical to SEQ ID NO: 204977
  chr18:45934609-45934773
  hypo

SEQ ID NO: 367590 - DNA, 221 bp, Homo sapiens; identical to SEQ ID NO: 204978
  chr18:45934810-45935031
  hypo

SEQ ID NO: 367591 - DNA, 1885 bp, Homo sapiens; identical to SEQ ID NO: 204979
  chr18:45935196-45937081
  hypo

SEQ ID NO: 367592 - DNA, 51 bp, Homo sapiens; identical to SEQ ID NO: 324178
  chr18:46142611-46142662
  hypo

SEQ ID NO: 367593 - DNA, 323 bp, Homo sapiens; identical to SEQ ID NO: 343385
  chr18:46287816-46288139
  hypo

SEQ ID NO: 367594 - DNA, 284 bp, Homo sapiens; identical to SEQ ID NO: 343386
  chr18:46418923-46419207
  hypo

SEQ ID NO: 367595 - DNA, 556 bp, Homo sapiens; identical to SEQ ID NO: 335811
  chr18:46502500-46503056
  hypo

SEQ ID NO: 367596 - DNA, 137 bp, Homo sapiens; identical to SEQ ID NO: 343388
  chr18:47285297-47285434
  hypo

SEQ ID NO: 367597 - DNA, 436 bp, Homo sapiens; identical to SEQ ID NO: 347511
  chr18:47720908-47721344
  hypo

SEQ ID NO: 367598 - DNA, 204 bp, Homo sapiens; identical to SEQ ID NO: 335816
  chr18:47813485-47813689
  hypo

SEQ ID NO: 367599 - DNA, 53 bp, Homo sapiens; identical to SEQ ID NO: 352104
  chr18:53257322-53257375
  hypo

SEQ ID NO: 367600 - DNA, 84 bp, Homo sapiens
  chr18:54483312-54483396
  hypo
cagggcctgaagcaaaagtccaggaggaagagcatgaccttgttgacgatgacatcaccactggtaagcacagacatctttaac

SEQ ID NO: 367601 - DNA, 249 bp, Homo sapiens; identical to SEQ ID NO: 343395
  chr18:54694241-54694490
  hypo

SEQ ID NO: 367602 - DNA, 115 bp, Homo sapiens; identical to SEQ ID NO: 346183
  chr18:55850987-55851102
  hypo

SEQ ID NO: 367603 - DNA, 172 bp, Homo sapiens; identical to SEQ ID NO: 355853
  chr18:56008826-56008998
  hypo

SEQ ID NO: 367604 - DNA, 486 bp, Homo sapiens; identical to SEQ ID NO: 355854
  chr18:59483218-59483704
  hypo

SEQ ID NO: 367605 - DNA, 98 bp, Homo sapiens; identical to SEQ ID NO: 343403
  chr18:60110139-60110237
  hypo

SEQ ID NO: 367606 - DNA, 66 bp, Homo sapiens; identical to SEQ ID NO: 343405
  chr18:60229150-60229216
  hypo

SEQ ID NO: 367607 - DNA, 127 bp, Homo sapiens; identical to SEQ ID NO: 355855
  chr18:72347372-72347499
  hypo

SEQ ID NO: 367608 - DNA, 74 bp, Homo sapiens; identical to SEQ ID NO: 355856
  chr18:72347576-72347650
  hypo

SEQ ID NO: 367609 - DNA, 183 bp, Homo sapiens; identical to SEQ ID NO: 343415
  chr18:72670022-72670205
  hypo

SEQ ID NO: 367610 - DNA, 227 bp, Homo sapiens; identical to SEQ ID NO: 343416
  chr18:72764607-72764834
  hypo

SEQ ID NO: 367611 - DNA, 153 bp, Homo sapiens; identical to SEQ ID NO: 343418
  chr18:74069268-74069421
  hypo

SEQ ID NO: 367612 - DNA, 163 bp, Homo sapiens; identical to SEQ ID NO: 343419
  chr18:74073695-74073858
  hypo

SEQ ID NO: 367613 - DNA, 684 bp, Homo sapiens; identical to SEQ ID NO: 343420
  chr18:74083302-74083986
  hypo

SEQ ID NO: 367614 - DNA, 1404 bp, Homo sapiens; identical to SEQ ID NO: 343421
  chr18:74090923-74092327
  hypo

SEQ ID NO: 367615 - DNA, 874 bp, Homo sapiens; identical to SEQ ID NO: 343422
  chr18:74096607-74097481
  hypo

SEQ ID NO: 367616 - DNA, 132 bp, Homo sapiens; identical to SEQ ID NO: 355863
  chr18:74113780-74113912
  hypo

SEQ ID NO: 367617 - DNA, 60 bp, Homo sapiens; identical to SEQ ID NO: 218599
  chr18:74113942-74114002
  hypo

SEQ ID NO: 367618 - DNA, 451 bp, Homo sapiens; identical to SEQ ID NO: 343424
  chr18:74120305-74120756
  hypo

SEQ ID NO: 367619 - DNA, 168 bp, Homo sapiens; identical to SEQ ID NO: 343425
  chr18:74134219-74134387
  hypo

SEQ ID NO: 367620 - DNA, 158 bp, Homo sapiens; identical to SEQ ID NO: 343426
  chr18:74134955-74135113
  hypo

SEQ ID NO: 367621 - DNA, 801 bp, Homo sapiens
  chr18:74144952-74145753
  hypo
cgagacctggccgcacatcctgagtccacacatcctgagtggcaacgacactgaaatccacacatgcggcactttccattgaagactctgtaggcttctgagatgctcccattaaatactaactgtaaggccagcctctgctgcgactgctgttcatcgctgtttctgttatcagacaggaagatctctagagtctagacatccagtaaaaagcaccactgaccgctgagtactcccgtgcaaaactacccactcccgaatacaacatttctccatggagttcgctgtcaactctgaagaacagaattcatcaaggtgcagctccagccactgttctcagcgtgagtcctgcggggccctcaagaaaaagcaggtctggcccctgtcttcaatgagatggcaatttgaggatgcctgacgcaaggcggatgctggggacagagagggtcatcctgcctgaaaagaatgtgtccacgcaacagggaggaatggggccagcctgaggcccaggtttgcattccaccctgggtgccgtaccgcggctgcacgctcaggccttgtggaggagacatgggagccttgagtctgggcatagcatccgggtcacagcaaggtggagaggggagaagacgggcaggtgccagagctgaaatgcatatggagctgggagccacctcagcttgcaaggaggaacaccaaagggctgggcagaagggtgggaatccgtgcgttaagcaaacgcctagtgaagaatcgagaaaggatgggcttagtcgcagcacatcacggatacaggagggc

SEQ ID NO: 367622 - DNA, 266 bp, Homo sapiens; identical to SEQ ID NO: 343428
  chr18:74148373-74148639
  hypo

SEQ ID NO: 367623 - DNA, 1394 bp, Homo sapiens
  chr18:74153251-74154645
  hypo
cggccaggccagagcccggggagtcagcagcggcacaggcggagccagggctgctgggctgggaggccgagtcaccctcactgagtgatccgcagcgggcccgcgccgccctgtccccgtcactgtccctctcgcggcgcgcgcggcgatgcacgcgtgagtgcagcaccatctgatgataggtgcggaagatcttgccgcactcgaagcactcggaggacttgccctggccggtggtggctgcggccctgcggttggggcgcgcggccgagcggggatcgaggtggccggcgggcgcggggtccccaggcccgctcgcgcgcttccgcgggggcccctgcgcggctggtgcatcctgctcacgcttgcgcttctcctggctcaccaggacgtactcgcgcctgtccttgtcgaaggccacgtccccggccagcgcctcgtcccaggccccgtacttgaggtactcggccggctcggccaccttaccccgcgtggccagctgccaggcctggtagctgttgaccgggtccagctcagccacccgccgtccggcctgcgtgccagggcacgagtcgccggccgccgacggcctcaggttcaggcactggaggaagaactgcttggtgtccgagggcccctccgccccctcctcggccggggcgcgcgtgcggctggcctcgactctgcggtggatggcattgtgggcgttcaagctgtccaggtttgtaaacaggttcccgcacttggcgcagacctcgtagaggctcaggccggcgacgatcacctcctcctggaccacgttgttgatggtggcgatggggtccagctcactcttgggcctgttcttgctgcccgtcttggggccgtgcgccttcatgtggttcttgaggaaccagggctccttgaacctacggccgcagatgtggcagccgtggtcgaaggagccccggtgcttcttcatgtgcgccttcaggaaccaggtctggctgaaggcctggccacacacctcgcacgggaactccccggggctcagctcgggcttgccgttctccacgcaggcctcgccgctgccgggcccctgcgcggtgatgtggtccctctcgatgtggctcagcagcgactcctcccgcagcgtcgcgtagctgcacagcctgcacttgaacggcttgtgcgcctggtgcacgtgcagctccaggtccttcttacgctcgaactggctcttgcagaaggagcactggaccgctgccttggcctcccccggggcgcatgcggacccctctgcccccttcttgctgctccgcagcaggactctgccgctgtcggcctgcgaggccccgttcaggaccctggcgccgtcggcctgcgaggccccgttcagcagccggttgcaggcc

SEQ ID NO: 367624 - DNA, 460 bp, Homo sapiens; identical to SEQ ID NO: 343430
  chr18:74159178-74159638
  hypo

SEQ ID NO: 367625 - DNA, 366 bp, Homo sapiens; identical to SEQ ID NO: 324379
  chr18:74171117-74171483
  hypo

SEQ ID NO: 367626 - DNA, 122 bp, Homo sapiens; identical to SEQ ID NO: 355868
  chr18:74171505-74171627
  hypo

SEQ ID NO: 367627 - DNA, 124 bp, Homo sapiens
  chr18:74176907-74177031
  hypo
cgaccccagggatacagccgtgcatccgatgagggcagctgcaccctcctcaccttcaggcaacctcgaggggagccgccagaggagagaggctccagaggtgccagggcccagggctcgccac

SEQ ID NO: 367628 - DNA, 182 bp, Homo sapiens; identical to SEQ ID NO: 355869
  chr18:74195379-74195561
  hypo

SEQ ID NO: 367629 - DNA, 245 bp, Homo sapiens; identical to SEQ ID NO: 355870
  chr18:74325503-74325748
  hypo

SEQ ID NO: 367630 - DNA, 173 bp, Homo sapiens; identical to SEQ ID NO: 355871
  chr18:74325938-74326111
  hypo

SEQ ID NO: 367631 - DNA, 250 bp, Homo sapiens; identical to SEQ ID NO: 355872
  chr18:74396249-74396499
  hypo

SEQ ID NO: 367632 - DNA, 176 bp, Homo sapiens; identical to SEQ ID NO: 343442
  chr18:74426512-74426688
  hypo

SEQ ID NO: 367633 - DNA, 79 bp, Homo sapiens; identical to SEQ ID NO: 343444
  chr18:74518710-74518789
  hypo

SEQ ID NO: 367634 - DNA, 297 bp, Homo sapiens; identical to SEQ ID NO: 343445
  chr18:74569886-74570183
  hypo

SEQ ID NO: 367635 - DNA, 430 bp, Homo sapiens; identical to SEQ ID NO: 343446
  chr18:74696524-74696954
  hypo

SEQ ID NO: 367636 - DNA, 140 bp, Homo sapiens; identical to SEQ ID NO: 355873
  chr18:74721790-74721930
  hypo

SEQ ID NO: 367637 - DNA, 704 bp, Homo sapiens; identical to SEQ ID NO: 343448
  chr18:74728317-74729021
  hypo

SEQ ID NO: 367638 - DNA, 1775 bp, Homo sapiens; identical to SEQ ID NO: 343449
  chr18:74736601-74738376
  hypo

SEQ ID NO: 367639 - DNA, 47 bp, Homo sapiens
  chr18:74755425-74755472
  hypo
cgtggcatctgaaaatgtaaataagtgatgtaccctgtggggtagct

SEQ ID NO: 367640 - DNA, 368 bp, Homo sapiens
  chr18:74755590-74755958
  hypo
tatgaaatgtcatccctagaaatggcttcatttgggataaagctttgaacttgcgtgcgtgccccgcaccccgtggcggactgagtcactgctttgctgttgcggcgtggtgagtaaaactttcccaggggagccggagttgagtgagaaagggatgcaggacacgcaggagctgacacatctctatggatttaagtcgctgtttccacaaatgctactcacatgcccacacgtgtagggcaggactgtcacgcgtccactctgctcagctttccaggccggatctggtcccagccattctacctgacccagactccccgcacccctgccattcccccagctgccgtcctgtgtctcctgatttctgc

SEQ ID NO: 367641 - DNA, 337 bp, Homo sapiens; identical to SEQ ID NO: 343451
  chr18:74759077-74759414
  hypo

SEQ ID NO: 367642 - DNA, 636 bp, Homo sapiens; identical to SEQ ID NO: 355876
  chr18:74763734-74764370
  hypo

SEQ ID NO: 367643 - DNA, 75 bp, Homo sapiens
  chr18:74806376-74806451
  hypo
cgttgctcataagtgccggttcccggactctgcaggaggcacaccttaacggggacactttactgcgggtgccac

SEQ ID NO: 367644 - DNA, 817 bp, Homo sapiens; identical to SEQ ID NO: 347518
  chr18:74844285-74845102
  hypo

SEQ ID NO: 367645 - DNA, 135 bp, Homo sapiens
  chr18:75339359-75339494
  hypo
tgggacagagagcagcccggatgcgcggagcagacttggacttcagagcaccttcgctgaagccgagtgctgctgtgccaggtttgtggcggtcatggtggaaagtggtgagtgcctcgggatgggtgctcctgc

SEQ ID NO: 367646 - DNA, 241 bp, Homo sapiens; identical to SEQ ID NO: 343461
  chr18:75873544-75873785
  hypo

SEQ ID NO: 367647 - DNA, 236 bp, Homo sapiens; identical to SEQ ID NO: 348899
  chr18:75999434-75999670
  hypo

SEQ ID NO: 367648 - DNA, 106 bp, Homo sapiens
  chr18:76123588-76123694
  hypo
cgtgatccacagaaatgattgctacgttccctgcagaacggacggcagtcgctggacagggccccagagcgcctgggtgcggtcagctccgcggactccccccggg

SEQ ID NO: 367649 - DNA, 31 bp, Homo sapiens
  chr18:76123894-76123925
  hypo
ctgtgggcccgagcgccgagggtcccatttc

SEQ ID NO: 367650 - DNA, 143 bp, Homo sapiens; identical to SEQ ID NO: 355880
  chr18:76129277-76129420
  hypo

SEQ ID NO: 367651 - DNA, 180 bp, Homo sapiens; identical to SEQ ID NO: 355881
  chr18:76129450-76129630
  hypo

SEQ ID NO: 367652 - DNA, 441 bp, Homo sapiens; identical to SEQ ID NO: 343466
  chr18:76151089-76151530
  hypo

SEQ ID NO: 367653 - DNA, 114 bp, Homo sapiens; identical to SEQ ID NO: 355882
  chr18:76189679-76189793
  hypo

SEQ ID NO: 367654 - DNA, 273 bp, Homo sapiens; identical to SEQ ID NO: 355883
  chr18:76189872-76190145
  hypo

SEQ ID NO: 367655 - DNA, 463 bp, Homo sapiens; identical to SEQ ID NO: 355884
  chr18:76435960-76436423
  hypo

SEQ ID NO: 367656 - DNA, 148 bp, Homo sapiens; identical to SEQ ID NO: 343469
  chr18:76480528-76480676
  hypo

SEQ ID NO: 367657 - DNA, 486 bp, Homo sapiens
  chr18:76486313-76486799
  hypo
cgagtgatggcgcaaagcaggccggtgaagcctcggcgctgggcccggcctggcactgcgcatccttggccttcgggacccgggctcccgcccccgtgcccagcctcacggagcccgcccaggcctgctgtcccccgagctccaggcccactgcccgccagaaccttctggtcttgcctcgcttcccgcctgcacttttctttcccggcctggcagagacatctataccagtgggaaaggcgagccactccggcagcgctgccaggttgcactccagcacctcacactcgcttctcccgggacttaaatttaaactcctcgagcgtcatgtccccatggctgtctggggccatcattgccacctcgtactcctctcttcactgccacaagaccaagagacagatgcgtcccggggtccttccacagcgttcccaggggaggaggagggcgcctggagccctggggaaggcgagcccgagccagcgc

SEQ ID NO: 367658 - DNA, 432 bp, Homo sapiens; identical to SEQ ID NO: 343471
  chr18:76495838-76496270
  hypo

SEQ ID NO: 367659 - DNA, 284 bp, Homo sapiens; identical to SEQ ID NO: 343472
  chr18:76534718-76535002
  hypo

SEQ ID NO: 367660 - DNA, 178 bp, Homo sapiens; identical to SEQ ID NO: 343473
  chr18:76552775-76552953
  hypo

SEQ ID NO: 367661 - DNA, 55 bp, Homo sapiens; identical to SEQ ID NO: 348901
  chr18:76653387-76653442
  hypo

SEQ ID NO: 367662 - DNA, 137 bp, Homo sapiens; identical to SEQ ID NO: 355888
  chr18:76685353-76685490
  hypo

SEQ ID NO: 367663 - DNA, 298 bp, Homo sapiens; identical to SEQ ID NO: 218657
  chr18:76685836-76686134
  hypo

SEQ ID NO: 367664 - DNA, 102 bp, Homo sapiens; identical to SEQ ID NO: 355890
  chr18:76686279-76686381
  hypo

SEQ ID NO: 367665 - DNA, 162 bp, Homo sapiens; identical to SEQ ID NO: 343478
  chr18:77076178-77076340
  hypo

SEQ ID NO: 367666 - DNA, 232 bp, Homo sapiens; identical to SEQ ID NO: 343479
  chr18:77083049-77083281
  hypo

SEQ ID NO: 367667 - DNA, 583 bp, Homo sapiens; identical to SEQ ID NO: 293194
  chr18:77160022-77160605
  hypo

SEQ ID NO: 367668 - DNA, 143 bp, Homo sapiens; identical to SEQ ID NO: 343482
  chr18:77198679-77198822
  hypo

SEQ ID NO: 367669 - DNA, 149 bp, Homo sapiens
  chr18:77270851-77271000
  hypo
cggggcatcctctgccggggcatcttccgccggggcatcctccgccgggacatcctccaccgggggctcctccgccggggcatcctgctccggggcatcgttcgccggtcttgtcgctgcggtggaagtgtcgtgttcccagccaggct

SEQ ID NO: 367670 - DNA, 338 bp, Homo sapiens
  chr18:77271089-77271427
  hypo
gagagtccaccaacggcaattacaggaacctaatggccttcctgccgcaccgctccgtggcacccggctcgctgtgatgaattgctcattatgtgcagtgttggaatagcctccacaagattaataattggataatcaatacagaaattcaatcttggggtgtttttttcactccggggtcaatatgtcctgaagattacaaggcccgactctgcctcccccctccccgctgcttccgcgttgggagtttggccagcacctcgccacacgatgggtcatggtgcgttgtctccgtacctccgtgacttttctattctttgcaaacagcaggttctgcc

SEQ ID NO: 367671 - DNA, 122 bp, Homo sapiens; identical to SEQ ID NO: 343487
  chr18:77334284-77334406
  hypo

SEQ ID NO: 367672 - DNA, 114 bp, Homo sapiens
  chr18:77338977-77339091
  hypo
cgcgccgagtgtcctaacacagttgccacacggctccatgtcctgtgcacaggccaggggttcgagtgggcatcagcaatgctcacttcagagcccctccgccacgacgtggcc

SEQ ID NO: 367673 - DNA, 259 bp, Homo sapiens
  chr18:77339121-77339380
  hypo
aaactgcgtctcctgcctccagctgcgttacttggagaagcaggaacctctccatcctcactttccatccgcacatccagggccgcccacgtgcacccacaccgtgcgctcactgtgtggcctgtcgagaacacagtgtcctctgcccctgatttcccaggagagtcgcacgtctgtgatggtggtctcccaggcacgcatggccatggagcacgggaacgtgtgcgcctgctgggagcacatgggaagactgcacgcc

SEQ ID NO: 367674 - DNA, 770 bp, Homo sapiens; identical to SEQ ID NO: 343490
  chr18:77358223-77358993
  hypo

SEQ ID NO: 367675 - DNA, 710 bp, Homo sapiens; identical to SEQ ID NO: 343492
  chr18:77474501-77475211
  hypo

SEQ ID NO: 367676 - DNA, 31 bp, Homo sapiens
  chr18:77482822-77482853
  hypo
cggcaggagttctgcggggccttcgtgctgc

SEQ ID NO: 367677 - DNA, 411 bp, Homo sapiens; identical to SEQ ID NO: 343493
  chr18:77497998-77498409
  hypo

SEQ ID NO: 367678 - DNA, 160 bp, Homo sapiens; identical to SEQ ID NO: 346187
  chr18:77508739-77508899
  hypo

SEQ ID NO: 367679 - DNA, 398 bp, Homo sapiens; identical to SEQ ID NO: 324585
  chr18:77508946-77509344
  hypo

SEQ ID NO: 367680 - DNA, 116 bp, Homo sapiens; identical to SEQ ID NO: 346189
  chr18:77509679-77509795
  hypo

SEQ ID NO: 367681 - DNA, 42 bp, Homo sapiens; identical to SEQ ID NO: 343495
  chr18:77510442-77510484
  hypo

SEQ ID NO: 367682 - DNA, 187 bp, Homo sapiens; identical to SEQ ID NO: 343496
  chr18:77512029-77512216
  hypo

SEQ ID NO: 367683 - DNA, 268 bp, Homo sapiens; identical to SEQ ID NO: 343497
  chr18:77535504-77535772
  hypo

SEQ ID NO: 367684 - DNA, 265 bp, Homo sapiens; identical to SEQ ID NO: 355896
  chr18:77542640-77542905
  hypo

SEQ ID NO: 367685 - DNA, 270 bp, Homo sapiens; identical to SEQ ID NO: 218705
  chr18:77542951-77543221
  hypo

SEQ ID NO: 367686 - DNA, 576 bp, Homo sapiens; identical to SEQ ID NO: 343503
  chr18:77608097-77608673
  hypo

SEQ ID NO: 367687 - DNA, 135 bp, Homo sapiens; identical to SEQ ID NO: 348905
  chr18:77609451-77609586
  hypo

SEQ ID NO: 367688 - DNA, 474 bp, Homo sapiens; identical to SEQ ID NO: 348906
  chr18:77609678-77610152
  hypo

SEQ ID NO: 367689 - DNA, 113 bp, Homo sapiens; identical to SEQ ID NO: 343505
  chr18:77616298-77616411
  hypo

SEQ ID NO: 367690 - DNA, 362 bp, Homo sapiens; identical to SEQ ID NO: 355902
  chr18:77627972-77628334
  hypo

SEQ ID NO: 367691 - DNA, 122 bp, Homo sapiens; identical to SEQ ID NO: 355903
  chr18:77628470-77628592
  hypo

SEQ ID NO: 367692 - DNA, 189 bp, Homo sapiens; identical to SEQ ID NO: 355904
  chr18:77635961-77636150
  hypo

SEQ ID NO: 367693 - DNA, 344 bp, Homo sapiens; identical to SEQ ID NO: 324607
  chr18:77636190-77636534
  hypo

SEQ ID NO: 367694 - DNA, 144 bp, Homo sapiens
  chr18:77644520-77644664
  hypo
cgatgcagtggaggagcagggctgggtctgggcctgggcctgggcgtggcagctccccaggcccacggggcaggaattctagattctgggattcctttcatcgttgctttttgtgttttctacctagagcggagaaatgtttgt

SEQ ID NO: 367695 - DNA, 39 bp, Homo sapiens
  chr18:77644881-77644920
  hypo
cagccaagacaccatccctgaaactgtgataatgagagc

SEQ ID NO: 367696 - DNA, 277 bp, Homo sapiens; identical to SEQ ID NO: 355906
  chr18:77808879-77809156
  hypo

SEQ ID NO: 367697 - DNA, 368 bp, Homo sapiens; identical to SEQ ID NO: 355907
  chr18:77809186-77809554
  hypo

SEQ ID NO: 367698 - DNA, 912 bp, Homo sapiens; identical to SEQ ID NO: 343511
  chr18:77943609-77944521
  hypo

SEQ ID NO: 367699 - DNA, 154 bp, Homo sapiens
  chr19:379979-380133
  hypo
cggcaggcggtttcgggcgctggcctgtgacgccgtcctgggcaggcgcgtgcatctgaatgctttttacctggtctctcgactgttgcgttgggtaactcccatccatatcaccagtttcacaccaggttccagggacgaggatgtggacacc

SEQ ID NO: 367700 - DNA, 54 bp, Homo sapiens; identical to SEQ ID NO: 355909
  chr19:403809-403863
  hypo

SEQ ID NO: 367701 - DNA, 311 bp, Homo sapiens
  chr19:407832-408143
  hypo
ccacctgggccagagccccgtgctcactgtggaacagagactccttgcgcctcgtgtgggggctctcagccagcatggcgaagccgtaggacgtctgggccttgggcaccgagggcagggacatggcaccctgggcctgggggtcggcgtcagtggcctcctcggacagccagtcctcggcactctcgatctggatcacgtgccgggtggctgccttcagcaggctcttgctctcggctgccagcttggcaggcagccgggggctccgtggggtctggcggggggccgcagaggccaggttctgttccgac

SEQ ID NO: 367702 - DNA, 805 bp, Homo sapiens
  chr19:418255-419060
  hypo
ctcctctgggaaggaggcctggacacccagcacgccgcaggggtccacaaagaccaggtgacgcccaccacagccgaccgcagtgtcacggtcatggctgcacgctgccaccctcgggcacatatccacccacgggcagtgacgcgtgtccacacacaacctgcacacaaaggctcacggcggccaaaaggcggaagcagccccagcgtccatcagcggatgaacacacaaaacgtggtcccctcacacagcgggacattatccagccgagaacaggagccaggctctggcccgggccacggcgcaatgcccctggaggacgtcacgctcagtgagagacgccagacacagaaggacacacagcgtggaatcccattgctatgaaatgtccaggacaggcccatccacagagacaggaggcggatgtgtggggttggagctggggaggggacagggagtgacggctggtggggacagggcttctttcggggctgacagaatgttctggaattcgacagagatggttgcacggctcggatgctgaacacccctgagtcgtgccctctagagggaaaggcacggcacgtgaaccgggtctcaattttcaaatcagaaaagaatctggcaaaggaggcaaggccagcgacccacggcggcagccacacacctggctcagggctcccgtgagaccacgccacgcaggtgcagctcactctcggcggccacgatgggctgcccgttctgcaggtggtggtcgatcaggtggctgatgctctcaaacagcacgtccttcgtccgtacctgc

SEQ ID NO: 367703 - DNA, 66 bp, Homo sapiens; identical to SEQ ID NO: 355911
  chr19:491540-491606
  hypo

SEQ ID NO: 367704 - DNA, 70 bp, Homo sapiens
  chr19:530480-530550
  hypo
tcaagactcaggtgggctgggcgcggtggctcatgcctataatcccagcatttgggaggccgacgcagac

SEQ ID NO: 367705 - DNA, 98 bp, Homo sapiens
  chr19:549193-549291
  hypo
cgcccgggtggggctgggggaatgaggctggcgggagggccggggccagggcagccgccgggcaggttcctggctctcccgttctctggggagtcctg

SEQ ID NO: 367706 - DNA, 834 bp, Homo sapiens; identical to SEQ ID NO: 343521
  chr19:581325-582159
  hypo

SEQ ID NO: 367707 - DNA, 200 bp, Homo sapiens; identical to SEQ ID NO: 343522
  chr19:601344-601544
  hypo

SEQ ID NO: 367708 - DNA, 405 bp, Homo sapiens; identical to SEQ ID NO: 352128
  chr19:603411-603816
  hypo

SEQ ID NO: 367709 - DNA, 159 bp, Homo sapiens; identical to SEQ ID NO: 352129
  chr19:603846-604005
  hypo

SEQ ID NO: 367710 - DNA, 56 bp, Homo sapiens; identical to SEQ ID NO: 355915
  chr19:617561-617617
  hypo

SEQ ID NO: 367711 - DNA, 808 bp, Homo sapiens; identical to SEQ ID NO: 355916
  chr19:617647-618455
  hypo

SEQ ID NO: 367712 - DNA, 216 bp, Homo sapiens
  chr19:629609-629825
  hypo
ccgtggtggacgaccagcaggtggtgggcgaggggcagctggtcagtgagcaggcagcacttgaagaaggccaggagcctctgctgctgacctgagagctgggcctgcgagtgctgccccgacggggcctgctccacatcgaggctcagcttcccaggggcctcctgcagcagccgggccagctgctcctcccaggggctctcgggggcctggcgc

SEQ ID NO: 367713 - DNA, 34 bp, Homo sapiens; identical to SEQ ID NO: 355917
  chr19:638348-638382
  hypo

SEQ ID NO: 367714 - DNA, 112 bp, Homo sapiens; identical to SEQ ID NO: 355918
  chr19:638476-638588
  hypo

SEQ ID NO: 367715 - DNA, 124 bp, Homo sapiens
  chr19:640789-640913
  hypo
cggtgtccccgccgggcggggggcactgggaagggggcccgggcccgctggctgccgcctgaatcaccaccatcagggcaggtaatcaccccctgtccttcccaccgctttcatctgggcgcca

SEQ ID NO: 367716 - DNA, 79 bp, Homo sapiens
  chr19:641007-641086
  hypo
ccggggcagaggcctggctccgctgcctgacctggaacagtctctgcctctctccaagcctcggtttccccagctggac

SEQ ID NO: 367717 - DNA, 739 bp, Homo sapiens; identical to SEQ ID NO: 343528
  chr19:736036-736775
  hypo

SEQ ID NO: 367718 - DNA, 182 bp, Homo sapiens; identical to SEQ ID NO: 343529
  chr19:739235-739417
  hypo

SEQ ID NO: 367719 - DNA, 287 bp, Homo sapiens; identical to SEQ ID NO: 293229
  chr19:813409-813696
  hypo

SEQ ID NO: 367720 - DNA, 322 bp, Homo sapiens; identical to SEQ ID NO: 352133
  chr19:813830-814152
  hypo

SEQ ID NO: 367721 - DNA, 102 bp, Homo sapiens; identical to SEQ ID NO: 355922
  chr19:814741-814843
  hypo

SEQ ID NO: 367722 - DNA, 119 bp, Homo sapiens; identical to SEQ ID NO: 343535
  chr19:874809-874928
  hypo

SEQ ID NO: 367723 - DNA, 158 bp, Homo sapiens; identical to SEQ ID NO: 346190
  chr19:883424-883582
  hypo

SEQ ID NO: 367724 - DNA, 544 bp, Homo sapiens; identical to SEQ ID NO: 346191
  chr19:884311-884855
  hypo

SEQ ID NO: 367725 - DNA, 61 bp, Homo sapiens
  chr19:891455-891516
  hypo
cgggagacgcagcggagggtctgcgctggcccaggtgagtgatgatgggggcagcaagtgg

SEQ ID NO: 367726 - DNA, 513 bp, Homo sapiens
  chr19:899625-900138
  hypo
cggcctggggggacacggagaagaaccgaagcagccgctcctcccaggtctccagcgtttcctggggagagcggcccggtggtcagggaactgcgggacctgtgggtggggggccagggaggtccagggcccccaggagcccacagcgctgggctcaaacatgacctctgacccaccacgtgaggctgcttaagtgtctctgaggccaccatgccacctcctgcctgtgccttccgtggaggaaactcctacacaccctgcagtgcccgccttcgttgcccccgccctcctactcagggccctggtgccgctgtctgtatcctgccctgtttcccctgacacgacctgcaccgggtgagaacctgtgcctgggaaacgggccttcaaaaaagaccaggcaggtagaaaagggaggcccggcaatcccccactcaccatggggatgcggctgcgcttgaggacggctcgcagacgccggctgatgcgctggaagcactcgcggggtgtataggc

SEQ ID NO: 367727 - DNA, 167 bp, Homo sapiens; identical to SEQ ID NO: 348910
  chr19:901066-901233
  hypo

SEQ ID NO: 367728 - DNA, 241 bp, Homo sapiens
  chr19:939434-939675
  hypo
tccagaagtaacacttgacactcttcttgcagagaggaagaaaatggaacgtttacagggagccccgagtccctcccttgacctctagggcatgagccgcatgttctccaggcctttctctgcccactcacacccaggaatgtgacctgggaggtatctaacgtgtgatcttccgggcaggtcgggaggttcctcccgccgctgccttcgaggagctgtttatcttgggtgcgttcgcgtc

SEQ ID NO: 367729 - DNA, 743 bp, Homo sapiens; identical to SEQ ID NO: 335871
  chr19:941824-942567
  hypo

SEQ ID NO: 367730 - DNA, 68 bp, Homo sapiens; identical to SEQ ID NO: 348912
  chr19:956638-956706
  hypo

SEQ ID NO: 367731 - DNA, 50 bp, Homo sapiens; identical to SEQ ID NO: 355928
  chr19:957401-957451
  hypo

SEQ ID NO: 367732 - DNA, 228 bp, Homo sapiens; identical to SEQ ID NO: 348913
  chr19:1004547-1004775
  hypo

SEQ ID NO: 367733 - DNA, 279 bp, Homo sapiens; identical to SEQ ID NO: 218770
  chr19:1005441-1005720
  hypo

SEQ ID NO: 367734 - DNA, 128 bp, Homo sapiens
  chr19:1030225-1030353
  hypo
ctggaatggccgggtgcagaaaggtggcagggaatcggtggcaaggagccaggtgcgtgactagaggcggtcagcctcgggggcagctccttcgggagttgctaagaagcaggatgggggccgggcgc

SEQ ID NO: 367735 - DNA, 140 bp, Homo sapiens; identical to SEQ ID NO: 343550
  chr19:1048876-1049016
  hypo

SEQ ID NO: 367736 - DNA, 985 bp, Homo sapiens
  chr19:1079725-1080710
  hypo
cgcacctgcgtggccgacgcgaagacgcagaagcaggagctggaggataccaaggtgacggcgctgcggcagatccaggaggtcatccggcagagcgaccaaaccatcaagtcggtgcgtggggtgctccggccgcccgggcggggatggtggaccgggcggcctcctcctgacccctccgctctccggtgccgcccgcaggccacgatctcctactaccagatgatgcatatgcagacggcgccgctgcccgtgcacttccagatgctgtgtgagagcagcaagctgtatgacccaggccagcagtacgcctcccacgtgcgccagctgcagcgggaccaggagcccgatgtgcactacgactttgagccccacgtctccgccaacgcctggtaccgccacccagctgccctgtccccggcgcacaaggccctgcctgggagccgggcttccctctgtcgggggcatgaagatgaagctgtcttgccccccatcacctcccctccttttcccggtttcttccactaggtcccccgtcatgcgtgcccggaagagcagcttcaacgtgagtgatgtggcgcggccggaggctgccgggagccccccagaagaaggcgggtgcactgagggcacacctgccaaggaccacaggggtgagtgtccggcggggcccaggggcggacgctggctccctgcgacccaccctggcccttcaccagagacgcctctttctccagccgggcgaggacaccaggttcacaagtcatggccgctctcgatctcagactcggacagtgggctggaccccggccctggcgcaggtgagggaggctctctggcgggctggggtgtggagctgcctcctctcctgagcctcagggtttcatcacccaccggggtgatggagggggcccccctggctgggggagtctgaacagtcctgattcccgcccaggggactttaagaagttcgagcggacgtcat

SEQ ID NO: 367737 - DNA, 319 bp, Homo sapiens; identical to SEQ ID NO: 343553
  chr19:1128115-1128434
  hypo

SEQ ID NO: 367738 - DNA, 71 bp, Homo sapiens
  chr19:1156143-1156214
  hypo
cgcctgtgtccgagtcccctaggccagcacggtgctcctggcagctcctccctccctacggtctctgagcc

SEQ ID NO: 367739 - DNA, 241 bp, Homo sapiens; identical to SEQ ID NO: 324801
  chr19:1156283-1156524
  hypo

SEQ ID NO: 367740 - DNA, 110 bp, Homo sapiens
  chr19:1156628-1156738
  hypo
gtggcgtggcccatccacgtgccagaacacgacacagccatgaacagcagcgaggccgacctaggccacagcgcagacgcaccttgaggacgtcacgctctgtgagagac

SEQ ID NO: 367741 - DNA, 338 bp, Homo sapiens; identical to SEQ ID NO: 348916
  chr19:1166870-1167208
  hypo

SEQ ID NO: 367742 - DNA, 83 bp, Homo sapiens
  chr19:1170985-1171068
  hypo
cgaggacaggcacacaggcacgggcaacacacaaaatacagacacacataaccgactcatgaacatgggtacacacaggcaca

SEQ ID NO: 367743 - DNA, 428 bp, Homo sapiens
  chr19:1171422-1171850
  hypo
gcagagtccccagggcagcgctggcgtcatggggggctgcctccacaccgcctccaggagtgtttacagctgtggattacatgataccgcccccttcccagagctgatcccaccccccagcatgggggccccctgggagggggcctctgggagccggactggttctgtcgacacagtcgcctctttgttcggggcagagctcactctggcggtgttggcgtttccgcatgggccctgccggaggggcatccgtgactccgctggagccgggttgggccaagcccaagctggtcacacccctcacacccctggggttgggggaggccttaggcagcaagtgggtggggggtctaggggtggctggcgcaacctctctccacctcggtttccccgccaggtgagagggcagtgactgcccatggtcacgc

SEQ ID NO: 367744 - DNA, 68 bp, Homo sapiens; identical to SEQ ID NO: 343557
  chr19:1179335-1179403
  hypo

SEQ ID NO: 367745 - DNA, 268 bp, Homo sapiens; identical to SEQ ID NO: 343558
  chr19:1223581-1223849
  hypo

SEQ ID NO: 367746 - DNA, 197 bp, Homo sapiens; identical to SEQ ID NO: 355934
  chr19:1226490-1226687
  hypo

SEQ ID NO: 367747 - DNA, 317 bp, Homo sapiens; identical to SEQ ID NO: 355935
  chr19:1226828-1227145
  hypo

SEQ ID NO: 367748 - DNA, 790 bp, Homo sapiens; identical to SEQ ID NO: 343560
  chr19:1254919-1255709
  hypo

SEQ ID NO: 367749 - DNA, 197 bp, Homo sapiens; identical to SEQ ID NO: 343562
  chr19:1297611-1297808
  hypo

SEQ ID NO: 367750 - DNA, 397 bp, Homo sapiens; identical to SEQ ID NO: 355936
  chr19:1312697-1313094
  hypo

SEQ ID NO: 367751 - DNA, 576 bp, Homo sapiens; identical to SEQ ID NO: 343565
  chr19:1333769-1334345
  hypo

SEQ ID NO: 367752 - DNA, 717 bp, Homo sapiens
  chr19:1370777-1371494
  hypo
cgctcgcgggccgcccgggaccgggccaaccagaagctggtggagtacattgtgaaggccaagggcgcggagagccacctgcgggccatcctaaagagcaggaagccatctcgctggctgcagaccttcctgagctccagccagtacgtgacctgtgtggagacctacctggaggatgaggggcagctggacctggtggtgaagtacctgcagggcgtctaccaggaggtgggggccaaggtgctccagcgcaccaacggcgaccggatccggttcattctggacgtgcttctgcccgaggtgagccgcggaccggcgtgtcacgtgggcagggaggggcctgcgctgggattttgcaactccgcacgaggaggctgccacggtcctcgcccctgctccctggccgttcggcggccaacggagcgtggaggcctcctgtgtttacatcctgtcagtgctgggaaatgcgagtgcgtgcgcttgaccctgtgcggagacggagccgcttacttgacccctgtgcagagatggagctgcttagaagctgtcagcaccagggggtgcgaactccctccctactgcgggcgcacagatgcttcccagcctcggtgggtcagtcctgggaaacccactgcgagttggaaattcccaagtcagaatcgcatttagtacccagataaacccactgtaagttgaaaaactgtaagtggataatgc

SEQ ID NO: 367753 - DNA, 303 bp, Homo sapiens; identical to SEQ ID NO: 343568
  chr19:1393952-1394255
  hypo

SEQ ID NO: 367754 - DNA, 255 bp, Homo sapiens; identical to SEQ ID NO: 355938
  chr19:1423978-1424233
  hypo

SEQ ID NO: 367755 - DNA, 120 bp, Homo sapiens; identical to SEQ ID NO: 361344
  chr19:1449921-1450041
  hypo

SEQ ID NO: 367756 - DNA, 249 bp, Homo sapiens; identical to SEQ ID NO: 361346
  chr19:1491131-1491380
  hypo

SEQ ID NO: 367757 - DNA, 164 bp, Homo sapiens
  chr19:1495400-1495564
  hypo
ggctgcccacgcggggggttctgggggctccctggcagcccctgaccctgctgcaccctccctgcagaatcaaagctatcgagagcccaagcaaggacgacgacactgtgtggctcacctactgggtggtgtacgccctgtttgggctggccgagttcttcagc

SEQ ID NO: 367758 - DNA, 58 bp, Homo sapiens; identical to SEQ ID NO: 218817
  chr19:1496674-1496732
  hypo

SEQ ID NO: 367759 - DNA, 241 bp, Homo sapiens; identical to SEQ ID NO: 355940
  chr19:1506026-1506267
  hypo

SEQ ID NO: 367760 - DNA, 121 bp, Homo sapiens; identical to SEQ ID NO: 355941
  chr19:1565953-1566074
  hypo

SEQ ID NO: 367761 - DNA, 227 bp, Homo sapiens; identical to SEQ ID NO: 324873
  chr19:1577427-1577654
  hypo

SEQ ID NO: 367762 - DNA, 547 bp, Homo sapiens; identical to SEQ ID NO: 324874
  chr19:1577687-1578234
  hypo

SEQ ID NO: 367763 - DNA, 280 bp, Homo sapiens; identical to SEQ ID NO: 205085
  chr19:1748599-1748879
  hypo

SEQ ID NO: 367764 - DNA, 349 bp, Homo sapiens; identical to SEQ ID NO: 293279
  chr19:1748939-1749288
  hypo

SEQ ID NO: 367765 - DNA, 200 bp, Homo sapiens; identical to SEQ ID NO: 293280
  chr19:1749318-1749518
  hypo

SEQ ID NO: 367766 - DNA, 220 bp, Homo sapiens; identical to SEQ ID NO: 293281
  chr19:1749556-1749776
  hypo

SEQ ID NO: 367767 - DNA, 197 bp, Homo sapiens; identical to SEQ ID NO: 361357
  chr19:1754950-1755147
  hypo

SEQ ID NO: 367768 - DNA, 367 bp, Homo sapiens; identical to SEQ ID NO: 343582
  chr19:1785308-1785675
  hypo

SEQ ID NO: 367769 - DNA, 87 bp, Homo sapiens; identical to SEQ ID NO: 355948
  chr19:1807818-1807905
  hypo

SEQ ID NO: 367770 - DNA, 242 bp, Homo sapiens; identical to SEQ ID NO: 348917
  chr19:1911845-1912087
  hypo

SEQ ID NO: 367771 - DNA, 659 bp, Homo sapiens; identical to SEQ ID NO: 355950
  chr19:1912446-1913105
  hypo

SEQ ID NO: 367772 - DNA, 713 bp, Homo sapiens; identical to SEQ ID NO: 343586
  chr19:1960909-1961622
  hypo

SEQ ID NO: 367773 - DNA, 261 bp, Homo sapiens; identical to SEQ ID NO: 355951
  chr19:1969650-1969911
  hypo

SEQ ID NO: 367774 - DNA, 319 bp, Homo sapiens; identical to SEQ ID NO: 324918
  chr19:1970106-1970425
  hypo

SEQ ID NO: 367775 - DNA, 304 bp, Homo sapiens; identical to SEQ ID NO: 343588
  chr19:1977028-1977332
  hypo

SEQ ID NO: 367776 - DNA, 232 bp, Homo sapiens; identical to SEQ ID NO: 346192
  chr19:1978023-1978255
  hypo

SEQ ID NO: 367777 - DNA, 116 bp, Homo sapiens; identical to SEQ ID NO: 345560
  chr19:1979018-1979134
  hypo

SEQ ID NO: 367778 - DNA, 181 bp, Homo sapiens
  chr19:1993286-1993467
  hypo
caggacccaaacacccacatcaggttccccgaggaaccttccagaattagcccctgtccgttgccctctgacatagggacacgacttggcaaggtggtcacccatgaaaacgagcaagaggctgaacccatctacacagcacacacccggaagcgtctatatggcctgtcttgttctgccc

SEQ ID NO: 367779 - DNA, 343 bp, Homo sapiens; identical to SEQ ID NO: 343592
  chr19:2000558-2000901
  hypo

SEQ ID NO: 367780 - DNA, 151 bp, Homo sapiens; identical to SEQ ID NO: 343593
  chr19:2041016-2041167
  hypo

SEQ ID NO: 367781 - DNA, 728 bp, Homo sapiens; identical to SEQ ID NO: 335895
  chr19:2164931-2165659
  hypo

SEQ ID NO: 367782 - DNA, 89 bp, Homo sapiens; identical to SEQ ID NO: 343596
  chr19:2204172-2204261
  hypo

SEQ ID NO: 367783 - DNA, 95 bp, Homo sapiens; identical to SEQ ID NO: 343597
  chr19:2224728-2224823
  hypo

SEQ ID NO: 367784 - DNA, 125 bp, Homo sapiens; identical to SEQ ID NO: 355958
  chr19:2244081-2244206
  hypo

SEQ ID NO: 367785 - DNA, 612 bp, Homo sapiens; identical to SEQ ID NO: 355959
  chr19:2244236-2244848
  hypo

SEQ ID NO: 367786 - DNA, 218 bp, Homo sapiens; identical to SEQ ID NO: 361373
  chr19:2273763-2273981
  hypo

SEQ ID NO: 367787 - DNA, 155 bp, Homo sapiens
  chr19:2339592-2339747
  hypo
cggcctagtggccaccccagctcaacccagggacgcgggccctgccaccctctgctgtgtggtctcctctgccctggggacgttcggggcggttccttgcacttcagtcccccccgggtcccctcctgctcccgggttttctgccccgttccccc

SEQ ID NO: 367788 - DNA, 63 bp, Homo sapiens
  chr19:2360648-2360711
  hypo
cgcaggtgcggcgtgtagatgcggcaggggttgtgtggacgcaggtgtggtgtgtagatgcgg

SEQ ID NO: 367789 - DNA, 301 bp, Homo sapiens; identical to SEQ ID NO: 343604
  chr19:2413723-2414024
  hypo

SEQ ID NO: 367790 - DNA, 435 bp, Homo sapiens; identical to SEQ ID NO: 361375
  chr19:2488689-2489124
  hypo

SEQ ID NO: 367791 - DNA, 91 bp, Homo sapiens; identical to SEQ ID NO: 355961
  chr19:2524648-2524739
  hypo

SEQ ID NO: 367792 - DNA, 112 bp, Homo sapiens
  chr19:2573883-2573995
  hypo
cgtggtcatatgcgaacgggtgaattaaattctttctggaagaggctggaaaggcactgcatgaatgggacataccgtgggtgccacggaccagctgctgcgaggtacggcc

SEQ ID NO: 367793 - DNA, 153 bp, Homo sapiens
  chr19:2574044-2574197
  hypo
tgccttctcaccttgggtgcctgggtctggcccagagcccgtcacacctgggctggtgcagtccaggtgaaacccgccctgccagccacccccaccatctcccggggtgtccctgctgggcctgcattctgacatcacgccttcaaactcaac

SEQ ID NO: 367794 - DNA, 72 bp, Homo sapiens; identical to SEQ ID NO: 347528
  chr19:2702445-2702517
  hypo

SEQ ID NO: 367795 - DNA, 453 bp, Homo sapiens; identical to SEQ ID NO: 347529
  chr19:2702553-2703006
  hypo

SEQ ID NO: 367796 - DNA, 324 bp, Homo sapiens
  chr19:2795325-2795649
  hypo
cgtgagctggcagggcctggcggcatggctgcgtgggctcctgctcccccggatgctcctcgcagtatgcagtggggcctttgctgttgatgtcacatgatcaggagagacccagagaccctcctgctgctgttcatcctcttaggcgaggacccctgggaatgtgctgatgtgtcccacagtctcaggatcatgcagccctagtgctttggtaaatccagatcagggtgacccatgatagccgtggattgttatttctttttatttaaatacagacagggtctcacaacgttgcccacgcttgtctcgaactcctgggcccac

SEQ ID NO: 367797 - DNA, 783 bp, Homo sapiens; identical to SEQ ID NO: 343613
  chr19:3105574-3106357
  hypo

SEQ ID NO: 367798 - DNA, 246 bp, Homo sapiens
  chr19:3114752-3114998
  hypo
cgtatcccgaccccagggtctccattggcccgagccctccgggctgcttcagacactgccgtaggtggcgcagtgcgcggtccaccccctcctggtggctttccgtcctcccgctggtttgggtgctgtgtccctgtcctgcccccccacccccggcagccggcctgagcacccaccgctgtgttgcagctacctgaccgacgttgaccgcatcgccaccttgggctacctgcccacccagcagga

SEQ ID NO: 367799 - DNA, 66 bp, Homo sapiens; identical to SEQ ID NO: 325036
  chr19:3115027-3115093
  hypo

SEQ ID NO: 367800 - DNA, 72 bp, Homo sapiens; identical to SEQ ID NO: 355964
  chr19:3219654-3219726
  hypo

SEQ ID NO: 367801 - DNA, 1016 bp, Homo sapiens; identical to SEQ ID NO: 343617
  chr19:3490855-3491871
  hypo

SEQ ID NO: 367802 - DNA, 84 bp, Homo sapiens; identical to SEQ ID NO: 355965
  chr19:3494540-3494624
  hypo

SEQ ID NO: 367803 - DNA, 193 bp, Homo sapiens
  chr19:3548059-3548252
  hypo
cgggcccagcccccgcccctggctcgaggacttcaggcgacccacccggactccagctcacccggaacacgggcacgtcctggccccccagctggtcgctgatgctgatgtcttgggtgggctccacccgcgacgagccctgcaggtgcagcaggagccaggcggcgccgtagacggtgatgttggccaccac

SEQ ID NO: 367804 - DNA, 214 bp, Homo sapiens; identical to SEQ ID NO: 325072
  chr19:3565326-3565540
  hypo

SEQ ID NO: 367805 - DNA, 133 bp, Homo sapiens
  chr19:3571360-3571493
  hypo
cgtgagccactgcgcccggcccatggcggataatattctgttgtaaggatatatcccgtcatcgatccatgcatcattagcagacgtttgagttgttttcactttttggctattatgaatcacgctgctaccg

SEQ ID NO: 367806 - DNA, 381 bp, Homo sapiens
  chr19:3576162-3576543
  hypo
gggagctggagccggctgagcagcgctgacctagggtgcagggcgtggtccctggaggcctgggaggctgaccctgcccttcccctcccccgccagaagactcgagctctgggctcatgaacactctcctgaatggacacaaggtaagcgaccttcttcctctcaaagcacctgggggagaaaggtctggaggcttctagaaccctgagtcagagccagtgctcgcccagatgtgtgcaagcaggggcggtgccactgcaccgtgggatcgctgttgattgtactcccaccggggtgtcccaggagaccctcctaggcttggggcacacccagagagcgtggctgcctcctaccaccagtaaattgccaccttgtcccttc

SEQ ID NO: 367807 - DNA, 205 bp, Homo sapiens; identical to SEQ ID NO: 343624
  chr19:3669713-3669918
  hypo

SEQ ID NO: 367808 - DNA, 60 bp, Homo sapiens
  chr19:3747832-3747892
  hypo
cggcctggccgacagctccgctgacctcagctgcgacagccgcgttaacagcgactacga

SEQ ID NO: 367809 - DNA, 98 bp, Homo sapiens
  chr19:3748020-3748118
  hypo
cagatgagtcccagagcccgagggatcgtgggagaatctcggctcatcagggggcccaggtgcgtcggacatggggggcaggcctgggaagggtctcc

SEQ ID NO: 367810 - DNA, 46 bp, Homo sapiens; identical to SEQ ID NO: 347530
  chr19:3785511-3785557
  hypo

SEQ ID NO: 367811 - DNA, 99 bp, Homo sapiens
  chr19:3966587-3966686
  hypo
cgggtggcacataagccccgtcattcactctgccagggcgcctcctccatgctggagtggacttcggccccggggacacagggcaccatatgcaccagc

SEQ ID NO: 367812 - DNA, 183 bp, Homo sapiens
  chr19:3966755-3966938
  hypo
tgctattgccaaccagatttcaggttctgccactgagtcctcctacagcaacagcagaccacagccgcccacctccagacagcccccggtctcactggccacagacttgctccttagaggcaaggccactggcaggctctcagttcctctacggaatgtgaaacgtgcctcatctccccagcc

SEQ ID NO: 367813 - DNA, 265 bp, Homo sapiens; identical to SEQ ID NO: 205120
  chr19:4054040-4054305
  hypo

SEQ ID NO: 367814 - DNA, 55 bp, Homo sapiens; identical to SEQ ID NO: 205121
  chr19:4054380-4054435
  hypo

SEQ ID NO: 367815 - DNA, 170 bp, Homo sapiens; identical to SEQ ID NO: 205122
  chr19:4054471-4054641
  hypo

SEQ ID NO: 367816 - DNA, 520 bp, Homo sapiens; identical to SEQ ID NO: 352163
  chr19:4054917-4055437
  hypo

SEQ ID NO: 367817 - DNA, 97 bp, Homo sapiens; identical to SEQ ID NO: 205124
  chr19:4064872-4064969
  hypo

SEQ ID NO: 367818 - DNA, 571 bp, Homo sapiens; identical to SEQ ID NO: 343638
  chr19:4094519-4095090
  hypo

SEQ ID NO: 367819 - DNA, 351 bp, Homo sapiens; identical to SEQ ID NO: 325155
  chr19:4096065-4096416
  hypo

SEQ ID NO: 367820 - DNA, 165 bp, Homo sapiens; identical to SEQ ID NO: 355975
  chr19:4096525-4096690
  hypo

SEQ ID NO: 367821 - DNA, 73 bp, Homo sapiens
  chr19:4290473-4290546
  hypo
cgcgcggacccgtgagaaccaggtggtgctgggccaacacagcgggcccttccccagcgtgcccgagctcgtc

SEQ ID NO: 367822 - DNA, 33 bp, Homo sapiens; identical to SEQ ID NO: 361387
  chr19:4304684-4304717
  hypo

SEQ ID NO: 367823 - DNA, 289 bp, Homo sapiens; identical to SEQ ID NO: 218965
  chr19:4361250-4361539
  hypo

SEQ ID NO: 367824 - DNA, 179 bp, Homo sapiens
  chr19:4361700-4361879
  hypo
gcgtgatgacgtcgccctcatggaagcccagctccccgtcgttctcgggctcgaagtcgtacagcgccttgcagctcggctggtccaggggcgctgggggcgggagcgggctgtggggctggggctgctacgcctcaccccgcccagtctggggtctcagacctgctgtgacctggagc

SEQ ID NO: 367825 - DNA, 107 bp, Homo sapiens; identical to SEQ ID NO: 335912
  chr19:4432865-4432972
  hypo

SEQ ID NO: 367826 - DNA, 242 bp, Homo sapiens; identical to SEQ ID NO: 352167
  chr19:4523777-4524019
  hypo

SEQ ID NO: 367827 - DNA, 43 bp, Homo sapiens
  chr19:4550330-4550373
  hypo
aaaggggcctgattcaccagaggtacccattgctttgcccaac

SEQ ID NO: 367828 - DNA, 129 bp, Homo sapiens; identical to SEQ ID NO: 355978
  chr19:4550735-4550864
  hypo

SEQ ID NO: 367829 - DNA, 130 bp, Homo sapiens; identical to SEQ ID NO: 343650
  chr19:4675518-4675648
  hypo

SEQ ID NO: 367830 - DNA, 638 bp, Homo sapiens; identical to SEQ ID NO: 343651
  chr19:4676079-4676717
  hypo

SEQ ID NO: 367831 - DNA, 80 bp, Homo sapiens; identical to SEQ ID NO: 343653
  chr19:4697654-4697734
  hypo

SEQ ID NO: 367832 - DNA, 233 bp, Homo sapiens
  chr19:4714229-4714462
  hypo
gagtgcttctgcacctggaagcgggcggccgggtcatctgtggcggctgcgtcgcctcggtcggccgttggggtcccggtggtggccatcctctcagccccctcggaattcagcgagaagctgcggggaggaagcaaagactatgagaaaggagaactgttttacctacgagctgccccaatgctgccccttgcgaggcactcaggttcttccagacgagccccacccctgcc

SEQ ID NO: 367833 - DNA, 61 bp, Homo sapiens
  chr19:4795062-4795123
  hypo
cgataaatccactagctaagacgtcgagtgccaagaccagccttccagccgaggtttggac

SEQ ID NO: 367834 - DNA, 199 bp, Homo sapiens
  chr19:4795324-4795523
  hypo
gaggagcagtgaccgggggtgtccagaaatatcctgtccctggatggaaactaggtctcgtttggatttttttttttttttgccgtgttaggaaattatttattaatttacaagacaggttttaactcagccgaggtgggaaatggtgtccctgtccctcccaaagcacagagcacagaaatgaggccgtttacatggc

SEQ ID NO: 367835 - DNA, 615 bp, Homo sapiens; identical to SEQ ID NO: 355982
  chr19:4816550-4817165
  hypo

SEQ ID NO: 367836 - DNA, 586 bp, Homo sapiens; identical to SEQ ID NO: 343657
  chr19:4817473-4818059
  hypo

SEQ ID NO: 367837 - DNA, 150 bp, Homo sapiens
  chr19:4986363-4986513
  hypo
cgatggcggagtaaacgggtgatggccactgagcgctggccgtggggactcttggtcctggctgccaagtagaagcttcaggggtgctcttcacagtcagctgactctgctgtccctgatagcagaagacagcgaaggcacctgccccct

SEQ ID NO: 367838 - DNA, 191 bp, Homo sapiens
  chr19:4986633-4986824
  hypo
gagcctggattagggccctcgaggggcggcgctgctttagccgggggaacagggagggcctctcccagcaggtgacattcagtcagagacctctgagcgactcacacctgcccacctttgcaggatttgggacaagagtgctccaaagaagtgcaggcagcacgtgcggaggccccaaggcggaacgaggc

SEQ ID NO: 367839 - DNA, 168 bp, Homo sapiens; identical to SEQ ID NO: 348926
  chr19:5023047-5023215
  hypo

SEQ ID NO: 367840 - DNA, 450 bp, Homo sapiens; identical to SEQ ID NO: 348927
  chr19:5023245-5023695
  hypo

SEQ ID NO: 367841 - DNA, 371 bp, Homo sapiens
  chr19:5037624-5037995
  hypo
ttaactctaaattagtgtttctcttcgcttggcactgtggacttggggccgcatcgttctctggggtggcgccatcctgggcattgcagggtgctgagcagcttccctggcctccatctacctcatgccaggagcaccctcagtcgtgaaagccacagacatccccagacatggccaggtgtcccctgggggacaagaccccccctcagttgagagccacctgctcgctgcggctgctgctgctgttactgcttttgctaaagaaacctgtgcatgccggccacggaggcagcaccttcctgtcgttaacaggcacctggaggataagtgttttcattgccaagcaaaacagtttcttcactgatgtgatc

SEQ ID NO: 367842 - DNA, 153 bp, Homo sapiens
  chr19:5038238-5038391
  hypo
cggagcggctgggagggcctgcacagaagggtgcctggcacccagaaggcccgtggtgcccaccggcagtctagaatctggtcttgtcggcccataggctcacccccaccagaggagggaacatgaggctggggacaaggccaggagcccagg

SEQ ID NO: 367843 - DNA, 122 bp, Homo sapiens
  chr19:5038421-5038543
  hypo
cctcagctcctggatgtctccagaaagagccggcgctaacctggactgtcctttccttgggaccagccttgtctcggtttaactctaaattagtgaaggcaccgggttccggctgcagtgcc

SEQ ID NO: 367844 - DNA, 284 bp, Homo sapiens; identical to SEQ ID NO: 355986
  chr19:5064018-5064302
  hypo

SEQ ID NO: 367845 - DNA, 203 bp, Homo sapiens; identical to SEQ ID NO: 355987
  chr19:5064332-5064535
  hypo

SEQ ID NO: 367846 - DNA, 158 bp, Homo sapiens
  chr19:5102582-5102740
  hypo
cggggccggggtggcatctggggccactcccggtctcttgctgttggcgttgggagggatctcgcaccacagcagggaatcgaggccccggctcccctcaggctctcccttcaccggcaatgggcggcgggcgacgggtgacgggtgacgggtgatgg

SEQ ID NO: 367847 - DNA, 110 bp, Homo sapiens
  chr19:5102770-5102880
  hypo
cctggtccactgtggcctgtggatgccgcccctgacgtcagcatctctctctggcctccctgggagcagtctcagagcagtgaagagctcttcacgtccggtgctgtggc

SEQ ID NO: 367848 - DNA, 415 bp, Homo sapiens; identical to SEQ ID NO: 355988
  chr19:5269156-5269571
  hypo

SEQ ID NO: 367849 - DNA, 438 bp, Homo sapiens; identical to SEQ ID NO: 347531
  chr19:5608081-5608519
  hypo

SEQ ID NO: 367850 - DNA, 229 bp, Homo sapiens; identical to SEQ ID NO: 348929
  chr19:5608569-5608798
  hypo

SEQ ID NO: 367851 - DNA, 84 bp, Homo sapiens; identical to SEQ ID NO: 343669
  chr19:5630448-5630532
  hypo

SEQ ID NO: 367852 - DNA, 441 bp, Homo sapiens; identical to SEQ ID NO: 355992
  chr19:5789249-5789690
  hypo

SEQ ID NO: 367853 - DNA, 241 bp, Homo sapiens; identical to SEQ ID NO: 219015
  chr19:5789927-5790168
  hypo

SEQ ID NO: 367854 - DNA, 138 bp, Homo sapiens; identical to SEQ ID NO: 355994
  chr19:5790213-5790351
  hypo

SEQ ID NO: 367855 - DNA, 336 bp, Homo sapiens; identical to SEQ ID NO: 355995
  chr19:5896616-5896952
  hypo

SEQ ID NO: 367856 - DNA, 258 bp, Homo sapiens
  chr19:5897319-5897577
  hypo
cggccggcagacggagactcatccacgtggtggacacaagaacaggcctgagacctcagttctgcggctgcttccagcctcacaccgccagctcagcggcgccccccacgggccctggcaccagggccccagctccaggttcccatcaatggctctattctcctgtggggcccggggctcctgggcctaatcccccttggcagtggctctgcttccctgcctggctgccaacgcctcctccttgccactctcgacccc

SEQ ID NO: 367857 - DNA, 291 bp, Homo sapiens; identical to SEQ ID NO: 219027
  chr19:5915130-5915421
  hypo

SEQ ID NO: 367858 - DNA, 405 bp, Homo sapiens; identical to SEQ ID NO: 325311
  chr19:5915520-5915925
  hypo

SEQ ID NO: 367859 - DNA, 324 bp, Homo sapiens
  chr19:5915969-5916293
  hypo
ggggtgggggtaaagtgcgggtggtggtggagagaacagggctgtggctggaccccagcactggtgacacgctgggtgggagcatgaggccccaggctgctggaggtcctcgcccggggaggtggaggccgttcctggtcaggggcttcctgaggcccctggggcatgcagaggccagggttttagttaaaagtttaatgtagttcccaaatacatttcatatgacaatcttacataaatgttccaaaacacatgggcgttatctcgttgtactcgtcactagctggctaaggcttaaagcagagacgtgtgactgggtctctc

SEQ ID NO: 367860 - DNA, 311 bp, Homo sapiens; identical to SEQ ID NO: 343677
  chr19:5938115-5938426
  hypo

SEQ ID NO: 367861 - DNA, 922 bp, Homo sapiens; identical to SEQ ID NO: 343679
  chr19:5994773-5995695
  hypo

SEQ ID NO: 367862 - DNA, 514 bp, Homo sapiens; identical to SEQ ID NO: 343680
  chr19:5995930-5996444
  hypo

SEQ ID NO: 367863 - DNA, 487 bp, Homo sapiens; identical to SEQ ID NO: 343681
  chr19:6001747-6002234
  hypo

SEQ ID NO: 367864 - DNA, 328 bp, Homo sapiens; identical to SEQ ID NO: 343683
  chr19:6005196-6005524
  hypo

SEQ ID NO: 367865 - DNA, 393 bp, Homo sapiens
  chr19:6007912-6008305
  hypo
tgccctggaatcccaagggaggccacagagaggagaggagcaggcgatggacatggatgcggaggggctgctgcttcagagaggatgcttgttggggggctcggggctccagctcctcagcgtcacccggggacgcctggcctgagcgctggcggttcccgggagggacacgcaggagctgcctgcctgggctggggcggtcacctcgcagtgccgtctgtacaccagctgcagggccttgacgtcgtgcagtgtgacgccgtcctgcagcaggaagctgcccaggtcgggcgctgggaactcggggaagacgtgggagacatctgggggaggaacacgggaacatcagaaatggcgaggctcttaggacaccgtggacaactggaaggccac

SEQ ID NO: 367866 - DNA, 384 bp, Homo sapiens; identical to SEQ ID NO: 343686
  chr19:6017220-6017604
  hypo

SEQ ID NO: 367867 - DNA, 111 bp, Homo sapiens; identical to SEQ ID NO: 343688
  chr19:6024069-6024180
  hypo

SEQ ID NO: 367868 - DNA, 510 bp, Homo sapiens; identical to SEQ ID NO: 348931
  chr19:6024679-6025189
  hypo

SEQ ID NO: 367869 - DNA, 313 bp, Homo sapiens; identical to SEQ ID NO: 343691
  chr19:6044422-6044735
  hypo

SEQ ID NO: 367870 - DNA, 653 bp, Homo sapiens; identical to SEQ ID NO: 343692
  chr19:6045007-6045660
  hypo

SEQ ID NO: 367871 - DNA, 124 bp, Homo sapiens; identical to SEQ ID NO: 343693
  chr19:6064123-6064247
  hypo

SEQ ID NO: 367872 - DNA, 257 bp, Homo sapiens; identical to SEQ ID NO: 343694
  chr19:6105459-6105716
  hypo

SEQ ID NO: 367873 - DNA, 202 bp, Homo sapiens
  chr19:6226077-6226279
  hypo
cggttcttctcccgcatggctgacggtgagtctgtgaggcagctggagagccctgcctgtcctgcctgggatggctgggcccacacgcagggcctggcagacaagtgaggtgaggagaaaggagaggaccggtggagagatgtgtgggtggcaggcaccgggcagctgccccgagggcccgtgccgctcagcctccaggaac

SEQ ID NO: 367874 - DNA, 125 bp, Homo sapiens; identical to SEQ ID NO: 343696
  chr19:6425753-6425878
  hypo

SEQ ID NO: 367875 - DNA, 323 bp, Homo sapiens; identical to SEQ ID NO: 361399
  chr19:6590881-6591204
  hypo

SEQ ID NO: 367876 - DNA, 97 bp, Homo sapiens
  chr19:6664841-6664938
  hypo
cgcccagcctctgcttcgtgagttttctttcccctgaggcaccctctgagttctccacgtgtcagacccatgtccaatgcaccacgctccttccttc

SEQ ID NO: 367877 - DNA, 186 bp, Homo sapiens
  chr19:6664968-6665154
  hypo
taccatcacgcagtcgaaccaggcgttcatccagcacacggacgaccaccttctccccagcctccaggtgtaccacaccacccaggaagctgctgtcccaccagacccgggagctgctggtggcccgtccgcagggtgactgctggctgaccaacagctccagctcctcggggtagcggggtgtgc

SEQ ID NO: 367878 - DNA, 384 bp, Homo sapiens
  chr19:7267319-7267703
  hypo
cgagacactgcttagaaccctgtatccccggcgtacctttctggcagtgactatgagtccaacatcgttcgacaaactgcccgttgatgacggtggcggggcagttggtcttgcccttcgcggtacccggacagatgtctccacactcctcgttgtcatctttgttcaacacgatgtaattatcctccacggaatccaggatacgggaccagtcgatagtggccaagtaacagagctcattgttcttctcgatgcggacagaaccccgggtgatgttcatcaggttgtagaggccgagttccttgaggtgaaccatctcgaagatgaccagcgcgtagttaaagaacagtcgtgatccccggatgaccgtgaggttggggaaca

SEQ ID NO: 367879 - DNA, 206 bp, Homo sapiens
  chr19:7267747-7267953
  hypo
taatcagtgatcatgatgagtttggggaaactgaggtctcggaaatcttcgggcctcgttttgaacatcaagagtatctgcaagtgtccttcgatgacagagcaattctccagctcatgcaacctagtgaggttgttccggatatccatgccgggacacactacaagagaaaatgaacagaaagcaagacaggtgagcagacgcac

SEQ ID NO: 367880 - DNA, 1037 bp, Homo sapiens; identical to SEQ ID NO: 335924
  chr19:7459644-7460681
  hypo

SEQ ID NO: 367881 - DNA, 250 bp, Homo sapiens; identical to SEQ ID NO: 343702
  chr19:7493749-7493999
  hypo

SEQ ID NO: 367882 - DNA, 92 bp, Homo sapiens; identical to SEQ ID NO: 343704
  chr19:7682222-7682314
  hypo

SEQ ID NO: 367883 - DNA, 271 bp, Homo sapiens
  chr19:7685308-7685579
  hypo
cgtctgccagaacgcgccggtcgtctgcgtggggggcagggcaggggtgggtgtgtgtgcccgtgagctggctgactccgccgcagcccccaaccctgatacccgtccctccccacagccctacccgggggtcacagatctgggagcagaagctgtagatggcccgggcgcggtcaatctccccgagcttgcactccatgtctgcaaaccgcaggcacatctcacgcgcgtgctcgtccgacagcacctggacaccggggttggggaggcc

SEQ ID NO: 367884 - DNA, 86 bp, Homo sapiens; identical to SEQ ID NO: 343706
  chr19:7838387-7838473
  hypo

SEQ ID NO: 367885 - DNA, 337 bp, Homo sapiens; identical to SEQ ID NO: 343707
  chr19:7972050-7972387
  hypo

SEQ ID NO: 367886 - DNA, 354 bp, Homo sapiens; identical to SEQ ID NO: 343708
  chr19:7991824-7992178
  hypo

SEQ ID NO: 367887 - DNA, 117 bp, Homo sapiens; identical to SEQ ID NO: 343709
  chr19:7992986-7993103
  hypo

SEQ ID NO: 367888 - DNA, 83 bp, Homo sapiens; identical to SEQ ID NO: 343711
  chr19:8004778-8004861
  hypo

SEQ ID NO: 367889 - DNA, 72 bp, Homo sapiens; identical to SEQ ID NO: 361404
  chr19:8115163-8115235
  hypo

SEQ ID NO: 367890 - DNA, 685 bp, Homo sapiens; identical to SEQ ID NO: 335930
  chr19:8274278-8274963
  hypo

SEQ ID NO: 367891 - DNA, 71 bp, Homo sapiens; identical to SEQ ID NO: 356005
  chr19:8463144-8463215
  hypo

SEQ ID NO: 367892 - DNA, 131 bp, Homo sapiens; identical to SEQ ID NO: 343715
  chr19:8526882-8527013
  hypo

SEQ ID NO: 367893 - DNA, 62 bp, Homo sapiens; identical to SEQ ID NO: 343716
  chr19:8535026-8535088
  hypo

SEQ ID NO: 367894 - DNA, 77 bp, Homo sapiens; identical to SEQ ID NO: 343717
  chr19:8546631-8546708
  hypo

SEQ ID NO: 367895 - DNA, 252 bp, Homo sapiens; identical to SEQ ID NO: 343718
  chr19:8554998-8555250
  hypo

SEQ ID NO: 367896 - DNA, 763 bp, Homo sapiens; identical to SEQ ID NO: 356008
  chr19:8576026-8576789
  hypo

SEQ ID NO: 367897 - DNA, 106 bp, Homo sapiens; identical to SEQ ID NO: 356009
  chr19:9129007-9129113
  hypo

SEQ ID NO: 367898 - DNA, 92 bp, Homo sapiens; identical to SEQ ID NO: 356010
  chr19:9129229-9129321
  hypo

SEQ ID NO: 367899 - DNA, 211 bp, Homo sapiens; identical to SEQ ID NO: 347533
  chr19:10197461-10197672
  hypo

SEQ ID NO: 367900 - DNA, 60 bp, Homo sapiens; identical to SEQ ID NO: 348938
  chr19:10370250-10370310
  hypo

SEQ ID NO: 367901 - DNA, 88 bp, Homo sapiens; identical to SEQ ID NO: 348939
  chr19:10370575-10370663
  hypo

SEQ ID NO: 367902 - DNA, 992 bp, Homo sapiens; identical to SEQ ID NO: 335937
  chr19:10381056-10382048
  hypo

SEQ ID NO: 367903 - DNA, 479 bp, Homo sapiens; identical to SEQ ID NO: 343727
  chr19:10395600-10396079
  hypo

SEQ ID NO: 367904 - DNA, 214 bp, Homo sapiens; identical to SEQ ID NO: 205174
  chr19:10400761-10400975
  hypo

SEQ ID NO: 367905 - DNA, 97 bp, Homo sapiens
  chr19:10464756-10464853
  hypo
cgtggtagagcgtgcgcagaatgtcaatctcctgcttccagcccgagcggtgctgggggccgcagtctgccttgagggctttcaccgccaccatctc

SEQ ID NO: 367906 - DNA, 484 bp, Homo sapiens; identical to SEQ ID NO: 352183
  chr19:10529649-10530133
  hypo

SEQ ID NO: 367907 - DNA, 111 bp, Homo sapiens; identical to SEQ ID NO: 352184
  chr19:10530526-10530637
  hypo

SEQ ID NO: 367908 - DNA, 630 bp, Homo sapiens; identical to SEQ ID NO: 352185
  chr19:10530654-10531284
  hypo

SEQ ID NO: 367909 - DNA, 38 bp, Homo sapiens; identical to SEQ ID NO: 361421
  chr19:10616220-10616258
  hypo

SEQ ID NO: 367910 - DNA, 143 bp, Homo sapiens; identical to SEQ ID NO: 356019
  chr19:10665634-10665777
  hypo

SEQ ID NO: 367911 - DNA, 143 bp, Homo sapiens; identical to SEQ ID NO: 356020
  chr19:10665807-10665950
  hypo

SEQ ID NO: 367912 - DNA, 56 bp, Homo sapiens; identical to SEQ ID NO: 343735
  chr19:10687570-10687626
  hypo

SEQ ID NO: 367913 - DNA, 74 bp, Homo sapiens; identical to SEQ ID NO: 343736
  chr19:10687853-10687927
  hypo

SEQ ID NO: 367914 - DNA, 115 bp, Homo sapiens; identical to SEQ ID NO: 352186
  chr19:10691764-10691879
  hypo

SEQ ID NO: 367915 - DNA, 69 bp, Homo sapiens; identical to SEQ ID NO: 356023
  chr19:10817637-10817706
  hypo

SEQ ID NO: 367916 - DNA, 327 bp, Homo sapiens
  chr19:10823276-10823603
  hypo
cgactgcgtcttccccacacggacagcggtgaggctctggcagaaggaggtcagggcgggagacgggtgggggactagggaggcaaggttaggggtggggggtggggagaatgaagccctgggtgacgcccctttccctgcccttcctctcccacagcgctttggctctgccctggtgcccactgggaacctgcagttgaggaagaaggtgtttgagaaggacttcggccccatagacccggagtgcacctgccccacgtgccaaaagtaggcaggatggcactgggagctggggcagggcatggaggggacagggcctggccgtgc

SEQ ID NO: 367917 - DNA, 45 bp, Homo sapiens; identical to SEQ ID NO: 219134
  chr19:10823633-10823678
  hypo

SEQ ID NO: 367918 - DNA, 192 bp, Homo sapiens
  chr19:10823721-10823913
  hypo
ccagtgcccggggcaaggtgggcgggggtgtcctaggtgcgtatgccccacgctgacctcccctccccgcagctgcagctcatgagcgccgtccgcaccagcatcgtggagaagcgcttcccggacttcgtgcgggacttcatgggcgccatgtacggggatcccaccctctgtcccacctgggccactgac

SEQ ID NO: 367919 - DNA, 122 bp, Homo sapiens; identical to SEQ ID NO: 356024
  chr19:10872413-10872535
  hypo

SEQ ID NO: 367920 - DNA, 372 bp, Homo sapiens; identical to SEQ ID NO: 343742
  chr19:10874575-10874947
  hypo

SEQ ID NO: 367921 - DNA, 83 bp, Homo sapiens; identical to SEQ ID NO: 343743
  chr19:10875524-10875607
  hypo

SEQ ID NO: 367922 - DNA, 177 bp, Homo sapiens; identical to SEQ ID NO: 356025
  chr19:11003087-11003264
  hypo

SEQ ID NO: 367923 - DNA, 444 bp, Homo sapiens
  chr19:11004773-11005217
  hypo
cgcctcctcccgagtctgcctggaatctgaattgggcctggtccgcatgcatcagcttccgtgctttccctcctctcagcgcttactgccagttcctgttgtccgtctcctcactgccctgctgggtgctgtctgcctcccactgtggactcccagcatgggagggccgggggtggctctctggttcaccgccaggtcctctgtgcctgcatgtggtccgggcagagcaggctgagcagagatgccagctgagtgggcttcagaaagcgtgtttttttttccgtgcctgtgggatgggagttggccacggggggtcggggtgtctccctctttttacctaactctcctcctttgatcgggaatattttcctctggaaggtgaagagcccatgttgtctttggcagcaggaggcgatttaatacaagacgtaccatttggacaac

SEQ ID NO: 367924 - DNA, 153 bp, Homo sapiens; identical to SEQ ID NO: 356026
  chr19:11008216-11008369
  hypo

SEQ ID NO: 367925 - DNA, 385 bp, Homo sapiens; identical to SEQ ID NO: 356027
  chr19:11030249-11030634
  hypo

SEQ ID NO: 367926 - DNA, 347 bp, Homo sapiens; identical to SEQ ID NO: 356028
  chr19:11128636-11128983
  hypo

SEQ ID NO: 367927 - DNA, 266 bp, Homo sapiens; identical to SEQ ID NO: 356029
  chr19:11129453-11129719
  hypo

SEQ ID NO: 367928 - DNA, 31 bp, Homo sapiens; identical to SEQ ID NO: 356030
  chr19:11129826-11129857
  hypo

SEQ ID NO: 367929 - DNA, 143 bp, Homo sapiens; identical to SEQ ID NO: 343755
  chr19:11152817-11152960
  hypo

SEQ ID NO: 367930 - DNA, 125 bp, Homo sapiens; identical to SEQ ID NO: 343757
  chr19:11172767-11172892
  hypo

SEQ ID NO: 367931 - DNA, 177 bp, Homo sapiens; identical to SEQ ID NO: 335952
  chr19:11199850-11200027
  hypo

SEQ ID NO: 367932 - DNA, 59 bp, Homo sapiens
  chr19:11285272-11285331
  hypo
gaacgtgaccaggtgccgccgcaccagctcggggtgtgcgtcgctgcggcaggccaggc

SEQ ID NO: 367933 - DNA, 1111 bp, Homo sapiens; identical to SEQ ID NO: 343760
  chr19:11303560-11304671
  hypo

SEQ ID NO: 367934 - DNA, 146 bp, Homo sapiens; identical to SEQ ID NO: 335953
  chr19:11466008-11466154
  hypo

SEQ ID NO: 367935 - DNA, 69 bp, Homo sapiens; identical to SEQ ID NO: 361431
  chr19:11591231-11591300
  hypo

SEQ ID NO: 367936 - DNA, 184 bp, Homo sapiens; identical to SEQ ID NO: 293539
  chr19:11591353-11591537
  hypo

SEQ ID NO: 367937 - DNA, 67 bp, Homo sapiens; identical to SEQ ID NO: 352195
  chr19:11592604-11592671
  hypo

SEQ ID NO: 367938 - DNA, 189 bp, Homo sapiens; identical to SEQ ID NO: 347537
  chr19:11593453-11593642
  hypo

SEQ ID NO: 367939 - DNA, 433 bp, Homo sapiens; identical to SEQ ID NO: 356037
  chr19:11662248-11662681
  hypo

SEQ ID NO: 367940 - DNA, 514 bp, Homo sapiens; identical to SEQ ID NO: 352205
  chr19:12146030-12146544
  hypo

SEQ ID NO: 367941 - DNA, 538 bp, Homo sapiens; identical to SEQ ID NO: 205207
  chr19:12595307-12595845
  hypo

SEQ ID NO: 367942 - DNA, 198 bp, Homo sapiens; identical to SEQ ID NO: 352212
  chr19:12595896-12596094
  hypo

SEQ ID NO: 367943 - DNA, 55 bp, Homo sapiens; identical to SEQ ID NO: 343772
  chr19:12749512-12749567
  hypo

SEQ ID NO: 367944 - DNA, 610 bp, Homo sapiens; identical to SEQ ID NO: 335981
  chr19:12900128-12900738
  hypo

SEQ ID NO: 367945 - DNA, 206 bp, Homo sapiens; identical to SEQ ID NO: 356041
  chr19:12977267-12977473
  hypo

SEQ ID NO: 367946 - DNA, 220 bp, Homo sapiens; identical to SEQ ID NO: 293597
  chr19:12995851-12996071
  hypo

SEQ ID NO: 367947 - DNA, 645 bp, Homo sapiens; identical to SEQ ID NO: 343777
  chr19:13108022-13108667
  hypo

SEQ ID NO: 367948 - DNA, 749 bp, Homo sapiens; identical to SEQ ID NO: 343778
  chr19:13109260-13110009
  hypo

SEQ ID NO: 367949 - DNA, 154 bp, Homo sapiens; identical to SEQ ID NO: 343779
  chr19:13110344-13110498
  hypo

SEQ ID NO: 367950 - DNA, 182 bp, Homo sapiens; identical to SEQ ID NO: 343782
  chr19:13114040-13114222
  hypo

SEQ ID NO: 367951 - DNA, 229 bp, Homo sapiens; identical to SEQ ID NO: 343784
  chr19:13156427-13156656
  hypo

SEQ ID NO: 367952 - DNA, 73 bp, Homo sapiens; identical to SEQ ID NO: 346198
  chr19:13181444-13181517
  hypo

SEQ ID NO: 367953 - DNA, 420 bp, Homo sapiens; identical to SEQ ID NO: 343786
  chr19:13186075-13186495
  hypo

SEQ ID NO: 367954 - DNA, 119 bp, Homo sapiens; identical to SEQ ID NO: 343787
  chr19:13194593-13194712
  hypo

SEQ ID NO: 367955 - DNA, 34 bp, Homo sapiens; identical to SEQ ID NO: 348945
  chr19:13201116-13201150
  hypo

SEQ ID NO: 367956 - DNA, 189 bp, Homo sapiens; identical to SEQ ID NO: 345572
  chr19:13213427-13213616
  hypo

SEQ ID NO: 367957 - DNA, 112 bp, Homo sapiens; identical to SEQ ID NO: 345573
  chr19:13213834-13213946
  hypo

SEQ ID NO: 367958 - DNA, 1257 bp, Homo sapiens; identical to SEQ ID NO: 345574
  chr19:13265772-13267029
  hypo

SEQ ID NO: 367959 - DNA, 203 bp, Homo sapiens; identical to SEQ ID NO: 343791
  chr19:13879644-13879847
  hypo

SEQ ID NO: 367960 - DNA, 150 bp, Homo sapiens
  chr19:14073146-14073296
  hypo
cgcacgggagggggcctgcctgcctgccccctggggtggtgggaggacggggctggggagaagacgctggggcctgggaggggggcggccaaggggccgagctggatgccccgcggggcacctgggcacgcggcgggttccttaaggcac

SEQ ID NO: 367961 - DNA, 1302 bp, Homo sapiens; identical to SEQ ID NO: 335994
  chr19:14073521-14074823
  hypo

SEQ ID NO: 367962 - DNA, 151 bp, Homo sapiens; identical to SEQ ID NO: 356050
  chr19:14181154-14181305
  hypo

SEQ ID NO: 367963 - DNA, 179 bp, Homo sapiens; identical to SEQ ID NO: 356051
  chr19:14181846-14182025
  hypo

SEQ ID NO: 367964 - DNA, 461 bp, Homo sapiens; identical to SEQ ID NO: 343796
  chr19:14263414-14263875
  hypo

SEQ ID NO: 367965 - DNA, 155 bp, Homo sapiens; identical to SEQ ID NO: 343797
  chr19:14522737-14522892
  hypo

SEQ ID NO: 367966 - DNA, 178 bp, Homo sapiens; identical to SEQ ID NO: 348950
  chr19:14663747-14663925
  hypo

SEQ ID NO: 367967 - DNA, 267 bp, Homo sapiens; identical to SEQ ID NO: 346202
  chr19:14664561-14664828
  hypo

SEQ ID NO: 367968 - DNA, 112 bp, Homo sapiens; identical to SEQ ID NO: 343801
  chr19:14815869-14815981
  hypo

SEQ ID NO: 367969 - DNA, 324 bp, Homo sapiens; identical to SEQ ID NO: 335997
  chr19:15235629-15235953
  hypo

SEQ ID NO: 367970 - DNA, 366 bp, Homo sapiens; identical to SEQ ID NO: 343807
  chr19:15302345-15302711
  hypo

SEQ ID NO: 367971 - DNA, 131 bp, Homo sapiens; identical to SEQ ID NO: 356057
  chr19:15364865-15364996
  hypo

SEQ ID NO: 367972 - DNA, 97 bp, Homo sapiens; identical to SEQ ID NO: 343810
  chr19:15382528-15382625
  hypo

SEQ ID NO: 367973 - DNA, 247 bp, Homo sapiens; identical to SEQ ID NO: 356058
  chr19:15512036-15512283
  hypo

SEQ ID NO: 367974 - DNA, 99 bp, Homo sapiens; identical to SEQ ID NO: 343813
  chr19:15531296-15531395
  hypo

SEQ ID NO: 367975 - DNA, 106 bp, Homo sapiens; identical to SEQ ID NO: 352228
  chr19:15695669-15695775
  hypo

SEQ ID NO: 367976 - DNA, 102 bp, Homo sapiens; identical to SEQ ID NO: 205249
  chr19:16187000-16187102
  hypo

SEQ ID NO: 367977 - DNA, 517 bp, Homo sapiens; identical to SEQ ID NO: 205250
  chr19:16187103-16187620
  hypo

SEQ ID NO: 367978 - DNA, 634 bp, Homo sapiens; identical to SEQ ID NO: 345579
  chr19:16187640-16188274
  hypo

SEQ ID NO: 367979 - DNA, 846 bp, Homo sapiens
  chr19:16232495-16233341
  hypo
tgtctcctactgaggacagttattttcctttaatgttgctaatatcccttctcttcatgtttagggacacagccggtcaggaacggtttcggacgatcacaacggcctactacaggggtgcaatggtagggactttttgtttggttgtttttatctgctttttaagtcaacatgggagcgtcactgtgcattggttaccgaagcctagatgtttctgtggagcccgtgccccaactcctcagggctccttggtcccaagttagtcttaggaacaggctttgtgccccggcctacccccatgtacatacctccccttctggctgcagagacaatgcaaggtttaaataaagtggaaacataattctttgggaatgaagaaagacacaggaagccggttcttccaggtgagctcagtgcagttaaagccggcatgccccgacttttaggagctgtcacatgacctgcatctgtctctgaaatttgctaccaaaagcttgaagatcttccaggagctgacctgccctgggctgtcggccgttatatccgtcacccaggcctgaggcgggatgacgtgatgggaagactcagtcatcatccctcaaaacatttctcaagcaccttctctgggccaggccttaactagatgcagaaggcggccagggatgggacgaggtcctgtgtcaggggccctgtgtgtacatggcagggcattcaggggtagagggagcaggaggtggagcccctggacctgacctgagaccctggcttgcccactgagctccatctcctgacttggaaaagggaacggagcacagcactgtgtctcgggctgtgctgaggataaac

SEQ ID NO: 367980 - DNA, 577 bp, Homo sapiens; identical to SEQ ID NO: 343817
  chr19:16238432-16239009
  hypo

SEQ ID NO: 367981 - DNA, 66 bp, Homo sapiens; identical to SEQ ID NO: 356064
  chr19:16638602-16638668
  hypo

SEQ ID NO: 367982 - DNA, 168 bp, Homo sapiens; identical to SEQ ID NO: 343820
  chr19:16661967-16662135
  hypo

SEQ ID NO: 367983 - DNA, 268 bp, Homo sapiens
  chr19:16681297-16681565
  hypo
cggctgagacaacaagcgcccaacttccacttaagaatacgggataaagctgtctccggctaaagccatggctattcttgccccaagccaggaaataccctggcttggcatcttgaacagaatttggactgtgcccaaagcatcctccttatgcagccctgagtcctgtgtgccactttcgcttccgttcccagaccatcacaacttctggctgttttaatttctaagactttgctggattttgccaagatcgaactccttggatcgc

SEQ ID NO: 367984 - DNA, 118 bp, Homo sapiens; identical to SEQ ID NO: 356065
  chr19:16756119-16756237
  hypo

SEQ ID NO: 367985 - DNA, 172 bp, Homo sapiens; identical to SEQ ID NO: 343823
  chr19:16763531-16763703
  hypo

SEQ ID NO: 367986 - DNA, 180 bp, Homo sapiens
  chr19:16766722-16766902
  hypo
cgacaggattagtcacgtgcagcacaacctgtatacagggctgatccagcacagactagaaacattaaatgcttggtctgtttccaggaagttttgagaggcgctgctcagcaagacccttcccctagcgaaggatcgtgaaaacaggacctcccaccatcaacagatgccaatcaaacg

SEQ ID NO: 367987 - DNA, 376 bp, Homo sapiens; identical to SEQ ID NO: 343826
  chr19:17172577-17172953
  hypo

SEQ ID NO: 367988 - DNA, 246 bp, Homo sapiens; identical to SEQ ID NO: 356067
  chr19:17264714-17264960
  hypo

SEQ ID NO: 367989 - DNA, 163 bp, Homo sapiens
  chr19:17362459-17362622
  hypo
acctgttccagctccctgcgcagagactgcagctgctcctgcaggtccagtgtcctgttgcgaaggagaagagagggggctcacagccccagccgatcctgtttcccaggtctcctcctacccacctgcccacagtattgtcatgtaaacacacctgtacacc

SEQ ID NO: 367990 - DNA, 105 bp, Homo sapiens; identical to SEQ ID NO: 361481
  chr19:17392397-17392502
  hypo

SEQ ID NO: 367991 - DNA, 67 bp, Homo sapiens; identical to SEQ ID NO: 343830
  chr19:17397256-17397323
  hypo

SEQ ID NO: 367992 - DNA, 239 bp, Homo sapiens; identical to SEQ ID NO: 205266
  chr19:17716539-17716778
  hypo

SEQ ID NO: 367993 - DNA, 148 bp, Homo sapiens
  chr19:17757928-17758076
  hypo
cgtgcacacacggagatgagatggaatgcacccgaccgagtgagtgcgcgctgcaaaggagagggaccaggccatgggacagggcatgagacaggtctcagagggtggagaaggaggggccctatggcggcccacgccccctcaccgg

SEQ ID NO: 367994 - DNA, 96 bp, Homo sapiens
  chr19:17758133-17758229
  hypo
ccttcatctgctgcgtgtgcgccgtcttggtcaccgcgaagatctcctggatgagctcgaagatctcgggcttgttgcgctcccggatcttcatgc

SEQ ID NO: 367995 - DNA, 1191 bp, Homo sapiens; identical to SEQ ID NO: 343835
  chr19:17837853-17839044
  hypo

SEQ ID NO: 367996 - DNA, 744 bp, Homo sapiens; identical to SEQ ID NO: 343836
  chr19:18052925-18053669
  hypo

SEQ ID NO: 367997 - DNA, 85 bp, Homo sapiens; identical to SEQ ID NO: 219293
  chr19:18092405-18092490
  hypo

SEQ ID NO: 367998 - DNA, 62 bp, Homo sapiens
  chr19:18092885-18092947
  hypo
cagcatctcctcctggatcatcgcagcctggaccgtgcgcgtctgcgagaggtgcgaccgcc

SEQ ID NO: 367999 - DNA, 353 bp, Homo sapiens; identical to SEQ ID NO: 347564
  chr19:18117804-18118157
  hypo

SEQ ID NO: 368000 - DNA, 47 bp, Homo sapiens
  chr19:18126529-18126576
  hypo
cgcggatggacatctgggttgtttccacggcttggctatagtgaatc

SEQ ID NO: 368001 - DNA, 41 bp, Homo sapiens
  chr19:18126606-18126647
  hypo
tactttgaaaacccacggagctgttaggtggccctagtggc

SEQ ID NO: 368002 - DNA, 40 bp, Homo sapiens; identical to SEQ ID NO: 356072
  chr19:18241264-18241304
  hypo

SEQ ID NO: 368003 - DNA, 124 bp, Homo sapiens; identical to SEQ ID NO: 356073
  chr19:18241355-18241479
  hypo

SEQ ID NO: 368004 - DNA, 612 bp, Homo sapiens; identical to SEQ ID NO: 343847
  chr19:18368482-18369094
  hypo

SEQ ID NO: 368005 - DNA, 207 bp, Homo sapiens; identical to SEQ ID NO: 343850
  chr19:18757941-18758148
  hypo

SEQ ID NO: 368006 - DNA, 67 bp, Homo sapiens; identical to SEQ ID NO: 325964
  chr19:18783006-18783073
  hypo

SEQ ID NO: 368007 - DNA, 34 bp, Homo sapiens; identical to SEQ ID NO: 325965
  chr19:18783151-18783185
  hypo

SEQ ID NO: 368008 - DNA, 126 bp, Homo sapiens; identical to SEQ ID NO: 356078
  chr19:18783216-18783342
  hypo

SEQ ID NO: 368009 - DNA, 160 bp, Homo sapiens; identical to SEQ ID NO: 356079
  chr19:18808024-18808184
  hypo

SEQ ID NO: 368010 - DNA, 301 bp, Homo sapiens; identical to SEQ ID NO: 343853
  chr19:18836823-18837124
  hypo

SEQ ID NO: 368011 - DNA, 368 bp, Homo sapiens; identical to SEQ ID NO: 356081
  chr19:18856011-18856379
  hypo

SEQ ID NO: 368012 - DNA, 329 bp, Homo sapiens; identical to SEQ ID NO: 356082
  chr19:18856409-18856738
  hypo

SEQ ID NO: 368013 - DNA, 145 bp, Homo sapiens; identical to SEQ ID NO: 356083
  chr19:18872680-18872825
  hypo

SEQ ID NO: 368014 - DNA, 137 bp, Homo sapiens; identical to SEQ ID NO: 356084
  chr19:18872900-18873037
  hypo

SEQ ID NO: 368015 - DNA, 312 bp, Homo sapiens
  chr19:18879409-18879721
  hypo
cgtcccagcagccaccacccccgccacccccacaggcgcccgtccgcctgccccctggtggccccctgttgcccagcgccagcctgactcgtgggccacagccgcccccgcttgcagtcacggtaccgtcctctctcccccagtcccccccagagaaccctggccagccatcgatggggatcgacatcgcctcggtaagcccagggtggggtccctcggggcctgactgggggtcttgtagaggacagcccgggggctgcagaacagtcgggttacctgctgcatgggccaggggtcagaaccccagcgaac

SEQ ID NO: 368016 - DNA, 165 bp, Homo sapiens; identical to SEQ ID NO: 343859
  chr19:18963604-18963769
  hypo

SEQ ID NO: 368017 - DNA, 196 bp, Homo sapiens; identical to SEQ ID NO: 356086
  chr19:18988706-18988902
  hypo

SEQ ID NO: 368018 - DNA, 233 bp, Homo sapiens; identical to SEQ ID NO: 343864
  chr19:19156742-19156975
  hypo

SEQ ID NO: 368019 - DNA, 321 bp, Homo sapiens; identical to SEQ ID NO: 326001
  chr19:19391586-19391907
  hypo

SEQ ID NO: 368020 - DNA, 76 bp, Homo sapiens
  chr19:19448030-19448106
  hypo
agcagaccccatattggcactgccgcctgctcttccagctcgctgtgagtaccgcggcccgggaacgagggtgccc

SEQ ID NO: 368021 - DNA, 270 bp, Homo sapiens; identical to SEQ ID NO: 343867
  chr19:19576172-19576442
  hypo

SEQ ID NO: 368022 - DNA, 259 bp, Homo sapiens
  chr19:19636907-19637166
  hypo
attgcagagtgggcagcgcctggagctgtggaggagggtgtctgggggcgggctggcccgctgagcagcgcctctcttcacaggctacagcatgctggccatagggattggaaccctgatctacgggcactggagcataatgaagtggaaccgtgagcgcaggtagggcccctggtgggcgttgtctgaaagtgcccccccggcgagttgtcggggtcctgtagcattccgctgttgtctgtgctggcgaggggtgaac

SEQ ID NO: 368023 - DNA, 90 bp, Homo sapiens; identical to SEQ ID NO: 352243
  chr19:19729161-19729251
  hypo

SEQ ID NO: 368024 - DNA, 135 bp, Homo sapiens; identical to SEQ ID NO: 205291
  chr19:19729395-19729530
  hypo

SEQ ID NO: 368025 - DNA, 147 bp, Homo sapiens; identical to SEQ ID NO: 352245
  chr19:19729585-19729732
  hypo

SEQ ID NO: 368026 - DNA, 172 bp, Homo sapiens
  chr19:19737446-19737618
  hypo
cgcacgtagaagaaaatgcgggtgtacacagccaccatgagcaggaagacaagcaggctcgacagagcccagacggccaaataggagcggctgagcaggggtgccatgcgtgagcagcggtccagggcacagaggcagtgccaggagtgggcaggcagcagccccaggccca

SEQ ID NO: 368027 - DNA, 178 bp, Homo sapiens; identical to SEQ ID NO: 219336
  chr19:19737702-19737880
  hypo

SEQ ID NO: 368028 - DNA, 50 bp, Homo sapiens; identical to SEQ ID NO: 205293
  chr19:19738572-19738622
  hypo

SEQ ID NO: 368029 - DNA, 504 bp, Homo sapiens; identical to SEQ ID NO: 293751
  chr19:19738668-19739172
  hypo

SEQ ID NO: 368030 - DNA, 247 bp, Homo sapiens; identical to SEQ ID NO: 205295
  chr19:19739428-19739675
  hypo

SEQ ID NO: 368031 - DNA, 150 bp, Homo sapiens; identical to SEQ ID NO: 343876
  chr19:19769454-19769604
  hypo

SEQ ID NO: 368032 - DNA, 261 bp, Homo sapiens; identical to SEQ ID NO: 205296
  chr19:19843330-19843591
  hypo

SEQ ID NO: 368033 - DNA, 47 bp, Homo sapiens; identical to SEQ ID NO: 352250
  chr19:19844044-19844091
  hypo

SEQ ID NO: 368034 - DNA, 116 bp, Homo sapiens; identical to SEQ ID NO: 343878
  chr19:19974498-19974614
  hypo

SEQ ID NO: 368035 - DNA, 53 bp, Homo sapiens; identical to SEQ ID NO: 347571
  chr19:20162601-20162654
  hypo

SEQ ID NO: 368036 - DNA, 388 bp, Homo sapiens
  chr19:28341898-28342286
  hypo
cggcctgctggccgctcctctgtcaggtctccgggtcaactagatgtcggccacgaacgccagacttagcctccggctcgccatgtttgaggtcgaccagcaggccctctcaccggagtgagctgtaaggagggatgctcagtgaaccaatcaagacgtgggccacggaggtcagcagggctctgggcaattcatggtcctgacctggcaagcaccactctgggacctgagcgttgcaaacccatctacacccgtccaacctgtgttggccggcgctcctcgctcgctcaggcctccgggttgacaagagttcagccgtgagcgcctggtttagccgccagcttacagtgtcggaggtcaaacagcaagccctcccccggagtaagca

SEQ ID NO: 368037 - DNA, 196 bp, Homo sapiens; identical to SEQ ID NO: 343884
  chr19:29993099-29993295
  hypo

SEQ ID NO: 368038 - DNA, 259 bp, Homo sapiens; identical to SEQ ID NO: 336066
  chr19:30165123-30165382
  hypo

SEQ ID NO: 368039 - DNA, 131 bp, Homo sapiens
  chr19:30186010-30186141
  hypo
cgccacccagacaccgaacacccagacacctaacacacagacacctgacacccagacacctggacacctgacacccggacacccagactacctgacacccggacacctggacacccgatcacccagacacc

SEQ ID NO: 368040 - DNA, 75 bp, Homo sapiens
  chr19:30186240-30186315
  hypo
ctgacacccagacacctgacacccggacacctggacacccggacaccgagacacctgacacccagacactgagac

SEQ ID NO: 368041 - DNA, 62 bp, Homo sapiens; identical to SEQ ID NO: 343891
  chr19:30502063-30502125
  hypo

SEQ ID NO: 368042 - DNA, 60 bp, Homo sapiens; identical to SEQ ID NO: 205342
  chr19:30718934-30718994
  hypo

SEQ ID NO: 368043 - DNA, 296 bp, Homo sapiens; identical to SEQ ID NO: 343893
  chr19:30936361-30936657
  hypo

SEQ ID NO: 368044 - DNA, 184 bp, Homo sapiens; identical to SEQ ID NO: 343895
  chr19:31640397-31640581
  hypo

SEQ ID NO: 368045 - DNA, 411 bp, Homo sapiens; identical to SEQ ID NO: 356102
  chr19:31767664-31768075
  hypo

SEQ ID NO: 368046 - DNA, 701 bp, Homo sapiens; identical to SEQ ID NO: 356103
  chr19:31768105-31768806
  hypo

SEQ ID NO: 368047 - DNA, 573 bp, Homo sapiens; identical to SEQ ID NO: 348963
  chr19:31769887-31770460
  hypo

SEQ ID NO: 368048 - DNA, 157 bp, Homo sapiens; identical to SEQ ID NO: 348964
  chr19:31770490-31770647
  hypo

SEQ ID NO: 368049 - DNA, 58 bp, Homo sapiens; identical to SEQ ID NO: 352276
  chr19:31839508-31839566
  hypo

SEQ ID NO: 368050 - DNA, 233 bp, Homo sapiens; identical to SEQ ID NO: 293818
  chr19:31841177-31841410
  hypo

SEQ ID NO: 368051 - DNA, 325 bp, Homo sapiens; identical to SEQ ID NO: 293819
  chr19:31841583-31841908
  hypo

SEQ ID NO: 368052 - DNA, 136 bp, Homo sapiens
  chr19:32083463-32083599
  hypo
cgcttgccggggagtcctgctgccttccgaggtgtgaagggaaggcatgcactgtgcatatgctgtaccatacagttttgcctacaactgcttgtagcttcattgtagctgtgaatgctccgttcctctccttttc

SEQ ID NO: 368053 - DNA, 32 bp, Homo sapiens
  chr19:32083759-32083791
  hypo
catgtccatgcagccctcccgctggctgtgtc

SEQ ID NO: 368054 - DNA, 93 bp, Homo sapiens; identical to SEQ ID NO: 343900
  chr19:32198266-32198359
  hypo

SEQ ID NO: 368055 - DNA, 164 bp, Homo sapiens; identical to SEQ ID NO: 343901
  chr19:32374316-32374480
  hypo

SEQ ID NO: 368056 - DNA, 267 bp, Homo sapiens; identical to SEQ ID NO: 343903
  chr19:32845502-32845769
  hypo

SEQ ID NO: 368057 - DNA, 38 bp, Homo sapiens; identical to SEQ ID NO: 343904
  chr19:32849484-32849522
  hypo

SEQ ID NO: 368058 - DNA, 158 bp, Homo sapiens; identical to SEQ ID NO: 343905
  chr19:32850587-32850745
  hypo

SEQ ID NO: 368059 - DNA, 143 bp, Homo sapiens; identical to SEQ ID NO: 348968
  chr19:32898192-32898335
  hypo

SEQ ID NO: 368060 - DNA, 219 bp, Homo sapiens; identical to SEQ ID NO: 348969
  chr19:32898490-32898709
  hypo

SEQ ID NO: 368061 - DNA, 75 bp, Homo sapiens; identical to SEQ ID NO: 343907
  chr19:33209600-33209675
  hypo

SEQ ID NO: 368062 - DNA, 74 bp, Homo sapiens; identical to SEQ ID NO: 343909
  chr19:33585141-33585215
  hypo

SEQ ID NO: 368063 - DNA, 298 bp, Homo sapiens; identical to SEQ ID NO: 361536
  chr19:33791861-33792159
  hypo

SEQ ID NO: 368064 - DNA, 1246 bp, Homo sapiens; identical to SEQ ID NO: 205356
  chr19:33792630-33793876
  hypo

SEQ ID NO: 368065 - DNA, 248 bp, Homo sapiens; identical to SEQ ID NO: 356116
  chr19:33996157-33996405
  hypo

SEQ ID NO: 368066 - DNA, 49 bp, Homo sapiens; identical to SEQ ID NO: 352281
  chr19:34114303-34114352
  hypo

SEQ ID NO: 368067 - DNA, 78 bp, Homo sapiens; identical to SEQ ID NO: 346209
  chr19:34949560-34949638
  hypo

SEQ ID NO: 368068 - DNA, 52 bp, Homo sapiens; identical to SEQ ID NO: 343916
  chr19:34963061-34963113
  hypo

SEQ ID NO: 368069 - DNA, 38 bp, Homo sapiens; identical to SEQ ID NO: 361543
  chr19:35168869-35168907
  hypo

SEQ ID NO: 368070 - DNA, 94 bp, Homo sapiens; identical to SEQ ID NO: 205366
  chr19:35168992-35169086
  hypo

SEQ ID NO: 368071 - DNA, 478 bp, Homo sapiens; identical to SEQ ID NO: 352284
  chr19:35454533-35455011
  hypo

SEQ ID NO: 368072 - DNA, 450 bp, Homo sapiens; identical to SEQ ID NO: 356121
  chr19:35551123-35551573
  hypo

SEQ ID NO: 368073 - DNA, 74 bp, Homo sapiens
  chr19:35589864-35589938
  hypo
cgccctgcgctgcgcgttgcctgcccgcgtggcgagccagcctgggatgcagttacgtgctccttccctttcac

SEQ ID NO: 368074 - DNA, 403 bp, Homo sapiens
  chr19:35617152-35617555
  hypo
cgcccccaggcccagcctcaccatggagtccccaatgtagcgtgtgaggcacaggaacacgtccccaccagcctggaagtggcgtgtggcatagacatcctcggcctcggggatgtctgtgcgtctctcgaagcggccaccggtccagtggaagagcacgggccgctgggaagccgaggccagcagcaggtggggccggccgtccagctccagggcctcagcgtccgtgtcccggtgccaggcgtgcaggctctggtgcgggtaaaagccgggcccgtcgcggcacagcagcgtggtgctgcccgccttggaggcatcggccaccacgaagcagggttgcccttccagccacaggagctcggcgtcattgggccgcagcagccgccgcggggccagggtctgc

SEQ ID NO: 368075 - DNA, 234 bp, Homo sapiens; identical to SEQ ID NO: 336085
  chr19:35738737-35738971
  hypo

SEQ ID NO: 368076 - DNA, 478 bp, Homo sapiens; identical to SEQ ID NO: 343927
  chr19:36042055-36042533
  hypo

SEQ ID NO: 368077 - DNA, 58 bp, Homo sapiens; identical to SEQ ID NO: 356122
  chr19:36222534-36222592
  hypo

SEQ ID NO: 368078 - DNA, 129 bp, Homo sapiens; identical to SEQ ID NO: 361550
  chr19:36347680-36347809
  hypo

SEQ ID NO: 368079 - DNA, 35 bp, Homo sapiens; identical to SEQ ID NO: 361551
  chr19:36348065-36348100
  hypo

SEQ ID NO: 368080 - DNA, 63 bp, Homo sapiens; identical to SEQ ID NO: 352285
  chr19:36478303-36478366
  hypo

SEQ ID NO: 368081 - DNA, 566 bp, Homo sapiens; identical to SEQ ID NO: 343932
  chr19:36592549-36593115
  hypo

SEQ ID NO: 368082 - DNA, 295 bp, Homo sapiens; identical to SEQ ID NO: 345590
  chr19:37568994-37569289
  hypo

SEQ ID NO: 368083 - DNA, 182 bp, Homo sapiens; identical to SEQ ID NO: 345591
  chr19:37569554-37569736
  hypo

SEQ ID NO: 368084 - DNA, 134 bp, Homo sapiens
  chr19:38481217-38481351
  hypo
ttgctcagctagtcagcccacagcgagaaccccgccccagtctgggctaacgtgtcctctgctgccagcagcccagtagggttctttgctggagtctggtttttccttgacttgtagctggcaagtgcttacac

SEQ ID NO: 368085 - DNA, 263 bp, Homo sapiens; identical to SEQ ID NO: 293927
  chr19:38719956-38720219
  hypo

SEQ ID NO: 368086 - DNA, 187 bp, Homo sapiens; identical to SEQ ID NO: 352306
  chr19:38720439-38720626
  hypo

SEQ ID NO: 368087 - DNA, 389 bp, Homo sapiens; identical to SEQ ID NO: 347597
  chr19:38754883-38755272
  hypo

SEQ ID NO: 368088 - DNA, 175 bp, Homo sapiens; identical to SEQ ID NO: 347598
  chr19:38755344-38755519
  hypo

SEQ ID NO: 368089 - DNA, 324 bp, Homo sapiens; identical to SEQ ID NO: 348975
  chr19:38781936-38782260
  hypo

SEQ ID NO: 368090 - DNA, 72 bp, Homo sapiens; identical to SEQ ID NO: 356132
  chr19:38828044-38828116
  hypo

SEQ ID NO: 368091 - DNA, 181 bp, Homo sapiens; identical to SEQ ID NO: 361583
  chr19:38852786-38852967
  hypo

SEQ ID NO: 368092 - DNA, 291 bp, Homo sapiens; identical to SEQ ID NO: 361584
  chr19:38853193-38853484
  hypo

SEQ ID NO: 368093 - DNA, 168 bp, Homo sapiens
  chr19:38873767-38873935
  hypo
cgttgggcagagtacgattggtgagaaaagagagcataggacacgtgggcaagtgctggccccatagggtggggatggagcctttgtgatcactctactcgtctctaatccctcctttcctgcagcgagggtgggtcctgggccccaacaactactacagttttgcca

SEQ ID NO: 368094 - DNA, 132 bp, Homo sapiens; identical to SEQ ID NO: 356133
  chr19:38901796-38901928
  hypo

SEQ ID NO: 368095 - DNA, 62 bp, Homo sapiens; identical to SEQ ID NO: 361585
  chr19:38976252-38976314
  hypo

SEQ ID NO: 368096 - DNA, 37 bp, Homo sapiens; identical to SEQ ID NO: 361586
  chr19:38976790-38976827
  hypo

SEQ ID NO: 368097 - DNA, 72 bp, Homo sapiens; identical to SEQ ID NO: 343954
  chr19:39094650-39094722
  hypo

SEQ ID NO: 368098 - DNA, 192 bp, Homo sapiens
  chr19:39151314-39151506
  hypo
cgcgagccaccatgcccgacccatggactcacttgtataatcttgtgaagcaggtgttgttacccttacatgcagaaatggatccatgggcctttaagccacttgcccctgtgacagtgccaggatttgaatgtagaagttgaggctttcaagtttatgctgttatttctacactacactgaagtctagtga

SEQ ID NO: 368099 - DNA, 243 bp, Homo sapiens; identical to SEQ ID NO: 326409
  chr19:39151540-39151783
  hypo

SEQ ID NO: 368100 - DNA, 87 bp, Homo sapiens; identical to SEQ ID NO: 343956
  chr19:39210557-39210644
  hypo

SEQ ID NO: 368101 - DNA, 203 bp, Homo sapiens; identical to SEQ ID NO: 343957
  chr19:39212200-39212403
  hypo

SEQ ID NO: 368102 - DNA, 90 bp, Homo sapiens
  chr19:39221989-39222079
  hypo
cggcagggtgagtacaggctgatcccttcaatcctctgggcctgtttcctcatccatcaaacggactaagacagccccgaccccataggg

SEQ ID NO: 368103 - DNA, 138 bp, Homo sapiens
  chr19:39222121-39222259
  hypo
tcgatgtgtgggtactgttactccttaaatcctgtggggctttctccttgccagtgggcactggaggatatttctgtgcagcaaaaaatatagtcaatcccatatggagtcagtttccttacagtctacctcagaggc

SEQ ID NO: 368104 - DNA, 246 bp, Homo sapiens; identical to SEQ ID NO: 343959
  chr19:39277459-39277705
  hypo

SEQ ID NO: 368105 - DNA, 84 bp, Homo sapiens; identical to SEQ ID NO: 343960
  chr19:39289891-39289975
  hypo

SEQ ID NO: 368106 - DNA, 73 bp, Homo sapiens; identical to SEQ ID NO: 356136
  chr19:39305794-39305867
  hypo

SEQ ID NO: 368107 - DNA, 192 bp, Homo sapiens; identical to SEQ ID NO: 356137
  chr19:39306241-39306433
  hypo

SEQ ID NO: 368108 - DNA, 100 bp, Homo sapiens; identical to SEQ ID NO: 356138
  chr19:39306545-39306645
  hypo

SEQ ID NO: 368109 - DNA, 56 bp, Homo sapiens; identical to SEQ ID NO: 348977
  chr19:39329516-39329572
  hypo

SEQ ID NO: 368110 - DNA, 369 bp, Homo sapiens; identical to SEQ ID NO: 343965
  chr19:39435437-39435806
  hypo

SEQ ID NO: 368111 - DNA, 668 bp, Homo sapiens; identical to SEQ ID NO: 361587
  chr19:39574122-39574790
  hypo

SEQ ID NO: 368112 - DNA, 45 bp, Homo sapiens; identical to SEQ ID NO: 361588
  chr19:39575044-39575089
  hypo

SEQ ID NO: 368113 - DNA, 136 bp, Homo sapiens; identical to SEQ ID NO: 343967
  chr19:39642874-39643010
  hypo

SEQ ID NO: 368114 - DNA, 485 bp, Homo sapiens; identical to SEQ ID NO: 356142
  chr19:39646243-39646728
  hypo

SEQ ID NO: 368115 - DNA, 272 bp, Homo sapiens
  chr19:39663613-39663885
  hypo
cgagtttgagaacatgtcggtgacacgctccaactccctgcggagagacagcccgccgccgcccgcccgtgcccgccaggaaaatgggatgccagaggagccggccaccacggccagagggggcccagggaaggcaggcagccgaggccggttcgccggtcacagcgaggcgggtggcggcagtggtgacaggcgacgggcggggccagagaagaggcccaagtcttccagggagggctcagggggtccccaggagtcctcccgggacaaac

SEQ ID NO: 368116 - DNA, 67 bp, Homo sapiens; identical to SEQ ID NO: 352310
  chr19:39997621-39997688
  hypo

SEQ ID NO: 368117 - DNA, 473 bp, Homo sapiens; identical to SEQ ID NO: 356144
  chr19:40362772-40363245
  hypo

SEQ ID NO: 368118 - DNA, 109 bp, Homo sapiens; identical to SEQ ID NO: 343976
  chr19:40474764-40474873
  hypo

SEQ ID NO: 368119 - DNA, 301 bp, Homo sapiens; identical to SEQ ID NO: 343977
  chr19:40753417-40753718
  hypo

SEQ ID NO: 368120 - DNA, 294 bp, Homo sapiens; identical to SEQ ID NO: 348979
  chr19:40829211-40829505
  hypo

SEQ ID NO: 368121 - DNA, 106 bp, Homo sapiens; identical to SEQ ID NO: 361596
  chr19:40972636-40972742
  hypo

SEQ ID NO: 368122 - DNA, 359 bp, Homo sapiens; identical to SEQ ID NO: 336145
  chr19:41190162-41190521
  hypo

SEQ ID NO: 368123 - DNA, 162 bp, Homo sapiens
  chr19:41643155-41643317
  hypo
cgcagtgctgctggagatccagcgcttcatcagcgtggtgccgcgcaccctcaccctcgacacccacctgcacagccactgtctggccaaaggtgcccactgagtctggagatcctgtgtggggccccgatgcatgagcgtattccgagatcagccagaatc

SEQ ID NO: 368124 - DNA, 207 bp, Homo sapiens; identical to SEQ ID NO: 343985
  chr19:41921100-41921307
  hypo

SEQ ID NO: 368125 - DNA, 259 bp, Homo sapiens; identical to SEQ ID NO: 326547
  chr19:42349033-42349292
  hypo

SEQ ID NO: 368126 - DNA, 157 bp, Homo sapiens; identical to SEQ ID NO: 356149
  chr19:42408960-42409117
  hypo

SEQ ID NO: 368127 - DNA, 575 bp, Homo sapiens; identical to SEQ ID NO: 343990
  chr19:42424093-42424668
  hypo

SEQ ID NO: 368128 - DNA, 88 bp, Homo sapiens
  chr19:42460873-42460961
  hypo
cgggatccctccccgggcttgtgatgggacggcgctgtgggcccgagcagcagagccgtgcaggacaggcatgggcaggggtggggca

SEQ ID NO: 368129 - DNA, 264 bp, Homo sapiens
  chr19:42461113-42461377
  hypo
acactcctgcacctggctcccaccatccaccccagctgctcagaccctgtactcacccagcacccagaagacggccgagcccgcaccagccagccagaagaaggggaaggagatgcctccagccagagcatactgatgcgctgggctcacctctcggcctgggggcagatggcattggggtgctgttccgactctccatgccctctcccagagtaacccctgctgccccccaacaatccgtacaagctccaggttctcgggatc

SEQ ID NO: 368130 - DNA, 166 bp, Homo sapiens; identical to SEQ ID NO: 343992
  chr19:42813649-42813815
  hypo

SEQ ID NO: 368131 - DNA, 71 bp, Homo sapiens; identical to SEQ ID NO: 348981
  chr19:42906796-42906867
  hypo

SEQ ID NO: 368132 - DNA, 157 bp, Homo sapiens; identical to SEQ ID NO: 348982
  chr19:42906913-42907070
  hypo

SEQ ID NO: 368133 - DNA, 126 bp, Homo sapiens; identical to SEQ ID NO: 361608
  chr19:42927599-42927725
  hypo

SEQ ID NO: 368134 - DNA, 246 bp, Homo sapiens; identical to SEQ ID NO: 352320
  chr19:43967263-43967509
  hypo

SEQ ID NO: 368135 - DNA, 423 bp, Homo sapiens; identical to SEQ ID NO: 361610
  chr19:43967731-43968154
  hypo

SEQ ID NO: 368136 - DNA, 330 bp, Homo sapiens; identical to SEQ ID NO: 348983
  chr19:44222791-44223121
  hypo

SEQ ID NO: 368137 - DNA, 344 bp, Homo sapiens; identical to SEQ ID NO: 219534
  chr19:44223175-44223519
  hypo

SEQ ID NO: 368138 - DNA, 225 bp, Homo sapiens; identical to SEQ ID NO: 343998
  chr19:44273529-44273754
  hypo

SEQ ID NO: 368139 - DNA, 782 bp, Homo sapiens; identical to SEQ ID NO: 336161
  chr19:45004129-45004911
  hypo

SEQ ID NO: 368140 - DNA, 300 bp, Homo sapiens; identical to SEQ ID NO: 344001
  chr19:45315421-45315721
  hypo

SEQ ID NO: 368141 - DNA, 292 bp, Homo sapiens; identical to SEQ ID NO: 356156
  chr19:45322448-45322740
  hypo

SEQ ID NO: 368142 - DNA, 1002 bp, Homo sapiens; identical to SEQ ID NO: 352329
  chr19:45349502-45350504
  hypo

SEQ ID NO: 368143 - DNA, 362 bp, Homo sapiens; identical to SEQ ID NO: 344004
  chr19:45377472-45377834
  hypo

SEQ ID NO: 368144 - DNA, 237 bp, Homo sapiens; identical to SEQ ID NO: 356159
  chr19:45567162-45567399
  hypo

SEQ ID NO: 368145 - DNA, 83 bp, Homo sapiens; identical to SEQ ID NO: 356160
  chr19:45570303-45570386
  hypo

SEQ ID NO: 368146 - DNA, 220 bp, Homo sapiens; identical to SEQ ID NO: 356161
  chr19:45570493-45570713
  hypo

SEQ ID NO: 368147 - DNA, 73 bp, Homo sapiens; identical to SEQ ID NO: 219560
  chr19:45574700-45574773
  hypo

SEQ ID NO: 368148 - DNA, 47 bp, Homo sapiens; identical to SEQ ID NO: 219561
  chr19:45574888-45574935
  hypo

SEQ ID NO: 368149 - DNA, 472 bp, Homo sapiens; identical to SEQ ID NO: 219562
  chr19:45575156-45575628
  hypo

SEQ ID NO: 368150 - DNA, 132 bp, Homo sapiens; identical to SEQ ID NO: 346212
  chr19:45603745-45603877
  hypo

SEQ ID NO: 368151 - DNA, 334 bp, Homo sapiens; identical to SEQ ID NO: 346213
  chr19:45603910-45604244
  hypo

SEQ ID NO: 368152 - DNA, 1117 bp, Homo sapiens; identical to SEQ ID NO: 336166
  chr19:45647694-45648811
  hypo

SEQ ID NO: 368153 - DNA, 75 bp, Homo sapiens; identical to SEQ ID NO: 356167
  chr19:45810267-45810342
  hypo

SEQ ID NO: 368154 - DNA, 84 bp, Homo sapiens; identical to SEQ ID NO: 344013
  chr19:45903713-45903797
  hypo

SEQ ID NO: 368155 - DNA, 211 bp, Homo sapiens; identical to SEQ ID NO: 344015
  chr19:46236693-46236904
  hypo

SEQ ID NO: 368156 - DNA, 40 bp, Homo sapiens; identical to SEQ ID NO: 356168
  chr19:46307556-46307596
  hypo

SEQ ID NO: 368157 - DNA, 39 bp, Homo sapiens; identical to SEQ ID NO: 356169
  chr19:46308096-46308135
  hypo

SEQ ID NO: 368158 - DNA, 58 bp, Homo sapiens; identical to SEQ ID NO: 356170
  chr19:46321120-46321178
  hypo

SEQ ID NO: 368159 - DNA, 110 bp, Homo sapiens; identical to SEQ ID NO: 356171
  chr19:46321422-46321532
  hypo

SEQ ID NO: 368160 - DNA, 88 bp, Homo sapiens; identical to SEQ ID NO: 352339
  chr19:46519167-46519255
  hypo

SEQ ID NO: 368161 - DNA, 421 bp, Homo sapiens; identical to SEQ ID NO: 352340
  chr19:46519582-46520003
  hypo

SEQ ID NO: 368162 - DNA, 369 bp, Homo sapiens; identical to SEQ ID NO: 344021
  chr19:46885301-46885670
  hypo

SEQ ID NO: 368163 - DNA, 139 bp, Homo sapiens; identical to SEQ ID NO: 345597
  chr19:46931914-46932053
  hypo

SEQ ID NO: 368164 - DNA, 31 bp, Homo sapiens; identical to SEQ ID NO: 326702
  chr19:47116867-47116898
  hypo

SEQ ID NO: 368165 - DNA, 168 bp, Homo sapiens; identical to SEQ ID NO: 344026
  chr19:47482472-47482640
  hypo

SEQ ID NO: 368166 - DNA, 259 bp, Homo sapiens; identical to SEQ ID NO: 352348
  chr19:47523724-47523983
  hypo

SEQ ID NO: 368167 - DNA, 117 bp, Homo sapiens
  chr19:47593053-47593170
  hypo
cgggtgatctctccggtctcctgtgccatgcacatgcagagcctggcccttctttgtacacttatcccaaccctaagtgaccaaacttgaggttctgtgagaccaggccaccggggt

SEQ ID NO: 368168 - DNA, 113 bp, Homo sapiens
  chr19:47593246-47593359
  hypo
ttggcacgccggtactggttcagctctttggtgaagtcgtcatagtcctccttgcccatgtcctcctcctcgtcgccctcatattccccatactgctcattctcgtagtcctc

SEQ ID NO: 368169 - DNA, 112 bp, Homo sapiens; identical to SEQ ID NO: 344031
  chr19:47646754-47646866
  hypo

SEQ ID NO: 368170 - DNA, 83 bp, Homo sapiens; identical to SEQ ID NO: 336190
  chr19:47676020-47676103
  hypo

SEQ ID NO: 368171 - DNA, 681 bp, Homo sapiens; identical to SEQ ID NO: 361653
  chr19:47729850-47730531
  hypo

SEQ ID NO: 368172 - DNA, 287 bp, Homo sapiens; identical to SEQ ID NO: 336192
  chr19:47731303-47731590
  hypo

SEQ ID NO: 368173 - DNA, 205 bp, Homo sapiens; identical to SEQ ID NO: 344036
  chr19:47881084-47881289
  hypo

SEQ ID NO: 368174 - DNA, 64 bp, Homo sapiens; identical to SEQ ID NO: 348989
  chr19:47881711-47881775
  hypo

SEQ ID NO: 368175 - DNA, 214 bp, Homo sapiens; identical to SEQ ID NO: 219597
  chr19:48003714-48003928
  hypo

SEQ ID NO: 368176 - DNA, 202 bp, Homo sapiens; identical to SEQ ID NO: 344039
  chr19:48012665-48012867
  hypo

SEQ ID NO: 368177 - DNA, 344 bp, Homo sapiens
  chr19:48150921-48151265
  hypo
cgggtgaggattggaagccatgatcgcctgcctctgttgctggttttagtctttaacccttgctctgtggacttgagaaatgtgcttttccatggtgcctgtgaccaagatgtccgcatcgttagtgaagaccctgctatgtccttgaccacactgcacggggatcctgtccacgatggggggtgtcctgttgggcttgagtgtctagatatggagaccgtagttcgcggggggagtggggggccgtttggcatatttgccctggcatttggggttgtttattgggggtgggagtgctcctggcatttcctgggcgggaactactggtgtagacctactggatt

SEQ ID NO: 368178 - DNA, 242 bp, Homo sapiens; identical to SEQ ID NO: 336199
  chr19:48229040-48229282
  hypo

SEQ ID NO: 368179 - DNA, 319 bp, Homo sapiens
  chr19:48857831-48858150
  hypo
tctgtaccttgttgctggtctcttcctcagtagaacagagcctgtgaggtacatctctcatgctgtccactgtctcccagagcctcaagccattccagagacacagtaggtgctcaataaatatttactgagcgaactcaatgaatgaatgaatcagcgaaaaaagatcagagagaggtcacccgccaaggtcacccgcaccactagtgaacaaccaagctattgtttgaaccgaggctatgctgcttctttccctgcccaggccacatcttcaaaggacttaagtcatcagcaaatggtcacccagcgggcctcaccc

SEQ ID NO: 368180 - DNA, 311 bp, Homo sapiens; identical to SEQ ID NO: 347612
  chr19:48901504-48901815
  hypo

SEQ ID NO: 368181 - DNA, 94 bp, Homo sapiens
  chr19:49012390-49012484
  hypo
cgggcccagaatccgatggacgcagggacggatggaaggatggacagacggacggacgcgtggagagccgggtggcgcggcggagtggtcaatg

SEQ ID NO: 368182 - DNA, 196 bp, Homo sapiens; identical to SEQ ID NO: 352353
  chr19:49014625-49014821
  hypo

SEQ ID NO: 368183 - DNA, 141 bp, Homo sapiens; identical to SEQ ID NO: 294203
  chr19:49242393-49242534
  hypo

SEQ ID NO: 368184 - DNA, 35 bp, Homo sapiens; identical to SEQ ID NO: 294204
  chr19:49242773-49242808
  hypo

SEQ ID NO: 368185 - DNA, 550 bp, Homo sapiens; identical to SEQ ID NO: 336209
  chr19:49467064-49467614
  hypo

SEQ ID NO: 368186 - DNA, 224 bp, Homo sapiens; identical to SEQ ID NO: 344049
  chr19:49600463-49600687
  hypo

SEQ ID NO: 368187 - DNA, 435 bp, Homo sapiens; identical to SEQ ID NO: 336213
  chr19:49660929-49661364
  hypo

SEQ ID NO: 368188 - DNA, 133 bp, Homo sapiens; identical to SEQ ID NO: 356189
  chr19:49703923-49704056
  hypo

SEQ ID NO: 368189 - DNA, 456 bp, Homo sapiens; identical to SEQ ID NO: 356190
  chr19:49971410-49971866
  hypo

SEQ ID NO: 368190 - DNA, 121 bp, Homo sapiens; identical to SEQ ID NO: 356191
  chr19:50129561-50129682
  hypo

SEQ ID NO: 368191 - DNA, 57 bp, Homo sapiens; identical to SEQ ID NO: 344057
  chr19:50130742-50130799
  hypo

SEQ ID NO: 368192 - DNA, 81 bp, Homo sapiens
  chr19:50297054-50297135
  hypo
gacttagaatacacatgcgcatctcctgggcagtcaggaagaggcctggattcgcaggcaaagagaagaacacaccagctc

SEQ ID NO: 368193 - DNA, 253 bp, Homo sapiens; identical to SEQ ID NO: 344060
  chr19:50306223-50306476
  hypo

SEQ ID NO: 368194 - DNA, 78 bp, Homo sapiens; identical to SEQ ID NO: 356193
  chr19:50320125-50320203
  hypo

SEQ ID NO: 368195 - DNA, 158 bp, Homo sapiens
  chr19:50352994-50353152
  hypo
cgggagcccctgggcaggaaaacatggacaggcctacgggttcttctgccatttcactggccactcctccgtgtcctttgctggttgcttctcattgtcgtgactgctaaagggatgagtgtcccagtctctttgtgagctcatccagtctccattca

SEQ ID NO: 368196 - DNA, 67 bp, Homo sapiens; identical to SEQ ID NO: 348994
  chr19:50365162-50365229
  hypo

SEQ ID NO: 368197 - DNA, 218 bp, Homo sapiens; identical to SEQ ID NO: 347617
  chr19:50553779-50553997
  hypo

SEQ ID NO: 368198 - DNA, 230 bp, Homo sapiens; identical to SEQ ID NO: 344068
  chr19:50784855-50785085
  hypo

SEQ ID NO: 368199 - DNA, 39 bp, Homo sapiens; identical to SEQ ID NO: 356197
  chr19:50789768-50789807
  hypo

SEQ ID NO: 368200 - DNA, 330 bp, Homo sapiens; identical to SEQ ID NO: 336223
  chr19:50828897-50829227
  hypo

SEQ ID NO: 368201 - DNA, 446 bp, Homo sapiens; identical to SEQ ID NO: 352368
  chr19:50833970-50834416
  hypo

SEQ ID NO: 368202 - DNA, 176 bp, Homo sapiens; identical to SEQ ID NO: 346217
  chr19:50919593-50919769
  hypo

SEQ ID NO: 368203 - DNA, 153 bp, Homo sapiens; identical to SEQ ID NO: 352372
  chr19:50979533-50979686
  hypo

SEQ ID NO: 368204 - DNA, 767 bp, Homo sapiens; identical to SEQ ID NO: 356201
  chr19:51020756-51021523
  hypo

SEQ ID NO: 368205 - DNA, 77 bp, Homo sapiens; identical to SEQ ID NO: 336229
  chr19:51111319-51111396
  hypo

SEQ ID NO: 368206 - DNA, 73 bp, Homo sapiens; identical to SEQ ID NO: 345605
  chr19:51228809-51228882
  hypo

SEQ ID NO: 368207 - DNA, 676 bp, Homo sapiens; identical to SEQ ID NO: 344078
  chr19:51303021-51303697
  hypo

SEQ ID NO: 368208 - DNA, 87 bp, Homo sapiens; identical to SEQ ID NO: 356205
  chr19:51535218-51535305
  hypo

SEQ ID NO: 368209 - DNA, 36 bp, Homo sapiens; identical to SEQ ID NO: 348998
  chr19:52058332-52058368
  hypo

SEQ ID NO: 368210 - DNA, 74 bp, Homo sapiens; identical to SEQ ID NO: 205557
  chr19:52531285-52531359
  hypo

SEQ ID NO: 368211 - DNA, 208 bp, Homo sapiens; identical to SEQ ID NO: 345609
  chr19:52531884-52532092
  hypo

SEQ ID NO: 368212 - DNA, 119 bp, Homo sapiens; identical to SEQ ID NO: 336251
  chr19:52715152-52715271
  hypo

SEQ ID NO: 368213 - DNA, 31 bp, Homo sapiens; identical to SEQ ID NO: 361712
  chr19:53030704-53030735
  hypo

SEQ ID NO: 368214 - DNA, 395 bp, Homo sapiens; identical to SEQ ID NO: 294319
  chr19:53030790-53031185
  hypo

SEQ ID NO: 368215 - DNA, 818 bp, Homo sapiens; identical to SEQ ID NO: 352396
  chr19:53237625-53238443
  hypo

SEQ ID NO: 368216 - DNA, 351 bp, Homo sapiens; identical to SEQ ID NO: 352398
  chr19:53445359-53445710
  hypo

SEQ ID NO: 368217 - DNA, 231 bp, Homo sapiens; identical to SEQ ID NO: 352399
  chr19:53445822-53446053
  hypo

SEQ ID NO: 368218 - DNA, 74 bp, Homo sapiens; identical to SEQ ID NO: 344094
  chr19:53463668-53463742
  hypo

SEQ ID NO: 368219 - DNA, 233 bp, Homo sapiens
  chr19:53507269-53507502
  hypo
ctcctttgaaaacactaagaatgacatcactgcatcagtttttactagagccaatcacctgtcgtgcctggaacagggatcgtacccagattgccctcagtcctgataatcaggaagcgcacatctataagaagcatgggagccagcgagtgaaagctcgtgaactcagtgagcacaatggacatatcacaggcattcactgggctcccaagagcgaccgcatcgtcacttgc

SEQ ID NO: 368220 - DNA, 139 bp, Homo sapiens; identical to SEQ ID NO: 347631
  chr19:53606073-53606212
  hypo

SEQ ID NO: 368221 - DNA, 221 bp, Homo sapiens; identical to SEQ ID NO: 205580
  chr19:53606354-53606575
  hypo

SEQ ID NO: 368222 - DNA, 143 bp, Homo sapiens; identical to SEQ ID NO: 344098
  chr19:53806012-53806155
  hypo

SEQ ID NO: 368223 - DNA, 79 bp, Homo sapiens
  chr19:54109766-54109845
  hypo
cggcaaggggttctcgggacatatcaggtagtaggggcactatgagggtgagcgccgctgagacaccaaaataggccaa

SEQ ID NO: 368224 - DNA, 285 bp, Homo sapiens
  chr19:54109903-54110188
  hypo
cggtgagggtggagggcttcttctcctgcgggacaggtatatgcaccgggcggtgagggtggagggcttcttctcctgcgggacaggtatatgcaccgggcggtgagggtggagggcttcttctcctgcaggacaggtatacgcactgggccaggaaaatgcacggaagtgaaggtacaaaaccctcttccctcttccccatctgagaacagggtagcctttaatgaaacctgtgcccagcggcagcccaaacagtgcccaaacccccgatgagacagaatgacc

SEQ ID NO: 368225 - DNA, 339 bp, Homo sapiens
  chr19:54313999-54314338
  hypo
cgtggaaagaaggcttgagctcatcgaagccgtcgatgatgaaaaggaggcgctcgggaactcggatgagctcctggagaggcgcgctgggctcaggccagcagctgaagatgaggtcttgcatgctgcattccgtggcactctggttcatctccctgcagttgatgtagaagagataatcaaatctgccttggaagagcttcccgtccgcccagtccagcatcaccttgtgtgccagcatggacttgcctatccctgccgcgccttgcatgaccacggtgcgcggtggctcggggcgctcctcgtctggctcaaagagggtctctatcttgatggggc

SEQ ID NO: 368226 - DNA, 84 bp, Homo sapiens; identical to SEQ ID NO: 347635
  chr19:54412564-54412648
  hypo

SEQ ID NO: 368227 - DNA, 412 bp, Homo sapiens; identical to SEQ ID NO: 361743
  chr19:55866046-55866458
  hypo

SEQ ID NO: 368228 - DNA, 108 bp, Homo sapiens; identical to SEQ ID NO: 344106
  chr19:55976235-55976343
  hypo

SEQ ID NO: 368229 - DNA, 386 bp, Homo sapiens; identical to SEQ ID NO: 356217
  chr19:55990556-55990942
  hypo

SEQ ID NO: 368230 - DNA, 77 bp, Homo sapiens; identical to SEQ ID NO: 356218
  chr19:56104962-56105039
  hypo

SEQ ID NO: 368231 - DNA, 134 bp, Homo sapiens; identical to SEQ ID NO: 336290
  chr19:56112791-56112925
  hypo

SEQ ID NO: 368232 - DNA, 245 bp, Homo sapiens; identical to SEQ ID NO: 294401
  chr19:56159669-56159914
  hypo

SEQ ID NO: 368233 - DNA, 68 bp, Homo sapiens; identical to SEQ ID NO: 352417
  chr19:56159950-56160018
  hypo

SEQ ID NO: 368234 - DNA, 411 bp, Homo sapiens; identical to SEQ ID NO: 356222
  chr19:56199006-56199417
  hypo

SEQ ID NO: 368235 - DNA, 133 bp, Homo sapiens; identical to SEQ ID NO: 356223
  chr19:56199619-56199752
  hypo

SEQ ID NO: 368236 - DNA, 213 bp, Homo sapiens
  chr19:56200283-56200496
  hypo
cgtggccgcagagcagcggggaggaggagctgcagctccagctggccctggccatgagcaaggaggaggccgaccaggtactgggcgtgcagctggggctgtctgtccgccacccgcctccacgcctcacttcaggctccctcccagccaggcgtgggcctggccctcactgtcgctgctccacatgctgtcactcgtctcctccccagtcct

SEQ ID NO: 368237 - DNA, 93 bp, Homo sapiens
  chr19:56200596-56200689
  hypo
ctggctctgcctctgactctgcctctggcccctcccgtcatgcccctcacactctctctcccccagcccccgtcctgcggccccgaggacgac

SEQ ID NO: 368238 - DNA, 149 bp, Homo sapiens; identical to SEQ ID NO: 346221
  chr19:56201494-56201643
  hypo

SEQ ID NO: 368239 - DNA, 495 bp, Homo sapiens; identical to SEQ ID NO: 349005
  chr19:56538418-56538913
  hypo

SEQ ID NO: 368240 - DNA, 74 bp, Homo sapiens; identical to SEQ ID NO: 349006
  chr19:56539122-56539196
  hypo

SEQ ID NO: 368241 - DNA, 119 bp, Homo sapiens
  chr19:56602205-56602324
  hypo
cgcttatgctcaggcctccctccagacgcactgtatgagaaagtgccgggccgggcctgtgcttcagcaagccccccaggtgattctgatgccagctccagtgtgagaatcactattcc

SEQ ID NO: 368242 - DNA, 145 bp, Homo sapiens; identical to SEQ ID NO: 356227
  chr19:56688223-56688368
  hypo

SEQ ID NO: 368243 - DNA, 171 bp, Homo sapiens; identical to SEQ ID NO: 344121
  chr19:56807013-56807184
  hypo

SEQ ID NO: 368244 - DNA, 152 bp, Homo sapiens; identical to SEQ ID NO: 361749
  chr19:56988132-56988284
  hypo

SEQ ID NO: 368245 - DNA, 461 bp, Homo sapiens; identical to SEQ ID NO: 344127
  chr19:57181884-57182345
  hypo

SEQ ID NO: 368246 - DNA, 121 bp, Homo sapiens; identical to SEQ ID NO: 344134
  chr19:58556965-58557086
  hypo

SEQ ID NO: 368247 - DNA, 168 bp, Homo sapiens; identical to SEQ ID NO: 361778
  chr19:58665973-58666141
  hypo

SEQ ID NO: 368248 - DNA, 224 bp, Homo sapiens; identical to SEQ ID NO: 205646
  chr19:58666733-58666957
  hypo

SEQ ID NO: 368249 - DNA, 343 bp, Homo sapiens; identical to SEQ ID NO: 352436
  chr19:58694209-58694552
  hypo

SEQ ID NO: 368250 - DNA, 788 bp, Homo sapiens; identical to SEQ ID NO: 344139
  chr19:58830548-58831336
  hypo

SEQ ID NO: 368251 - DNA, 91 bp, Homo sapiens; identical to SEQ ID NO: 344141
  chr19:58878569-58878660
  hypo

SEQ ID NO: 368252 - DNA, 53 bp, Homo sapiens; identical to SEQ ID NO: 349008
  chr19:58964127-58964180
  hypo

SEQ ID NO: 368253 - DNA, 404 bp, Homo sapiens; identical to SEQ ID NO: 361782
  chr19:59010484-59010888
  hypo

SEQ ID NO: 368254 - DNA, 48 bp, Homo sapiens; identical to SEQ ID NO: 361783
  chr19:59010962-59011010
  hypo

SEQ ID NO: 368255 - DNA, 236 bp, Homo sapiens; identical to SEQ ID NO: 344146
  chr20:371973-372209
  hypo

SEQ ID NO: 368256 - DNA, 93 bp, Homo sapiens; identical to SEQ ID NO: 356232
  chr20:400189-400282
  hypo

SEQ ID NO: 368257 - DNA, 101 bp, Homo sapiens; identical to SEQ ID NO: 356233
  chr20:400915-401016
  hypo

SEQ ID NO: 368258 - DNA, 139 bp, Homo sapiens; identical to SEQ ID NO: 219814
  chr20:2820587-2820726
  hypo

SEQ ID NO: 368259 - DNA, 143 bp, Homo sapiens; identical to SEQ ID NO: 294514
  chr20:2820861-2821004
  hypo

SEQ ID NO: 368260 - DNA, 265 bp, Homo sapiens; identical to SEQ ID NO: 219817
  chr20:3202153-3202418
  hypo

SEQ ID NO: 368261 - DNA, 283 bp, Homo sapiens; identical to SEQ ID NO: 352445
  chr20:3220266-3220549
  hypo

SEQ ID NO: 368262 - DNA, 125 bp, Homo sapiens; identical to SEQ ID NO: 352446
  chr20:3229128-3229253
  hypo

SEQ ID NO: 368263 - DNA, 154 bp, Homo sapiens; identical to SEQ ID NO: 205676
  chr20:3229326-3229480
  hypo

SEQ ID NO: 368264 - DNA, 31 bp, Homo sapiens; identical to SEQ ID NO: 205677
  chr20:3229526-3229557
  hypo

SEQ ID NO: 368265 - DNA, 144 bp, Homo sapiens; identical to SEQ ID NO: 352449
  chr20:3229659-3229803
  hypo

SEQ ID NO: 368266 - DNA, 414 bp, Homo sapiens; identical to SEQ ID NO: 347652
  chr20:4804008-4804422
  hypo

SEQ ID NO: 368267 - DNA, 63 bp, Homo sapiens; identical to SEQ ID NO: 361804
  chr20:5297756-5297819
  hypo

SEQ ID NO: 368268 - DNA, 330 bp, Homo sapiens; identical to SEQ ID NO: 361806
  chr20:5892269-5892599
  hypo

SEQ ID NO: 368269 - DNA, 93 bp, Homo sapiens; identical to SEQ ID NO: 356243
  chr20:6022704-6022797
  hypo

SEQ ID NO: 368270 - DNA, 427 bp, Homo sapiens; identical to SEQ ID NO: 352453
  chr20:6747996-6748423
  hypo

SEQ ID NO: 368271 - DNA, 293 bp, Homo sapiens; identical to SEQ ID NO: 294559
  chr20:6748470-6748763
  hypo

SEQ ID NO: 368272 - DNA, 587 bp, Homo sapiens; identical to SEQ ID NO: 361809
  chr20:6749063-6749650
  hypo

SEQ ID NO: 368273 - DNA, 126 bp, Homo sapiens; identical to SEQ ID NO: 361810
  chr20:9048369-9048495
  hypo

SEQ ID NO: 368274 - DNA, 631 bp, Homo sapiens; identical to SEQ ID NO: 294562
  chr20:9048532-9049163
  hypo

SEQ ID NO: 368275 - DNA, 229 bp, Homo sapiens; identical to SEQ ID NO: 294563
  chr20:9049238-9049467
  hypo

SEQ ID NO: 368276 - DNA, 164 bp, Homo sapiens; identical to SEQ ID NO: 344170
  chr20:10687213-10687377
  hypo

SEQ ID NO: 368277 - DNA, 127 bp, Homo sapiens; identical to SEQ ID NO: 344171
  chr20:13417399-13417526
  hypo

SEQ ID NO: 368278 - DNA, 79 bp, Homo sapiens; identical to SEQ ID NO: 361823
  chr20:18039568-18039647
  hypo

SEQ ID NO: 368279 - DNA, 94 bp, Homo sapiens; identical to SEQ ID NO: 361824
  chr20:18039936-18040030
  hypo

SEQ ID NO: 368280 - DNA, 267 bp, Homo sapiens; identical to SEQ ID NO: 294620
  chr20:19193616-19193883
  hypo

SEQ ID NO: 368281 - DNA, 143 bp, Homo sapiens; identical to SEQ ID NO: 344175
  chr20:19497049-19497192
  hypo

SEQ ID NO: 368282 - DNA, 225 bp, Homo sapiens; identical to SEQ ID NO: 349013
  chr20:20376606-20376831
  hypo

SEQ ID NO: 368283 - DNA, 218 bp, Homo sapiens; identical to SEQ ID NO: 219867
  chr20:20376973-20377191
  hypo

SEQ ID NO: 368284 - DNA, 221 bp, Homo sapiens; identical to SEQ ID NO: 205736
  chr20:21686742-21686963
  hypo

SEQ ID NO: 368285 - DNA, 330 bp, Homo sapiens; identical to SEQ ID NO: 361841
  chr20:22563824-22564154
  hypo

SEQ ID NO: 368286 - DNA, 982 bp, Homo sapiens; identical to SEQ ID NO: 361843
  chr20:22564265-22565247
  hypo

SEQ ID NO: 368287 - DNA, 264 bp, Homo sapiens; identical to SEQ ID NO: 352468
  chr20:23617984-23618248
  hypo

SEQ ID NO: 368288 - DNA, 68 bp, Homo sapiens; identical to SEQ ID NO: 352469
  chr20:23618645-23618713
  hypo

SEQ ID NO: 368289 - DNA, 112 bp, Homo sapiens; identical to SEQ ID NO: 219885
  chr20:23969320-23969432
  hypo

SEQ ID NO: 368290 - DNA, 439 bp, Homo sapiens; identical to SEQ ID NO: 344188
  chr20:25012790-25013229
  hypo

SEQ ID NO: 368291 - DNA, 67 bp, Homo sapiens
  chr20:25223074-25223141
  hypo
cgaaattgaccagcacagatctgccagtggcgttgctgggatcccagagagattttccctccgcacc

SEQ ID NO: 368292 - DNA, 297 bp, Homo sapiens; identical to SEQ ID NO: 344190
  chr20:25231684-25231981
  hypo

SEQ ID NO: 368293 - DNA, 237 bp, Homo sapiens; identical to SEQ ID NO: 356253
  chr20:25320332-25320569
  hypo

SEQ ID NO: 368294 - DNA, 116 bp, Homo sapiens
  chr20:29873935-29874051
  hypo
ttccccgcttctgcacgaaccacagcattggcaacacctgctctgtggggctatcacacacaaaccccacagaggcctggtacacttcgatggcttcccccagggactgctgcgcc

SEQ ID NO: 368295 - DNA, 113 bp, Homo sapiens; identical to SEQ ID NO: 344193
  chr20:30139516-30139629
  hypo

SEQ ID NO: 368296 - DNA, 78 bp, Homo sapiens
  chr20:30153987-30154065
  hypo
ttcaccagcctgtgtcctctcatagcctgccctcctatacctggtccccgcctgcatcggttttcctgtcctggtggc

SEQ ID NO: 368297 - DNA, 1002 bp, Homo sapiens; identical to SEQ ID NO: 345628
  chr20:30192854-30193856
  hypo

SEQ ID NO: 368298 - DNA, 189 bp, Homo sapiens; identical to SEQ ID NO: 345629
  chr20:30193992-30194181
  hypo

SEQ ID NO: 368299 - DNA, 482 bp, Homo sapiens; identical to SEQ ID NO: 352476
  chr20:30555404-30555886
  hypo

SEQ ID NO: 368300 - DNA, 248 bp, Homo sapiens; identical to SEQ ID NO: 352477
  chr20:30556403-30556651
  hypo

SEQ ID NO: 368301 - DNA, 73 bp, Homo sapiens
  chr20:30770391-30770464
  hypo
cgggaatgggctccgggacatttattgcctcaattccaagactgcctggaaaagggcggtactgccttgggca

SEQ ID NO: 368302 - DNA, 199 bp, Homo sapiens
  chr20:30770494-30770693
  hypo
ccccagaagggccttcagcaggcatctgatgccttcatacatgctgtcgcctcgcccaccaggaagaccctcctgaacctcaaagatgtgacacatgcattcattcatttcacaaagaactacttgtgccaggtgctgctctaggtaagggggatttagcaatgaataaaacaaagtgcctctgggtgtggcggctcac

SEQ ID NO: 368303 - DNA, 270 bp, Homo sapiens; identical to SEQ ID NO: 356259
  chr20:30772699-30772969
  hypo

SEQ ID NO: 368304 - DNA, 31 bp, Homo sapiens; identical to SEQ ID NO: 327522
  chr20:30864850-30864881
  hypo

SEQ ID NO: 368305 - DNA, 94 bp, Homo sapiens; identical to SEQ ID NO: 361861
  chr20:30946060-30946154
  hypo

SEQ ID NO: 368306 - DNA, 112 bp, Homo sapiens; identical to SEQ ID NO: 205764
  chr20:30946218-30946330
  hypo

SEQ ID NO: 368307 - DNA, 285 bp, Homo sapiens; identical to SEQ ID NO: 361863
  chr20:30946345-30946630
  hypo

SEQ ID NO: 368308 - DNA, 35 bp, Homo sapiens; identical to SEQ ID NO: 344204
  chr20:30996055-30996090
  hypo

SEQ ID NO: 368309 - DNA, 155 bp, Homo sapiens; identical to SEQ ID NO: 344206
  chr20:31334709-31334864
  hypo

SEQ ID NO: 368310 - DNA, 145 bp, Homo sapiens; identical to SEQ ID NO: 356261
  chr20:32301652-32301797
  hypo

SEQ ID NO: 368311 - DNA, 207 bp, Homo sapiens; identical to SEQ ID NO: 344209
  chr20:32332893-32333100
  hypo

SEQ ID NO: 368312 - DNA, 412 bp, Homo sapiens
  chr20:32378478-32378890
  hypo
cgtcacggcccctccctgagcctgagatgacctggcaaagcgagccaaggtgcagagagtgagcagctgttccaggcagaggagaatggcaagtacaaaggcgcagagggaggagccagcgtggcatctctgaggagagcgagtgtggctggcgcagagagtggctggaagaaggcagacgacgagggtggagagagctggggccagatcacacaggtgctggtggggaaagagcctggattttattcccagcgcagggcactgttgcggggtgaaggtctggatgcttctcactgactttcccttgccctccaggcatgaagctccacaaatgcgccctgtgcagcaagtccttcagccgccgtgcccacctcgccgagcatcagcgcgcccacacgggcaactacaagtt

SEQ ID NO: 368313 - DNA, 342 bp, Homo sapiens; identical to SEQ ID NO: 327571
  chr20:32378966-32379308
  hypo

SEQ ID NO: 368314 - DNA, 87 bp, Homo sapiens
  chr20:32379338-32379425
  hypo
tgtttcctgggcaggcctgatgctcctgtttgggtccagggcccctgggggcagaccggtgatccttaccagtggaagcgagccatc

SEQ ID NO: 368315 - DNA, 237 bp, Homo sapiens; identical to SEQ ID NO: 344211
  chr20:32436267-32436504
  hypo

SEQ ID NO: 368316 - DNA, 71 bp, Homo sapiens; identical to SEQ ID NO: 344213
  chr20:32669113-32669184
  hypo

SEQ ID NO: 368317 - DNA, 31 bp, Homo sapiens
  chr20:32677630-32677661
  hypo
cgcactgtaggaaatagagtcgtgtgtcctt

SEQ ID NO: 368318 - DNA, 205 bp, Homo sapiens
  chr20:32677691-32677896
  hypo
gtgacaagtgacatattcctctgcaaataaagcaacacacagaattacctggtggctgcagtgaggtagagaagtttctgccttcttaaatacatctacaaagaactccacaagcccaggctgagaatttagctgggcacccagaccagggaagcgcagctattcgaggggtaagaaaacacaagctgtctgctgtggcgcttcc

SEQ ID NO: 368319 - DNA, 134 bp, Homo sapiens; identical to SEQ ID NO: 344217
  chr20:33183817-33183951
  hypo

SEQ ID NO: 368320 - DNA, 86 bp, Homo sapiens; identical to SEQ ID NO: 344218
  chr20:33876250-33876336
  hypo

SEQ ID NO: 368321 - DNA, 164 bp, Homo sapiens
  chr20:33879796-33879960
  hypo
cggtctggcccggaggcctcctgcccctgagcctcgctgagctcagggcccccgcgcacatggctggtcatgtagtccacatccagggcgctcaggaagggcagctcccgctcctcggagatgacccgcaggtaggcagcctcaccccgctccaggagggcgtc

SEQ ID NO: 368322 - DNA, 131 bp, Homo sapiens
  chr20:33880280-33880411
  hypo
cccctggcctctggaacctgtcaggtcagccccacctgtctgcctgtgttgggactcgcctgcccagggaagcggcagtgccaggccctcggtgcacactcctgcctccctctcttcctcccagcaacgcc

SEQ ID NO: 368323 - DNA, 72 bp, Homo sapiens; identical to SEQ ID NO: 356267
  chr20:34147099-34147171
  hypo

SEQ ID NO: 368324 - DNA, 131 bp, Homo sapiens; identical to SEQ ID NO: 356268
  chr20:34147230-34147361
  hypo

SEQ ID NO: 368325 - DNA, 534 bp, Homo sapiens; identical to SEQ ID NO: 336423
  chr20:34652354-34652888
  hypo

SEQ ID NO: 368326 - DNA, 431 bp, Homo sapiens; identical to SEQ ID NO: 356270
  chr20:35155295-35155726
  hypo

SEQ ID NO: 368327 - DNA, 435 bp, Homo sapiens; identical to SEQ ID NO: 346229
  chr20:35443740-35444175
  hypo

SEQ ID NO: 368328 - DNA, 381 bp, Homo sapiens; identical to SEQ ID NO: 346230
  chr20:35444205-35444586
  hypo

SEQ ID NO: 368329 - DNA, 64 bp, Homo sapiens; identical to SEQ ID NO: 344226
  chr20:35929641-35929705
  hypo

SEQ ID NO: 368330 - DNA, 538 bp, Homo sapiens; identical to SEQ ID NO: 356273
  chr20:36760841-36761379
  hypo

SEQ ID NO: 368331 - DNA, 116 bp, Homo sapiens; identical to SEQ ID NO: 349021
  chr20:36764040-36764156
  hypo

SEQ ID NO: 368332 - DNA, 124 bp, Homo sapiens; identical to SEQ ID NO: 349022
  chr20:36764186-36764310
  hypo

SEQ ID NO: 368333 - DNA, 186 bp, Homo sapiens; identical to SEQ ID NO: 344229
  chr20:36765901-36766087
  hypo

SEQ ID NO: 368334 - DNA, 278 bp, Homo sapiens; identical to SEQ ID NO: 344230
  chr20:36766589-36766867
  hypo

SEQ ID NO: 368335 - DNA, 186 bp, Homo sapiens
  chr20:36767690-36767876
  hypo
cggggccattgctgtacgtaggctaccaattaaaacacacgcacacacatacacgagcctgccgggctgggaaaactggatgcttatcttcaaggctgcattaaagactctgagggcacataccctctgggtatttgtaggtgtgggtgatatcctcccgctcgtctcggcccacgctcttagtgc

SEQ ID NO: 368336 - DNA, 109 bp, Homo sapiens
  chr20:36767917-36768026
  hypo
tgcacagacccatcgtcctgctggatccagtctaccacgtcggcattgacctccgcaaagacaaagggcgcatcgtacttggtgctcaggtcgccctccttgatggcac

SEQ ID NO: 368337 - DNA, 161 bp, Homo sapiens; identical to SEQ ID NO: 344232
  chr20:36802873-36803034
  hypo

SEQ ID NO: 368338 - DNA, 148 bp, Homo sapiens; identical to SEQ ID NO: 344233
  chr20:37145099-37145247
  hypo

SEQ ID NO: 368339 - DNA, 62 bp, Homo sapiens; identical to SEQ ID NO: 345634
  chr20:37274639-37274701
  hypo

SEQ ID NO: 368340 - DNA, 546 bp, Homo sapiens; identical to SEQ ID NO: 205802
  chr20:37274731-37275277
  hypo

SEQ ID NO: 368341 - DNA, 100 bp, Homo sapiens; identical to SEQ ID NO: 352489
  chr20:37303401-37303501
  hypo

SEQ ID NO: 368342 - DNA, 389 bp, Homo sapiens; identical to SEQ ID NO: 345636
  chr20:37433723-37434112
  hypo

SEQ ID NO: 368343 - DNA, 106 bp, Homo sapiens; identical to SEQ ID NO: 344238
  chr20:37596775-37596881
  hypo

SEQ ID NO: 368344 - DNA, 110 bp, Homo sapiens; identical to SEQ ID NO: 344239
  chr20:37657005-37657115
  hypo

SEQ ID NO: 368345 - DNA, 138 bp, Homo sapiens; identical to SEQ ID NO: 344240
  chr20:37673303-37673441
  hypo

SEQ ID NO: 368346 - DNA, 233 bp, Homo sapiens; identical to SEQ ID NO: 356284
  chr20:40020340-40020573
  hypo

SEQ ID NO: 368347 - DNA, 172 bp, Homo sapiens; identical to SEQ ID NO: 346234
  chr20:42088459-42088631
  hypo

SEQ ID NO: 368348 - DNA, 184 bp, Homo sapiens
  chr20:42804035-42804219
  hypo
cggtgagcatttagactgcgttacatttttcccgtaacaatcccaaggccttgctctctggctcgcctgcaaggctggcaccaaagtcccttcccatggcttccaaatgccgctgtccatcaaatctccatagtctctggtttcctgggatcaccaacagacaacccgaagcggaggagctggc

SEQ ID NO: 368349 - DNA, 55 bp, Homo sapiens
  chr20:42833281-42833336
  hypo
cgctcctgccctccccacgccagtagtcagcggtgtctattgttcccatgtccac

SEQ ID NO: 368350 - DNA, 95 bp, Homo sapiens; identical to SEQ ID NO: 356286
  chr20:42931339-42931434
  hypo

SEQ ID NO: 368351 - DNA, 215 bp, Homo sapiens; identical to SEQ ID NO: 347677
  chr20:43976984-43977199
  hypo

SEQ ID NO: 368352 - DNA, 63 bp, Homo sapiens
  chr20:44602364-44602427
  hypo
caaacaaacaaacaaaaagtcctaaggagaagacctattaataaggagaaaaggtccgggctc

SEQ ID NO: 368353 - DNA, 578 bp, Homo sapiens; identical to SEQ ID NO: 352497
  chr20:44642532-44643110
  hypo

SEQ ID NO: 368354 - DNA, 66 bp, Homo sapiens; identical to SEQ ID NO: 352499
  chr20:44937643-44937709
  hypo

SEQ ID NO: 368355 - DNA, 191 bp, Homo sapiens
  chr20:45833348-45833539
  hypo
cgaaggattacagcatggaaagcctcagcacagagccccacgtggggcaggcccacatcagcgacacttggaggaatataggtgacctttgcttctctagactaaagaaaataaataagaatatagatggggtcctgatgtaccctgatatgaaggtggcagctaaatgctgacctttggaaaactcaact

SEQ ID NO: 368356 - DNA, 455 bp, Homo sapiens; identical to SEQ ID NO: 344262
  chr20:46234984-46235439
  hypo

SEQ ID NO: 368357 - DNA, 166 bp, Homo sapiens
  chr20:46365433-46365599
  hypo
cgtccctgctcacctgtccggtagccagtgctattgaggtacacggcaaaggtgcggctctcgtgctgtgcctgccaggagggcgaggagcagttctcattgttggtgtaggtgttgtggttgtggacgtacttgccagtgaggatggaggagcgtgaggggcagc

SEQ ID NO: 368358 - DNA, 125 bp, Homo sapiens
  chr20:46365635-46365760
  hypo
ccccgccctgctccatgatgcgccgggtcttgttcatcacctgcatggaacctgcaagtcaagggtggaagtaaggcgcagggcaggagacccgggcggcaccggcaccagggggctctcagcac

SEQ ID NO: 368359 - DNA, 93 bp, Homo sapiens; identical to SEQ ID NO: 356291
  chr20:46823583-46823676
  hypo

SEQ ID NO: 368360 - DNA, 129 bp, Homo sapiens; identical to SEQ ID NO: 344268
  chr20:47688836-47688965
  hypo

SEQ ID NO: 368361 - DNA, 51 bp, Homo sapiens; identical to SEQ ID NO: 344269
  chr20:47713222-47713273
  hypo

SEQ ID NO: 368362 - DNA, 67 bp, Homo sapiens; identical to SEQ ID NO: 344270
  chr20:47765244-47765311
  hypo

SEQ ID NO: 368363 - DNA, 50 bp, Homo sapiens; identical to SEQ ID NO: 356294
  chr20:47766299-47766349
  hypo

SEQ ID NO: 368364 - DNA, 36 bp, Homo sapiens; identical to SEQ ID NO: 349028
  chr20:47837206-47837242
  hypo

SEQ ID NO: 368365 - DNA, 50 bp, Homo sapiens; identical to SEQ ID NO: 352500
  chr20:47934774-47934824
  hypo

SEQ ID NO: 368366 - DNA, 72 bp, Homo sapiens; identical to SEQ ID NO: 344276
  chr20:48350345-48350417
  hypo

SEQ ID NO: 368367 - DNA, 522 bp, Homo sapiens; identical to SEQ ID NO: 346235
  chr20:48498752-48499274
  hypo

SEQ ID NO: 368368 - DNA, 343 bp, Homo sapiens; identical to SEQ ID NO: 356298
  chr20:48504339-48504682
  hypo

SEQ ID NO: 368369 - DNA, 245 bp, Homo sapiens; identical to SEQ ID NO: 356299
  chr20:48524519-48524764
  hypo

SEQ ID NO: 368370 - DNA, 373 bp, Homo sapiens; identical to SEQ ID NO: 356300
  chr20:48524818-48525191
  hypo

SEQ ID NO: 368371 - DNA, 982 bp, Homo sapiens; identical to SEQ ID NO: 336464
  chr20:48598700-48599682
  hypo

SEQ ID NO: 368372 - DNA, 164 bp, Homo sapiens; identical to SEQ ID NO: 345639
  chr20:48771177-48771341
  hypo

SEQ ID NO: 368373 - DNA, 158 bp, Homo sapiens; identical to SEQ ID NO: 344282
  chr20:49178954-49179112
  hypo

SEQ ID NO: 368374 - DNA, 242 bp, Homo sapiens; identical to SEQ ID NO: 356304
  chr20:49206898-49207140
  hypo

SEQ ID NO: 368375 - DNA, 62 bp, Homo sapiens; identical to SEQ ID NO: 349032
  chr20:49218808-49218870
  hypo

SEQ ID NO: 368376 - DNA, 477 bp, Homo sapiens
  chr20:49223746-49224223
  hypo
cgatgagcaggggacactcggttcagaccccttgtctgtaaaaggggtgcgcttacagaagaacccccatgtggaacatgcacagggaagggtgggaatccaggcgagcgcatgggagcaccgaggcaagtgatgctcagcctggcccgtgatgctcagcctggcctgtgtccagccttgcactcggagtaggtaggtccccatagatccatttgcctcgaagaaacttgcttataattatttgcacaaaggcctggctcgtggcacctgggcctggcctgaccagaaggcctagagctcagaggctctgcaagtgcccacttctctgcccagggtgtctgcagacccgcaggcaccctgggtcctaggcttggatggcactgagctgcccgccaccctgtacacttcaggggcccctgggcgaggggtattctcagccctaccagacaggtgaggaccccgagggtgcaggtggtc

SEQ ID NO: 368377 - DNA, 581 bp, Homo sapiens; identical to SEQ ID NO: 347682
  chr20:49224897-49225478
  hypo

SEQ ID NO: 368378 - DNA, 305 bp, Homo sapiens; identical to SEQ ID NO: 336468
  chr20:49225991-49226296
  hypo

SEQ ID NO: 368379 - DNA, 159 bp, Homo sapiens; identical to SEQ ID NO: 356308
  chr20:49236444-49236603
  hypo

SEQ ID NO: 368380 - DNA, 146 bp, Homo sapiens; identical to SEQ ID NO: 344290
  chr20:49240816-49240962
  hypo

SEQ ID NO: 368381 - DNA, 141 bp, Homo sapiens; identical to SEQ ID NO: 344291
  chr20:49247308-49247449
  hypo

SEQ ID NO: 368382 - DNA, 70 bp, Homo sapiens; identical to SEQ ID NO: 344293
  chr20:49284107-49284177
  hypo

SEQ ID NO: 368383 - DNA, 295 bp, Homo sapiens; identical to SEQ ID NO: 344297
  chr20:50208595-50208890
  hypo

SEQ ID NO: 368384 - DNA, 570 bp, Homo sapiens; identical to SEQ ID NO: 345641
  chr20:50383675-50384245
  hypo

SEQ ID NO: 368385 - DNA, 243 bp, Homo sapiens; identical to SEQ ID NO: 205849
  chr20:50384928-50385171
  hypo

SEQ ID NO: 368386 - DNA, 174 bp, Homo sapiens; identical to SEQ ID NO: 344302
  chr20:52374073-52374247
  hypo

SEQ ID NO: 368387 - DNA, 31 bp, Homo sapiens
  chr20:52484682-52484713
  hypo
cgctaatatttacgactagaacattctttat

SEQ ID NO: 368388 - DNA, 62 bp, Homo sapiens; identical to SEQ ID NO: 344303
  chr20:55026786-55026848
  hypo

SEQ ID NO: 368389 - DNA, 135 bp, Homo sapiens; identical to SEQ ID NO: 205864
  chr20:55206463-55206598
  hypo

SEQ ID NO: 368390 - DNA, 95 bp, Homo sapiens; identical to SEQ ID NO: 352515
  chr20:55206774-55206869
  hypo

SEQ ID NO: 368391 - DNA, 226 bp, Homo sapiens; identical to SEQ ID NO: 344308
  chr20:56001391-56001617
  hypo

SEQ ID NO: 368392 - DNA, 363 bp, Homo sapiens; identical to SEQ ID NO: 344309
  chr20:56126192-56126555
  hypo

SEQ ID NO: 368393 - DNA, 91 bp, Homo sapiens; identical to SEQ ID NO: 356315
  chr20:56772299-56772390
  hypo

SEQ ID NO: 368394 - DNA, 213 bp, Homo sapiens; identical to SEQ ID NO: 220091
  chr20:56780225-56780438
  hypo

SEQ ID NO: 368395 - DNA, 60 bp, Homo sapiens; identical to SEQ ID NO: 220092
  chr20:56780951-56781011
  hypo

SEQ ID NO: 368396 - DNA, 96 bp, Homo sapiens; identical to SEQ ID NO: 356318
  chr20:56781104-56781200
  hypo

SEQ ID NO: 368397 - DNA, 307 bp, Homo sapiens; identical to SEQ ID NO: 344313
  chr20:56941603-56941910
  hypo

SEQ ID NO: 368398 - DNA, 64 bp, Homo sapiens; identical to SEQ ID NO: 344314
  chr20:56999390-56999454
  hypo

SEQ ID NO: 368399 - DNA, 167 bp, Homo sapiens; identical to SEQ ID NO: 356320
  chr20:57009378-57009545
  hypo

SEQ ID NO: 368400 - DNA, 113 bp, Homo sapiens; identical to SEQ ID NO: 345643
  chr20:57225466-57225579
  hypo

SEQ ID NO: 368401 - DNA, 119 bp, Homo sapiens; identical to SEQ ID NO: 344318
  chr20:57240808-57240927
  hypo

SEQ ID NO: 368402 - DNA, 164 bp, Homo sapiens; identical to SEQ ID NO: 346239
  chr20:57268976-57269140
  hypo

SEQ ID NO: 368403 - DNA, 430 bp, Homo sapiens; identical to SEQ ID NO: 344321
  chr20:57571504-57571934
  hypo

SEQ ID NO: 368404 - DNA, 63 bp, Homo sapiens
  chr20:57767480-57767543
  hypo
cgtgcgctccacctggacgcccccagacaagtctcggcccctcttcttccactccgtccccac

SEQ ID NO: 368405 - DNA, 327 bp, Homo sapiens; identical to SEQ ID NO: 336499
  chr20:57797949-57798276
  hypo

SEQ ID NO: 368406 - DNA, 176 bp, Homo sapiens; identical to SEQ ID NO: 205885
  chr20:57875365-57875541
  hypo

SEQ ID NO: 368407 - DNA, 220 bp, Homo sapiens; identical to SEQ ID NO: 352521
  chr20:57875889-57876109
  hypo

SEQ ID NO: 368408 - DNA, 233 bp, Homo sapiens; identical to SEQ ID NO: 347690
  chr20:57978841-57979074
  hypo

SEQ ID NO: 368409 - DNA, 74 bp, Homo sapiens; identical to SEQ ID NO: 361931
  chr20:58180712-58180786
  hypo

SEQ ID NO: 368410 - DNA, 354 bp, Homo sapiens; identical to SEQ ID NO: 344328
  chr20:58507061-58507415
  hypo

SEQ ID NO: 368411 - DNA, 260 bp, Homo sapiens; identical to SEQ ID NO: 356329
  chr20:58508063-58508323
  hypo

SEQ ID NO: 368412 - DNA, 56 bp, Homo sapiens; identical to SEQ ID NO: 346240
  chr20:58514041-58514097
  hypo

SEQ ID NO: 368413 - DNA, 115 bp, Homo sapiens; identical to SEQ ID NO: 345644
  chr20:58514400-58514515
  hypo

SEQ ID NO: 368414 - DNA, 109 bp, Homo sapiens; identical to SEQ ID NO: 361933
  chr20:58515463-58515572
  hypo

SEQ ID NO: 368415 - DNA, 433 bp, Homo sapiens; identical to SEQ ID NO: 344333
  chr20:59872770-59873203
  hypo

SEQ ID NO: 368416 - DNA, 211 bp, Homo sapiens; identical to SEQ ID NO: 344334
  chr20:60094644-60094855
  hypo

SEQ ID NO: 368417 - DNA, 146 bp, Homo sapiens; identical to SEQ ID NO: 344335
  chr20:60173821-60173967
  hypo

SEQ ID NO: 368418 - DNA, 428 bp, Homo sapiens
  chr20:60226081-60226509
  hypo
cgtgcttggccgtgcactggtgtgcttgtgtgagtgagttagcgccgtgcttggccgtgcactggtgtgctcgtgtcagtgagttagcaccgtgcttggccgtgcactggtgtgctcgtgtgagtgagttagcctcgtgcttggtcacgcactggtgtgcttgtgtgagttagcgtcatgcttggccgtgcactggtgtgcttgtgtgagtgagttagcatcgtgcttggccatggcagtgagttctgattgcagggtctcaacgctcagggaaggacgagtgccccttctgtgccattttccaaaactctagggatattgagtcttgctcaggtcacccaaaggcacatgtcccagccccgagtcaagcgtacaggggcctcccgggagcacccttgtgcctgtcgcggcgttcctctccttctgcc

SEQ ID NO: 368419 - DNA, 352 bp, Homo sapiens; identical to SEQ ID NO: 220128
  chr20:60238496-60238848
  hypo

SEQ ID NO: 368420 - DNA, 331 bp, Homo sapiens; identical to SEQ ID NO: 356333
  chr20:60273150-60273481
  hypo

SEQ ID NO: 368421 - DNA, 546 bp, Homo sapiens; identical to SEQ ID NO: 344339
  chr20:60275663-60276209
  hypo

SEQ ID NO: 368422 - DNA, 249 bp, Homo sapiens
  chr20:60313847-60314096
  hypo
cgctcctcctctcaccaccttcacggcaatcccgctcctcctctcaccaccttgacgaaggcgtgaaacgtccctgaggctcagcttcctatctgcgagatgggccagttctactcgccagcgctgccttcccgtgcctggcagtgcacccgccgcgtggaggctgcaggggctgggacaggacgtgtgatctgcattggggtcgcagaggcggcttttcagggcattgtaggtgtttgctggtacatc

SEQ ID NO: 368423 - DNA, 178 bp, Homo sapiens; identical to SEQ ID NO: 344342
  chr20:60316318-60316496
  hypo

SEQ ID NO: 368424 - DNA, 347 bp, Homo sapiens; identical to SEQ ID NO: 349042
  chr20:60352702-60353049
  hypo

SEQ ID NO: 368425 - DNA, 350 bp, Homo sapiens
  chr20:60373188-60373538
  hypo
cgccctctcaccctgcgcctctcctgagccagcagccataacccccgccccgcccggccctgccccgggctctgtggcagcacctcctgccaggagcaccctcagctccctgcgggagcacgcagcaacagaggggagggggtgtggtcccgcctcgcacgcatccccgctgtgggcggcccctcgctgcgcctcagcctctccctggccccacgggcctccacactcctcacatacagaatgggctgtgggtcctcagcccgtccggaccctccgctcctttcctgctacctccgtgcgcagcaggccttgtggggtgtggtccagagcgtggccccggggtgcatcgc

SEQ ID NO: 368426 - DNA, 111 bp, Homo sapiens
  chr20:60448951-60449062
  hypo
gagaggtgaggcggggtggggtctgcgtgcaggcgggtgagctcctggtccccgcaggacacccacaggaccctcggggagcctctccagtggcgccgtcggggagtgatc

SEQ ID NO: 368427 - DNA, 242 bp, Homo sapiens
  chr20:60485425-60485667
  hypo
gcatatttacacttaacacgggtttgtgacattctttccttccattttgcagtttgcaggggaggtccccgaaaaccgcgtggagaccgtggtcgcaaacctcacggtgatggaccgagatcagccccactctccaaactggaatgccgtttaccgcatcatcagtggggatccatccgggcacttcagcgtccgcacagaccccgtaaccaacgagggcatggtcaccgtggtgaaggtgc

SEQ ID NO: 368428 - DNA, 193 bp, Homo sapiens
  chr20:60494919-60495112
  hypo
cgcggtgattgcatggaagcttgtgattgtgtggaagcatggtatcgtgattatgtggaagcgtggtgtcacggtgattgcgtggaagcgtgttgtgattgtgtggaagcgtggtatcgcggtgattgcatggaagtgtggtgtcacagtgattgcgtggaagcgtgtcgtgattgtgtggaagcatggtatc

SEQ ID NO: 368429 - DNA, 105 bp, Homo sapiens
  chr20:60495161-60495266
  hypo
tgattggaagcgtgtcacggtgattgcgtggaagcgtggttttgtgattgcatggaagcatggcgtcacagtgactgcgtggaagcgtggtgtcatggtgactgc

SEQ ID NO: 368430 - DNA, 105 bp, Homo sapiens
  chr20:60495300-60495405
  hypo
cgtggtgtcacagtgattgcatggaagcgtgtcatgattgtgtggaagcatggtatcgtgattgtgtggaagcgtggtgtgattgtgtggaagcgtggtgtcata

SEQ ID NO: 368431 - DNA, 266 bp, Homo sapiens; identical to SEQ ID NO: 328091
  chr20:60495440-60495706
  hypo

SEQ ID NO: 368432 - DNA, 36 bp, Homo sapiens
  chr20:60502550-60502586
  hypo
cggccgcgcctgcttttctcacagacacttccaaaa

SEQ ID NO: 368433 - DNA, 83 bp, Homo sapiens; identical to SEQ ID NO: 346242
  chr20:60544922-60545005
  hypo

SEQ ID NO: 368434 - DNA, 208 bp, Homo sapiens; identical to SEQ ID NO: 220146
  chr20:60545058-60545266
  hypo

SEQ ID NO: 368435 - DNA, 265 bp, Homo sapiens; identical to SEQ ID NO: 220147
  chr20:60545296-60545561
  hypo

SEQ ID NO: 368436 - DNA, 331 bp, Homo sapiens; identical to SEQ ID NO: 344356
  chr20:60563069-60563400
  hypo

SEQ ID NO: 368437 - DNA, 266 bp, Homo sapiens
  chr20:60662808-60663074
  hypo
gctctgtacactcacctgcatgcactcacacgcgctcctatacactcacctgcacacgcactcacacaagctcttgtacactcacctgcacacgcactcacacaagctcttgtacactcactgcagactcacccacacacgctcctgtacactcacctgcatgcactcacatgtactcctgtacactcacctgcacactcacctgcacacgcacgcacacgtgctcctgtacactcacctgcatgcacacacatgcgctcctgtac

SEQ ID NO: 368438 - DNA, 409 bp, Homo sapiens; identical to SEQ ID NO: 344359
  chr20:60725146-60725555
  hypo

SEQ ID NO: 368439 - DNA, 128 bp, Homo sapiens
  chr20:60756218-60756346
  hypo
agaagtgtttattttgtaggcactaagggtttctaaaacccttaacactggtaagggctcaaaaataaacgtatgtgttcatattcgatcaccgaaatgagagttcttaattgctaattgacaaacgc

SEQ ID NO: 368440 - DNA, 373 bp, Homo sapiens; identical to SEQ ID NO: 349046
  chr20:60773878-60774251
  hypo

SEQ ID NO: 368441 - DNA, 175 bp, Homo sapiens; identical to SEQ ID NO: 356340
  chr20:60781114-60781289
  hypo

SEQ ID NO: 368442 - DNA, 256 bp, Homo sapiens; identical to SEQ ID NO: 356341
  chr20:60781567-60781823
  hypo

SEQ ID NO: 368443 - DNA, 64 bp, Homo sapiens; identical to SEQ ID NO: 344363
  chr20:60842033-60842097
  hypo

SEQ ID NO: 368444 - DNA, 578 bp, Homo sapiens
  chr20:60855793-60856371
  hypo
cgtgtgtgtttcgtgaggtggcctttcttttgacgacttcacaggaaagccatttgtctttgttcagtcttctttgattgcttattaacttgtcttgacatttaagtagaaagctttgtagatgctacaaaggaaagaagaagtacatttcaaacgcatgctaaatacacagcctccgtcgcaggggcttcaaagcagcgtgctgctctcccgcgggtgccggttgctgtgacccagccccgcctggtcgttgcgtcttgggtcacgtcgtgtcttggcttttctggactctcactgcttgttttctggtgtcttcacagacataatgaagcctacacctggaccaaccccacctgctgcgtccacaacgtcatcatcgggaagctgtggatagagcagtatgggacagtggagattttaaaccacaggtgacagcaccccaccgttgggtgagagcgcgaggctccgggtggggatgggcgagccggggagcgtgagcatccgtgctcctggtgggttttagctcagcctcacgagctgctgccgtgtccccgccagcccaggcatagcagctgcct

SEQ ID NO: 368445 - DNA, 461 bp, Homo sapiens; identical to SEQ ID NO: 328132
  chr20:60856401-60856862
  hypo

SEQ ID NO: 368446 - DNA, 148 bp, Homo sapiens
  chr20:60856892-60857040
  hypo
gaaaagaacttcacaaggtggaaggacacattcaagacaaaaagtaggtccttgccaagtgttcatggggcaccactacagcctgtgtgtccacgttagaagggctcaggtgctcctgggcctgcgtgtgcctacgtgcatgagacgc

SEQ ID NO: 368447 - DNA, 284 bp, Homo sapiens; identical to SEQ ID NO: 328147
  chr20:60925541-60925825
  hypo

SEQ ID NO: 368448 - DNA, 111 bp, Homo sapiens
  chr20:60926049-60926160
  hypo
gaggactctgggtgaggcccaggaatgtgccggtgccagcaccagggctgctgcccatcctgtgaggggctcccgggaggtggatgctctgcagtgccctcggctgccccc

SEQ ID NO: 368449 - DNA, 82 bp, Homo sapiens
  chr20:60953036-60953118
  hypo
cgcagtggccggcccgggggtgcaaccccatcccctctctggggtccctttgcagggcagccttaggatccattcactgtgg

SEQ ID NO: 368450 - DNA, 71 bp, Homo sapiens
  chr20:60953645-60953716
  hypo
tccagggaagcgactccgtcccgcttggcctcagtcactgctctgtcaatgggatgataactgcccttccc

SEQ ID NO: 368451 - DNA, 211 bp, Homo sapiens; identical to SEQ ID NO: 328158
  chr20:60984130-60984341
  hypo

SEQ ID NO: 368452 - DNA, 196 bp, Homo sapiens
  chr20:60992542-60992738
  hypo
cgtctgtcccgtccacgcagcccccccagtcatctgcacgctcctctgtgacgtctgtcccgtccacgcaacgcccccccagtcatctgcacgctcctctgtgacgtctgttccgtccacgcaccaccccccccagtcatctgcacgctcctctgtgacgtctgtcccgtccacgcaccccccccagtcatctgca

SEQ ID NO: 368453 - DNA, 203 bp, Homo sapiens
  chr20:60992781-60992984
  hypo
gtcatctgcacgctcctctgtgacgtctgtcctgtccacacaccacccccccggtcatctgcacgctcctctgtgacgtctgtcctgtccacgcaacgcccccccagtcatctgcacgctcctctgtcacgtctgtcctgtccacgcaacgcccccccagtcatctgcacgctcctctgtgacgtctgtcctgtccacgcaac

SEQ ID NO: 368454 - DNA, 597 bp, Homo sapiens; identical to SEQ ID NO: 344374
  chr20:61000254-61000851
  hypo

SEQ ID NO: 368455 - DNA, 67 bp, Homo sapiens
  chr20:61013047-61013114
  hypo
cgactgcccggggctcagcgggcaggcagggagatgcctcaggactcacgggtgaggggtgttgggc

SEQ ID NO: 368456 - DNA, 55 bp, Homo sapiens; identical to SEQ ID NO: 328168
  chr20:61013193-61013248
  hypo

SEQ ID NO: 368457 - DNA, 120 bp, Homo sapiens
  chr20:61013278-61013398
  hypo
cctgaatggagtcctcactgccggcccggcctgcgctgcctgctctcggcctccctgtgtgtcgcgtgatgttgtgtgccagggttgggcggtggctgtgtgaggcctgtgaggacacac

SEQ ID NO: 368458 - DNA, 236 bp, Homo sapiens; identical to SEQ ID NO: 356343
  chr20:61287746-61287982
  hypo

SEQ ID NO: 368459 - DNA, 60 bp, Homo sapiens; identical to SEQ ID NO: 356344
  chr20:61288557-61288617
  hypo

SEQ ID NO: 368460 - DNA, 150 bp, Homo sapiens
  chr20:61314706-61314856
  hypo
ctggaggtggcgaggacgggcttttccatcactctcggtgggggcacctgctccaggggcagctccatgggcgcttggcgggacggaagctgcgggaatagttgatgttgaggttgacggcgacagtgaggactgcaagaatacagtcac

SEQ ID NO: 368461 - DNA, 241 bp, Homo sapiens; identical to SEQ ID NO: 328183
  chr20:61318783-61319024
  hypo

SEQ ID NO: 368462 - DNA, 115 bp, Homo sapiens; identical to SEQ ID NO: 356345
  chr20:61330805-61330920
  hypo

SEQ ID NO: 368463 - DNA, 158 bp, Homo sapiens
  chr20:61472199-61472357
  hypo
ctcggccgccgactggacgcgcgggccttgccagcgagcaccctcatcgggctgtcgcctgacagcatacctcaaaaggccctagctaataaacctgtaagcccagcatttgagagaaggtagggtgtgtatatataaaaggttgtgtacaactccac

SEQ ID NO: 368464 - DNA, 55 bp, Homo sapiens; identical to SEQ ID NO: 220198
  chr20:61527972-61528027
  hypo

SEQ ID NO: 368465 - DNA, 124 bp, Homo sapiens
  chr20:61528147-61528271
  hypo
tcttggggatggtgcccttgaaacctgagggtggctttttaatggctggtgtggctgctgccacattagcaaaagaagacttctttggcacgaggtttctaggtgcaggctgcttgcccaccgc

SEQ ID NO: 368466 - DNA, 166 bp, Homo sapiens; identical to SEQ ID NO: 344386
  chr20:61591490-61591656
  hypo

SEQ ID NO: 368467 - DNA, 69 bp, Homo sapiens
  chr20:61665975-61666044
  hypo
cgcagcgtgattccgtgccacggcgtcaggagcggcatgtagcatcttttggtttgagagtaaaattcc

SEQ ID NO: 368468 - DNA, 96 bp, Homo sapiens
  chr20:61749643-61749739
  hypo
cgctgtgtcctgctgcattgctgggcagtgtccactgcacgtcgctcgctgcattgctgggcagtgtccgcggcatgtcgctctctgcattgctgg

SEQ ID NO: 368469 - DNA, 65 bp, Homo sapiens
  chr20:61749920-61749985
  hypo
ggatgctcaggctgcttcccgttggacgcgattgtgagtgacgctgctgtgagcctccaggtacc

SEQ ID NO: 368470 - DNA, 192 bp, Homo sapiens; identical to SEQ ID NO: 352526
  chr20:61806216-61806408
  hypo

SEQ ID NO: 368471 - DNA, 247 bp, Homo sapiens; identical to SEQ ID NO: 205902
  chr20:61810310-61810557
  hypo

SEQ ID NO: 368472 - DNA, 270 bp, Homo sapiens; identical to SEQ ID NO: 361940
  chr20:61810632-61810902
  hypo

SEQ ID NO: 368473 - DNA, 123 bp, Homo sapiens; identical to SEQ ID NO: 346245
  chr20:61838301-61838424
  hypo

SEQ ID NO: 368474 - DNA, 46 bp, Homo sapiens; identical to SEQ ID NO: 356349
  chr20:61974409-61974455
  hypo

SEQ ID NO: 368475 - DNA, 78 bp, Homo sapiens
  chr20:61974565-61974643
  hypo
cggcacacgtggtgacggtgcgttttattcattgaagtctgtgcacacactgggagcacattccagggcttggcagac

SEQ ID NO: 368476 - DNA, 31 bp, Homo sapiens; identical to SEQ ID NO: 356350
  chr20:61991069-61991100
  hypo

SEQ ID NO: 368477 - DNA, 233 bp, Homo sapiens; identical to SEQ ID NO: 220227
  chr20:62031374-62031607
  hypo

SEQ ID NO: 368478 - DNA, 114 bp, Homo sapiens
  chr20:62153095-62153209
  hypo
cggtgttggagtccgcagagcactcggaacctccccaggcctccagcagcatgaccgcctgtggcctggctcgggacgccccgaggaagcagcccggcggtcagtccagcacag

SEQ ID NO: 368479 - DNA, 128 bp, Homo sapiens
  chr20:62153462-62153590
  hypo
cacctggaactgtgcacctggcaccaagcggaaaataaactccaagcagccagtagccccgatggtgtgtgcctgagctgtgtggcccgaggttccatttgagtgtgagaaatggctgaatccctccc

SEQ ID NO: 368480 - DNA, 179 bp, Homo sapiens; identical to SEQ ID NO: 356352
  chr20:62197207-62197386
  hypo

SEQ ID NO: 368481 - DNA, 336 bp, Homo sapiens; identical to SEQ ID NO: 356353
  chr20:62197416-62197752
  hypo

SEQ ID NO: 368482 - DNA, 89 bp, Homo sapiens
  chr20:62204139-62204228
  hypo
cgcgactgcgggcaaaggtgcaccggtttcggtggcgccggcagccgagcccagggctgtagtagtggcagacttggtagcacaggggc

SEQ ID NO: 368483 - DNA, 95 bp, Homo sapiens
  chr20:62204387-62204482
  hypo
cacaggtccaccagggcacacagccgggccagggacggccctctggtggccgcggggctgttgggcagcagggtggaccctggaggcgccacctc

SEQ ID NO: 368484 - DNA, 613 bp, Homo sapiens
  chr20:62221442-62222055
  hypo
tacttccgctcgtggtcctctgccatggcagccacctcaatggtggccgtgtgctcctcaggcccgggggcagcccctgcgggcactgtcacaattgtgctggagccaggcgaggcctgggccacgttctgcagggtggggcccaggccaggcaacgtgagcagctgtagcgggctgaccaccttgaacaccgtgctaccgtcctgcacggcggccgtgctcaggaccgtgaggctggacgcgtccgggtggatctccactgtgctggggtaggtggagccggaagaggccaagactgtgtatcccccgagcagcggggaggccggggagctggcggggggcgcctgaagggaacccttgcccaggacggtggacggcagggtggacaccactttaccaaggggcacgctggtcagctgggggacgggcacgcccgggccaagcgccagctgggcagactgggtgagcacctgcgaggccatggcggccggtcctgatgtggcacgtgcaagccggggccgcttcacaggcggtggcagggagaccggcgtcagcgtcatgagcacgttgctgaggtgctgggacttgtgcttcagctccttggctcggcgac

SEQ ID NO: 368485 - DNA, 227 bp, Homo sapiens; identical to SEQ ID NO: 344409
  chr20:62242319-62242546
  hypo

SEQ ID NO: 368486 - DNA, 492 bp, Homo sapiens; identical to SEQ ID NO: 344410
  chr20:62248630-62249122
  hypo

SEQ ID NO: 368487 - DNA, 357 bp, Homo sapiens; identical to SEQ ID NO: 344411
  chr20:62252093-62252450
  hypo

SEQ ID NO: 368488 - DNA, 390 bp, Homo sapiens; identical to SEQ ID NO: 347694
  chr20:62273399-62273789
  hypo

SEQ ID NO: 368489 - DNA, 130 bp, Homo sapiens; identical to SEQ ID NO: 344413
  chr20:62309958-62310088
  hypo

SEQ ID NO: 368490 - DNA, 103 bp, Homo sapiens; identical to SEQ ID NO: 344414
  chr20:62310122-62310225
  hypo

SEQ ID NO: 368491 - DNA, 161 bp, Homo sapiens; identical to SEQ ID NO: 356358
  chr20:62314955-62315116
  hypo

SEQ ID NO: 368492 - DNA, 269 bp, Homo sapiens; identical to SEQ ID NO: 356359
  chr20:62322022-62322291
  hypo

SEQ ID NO: 368493 - DNA, 716 bp, Homo sapiens
  chr20:62326157-62326873
  hypo
cgccgtgagcgcctacctggctgatgcccgcagggccctggggtccgcgggctgtagccaactcttggcagcgctgacagcctataagcaagacgacgacctcgacaaggtgctggctgtgttggccgccctgaccactgcaaagccagaggacttccccctgctgcacagcaagtggccctggcgtggggaacagccggtggggtggggggcaggggacaaaatgggggctgtgccgggtctgattgaagctccccgcagggttcagcatgtttgtgcgtccacaccacaagcagcgcttctcacagacgtgcacagacctgaccggccggccctacccgggcatggagccaccgggaccccaggaggagaggcttgccgtgcctcctgtgcttacccacagggctccccaaccaggtagggcacctgcctggctgctcctggcagcgccccaaccgcacgcagccctgggagtgagcagcaaagccccaggcccccctcagactcaagtctctgtctccaggcccctcacggtccgagaagaccgggaagacccagagcaagatctcgtccttccttagacagaggccagcagggactgtgggggcgggcggtgaggatgcaggtcccagccagtcctcaggacctccccacgggcctgcagcatctgagtggggtgagcctcatgggagagacatcgctgggcagcaggccac

SEQ ID NO: 368494 - DNA, 264 bp, Homo sapiens; identical to SEQ ID NO: 352532
  chr20:62461639-62461903
  hypo

SEQ ID NO: 368495 - DNA, 345 bp, Homo sapiens; identical to SEQ ID NO: 345646
  chr20:62495236-62495581
  hypo

SEQ ID NO: 368496 - DNA, 305 bp, Homo sapiens
  chr20:62513518-62513823
  hypo
cgctcgttccccacagacgtggttgagcttgcattttctcccctcagcacagtctcatttgggaagaggaaagggaaacttgcacgcatgggccggtcagggcactgagaggcctttctgctctggcactgcctgccaggcgtgcacctcagggggcccgtccgctctagcaggcaaatggggcgtgttctctgtagtcagaggggctgtgagaagacaggaaagcgagcttagtgggtatcaggcaagggggtgaaattgggttgtgagatgagaaagcagcgtcattgcagggctggggggcc

SEQ ID NO: 368497 - DNA, 45 bp, Homo sapiens
  chr20:62513897-62513942
  hypo
gggccgaggggctctgggcctgcaccccctctgtagacacctggc

SEQ ID NO: 368498 - DNA, 507 bp, Homo sapiens; identical to SEQ ID NO: 344425
  chr20:62550652-62551159
  hypo

SEQ ID NO: 368499 - DNA, 1158 bp, Homo sapiens; identical to SEQ ID NO: 344427
  chr20:62562220-62563378
  hypo

SEQ ID NO: 368500 - DNA, 284 bp, Homo sapiens; identical to SEQ ID NO: 344428
  chr20:62578699-62578983
  hypo

SEQ ID NO: 368501 - DNA, 98 bp, Homo sapiens; identical to SEQ ID NO: 344429
  chr20:62581888-62581986
  hypo

SEQ ID NO: 368502 - DNA, 759 bp, Homo sapiens; identical to SEQ ID NO: 205913
  chr20:62600809-62601568
  hypo

SEQ ID NO: 368503 - DNA, 65 bp, Homo sapiens; identical to SEQ ID NO: 361949
  chr20:62601569-62601634
  hypo

SEQ ID NO: 368504 - DNA, 142 bp, Homo sapiens; identical to SEQ ID NO: 344431
  chr20:62630932-62631074
  hypo

SEQ ID NO: 368505 - DNA, 73 bp, Homo sapiens; identical to SEQ ID NO: 344433
  chr20:62639433-62639506
  hypo

SEQ ID NO: 368506 - DNA, 48 bp, Homo sapiens
  chr20:62662125-62662173
  hypo
cgggcaattaagaataccacaaggcttaaaaaacaatcaggttatcag

SEQ ID NO: 368507 - DNA, 195 bp, Homo sapiens
  chr20:62662271-62662466
  hypo
cagggggaggtgaccctgaggagagggtggcagcaacgcagagtcccgggcctgccagcatgctcagcagccagcgcccgccatcccttctccagcagcgggtgggggtgccatgcacacccttacctggcctctcatagcatggacctcttcgggcccggtttttcaggtgtgcatgtgtctggcaggcacggc

SEQ ID NO: 368508 - DNA, 214 bp, Homo sapiens; identical to SEQ ID NO: 295001
  chr20:62680443-62680657
  hypo

SEQ ID NO: 368509 - DNA, 251 bp, Homo sapiens; identical to SEQ ID NO: 205918
  chr20:62694767-62695018
  hypo

SEQ ID NO: 368510 - DNA, 197 bp, Homo sapiens; identical to SEQ ID NO: 352536
  chr20:62695048-62695245
  hypo

SEQ ID NO: 368511 - DNA, 100 bp, Homo sapiens
  chr20:62839658-62839758
  hypo
ggacatgatgacccggggaaacctgggcctcctggagcaggccatcgccctgaaggctgaacaggtgcgcacagtctgcgagccgggctgcccgcctgcc

SEQ ID NO: 368512 - DNA, 57 bp, Homo sapiens
  chr20:62863342-62863399
  hypo
cggaagggccagttcttccctgaggctccaggacctcagcggccctccctgcctcac

SEQ ID NO: 368513 - DNA, 242 bp, Homo sapiens; identical to SEQ ID NO: 328411
  chr20:62863429-62863671
  hypo

SEQ ID NO: 368514 - DNA, 204 bp, Homo sapiens; identical to SEQ ID NO: 356368
  chr20:62868769-62868973
  hypo

SEQ ID NO: 368515 - DNA, 56 bp, Homo sapiens; identical to SEQ ID NO: 220292
  chr21:19274772-19274828
  hypo

SEQ ID NO: 368516 - DNA, 122 bp, Homo sapiens; identical to SEQ ID NO: 205931
  chr21:27011487-27011609
  hypo

SEQ ID NO: 368517 - DNA, 133 bp, Homo sapiens; identical to SEQ ID NO: 205932
  chr21:27011639-27011772
  hypo

SEQ ID NO: 368518 - DNA, 55 bp, Homo sapiens; identical to SEQ ID NO: 344444
  chr21:30294975-30295030
  hypo

SEQ ID NO: 368519 - DNA, 161 bp, Homo sapiens; identical to SEQ ID NO: 344445
  chr21:30357072-30357233
  hypo

SEQ ID NO: 368520 - DNA, 191 bp, Homo sapiens; identical to SEQ ID NO: 361962
  chr21:32716044-32716235
  hypo

SEQ ID NO: 368521 - DNA, 154 bp, Homo sapiens; identical to SEQ ID NO: 344449
  chr21:33711064-33711218
  hypo

SEQ ID NO: 368522 - DNA, 270 bp, Homo sapiens; identical to SEQ ID NO: 344450
  chr21:33781936-33782206
  hypo

SEQ ID NO: 368523 - DNA, 108 bp, Homo sapiens; identical to SEQ ID NO: 356373
  chr21:33954435-33954543
  hypo

SEQ ID NO: 368524 - DNA, 53 bp, Homo sapiens; identical to SEQ ID NO: 344452
  chr21:34033597-34033650
  hypo

SEQ ID NO: 368525 - DNA, 255 bp, Homo sapiens; identical to SEQ ID NO: 344458
  chr21:35258647-35258902
  hypo

SEQ ID NO: 368526 - DNA, 42 bp, Homo sapiens; identical to SEQ ID NO: 344459
  chr21:35286360-35286402
  hypo

SEQ ID NO: 368527 - DNA, 881 bp, Homo sapiens; identical to SEQ ID NO: 336551
  chr21:36163875-36164756
  hypo

SEQ ID NO: 368528 - DNA, 176 bp, Homo sapiens; identical to SEQ ID NO: 344463
  chr21:36437239-36437415
  hypo

SEQ ID NO: 368529 - DNA, 246 bp, Homo sapiens; identical to SEQ ID NO: 344466
  chr21:37582287-37582533
  hypo

SEQ ID NO: 368530 - DNA, 48 bp, Homo sapiens; identical to SEQ ID NO: 344468
  chr21:37718564-37718612
  hypo

SEQ ID NO: 368531 - DNA, 42 bp, Homo sapiens; identical to SEQ ID NO: 349055
  chr21:37775172-37775214
  hypo

SEQ ID NO: 368532 - DNA, 174 bp, Homo sapiens; identical to SEQ ID NO: 344471
  chr21:38176483-38176657
  hypo

SEQ ID NO: 368533 - DNA, 121 bp, Homo sapiens; identical to SEQ ID NO: 328577
  chr21:38362977-38363098
  hypo

SEQ ID NO: 368534 - DNA, 246 bp, Homo sapiens; identical to SEQ ID NO: 344473
  chr21:38603108-38603354
  hypo

SEQ ID NO: 368535 - DNA, 78 bp, Homo sapiens; identical to SEQ ID NO: 356381
  chr21:38918381-38918459
  hypo

SEQ ID NO: 368536 - DNA, 169 bp, Homo sapiens; identical to SEQ ID NO: 356382
  chr21:38918561-38918730
  hypo

SEQ ID NO: 368537 - DNA, 310 bp, Homo sapiens; identical to SEQ ID NO: 206000
  chr21:39288394-39288704
  hypo

SEQ ID NO: 368538 - DNA, 279 bp, Homo sapiens; identical to SEQ ID NO: 206001
  chr21:39288901-39289180
  hypo

SEQ ID NO: 368539 - DNA, 38 bp, Homo sapiens; identical to SEQ ID NO: 361988
  chr21:40032283-40032321
  hypo

SEQ ID NO: 368540 - DNA, 158 bp, Homo sapiens; identical to SEQ ID NO: 206003
  chr21:40032367-40032525
  hypo

SEQ ID NO: 368541 - DNA, 65 bp, Homo sapiens; identical to SEQ ID NO: 361990
  chr21:40032848-40032913
  hypo

SEQ ID NO: 368542 - DNA, 132 bp, Homo sapiens; identical to SEQ ID NO: 206005
  chr21:40032974-40033106
  hypo

SEQ ID NO: 368543 - DNA, 749 bp, Homo sapiens; identical to SEQ ID NO: 344480
  chr21:40316188-40316937
  hypo

SEQ ID NO: 368544 - DNA, 168 bp, Homo sapiens; identical to SEQ ID NO: 344482
  chr21:40348667-40348835
  hypo

SEQ ID NO: 368545 - DNA, 51 bp, Homo sapiens; identical to SEQ ID NO: 344484
  chr21:40580603-40580654
  hypo

SEQ ID NO: 368546 - DNA, 497 bp, Homo sapiens; identical to SEQ ID NO: 344485
  chr21:40762272-40762769
  hypo

SEQ ID NO: 368547 - DNA, 212 bp, Homo sapiens; identical to SEQ ID NO: 344486
  chr21:40891441-40891653
  hypo

SEQ ID NO: 368548 - DNA, 238 bp, Homo sapiens; identical to SEQ ID NO: 344487
  chr21:42572234-42572472
  hypo

SEQ ID NO: 368549 - DNA, 151 bp, Homo sapiens; identical to SEQ ID NO: 344488
  chr21:42593821-42593972
  hypo

SEQ ID NO: 368550 - DNA, 90 bp, Homo sapiens; identical to SEQ ID NO: 356389
  chr21:42613666-42613756
  hypo

SEQ ID NO: 368551 - DNA, 82 bp, Homo sapiens; identical to SEQ ID NO: 356390
  chr21:42613819-42613901
  hypo

SEQ ID NO: 368552 - DNA, 146 bp, Homo sapiens; identical to SEQ ID NO: 346249
  chr21:42617817-42617963
  hypo

SEQ ID NO: 368553 - DNA, 92 bp, Homo sapiens; identical to SEQ ID NO: 346250
  chr21:42617995-42618087
  hypo

SEQ ID NO: 368554 - DNA, 211 bp, Homo sapiens; identical to SEQ ID NO: 344491
  chr21:42629074-42629285
  hypo

SEQ ID NO: 368555 - DNA, 824 bp, Homo sapiens; identical to SEQ ID NO: 356394
  chr21:43160967-43161791
  hypo

SEQ ID NO: 368556 - DNA, 283 bp, Homo sapiens; identical to SEQ ID NO: 344495
  chr21:43161857-43162140
  hypo

SEQ ID NO: 368557 - DNA, 317 bp, Homo sapiens; identical to SEQ ID NO: 344496
  chr21:43162557-43162874
  hypo

SEQ ID NO: 368558 - DNA, 157 bp, Homo sapiens; identical to SEQ ID NO: 344499
  chr21:43168170-43168327
  hypo

SEQ ID NO: 368559 - DNA, 375 bp, Homo sapiens; identical to SEQ ID NO: 346251
  chr21:43239707-43240082
  hypo

SEQ ID NO: 368560 - DNA, 243 bp, Homo sapiens; identical to SEQ ID NO: 346252
  chr21:43240112-43240355
  hypo

SEQ ID NO: 368561 - DNA, 219 bp, Homo sapiens; identical to SEQ ID NO: 344502
  chr21:43273205-43273424
  hypo

SEQ ID NO: 368562 - DNA, 396 bp, Homo sapiens; identical to SEQ ID NO: 356399
  chr21:43547667-43548063
  hypo

SEQ ID NO: 368563 - DNA, 516 bp, Homo sapiens; identical to SEQ ID NO: 344507
  chr21:43791392-43791908
  hypo

SEQ ID NO: 368564 - DNA, 239 bp, Homo sapiens; identical to SEQ ID NO: 356401
  chr21:43991061-43991300
  hypo

SEQ ID NO: 368565 - DNA, 205 bp, Homo sapiens; identical to SEQ ID NO: 356402
  chr21:43991493-43991698
  hypo

SEQ ID NO: 368566 - DNA, 114 bp, Homo sapiens; identical to SEQ ID NO: 356403
  chr21:44110034-44110148
  hypo

SEQ ID NO: 368567 - DNA, 562 bp, Homo sapiens
  chr21:44112757-44113319
  hypo
cgaggctggcccgggacacgccactgatgctcttctgacccaggggcttttctctcccgcttccgtccctcttccctcgccggcaggtgacgttactggccttttcttttttggccctgcctcccccttggcttctcccctcttcctctcctccactcggtgcctggtgacatgcggccatcctcagagatgtgcttcggggcccgcacgccttgctcctcgcactcttcctgcaccggagccgcggtgcgaggcctcgggaatgctcaccgtttctctcccgccccccggccgcatgctgcagccattccctcaccacatgtccaggagggagccggcatcctttgctgactttcttgctgtgactatggtgctgcgtggaaaaggggccgtgggaaggctgggcaggtggctgctcagagccccacctgacacggtgacccacggggcctggaaattcactgccccgatttccacacaggtgcctgagctcctgcagagaatgcctgagagcgagacgcatgcccgtcaatttgtgctttcaggcgtcctaagcacacac

SEQ ID NO: 368568 - DNA, 467 bp, Homo sapiens; identical to SEQ ID NO: 356404
  chr21:44180227-44180694
  hypo

SEQ ID NO: 368569 - DNA, 119 bp, Homo sapiens; identical to SEQ ID NO: 346254
  chr21:44338552-44338671
  hypo

SEQ ID NO: 368570 - DNA, 209 bp, Homo sapiens; identical to SEQ ID NO: 344516
  chr21:44444714-44444923
  hypo

SEQ ID NO: 368571 - DNA, 330 bp, Homo sapiens; identical to SEQ ID NO: 344517
  chr21:44448081-44448411
  hypo

SEQ ID NO: 368572 - DNA, 128 bp, Homo sapiens; identical to SEQ ID NO: 344518
  chr21:44451419-44451547
  hypo

SEQ ID NO: 368573 - DNA, 38 bp, Homo sapiens
  chr21:44482534-44482572
  hypo
cgtgggagccgctcccacgtgaccaagagggtgaacag

SEQ ID NO: 368574 - DNA, 205 bp, Homo sapiens; identical to SEQ ID NO: 328801
  chr21:44482687-44482892
  hypo

SEQ ID NO: 368575 - DNA, 159 bp, Homo sapiens
  chr21:44482954-44483113
  hypo
tgtttcagtggagaagctggttggggcccagggtcagccaggctccccagtgtgagggtgagttacaggctgcaccggcactgtggccgggctctggactcgacctaccgtcctgtccagcaccgtggggatgaagtcgtagccgatcccttccacctc

SEQ ID NO: 368576 - DNA, 165 bp, Homo sapiens; identical to SEQ ID NO: 328822
  chr21:44837213-44837378
  hypo

SEQ ID NO: 368577 - DNA, 320 bp, Homo sapiens; identical to SEQ ID NO: 344523
  chr21:44840079-44840399
  hypo

SEQ ID NO: 368578 - DNA, 179 bp, Homo sapiens
  chr21:44840677-44840856
  hypo
cggggacggcaggcgcaaggcacaagcctgtgcagcaagggcacccgtccaccctcgaaatagggcactgagaaggcatccatgggctgggtttctcccgcagcccacagtaacctgggcctgattcccagactcaacaaggactcagaagccagccacgaaggggctgcaggagacac

SEQ ID NO: 368579 - DNA, 81 bp, Homo sapiens
  chr21:44841527-44841608
  hypo
gatgtccatgttgccatccagcaggaggttctcggtcttgaggtcccggtggacgatgtgatggtcgtgacagtactccac

SEQ ID NO: 368580 - DNA, 33 bp, Homo sapiens; identical to SEQ ID NO: 352569
  chr21:44847478-44847511
  hypo

SEQ ID NO: 368581 - DNA, 132 bp, Homo sapiens
  chr21:45140928-45141060
  hypo
cacggcatccttacctgtgggctccacagggttccatgcaggcattttgctcccataccccgatgtccaagcccggctggacaaggagaagcaatgtgatgaccgaggggctgagatggctggagacccagc

SEQ ID NO: 368582 - DNA, 932 bp, Homo sapiens; identical to SEQ ID NO: 344530
  chr21:45175388-45176320
  hypo

SEQ ID NO: 368583 - DNA, 147 bp, Homo sapiens; identical to SEQ ID NO: 328856
  chr21:45233002-45233149
  hypo

SEQ ID NO: 368584 - DNA, 56 bp, Homo sapiens
  chr21:45289958-45290014
  hypo
cggcacgggcgggcgggattttggattagttttaggaagcgaaccacagccgtcct

SEQ ID NO: 368585 - DNA, 69 bp, Homo sapiens
  chr21:45290044-45290113
  hypo
gctggtgcagggaggcgaagtgctggtgttctgggaattttcaaatgcactacagcgatcaggacacac

SEQ ID NO: 368586 - DNA, 703 bp, Homo sapiens; identical to SEQ ID NO: 344535
  chr21:45345807-45346510
  hypo

SEQ ID NO: 368587 - DNA, 51 bp, Homo sapiens
  chr21:45352895-45352946
  hypo
cgctctctctccctcacagcgtgccaggtgccttttctctgcgttctcgtc

SEQ ID NO: 368588 - DNA, 500 bp, Homo sapiens; identical to SEQ ID NO: 220455
  chr21:45353002-45353502
  hypo

SEQ ID NO: 368589 - DNA, 85 bp, Homo sapiens
  chr21:45353564-45353649
  hypo
aatgtgggaggggcagcacaggggaaaggtgaggggagagtcaggagagaaggacgccgcataccagatgcccagaggccccggc

SEQ ID NO: 368590 - DNA, 100 bp, Homo sapiens; identical to SEQ ID NO: 356411
  chr21:45374905-45375005
  hypo

SEQ ID NO: 368591 - DNA, 642 bp, Homo sapiens; identical to SEQ ID NO: 349066
  chr21:45400182-45400824
  hypo

SEQ ID NO: 368592 - DNA, 278 bp, Homo sapiens; identical to SEQ ID NO: 349067
  chr21:45400854-45401132
  hypo

SEQ ID NO: 368593 - DNA, 105 bp, Homo sapiens; identical to SEQ ID NO: 344539
  chr21:45499846-45499951
  hypo

SEQ ID NO: 368594 - DNA, 40 bp, Homo sapiens
  chr21:45508577-45508617
  hypo
cgcgcagcactggtggcacctgtgctatgtgccgtgttat

SEQ ID NO: 368595 - DNA, 224 bp, Homo sapiens
  chr21:45508695-45508919
  hypo
tgctgtgtgccatgttatcccactcttccctgacactggcggcacctgtgctatgtgccgtgttatcctctcttccctggcgctggcggcacctgtgctgtgtgccgtgttatcccactcttctctggcgctggcggcacctgtgctgtgtgccgtgttatcctcttttccctggcactggcggcacctgtgctgtgtgccgtgttaccccgctcttccctggc

SEQ ID NO: 368596 - DNA, 162 bp, Homo sapiens; identical to SEQ ID NO: 344541
  chr21:45513811-45513973
  hypo

SEQ ID NO: 368597 - DNA, 326 bp, Homo sapiens; identical to SEQ ID NO: 344543
  chr21:45518831-45519157
  hypo

SEQ ID NO: 368598 - DNA, 98 bp, Homo sapiens; identical to SEQ ID NO: 344545
  chr21:45617247-45617345
  hypo

SEQ ID NO: 368599 - DNA, 53 bp, Homo sapiens; identical to SEQ ID NO: 344546
  chr21:45621745-45621798
  hypo

SEQ ID NO: 368600 - DNA, 236 bp, Homo sapiens; identical to SEQ ID NO: 344547
  chr21:45628864-45629100
  hypo

SEQ ID NO: 368601 - DNA, 156 bp, Homo sapiens
  chr21:45656872-45657028
  hypo
cgccccgcagcatgccggccggtgacatcagggctcggttccggtagcggctgtccacgttttccaaggagctgttctgtgggatgtggtaggtcaccacggttttcgactcactggtttgccaatatacgtaaacatcatttaaatcaaaacggc

SEQ ID NO: 368602 - DNA, 269 bp, Homo sapiens; identical to SEQ ID NO: 328925
  chr21:45750126-45750395
  hypo

SEQ ID NO: 368603 - DNA, 245 bp, Homo sapiens
  chr21:45790621-45790866
  hypo
cggcggggtcggactggaccagctgttgggctttgtttgctctttttacgaattgaaaaactgaagccaggagcggctgggtgacgtcccaggtcactccttactttcctccccacgctgagctcagacgacttcccgtgacaccactgttggtggcggaatgggactgtggctgcttccgctcagccacgctccctctctgtggacggcggagggtgtgtgtcccagcccggctgccgccctcc

SEQ ID NO: 368604 - DNA, 58 bp, Homo sapiens
  chr21:45791167-45791225
  hypo
tctgcctccgtgtcccgtggccgcctccctccagtgtctgcctccgtgtcccgtggcc

SEQ ID NO: 368605 - DNA, 226 bp, Homo sapiens; identical to SEQ ID NO: 344552
  chr21:45834132-45834358
  hypo

SEQ ID NO: 368606 - DNA, 468 bp, Homo sapiens; identical to SEQ ID NO: 344553
  chr21:45941802-45942270
  hypo

SEQ ID NO: 368607 - DNA, 285 bp, Homo sapiens
  chr21:46155048-46155333
  hypo
cggcggcaagtcacgagcagggcgtcactgtcccagcgcggcttcccagcctcctgcaggggccagggttggggtgcattctctgtcttctcagtgaggacgcgcaaatgttccaggatggaagataaatgttcaggaaaacgaggacccagaaattcttcatgggctgcatgagccctgaggcccgactggcaggccactgaggtcacctgaaaaactggtgacaacgggcgggctcagcggctacccggggacaatcacggcaggcggaagagcggcactggc

SEQ ID NO: 368608 - DNA, 97 bp, Homo sapiens
  chr21:46206226-46206323
  hypo
tgaggacagcccagactgtgggactcgccatccatctcataactgccttgggggccacattacacacaaacacagattccagaaaccttcagacacc

SEQ ID NO: 368609 - DNA, 173 bp, Homo sapiens; identical to SEQ ID NO: 344560
  chr21:46270497-46270670
  hypo

SEQ ID NO: 368610 - DNA, 106 bp, Homo sapiens; identical to SEQ ID NO: 356418
  chr21:46277475-46277581
  hypo

SEQ ID NO: 368611 - DNA, 45 bp, Homo sapiens; identical to SEQ ID NO: 356419
  chr21:46277614-46277659
  hypo

SEQ ID NO: 368612 - DNA, 42 bp, Homo sapiens; identical to SEQ ID NO: 356420
  chr21:46311711-46311753
  hypo

SEQ ID NO: 368613 - DNA, 160 bp, Homo sapiens; identical to SEQ ID NO: 356421
  chr21:46316870-46317030
  hypo

SEQ ID NO: 368614 - DNA, 175 bp, Homo sapiens; identical to SEQ ID NO: 356422
  chr21:46317252-46317427
  hypo

SEQ ID NO: 368615 - DNA, 60 bp, Homo sapiens; identical to SEQ ID NO: 356423
  chr21:46319505-46319565
  hypo

SEQ ID NO: 368616 - DNA, 643 bp, Homo sapiens
  chr21:46320233-46320876
  hypo
cgaattcgttgctcctcttgtacaagttgtcctccaggtgacagcggccgtcgttgggggtcaggatggcgcccagcttcccgtcgcccgcgaaatggaagccgtcatcagtggcaaacaccagcagccgcgtgacgttgcgccagccgatttcctcctgagaagaaggcgtggggggcagggttacctgcctcagtttcccagacccggccctctggagcagaggagacgatgcagagctggtggggtggcccggaggctggtgtgggtccccctttcccctgggtctcagggacccagctgtgttcccccagacgccacgcccaggaggagacaacggccctcaaacaccccgtgcacatgtgaggcgcagggagtggaggcacgtgtggaaaggcaaggagagagacacggctgcggtccctgcacttcagagctgggaacaaaccctcaggaaaccatccccaaggggaaaaaccctcgcagacgtgtgggccacacgcagaacgagtgcaacatggaggaaaacgagcctgaggggcccagcaggccttgagtccaccattgacagcccctggcaggcgcatgtgggggccgtgcgtgtcctaggctgtgacctcacactcgtgagcagtgtgtctgc

SEQ ID NO: 368617 - DNA, 663 bp, Homo sapiens
  chr21:46323288-46323951
  hypo
cggactcggtgatctcgttgagggcccggagcaggtcgccacctagcttcttgacattcctgaggtcatcaagcatggagtaggagaggtccatcagatagtacaggtcgatggggtagcccttggcccgccggaaggtcacgttgaacgctgctgcctggcctgccggtggggacagaacaaaaggagccacacctcacatctcacacagggtgtctgggggcgtgtggccccgagcgggctgtgcactggcaccctctcctccagcccccaaatcctcctgacctcccctctccccgcctggcaggagagctgaggaccagacacaggacatccaggcaggctggagtttcagaggaaggacatgactcccggacgcaggcatgtgcctcgcagtgacactgaaacccgcctggggtgcttagagttgacgccagcgacattggggacgcctttcattgagagtggcagcggctcacctgggctcacacctaacccggccccatgcctgcagtcccacgggcgccctcatcagcagccacatagacaggcatcacacgaacctggcacttcccagcaaggcccacgcgggccgtccccaggaggcccctttctccatcccagccctggacttccgctcgcccgcgtctcagtcacacgtgc

SEQ ID NO: 368618 - DNA, 218 bp, Homo sapiens; identical to SEQ ID NO: 344569
  chr21:46324938-46325156
  hypo

SEQ ID NO: 368619 - DNA, 422 bp, Homo sapiens; identical to SEQ ID NO: 344570
  chr21:46326574-46326996
  hypo

SEQ ID NO: 368620 - DNA, 216 bp, Homo sapiens; identical to SEQ ID NO: 295181
  chr21:46351437-46351653
  hypo

SEQ ID NO: 368621 - DNA, 394 bp, Homo sapiens; identical to SEQ ID NO: 295182
  chr21:46352279-46352673
  hypo

SEQ ID NO: 368622 - DNA, 278 bp, Homo sapiens; identical to SEQ ID NO: 356427
  chr21:46397986-46398264
  hypo

SEQ ID NO: 368623 - DNA, 771 bp, Homo sapiens
  chr21:46492439-46493210
  hypo
cctggggagatggagggaagcaccatggggatttgctttttcttgctgccgacggagcccagccaccacgggagggaggcccggccagcctgcggtgggtgggtgacatgtggcccggatctgcccggggcgcctgcctgtaagtgggcccagcagacaccccatggagccgaggcaagccgtcccagctgaaccggcttaagctgcaggcccacagagtcatgagcagtgaagagaggttttcgccctctgaggtttggggtggcctgttacacagaaatacacacaacgtcctcaggcacgtatctctttaagaatgtgtcccgagaaggcgtcccaggagtcttgatttttatttagccgtccacggttgcccctttgggtgcttcgccttcagatggggtgaagggctcacttgttagctggctggccccaaagacaggcttgttttccaccaggcagtgactgaagccggcagcctgctgcataccgcgggccttcccctgacctgtccgggactgcgggctggcggctgacacctgcggagtgcttaccgcataccaggctcccaaacttccatctgtgttcgtcttttaagttttgttgttttccagagtcggagtctcagtgttgcccgggccagagcgcagcggccatttataggcgcggacctcggcctcgcacaccacagctccagctctgagacacaagcgacccgcacccccccaccgcccagccccagcctccagactggctgagatcacagtgtgc

SEQ ID NO: 368624 - DNA, 262 bp, Homo sapiens; identical to SEQ ID NO: 344578
  chr21:46748053-46748315
  hypo

SEQ ID NO: 368625 - DNA, 634 bp, Homo sapiens; identical to SEQ ID NO: 344579
  chr21:46779388-46780022
  hypo

SEQ ID NO: 368626 - DNA, 184 bp, Homo sapiens; identical to SEQ ID NO: 344580
  chr21:46799934-46800118
  hypo

SEQ ID NO: 368627 - DNA, 347 bp, Homo sapiens; identical to SEQ ID NO: 362009
  chr21:46800403-46800750
  hypo

SEQ ID NO: 368628 - DNA, 304 bp, Homo sapiens; identical to SEQ ID NO: 362010
  chr21:46800780-46801084
  hypo

SEQ ID NO: 368629 - DNA, 214 bp, Homo sapiens; identical to SEQ ID NO: 336588
  chr21:46801338-46801552
  hypo

SEQ ID NO: 368630 - DNA, 571 bp, Homo sapiens; identical to SEQ ID NO: 356429
  chr21:46801817-46802388
  hypo

SEQ ID NO: 368631 - DNA, 177 bp, Homo sapiens; identical to SEQ ID NO: 344584
  chr21:46802668-46802845
  hypo

SEQ ID NO: 368632 - DNA, 140 bp, Homo sapiens; identical to SEQ ID NO: 356431
  chr21:46808694-46808834
  hypo

SEQ ID NO: 368633 - DNA, 339 bp, Homo sapiens; identical to SEQ ID NO: 344587
  chr21:46811012-46811351
  hypo

SEQ ID NO: 368634 - DNA, 333 bp, Homo sapiens; identical to SEQ ID NO: 346256
  chr21:46811998-46812331
  hypo

SEQ ID NO: 368635 - DNA, 81 bp, Homo sapiens; identical to SEQ ID NO: 346257
  chr21:46812995-46813076
  hypo

SEQ ID NO: 368636 - DNA, 192 bp, Homo sapiens; identical to SEQ ID NO: 346258
  chr21:46813106-46813298
  hypo

SEQ ID NO: 368637 - DNA, 265 bp, Homo sapiens; identical to SEQ ID NO: 344590
  chr21:46813682-46813947
  hypo

SEQ ID NO: 368638 - DNA, 391 bp, Homo sapiens; identical to SEQ ID NO: 344591
  chr21:46834432-46834823
  hypo

SEQ ID NO: 368639 - DNA, 499 bp, Homo sapiens; identical to SEQ ID NO: 344592
  chr21:46835379-46835878
  hypo

SEQ ID NO: 368640 - DNA, 168 bp, Homo sapiens
  chr21:46838491-46838659
  hypo
cggcggttcccacctgctctgcacagcccgcctcgtgcacctgctgaccccaccgtgtccacagcccgccctccttggctcacatctcttcctggggtctcagggaagcggcacctcctcaggggcctcccagccacctcacgtcacttcctggggtctcagggcagc

SEQ ID NO: 368641 - DNA, 261 bp, Homo sapiens; identical to SEQ ID NO: 346259
  chr21:46839249-46839510
  hypo

SEQ ID NO: 368642 - DNA, 139 bp, Homo sapiens; identical to SEQ ID NO: 356439
  chr21:46842404-46842543
  hypo

SEQ ID NO: 368643 - DNA, 324 bp, Homo sapiens; identical to SEQ ID NO: 349077
  chr21:46844304-46844628
  hypo

SEQ ID NO: 368644 - DNA, 448 bp, Homo sapiens; identical to SEQ ID NO: 220526
  chr21:46844763-46845211
  hypo

SEQ ID NO: 368645 - DNA, 67 bp, Homo sapiens
  chr21:46848505-46848572
  hypo
cgccggagagagggagccctgggccatcacgcagccaccgcccggccccaagaacctgcgagtccac

SEQ ID NO: 368646 - DNA, 670 bp, Homo sapiens; identical to SEQ ID NO: 344602
  chr21:46849594-46850264
  hypo

SEQ ID NO: 368647 - DNA, 786 bp, Homo sapiens; identical to SEQ ID NO: 344603
  chr21:46861383-46862169
  hypo

SEQ ID NO: 368648 - DNA, 107 bp, Homo sapiens; identical to SEQ ID NO: 356444
  chr21:46862420-46862527
  hypo

SEQ ID NO: 368649 - DNA, 294 bp, Homo sapiens
  chr21:46863364-46863658
  hypo
cggcatcgcagcagagtcccggtggtggagatgctttgccactggccacccagagctaggagcctcggccaagggctccctccttgcactgtggtctctcgggacctaggaggtcccggggtgtggactgtgctgaactgttctccgacaggcggccctttttctcccacgtgggcgaaaagtgaagcctctgggtggtcctgtacctgtctgtcacatcccgggctgcagccgggtccccagggaggcctccgtgaaaacacaaatcaagtgccaatttcctggtgaagagtc

SEQ ID NO: 368650 - DNA, 44 bp, Homo sapiens; identical to SEQ ID NO: 220533
  chr21:46863708-46863752
  hypo

SEQ ID NO: 368651 - DNA, 54 bp, Homo sapiens; identical to SEQ ID NO: 346261
  chr21:46864076-46864130
  hypo

SEQ ID NO: 368652 - DNA, 297 bp, Homo sapiens; identical to SEQ ID NO: 344607
  chr21:46870768-46871065
  hypo

SEQ ID NO: 368653 - DNA, 307 bp, Homo sapiens; identical to SEQ ID NO: 344608
  chr21:46885721-46886028
  hypo

SEQ ID NO: 368654 - DNA, 274 bp, Homo sapiens; identical to SEQ ID NO: 344609
  chr21:46886377-46886651
  hypo

SEQ ID NO: 368655 - DNA, 222 bp, Homo sapiens; identical to SEQ ID NO: 344610
  chr21:46893658-46893880
  hypo

SEQ ID NO: 368656 - DNA, 277 bp, Homo sapiens; identical to SEQ ID NO: 346263
  chr21:46894494-46894771
  hypo

SEQ ID NO: 368657 - DNA, 257 bp, Homo sapiens; identical to SEQ ID NO: 220538
  chr21:46894910-46895167
  hypo

SEQ ID NO: 368658 - DNA, 215 bp, Homo sapiens; identical to SEQ ID NO: 220539
  chr21:46895491-46895706
  hypo

SEQ ID NO: 368659 - DNA, 575 bp, Homo sapiens; identical to SEQ ID NO: 346266
  chr21:46895736-46896311
  hypo

SEQ ID NO: 368660 - DNA, 866 bp, Homo sapiens; identical to SEQ ID NO: 344612
  chr21:46900291-46901157
  hypo

SEQ ID NO: 368661 - DNA, 251 bp, Homo sapiens; identical to SEQ ID NO: 356454
  chr21:46901458-46901709
  hypo

SEQ ID NO: 368662 - DNA, 1234 bp, Homo sapiens; identical to SEQ ID NO: 344614
  chr21:46906455-46907689
  hypo

SEQ ID NO: 368663 - DNA, 310 bp, Homo sapiens
  chr21:46910337-46910647
  hypo
cgagatgtgccctcccgggtccctgggtctccatgtgccctcgtgggtccctgggcctccgtgtgccctcccgggtctctgggcctccgtgtgcccactcccgggtctctgggcctccgtgtgccctcctgggtctccgtgtgccctctcaggtccctgggcctccgtgtgccctcccgggtccctgggccttcgtgtgccctcccaggtctctgggcctccgtgtgcccactcccggagcgccaggagttaagtataagtctccgtcagggctcttggtggctgcctccctcccaggccccagccggtc

SEQ ID NO: 368664 - DNA, 616 bp, Homo sapiens; identical to SEQ ID NO: 344616
  chr21:46911022-46911638
  hypo

SEQ ID NO: 368665 - DNA, 755 bp, Homo sapiens; identical to SEQ ID NO: 220545
  chr21:46912528-46913283
  hypo

SEQ ID NO: 368666 - DNA, 319 bp, Homo sapiens; identical to SEQ ID NO: 346270
  chr21:46913360-46913679
  hypo

SEQ ID NO: 368667 - DNA, 469 bp, Homo sapiens; identical to SEQ ID NO: 356459
  chr21:46914465-46914934
  hypo

SEQ ID NO: 368668 - DNA, 395 bp, Homo sapiens; identical to SEQ ID NO: 344619
  chr21:46918218-46918613
  hypo

SEQ ID NO: 368669 - DNA, 222 bp, Homo sapiens
  chr21:46918891-46919113
  hypo
cgagggctccgagggctctagagggaacagtgtttgcaggcggaatggctgatgctcttccaaagccaaggaaggctcagagcattcccctcattcgaaggatcaacaattagagtgacgagatttctcaacaaaacgggagaagccagaagaccataaatggtttccaaaatatccaagaaagtcaattgccagtgtagactccgacagccagtggtactc

SEQ ID NO: 368670 - DNA, 229 bp, Homo sapiens; identical to SEQ ID NO: 329091
  chr21:46919143-46919372
  hypo

SEQ ID NO: 368671 - DNA, 300 bp, Homo sapiens; identical to SEQ ID NO: 344621
  chr21:46924382-46924682
  hypo

SEQ ID NO: 368672 - DNA, 42 bp, Homo sapiens
  chr21:46925925-46925967
  hypo
gccgcctcctggggcttaaggaaggcgagaggctcaggcccc

SEQ ID NO: 368673 - DNA, 59 bp, Homo sapiens
  chr21:46934012-46934071
  hypo
cggagggagcaggccctcaggttggggaggcgctgggaggaggattctgatggcggtgt

SEQ ID NO: 368674 - DNA, 390 bp, Homo sapiens; identical to SEQ ID NO: 346272
  chr21:46935349-46935739
  hypo

SEQ ID NO: 368675 - DNA, 132 bp, Homo sapiens; identical to SEQ ID NO: 344625
  chr21:46958789-46958921
  hypo

SEQ ID NO: 368676 - DNA, 55 bp, Homo sapiens; identical to SEQ ID NO: 352575
  chr21:47062898-47062953
  hypo

SEQ ID NO: 368677 - DNA, 142 bp, Homo sapiens; identical to SEQ ID NO: 345651
  chr21:47063290-47063432
  hypo

SEQ ID NO: 368678 - DNA, 387 bp, Homo sapiens; identical to SEQ ID NO: 344629
  chr21:47285233-47285620
  hypo

SEQ ID NO: 368679 - DNA, 539 bp, Homo sapiens; identical to SEQ ID NO: 344631
  chr21:47369859-47370398
  hypo

SEQ ID NO: 368680 - DNA, 504 bp, Homo sapiens; identical to SEQ ID NO: 356465
  chr21:47413791-47414295
  hypo

SEQ ID NO: 368681 - DNA, 44 bp, Homo sapiens; identical to SEQ ID NO: 356466
  chr21:47414327-47414371
  hypo

SEQ ID NO: 368682 - DNA, 209 bp, Homo sapiens
  chr21:47414718-47414927
  hypo
cgcaggctgggctgggccgttgcatcctcccggagctcacctgccccacggggacaggaaggcctccacacggtcacgcccggagacagcaagtctgtgctcccgagcttgtctgcttctgtggacaaatcgaccttacggctccatgtgcgcagctgcccacacaccgagcacaaggccagaccctgggcacggcagctgtctcagac

SEQ ID NO: 368683 - DNA, 307 bp, Homo sapiens
  chr21:47475683-47475990
  hypo
cgtggtgggagctgggccgagggtcaggcctggaggtggtgcccatcactgggtcccgctcaagagagaagaggctgggaagccaggtgcagctgtgtgcccacaggcgggtgagacaggactgggcctggatcccgcacccgctcgccgcgcagctcagcgcaagcggcctccgggggcctcctctctgcaaggggagcgcgcgcccggccctgaccctgcctgctgattctctggaaggttcatgtccgggactcctcggtgaccctgggcagagccacccacatgcgctgcctcccctcccacc

SEQ ID NO: 368684 - DNA, 115 bp, Homo sapiens
  chr21:47489821-47489936
  hypo
cgatggcactttctgtaggccgcagaggtaggggccgcagagccaagcttgctagcatccatgggacgctgaggccccaaataatagagaccagatggcagcgcttacccccagg

SEQ ID NO: 368685 - DNA, 51 bp, Homo sapiens
  chr21:47532134-47532185
  hypo
aagaacctgcagggcatcagctccttccgccgcggcaccttcaccgactgc

SEQ ID NO: 368686 - DNA, 384 bp, Homo sapiens; identical to SEQ ID NO: 349095
  chr21:47602705-47603089
  hypo

SEQ ID NO: 368687 - DNA, 276 bp, Homo sapiens; identical to SEQ ID NO: 344643
  chr21:47640150-47640426
  hypo

SEQ ID NO: 368688 - DNA, 273 bp, Homo sapiens; identical to SEQ ID NO: 362015
  chr21:47649460-47649733
  hypo

SEQ ID NO: 368689 - DNA, 67 bp, Homo sapiens; identical to SEQ ID NO: 346274
  chr21:47689571-47689638
  hypo

SEQ ID NO: 368690 - DNA, 129 bp, Homo sapiens; identical to SEQ ID NO: 346275
  chr21:47689700-47689829
  hypo

SEQ ID NO: 368691 - DNA, 188 bp, Homo sapiens; identical to SEQ ID NO: 356471
  chr21:47799620-47799808
  hypo

SEQ ID NO: 368692 - DNA, 731 bp, Homo sapiens; identical to SEQ ID NO: 344649
  chr21:47832850-47833581
  hypo

SEQ ID NO: 368693 - DNA, 221 bp, Homo sapiens; identical to SEQ ID NO: 344651
  chr21:47872870-47873091
  hypo

SEQ ID NO: 368694 - DNA, 67 bp, Homo sapiens; identical to SEQ ID NO: 356473
  chr21:47918529-47918596
  hypo

SEQ ID NO: 368695 - DNA, 106 bp, Homo sapiens; identical to SEQ ID NO: 344655
  chr22:18084157-18084263
  hypo

SEQ ID NO: 368696 - DNA, 118 bp, Homo sapiens; identical to SEQ ID NO: 356475
  chr22:18265358-18265476
  hypo

SEQ ID NO: 368697 - DNA, 196 bp, Homo sapiens; identical to SEQ ID NO: 356476
  chr22:18265523-18265719
  hypo

SEQ ID NO: 368698 - DNA, 145 bp, Homo sapiens
  chr22:18287371-18287516
  hypo
cgctatgtaatttccacgcctgagatgcagactgggcactgccgagaggctgggcttgagcaggcggtcctcatctccccagaatcataaagacacacagagcacagcactcggccgccatggtgttgccctctctccaaacccc

SEQ ID NO: 368699 - DNA, 44 bp, Homo sapiens; identical to SEQ ID NO: 356477
  chr22:18328049-18328093
  hypo

SEQ ID NO: 368700 - DNA, 537 bp, Homo sapiens; identical to SEQ ID NO: 356478
  chr22:18340868-18341405
  hypo

SEQ ID NO: 368701 - DNA, 289 bp, Homo sapiens; identical to SEQ ID NO: 356479
  chr22:18348544-18348833
  hypo

SEQ ID NO: 368702 - DNA, 542 bp, Homo sapiens; identical to SEQ ID NO: 344661
  chr22:18443260-18443802
  hypo

SEQ ID NO: 368703 - DNA, 426 bp, Homo sapiens
  chr22:18619428-18619854
  hypo
cgaacacatgttctgatccacctgaggcaaaaggcgcccctgtggagcccagcacgtctgtgtgggaggaaccgcctggaggagcagagagcaaagcaaaggggcttggggcggaacacgacgggagtggcaggagcagccagcgggaagccagggagagggtttggagatcagccagtcgcgggcaggggtaggcaaaacctgtaggttcctgtggacgccctggaattgtgcagttacttctgagtgaggcatgaaaccagtgagttctgaggagacaactaacgctgcaatttaatttccagttaacctgtggagcttcagaagctctcactcacaactgggatattaacaaggtcggatccggagggaagtccctcagcacatagagcatgaagtgtgcacccccccgtgcagcaagtccac

SEQ ID NO: 368704 - DNA, 129 bp, Homo sapiens; identical to SEQ ID NO: 352578
  chr22:19706042-19706171
  hypo

SEQ ID NO: 368705 - DNA, 175 bp, Homo sapiens; identical to SEQ ID NO: 356482
  chr22:19771495-19771670
  hypo

SEQ ID NO: 368706 - DNA, 218 bp, Homo sapiens; identical to SEQ ID NO: 356483
  chr22:19771889-19772107
  hypo

SEQ ID NO: 368707 - DNA, 406 bp, Homo sapiens; identical to SEQ ID NO: 344666
  chr22:19830509-19830915
  hypo

SEQ ID NO: 368708 - DNA, 381 bp, Homo sapiens; identical to SEQ ID NO: 329264
  chr22:19839604-19839985
  hypo

SEQ ID NO: 368709 - DNA, 88 bp, Homo sapiens; identical to SEQ ID NO: 344669
  chr22:19924393-19924481
  hypo

SEQ ID NO: 368710 - DNA, 388 bp, Homo sapiens; identical to SEQ ID NO: 344671
  chr22:19968748-19969136
  hypo

SEQ ID NO: 368711 - DNA, 118 bp, Homo sapiens; identical to SEQ ID NO: 356486
  chr22:20228961-20229079
  hypo

SEQ ID NO: 368712 - DNA, 155 bp, Homo sapiens; identical to SEQ ID NO: 356487
  chr22:20229239-20229394
  hypo

SEQ ID NO: 368713 - DNA, 210 bp, Homo sapiens; identical to SEQ ID NO: 356488
  chr22:20929364-20929574
  hypo

SEQ ID NO: 368714 - DNA, 187 bp, Homo sapiens; identical to SEQ ID NO: 344676
  chr22:21011052-21011239
  hypo

SEQ ID NO: 368715 - DNA, 69 bp, Homo sapiens; identical to SEQ ID NO: 362021
  chr22:21386510-21386579
  hypo

SEQ ID NO: 368716 - DNA, 201 bp, Homo sapiens; identical to SEQ ID NO: 344679
  chr22:21977477-21977678
  hypo

SEQ ID NO: 368717 - DNA, 46 bp, Homo sapiens; identical to SEQ ID NO: 356490
  chr22:21983041-21983087
  hypo

SEQ ID NO: 368718 - DNA, 66 bp, Homo sapiens; identical to SEQ ID NO: 344682
  chr22:22029114-22029180
  hypo

SEQ ID NO: 368719 - DNA, 212 bp, Homo sapiens; identical to SEQ ID NO: 356492
  chr22:22036173-22036385
  hypo

SEQ ID NO: 368720 - DNA, 97 bp, Homo sapiens; identical to SEQ ID NO: 356493
  chr22:22057979-22058076
  hypo

SEQ ID NO: 368721 - DNA, 354 bp, Homo sapiens; identical to SEQ ID NO: 336607
  chr22:22292773-22293127
  hypo

SEQ ID NO: 368722 - DNA, 192 bp, Homo sapiens; identical to SEQ ID NO: 344688
  chr22:22324565-22324757
  hypo

SEQ ID NO: 368723 - DNA, 136 bp, Homo sapiens; identical to SEQ ID NO: 345653
  chr22:22862472-22862608
  hypo

SEQ ID NO: 368724 - DNA, 134 bp, Homo sapiens; identical to SEQ ID NO: 349101
  chr22:22899978-22900112
  hypo

SEQ ID NO: 368725 - DNA, 116 bp, Homo sapiens; identical to SEQ ID NO: 356497
  chr22:23437460-23437576
  hypo

SEQ ID NO: 368726 - DNA, 74 bp, Homo sapiens; identical to SEQ ID NO: 356498
  chr22:23437631-23437705
  hypo

SEQ ID NO: 368727 - DNA, 90 bp, Homo sapiens
  chr22:23453477-23453567
  hypo
cgtggctggctctgtaccgagcagggggtgcggccacaaatctccaagcccaggccaggggagagaggcaagcgcactggactcggttcc

SEQ ID NO: 368728 - DNA, 499 bp, Homo sapiens
  chr22:23800960-23801459
  hypo
ggggagggttcccagagggctgccgggcgaagggagtcctttccaaaacggtttcctgagctctgatgcacacacatgcagctcacccccaagtctagcgttccattagtctaccgttccgttcttcccagcacattcggtgcgcagccgcgaccagtctaaccgtggcacctttccaccggccctgagccctggcgtgcccctccacgacatcccctgggcacggagttgtgtcgacaggtctctgtgactggctgggcatgttttcggggtttgcccgcggggcagcgtgtctcagagtttggctgtacgaagcggtgttgacgggtaaacccggttttgtctctccctccggcggttgagggctggttccgcgttccatctgttagtgatgggatcgtgttgccgtggacgtccgtgccgaggtctgtgtgtggacagcgctcagaccccctggctgcgcgcccgggcgtgtgctgggcccatggactctgcgttc

SEQ ID NO: 368729 - DNA, 151 bp, Homo sapiens; identical to SEQ ID NO: 356499
  chr22:24179789-24179940
  hypo

SEQ ID NO: 368730 - DNA, 226 bp, Homo sapiens; identical to SEQ ID NO: 356500
  chr22:24179982-24180208
  hypo

SEQ ID NO: 368731 - DNA, 187 bp, Homo sapiens; identical to SEQ ID NO: 295268
  chr22:24552924-24553111
  hypo

SEQ ID NO: 368732 - DNA, 31 bp, Homo sapiens; identical to SEQ ID NO: 362028
  chr22:24819665-24819696
  hypo

SEQ ID NO: 368733 - DNA, 173 bp, Homo sapiens; identical to SEQ ID NO: 295271
  chr22:24819901-24820074
  hypo

SEQ ID NO: 368734 - DNA, 61 bp, Homo sapiens; identical to SEQ ID NO: 295272
  chr22:24820486-24820547
  hypo

SEQ ID NO: 368735 - DNA, 240 bp, Homo sapiens; identical to SEQ ID NO: 345654
  chr22:25348202-25348442
  hypo

SEQ ID NO: 368736 - DNA, 787 bp, Homo sapiens; identical to SEQ ID NO: 206075
  chr22:25348485-25349272
  hypo

SEQ ID NO: 368737 - DNA, 395 bp, Homo sapiens; identical to SEQ ID NO: 352589
  chr22:25349348-25349743
  hypo

SEQ ID NO: 368738 - DNA, 305 bp, Homo sapiens; identical to SEQ ID NO: 344700
  chr22:25561932-25562237
  hypo

SEQ ID NO: 368739 - DNA, 122 bp, Homo sapiens; identical to SEQ ID NO: 344701
  chr22:25570292-25570414
  hypo

SEQ ID NO: 368740 - DNA, 352 bp, Homo sapiens; identical to SEQ ID NO: 344702
  chr22:25602982-25603334
  hypo

SEQ ID NO: 368741 - DNA, 60 bp, Homo sapiens; identical to SEQ ID NO: 295278
  chr22:25678186-25678246
  hypo

SEQ ID NO: 368742 - DNA, 284 bp, Homo sapiens; identical to SEQ ID NO: 362037
  chr22:26565999-26566283
  hypo

SEQ ID NO: 368743 - DNA, 62 bp, Homo sapiens; identical to SEQ ID NO: 344706
  chr22:26999530-26999592
  hypo

SEQ ID NO: 368744 - DNA, 251 bp, Homo sapiens; identical to SEQ ID NO: 349106
  chr22:27007869-27008120
  hypo

SEQ ID NO: 368745 - DNA, 88 bp, Homo sapiens; identical to SEQ ID NO: 356511
  chr22:27019127-27019215
  hypo

SEQ ID NO: 368746 - DNA, 299 bp, Homo sapiens; identical to SEQ ID NO: 352596
  chr22:27068622-27068921
  hypo

SEQ ID NO: 368747 - DNA, 63 bp, Homo sapiens; identical to SEQ ID NO: 295312
  chr22:29075343-29075406
  hypo

SEQ ID NO: 368748 - DNA, 67 bp, Homo sapiens; identical to SEQ ID NO: 344712
  chr22:29076607-29076674
  hypo

SEQ ID NO: 368749 - DNA, 86 bp, Homo sapiens; identical to SEQ ID NO: 344714
  chr22:29587127-29587213
  hypo

SEQ ID NO: 368750 - DNA, 139 bp, Homo sapiens; identical to SEQ ID NO: 344715
  chr22:29686357-29686496
  hypo

SEQ ID NO: 368751 - DNA, 120 bp, Homo sapiens; identical to SEQ ID NO: 344717
  chr22:29758124-29758244
  hypo

SEQ ID NO: 368752 - DNA, 199 bp, Homo sapiens; identical to SEQ ID NO: 362054
  chr22:29876679-29876878
  hypo

SEQ ID NO: 368753 - DNA, 79 bp, Homo sapiens; identical to SEQ ID NO: 356518
  chr22:30084279-30084358
  hypo

SEQ ID NO: 368754 - DNA, 120 bp, Homo sapiens; identical to SEQ ID NO: 356519
  chr22:30084388-30084508
  hypo

SEQ ID NO: 368755 - DNA, 457 bp, Homo sapiens; identical to SEQ ID NO: 356520
  chr22:30090282-30090739
  hypo

SEQ ID NO: 368756 - DNA, 74 bp, Homo sapiens; identical to SEQ ID NO: 356521
  chr22:30090769-30090843
  hypo

SEQ ID NO: 368757 - DNA, 36 bp, Homo sapiens
  chr22:30091074-30091110
  hypo
cgtccaaggcaccggtgtgtgtgtgtcttgcactcc

SEQ ID NO: 368758 - DNA, 447 bp, Homo sapiens
  chr22:30091301-30091748
  hypo
catcgtcagggagcccgcccagagctcgtgacgagcaagtgctgggtccccgccaggcaccccgaggcggcgctctggctggcagctggtggggaataggcagggcagctgtggctggggagagactttaggcagaagctgtgatgcaggctgactgccagccgaggggctgggtagtgccgtgcgggagctgatggtacagggcactcgctgtccccctccggccaccctagaccagggtccgagaggcaggcaggagccactcatgtcttccccattgcccgacgcccatagacgctccttcctgtgtggggctggggtactccctggtcgtactgcagtcagcacccgtaacccggctatgaccagggatctgtaagccctgtggctccacaggtgctgcttctcactggcccagactctgagctccaccggcccagtctgcac

SEQ ID NO: 368759 - DNA, 254 bp, Homo sapiens; identical to SEQ ID NO: 344724
  chr22:30190745-30190999
  hypo

SEQ ID NO: 368760 - DNA, 496 bp, Homo sapiens; identical to SEQ ID NO: 344726
  chr22:30939634-30940130
  hypo

SEQ ID NO: 368761 - DNA, 395 bp, Homo sapiens; identical to SEQ ID NO: 362057
  chr22:31198752-31199147
  hypo

SEQ ID NO: 368762 - DNA, 688 bp, Homo sapiens; identical to SEQ ID NO: 344731
  chr22:31266269-31266957
  hypo

SEQ ID NO: 368763 - DNA, 163 bp, Homo sapiens; identical to SEQ ID NO: 344732
  chr22:31475566-31475729
  hypo

SEQ ID NO: 368764 - DNA, 410 bp, Homo sapiens; identical to SEQ ID NO: 344733
  chr22:31483882-31484292
  hypo

SEQ ID NO: 368765 - DNA, 212 bp, Homo sapiens; identical to SEQ ID NO: 344734
  chr22:31486794-31487006
  hypo

SEQ ID NO: 368766 - DNA, 425 bp, Homo sapiens; identical to SEQ ID NO: 344735
  chr22:31487263-31487688
  hypo

SEQ ID NO: 368767 - DNA, 345 bp, Homo sapiens; identical to SEQ ID NO: 356525
  chr22:31489493-31489838
  hypo

SEQ ID NO: 368768 - DNA, 96 bp, Homo sapiens; identical to SEQ ID NO: 356526
  chr22:31495078-31495174
  hypo

SEQ ID NO: 368769 - DNA, 567 bp, Homo sapiens
  chr22:31522433-31523000
  hypo
cggtggtgacgacagcgacggcgcagacatgatcgccatagggtgaggtggcagggcatgtggaccccctcctgagcccctcgggccttccgggccctccacccatggcaggggcttccagggcacctctccaatcccatggccaccctgcccccacccctccaggttgcaggaagtgaactccatgctcaacaagcgactcaaggacgccctcttcacggaccagtggagtgagctgttcatggatgcgctagggcccttcaacttcgtgctggtaacgcacccctcaccccctggacagccagagaccctgctgaattcctggctccagctgtaccctggctcactgtggggcccgctgggcctctgtggctgggtccgtgacatgggtgggtggaggagcagacctgaaggtgggcgcgagggcgggggagttgtgttctgtcccccagccacgtggcctcccgctgcaggtgagttcggtgaggatgcagggtgtcatcctgctgctgttcgccaagtactaccacctgcccttcctgcgagacgtgcagaccgactgcacgc

SEQ ID NO: 368770 - DNA, 365 bp, Homo sapiens; identical to SEQ ID NO: 356527
  chr22:32078028-32078393
  hypo

SEQ ID NO: 368771 - DNA, 81 bp, Homo sapiens; identical to SEQ ID NO: 362058
  chr22:32571858-32571939
  hypo

SEQ ID NO: 368772 - DNA, 389 bp, Homo sapiens; identical to SEQ ID NO: 344743
  chr22:32665378-32665767
  hypo

SEQ ID NO: 368773 - DNA, 132 bp, Homo sapiens; identical to SEQ ID NO: 344744
  chr22:32804860-32804992
  hypo

SEQ ID NO: 368774 - DNA, 791 bp, Homo sapiens; identical to SEQ ID NO: 362059
  chr22:34316250-34317041
  hypo

SEQ ID NO: 368775 - DNA, 102 bp, Homo sapiens; identical to SEQ ID NO: 344747
  chr22:35821646-35821748
  hypo

SEQ ID NO: 368776 - DNA, 269 bp, Homo sapiens; identical to SEQ ID NO: 356530
  chr22:35848670-35848939
  hypo

SEQ ID NO: 368777 - DNA, 127 bp, Homo sapiens; identical to SEQ ID NO: 344749
  chr22:36519474-36519601
  hypo

SEQ ID NO: 368778 - DNA, 96 bp, Homo sapiens; identical to SEQ ID NO: 346280
  chr22:36902565-36902661
  hypo

SEQ ID NO: 368779 - DNA, 112 bp, Homo sapiens
  chr22:36907702-36907814
  hypo
cgcagcgtaaaatgccccaggcattctccacgctcaggttgatctggctggcaaactcattaggcttgaactgctgggtgcctaggatgacgtggcgtgaggagtctttcac

SEQ ID NO: 368780 - DNA, 290 bp, Homo sapiens; identical to SEQ ID NO: 344753
  chr22:38061005-38061295
  hypo

SEQ ID NO: 368781 - DNA, 271 bp, Homo sapiens; identical to SEQ ID NO: 344759
  chr22:38378835-38379106
  hypo

SEQ ID NO: 368782 - DNA, 800 bp, Homo sapiens; identical to SEQ ID NO: 356533
  chr22:38379141-38379941
  hypo

SEQ ID NO: 368783 - DNA, 53 bp, Homo sapiens
  chr22:38380268-38380321
  hypo
cggggtgtcgcctctctccacctcacagcagggtcccaggcctgggcgggcca

SEQ ID NO: 368784 - DNA, 136 bp, Homo sapiens
  chr22:38380437-38380573
  hypo
acgctggtgggctgggagggaggggcggggggccctgagcctcaggccacggcctcgttaggacggagcctgaatccttaccaccaaccaccctggccggacagcccgagactgactgagcgactgagcctgagcc

SEQ ID NO: 368785 - DNA, 230 bp, Homo sapiens; identical to SEQ ID NO: 344762
  chr22:38381994-38382224
  hypo

SEQ ID NO: 368786 - DNA, 591 bp, Homo sapiens; identical to SEQ ID NO: 356534
  chr22:38434385-38434976
  hypo

SEQ ID NO: 368787 - DNA, 146 bp, Homo sapiens; identical to SEQ ID NO: 356535
  chr22:38435006-38435152
  hypo

SEQ ID NO: 368788 - DNA, 292 bp, Homo sapiens; identical to SEQ ID NO: 344764
  chr22:38506297-38506589
  hypo

SEQ ID NO: 368789 - DNA, 55 bp, Homo sapiens
  chr22:38516974-38517029
  hypo
gaacagcctgcagagcgcctgaacgcaggaggtggcaggaggaagcgggtttacc

SEQ ID NO: 368790 - DNA, 84 bp, Homo sapiens
  chr22:38687297-38687381
  hypo
ggcgggccgtggcacctgctgtcttgggaaacacaggtcaatacatccacacacacacacacacacacacacgcaggggacgcc

SEQ ID NO: 368791 - DNA, 391 bp, Homo sapiens
  chr22:38694593-38694984
  hypo
tgctgcccatggtggcacaagctgtcagcacggatgaggctggagggctctgggaccccagtgaggtcaaccacactgtccagctcgtacctcccgtctgtcgggagcccctcccgccaccagctcactctggccctctgagtcagggccttccccatccagtcccccaagcccgccttggcctccaggtgactcacgaatttcagcatgttccagtcaaagacgtagtcataggagaagccctgccggtggaagaggttgcggaagagctgacgtaggtaagagtagtcgggcttgtcgtcaaaccgcagggagcggcagaagttgaggtatgttgagaattcggctggagggtgttgcagaggatagagaaggccactgtgaggcccac

SEQ ID NO: 368792 - DNA, 59 bp, Homo sapiens
  chr22:38874156-38874215
  hypo
cgaggaaataactccaaataggagtacaaataggagtgctctaggccagtgtggtcctg

SEQ ID NO: 368793 - DNA, 123 bp, Homo sapiens; identical to SEQ ID NO: 362064
  chr22:38966046-38966169
  hypo

SEQ ID NO: 368794 - DNA, 55 bp, Homo sapiens; identical to SEQ ID NO: 344772
  chr22:39144766-39144821
  hypo

SEQ ID NO: 368795 - DNA, 320 bp, Homo sapiens; identical to SEQ ID NO: 352609
  chr22:39549067-39549387
  hypo

SEQ ID NO: 368796 - DNA, 137 bp, Homo sapiens; identical to SEQ ID NO: 352610
  chr22:39549472-39549609
  hypo

SEQ ID NO: 368797 - DNA, 219 bp, Homo sapiens; identical to SEQ ID NO: 344774
  chr22:39756401-39756620
  hypo

SEQ ID NO: 368798 - DNA, 31 bp, Homo sapiens; identical to SEQ ID NO: 295456
  chr22:39853626-39853657
  hypo

SEQ ID NO: 368799 - DNA, 209 bp, Homo sapiens; identical to SEQ ID NO: 295457
  chr22:39853690-39853899
  hypo

SEQ ID NO: 368800 - DNA, 130 bp, Homo sapiens; identical to SEQ ID NO: 345661
  chr22:39853934-39854064
  hypo

SEQ ID NO: 368801 - DNA, 121 bp, Homo sapiens
  chr22:40024720-40024841
  hypo
cgccggcaatggcaggagcagcagacggcctctcccagccgcccagcccctttactgacctggccagtccagggagagtggcccccagtggccaggccacagcctcggctcccctcgcccc

SEQ ID NO: 368802 - DNA, 423 bp, Homo sapiens; identical to SEQ ID NO: 356541
  chr22:40045208-40045631
  hypo

SEQ ID NO: 368803 - DNA, 220 bp, Homo sapiens; identical to SEQ ID NO: 356542
  chr22:40045721-40045941
  hypo

SEQ ID NO: 368804 - DNA, 53 bp, Homo sapiens; identical to SEQ ID NO: 344779
  chr22:40061917-40061970
  hypo

SEQ ID NO: 368805 - DNA, 171 bp, Homo sapiens; identical to SEQ ID NO: 356543
  chr22:40074986-40075157
  hypo

SEQ ID NO: 368806 - DNA, 195 bp, Homo sapiens; identical to SEQ ID NO: 356544
  chr22:40075302-40075497
  hypo

SEQ ID NO: 368807 - DNA, 192 bp, Homo sapiens; identical to SEQ ID NO: 344782
  chr22:40812801-40812993
  hypo

SEQ ID NO: 368808 - DNA, 190 bp, Homo sapiens; identical to SEQ ID NO: 344783
  chr22:41536192-41536382
  hypo

SEQ ID NO: 368809 - DNA, 106 bp, Homo sapiens; identical to SEQ ID NO: 349116
  chr22:41634855-41634961
  hypo

SEQ ID NO: 368810 - DNA, 366 bp, Homo sapiens; identical to SEQ ID NO: 344785
  chr22:41639303-41639669
  hypo

SEQ ID NO: 368811 - DNA, 302 bp, Homo sapiens
  chr22:41656931-41657233
  hypo
cgatcggggactcagcaatgtcctgcggggatggggagaggagagtggaagaggagtggggataaggtcacctgagagcacgtcatttggcacctgagccctgcggctgcccctgcctatctccctgtcttggaggtctggtatgttccttctctgtgccccacaccagtggctgggccaggctactgtcagcactcgcaccatctcacttcaccacttctgagcctggcagatgacactccttggtcagagtggcctgcctggcctgaagccccataggggctggctcaccagtgggagcc

SEQ ID NO: 368812 - DNA, 288 bp, Homo sapiens
  chr22:41657416-41657704
  hypo
gctgcaggggcaggatggacagaaaccactcaccctaaaagcttctgccaaggcagtggcgccatcattctccagacggtttctgccagccacaaagaccttcagggccagaggcttgccttgggcactggatttccggtgacattcggtcagagctgcagccaggatctgtggggaaaggcaaggggccctggtcatgggcaggagccccttctcccagcggggtggccactgctgctgaactgctcttcaacatcccacgccacccatcggtgcaggtcaggggac

SEQ ID NO: 368813 - DNA, 69 bp, Homo sapiens; identical to SEQ ID NO: 344787
  chr22:41658279-41658348
  hypo

SEQ ID NO: 368814 - DNA, 143 bp, Homo sapiens; identical to SEQ ID NO: 344789
  chr22:41669366-41669509
  hypo

SEQ ID NO: 368815 - DNA, 137 bp, Homo sapiens; identical to SEQ ID NO: 344792
  chr22:41973298-41973435
  hypo

SEQ ID NO: 368816 - DNA, 59 bp, Homo sapiens; identical to SEQ ID NO: 344793
  chr22:42033751-42033810
  hypo

SEQ ID NO: 368817 - DNA, 207 bp, Homo sapiens
  chr22:42095795-42096002
  hypo
cgctccggtgaacccgacgcgaaaccgggcccccgcgctgtgttcactctcctccctgtcagcccgtcccggacccggccgcagcggcctctcgggcccctcagccccaggccggcctgcgggcctccgtggagcccggtccactggctctgcgcctgaaaggacggaaatccggatcccccgggacctcacccagtctcagggaca

SEQ ID NO: 368818 - DNA, 70 bp, Homo sapiens
  chr22:42096253-42096323
  hypo
gtgaacgggaagactgttccttgggcagagctggccaaagcgggctgcctgggtcctcattgcctaccgc

SEQ ID NO: 368819 - DNA, 50 bp, Homo sapiens
  chr22:42395290-42395340
  hypo
aggacaggtactgggtgtgtatctcctcctacttccacgaacaaggtgtc

SEQ ID NO: 368820 - DNA, 32 bp, Homo sapiens; identical to SEQ ID NO: 356550
  chr22:42667137-42667169
  hypo

SEQ ID NO: 368821 - DNA, 77 bp, Homo sapiens; identical to SEQ ID NO: 356551
  chr22:42995235-42995312
  hypo

SEQ ID NO: 368822 - DNA, 106 bp, Homo sapiens; identical to SEQ ID NO: 220854
  chr22:42995599-42995705
  hypo

SEQ ID NO: 368823 - DNA, 151 bp, Homo sapiens; identical to SEQ ID NO: 344799
  chr22:43000061-43000212
  hypo

SEQ ID NO: 368824 - DNA, 141 bp, Homo sapiens; identical to SEQ ID NO: 344800
  chr22:43351254-43351395
  hypo

SEQ ID NO: 368825 - DNA, 39 bp, Homo sapiens
  chr22:43434578-43434617
  hypo
tcatctagttccatttacaacagactcatccacaaaacc

SEQ ID NO: 368826 - DNA, 173 bp, Homo sapiens; identical to SEQ ID NO: 344802
  chr22:43529312-43529485
  hypo

SEQ ID NO: 368827 - DNA, 186 bp, Homo sapiens
  chr22:43570061-43570247
  hypo
cggtccgtgaagacggccgtgacgttcggggcccacagctcggctcctgcaccacggtttccacagtgggtgctcatggaggagcaggcggacacagacgctgggccggggaaaagggccatggagcacaccgatgccgtgtctgggacttaccacctttcccgctgctggaagtagctgacaaac

SEQ ID NO: 368828 - DNA, 298 bp, Homo sapiens
  chr22:43570314-43570612
  hypo
ggcgcgcgatggaggccaggcagtccttgacagtcagcaggttctcgcaggggaactggttcagcagcacgcctggcctctcctggctgagtttcctgcagggcggaggcaggtgcgccagctcaaggggaggccggcagtgcctagaagccctgactgggagggcccctgcggccagaggtgccctcacctgtagtccttgaagtgtgagaagttgaagaggatgtcggcgtccgcctcactctgggtgagggtgaagcgcgggtgggtgaggctgctggccacctgctgcacgtcc

SEQ ID NO: 368829 - DNA, 559 bp, Homo sapiens; identical to SEQ ID NO: 295522
  chr22:44419919-44420478
  hypo

SEQ ID NO: 368830 - DNA, 73 bp, Homo sapiens
  chr22:44500148-44500221
  hypo
cgtctcaaagcaggctggcagacattttccactcttgatcaatcattttccaaaataagcatagacacagcaa

SEQ ID NO: 368831 - DNA, 34 bp, Homo sapiens; identical to SEQ ID NO: 295527
  chr22:45064203-45064237
  hypo

SEQ ID NO: 368832 - DNA, 389 bp, Homo sapiens; identical to SEQ ID NO: 295528
  chr22:45064286-45064675
  hypo

SEQ ID NO: 368833 - DNA, 147 bp, Homo sapiens; identical to SEQ ID NO: 352628
  chr22:45064918-45065065
  hypo

SEQ ID NO: 368834 - DNA, 324 bp, Homo sapiens; identical to SEQ ID NO: 344808
  chr22:45074487-45074811
  hypo

SEQ ID NO: 368835 - DNA, 98 bp, Homo sapiens; identical to SEQ ID NO: 356559
  chr22:45075627-45075725
  hypo

SEQ ID NO: 368836 - DNA, 553 bp, Homo sapiens; identical to SEQ ID NO: 345662
  chr22:45097777-45098330
  hypo

SEQ ID NO: 368837 - DNA, 470 bp, Homo sapiens; identical to SEQ ID NO: 206166
  chr22:45098381-45098851
  hypo

SEQ ID NO: 368838 - DNA, 78 bp, Homo sapiens; identical to SEQ ID NO: 356562
  chr22:45120758-45120836
  hypo

SEQ ID NO: 368839 - DNA, 176 bp, Homo sapiens; identical to SEQ ID NO: 295538
  chr22:45405768-45405944
  hypo

SEQ ID NO: 368840 - DNA, 178 bp, Homo sapiens; identical to SEQ ID NO: 362097
  chr22:45406385-45406563
  hypo

SEQ ID NO: 368841 - DNA, 123 bp, Homo sapiens; identical to SEQ ID NO: 344816
  chr22:45581821-45581944
  hypo

SEQ ID NO: 368842 - DNA, 733 bp, Homo sapiens; identical to SEQ ID NO: 356563
  chr22:45592910-45593643
  hypo

SEQ ID NO: 368843 - DNA, 258 bp, Homo sapiens; identical to SEQ ID NO: 346288
  chr22:45593715-45593973
  hypo

SEQ ID NO: 368844 - DNA, 238 bp, Homo sapiens; identical to SEQ ID NO: 329970
  chr22:45603946-45604184
  hypo

SEQ ID NO: 368845 - DNA, 55 bp, Homo sapiens; identical to SEQ ID NO: 356566
  chr22:45604387-45604442
  hypo

SEQ ID NO: 368846 - DNA, 342 bp, Homo sapiens
  chr22:45607771-45608113
  hypo
cgagagcagacaccacagggatgcttggggcacagacgcaggggcaggggccgggggtcactcaccttcctcccgtctgcaccgctttcgctgccggagtacgccagcttccggcgcacatagaaaagcatgtcgtcctgccggggagcccatttctccatgaagtaggtggagaacatccaagtccagaagacgatgcggtcatccttgaagcaccctgcagagggaggccagacaggagtgaggaaggacggccaccctggcccttgcagcatggccttggccaagctgcgcccatacccccacatttctggccagaaatttgcgagggctctgagatgc

SEQ ID NO: 368847 - DNA, 176 bp, Homo sapiens; identical to SEQ ID NO: 344820
  chr22:45613836-45614012
  hypo

SEQ ID NO: 368848 - DNA, 567 bp, Homo sapiens; identical to SEQ ID NO: 344821
  chr22:45808579-45809146
  hypo

SEQ ID NO: 368849 - DNA, 392 bp, Homo sapiens; identical to SEQ ID NO: 344822
  chr22:45959040-45959432
  hypo

SEQ ID NO: 368850 - DNA, 447 bp, Homo sapiens; identical to SEQ ID NO: 344825
  chr22:46261704-46262151
  hypo

SEQ ID NO: 368851 - DNA, 127 bp, Homo sapiens; identical to SEQ ID NO: 344826
  chr22:46339131-46339258
  hypo

SEQ ID NO: 368852 - DNA, 710 bp, Homo sapiens; identical to SEQ ID NO: 344831
  chr22:46815686-46816396
  hypo

SEQ ID NO: 368853 - DNA, 224 bp, Homo sapiens; identical to SEQ ID NO: 330068
  chr22:46929401-46929625
  hypo

SEQ ID NO: 368854 - DNA, 203 bp, Homo sapiens; identical to SEQ ID NO: 330069
  chr22:46929718-46929921
  hypo

SEQ ID NO: 368855 - DNA, 281 bp, Homo sapiens; identical to SEQ ID NO: 349123
  chr22:46931438-46931719
  hypo

SEQ ID NO: 368856 - DNA, 68 bp, Homo sapiens; identical to SEQ ID NO: 349124
  chr22:46932128-46932196
  hypo

SEQ ID NO: 368857 - DNA, 359 bp, Homo sapiens; identical to SEQ ID NO: 356572
  chr22:46979972-46980331
  hypo

SEQ ID NO: 368858 - DNA, 134 bp, Homo sapiens; identical to SEQ ID NO: 356573
  chr22:47022417-47022551
  hypo

SEQ ID NO: 368859 - DNA, 412 bp, Homo sapiens; identical to SEQ ID NO: 220934
  chr22:47022632-47023044
  hypo

SEQ ID NO: 368860 - DNA, 58 bp, Homo sapiens; identical to SEQ ID NO: 356575
  chr22:47023191-47023249
  hypo

SEQ ID NO: 368861 - DNA, 263 bp, Homo sapiens; identical to SEQ ID NO: 344836
  chr22:47054031-47054294
  hypo

SEQ ID NO: 368862 - DNA, 209 bp, Homo sapiens; identical to SEQ ID NO: 344837
  chr22:47075172-47075381
  hypo

SEQ ID NO: 368863 - DNA, 850 bp, Homo sapiens; identical to SEQ ID NO: 344838
  chr22:47197347-47198197
  hypo

SEQ ID NO: 368864 - DNA, 961 bp, Homo sapiens
  chr22:47298524-47299485
  hypo
accagcccttccactgagctgactcttcgcctccactcagagtcccgttcaagtgggcacgttgttttcacctttcctgcgataactgcaagcaacacacctgcatttttgacacacaaagttgtaatggttgtgattcccgaagaacaccagcagacagacacccggtgggcacgtggggacacgaagactcagatgtctctgtcctcagcagcgcacagttgaagtgagggatgaagacagatgtgcgtgaaacccagagagatcatatacagttgtcaatgaaaccacagtttgtatcctgccgactgcattccagggtggctgaaagaattggagaagacagcccgaggaggggcagcgtatggggcagtccactctggagggtcatgcccaattgctggggccgcctcacgtctctgctctgtgatttcttctatttcctggcccggttgggccgtggatctctccctggtgcacctggagtctctgtggatctctttcctcaggggactctgcaacccagcctcacgccctgcagggggtcacagacctcagcctggtgggcgttcgggaccgagggctgagggccgagggttgaggtgaagtgcagtggcacagccatcccaggctgcaggcgaaggggctccccttcgagaacccacaggatggtagcagagcgaagttcagcctgcgggggcgtctgtactcggggaagctgtggaccaggcatggagccagcctgtttgccctccccgccctgatggctgctccggctggctaggcctcttctctgagattcttggcttagtacctctggcttttgccgcttgaatttggggacctgtcggctcttcctgtttcgcttcagtggacttccaccctagctctcgcctctggttgctgctctgagcgtgagtctagagggaccagcaaggtcctgagggagttgcgaggaatc

SEQ ID NO: 368865 - DNA, 350 bp, Homo sapiens; identical to SEQ ID NO: 344841
  chr22:47436589-47436939
  hypo

SEQ ID NO: 368866 - DNA, 99 bp, Homo sapiens; identical to SEQ ID NO: 356579
  chr22:47441200-47441299
  hypo

SEQ ID NO: 368867 - DNA, 72 bp, Homo sapiens; identical to SEQ ID NO: 344844
  chr22:47465521-47465593
  hypo

SEQ ID NO: 368868 - DNA, 117 bp, Homo sapiens; identical to SEQ ID NO: 344845
  chr22:47465782-47465899
  hypo

SEQ ID NO: 368869 - DNA, 183 bp, Homo sapiens
  chr22:47525924-47526107
  hypo
ccatcccttctaggcccctcctcaggacaccccctcctgccgggctccccccaagcgcagcccccttcccaaacccacgtttgcctcactgtcttccttgtccggtagagcacacccctcagcacttctctgtgtgaatgagcctggcagggacctaccttgagatctacatgtctggatacc

SEQ ID NO: 368870 - DNA, 398 bp, Homo sapiens
  chr22:47534595-47534993
  hypo
cgtgaggattttaaccgatggattgggggaaacacaaacgttccagccgtagcacgttatttggccgaaacccagaataccaggaggccagccctcgctctgcagccgtctcccctgagggcccagcctggattcaggccttttggcttggccaaagcccttctgagtcccaccctgagcctttgcgggagggtgacgtcatgtgctttattgctttgtttatgtgcttcagtcaccgttccgctcctgcagcgaccagtcaggcacagaacactgaggccgccaaagactggcccttggttccagttgcccgcacggaactgtgtgtctggggcccagttgctgaggaagtacctcagaggacaccgctgacacaagccacaggtgctgacgtggcc

SEQ ID NO: 368871 - DNA, 234 bp, Homo sapiens
  chr22:48027392-48027626
  hypo
cggcttccacagattggacgaggcccacccaccttggggaggggccagctgctgtgttcagtccgccattgcaaacacgaagctcttccagaaacgccctcacagacaccccggaagtcacgtacccactctgtaggtgccccggggcacaggcaagcggacgagccagttatccctcagagctcctgctgcctcgcccgctttctctcggaaacgtgaagtgtggcctcagct

SEQ ID NO: 368872 - DNA, 41 bp, Homo sapiens
  chr22:48027786-48027827
  hypo
ggcccagcgtcagacgtttccagcatccgcgggagtgaaac

SEQ ID NO: 368873 - DNA, 110 bp, Homo sapiens; identical to SEQ ID NO: 344850
  chr22:48280063-48280173
  hypo

SEQ ID NO: 368874 - DNA, 236 bp, Homo sapiens; identical to SEQ ID NO: 344853
  chr22:48996174-48996410
  hypo

SEQ ID NO: 368875 - DNA, 302 bp, Homo sapiens; identical to SEQ ID NO: 344854
  chr22:49042371-49042673
  hypo

SEQ ID NO: 368876 - DNA, 220 bp, Homo sapiens; identical to SEQ ID NO: 356582
  chr22:49138251-49138471
  hypo

SEQ ID NO: 368877 - DNA, 574 bp, Homo sapiens; identical to SEQ ID NO: 356583
  chr22:49138501-49139075
  hypo

SEQ ID NO: 368878 - DNA, 45 bp, Homo sapiens
  chr22:49146962-49147007
  hypo
cgtacaatatcttgaacatgcttcttccaatgggttttgtttccc

SEQ ID NO: 368879 - DNA, 105 bp, Homo sapiens
  chr22:49637423-49637528
  hypo
cgcgactccagctccttccgaggaggtcactgagctttgcacgatgccggctccttctcaggaggtcaccagagcttctcgtgactccagccccttcccaggagg

SEQ ID NO: 368880 - DNA, 107 bp, Homo sapiens
  chr22:49637781-49637888
  hypo
tggagccctccatttcggccgctcccgcgtcaggcccaaaataggtgcctgctggtcatcacttctgcgatcatgctttcatctccactcaattacgtcgcctccgc

SEQ ID NO: 368881 - DNA, 279 bp, Homo sapiens
  chr22:49693555-49693834
  hypo
cgagaaaccaacccaatcccagaacgccgaagacaccaggctccccggacgggcttccagggagccacttctagcttcacaacgtgaactgttttctcaacacatgacttcgcaagagtaaaagtccgtattctccctaaggcctcctgcgaacgctgtgtccaggccccgctgggggatccaggctctgagatgccccggccccatgccaggctgtggatggggagtgaccgtgcactcaccgtggtggcaacgcctgtatgcggcctgtagatgaac

SEQ ID NO: 368882 - DNA, 178 bp, Homo sapiens; identical to SEQ ID NO: 344859
  chr22:49698417-49698595
  hypo

SEQ ID NO: 368883 - DNA, 171 bp, Homo sapiens; identical to SEQ ID NO: 344860
  chr22:49698626-49698797
  hypo

SEQ ID NO: 368884 - DNA, 298 bp, Homo sapiens; identical to SEQ ID NO: 344861
  chr22:49729101-49729399
  hypo

SEQ ID NO: 368885 - DNA, 108 bp, Homo sapiens; identical to SEQ ID NO: 344862
  chr22:49857262-49857370
  hypo

SEQ ID NO: 368886 - DNA, 468 bp, Homo sapiens
  chr22:49911038-49911506
  hypo
cgccatctgagggacaaagtccccgagccccgatgcctgggcgcagagctggagactcggcttcttcttcgacctccccggccacttcccaacaccacatcacctcaacgcaggtataaggcacgtcccgtcattgcccccgttttagagctgagaaacatgaggaccagagaatcaaggctgtctgagccagagggcgcctcgctggcccctaccccaaaacagcacccgccctgccctggtcattactgccccccaaccttaaccaccctccccactgccctacagaagacccttagaagggggctgactgatggaccatggtgaaggccagcctggcctccttcagccacagtgtgaagcgcagttcaccaaaactggaaactgccatgcatcccggtgtcatcaaacaccacagcaaaagagccaggtgaacgcacggaacatcaagccgcaaccctccacacc

SEQ ID NO: 368887 - DNA, 193 bp, Homo sapiens
  chr22:49911586-49911779
  hypo
ccgtcggagctggggatcatcctcccagagtttcagcagctcagagaaggccagcaactcaccgagccatgccacagcgtgcaagcacagcggcccggccctcctgcattctgtcatgcactgcgtgtcatcttattaaaggatccaacgcaggctcataaaatacttaatgaaaacatgccaccaggtgcac

SEQ ID NO: 368888 - DNA, 107 bp, Homo sapiens; identical to SEQ ID NO: 330245
  chr22:49967872-49967979
  hypo

SEQ ID NO: 368889 - DNA, 238 bp, Homo sapiens; identical to SEQ ID NO: 330251
  chr22:50002819-50003057
  hypo

SEQ ID NO: 368890 - DNA, 210 bp, Homo sapiens; identical to SEQ ID NO: 220970
  chr22:50008973-50009183
  hypo

SEQ ID NO: 368891 - DNA, 289 bp, Homo sapiens; identical to SEQ ID NO: 220971
  chr22:50009330-50009619
  hypo

SEQ ID NO: 368892 - DNA, 48 bp, Homo sapiens; identical to SEQ ID NO: 346291
  chr22:50009663-50009711
  hypo

SEQ ID NO: 368893 - DNA, 58 bp, Homo sapiens; identical to SEQ ID NO: 352639
  chr22:50170525-50170583
  hypo

SEQ ID NO: 368894 - DNA, 160 bp, Homo sapiens; identical to SEQ ID NO: 356591
  chr22:50170790-50170950
  hypo

SEQ ID NO: 368895 - DNA, 109 bp, Homo sapiens
  chr22:50177139-50177248
  hypo
cgcgcctgggcatggccgtcacacccaaaccaccagtcactatgggacggctccgcacatgctcaggacagcctcagaatgctgtccactgtgtcgtcagctgcagcag

SEQ ID NO: 368896 - DNA, 50 bp, Homo sapiens
  chr22:50177299-50177349
  hypo
ggaaggctgaggtgccacgacatcccgccagctccaggcgtgcaccgggc

SEQ ID NO: 368897 - DNA, 225 bp, Homo sapiens; identical to SEQ ID NO: 346292
  chr22:50191356-50191581
  hypo

SEQ ID NO: 368898 - DNA, 81 bp, Homo sapiens; identical to SEQ ID NO: 346293
  chr22:50191626-50191707
  hypo

SEQ ID NO: 368899 - DNA, 248 bp, Homo sapiens; identical to SEQ ID NO: 356594
  chr22:50316625-50316873
  hypo

SEQ ID NO: 368900 - DNA, 72 bp, Homo sapiens; identical to SEQ ID NO: 356595
  chr22:50316938-50317010
  hypo

SEQ ID NO: 368901 - DNA, 217 bp, Homo sapiens; identical to SEQ ID NO: 352640
  chr22:50453240-50453457
  hypo

SEQ ID NO: 368902 - DNA, 98 bp, Homo sapiens; identical to SEQ ID NO: 352641
  chr22:50453539-50453637
  hypo

SEQ ID NO: 368903 - DNA, 267 bp, Homo sapiens; identical to SEQ ID NO: 330313
  chr22:50529625-50529892
  hypo

SEQ ID NO: 368904 - DNA, 74 bp, Homo sapiens
  chr22:50529922-50529996
  hypo
aaccgtgcatgctaatgactcccagatgctgatataagtggccatttacatagcacttaacgcgtgtcagccac

SEQ ID NO: 368905 - DNA, 1272 bp, Homo sapiens; identical to SEQ ID NO: 344881
  chr22:50718718-50719990
  hypo

SEQ ID NO: 368906 - DNA, 109 bp, Homo sapiens; identical to SEQ ID NO: 344882
  chr22:50864117-50864226
  hypo

SEQ ID NO: 368907 - DNA, 148 bp, Homo sapiens; identical to SEQ ID NO: 344883
  chr22:50873266-50873414
  hypo

SEQ ID NO: 368908 - DNA, 517 bp, Homo sapiens; identical to SEQ ID NO: 344884
  chr22:50885403-50885920
  hypo

SEQ ID NO: 368909 - DNA, 778 bp, Homo sapiens; identical to SEQ ID NO: 344885
  chr22:50894573-50895351
  hypo

SEQ ID NO: 368910 - DNA, 153 bp, Homo sapiens; identical to SEQ ID NO: 356600
  chr22:50899708-50899861
  hypo

SEQ ID NO: 368911 - DNA, 378 bp, Homo sapiens; identical to SEQ ID NO: 356601
  chr22:50942715-50943093
  hypo

SEQ ID NO: 368912 - DNA, 308 bp, Homo sapiens; identical to SEQ ID NO: 356602
  chr22:50943412-50943720
  hypo

SEQ ID NO: 368913 - DNA, 209 bp, Homo sapiens; identical to SEQ ID NO: 356603
  chr22:50944156-50944365
  hypo

SEQ ID NO: 368914 - DNA, 103 bp, Homo sapiens; identical to SEQ ID NO: 356604
  chr22:50944716-50944819
  hypo

SEQ ID NO: 368915 - DNA, 154 bp, Homo sapiens; identical to SEQ ID NO: 346294
  chr22:50954823-50954977
  hypo

SEQ ID NO: 368916 - DNA, 128 bp, Homo sapiens; identical to SEQ ID NO: 362108
  chrX:2846679-2846807
  hypo

SEQ ID NO: 368917 - DNA, 219 bp, Homo sapiens; identical to SEQ ID NO: 295607
  chrX:2846856-2847075
  hypo

SEQ ID NO: 368918 - DNA, 314 bp, Homo sapiens; identical to SEQ ID NO: 362110
  chrX:2847196-2847510
  hypo

SEQ ID NO: 368919 - DNA, 596 bp, Homo sapiens; identical to SEQ ID NO: 352644
  chrX:9432830-9433426
  hypo

SEQ ID NO: 368920 - DNA, 241 bp, Homo sapiens; identical to SEQ ID NO: 206206
  chrX:9433471-9433712
  hypo

SEQ ID NO: 368921 - DNA, 224 bp, Homo sapiens; identical to SEQ ID NO: 206224
  chrX:16730628-16730852
  hypo

SEQ ID NO: 368922 - DNA, 35 bp, Homo sapiens; identical to SEQ ID NO: 345669
  chrX:16730902-16730937
  hypo

SEQ ID NO: 368923 - DNA, 187 bp, Homo sapiens; identical to SEQ ID NO: 336699
  chrX:23801086-23801273
  hypo

SEQ ID NO: 368924 - DNA, 223 bp, Homo sapiens; identical to SEQ ID NO: 336704
  chrX:39921413-39921636
  hypo

SEQ ID NO: 368925 - DNA, 301 bp, Homo sapiens; identical to SEQ ID NO: 336705
  chrX:39922006-39922307
  hypo

SEQ ID NO: 368926 - DNA, 863 bp, Homo sapiens; identical to SEQ ID NO: 336706
  chrX:39931611-39932474
  hypo

SEQ ID NO: 368927 - DNA, 892 bp, Homo sapiens; identical to SEQ ID NO: 336707
  chrX:39933533-39934425
  hypo

SEQ ID NO: 368928 - DNA, 1938 bp, Homo sapiens; identical to SEQ ID NO: 352661
  chrX:39954918-39956856
  hypo

SEQ ID NO: 368929 - DNA, 621 bp, Homo sapiens; identical to SEQ ID NO: 352672
  chrX:40014669-40015290
  hypo

SEQ ID NO: 368930 - DNA, 667 bp, Homo sapiens; identical to SEQ ID NO: 295697
  chrX:40035057-40035724
  hypo

SEQ ID NO: 368931 - DNA, 721 bp, Homo sapiens; identical to SEQ ID NO: 347751
  chrX:40035852-40036573
  hypo

SEQ ID NO: 368932 - DNA, 264 bp, Homo sapiens; identical to SEQ ID NO: 336722
  chrX:41112874-41113138
  hypo

SEQ ID NO: 368933 - DNA, 77 bp, Homo sapiens
  chrX:41331620-41331697
  hypo
cggtggctccaaagtgggtggccacacgcacaccctcgtgcaatgtgaagctcacctgatgactcaccatggccagc

SEQ ID NO: 368934 - DNA, 286 bp, Homo sapiens
  chrX:41331751-41332037
  hypo
tccaaggattcttgagctatggaacactcctggatttcaagaacctctgactacaggggggctctgcgtccatcaggggcaaagccacggctgagaccatcagggcctcggggcagccggagcacaggcacaggaaaggtcactggagcctgcattgtcttggcgaggtccgtggctactgtgcgcgcccccacttccgccggcaccccgcagtagaggccagggcaggccccgagccgcggagcctgggttccgcctgcgccaccgccaccaacccacgtgtcac

SEQ ID NO: 368935 - DNA, 73 bp, Homo sapiens
  chrX:44922889-44922962
  hypo
cgctgggaagtacagacactattttgataggcaataatcatataacaggaagtggaagtaatggaaacgtgcc

SEQ ID NO: 368936 - DNA, 84 bp, Homo sapiens; identical to SEQ ID NO: 362174
  chrX:123094093-123094177
  hypo

SEQ ID NO: 368937 - DNA, 87 bp, Homo sapiens; identical to SEQ ID NO: 362175
  chrX:123094335-123094422
  hypo

SEQ ID NO: 368938 - DNA, 198 bp, Homo sapiens; identical to SEQ ID NO: 336730
  chrX:123094505-123094703
  hypo

SEQ ID NO: 368939 - DNA, 856 bp, Homo sapiens; identical to SEQ ID NO: 336731
  chrX:129146935-129147791
  hypo

SEQ ID NO: 368940 - DNA, 85 bp, Homo sapiens
  chrY:14532154-14532239
  hypo
cgcagacctgcgcccaggcgcagtgggtggaaataaatcctcgtcacgaacccgcagaacagaggcgccgtctttgggaagccgc

SEQ ID NO: 368941 - DNA, 431 bp, Homo sapiens; identical to SEQ ID NO: 344915
  chrY:14776368-14776799
  hypo

SEQ ID NO: 368942 - DNA, 1082 bp, Homo sapiens; identical to SEQ ID NO: 345679
  chrY:16636060-16637142
  hypo

SEQ ID NO: 368943 - DNA, 208 bp, Homo sapiens; identical to SEQ ID NO: 356619
  chrY:21205113-21205321
  hypo

SEQ ID NO: 368944 - DNA, 323 bp, Homo sapiens; identical to SEQ ID NO: 344918
  chrY:21208492-21208815
  hypo

SEQ ID NO: 368945 - DNA, 122 bp, Homo sapiens; identical to SEQ ID NO: 346299
  chrY:22918582-22918704
  hypo

SEQ ID NO: 368946 - DNA, 205 bp, Homo sapiens; identical to SEQ ID NO: 344920
  AEKP01149809.1_1-6354:1345-1550
  hypo

SEQ ID NO: 368947 - DNA, 96 bp, Homo sapiens; identical to SEQ ID NO: 356622
  NW_001838014.1_249000-295694:3973-4069
  hypo

SEQ ID NO: 368948 - DNA, 191 bp, Homo sapiens; identical to SEQ ID NO: 344924
  NW_001838286.2_1380778-1470498:80846-81037
  hypo

SEQ ID NO: 368949 - DNA, 860 bp, Homo sapiens; identical to SEQ ID NO: 356624
  NW_001838286.2_1380778-1470498:81470-82330
  hypo

SEQ ID NO: 368950 - DNA, 132 bp, Homo sapiens
  NW_001840306.1_6328-82586:33382-33514
  hypo
cgcaacgaaaccccagacaacatcctccgttttcacaagagcggtgcctcccctggtcaccactgcgacccctgcttccagctggcacgagccacacacactgctcatttttctcagcgcctgattgtctgt

SEQ ID NO: 368951 - DNA, 123 bp, Homo sapiens
  NW_001842432.1_1-179261:102996-103119
  hypo
cgttcctgatggaggccgtgggcctctttgtcctcgcttaccaggcagcagctccagccattctcagccccaccggtgggtgccgccttccatcaggccaaagactttccgaaactgcccttc

SEQ ID NO: 368952 - DNA, 62 bp, Homo sapiens
  NW_001842432.1_1-179261:103214-103276
  hypo
ctggaggtccctgagccgggggttgggaggccaatccatcggtgcagtgccgggtgcaggcc

SEQ ID NO: 368953 - DNA, 135 bp, Homo sapiens; identical to SEQ ID NO: 330646
  chr1:999594-999729
  hyper

SEQ ID NO: 368954 - DNA, 190 bp, Homo sapiens
  chr1:1181916-1182106
  hyper
cgcgggaggacgcgctggcggtggcgttggggggatctgcgcgctggccaggctgctgcgtcctctgtgcctcccgccgggccccgacgcccccgaggagcacgagctgcggcccgaggaggaccacgaccgcggcccaggcccagcgccgcatggctccgtcccgaggcggctcagcgcggcgagtctc

SEQ ID NO: 368955 - DNA, 54 bp, Homo sapiens
  chr1:1182227-1182281
  hyper
cgacggcgctcaggtccccccggggtcccgctccagcccccgctcccagccccc

SEQ ID NO: 368956 - DNA, 173 bp, Homo sapiens
  chr1:1534828-1535001
  hyper
cgccgtcatggccaccacgatgtcctgcatgccggccggctcggcggtgaactccacgcactcggccggctcgggggtctctggcgcggcggcggcgggcccagcgcgcagcggcagcggctgcaggcacaggcggtagaggacgctgtcgtgcacgtcgggcagcaggtagt

SEQ ID NO: 368957 - DNA, 58 bp, Homo sapiens; identical to SEQ ID NO: 277818
  chr1:1566482-1566540
  hyper

SEQ ID NO: 368958 - DNA, 97 bp, Homo sapiens; identical to SEQ ID NO: 349142
  chr1:1566979-1567076
  hyper

SEQ ID NO: 368959 - DNA, 431 bp, Homo sapiens; identical to SEQ ID NO: 344930
  chr1:1713574-1714005
  hyper

SEQ ID NO: 368960 - DNA, 232 bp, Homo sapiens; identical to SEQ ID NO: 344931
  chr1:1714067-1714299
  hyper

SEQ ID NO: 368961 - DNA, 633 bp, Homo sapiens
  chr1:1981183-1981816
  hyper
cgattgtccagatcaagcccctcgagtaaggcccgagaggctgtggcttcagaaatgaaggtcatgggcgactcgggccaatgccgcgtccttgacctgggcgaagtgagcggttgcactcacgagtgtggacggcccttccctacaggggaccttggattcgctgggggcggagtgggggctggggcccagagaacccgagtccggacgctcccgtccgtgaccctggccgggttctccgctcctcgcagcttcagtccgcaagtgtgagatgtcaggggacccctggacggcggggccctcgggctggcagcgcgcgccgcaggagtttcgattcggagggtctgggcgaaggccgagaactcgcgtttccagcgagttcccgggggcgccgctccgtcccagaggccggggcccctccggttgccgggcagagccgcgccgcgcgcggtcccattggcgcaggtgcgccgcgccccgcccaacaggtagccccgcccgacaggtagccccgcccgcgcctcgccattgggccgcggccgggtgtcccccgaggattggcccaggtggcggccccgcctcgccctcattggccgcaggtgccaccgcccgccccgggaccgcccgccccgc

SEQ ID NO: 368962 - DNA, 494 bp, Homo sapiens; identical to SEQ ID NO: 277829
  chr1:1981817-1982311
  hyper

SEQ ID NO: 368963 - DNA, 198 bp, Homo sapiens
  chr1:1982427-1982625
  hyper
cggggacgttccggccgcaaacctgtaaggactgaaagttttcatcaagttgtgaaaactcctggcgggtttcttaaaatcagcgtttcctaaacgttctccacgtttacccggtcgggggtctcgctttagccaaaatccggagacccggggcgcgggcgctgtggctccaatgcagcccccggcagggctcggggc

SEQ ID NO: 368964 - DNA, 194 bp, Homo sapiens; identical to SEQ ID NO: 344932
  chr1:2460612-2460806
  hyper

SEQ ID NO: 368965 - DNA, 413 bp, Homo sapiens; identical to SEQ ID NO: 197254
  chr1:2460898-2461311
  hyper

SEQ ID NO: 368966 - DNA, 443 bp, Homo sapiens; identical to SEQ ID NO: 344934
  chr1:2461988-2462431
  hyper

SEQ ID NO: 368967 - DNA, 42 bp, Homo sapiens; identical to SEQ ID NO: 349148
  chr1:3325196-3325238
  hyper

SEQ ID NO: 368968 - DNA, 178 bp, Homo sapiens; identical to SEQ ID NO: 346305
  chr1:3663338-3663516
  hyper

SEQ ID NO: 368969 - DNA, 101 bp, Homo sapiens; identical to SEQ ID NO: 346306
  chr1:3663983-3664084
  hyper

SEQ ID NO: 368970 - DNA, 344 bp, Homo sapiens; identical to SEQ ID NO: 330664
  chr1:5772056-5772400
  hyper

SEQ ID NO: 368971 - DNA, 896 bp, Homo sapiens; identical to SEQ ID NO: 330665
  chr1:6052426-6053322
  hyper

SEQ ID NO: 368972 - DNA, 35 bp, Homo sapiens; identical to SEQ ID NO: 349151
  chr1:6086224-6086259
  hyper

SEQ ID NO: 368973 - DNA, 88 bp, Homo sapiens; identical to SEQ ID NO: 349152
  chr1:6086291-6086379
  hyper

SEQ ID NO: 368974 - DNA, 223 bp, Homo sapiens; identical to SEQ ID NO: 277883
  chr1:6240708-6240931
  hyper

SEQ ID NO: 368975 - DNA, 280 bp, Homo sapiens; identical to SEQ ID NO: 356640
  chr1:6241264-6241544
  hyper

SEQ ID NO: 368976 - DNA, 165 bp, Homo sapiens; identical to SEQ ID NO: 330668
  chr1:6265347-6265512
  hyper

SEQ ID NO: 368977 - DNA, 695 bp, Homo sapiens; identical to SEQ ID NO: 197277
  chr1:6265789-6266484
  hyper

SEQ ID NO: 368978 - DNA, 64 bp, Homo sapiens; identical to SEQ ID NO: 344936
  chr1:6266713-6266777
  hyper

SEQ ID NO: 368979 - DNA, 56 bp, Homo sapiens; identical to SEQ ID NO: 356644
  chr1:6302010-6302066
  hyper

SEQ ID NO: 368980 - DNA, 227 bp, Homo sapiens; identical to SEQ ID NO: 330672
  chr1:6474528-6474755
  hyper

SEQ ID NO: 368981 - DNA, 219 bp, Homo sapiens; identical to SEQ ID NO: 346310
  chr1:6479997-6480216
  hyper

SEQ ID NO: 368982 - DNA, 53 bp, Homo sapiens; identical to SEQ ID NO: 344938
  chr1:6507073-6507126
  hyper

SEQ ID NO: 368983 - DNA, 108 bp, Homo sapiens; identical to SEQ ID NO: 197284
  chr1:6545271-6545379
  hyper

SEQ ID NO: 368984 - DNA, 246 bp, Homo sapiens; identical to SEQ ID NO: 197285
  chr1:6545639-6545885
  hyper

SEQ ID NO: 368985 - DNA, 222 bp, Homo sapiens; identical to SEQ ID NO: 349161
  chr1:6545931-6546153
  hyper

SEQ ID NO: 368986 - DNA, 344 bp, Homo sapiens; identical to SEQ ID NO: 330677
  chr1:6546495-6546839
  hyper

SEQ ID NO: 368987 - DNA, 199 bp, Homo sapiens; identical to SEQ ID NO: 349163
  chr1:7764988-7765187
  hyper

SEQ ID NO: 368988 - DNA, 108 bp, Homo sapiens; identical to SEQ ID NO: 330679
  chr1:7843510-7843618
  hyper

SEQ ID NO: 368989 - DNA, 179 bp, Homo sapiens; identical to SEQ ID NO: 349165
  chr1:7844224-7844403
  hyper

SEQ ID NO: 368990 - DNA, 248 bp, Homo sapiens; identical to SEQ ID NO: 330682
  chr1:8014160-8014408
  hyper

SEQ ID NO: 368991 - DNA, 131 bp, Homo sapiens; identical to SEQ ID NO: 356656
  chr1:8085554-8085685
  hyper

SEQ ID NO: 368992 - DNA, 377 bp, Homo sapiens; identical to SEQ ID NO: 277921
  chr1:8085715-8086092
  hyper

SEQ ID NO: 368993 - DNA, 401 bp, Homo sapiens; identical to SEQ ID NO: 349167
  chr1:8086401-8086802
  hyper

SEQ ID NO: 368994 - DNA, 425 bp, Homo sapiens; identical to SEQ ID NO: 344939
  chr1:9711649-9712074
  hyper

SEQ ID NO: 368995 - DNA, 125 bp, Homo sapiens; identical to SEQ ID NO: 330686
  chr1:9747572-9747697
  hyper

SEQ ID NO: 368996 - DNA, 122 bp, Homo sapiens; identical to SEQ ID NO: 330687
  chr1:9749342-9749464
  hyper

SEQ ID NO: 368997 - DNA, 259 bp, Homo sapiens; identical to SEQ ID NO: 356662
  chr1:10057121-10057380
  hyper

SEQ ID NO: 368998 - DNA, 485 bp, Homo sapiens; identical to SEQ ID NO: 356663
  chr1:10057622-10058107
  hyper

SEQ ID NO: 368999 - DNA, 139 bp, Homo sapiens; identical to SEQ ID NO: 277949
  chr1:10854235-10854374
  hyper

SEQ ID NO: 369000 - DNA, 386 bp, Homo sapiens; identical to SEQ ID NO: 349172
  chr1:10854661-10855047
  hyper

SEQ ID NO: 369001 - DNA, 52 bp, Homo sapiens; identical to SEQ ID NO: 197314
  chr1:11538821-11538873
  hyper

SEQ ID NO: 369002 - DNA, 64 bp, Homo sapiens; identical to SEQ ID NO: 346318
  chr1:12123950-12124014
  hyper

SEQ ID NO: 369003 - DNA, 516 bp, Homo sapiens; identical to SEQ ID NO: 349175
  chr1:12226892-12227408
  hyper

SEQ ID NO: 369004 - DNA, 206 bp, Homo sapiens; identical to SEQ ID NO: 197324
  chr1:12227438-12227644
  hyper

SEQ ID NO: 369005 - DNA, 1749 bp, Homo sapiens; identical to SEQ ID NO: 330694
  chr1:12677012-12678761
  hyper

SEQ ID NO: 369006 - DNA, 264 bp, Homo sapiens; identical to SEQ ID NO: 197328
  chr1:13840257-13840521
  hyper

SEQ ID NO: 369007 - DNA, 87 bp, Homo sapiens; identical to SEQ ID NO: 349178
  chr1:13910927-13911014
  hyper

SEQ ID NO: 369008 - DNA, 169 bp, Homo sapiens; identical to SEQ ID NO: 349179
  chr1:14926204-14926373
  hyper

SEQ ID NO: 369009 - DNA, 507 bp, Homo sapiens; identical to SEQ ID NO: 197332
  chr1:15250613-15251120
  hyper

SEQ ID NO: 369010 - DNA, 225 bp, Homo sapiens; identical to SEQ ID NO: 197333
  chr1:15251274-15251499
  hyper

SEQ ID NO: 369011 - DNA, 80 bp, Homo sapiens
  chr1:15251580-15251660
  hyper
gagaaattgcagaggtggagacacaaacgcagtgatctaattgcgtttggttggcgaatccgccccaagtggagaacagc

SEQ ID NO: 369012 - DNA, 795 bp, Homo sapiens
  chr1:15478897-15479692
  hyper
cgtggacaccatatgtacccatgaattccgcctttggaagtgaacttgattgcagcctattttcgtctggaggcggtggattcccggtaggaggcgccttcagtcctcggctcgatcctgtgacgccagccagctgcctatcggcttctcagtgtttgaacttcaaagggctggacgctcacccaagaaggggaccccggcctgacctctctcggaattcaaaaaaatctaaggctcagagagggaatgggagctggctcttccctctgtgtttagcatccacgttttttggcggtctggctgaaaccagcccaccctagttcgggcgccagagcaacgcagttccgagggcagatctccaaggggcggaggcagagccgcgggtgagaggcttccgcgccgacttcgggtttgcactccccggagccagaactccgtggcggctccgggcctccgtggatccgagcagagactggctgcccgcctgccactcgcaggctgggaaaacgccagccggtgcctcgccgggaaagttctcggcaaagctggggatgagccctcagcagggcaggctcccggtgcagcgcgcccccatccattgcccgcgcgcaagaacccggaatgggccccacctgggccgggactcgggcgtgcgatcccgagggcgccctggggaccacgcatcgggtggggaccctggccgagggcgtgagctgactcagtttttaaaaactcgcttcctccttccctacttgtgccggtcactcacctcgctgggaaccagcccagggcaga

SEQ ID NO: 369013 - DNA, 333 bp, Homo sapiens; identical to SEQ ID NO: 277984
  chr1:15479777-15480110
  hyper

SEQ ID NO: 369014 - DNA, 367 bp, Homo sapiens; identical to SEQ ID NO: 197338
  chr1:15480226-15480593
  hyper

SEQ ID NO: 369015 - DNA, 238 bp, Homo sapiens; identical to SEQ ID NO: 277988
  chr1:15573761-15573999
  hyper

SEQ ID NO: 369016 - DNA, 73 bp, Homo sapiens; identical to SEQ ID NO: 356677
  chr1:15574029-15574102
  hyper

SEQ ID NO: 369017 - DNA, 274 bp, Homo sapiens; identical to SEQ ID NO: 330703
  chr1:15735867-15736141
  hyper

SEQ ID NO: 369018 - DNA, 135 bp, Homo sapiens; identical to SEQ ID NO: 349180
  chr1:16085153-16085288
  hyper

SEQ ID NO: 369019 - DNA, 529 bp, Homo sapiens; identical to SEQ ID NO: 356680
  chr1:17445328-17445857
  hyper

SEQ ID NO: 369020 - DNA, 144 bp, Homo sapiens; identical to SEQ ID NO: 356681
  chr1:17445943-17446087
  hyper

SEQ ID NO: 369021 - DNA, 204 bp, Homo sapiens; identical to SEQ ID NO: 349181
  chr1:18434105-18434309
  hyper

SEQ ID NO: 369022 - DNA, 37 bp, Homo sapiens; identical to SEQ ID NO: 349182
  chr1:18434816-18434853
  hyper

SEQ ID NO: 369023 - DNA, 183 bp, Homo sapiens
  chr1:18957613-18957796
  hyper
ctccgcagtctccgggctcggaaactttggccccgagcgccagagcgccagagcgcgagagcgcggcgctcgccactctgaggctggcggcctcgattccggccgcgttcccccggcccccctccgccgcggggcctggtctccgggttctgccaggcgcatcagcccgcacaacttctggcc

SEQ ID NO: 369024 - DNA, 56 bp, Homo sapiens; identical to SEQ ID NO: 356684
  chr1:18960805-18960861
  hyper

SEQ ID NO: 369025 - DNA, 125 bp, Homo sapiens
  chr1:18963947-18964072
  hyper
catgggaacccgcagactgatggctttggaaaaagtggcgagtgccctggaacctgaaagcttgcaaaaagccagtgttgtttcagtctcccttcagaggtttctcccagcacccctctcctcac

SEQ ID NO: 369026 - DNA, 82 bp, Homo sapiens; identical to SEQ ID NO: 356685
  chr1:18971634-18971716
  hyper

SEQ ID NO: 369027 - DNA, 209 bp, Homo sapiens; identical to SEQ ID NO: 278034
  chr1:19043143-19043352
  hyper

SEQ ID NO: 369028 - DNA, 307 bp, Homo sapiens
  chr1:19283560-19283867
  hyper
cgctcctctcccacgtcgcctgccgagagggctccgtttctctgtcctctctgcccgcaatgcccctggccccaaattccttcggatgtgcgcgaccgcggctggaagggctgggggaccacagtatccgaaggtgcatcggcaccccacccccactctagcctggggaggcccagatcgacctttcggggataagagggcgcccgtgccccacgctgcggacccgggggtgggctcctcgaatgctagctgcgggccttgtcctctcgagatcggcccgggcacagctaagcccgctggttccccc

SEQ ID NO: 369029 - DNA, 201 bp, Homo sapiens; identical to SEQ ID NO: 344942
  chr1:20512799-20513000
  hyper

SEQ ID NO: 369030 - DNA, 258 bp, Homo sapiens; identical to SEQ ID NO: 349185
  chr1:20810336-20810594
  hyper

SEQ ID NO: 369031 - DNA, 259 bp, Homo sapiens; identical to SEQ ID NO: 197367
  chr1:20810930-20811189
  hyper

SEQ ID NO: 369032 - DNA, 67 bp, Homo sapiens; identical to SEQ ID NO: 197368
  chr1:20811219-20811286
  hyper

SEQ ID NO: 369033 - DNA, 66 bp, Homo sapiens
  chr1:20811755-20811821
  hyper
cccggcgccgaagaagttgttggtgtcctgcaggcggcaggagaagatctggcccacgtcgccgcc

SEQ ID NO: 369034 - DNA, 342 bp, Homo sapiens; identical to SEQ ID NO: 330719
  chr1:21563161-21563503
  hyper

SEQ ID NO: 369035 - DNA, 99 bp, Homo sapiens; identical to SEQ ID NO: 278068
  chr1:21835634-21835733
  hyper

SEQ ID NO: 369036 - DNA, 150 bp, Homo sapiens; identical to SEQ ID NO: 278069
  chr1:21835765-21835915
  hyper

SEQ ID NO: 369037 - DNA, 186 bp, Homo sapiens; identical to SEQ ID NO: 330722
  chr1:22351424-22351610
  hyper

SEQ ID NO: 369038 - DNA, 79 bp, Homo sapiens; identical to SEQ ID NO: 356694
  chr1:23884853-23884932
  hyper

SEQ ID NO: 369039 - DNA, 66 bp, Homo sapiens; identical to SEQ ID NO: 197390
  chr1:23885004-23885070
  hyper

SEQ ID NO: 369040 - DNA, 468 bp, Homo sapiens; identical to SEQ ID NO: 356696
  chr1:23885100-23885568
  hyper

SEQ ID NO: 369041 - DNA, 385 bp, Homo sapiens; identical to SEQ ID NO: 349190
  chr1:24126326-24126711
  hyper

SEQ ID NO: 369042 - DNA, 490 bp, Homo sapiens; identical to SEQ ID NO: 197394
  chr1:24648342-24648832
  hyper

SEQ ID NO: 369043 - DNA, 40 bp, Homo sapiens; identical to SEQ ID NO: 330727
  chr1:24739857-24739897
  hyper

SEQ ID NO: 369044 - DNA, 234 bp, Homo sapiens; identical to SEQ ID NO: 330728
  chr1:24742017-24742251
  hyper

SEQ ID NO: 369045 - DNA, 795 bp, Homo sapiens; identical to SEQ ID NO: 346322
  chr1:24882115-24882910
  hyper

SEQ ID NO: 369046 - DNA, 320 bp, Homo sapiens; identical to SEQ ID NO: 349193
  chr1:25255291-25255611
  hyper

SEQ ID NO: 369047 - DNA, 391 bp, Homo sapiens; identical to SEQ ID NO: 278124
  chr1:26372144-26372535
  hyper

SEQ ID NO: 369048 - DNA, 299 bp, Homo sapiens; identical to SEQ ID NO: 356704
  chr1:26372565-26372864
  hyper

SEQ ID NO: 369049 - DNA, 807 bp, Homo sapiens; identical to SEQ ID NO: 330733
  chr1:26662538-26663345
  hyper

SEQ ID NO: 369050 - DNA, 65 bp, Homo sapiens; identical to SEQ ID NO: 356706
  chr1:27113559-27113624
  hyper

SEQ ID NO: 369051 - DNA, 530 bp, Homo sapiens; identical to SEQ ID NO: 356707
  chr1:27113714-27114244
  hyper

SEQ ID NO: 369052 - DNA, 308 bp, Homo sapiens; identical to SEQ ID NO: 349195
  chr1:27332673-27332981
  hyper

SEQ ID NO: 369053 - DNA, 698 bp, Homo sapiens; identical to SEQ ID NO: 330736
  chr1:27901989-27902687
  hyper

SEQ ID NO: 369054 - DNA, 48 bp, Homo sapiens; identical to SEQ ID NO: 356710
  chr1:27960573-27960621
  hyper

SEQ ID NO: 369055 - DNA, 134 bp, Homo sapiens; identical to SEQ ID NO: 349197
  chr1:28198925-28199059
  hyper

SEQ ID NO: 369056 - DNA, 738 bp, Homo sapiens; identical to SEQ ID NO: 330739
  chr1:28286184-28286922
  hyper

SEQ ID NO: 369057 - DNA, 148 bp, Homo sapiens; identical to SEQ ID NO: 344946
  chr1:29585852-29586000
  hyper

SEQ ID NO: 369058 - DNA, 81 bp, Homo sapiens; identical to SEQ ID NO: 197427
  chr1:31157913-31157994
  hyper

SEQ ID NO: 369059 - DNA, 226 bp, Homo sapiens; identical to SEQ ID NO: 349201
  chr1:31158226-31158452
  hyper

SEQ ID NO: 369060 - DNA, 261 bp, Homo sapiens; identical to SEQ ID NO: 197432
  chr1:32180427-32180688
  hyper

SEQ ID NO: 369061 - DNA, 143 bp, Homo sapiens; identical to SEQ ID NO: 356717
  chr1:32226391-32226534
  hyper

SEQ ID NO: 369062 - DNA, 129 bp, Homo sapiens; identical to SEQ ID NO: 278204
  chr1:32410105-32410234
  hyper

SEQ ID NO: 369063 - DNA, 191 bp, Homo sapiens; identical to SEQ ID NO: 356719
  chr1:32827549-32827740
  hyper

SEQ ID NO: 369064 - DNA, 299 bp, Homo sapiens; identical to SEQ ID NO: 278215
  chr1:32930159-32930458
  hyper

SEQ ID NO: 369065 - DNA, 61 bp, Homo sapiens; identical to SEQ ID NO: 197440
  chr1:32930558-32930619
  hyper

SEQ ID NO: 369066 - DNA, 178 bp, Homo sapiens; identical to SEQ ID NO: 344949
  chr1:33219389-33219567
  hyper

SEQ ID NO: 369067 - DNA, 307 bp, Homo sapiens; identical to SEQ ID NO: 344950
  chr1:33219596-33219903
  hyper

SEQ ID NO: 369068 - DNA, 166 bp, Homo sapiens
  chr1:33359063-33359229
  hyper
atcttgcgggtgggggctcgggcaggctcctctcactccccgcctcccctcccgcccccaggccatttacaagatggtttcgtccgtgatgaagatgccggaggacgagtcgaccccggaaaagaggactgagaaaatcttccgccaaatggacacaaacaacgac

SEQ ID NO: 369069 - DNA, 33 bp, Homo sapiens; identical to SEQ ID NO: 349208
  chr1:33438467-33438500
  hyper

SEQ ID NO: 369070 - DNA, 57 bp, Homo sapiens; identical to SEQ ID NO: 349209
  chr1:33438921-33438978
  hyper

SEQ ID NO: 369071 - DNA, 91 bp, Homo sapiens; identical to SEQ ID NO: 349210
  chr1:33772615-33772706
  hyper

SEQ ID NO: 369072 - DNA, 102 bp, Homo sapiens
  chr1:33772741-33772843
  hyper
cgactcggccagcgcctcgggcccaaaagtgccgctgaagtgctggtccacgtccatgcagaacatgaagtgcgcctcgcggcccggcagcccgcccagcgc

SEQ ID NO: 369073 - DNA, 48 bp, Homo sapiens; identical to SEQ ID NO: 278235
  chr1:33772856-33772904
  hyper

SEQ ID NO: 369074 - DNA, 87 bp, Homo sapiens
  chr1:33772986-33773073
  hyper
cgctctggcccgccatgaagtgctgctccgccgtctccaggaagcgctccaggtacttctccaggtatctaagggcgcggcgccacc

SEQ ID NO: 369075 - DNA, 638 bp, Homo sapiens; identical to SEQ ID NO: 278237
  chr1:33896186-33896824
  hyper

SEQ ID NO: 369076 - DNA, 393 bp, Homo sapiens; identical to SEQ ID NO: 330757
  chr1:33937934-33938327
  hyper

SEQ ID NO: 369077 - DNA, 224 bp, Homo sapiens; identical to SEQ ID NO: 197453
  chr1:34629913-34630137
  hyper

SEQ ID NO: 369078 - DNA, 355 bp, Homo sapiens
  chr1:35247173-35247528
  hyper
gccaccagcccctccggaggctggcccgggagcgcctggcagcgtcgggtctaggagccggctccctcctgctccctcctccgcgccgcccggggtgtgcccgccgtctgtgtgcaccactgctgagcccagctccggcgccctcgcctctgctgtgggccccggggacgcggggtcaggccaccgcgttggccaggccgctgcaggtaagtgctggacggggcggggcgaggctgggcgggaccctcaggggcgccaagcgctcctggcgaccccctgcggcagggctggggcttgagcctgccagtgcgctgggatggggcgcgaagcgggggtgcggggagcccgccacccc

SEQ ID NO: 369079 - DNA, 252 bp, Homo sapiens; identical to SEQ ID NO: 278242
  chr1:35394790-35395042
  hyper

SEQ ID NO: 369080 - DNA, 113 bp, Homo sapiens; identical to SEQ ID NO: 346333
  chr1:35396131-35396244
  hyper

SEQ ID NO: 369081 - DNA, 209 bp, Homo sapiens; identical to SEQ ID NO: 349215
  chr1:36916114-36916323
  hyper

SEQ ID NO: 369082 - DNA, 79 bp, Homo sapiens; identical to SEQ ID NO: 356733
  chr1:37721195-37721274
  hyper

SEQ ID NO: 369083 - DNA, 47 bp, Homo sapiens; identical to SEQ ID NO: 349216
  chr1:38230859-38230906
  hyper

SEQ ID NO: 369084 - DNA, 423 bp, Homo sapiens; identical to SEQ ID NO: 349217
  chr1:38512641-38513064
  hyper

SEQ ID NO: 369085 - DNA, 90 bp, Homo sapiens; identical to SEQ ID NO: 278275
  chr1:38513154-38513244
  hyper

SEQ ID NO: 369086 - DNA, 62 bp, Homo sapiens; identical to SEQ ID NO: 356737
  chr1:39043982-39044044
  hyper

SEQ ID NO: 369087 - DNA, 66 bp, Homo sapiens; identical to SEQ ID NO: 356738
  chr1:39044466-39044532
  hyper

SEQ ID NO: 369088 - DNA, 482 bp, Homo sapiens
  chr1:39874756-39875238
  hyper
cgagctagcgagctagcgggtcgcgctgcgcgggggaggaggactcgccccccgcccgaccctagcggagccttttgttcccagccagaagtttgcatgccgggaccgtgacagctgcgggcggggaggacggcggggccgcggggccagcggcgtggtggagaatagaggcggctgcttgtcatgcagcccacggcgtggcggctgcgggccggggactggcggcggcgggcgaggcggcgcccacagcactcgggactcagctgccggagggacaaactaacttcctgagcgcgggacctgaggctggcgcggccgggagccacctgcagcctgcggtgaggcgaccctggccctcggggcgcgcggcatggcgcggggaagcgggccgtgctgagcgagcccctccgacagacccgcggccgctgctgctgcccgcccgcccgcctgcctttccgaaggcctggcgcggggctccgctc

SEQ ID NO: 369089 - DNA, 696 bp, Homo sapiens; identical to SEQ ID NO: 349219
  chr1:39956640-39957336
  hyper

SEQ ID NO: 369090 - DNA, 182 bp, Homo sapiens; identical to SEQ ID NO: 278287
  chr1:40149563-40149745
  hyper

SEQ ID NO: 369091 - DNA, 132 bp, Homo sapiens; identical to SEQ ID NO: 356740
  chr1:40158183-40158315
  hyper

SEQ ID NO: 369092 - DNA, 101 bp, Homo sapiens; identical to SEQ ID NO: 346335
  chr1:40781107-40781208
  hyper

SEQ ID NO: 369093 - DNA, 351 bp, Homo sapiens; identical to SEQ ID NO: 349221
  chr1:40782323-40782674
  hyper

SEQ ID NO: 369094 - DNA, 52 bp, Homo sapiens; identical to SEQ ID NO: 349222
  chr1:40782908-40782960
  hyper

SEQ ID NO: 369095 - DNA, 237 bp, Homo sapiens; identical to SEQ ID NO: 349223
  chr1:41268046-41268283
  hyper

SEQ ID NO: 369096 - DNA, 38 bp, Homo sapiens
  chr1:41326952-41326990
  hyper
cgagggggagaggacacgatccaagaaccagagtccga

SEQ ID NO: 369097 - DNA, 434 bp, Homo sapiens; identical to SEQ ID NO: 278304
  chr1:41327080-41327514
  hyper

SEQ ID NO: 369098 - DNA, 462 bp, Homo sapiens; identical to SEQ ID NO: 330784
  chr1:41832027-41832489
  hyper

SEQ ID NO: 369099 - DNA, 295 bp, Homo sapiens; identical to SEQ ID NO: 197484
  chr1:41848318-41848613
  hyper

SEQ ID NO: 369100 - DNA, 111 bp, Homo sapiens
  chr1:41848643-41848754
  hyper
ggtgtggacggtggtcggggaagccaactaggagatgggccagggagcgtttacaaatcttcagtttcatttgcggaggcctagccgtgaccccgcgcccaccccaaacac

SEQ ID NO: 369101 - DNA, 83 bp, Homo sapiens; identical to SEQ ID NO: 330787
  chr1:43147856-43147939
  hyper

SEQ ID NO: 369102 - DNA, 913 bp, Homo sapiens; identical to SEQ ID NO: 349225
  chr1:43389625-43390538
  hyper

SEQ ID NO: 369103 - DNA, 263 bp, Homo sapiens
  chr1:44872030-44872293
  hyper
cgtagagtagcccgacacgtgggatctcccgggattttcggggtcgggaccccctctcccagcggttctactgagcaaggcgggaggacgatcgtggagacgagggctacttgactactctacttgtagttttatttttatcttagacctgccttaaactgagtaacaatttctcttctgacttaagaacaaaacttttcagtgagcacgccggtcgctgcggtcctgcggccactgccgccgcgcttgtcagcccgggccga

SEQ ID NO: 369104 - DNA, 46 bp, Homo sapiens; identical to SEQ ID NO: 356747
  chr1:45097397-45097443
  hyper

SEQ ID NO: 369105 - DNA, 87 bp, Homo sapiens; identical to SEQ ID NO: 401
  chr1:45097717-45097804
  hyper

SEQ ID NO: 369106 - DNA, 114 bp, Homo sapiens; identical to SEQ ID NO: 403
  chr1:45098213-45098327
  hyper

SEQ ID NO: 369107 - DNA, 317 bp, Homo sapiens; identical to SEQ ID NO: 330795
  chr1:45284969-45285286
  hyper

SEQ ID NO: 369108 - DNA, 784 bp, Homo sapiens; identical to SEQ ID NO: 330796
  chr1:45285419-45286203
  hyper

SEQ ID NO: 369109 - DNA, 1865 bp, Homo sapiens; identical to SEQ ID NO: 330798
  chr1:46767970-46769835
  hyper

SEQ ID NO: 369110 - DNA, 335 bp, Homo sapiens; identical to SEQ ID NO: 330799
  chr1:46908450-46908785
  hyper

SEQ ID NO: 369111 - DNA, 188 bp, Homo sapiens; identical to SEQ ID NO: 349230
  chr1:46954676-46954864
  hyper

SEQ ID NO: 369112 - DNA, 392 bp, Homo sapiens; identical to SEQ ID NO: 349231
  chr1:46954904-46955296
  hyper

SEQ ID NO: 369113 - DNA, 263 bp, Homo sapiens; identical to SEQ ID NO: 356755
  chr1:46955978-46956241
  hyper

SEQ ID NO: 369114 - DNA, 255 bp, Homo sapiens; identical to SEQ ID NO: 346339
  chr1:46957171-46957426
  hyper

SEQ ID NO: 369115 - DNA, 561 bp, Homo sapiens; identical to SEQ ID NO: 330811
  chr1:48175235-48175796
  hyper

SEQ ID NO: 369116 - DNA, 159 bp, Homo sapiens; identical to SEQ ID NO: 349233
  chr1:48190715-48190874
  hyper

SEQ ID NO: 369117 - DNA, 48 bp, Homo sapiens; identical to SEQ ID NO: 349234
  chr1:48191178-48191226
  hyper

SEQ ID NO: 369118 - DNA, 677 bp, Homo sapiens; identical to SEQ ID NO: 356759
  chr1:48462497-48463174
  hyper

SEQ ID NO: 369119 - DNA, 38 bp, Homo sapiens; identical to SEQ ID NO: 330814
  chr1:48463421-48463459
  hyper

SEQ ID NO: 369120 - DNA, 135 bp, Homo sapiens; identical to SEQ ID NO: 356760
  chr1:48559554-48559689
  hyper

SEQ ID NO: 369121 - DNA, 836 bp, Homo sapiens; identical to SEQ ID NO: 330816
  chr1:48937304-48938140
  hyper

SEQ ID NO: 369122 - DNA, 108 bp, Homo sapiens; identical to SEQ ID NO: 349235
  chr1:49242191-49242299
  hyper

SEQ ID NO: 369123 - DNA, 107 bp, Homo sapiens; identical to SEQ ID NO: 349236
  chr1:49243013-49243120
  hyper

SEQ ID NO: 369124 - DNA, 114 bp, Homo sapiens; identical to SEQ ID NO: 344955
  chr1:50893877-50893991
  hyper

SEQ ID NO: 369125 - DNA, 157 bp, Homo sapiens
  chr1:51442806-51442963
  hyper
cctggctgccctaagcaaccttcatcaaaaggctacgggggaaagtccctgtctcggtctctggagactgttctgcttttatatggcagtcccatgaaaacagctccacgcaggaacctagtgagaggcaggaaacaaatttcccacctgagacccc

SEQ ID NO: 369126 - DNA, 189 bp, Homo sapiens; identical to SEQ ID NO: 330827
  chr1:52081941-52082130
  hyper

SEQ ID NO: 369127 - DNA, 31 bp, Homo sapiens; identical to SEQ ID NO: 344956
  chr1:52194847-52194878
  hyper

SEQ ID NO: 369128 - DNA, 322 bp, Homo sapiens; identical to SEQ ID NO: 197534
  chr1:52194968-52195290
  hyper

SEQ ID NO: 369129 - DNA, 778 bp, Homo sapiens; identical to SEQ ID NO: 344958
  chr1:52195348-52196126
  hyper

SEQ ID NO: 369130 - DNA, 949 bp, Homo sapiens; identical to SEQ ID NO: 349242
  chr1:53017742-53018691
  hyper

SEQ ID NO: 369131 - DNA, 136 bp, Homo sapiens; identical to SEQ ID NO: 349243
  chr1:53168691-53168827
  hyper

SEQ ID NO: 369132 - DNA, 291 bp, Homo sapiens; identical to SEQ ID NO: 330834
  chr1:53387231-53387522
  hyper

SEQ ID NO: 369133 - DNA, 605 bp, Homo sapiens; identical to SEQ ID NO: 349244
  chr1:54204704-54205309
  hyper

SEQ ID NO: 369134 - DNA, 207 bp, Homo sapiens; identical to SEQ ID NO: 330837
  chr1:55352463-55352670
  hyper

SEQ ID NO: 369135 - DNA, 354 bp, Homo sapiens; identical to SEQ ID NO: 197546
  chr1:55505162-55505516
  hyper

SEQ ID NO: 369136 - DNA, 50 bp, Homo sapiens; identical to SEQ ID NO: 278445
  chr1:55505559-55505609
  hyper

SEQ ID NO: 369137 - DNA, 120 bp, Homo sapiens
  chr1:57110528-57110648
  hyper
cgctcccgacatgcgaggcccgtctcttcttccagtttgacttccaagtctttccattccctaggatcgggccccagtctcaccccctattttcacccccttcggttttcctcagaaagg

SEQ ID NO: 369138 - DNA, 168 bp, Homo sapiens; identical to SEQ ID NO: 278449
  chr1:57110714-57110882
  hyper

SEQ ID NO: 369139 - DNA, 434 bp, Homo sapiens; identical to SEQ ID NO: 356775
  chr1:59042557-59042991
  hyper

SEQ ID NO: 369140 - DNA, 435 bp, Homo sapiens; identical to SEQ ID NO: 346344
  chr1:59281487-59281922
  hyper

SEQ ID NO: 369141 - DNA, 63 bp, Homo sapiens; identical to SEQ ID NO: 349249
  chr1:59612305-59612368
  hyper

SEQ ID NO: 369142 - DNA, 216 bp, Homo sapiens; identical to SEQ ID NO: 349250
  chr1:60539399-60539615
  hyper

SEQ ID NO: 369143 - DNA, 266 bp, Homo sapiens
  chr1:61519704-61519970
  hyper
cgcggtcgtgaccttgccgagcagctcctgcgcctcaggctcggtccctgcacccgccctcactccagtccctctcagggcctgcagtggaagatccccgtggtccgggtgggtggcgatggagagcagaattgaatttatttgctctcaaattcccctaaaagctctgaaactgggaaagtccgcgggctgccagggacagtaatcactgtgtccccacccggacgcaggaggtctcgggaggagctccgaggccaagcgcccgc

SEQ ID NO: 369144 - DNA, 94 bp, Homo sapiens; identical to SEQ ID NO: 356779
  chr1:62207675-62207769
  hyper

SEQ ID NO: 369145 - DNA, 420 bp, Homo sapiens; identical to SEQ ID NO: 197564
  chr1:62207842-62208262
  hyper

SEQ ID NO: 369146 - DNA, 203 bp, Homo sapiens; identical to SEQ ID NO: 356781
  chr1:62208291-62208494
  hyper

SEQ ID NO: 369147 - DNA, 205 bp, Homo sapiens; identical to SEQ ID NO: 356782
  chr1:62784150-62784355
  hyper

SEQ ID NO: 369148 - DNA, 224 bp, Homo sapiens; identical to SEQ ID NO: 278478
  chr1:62784646-62784870
  hyper

SEQ ID NO: 369149 - DNA, 102 bp, Homo sapiens; identical to SEQ ID NO: 356784
  chr1:63791875-63791977
  hyper

SEQ ID NO: 369150 - DNA, 163 bp, Homo sapiens; identical to SEQ ID NO: 197567
  chr1:63792016-63792179
  hyper

SEQ ID NO: 369151 - DNA, 50 bp, Homo sapiens; identical to SEQ ID NO: 356786
  chr1:63792231-63792281
  hyper

SEQ ID NO: 369152 - DNA, 266 bp, Homo sapiens; identical to SEQ ID NO: 197569
  chr1:63793072-63793338
  hyper

SEQ ID NO: 369153 - DNA, 293 bp, Homo sapiens; identical to SEQ ID NO: 330855
  chr1:65431047-65431340
  hyper

SEQ ID NO: 369154 - DNA, 40 bp, Homo sapiens; identical to SEQ ID NO: 349253
  chr1:65468262-65468302
  hyper

SEQ ID NO: 369155 - DNA, 155 bp, Homo sapiens; identical to SEQ ID NO: 197574
  chr1:65468660-65468815
  hyper

SEQ ID NO: 369156 - DNA, 180 bp, Homo sapiens; identical to SEQ ID NO: 278491
  chr1:65468816-65468996
  hyper

SEQ ID NO: 369157 - DNA, 393 bp, Homo sapiens; identical to SEQ ID NO: 278499
  chr1:65774903-65775296
  hyper

SEQ ID NO: 369158 - DNA, 446 bp, Homo sapiens; identical to SEQ ID NO: 349257
  chr1:65775326-65775772
  hyper

SEQ ID NO: 369159 - DNA, 60 bp, Homo sapiens; identical to SEQ ID NO: 197583
  chr1:66999412-66999472
  hyper

SEQ ID NO: 369160 - DNA, 36 bp, Homo sapiens; identical to SEQ ID NO: 349259
  chr1:66999673-66999709
  hyper

SEQ ID NO: 369161 - DNA, 47 bp, Homo sapiens; identical to SEQ ID NO: 349260
  chr1:67773780-67773827
  hyper

SEQ ID NO: 369162 - DNA, 713 bp, Homo sapiens
  chr1:68298601-68299314
  hyper
ggggcctcccaacccggcgcggggcgcacggccgcaggctggcgaggaggcaagcgagctcaaggggagacctttccttccacccccagccctagccccagccacagccgtgggggcggcttcccgcaacctcgggcggccgcccgtcgagggcgcgcgcgccgtttctgcctctgggtctcggtgtcccttggccccttcctccccctccccccggtctccggcgcccagcgcccagaccagtccccgccctccagcaggacactcttccctccttccttccttcctccgctccctccctccatctcgcttcccagcacccgggactcggaggcggcccccgaactcgctggccgacgccccgcgccgcgccccgaccccgcggggacccgactcaccacccgcgcccgccgcttggtactcacccgcctgccggtgcgctgccccgccgtcgccgccgggactcggtctctaagggctcctggagacggctccgacctctcctcctcctcctcctcttgctcctccgggcgccggctccgcctcgctggggtgggcggggcggcggcggccccgggctccttcctccgcgccgggccctgcctcccgcccggacgccctggctgtgctgtcccgggccggggagcccgcgttgtggccccgcaggaggaggggcgaggcctggcctgtggaagctcggtggacgtctggtc

SEQ ID NO: 369163 - DNA, 132 bp, Homo sapiens; identical to SEQ ID NO: 349261
  chr1:70032839-70032971
  hyper

SEQ ID NO: 369164 - DNA, 231 bp, Homo sapiens; identical to SEQ ID NO: 197592
  chr1:70033272-70033503
  hyper

SEQ ID NO: 369165 - DNA, 44 bp, Homo sapiens; identical to SEQ ID NO: 356799
  chr1:70035044-70035088
  hyper

SEQ ID NO: 369166 - DNA, 92 bp, Homo sapiens; identical to SEQ ID NO: 356800
  chr1:70035537-70035629
  hyper

SEQ ID NO: 369167 - DNA, 612 bp, Homo sapiens; identical to SEQ ID NO: 197598
  chr1:72749029-72749641
  hyper

SEQ ID NO: 369168 - DNA, 100 bp, Homo sapiens; identical to SEQ ID NO: 349263
  chr1:72750578-72750678
  hyper

SEQ ID NO: 369169 - DNA, 124 bp, Homo sapiens; identical to SEQ ID NO: 356803
  chr1:75597701-75597825
  hyper

SEQ ID NO: 369170 - DNA, 47 bp, Homo sapiens; identical to SEQ ID NO: 349264
  chr1:75603159-75603206
  hyper

SEQ ID NO: 369171 - DNA, 126 bp, Homo sapiens; identical to SEQ ID NO: 349265
  chr1:76080152-76080278
  hyper

SEQ ID NO: 369172 - DNA, 211 bp, Homo sapiens; identical to SEQ ID NO: 278539
  chr1:76081826-76082037
  hyper

SEQ ID NO: 369173 - DNA, 184 bp, Homo sapiens; identical to SEQ ID NO: 197604
  chr1:77333579-77333763
  hyper

SEQ ID NO: 369174 - DNA, 223 bp, Homo sapiens; identical to SEQ ID NO: 349267
  chr1:78956569-78956792
  hyper

SEQ ID NO: 369175 - DNA, 142 bp, Homo sapiens; identical to SEQ ID NO: 356808
  chr1:82266277-82266419
  hyper

SEQ ID NO: 369176 - DNA, 326 bp, Homo sapiens; identical to SEQ ID NO: 278556
  chr1:82266440-82266766
  hyper

SEQ ID NO: 369177 - DNA, 295 bp, Homo sapiens; identical to SEQ ID NO: 278557
  chr1:82266855-82267150
  hyper

SEQ ID NO: 369178 - DNA, 51 bp, Homo sapiens; identical to SEQ ID NO: 356811
  chr1:82267185-82267236
  hyper

SEQ ID NO: 369179 - DNA, 369 bp, Homo sapiens; identical to SEQ ID NO: 356812
  chr1:82267247-82267616
  hyper

SEQ ID NO: 369180 - DNA, 149 bp, Homo sapiens; identical to SEQ ID NO: 278559
  chr1:82267739-82267888
  hyper

SEQ ID NO: 369181 - DNA, 49 bp, Homo sapiens; identical to SEQ ID NO: 349268
  chr1:84326267-84326316
  hyper

SEQ ID NO: 369182 - DNA, 385 bp, Homo sapiens; identical to SEQ ID NO: 349269
  chr1:84326357-84326742
  hyper

SEQ ID NO: 369183 - DNA, 228 bp, Homo sapiens; identical to SEQ ID NO: 349270
  chr1:84543146-84543374
  hyper

SEQ ID NO: 369184 - DNA, 659 bp, Homo sapiens; identical to SEQ ID NO: 349271
  chr1:84543409-84544068
  hyper

SEQ ID NO: 369185 - DNA, 201 bp, Homo sapiens; identical to SEQ ID NO: 197612
  chr1:85358969-85359170
  hyper

SEQ ID NO: 369186 - DNA, 800 bp, Homo sapiens; identical to SEQ ID NO: 356819
  chr1:85462482-85463282
  hyper

SEQ ID NO: 369187 - DNA, 170 bp, Homo sapiens
  chr1:85463947-85464117
  hyper
ggagccgggagggagcgtcagcgtggcccggcgggcgcggagggagggcgcacggccccagggctggactcgtaaccccagcgccctgctgcagccgccgttgcttttccctcttggtgcacgaaaggaagacgcctgtgggaaatcgaacagacaatcggtcgccgttc

SEQ ID NO: 369188 - DNA, 77 bp, Homo sapiens; identical to SEQ ID NO: 346346
  chr1:85773944-85774021
  hyper

SEQ ID NO: 369189 - DNA, 112 bp, Homo sapiens; identical to SEQ ID NO: 346347
  chr1:85774083-85774195
  hyper

SEQ ID NO: 369190 - DNA, 64 bp, Homo sapiens; identical to SEQ ID NO: 356822
  chr1:86621199-86621263
  hyper

SEQ ID NO: 369191 - DNA, 222 bp, Homo sapiens; identical to SEQ ID NO: 330886
  chr1:87800835-87801057
  hyper

SEQ ID NO: 369192 - DNA, 1156 bp, Homo sapiens; identical to SEQ ID NO: 330887
  chr1:90098160-90099316
  hyper

SEQ ID NO: 369193 - DNA, 437 bp, Homo sapiens; identical to SEQ ID NO: 344960
  chr1:90308855-90309292
  hyper

SEQ ID NO: 369194 - DNA, 115 bp, Homo sapiens; identical to SEQ ID NO: 344961
  chr1:90309490-90309605
  hyper

SEQ ID NO: 369195 - DNA, 171 bp, Homo sapiens; identical to SEQ ID NO: 330889
  chr1:91170461-91170632
  hyper

SEQ ID NO: 369196 - DNA, 55 bp, Homo sapiens; identical to SEQ ID NO: 197630
  chr1:91172715-91172770
  hyper

SEQ ID NO: 369197 - DNA, 68 bp, Homo sapiens
  chr1:91172771-91172839
  hyper
gcttccactaagaacttattaaatagggacgattcacagttgatctgtcactgagcactacttacccc

SEQ ID NO: 369198 - DNA, 154 bp, Homo sapiens; identical to SEQ ID NO: 356828
  chr1:91183993-91184147
  hyper

SEQ ID NO: 369199 - DNA, 60 bp, Homo sapiens; identical to SEQ ID NO: 278617
  chr1:91185065-91185125
  hyper

SEQ ID NO: 369200 - DNA, 80 bp, Homo sapiens
  chr1:91869781-91869861
  hyper
cggctggggaccgaatcagcacctaaagcaaaataacagctctgtggatttcctaaggagaatatcctaaatccaaggca

SEQ ID NO: 369201 - DNA, 74 bp, Homo sapiens
  chr1:91870376-91870450
  hyper
ccagtcgagcgccgatttatcagcccctctgaggaccgccaagcctggctaagccgagctccaagcaatggatc

SEQ ID NO: 369202 - DNA, 284 bp, Homo sapiens; identical to SEQ ID NO: 349278
  chr1:92495420-92495704
  hyper

SEQ ID NO: 369203 - DNA, 64 bp, Homo sapiens; identical to SEQ ID NO: 349279
  chr1:92495832-92495896
  hyper

SEQ ID NO: 369204 - DNA, 170 bp, Homo sapiens; identical to SEQ ID NO: 346351
  chr1:92948154-92948324
  hyper

SEQ ID NO: 369205 - DNA, 225 bp, Homo sapiens; identical to SEQ ID NO: 197641
  chr1:92949466-92949691
  hyper

SEQ ID NO: 369206 - DNA, 227 bp, Homo sapiens; identical to SEQ ID NO: 197642
  chr1:92950207-92950434
  hyper

SEQ ID NO: 369207 - DNA, 119 bp, Homo sapiens; identical to SEQ ID NO: 330906
  chr1:94374262-94374381
  hyper

SEQ ID NO: 369208 - DNA, 501 bp, Homo sapiens; identical to SEQ ID NO: 346354
  chr1:94702434-94702935
  hyper

SEQ ID NO: 369209 - DNA, 88 bp, Homo sapiens; identical to SEQ ID NO: 197650
  chr1:94702990-94703078
  hyper

SEQ ID NO: 369210 - DNA, 221 bp, Homo sapiens; identical to SEQ ID NO: 197651
  chr1:94703103-94703324
  hyper

SEQ ID NO: 369211 - DNA, 157 bp, Homo sapiens; identical to SEQ ID NO: 356839
  chr1:94703357-94703514
  hyper

SEQ ID NO: 369212 - DNA, 283 bp, Homo sapiens; identical to SEQ ID NO: 349287
  chr1:94713022-94713305
  hyper

SEQ ID NO: 369213 - DNA, 657 bp, Homo sapiens; identical to SEQ ID NO: 330909
  chr1:95285602-95286259
  hyper

SEQ ID NO: 369214 - DNA, 148 bp, Homo sapiens; identical to SEQ ID NO: 349288
  chr1:95428574-95428722
  hyper

SEQ ID NO: 369215 - DNA, 759 bp, Homo sapiens; identical to SEQ ID NO: 349289
  chr1:99126872-99127631
  hyper

SEQ ID NO: 369216 - DNA, 325 bp, Homo sapiens; identical to SEQ ID NO: 344965
  chr1:99127671-99127996
  hyper

SEQ ID NO: 369217 - DNA, 288 bp, Homo sapiens; identical to SEQ ID NO: 278688
  chr1:101702081-101702369
  hyper

SEQ ID NO: 369218 - DNA, 392 bp, Homo sapiens; identical to SEQ ID NO: 278689
  chr1:101702796-101703188
  hyper

SEQ ID NO: 369219 - DNA, 184 bp, Homo sapiens; identical to SEQ ID NO: 356846
  chr1:101774910-101775094
  hyper

SEQ ID NO: 369220 - DNA, 244 bp, Homo sapiens; identical to SEQ ID NO: 346359
  chr1:103574168-103574412
  hyper

SEQ ID NO: 369221 - DNA, 1045 bp, Homo sapiens; identical to SEQ ID NO: 356848
  chr1:107599205-107600250
  hyper

SEQ ID NO: 369222 - DNA, 40 bp, Homo sapiens; identical to SEQ ID NO: 356849
  chr1:107600359-107600399
  hyper

SEQ ID NO: 369223 - DNA, 49 bp, Homo sapiens; identical to SEQ ID NO: 349294
  chr1:107684495-107684544
  hyper

SEQ ID NO: 369224 - DNA, 305 bp, Homo sapiens; identical to SEQ ID NO: 349295
  chr1:108506290-108506595
  hyper

SEQ ID NO: 369225 - DNA, 113 bp, Homo sapiens; identical to SEQ ID NO: 349296
  chr1:109204221-109204334
  hyper

SEQ ID NO: 369226 - DNA, 119 bp, Homo sapiens; identical to SEQ ID NO: 278710
  chr1:109656101-109656220
  hyper

SEQ ID NO: 369227 - DNA, 203 bp, Homo sapiens; identical to SEQ ID NO: 197688
  chr1:109656291-109656494
  hyper

SEQ ID NO: 369228 - DNA, 116 bp, Homo sapiens; identical to SEQ ID NO: 344968
  chr1:109657070-109657186
  hyper

SEQ ID NO: 369229 - DNA, 111 bp, Homo sapiens
  chr1:110008905-110009016
  hyper
cggcgctgggcagtttgcaatccaggaaaatagggaaggataaacctgaagcctgtgcgtccaggtgcgcctggctagggtttccgacggccgcggtgtctcggtggggac

SEQ ID NO: 369230 - DNA, 489 bp, Homo sapiens; identical to SEQ ID NO: 278717
  chr1:110009094-110009583
  hyper

SEQ ID NO: 369231 - DNA, 143 bp, Homo sapiens; identical to SEQ ID NO: 349300
  chr1:110186004-110186147
  hyper

SEQ ID NO: 369232 - DNA, 35 bp, Homo sapiens; identical to SEQ ID NO: 349301
  chr1:110186177-110186212
  hyper

SEQ ID NO: 369233 - DNA, 139 bp, Homo sapiens
  chr1:110527029-110527168
  hyper
cgagccccggacatttcctaggaatcgctgtaggatgtgtcgtgtggggctctggtctttgctcccaaacacccctttcatgcgcctctgaggccttgccaggaaccccgcagcccaaagaccctccgttccgcagcat

SEQ ID NO: 369234 - DNA, 65 bp, Homo sapiens; identical to SEQ ID NO: 344969
  chr1:110672768-110672833
  hyper

SEQ ID NO: 369235 - DNA, 364 bp, Homo sapiens; identical to SEQ ID NO: 349303
  chr1:110753530-110753894
  hyper

SEQ ID NO: 369236 - DNA, 46 bp, Homo sapiens; identical to SEQ ID NO: 197698
  chr1:110753957-110754003
  hyper

SEQ ID NO: 369237 - DNA, 360 bp, Homo sapiens; identical to SEQ ID NO: 344970
  chr1:111506646-111507006
  hyper

SEQ ID NO: 369238 - DNA, 736 bp, Homo sapiens; identical to SEQ ID NO: 344971
  chr1:111746588-111747324
  hyper

SEQ ID NO: 369239 - DNA, 155 bp, Homo sapiens; identical to SEQ ID NO: 197704
  chr1:112532952-112533107
  hyper

SEQ ID NO: 369240 - DNA, 637 bp, Homo sapiens; identical to SEQ ID NO: 330936
  chr1:113256965-113257602
  hyper

SEQ ID NO: 369241 - DNA, 818 bp, Homo sapiens; identical to SEQ ID NO: 330937
  chr1:113498720-113499538
  hyper

SEQ ID NO: 369242 - DNA, 699 bp, Homo sapiens; identical to SEQ ID NO: 349308
  chr1:113932580-113933279
  hyper

SEQ ID NO: 369243 - DNA, 764 bp, Homo sapiens
  chr1:113933305-113934069
  hyper
cgctcgggcgctgagcccagggaccagccggcggcagtgaccccgcccgaagccccttctggaacctcctggggacaattcccttttcctttcttcagcctaacccgcggtggccctcgcggagtccggtcagccccggggagcgcagccgggaggggcgtccaaggggcgtctcgcgtctgggaacggccgggcccccagcgggctgtggtcgcggggtgggggccggagcggcgaggccccccttaccgggctgcgcgggccgcccagggcccccgggctgagacggggccggagcggcgccccggccgcccgcgcggggtctcccccatggtgcagcggggttcgggatgtcgaagacgctgaagaagaagaagcactggctcagcaaggtgcaggagtgcgccgtgtcctgggccgggcccccgggcgacttcggcgcggagatccgcggtggcgcggagcgtggcgagttcccctacctggggcggctccgcgaggagcccggcgggggcacctgctgcgtcgtctcgggcaaggcgcccagcccaggcgatgtgctgctggaggtaaacgggacgcctgtcagcgggctcaccaaccgggacaccctggctgtcatccgccacttccgcgagcccatccgtctcaagactgtgaaaccaggtacgccggccctgcgtatctgtctcggggtgttggggagaggggcttcagggtgggcgtcctgggagcggcggcacctccccaccgcgtattgtccc

SEQ ID NO: 369244 - DNA, 612 bp, Homo sapiens; identical to SEQ ID NO: 330940
  chr1:115212647-115213259
  hyper

SEQ ID NO: 369245 - DNA, 35 bp, Homo sapiens; identical to SEQ ID NO: 349311
  chr1:115632692-115632727
  hyper

SEQ ID NO: 369246 - DNA, 1132 bp, Homo sapiens; identical to SEQ ID NO: 330944
  chr1:116184428-116185560
  hyper

SEQ ID NO: 369247 - DNA, 98 bp, Homo sapiens; identical to SEQ ID NO: 356869
  chr1:116370923-116371021
  hyper

SEQ ID NO: 369248 - DNA, 204 bp, Homo sapiens
  chr1:116381944-116382148
  hyper
ttgtcccggcgggagctgcatctctgccggcaaagttcgggcgctcccggaaccggagctcggcaggctgcagctgtccccgggtggcctggccaagtccgggcatgtcggtgcttagccttcctctaacttaactgtgccctcttggaaacgccacctggccaggcttctctggggcgcctggagcactggcccggactgtgc

SEQ ID NO: 369249 - DNA, 47 bp, Homo sapiens; identical to SEQ ID NO: 349313
  chr1:116711292-116711339
  hyper

SEQ ID NO: 369250 - DNA, 200 bp, Homo sapiens; identical to SEQ ID NO: 349314
  chr1:117452644-117452844
  hyper

SEQ ID NO: 369251 - DNA, 219 bp, Homo sapiens; identical to SEQ ID NO: 349315
  chr1:117453203-117453422
  hyper

SEQ ID NO: 369252 - DNA, 287 bp, Homo sapiens; identical to SEQ ID NO: 330949
  chr1:118149482-118149769
  hyper

SEQ ID NO: 369253 - DNA, 141 bp, Homo sapiens; identical to SEQ ID NO: 197734
  chr1:119548917-119549058
  hyper

SEQ ID NO: 369254 - DNA, 84 bp, Homo sapiens; identical to SEQ ID NO: 330956
  chr1:150586185-150586269
  hyper

SEQ ID NO: 369255 - DNA, 430 bp, Homo sapiens; identical to SEQ ID NO: 330957
  chr1:150669495-150669925
  hyper

SEQ ID NO: 369256 - DNA, 33 bp, Homo sapiens
  chr1:150947664-150947697
  hyper
cggcccccggtccccgccagggtgggcacattc

SEQ ID NO: 369257 - DNA, 797 bp, Homo sapiens; identical to SEQ ID NO: 330959
  chr1:151020083-151020880
  hyper

SEQ ID NO: 369258 - DNA, 154 bp, Homo sapiens; identical to SEQ ID NO: 330960
  chr1:151566699-151566853
  hyper

SEQ ID NO: 369259 - DNA, 79 bp, Homo sapiens; identical to SEQ ID NO: 197752
  chr1:151694406-151694485
  hyper

SEQ ID NO: 369260 - DNA, 137 bp, Homo sapiens; identical to SEQ ID NO: 278839
  chr1:151801436-151801573
  hyper

SEQ ID NO: 369261 - DNA, 321 bp, Homo sapiens; identical to SEQ ID NO: 278843
  chr1:152080641-152080962
  hyper

SEQ ID NO: 369262 - DNA, 447 bp, Homo sapiens; identical to SEQ ID NO: 346369
  chr1:154297543-154297990
  hyper

SEQ ID NO: 369263 - DNA, 72 bp, Homo sapiens; identical to SEQ ID NO: 278861
  chr1:154298038-154298110
  hyper

SEQ ID NO: 369264 - DNA, 244 bp, Homo sapiens; identical to SEQ ID NO: 349324
  chr1:154474305-154474549
  hyper

SEQ ID NO: 369265 - DNA, 216 bp, Homo sapiens; identical to SEQ ID NO: 278869
  chr1:154971706-154971922
  hyper

SEQ ID NO: 369266 - DNA, 457 bp, Homo sapiens; identical to SEQ ID NO: 356886
  chr1:154971923-154972380
  hyper

SEQ ID NO: 369267 - DNA, 155 bp, Homo sapiens; identical to SEQ ID NO: 344973
  chr1:155043706-155043861
  hyper

SEQ ID NO: 369268 - DNA, 269 bp, Homo sapiens; identical to SEQ ID NO: 356888
  chr1:155164146-155164415
  hyper

SEQ ID NO: 369269 - DNA, 594 bp, Homo sapiens; identical to SEQ ID NO: 356889
  chr1:155164455-155165049
  hyper

SEQ ID NO: 369270 - DNA, 200 bp, Homo sapiens; identical to SEQ ID NO: 330974
  chr1:155881090-155881290
  hyper

SEQ ID NO: 369271 - DNA, 35 bp, Homo sapiens; identical to SEQ ID NO: 330975
  chr1:156036276-156036311
  hyper

SEQ ID NO: 369272 - DNA, 96 bp, Homo sapiens; identical to SEQ ID NO: 349326
  chr1:156215233-156215329
  hyper

SEQ ID NO: 369273 - DNA, 229 bp, Homo sapiens; identical to SEQ ID NO: 330977
  chr1:156326789-156327018
  hyper

SEQ ID NO: 369274 - DNA, 42 bp, Homo sapiens; identical to SEQ ID NO: 346372
  chr1:156390054-156390096
  hyper

SEQ ID NO: 369275 - DNA, 422 bp, Homo sapiens; identical to SEQ ID NO: 356894
  chr1:156593638-156594060
  hyper

SEQ ID NO: 369276 - DNA, 202 bp, Homo sapiens; identical to SEQ ID NO: 197783
  chr1:156594227-156594429
  hyper

SEQ ID NO: 369277 - DNA, 48 bp, Homo sapiens
  chr1:156627098-156627146
  hyper
cgcgcagtagagtgcgcctgtgtgggccgggccgccgtgcagggggcc

SEQ ID NO: 369278 - DNA, 146 bp, Homo sapiens; identical to SEQ ID NO: 278916
  chr1:156646447-156646593
  hyper

SEQ ID NO: 369279 - DNA, 403 bp, Homo sapiens; identical to SEQ ID NO: 356897
  chr1:156646856-156647259
  hyper

SEQ ID NO: 369280 - DNA, 175 bp, Homo sapiens; identical to SEQ ID NO: 356898
  chr1:156662232-156662407
  hyper

SEQ ID NO: 369281 - DNA, 103 bp, Homo sapiens; identical to SEQ ID NO: 344974
  chr1:158083079-158083182
  hyper

SEQ ID NO: 369282 - DNA, 916 bp, Homo sapiens; identical to SEQ ID NO: 356900
  chr1:159894399-159895315
  hyper

SEQ ID NO: 369283 - DNA, 156 bp, Homo sapiens
  chr1:160040177-160040333
  hyper
cgtgcggggcaaggaagcggagacccagacagctgcaggcgcagagagaaatatccaaagacagagacccagacagacccggggagaaagagagatgaagagacgatatgcgaaacgataggagctgagctggcagggtgacaggggaagggagaa

SEQ ID NO: 369284 - DNA, 52 bp, Homo sapiens
  chr1:160040504-160040556
  hyper
ctccctgagccacaggactgtatctttgggcacaattcccgtgttgttcacc

SEQ ID NO: 369285 - DNA, 75 bp, Homo sapiens; identical to SEQ ID NO: 330994
  chr1:160040592-160040667
  hyper

SEQ ID NO: 369286 - DNA, 329 bp, Homo sapiens; identical to SEQ ID NO: 278955
  chr1:160370270-160370599
  hyper

SEQ ID NO: 369287 - DNA, 232 bp, Homo sapiens; identical to SEQ ID NO: 356902
  chr1:160370629-160370861
  hyper

SEQ ID NO: 369288 - DNA, 396 bp, Homo sapiens; identical to SEQ ID NO: 330996
  chr1:160983499-160983895
  hyper

SEQ ID NO: 369289 - DNA, 935 bp, Homo sapiens; identical to SEQ ID NO: 344975
  chr1:160990384-160991319
  hyper

SEQ ID NO: 369290 - DNA, 367 bp, Homo sapiens; identical to SEQ ID NO: 330998
  chr1:161195526-161195893
  hyper

SEQ ID NO: 369291 - DNA, 187 bp, Homo sapiens; identical to SEQ ID NO: 330999
  chr1:161196150-161196337
  hyper

SEQ ID NO: 369292 - DNA, 93 bp, Homo sapiens; identical to SEQ ID NO: 346376
  chr1:161276123-161276216
  hyper

SEQ ID NO: 369293 - DNA, 64 bp, Homo sapiens; identical to SEQ ID NO: 344976
  chr1:161368929-161368993
  hyper

SEQ ID NO: 369294 - DNA, 95 bp, Homo sapiens; identical to SEQ ID NO: 344977
  chr1:161369405-161369500
  hyper

SEQ ID NO: 369295 - DNA, 293 bp, Homo sapiens; identical to SEQ ID NO: 344978
  chr1:161369566-161369859
  hyper

SEQ ID NO: 369296 - DNA, 299 bp, Homo sapiens; identical to SEQ ID NO: 344979
  chr1:161369945-161370244
  hyper

SEQ ID NO: 369297 - DNA, 712 bp, Homo sapiens; identical to SEQ ID NO: 349339
  chr1:161409991-161410703
  hyper

SEQ ID NO: 369298 - DNA, 36 bp, Homo sapiens; identical to SEQ ID NO: 356913
  chr1:161582198-161582234
  hyper

SEQ ID NO: 369299 - DNA, 108 bp, Homo sapiens; identical to SEQ ID NO: 197819
  chr1:161591364-161591472
  hyper

SEQ ID NO: 369300 - DNA, 82 bp, Homo sapiens; identical to SEQ ID NO: 197820
  chr1:161591546-161591628
  hyper

SEQ ID NO: 369301 - DNA, 354 bp, Homo sapiens
  chr1:161695853-161696207
  hyper
ctaaggtggctgtgacagtgcaaggtgggagagaccaggggccccgggagggaggcaaatgagcattgagaaattctgggacaggagctcggcgagaaaagaaggggcggaagttcaaatagctgccacttggagggtttctcttagactatggacgctgtctcctctcctttgccgtgaagcagcgcttgatccgccgcctgcttggaggctggtccctttccccgacgcacatcctggcttctcactctggctggggactcccacagagagggcagctctggcaggggcaggggccactgtgggactgggacgaaggagcgactccctagcgtcctgcaaggcaggcgcagc

SEQ ID NO: 369302 - DNA, 903 bp, Homo sapiens; identical to SEQ ID NO: 331011
  chr1:162039148-162040051
  hyper

SEQ ID NO: 369303 - DNA, 60 bp, Homo sapiens; identical to SEQ ID NO: 346381
  chr1:162792553-162792613
  hyper

SEQ ID NO: 369304 - DNA, 55 bp, Homo sapiens; identical to SEQ ID NO: 331013
  chr1:163378364-163378419
  hyper

SEQ ID NO: 369305 - DNA, 204 bp, Homo sapiens; identical to SEQ ID NO: 349344
  chr1:165086756-165086960
  hyper

SEQ ID NO: 369306 - DNA, 60 bp, Homo sapiens; identical to SEQ ID NO: 349345
  chr1:165087027-165087087
  hyper

SEQ ID NO: 369307 - DNA, 103 bp, Homo sapiens; identical to SEQ ID NO: 278995
  chr1:165204594-165204697
  hyper

SEQ ID NO: 369308 - DNA, 93 bp, Homo sapiens; identical to SEQ ID NO: 278996
  chr1:165204732-165204825
  hyper

SEQ ID NO: 369309 - DNA, 87 bp, Homo sapiens; identical to SEQ ID NO: 349348
  chr1:165205366-165205453
  hyper

SEQ ID NO: 369310 - DNA, 138 bp, Homo sapiens; identical to SEQ ID NO: 349349
  chr1:165414053-165414191
  hyper

SEQ ID NO: 369311 - DNA, 805 bp, Homo sapiens; identical to SEQ ID NO: 331017
  chr1:165737832-165738637
  hyper

SEQ ID NO: 369312 - DNA, 629 bp, Homo sapiens; identical to SEQ ID NO: 356926
  chr1:166135586-166136215
  hyper

SEQ ID NO: 369313 - DNA, 263 bp, Homo sapiens; identical to SEQ ID NO: 331021
  chr1:168311912-168312175
  hyper

SEQ ID NO: 369314 - DNA, 328 bp, Homo sapiens; identical to SEQ ID NO: 331022
  chr1:169074766-169075094
  hyper

SEQ ID NO: 369315 - DNA, 128 bp, Homo sapiens; identical to SEQ ID NO: 279040
  chr1:170629412-170629540
  hyper

SEQ ID NO: 369316 - DNA, 101 bp, Homo sapiens
  chr1:170629569-170629670
  hyper
gcttcgcgccccccacccgcccggggaccgcgactaagtccccgacgcagctcttcccttttcctgaataccctgggactctgctcccgagttccagctcc

SEQ ID NO: 369317 - DNA, 255 bp, Homo sapiens; identical to SEQ ID NO: 197848
  chr1:170633637-170633892
  hyper

SEQ ID NO: 369318 - DNA, 135 bp, Homo sapiens; identical to SEQ ID NO: 356930
  chr1:170637507-170637642
  hyper

SEQ ID NO: 369319 - DNA, 346 bp, Homo sapiens; identical to SEQ ID NO: 331030
  chr1:171220542-171220888
  hyper

SEQ ID NO: 369320 - DNA, 135 bp, Homo sapiens; identical to SEQ ID NO: 349354
  chr1:171811643-171811778
  hyper

SEQ ID NO: 369321 - DNA, 108 bp, Homo sapiens; identical to SEQ ID NO: 331033
  chr1:173683937-173684045
  hyper

SEQ ID NO: 369322 - DNA, 301 bp, Homo sapiens; identical to SEQ ID NO: 349355
  chr1:175048508-175048809
  hyper

SEQ ID NO: 369323 - DNA, 227 bp, Homo sapiens; identical to SEQ ID NO: 331035
  chr1:175161560-175161787
  hyper

SEQ ID NO: 369324 - DNA, 116 bp, Homo sapiens; identical to SEQ ID NO: 349357
  chr1:177133329-177133445
  hyper

SEQ ID NO: 369325 - DNA, 177 bp, Homo sapiens; identical to SEQ ID NO: 349358
  chr1:177134163-177134340
  hyper

SEQ ID NO: 369326 - DNA, 98 bp, Homo sapiens; identical to SEQ ID NO: 356938
  chr1:177140714-177140812
  hyper

SEQ ID NO: 369327 - DNA, 31 bp, Homo sapiens; identical to SEQ ID NO: 349359
  chr1:177150742-177150773
  hyper

SEQ ID NO: 369328 - DNA, 693 bp, Homo sapiens; identical to SEQ ID NO: 356940
  chr1:178062419-178063112
  hyper

SEQ ID NO: 369329 - DNA, 475 bp, Homo sapiens; identical to SEQ ID NO: 197861
  chr1:178063150-178063625
  hyper

SEQ ID NO: 369330 - DNA, 112 bp, Homo sapiens; identical to SEQ ID NO: 356942
  chr1:178063733-178063845
  hyper

SEQ ID NO: 369331 - DNA, 194 bp, Homo sapiens; identical to SEQ ID NO: 356943
  chr1:180123493-180123687
  hyper

SEQ ID NO: 369332 - DNA, 883 bp, Homo sapiens
  chr1:180123700-180124583
  hyper
cggcgggcgctccattcctttaccggactgtacacctcgcctcctggggcctgaggcgggaacccgggtcgcgctgctccgaggcctcggcggaccgcgaaaggatggctcaccacccggccagggccagcccctgcaacaagctcagccccgcccgctcccgcgcccaggagcggccggcggggcggggtggctgggccggcctcgggggcgggggctcgggggcgggggctcaggggcggggccacgtggctcctccttgcgggcggaggcaggcggtgccgcggcgccgggacccgactcatccggtgcttgcgtgtggtggtgagcgcagcgccgaggatgaggaggtgcaacagcggctccgggccgccgccgtcgctgctgctgctgctgctgtggctgctcgcggttcccggcgctaacgcggccccgcggtcggcgctctattcgccttccgacccgctgacgctgctgcaggcggacacggtgcgcggcgcggtgctgggctcccgcagcgcctgggccgtggagttcttcgcctcctggtgcggccactgcatcgccttcgccccgacgtggaaggcgctggccgaagacgtcaaaggtgagaagcgggggcggcccgctcccccgtgccccgccgcccggacccctccacctgcccggtgggcagcctcctactccgggagcgcgtccctcttccagtcacctccgcccacctcttcctctccgcgcatcccacgcccaccaccttcatgtttctcagctccatttttgcctcccgctcccttgccttttcctcttggccctcatcccgagcttctttccctctccgcggcctgggcccccagacctgccctgctcgcccggttcgtccccc

SEQ ID NO: 369333 - DNA, 1580 bp, Homo sapiens; identical to SEQ ID NO: 331042
  chr1:180199369-180200949
  hyper

SEQ ID NO: 369334 - DNA, 640 bp, Homo sapiens; identical to SEQ ID NO: 331044
  chr1:181059009-181059649
  hyper

SEQ ID NO: 369335 - DNA, 43 bp, Homo sapiens; identical to SEQ ID NO: 356947
  chr1:181286822-181286865
  hyper

SEQ ID NO: 369336 - DNA, 110 bp, Homo sapiens; identical to SEQ ID NO: 331048
  chr1:182361452-182361562
  hyper

SEQ ID NO: 369337 - DNA, 249 bp, Homo sapiens; identical to SEQ ID NO: 344982
  chr1:182583799-182584048
  hyper

SEQ ID NO: 369338 - DNA, 40 bp, Homo sapiens; identical to SEQ ID NO: 344983
  chr1:182584613-182584653
  hyper

SEQ ID NO: 369339 - DNA, 77 bp, Homo sapiens; identical to SEQ ID NO: 349363
  chr1:182911469-182911546
  hyper

SEQ ID NO: 369340 - DNA, 118 bp, Homo sapiens; identical to SEQ ID NO: 356952
  chr1:184633170-184633288
  hyper

SEQ ID NO: 369341 - DNA, 81 bp, Homo sapiens; identical to SEQ ID NO: 356953
  chr1:184633350-184633431
  hyper

SEQ ID NO: 369342 - DNA, 151 bp, Homo sapiens; identical to SEQ ID NO: 331054
  chr1:184722819-184722970
  hyper

SEQ ID NO: 369343 - DNA, 360 bp, Homo sapiens; identical to SEQ ID NO: 331055
  chr1:184943416-184943776
  hyper

SEQ ID NO: 369344 - DNA, 121 bp, Homo sapiens; identical to SEQ ID NO: 331056
  chr1:185014263-185014384
  hyper

SEQ ID NO: 369345 - DNA, 93 bp, Homo sapiens; identical to SEQ ID NO: 356956
  chr1:196577278-196577371
  hyper

SEQ ID NO: 369346 - DNA, 193 bp, Homo sapiens; identical to SEQ ID NO: 197889
  chr1:196577435-196577628
  hyper

SEQ ID NO: 369347 - DNA, 99 bp, Homo sapiens; identical to SEQ ID NO: 356958
  chr1:197881313-197881412
  hyper

SEQ ID NO: 369348 - DNA, 176 bp, Homo sapiens; identical to SEQ ID NO: 356959
  chr1:197881604-197881780
  hyper

SEQ ID NO: 369349 - DNA, 50 bp, Homo sapiens; identical to SEQ ID NO: 349366
  chr1:197882002-197882052
  hyper

SEQ ID NO: 369350 - DNA, 219 bp, Homo sapiens; identical to SEQ ID NO: 197892
  chr1:197882208-197882427
  hyper

SEQ ID NO: 369351 - DNA, 261 bp, Homo sapiens; identical to SEQ ID NO: 279146
  chr1:197882611-197882872
  hyper

SEQ ID NO: 369352 - DNA, 293 bp, Homo sapiens; identical to SEQ ID NO: 279148
  chr1:199998439-199998732
  hyper

SEQ ID NO: 369353 - DNA, 217 bp, Homo sapiens; identical to SEQ ID NO: 349369
  chr1:200008298-200008515
  hyper

SEQ ID NO: 369354 - DNA, 355 bp, Homo sapiens; identical to SEQ ID NO: 349370
  chr1:200008691-200009046
  hyper

SEQ ID NO: 369355 - DNA, 93 bp, Homo sapiens; identical to SEQ ID NO: 349371
  chr1:200012227-200012320
  hyper

SEQ ID NO: 369356 - DNA, 137 bp, Homo sapiens; identical to SEQ ID NO: 344984
  chr1:200271204-200271341
  hyper

SEQ ID NO: 369357 - DNA, 528 bp, Homo sapiens; identical to SEQ ID NO: 344985
  chr1:200271373-200271901
  hyper

SEQ ID NO: 369358 - DNA, 255 bp, Homo sapiens; identical to SEQ ID NO: 331068
  chr1:200379717-200379972
  hyper

SEQ ID NO: 369359 - DNA, 311 bp, Homo sapiens; identical to SEQ ID NO: 356969
  chr1:201228906-201229217
  hyper

SEQ ID NO: 369360 - DNA, 42 bp, Homo sapiens; identical to SEQ ID NO: 356970
  chr1:201252452-201252494
  hyper

SEQ ID NO: 369361 - DNA, 134 bp, Homo sapiens; identical to SEQ ID NO: 356971
  chr1:201252816-201252950
  hyper

SEQ ID NO: 369362 - DNA, 206 bp, Homo sapiens; identical to SEQ ID NO: 349375
  chr1:201368376-201368582
  hyper

SEQ ID NO: 369363 - DNA, 121 bp, Homo sapiens; identical to SEQ ID NO: 197902
  chr1:201368727-201368848
  hyper

SEQ ID NO: 369364 - DNA, 578 bp, Homo sapiens; identical to SEQ ID NO: 344986
  chr1:201449645-201450223
  hyper

SEQ ID NO: 369365 - DNA, 289 bp, Homo sapiens; identical to SEQ ID NO: 356975
  chr1:201915739-201916028
  hyper

SEQ ID NO: 369366 - DNA, 160 bp, Homo sapiens; identical to SEQ ID NO: 331074
  chr1:202112280-202112440
  hyper

SEQ ID NO: 369367 - DNA, 86 bp, Homo sapiens; identical to SEQ ID NO: 356977
  chr1:202183285-202183371
  hyper

SEQ ID NO: 369368 - DNA, 80 bp, Homo sapiens; identical to SEQ ID NO: 349379
  chr1:202613545-202613625
  hyper

SEQ ID NO: 369369 - DNA, 252 bp, Homo sapiens; identical to SEQ ID NO: 331077
  chr1:202936089-202936341
  hyper

SEQ ID NO: 369370 - DNA, 58 bp, Homo sapiens; identical to SEQ ID NO: 331079
  chr1:203242491-203242549
  hyper

SEQ ID NO: 369371 - DNA, 382 bp, Homo sapiens; identical to SEQ ID NO: 331080
  chr1:203595808-203596190
  hyper

SEQ ID NO: 369372 - DNA, 374 bp, Homo sapiens; identical to SEQ ID NO: 349382
  chr1:204042250-204042624
  hyper

SEQ ID NO: 369373 - DNA, 244 bp, Homo sapiens; identical to SEQ ID NO: 197916
  chr1:204042692-204042936
  hyper

SEQ ID NO: 369374 - DNA, 75 bp, Homo sapiens; identical to SEQ ID NO: 349384
  chr1:204042966-204043041
  hyper

SEQ ID NO: 369375 - DNA, 494 bp, Homo sapiens; identical to SEQ ID NO: 331083
  chr1:204347108-204347602
  hyper

SEQ ID NO: 369376 - DNA, 357 bp, Homo sapiens; identical to SEQ ID NO: 279201
  chr1:204654218-204654575
  hyper

SEQ ID NO: 369377 - DNA, 73 bp, Homo sapiens; identical to SEQ ID NO: 349386
  chr1:204654769-204654842
  hyper

SEQ ID NO: 369378 - DNA, 483 bp, Homo sapiens; identical to SEQ ID NO: 356986
  chr1:205313006-205313489
  hyper

SEQ ID NO: 369379 - DNA, 63 bp, Homo sapiens; identical to SEQ ID NO: 349387
  chr1:205400134-205400197
  hyper

SEQ ID NO: 369380 - DNA, 60 bp, Homo sapiens; identical to SEQ ID NO: 197925
  chr1:205425836-205425896
  hyper

SEQ ID NO: 369381 - DNA, 455 bp, Homo sapiens; identical to SEQ ID NO: 356989
  chr1:205425997-205426452
  hyper

SEQ ID NO: 369382 - DNA, 146 bp, Homo sapiens; identical to SEQ ID NO: 356990
  chr1:207628133-207628279
  hyper

SEQ ID NO: 369383 - DNA, 585 bp, Homo sapiens; identical to SEQ ID NO: 356991
  chr1:209957600-209958185
  hyper

SEQ ID NO: 369384 - DNA, 111 bp, Homo sapiens
  chr1:209979376-209979487
  hyper
cgtcttagccaaggggcgcctggctctacccaagtagggactgcaggttcctctccccgtcccgcaccagcccttacctgcccagcccaggtgcgccgagctcacgtcagc

SEQ ID NO: 369385 - DNA, 124 bp, Homo sapiens; identical to SEQ ID NO: 279228
  chr1:209979488-209979612
  hyper

SEQ ID NO: 369386 - DNA, 179 bp, Homo sapiens; identical to SEQ ID NO: 331096
  chr1:212838662-212838841
  hyper

SEQ ID NO: 369387 - DNA, 257 bp, Homo sapiens; identical to SEQ ID NO: 356993
  chr1:212873467-212873724
  hyper

SEQ ID NO: 369388 - DNA, 224 bp, Homo sapiens; identical to SEQ ID NO: 197940
  chr1:212873750-212873974
  hyper

SEQ ID NO: 369389 - DNA, 116 bp, Homo sapiens; identical to SEQ ID NO: 346393
  chr1:214156950-214157066
  hyper

SEQ ID NO: 369390 - DNA, 59 bp, Homo sapiens
  chr1:214159503-214159562
  hyper
cggttagaacacctgatacaacagtcaatagttggaggtgtgagtggtgcgtgtgcgct

SEQ ID NO: 369391 - DNA, 410 bp, Homo sapiens; identical to SEQ ID NO: 197946
  chr1:214159697-214160107
  hyper

SEQ ID NO: 369392 - DNA, 155 bp, Homo sapiens; identical to SEQ ID NO: 349390
  chr1:214161233-214161388
  hyper

SEQ ID NO: 369393 - DNA, 157 bp, Homo sapiens; identical to SEQ ID NO: 356997
  chr1:214162300-214162457
  hyper

SEQ ID NO: 369394 - DNA, 70 bp, Homo sapiens; identical to SEQ ID NO: 349391
  chr1:214387777-214387847
  hyper

SEQ ID NO: 369395 - DNA, 279 bp, Homo sapiens; identical to SEQ ID NO: 331104
  chr1:214453844-214454123
  hyper

SEQ ID NO: 369396 - DNA, 233 bp, Homo sapiens; identical to SEQ ID NO: 346394
  chr1:214724215-214724448
  hyper

SEQ ID NO: 369397 - DNA, 44 bp, Homo sapiens; identical to SEQ ID NO: 197950
  chr1:214724487-214724531
  hyper

SEQ ID NO: 369398 - DNA, 182 bp, Homo sapiens; identical to SEQ ID NO: 197951
  chr1:214724561-214724743
  hyper

SEQ ID NO: 369399 - DNA, 427 bp, Homo sapiens; identical to SEQ ID NO: 197952
  chr1:214724786-214725213
  hyper

SEQ ID NO: 369400 - DNA, 239 bp, Homo sapiens; identical to SEQ ID NO: 349397
  chr1:214725561-214725800
  hyper

SEQ ID NO: 369401 - DNA, 592 bp, Homo sapiens; identical to SEQ ID NO: 331107
  chr1:216774207-216774799
  hyper

SEQ ID NO: 369402 - DNA, 456 bp, Homo sapiens; identical to SEQ ID NO: 349398
  chr1:218519313-218519769
  hyper

SEQ ID NO: 369403 - DNA, 54 bp, Homo sapiens; identical to SEQ ID NO: 357007
  chr1:218520805-218520859
  hyper

SEQ ID NO: 369404 - DNA, 151 bp, Homo sapiens; identical to SEQ ID NO: 197959
  chr1:219347035-219347186
  hyper

SEQ ID NO: 369405 - DNA, 55 bp, Homo sapiens; identical to SEQ ID NO: 344990
  chr1:219347516-219347571
  hyper

SEQ ID NO: 369406 - DNA, 91 bp, Homo sapiens; identical to SEQ ID NO: 357010
  chr1:220102055-220102146
  hyper

SEQ ID NO: 369407 - DNA, 197 bp, Homo sapiens; identical to SEQ ID NO: 349401
  chr1:220700617-220700814
  hyper

SEQ ID NO: 369408 - DNA, 592 bp, Homo sapiens; identical to SEQ ID NO: 357012
  chr1:220701523-220702115
  hyper

SEQ ID NO: 369409 - DNA, 133 bp, Homo sapiens; identical to SEQ ID NO: 346400
  chr1:220863507-220863640
  hyper

SEQ ID NO: 369410 - DNA, 198 bp, Homo sapiens; identical to SEQ ID NO: 349403
  chr1:220921368-220921566
  hyper

SEQ ID NO: 369411 - DNA, 115 bp, Homo sapiens; identical to SEQ ID NO: 349404
  chr1:220922060-220922175
  hyper

SEQ ID NO: 369412 - DNA, 42 bp, Homo sapiens; identical to SEQ ID NO: 331120
  chr1:220950193-220950235
  hyper

SEQ ID NO: 369413 - DNA, 83 bp, Homo sapiens; identical to SEQ ID NO: 349406
  chr1:221051890-221051973
  hyper

SEQ ID NO: 369414 - DNA, 37 bp, Homo sapiens; identical to SEQ ID NO: 331122
  chr1:223936543-223936580
  hyper

SEQ ID NO: 369415 - DNA, 33 bp, Homo sapiens; identical to SEQ ID NO: 357019
  chr1:224528889-224528922
  hyper

SEQ ID NO: 369416 - DNA, 234 bp, Homo sapiens; identical to SEQ ID NO: 279312
  chr1:224803483-224803717
  hyper

SEQ ID NO: 369417 - DNA, 99 bp, Homo sapiens; identical to SEQ ID NO: 197977
  chr1:225117651-225117750
  hyper

SEQ ID NO: 369418 - DNA, 66 bp, Homo sapiens; identical to SEQ ID NO: 346403
  chr1:225117751-225117817
  hyper

SEQ ID NO: 369419 - DNA, 936 bp, Homo sapiens; identical to SEQ ID NO: 331128
  chr1:225614356-225615292
  hyper

SEQ ID NO: 369420 - DNA, 44 bp, Homo sapiens; identical to SEQ ID NO: 349411
  chr1:226736488-226736532
  hyper

SEQ ID NO: 369421 - DNA, 67 bp, Homo sapiens; identical to SEQ ID NO: 349412
  chr1:226814279-226814346
  hyper

SEQ ID NO: 369422 - DNA, 34 bp, Homo sapiens; identical to SEQ ID NO: 344992
  chr1:226924738-226924772
  hyper

SEQ ID NO: 369423 - DNA, 1206 bp, Homo sapiens; identical to SEQ ID NO: 197984
  chr1:226925659-226926865
  hyper

SEQ ID NO: 369424 - DNA, 49 bp, Homo sapiens; identical to SEQ ID NO: 344995
  chr1:226926951-226927000
  hyper

SEQ ID NO: 369425 - DNA, 260 bp, Homo sapiens; identical to SEQ ID NO: 349416
  chr1:227505256-227505516
  hyper

SEQ ID NO: 369426 - DNA, 153 bp, Homo sapiens; identical to SEQ ID NO: 197988
  chr1:227505859-227506012
  hyper

SEQ ID NO: 369427 - DNA, 212 bp, Homo sapiens; identical to SEQ ID NO: 349418
  chr1:227506042-227506254
  hyper

SEQ ID NO: 369428 - DNA, 84 bp, Homo sapiens; identical to SEQ ID NO: 357032
  chr1:228225442-228225526
  hyper

SEQ ID NO: 369429 - DNA, 62 bp, Homo sapiens; identical to SEQ ID NO: 357033
  chr1:228225939-228226001
  hyper

SEQ ID NO: 369430 - DNA, 118 bp, Homo sapiens; identical to SEQ ID NO: 331141
  chr1:228646027-228646145
  hyper

SEQ ID NO: 369431 - DNA, 253 bp, Homo sapiens; identical to SEQ ID NO: 279361
  chr1:228646941-228647194
  hyper

SEQ ID NO: 369432 - DNA, 117 bp, Homo sapiens; identical to SEQ ID NO: 279362
  chr1:228647317-228647434
  hyper

SEQ ID NO: 369433 - DNA, 142 bp, Homo sapiens; identical to SEQ ID NO: 357036
  chr1:228652629-228652771
  hyper

SEQ ID NO: 369434 - DNA, 97 bp, Homo sapiens; identical to SEQ ID NO: 346407
  chr1:228870708-228870805
  hyper

SEQ ID NO: 369435 - DNA, 328 bp, Homo sapiens; identical to SEQ ID NO: 198004
  chr1:228870899-228871227
  hyper

SEQ ID NO: 369436 - DNA, 269 bp, Homo sapiens; identical to SEQ ID NO: 198005
  chr1:228871596-228871865
  hyper

SEQ ID NO: 369437 - DNA, 252 bp, Homo sapiens; identical to SEQ ID NO: 349424
  chr1:228872003-228872255
  hyper

SEQ ID NO: 369438 - DNA, 103 bp, Homo sapiens; identical to SEQ ID NO: 349425
  chr1:229543603-229543706
  hyper

SEQ ID NO: 369439 - DNA, 618 bp, Homo sapiens; identical to SEQ ID NO: 357042
  chr1:230561973-230562591
  hyper

SEQ ID NO: 369440 - DNA, 44 bp, Homo sapiens; identical to SEQ ID NO: 357043
  chr1:231053141-231053185
  hyper

SEQ ID NO: 369441 - DNA, 587 bp, Homo sapiens; identical to SEQ ID NO: 349427
  chr1:231175062-231175649
  hyper

SEQ ID NO: 369442 - DNA, 709 bp, Homo sapiens; identical to SEQ ID NO: 349428
  chr1:231175692-231176401
  hyper

SEQ ID NO: 369443 - DNA, 228 bp, Homo sapiens; identical to SEQ ID NO: 198012
  chr1:231297569-231297797
  hyper

SEQ ID NO: 369444 - DNA, 155 bp, Homo sapiens; identical to SEQ ID NO: 349430
  chr1:232765040-232765195
  hyper

SEQ ID NO: 369445 - DNA, 162 bp, Homo sapiens; identical to SEQ ID NO: 198015
  chr1:232765375-232765537
  hyper

SEQ ID NO: 369446 - DNA, 411 bp, Homo sapiens; identical to SEQ ID NO: 349432
  chr1:232765595-232766006
  hyper

SEQ ID NO: 369447 - DNA, 199 bp, Homo sapiens
  chr1:232941054-232941253
  hyper
cgcccgagacccgctggagcgcttccgcaaatctcgcgagatagcaggcagcgatgccttttgctccggtttctcgtgagaccccggggcttcagcttctcgtttgcggagcccgcggcggcgtttcctggggcaacagcaatggcggcctcgctgtccgagcggctcttctcgctggagctgctggtggactgggtgc

SEQ ID NO: 369448 - DNA, 345 bp, Homo sapiens; identical to SEQ ID NO: 198018
  chr1:232941254-232941599
  hyper

SEQ ID NO: 369449 - DNA, 322 bp, Homo sapiens; identical to SEQ ID NO: 357051
  chr1:233749409-233749731
  hyper

SEQ ID NO: 369450 - DNA, 314 bp, Homo sapiens; identical to SEQ ID NO: 198020
  chr1:233749768-233750082
  hyper

SEQ ID NO: 369451 - DNA, 181 bp, Homo sapiens; identical to SEQ ID NO: 349434
  chr1:233750511-233750692
  hyper

SEQ ID NO: 369452 - DNA, 116 bp, Homo sapiens; identical to SEQ ID NO: 279397
  chr1:234350341-234350457
  hyper

SEQ ID NO: 369453 - DNA, 174 bp, Homo sapiens; identical to SEQ ID NO: 349435
  chr1:234736252-234736426
  hyper

SEQ ID NO: 369454 - DNA, 162 bp, Homo sapiens; identical to SEQ ID NO: 331158
  chr1:234812061-234812223
  hyper

SEQ ID NO: 369455 - DNA, 81 bp, Homo sapiens; identical to SEQ ID NO: 357057
  chr1:235811934-235812015
  hyper

SEQ ID NO: 369456 - DNA, 184 bp, Homo sapiens; identical to SEQ ID NO: 279411
  chr1:235813161-235813345
  hyper

SEQ ID NO: 369457 - DNA, 694 bp, Homo sapiens; identical to SEQ ID NO: 331162
  chr1:236444211-236444905
  hyper

SEQ ID NO: 369458 - DNA, 98 bp, Homo sapiens; identical to SEQ ID NO: 349438
  chr1:236850212-236850310
  hyper

SEQ ID NO: 369459 - DNA, 36 bp, Homo sapiens; identical to SEQ ID NO: 198032
  chr1:237205188-237205224
  hyper

SEQ ID NO: 369460 - DNA, 206 bp, Homo sapiens
  chr1:239549378-239549584
  hyper
cgtcctctattacactgctctgcagaaacagactcactaaatgtcaaaaagtagatgcatcagactgttccttagagaaaggtttgccatggagtcgtatattgtaactgagctgaagttcactcatcgataagttgtgcccaaggaatcgaattccttccagtccttctaagcagtccagggaaaccaatttaaaagcgaacaca

SEQ ID NO: 369461 - DNA, 219 bp, Homo sapiens; identical to SEQ ID NO: 198034
  chr1:239549815-239550034
  hyper

SEQ ID NO: 369462 - DNA, 420 bp, Homo sapiens; identical to SEQ ID NO: 349439
  chr1:241519651-241520071
  hyper

SEQ ID NO: 369463 - DNA, 50 bp, Homo sapiens; identical to SEQ ID NO: 198037
  chr1:241520533-241520583
  hyper

SEQ ID NO: 369464 - DNA, 147 bp, Homo sapiens; identical to SEQ ID NO: 198038
  chr1:241520612-241520759
  hyper

SEQ ID NO: 369465 - DNA, 91 bp, Homo sapiens; identical to SEQ ID NO: 349442
  chr1:241520789-241520880
  hyper

SEQ ID NO: 369466 - DNA, 156 bp, Homo sapiens; identical to SEQ ID NO: 357065
  chr1:243646223-243646379
  hyper

SEQ ID NO: 369467 - DNA, 836 bp, Homo sapiens; identical to SEQ ID NO: 331173
  chr1:244012299-244013135
  hyper

SEQ ID NO: 369468 - DNA, 499 bp, Homo sapiens; identical to SEQ ID NO: 349443
  chr1:244013722-244014221
  hyper

SEQ ID NO: 369469 - DNA, 168 bp, Homo sapiens; identical to SEQ ID NO: 279435
  chr1:244080795-244080963
  hyper

SEQ ID NO: 369470 - DNA, 137 bp, Homo sapiens; identical to SEQ ID NO: 349444
  chr1:247170868-247171005
  hyper

SEQ ID NO: 369471 - DNA, 307 bp, Homo sapiens; identical to SEQ ID NO: 331178
  chr1:247241973-247242280
  hyper

SEQ ID NO: 369472 - DNA, 819 bp, Homo sapiens; identical to SEQ ID NO: 331179
  chr1:247267064-247267883
  hyper

SEQ ID NO: 369473 - DNA, 177 bp, Homo sapiens; identical to SEQ ID NO: 331181
  chr1:248406552-248406729
  hyper

SEQ ID NO: 369474 - DNA, 534 bp, Homo sapiens; identical to SEQ ID NO: 357072
  chr2:45398-45932
  hyper

SEQ ID NO: 369475 - DNA, 245 bp, Homo sapiens; identical to SEQ ID NO: 279456
  chr2:45969-46214
  hyper

SEQ ID NO: 369476 - DNA, 143 bp, Homo sapiens; identical to SEQ ID NO: 357074
  chr2:46450-46593
  hyper

SEQ ID NO: 369477 - DNA, 530 bp, Homo sapiens; identical to SEQ ID NO: 357075
  chr2:46665-47195
  hyper

SEQ ID NO: 369478 - DNA, 269 bp, Homo sapiens
  chr2:263894-264163
  hyper
cgccggttttcccgtcctcctcctcccaccaccgcccagctcttgagaggggagggtgctgccggacaggtgggtccccgggtactcactgctgcccgcccggccgcggcgccccgtcccgaggctgcccaggaagaggaaggcgcgctgccccgccccgcggacaaggaggccccagcgagggcgtacctgcggcaggtgacgaaggaggcggcgcaaaacacccgccgtgtacgtttcgcgggacaaaaaccacgcgcccgccgggc

SEQ ID NO: 369479 - DNA, 259 bp, Homo sapiens
  chr2:264204-264463
  hyper
gtcctcaagatcgaaaagcccagagccccgcggcggctccaagcacggtgttgggggtgggggtctcagggagcgcccaggcccaaggccgccctggtccggcgtggaccccgcggggctcaaggcaggttccccgcgtgacccgcccagcccctctatgcgaactcgaacgacaggcaccacagcccgccacgtgcgcgagactcgcgctgtgccccaacccaggtgggcggcccgcggagccgcgaggcctgagccc

SEQ ID NO: 369480 - DNA, 105 bp, Homo sapiens; identical to SEQ ID NO: 357076
  chr2:945447-945552
  hyper

SEQ ID NO: 369481 - DNA, 128 bp, Homo sapiens; identical to SEQ ID NO: 331190
  chr2:3307454-3307582
  hyper

SEQ ID NO: 369482 - DNA, 74 bp, Homo sapiens
  chr2:5834133-5834207
  hyper
ggactggctggaggcgaacttctccgacctggtgttcacatattgaaaggcgcccgctgctcgctctttctctc

SEQ ID NO: 369483 - DNA, 259 bp, Homo sapiens; identical to SEQ ID NO: 357078
  chr2:5866211-5866470
  hyper

SEQ ID NO: 369484 - DNA, 270 bp, Homo sapiens; identical to SEQ ID NO: 357079
  chr2:7005163-7005433
  hyper

SEQ ID NO: 369485 - DNA, 728 bp, Homo sapiens; identical to SEQ ID NO: 349448
  chr2:7005469-7006197
  hyper

SEQ ID NO: 369486 - DNA, 291 bp, Homo sapiens; identical to SEQ ID NO: 344998
  chr2:7057762-7058053
  hyper

SEQ ID NO: 369487 - DNA, 41 bp, Homo sapiens; identical to SEQ ID NO: 344999
  chr2:7058391-7058432
  hyper

SEQ ID NO: 369488 - DNA, 211 bp, Homo sapiens
  chr2:9143655-9143866
  hyper
cgcctcggggtacctggtcgatgggcagctgcacggcgttgctgaggggctgcagcagggtggagcccgtggtgctggtggtggccatggccgggcctcggcgctccggccgcccgcgccgctcgcccgctcgcgctgtgccgggcgacgacgaggatggggatgcagcggcgcgcccgcccctgggccgcccgcggtcggagctctgcgc

SEQ ID NO: 369489 - DNA, 166 bp, Homo sapiens; identical to SEQ ID NO: 331200
  chr2:10152421-10152587
  hyper

SEQ ID NO: 369490 - DNA, 201 bp, Homo sapiens; identical to SEQ ID NO: 357084
  chr2:10183602-10183803
  hyper

SEQ ID NO: 369491 - DNA, 439 bp, Homo sapiens; identical to SEQ ID NO: 357085
  chr2:10183814-10184253
  hyper

SEQ ID NO: 369492 - DNA, 213 bp, Homo sapiens; identical to SEQ ID NO: 331202
  chr2:10587836-10588049
  hyper

SEQ ID NO: 369493 - DNA, 178 bp, Homo sapiens; identical to SEQ ID NO: 345000
  chr2:10588876-10589054
  hyper

SEQ ID NO: 369494 - DNA, 117 bp, Homo sapiens; identical to SEQ ID NO: 198078
  chr2:10589055-10589172
  hyper

SEQ ID NO: 369495 - DNA, 197 bp, Homo sapiens; identical to SEQ ID NO: 345002
  chr2:10589298-10589495
  hyper

SEQ ID NO: 369496 - DNA, 409 bp, Homo sapiens
  chr2:10862101-10862510
  hyper
acaaaatgccctcggattggagcgggaccgggagtccgaaaggaagaggttccaccaggggtctctggctcctcagagcttatcctgctttcccccagccgtccggagacgccgcggggaggcaagcggaaagggggaacctggccgagggggaaaggtgcgggtgtggacacctgtgaaggagcagcacgaatcgaatcggccgtagaggctgcagacgcggccgcgaaaccaccggccacgccgggcaagggacccagcactgctgagcgggcacctcgcctagtggaaaaaagactttagtagttcccctcaccccctactacttttttttttcttatttaaaaaaatcctctgaagtctatttttaaagctaataccaatcacaaggttggccagtttgacctgc

SEQ ID NO: 369497 - DNA, 42 bp, Homo sapiens; identical to SEQ ID NO: 357090
  chr2:11051801-11051843
  hyper

SEQ ID NO: 369498 - DNA, 229 bp, Homo sapiens; identical to SEQ ID NO: 279516
  chr2:11052132-11052361
  hyper

SEQ ID NO: 369499 - DNA, 70 bp, Homo sapiens; identical to SEQ ID NO: 346417
  chr2:12856411-12856481
  hyper

SEQ ID NO: 369500 - DNA, 849 bp, Homo sapiens; identical to SEQ ID NO: 346418
  chr2:12856549-12857398
  hyper

SEQ ID NO: 369501 - DNA, 184 bp, Homo sapiens; identical to SEQ ID NO: 357094
  chr2:12857960-12858144
  hyper

SEQ ID NO: 369502 - DNA, 283 bp, Homo sapiens; identical to SEQ ID NO: 357095
  chr2:14772282-14772565
  hyper

SEQ ID NO: 369503 - DNA, 167 bp, Homo sapiens; identical to SEQ ID NO: 357096
  chr2:14772823-14772990
  hyper

SEQ ID NO: 369504 - DNA, 78 bp, Homo sapiens; identical to SEQ ID NO: 357097
  chr2:14773829-14773907
  hyper

SEQ ID NO: 369505 - DNA, 239 bp, Homo sapiens; identical to SEQ ID NO: 198087
  chr2:14774042-14774281
  hyper

SEQ ID NO: 369506 - DNA, 255 bp, Homo sapiens; identical to SEQ ID NO: 198088
  chr2:14774684-14774939
  hyper

SEQ ID NO: 369507 - DNA, 239 bp, Homo sapiens; identical to SEQ ID NO: 198089
  chr2:14775287-14775526
  hyper

SEQ ID NO: 369508 - DNA, 359 bp, Homo sapiens; identical to SEQ ID NO: 357101
  chr2:16790115-16790474
  hyper

SEQ ID NO: 369509 - DNA, 460 bp, Homo sapiens; identical to SEQ ID NO: 331212
  chr2:17699502-17699962
  hyper

SEQ ID NO: 369510 - DNA, 159 bp, Homo sapiens; identical to SEQ ID NO: 349460
  chr2:17721363-17721522
  hyper

SEQ ID NO: 369511 - DNA, 241 bp, Homo sapiens; identical to SEQ ID NO: 349461
  chr2:17721867-17722108
  hyper

SEQ ID NO: 369512 - DNA, 419 bp, Homo sapiens; identical to SEQ ID NO: 279542
  chr2:18060198-18060617
  hyper

SEQ ID NO: 369513 - DNA, 137 bp, Homo sapiens; identical to SEQ ID NO: 198097
  chr2:19550409-19550546
  hyper

SEQ ID NO: 369514 - DNA, 274 bp, Homo sapiens; identical to SEQ ID NO: 346421
  chr2:19550611-19550885
  hyper

SEQ ID NO: 369515 - DNA, 297 bp, Homo sapiens; identical to SEQ ID NO: 349464
  chr2:19551656-19551953
  hyper

SEQ ID NO: 369516 - DNA, 361 bp, Homo sapiens; identical to SEQ ID NO: 279548
  chr2:19557098-19557459
  hyper

SEQ ID NO: 369517 - DNA, 137 bp, Homo sapiens; identical to SEQ ID NO: 357110
  chr2:19557489-19557626
  hyper

SEQ ID NO: 369518 - DNA, 33 bp, Homo sapiens; identical to SEQ ID NO: 357111
  chr2:19557652-19557685
  hyper

SEQ ID NO: 369519 - DNA, 234 bp, Homo sapiens; identical to SEQ ID NO: 279550
  chr2:19557727-19557961
  hyper

SEQ ID NO: 369520 - DNA, 340 bp, Homo sapiens; identical to SEQ ID NO: 279551
  chr2:19558041-19558381
  hyper

SEQ ID NO: 369521 - DNA, 286 bp, Homo sapiens; identical to SEQ ID NO: 357114
  chr2:19561707-19561993
  hyper

SEQ ID NO: 369522 - DNA, 141 bp, Homo sapiens; identical to SEQ ID NO: 357115
  chr2:19563170-19563311
  hyper

SEQ ID NO: 369523 - DNA, 67 bp, Homo sapiens; identical to SEQ ID NO: 357116
  chr2:19563433-19563500
  hyper

SEQ ID NO: 369524 - DNA, 431 bp, Homo sapiens; identical to SEQ ID NO: 345003
  chr2:20425309-20425740
  hyper

SEQ ID NO: 369525 - DNA, 387 bp, Homo sapiens; identical to SEQ ID NO: 357118
  chr2:20646879-20647266
  hyper

SEQ ID NO: 369526 - DNA, 461 bp, Homo sapiens; identical to SEQ ID NO: 357119
  chr2:20647309-20647770
  hyper

SEQ ID NO: 369527 - DNA, 174 bp, Homo sapiens; identical to SEQ ID NO: 346423
  chr2:20865462-20865636
  hyper

SEQ ID NO: 369528 - DNA, 449 bp, Homo sapiens; identical to SEQ ID NO: 198111
  chr2:20866660-20867109
  hyper

SEQ ID NO: 369529 - DNA, 155 bp, Homo sapiens; identical to SEQ ID NO: 349468
  chr2:20867313-20867468
  hyper

SEQ ID NO: 369530 - DNA, 508 bp, Homo sapiens; identical to SEQ ID NO: 198113
  chr2:21022199-21022707
  hyper

SEQ ID NO: 369531 - DNA, 249 bp, Homo sapiens; identical to SEQ ID NO: 198115
  chr2:23609647-23609896
  hyper

SEQ ID NO: 369532 - DNA, 206 bp, Homo sapiens; identical to SEQ ID NO: 349471
  chr2:23610070-23610276
  hyper

SEQ ID NO: 369533 - DNA, 513 bp, Homo sapiens; identical to SEQ ID NO: 349472
  chr2:24272450-24272963
  hyper

SEQ ID NO: 369534 - DNA, 243 bp, Homo sapiens; identical to SEQ ID NO: 357127
  chr2:24714924-24715167
  hyper

SEQ ID NO: 369535 - DNA, 206 bp, Homo sapiens; identical to SEQ ID NO: 349473
  chr2:25142479-25142685
  hyper

SEQ ID NO: 369536 - DNA, 287 bp, Homo sapiens; identical to SEQ ID NO: 357129
  chr2:25354461-25354748
  hyper

SEQ ID NO: 369537 - DNA, 44 bp, Homo sapiens; identical to SEQ ID NO: 357130
  chr2:25354957-25355001
  hyper

SEQ ID NO: 369538 - DNA, 93 bp, Homo sapiens; identical to SEQ ID NO: 331235
  chr2:25464444-25464537
  hyper

SEQ ID NO: 369539 - DNA, 79 bp, Homo sapiens; identical to SEQ ID NO: 198137
  chr2:26521880-26521959
  hyper

SEQ ID NO: 369540 - DNA, 374 bp, Homo sapiens; identical to SEQ ID NO: 349476
  chr2:26522127-26522501
  hyper

SEQ ID NO: 369541 - DNA, 63 bp, Homo sapiens
  chr2:26915614-26915677
  hyper
cgggtgcccggcgcggagagcggcgagcgcagccatgccccaggccgcctccggggcagcagc

SEQ ID NO: 369542 - DNA, 54 bp, Homo sapiens; identical to SEQ ID NO: 357134
  chr2:27069931-27069985
  hyper

SEQ ID NO: 369543 - DNA, 50 bp, Homo sapiens; identical to SEQ ID NO: 357135
  chr2:27165764-27165814
  hyper

SEQ ID NO: 369544 - DNA, 134 bp, Homo sapiens; identical to SEQ ID NO: 357136
  chr2:27304246-27304380
  hyper

SEQ ID NO: 369545 - DNA, 250 bp, Homo sapiens; identical to SEQ ID NO: 198140
  chr2:27308893-27309143
  hyper

SEQ ID NO: 369546 - DNA, 111 bp, Homo sapiens; identical to SEQ ID NO: 1396
  chr2:27309206-27309317
  hyper

SEQ ID NO: 369547 - DNA, 88 bp, Homo sapiens; identical to SEQ ID NO: 349479
  chr2:27473102-27473190
  hyper

SEQ ID NO: 369548 - DNA, 58 bp, Homo sapiens; identical to SEQ ID NO: 346425
  chr2:27938267-27938325
  hyper

SEQ ID NO: 369549 - DNA, 51 bp, Homo sapiens; identical to SEQ ID NO: 349481
  chr2:29033285-29033336
  hyper

SEQ ID NO: 369550 - DNA, 206 bp, Homo sapiens; identical to SEQ ID NO: 198150
  chr2:30143712-30143918
  hyper

SEQ ID NO: 369551 - DNA, 157 bp, Homo sapiens; identical to SEQ ID NO: 357143
  chr2:30144693-30144850
  hyper

SEQ ID NO: 369552 - DNA, 37 bp, Homo sapiens; identical to SEQ ID NO: 345005
  chr2:30453530-30453567
  hyper

SEQ ID NO: 369553 - DNA, 461 bp, Homo sapiens; identical to SEQ ID NO: 357145
  chr2:30454942-30455403
  hyper

SEQ ID NO: 369554 - DNA, 68 bp, Homo sapiens; identical to SEQ ID NO: 198154
  chr2:31361021-31361089
  hyper

SEQ ID NO: 369555 - DNA, 178 bp, Homo sapiens; identical to SEQ ID NO: 198155
  chr2:31361118-31361296
  hyper

SEQ ID NO: 369556 - DNA, 70 bp, Homo sapiens; identical to SEQ ID NO: 346429
  chr2:31361690-31361760
  hyper

SEQ ID NO: 369557 - DNA, 105 bp, Homo sapiens; identical to SEQ ID NO: 198157
  chr2:31457427-31457532
  hyper

SEQ ID NO: 369558 - DNA, 408 bp, Homo sapiens; identical to SEQ ID NO: 349487
  chr2:32852661-32853069
  hyper

SEQ ID NO: 369559 - DNA, 702 bp, Homo sapiens; identical to SEQ ID NO: 357151
  chr2:37899247-37899949
  hyper

SEQ ID NO: 369560 - DNA, 60 bp, Homo sapiens; identical to SEQ ID NO: 357152
  chr2:37899997-37900057
  hyper

SEQ ID NO: 369561 - DNA, 135 bp, Homo sapiens; identical to SEQ ID NO: 357153
  chr2:38303709-38303844
  hyper

SEQ ID NO: 369562 - DNA, 134 bp, Homo sapiens; identical to SEQ ID NO: 331260
  chr2:38342446-38342580
  hyper

SEQ ID NO: 369563 - DNA, 199 bp, Homo sapiens; identical to SEQ ID NO: 331262
  chr2:39663585-39663784
  hyper

SEQ ID NO: 369564 - DNA, 239 bp, Homo sapiens
  chr2:42274305-42274544
  hyper
cgcggctgaccccgtcagaccccaggcatcttgaggggtagggagcgacccccagctgcatttggggctttagaggcaaggaaaatcagaaacactttggtaaaaggagttgaacagggcatcctcggcgagctcacgagcattcctctatgcctagagctcctgtcccacgcgcgctcgcaggtgctggcccggctgtgcccgcttccccctcaccatcgccccaatccggaatccgg

SEQ ID NO: 369565 - DNA, 1085 bp, Homo sapiens; identical to SEQ ID NO: 279692
  chr2:42274691-42275776
  hyper

SEQ ID NO: 369566 - DNA, 76 bp, Homo sapiens; identical to SEQ ID NO: 357156
  chr2:42720186-42720262
  hyper

SEQ ID NO: 369567 - DNA, 281 bp, Homo sapiens; identical to SEQ ID NO: 357157
  chr2:42721246-42721527
  hyper

SEQ ID NO: 369568 - DNA, 63 bp, Homo sapiens; identical to SEQ ID NO: 345009
  chr2:43019535-43019598
  hyper

SEQ ID NO: 369569 - DNA, 70 bp, Homo sapiens; identical to SEQ ID NO: 346432
  chr2:43020503-43020573
  hyper

SEQ ID NO: 369570 - DNA, 52 bp, Homo sapiens
  chr2:43037884-43037936
  hyper
cgcaagcaggaagcagctcgcagtggactctcaataccccttttccgagcta

SEQ ID NO: 369571 - DNA, 395 bp, Homo sapiens; identical to SEQ ID NO: 345010
  chr2:43452443-43452838
  hyper

SEQ ID NO: 369572 - DNA, 367 bp, Homo sapiens; identical to SEQ ID NO: 279710
  chr2:43864730-43865097
  hyper

SEQ ID NO: 369573 - DNA, 104 bp, Homo sapiens
  chr2:45157711-45157815
  hyper
agtcttgtggccctggcagaggtgacaagggcatttgggaaagacagagaaaaataaattcgctccagtgactgtacacggggcatttgaggctgtgagaaaac

SEQ ID NO: 369574 - DNA, 125 bp, Homo sapiens
  chr2:45161096-45161221
  hyper
cggggagcagcggcttttcaccctgctatagggaggtgcgtttggctgagctgtccccccaccaaataaagctaatgatgtagtaatttaggagggggagaggggctgggcaaaaggagagaggg

SEQ ID NO: 369575 - DNA, 47 bp, Homo sapiens; identical to SEQ ID NO: 349493
  chr2:45164561-45164608
  hyper

SEQ ID NO: 369576 - DNA, 314 bp, Homo sapiens; identical to SEQ ID NO: 279718
  chr2:45165156-45165470
  hyper

SEQ ID NO: 369577 - DNA, 228 bp, Homo sapiens; identical to SEQ ID NO: 198186
  chr2:45396995-45397223
  hyper

SEQ ID NO: 369578 - DNA, 481 bp, Homo sapiens; identical to SEQ ID NO: 357165
  chr2:46525231-46525712
  hyper

SEQ ID NO: 369579 - DNA, 245 bp, Homo sapiens; identical to SEQ ID NO: 198189
  chr2:46525757-46526002
  hyper

SEQ ID NO: 369580 - DNA, 63 bp, Homo sapiens; identical to SEQ ID NO: 198190
  chr2:46526239-46526302
  hyper

SEQ ID NO: 369581 - DNA, 54 bp, Homo sapiens
  chr2:46526448-46526502
  hyper
ttgggccctgctcccctttcctggccgtagtcccccctttctcgtcaccgtcgc

SEQ ID NO: 369582 - DNA, 144 bp, Homo sapiens; identical to SEQ ID NO: 331289
  chr2:46689161-46689305
  hyper

SEQ ID NO: 369583 - DNA, 537 bp, Homo sapiens; identical to SEQ ID NO: 331290
  chr2:47142873-47143410
  hyper

SEQ ID NO: 369584 - DNA, 462 bp, Homo sapiens; identical to SEQ ID NO: 345011
  chr2:47499350-47499812
  hyper

SEQ ID NO: 369585 - DNA, 73 bp, Homo sapiens; identical to SEQ ID NO: 331292
  chr2:47656947-47657020
  hyper

SEQ ID NO: 369586 - DNA, 59 bp, Homo sapiens; identical to SEQ ID NO: 357170
  chr2:47747991-47748050
  hyper

SEQ ID NO: 369587 - DNA, 203 bp, Homo sapiens; identical to SEQ ID NO: 279765
  chr2:47748523-47748726
  hyper

SEQ ID NO: 369588 - DNA, 182 bp, Homo sapiens; identical to SEQ ID NO: 279782
  chr2:50573865-50574047
  hyper

SEQ ID NO: 369589 - DNA, 448 bp, Homo sapiens; identical to SEQ ID NO: 198207
  chr2:54784958-54785406
  hyper

SEQ ID NO: 369590 - DNA, 716 bp, Homo sapiens; identical to SEQ ID NO: 346436
  chr2:54785407-54786123
  hyper

SEQ ID NO: 369591 - DNA, 397 bp, Homo sapiens; identical to SEQ ID NO: 331298
  chr2:54798152-54798549
  hyper

SEQ ID NO: 369592 - DNA, 546 bp, Homo sapiens; identical to SEQ ID NO: 331299
  chr2:55509233-55509779
  hyper

SEQ ID NO: 369593 - DNA, 60 bp, Homo sapiens; identical to SEQ ID NO: 349500
  chr2:56149749-56149809
  hyper

SEQ ID NO: 369594 - DNA, 89 bp, Homo sapiens; identical to SEQ ID NO: 198215
  chr2:56150447-56150536
  hyper

SEQ ID NO: 369595 - DNA, 53 bp, Homo sapiens
  chr2:56410764-56410817
  hyper
cgatccctccaaatacgaagcacctcgcatttgggtcagcagctgtttcccct

SEQ ID NO: 369596 - DNA, 276 bp, Homo sapiens; identical to SEQ ID NO: 279805
  chr2:56411253-56411529
  hyper

SEQ ID NO: 369597 - DNA, 194 bp, Homo sapiens; identical to SEQ ID NO: 331303
  chr2:60777883-60778077
  hyper

SEQ ID NO: 369598 - DNA, 50 bp, Homo sapiens; identical to SEQ ID NO: 357179
  chr2:60780349-60780399
  hyper

SEQ ID NO: 369599 - DNA, 541 bp, Homo sapiens; identical to SEQ ID NO: 346437
  chr2:60783811-60784352
  hyper

SEQ ID NO: 369600 - DNA, 373 bp, Homo sapiens; identical to SEQ ID NO: 349503
  chr2:60784505-60784878
  hyper

SEQ ID NO: 369601 - DNA, 362 bp, Homo sapiens; identical to SEQ ID NO: 331309
  chr2:61109154-61109516
  hyper

SEQ ID NO: 369602 - DNA, 109 bp, Homo sapiens; identical to SEQ ID NO: 331310
  chr2:61110127-61110236
  hyper

SEQ ID NO: 369603 - DNA, 428 bp, Homo sapiens; identical to SEQ ID NO: 357184
  chr2:61175657-61176085
  hyper

SEQ ID NO: 369604 - DNA, 203 bp, Homo sapiens
  chr2:62081268-62081471
  hyper
cggttgctatgggcgccgtaactggggacgctacaggagccgccagggaccaaaagtcacgcaaaatccactcaggctgccagagacccgagtcgggtgcttactggatcatggcagtcagtaccgagtctgttggctggttccgaaggttggcaggctgaacagggcacttattccactcctttgcgtctaaccgcctgaac

SEQ ID NO: 369605 - DNA, 203 bp, Homo sapiens; identical to SEQ ID NO: 349506
  chr2:63278430-63278633
  hyper

SEQ ID NO: 369606 - DNA, 282 bp, Homo sapiens; identical to SEQ ID NO: 349507
  chr2:63279141-63279423
  hyper

SEQ ID NO: 369607 - DNA, 98 bp, Homo sapiens; identical to SEQ ID NO: 357187
  chr2:63282552-63282650
  hyper

SEQ ID NO: 369608 - DNA, 89 bp, Homo sapiens; identical to SEQ ID NO: 357188
  chr2:63284469-63284558
  hyper

SEQ ID NO: 369609 - DNA, 54 bp, Homo sapiens; identical to SEQ ID NO: 346439
  chr2:63287368-63287422
  hyper

SEQ ID NO: 369610 - DNA, 354 bp, Homo sapiens; identical to SEQ ID NO: 331320
  chr2:64994400-64994754
  hyper

SEQ ID NO: 369611 - DNA, 76 bp, Homo sapiens; identical to SEQ ID NO: 357191
  chr2:66652787-66652863
  hyper

SEQ ID NO: 369612 - DNA, 59 bp, Homo sapiens; identical to SEQ ID NO: 198245
  chr2:66652963-66653022
  hyper

SEQ ID NO: 369613 - DNA, 81 bp, Homo sapiens
  chr2:66654136-66654217
  hyper
cgacctgccagtcaatgaagttatcctccgggagctgggaagaaggggcgcctcgcggggctgtgggctcggttgcgaacc

SEQ ID NO: 369614 - DNA, 951 bp, Homo sapiens; identical to SEQ ID NO: 331322
  chr2:66660936-66661887
  hyper

SEQ ID NO: 369615 - DNA, 391 bp, Homo sapiens
  chr2:66803754-66804145
  hyper
gggggctggagggcacatggaacgcgtgcacggcccactaggagggcgttgggaggagagtgcccgagtctggagccgcagccgggaagccgtagacagcaccccgacgccttaggcagaagctcctcaggatcactttaaaagctctgcaaactttccccagcctttcggataccctcaggcccttggcccaccggaaggcagtaaaaacgtaacttcatgctgcaaagctcccgggtaggcgcttggacgccgatggagagaggcgtggaactgggtagtggggcgccctgcctggctgggcacttttccttgtctcattctcgtctcccatgccatgccttacccactggctgctagcggcgcgtttcacttaaggtggccacggtgc

SEQ ID NO: 369616 - DNA, 213 bp, Homo sapiens; identical to SEQ ID NO: 331326
  chr2:67624288-67624501
  hyper

SEQ ID NO: 369617 - DNA, 79 bp, Homo sapiens; identical to SEQ ID NO: 346440
  chr2:68547270-68547349
  hyper

SEQ ID NO: 369618 - DNA, 74 bp, Homo sapiens; identical to SEQ ID NO: 357195
  chr2:69533984-69534058
  hyper

SEQ ID NO: 369619 - DNA, 317 bp, Homo sapiens; identical to SEQ ID NO: 346441
  chr2:70351179-70351496
  hyper

SEQ ID NO: 369620 - DNA, 236 bp, Homo sapiens; identical to SEQ ID NO: 346442
  chr2:70351563-70351799
  hyper

SEQ ID NO: 369621 - DNA, 280 bp, Homo sapiens; identical to SEQ ID NO: 331330
  chr2:70369049-70369329
  hyper

SEQ ID NO: 369622 - DNA, 442 bp, Homo sapiens; identical to SEQ ID NO: 349515
  chr2:71453505-71453947
  hyper

SEQ ID NO: 369623 - DNA, 228 bp, Homo sapiens; identical to SEQ ID NO: 349516
  chr2:71454386-71454614
  hyper

SEQ ID NO: 369624 - DNA, 126 bp, Homo sapiens; identical to SEQ ID NO: 357201
  chr2:71680558-71680684
  hyper

SEQ ID NO: 369625 - DNA, 431 bp, Homo sapiens
  chr2:72371599-72372030
  hyper
cgagaggaaagaggtatcccggacagctggacccgaagcgggagtctccgcccccacccccacccccacacccccaccccgcgctcgggagcctctcggaataaatatttccaggctccgggccacgggctggcgagaccccgcggggtggccgcaggccaaagattatttatagcggtaagcggtcggtgcccggaggcagcaactacagatgggggttggagtttcctccgctctccggtgtggcccgcgcagggacccggcggccctcggaggactctgcagggcggggtcacgggcccagagccgcgattttcctaatgcattttgccctggaaataacggagacggactttggttgccgccctggagtttggaacccgagcgcggggcggggcgggaccgggcagggcgacccgcgcaggtaacca

SEQ ID NO: 369626 - DNA, 354 bp, Homo sapiens; identical to SEQ ID NO: 198272
  chr2:72372237-72372591
  hyper

SEQ ID NO: 369627 - DNA, 480 bp, Homo sapiens; identical to SEQ ID NO: 357204
  chr2:72372758-72373238
  hyper

SEQ ID NO: 369628 - DNA, 127 bp, Homo sapiens; identical to SEQ ID NO: 345014
  chr2:72374248-72374375
  hyper

SEQ ID NO: 369629 - DNA, 259 bp, Homo sapiens; identical to SEQ ID NO: 345015
  chr2:72374932-72375191
  hyper

SEQ ID NO: 369630 - DNA, 131 bp, Homo sapiens
  chr2:72376427-72376558
  hyper
cgcacacacggtgcgcactcgcttagtgcctgcttggcttctaggctccttcccttcctcttttcctccttcccaggtcagcggtcccctcctccagctccgagcagtccctcctgggccgaagccccggc

SEQ ID NO: 369631 - DNA, 135 bp, Homo sapiens; identical to SEQ ID NO: 198277
  chr2:72376588-72376723
  hyper

SEQ ID NO: 369632 - DNA, 264 bp, Homo sapiens; identical to SEQ ID NO: 279909
  chr2:72376765-72377029
  hyper

SEQ ID NO: 369633 - DNA, 698 bp, Homo sapiens; identical to SEQ ID NO: 357207
  chr2:73052641-73053339
  hyper

SEQ ID NO: 369634 - DNA, 223 bp, Homo sapiens; identical to SEQ ID NO: 279917
  chr2:73144495-73144718
  hyper

SEQ ID NO: 369635 - DNA, 120 bp, Homo sapiens; identical to SEQ ID NO: 346446
  chr2:73147029-73147149
  hyper

SEQ ID NO: 369636 - DNA, 189 bp, Homo sapiens; identical to SEQ ID NO: 346447
  chr2:73150996-73151185
  hyper

SEQ ID NO: 369637 - DNA, 35 bp, Homo sapiens; identical to SEQ ID NO: 198289
  chr2:73151849-73151884
  hyper

SEQ ID NO: 369638 - DNA, 285 bp, Homo sapiens; identical to SEQ ID NO: 198290
  chr2:73151946-73152231
  hyper

SEQ ID NO: 369639 - DNA, 46 bp, Homo sapiens; identical to SEQ ID NO: 349526
  chr2:73152264-73152310
  hyper

SEQ ID NO: 369640 - DNA, 135 bp, Homo sapiens; identical to SEQ ID NO: 349527
  chr2:73520107-73520242
  hyper

SEQ ID NO: 369641 - DNA, 228 bp, Homo sapiens; identical to SEQ ID NO: 331345
  chr2:74211299-74211527
  hyper

SEQ ID NO: 369642 - DNA, 275 bp, Homo sapiens; identical to SEQ ID NO: 345016
  chr2:74425444-74425719
  hyper

SEQ ID NO: 369643 - DNA, 395 bp, Homo sapiens; identical to SEQ ID NO: 198298
  chr2:74425790-74426185
  hyper

SEQ ID NO: 369644 - DNA, 228 bp, Homo sapiens; identical to SEQ ID NO: 345018
  chr2:74426214-74426442
  hyper

SEQ ID NO: 369645 - DNA, 412 bp, Homo sapiens; identical to SEQ ID NO: 345019
  chr2:74729488-74729900
  hyper

SEQ ID NO: 369646 - DNA, 238 bp, Homo sapiens; identical to SEQ ID NO: 198302
  chr2:74729933-74730171
  hyper

SEQ ID NO: 369647 - DNA, 79 bp, Homo sapiens; identical to SEQ ID NO: 345021
  chr2:74730644-74730723
  hyper

SEQ ID NO: 369648 - DNA, 191 bp, Homo sapiens
  chr2:74740324-74740515
  hyper
cgttggtgcccacccgccaccgccaccgcaggatggtagaagcgcccccctctctgagcccagtctcaccggctcagaggcgccagggcccccccgggggccggggcgggccggggaaggtaatgtaattccggcccagctaacccgattaccgcggcctgcaccgggcagggcggcggcgggggcgggtc

SEQ ID NO: 369649 - DNA, 235 bp, Homo sapiens; identical to SEQ ID NO: 345022
  chr2:74781700-74781935
  hyper

SEQ ID NO: 369650 - DNA, 122 bp, Homo sapiens; identical to SEQ ID NO: 198308
  chr2:74782349-74782471
  hyper

SEQ ID NO: 369651 - DNA, 1609 bp, Homo sapiens; identical to SEQ ID NO: 357224
  chr2:75060920-75062529
  hyper

SEQ ID NO: 369652 - DNA, 229 bp, Homo sapiens; identical to SEQ ID NO: 357225
  chr2:75062575-75062804
  hyper

SEQ ID NO: 369653 - DNA, 47 bp, Homo sapiens; identical to SEQ ID NO: 198309
  chr2:75147056-75147103
  hyper

SEQ ID NO: 369654 - DNA, 182 bp, Homo sapiens; identical to SEQ ID NO: 357227
  chr2:75426248-75426430
  hyper

SEQ ID NO: 369655 - DNA, 214 bp, Homo sapiens; identical to SEQ ID NO: 279955
  chr2:75426570-75426784
  hyper

SEQ ID NO: 369656 - DNA, 54 bp, Homo sapiens; identical to SEQ ID NO: 357229
  chr2:75426875-75426929
  hyper

SEQ ID NO: 369657 - DNA, 264 bp, Homo sapiens
  chr2:79739586-79739850
  hyper
cgcggcagtcactacctttgcagcactctggccctgccctcctcctgccacgtgtcggacccctgctgggctggccctcctttcctactctgcgacacccctatcccccccgcccctatcctgcccgctcccgcacccggtccctctccccgggcctcgcgactccggcgattcagctccgggtccccgcccgcagggtaacgcggttgtcatggacacggcacctgcgccctacggcggtgccccttcgccgccgtcccctcc

SEQ ID NO: 369658 - DNA, 489 bp, Homo sapiens; identical to SEQ ID NO: 279963
  chr2:80530839-80531328
  hyper

SEQ ID NO: 369659 - DNA, 100 bp, Homo sapiens; identical to SEQ ID NO: 357230
  chr2:80549811-80549911
  hyper

SEQ ID NO: 369660 - DNA, 77 bp, Homo sapiens; identical to SEQ ID NO: 357231
  chr2:85360795-85360872
  hyper

SEQ ID NO: 369661 - DNA, 163 bp, Homo sapiens; identical to SEQ ID NO: 349538
  chr2:87018396-87018559
  hyper

SEQ ID NO: 369662 - DNA, 72 bp, Homo sapiens; identical to SEQ ID NO: 357233
  chr2:87034584-87034656
  hyper

SEQ ID NO: 369663 - DNA, 622 bp, Homo sapiens; identical to SEQ ID NO: 357234
  chr2:87034689-87035311
  hyper

SEQ ID NO: 369664 - DNA, 895 bp, Homo sapiens; identical to SEQ ID NO: 331365
  chr2:88315911-88316806
  hyper

SEQ ID NO: 369665 - DNA, 144 bp, Homo sapiens; identical to SEQ ID NO: 349540
  chr2:88752878-88753022
  hyper

SEQ ID NO: 369666 - DNA, 138 bp, Homo sapiens; identical to SEQ ID NO: 331369
  chr2:91635540-91635678
  hyper

SEQ ID NO: 369667 - DNA, 205 bp, Homo sapiens; identical to SEQ ID NO: 357237
  chr2:96011320-96011525
  hyper

SEQ ID NO: 369668 - DNA, 129 bp, Homo sapiens; identical to SEQ ID NO: 280005
  chr2:96011564-96011693
  hyper

SEQ ID NO: 369669 - DNA, 578 bp, Homo sapiens; identical to SEQ ID NO: 280006
  chr2:96011863-96012441
  hyper

SEQ ID NO: 369670 - DNA, 48 bp, Homo sapiens; identical to SEQ ID NO: 346460
  chr2:96012683-96012731
  hyper

SEQ ID NO: 369671 - DNA, 250 bp, Homo sapiens; identical to SEQ ID NO: 346461
  chr2:96192254-96192504
  hyper

SEQ ID NO: 369672 - DNA, 193 bp, Homo sapiens; identical to SEQ ID NO: 346462
  chr2:96192624-96192817
  hyper

SEQ ID NO: 369673 - DNA, 59 bp, Homo sapiens; identical to SEQ ID NO: 345026
  chr2:96991316-96991375
  hyper

SEQ ID NO: 369674 - DNA, 187 bp, Homo sapiens; identical to SEQ ID NO: 331375
  chr2:97073215-97073402
  hyper

SEQ ID NO: 369675 - DNA, 42 bp, Homo sapiens; identical to SEQ ID NO: 346464
  chr2:97203334-97203376
  hyper

SEQ ID NO: 369676 - DNA, 39 bp, Homo sapiens; identical to SEQ ID NO: 346465
  chr2:97203545-97203584
  hyper

SEQ ID NO: 369677 - DNA, 212 bp, Homo sapiens; identical to SEQ ID NO: 345027
  chr2:98703022-98703234
  hyper

SEQ ID NO: 369678 - DNA, 200 bp, Homo sapiens; identical to SEQ ID NO: 198335
  chr2:98703475-98703675
  hyper

SEQ ID NO: 369679 - DNA, 77 bp, Homo sapiens; identical to SEQ ID NO: 345029
  chr2:98703736-98703813
  hyper

SEQ ID NO: 369680 - DNA, 103 bp, Homo sapiens
  chr2:99346429-99346532
  hyper
cgttttcgggtttacacgtgtgggttaaagaaatctatgtcaagataacctgttcatcaaactgttttttaaacattcagaaaaagaaacataaaccacaaaa

SEQ ID NO: 369681 - DNA, 244 bp, Homo sapiens
  chr2:99346574-99346818
  hyper
cgactgtcattatcttttatcaaataatctgtccaacagcaaaagcacaacagcaaaatacgtggaaagcattcaaagcatacattgtgcctgcttctattttccaatgcggaatgtaggcaatgaaaccgctccagagaaacacactgttgcgaggaataaaggcgggtgtgcaagtggctcgactgccagctcagaaaagctcgcctccgagatgtcacctggcacacttggtggagtcacc

SEQ ID NO: 369682 - DNA, 146 bp, Homo sapiens; identical to SEQ ID NO: 345030
  chr2:101033445-101033591
  hyper

SEQ ID NO: 369683 - DNA, 489 bp, Homo sapiens; identical to SEQ ID NO: 357250
  chr2:101435063-101435552
  hyper

SEQ ID NO: 369684 - DNA, 94 bp, Homo sapiens; identical to SEQ ID NO: 198345
  chr2:101435590-101435684
  hyper

SEQ ID NO: 369685 - DNA, 275 bp, Homo sapiens; identical to SEQ ID NO: 357252
  chr2:101436113-101436388
  hyper

SEQ ID NO: 369686 - DNA, 886 bp, Homo sapiens; identical to SEQ ID NO: 357253
  chr2:101436742-101437628
  hyper

SEQ ID NO: 369687 - DNA, 519 bp, Homo sapiens; identical to SEQ ID NO: 331387
  chr2:102758965-102759484
  hyper

SEQ ID NO: 369688 - DNA, 58 bp, Homo sapiens; identical to SEQ ID NO: 357255
  chr2:102972750-102972808
  hyper

SEQ ID NO: 369689 - DNA, 173 bp, Homo sapiens; identical to SEQ ID NO: 349554
  chr2:103235763-103235936
  hyper

SEQ ID NO: 369690 - DNA, 346 bp, Homo sapiens; identical to SEQ ID NO: 349555
  chr2:103236292-103236638
  hyper

SEQ ID NO: 369691 - DNA, 110 bp, Homo sapiens
  chr2:105460811-105460921
  hyper
cgggatccgccacatgcccctcgaccctctcccaagagaaggaccctatttgacaaacaataacagagcagtaactcttgcaatctgcccacacctttgggggtggctgg

SEQ ID NO: 369692 - DNA, 96 bp, Homo sapiens; identical to SEQ ID NO: 349556
  chr2:105468467-105468563
  hyper

SEQ ID NO: 369693 - DNA, 144 bp, Homo sapiens; identical to SEQ ID NO: 345031
  chr2:105471069-105471213
  hyper

SEQ ID NO: 369694 - DNA, 155 bp, Homo sapiens; identical to SEQ ID NO: 349558
  chr2:105473814-105473969
  hyper

SEQ ID NO: 369695 - DNA, 337 bp, Homo sapiens; identical to SEQ ID NO: 198369
  chr2:105489278-105489615
  hyper

SEQ ID NO: 369696 - DNA, 112 bp, Homo sapiens; identical to SEQ ID NO: 345033
  chr2:105490035-105490147
  hyper

SEQ ID NO: 369697 - DNA, 454 bp, Homo sapiens
  chr2:105760109-105760563
  hyper
cgaaagcgaggtgtgcgggcgggtggaaggaggaaggtgagggttcttcctagaggtgaccaggtgaggccgggagtcgagcattttcataagattgctcgcggacgcgggggtgggtggagagcatcacgattaagaaggaacacacgcacgcacacacacacctccttcctccttcccctcctcttcctctcaccccgccccccggggggcggtaccctagtctcccgggggaggttttggggcggaggaccgcggaggactgcgcccaggagggtggccggccgcgggaggaggacttggggtcgggctgctgcagctgggtggccagcgccgcggcggcccctcccccgctctccctggccgccgccccctcctcctcccgtcctcctcctcctctccctcctcccggtcccccatcctcctcccggcccccggcagctgcggctcgggg

SEQ ID NO: 369698 - DNA, 83 bp, Homo sapiens
  chr2:107504132-107504215
  hyper
ggtaaatactctcctgtgaacttcagcgtgtctctccgcgcgcactcctggcattgggtgccccaccccgctggttctctcgc

SEQ ID NO: 369699 - DNA, 65 bp, Homo sapiens; identical to SEQ ID NO: 349561
  chr2:109647974-109648039
  hyper

SEQ ID NO: 369700 - DNA, 71 bp, Homo sapiens; identical to SEQ ID NO: 349562
  chr2:109648464-109648535
  hyper

SEQ ID NO: 369701 - DNA, 163 bp, Homo sapiens
  chr2:109744585-109744748
  hyper
cgacgggaacgcaaagcggccacgagggggcagcgcacggcagggaatcttcgccgccgaccccagcccaccgccaaacttccctgctgctctcggtcctcctgtacgtacttccgttgctctgacgctcccagaagccggggcgtcgggaaggagagcgcga

SEQ ID NO: 369702 - DNA, 224 bp, Homo sapiens; identical to SEQ ID NO: 349563
  chr2:110370717-110370941
  hyper

SEQ ID NO: 369703 - DNA, 485 bp, Homo sapiens; identical to SEQ ID NO: 198380
  chr2:110371219-110371704
  hyper

SEQ ID NO: 369704 - DNA, 446 bp, Homo sapiens; identical to SEQ ID NO: 198381
  chr2:110371818-110372264
  hyper

SEQ ID NO: 369705 - DNA, 138 bp, Homo sapiens; identical to SEQ ID NO: 280112
  chr2:110372284-110372422
  hyper

SEQ ID NO: 369706 - DNA, 293 bp, Homo sapiens; identical to SEQ ID NO: 198383
  chr2:111490023-111490316
  hyper

SEQ ID NO: 369707 - DNA, 171 bp, Homo sapiens
  chr2:111490689-111490860
  hyper
gttgaacctgtttcttgagtccccgccccgcgatgtcccacccttggtggggagaaggggacagaaaaccgcgatgggatgggcgcacagggatggagtggccctgtccagggcgtgtctgggcgtcggggtgggacaggcttacaggaccccctcggagtgcaggtgtgc

SEQ ID NO: 369708 - DNA, 264 bp, Homo sapiens; identical to SEQ ID NO: 345034
  chr2:111874622-111874886
  hyper

SEQ ID NO: 369709 - DNA, 204 bp, Homo sapiens; identical to SEQ ID NO: 198386
  chr2:111874987-111875191
  hyper

SEQ ID NO: 369710 - DNA, 138 bp, Homo sapiens; identical to SEQ ID NO: 345036
  chr2:111875611-111875749
  hyper

SEQ ID NO: 369711 - DNA, 699 bp, Homo sapiens; identical to SEQ ID NO: 331404
  chr2:111877567-111878266
  hyper

SEQ ID NO: 369712 - DNA, 70 bp, Homo sapiens; identical to SEQ ID NO: 349569
  chr2:112656507-112656577
  hyper

SEQ ID NO: 369713 - DNA, 32 bp, Homo sapiens; identical to SEQ ID NO: 280126
  chr2:112657092-112657124
  hyper

SEQ ID NO: 369714 - DNA, 554 bp, Homo sapiens; identical to SEQ ID NO: 345037
  chr2:113341898-113342452
  hyper

SEQ ID NO: 369715 - DNA, 33 bp, Homo sapiens; identical to SEQ ID NO: 198390
  chr2:114035443-114035476
  hyper

SEQ ID NO: 369716 - DNA, 88 bp, Homo sapiens; identical to SEQ ID NO: 357275
  chr2:114035830-114035918
  hyper

SEQ ID NO: 369717 - DNA, 190 bp, Homo sapiens; identical to SEQ ID NO: 357276
  chr2:119068126-119068316
  hyper

SEQ ID NO: 369718 - DNA, 60 bp, Homo sapiens; identical to SEQ ID NO: 198399
  chr2:119605299-119605359
  hyper

SEQ ID NO: 369719 - DNA, 84 bp, Homo sapiens; identical to SEQ ID NO: 198400
  chr2:119605386-119605470
  hyper

SEQ ID NO: 369720 - DNA, 118 bp, Homo sapiens
  chr2:119605501-119605619
  hyper
cgcgcgcgggactttgcggataaataatccgggggcgtcaaccgctggcggagagggggcgcctcggcgctggccctgtgcgtcgggtccgccctcccccacccgcgcccgcacccgc

SEQ ID NO: 369721 - DNA, 120 bp, Homo sapiens; identical to SEQ ID NO: 357277
  chr2:119615627-119615747
  hyper

SEQ ID NO: 369722 - DNA, 139 bp, Homo sapiens; identical to SEQ ID NO: 357278
  chr2:119913874-119914013
  hyper

SEQ ID NO: 369723 - DNA, 147 bp, Homo sapiens; identical to SEQ ID NO: 280165
  chr2:119914053-119914200
  hyper

SEQ ID NO: 369724 - DNA, 33 bp, Homo sapiens; identical to SEQ ID NO: 280166
  chr2:119914247-119914280
  hyper

SEQ ID NO: 369725 - DNA, 224 bp, Homo sapiens; identical to SEQ ID NO: 357281
  chr2:120281422-120281646
  hyper

SEQ ID NO: 369726 - DNA, 636 bp, Homo sapiens; identical to SEQ ID NO: 331421
  chr2:120301702-120302338
  hyper

SEQ ID NO: 369727 - DNA, 323 bp, Homo sapiens; identical to SEQ ID NO: 357283
  chr2:121199626-121199949
  hyper

SEQ ID NO: 369728 - DNA, 260 bp, Homo sapiens; identical to SEQ ID NO: 280178
  chr2:121200130-121200390
  hyper

SEQ ID NO: 369729 - DNA, 241 bp, Homo sapiens; identical to SEQ ID NO: 198417
  chr2:121200454-121200695
  hyper

SEQ ID NO: 369730 - DNA, 56 bp, Homo sapiens; identical to SEQ ID NO: 349576
  chr2:121200731-121200787
  hyper

SEQ ID NO: 369731 - DNA, 693 bp, Homo sapiens; identical to SEQ ID NO: 357287
  chr2:121494270-121494963
  hyper

SEQ ID NO: 369732 - DNA, 269 bp, Homo sapiens; identical to SEQ ID NO: 349577
  chr2:121499186-121499455
  hyper

SEQ ID NO: 369733 - DNA, 47 bp, Homo sapiens; identical to SEQ ID NO: 349578
  chr2:121499643-121499690
  hyper

SEQ ID NO: 369734 - DNA, 154 bp, Homo sapiens; identical to SEQ ID NO: 331428
  chr2:121834588-121834742
  hyper

SEQ ID NO: 369735 - DNA, 286 bp, Homo sapiens; identical to SEQ ID NO: 198421
  chr2:122042359-122042645
  hyper

SEQ ID NO: 369736 - DNA, 110 bp, Homo sapiens; identical to SEQ ID NO: 357292
  chr2:122042982-122043092
  hyper

SEQ ID NO: 369737 - DNA, 381 bp, Homo sapiens; identical to SEQ ID NO: 280195
  chr2:127413347-127413728
  hyper

SEQ ID NO: 369738 - DNA, 255 bp, Homo sapiens; identical to SEQ ID NO: 349581
  chr2:127414108-127414363
  hyper

SEQ ID NO: 369739 - DNA, 43 bp, Homo sapiens
  chr2:127643937-127643980
  hyper
cgtggccgaccctcccagccccctaaccccggtcgggcccatc

SEQ ID NO: 369740 - DNA, 48 bp, Homo sapiens; identical to SEQ ID NO: 345038
  chr2:127782995-127783043
  hyper

SEQ ID NO: 369741 - DNA, 121 bp, Homo sapiens; identical to SEQ ID NO: 357296
  chr2:127863367-127863488
  hyper

SEQ ID NO: 369742 - DNA, 427 bp, Homo sapiens; identical to SEQ ID NO: 357297
  chr2:127863878-127864305
  hyper

SEQ ID NO: 369743 - DNA, 312 bp, Homo sapiens; identical to SEQ ID NO: 357298
  chr2:127976826-127977138
  hyper

SEQ ID NO: 369744 - DNA, 550 bp, Homo sapiens; identical to SEQ ID NO: 331437
  chr2:128173501-128174051
  hyper

SEQ ID NO: 369745 - DNA, 155 bp, Homo sapiens; identical to SEQ ID NO: 357300
  chr2:128284482-128284637
  hyper

SEQ ID NO: 369746 - DNA, 53 bp, Homo sapiens
  chr2:128421756-128421809
  hyper
cgacgccggggcagagcccacggcgtcggagggccccggtcgggtttccgagg

SEQ ID NO: 369747 - DNA, 105 bp, Homo sapiens; identical to SEQ ID NO: 357301
  chr2:128459397-128459502
  hyper

SEQ ID NO: 369748 - DNA, 31 bp, Homo sapiens; identical to SEQ ID NO: 357302
  chr2:131484816-131484847
  hyper

SEQ ID NO: 369749 - DNA, 135 bp, Homo sapiens; identical to SEQ ID NO: 198433
  chr2:131792037-131792172
  hyper

SEQ ID NO: 369750 - DNA, 209 bp, Homo sapiens; identical to SEQ ID NO: 198440
  chr2:133427262-133427471
  hyper

SEQ ID NO: 369751 - DNA, 233 bp, Homo sapiens; identical to SEQ ID NO: 280229
  chr2:133427652-133427885
  hyper

SEQ ID NO: 369752 - DNA, 191 bp, Homo sapiens; identical to SEQ ID NO: 349585
  chr2:133428106-133428297
  hyper

SEQ ID NO: 369753 - DNA, 398 bp, Homo sapiens; identical to SEQ ID NO: 357307
  chr2:134023956-134024354
  hyper

SEQ ID NO: 369754 - DNA, 294 bp, Homo sapiens; identical to SEQ ID NO: 280232
  chr2:134024401-134024695
  hyper

SEQ ID NO: 369755 - DNA, 146 bp, Homo sapiens; identical to SEQ ID NO: 349586
  chr2:134325872-134326018
  hyper

SEQ ID NO: 369756 - DNA, 353 bp, Homo sapiens; identical to SEQ ID NO: 198445
  chr2:135476396-135476749
  hyper

SEQ ID NO: 369757 - DNA, 128 bp, Homo sapiens; identical to SEQ ID NO: 345039
  chr2:136873862-136873990
  hyper

SEQ ID NO: 369758 - DNA, 912 bp, Homo sapiens; identical to SEQ ID NO: 198448
  chr2:136874020-136874932
  hyper

SEQ ID NO: 369759 - DNA, 482 bp, Homo sapiens; identical to SEQ ID NO: 198449
  chr2:136875399-136875881
  hyper

SEQ ID NO: 369760 - DNA, 217 bp, Homo sapiens; identical to SEQ ID NO: 198450
  chr2:136876145-136876362
  hyper

SEQ ID NO: 369761 - DNA, 60 bp, Homo sapiens; identical to SEQ ID NO: 198452
  chr2:137523039-137523099
  hyper

SEQ ID NO: 369762 - DNA, 102 bp, Homo sapiens; identical to SEQ ID NO: 357316
  chr2:137523676-137523778
  hyper

SEQ ID NO: 369763 - DNA, 69 bp, Homo sapiens; identical to SEQ ID NO: 357317
  chr2:139538166-139538235
  hyper

SEQ ID NO: 369764 - DNA, 131 bp, Homo sapiens; identical to SEQ ID NO: 349592
  chr2:142887740-142887871
  hyper

SEQ ID NO: 369765 - DNA, 32 bp, Homo sapiens; identical to SEQ ID NO: 349593
  chr2:142888566-142888598
  hyper

SEQ ID NO: 369766 - DNA, 35 bp, Homo sapiens; identical to SEQ ID NO: 349594
  chr2:145275891-145275926
  hyper

SEQ ID NO: 369767 - DNA, 186 bp, Homo sapiens; identical to SEQ ID NO: 331461
  chr2:148602743-148602929
  hyper

SEQ ID NO: 369768 - DNA, 50 bp, Homo sapiens; identical to SEQ ID NO: 345044
  chr2:149632592-149632642
  hyper

SEQ ID NO: 369769 - DNA, 544 bp, Homo sapiens; identical to SEQ ID NO: 357323
  chr2:149634146-149634690
  hyper

SEQ ID NO: 369770 - DNA, 114 bp, Homo sapiens; identical to SEQ ID NO: 349597
  chr2:149645382-149645496
  hyper

SEQ ID NO: 369771 - DNA, 64 bp, Homo sapiens; identical to SEQ ID NO: 349598
  chr2:149645987-149646051
  hyper

SEQ ID NO: 369772 - DNA, 699 bp, Homo sapiens; identical to SEQ ID NO: 280266
  chr2:150186988-150187687
  hyper

SEQ ID NO: 369773 - DNA, 763 bp, Homo sapiens; identical to SEQ ID NO: 331465
  chr2:151341770-151342533
  hyper

SEQ ID NO: 369774 - DNA, 135 bp, Homo sapiens; identical to SEQ ID NO: 349599
  chr2:151342572-151342707
  hyper

SEQ ID NO: 369775 - DNA, 166 bp, Homo sapiens; identical to SEQ ID NO: 198470
  chr2:151342737-151342903
  hyper

SEQ ID NO: 369776 - DNA, 313 bp, Homo sapiens; identical to SEQ ID NO: 198471
  chr2:151343277-151343590
  hyper

SEQ ID NO: 369777 - DNA, 181 bp, Homo sapiens
  chr2:151343637-151343818
  hyper
ggaaagtagtaaggaccgagaaagacttttttttttctttttttttttttttaagggaaaacggatgaaagcggggaggcccacctcgggactgggatcccactggccgaccccctcgtggaagccgcggccggccacactcacctcggggaagcagtccttggcgaagacatggagcagc

SEQ ID NO: 369778 - DNA, 282 bp, Homo sapiens; identical to SEQ ID NO: 331467
  chr2:151344070-151344352
  hyper

SEQ ID NO: 369779 - DNA, 147 bp, Homo sapiens; identical to SEQ ID NO: 349602
  chr2:152954365-152954512
  hyper

SEQ ID NO: 369780 - DNA, 593 bp, Homo sapiens; identical to SEQ ID NO: 357332
  chr2:153192142-153192735
  hyper

SEQ ID NO: 369781 - DNA, 80 bp, Homo sapiens; identical to SEQ ID NO: 357333
  chr2:153192765-153192845
  hyper

SEQ ID NO: 369782 - DNA, 109 bp, Homo sapiens; identical to SEQ ID NO: 357334
  chr2:154335663-154335772
  hyper

SEQ ID NO: 369783 - DNA, 60 bp, Homo sapiens; identical to SEQ ID NO: 357335
  chr2:155553956-155554016
  hyper

SEQ ID NO: 369784 - DNA, 612 bp, Homo sapiens; identical to SEQ ID NO: 198483
  chr2:155554076-155554688
  hyper

SEQ ID NO: 369785 - DNA, 349 bp, Homo sapiens; identical to SEQ ID NO: 198484
  chr2:155554689-155555038
  hyper

SEQ ID NO: 369786 - DNA, 461 bp, Homo sapiens; identical to SEQ ID NO: 349603
  chr2:157292161-157292622
  hyper

SEQ ID NO: 369787 - DNA, 1811 bp, Homo sapiens; identical to SEQ ID NO: 331475
  chr2:159313069-159314880
  hyper

SEQ ID NO: 369788 - DNA, 690 bp, Homo sapiens
  chr2:159825046-159825736
  hyper
cgcgagaggaaggtgccttcgggaacacgcgcaagggcggggattcgcgctgccaatgaggccccggtgtgggccgagcaaggcggggggacgggccggagcggaggctttgctgtggcagctgctggagcggcggccgcctcgggagccggaggagaggcagccgcggagcgccgagctggcctcgccccgaggcccggccctgggtgtggggaaccgcgctgaggagctggaaactttcccggcaggtaactcccgcagcccggactccgccgcgggcctgcgagcgccccgggcatggccagctgccagtgtgcggagaggtcgagagggacccggggtggagagggtgatgggagaagggaaaggcgtgtgggaaagtttctggagcgccccctcctccgccgggcacacccgggagctttccgggaataggcacagacatgttgggcgccccgggccttggtctctcggcggctttggggagtccgcaccttccttgcgcggttcccccgcgccggaccgagccggcctcccctggaaccggtgtggtgggaaccgggaacgcttggggcacgctcgagttctgggaccacccccgcccggcgcgcccgctcgccccctttcccgccttctctgtagccctcgggcttggcaagggcctgggctacgcctggtacctggcgcggg

SEQ ID NO: 369789 - DNA, 123 bp, Homo sapiens; identical to SEQ ID NO: 357340
  chr2:161264043-161264166
  hyper

SEQ ID NO: 369790 - DNA, 203 bp, Homo sapiens; identical to SEQ ID NO: 198498
  chr2:161264419-161264622
  hyper

SEQ ID NO: 369791 - DNA, 97 bp, Homo sapiens; identical to SEQ ID NO: 349605
  chr2:162094194-162094291
  hyper

SEQ ID NO: 369792 - DNA, 258 bp, Homo sapiens; identical to SEQ ID NO: 280315
  chr2:162094357-162094615
  hyper

SEQ ID NO: 369793 - DNA, 625 bp, Homo sapiens; identical to SEQ ID NO: 357344
  chr2:162271677-162272302
  hyper

SEQ ID NO: 369794 - DNA, 91 bp, Homo sapiens; identical to SEQ ID NO: 357345
  chr2:162272334-162272425
  hyper

SEQ ID NO: 369795 - DNA, 49 bp, Homo sapiens; identical to SEQ ID NO: 357346
  chr2:162284276-162284325
  hyper

SEQ ID NO: 369796 - DNA, 94 bp, Homo sapiens; identical to SEQ ID NO: 349607
  chr2:162930102-162930196
  hyper

SEQ ID NO: 369797 - DNA, 262 bp, Homo sapiens; identical to SEQ ID NO: 198502
  chr2:162930659-162930921
  hyper

SEQ ID NO: 369798 - DNA, 205 bp, Homo sapiens; identical to SEQ ID NO: 331488
  chr2:165873413-165873618
  hyper

SEQ ID NO: 369799 - DNA, 137 bp, Homo sapiens; identical to SEQ ID NO: 345047
  chr2:166649931-166650068
  hyper

SEQ ID NO: 369800 - DNA, 37 bp, Homo sapiens; identical to SEQ ID NO: 198509
  chr2:166650106-166650143
  hyper

SEQ ID NO: 369801 - DNA, 723 bp, Homo sapiens; identical to SEQ ID NO: 345049
  chr2:166650508-166651231
  hyper

SEQ ID NO: 369802 - DNA, 100 bp, Homo sapiens; identical to SEQ ID NO: 349612
  chr2:168148871-168148971
  hyper

SEQ ID NO: 369803 - DNA, 239 bp, Homo sapiens; identical to SEQ ID NO: 198512
  chr2:168149264-168149503
  hyper

SEQ ID NO: 369804 - DNA, 220 bp, Homo sapiens; identical to SEQ ID NO: 198513
  chr2:168149556-168149776
  hyper

SEQ ID NO: 369805 - DNA, 89 bp, Homo sapiens; identical to SEQ ID NO: 357355
  chr2:168150962-168151051
  hyper

SEQ ID NO: 369806 - DNA, 401 bp, Homo sapiens; identical to SEQ ID NO: 349615
  chr2:169312417-169312818
  hyper

SEQ ID NO: 369807 - DNA, 904 bp, Homo sapiens; identical to SEQ ID NO: 349616
  chr2:169312881-169313785
  hyper

SEQ ID NO: 369808 - DNA, 361 bp, Homo sapiens; identical to SEQ ID NO: 349617
  chr2:171567970-171568331
  hyper

SEQ ID NO: 369809 - DNA, 273 bp, Homo sapiens; identical to SEQ ID NO: 349618
  chr2:171568711-171568984
  hyper

SEQ ID NO: 369810 - DNA, 120 bp, Homo sapiens
  chr2:171569927-171570047
  hyper
cgttgggggagaagggggcgtgcgagtgcaggatgtgcgagggacccattgtatttgggtcgcaagcagcccacccgtcttgagtacgatattctcattccgcaggcgcgccctgggcgt

SEQ ID NO: 369811 - DNA, 243 bp, Homo sapiens; identical to SEQ ID NO: 198523
  chr2:171570957-171571200
  hyper

SEQ ID NO: 369812 - DNA, 161 bp, Homo sapiens; identical to SEQ ID NO: 198524
  chr2:171571315-171571476
  hyper

SEQ ID NO: 369813 - DNA, 277 bp, Homo sapiens; identical to SEQ ID NO: 349621
  chr2:171571520-171571797
  hyper

SEQ ID NO: 369814 - DNA, 137 bp, Homo sapiens; identical to SEQ ID NO: 357363
  chr2:171670741-171670878
  hyper

SEQ ID NO: 369815 - DNA, 178 bp, Homo sapiens; identical to SEQ ID NO: 349622
  chr2:171671978-171672156
  hyper

SEQ ID NO: 369816 - DNA, 764 bp, Homo sapiens; identical to SEQ ID NO: 357365
  chr2:171673109-171673873
  hyper

SEQ ID NO: 369817 - DNA, 152 bp, Homo sapiens; identical to SEQ ID NO: 198531
  chr2:171673939-171674091
  hyper

SEQ ID NO: 369818 - DNA, 369 bp, Homo sapiens; identical to SEQ ID NO: 198532
  chr2:171674329-171674698
  hyper

SEQ ID NO: 369819 - DNA, 32 bp, Homo sapiens; identical to SEQ ID NO: 357368
  chr2:172379091-172379123
  hyper

SEQ ID NO: 369820 - DNA, 127 bp, Homo sapiens; identical to SEQ ID NO: 357369
  chr2:172947590-172947717
  hyper

SEQ ID NO: 369821 - DNA, 230 bp, Homo sapiens; identical to SEQ ID NO: 198538
  chr2:172950233-172950463
  hyper

SEQ ID NO: 369822 - DNA, 233 bp, Homo sapiens; identical to SEQ ID NO: 349624
  chr2:172950493-172950726
  hyper

SEQ ID NO: 369823 - DNA, 169 bp, Homo sapiens; identical to SEQ ID NO: 198540
  chr2:172951779-172951948
  hyper

SEQ ID NO: 369824 - DNA, 112 bp, Homo sapiens; identical to SEQ ID NO: 346490
  chr2:172955255-172955367
  hyper

SEQ ID NO: 369825 - DNA, 57 bp, Homo sapiens; identical to SEQ ID NO: 346491
  chr2:172955887-172955944
  hyper

SEQ ID NO: 369826 - DNA, 116 bp, Homo sapiens; identical to SEQ ID NO: 357375
  chr2:172962017-172962133
  hyper

SEQ ID NO: 369827 - DNA, 66 bp, Homo sapiens; identical to SEQ ID NO: 357376
  chr2:172964092-172964158
  hyper

SEQ ID NO: 369828 - DNA, 62 bp, Homo sapiens
  chr2:172964685-172964747
  hyper
cgctcctgggggagcgcggtgggggtaagataagggatgggggctccgagggctgggaactg

SEQ ID NO: 369829 - DNA, 163 bp, Homo sapiens; identical to SEQ ID NO: 346492
  chr2:172967062-172967225
  hyper

SEQ ID NO: 369830 - DNA, 381 bp, Homo sapiens
  chr2:173037307-173037688
  hyper
cgggcggtggcgggccgtggtccggcgcagtttccccgcggcccgctgggtcgcactgtggccttaggaatgtgggccggggcggggcggcttgggagcgcgctgcagccaacgccgcgttcagccccgggcgcaactgcagccgtgccgggggcctccggggccccgaccgaccgacagctctttcagaccgcagcgaagtttgcacacacgacagcacgtcccggggctaggatcttgcccgcctgcggggctgacctgcaccacccttggggaagcgcgaactgccgccccgctgccgggagttaggcgcccgggcctgggtcgcccccacagacggctcggacggcacgaacgagcggaccccaaggatagtgggct

SEQ ID NO: 369831 - DNA, 85 bp, Homo sapiens; identical to SEQ ID NO: 345050
  chr2:173099596-173099681
  hyper

SEQ ID NO: 369832 - DNA, 164 bp, Homo sapiens
  chr2:173600371-173600535
  hyper
cggccaccggggtcgccacccccagtgtcccccagcagcgggaccgcggggtccccaccccggggcggaatccccacccacgggcgccgcagtgcagcggcgggcgggcgggcgactcggccctccccgcacccgcgtcccgccccccgggtcccctccctctc

SEQ ID NO: 369833 - DNA, 1041 bp, Homo sapiens; identical to SEQ ID NO: 345051
  chr2:174219326-174220367
  hyper

SEQ ID NO: 369834 - DNA, 41 bp, Homo sapiens; identical to SEQ ID NO: 349630
  chr2:175190730-175190771
  hyper

SEQ ID NO: 369835 - DNA, 650 bp, Homo sapiens; identical to SEQ ID NO: 198556
  chr2:175197265-175197915
  hyper

SEQ ID NO: 369836 - DNA, 454 bp, Homo sapiens; identical to SEQ ID NO: 198557
  chr2:175198064-175198518
  hyper

SEQ ID NO: 369837 - DNA, 350 bp, Homo sapiens; identical to SEQ ID NO: 280407
  chr2:175199018-175199368
  hyper

SEQ ID NO: 369838 - DNA, 205 bp, Homo sapiens; identical to SEQ ID NO: 198560
  chr2:175199935-175200140
  hyper

SEQ ID NO: 369839 - DNA, 75 bp, Homo sapiens; identical to SEQ ID NO: 357385
  chr2:175204013-175204088
  hyper

SEQ ID NO: 369840 - DNA, 75 bp, Homo sapiens; identical to SEQ ID NO: 345052
  chr2:175546713-175546788
  hyper

SEQ ID NO: 369841 - DNA, 543 bp, Homo sapiens; identical to SEQ ID NO: 331523
  chr2:176937692-176938235
  hyper

SEQ ID NO: 369842 - DNA, 207 bp, Homo sapiens; identical to SEQ ID NO: 357388
  chr2:176965522-176965729
  hyper

SEQ ID NO: 369843 - DNA, 173 bp, Homo sapiens; identical to SEQ ID NO: 349636
  chr2:176969908-176970081
  hyper

SEQ ID NO: 369844 - DNA, 273 bp, Homo sapiens; identical to SEQ ID NO: 198569
  chr2:176972103-176972376
  hyper

SEQ ID NO: 369845 - DNA, 84 bp, Homo sapiens; identical to SEQ ID NO: 346499
  chr2:176975945-176976029
  hyper

SEQ ID NO: 369846 - DNA, 61 bp, Homo sapiens; identical to SEQ ID NO: 357391
  chr2:176980657-176980718
  hyper

SEQ ID NO: 369847 - DNA, 177 bp, Homo sapiens
  chr2:176983836-176984013
  hyper
aagagcgttaacctcaccgacaggcaggtcaagatttggtttcaaaaccgccgaatgaaactcaagaagatgagccgagagaaccggatccgagaactgaccgccaacctcacgttttcttaggtctgaggccggtctgaggccggtcagaggccaggattggagagggggcaccgc

SEQ ID NO: 369848 - DNA, 125 bp, Homo sapiens; identical to SEQ ID NO: 198576
  chr2:176993339-176993464
  hyper

SEQ ID NO: 369849 - DNA, 61 bp, Homo sapiens; identical to SEQ ID NO: 349639
  chr2:176995668-176995729
  hyper

SEQ ID NO: 369850 - DNA, 40 bp, Homo sapiens; identical to SEQ ID NO: 346500
  chr2:177005679-177005719
  hyper

SEQ ID NO: 369851 - DNA, 40 bp, Homo sapiens; identical to SEQ ID NO: 357395
  chr2:177042492-177042532
  hyper

SEQ ID NO: 369852 - DNA, 219 bp, Homo sapiens; identical to SEQ ID NO: 280446
  chr2:177052744-177052963
  hyper

SEQ ID NO: 369853 - DNA, 55 bp, Homo sapiens; identical to SEQ ID NO: 357397
  chr2:177502170-177502225
  hyper

SEQ ID NO: 369854 - DNA, 60 bp, Homo sapiens; identical to SEQ ID NO: 198583
  chr2:177502920-177502980
  hyper

SEQ ID NO: 369855 - DNA, 794 bp, Homo sapiens; identical to SEQ ID NO: 331546
  chr2:178257227-178258021
  hyper

SEQ ID NO: 369856 - DNA, 353 bp, Homo sapiens; identical to SEQ ID NO: 331547
  chr2:178483339-178483692
  hyper

SEQ ID NO: 369857 - DNA, 487 bp, Homo sapiens; identical to SEQ ID NO: 331548
  chr2:178937351-178937838
  hyper

SEQ ID NO: 369858 - DNA, 486 bp, Homo sapiens; identical to SEQ ID NO: 331549
  chr2:179343487-179343973
  hyper

SEQ ID NO: 369859 - DNA, 33 bp, Homo sapiens; identical to SEQ ID NO: 349644
  chr2:180725139-180725172
  hyper

SEQ ID NO: 369860 - DNA, 34 bp, Homo sapiens; identical to SEQ ID NO: 345053
  chr2:182323095-182323129
  hyper

SEQ ID NO: 369861 - DNA, 44 bp, Homo sapiens; identical to SEQ ID NO: 357404
  chr2:182521331-182521375
  hyper

SEQ ID NO: 369862 - DNA, 280 bp, Homo sapiens; identical to SEQ ID NO: 357405
  chr2:182521646-182521926
  hyper

SEQ ID NO: 369863 - DNA, 193 bp, Homo sapiens; identical to SEQ ID NO: 349646
  chr2:182756176-182756369
  hyper

SEQ ID NO: 369864 - DNA, 71 bp, Homo sapiens; identical to SEQ ID NO: 345054
  chr2:182818959-182819030
  hyper

SEQ ID NO: 369865 - DNA, 67 bp, Homo sapiens; identical to SEQ ID NO: 357408
  chr2:183732106-183732173
  hyper

SEQ ID NO: 369866 - DNA, 90 bp, Homo sapiens; identical to SEQ ID NO: 345055
  chr2:183902312-183902402
  hyper

SEQ ID NO: 369867 - DNA, 568 bp, Homo sapiens; identical to SEQ ID NO: 198600
  chr2:183902442-183903010
  hyper

SEQ ID NO: 369868 - DNA, 587 bp, Homo sapiens; identical to SEQ ID NO: 346507
  chr2:183903037-183903624
  hyper

SEQ ID NO: 369869 - DNA, 352 bp, Homo sapiens; identical to SEQ ID NO: 349651
  chr2:185462268-185462620
  hyper

SEQ ID NO: 369870 - DNA, 583 bp, Homo sapiens; identical to SEQ ID NO: 198606
  chr2:189156844-189157427
  hyper

SEQ ID NO: 369871 - DNA, 107 bp, Homo sapiens; identical to SEQ ID NO: 349652
  chr2:190445073-190445180
  hyper

SEQ ID NO: 369872 - DNA, 819 bp, Homo sapiens; identical to SEQ ID NO: 198610
  chr2:190445255-190446074
  hyper

SEQ ID NO: 369873 - DNA, 279 bp, Homo sapiens; identical to SEQ ID NO: 349654
  chr2:190446109-190446388
  hyper

SEQ ID NO: 369874 - DNA, 86 bp, Homo sapiens; identical to SEQ ID NO: 345058
  chr2:191044988-191045074
  hyper

SEQ ID NO: 369875 - DNA, 513 bp, Homo sapiens; identical to SEQ ID NO: 345059
  chr2:191045505-191046018
  hyper

SEQ ID NO: 369876 - DNA, 171 bp, Homo sapiens; identical to SEQ ID NO: 349657
  chr2:191208170-191208341
  hyper

SEQ ID NO: 369877 - DNA, 361 bp, Homo sapiens; identical to SEQ ID NO: 331567
  chr2:191514839-191515200
  hyper

SEQ ID NO: 369878 - DNA, 287 bp, Homo sapiens; identical to SEQ ID NO: 357420
  chr2:192015084-192015371
  hyper

SEQ ID NO: 369879 - DNA, 251 bp, Homo sapiens; identical to SEQ ID NO: 198622
  chr2:192015426-192015677
  hyper

SEQ ID NO: 369880 - DNA, 240 bp, Homo sapiens; identical to SEQ ID NO: 357422
  chr2:192015678-192015918
  hyper

SEQ ID NO: 369881 - DNA, 447 bp, Homo sapiens; identical to SEQ ID NO: 345060
  chr2:192109730-192110177
  hyper

SEQ ID NO: 369882 - DNA, 253 bp, Homo sapiens; identical to SEQ ID NO: 198625
  chr2:192110303-192110556
  hyper

SEQ ID NO: 369883 - DNA, 439 bp, Homo sapiens; identical to SEQ ID NO: 345062
  chr2:192110584-192111023
  hyper

SEQ ID NO: 369884 - DNA, 518 bp, Homo sapiens; identical to SEQ ID NO: 349662
  chr2:198174828-198175346
  hyper

SEQ ID NO: 369885 - DNA, 897 bp, Homo sapiens; identical to SEQ ID NO: 331573
  chr2:200320451-200321348
  hyper

SEQ ID NO: 369886 - DNA, 224 bp, Homo sapiens
  chr2:200321659-200321883
  hyper
cggaagccgcaggtctcgacacccctggattgggggggtgggggggggcggggaaggaggggaaacacctgatgaaacggcgctcgcgttgtcactgacacccgcaagaagcaagaccccggcaccgtactgcgtgcgcgctgggaatcctcgtgggcgctctggccgcgcgagcagtgtcggcgccacgggtcaaggagacaaggtgggggtggcagggggag

SEQ ID NO: 369887 - DNA, 55 bp, Homo sapiens
  chr2:200321998-200322053
  hyper
gttggccctgggcttccccgaactcccgagcgcggcgcgggagccctcgccctgc

SEQ ID NO: 369888 - DNA, 44 bp, Homo sapiens; identical to SEQ ID NO: 357428
  chr2:200322454-200322498
  hyper

SEQ ID NO: 369889 - DNA, 62 bp, Homo sapiens; identical to SEQ ID NO: 357429
  chr2:200322611-200322673
  hyper

SEQ ID NO: 369890 - DNA, 133 bp, Homo sapiens; identical to SEQ ID NO: 280540
  chr2:200326735-200326868
  hyper

SEQ ID NO: 369891 - DNA, 279 bp, Homo sapiens; identical to SEQ ID NO: 280541
  chr2:200326960-200327239
  hyper

SEQ ID NO: 369892 - DNA, 377 bp, Homo sapiens; identical to SEQ ID NO: 280542
  chr2:200327794-200328171
  hyper

SEQ ID NO: 369893 - DNA, 180 bp, Homo sapiens
  chr2:200328393-200328573
  hyper
gcgggggatgggcaggtccctggcccagggtaccaccgggccactcaacacaaaaacgccctggcgcgtgcaaaatacgaacgcccacagtttgtcccaaccccttgaaatgaaaagtacacctggaaagcccaagatagcacccggtccgcaccccaaatttcaggcaggccagcaggc

SEQ ID NO: 369894 - DNA, 197 bp, Homo sapiens; identical to SEQ ID NO: 357433
  chr2:200329745-200329942
  hyper

SEQ ID NO: 369895 - DNA, 50 bp, Homo sapiens
  chr2:200331873-200331923
  hyper
cggccagactcaggcctttctaatacaggcgtgaagggcgggacgcccag

SEQ ID NO: 369896 - DNA, 427 bp, Homo sapiens
  chr2:200331953-200332380
  hyper
caggtggataacttctgcggattcggctttcaggctgctggagctctccccagcccgaggccttagcccagcgcaatcccttgtccagaccggccagtttccgcgtggcgaaaaagggggaggcaagtgtgtcttttccaaggagcttttatccaacagcctcccctccccccaactctcagccttaggtgccgggcttcagccgaagcgtttttcaaatttgtcatcattggaaacctcggacaagtggagtgtaaaattttgagggtttccaggtaggctctgacttcaggcattcaatgaaaggggaagagggctgagggcgggggagagagacaagcacagagggctccctgtagtcggcaggaattccctccctctgcagcccagctgcacccactagcacacactagtcttgccttctccc

SEQ ID NO: 369897 - DNA, 111 bp, Homo sapiens; identical to SEQ ID NO: 331580
  chr2:201727391-201727502
  hyper

SEQ ID NO: 369898 - DNA, 132 bp, Homo sapiens; identical to SEQ ID NO: 331581
  chr2:201828586-201828718
  hyper

SEQ ID NO: 369899 - DNA, 42 bp, Homo sapiens; identical to SEQ ID NO: 280569
  chr2:202897429-202897471
  hyper

SEQ ID NO: 369900 - DNA, 580 bp, Homo sapiens; identical to SEQ ID NO: 357437
  chr2:202897603-202898183
  hyper

SEQ ID NO: 369901 - DNA, 173 bp, Homo sapiens; identical to SEQ ID NO: 331583
  chr2:206750391-206750564
  hyper

SEQ ID NO: 369902 - DNA, 229 bp, Homo sapiens; identical to SEQ ID NO: 331584
  chr2:206948646-206948875
  hyper

SEQ ID NO: 369903 - DNA, 57 bp, Homo sapiens; identical to SEQ ID NO: 357439
  chr2:207307406-207307463
  hyper

SEQ ID NO: 369904 - DNA, 239 bp, Homo sapiens; identical to SEQ ID NO: 198669
  chr2:207308960-207309199
  hyper

SEQ ID NO: 369905 - DNA, 1168 bp, Homo sapiens; identical to SEQ ID NO: 349669
  chr2:208030665-208031833
  hyper

SEQ ID NO: 369906 - DNA, 56 bp, Homo sapiens; identical to SEQ ID NO: 349670
  chr2:208031939-208031995
  hyper

SEQ ID NO: 369907 - DNA, 228 bp, Homo sapiens
  chr2:208633316-208633544
  hyper
cgtcaggttgtagccgatgccgcggcacatgggcaccgtgatttcctggcacaccggggccttggacgcggcggccgcccggcccaccagctgcgctaggagcagcagcaacagcgagggcggcgcggatgggtcaggccgagccatcgccccctccctcccctcgcctccagcagcccgcgagggacgcacacaggcagaggaatccgggccggggcttctccctcc

SEQ ID NO: 369908 - DNA, 70 bp, Homo sapiens
  chr2:208635464-208635534
  hyper
cgcgcccggcccgtttacatcttaagacaagatctcactccttacaacaattctgaggcaggtacttcct

SEQ ID NO: 369909 - DNA, 32 bp, Homo sapiens; identical to SEQ ID NO: 357443
  chr2:210637062-210637094
  hyper

SEQ ID NO: 369910 - DNA, 250 bp, Homo sapiens
  chr2:211090073-211090323
  hyper
tcagctgaggcgtccacctgtggtgtcctcccaaaaaagcgctcgcgcgcgcccttccggagccccaaccacgccacaggctggtcgcgagggaatacgcccgtcttggctgtcagcaataggattttacagcgaaactgctgcctttgcttgcagcattctttcttgtttatcgaagcagctctgagcctttttagcgtcctgaagcgctttgagtaacggatgaaagctatggagcccccaaatacgc

SEQ ID NO: 369911 - DNA, 598 bp, Homo sapiens; identical to SEQ ID NO: 198682
  chr2:213402010-213402608
  hyper

SEQ ID NO: 369912 - DNA, 426 bp, Homo sapiens; identical to SEQ ID NO: 331594
  chr2:216946200-216946626
  hyper

SEQ ID NO: 369913 - DNA, 87 bp, Homo sapiens; identical to SEQ ID NO: 349672
  chr2:217498487-217498574
  hyper

SEQ ID NO: 369914 - DNA, 160 bp, Homo sapiens; identical to SEQ ID NO: 349673
  chr2:217556802-217556962
  hyper

SEQ ID NO: 369915 - DNA, 239 bp, Homo sapiens; identical to SEQ ID NO: 198687
  chr2:217557011-217557250
  hyper

SEQ ID NO: 369916 - DNA, 454 bp, Homo sapiens; identical to SEQ ID NO: 349675
  chr2:217557321-217557775
  hyper

SEQ ID NO: 369917 - DNA, 86 bp, Homo sapiens; identical to SEQ ID NO: 331598
  chr2:217558012-217558098
  hyper

SEQ ID NO: 369918 - DNA, 32 bp, Homo sapiens; identical to SEQ ID NO: 349676
  chr2:217558872-217558904
  hyper

SEQ ID NO: 369919 - DNA, 410 bp, Homo sapiens; identical to SEQ ID NO: 280629
  chr2:217559556-217559966
  hyper

SEQ ID NO: 369920 - DNA, 324 bp, Homo sapiens; identical to SEQ ID NO: 280633
  chr2:219232221-219232545
  hyper

SEQ ID NO: 369921 - DNA, 32 bp, Homo sapiens; identical to SEQ ID NO: 357453
  chr2:219232859-219232891
  hyper

SEQ ID NO: 369922 - DNA, 128 bp, Homo sapiens; identical to SEQ ID NO: 349678
  chr2:219735657-219735785
  hyper

SEQ ID NO: 369923 - DNA, 433 bp, Homo sapiens
  chr2:219748345-219748778
  hyper
cgtgtggcggcatgcagccgcgaactaatccccgcgggccgcggcagacggctcccggccccagccgcgccgctctcagagggcaaccccctccctgccccgctctcccgccccctcccgccccaccgccgcccgggcccctccagccgtccagaagcggctgcccgggacccccgggtcctgcccagctcgggccacacgctcctccctgtcccgccgcctgcgcgccgacacgaacggacgggcctctgcaccattcatgccccggctgggccgggccggcgctcaccgccgccgcgggcccgctcctaccctcgggtttctaggtcgtccgcgctgcccgcagccgcgtttcccttcggggccctcgggtaccccatgaggactccgtagccctggctttggtttctgcccgccggggactgggataggc

SEQ ID NO: 369924 - DNA, 594 bp, Homo sapiens; identical to SEQ ID NO: 346517
  chr2:219757371-219757965
  hyper

SEQ ID NO: 369925 - DNA, 64 bp, Homo sapiens; identical to SEQ ID NO: 346518
  chr2:219758014-219758078
  hyper

SEQ ID NO: 369926 - DNA, 208 bp, Homo sapiens; identical to SEQ ID NO: 331604
  chr2:219762346-219762554
  hyper

SEQ ID NO: 369927 - DNA, 169 bp, Homo sapiens
  chr2:219763161-219763330
  hyper
cgggccttggggcgcgtagccccagttaattgggtgggtctcgggttcaactcatccgctgccctttgacttgggaaccacccgccctctgcctcgcacggcgcccaaatccgacttcacgggcccattgctttccgccggccgcggccttgctggccctctttcctcc

SEQ ID NO: 369928 - DNA, 41 bp, Homo sapiens
  chr2:219773646-219773687
  hyper
cggtggccttaagagtccagtcgatgctgccacgtgatggg

SEQ ID NO: 369929 - DNA, 151 bp, Homo sapiens
  chr2:219773917-219774068
  hyper
ggtcgctgtcctttctgggaaccaagcaggggtcgcaggagggcggggatgggtcagcggggatctctgagtggggttcggctgagagaggccacagtttcatctttgggaagctaccctgggccggccacgcgccgtgagccggactggc

SEQ ID NO: 369930 - DNA, 334 bp, Homo sapiens; identical to SEQ ID NO: 280653
  chr2:219824452-219824786
  hyper

SEQ ID NO: 369931 - DNA, 166 bp, Homo sapiens; identical to SEQ ID NO: 198699
  chr2:219827883-219828049
  hyper

SEQ ID NO: 369932 - DNA, 53 bp, Homo sapiens; identical to SEQ ID NO: 357459
  chr2:219828117-219828170
  hyper

SEQ ID NO: 369933 - DNA, 832 bp, Homo sapiens; identical to SEQ ID NO: 357460
  chr2:219845565-219846397
  hyper

SEQ ID NO: 369934 - DNA, 197 bp, Homo sapiens; identical to SEQ ID NO: 349682
  chr2:219847616-219847813
  hyper

SEQ ID NO: 369935 - DNA, 41 bp, Homo sapiens; identical to SEQ ID NO: 357462
  chr2:219857682-219857723
  hyper

SEQ ID NO: 369936 - DNA, 74 bp, Homo sapiens; identical to SEQ ID NO: 357463
  chr2:219858468-219858542
  hyper

SEQ ID NO: 369937 - DNA, 969 bp, Homo sapiens; identical to SEQ ID NO: 280663
  chr2:219866613-219867582
  hyper

SEQ ID NO: 369938 - DNA, 369 bp, Homo sapiens; identical to SEQ ID NO: 345064
  chr2:219922768-219923137
  hyper

SEQ ID NO: 369939 - DNA, 220 bp, Homo sapiens
  chr2:219924173-219924393
  hyper
cgtccccaccaccaagcccaggaatcccctaagctcagtcccagagcccgaaggccccaataacccacccttccaccgcagtagcacccctcagctctccggacagacacgtgggctcgctgggcaggttccttttcccacctccgcctcccgattcaactcttcctcgctgttcttaaccccagacccagccgggacgctgctcctggaaggggcagcc

SEQ ID NO: 369940 - DNA, 128 bp, Homo sapiens; identical to SEQ ID NO: 280667
  chr2:219924438-219924566
  hyper

SEQ ID NO: 369941 - DNA, 525 bp, Homo sapiens
  chr2:219924596-219925121
  hyper
ccagtactttggggcagaggagccgccgccaacctgctgggctgtggggcttggcagcggggagctcttctagcagtctcctccgggcttggggatgccgacactcctgcctggacccctggccagcccatcttgggcaggaggcagcggggcttggcgagaggggcaggtgccagggagcgtgccagccagtcgagaaaatgtgccagggggtgggtagggccgggcaggtggccgtgcttcggtggcggcgcgctggtagggcggatcgcgctcacctgggtcatgaggcggtcggcgcctgtgttctcctcgtccttgaagatgatgtctggattgtaattgggggtgagctccttgaagcgctcggagctgcgagcgatcttgccttcatagcgtccgctggcgcccagggtcttctcgggcacattggggctgaactgcttgtaggcgagcggcacgagtttgcgtggcggtcgccggcggctgcccaccacccgacccggcccgcagccccatgccgcc

SEQ ID NO: 369942 - DNA, 393 bp, Homo sapiens; identical to SEQ ID NO: 346520
  chr2:220348591-220348984
  hyper

SEQ ID NO: 369943 - DNA, 182 bp, Homo sapiens; identical to SEQ ID NO: 198715
  chr2:220361644-220361826
  hyper

SEQ ID NO: 369944 - DNA, 51 bp, Homo sapiens; identical to SEQ ID NO: 280681
  chr2:220362349-220362400
  hyper

SEQ ID NO: 369945 - DNA, 109 bp, Homo sapiens; identical to SEQ ID NO: 280682
  chr2:220362444-220362553
  hyper

SEQ ID NO: 369946 - DNA, 249 bp, Homo sapiens
  chr2:220377743-220377992
  hyper
cggggccaggcctgacgcagggggcggggtggccgttgggcagcgggtggacctcgggctctaatccccagcagctgccgtttccctcagatcgattcctttctcactttttttctcagctgctggttctgcggcttggatcgatggagccacctccccccgcccgtccacgcttcctctccctgctgctcattagcgccccgattaatcagcccccctttcctcccggggacaagggcttcctccccc

SEQ ID NO: 369947 - DNA, 98 bp, Homo sapiens; identical to SEQ ID NO: 357468
  chr2:220378995-220379093
  hyper

SEQ ID NO: 369948 - DNA, 59 bp, Homo sapiens; identical to SEQ ID NO: 349687
  chr2:220417712-220417771
  hyper

SEQ ID NO: 369949 - DNA, 81 bp, Homo sapiens; identical to SEQ ID NO: 357470
  chr2:220435308-220435389
  hyper

SEQ ID NO: 369950 - DNA, 95 bp, Homo sapiens; identical to SEQ ID NO: 357471
  chr2:220436254-220436349
  hyper

SEQ ID NO: 369951 - DNA, 138 bp, Homo sapiens; identical to SEQ ID NO: 198724
  chr2:222435635-222435773
  hyper

SEQ ID NO: 369952 - DNA, 406 bp, Homo sapiens; identical to SEQ ID NO: 198725
  chr2:222436961-222437367
  hyper

SEQ ID NO: 369953 - DNA, 806 bp, Homo sapiens; identical to SEQ ID NO: 346522
  chr2:222437421-222438227
  hyper

SEQ ID NO: 369954 - DNA, 132 bp, Homo sapiens
  chr2:223104742-223104874
  hyper
cgtctcacagcacgaggtcattagaaggaaaataagctcctgccaggttggggctaatcaaaatagcacaaataaaccctgacactcaacaactccccgagtgcctgctgccctgggaggagagtacagatt

SEQ ID NO: 369955 - DNA, 304 bp, Homo sapiens; identical to SEQ ID NO: 198729
  chr2:223166850-223167154
  hyper

SEQ ID NO: 369956 - DNA, 60 bp, Homo sapiens; identical to SEQ ID NO: 198731
  chr2:223170211-223170271
  hyper

SEQ ID NO: 369957 - DNA, 284 bp, Homo sapiens; identical to SEQ ID NO: 198732
  chr2:223171556-223171840
  hyper

SEQ ID NO: 369958 - DNA, 863 bp, Homo sapiens; identical to SEQ ID NO: 331634
  chr2:223183542-223184405
  hyper

SEQ ID NO: 369959 - DNA, 94 bp, Homo sapiens; identical to SEQ ID NO: 349691
  chr2:223185036-223185130
  hyper

SEQ ID NO: 369960 - DNA, 1340 bp, Homo sapiens; identical to SEQ ID NO: 357479
  chr2:223288948-223290288
  hyper

SEQ ID NO: 369961 - DNA, 163 bp, Homo sapiens; identical to SEQ ID NO: 331637
  chr2:224702626-224702789
  hyper

SEQ ID NO: 369962 - DNA, 372 bp, Homo sapiens; identical to SEQ ID NO: 331638
  chr2:224808923-224809295
  hyper

SEQ ID NO: 369963 - DNA, 236 bp, Homo sapiens; identical to SEQ ID NO: 198740
  chr2:225906168-225906404
  hyper

SEQ ID NO: 369964 - DNA, 210 bp, Homo sapiens; identical to SEQ ID NO: 331640
  chr2:227700369-227700579
  hyper

SEQ ID NO: 369965 - DNA, 559 bp, Homo sapiens
  chr2:228028714-228029273
  hyper
cgccttacctgtggggacgcccgcagcgccaggagctgccgccttgccaccccacgggacgcgcacctccagccccaatccacccgcgccccgctgcctcttcgcggcgctctcgcagccaagcccggcggccgcaagttggaggcgggctggaggcggggaacgcggaccgccgcgggcgcggggaacaagcggggcctcccgagtgcagacgcccggcgcgcctcccgcttaatctgggcagggccgctggccactccctccaccctgcgcagccacctccccaccgcgcagccacctccccaccgcacacccccaaacgccccacctccgaccgcaccccacttccccgcctgggcccccggaccttgggagcatcacctccttaaccccttaccctggatccgcgcccacctgcccctcaggcgcccagccctttctcgcctcctgggcacgatgcccgggtagaagggacactgcctggtaagttgggagggagggggtatgagggcgggacctgagccacgtcttccctcccttgaagccacaaccaaaaagc

SEQ ID NO: 369966 - DNA, 352 bp, Homo sapiens; identical to SEQ ID NO: 345069
  chr2:230932495-230932847
  hyper

SEQ ID NO: 369967 - DNA, 146 bp, Homo sapiens; identical to SEQ ID NO: 280732
  chr2:230933064-230933210
  hyper

SEQ ID NO: 369968 - DNA, 34 bp, Homo sapiens
  chr2:231191894-231191928
  hyper
ggtcagggcagccacactgcacgcaggctgggcc

SEQ ID NO: 369969 - DNA, 441 bp, Homo sapiens; identical to SEQ ID NO: 331646
  chr2:231902096-231902537
  hyper

SEQ ID NO: 369970 - DNA, 156 bp, Homo sapiens; identical to SEQ ID NO: 357486
  chr2:231902837-231902993
  hyper

SEQ ID NO: 369971 - DNA, 167 bp, Homo sapiens; identical to SEQ ID NO: 349698
  chr2:232260775-232260942
  hyper

SEQ ID NO: 369972 - DNA, 41 bp, Homo sapiens; identical to SEQ ID NO: 349699
  chr2:232260984-232261025
  hyper

SEQ ID NO: 369973 - DNA, 104 bp, Homo sapiens; identical to SEQ ID NO: 280744
  chr2:232479181-232479285
  hyper

SEQ ID NO: 369974 - DNA, 227 bp, Homo sapiens; identical to SEQ ID NO: 349701
  chr2:232479454-232479681
  hyper

SEQ ID NO: 369975 - DNA, 115 bp, Homo sapiens; identical to SEQ ID NO: 357491
  chr2:232527239-232527354
  hyper

SEQ ID NO: 369976 - DNA, 51 bp, Homo sapiens
  chr2:232651379-232651430
  hyper
cgcggctcctcactccacgcctgcggccctgcttggagcataccgcccacc

SEQ ID NO: 369977 - DNA, 623 bp, Homo sapiens; identical to SEQ ID NO: 346527
  chr2:232790030-232790653
  hyper

SEQ ID NO: 369978 - DNA, 263 bp, Homo sapiens; identical to SEQ ID NO: 280754
  chr2:232790784-232791047
  hyper

SEQ ID NO: 369979 - DNA, 390 bp, Homo sapiens; identical to SEQ ID NO: 280755
  chr2:232791140-232791530
  hyper

SEQ ID NO: 369980 - DNA, 254 bp, Homo sapiens; identical to SEQ ID NO: 357495
  chr2:233283897-233284151
  hyper

SEQ ID NO: 369981 - DNA, 92 bp, Homo sapiens; identical to SEQ ID NO: 357496
  chr2:233367692-233367784
  hyper

SEQ ID NO: 369982 - DNA, 339 bp, Homo sapiens; identical to SEQ ID NO: 280765
  chr2:233497841-233498180
  hyper

SEQ ID NO: 369983 - DNA, 33 bp, Homo sapiens; identical to SEQ ID NO: 198759
  chr2:233499312-233499345
  hyper

SEQ ID NO: 369984 - DNA, 220 bp, Homo sapiens; identical to SEQ ID NO: 349705
  chr2:233740556-233740776
  hyper

SEQ ID NO: 369985 - DNA, 168 bp, Homo sapiens; identical to SEQ ID NO: 357500
  chr2:233741586-233741754
  hyper

SEQ ID NO: 369986 - DNA, 359 bp, Homo sapiens; identical to SEQ ID NO: 349706
  chr2:234474820-234475179
  hyper

SEQ ID NO: 369987 - DNA, 102 bp, Homo sapiens; identical to SEQ ID NO: 349707
  chr2:234475503-234475605
  hyper

SEQ ID NO: 369988 - DNA, 165 bp, Homo sapiens; identical to SEQ ID NO: 357503
  chr2:235404971-235405136
  hyper

SEQ ID NO: 369989 - DNA, 592 bp, Homo sapiens; identical to SEQ ID NO: 198764
  chr2:235860154-235860746
  hyper

SEQ ID NO: 369990 - DNA, 84 bp, Homo sapiens; identical to SEQ ID NO: 198765
  chr2:235860808-235860892
  hyper

SEQ ID NO: 369991 - DNA, 438 bp, Homo sapiens; identical to SEQ ID NO: 198766
  chr2:235860951-235861389
  hyper

SEQ ID NO: 369992 - DNA, 132 bp, Homo sapiens; identical to SEQ ID NO: 357507
  chr2:235861533-235861665
  hyper

SEQ ID NO: 369993 - DNA, 297 bp, Homo sapiens; identical to SEQ ID NO: 198767
  chr2:236402404-236402701
  hyper

SEQ ID NO: 369994 - DNA, 138 bp, Homo sapiens; identical to SEQ ID NO: 198768
  chr2:236403013-236403151
  hyper

SEQ ID NO: 369995 - DNA, 118 bp, Homo sapiens; identical to SEQ ID NO: 198769
  chr2:236403736-236403854
  hyper

SEQ ID NO: 369996 - DNA, 212 bp, Homo sapiens
  chr2:236403941-236404153
  hyper
gggcggtgcagggctgccctccttagtgtgtttgcttaattcaggggtgcagttgaacttagtggatgccgagagccagccctagccgcgggagcatcgtgtccaggtgcccctgtgcaaacgctggaaccggtagtgtgctttgtaccaaccaaaagtccggggttggattagaggaagaaccctaccaggagggcagggcgtcctccagc

SEQ ID NO: 369997 - DNA, 307 bp, Homo sapiens; identical to SEQ ID NO: 198771
  chr2:236578055-236578362
  hyper

SEQ ID NO: 369998 - DNA, 44 bp, Homo sapiens; identical to SEQ ID NO: 346535
  chr2:236578677-236578721
  hyper

SEQ ID NO: 369999 - DNA, 115 bp, Homo sapiens; identical to SEQ ID NO: 357513
  chr2:237080431-237080546
  hyper

SEQ ID NO: 370000 - DNA, 352 bp, Homo sapiens; identical to SEQ ID NO: 280797
  chr2:237087070-237087422
  hyper

SEQ ID NO: 370001 - DNA, 393 bp, Homo sapiens; identical to SEQ ID NO: 280798
  chr2:237087618-237088011
  hyper

SEQ ID NO: 370002 - DNA, 223 bp, Homo sapiens; identical to SEQ ID NO: 345074
  chr2:237088239-237088462
  hyper

SEQ ID NO: 370003 - DNA, 226 bp, Homo sapiens; identical to SEQ ID NO: 331671
  chr2:238617178-238617404
  hyper

SEQ ID NO: 370004 - DNA, 112 bp, Homo sapiens; identical to SEQ ID NO: 357518
  chr2:241393469-241393581
  hyper

SEQ ID NO: 370005 - DNA, 205 bp, Homo sapiens; identical to SEQ ID NO: 198794
  chr2:241771771-241771976
  hyper

SEQ ID NO: 370006 - DNA, 82 bp, Homo sapiens; identical to SEQ ID NO: 331676
  chr2:242269474-242269556
  hyper

SEQ ID NO: 370007 - DNA, 246 bp, Homo sapiens; identical to SEQ ID NO: 349719
  chr2:242498020-242498266
  hyper

SEQ ID NO: 370008 - DNA, 235 bp, Homo sapiens; identical to SEQ ID NO: 280841
  chr2:242498800-242499035
  hyper

SEQ ID NO: 370009 - DNA, 172 bp, Homo sapiens; identical to SEQ ID NO: 280842
  chr2:242549677-242549849
  hyper

SEQ ID NO: 370010 - DNA, 50 bp, Homo sapiens; identical to SEQ ID NO: 280843
  chr2:242549957-242550007
  hyper

SEQ ID NO: 370011 - DNA, 109 bp, Homo sapiens; identical to SEQ ID NO: 349721
  chr3:2139600-2139709
  hyper

SEQ ID NO: 370012 - DNA, 54 bp, Homo sapiens; identical to SEQ ID NO: 198804
  chr3:2141396-2141450
  hyper

SEQ ID NO: 370013 - DNA, 244 bp, Homo sapiens; identical to SEQ ID NO: 349723
  chr3:2141539-2141783
  hyper

SEQ ID NO: 370014 - DNA, 193 bp, Homo sapiens; identical to SEQ ID NO: 357528
  chr3:3221338-3221531
  hyper

SEQ ID NO: 370015 - DNA, 46 bp, Homo sapiens; identical to SEQ ID NO: 107798
  chr3:3221564-3221610
  hyper

SEQ ID NO: 370016 - DNA, 81 bp, Homo sapiens; identical to SEQ ID NO: 349724
  chr3:3840349-3840430
  hyper

SEQ ID NO: 370017 - DNA, 326 bp, Homo sapiens; identical to SEQ ID NO: 349725
  chr3:4909962-4910288
  hyper

SEQ ID NO: 370018 - DNA, 210 bp, Homo sapiens; identical to SEQ ID NO: 349726
  chr3:4910550-4910760
  hyper

SEQ ID NO: 370019 - DNA, 231 bp, Homo sapiens; identical to SEQ ID NO: 345076
  chr3:5018754-5018985
  hyper

SEQ ID NO: 370020 - DNA, 143 bp, Homo sapiens; identical to SEQ ID NO: 345077
  chr3:5019132-5019275
  hyper

SEQ ID NO: 370021 - DNA, 205 bp, Homo sapiens; identical to SEQ ID NO: 345078
  chr3:5137574-5137779
  hyper

SEQ ID NO: 370022 - DNA, 190 bp, Homo sapiens; identical to SEQ ID NO: 280868
  chr3:6902672-6902862
  hyper

SEQ ID NO: 370023 - DNA, 40 bp, Homo sapiens; identical to SEQ ID NO: 280869
  chr3:6902929-6902969
  hyper

SEQ ID NO: 370024 - DNA, 76 bp, Homo sapiens; identical to SEQ ID NO: 357538
  chr3:6903188-6903264
  hyper

SEQ ID NO: 370025 - DNA, 233 bp, Homo sapiens; identical to SEQ ID NO: 280892
  chr3:10183473-10183706
  hyper

SEQ ID NO: 370026 - DNA, 176 bp, Homo sapiens; identical to SEQ ID NO: 357540
  chr3:10183782-10183958
  hyper

SEQ ID NO: 370027 - DNA, 412 bp, Homo sapiens; identical to SEQ ID NO: 345079
  chr3:10206343-10206755
  hyper

SEQ ID NO: 370028 - DNA, 880 bp, Homo sapiens; identical to SEQ ID NO: 331693
  chr3:11684049-11684929
  hyper

SEQ ID NO: 370029 - DNA, 427 bp, Homo sapiens; identical to SEQ ID NO: 346543
  chr3:12329055-12329482
  hyper

SEQ ID NO: 370030 - DNA, 205 bp, Homo sapiens; identical to SEQ ID NO: 198821
  chr3:12330025-12330230
  hyper

SEQ ID NO: 370031 - DNA, 80 bp, Homo sapiens; identical to SEQ ID NO: 349733
  chr3:12330283-12330363
  hyper

SEQ ID NO: 370032 - DNA, 98 bp, Homo sapiens; identical to SEQ ID NO: 349734
  chr3:13009355-13009453
  hyper

SEQ ID NO: 370033 - DNA, 50 bp, Homo sapiens; identical to SEQ ID NO: 280911
  chr3:13009475-13009525
  hyper

SEQ ID NO: 370034 - DNA, 1305 bp, Homo sapiens
  chr3:13460995-13462300
  hyper
cgccggcctgcctcgtctcacttcgcctctgtaaagcggcccctgggcttccctccaaaactcctttcctccagggtctccgttcctccccgcgacgctaggcgctgcgcttcgtttcacagactcacttcccacgccagggcgagggcggtcacagacaaacccgagctggggtcccagactcaagggaagtgcggcccagctgccccggcgccccctcccgggtcaggccggctcgggcccggccggcttgggccctgcggtcccagacgccgctccccaggccacccctcctcccgcacaacccagaacacgcgggtcacggccgccaggctgcgcccgctctgctcgcgcctcagcggcgcggaggcccggacggcgccatgacatgagcagtggtggcgacccacgcgcacccgccgctccgagtgctgcagcctagcgcccagcgagagcgcgccgcgcacctgccggctctgccggcctcccggcgcccgcccagcctctcagcgcgaaggcccagcccggcccacggcgcccgcccggcccggccgcgcgcctcaccagcggtagcagccctccgaggcctccagcgtgaagttaacgcgcgtggcccgcgtgaagggcagcagcactttggggatgttgagcttggccgcagcggcggaggggcccgccgccaacagcaccgacagcgtcagcagcagcagcccccggccccgcgccgccatcctcgccgcgcgtcacctcccgcgaccctgcgcccggccgcccgcgccgccccgttgccctccgctcccgcccgcgcgcgcgccaggccagcaggtgatgagcgcgggggcggggcgagggccgtcggcggccgccgcttcctgggcctgagcgcgggaactctgggggccgagctcgcggcgaccccacccccagcccggccctcgcgcagggacgcggggctgggggatgggcgcgcgcccgggcccccggagctgagggagaaggcttggggcgcgcccgcggggacccctggaccctagaagtcccaagggggagcccccggggcgccccgcagcacgcatcccgccctggtatttgcccctggcggtggagccaagccgccggctttggaccttgcgctctggcccggacccacggtcagcaaggaagggacacatgccccaggacatttgggatgcagaaaaccggcgcctgccttgtcccagcccatgcttcccagaagagggaccccgggctcgcaaagggaagccacctgctgaagcgctgaaggcccggggcccgctccccctc

SEQ ID NO: 370035 - DNA, 201 bp, Homo sapiens; identical to SEQ ID NO: 198829
  chr3:13920779-13920980
  hyper

SEQ ID NO: 370036 - DNA, 138 bp, Homo sapiens; identical to SEQ ID NO: 357550
  chr3:13921903-13922041
  hyper

SEQ ID NO: 370037 - DNA, 478 bp, Homo sapiens; identical to SEQ ID NO: 349738
  chr3:13936742-13937220
  hyper

SEQ ID NO: 370038 - DNA, 124 bp, Homo sapiens; identical to SEQ ID NO: 349739
  chr3:13937250-13937374
  hyper

SEQ ID NO: 370039 - DNA, 92 bp, Homo sapiens; identical to SEQ ID NO: 331702
  chr3:14443834-14443926
  hyper

SEQ ID NO: 370040 - DNA, 578 bp, Homo sapiens; identical to SEQ ID NO: 331703
  chr3:14443998-14444576
  hyper

SEQ ID NO: 370041 - DNA, 78 bp, Homo sapiens; identical to SEQ ID NO: 280927
  chr3:14644635-14644713
  hyper

SEQ ID NO: 370042 - DNA, 54 bp, Homo sapiens; identical to SEQ ID NO: 357556
  chr3:14644749-14644803
  hyper

SEQ ID NO: 370043 - DNA, 369 bp, Homo sapiens; identical to SEQ ID NO: 345080
  chr3:16553609-16553978
  hyper

SEQ ID NO: 370044 - DNA, 78 bp, Homo sapiens; identical to SEQ ID NO: 345081
  chr3:16555426-16555504
  hyper

SEQ ID NO: 370045 - DNA, 107 bp, Homo sapiens; identical to SEQ ID NO: 357559
  chr3:16925425-16925532
  hyper

SEQ ID NO: 370046 - DNA, 73 bp, Homo sapiens; identical to SEQ ID NO: 280940
  chr3:16925583-16925656
  hyper

SEQ ID NO: 370047 - DNA, 230 bp, Homo sapiens; identical to SEQ ID NO: 280941
  chr3:16925705-16925935
  hyper

SEQ ID NO: 370048 - DNA, 255 bp, Homo sapiens; identical to SEQ ID NO: 280942
  chr3:16925965-16926220
  hyper

SEQ ID NO: 370049 - DNA, 93 bp, Homo sapiens; identical to SEQ ID NO: 357563
  chr3:16926261-16926354
  hyper

SEQ ID NO: 370050 - DNA, 340 bp, Homo sapiens; identical to SEQ ID NO: 349744
  chr3:16926663-16927003
  hyper

SEQ ID NO: 370051 - DNA, 90 bp, Homo sapiens
  chr3:19190216-19190306
  hyper
ggttatgaaaggattactggcgccgcaaaacaccttcctggacaccatcgccacccgttttgacggaacacgtaagtcttacacttgaac

SEQ ID NO: 370052 - DNA, 269 bp, Homo sapiens; identical to SEQ ID NO: 331711
  chr3:23957838-23958107
  hyper

SEQ ID NO: 370053 - DNA, 989 bp, Homo sapiens; identical to SEQ ID NO: 331712
  chr3:24536360-24537349
  hyper

SEQ ID NO: 370054 - DNA, 158 bp, Homo sapiens; identical to SEQ ID NO: 280964
  chr3:24870844-24871002
  hyper

SEQ ID NO: 370055 - DNA, 349 bp, Homo sapiens; identical to SEQ ID NO: 357568
  chr3:24871245-24871594
  hyper

SEQ ID NO: 370056 - DNA, 221 bp, Homo sapiens; identical to SEQ ID NO: 198852
  chr3:25469458-25469679
  hyper

SEQ ID NO: 370057 - DNA, 130 bp, Homo sapiens; identical to SEQ ID NO: 345083
  chr3:25469874-25470004
  hyper

SEQ ID NO: 370058 - DNA, 219 bp, Homo sapiens; identical to SEQ ID NO: 198856
  chr3:26665682-26665901
  hyper

SEQ ID NO: 370059 - DNA, 214 bp, Homo sapiens; identical to SEQ ID NO: 346549
  chr3:27410391-27410605
  hyper

SEQ ID NO: 370060 - DNA, 61 bp, Homo sapiens; identical to SEQ ID NO: 346550
  chr3:27411079-27411140
  hyper

SEQ ID NO: 370061 - DNA, 413 bp, Homo sapiens
  chr3:27754928-27755341
  hyper
gcagaggagagggaagaccgtgagtctgctttcacctaggtttaaagcgaatcaaagacggctgtaaaaagggaaaccgggaccaaaaacagatttggagcctcgaaactctccattgaaggtttggaagatacgttgctgcagacttgaaaccggctccaaatccggcccaaacatgggctgaaaatatggcgcgctaatctgctgcttcccctcctcctcaagttctttctgactcttcccacctttcccagtttcccttccagacgtctgcggctccccactccacccccaggatagctactctacatcccgacaattcccagcttctacacccaggaggaggaattctggaaccacccagagcgaactcgtgccggggcggggtggggaccggaggaaggtcctgctcc

SEQ ID NO: 370062 - DNA, 337 bp, Homo sapiens
  chr3:27756316-27756653
  hyper
cgggccccagagggacggaggggaagggagacaggacagtcgaggtacaaggtcctggcggccttaattgggcgcagaaggggaggaggtctcggctgattgctcgcctcccagcagctaatcctcttagcagctgcatttccgcgctacacagttagcagaatgatcctcccagctagacctttaccccgggagggtccaggagggggctggaaaggtttgcaatctgggcctgaagccgtctgcagataagcctggcgggacgtctggctggggggacaaaggggaccctccaccccactctttggacctcccagggttcagccaggggatgggc

SEQ ID NO: 370063 - DNA, 427 bp, Homo sapiens
  chr3:27756715-27757142
  hyper
tccaaggtcactgtttgcagagcggcagtgcacggaacgactggaatcctcctttgtaagtgccacgcccgtccctagcctgcgcctcagaccgagtccgggcggagtttgactgcagctactgaggccggcagccggcggcggcgggtgcgcagcgtctgggttcagaagaaagccgcaggtgggcgcagaagctgagctgtgtgcagccccccgctccgccgcgccccagggaccctgaactggtgggcgctcaaagggccacgggggttcccagggagcctaggtgggcctaaggatgggtggccccaagtaagcctagaaaaaagcccagagaacttagtggccaggcgctctgacagagcctggtctccaagagccagaagcggaggttttcgaggcttggttaagtctgatgtgggcaatc

SEQ ID NO: 370064 - DNA, 275 bp, Homo sapiens; identical to SEQ ID NO: 280981
  chr3:27765542-27765817
  hyper

SEQ ID NO: 370065 - DNA, 150 bp, Homo sapiens; identical to SEQ ID NO: 357573
  chr3:29322332-29322482
  hyper

SEQ ID NO: 370066 - DNA, 243 bp, Homo sapiens; identical to SEQ ID NO: 331723
  chr3:30648808-30649051
  hyper

SEQ ID NO: 370067 - DNA, 168 bp, Homo sapiens; identical to SEQ ID NO: 357574
  chr3:32279558-32279726
  hyper

SEQ ID NO: 370068 - DNA, 558 bp, Homo sapiens; identical to SEQ ID NO: 345084
  chr3:32433054-32433612
  hyper

SEQ ID NO: 370069 - DNA, 200 bp, Homo sapiens; identical to SEQ ID NO: 198867
  chr3:32433665-32433865
  hyper

SEQ ID NO: 370070 - DNA, 81 bp, Homo sapiens; identical to SEQ ID NO: 345086
  chr3:32434068-32434149
  hyper

SEQ ID NO: 370071 - DNA, 64 bp, Homo sapiens; identical to SEQ ID NO: 349753
  chr3:35681641-35681705
  hyper

SEQ ID NO: 370072 - DNA, 240 bp, Homo sapiens; identical to SEQ ID NO: 357579
  chr3:36985571-36985811
  hyper

SEQ ID NO: 370073 - DNA, 250 bp, Homo sapiens; identical to SEQ ID NO: 198878
  chr3:36986413-36986663
  hyper

SEQ ID NO: 370074 - DNA, 1420 bp, Homo sapiens; identical to SEQ ID NO: 331732
  chr3:37033979-37035399
  hyper

SEQ ID NO: 370075 - DNA, 93 bp, Homo sapiens; identical to SEQ ID NO: 281033
  chr3:37901953-37902046
  hyper

SEQ ID NO: 370076 - DNA, 423 bp, Homo sapiens; identical to SEQ ID NO: 281034
  chr3:37902095-37902518
  hyper

SEQ ID NO: 370077 - DNA, 255 bp, Homo sapiens; identical to SEQ ID NO: 357584
  chr3:37902584-37902839
  hyper

SEQ ID NO: 370078 - DNA, 41 bp, Homo sapiens; identical to SEQ ID NO: 349755
  chr3:38070629-38070670
  hyper

SEQ ID NO: 370079 - DNA, 50 bp, Homo sapiens; identical to SEQ ID NO: 331738
  chr3:39250115-39250165
  hyper

SEQ ID NO: 370080 - DNA, 493 bp, Homo sapiens; identical to SEQ ID NO: 346555
  chr3:39850742-39851235
  hyper

SEQ ID NO: 370081 - DNA, 88 bp, Homo sapiens; identical to SEQ ID NO: 331740
  chr3:40350800-40350888
  hyper

SEQ ID NO: 370082 - DNA, 217 bp, Homo sapiens; identical to SEQ ID NO: 357589
  chr3:40547367-40547584
  hyper

SEQ ID NO: 370083 - DNA, 167 bp, Homo sapiens; identical to SEQ ID NO: 331742
  chr3:41240162-41240329
  hyper

SEQ ID NO: 370084 - DNA, 158 bp, Homo sapiens; identical to SEQ ID NO: 357590
  chr3:42542869-42543027
  hyper

SEQ ID NO: 370085 - DNA, 129 bp, Homo sapiens; identical to SEQ ID NO: 281069
  chr3:42543580-42543709
  hyper

SEQ ID NO: 370086 - DNA, 87 bp, Homo sapiens
  chr3:42947961-42948048
  hyper
gtcttggccctgccctgggttctaggcccggagacggggtggtgcggcggctgggaaatgggggtacaacccagagtgaggggcctc

SEQ ID NO: 370087 - DNA, 243 bp, Homo sapiens; identical to SEQ ID NO: 345088
  chr3:43147038-43147281
  hyper

SEQ ID NO: 370088 - DNA, 105 bp, Homo sapiens; identical to SEQ ID NO: 345089
  chr3:43147607-43147712
  hyper

SEQ ID NO: 370089 - DNA, 131 bp, Homo sapiens; identical to SEQ ID NO: 349760
  chr3:43935666-43935797
  hyper

SEQ ID NO: 370090 - DNA, 426 bp, Homo sapiens; identical to SEQ ID NO: 198906
  chr3:44038922-44039348
  hyper

SEQ ID NO: 370091 - DNA, 41 bp, Homo sapiens; identical to SEQ ID NO: 345091
  chr3:44063232-44063273
  hyper

SEQ ID NO: 370092 - DNA, 71 bp, Homo sapiens; identical to SEQ ID NO: 346560
  chr3:44597031-44597102
  hyper

SEQ ID NO: 370093 - DNA, 550 bp, Homo sapiens; identical to SEQ ID NO: 331751
  chr3:44666348-44666898
  hyper

SEQ ID NO: 370094 - DNA, 157 bp, Homo sapiens; identical to SEQ ID NO: 357599
  chr3:44771093-44771250
  hyper

SEQ ID NO: 370095 - DNA, 365 bp, Homo sapiens; identical to SEQ ID NO: 349765
  chr3:45186931-45187296
  hyper

SEQ ID NO: 370096 - DNA, 485 bp, Homo sapiens; identical to SEQ ID NO: 357601
  chr3:49027062-49027547
  hyper

SEQ ID NO: 370097 - DNA, 395 bp, Homo sapiens; identical to SEQ ID NO: 346561
  chr3:49027805-49028200
  hyper

SEQ ID NO: 370098 - DNA, 190 bp, Homo sapiens; identical to SEQ ID NO: 357603
  chr3:49066961-49067151
  hyper

SEQ ID NO: 370099 - DNA, 387 bp, Homo sapiens; identical to SEQ ID NO: 357604
  chr3:49893744-49894131
  hyper

SEQ ID NO: 370100 - DNA, 233 bp, Homo sapiens; identical to SEQ ID NO: 349767
  chr3:49906737-49906970
  hyper

SEQ ID NO: 370101 - DNA, 49 bp, Homo sapiens; identical to SEQ ID NO: 349768
  chr3:49907379-49907428
  hyper

SEQ ID NO: 370102 - DNA, 94 bp, Homo sapiens; identical to SEQ ID NO: 357607
  chr3:50243562-50243656
  hyper

SEQ ID NO: 370103 - DNA, 356 bp, Homo sapiens; identical to SEQ ID NO: 346562
  chr3:50374299-50374655
  hyper

SEQ ID NO: 370104 - DNA, 233 bp, Homo sapiens; identical to SEQ ID NO: 281171
  chr3:50374684-50374917
  hyper

SEQ ID NO: 370105 - DNA, 34 bp, Homo sapiens; identical to SEQ ID NO: 346564
  chr3:50374946-50374980
  hyper

SEQ ID NO: 370106 - DNA, 81 bp, Homo sapiens; identical to SEQ ID NO: 346565
  chr3:50377892-50377973
  hyper

SEQ ID NO: 370107 - DNA, 167 bp, Homo sapiens; identical to SEQ ID NO: 346566
  chr3:50378002-50378169
  hyper

SEQ ID NO: 370108 - DNA, 37 bp, Homo sapiens; identical to SEQ ID NO: 281183
  chr3:51989952-51989989
  hyper

SEQ ID NO: 370109 - DNA, 138 bp, Homo sapiens; identical to SEQ ID NO: 357614
  chr3:51990500-51990638
  hyper

SEQ ID NO: 370110 - DNA, 117 bp, Homo sapiens
  chr3:52280022-52280139
  hyper
cgcacgaggacgcacgctaccctggaatgcaggctacgccgagtgagtgcccctccccgacccccagctcaggcccgggcctgaacccgcttcgggtcctgcgcccgcctagaaagc

SEQ ID NO: 370111 - DNA, 199 bp, Homo sapiens; identical to SEQ ID NO: 331773
  chr3:53195788-53195987
  hyper

SEQ ID NO: 370112 - DNA, 572 bp, Homo sapiens; identical to SEQ ID NO: 357616
  chr3:53527829-53528401
  hyper

SEQ ID NO: 370113 - DNA, 247 bp, Homo sapiens; identical to SEQ ID NO: 198957
  chr3:53879786-53880033
  hyper

SEQ ID NO: 370114 - DNA, 201 bp, Homo sapiens; identical to SEQ ID NO: 198959
  chr3:54156155-54156356
  hyper

SEQ ID NO: 370115 - DNA, 346 bp, Homo sapiens; identical to SEQ ID NO: 198961
  chr3:55521390-55521736
  hyper

SEQ ID NO: 370116 - DNA, 35 bp, Homo sapiens
  chr3:55522560-55522595
  hyper
cgcatgcgtggtgaggccggcctatgacaaactct

SEQ ID NO: 370117 - DNA, 165 bp, Homo sapiens; identical to SEQ ID NO: 349778
  chr3:57198384-57198549
  hyper

SEQ ID NO: 370118 - DNA, 568 bp, Homo sapiens; identical to SEQ ID NO: 349779
  chr3:57198581-57199149
  hyper

SEQ ID NO: 370119 - DNA, 127 bp, Homo sapiens; identical to SEQ ID NO: 357622
  chr3:57204027-57204154
  hyper

SEQ ID NO: 370120 - DNA, 322 bp, Homo sapiens; identical to SEQ ID NO: 357623
  chr3:57204208-57204530
  hyper

SEQ ID NO: 370121 - DNA, 205 bp, Homo sapiens
  chr3:57261363-57261568
  hyper
cgcttcgagcggagttgggaatgttatcatctgaggaaactaaaaggcgccagcagtaggactttctccaaggtctctgacaaaatatgttgcgggaaaagtcaacccgccccaaattcccccgtgtggccctaactcgaggctctggctcctcgcgccggcaagctgaggaagagacggtcccctgcgatttagatacaaacgc

SEQ ID NO: 370122 - DNA, 625 bp, Homo sapiens; identical to SEQ ID NO: 357624
  chr3:57994555-57995180
  hyper

SEQ ID NO: 370123 - DNA, 1461 bp, Homo sapiens
  chr3:61546692-61548153
  hyper
cgctcggctttgtttcccggcgggggaatgcgctgtgttggaggcgcgaacaggagccgcagacggtgagcctcaccgctgcaaatgccagggcagtgaagccgaacagaaaaccccatcgctttaaaaaggcagctgtccgccctccccctttcccctcgccagggcgaggggcccctcaagtccgggatccgcgagctgcgcggaggatctcgccaaacccgagcaccgtgcggcgtcttttaagagctcgaacaacgggaatccagcaaaaaacaagccggccccagaaggcagcctccctcctctctccgcgcacgggctacaatcgcccccagtccccaaactgtcccagtagaggccgcgcggagagagcagagccgagggacccagcgcaaggcgggagccaagcgcggctgctttaagaacgcggagagcgcgcgcccgccgccagctggcccgggctgcgcgcccccgccgccaccgcgcgccccctgttcgctcgctccttcgctcgccggctttaaagtctctgccaggatccatgctcacatgttacttcctgtatggaggcatggccagtttccagccccgcgctcttcgttccttcccagcctgcgccggagccacaactttcaggagcatggactgaaggcgccctcgccccagcgcccctctgagatcctttgtgttttcctccgtttcctccggccgtttctattttggggggctctccgctccccctgcctctcccctccccttcccctctcgcaaacatgcctccttccttcccggggccctggaaggagctgcctgcctgaagcccggagacgccgcgccgcgctcagccccgccgccgcccgccggctctcgggctgtgctgcgctgccgactcaagttggggatcctcggctgctcgccgccgccgcccgcggtccctgcctgccccaggcccggggcatcgccgccggccgccgactccgcgccctgcccgatcggctctctcctttttaaacggaaagcagcctttctccgccgagaggatcgtccccagcgtggctctgcgttcccggtcactttttgagattttccggggggcgctcggcggcttcccggattccaaggggactcgggccgccgagcgcggggggcccgtggagcgggcgagccggggaagcgccccggcttagcggaggctcgcacggaggcaagaacttattcaacaagtttacctccctgctttcctcttttcgatgtgcgttttcggacatgcggaggttactggaaccgtgttggtggattttgttcctgaaaatcaccagttccgtgctccattatgtcgtgtgcttccccggtgagtgccggccgccgaggggatgcggccccggccggcgcgcgttggggatgcggagttgtcgcctgggcgcggagctccggcgcccgtccgggagaccctggaga

SEQ ID NO: 370124 - DNA, 446 bp, Homo sapiens; identical to SEQ ID NO: 349780
  chr3:62859445-62859891
  hyper

SEQ ID NO: 370125 - DNA, 205 bp, Homo sapiens; identical to SEQ ID NO: 198979
  chr3:62859964-62860169
  hyper

SEQ ID NO: 370126 - DNA, 225 bp, Homo sapiens
  chr3:62861325-62861550
  hyper
tgggggagggagaaatccagaaaccagccgagcgggctgtttggagacgctaaatcgagaggtcttacttaggaggaggaagtccgtgagatcttatacgggaaagaaagggtccatctcctttccccaggcttctttacacctggggcgtggggggcgtgggggctgggcagcgtgtttgtcccacctgtgtaaactctgattccagcaacttattccgcatgc

SEQ ID NO: 370127 - DNA, 77 bp, Homo sapiens; identical to SEQ ID NO: 198981
  chr3:63264062-63264139
  hyper

SEQ ID NO: 370128 - DNA, 85 bp, Homo sapiens; identical to SEQ ID NO: 198982
  chr3:63264169-63264254
  hyper

SEQ ID NO: 370129 - DNA, 138 bp, Homo sapiens
  chr3:63264840-63264978
  hyper
aagctcagaaagttggtcagaactgagacagctcctctgcgggactgggatgctggaagcgcgtgttcaactgctccgcgggagcttcagggagggaaagatgctgcgaagctattacagactgttataaacggcggc

SEQ ID NO: 370130 - DNA, 389 bp, Homo sapiens; identical to SEQ ID NO: 349782
  chr3:64430905-64431294
  hyper

SEQ ID NO: 370131 - DNA, 348 bp, Homo sapiens
  chr3:64671307-64671655
  hyper
cgggggtcgacagagagtcggggaaccaacgtggattccctgctaaatgctatttggcagcgcaagaaggcggcctccccgccctgcctcagtccctagggaaacgtgcgccgcaggctccctctctccactccctggaacccgtgagtagtagaaaccccagaggaaccgaaatcacgtccggacagcctctccaggctgtctcccactatcccgtttctcccggccaccccgccagtagggtgcagagttggactgcgctgcacccccactctcggttccaccccaattcaaagcgtccggggtaggctccgccttctcccccgcccccagagccctcggcccacc

SEQ ID NO: 370132 - DNA, 306 bp, Homo sapiens; identical to SEQ ID NO: 198986
  chr3:64671732-64672038
  hyper

SEQ ID NO: 370133 - DNA, 208 bp, Homo sapiens
  chr3:64672413-64672621
  hyper
tggcggtgagattaaatagaaactgctggccgaaggcagagaggcggtaatgcgcctgggaggaggtagaggaggaagaggaggaggcgaaggcaggccaggggtcagtggcagagttaatgctccgtcgcgttcttttgaagtggacgttcgtgggaaagggttctccgagagcgttcactcggatgggagacacgatttcgtattc

SEQ ID NO: 370134 - DNA, 129 bp, Homo sapiens; identical to SEQ ID NO: 357631
  chr3:64673134-64673263
  hyper

SEQ ID NO: 370135 - DNA, 507 bp, Homo sapiens; identical to SEQ ID NO: 357632
  chr3:64673419-64673926
  hyper

SEQ ID NO: 370136 - DNA, 1318 bp, Homo sapiens; identical to SEQ ID NO: 281269
  chr3:66024122-66025440
  hyper

SEQ ID NO: 370137 - DNA, 56 bp, Homo sapiens; identical to SEQ ID NO: 349784
  chr3:66025506-66025562
  hyper

SEQ ID NO: 370138 - DNA, 1570 bp, Homo sapiens; identical to SEQ ID NO: 331800
  chr3:66550318-66551888
  hyper

SEQ ID NO: 370139 - DNA, 1076 bp, Homo sapiens; identical to SEQ ID NO: 331801
  chr3:67048291-67049367
  hyper

SEQ ID NO: 370140 - DNA, 221 bp, Homo sapiens; identical to SEQ ID NO: 349787
  chr3:69434926-69435147
  hyper

SEQ ID NO: 370141 - DNA, 778 bp, Homo sapiens; identical to SEQ ID NO: 331805
  chr3:69788429-69789207
  hyper

SEQ ID NO: 370142 - DNA, 1710 bp, Homo sapiens; identical to SEQ ID NO: 331806
  chr3:71113110-71114820
  hyper

SEQ ID NO: 370143 - DNA, 1327 bp, Homo sapiens; identical to SEQ ID NO: 349789
  chr3:71630573-71631900
  hyper

SEQ ID NO: 370144 - DNA, 60 bp, Homo sapiens; identical to SEQ ID NO: 198999
  chr3:71802788-71802848
  hyper

SEQ ID NO: 370145 - DNA, 367 bp, Homo sapiens
  chr3:71834745-71835112
  hyper
ggggacacagcagcccctgaatccattcgtttgttcagcaggtctatactgggcgcccgctgcgtgccaggtactgccaccggctctctcctcacggtggaataacttaacagagaagacagacatcaatcaaataccctggaaacgtggaaggcaggggaaagaacaaagggagagcaaaatcgccccaatcccacatcacccgcgacgtgaaaggatttgtccttccagctgcgggactcctatttgtttatttcaagtcagaggccttccctttatgcccacatctgttcccgaccctctcctctgattttcctcacatgtatttcctcccctcttcagccccgcgccagctccaggcacagcc

SEQ ID NO: 370146 - DNA, 152 bp, Homo sapiens; identical to SEQ ID NO: 349791
  chr3:72149806-72149958
  hyper

SEQ ID NO: 370147 - DNA, 96 bp, Homo sapiens; identical to SEQ ID NO: 349792
  chr3:72150077-72150173
  hyper

SEQ ID NO: 370148 - DNA, 160 bp, Homo sapiens
  chr3:72787779-72787939
  hyper
cgggtgccttcccccaacgaaagccactgatgtcgcccctctcctcccagcagcttccagaccgcgaccttctgtagctctgctcagaacttcacctggaacagcttcttacaattcttaaacagcccctcagtcgactgtgattaagcatacactccag

SEQ ID NO: 370149 - DNA, 311 bp, Homo sapiens; identical to SEQ ID NO: 357643
  chr3:73674224-73674535
  hyper

SEQ ID NO: 370150 - DNA, 167 bp, Homo sapiens
  chr3:79815913-79816080
  hyper
ggggcagggagaaggagcaagaaggggccccagaagggcacggcgtttcatcaataatgcagaggctcctggacctccctgcaatacgttttccagctaaacgccaccaactggagcgcttcctggttcgtcccactcgtgtggtttttgtgtgtgaaagatgggac

SEQ ID NO: 370151 - DNA, 174 bp, Homo sapiens; identical to SEQ ID NO: 357644
  chr3:85008817-85008991
  hyper

SEQ ID NO: 370152 - DNA, 139 bp, Homo sapiens
  chr3:85010663-85010802
  hyper
cgggtgtctgacacgttacttaggtttttaatccgcgctgagacaatctcacagagaccctacttcacctctcagtaacttgcatttctcagctctgctgtgtgtgtgtgtatgtgtgtgtgtgtgcgcgcgcgcgcgc

SEQ ID NO: 370153 - DNA, 266 bp, Homo sapiens; identical to SEQ ID NO: 281310
  chr3:87841792-87842058
  hyper

SEQ ID NO: 370154 - DNA, 302 bp, Homo sapiens
  chr3:87842412-87842714
  hyper
cagcggaaggaggggagagtcttcgaatccatctctcggtgggatcttgagaggattcgcgggggggacggtaagataaatctgaggagctggaagaagccgtagatcggaaatcgcttgcagttttccaactttatttcccgcgggtacgaaccattaaggtaaaagggtcagagagagcttctacctcgcggctgcagcttgcctagttgccgcaggtctgactcaaggtagggttgttggcgccttcctgtttggaggggcaatcaagcaaaagagaaagggggatccgagagaccggc

SEQ ID NO: 370155 - DNA, 324 bp, Homo sapiens
  chr3:96531754-96532078
  hyper
cgctcccctgacctcttgtcactgtgccatttccctcctgtgctttctgcccacttggaaaatatcgtatatcctttacaagaccgctactttctctcctctgttcacatttctccattaccatccacattttctcaaaacattccgacgggttttgaagtggggttttcaacctccctcgactgtgatagccgaagtcccttcaagaaagaaaaatgatgttggaaatactagtaacaaataaagtatcacggaaatccccacccaagcgatacggtttccttgacgcgcccttaaccaaggcgttaagtttagcctgacagc

SEQ ID NO: 370156 - DNA, 280 bp, Homo sapiens; identical to SEQ ID NO: 345095
  chr3:98619774-98620054
  hyper

SEQ ID NO: 370157 - DNA, 58 bp, Homo sapiens; identical to SEQ ID NO: 345096
  chr3:98621126-98621184
  hyper

SEQ ID NO: 370158 - DNA, 101 bp, Homo sapiens; identical to SEQ ID NO: 346575
  chr3:99594790-99594891
  hyper

SEQ ID NO: 370159 - DNA, 434 bp, Homo sapiens; identical to SEQ ID NO: 331822
  chr3:100120034-100120468
  hyper

SEQ ID NO: 370160 - DNA, 299 bp, Homo sapiens; identical to SEQ ID NO: 349796
  chr3:101497996-101498295
  hyper

SEQ ID NO: 370161 - DNA, 98 bp, Homo sapiens; identical to SEQ ID NO: 349797
  chr3:101498512-101498610
  hyper

SEQ ID NO: 370162 - DNA, 566 bp, Homo sapiens; identical to SEQ ID NO: 346576
  chr3:105087465-105088031
  hyper

SEQ ID NO: 370163 - DNA, 459 bp, Homo sapiens; identical to SEQ ID NO: 346577
  chr3:105088087-105088546
  hyper

SEQ ID NO: 370164 - DNA, 238 bp, Homo sapiens
  chr3:106959642-106959880
  hyper
cgttggcttctccacgagtgacaaccatgttttcccagatagaagaccggagccctgctcctttgcgatccgccgagggctgcagagagcatcctcatccatttgggcacccctgcccaggaagagcccggccatccctttccggactggatccttaagaggtgaattttcttccgtggattccgatttgctccgtctgaccagcctaggcaatccagcatcgcgtggtaccagtgcc

SEQ ID NO: 370165 - DNA, 227 bp, Homo sapiens
  chr3:107148769-107148996
  hyper
cgcccaggctgggaggcccaagtcccggcagctgctgcggtggacttagaggcagcagctcctgcttctgccccaaacgttcagtgtagtcggattcccggggacagcagggcagtctgcgcgcacatccccggggcatcgcaggacacctgctgccccctatcggtggtgagaacaataacccgaacccggttggaatcaactggaagaggccttttgaaaaaaag

SEQ ID NO: 370166 - DNA, 907 bp, Homo sapiens; identical to SEQ ID NO: 281361
  chr3:110789734-110790641
  hyper

SEQ ID NO: 370167 - DNA, 573 bp, Homo sapiens; identical to SEQ ID NO: 349801
  chr3:110790671-110791244
  hyper

SEQ ID NO: 370168 - DNA, 762 bp, Homo sapiens; identical to SEQ ID NO: 331829
  chr3:111578054-111578816
  hyper

SEQ ID NO: 370169 - DNA, 334 bp, Homo sapiens; identical to SEQ ID NO: 357656
  chr3:112051807-112052141
  hyper

SEQ ID NO: 370170 - DNA, 79 bp, Homo sapiens; identical to SEQ ID NO: 199042
  chr3:112052419-112052498
  hyper

SEQ ID NO: 370171 - DNA, 103 bp, Homo sapiens; identical to SEQ ID NO: 199043
  chr3:112930511-112930614
  hyper

SEQ ID NO: 370172 - DNA, 151 bp, Homo sapiens; identical to SEQ ID NO: 199044
  chr3:112930655-112930806
  hyper

SEQ ID NO: 370173 - DNA, 1176 bp, Homo sapiens; identical to SEQ ID NO: 331832
  chr3:113251180-113252356
  hyper

SEQ ID NO: 370174 - DNA, 48 bp, Homo sapiens; identical to SEQ ID NO: 345098
  chr3:115231437-115231485
  hyper

SEQ ID NO: 370175 - DNA, 345 bp, Homo sapiens
  chr3:115377294-115377639
  hyper
cgttccctcggcggctctgcagtgtgatctcatctctttgtttctccccggctgccgtcagtcaccggctctctgcgcccccacccgcgcgggctcgcggccgtgctgcgggcgtggcctcagccgctgagaccctggggaccgcagggcgtggcgcggcctccgcccgctgcacggagagccccccagaggcagcgacacggcgcttggggtccgcggggctcctcctccaactccgcagacctccggggaggcctcttgctccccgaacacccgggagttcgctttcatttttaacgaatctccacaatctcttgtttgggagataattgcttctttcagggg

SEQ ID NO: 370176 - DNA, 302 bp, Homo sapiens; identical to SEQ ID NO: 349804
  chr3:116163989-116164291
  hyper

SEQ ID NO: 370177 - DNA, 127 bp, Homo sapiens; identical to SEQ ID NO: 281391
  chr3:119422082-119422209
  hyper

SEQ ID NO: 370178 - DNA, 253 bp, Homo sapiens
  chr3:120169367-120169620
  hyper
cgtaagcagcattactgccccagctccaccccagcacaccccaaggaccgaaactcccagcgccaccccgggagagcatccccaggacgcgcgcccacccgcccagcgcgcagacccaagaggccccggggaccgagttcggactcctcggcccctcgcctacctcggcgcggacccaggcgaccgccaccagcgcgagcgcgagcgcgagccagcgtttccacatctgcggaagagagaagagagcgagtct

SEQ ID NO: 370179 - DNA, 128 bp, Homo sapiens; identical to SEQ ID NO: 357664
  chr3:120626737-120626865
  hyper

SEQ ID NO: 370180 - DNA, 59 bp, Homo sapiens; identical to SEQ ID NO: 199059
  chr3:120627258-120627317
  hyper

SEQ ID NO: 370181 - DNA, 253 bp, Homo sapiens; identical to SEQ ID NO: 331842
  chr3:121741110-121741363
  hyper

SEQ ID NO: 370182 - DNA, 53 bp, Homo sapiens; identical to SEQ ID NO: 357667
  chr3:121902674-121902727
  hyper

SEQ ID NO: 370183 - DNA, 154 bp, Homo sapiens; identical to SEQ ID NO: 357668
  chr3:123168102-123168256
  hyper

SEQ ID NO: 370184 - DNA, 276 bp, Homo sapiens
  chr3:123168265-123168541
  hyper
cggcccggagagctgtcgcgcccgcttcgcaagccccaagctcctcgtcgccggctgcgggcccaccgcggccggcgcggaacgactaggcggaggacggaatccggcgcagcgctgccgcggttctgccccgacgcaggcaggcttctcccggggagtaaggcatccagagatccagcgccggggctcagaagcagccggcccagaggggcccgcctgagagccgcggcgcccgagaggcgctccgggggggcccgcgggagcccggctcagggc

SEQ ID NO: 370185 - DNA, 173 bp, Homo sapiens
  chr3:123168908-123169081
  hyper
cgcccccagtcctagctcccctcttttgtatccccctttaatccccctccccccatttaacccaacttcagccccggcgctgcgccccccttccctggcccggctcgattggccgcttccggagctgtcagactacagtccggcgctcttattgggcgattctctggcccggc

SEQ ID NO: 370186 - DNA, 731 bp, Homo sapiens; identical to SEQ ID NO: 346580
  chr3:123751654-123752385
  hyper

SEQ ID NO: 370187 - DNA, 247 bp, Homo sapiens; identical to SEQ ID NO: 199066
  chr3:123752573-123752820
  hyper

SEQ ID NO: 370188 - DNA, 102 bp, Homo sapiens; identical to SEQ ID NO: 349807
  chr3:124606483-124606585
  hyper

SEQ ID NO: 370189 - DNA, 438 bp, Homo sapiens; identical to SEQ ID NO: 345099
  chr3:124773932-124774370
  hyper

SEQ ID NO: 370190 - DNA, 244 bp, Homo sapiens; identical to SEQ ID NO: 357673
  chr3:125986265-125986509
  hyper

SEQ ID NO: 370191 - DNA, 48 bp, Homo sapiens; identical to SEQ ID NO: 199076
  chr3:126373704-126373752
  hyper

SEQ ID NO: 370192 - DNA, 317 bp, Homo sapiens; identical to SEQ ID NO: 349810
  chr3:126373824-126374141
  hyper

SEQ ID NO: 370193 - DNA, 99 bp, Homo sapiens; identical to SEQ ID NO: 349811
  chr3:127634312-127634411
  hyper

SEQ ID NO: 370194 - DNA, 122 bp, Homo sapiens; identical to SEQ ID NO: 345100
  chr3:127794271-127794393
  hyper

SEQ ID NO: 370195 - DNA, 288 bp, Homo sapiens; identical to SEQ ID NO: 199083
  chr3:127794860-127795148
  hyper

SEQ ID NO: 370196 - DNA, 44 bp, Homo sapiens; identical to SEQ ID NO: 345102
  chr3:127795229-127795273
  hyper

SEQ ID NO: 370197 - DNA, 333 bp, Homo sapiens; identical to SEQ ID NO: 345103
  chr3:128216313-128216646
  hyper

SEQ ID NO: 370198 - DNA, 378 bp, Homo sapiens; identical to SEQ ID NO: 345104
  chr3:128216713-128217091
  hyper

SEQ ID NO: 370199 - DNA, 601 bp, Homo sapiens; identical to SEQ ID NO: 331858
  chr3:128336511-128337112
  hyper

SEQ ID NO: 370200 - DNA, 57 bp, Homo sapiens; identical to SEQ ID NO: 346587
  chr3:128713000-128713057
  hyper

SEQ ID NO: 370201 - DNA, 562 bp, Homo sapiens; identical to SEQ ID NO: 199092
  chr3:129345876-129346438
  hyper

SEQ ID NO: 370202 - DNA, 93 bp, Homo sapiens; identical to SEQ ID NO: 349820
  chr3:129346564-129346657
  hyper

SEQ ID NO: 370203 - DNA, 48 bp, Homo sapiens; identical to SEQ ID NO: 199094
  chr3:129694299-129694347
  hyper

SEQ ID NO: 370204 - DNA, 474 bp, Homo sapiens; identical to SEQ ID NO: 357687
  chr3:131080684-131081158
  hyper

SEQ ID NO: 370205 - DNA, 816 bp, Homo sapiens; identical to SEQ ID NO: 199096
  chr3:131753156-131753972
  hyper

SEQ ID NO: 370206 - DNA, 196 bp, Homo sapiens; identical to SEQ ID NO: 346590
  chr3:132756116-132756312
  hyper

SEQ ID NO: 370207 - DNA, 39 bp, Homo sapiens; identical to SEQ ID NO: 346591
  chr3:132756477-132756516
  hyper

SEQ ID NO: 370208 - DNA, 65 bp, Homo sapiens; identical to SEQ ID NO: 357691
  chr3:132757908-132757973
  hyper

SEQ ID NO: 370209 - DNA, 80 bp, Homo sapiens; identical to SEQ ID NO: 281503
  chr3:133748401-133748481
  hyper

SEQ ID NO: 370210 - DNA, 72 bp, Homo sapiens; identical to SEQ ID NO: 281504
  chr3:133748576-133748648
  hyper

SEQ ID NO: 370211 - DNA, 260 bp, Homo sapiens; identical to SEQ ID NO: 357694
  chr3:133748694-133748954
  hyper

SEQ ID NO: 370212 - DNA, 45 bp, Homo sapiens
  chr3:134370196-134370241
  hyper
acggtctccggagggttctcgagagggctggagccgacctcccac

SEQ ID NO: 370213 - DNA, 322 bp, Homo sapiens
  chr3:134513748-134514070
  hyper
cgaaggctcgtttgatcatttaaagcggatccagtcctgggtgggatgtaagggcacgaggcctccccagctccttcgctgggcaccctatggggggacagggtgagttgggcgggccgctgcggttctccgagagcaccacgagggggagcccggacccctcctagcgccttccgagccctcccgcacagccttgcaagcaaaagtttttcttaaactaacaatgccagtgtaaggaggtgctcgcgcctgattggccgggggaattttgcaggtttgattccttgattggacaggaggtgttaggggtggggagagagct

SEQ ID NO: 370214 - DNA, 295 bp, Homo sapiens; identical to SEQ ID NO: 345106
  chr3:135684609-135684904
  hyper

SEQ ID NO: 370215 - DNA, 306 bp, Homo sapiens; identical to SEQ ID NO: 357696
  chr3:136538179-136538485
  hyper

SEQ ID NO: 370216 - DNA, 35 bp, Homo sapiens; identical to SEQ ID NO: 346593
  chr3:136751341-136751376
  hyper

SEQ ID NO: 370217 - DNA, 356 bp, Homo sapiens; identical to SEQ ID NO: 281523
  chr3:137480764-137481120
  hyper

SEQ ID NO: 370218 - DNA, 67 bp, Homo sapiens
  chr3:137482183-137482250
  hyper
tgggaagaggcgcccagggacaaaccgaccctggttgcgatacaccgtgagactccgctgtagggcc

SEQ ID NO: 370219 - DNA, 60 bp, Homo sapiens; identical to SEQ ID NO: 281527
  chr3:137483589-137483649
  hyper

SEQ ID NO: 370220 - DNA, 247 bp, Homo sapiens; identical to SEQ ID NO: 281530
  chr3:137488090-137488337
  hyper

SEQ ID NO: 370221 - DNA, 703 bp, Homo sapiens; identical to SEQ ID NO: 199114
  chr3:138067014-138067717
  hyper

SEQ ID NO: 370222 - DNA, 106 bp, Homo sapiens; identical to SEQ ID NO: 346595
  chr3:138067747-138067853
  hyper

SEQ ID NO: 370223 - DNA, 267 bp, Homo sapiens; identical to SEQ ID NO: 349830
  chr3:139258672-139258939
  hyper

SEQ ID NO: 370224 - DNA, 79 bp, Homo sapiens; identical to SEQ ID NO: 346596
  chr3:139655101-139655180
  hyper

SEQ ID NO: 370225 - DNA, 1495 bp, Homo sapiens; identical to SEQ ID NO: 331891
  chr3:140660238-140661733
  hyper

SEQ ID NO: 370226 - DNA, 35 bp, Homo sapiens
  chr3:141120999-141121034
  hyper
cgggcatggggccttacggggccctcacgggtccc

SEQ ID NO: 370227 - DNA, 207 bp, Homo sapiens; identical to SEQ ID NO: 357706
  chr3:142607211-142607418
  hyper

SEQ ID NO: 370228 - DNA, 85 bp, Homo sapiens; identical to SEQ ID NO: 357707
  chr3:142607884-142607969
  hyper

SEQ ID NO: 370229 - DNA, 59 bp, Homo sapiens; identical to SEQ ID NO: 349833
  chr3:145878430-145878489
  hyper

SEQ ID NO: 370230 - DNA, 112 bp, Homo sapiens; identical to SEQ ID NO: 199124
  chr3:145878553-145878665
  hyper

SEQ ID NO: 370231 - DNA, 173 bp, Homo sapiens; identical to SEQ ID NO: 281571
  chr3:145878695-145878868
  hyper

SEQ ID NO: 370232 - DNA, 349 bp, Homo sapiens; identical to SEQ ID NO: 349836
  chr3:145878937-145879286
  hyper

SEQ ID NO: 370233 - DNA, 604 bp, Homo sapiens; identical to SEQ ID NO: 346598
  chr3:145968403-145969007
  hyper

SEQ ID NO: 370234 - DNA, 130 bp, Homo sapiens; identical to SEQ ID NO: 349838
  chr3:147075091-147075221
  hyper

SEQ ID NO: 370235 - DNA, 379 bp, Homo sapiens; identical to SEQ ID NO: 349839
  chr3:147086665-147087044
  hyper

SEQ ID NO: 370236 - DNA, 60 bp, Homo sapiens; identical to SEQ ID NO: 281579
  chr3:147088567-147088627
  hyper

SEQ ID NO: 370237 - DNA, 100 bp, Homo sapiens; identical to SEQ ID NO: 357716
  chr3:147088653-147088753
  hyper

SEQ ID NO: 370238 - DNA, 147 bp, Homo sapiens
  chr3:147108619-147108766
  hyper
cggaggcggcggcggcagcagcagggccaggtggtagctcggggctgaggatcgcggcgggggcagccgctatggggcccaagccctgacacacgtaccattcgctcaagtcggcggtacgcgccgccaccgccgccgaggaggcca

SEQ ID NO: 370239 - DNA, 97 bp, Homo sapiens; identical to SEQ ID NO: 357717
  chr3:147111702-147111799
  hyper

SEQ ID NO: 370240 - DNA, 346 bp, Homo sapiens; identical to SEQ ID NO: 357718
  chr3:147138422-147138768
  hyper

SEQ ID NO: 370241 - DNA, 590 bp, Homo sapiens; identical to SEQ ID NO: 199134
  chr3:149375406-149375996
  hyper

SEQ ID NO: 370242 - DNA, 269 bp, Homo sapiens; identical to SEQ ID NO: 331913
  chr3:150481645-150481914
  hyper

SEQ ID NO: 370243 - DNA, 85 bp, Homo sapiens; identical to SEQ ID NO: 349841
  chr3:150802802-150802887
  hyper

SEQ ID NO: 370244 - DNA, 70 bp, Homo sapiens; identical to SEQ ID NO: 357722
  chr3:150805097-150805167
  hyper

SEQ ID NO: 370245 - DNA, 98 bp, Homo sapiens; identical to SEQ ID NO: 349842
  chr3:152553725-152553823
  hyper

SEQ ID NO: 370246 - DNA, 32 bp, Homo sapiens
  chr3:152878837-152878869
  hyper
cgtgactggaaaccgaggagtcagaccctctc

SEQ ID NO: 370247 - DNA, 191 bp, Homo sapiens; identical to SEQ ID NO: 357724
  chr3:152879611-152879802
  hyper

SEQ ID NO: 370248 - DNA, 31 bp, Homo sapiens; identical to SEQ ID NO: 349843
  chr3:153838787-153838818
  hyper

SEQ ID NO: 370249 - DNA, 58 bp, Homo sapiens; identical to SEQ ID NO: 199144
  chr3:153839460-153839518
  hyper

SEQ ID NO: 370250 - DNA, 84 bp, Homo sapiens; identical to SEQ ID NO: 349845
  chr3:153840393-153840477
  hyper

SEQ ID NO: 370251 - DNA, 63 bp, Homo sapiens; identical to SEQ ID NO: 349846
  chr3:154797121-154797184
  hyper

SEQ ID NO: 370252 - DNA, 120 bp, Homo sapiens; identical to SEQ ID NO: 199148
  chr3:154797214-154797334
  hyper

SEQ ID NO: 370253 - DNA, 122 bp, Homo sapiens; identical to SEQ ID NO: 345108
  chr3:156533976-156534098
  hyper

SEQ ID NO: 370254 - DNA, 142 bp, Homo sapiens; identical to SEQ ID NO: 345109
  chr3:156534539-156534681
  hyper

SEQ ID NO: 370255 - DNA, 523 bp, Homo sapiens; identical to SEQ ID NO: 345110
  chr3:157217201-157217724
  hyper

SEQ ID NO: 370256 - DNA, 184 bp, Homo sapiens; identical to SEQ ID NO: 349851
  chr3:157260928-157261112
  hyper

SEQ ID NO: 370257 - DNA, 258 bp, Homo sapiens; identical to SEQ ID NO: 345111
  chr3:157815399-157815657
  hyper

SEQ ID NO: 370258 - DNA, 67 bp, Homo sapiens; identical to SEQ ID NO: 199159
  chr3:157815822-157815889
  hyper

SEQ ID NO: 370259 - DNA, 568 bp, Homo sapiens; identical to SEQ ID NO: 345113
  chr3:157815923-157816491
  hyper

SEQ ID NO: 370260 - DNA, 193 bp, Homo sapiens; identical to SEQ ID NO: 199161
  chr3:157821711-157821904
  hyper

SEQ ID NO: 370261 - DNA, 32 bp, Homo sapiens; identical to SEQ ID NO: 346606
  chr3:157824101-157824133
  hyper

SEQ ID NO: 370262 - DNA, 140 bp, Homo sapiens; identical to SEQ ID NO: 349857
  chr3:157825408-157825548
  hyper

SEQ ID NO: 370263 - DNA, 31 bp, Homo sapiens; identical to SEQ ID NO: 357740
  chr3:157828149-157828180
  hyper

SEQ ID NO: 370264 - DNA, 173 bp, Homo sapiens; identical to SEQ ID NO: 349858
  chr3:158289012-158289185
  hyper

SEQ ID NO: 370265 - DNA, 79 bp, Homo sapiens; identical to SEQ ID NO: 345114
  chr3:159480852-159480931
  hyper

SEQ ID NO: 370266 - DNA, 943 bp, Homo sapiens; identical to SEQ ID NO: 346608
  chr3:159480975-159481918
  hyper

SEQ ID NO: 370267 - DNA, 272 bp, Homo sapiens; identical to SEQ ID NO: 357744
  chr3:159943217-159943489
  hyper

SEQ ID NO: 370268 - DNA, 344 bp, Homo sapiens; identical to SEQ ID NO: 357745
  chr3:160822422-160822766
  hyper

SEQ ID NO: 370269 - DNA, 245 bp, Homo sapiens; identical to SEQ ID NO: 199173
  chr3:160822962-160823207
  hyper

SEQ ID NO: 370270 - DNA, 201 bp, Homo sapiens
  chr3:161089246-161089447
  hyper
cggcttaggtgagcgccgaggctttggctcctccccagctgctgcgagcttcccactgcgccgggcgcctgggagcctcccggagttaggtgttcggccccgccctcaggactcttgctaaaactcaaattctacctggctaattccggtgattaattattgacaaaaggaaaacactcctacgcaaacttgtgtccaacc

SEQ ID NO: 370271 - DNA, 96 bp, Homo sapiens
  chr3:164912568-164912664
  hyper
tgttatttcttgaactaaaaccccttacgttctggacctgggctgtgtcctaaaggctatctcacctttttccttttctttagctcaggatagcgc

SEQ ID NO: 370272 - DNA, 80 bp, Homo sapiens; identical to SEQ ID NO: 345116
  chr3:167098187-167098267
  hyper

SEQ ID NO: 370273 - DNA, 308 bp, Homo sapiens
  chr3:167967629-167967937
  hyper
cgacaagcccaacttctgcgccgggttcggacttgcggagccggaacggcgcaccgcgcgcagcccgggcggcggccagggcggatcagcctcgccgagatgtcctcgcgactgtggctctggtgcttctgcctgggcggttgccggctggccgccaggaagcgccctacagctccggctgggcatgtaagtggcgcccgcgcgctccggaacgcttggagagagcagacaacagtatgccccgccccacctcggacctggtgcggacaccgcggcccgagcccgggaagggatggggggcaggaggt

SEQ ID NO: 370274 - DNA, 99 bp, Homo sapiens
  chr3:167968382-167968481
  hyper
gggagatgagtatatgaaggattgagtgctcggccacttagctgctagtccccttattagagaactgaagagttagtaggaaggtgactcaaacgcatc

SEQ ID NO: 370275 - DNA, 271 bp, Homo sapiens; identical to SEQ ID NO: 349862
  chr3:169379645-169379916
  hyper

SEQ ID NO: 370276 - DNA, 227 bp, Homo sapiens; identical to SEQ ID NO: 345117
  chr3:169482182-169482409
  hyper

SEQ ID NO: 370277 - DNA, 241 bp, Homo sapiens; identical to SEQ ID NO: 199188
  chr3:169482439-169482680
  hyper

SEQ ID NO: 370278 - DNA, 282 bp, Homo sapiens; identical to SEQ ID NO: 281698
  chr3:170626174-170626456
  hyper

SEQ ID NO: 370279 - DNA, 508 bp, Homo sapiens; identical to SEQ ID NO: 357752
  chr3:170626710-170627218
  hyper

SEQ ID NO: 370280 - DNA, 361 bp, Homo sapiens; identical to SEQ ID NO: 357753
  chr3:171527569-171527930
  hyper

SEQ ID NO: 370281 - DNA, 79 bp, Homo sapiens; identical to SEQ ID NO: 199196
  chr3:171527971-171528050
  hyper

SEQ ID NO: 370282 - DNA, 216 bp, Homo sapiens; identical to SEQ ID NO: 199197
  chr3:171528333-171528549
  hyper

SEQ ID NO: 370283 - DNA, 80 bp, Homo sapiens; identical to SEQ ID NO: 357756
  chr3:173115694-173115774
  hyper

SEQ ID NO: 370284 - DNA, 75 bp, Homo sapiens; identical to SEQ ID NO: 331946
  chr3:176915778-176915853
  hyper

SEQ ID NO: 370285 - DNA, 138 bp, Homo sapiens; identical to SEQ ID NO: 345119
  chr3:179169640-179169778
  hyper

SEQ ID NO: 370286 - DNA, 86 bp, Homo sapiens; identical to SEQ ID NO: 349867
  chr3:179754092-179754178
  hyper

SEQ ID NO: 370287 - DNA, 134 bp, Homo sapiens; identical to SEQ ID NO: 281734
  chr3:180319921-180320055
  hyper

SEQ ID NO: 370288 - DNA, 169 bp, Homo sapiens; identical to SEQ ID NO: 281735
  chr3:180320087-180320256
  hyper

SEQ ID NO: 370289 - DNA, 98 bp, Homo sapiens; identical to SEQ ID NO: 349870
  chr3:180320294-180320392
  hyper

SEQ ID NO: 370290 - DNA, 206 bp, Homo sapiens; identical to SEQ ID NO: 346614
  chr3:180397104-180397310
  hyper

SEQ ID NO: 370291 - DNA, 55 bp, Homo sapiens; identical to SEQ ID NO: 199214
  chr3:181413014-181413069
  hyper

SEQ ID NO: 370292 - DNA, 97 bp, Homo sapiens; identical to SEQ ID NO: 349872
  chr3:181421152-181421249
  hyper

SEQ ID NO: 370293 - DNA, 336 bp, Homo sapiens; identical to SEQ ID NO: 281747
  chr3:181429718-181430054
  hyper

SEQ ID NO: 370294 - DNA, 36 bp, Homo sapiens; identical to SEQ ID NO: 199220
  chr3:181430331-181430367
  hyper

SEQ ID NO: 370295 - DNA, 252 bp, Homo sapiens; identical to SEQ ID NO: 199221
  chr3:181430443-181430695
  hyper

SEQ ID NO: 370296 - DNA, 47 bp, Homo sapiens; identical to SEQ ID NO: 199223
  chr3:181444767-181444814
  hyper

SEQ ID NO: 370297 - DNA, 276 bp, Homo sapiens
  chr3:182833891-182834167
  hyper
cggcggccaatggggggctaaaggggcttgttgtcatgggagcgaggatgtgatctatatgctgcacctgcggctctcctgctcatgcgcactgactgcacccgctgttcccctgcccatgcgcactgactgcacccgctgttcccctgccggtgcagactggctgcacctgctgttcccctacccgtgcgcactggctgcacctgctgttcccctgcccgtgaggactggctgcacctgcttttcccctgcccgtgcggactggctgcgcctgct

SEQ ID NO: 370298 - DNA, 54 bp, Homo sapiens
  chr3:182834231-182834285
  hyper
tgctgttcccctgcccgtgcggactggctgcacctactgttcccctgcccgtgc

SEQ ID NO: 370299 - DNA, 434 bp, Homo sapiens; identical to SEQ ID NO: 357768
  chr3:182880277-182880711
  hyper

SEQ ID NO: 370300 - DNA, 49 bp, Homo sapiens; identical to SEQ ID NO: 349877
  chr3:182896562-182896611
  hyper

SEQ ID NO: 370301 - DNA, 201 bp, Homo sapiens; identical to SEQ ID NO: 357770
  chr3:182970902-182971103
  hyper

SEQ ID NO: 370302 - DNA, 585 bp, Homo sapiens; identical to SEQ ID NO: 199230
  chr3:182971342-182971927
  hyper

SEQ ID NO: 370303 - DNA, 313 bp, Homo sapiens; identical to SEQ ID NO: 281765
  chr3:183145618-183145931
  hyper

SEQ ID NO: 370304 - DNA, 319 bp, Homo sapiens; identical to SEQ ID NO: 357773
  chr3:183146025-183146344
  hyper

SEQ ID NO: 370305 - DNA, 809 bp, Homo sapiens; identical to SEQ ID NO: 345120
  chr3:183165024-183165833
  hyper

SEQ ID NO: 370306 - DNA, 570 bp, Homo sapiens; identical to SEQ ID NO: 345121
  chr3:183542795-183543365
  hyper

SEQ ID NO: 370307 - DNA, 939 bp, Homo sapiens; identical to SEQ ID NO: 331970
  chr3:184278877-184279816
  hyper

SEQ ID NO: 370308 - DNA, 213 bp, Homo sapiens; identical to SEQ ID NO: 281792
  chr3:184301275-184301488
  hyper

SEQ ID NO: 370309 - DNA, 253 bp, Homo sapiens; identical to SEQ ID NO: 357777
  chr3:184322331-184322584
  hyper

SEQ ID NO: 370310 - DNA, 301 bp, Homo sapiens; identical to SEQ ID NO: 199246
  chr3:184870307-184870608
  hyper

SEQ ID NO: 370311 - DNA, 43 bp, Homo sapiens; identical to SEQ ID NO: 331974
  chr3:185977478-185977521
  hyper

SEQ ID NO: 370312 - DNA, 290 bp, Homo sapiens; identical to SEQ ID NO: 199253
  chr3:186079331-186079621
  hyper

SEQ ID NO: 370313 - DNA, 301 bp, Homo sapiens; identical to SEQ ID NO: 331976
  chr3:186648488-186648789
  hyper

SEQ ID NO: 370314 - DNA, 45 bp, Homo sapiens; identical to SEQ ID NO: 345123
  chr3:187455297-187455342
  hyper

SEQ ID NO: 370315 - DNA, 446 bp, Homo sapiens; identical to SEQ ID NO: 199256
  chr3:187456666-187457112
  hyper

SEQ ID NO: 370316 - DNA, 509 bp, Homo sapiens; identical to SEQ ID NO: 345125
  chr3:187457654-187458163
  hyper

SEQ ID NO: 370317 - DNA, 1066 bp, Homo sapiens; identical to SEQ ID NO: 331979
  chr3:187458583-187459649
  hyper

SEQ ID NO: 370318 - DNA, 59 bp, Homo sapiens; identical to SEQ ID NO: 331980
  chr3:190231330-190231389
  hyper

SEQ ID NO: 370319 - DNA, 40 bp, Homo sapiens; identical to SEQ ID NO: 349887
  chr3:190529763-190529803
  hyper

SEQ ID NO: 370320 - DNA, 56 bp, Homo sapiens; identical to SEQ ID NO: 349888
  chr3:192128140-192128196
  hyper

SEQ ID NO: 370321 - DNA, 198 bp, Homo sapiens; identical to SEQ ID NO: 357787
  chr3:192635147-192635345
  hyper

SEQ ID NO: 370322 - DNA, 522 bp, Homo sapiens; identical to SEQ ID NO: 331987
  chr3:192635635-192636157
  hyper

SEQ ID NO: 370323 - DNA, 111 bp, Homo sapiens; identical to SEQ ID NO: 345126
  chr3:193775965-193776076
  hyper

SEQ ID NO: 370324 - DNA, 352 bp, Homo sapiens; identical to SEQ ID NO: 357789
  chr3:193852659-193853011
  hyper

SEQ ID NO: 370325 - DNA, 246 bp, Homo sapiens; identical to SEQ ID NO: 199271
  chr3:193858636-193858882
  hyper

SEQ ID NO: 370326 - DNA, 261 bp, Homo sapiens
  chr3:193858949-193859210
  hyper
cgtcccgggaaacctgtcattaaagtcaattaacttttcccacacccgttggccggtaacaacccgctcctagcttcctccccggctcctaagtgcaaccagatgggcggacgggctgcccccgccgcgcgcccgccggggcggcccgggggttccagggaggccgcccggggccctccgcccgggcgggagccggccagggcggccacgccgggccagccctggcggccctgcggccaaggtggttcgcttagcaggccc

SEQ ID NO: 370327 - DNA, 146 bp, Homo sapiens; identical to SEQ ID NO: 345127
  chr3:194407289-194407435
  hyper

SEQ ID NO: 370328 - DNA, 153 bp, Homo sapiens; identical to SEQ ID NO: 199276
  chr3:194407836-194407989
  hyper

SEQ ID NO: 370329 - DNA, 101 bp, Homo sapiens; identical to SEQ ID NO: 199277
  chr3:194408028-194408129
  hyper

SEQ ID NO: 370330 - DNA, 582 bp, Homo sapiens; identical to SEQ ID NO: 345130
  chr3:195599104-195599686
  hyper

SEQ ID NO: 370331 - DNA, 968 bp, Homo sapiens; identical to SEQ ID NO: 349894
  chr3:195622064-195623032
  hyper

SEQ ID NO: 370332 - DNA, 67 bp, Homo sapiens
  chr3:196366368-196366435
  hyper
cgcccccagccctgccaaggcaccaacgcaagaaagccgggggagcctcggtcgcattgctggaaga

SEQ ID NO: 370333 - DNA, 94 bp, Homo sapiens; identical to SEQ ID NO: 281876
  chr3:196755864-196755958
  hyper

SEQ ID NO: 370334 - DNA, 341 bp, Homo sapiens; identical to SEQ ID NO: 349896
  chr3:196756044-196756385
  hyper

SEQ ID NO: 370335 - DNA, 211 bp, Homo sapiens; identical to SEQ ID NO: 331997
  chr3:197023975-197024186
  hyper

SEQ ID NO: 370336 - DNA, 643 bp, Homo sapiens; identical to SEQ ID NO: 331998
  chr3:197025639-197026282
  hyper

SEQ ID NO: 370337 - DNA, 150 bp, Homo sapiens; identical to SEQ ID NO: 357799
  chr3:197807078-197807228
  hyper

SEQ ID NO: 370338 - DNA, 708 bp, Homo sapiens
  chr3:197807545-197808253
  hyper
ctcagcccgcgaagccgttaggcgcgcgcctgcagctcagcgcccgcgcggactccggaagccgctcccaagcccgcgctgccggcagggggcggctgcggctcgggcgcaggcgccgctggcttgcgggttctcctgggctcgcccgggacgtcccgtagtcgcaggcgcgcaacccgcccggcctgagggcccgcctggccgtgacccccgccccgctcctcctccgaagagagatcggggccgctggcaggggccctccgcagccaccagggatggggctgtggggcagttcccgccccggtgcagccgccgccgggcagaccgcctggcttggctgcagccgcggcatctggctccggttctgcgaggctgggagctccagcgagcttgggagctgccaggcggctgctgcgagcaggcagagggcgcctggagcttgggccctcaggcggcggagcatggcctgggcggcctctggatcgcgagtgcacctggcctgagagcctgccaggccctgcccccgctcggctcctcctctgccggagctccggaccgctagccaggggccctctgcagccaccgggaatggggctgagggcgggttcccgcccctgtgcagccgccccagggccgactgcctggctcggccgcagccactggtacatctggctccggttctgagatgttgggagtgcgggcgggctc

SEQ ID NO: 370339 - DNA, 210 bp, Homo sapiens; identical to SEQ ID NO: 199287
  chr4:331352-331562
  hyper

SEQ ID NO: 370340 - DNA, 171 bp, Homo sapiens; identical to SEQ ID NO: 357802
  chr4:657350-657521
  hyper

SEQ ID NO: 370341 - DNA, 114 bp, Homo sapiens; identical to SEQ ID NO: 281896
  chr4:657552-657666
  hyper

SEQ ID NO: 370342 - DNA, 139 bp, Homo sapiens; identical to SEQ ID NO: 357804
  chr4:657712-657851
  hyper

SEQ ID NO: 370343 - DNA, 289 bp, Homo sapiens; identical to SEQ ID NO: 332005
  chr4:819440-819729
  hyper

SEQ ID NO: 370344 - DNA, 69 bp, Homo sapiens; identical to SEQ ID NO: 349899
  chr4:1036539-1036608
  hyper

SEQ ID NO: 370345 - DNA, 307 bp, Homo sapiens; identical to SEQ ID NO: 281907
  chr4:1165683-1165990
  hyper

SEQ ID NO: 370346 - DNA, 222 bp, Homo sapiens; identical to SEQ ID NO: 357808
  chr4:1166359-1166581
  hyper

SEQ ID NO: 370347 - DNA, 218 bp, Homo sapiens; identical to SEQ ID NO: 199294
  chr4:1332660-1332878
  hyper

SEQ ID NO: 370348 - DNA, 414 bp, Homo sapiens
  chr4:1395992-1396406
  hyper
cggggaaaacaggcaggcgcttcttcctccaggcagtagccgaagctgacaccgcccccaagctgacacgcctagcccggtgctcccttgcggggctgtggggcaggggagtgggaccggagcaggctgcaggggtggggagcaggaggcggaaaatgccgcggccccaccagctccatggctaagaggagaggcgaagaggaagcagctggtcactttccgagacctgtgatcttttttgggacggggagggggcggtcagggaggtgacgctgggacctgagcctcagccagcttggcgggtgagcccctgcgctcagcccctgcgcccacgacgacgggcaggcaccagcagagtggcctgaattccggccgggggacgccaggccggtgggaaaacgggctggagtcccg

SEQ ID NO: 370349 - DNA, 103 bp, Homo sapiens; identical to SEQ ID NO: 281912
  chr4:1396923-1397026
  hyper

SEQ ID NO: 370350 - DNA, 109 bp, Homo sapiens
  chr4:1397780-1397889
  hyper
ggcctgtccttccctcccgccgcccgcgtctcctctcggtcccttgcttgtttctttctatggagagggtccccctcgccccgcgctgcccgttctcgcggcgccgggc

SEQ ID NO: 370351 - DNA, 136 bp, Homo sapiens; identical to SEQ ID NO: 281919
  chr4:1400112-1400248
  hyper

SEQ ID NO: 370352 - DNA, 186 bp, Homo sapiens; identical to SEQ ID NO: 357810
  chr4:1796303-1796489
  hyper

SEQ ID NO: 370353 - DNA, 549 bp, Homo sapiens; identical to SEQ ID NO: 357811
  chr4:1796598-1797147
  hyper

SEQ ID NO: 370354 - DNA, 285 bp, Homo sapiens
  chr4:2042731-2043016
  hyper
ggggggcgcccgaggctccgggtcctgcacggcgagcggggcggcctccaggtaggggtgcggctccgcccaccaagaagagggtctggcgggaggtgtggttagtccctgagctcccggccacagcgcgggctgctgggtggggtggggggggagcgggggcgccagcacccacgtgcgcctggggcgccttctgaggaggccaccgcctgtgtcggtgtcggcgtgggggcctggctccgacggctgggaccatccctcccagggcgtccggggcccagattc

SEQ ID NO: 370355 - DNA, 560 bp, Homo sapiens
  chr4:2060916-2061476
  hyper
cgtctcccccacccccgcgatcacatggtgacccccggcagccaatgcagtggacgctaggaccctgcgggccgcgggcgccgcgactgcaccggcgccgccgcattataaatacttctccaaaatgcggcgcagctccctgcgcgcgccccggccgcccgccgcctccgccccgcgcccctgagctgccgccgccgccgccgccgctgccgccgccgccgccgccgccgcgggtccgagggcgccgcgcccttgccctgggcccggccgtgcccgccgccgcccggccgcgtccccgctgccgcgccgcccggccgggtgcatgcattgtgggcctcccgacatggtctgcgagacgaagatcgtggccgccgaggaccatgaggcgctgccgggggccaagaaggacgcgctgctcgccgccgccggcgccatgtggcccccgctgcccgccgcgcccgggccggccgccgcgccccccgcgcccccacctgccccggtggctcagcctcacggcggggcggggggcgcggggccgccgggggggcgcggcgtgtgca

SEQ ID NO: 370356 - DNA, 137 bp, Homo sapiens; identical to SEQ ID NO: 349901
  chr4:3767158-3767295
  hyper

SEQ ID NO: 370357 - DNA, 275 bp, Homo sapiens; identical to SEQ ID NO: 349902
  chr4:3768207-3768482
  hyper

SEQ ID NO: 370358 - DNA, 174 bp, Homo sapiens; identical to SEQ ID NO: 349903
  chr4:3882250-3882424
  hyper

SEQ ID NO: 370359 - DNA, 185 bp, Homo sapiens; identical to SEQ ID NO: 357816
  chr4:4854484-4854669
  hyper

SEQ ID NO: 370360 - DNA, 111 bp, Homo sapiens
  chr4:4868273-4868384
  hyper
cgcaaaggactgcagctcagagaggtgacatggttttcccaaggttacacagttaatgaaggacatagcaggaattccaacacggattccactcgaggatccggtttttcc

SEQ ID NO: 370361 - DNA, 73 bp, Homo sapiens; identical to SEQ ID NO: 199316
  chr4:4868464-4868537
  hyper

SEQ ID NO: 370362 - DNA, 460 bp, Homo sapiens; identical to SEQ ID NO: 357817
  chr4:4870855-4871315
  hyper

SEQ ID NO: 370363 - DNA, 370 bp, Homo sapiens; identical to SEQ ID NO: 199318
  chr4:4871384-4871754
  hyper

SEQ ID NO: 370364 - DNA, 242 bp, Homo sapiens; identical to SEQ ID NO: 199319
  chr4:4872215-4872457
  hyper

SEQ ID NO: 370365 - DNA, 1146 bp, Homo sapiens; identical to SEQ ID NO: 357819
  chr4:4873528-4874674
  hyper

SEQ ID NO: 370366 - DNA, 57 bp, Homo sapiens; identical to SEQ ID NO: 357820
  chr4:5052378-5052435
  hyper

SEQ ID NO: 370367 - DNA, 289 bp, Homo sapiens; identical to SEQ ID NO: 199324
  chr4:5052556-5052845
  hyper

SEQ ID NO: 370368 - DNA, 80 bp, Homo sapiens
  chr4:5712804-5712884
  hyper
cgggcccccctccggaagggtccggggctgggaggcgcgtctgtctctgggcatgctcagtgcaggggcagggctggggc

SEQ ID NO: 370369 - DNA, 57 bp, Homo sapiens
  chr4:5713393-5713450
  hyper
cgcacgcaaccgcttaggcgtcgggttccccttctgctccaggagggaggtggcggc

SEQ ID NO: 370370 - DNA, 145 bp, Homo sapiens; identical to SEQ ID NO: 349905
  chr4:5890606-5890751
  hyper

SEQ ID NO: 370371 - DNA, 206 bp, Homo sapiens; identical to SEQ ID NO: 199329
  chr4:6201673-6201879
  hyper

SEQ ID NO: 370372 - DNA, 65 bp, Homo sapiens; identical to SEQ ID NO: 346630
  chr4:6202658-6202723
  hyper

SEQ ID NO: 370373 - DNA, 821 bp, Homo sapiens; identical to SEQ ID NO: 332029
  chr4:6271360-6272181
  hyper

SEQ ID NO: 370374 - DNA, 364 bp, Homo sapiens; identical to SEQ ID NO: 332030
  chr4:6339386-6339750
  hyper

SEQ ID NO: 370375 - DNA, 164 bp, Homo sapiens; identical to SEQ ID NO: 349908
  chr4:6473630-6473794
  hyper

SEQ ID NO: 370376 - DNA, 46 bp, Homo sapiens; identical to SEQ ID NO: 349909
  chr4:6474487-6474533
  hyper

SEQ ID NO: 370377 - DNA, 127 bp, Homo sapiens; identical to SEQ ID NO: 357829
  chr4:6717788-6717915
  hyper

SEQ ID NO: 370378 - DNA, 214 bp, Homo sapiens; identical to SEQ ID NO: 281997
  chr4:7194882-7195096
  hyper

SEQ ID NO: 370379 - DNA, 667 bp, Homo sapiens; identical to SEQ ID NO: 357831
  chr4:7940425-7941092
  hyper

SEQ ID NO: 370380 - DNA, 32 bp, Homo sapiens; identical to SEQ ID NO: 199335
  chr4:7941129-7941161
  hyper

SEQ ID NO: 370381 - DNA, 522 bp, Homo sapiens; identical to SEQ ID NO: 199336
  chr4:7941191-7941713
  hyper

SEQ ID NO: 370382 - DNA, 627 bp, Homo sapiens; identical to SEQ ID NO: 357834
  chr4:8159728-8160355
  hyper

SEQ ID NO: 370383 - DNA, 142 bp, Homo sapiens; identical to SEQ ID NO: 357835
  chr4:8160429-8160571
  hyper

SEQ ID NO: 370384 - DNA, 88 bp, Homo sapiens; identical to SEQ ID NO: 199339
  chr4:8201024-8201112
  hyper

SEQ ID NO: 370385 - DNA, 38 bp, Homo sapiens; identical to SEQ ID NO: 282004
  chr4:8201450-8201488
  hyper

SEQ ID NO: 370386 - DNA, 115 bp, Homo sapiens; identical to SEQ ID NO: 332040
  chr4:8609457-8609572
  hyper

SEQ ID NO: 370387 - DNA, 33 bp, Homo sapiens
  chr4:8873984-8874017
  hyper
gtgtgcgcgcgcgtggtgtgtgcacgagtgtgc

SEQ ID NO: 370388 - DNA, 310 bp, Homo sapiens; identical to SEQ ID NO: 199344
  chr4:8894331-8894641
  hyper

SEQ ID NO: 370389 - DNA, 173 bp, Homo sapiens
  chr4:9500034-9500207
  hyper
cagctctcggcctcggacccgggccgcgtgtgagcgcgctttgcacctcctatccccagggtccgccgagagccacgattttttacagaaaatgagcaataaagagattttgtaccgtcctgactggggagtcccaggccgcgtgggacggagtgcccctcggatgcaagccc

SEQ ID NO: 370390 - DNA, 207 bp, Homo sapiens; identical to SEQ ID NO: 332046
  chr4:10090148-10090355
  hyper

SEQ ID NO: 370391 - DNA, 43 bp, Homo sapiens; identical to SEQ ID NO: 345134
  chr4:10458329-10458372
  hyper

SEQ ID NO: 370392 - DNA, 414 bp, Homo sapiens
  chr4:11429092-11429506
  hyper
cggagcgcagcgcaaagacagtggatttggagtggcctccctagaatccccccaaaagcatcttggcacaagttgtagataaaaatagctcatgataacattgtgggaaagggaggagcgagactcgcgcaaggcgaggcaagggtaccactggatctgcaaaggaggaggaagagggaggatgcaacccttggcccaagagagcgccctgagtgtgcgaggaatcgctggctcccaggggagggaaagagatggaagacctatagcgcctataactgcagagttatagacctataactgcagagcccagcacaccccatcccgcgccggcacccggctttggctccagcttcttcttcccatcatccgcctacgttctgggtctgtcctccgcttcctgggacaggctggggc

SEQ ID NO: 370393 - DNA, 153 bp, Homo sapiens; identical to SEQ ID NO: 357842
  chr4:13546756-13546909
  hyper

SEQ ID NO: 370394 - DNA, 353 bp, Homo sapiens; identical to SEQ ID NO: 349919
  chr4:15780742-15781095
  hyper

SEQ ID NO: 370395 - DNA, 224 bp, Homo sapiens; identical to SEQ ID NO: 282038
  chr4:16084483-16084707
  hyper

SEQ ID NO: 370396 - DNA, 140 bp, Homo sapiens; identical to SEQ ID NO: 199357
  chr4:16228990-16229130
  hyper

SEQ ID NO: 370397 - DNA, 273 bp, Homo sapiens; identical to SEQ ID NO: 357845
  chr4:16229202-16229475
  hyper

SEQ ID NO: 370398 - DNA, 380 bp, Homo sapiens
  chr4:20253129-20253509
  hyper
cgcgtggcaaaagctgcaggagaggcactggcagggctgtttatttatgagccgcgttcaaagccgacctcttcccattctcccactgcaaacgactatctccgagcccaggtcacctctggggccaaggagttgggggctggggctcgggtggctccttcttcgggccaagtttgcccgcgcgtgggagcgagggggcgagccagggcgcacgggaacgcgcgccgccagccgccgcctccgcccagcgctggcagccccggcctcacctctcccctctccccagcgaggtgcgggctcccagagcggagccagggggcgggcctgggcctcgaggggcggggtcagggggcggaggctcgggcggctatataaggccc

SEQ ID NO: 370399 - DNA, 82 bp, Homo sapiens; identical to SEQ ID NO: 199363
  chr4:20253975-20254057
  hyper

SEQ ID NO: 370400 - DNA, 196 bp, Homo sapiens; identical to SEQ ID NO: 357847
  chr4:20254323-20254519
  hyper

SEQ ID NO: 370401 - DNA, 144 bp, Homo sapiens; identical to SEQ ID NO: 357848
  chr4:24914262-24914406
  hyper

SEQ ID NO: 370402 - DNA, 72 bp, Homo sapiens; identical to SEQ ID NO: 357849
  chr4:24914804-24914876
  hyper

SEQ ID NO: 370403 - DNA, 94 bp, Homo sapiens; identical to SEQ ID NO: 357850
  chr4:25031950-25032044
  hyper

SEQ ID NO: 370404 - DNA, 461 bp, Homo sapiens; identical to SEQ ID NO: 357851
  chr4:25032103-25032564
  hyper

SEQ ID NO: 370405 - DNA, 112 bp, Homo sapiens; identical to SEQ ID NO: 332062
  chr4:25235368-25235480
  hyper

SEQ ID NO: 370406 - DNA, 251 bp, Homo sapiens; identical to SEQ ID NO: 282065
  chr4:25656879-25657130
  hyper

SEQ ID NO: 370407 - DNA, 53 bp, Homo sapiens; identical to SEQ ID NO: 357853
  chr4:25657493-25657546
  hyper

SEQ ID NO: 370408 - DNA, 609 bp, Homo sapiens; identical to SEQ ID NO: 332064
  chr4:25863681-25864290
  hyper

SEQ ID NO: 370409 - DNA, 113 bp, Homo sapiens
  chr4:27086319-27086432
  hyper
cgtttctttctctccttacgcttatcggttttaacacatgccatttaccacctcccacccgctgattagggggctggaaacgggcttacatcactgtcagggcaggagaggaa

SEQ ID NO: 370410 - DNA, 266 bp, Homo sapiens; identical to SEQ ID NO: 282074
  chr4:27086484-27086750
  hyper

SEQ ID NO: 370411 - DNA, 77 bp, Homo sapiens
  chr4:27086840-27086917
  hyper
tgcagcgatctcattgcataaaacgcacatccccttccctttttctttttaaaagaaaaagagcttcagaaatgacc

SEQ ID NO: 370412 - DNA, 283 bp, Homo sapiens; identical to SEQ ID NO: 349921
  chr4:30720964-30721247
  hyper

SEQ ID NO: 370413 - DNA, 304 bp, Homo sapiens; identical to SEQ ID NO: 349922
  chr4:30721470-30721774
  hyper

SEQ ID NO: 370414 - DNA, 220 bp, Homo sapiens
  chr4:30722023-30722243
  hyper
cgacatgcgggccgaatgcaggtgagaaaaggcacggactctgcggctgcgaacccaaacttgggcaccgcacggtgcgcactgctcagccttcgcccccgtgggcgaaaggctgctgcggtttcaggcggctgcttcgtgactaatgaccttgcgcagagttgttaagaaaaaagagaaacccgcgctctccggggtgagaagggactgactctgggcg

SEQ ID NO: 370415 - DNA, 548 bp, Homo sapiens
  chr4:30722273-30722821
  hyper
cgcgccggggggaccctgacactgaccgctctgtgacgcgagtagtctcccctgcaccgtgcccgaagcgacgtgccgggggatttttcattctcgatctgttgactggctcccccgctgcatgagcagagtcggagttgagactggcttgttgctggccccagcgcctggtgcaggaagcgactcacgtttgtctgggtggccggagccggagcagagcctgggtttggagtgagtgcctggaacgtgaattggactcaactcgagtagcagcaaagaccagcgggctggcaggcgggggaggctgcaggctcattccccacctcttcccagccccactgcccgtctgccggagcggttctggccccttccgacagagcggggactagagccggggattctccgcccgctgaggggatgactctgggttgggggagcgccgaacccgcggcgcgcagtgtcccgtgaactgtgagtactgcgactgaacggcggcaggcgagcgggcgattagcacccattgcatgaattatgaaacaataactttc

SEQ ID NO: 370416 - DNA, 201 bp, Homo sapiens; identical to SEQ ID NO: 282083
  chr4:30723862-30724063
  hyper

SEQ ID NO: 370417 - DNA, 90 bp, Homo sapiens; identical to SEQ ID NO: 282084
  chr4:30724126-30724216
  hyper

SEQ ID NO: 370418 - DNA, 785 bp, Homo sapiens; identical to SEQ ID NO: 349925
  chr4:36245423-36246208
  hyper

SEQ ID NO: 370419 - DNA, 131 bp, Homo sapiens; identical to SEQ ID NO: 349926
  chr4:36246257-36246388
  hyper

SEQ ID NO: 370420 - DNA, 397 bp, Homo sapiens; identical to SEQ ID NO: 357861
  chr4:37455033-37455430
  hyper

SEQ ID NO: 370421 - DNA, 330 bp, Homo sapiens; identical to SEQ ID NO: 357862
  chr4:37455485-37455815
  hyper

SEQ ID NO: 370422 - DNA, 184 bp, Homo sapiens; identical to SEQ ID NO: 332074
  chr4:37978665-37978849
  hyper

SEQ ID NO: 370423 - DNA, 182 bp, Homo sapiens; identical to SEQ ID NO: 357864
  chr4:39047105-39047287
  hyper

SEQ ID NO: 370424 - DNA, 322 bp, Homo sapiens; identical to SEQ ID NO: 349928
  chr4:40632148-40632470
  hyper

SEQ ID NO: 370425 - DNA, 305 bp, Homo sapiens; identical to SEQ ID NO: 332077
  chr4:41218387-41218692
  hyper

SEQ ID NO: 370426 - DNA, 52 bp, Homo sapiens
  chr4:41362252-41362304
  hyper
cggcgccgggccaggggctgccccgccttgcccctacctctgcggccaggaa

SEQ ID NO: 370427 - DNA, 650 bp, Homo sapiens
  chr4:41363167-41363817
  hyper
tgcagtctagctgcgcgcgtgagggcaggaagggatcccctgcgcgtccatccttcctgcccgctggcctcgcaaatctcagctagcgccgcttccaggcgctgccaagggaagcgcagtgctagcaaagcgttgcaaaggcgcaggaagcgcgagcccccagagacttcaccggtgctcgcatttcggggtatcttgcttctggtcccacatttcgccccttgtccccctaccccgcacccttccggagcagagttggcagtgtcttcacggaggcgcatacccaccggagcctcttgctgtattcctggcaccgggtcaggtgtgaggctggcacagtgcgcagggcgggggtagcttgcaagacccacctgcgagcacgcatccgcatagacgctgcccagcctttggcaacccccgcccctctccatcccaaggactgcagggtcggttccgaagtacgggctacccggtctggttggcatatttcacttcttaaataactcgttggcaggccagggaaatcactggagctctcggctctcagtcccggaagcgctcactgggtgatcctgattcacgatgtctatcagtagatgcagcttggtagccccgagctcccgaaatgaactgtctgcggggttcaggac

SEQ ID NO: 370428 - DNA, 58 bp, Homo sapiens; identical to SEQ ID NO: 349929
  chr4:41746763-41746821
  hyper

SEQ ID NO: 370429 - DNA, 65 bp, Homo sapiens; identical to SEQ ID NO: 357867
  chr4:41752247-41752312
  hyper

SEQ ID NO: 370430 - DNA, 141 bp, Homo sapiens
  chr4:41869059-41869200
  hyper
cgaattgaaatggatatttccctcctcggcccagctgaacgaggctcaatgcctcaaagatgcagagctgcctcggtggacatgctctgtggctgatattataattttcataatgcgcttttatgtcgcgccagactcctc

SEQ ID NO: 370431 - DNA, 1067 bp, Homo sapiens; identical to SEQ ID NO: 346638
  chr4:42657902-42658969
  hyper

SEQ ID NO: 370432 - DNA, 34 bp, Homo sapiens; identical to SEQ ID NO: 199402
  chr4:44449403-44449437
  hyper

SEQ ID NO: 370433 - DNA, 195 bp, Homo sapiens
  chr4:46391158-46391353
  hyper
cgccacaaccccctcaaccaagaccacctccgcaaccacagcgggaaaagctaggggcaggcagcccacttttgcaattactctacattacagtgaactgcggtcctcacgtcttcttttcttcactccccttaacaaaataaaataaataatttcccttcctgcccacccacggttgcccaagaccaagtctta

SEQ ID NO: 370434 - DNA, 285 bp, Homo sapiens; identical to SEQ ID NO: 199404
  chr4:46391393-46391678
  hyper

SEQ ID NO: 370435 - DNA, 707 bp, Homo sapiens; identical to SEQ ID NO: 282134
  chr4:46391710-46392417
  hyper

SEQ ID NO: 370436 - DNA, 142 bp, Homo sapiens; identical to SEQ ID NO: 357871
  chr4:46392515-46392657
  hyper

SEQ ID NO: 370437 - DNA, 104 bp, Homo sapiens; identical to SEQ ID NO: 357872
  chr4:47033907-47034011
  hyper

SEQ ID NO: 370438 - DNA, 93 bp, Homo sapiens; identical to SEQ ID NO: 199407
  chr4:47839530-47839623
  hyper

SEQ ID NO: 370439 - DNA, 375 bp, Homo sapiens; identical to SEQ ID NO: 357874
  chr4:47839675-47840050
  hyper

SEQ ID NO: 370440 - DNA, 260 bp, Homo sapiens; identical to SEQ ID NO: 346640
  chr4:48271822-48272082
  hyper

SEQ ID NO: 370441 - DNA, 190 bp, Homo sapiens; identical to SEQ ID NO: 346641
  chr4:48272083-48272273
  hyper

SEQ ID NO: 370442 - DNA, 239 bp, Homo sapiens; identical to SEQ ID NO: 357877
  chr4:53617162-53617401
  hyper

SEQ ID NO: 370443 - DNA, 241 bp, Homo sapiens; identical to SEQ ID NO: 199414
  chr4:53617560-53617801
  hyper

SEQ ID NO: 370444 - DNA, 172 bp, Homo sapiens; identical to SEQ ID NO: 357879
  chr4:54965627-54965799
  hyper

SEQ ID NO: 370445 - DNA, 354 bp, Homo sapiens; identical to SEQ ID NO: 357880
  chr4:54967511-54967865
  hyper

SEQ ID NO: 370446 - DNA, 193 bp, Homo sapiens; identical to SEQ ID NO: 357881
  chr4:55094321-55094514
  hyper

SEQ ID NO: 370447 - DNA, 70 bp, Homo sapiens; identical to SEQ ID NO: 357882
  chr4:55094684-55094754
  hyper

SEQ ID NO: 370448 - DNA, 167 bp, Homo sapiens
  chr4:56413698-56413865
  hyper
cggccagaggagggaagcgaaaggaggtcgggatttatttgctcatttggagatttttcccttgcccttttattaaaaatcaagtgacagtgtaatggaagatggagaatgaagcatcagaaataaaccaggaccctaatttgcatggatttcctcgttggaacaac

SEQ ID NO: 370449 - DNA, 958 bp, Homo sapiens; identical to SEQ ID NO: 332106
  chr4:56914942-56915900
  hyper

SEQ ID NO: 370450 - DNA, 93 bp, Homo sapiens; identical to SEQ ID NO: 346642
  chr4:57687545-57687638
  hyper

SEQ ID NO: 370451 - DNA, 205 bp, Homo sapiens; identical to SEQ ID NO: 346643
  chr4:57687887-57688092
  hyper

SEQ ID NO: 370452 - DNA, 427 bp, Homo sapiens; identical to SEQ ID NO: 346644
  chr4:58029764-58030191
  hyper

SEQ ID NO: 370453 - DNA, 238 bp, Homo sapiens; identical to SEQ ID NO: 282213
  chr4:62068395-62068633
  hyper

SEQ ID NO: 370454 - DNA, 332 bp, Homo sapiens
  chr4:62068663-62068995
  hyper
taactggaaaatctggtttgaggaggccacgggggcccccgcagggtggcgaggaaaccttgccgtgtccccttcccctggagaggcgcagctcggcgacatgcgtgcggcgcgtgagagtcgctggtgcagcgctcgatgcaccccagaatggccctgatgagaacctcatagggtagtcatctctccagcaggttgaagtaatcgagtccagccagcgtaactcctggtccctggaattctctggccactttcctacctctgatagaaacatgcgctgcttttatttatggccagagatatcatagcagttgggagaactcgaggcttgc

SEQ ID NO: 370455 - DNA, 229 bp, Homo sapiens; identical to SEQ ID NO: 349937
  chr4:73433670-73433899
  hyper

SEQ ID NO: 370456 - DNA, 125 bp, Homo sapiens; identical to SEQ ID NO: 349938
  chr4:73434163-73434288
  hyper

SEQ ID NO: 370457 - DNA, 356 bp, Homo sapiens
  chr4:74904434-74904790
  hyper
atgcatggttgagactggaaagcccggagcggccgggccagggaaattcccggagctccagatcgatccggagtcccgaaggaaggcgacggccccgcccccggggtggagtcggatacgggtagggggagcccactggtgacgcctacgcctcgccctccagagtaacccccgtgcactctgggactttgggatattcattttctgccccaaattcctggagaggcagtgagtccacctcgctgaagatacagcctgtgaggggggaccttaggtccccgatgaccccccgcgtacggggtagggttggaggaaagagctggggggacccgtgagaaccaggacaggaaaggcac

SEQ ID NO: 370458 - DNA, 249 bp, Homo sapiens; identical to SEQ ID NO: 282236
  chr4:75230487-75230736
  hyper

SEQ ID NO: 370459 - DNA, 230 bp, Homo sapiens
  chr4:75858228-75858458
  hyper
cgccgcggggcccgggtgggaggggtttggcagcggcaggcgcggcggcggcggcggaggcggaggcggccccgggctcgggcggctgggatggagcagaagagcgcggagcaccggagggcacgcagctgacggagctgcgctgcgttcgcctcgtttgcctcgcgccctccactggagctgttcgcgcctcccggctcccaccgcagcccacccggcagaggagtcgc

SEQ ID NO: 370460 - DNA, 49 bp, Homo sapiens; identical to SEQ ID NO: 199448
  chr4:75858524-75858573
  hyper

SEQ ID NO: 370461 - DNA, 290 bp, Homo sapiens; identical to SEQ ID NO: 199449
  chr4:75858629-75858919
  hyper

SEQ ID NO: 370462 - DNA, 365 bp, Homo sapiens; identical to SEQ ID NO: 199450
  chr4:75858998-75859363
  hyper

SEQ ID NO: 370463 - DNA, 144 bp, Homo sapiens
  chr4:75859428-75859572
  hyper
gttcaggtacctattttttccagaaaacgtctcccgaaaagggacaactggctgtggatatggtgctgctgggaaaagtagcccgactgcgcggccactggcattttcagtttaaatgtgacccaaagtcacatagcgcaaacc

SEQ ID NO: 370464 - DNA, 133 bp, Homo sapiens; identical to SEQ ID NO: 199452
  chr4:76555905-76556038
  hyper

SEQ ID NO: 370465 - DNA, 421 bp, Homo sapiens; identical to SEQ ID NO: 357890
  chr4:77172549-77172970
  hyper

SEQ ID NO: 370466 - DNA, 86 bp, Homo sapiens; identical to SEQ ID NO: 357891
  chr4:77173055-77173141
  hyper

SEQ ID NO: 370467 - DNA, 361 bp, Homo sapiens; identical to SEQ ID NO: 357892
  chr4:77227668-77228029
  hyper

SEQ ID NO: 370468 - DNA, 78 bp, Homo sapiens; identical to SEQ ID NO: 357893
  chr4:77228452-77228530
  hyper

SEQ ID NO: 370469 - DNA, 448 bp, Homo sapiens; identical to SEQ ID NO: 332121
  chr4:77610260-77610708
  hyper

SEQ ID NO: 370470 - DNA, 275 bp, Homo sapiens; identical to SEQ ID NO: 349941
  chr4:77818885-77819160
  hyper

SEQ ID NO: 370471 - DNA, 267 bp, Homo sapiens; identical to SEQ ID NO: 199462
  chr4:77819271-77819538
  hyper

SEQ ID NO: 370472 - DNA, 142 bp, Homo sapiens; identical to SEQ ID NO: 349943
  chr4:77819573-77819715
  hyper

SEQ ID NO: 370473 - DNA, 780 bp, Homo sapiens; identical to SEQ ID NO: 332123
  chr4:80993254-80994034
  hyper

SEQ ID NO: 370474 - DNA, 43 bp, Homo sapiens
  chr4:81123012-81123055
  hyper
cgtgtgtgtgtgtgtgtgcgtgcgtgcgtgtgtgtggtgtttg

SEQ ID NO: 370475 - DNA, 151 bp, Homo sapiens; identical to SEQ ID NO: 357899
  chr4:81124731-81124882
  hyper

SEQ ID NO: 370476 - DNA, 642 bp, Homo sapiens; identical to SEQ ID NO: 332131
  chr4:82391851-82392493
  hyper

SEQ ID NO: 370477 - DNA, 233 bp, Homo sapiens; identical to SEQ ID NO: 349945
  chr4:82965099-82965332
  hyper

SEQ ID NO: 370478 - DNA, 52 bp, Homo sapiens
  chr4:83482632-83482684
  hyper
cgcttctcacccgagtccacccgataacgagatgatggggcggcgggtgggg

SEQ ID NO: 370479 - DNA, 115 bp, Homo sapiens
  chr4:83483372-83483487
  hyper
cgcgtttgcctggcgctcctcatccaacaaaaggaaggacagaatcttggatcctccgcctggtggttatttattcctgacctgttgtaaccttctgcctggctctctttcgtcc

SEQ ID NO: 370480 - DNA, 90 bp, Homo sapiens; identical to SEQ ID NO: 282278
  chr4:83718834-83718924
  hyper

SEQ ID NO: 370481 - DNA, 368 bp, Homo sapiens; identical to SEQ ID NO: 282279
  chr4:83718966-83719334
  hyper

SEQ ID NO: 370482 - DNA, 47 bp, Homo sapiens; identical to SEQ ID NO: 357902
  chr4:84030839-84030886
  hyper

SEQ ID NO: 370483 - DNA, 229 bp, Homo sapiens; identical to SEQ ID NO: 282286
  chr4:84030916-84031145
  hyper

SEQ ID NO: 370484 - DNA, 215 bp, Homo sapiens; identical to SEQ ID NO: 346647
  chr4:84457821-84458036
  hyper

SEQ ID NO: 370485 - DNA, 48 bp, Homo sapiens; identical to SEQ ID NO: 282293
  chr4:85403425-85403473
  hyper

SEQ ID NO: 370486 - DNA, 147 bp, Homo sapiens; identical to SEQ ID NO: 357906
  chr4:85404934-85405081
  hyper

SEQ ID NO: 370487 - DNA, 93 bp, Homo sapiens; identical to SEQ ID NO: 357907
  chr4:85405111-85405204
  hyper

SEQ ID NO: 370488 - DNA, 700 bp, Homo sapiens; identical to SEQ ID NO: 282299
  chr4:85419891-85420591
  hyper

SEQ ID NO: 370489 - DNA, 310 bp, Homo sapiens; identical to SEQ ID NO: 357909
  chr4:85503546-85503856
  hyper

SEQ ID NO: 370490 - DNA, 250 bp, Homo sapiens; identical to SEQ ID NO: 199476
  chr4:85503985-85504235
  hyper

SEQ ID NO: 370491 - DNA, 297 bp, Homo sapiens; identical to SEQ ID NO: 357911
  chr4:85504793-85505090
  hyper

SEQ ID NO: 370492 - DNA, 306 bp, Homo sapiens; identical to SEQ ID NO: 357912
  chr4:85886808-85887114
  hyper

SEQ ID NO: 370493 - DNA, 678 bp, Homo sapiens; identical to SEQ ID NO: 282305
  chr4:85887200-85887878
  hyper

SEQ ID NO: 370494 - DNA, 438 bp, Homo sapiens; identical to SEQ ID NO: 282306
  chr4:85887927-85888365
  hyper

SEQ ID NO: 370495 - DNA, 49 bp, Homo sapiens
  chr4:85888399-85888448
  hyper
gttgaggagctcggtctcaaatggtgccttccgtcagtgaccttgagtc

SEQ ID NO: 370496 - DNA, 183 bp, Homo sapiens; identical to SEQ ID NO: 357915
  chr4:87515033-87515216
  hyper

SEQ ID NO: 370497 - DNA, 340 bp, Homo sapiens; identical to SEQ ID NO: 199484
  chr4:87813080-87813420
  hyper

SEQ ID NO: 370498 - DNA, 313 bp, Homo sapiens; identical to SEQ ID NO: 349949
  chr4:87813512-87813825
  hyper

SEQ ID NO: 370499 - DNA, 119 bp, Homo sapiens; identical to SEQ ID NO: 357918
  chr4:89378198-89378317
  hyper

SEQ ID NO: 370500 - DNA, 616 bp, Homo sapiens; identical to SEQ ID NO: 332148
  chr4:90228673-90229289
  hyper

SEQ ID NO: 370501 - DNA, 320 bp, Homo sapiens; identical to SEQ ID NO: 357920
  chr4:94748540-94748860
  hyper

SEQ ID NO: 370502 - DNA, 196 bp, Homo sapiens; identical to SEQ ID NO: 282339
  chr4:94749529-94749725
  hyper

SEQ ID NO: 370503 - DNA, 276 bp, Homo sapiens; identical to SEQ ID NO: 282340
  chr4:94749755-94750031
  hyper

SEQ ID NO: 370504 - DNA, 47 bp, Homo sapiens; identical to SEQ ID NO: 349950
  chr4:94753232-94753279
  hyper

SEQ ID NO: 370505 - DNA, 33 bp, Homo sapiens; identical to SEQ ID NO: 349951
  chr4:94753547-94753580
  hyper

SEQ ID NO: 370506 - DNA, 60 bp, Homo sapiens; identical to SEQ ID NO: 199502
  chr4:95678999-95679059
  hyper

SEQ ID NO: 370507 - DNA, 314 bp, Homo sapiens; identical to SEQ ID NO: 282348
  chr4:95679325-95679639
  hyper

SEQ ID NO: 370508 - DNA, 63 bp, Homo sapiens; identical to SEQ ID NO: 349954
  chr4:95679745-95679808
  hyper

SEQ ID NO: 370509 - DNA, 316 bp, Homo sapiens
  chr4:96470377-96470693
  hyper
cgcctgtgaggaacacacacagacaccgggggtgggggtgggggtgggggttgaagtggggggagttggaggaggagggaacggagggaggaagcttgggcaccgtcaggcgctctggtctccaatctcagtgttctcacgccggcggagagatgtcccggctgtcgctgctgggtggccaaggaggttcacatcctagagtagggcgcacgggtgcgcgaaggcgctcgccaaggaggcgtagagggcgcagcacaactcctctggggggtaaccgggggcgggagcacgcccgcccgccttatgtaagcaagga

SEQ ID NO: 370510 - DNA, 134 bp, Homo sapiens; identical to SEQ ID NO: 345137
  chr4:100729543-100729677
  hyper

SEQ ID NO: 370511 - DNA, 258 bp, Homo sapiens; identical to SEQ ID NO: 345138
  chr4:100867945-100868203
  hyper

SEQ ID NO: 370512 - DNA, 91 bp, Homo sapiens; identical to SEQ ID NO: 199513
  chr4:102711787-102711878
  hyper

SEQ ID NO: 370513 - DNA, 692 bp, Homo sapiens; identical to SEQ ID NO: 349957
  chr4:103997179-103997871
  hyper

SEQ ID NO: 370514 - DNA, 269 bp, Homo sapiens; identical to SEQ ID NO: 349958
  chr4:106067220-106067489
  hyper

SEQ ID NO: 370515 - DNA, 1352 bp, Homo sapiens; identical to SEQ ID NO: 332159
  chr4:106156138-106157490
  hyper

SEQ ID NO: 370516 - DNA, 206 bp, Homo sapiens; identical to SEQ ID NO: 282408
  chr4:109088463-109088669
  hyper

SEQ ID NO: 370517 - DNA, 443 bp, Homo sapiens
  chr4:109089314-109089757
  hyper
ctggagggagcacgcctccccaaagtgcagaggagggtccggcggcgcgtctccgcggaaaccctctccactgtagttaccccggatgccgacttagtagtttgttttccgagaaaagagaggggatctgggcagaagggccccgtttgccccaaaagaaggtgcaaggatcagaagataacgaaacgtccacttcctgaagggtgggaaaaaaagaaaaagaaaaaggagccacccacgctggagatgtccgttttagatcttcttattttcttccctttcgcttcggtttttcttctcgaggctcatttaatctgctagagaaggaggaggagcagaagatgggggccgaggaggaggggaagagaaagagaagtttgccaagaataaagtttttgccggcaagcgcggggactccgcagtggagggcactgcggagtctc

SEQ ID NO: 370518 - DNA, 71 bp, Homo sapiens; identical to SEQ ID NO: 332164
  chr4:110343729-110343800
  hyper

SEQ ID NO: 370519 - DNA, 501 bp, Homo sapiens; identical to SEQ ID NO: 332165
  chr4:110481822-110482323
  hyper

SEQ ID NO: 370520 - DNA, 232 bp, Homo sapiens; identical to SEQ ID NO: 199554
  chr4:111543735-111543967
  hyper

SEQ ID NO: 370521 - DNA, 98 bp, Homo sapiens
  chr4:113430521-113430619
  hyper
cggtgagatgcggggccgaggaggagaaggagtgggaccgtgggcgtgcaggtgtttcaaggatcctcctcctttcccccttccatctctgattccat

SEQ ID NO: 370522 - DNA, 352 bp, Homo sapiens
  chr4:113431158-113431510
  hyper
aactggggaaggaaaaacgcgttgggggcaaggagaaccgctcctgcagacctggcccctccttggccctaggggacccctgccgatgcccactcggtgccacgtggggcggccccaagggagatgcaccatcccccaaaccaagcgctttggaaaagaaactgcagagaataataagaagcatgggggggggggcggggggcggggtgtgtccgtggagtgatgagaaagctggtctttcatccctccttttttggacattccttaagtttaatcattaaagtggtccttaaaaaagaaggcagcagcttaacgctgctatttctgacaatctgccccacacactgtcagc

SEQ ID NO: 370523 - DNA, 47 bp, Homo sapiens; identical to SEQ ID NO: 349961
  chr4:113432609-113432656
  hyper

SEQ ID NO: 370524 - DNA, 299 bp, Homo sapiens; identical to SEQ ID NO: 199559
  chr4:113435475-113435774
  hyper

SEQ ID NO: 370525 - DNA, 242 bp, Homo sapiens; identical to SEQ ID NO: 199560
  chr4:113436585-113436827
  hyper

SEQ ID NO: 370526 - DNA, 228 bp, Homo sapiens; identical to SEQ ID NO: 199561
  chr4:113438278-113438506
  hyper

SEQ ID NO: 370527 - DNA, 157 bp, Homo sapiens; identical to SEQ ID NO: 349965
  chr4:113442552-113442709
  hyper

SEQ ID NO: 370528 - DNA, 80 bp, Homo sapiens; identical to SEQ ID NO: 349966
  chr4:113444864-113444944
  hyper

SEQ ID NO: 370529 - DNA, 115 bp, Homo sapiens; identical to SEQ ID NO: 349967
  chr4:113445444-113445559
  hyper

SEQ ID NO: 370530 - DNA, 105 bp, Homo sapiens; identical to SEQ ID NO: 282450
  chr4:113627471-113627576
  hyper

SEQ ID NO: 370531 - DNA, 879 bp, Homo sapiens; identical to SEQ ID NO: 332181
  chr4:114682555-114683434
  hyper

SEQ ID NO: 370532 - DNA, 215 bp, Homo sapiens; identical to SEQ ID NO: 349969
  chr4:115520945-115521160
  hyper

SEQ ID NO: 370533 - DNA, 555 bp, Homo sapiens; identical to SEQ ID NO: 282458
  chr4:118954450-118955005
  hyper

SEQ ID NO: 370534 - DNA, 81 bp, Homo sapiens
  chr4:118955125-118955206
  hyper
ggaatgcggactccagaggcggcatctcgaccagacaagtttctcgcggcttggaatgagggagtcctgaaaccgacactc

SEQ ID NO: 370535 - DNA, 108 bp, Homo sapiens; identical to SEQ ID NO: 349970
  chr4:119273336-119273444
  hyper

SEQ ID NO: 370536 - DNA, 222 bp, Homo sapiens; identical to SEQ ID NO: 199571
  chr4:119273515-119273737
  hyper

SEQ ID NO: 370537 - DNA, 201 bp, Homo sapiens; identical to SEQ ID NO: 199572
  chr4:119273903-119274104
  hyper

SEQ ID NO: 370538 - DNA, 243 bp, Homo sapiens; identical to SEQ ID NO: 357951
  chr4:119274214-119274457
  hyper

SEQ ID NO: 370539 - DNA, 153 bp, Homo sapiens; identical to SEQ ID NO: 357952
  chr4:119809913-119810066
  hyper

SEQ ID NO: 370540 - DNA, 305 bp, Homo sapiens; identical to SEQ ID NO: 332186
  chr4:120549993-120550298
  hyper

SEQ ID NO: 370541 - DNA, 260 bp, Homo sapiens; identical to SEQ ID NO: 199579
  chr4:121843304-121843564
  hyper

SEQ ID NO: 370542 - DNA, 276 bp, Homo sapiens; identical to SEQ ID NO: 199580
  chr4:121843731-121844007
  hyper

SEQ ID NO: 370543 - DNA, 170 bp, Homo sapiens; identical to SEQ ID NO: 357955
  chr4:121844206-121844376
  hyper

SEQ ID NO: 370544 - DNA, 234 bp, Homo sapiens; identical to SEQ ID NO: 349973
  chr4:121992978-121993212
  hyper

SEQ ID NO: 370545 - DNA, 259 bp, Homo sapiens; identical to SEQ ID NO: 199583
  chr4:121993736-121993995
  hyper

SEQ ID NO: 370546 - DNA, 36 bp, Homo sapiens
  chr4:121994354-121994390
  hyper
ttgaaactcagcagctgttttaacaattgaaaaagc

SEQ ID NO: 370547 - DNA, 70 bp, Homo sapiens; identical to SEQ ID NO: 349975
  chr4:123747655-123747725
  hyper

SEQ ID NO: 370548 - DNA, 225 bp, Homo sapiens; identical to SEQ ID NO: 357959
  chr4:123748993-123749218
  hyper

SEQ ID NO: 370549 - DNA, 1537 bp, Homo sapiens; identical to SEQ ID NO: 332191
  chr4:124317751-124319288
  hyper

SEQ ID NO: 370550 - DNA, 242 bp, Homo sapiens; identical to SEQ ID NO: 282500
  chr4:128544404-128544646
  hyper

SEQ ID NO: 370551 - DNA, 49 bp, Homo sapiens; identical to SEQ ID NO: 357962
  chr4:128544806-128544855
  hyper

SEQ ID NO: 370552 - DNA, 149 bp, Homo sapiens; identical to SEQ ID NO: 349977
  chr4:129210000-129210149
  hyper

SEQ ID NO: 370553 - DNA, 136 bp, Homo sapiens; identical to SEQ ID NO: 349978
  chr4:140970253-140970389
  hyper

SEQ ID NO: 370554 - DNA, 212 bp, Homo sapiens; identical to SEQ ID NO: 349979
  chr4:140970419-140970631
  hyper

SEQ ID NO: 370555 - DNA, 352 bp, Homo sapiens; identical to SEQ ID NO: 345141
  chr4:141293964-141294316
  hyper

SEQ ID NO: 370556 - DNA, 103 bp, Homo sapiens; identical to SEQ ID NO: 199607
  chr4:141294418-141294521
  hyper

SEQ ID NO: 370557 - DNA, 88 bp, Homo sapiens; identical to SEQ ID NO: 199608
  chr4:141294545-141294633
  hyper

SEQ ID NO: 370558 - DNA, 40 bp, Homo sapiens; identical to SEQ ID NO: 345144
  chr4:141295287-141295327
  hyper

SEQ ID NO: 370559 - DNA, 88 bp, Homo sapiens; identical to SEQ ID NO: 349984
  chr4:141489128-141489216
  hyper

SEQ ID NO: 370560 - DNA, 60 bp, Homo sapiens; identical to SEQ ID NO: 199612
  chr4:142054594-142054654
  hyper

SEQ ID NO: 370561 - DNA, 155 bp, Homo sapiens; identical to SEQ ID NO: 357972
  chr4:142054757-142054912
  hyper

SEQ ID NO: 370562 - DNA, 824 bp, Homo sapiens; identical to SEQ ID NO: 332200
  chr4:142557243-142558067
  hyper

SEQ ID NO: 370563 - DNA, 192 bp, Homo sapiens; identical to SEQ ID NO: 199617
  chr4:143767433-143767625
  hyper

SEQ ID NO: 370564 - DNA, 332 bp, Homo sapiens; identical to SEQ ID NO: 357975
  chr4:143768278-143768610
  hyper

SEQ ID NO: 370565 - DNA, 82 bp, Homo sapiens
  chr4:144622231-144622313
  hyper
atactctcttccccaggtgccacaaagggattgtccctcagggttgggagagagacggtgactgtactcgggtcagtcctgc

SEQ ID NO: 370566 - DNA, 194 bp, Homo sapiens; identical to SEQ ID NO: 332204
  chr4:146098925-146099119
  hyper

SEQ ID NO: 370567 - DNA, 995 bp, Homo sapiens; identical to SEQ ID NO: 357977
  chr4:146857459-146858454
  hyper

SEQ ID NO: 370568 - DNA, 270 bp, Homo sapiens; identical to SEQ ID NO: 199627
  chr4:147560617-147560887
  hyper

SEQ ID NO: 370569 - DNA, 260 bp, Homo sapiens; identical to SEQ ID NO: 332209
  chr4:149362760-149363020
  hyper

SEQ ID NO: 370570 - DNA, 223 bp, Homo sapiens; identical to SEQ ID NO: 346657
  chr4:149364661-149364884
  hyper

SEQ ID NO: 370571 - DNA, 438 bp, Homo sapiens; identical to SEQ ID NO: 282569
  chr4:149365430-149365868
  hyper

SEQ ID NO: 370572 - DNA, 346 bp, Homo sapiens; identical to SEQ ID NO: 357982
  chr4:149365911-149366257
  hyper

SEQ ID NO: 370573 - DNA, 104 bp, Homo sapiens
  chr4:150999250-150999354
  hyper
cgcggttacgtttcccaggcggaggagcgcgcgtcgcggctgcgcccattaacgcgcggcgccgggcaggagccgtcaggcgggcggggctgcccgggacccgc

SEQ ID NO: 370574 - DNA, 552 bp, Homo sapiens; identical to SEQ ID NO: 199637
  chr4:150999589-151000141
  hyper

SEQ ID NO: 370575 - DNA, 124 bp, Homo sapiens; identical to SEQ ID NO: 346661
  chr4:151000581-151000705
  hyper

SEQ ID NO: 370576 - DNA, 113 bp, Homo sapiens; identical to SEQ ID NO: 349995
  chr4:152246019-152246132
  hyper

SEQ ID NO: 370577 - DNA, 178 bp, Homo sapiens; identical to SEQ ID NO: 199640
  chr4:152246314-152246492
  hyper

SEQ ID NO: 370578 - DNA, 469 bp, Homo sapiens; identical to SEQ ID NO: 349997
  chr4:152246542-152247011
  hyper

SEQ ID NO: 370579 - DNA, 1048 bp, Homo sapiens; identical to SEQ ID NO: 332213
  chr4:152329824-152330872
  hyper

SEQ ID NO: 370580 - DNA, 190 bp, Homo sapiens; identical to SEQ ID NO: 349998
  chr4:153600941-153601131
  hyper

SEQ ID NO: 370581 - DNA, 261 bp, Homo sapiens; identical to SEQ ID NO: 349999
  chr4:153601161-153601422
  hyper

SEQ ID NO: 370582 - DNA, 177 bp, Homo sapiens; identical to SEQ ID NO: 332215
  chr4:153856957-153857134
  hyper

SEQ ID NO: 370583 - DNA, 45 bp, Homo sapiens; identical to SEQ ID NO: 345146
  chr4:154143770-154143815
  hyper

SEQ ID NO: 370584 - DNA, 213 bp, Homo sapiens; identical to SEQ ID NO: 199648
  chr4:154144184-154144397
  hyper

SEQ ID NO: 370585 - DNA, 227 bp, Homo sapiens
  chr4:154387493-154387720
  hyper
cgccagcgagctagcggcgagcgcggcgagcaacggagaggagcgcgagcagcagcatggcggggctccgacgcccgcagcccggctgctactgccgcaccgcggcggccgtgaacctcctgctgggcgtcttccaggtcctgctgccctgctgtcgcccgggaggggctcagggacaaggtcagccttgcgccgctgggctcgctctgcctctccaccccgccccc

SEQ ID NO: 370586 - DNA, 192 bp, Homo sapiens; identical to SEQ ID NO: 350003
  chr4:154714010-154714202
  hyper

SEQ ID NO: 370587 - DNA, 371 bp, Homo sapiens
  chr4:155664665-155665036
  hyper
cgaaagattcggtcaggaaagaatctgcaggcattcgaggcgctcgcactttgcaaagtaaatgcaatctctttattaagccgaagtccctcatatctatccttttagaggaaggtggtccaactcagaaatctctcccaagaggactttccaccgaagactaccgcgaagtgccaggaactcgccccagtcccgacaggtgcaggacctttcgtgccgccacaccttgggactctacctccctaaataggccacttaaaagccagtagtgcaaccgggatcccgcggcgataaagaatcactgtgcagaaccctggagctgggagtcggcccgcccccctcccaaagaaaccgggatcccgcgtcctccc

SEQ ID NO: 370588 - DNA, 246 bp, Homo sapiens; identical to SEQ ID NO: 199651
  chr4:155665475-155665721
  hyper

SEQ ID NO: 370589 - DNA, 54 bp, Homo sapiens
  chr4:155665778-155665832
  hyper
gttattgtcaaagtggccagcatccgcgtggacacagtggaggacttcgcctac

SEQ ID NO: 370590 - DNA, 40 bp, Homo sapiens; identical to SEQ ID NO: 350004
  chr4:156298073-156298113
  hyper

SEQ ID NO: 370591 - DNA, 200 bp, Homo sapiens; identical to SEQ ID NO: 357996
  chr4:156587883-156588083
  hyper

SEQ ID NO: 370592 - DNA, 144 bp, Homo sapiens; identical to SEQ ID NO: 199653
  chr4:156588167-156588311
  hyper

SEQ ID NO: 370593 - DNA, 55 bp, Homo sapiens; identical to SEQ ID NO: 199654
  chr4:156588401-156588456
  hyper

SEQ ID NO: 370594 - DNA, 156 bp, Homo sapiens; identical to SEQ ID NO: 357999
  chr4:156680543-156680699
  hyper

SEQ ID NO: 370595 - DNA, 216 bp, Homo sapiens; identical to SEQ ID NO: 199658
  chr4:156680970-156681186
  hyper

SEQ ID NO: 370596 - DNA, 42 bp, Homo sapiens; identical to SEQ ID NO: 282611
  chr4:158141450-158141492
  hyper

SEQ ID NO: 370597 - DNA, 53 bp, Homo sapiens; identical to SEQ ID NO: 358002
  chr4:158142705-158142758
  hyper

SEQ ID NO: 370598 - DNA, 268 bp, Homo sapiens; identical to SEQ ID NO: 282613
  chr4:158143023-158143291
  hyper

SEQ ID NO: 370599 - DNA, 213 bp, Homo sapiens
  chr4:158143704-158143917
  hyper
gggcgaggccgccaggggcgccgcggtcagcttgccagcccggcgcgctttgttctcaggtagctgggctccagcagaggcagccggggaaaaggactgggaagccgtgggatctggccgagtttgaaaatctggagaagtcgctgatcagccattttagtctttgcaatgctccatattaaccctctcactccgcgcagtgctccgggactc

SEQ ID NO: 370600 - DNA, 120 bp, Homo sapiens; identical to SEQ ID NO: 332230
  chr4:159093914-159094034
  hyper

SEQ ID NO: 370601 - DNA, 726 bp, Homo sapiens
  chr4:159690014-159690740
  hyper
cgcctcccgccggggttacgtgagcccggggcgggcggccgccgggccaatggccgccgccggggccgccgcgctcctcccgcgccgccgccgccgccgtggggctgcgggctcctcccgcaggagataactgtcagcgcgcgaggcggtggcgggccggctcagtcatatgaccggcagccggcggctccggcgccgagcagagttactcagtcgcagcggccccgcgctcccgcaaggctgggcggccgcgccgccgcgatggccccgccaccgcggccgccgcccccggctgcgcgctgagccgccggccccccgagcgccacggccggagctgcggcggcggcatcatggccccgaccctgctccagaagctcttcaacaaaaggggcagcagcggcagctccgcggcggcgtctgcccagggcagggctcctaaggaaggacccgcctttaggtgagggggcgccggggggcaattctggcgcgggacccgagttggcttcggtgctcgccggggaggggacgggtaggggaaagggaagggactgtccaggacggcgctgcctatcgccggcacctggtcccgggcttgtcagcgtggacgcgcctgatccgagtgtggctccggaccctccgtgacccttcctcccgctctttctccacaactcagggtccttccccatttcagagttctcttgtgttccttggggttcccgggcgtgc

SEQ ID NO: 370602 - DNA, 168 bp, Homo sapiens; identical to SEQ ID NO: 358005
  chr4:163085074-163085242
  hyper

SEQ ID NO: 370603 - DNA, 244 bp, Homo sapiens; identical to SEQ ID NO: 358006
  chr4:163085479-163085723
  hyper

SEQ ID NO: 370604 - DNA, 359 bp, Homo sapiens; identical to SEQ ID NO: 358007
  chr4:164253781-164254140
  hyper

SEQ ID NO: 370605 - DNA, 155 bp, Homo sapiens; identical to SEQ ID NO: 350006
  chr4:165304258-165304413
  hyper

SEQ ID NO: 370606 - DNA, 244 bp, Homo sapiens; identical to SEQ ID NO: 358009
  chr4:166300444-166300688
  hyper

SEQ ID NO: 370607 - DNA, 536 bp, Homo sapiens; identical to SEQ ID NO: 282628
  chr4:166794038-166794574
  hyper

SEQ ID NO: 370608 - DNA, 63 bp, Homo sapiens; identical to SEQ ID NO: 332241
  chr4:169552556-169552619
  hyper

SEQ ID NO: 370609 - DNA, 677 bp, Homo sapiens; identical to SEQ ID NO: 350007
  chr4:169752829-169753506
  hyper

SEQ ID NO: 370610 - DNA, 439 bp, Homo sapiens; identical to SEQ ID NO: 282635
  chr4:169753535-169753974
  hyper

SEQ ID NO: 370611 - DNA, 273 bp, Homo sapiens; identical to SEQ ID NO: 358013
  chr4:169754143-169754416
  hyper

SEQ ID NO: 370612 - DNA, 230 bp, Homo sapiens
  chr4:170679064-170679294
  hyper
cggccgcttccgagcgccgccaaccgcttccgggttcaaaagcctccaagccgaatttcagcgccgcccgggctcgccaatttaggggaaaggctccgcccattccccgccccctgagacctggcaccggacgcgttgaggccccgcccactcccgtgctgggcgcgtgcaaggagcgtcttctgtcagcgtagtctgcatctaggctttctggagcatcttccagggtc

SEQ ID NO: 370613 - DNA, 102 bp, Homo sapiens; identical to SEQ ID NO: 199680
  chr4:170947173-170947275
  hyper

SEQ ID NO: 370614 - DNA, 171 bp, Homo sapiens; identical to SEQ ID NO: 199681
  chr4:170947867-170948038
  hyper

SEQ ID NO: 370615 - DNA, 426 bp, Homo sapiens; identical to SEQ ID NO: 199682
  chr4:170948089-170948515
  hyper

SEQ ID NO: 370616 - DNA, 940 bp, Homo sapiens; identical to SEQ ID NO: 358017
  chr4:171010636-171011576
  hyper

SEQ ID NO: 370617 - DNA, 1685 bp, Homo sapiens; identical to SEQ ID NO: 332246
  chr4:174089737-174091422
  hyper

SEQ ID NO: 370618 - DNA, 42 bp, Homo sapiens; identical to SEQ ID NO: 358019
  chr4:174439755-174439797
  hyper

SEQ ID NO: 370619 - DNA, 270 bp, Homo sapiens; identical to SEQ ID NO: 199686
  chr4:174440348-174440618
  hyper

SEQ ID NO: 370620 - DNA, 126 bp, Homo sapiens; identical to SEQ ID NO: 350013
  chr4:174443425-174443551
  hyper

SEQ ID NO: 370621 - DNA, 168 bp, Homo sapiens; identical to SEQ ID NO: 358022
  chr4:174448150-174448318
  hyper

SEQ ID NO: 370622 - DNA, 355 bp, Homo sapiens; identical to SEQ ID NO: 358023
  chr4:174448663-174449018
  hyper

SEQ ID NO: 370623 - DNA, 126 bp, Homo sapiens; identical to SEQ ID NO: 350014
  chr4:174458996-174459122
  hyper

SEQ ID NO: 370624 - DNA, 35 bp, Homo sapiens; identical to SEQ ID NO: 358025
  chr4:174460221-174460256
  hyper

SEQ ID NO: 370625 - DNA, 275 bp, Homo sapiens; identical to SEQ ID NO: 358026
  chr4:175138136-175138411
  hyper

SEQ ID NO: 370626 - DNA, 71 bp, Homo sapiens; identical to SEQ ID NO: 350015
  chr4:175750738-175750809
  hyper

SEQ ID NO: 370627 - DNA, 68 bp, Homo sapiens; identical to SEQ ID NO: 350016
  chr4:176922585-176922653
  hyper

SEQ ID NO: 370628 - DNA, 42 bp, Homo sapiens; identical to SEQ ID NO: 345148
  chr4:176986744-176986786
  hyper

SEQ ID NO: 370629 - DNA, 504 bp, Homo sapiens; identical to SEQ ID NO: 332261
  chr4:177116437-177116941
  hyper

SEQ ID NO: 370630 - DNA, 355 bp, Homo sapiens; identical to SEQ ID NO: 282677
  chr4:180979649-180980004
  hyper

SEQ ID NO: 370631 - DNA, 157 bp, Homo sapiens
  chr4:183727549-183727706
  hyper
cggcttctgcggacatggaaaagccgtcccaacatccggcggccccgtgggcaggggtcctgggacgccccctcctgcatccccgggcgggccctgcaggggatggcggcgatttcaggaagggctccggcgccccctagtgacgcgcggctgtggt

SEQ ID NO: 370632 - DNA, 268 bp, Homo sapiens; identical to SEQ ID NO: 332264
  chr4:183839058-183839326
  hyper

SEQ ID NO: 370633 - DNA, 206 bp, Homo sapiens; identical to SEQ ID NO: 199699
  chr4:184019900-184020106
  hyper

SEQ ID NO: 370634 - DNA, 365 bp, Homo sapiens; identical to SEQ ID NO: 199701
  chr4:184718835-184719200
  hyper

SEQ ID NO: 370635 - DNA, 521 bp, Homo sapiens; identical to SEQ ID NO: 358035
  chr4:184719413-184719934
  hyper

SEQ ID NO: 370636 - DNA, 365 bp, Homo sapiens; identical to SEQ ID NO: 332268
  chr4:185747631-185747996
  hyper

SEQ ID NO: 370637 - DNA, 219 bp, Homo sapiens; identical to SEQ ID NO: 358037
  chr4:185939454-185939673
  hyper

SEQ ID NO: 370638 - DNA, 52 bp, Homo sapiens; identical to SEQ ID NO: 358038
  chr4:186050065-186050117
  hyper

SEQ ID NO: 370639 - DNA, 193 bp, Homo sapiens
  chr4:187026475-187026668
  hyper
cgccgccagccgcgccgcgggagcagtggggaccctgctctcttggcccagtagccctagagcgggtaaagccccgccccagccccccactccctccggcgggggctgctcccctgctcgcctggtggtcccagcgcggccgccctcgggccccggcggggtctgggccgcgctccccaggaacccgctccag

SEQ ID NO: 370640 - DNA, 182 bp, Homo sapiens; identical to SEQ ID NO: 199719
  chr4:187647457-187647639
  hyper

SEQ ID NO: 370641 - DNA, 393 bp, Homo sapiens; identical to SEQ ID NO: 199720
  chr4:187647669-187648062
  hyper

SEQ ID NO: 370642 - DNA, 239 bp, Homo sapiens; identical to SEQ ID NO: 350024
  chr4:187648119-187648358
  hyper

SEQ ID NO: 370643 - DNA, 1660 bp, Homo sapiens; identical to SEQ ID NO: 332275
  chr5:472600-474260
  hyper

SEQ ID NO: 370644 - DNA, 457 bp, Homo sapiens; identical to SEQ ID NO: 282733
  chr5:490766-491223
  hyper

SEQ ID NO: 370645 - DNA, 74 bp, Homo sapiens; identical to SEQ ID NO: 350026
  chr5:523704-523778
  hyper

SEQ ID NO: 370646 - DNA, 258 bp, Homo sapiens; identical to SEQ ID NO: 350027
  chr5:676510-676768
  hyper

SEQ ID NO: 370647 - DNA, 356 bp, Homo sapiens; identical to SEQ ID NO: 350028
  chr5:676926-677282
  hyper

SEQ ID NO: 370648 - DNA, 210 bp, Homo sapiens; identical to SEQ ID NO: 332279
  chr5:1004778-1004988
  hyper

SEQ ID NO: 370649 - DNA, 116 bp, Homo sapiens; identical to SEQ ID NO: 350029
  chr5:1009142-1009258
  hyper

SEQ ID NO: 370650 - DNA, 151 bp, Homo sapiens; identical to SEQ ID NO: 350030
  chr5:1009625-1009776
  hyper

SEQ ID NO: 370651 - DNA, 207 bp, Homo sapiens; identical to SEQ ID NO: 332281
  chr5:1061585-1061792
  hyper

SEQ ID NO: 370652 - DNA, 860 bp, Homo sapiens; identical to SEQ ID NO: 332282
  chr5:1064412-1065272
  hyper

SEQ ID NO: 370653 - DNA, 991 bp, Homo sapiens; identical to SEQ ID NO: 332283
  chr5:1111396-1112387
  hyper

SEQ ID NO: 370654 - DNA, 166 bp, Homo sapiens; identical to SEQ ID NO: 358052
  chr5:1155508-1155674
  hyper

SEQ ID NO: 370655 - DNA, 315 bp, Homo sapiens; identical to SEQ ID NO: 345152
  chr5:1645162-1645477
  hyper

SEQ ID NO: 370656 - DNA, 901 bp, Homo sapiens; identical to SEQ ID NO: 332288
  chr5:1800443-1801344
  hyper

SEQ ID NO: 370657 - DNA, 286 bp, Homo sapiens; identical to SEQ ID NO: 345153
  chr5:1874606-1874892
  hyper

SEQ ID NO: 370658 - DNA, 70 bp, Homo sapiens; identical to SEQ ID NO: 350034
  chr5:1877239-1877309
  hyper

SEQ ID NO: 370659 - DNA, 87 bp, Homo sapiens; identical to SEQ ID NO: 358057
  chr5:1879747-1879834
  hyper

SEQ ID NO: 370660 - DNA, 39 bp, Homo sapiens; identical to SEQ ID NO: 350035
  chr5:2743466-2743505
  hyper

SEQ ID NO: 370661 - DNA, 174 bp, Homo sapiens; identical to SEQ ID NO: 358059
  chr5:2753572-2753746
  hyper

SEQ ID NO: 370662 - DNA, 96 bp, Homo sapiens; identical to SEQ ID NO: 346675
  chr5:3121996-3122092
  hyper

SEQ ID NO: 370663 - DNA, 83 bp, Homo sapiens; identical to SEQ ID NO: 346676
  chr5:3122204-3122287
  hyper

SEQ ID NO: 370664 - DNA, 88 bp, Homo sapiens; identical to SEQ ID NO: 282777
  chr5:3602716-3602804
  hyper

SEQ ID NO: 370665 - DNA, 32 bp, Homo sapiens; identical to SEQ ID NO: 350038
  chr5:6583144-6583176
  hyper

SEQ ID NO: 370666 - DNA, 376 bp, Homo sapiens; identical to SEQ ID NO: 199753
  chr5:9545120-9545496
  hyper

SEQ ID NO: 370667 - DNA, 588 bp, Homo sapiens
  chr5:9545851-9546439
  hyper
tgggggcaccggcttgggggccacgagcacggtccccgagcgcgcggccaaccggtgggtgggcaggttcgcgcccagcagagacgaccctcgaggtggcaaagttgggtgtccaagccagctccgcggggcagtcctgggtgggagaagggagcgtcccgggatgagcgacactggccgggccgcccctgcacggggaaggtggagggccggggctgcagcgggccaagggccgcggctggcctgaggctgcgaagcccacccgcggcgggaaagcagcgctcgggagcgggctcagggagagcagccgccaccggcgccgccttcccggcaagtagatcggcgcggggcgagcgggcgcggagagcgcggggcggagagcgctgggcggggagcgggggacagcctgggcccacccccgccccgccccgcccctgccccgcccccgccgccgcgccgcctcctcctcctcctcctccccgccggggtgaaactcgagcgccccacccgcgcctgacctccccgagcccctccccgggccccgccccttcccggtacaggacccccaccttcgctcctgggagcccc

SEQ ID NO: 370668 - DNA, 468 bp, Homo sapiens; identical to SEQ ID NO: 332309
  chr5:10354870-10355338
  hyper

SEQ ID NO: 370669 - DNA, 95 bp, Homo sapiens; identical to SEQ ID NO: 358067
  chr5:10563418-10563513
  hyper

SEQ ID NO: 370670 - DNA, 170 bp, Homo sapiens; identical to SEQ ID NO: 345154
  chr5:10564301-10564471
  hyper

SEQ ID NO: 370671 - DNA, 147 bp, Homo sapiens; identical to SEQ ID NO: 350041
  chr5:11385588-11385735
  hyper

SEQ ID NO: 370672 - DNA, 73 bp, Homo sapiens; identical to SEQ ID NO: 350042
  chr5:11903295-11903368
  hyper

SEQ ID NO: 370673 - DNA, 41 bp, Homo sapiens
  chr5:14142657-14142698
  hyper
cgtagccggggcataggcgttttgaactagaatattcgtcc

SEQ ID NO: 370674 - DNA, 717 bp, Homo sapiens
  chr5:14142816-14143533
  hyper
cagcagccgaaagtcccctgggagatggggatacaccgagaggaatcccattttacaggagagctttgtacccttaggagtaccgtggcctccgggactggagcagataacctgttttcgggccctctatgttcactcaacaactattaagaagccccctccccgagccagggccagcgctgagcccactagggaggcacccgccccggcccgcgtcaccccgccttgcgggctagacgacgaaacgcctcggcgctcaggggaccgcgcaccggtgcaggagccagcgccccggttgggggcgcaatgccgggcctgggaaggtccgccccggctggtcagagctttcctgcgccttccaaggcttggagctgccccggggaagcagaccgaaccaaaccgaacgttcctgcagcctccccgccagccctgcgggagcccatccgcccaacgcggccccgcccctcccccaggctccgcccaccgccgagcccaggctcggcccttgacgaagttcgccggaaattaccgaagcccctcttttttttccttcctctccgttccctgttctcccttttcctttcacccgggttccctcggccgtgatttccccctcccccctccttccttccccattgaaatcaagatggaggctcgcggcagccgccggcgcccgtgatcccggaggtctcgccggccacgggcccccgccctcgc

SEQ ID NO: 370675 - DNA, 125 bp, Homo sapiens; identical to SEQ ID NO: 332315
  chr5:14205146-14205271
  hyper

SEQ ID NO: 370676 - DNA, 176 bp, Homo sapiens
  chr5:14581611-14581787
  hyper
cgggccttcgatgaaaagtgccaaggaggtcgccggatccgcccaagtggaattcccaagatgtttcccggggagcagcctcaggaacgcgcctggaccccaggagtagcttcccgccccgctgccgagcctcggaggtctccgcagttctggggcccgcgaccccgacagcgcgc

SEQ ID NO: 370677 - DNA, 41 bp, Homo sapiens
  chr5:15500076-15500117
  hyper
cgttgcttcgctccgaagggttcgcgcgtagcgcgctgagc

SEQ ID NO: 370678 - DNA, 252 bp, Homo sapiens; identical to SEQ ID NO: 350044
  chr5:16934300-16934552
  hyper

SEQ ID NO: 370679 - DNA, 43 bp, Homo sapiens; identical to SEQ ID NO: 350045
  chr5:16934582-16934625
  hyper

SEQ ID NO: 370680 - DNA, 88 bp, Homo sapiens; identical to SEQ ID NO: 358074
  chr5:16935468-16935556
  hyper

SEQ ID NO: 370681 - DNA, 266 bp, Homo sapiens; identical to SEQ ID NO: 199773
  chr5:16935617-16935883
  hyper

SEQ ID NO: 370682 - DNA, 33 bp, Homo sapiens; identical to SEQ ID NO: 199774
  chr5:16936321-16936354
  hyper

SEQ ID NO: 370683 - DNA, 70 bp, Homo sapiens; identical to SEQ ID NO: 199775
  chr5:16936514-16936584
  hyper

SEQ ID NO: 370684 - DNA, 235 bp, Homo sapiens; identical to SEQ ID NO: 350049
  chr5:16936833-16937068
  hyper

SEQ ID NO: 370685 - DNA, 302 bp, Homo sapiens; identical to SEQ ID NO: 358079
  chr5:17216361-17216663
  hyper

SEQ ID NO: 370686 - DNA, 52 bp, Homo sapiens; identical to SEQ ID NO: 350050
  chr5:17217629-17217681
  hyper

SEQ ID NO: 370687 - DNA, 187 bp, Homo sapiens; identical to SEQ ID NO: 282827
  chr5:22853256-22853443
  hyper

SEQ ID NO: 370688 - DNA, 100 bp, Homo sapiens; identical to SEQ ID NO: 350052
  chr5:22853569-22853669
  hyper

SEQ ID NO: 370689 - DNA, 439 bp, Homo sapiens; identical to SEQ ID NO: 282834
  chr5:31639164-31639603
  hyper

SEQ ID NO: 370690 - DNA, 478 bp, Homo sapiens; identical to SEQ ID NO: 346679
  chr5:31854462-31854940
  hyper

SEQ ID NO: 370691 - DNA, 31 bp, Homo sapiens
  chr5:33892023-33892054
  hyper
cgctcgcctgtggcccagcaggaagatgcag

SEQ ID NO: 370692 - DNA, 131 bp, Homo sapiens; identical to SEQ ID NO: 350054
  chr5:34655742-34655873
  hyper

SEQ ID NO: 370693 - DNA, 441 bp, Homo sapiens; identical to SEQ ID NO: 199790
  chr5:34655910-34656351
  hyper

SEQ ID NO: 370694 - DNA, 221 bp, Homo sapiens; identical to SEQ ID NO: 199791
  chr5:34656421-34656642
  hyper

SEQ ID NO: 370695 - DNA, 387 bp, Homo sapiens; identical to SEQ ID NO: 358087
  chr5:34657034-34657421
  hyper

SEQ ID NO: 370696 - DNA, 376 bp, Homo sapiens; identical to SEQ ID NO: 358088
  chr5:35230090-35230466
  hyper

SEQ ID NO: 370697 - DNA, 747 bp, Homo sapiens; identical to SEQ ID NO: 350058
  chr5:36744888-36745635
  hyper

SEQ ID NO: 370698 - DNA, 786 bp, Homo sapiens; identical to SEQ ID NO: 332333
  chr5:37248996-37249782
  hyper

SEQ ID NO: 370699 - DNA, 100 bp, Homo sapiens; identical to SEQ ID NO: 350059
  chr5:38556107-38556207
  hyper

SEQ ID NO: 370700 - DNA, 85 bp, Homo sapiens; identical to SEQ ID NO: 199802
  chr5:38556985-38557070
  hyper

SEQ ID NO: 370701 - DNA, 162 bp, Homo sapiens; identical to SEQ ID NO: 358093
  chr5:38557400-38557562
  hyper

SEQ ID NO: 370702 - DNA, 37 bp, Homo sapiens
  chr5:39424892-39424929
  hyper
cgaagctactcaccggctagctattgcctccgtgaag

SEQ ID NO: 370703 - DNA, 336 bp, Homo sapiens; identical to SEQ ID NO: 199807
  chr5:40680627-40680963
  hyper

SEQ ID NO: 370704 - DNA, 462 bp, Homo sapiens; identical to SEQ ID NO: 350062
  chr5:41510373-41510835
  hyper

SEQ ID NO: 370705 - DNA, 799 bp, Homo sapiens; identical to SEQ ID NO: 350063
  chr5:41870076-41870875
  hyper

SEQ ID NO: 370706 - DNA, 277 bp, Homo sapiens; identical to SEQ ID NO: 358097
  chr5:42424338-42424615
  hyper

SEQ ID NO: 370707 - DNA, 98 bp, Homo sapiens; identical to SEQ ID NO: 345157
  chr5:42950747-42950845
  hyper

SEQ ID NO: 370708 - DNA, 175 bp, Homo sapiens; identical to SEQ ID NO: 346682
  chr5:42995428-42995603
  hyper

SEQ ID NO: 370709 - DNA, 337 bp, Homo sapiens; identical to SEQ ID NO: 345158
  chr5:43007481-43007818
  hyper

SEQ ID NO: 370710 - DNA, 387 bp, Homo sapiens; identical to SEQ ID NO: 199819
  chr5:43017314-43017701
  hyper

SEQ ID NO: 370711 - DNA, 303 bp, Homo sapiens; identical to SEQ ID NO: 199820
  chr5:43019347-43019650
  hyper

SEQ ID NO: 370712 - DNA, 259 bp, Homo sapiens; identical to SEQ ID NO: 199821
  chr5:43019887-43020146
  hyper

SEQ ID NO: 370713 - DNA, 349 bp, Homo sapiens
  chr5:43020294-43020643
  hyper
agccctagcggacagttttcaggtggcagtaatgctcatttcctggaacagatggttcgtggcccttgaagcgctgcgatctgtaaagctagttctctgcaaggtttgcttagtgtctgttttatttcggtttcttttcttgctatgtttatctgtcggaattacagtttgttttggttctatgtaatctctaaaatgttatcgtttttcttttgactactaatttttgtgcattcattactattgagtttcataatacctggcttgcctccgcccacggcctccggaaagcataaatgtccaggctaatgggagtgctgaaggctctgcctcgttgatcagcacaaac

SEQ ID NO: 370714 - DNA, 328 bp, Homo sapiens; identical to SEQ ID NO: 332354
  chr5:43557434-43557762
  hyper

SEQ ID NO: 370715 - DNA, 214 bp, Homo sapiens; identical to SEQ ID NO: 350071
  chr5:43603571-43603785
  hyper

SEQ ID NO: 370716 - DNA, 50 bp, Homo sapiens; identical to SEQ ID NO: 345162
  chr5:49737299-49737349
  hyper

SEQ ID NO: 370717 - DNA, 104 bp, Homo sapiens; identical to SEQ ID NO: 350073
  chr5:50263380-50263484
  hyper

SEQ ID NO: 370718 - DNA, 140 bp, Homo sapiens; identical to SEQ ID NO: 199834
  chr5:50674590-50674730
  hyper

SEQ ID NO: 370719 - DNA, 354 bp, Homo sapiens
  chr5:50677760-50678114
  hyper
aatgcggccggccaggatttacagctcttatcaagggttagattttgcgaaagatataaagaaaggagtttcctaacacaccgggtcttctcacagcaacaagacaccgaaattaagccttctatggtttgtgtctgtaggactttttagataaaactggcagccccattagataagaaatggctttttagaagctttgggggaagcgcgggggttcttcgtggccttcctgtgactgtctttgggagaccgtaacagatgatgggaacatgtaagaatgattgaagaaggttaccggcgagttgcacctaacagtcttctctctccaagtagtttctcgagagaaaattatat

SEQ ID NO: 370720 - DNA, 318 bp, Homo sapiens; identical to SEQ ID NO: 358108
  chr5:52778284-52778602
  hyper

SEQ ID NO: 370721 - DNA, 135 bp, Homo sapiens; identical to SEQ ID NO: 358109
  chr5:52778741-52778876
  hyper

SEQ ID NO: 370722 - DNA, 75 bp, Homo sapiens; identical to SEQ ID NO: 345163
  chr5:54518558-54518633
  hyper

SEQ ID NO: 370723 - DNA, 209 bp, Homo sapiens; identical to SEQ ID NO: 345164
  chr5:54526958-54527167
  hyper

SEQ ID NO: 370724 - DNA, 308 bp, Homo sapiens; identical to SEQ ID NO: 332365
  chr5:56110226-56110534
  hyper

SEQ ID NO: 370725 - DNA, 552 bp, Homo sapiens; identical to SEQ ID NO: 358113
  chr5:56112644-56113196
  hyper

SEQ ID NO: 370726 - DNA, 37 bp, Homo sapiens; identical to SEQ ID NO: 199857
  chr5:57878673-57878710
  hyper

SEQ ID NO: 370727 - DNA, 158 bp, Homo sapiens; identical to SEQ ID NO: 199858
  chr5:57878752-57878910
  hyper

SEQ ID NO: 370728 - DNA, 227 bp, Homo sapiens; identical to SEQ ID NO: 345168
  chr5:57879190-57879417
  hyper

SEQ ID NO: 370729 - DNA, 128 bp, Homo sapiens; identical to SEQ ID NO: 345169
  chr5:58334886-58335014
  hyper

SEQ ID NO: 370730 - DNA, 210 bp, Homo sapiens; identical to SEQ ID NO: 199861
  chr5:58335353-58335563
  hyper

SEQ ID NO: 370731 - DNA, 73 bp, Homo sapiens; identical to SEQ ID NO: 345171
  chr5:58335881-58335954
  hyper

SEQ ID NO: 370732 - DNA, 201 bp, Homo sapiens; identical to SEQ ID NO: 199865
  chr5:59189507-59189708
  hyper

SEQ ID NO: 370733 - DNA, 53 bp, Homo sapiens; identical to SEQ ID NO: 358121
  chr5:59190083-59190136
  hyper

SEQ ID NO: 370734 - DNA, 160 bp, Homo sapiens; identical to SEQ ID NO: 358122
  chr5:60921444-60921604
  hyper

SEQ ID NO: 370735 - DNA, 49 bp, Homo sapiens; identical to SEQ ID NO: 358123
  chr5:60921662-60921711
  hyper

SEQ ID NO: 370736 - DNA, 489 bp, Homo sapiens; identical to SEQ ID NO: 332371
  chr5:64398796-64399285
  hyper

SEQ ID NO: 370737 - DNA, 348 bp, Homo sapiens; identical to SEQ ID NO: 346698
  chr5:65220847-65221195
  hyper

SEQ ID NO: 370738 - DNA, 1043 bp, Homo sapiens; identical to SEQ ID NO: 332373
  chr5:66299591-66300634
  hyper

SEQ ID NO: 370739 - DNA, 97 bp, Homo sapiens; identical to SEQ ID NO: 350085
  chr5:66511687-66511784
  hyper

SEQ ID NO: 370740 - DNA, 81 bp, Homo sapiens; identical to SEQ ID NO: 199883
  chr5:72416165-72416246
  hyper

SEQ ID NO: 370741 - DNA, 114 bp, Homo sapiens; identical to SEQ ID NO: 350086
  chr5:72497779-72497893
  hyper

SEQ ID NO: 370742 - DNA, 269 bp, Homo sapiens; identical to SEQ ID NO: 199884
  chr5:72594501-72594770
  hyper

SEQ ID NO: 370743 - DNA, 316 bp, Homo sapiens; identical to SEQ ID NO: 199885
  chr5:72733185-72733501
  hyper

SEQ ID NO: 370744 - DNA, 177 bp, Homo sapiens; identical to SEQ ID NO: 350088
  chr5:72733588-72733765
  hyper

SEQ ID NO: 370745 - DNA, 85 bp, Homo sapiens; identical to SEQ ID NO: 350089
  chr5:72742484-72742569
  hyper

SEQ ID NO: 370746 - DNA, 216 bp, Homo sapiens; identical to SEQ ID NO: 199888
  chr5:72744481-72744697
  hyper

SEQ ID NO: 370747 - DNA, 177 bp, Homo sapiens; identical to SEQ ID NO: 358135
  chr5:72745196-72745373
  hyper

SEQ ID NO: 370748 - DNA, 300 bp, Homo sapiens; identical to SEQ ID NO: 199889
  chr5:72747520-72747820
  hyper

SEQ ID NO: 370749 - DNA, 127 bp, Homo sapiens; identical to SEQ ID NO: 350091
  chr5:72747850-72747977
  hyper

SEQ ID NO: 370750 - DNA, 164 bp, Homo sapiens; identical to SEQ ID NO: 332389
  chr5:73843900-73844064
  hyper

SEQ ID NO: 370751 - DNA, 368 bp, Homo sapiens
  chr5:74349128-74349496
  hyper
cggggttcagcccggttccccgcgcggctccgagagggcgcccccgcctgccgcctggagatggacgcggcgccgaagttttccccggcgggaaaacgaaagtcgtgaggagcagagggtcggggcgtcccggcggagacgaggctgagaccgggttaacatctccagccccgggcgaccctcgctcccccgcgtggccaagtcgacttacgagagggagcgggccagccccgaacgcggggtccgtgcggctgcggaggccgccccggcgggggccgagggttgcgctctgggttcccaggctctccgcggcggctcgctctcgccgcgctcctccgtcgccctgctggggagccgctctcgcccgg

SEQ ID NO: 370752 - DNA, 291 bp, Homo sapiens; identical to SEQ ID NO: 199900
  chr5:75378714-75379005
  hyper

SEQ ID NO: 370753 - DNA, 373 bp, Homo sapiens; identical to SEQ ID NO: 199901
  chr5:75379694-75380067
  hyper

SEQ ID NO: 370754 - DNA, 50 bp, Homo sapiens; identical to SEQ ID NO: 283051
  chr5:75698194-75698244
  hyper

SEQ ID NO: 370755 - DNA, 1185 bp, Homo sapiens; identical to SEQ ID NO: 199902
  chr5:75698274-75699459
  hyper

SEQ ID NO: 370756 - DNA, 110 bp, Homo sapiens; identical to SEQ ID NO: 350096
  chr5:76011064-76011174
  hyper

SEQ ID NO: 370757 - DNA, 410 bp, Homo sapiens; identical to SEQ ID NO: 283056
  chr5:76011754-76012164
  hyper

SEQ ID NO: 370758 - DNA, 377 bp, Homo sapiens; identical to SEQ ID NO: 283057
  chr5:76012199-76012576
  hyper

SEQ ID NO: 370759 - DNA, 184 bp, Homo sapiens; identical to SEQ ID NO: 358146
  chr5:76012643-76012827
  hyper

SEQ ID NO: 370760 - DNA, 407 bp, Homo sapiens; identical to SEQ ID NO: 199907
  chr5:76114443-76114850
  hyper

SEQ ID NO: 370761 - DNA, 282 bp, Homo sapiens; identical to SEQ ID NO: 199908
  chr5:76114880-76115162
  hyper

SEQ ID NO: 370762 - DNA, 218 bp, Homo sapiens; identical to SEQ ID NO: 199909
  chr5:76115225-76115443
  hyper

SEQ ID NO: 370763 - DNA, 78 bp, Homo sapiens; identical to SEQ ID NO: 358150
  chr5:76115609-76115687
  hyper

SEQ ID NO: 370764 - DNA, 116 bp, Homo sapiens
  chr5:76506029-76506145
  hyper
cgctgggggcggcgtcgggatgagtgcagaagagacgaggcctctggacagcggaggaggaggggagggcgccgaggcgcggtgccagctgccgcgcacaggggccccgcggcgga

SEQ ID NO: 370765 - DNA, 96 bp, Homo sapiens; identical to SEQ ID NO: 358151
  chr5:76507202-76507298
  hyper

SEQ ID NO: 370766 - DNA, 345 bp, Homo sapiens; identical to SEQ ID NO: 345175
  chr5:76926856-76927201
  hyper

SEQ ID NO: 370767 - DNA, 199 bp, Homo sapiens
  chr5:76936815-76937014
  hyper
cacacgctgtctggagggagggagaaggggccgcgacctggggagacaaggataagggcgcggggccgcgcgtctccacgtgcgtgcacacaagcgctagtgtccccatcccacagtcgcccccggaacggcgccggctgtgcagcgatctcccacacgcactcgctcgtatattctgttttgttgtatctttcaggtc

SEQ ID NO: 370768 - DNA, 50 bp, Homo sapiens; identical to SEQ ID NO: 358153
  chr5:76937347-76937397
  hyper

SEQ ID NO: 370769 - DNA, 89 bp, Homo sapiens; identical to SEQ ID NO: 358154
  chr5:76939813-76939902
  hyper

SEQ ID NO: 370770 - DNA, 191 bp, Homo sapiens; identical to SEQ ID NO: 199915
  chr5:77148195-77148386
  hyper

SEQ ID NO: 370771 - DNA, 37 bp, Homo sapiens; identical to SEQ ID NO: 346704
  chr5:77268330-77268367
  hyper

SEQ ID NO: 370772 - DNA, 342 bp, Homo sapiens
  chr5:77591388-77591730
  hyper
cgtttggagctgaagtggtgcgtcctattggcgtctagctaccaaaaataaaatggaccacctcgcgcgccagtcgtgttactcactaatatgcactagggagcctaggcgggatgcttgcctggccccagagtagctctctccgggtgctggcacccgagaaaacctctttcccggggtgccttcccccagcccgccttctcaggtgggtttcagcgccttccctctcttctccccagtgcctcccgtccaaggaaggcattaacacccaaagccctggcggccaggtactgaaactgtcaagggattctaccaggtagaacgcgaacctggaggccggcc

SEQ ID NO: 370773 - DNA, 180 bp, Homo sapiens; identical to SEQ ID NO: 332410
  chr5:78531507-78531687
  hyper

SEQ ID NO: 370774 - DNA, 1538 bp, Homo sapiens; identical to SEQ ID NO: 332411
  chr5:78531956-78533494
  hyper

SEQ ID NO: 370775 - DNA, 418 bp, Homo sapiens; identical to SEQ ID NO: 350103
  chr5:79551984-79552402
  hyper

SEQ ID NO: 370776 - DNA, 41 bp, Homo sapiens; identical to SEQ ID NO: 199922
  chr5:79865662-79865703
  hyper

SEQ ID NO: 370777 - DNA, 90 bp, Homo sapiens; identical to SEQ ID NO: 199923
  chr5:79865744-79865834
  hyper

SEQ ID NO: 370778 - DNA, 224 bp, Homo sapiens; identical to SEQ ID NO: 199924
  chr5:80256566-80256790
  hyper

SEQ ID NO: 370779 - DNA, 158 bp, Homo sapiens; identical to SEQ ID NO: 350105
  chr5:82767810-82767968
  hyper

SEQ ID NO: 370780 - DNA, 541 bp, Homo sapiens; identical to SEQ ID NO: 283098
  chr5:82769369-82769910
  hyper

SEQ ID NO: 370781 - DNA, 245 bp, Homo sapiens; identical to SEQ ID NO: 283099
  chr5:82770318-82770563
  hyper

SEQ ID NO: 370782 - DNA, 122 bp, Homo sapiens
  chr5:83679447-83679569
  hyper
cgcagctaagctccaggcccctggggtcagactaggagaggcgggttcctggggtttgctgtaatcgatgctgctcctctgggatggggaggcaggagaaagctgaagtgacctgtgagact

SEQ ID NO: 370783 - DNA, 75 bp, Homo sapiens
  chr5:83680369-83680444
  hyper
aagagaggagcctttcctccccttttgcctgcgctccggcgcgcggaggtgggtgagctccggggagccgccggc

SEQ ID NO: 370784 - DNA, 45 bp, Homo sapiens; identical to SEQ ID NO: 345178
  chr5:87436549-87436594
  hyper

SEQ ID NO: 370785 - DNA, 735 bp, Homo sapiens; identical to SEQ ID NO: 345179
  chr5:87436769-87437504
  hyper

SEQ ID NO: 370786 - DNA, 80 bp, Homo sapiens; identical to SEQ ID NO: 283113
  chr5:87955380-87955460
  hyper

SEQ ID NO: 370787 - DNA, 80 bp, Homo sapiens; identical to SEQ ID NO: 345180
  chr5:87957200-87957280
  hyper

SEQ ID NO: 370788 - DNA, 49 bp, Homo sapiens; identical to SEQ ID NO: 199934
  chr5:87962917-87962966
  hyper

SEQ ID NO: 370789 - DNA, 388 bp, Homo sapiens; identical to SEQ ID NO: 283116
  chr5:87963002-87963390
  hyper

SEQ ID NO: 370790 - DNA, 191 bp, Homo sapiens; identical to SEQ ID NO: 350114
  chr5:87963511-87963702
  hyper

SEQ ID NO: 370791 - DNA, 156 bp, Homo sapiens; identical to SEQ ID NO: 345181
  chr5:87969885-87970041
  hyper

SEQ ID NO: 370792 - DNA, 599 bp, Homo sapiens; identical to SEQ ID NO: 199937
  chr5:87970918-87971517
  hyper

SEQ ID NO: 370793 - DNA, 37 bp, Homo sapiens; identical to SEQ ID NO: 345183
  chr5:87975991-87976028
  hyper

SEQ ID NO: 370794 - DNA, 243 bp, Homo sapiens; identical to SEQ ID NO: 345184
  chr5:87976663-87976906
  hyper

SEQ ID NO: 370795 - DNA, 325 bp, Homo sapiens; identical to SEQ ID NO: 350119
  chr5:87979367-87979692
  hyper

SEQ ID NO: 370796 - DNA, 157 bp, Homo sapiens; identical to SEQ ID NO: 283123
  chr5:87979985-87980142
  hyper

SEQ ID NO: 370797 - DNA, 147 bp, Homo sapiens; identical to SEQ ID NO: 283124
  chr5:87980250-87980397
  hyper

SEQ ID NO: 370798 - DNA, 138 bp, Homo sapiens; identical to SEQ ID NO: 332428
  chr5:87982673-87982811
  hyper

SEQ ID NO: 370799 - DNA, 241 bp, Homo sapiens
  chr5:87983395-87983636
  hyper
tgctttaaggttatcagtcttataagcaccacgtgattagacaggaaaggtaacttgaaaacacaacctgattctgagcgaaatcattttgtcctgttggcatgaaaatgtagttacacctccaagttctgctcaggaacagacggctgcgtgtgggggctggtccctacccagatcagtacaggatcttcagctggcagacgagatccagcaaatggaattcacgaagaaactcatgtgc

SEQ ID NO: 370800 - DNA, 108 bp, Homo sapiens; identical to SEQ ID NO: 332430
  chr5:87984851-87984959
  hyper

SEQ ID NO: 370801 - DNA, 262 bp, Homo sapiens; identical to SEQ ID NO: 283129
  chr5:87986873-87987135
  hyper

SEQ ID NO: 370802 - DNA, 139 bp, Homo sapiens; identical to SEQ ID NO: 346715
  chr5:87987165-87987304
  hyper

SEQ ID NO: 370803 - DNA, 453 bp, Homo sapiens; identical to SEQ ID NO: 346716
  chr5:88178399-88178852
  hyper

SEQ ID NO: 370804 - DNA, 422 bp, Homo sapiens; identical to SEQ ID NO: 283136
  chr5:88179429-88179851
  hyper

SEQ ID NO: 370805 - DNA, 42 bp, Homo sapiens; identical to SEQ ID NO: 345186
  chr5:88180346-88180388
  hyper

SEQ ID NO: 370806 - DNA, 286 bp, Homo sapiens; identical to SEQ ID NO: 350128
  chr5:89854237-89854523
  hyper

SEQ ID NO: 370807 - DNA, 546 bp, Homo sapiens; identical to SEQ ID NO: 358188
  chr5:92943283-92943829
  hyper

SEQ ID NO: 370808 - DNA, 926 bp, Homo sapiens; identical to SEQ ID NO: 358189
  chr5:94619403-94620329
  hyper

SEQ ID NO: 370809 - DNA, 434 bp, Homo sapiens; identical to SEQ ID NO: 358190
  chr5:95767460-95767894
  hyper

SEQ ID NO: 370810 - DNA, 114 bp, Homo sapiens; identical to SEQ ID NO: 345187
  chr5:100236036-100236150
  hyper

SEQ ID NO: 370811 - DNA, 86 bp, Homo sapiens; identical to SEQ ID NO: 346720
  chr5:100238197-100238283
  hyper

SEQ ID NO: 370812 - DNA, 344 bp, Homo sapiens; identical to SEQ ID NO: 199962
  chr5:100239724-100240068
  hyper

SEQ ID NO: 370813 - DNA, 399 bp, Homo sapiens; identical to SEQ ID NO: 199964
  chr5:101631635-101632034
  hyper

SEQ ID NO: 370814 - DNA, 221 bp, Homo sapiens; identical to SEQ ID NO: 199965
  chr5:101632074-101632295
  hyper

SEQ ID NO: 370815 - DNA, 298 bp, Homo sapiens; identical to SEQ ID NO: 199969
  chr5:107005685-107005983
  hyper

SEQ ID NO: 370816 - DNA, 449 bp, Homo sapiens; identical to SEQ ID NO: 199970
  chr5:107006260-107006709
  hyper

SEQ ID NO: 370817 - DNA, 281 bp, Homo sapiens; identical to SEQ ID NO: 350137
  chr5:109024730-109025011
  hyper

SEQ ID NO: 370818 - DNA, 738 bp, Homo sapiens; identical to SEQ ID NO: 332448
  chr5:110847638-110848376
  hyper

SEQ ID NO: 370819 - DNA, 469 bp, Homo sapiens; identical to SEQ ID NO: 199981
  chr5:112629778-112630247
  hyper

SEQ ID NO: 370820 - DNA, 113 bp, Homo sapiens; identical to SEQ ID NO: 345190
  chr5:112630698-112630811
  hyper

SEQ ID NO: 370821 - DNA, 252 bp, Homo sapiens; identical to SEQ ID NO: 283209
  chr5:112823814-112824066
  hyper

SEQ ID NO: 370822 - DNA, 218 bp, Homo sapiens; identical to SEQ ID NO: 199985
  chr5:113696733-113696951
  hyper

SEQ ID NO: 370823 - DNA, 97 bp, Homo sapiens; identical to SEQ ID NO: 199986
  chr5:113698167-113698264
  hyper

SEQ ID NO: 370824 - DNA, 56 bp, Homo sapiens; identical to SEQ ID NO: 199987
  chr5:113698330-113698386
  hyper

SEQ ID NO: 370825 - DNA, 213 bp, Homo sapiens; identical to SEQ ID NO: 350143
  chr5:114506308-114506521
  hyper

SEQ ID NO: 370826 - DNA, 57 bp, Homo sapiens; identical to SEQ ID NO: 199990
  chr5:114515671-114515728
  hyper

SEQ ID NO: 370827 - DNA, 131 bp, Homo sapiens; identical to SEQ ID NO: 199991
  chr5:114515769-114515900
  hyper

SEQ ID NO: 370828 - DNA, 44 bp, Homo sapiens; identical to SEQ ID NO: 346728
  chr5:114516274-114516318
  hyper

SEQ ID NO: 370829 - DNA, 51 bp, Homo sapiens; identical to SEQ ID NO: 350147
  chr5:115911175-115911226
  hyper

SEQ ID NO: 370830 - DNA, 105 bp, Homo sapiens; identical to SEQ ID NO: 346729
  chr5:115911590-115911695
  hyper

SEQ ID NO: 370831 - DNA, 89 bp, Homo sapiens
  chr5:118788280-118788369
  hyper
cgctgaggttcgacgggcgggtggtactggtcaccggcgcgggggcaggtgagcatgcgaaggttggaggccgcgccccttgctgaggc

SEQ ID NO: 370832 - DNA, 35 bp, Homo sapiens; identical to SEQ ID NO: 346730
  chr5:119799821-119799856
  hyper

SEQ ID NO: 370833 - DNA, 112 bp, Homo sapiens; identical to SEQ ID NO: 358213
  chr5:122423762-122423874
  hyper

SEQ ID NO: 370834 - DNA, 331 bp, Homo sapiens; identical to SEQ ID NO: 283251
  chr5:122424105-122424436
  hyper

SEQ ID NO: 370835 - DNA, 287 bp, Homo sapiens; identical to SEQ ID NO: 358215
  chr5:122434876-122435163
  hyper

SEQ ID NO: 370836 - DNA, 102 bp, Homo sapiens; identical to SEQ ID NO: 200008
  chr5:122435201-122435303
  hyper

SEQ ID NO: 370837 - DNA, 122 bp, Homo sapiens; identical to SEQ ID NO: 283256
  chr5:122435413-122435535
  hyper

SEQ ID NO: 370838 - DNA, 94 bp, Homo sapiens; identical to SEQ ID NO: 346731
  chr5:124082318-124082412
  hyper

SEQ ID NO: 370839 - DNA, 924 bp, Homo sapiens; identical to SEQ ID NO: 283263
  chr5:124082442-124083366
  hyper

SEQ ID NO: 370840 - DNA, 37 bp, Homo sapiens; identical to SEQ ID NO: 346733
  chr5:124084158-124084195
  hyper

SEQ ID NO: 370841 - DNA, 60 bp, Homo sapiens; identical to SEQ ID NO: 346734
  chr5:124084302-124084362
  hyper

SEQ ID NO: 370842 - DNA, 111 bp, Homo sapiens; identical to SEQ ID NO: 345192
  chr5:124084660-124084771
  hyper

SEQ ID NO: 370843 - DNA, 64 bp, Homo sapiens; identical to SEQ ID NO: 345193
  chr5:124084977-124085041
  hyper

SEQ ID NO: 370844 - DNA, 94 bp, Homo sapiens; identical to SEQ ID NO: 350156
  chr5:125930492-125930586
  hyper

SEQ ID NO: 370845 - DNA, 170 bp, Homo sapiens; identical to SEQ ID NO: 350157
  chr5:125931062-125931232
  hyper

SEQ ID NO: 370846 - DNA, 44 bp, Homo sapiens; identical to SEQ ID NO: 358226
  chr5:126626239-126626283
  hyper

SEQ ID NO: 370847 - DNA, 63 bp, Homo sapiens; identical to SEQ ID NO: 358227
  chr5:126626738-126626801
  hyper

SEQ ID NO: 370848 - DNA, 82 bp, Homo sapiens; identical to SEQ ID NO: 350158
  chr5:127537002-127537084
  hyper

SEQ ID NO: 370849 - DNA, 65 bp, Homo sapiens; identical to SEQ ID NO: 350159
  chr5:127537230-127537295
  hyper

SEQ ID NO: 370850 - DNA, 167 bp, Homo sapiens
  chr5:129239570-129239737
  hyper
cgcggagtggcagcggtaagaacaacgtggaaaggacggaaaacgcgaagagtggcgccctggcggacctggggcggggcagagtggtaagggtcacgccaggacgtacccggctgtgggccgggggaggagagcacggtgggacagcaacgaacttgctgggggct

SEQ ID NO: 370851 - DNA, 242 bp, Homo sapiens; identical to SEQ ID NO: 283276
  chr5:129239782-129240024
  hyper

SEQ ID NO: 370852 - DNA, 34 bp, Homo sapiens; identical to SEQ ID NO: 200020
  chr5:129240901-129240935
  hyper

SEQ ID NO: 370853 - DNA, 143 bp, Homo sapiens; identical to SEQ ID NO: 200021
  chr5:129240962-129241105
  hyper

SEQ ID NO: 370854 - DNA, 273 bp, Homo sapiens; identical to SEQ ID NO: 200022
  chr5:129241140-129241413
  hyper

SEQ ID NO: 370855 - DNA, 241 bp, Homo sapiens; identical to SEQ ID NO: 358234
  chr5:131831522-131831763
  hyper

SEQ ID NO: 370856 - DNA, 362 bp, Homo sapiens
  chr5:131892939-131893301
  hyper
cgtgcacgccttgcttcggcctcagttaagcctttgtgggctccaggtccctggtgagattagaaacgtttgcaaacatgtcccggatcgaaaagatgagcattctgggcgtgcggagttttggaatagaggacaaagataagcaaattatcactttcttcagcccccttacaattttggttggacccaatggggcgggaaagacggtaagtcttcagtagccgccttcagtttacaggtcgctacatctttcggagaataaaatgggaagttgagaactctccttaggagcagaagcgtccctagggctccacaggtgtaggcccttaaagtgccttagggtgtggcctgcaggctacagc

SEQ ID NO: 370857 - DNA, 187 bp, Homo sapiens; identical to SEQ ID NO: 358235
  chr5:132072695-132072882
  hyper

SEQ ID NO: 370858 - DNA, 217 bp, Homo sapiens; identical to SEQ ID NO: 350164
  chr5:132082800-132083017
  hyper

SEQ ID NO: 370859 - DNA, 805 bp, Homo sapiens; identical to SEQ ID NO: 332483
  chr5:132386973-132387778
  hyper

SEQ ID NO: 370860 - DNA, 550 bp, Homo sapiens
  chr5:133450698-133451248
  hyper
cgacaagagccgcgacagcgccgccggtcccgagcgcgacctggccgagctcaagtcgtcgctcgtgaacgagtccgagggcgcggccggcggcgcagggatcccgggggtcccgggggccggcgccggggcccgcggcgaggccgaggtgagcccccgccggcgccggctcctcccccgcggtcgccgcgccgcgccgccccagttgcgcgcggccctcggggtctccagcgcgcagagcgtccctgccccggcgtcggccccgacccccgcggtcccaccgcccctcactcccctccggttctccctccaggctctcgggcgggaacacgctgcgcagagactcttcccggacaaacttccagagcccctggaggacggtgagtttctgcccggcccggcttcccttcgtcgcgctcaggccctggcctcggtgggacggggacgccaaggaccgcggggagccgggtgcctcccccaccgcagctcaggaggcggcagaacccaggggtggagagtggggggcgggcttcccgggcgccgccgggtc

SEQ ID NO: 370861 - DNA, 873 bp, Homo sapiens; identical to SEQ ID NO: 332486
  chr5:133862738-133863611
  hyper

SEQ ID NO: 370862 - DNA, 94 bp, Homo sapiens; identical to SEQ ID NO: 332487
  chr5:134240165-134240259
  hyper

SEQ ID NO: 370863 - DNA, 36 bp, Homo sapiens; identical to SEQ ID NO: 350167
  chr5:134364991-134365027
  hyper

SEQ ID NO: 370864 - DNA, 169 bp, Homo sapiens; identical to SEQ ID NO: 200034
  chr5:134365094-134365263
  hyper

SEQ ID NO: 370865 - DNA, 185 bp, Homo sapiens; identical to SEQ ID NO: 346740
  chr5:134366533-134366718
  hyper

SEQ ID NO: 370866 - DNA, 124 bp, Homo sapiens; identical to SEQ ID NO: 200036
  chr5:134367305-134367429
  hyper

SEQ ID NO: 370867 - DNA, 172 bp, Homo sapiens; identical to SEQ ID NO: 358243
  chr5:134370281-134370453
  hyper

SEQ ID NO: 370868 - DNA, 38 bp, Homo sapiens; identical to SEQ ID NO: 358244
  chr5:134370508-134370546
  hyper

SEQ ID NO: 370869 - DNA, 62 bp, Homo sapiens; identical to SEQ ID NO: 358245
  chr5:134374385-134374447
  hyper

SEQ ID NO: 370870 - DNA, 84 bp, Homo sapiens; identical to SEQ ID NO: 350171
  chr5:134375851-134375935
  hyper

SEQ ID NO: 370871 - DNA, 219 bp, Homo sapiens; identical to SEQ ID NO: 350172
  chr5:134527185-134527404
  hyper

SEQ ID NO: 370872 - DNA, 70 bp, Homo sapiens; identical to SEQ ID NO: 346742
  chr5:134802366-134802436
  hyper

SEQ ID NO: 370873 - DNA, 226 bp, Homo sapiens; identical to SEQ ID NO: 346743
  chr5:134824599-134824825
  hyper

SEQ ID NO: 370874 - DNA, 45 bp, Homo sapiens; identical to SEQ ID NO: 350175
  chr5:134827217-134827262
  hyper

SEQ ID NO: 370875 - DNA, 175 bp, Homo sapiens
  chr5:134870248-134870423
  hyper
cggctcaaaccgaattttcatgctcgtttttcttcattagagttctacaaattgtaaaattgacttttcacctcgtcttcaggggctgatctgtcccttttctaaatcacactgaagtggtggctggggtcagttctgagccagtcacaaaggaggttttgtggagttcagaaag

SEQ ID NO: 370876 - DNA, 89 bp, Homo sapiens; identical to SEQ ID NO: 358251
  chr5:134879182-134879271
  hyper

SEQ ID NO: 370877 - DNA, 73 bp, Homo sapiens; identical to SEQ ID NO: 345194
  chr5:134880614-134880687
  hyper

SEQ ID NO: 370878 - DNA, 341 bp, Homo sapiens
  chr5:135528891-135529232
  hyper
ggggcgggactggcggcggctgcccgggggagcggctgcgaaccaatgagggcaagagaggacgcggctgcgactgcccccagcccggcctcacatcactcagggacagagggacagagacagggacagagagagagagagaaagagagaaaagcacagggtcacaggaagactgacgggcaaagacacagttacagacctatgaacagagccacacgccaaacagggacaaaccgttgaggtaagcaaaccaactcagagacaaagctcagctgagcgtgcacacctgcgttcattatcctccttgacaggctccctccaggcatggcctggtttgttcc

SEQ ID NO: 370879 - DNA, 68 bp, Homo sapiens; identical to SEQ ID NO: 358253
  chr5:137474821-137474889
  hyper

SEQ ID NO: 370880 - DNA, 150 bp, Homo sapiens; identical to SEQ ID NO: 358254
  chr5:137474919-137475069
  hyper

SEQ ID NO: 370881 - DNA, 240 bp, Homo sapiens; identical to SEQ ID NO: 358255
  chr5:138923037-138923277
  hyper

SEQ ID NO: 370882 - DNA, 201 bp, Homo sapiens; identical to SEQ ID NO: 350177
  chr5:139047738-139047939
  hyper

SEQ ID NO: 370883 - DNA, 469 bp, Homo sapiens; identical to SEQ ID NO: 332510
  chr5:139088846-139089315
  hyper

SEQ ID NO: 370884 - DNA, 335 bp, Homo sapiens; identical to SEQ ID NO: 350178
  chr5:139135589-139135924
  hyper

SEQ ID NO: 370885 - DNA, 307 bp, Homo sapiens; identical to SEQ ID NO: 332512
  chr5:139175997-139176304
  hyper

SEQ ID NO: 370886 - DNA, 63 bp, Homo sapiens; identical to SEQ ID NO: 200064
  chr5:139227938-139228001
  hyper

SEQ ID NO: 370887 - DNA, 601 bp, Homo sapiens; identical to SEQ ID NO: 332514
  chr5:139487921-139488522
  hyper

SEQ ID NO: 370888 - DNA, 37 bp, Homo sapiens
  chr5:139525386-139525423
  hyper
cgtctctccccatgccttcaaaggcggcctgccttcc

SEQ ID NO: 370889 - DNA, 134 bp, Homo sapiens; identical to SEQ ID NO: 283372
  chr5:139525814-139525948
  hyper

SEQ ID NO: 370890 - DNA, 276 bp, Homo sapiens; identical to SEQ ID NO: 332516
  chr5:139554306-139554582
  hyper

SEQ ID NO: 370891 - DNA, 248 bp, Homo sapiens; identical to SEQ ID NO: 358262
  chr5:139742899-139743147
  hyper

SEQ ID NO: 370892 - DNA, 192 bp, Homo sapiens; identical to SEQ ID NO: 350181
  chr5:140011830-140012022
  hyper

SEQ ID NO: 370893 - DNA, 111 bp, Homo sapiens; identical to SEQ ID NO: 350182
  chr5:140012520-140012631
  hyper

SEQ ID NO: 370894 - DNA, 275 bp, Homo sapiens; identical to SEQ ID NO: 350183
  chr5:140346034-140346309
  hyper

SEQ ID NO: 370895 - DNA, 324 bp, Homo sapiens; identical to SEQ ID NO: 332521
  chr5:140419818-140420142
  hyper

SEQ ID NO: 370896 - DNA, 212 bp, Homo sapiens; identical to SEQ ID NO: 358266
  chr5:140855386-140855598
  hyper

SEQ ID NO: 370897 - DNA, 155 bp, Homo sapiens; identical to SEQ ID NO: 346746
  chr5:141931151-141931306
  hyper

SEQ ID NO: 370898 - DNA, 624 bp, Homo sapiens; identical to SEQ ID NO: 283411
  chr5:142781875-142782499
  hyper

SEQ ID NO: 370899 - DNA, 124 bp, Homo sapiens; identical to SEQ ID NO: 283412
  chr5:142782625-142782749
  hyper

SEQ ID NO: 370900 - DNA, 410 bp, Homo sapiens; identical to SEQ ID NO: 345197
  chr5:142782794-142783204
  hyper

SEQ ID NO: 370901 - DNA, 1069 bp, Homo sapiens; identical to SEQ ID NO: 350188
  chr5:142783606-142784675
  hyper

SEQ ID NO: 370902 - DNA, 32 bp, Homo sapiens; identical to SEQ ID NO: 345199
  chr5:142785272-142785304
  hyper

SEQ ID NO: 370903 - DNA, 438 bp, Homo sapiens
  chr5:145214425-145214863
  hyper
cggaaagctccacacgtcggtcatctgcaactccacggagctcacgagctgggattcccggaggctcttcctaaaaggaaagcctcttctttcagctggggcaggtgtgaacgtgatgccaagcacggccccttttcccgctccctgtaaagggagtcttcgaggaaatccctctcgacccacacatccctgaagcaaagcccgcagctggaaagagacactggcggtgccagcttccgcgtggatgaaggagaggagagaggggcaagcagcggaggcagcgcgggatacggaaggtggaagcggggcggtacctttcggagaaagctggcgaccacctgctcgaaggggtacttgtacacctggtgcacatccaccgagacccccatccccgcgcgccgcgggccccgcgcaccggccacgcctccgcgagctcag

SEQ ID NO: 370904 - DNA, 235 bp, Homo sapiens
  chr5:145215152-145215387
  hyper
tgcctgggagccatcacgccccgccccaggaaacctggaccttgggcttatgcgtttatggtatcaccgcctggagtcacagaataagccgtggttggcagcacgggaaaaaagtattaataaggaaggcctggtgtgacaaaggccagcattactcatgccaccaggcagctgcctctgaggcttgggtttgggcctcgtgtaaggtaaagattgcctcgggaataagaaccgc

SEQ ID NO: 370905 - DNA, 184 bp, Homo sapiens; identical to SEQ ID NO: 358273
  chr5:148033538-148033722
  hyper

SEQ ID NO: 370906 - DNA, 110 bp, Homo sapiens; identical to SEQ ID NO: 350190
  chr5:148206075-148206185
  hyper

SEQ ID NO: 370907 - DNA, 36 bp, Homo sapiens; identical to SEQ ID NO: 350191
  chr5:148206432-148206468
  hyper

SEQ ID NO: 370908 - DNA, 126 bp, Homo sapiens; identical to SEQ ID NO: 346752
  chr5:148520933-148521059
  hyper

SEQ ID NO: 370909 - DNA, 45 bp, Homo sapiens; identical to SEQ ID NO: 346753
  chr5:148521331-148521376
  hyper

SEQ ID NO: 370910 - DNA, 252 bp, Homo sapiens; identical to SEQ ID NO: 346754
  chr5:148650971-148651223
  hyper

SEQ ID NO: 370911 - DNA, 87 bp, Homo sapiens; identical to SEQ ID NO: 332540
  chr5:148724812-148724899
  hyper

SEQ ID NO: 370912 - DNA, 299 bp, Homo sapiens; identical to SEQ ID NO: 332541
  chr5:149381214-149381513
  hyper

SEQ ID NO: 370913 - DNA, 103 bp, Homo sapiens; identical to SEQ ID NO: 358280
  chr5:149569886-149569989
  hyper

SEQ ID NO: 370914 - DNA, 182 bp, Homo sapiens
  chr5:149681827-149682009
  hyper
cgccagcctccccgggcccgtcggccacgaagctcggcttggcccagtcccaggacaggtagccgaagctgagcaggctgaccagggagaagccagtgagggtgtgcatcgccaagccggcccgcgcgtcccggcgcgccgggctcctggggcctcaccacctcgcgcgcccagggcgcacc

SEQ ID NO: 370915 - DNA, 101 bp, Homo sapiens; identical to SEQ ID NO: 283446
  chr5:149682691-149682792
  hyper

SEQ ID NO: 370916 - DNA, 434 bp, Homo sapiens; identical to SEQ ID NO: 332544
  chr5:150004280-150004714
  hyper

SEQ ID NO: 370917 - DNA, 316 bp, Homo sapiens; identical to SEQ ID NO: 358283
  chr5:150536746-150537062
  hyper

SEQ ID NO: 370918 - DNA, 494 bp, Homo sapiens; identical to SEQ ID NO: 358284
  chr5:150603058-150603552
  hyper

SEQ ID NO: 370919 - DNA, 163 bp, Homo sapiens; identical to SEQ ID NO: 358285
  chr5:150603589-150603752
  hyper

SEQ ID NO: 370920 - DNA, 98 bp, Homo sapiens; identical to SEQ ID NO: 350197
  chr5:151066500-151066598
  hyper

SEQ ID NO: 370921 - DNA, 293 bp, Homo sapiens; identical to SEQ ID NO: 200114
  chr5:151150270-151150563
  hyper

SEQ ID NO: 370922 - DNA, 229 bp, Homo sapiens; identical to SEQ ID NO: 346758
  chr5:151150681-151150910
  hyper

SEQ ID NO: 370923 - DNA, 173 bp, Homo sapiens; identical to SEQ ID NO: 350200
  chr5:152870319-152870492
  hyper

SEQ ID NO: 370924 - DNA, 226 bp, Homo sapiens; identical to SEQ ID NO: 358290
  chr5:153854949-153855175
  hyper

SEQ ID NO: 370925 - DNA, 194 bp, Homo sapiens
  chr5:153859808-153860002
  hyper
attacgctgtggagagaaggacctcaacacacaatcctcaacacacgcccagtctttgtcctaatccaagtacaatctgcaacagtgcctctcagagcggcacactaggccctcagattatacattcacaggtacatgcacaagggctcacaaaaccttgccgccgtacacaaaagcccgtatcttcataagac

SEQ ID NO: 370926 - DNA, 94 bp, Homo sapiens; identical to SEQ ID NO: 345201
  chr5:153862577-153862671
  hyper

SEQ ID NO: 370927 - DNA, 159 bp, Homo sapiens; identical to SEQ ID NO: 350202
  chr5:153900641-153900800
  hyper

SEQ ID NO: 370928 - DNA, 176 bp, Homo sapiens; identical to SEQ ID NO: 283478
  chr5:155107908-155108084
  hyper

SEQ ID NO: 370929 - DNA, 255 bp, Homo sapiens; identical to SEQ ID NO: 200123
  chr5:155108849-155109104
  hyper

SEQ ID NO: 370930 - DNA, 240 bp, Homo sapiens; identical to SEQ ID NO: 200124
  chr5:157001858-157002098
  hyper

SEQ ID NO: 370931 - DNA, 243 bp, Homo sapiens; identical to SEQ ID NO: 200125
  chr5:157002204-157002447
  hyper

SEQ ID NO: 370932 - DNA, 290 bp, Homo sapiens; identical to SEQ ID NO: 346761
  chr5:157002817-157003107
  hyper

SEQ ID NO: 370933 - DNA, 239 bp, Homo sapiens; identical to SEQ ID NO: 283484
  chr5:157098032-157098271
  hyper

SEQ ID NO: 370934 - DNA, 205 bp, Homo sapiens; identical to SEQ ID NO: 358298
  chr5:157170412-157170617
  hyper

SEQ ID NO: 370935 - DNA, 1199 bp, Homo sapiens; identical to SEQ ID NO: 350208
  chr5:158634816-158636015
  hyper

SEQ ID NO: 370936 - DNA, 172 bp, Homo sapiens; identical to SEQ ID NO: 350209
  chr5:159343215-159343387
  hyper

SEQ ID NO: 370937 - DNA, 152 bp, Homo sapiens; identical to SEQ ID NO: 350210
  chr5:159343648-159343800
  hyper

SEQ ID NO: 370938 - DNA, 42 bp, Homo sapiens; identical to SEQ ID NO: 350211
  chr5:159399024-159399066
  hyper

SEQ ID NO: 370939 - DNA, 231 bp, Homo sapiens; identical to SEQ ID NO: 358303
  chr5:159414348-159414579
  hyper

SEQ ID NO: 370940 - DNA, 335 bp, Homo sapiens; identical to SEQ ID NO: 350212
  chr5:160973804-160974139
  hyper

SEQ ID NO: 370941 - DNA, 72 bp, Homo sapiens; identical to SEQ ID NO: 283509
  chr5:160974540-160974612
  hyper

SEQ ID NO: 370942 - DNA, 210 bp, Homo sapiens; identical to SEQ ID NO: 283510
  chr5:160974861-160975071
  hyper

SEQ ID NO: 370943 - DNA, 96 bp, Homo sapiens; identical to SEQ ID NO: 358307
  chr5:168727259-168727355
  hyper

SEQ ID NO: 370944 - DNA, 226 bp, Homo sapiens; identical to SEQ ID NO: 283530
  chr5:169930945-169931171
  hyper

SEQ ID NO: 370945 - DNA, 243 bp, Homo sapiens; identical to SEQ ID NO: 283532
  chr5:170171140-170171383
  hyper

SEQ ID NO: 370946 - DNA, 388 bp, Homo sapiens; identical to SEQ ID NO: 350214
  chr5:170171413-170171801
  hyper

SEQ ID NO: 370947 - DNA, 53 bp, Homo sapiens; identical to SEQ ID NO: 200150
  chr5:170737718-170737771
  hyper

SEQ ID NO: 370948 - DNA, 772 bp, Homo sapiens; identical to SEQ ID NO: 332579
  chr5:172198713-172199485
  hyper

SEQ ID NO: 370949 - DNA, 251 bp, Homo sapiens; identical to SEQ ID NO: 332580
  chr5:172234246-172234497
  hyper

SEQ ID NO: 370950 - DNA, 152 bp, Homo sapiens; identical to SEQ ID NO: 358311
  chr5:172656561-172656713
  hyper

SEQ ID NO: 370951 - DNA, 181 bp, Homo sapiens; identical to SEQ ID NO: 350215
  chr5:172660254-172660435
  hyper

SEQ ID NO: 370952 - DNA, 342 bp, Homo sapiens; identical to SEQ ID NO: 283559
  chr5:172663868-172664210
  hyper

SEQ ID NO: 370953 - DNA, 142 bp, Homo sapiens; identical to SEQ ID NO: 358314
  chr5:172665306-172665448
  hyper

SEQ ID NO: 370954 - DNA, 297 bp, Homo sapiens; identical to SEQ ID NO: 358315
  chr5:172665949-172666246
  hyper

SEQ ID NO: 370955 - DNA, 162 bp, Homo sapiens; identical to SEQ ID NO: 358316
  chr5:172756215-172756377
  hyper

SEQ ID NO: 370956 - DNA, 475 bp, Homo sapiens; identical to SEQ ID NO: 358317
  chr5:174119512-174119987
  hyper

SEQ ID NO: 370957 - DNA, 233 bp, Homo sapiens; identical to SEQ ID NO: 200172
  chr5:174120134-174120367
  hyper

SEQ ID NO: 370958 - DNA, 175 bp, Homo sapiens; identical to SEQ ID NO: 350219
  chr5:174120406-174120581
  hyper

SEQ ID NO: 370959 - DNA, 305 bp, Homo sapiens; identical to SEQ ID NO: 358320
  chr5:174148214-174148519
  hyper

SEQ ID NO: 370960 - DNA, 414 bp, Homo sapiens; identical to SEQ ID NO: 350220
  chr5:174150711-174151125
  hyper

SEQ ID NO: 370961 - DNA, 246 bp, Homo sapiens; identical to SEQ ID NO: 283578
  chr5:174151197-174151443
  hyper

SEQ ID NO: 370962 - DNA, 999 bp, Homo sapiens; identical to SEQ ID NO: 358323
  chr5:174151769-174152768
  hyper

SEQ ID NO: 370963 - DNA, 92 bp, Homo sapiens; identical to SEQ ID NO: 200177
  chr5:174162402-174162494
  hyper

SEQ ID NO: 370964 - DNA, 87 bp, Homo sapiens; identical to SEQ ID NO: 350223
  chr5:174162904-174162991
  hyper

SEQ ID NO: 370965 - DNA, 65 bp, Homo sapiens; identical to SEQ ID NO: 350224
  chr5:174178103-174178168
  hyper

SEQ ID NO: 370966 - DNA, 383 bp, Homo sapiens; identical to SEQ ID NO: 283585
  chr5:174178248-174178631
  hyper

SEQ ID NO: 370967 - DNA, 78 bp, Homo sapiens; identical to SEQ ID NO: 358328
  chr5:174220739-174220817
  hyper

SEQ ID NO: 370968 - DNA, 46 bp, Homo sapiens; identical to SEQ ID NO: 358329
  chr5:174221001-174221047
  hyper

SEQ ID NO: 370969 - DNA, 34 bp, Homo sapiens
  chr5:175084709-175084743
  hyper
cggttgcccggtcaagggcgggctcacaatctgc

SEQ ID NO: 370970 - DNA, 75 bp, Homo sapiens; identical to SEQ ID NO: 200181
  chr5:175084744-175084819
  hyper

SEQ ID NO: 370971 - DNA, 241 bp, Homo sapiens; identical to SEQ ID NO: 332600
  chr5:175969793-175970034
  hyper

SEQ ID NO: 370972 - DNA, 59 bp, Homo sapiens; identical to SEQ ID NO: 358331
  chr5:176038454-176038513
  hyper

SEQ ID NO: 370973 - DNA, 209 bp, Homo sapiens; identical to SEQ ID NO: 200186
  chr5:176057164-176057373
  hyper

SEQ ID NO: 370974 - DNA, 159 bp, Homo sapiens; identical to SEQ ID NO: 332604
  chr5:176239899-176240058
  hyper

SEQ ID NO: 370975 - DNA, 248 bp, Homo sapiens; identical to SEQ ID NO: 283604
  chr5:176560001-176560249
  hyper

SEQ ID NO: 370976 - DNA, 290 bp, Homo sapiens; identical to SEQ ID NO: 345203
  chr5:176560318-176560608
  hyper

SEQ ID NO: 370977 - DNA, 93 bp, Homo sapiens; identical to SEQ ID NO: 358336
  chr5:177543589-177543682
  hyper

SEQ ID NO: 370978 - DNA, 116 bp, Homo sapiens; identical to SEQ ID NO: 350228
  chr5:178016455-178016571
  hyper

SEQ ID NO: 370979 - DNA, 184 bp, Homo sapiens; identical to SEQ ID NO: 358338
  chr5:178594471-178594655
  hyper

SEQ ID NO: 370980 - DNA, 288 bp, Homo sapiens; identical to SEQ ID NO: 350229
  chr5:178770455-178770743
  hyper

SEQ ID NO: 370981 - DNA, 66 bp, Homo sapiens; identical to SEQ ID NO: 358340
  chr5:179244342-179244408
  hyper

SEQ ID NO: 370982 - DNA, 727 bp, Homo sapiens; identical to SEQ ID NO: 332613
  chr5:179245848-179246575
  hyper

SEQ ID NO: 370983 - DNA, 243 bp, Homo sapiens; identical to SEQ ID NO: 350231
  chr5:179498011-179498254
  hyper

SEQ ID NO: 370984 - DNA, 504 bp, Homo sapiens; identical to SEQ ID NO: 200203
  chr5:179498363-179498867
  hyper

SEQ ID NO: 370985 - DNA, 329 bp, Homo sapiens; identical to SEQ ID NO: 200204
  chr5:179498897-179499226
  hyper

SEQ ID NO: 370986 - DNA, 81 bp, Homo sapiens; identical to SEQ ID NO: 350234
  chr5:179499256-179499337
  hyper

SEQ ID NO: 370987 - DNA, 196 bp, Homo sapiens; identical to SEQ ID NO: 358346
  chr5:179779452-179779648
  hyper

SEQ ID NO: 370988 - DNA, 127 bp, Homo sapiens; identical to SEQ ID NO: 350235
  chr5:180018679-180018806
  hyper

SEQ ID NO: 370989 - DNA, 365 bp, Homo sapiens; identical to SEQ ID NO: 358348
  chr5:180046947-180047312
  hyper

SEQ ID NO: 370990 - DNA, 561 bp, Homo sapiens; identical to SEQ ID NO: 332620
  chr5:180257880-180258441
  hyper

SEQ ID NO: 370991 - DNA, 457 bp, Homo sapiens; identical to SEQ ID NO: 332621
  chr5:180258503-180258960
  hyper

SEQ ID NO: 370992 - DNA, 594 bp, Homo sapiens; identical to SEQ ID NO: 350238
  chr5:180479644-180480238
  hyper

SEQ ID NO: 370993 - DNA, 829 bp, Homo sapiens; identical to SEQ ID NO: 346765
  chr5:180480302-180481131
  hyper

SEQ ID NO: 370994 - DNA, 607 bp, Homo sapiens; identical to SEQ ID NO: 358353
  chr5:180630981-180631588
  hyper

SEQ ID NO: 370995 - DNA, 63 bp, Homo sapiens; identical to SEQ ID NO: 358354
  chr5:180632796-180632859
  hyper

SEQ ID NO: 370996 - DNA, 244 bp, Homo sapiens; identical to SEQ ID NO: 358355
  chr5:180633225-180633469
  hyper

SEQ ID NO: 370997 - DNA, 603 bp, Homo sapiens
  chr5:180644001-180644604
  hyper
cgacctagggtagtaactggaactgcaggtatgcaccaccacgctcggctaattaaaaaaatatatatattttttcctagagatggggcggggggcgggggcgggggcggaggggacagtctcactatgttgcctaggctggtctcgaactcttaagcccggtttccgagtcgctggggctacagtagcgcgctgacacgcccgacccttgctttgccacttagatgttgcatttattcgactttcacgtcgggcagaggtgctgggaaagaggcggctggcccctgcgtaagtgtgcgggtgcggtgtgagaaagctggaagcctgttttctaggcggggaagcagcctgcgctgccggggccgcatcatggcacgtgggtttccccgggcttactctcctgccagtagcgctgtcctagggatcccgcccacccctccggcttcttctctgaagcctttgcagcattttccctgagattgctgaagaggcccctggggatcgggctcccaactcacccgccgcgtcccacggcccgaagccgacgagctgcaagtgaggatgggtgcagagggaggccgacggtcacgccttggagaggct

SEQ ID NO: 370998 - DNA, 48 bp, Homo sapiens
  chr5:180644634-180644682
  hyper
ctgcgaacccaaaagccgtgtcagtgctgcaggcccgcccgaagtggc

SEQ ID NO: 370999 - DNA, 60 bp, Homo sapiens; identical to SEQ ID NO: 345204
  chr6:391113-391173
  hyper

SEQ ID NO: 371000 - DNA, 55 bp, Homo sapiens; identical to SEQ ID NO: 346767
  chr6:393764-393819
  hyper

SEQ ID NO: 371001 - DNA, 393 bp, Homo sapiens; identical to SEQ ID NO: 346768
  chr6:710660-711053
  hyper

SEQ ID NO: 371002 - DNA, 141 bp, Homo sapiens; identical to SEQ ID NO: 346769
  chr6:711310-711451
  hyper

SEQ ID NO: 371003 - DNA, 274 bp, Homo sapiens; identical to SEQ ID NO: 350244
  chr6:1311068-1311342
  hyper

SEQ ID NO: 371004 - DNA, 428 bp, Homo sapiens; identical to SEQ ID NO: 200222
  chr6:1311343-1311771
  hyper

SEQ ID NO: 371005 - DNA, 223 bp, Homo sapiens; identical to SEQ ID NO: 200223
  chr6:1312096-1312319
  hyper

SEQ ID NO: 371006 - DNA, 46 bp, Homo sapiens; identical to SEQ ID NO: 200224
  chr6:1312708-1312754
  hyper

SEQ ID NO: 371007 - DNA, 483 bp, Homo sapiens; identical to SEQ ID NO: 200225
  chr6:1312784-1313267
  hyper

SEQ ID NO: 371008 - DNA, 602 bp, Homo sapiens; identical to SEQ ID NO: 200226
  chr6:1313302-1313904
  hyper

SEQ ID NO: 371009 - DNA, 85 bp, Homo sapiens; identical to SEQ ID NO: 350250
  chr6:1381781-1381866
  hyper

SEQ ID NO: 371010 - DNA, 61 bp, Homo sapiens; identical to SEQ ID NO: 350251
  chr6:1382651-1382712
  hyper

SEQ ID NO: 371011 - DNA, 65 bp, Homo sapiens; identical to SEQ ID NO: 350252
  chr6:1524429-1524494
  hyper

SEQ ID NO: 371012 - DNA, 165 bp, Homo sapiens; identical to SEQ ID NO: 200236
  chr6:1624812-1624977
  hyper

SEQ ID NO: 371013 - DNA, 51 bp, Homo sapiens; identical to SEQ ID NO: 200237
  chr6:1625068-1625119
  hyper

SEQ ID NO: 371014 - DNA, 123 bp, Homo sapiens; identical to SEQ ID NO: 345205
  chr6:2841503-2841626
  hyper

SEQ ID NO: 371015 - DNA, 732 bp, Homo sapiens; identical to SEQ ID NO: 345206
  chr6:2841627-2842359
  hyper

SEQ ID NO: 371016 - DNA, 156 bp, Homo sapiens; identical to SEQ ID NO: 200240
  chr6:2903557-2903713
  hyper

SEQ ID NO: 371017 - DNA, 65 bp, Homo sapiens
  chr6:3228121-3228186
  hyper
cgtgcgcattgtctggggctgtggtgggggtctgggtatggggatatgggggaacagtgaagaaa

SEQ ID NO: 371018 - DNA, 241 bp, Homo sapiens; identical to SEQ ID NO: 200242
  chr6:3228680-3228921
  hyper

SEQ ID NO: 371019 - DNA, 559 bp, Homo sapiens; identical to SEQ ID NO: 358374
  chr6:3229632-3230191
  hyper

SEQ ID NO: 371020 - DNA, 72 bp, Homo sapiens; identical to SEQ ID NO: 200244
  chr6:3231938-3232010
  hyper

SEQ ID NO: 371021 - DNA, 70 bp, Homo sapiens; identical to SEQ ID NO: 350259
  chr6:3232260-3232330
  hyper

SEQ ID NO: 371022 - DNA, 684 bp, Homo sapiens; identical to SEQ ID NO: 332639
  chr6:3457545-3458229
  hyper

SEQ ID NO: 371023 - DNA, 699 bp, Homo sapiens; identical to SEQ ID NO: 332640
  chr6:3750702-3751401
  hyper

SEQ ID NO: 371024 - DNA, 478 bp, Homo sapiens; identical to SEQ ID NO: 283717
  chr6:4135305-4135783
  hyper

SEQ ID NO: 371025 - DNA, 95 bp, Homo sapiens; identical to SEQ ID NO: 200248
  chr6:4775543-4775638
  hyper

SEQ ID NO: 371026 - DNA, 358 bp, Homo sapiens; identical to SEQ ID NO: 200249
  chr6:4775639-4775997
  hyper

SEQ ID NO: 371027 - DNA, 76 bp, Homo sapiens; identical to SEQ ID NO: 358382
  chr6:4776187-4776263
  hyper

SEQ ID NO: 371028 - DNA, 465 bp, Homo sapiens; identical to SEQ ID NO: 332643
  chr6:4948996-4949461
  hyper

SEQ ID NO: 371029 - DNA, 229 bp, Homo sapiens; identical to SEQ ID NO: 346774
  chr6:5084683-5084912
  hyper

SEQ ID NO: 371030 - DNA, 695 bp, Homo sapiens; identical to SEQ ID NO: 283724
  chr6:5084942-5085637
  hyper

SEQ ID NO: 371031 - DNA, 130 bp, Homo sapiens
  chr6:5851329-5851459
  hyper
cgggggacattcctctgctgaccccaaagttcagcaggtgcgggagagggaggggcggactcttctgtctgcacagggcttggggaggcatctcctcctcggggctcgcagacagggcttctcgtgccaa

SEQ ID NO: 371032 - DNA, 76 bp, Homo sapiens
  chr6:5851836-5851912
  hyper
gagcgagcctgcctccagggcagcctcaccgcctggatcctgggcaggagacctcccaggtaataaccgtgatcac

SEQ ID NO: 371033 - DNA, 115 bp, Homo sapiens; identical to SEQ ID NO: 200254
  chr6:5997274-5997389
  hyper

SEQ ID NO: 371034 - DNA, 112 bp, Homo sapiens; identical to SEQ ID NO: 200255
  chr6:5997401-5997513
  hyper

SEQ ID NO: 371035 - DNA, 162 bp, Homo sapiens; identical to SEQ ID NO: 358388
  chr6:5997899-5998061
  hyper

SEQ ID NO: 371036 - DNA, 80 bp, Homo sapiens; identical to SEQ ID NO: 350268
  chr6:6009552-6009632
  hyper

SEQ ID NO: 371037 - DNA, 119 bp, Homo sapiens; identical to SEQ ID NO: 350269
  chr6:6546401-6546520
  hyper

SEQ ID NO: 371038 - DNA, 90 bp, Homo sapiens; identical to SEQ ID NO: 350270
  chr6:6547222-6547312
  hyper

SEQ ID NO: 371039 - DNA, 563 bp, Homo sapiens
  chr6:7542700-7543263
  hyper
cgtaatcaaagtaaaagaggaaaggagcggggccccggtcctgtctggtggccgagtggtgctcggggctccgcagtctctaccggctcacccccaatccccagtaaccccgagaccacgactgcaacgactcctggactcctcggccacccaaggacgtttgtatcaaggctgcgcgtcccggcggcgcggggtcctgtcccgaggaggcgcttcggcttcccctgtccgggaaacgaaacttccccgccggggcggctgccgggcccgggtctcgaagttcggccgggacgtgcctgttaccttcggtcgtccgcgccgcagcccccgcgggcgagcgcacctggggccctgcctctgagccttttgtttcctcctttttaaaaacaccggatgaaagaccccagtgtgccttggatcgcagagcgccggccgcatgtctgctttgatccagaatgtgtgggcaggggagtgggggggtgggagaggacgacgctgggggcccgccctggcctaggcgccccgggaagaccccccggtgagagggtcagcttctccggatc

SEQ ID NO: 371040 - DNA, 107 bp, Homo sapiens
  chr6:7543350-7543457
  hyper
agatgcccacgtgagccgtgcgcgttttgcagcccgccccacctccccgccccctgctagttgttcccacgtcgggcttttgggaaagaggccctgagcgccgggac

SEQ ID NO: 371041 - DNA, 189 bp, Homo sapiens; identical to SEQ ID NO: 350271
  chr6:7726066-7726255
  hyper

SEQ ID NO: 371042 - DNA, 143 bp, Homo sapiens; identical to SEQ ID NO: 350272
  chr6:10383584-10383727
  hyper

SEQ ID NO: 371043 - DNA, 85 bp, Homo sapiens; identical to SEQ ID NO: 350273
  chr6:10384074-10384159
  hyper

SEQ ID NO: 371044 - DNA, 148 bp, Homo sapiens; identical to SEQ ID NO: 358395
  chr6:10392129-10392277
  hyper

SEQ ID NO: 371045 - DNA, 179 bp, Homo sapiens; identical to SEQ ID NO: 358396
  chr6:10409954-10410133
  hyper

SEQ ID NO: 371046 - DNA, 202 bp, Homo sapiens; identical to SEQ ID NO: 200266
  chr6:10410242-10410444
  hyper

SEQ ID NO: 371047 - DNA, 305 bp, Homo sapiens; identical to SEQ ID NO: 200267
  chr6:10410948-10411253
  hyper

SEQ ID NO: 371048 - DNA, 854 bp, Homo sapiens
  chr6:10412036-10412890
  hyper
cttcagctggtcgaacccacggtctctatcctgccgcgactggttatgattcaaagttctttaaaaatgaaaaaccccaaaaaaggaaaaaggaaaaagtatgtgtgagtgtgtgggtgcgtgcgtgttccttaatccgtgtctccccctcttttcttagcggcggcttcgcttgagcttctaataaccgcgctgggcagcgttcctggagcctcctaatagcagatattcatgactattaatattacacgaatacttaataagggaagaatgcctggaaatcgagcgtgaagcggagaggcaactcgcgccggagccggctctcaatgcagtccattgacgggagtctcagtgtagcaaatcggagtggggagagggagcgcgagagacaaaaagcgagcgagagagggagcgggcgagcgcgcggggggccgcggcgcggcgtctggcgaatcacagggaaggggcaacattttaaaaggttgcagggcatgcaaaagtgaaagagaaagaggcagagagggagaccgaaggagagagcgcagagagggagaatgtgtctgcgtgcgtgtgtgagaaagaaagtgtgggcgagggagaggagccccgggtggggagaggggagggagggaaggagggagagcccgagaggaggaagggagggaaagagggagggaggaagggagggagggagggggagggggcccagccggagcgcacggagggggaggccgcgggggagggggaaggggagaggaagcgagcgaggacaatcagacctaaaaggctggggcagacctcgggatgcagcgggggtcgtgcgtagcgggtaggagctgcttgggaccgcgtcc

SEQ ID NO: 371049 - DNA, 60 bp, Homo sapiens; identical to SEQ ID NO: 200271
  chr6:10415329-10415389
  hyper

SEQ ID NO: 371050 - DNA, 282 bp, Homo sapiens; identical to SEQ ID NO: 283756
  chr6:10415836-10416118
  hyper

SEQ ID NO: 371051 - DNA, 227 bp, Homo sapiens; identical to SEQ ID NO: 345207
  chr6:10417842-10418069
  hyper

SEQ ID NO: 371052 - DNA, 137 bp, Homo sapiens; identical to SEQ ID NO: 350277
  chr6:10418940-10419077
  hyper

SEQ ID NO: 371053 - DNA, 94 bp, Homo sapiens; identical to SEQ ID NO: 350278
  chr6:10420268-10420362
  hyper

SEQ ID NO: 371054 - DNA, 142 bp, Homo sapiens; identical to SEQ ID NO: 350279
  chr6:10423471-10423613
  hyper

SEQ ID NO: 371055 - DNA, 214 bp, Homo sapiens; identical to SEQ ID NO: 200278
  chr6:10423704-10423918
  hyper

SEQ ID NO: 371056 - DNA, 318 bp, Homo sapiens; identical to SEQ ID NO: 350281
  chr6:10424087-10424405
  hyper

SEQ ID NO: 371057 - DNA, 77 bp, Homo sapiens; identical to SEQ ID NO: 346777
  chr6:11043624-11043701
  hyper

SEQ ID NO: 371058 - DNA, 66 bp, Homo sapiens; identical to SEQ ID NO: 350283
  chr6:13013504-13013570
  hyper

SEQ ID NO: 371059 - DNA, 391 bp, Homo sapiens; identical to SEQ ID NO: 350284
  chr6:13014076-13014467
  hyper

SEQ ID NO: 371060 - DNA, 446 bp, Homo sapiens; identical to SEQ ID NO: 358411
  chr6:17101827-17102273
  hyper

SEQ ID NO: 371061 - DNA, 192 bp, Homo sapiens; identical to SEQ ID NO: 358412
  chr6:17102346-17102538
  hyper

SEQ ID NO: 371062 - DNA, 65 bp, Homo sapiens; identical to SEQ ID NO: 200293
  chr6:17281262-17281327
  hyper

SEQ ID NO: 371063 - DNA, 89 bp, Homo sapiens; identical to SEQ ID NO: 200294
  chr6:17281328-17281417
  hyper

SEQ ID NO: 371064 - DNA, 564 bp, Homo sapiens; identical to SEQ ID NO: 200295
  chr6:17281534-17282098
  hyper

SEQ ID NO: 371065 - DNA, 181 bp, Homo sapiens; identical to SEQ ID NO: 350286
  chr6:17282217-17282398
  hyper

SEQ ID NO: 371066 - DNA, 1440 bp, Homo sapiens; identical to SEQ ID NO: 332674
  chr6:18263786-18265226
  hyper

SEQ ID NO: 371067 - DNA, 615 bp, Homo sapiens; identical to SEQ ID NO: 332675
  chr6:19804685-19805300
  hyper

SEQ ID NO: 371068 - DNA, 813 bp, Homo sapiens; identical to SEQ ID NO: 332677
  chr6:20212279-20213092
  hyper

SEQ ID NO: 371069 - DNA, 95 bp, Homo sapiens; identical to SEQ ID NO: 358417
  chr6:21664624-21664719
  hyper

SEQ ID NO: 371070 - DNA, 174 bp, Homo sapiens; identical to SEQ ID NO: 200310
  chr6:21664749-21664923
  hyper

SEQ ID NO: 371071 - DNA, 431 bp, Homo sapiens; identical to SEQ ID NO: 200311
  chr6:21665191-21665622
  hyper

SEQ ID NO: 371072 - DNA, 268 bp, Homo sapiens; identical to SEQ ID NO: 200312
  chr6:21666189-21666457
  hyper

SEQ ID NO: 371073 - DNA, 351 bp, Homo sapiens; identical to SEQ ID NO: 200313
  chr6:21666588-21666939
  hyper

SEQ ID NO: 371074 - DNA, 873 bp, Homo sapiens; identical to SEQ ID NO: 345210
  chr6:24910930-24911803
  hyper

SEQ ID NO: 371075 - DNA, 290 bp, Homo sapiens
  chr6:26033454-26033744
  hyper
cgcctgaatattaggcaaaacgccaccctgcgcgatggtcacacgccccaagagtttattaagctcctcgtcattgcggatggccaattgcaggtggcgcgggatgatgcgggtcttcttgttgtcgcgggccgcattgcccgccagctccaggatctcggcggtcaggtactcaagcaccgccgcgagatacaccggcgcgccagccccgacgcgctcggagtagttgcctttgcggagcaggcggtgcactcggcccacaggaaactgcaaacctgcacgagaagacc

SEQ ID NO: 371076 - DNA, 34 bp, Homo sapiens
  chr6:26034208-26034242
  hyper
aggtccttcaaatcgggcgcagtggctcatgccc

SEQ ID NO: 371077 - DNA, 201 bp, Homo sapiens; identical to SEQ ID NO: 200321
  chr6:26087985-26088186
  hyper

SEQ ID NO: 371078 - DNA, 327 bp, Homo sapiens; identical to SEQ ID NO: 350294
  chr6:26197520-26197847
  hyper

SEQ ID NO: 371079 - DNA, 86 bp, Homo sapiens; identical to SEQ ID NO: 350295
  chr6:26198488-26198574
  hyper

SEQ ID NO: 371080 - DNA, 213 bp, Homo sapiens; identical to SEQ ID NO: 200330
  chr6:26198924-26199137
  hyper

SEQ ID NO: 371081 - DNA, 367 bp, Homo sapiens; identical to SEQ ID NO: 283855
  chr6:26204318-26204685
  hyper

SEQ ID NO: 371082 - DNA, 204 bp, Homo sapiens; identical to SEQ ID NO: 200332
  chr6:26205298-26205502
  hyper

SEQ ID NO: 371083 - DNA, 55 bp, Homo sapiens; identical to SEQ ID NO: 345214
  chr6:26205712-26205767
  hyper

SEQ ID NO: 371084 - DNA, 42 bp, Homo sapiens; identical to SEQ ID NO: 332688
  chr6:26206006-26206048
  hyper

SEQ ID NO: 371085 - DNA, 171 bp, Homo sapiens; identical to SEQ ID NO: 350301
  chr6:26215876-26216047
  hyper

SEQ ID NO: 371086 - DNA, 223 bp, Homo sapiens; identical to SEQ ID NO: 200335
  chr6:26216853-26217076
  hyper

SEQ ID NO: 371087 - DNA, 209 bp, Homo sapiens; identical to SEQ ID NO: 200336
  chr6:26217156-26217365
  hyper

SEQ ID NO: 371088 - DNA, 312 bp, Homo sapiens; identical to SEQ ID NO: 345216
  chr6:26217578-26217890
  hyper

SEQ ID NO: 371089 - DNA, 114 bp, Homo sapiens; identical to SEQ ID NO: 345217
  chr6:26233864-26233978
  hyper

SEQ ID NO: 371090 - DNA, 125 bp, Homo sapiens; identical to SEQ ID NO: 283866
  chr6:26241269-26241394
  hyper

SEQ ID NO: 371091 - DNA, 113 bp, Homo sapiens; identical to SEQ ID NO: 346790
  chr6:26250001-26250114
  hyper

SEQ ID NO: 371092 - DNA, 129 bp, Homo sapiens; identical to SEQ ID NO: 345218
  chr6:26271217-26271346
  hyper

SEQ ID NO: 371093 - DNA, 326 bp, Homo sapiens; identical to SEQ ID NO: 283871
  chr6:26272105-26272431
  hyper

SEQ ID NO: 371094 - DNA, 227 bp, Homo sapiens; identical to SEQ ID NO: 200345
  chr6:26272853-26273080
  hyper

SEQ ID NO: 371095 - DNA, 352 bp, Homo sapiens; identical to SEQ ID NO: 350311
  chr6:26313163-26313515
  hyper

SEQ ID NO: 371096 - DNA, 345 bp, Homo sapiens; identical to SEQ ID NO: 350312
  chr6:26313545-26313890
  hyper

SEQ ID NO: 371097 - DNA, 205 bp, Homo sapiens; identical to SEQ ID NO: 200346
  chr6:26322363-26322568
  hyper

SEQ ID NO: 371098 - DNA, 124 bp, Homo sapiens; identical to SEQ ID NO: 332704
  chr6:26330521-26330645
  hyper

SEQ ID NO: 371099 - DNA, 70 bp, Homo sapiens; identical to SEQ ID NO: 345220
  chr6:26331633-26331703
  hyper

SEQ ID NO: 371100 - DNA, 323 bp, Homo sapiens; identical to SEQ ID NO: 200349
  chr6:26331811-26332134
  hyper

SEQ ID NO: 371101 - DNA, 243 bp, Homo sapiens; identical to SEQ ID NO: 345222
  chr6:26332283-26332526
  hyper

SEQ ID NO: 371102 - DNA, 278 bp, Homo sapiens; identical to SEQ ID NO: 345223
  chr6:26522013-26522291
  hyper

SEQ ID NO: 371103 - DNA, 67 bp, Homo sapiens; identical to SEQ ID NO: 358449
  chr6:26555496-26555563
  hyper

SEQ ID NO: 371104 - DNA, 247 bp, Homo sapiens; identical to SEQ ID NO: 200355
  chr6:26577475-26577722
  hyper

SEQ ID NO: 371105 - DNA, 188 bp, Homo sapiens; identical to SEQ ID NO: 350320
  chr6:26987779-26987967
  hyper

SEQ ID NO: 371106 - DNA, 139 bp, Homo sapiens; identical to SEQ ID NO: 350321
  chr6:27059547-27059686
  hyper

SEQ ID NO: 371107 - DNA, 43 bp, Homo sapiens; identical to SEQ ID NO: 350322
  chr6:27059899-27059942
  hyper

SEQ ID NO: 371108 - DNA, 179 bp, Homo sapiens
  chr6:27099585-27099764
  hyper
cgctctatccaacgaaaactaattagaaataaatctccttcccgaaagcgataaaatactaaagaatgagaaactgacagtttactgagtttgtaaggaaggccaaataaaggcggggtttggattcctttggcgcacccaagccgaccgtggacttcctggatacaacaaccaatcag

SEQ ID NO: 371109 - DNA, 60 bp, Homo sapiens; identical to SEQ ID NO: 200363
  chr6:27100389-27100449
  hyper

SEQ ID NO: 371110 - DNA, 60 bp, Homo sapiens; identical to SEQ ID NO: 200364
  chr6:27101049-27101109
  hyper

SEQ ID NO: 371111 - DNA, 87 bp, Homo sapiens; identical to SEQ ID NO: 345226
  chr6:27101206-27101293
  hyper

SEQ ID NO: 371112 - DNA, 139 bp, Homo sapiens; identical to SEQ ID NO: 350326
  chr6:27125333-27125472
  hyper

SEQ ID NO: 371113 - DNA, 84 bp, Homo sapiens; identical to SEQ ID NO: 350327
  chr6:27125473-27125557
  hyper

SEQ ID NO: 371114 - DNA, 217 bp, Homo sapiens; identical to SEQ ID NO: 332718
  chr6:27125812-27126029
  hyper

SEQ ID NO: 371115 - DNA, 51 bp, Homo sapiens; identical to SEQ ID NO: 200369
  chr6:27173864-27173915
  hyper

SEQ ID NO: 371116 - DNA, 360 bp, Homo sapiens; identical to SEQ ID NO: 358460
  chr6:27218591-27218951
  hyper

SEQ ID NO: 371117 - DNA, 447 bp, Homo sapiens; identical to SEQ ID NO: 358461
  chr6:27218980-27219427
  hyper

SEQ ID NO: 371118 - DNA, 56 bp, Homo sapiens; identical to SEQ ID NO: 358462
  chr6:27256447-27256503
  hyper

SEQ ID NO: 371119 - DNA, 219 bp, Homo sapiens; identical to SEQ ID NO: 358463
  chr6:27300812-27301031
  hyper

SEQ ID NO: 371120 - DNA, 140 bp, Homo sapiens; identical to SEQ ID NO: 350328
  chr6:27356293-27356433
  hyper

SEQ ID NO: 371121 - DNA, 222 bp, Homo sapiens; identical to SEQ ID NO: 283916
  chr6:27356463-27356685
  hyper

SEQ ID NO: 371122 - DNA, 540 bp, Homo sapiens; identical to SEQ ID NO: 350330
  chr6:27470822-27471362
  hyper

SEQ ID NO: 371123 - DNA, 204 bp, Homo sapiens; identical to SEQ ID NO: 346801
  chr6:27560506-27560710
  hyper

SEQ ID NO: 371124 - DNA, 60 bp, Homo sapiens; identical to SEQ ID NO: 358468
  chr6:27635798-27635858
  hyper

SEQ ID NO: 371125 - DNA, 90 bp, Homo sapiens; identical to SEQ ID NO: 200378
  chr6:27636531-27636621
  hyper

SEQ ID NO: 371126 - DNA, 87 bp, Homo sapiens; identical to SEQ ID NO: 358470
  chr6:27640312-27640399
  hyper

SEQ ID NO: 371127 - DNA, 1073 bp, Homo sapiens; identical to SEQ ID NO: 332740
  chr6:27655169-27656242
  hyper

SEQ ID NO: 371128 - DNA, 136 bp, Homo sapiens; identical to SEQ ID NO: 358472
  chr6:27662125-27662261
  hyper

SEQ ID NO: 371129 - DNA, 106 bp, Homo sapiens; identical to SEQ ID NO: 200383
  chr6:27775598-27775704
  hyper

SEQ ID NO: 371130 - DNA, 67 bp, Homo sapiens; identical to SEQ ID NO: 350334
  chr6:27777648-27777715
  hyper

SEQ ID NO: 371131 - DNA, 402 bp, Homo sapiens; identical to SEQ ID NO: 350335
  chr6:27778156-27778558
  hyper

SEQ ID NO: 371132 - DNA, 71 bp, Homo sapiens; identical to SEQ ID NO: 350336
  chr6:27782642-27782713
  hyper

SEQ ID NO: 371133 - DNA, 351 bp, Homo sapiens; identical to SEQ ID NO: 346802
  chr6:27798705-27799056
  hyper

SEQ ID NO: 371134 - DNA, 133 bp, Homo sapiens; identical to SEQ ID NO: 358478
  chr6:27805774-27805907
  hyper

SEQ ID NO: 371135 - DNA, 535 bp, Homo sapiens; identical to SEQ ID NO: 358479
  chr6:27805936-27806471
  hyper

SEQ ID NO: 371136 - DNA, 72 bp, Homo sapiens; identical to SEQ ID NO: 358480
  chr6:27833292-27833364
  hyper

SEQ ID NO: 371137 - DNA, 487 bp, Homo sapiens; identical to SEQ ID NO: 200395
  chr6:27840617-27841104
  hyper

SEQ ID NO: 371138 - DNA, 139 bp, Homo sapiens; identical to SEQ ID NO: 358482
  chr6:27841257-27841396
  hyper

SEQ ID NO: 371139 - DNA, 48 bp, Homo sapiens; identical to SEQ ID NO: 200397
  chr6:27858740-27858788
  hyper

SEQ ID NO: 371140 - DNA, 304 bp, Homo sapiens; identical to SEQ ID NO: 346803
  chr6:28249105-28249409
  hyper

SEQ ID NO: 371141 - DNA, 125 bp, Homo sapiens; identical to SEQ ID NO: 346804
  chr6:28249579-28249704
  hyper

SEQ ID NO: 371142 - DNA, 190 bp, Homo sapiens; identical to SEQ ID NO: 345227
  chr6:28303261-28303451
  hyper

SEQ ID NO: 371143 - DNA, 73 bp, Homo sapiens; identical to SEQ ID NO: 200404
  chr6:28303489-28303562
  hyper

SEQ ID NO: 371144 - DNA, 208 bp, Homo sapiens; identical to SEQ ID NO: 200405
  chr6:28303607-28303815
  hyper

SEQ ID NO: 371145 - DNA, 150 bp, Homo sapiens; identical to SEQ ID NO: 345230
  chr6:28304301-28304451
  hyper

SEQ ID NO: 371146 - DNA, 174 bp, Homo sapiens
  chr6:28414768-28414942
  hyper
cgggatggaggcgcgtcgctttctgtggctggcgctggatccaccctgggtctccagccacggctgcagagagggtagcgcggtttcttaggccagagtggagtgggacaggaggtgcccagagacgactgtggtggcttgagacatggaagcgctgcagcctttgagcccagt

SEQ ID NO: 371147 - DNA, 314 bp, Homo sapiens; identical to SEQ ID NO: 358490
  chr6:28456978-28457292
  hyper

SEQ ID NO: 371148 - DNA, 208 bp, Homo sapiens; identical to SEQ ID NO: 283964
  chr6:28457345-28457553
  hyper

SEQ ID NO: 371149 - DNA, 143 bp, Homo sapiens; identical to SEQ ID NO: 350345
  chr6:28458192-28458335
  hyper

SEQ ID NO: 371150 - DNA, 248 bp, Homo sapiens; identical to SEQ ID NO: 332760
  chr6:33538968-33539216
  hyper

SEQ ID NO: 371151 - DNA, 418 bp, Homo sapiens; identical to SEQ ID NO: 283975
  chr6:35181443-35181861
  hyper

SEQ ID NO: 371152 - DNA, 217 bp, Homo sapiens; identical to SEQ ID NO: 283976
  chr6:35181983-35182200
  hyper

SEQ ID NO: 371153 - DNA, 1248 bp, Homo sapiens; identical to SEQ ID NO: 332764
  chr6:35655519-35656767
  hyper

SEQ ID NO: 371154 - DNA, 441 bp, Homo sapiens; identical to SEQ ID NO: 358497
  chr6:35744202-35744643
  hyper

SEQ ID NO: 371155 - DNA, 463 bp, Homo sapiens; identical to SEQ ID NO: 345231
  chr6:36098070-36098533
  hyper

SEQ ID NO: 371156 - DNA, 577 bp, Homo sapiens; identical to SEQ ID NO: 350349
  chr6:36354750-36355327
  hyper

SEQ ID NO: 371157 - DNA, 407 bp, Homo sapiens; identical to SEQ ID NO: 350350
  chr6:36355357-36355764
  hyper

SEQ ID NO: 371158 - DNA, 80 bp, Homo sapiens; identical to SEQ ID NO: 358501
  chr6:36807979-36808059
  hyper

SEQ ID NO: 371159 - DNA, 462 bp, Homo sapiens; identical to SEQ ID NO: 358502
  chr6:37665241-37665703
  hyper

SEQ ID NO: 371160 - DNA, 369 bp, Homo sapiens; identical to SEQ ID NO: 345232
  chr6:37666475-37666844
  hyper

SEQ ID NO: 371161 - DNA, 218 bp, Homo sapiens; identical to SEQ ID NO: 345233
  chr6:37666866-37667084
  hyper

SEQ ID NO: 371162 - DNA, 208 bp, Homo sapiens; identical to SEQ ID NO: 350353
  chr6:39196876-39197084
  hyper

SEQ ID NO: 371163 - DNA, 146 bp, Homo sapiens; identical to SEQ ID NO: 350354
  chr6:39197391-39197537
  hyper

SEQ ID NO: 371164 - DNA, 129 bp, Homo sapiens
  chr6:39281999-39282128
  hyper
ggtaagccaggtaggcgagcagcaggagcacggtgctgggcaccgcgcagccccggaccctgccctcgggagccgcccgggctcgcggtcggtacatagcgggagaggcggggagccggcgccgggagc

SEQ ID NO: 371165 - DNA, 156 bp, Homo sapiens; identical to SEQ ID NO: 358507
  chr6:40554364-40554520
  hyper

SEQ ID NO: 371166 - DNA, 315 bp, Homo sapiens; identical to SEQ ID NO: 284013
  chr6:40554860-40555175
  hyper

SEQ ID NO: 371167 - DNA, 151 bp, Homo sapiens; identical to SEQ ID NO: 200432
  chr6:41339070-41339221
  hyper

SEQ ID NO: 371168 - DNA, 360 bp, Homo sapiens; identical to SEQ ID NO: 358510
  chr6:41340027-41340387
  hyper

SEQ ID NO: 371169 - DNA, 101 bp, Homo sapiens; identical to SEQ ID NO: 358511
  chr6:41472031-41472132
  hyper

SEQ ID NO: 371170 - DNA, 85 bp, Homo sapiens; identical to SEQ ID NO: 346813
  chr6:41605681-41605766
  hyper

SEQ ID NO: 371171 - DNA, 308 bp, Homo sapiens; identical to SEQ ID NO: 350357
  chr6:42109904-42110212
  hyper

SEQ ID NO: 371172 - DNA, 324 bp, Homo sapiens; identical to SEQ ID NO: 350358
  chr6:42110273-42110597
  hyper

SEQ ID NO: 371173 - DNA, 34 bp, Homo sapiens; identical to SEQ ID NO: 350359
  chr6:42145871-42145905
  hyper

SEQ ID NO: 371174 - DNA, 45 bp, Homo sapiens; identical to SEQ ID NO: 350360
  chr6:42145975-42146020
  hyper

SEQ ID NO: 371175 - DNA, 62 bp, Homo sapiens; identical to SEQ ID NO: 345234
  chr6:42928259-42928321
  hyper

SEQ ID NO: 371176 - DNA, 76 bp, Homo sapiens; identical to SEQ ID NO: 345235
  chr6:42928454-42928530
  hyper

SEQ ID NO: 371177 - DNA, 155 bp, Homo sapiens; identical to SEQ ID NO: 332786
  chr6:42947097-42947252
  hyper

SEQ ID NO: 371178 - DNA, 50 bp, Homo sapiens
  chr6:43242933-43242983
  hyper
caggggtcccgtccatccgcccgcccccgcggccagcgccacgaatgtac

SEQ ID NO: 371179 - DNA, 179 bp, Homo sapiens; identical to SEQ ID NO: 358520
  chr6:43243254-43243433
  hyper

SEQ ID NO: 371180 - DNA, 557 bp, Homo sapiens; identical to SEQ ID NO: 284051
  chr6:43243475-43244032
  hyper

SEQ ID NO: 371181 - DNA, 466 bp, Homo sapiens; identical to SEQ ID NO: 350363
  chr6:43969986-43970452
  hyper

SEQ ID NO: 371182 - DNA, 176 bp, Homo sapiens; identical to SEQ ID NO: 346816
  chr6:44044201-44044377
  hyper

SEQ ID NO: 371183 - DNA, 97 bp, Homo sapiens; identical to SEQ ID NO: 346817
  chr6:44044450-44044547
  hyper

SEQ ID NO: 371184 - DNA, 37 bp, Homo sapiens; identical to SEQ ID NO: 332792
  chr6:44094355-44094392
  hyper

SEQ ID NO: 371185 - DNA, 45 bp, Homo sapiens; identical to SEQ ID NO: 350367
  chr6:44187030-44187075
  hyper

SEQ ID NO: 371186 - DNA, 468 bp, Homo sapiens; identical to SEQ ID NO: 350368
  chr6:44187131-44187599
  hyper

SEQ ID NO: 371187 - DNA, 253 bp, Homo sapiens; identical to SEQ ID NO: 350369
  chr6:45387325-45387578
  hyper

SEQ ID NO: 371188 - DNA, 261 bp, Homo sapiens; identical to SEQ ID NO: 200456
  chr6:45388098-45388359
  hyper

SEQ ID NO: 371189 - DNA, 319 bp, Homo sapiens; identical to SEQ ID NO: 200457
  chr6:45388397-45388716
  hyper

SEQ ID NO: 371190 - DNA, 320 bp, Homo sapiens
  chr6:45390544-45390864
  hyper
cggttgcggccgccccacgacaaccgcaccatggtggagatcatcgccgaccacccggccgaactcgtccgcaccgacagccccaacttcctgtgctcggtgctgccctcgcactggcgctgcaacaagaccctgcccgtggccttcaaggtaagaggctacaccgccccccgcccccggccgggagcggcggaacctgcccgccggtgtcttcctgcccacggggctgggccccggacgtcctccaagacctcctgccttggcggctctaaccccagaaacccccggccgggcctccctccggatgccctggcgggctc

SEQ ID NO: 371191 - DNA, 38 bp, Homo sapiens; identical to SEQ ID NO: 350372
  chr6:45631098-45631136
  hyper

SEQ ID NO: 371192 - DNA, 224 bp, Homo sapiens; identical to SEQ ID NO: 200458
  chr6:45982991-45983215
  hyper

SEQ ID NO: 371193 - DNA, 372 bp, Homo sapiens; identical to SEQ ID NO: 345236
  chr6:46097250-46097622
  hyper

SEQ ID NO: 371194 - DNA, 521 bp, Homo sapiens; identical to SEQ ID NO: 345237
  chr6:46097694-46098215
  hyper

SEQ ID NO: 371195 - DNA, 333 bp, Homo sapiens; identical to SEQ ID NO: 350375
  chr6:46138265-46138598
  hyper

SEQ ID NO: 371196 - DNA, 162 bp, Homo sapiens; identical to SEQ ID NO: 350376
  chr6:46138801-46138963
  hyper

SEQ ID NO: 371197 - DNA, 99 bp, Homo sapiens; identical to SEQ ID NO: 332801
  chr6:47382546-47382645
  hyper

SEQ ID NO: 371198 - DNA, 433 bp, Homo sapiens
  chr6:49518143-49518576
  hyper
cgcctcagctccggagaaaaacgaaaggtgggtgggaaactaggatagaggtgaaaagtaagaggggactgaatcagcgaatgacaaagggagcagggctccggacaggggtaggaggaagaagaggagtgactggggcttgtgtcaagcttcttctgaatggctagacagccgccaggtgggagaggcggagggtgaagaggcgggttccgcacgcggttagcctggggctgatctagtcttcagctttcaccggctgggagtccggagctgcagcagaggccacacccagggcttggtggtcccgcgctttccggagctcagcaggcgcttgctgcttgaaccggtcaaagaaggaacgaatgaatgacccttttgccaggatggagacccgggggcctcagggagctgcgaatcccatggactcctcccg

SEQ ID NO: 371199 - DNA, 278 bp, Homo sapiens; identical to SEQ ID NO: 350379
  chr6:49519000-49519278
  hyper

SEQ ID NO: 371200 - DNA, 41 bp, Homo sapiens; identical to SEQ ID NO: 358541
  chr6:50674750-50674791
  hyper

SEQ ID NO: 371201 - DNA, 368 bp, Homo sapiens; identical to SEQ ID NO: 284097
  chr6:50690697-50691065
  hyper

SEQ ID NO: 371202 - DNA, 84 bp, Homo sapiens; identical to SEQ ID NO: 350381
  chr6:50691095-50691179
  hyper

SEQ ID NO: 371203 - DNA, 53 bp, Homo sapiens; identical to SEQ ID NO: 358544
  chr6:50692556-50692609
  hyper

SEQ ID NO: 371204 - DNA, 43 bp, Homo sapiens; identical to SEQ ID NO: 346821
  chr6:50805695-50805738
  hyper

SEQ ID NO: 371205 - DNA, 193 bp, Homo sapiens; identical to SEQ ID NO: 358546
  chr6:50808438-50808631
  hyper

SEQ ID NO: 371206 - DNA, 42 bp, Homo sapiens; identical to SEQ ID NO: 200471
  chr6:50810509-50810551
  hyper

SEQ ID NO: 371207 - DNA, 211 bp, Homo sapiens; identical to SEQ ID NO: 200472
  chr6:50811605-50811816
  hyper

SEQ ID NO: 371208 - DNA, 313 bp, Homo sapiens; identical to SEQ ID NO: 358549
  chr6:50813939-50814252
  hyper

SEQ ID NO: 371209 - DNA, 636 bp, Homo sapiens; identical to SEQ ID NO: 346822
  chr6:52227115-52227751
  hyper

SEQ ID NO: 371210 - DNA, 132 bp, Homo sapiens; identical to SEQ ID NO: 200475
  chr6:52227876-52228008
  hyper

SEQ ID NO: 371211 - DNA, 119 bp, Homo sapiens; identical to SEQ ID NO: 345238
  chr6:53212372-53212491
  hyper

SEQ ID NO: 371212 - DNA, 215 bp, Homo sapiens; identical to SEQ ID NO: 200479
  chr6:53213970-53214185
  hyper

SEQ ID NO: 371213 - DNA, 189 bp, Homo sapiens; identical to SEQ ID NO: 346826
  chr6:56716695-56716884
  hyper

SEQ ID NO: 371214 - DNA, 248 bp, Homo sapiens; identical to SEQ ID NO: 345240
  chr6:56818408-56818656
  hyper

SEQ ID NO: 371215 - DNA, 70 bp, Homo sapiens
  chr6:56820686-56820756
  hyper
cgtttcttcataaccagcaaaaagtatatggcagttggtggccaggggatttaacactgatgcaatgcca

SEQ ID NO: 371216 - DNA, 620 bp, Homo sapiens; identical to SEQ ID NO: 332826
  chr6:57036954-57037574
  hyper

SEQ ID NO: 371217 - DNA, 207 bp, Homo sapiens; identical to SEQ ID NO: 350390
  chr6:69344116-69344323
  hyper

SEQ ID NO: 371218 - DNA, 294 bp, Homo sapiens; identical to SEQ ID NO: 200490
  chr6:69344649-69344943
  hyper

SEQ ID NO: 371219 - DNA, 72 bp, Homo sapiens; identical to SEQ ID NO: 350392
  chr6:69346042-69346114
  hyper

SEQ ID NO: 371220 - DNA, 115 bp, Homo sapiens; identical to SEQ ID NO: 350393
  chr6:69942728-69942843
  hyper

SEQ ID NO: 371221 - DNA, 574 bp, Homo sapiens; identical to SEQ ID NO: 350394
  chr6:70576385-70576959
  hyper

SEQ ID NO: 371222 - DNA, 298 bp, Homo sapiens; identical to SEQ ID NO: 200494
  chr6:70576997-70577295
  hyper

SEQ ID NO: 371223 - DNA, 570 bp, Homo sapiens; identical to SEQ ID NO: 350396
  chr6:71123134-71123704
  hyper

SEQ ID NO: 371224 - DNA, 289 bp, Homo sapiens; identical to SEQ ID NO: 350397
  chr6:71123746-71124035
  hyper

SEQ ID NO: 371225 - DNA, 54 bp, Homo sapiens; identical to SEQ ID NO: 200498
  chr6:71665452-71665506
  hyper

SEQ ID NO: 371226 - DNA, 222 bp, Homo sapiens; identical to SEQ ID NO: 200499
  chr6:71665723-71665945
  hyper

SEQ ID NO: 371227 - DNA, 145 bp, Homo sapiens
  chr6:71666986-71667131
  hyper
gggaggagcgtccccgcggggctgcacgacctcctggagggggtgatgctcgttcacctctcttcagctttgtgaaataccgcaaggtctttggagatgagccaggaaaatccattcacgtgcggaaatttgccgggctacgcgc

SEQ ID NO: 371228 - DNA, 975 bp, Homo sapiens; identical to SEQ ID NO: 358567
  chr6:71998106-71999081
  hyper

SEQ ID NO: 371229 - DNA, 155 bp, Homo sapiens; identical to SEQ ID NO: 350399
  chr6:72129577-72129732
  hyper

SEQ ID NO: 371230 - DNA, 61 bp, Homo sapiens; identical to SEQ ID NO: 350400
  chr6:72130646-72130707
  hyper

SEQ ID NO: 371231 - DNA, 226 bp, Homo sapiens; identical to SEQ ID NO: 200502
  chr6:72596315-72596541
  hyper

SEQ ID NO: 371232 - DNA, 163 bp, Homo sapiens; identical to SEQ ID NO: 346832
  chr6:73329621-73329784
  hyper

SEQ ID NO: 371233 - DNA, 82 bp, Homo sapiens; identical to SEQ ID NO: 346833
  chr6:73330126-73330208
  hyper

SEQ ID NO: 371234 - DNA, 40 bp, Homo sapiens; identical to SEQ ID NO: 346834
  chr6:74019373-74019413
  hyper

SEQ ID NO: 371235 - DNA, 102 bp, Homo sapiens; identical to SEQ ID NO: 346835
  chr6:74020094-74020196
  hyper

SEQ ID NO: 371236 - DNA, 130 bp, Homo sapiens; identical to SEQ ID NO: 350406
  chr6:74161047-74161177
  hyper

SEQ ID NO: 371237 - DNA, 178 bp, Homo sapiens; identical to SEQ ID NO: 200507
  chr6:74161321-74161499
  hyper

SEQ ID NO: 371238 - DNA, 290 bp, Homo sapiens; identical to SEQ ID NO: 284165
  chr6:74405623-74405913
  hyper

SEQ ID NO: 371239 - DNA, 174 bp, Homo sapiens; identical to SEQ ID NO: 358578
  chr6:74406015-74406189
  hyper

SEQ ID NO: 371240 - DNA, 280 bp, Homo sapiens; identical to SEQ ID NO: 284172
  chr6:75915989-75916269
  hyper

SEQ ID NO: 371241 - DNA, 50 bp, Homo sapiens; identical to SEQ ID NO: 358580
  chr6:79620238-79620288
  hyper

SEQ ID NO: 371242 - DNA, 390 bp, Homo sapiens; identical to SEQ ID NO: 332846
  chr6:80487617-80488007
  hyper

SEQ ID NO: 371243 - DNA, 83 bp, Homo sapiens; identical to SEQ ID NO: 350409
  chr6:80657600-80657683
  hyper

SEQ ID NO: 371244 - DNA, 164 bp, Homo sapiens; identical to SEQ ID NO: 350410
  chr6:83073044-83073208
  hyper

SEQ ID NO: 371245 - DNA, 268 bp, Homo sapiens; identical to SEQ ID NO: 284199
  chr6:83073251-83073519
  hyper

SEQ ID NO: 371246 - DNA, 213 bp, Homo sapiens; identical to SEQ ID NO: 284200
  chr6:83073590-83073803
  hyper

SEQ ID NO: 371247 - DNA, 682 bp, Homo sapiens; identical to SEQ ID NO: 200530
  chr6:83073835-83074517
  hyper

SEQ ID NO: 371248 - DNA, 66 bp, Homo sapiens; identical to SEQ ID NO: 350415
  chr6:83074829-83074895
  hyper

SEQ ID NO: 371249 - DNA, 123 bp, Homo sapiens; identical to SEQ ID NO: 358588
  chr6:85478295-85478418
  hyper

SEQ ID NO: 371250 - DNA, 58 bp, Homo sapiens; identical to SEQ ID NO: 284218
  chr6:85478456-85478514
  hyper

SEQ ID NO: 371251 - DNA, 353 bp, Homo sapiens; identical to SEQ ID NO: 350416
  chr6:86159095-86159448
  hyper

SEQ ID NO: 371252 - DNA, 269 bp, Homo sapiens; identical to SEQ ID NO: 200542
  chr6:86159509-86159778
  hyper

SEQ ID NO: 371253 - DNA, 243 bp, Homo sapiens; identical to SEQ ID NO: 200543
  chr6:86159903-86160146
  hyper

SEQ ID NO: 371254 - DNA, 123 bp, Homo sapiens; identical to SEQ ID NO: 350419
  chr6:87646737-87646860
  hyper

SEQ ID NO: 371255 - DNA, 170 bp, Homo sapiens; identical to SEQ ID NO: 200546
  chr6:87646944-87647114
  hyper

SEQ ID NO: 371256 - DNA, 74 bp, Homo sapiens; identical to SEQ ID NO: 200547
  chr6:87647143-87647217
  hyper

SEQ ID NO: 371257 - DNA, 42 bp, Homo sapiens
  chr6:87861506-87861548
  hyper
cgaaatcaggcagcagtgcccgcgccacggcctctgcaggac

SEQ ID NO: 371258 - DNA, 280 bp, Homo sapiens; identical to SEQ ID NO: 332855
  chr6:88678327-88678607
  hyper

SEQ ID NO: 371259 - DNA, 776 bp, Homo sapiens; identical to SEQ ID NO: 332857
  chr6:89855504-89856280
  hyper

SEQ ID NO: 371260 - DNA, 304 bp, Homo sapiens; identical to SEQ ID NO: 200552
  chr6:90121293-90121597
  hyper

SEQ ID NO: 371261 - DNA, 709 bp, Homo sapiens; identical to SEQ ID NO: 284243
  chr6:90121684-90122393
  hyper

SEQ ID NO: 371262 - DNA, 74 bp, Homo sapiens; identical to SEQ ID NO: 345243
  chr6:90122423-90122497
  hyper

SEQ ID NO: 371263 - DNA, 255 bp, Homo sapiens; identical to SEQ ID NO: 346839
  chr6:90142647-90142902
  hyper

SEQ ID NO: 371264 - DNA, 1051 bp, Homo sapiens; identical to SEQ ID NO: 284249
  chr6:91005702-91006753
  hyper

SEQ ID NO: 371265 - DNA, 97 bp, Homo sapiens; identical to SEQ ID NO: 358602
  chr6:91006779-91006876
  hyper

SEQ ID NO: 371266 - DNA, 41 bp, Homo sapiens; identical to SEQ ID NO: 350428
  chr6:91320244-91320285
  hyper

SEQ ID NO: 371267 - DNA, 286 bp, Homo sapiens; identical to SEQ ID NO: 200558
  chr6:94127131-94127417
  hyper

SEQ ID NO: 371268 - DNA, 217 bp, Homo sapiens; identical to SEQ ID NO: 284267
  chr6:99272867-99273084
  hyper

SEQ ID NO: 371269 - DNA, 208 bp, Homo sapiens; identical to SEQ ID NO: 200570
  chr6:99273114-99273322
  hyper

SEQ ID NO: 371270 - DNA, 101 bp, Homo sapiens; identical to SEQ ID NO: 350431
  chr6:99276279-99276380
  hyper

SEQ ID NO: 371271 - DNA, 274 bp, Homo sapiens; identical to SEQ ID NO: 200576
  chr6:99276430-99276704
  hyper

SEQ ID NO: 371272 - DNA, 399 bp, Homo sapiens; identical to SEQ ID NO: 200577
  chr6:99276781-99277180
  hyper

SEQ ID NO: 371273 - DNA, 60 bp, Homo sapiens; identical to SEQ ID NO: 350434
  chr6:99292143-99292203
  hyper

SEQ ID NO: 371274 - DNA, 109 bp, Homo sapiens; identical to SEQ ID NO: 350435
  chr6:99292521-99292630
  hyper

SEQ ID NO: 371275 - DNA, 327 bp, Homo sapiens; identical to SEQ ID NO: 332867
  chr6:99873227-99873554
  hyper

SEQ ID NO: 371276 - DNA, 168 bp, Homo sapiens; identical to SEQ ID NO: 358612
  chr6:100036494-100036662
  hyper

SEQ ID NO: 371277 - DNA, 227 bp, Homo sapiens; identical to SEQ ID NO: 284294
  chr6:100036732-100036959
  hyper

SEQ ID NO: 371278 - DNA, 97 bp, Homo sapiens; identical to SEQ ID NO: 358614
  chr6:100039474-100039571
  hyper

SEQ ID NO: 371279 - DNA, 59 bp, Homo sapiens; identical to SEQ ID NO: 358615
  chr6:105389710-105389769
  hyper

SEQ ID NO: 371280 - DNA, 126 bp, Homo sapiens; identical to SEQ ID NO: 358616
  chr6:105627242-105627368
  hyper

SEQ ID NO: 371281 - DNA, 134 bp, Homo sapiens; identical to SEQ ID NO: 358617
  chr6:105628083-105628217
  hyper

SEQ ID NO: 371282 - DNA, 61 bp, Homo sapiens; identical to SEQ ID NO: 345244
  chr6:106443120-106443181
  hyper

SEQ ID NO: 371283 - DNA, 352 bp, Homo sapiens; identical to SEQ ID NO: 346842
  chr6:106533693-106534045
  hyper

SEQ ID NO: 371284 - DNA, 388 bp, Homo sapiens; identical to SEQ ID NO: 346843
  chr6:106534075-106534463
  hyper

SEQ ID NO: 371285 - DNA, 248 bp, Homo sapiens; identical to SEQ ID NO: 358621
  chr6:106808607-106808855
  hyper

SEQ ID NO: 371286 - DNA, 113 bp, Homo sapiens; identical to SEQ ID NO: 358622
  chr6:106809184-106809297
  hyper

SEQ ID NO: 371287 - DNA, 104 bp, Homo sapiens; identical to SEQ ID NO: 345245
  chr6:106958136-106958240
  hyper

SEQ ID NO: 371288 - DNA, 404 bp, Homo sapiens; identical to SEQ ID NO: 345246
  chr6:106958337-106958741
  hyper

SEQ ID NO: 371289 - DNA, 333 bp, Homo sapiens; identical to SEQ ID NO: 200605
  chr6:106959606-106959939
  hyper

SEQ ID NO: 371290 - DNA, 262 bp, Homo sapiens; identical to SEQ ID NO: 200606
  chr6:106960046-106960308
  hyper

SEQ ID NO: 371291 - DNA, 155 bp, Homo sapiens; identical to SEQ ID NO: 345249
  chr6:106961023-106961178
  hyper

SEQ ID NO: 371292 - DNA, 314 bp, Homo sapiens; identical to SEQ ID NO: 200609
  chr6:107810308-107810622
  hyper

SEQ ID NO: 371293 - DNA, 430 bp, Homo sapiens; identical to SEQ ID NO: 350445
  chr6:107810665-107811095
  hyper

SEQ ID NO: 371294 - DNA, 70 bp, Homo sapiens
  chr6:108435964-108436034
  hyper
cggtttagtcatcattcctaataacaaggatgttgctaagaacagaaattttacatgattttcatacatt

SEQ ID NO: 371295 - DNA, 163 bp, Homo sapiens; identical to SEQ ID NO: 332893
  chr6:108455187-108455350
  hyper

SEQ ID NO: 371296 - DNA, 197 bp, Homo sapiens; identical to SEQ ID NO: 358630
  chr6:108478324-108478521
  hyper

SEQ ID NO: 371297 - DNA, 255 bp, Homo sapiens; identical to SEQ ID NO: 284345
  chr6:108478551-108478806
  hyper

SEQ ID NO: 371298 - DNA, 44 bp, Homo sapiens; identical to SEQ ID NO: 358632
  chr6:108484828-108484872
  hyper

SEQ ID NO: 371299 - DNA, 159 bp, Homo sapiens; identical to SEQ ID NO: 200614
  chr6:108496966-108497125
  hyper

SEQ ID NO: 371300 - DNA, 72 bp, Homo sapiens; identical to SEQ ID NO: 350448
  chr6:108882975-108883047
  hyper

SEQ ID NO: 371301 - DNA, 167 bp, Homo sapiens
  chr6:109330991-109331158
  hyper
cgcgaggtgagcgtgcactgtcaggaaggtgcagcacgagtcttcgggcttcagggacaggggaatctgccccctacacccctgctcggccatttacctagaaccaaacagcagccaacctcgagactgattctgacagcaccaggagtaatgaagttctctaaatt

SEQ ID NO: 371302 - DNA, 226 bp, Homo sapiens
  chr6:109331216-109331442
  hyper
cggcagcagaatgcaggactttggcctataatcaatgcaaaattcattttgctaagctacgtaaaagctataaatatcactcccctacacagataataaaccttggtagcctatctctgaatcgtcttttttcctctcaagtatattcgaaggctttacaatttctaatattccttcataagcgccctccctgggttataaagacagaatttcaatctctgaaatc

SEQ ID NO: 371303 - DNA, 572 bp, Homo sapiens; identical to SEQ ID NO: 358635
  chr6:111408744-111409316
  hyper

SEQ ID NO: 371304 - DNA, 273 bp, Homo sapiens; identical to SEQ ID NO: 200623
  chr6:111409368-111409641
  hyper

SEQ ID NO: 371305 - DNA, 945 bp, Homo sapiens; identical to SEQ ID NO: 346853
  chr6:112193858-112194803
  hyper

SEQ ID NO: 371306 - DNA, 737 bp, Homo sapiens; identical to SEQ ID NO: 332905
  chr6:114176491-114177228
  hyper

SEQ ID NO: 371307 - DNA, 72 bp, Homo sapiens; identical to SEQ ID NO: 332906
  chr6:116691827-116691899
  hyper

SEQ ID NO: 371308 - DNA, 133 bp, Homo sapiens; identical to SEQ ID NO: 358639
  chr6:118241526-118241659
  hyper

SEQ ID NO: 371309 - DNA, 69 bp, Homo sapiens; identical to SEQ ID NO: 350453
  chr6:119030678-119030747
  hyper

SEQ ID NO: 371310 - DNA, 547 bp, Homo sapiens; identical to SEQ ID NO: 350454
  chr6:122931206-122931753
  hyper

SEQ ID NO: 371311 - DNA, 40 bp, Homo sapiens
  chr6:122932019-122932059
  hyper
cggctctcgcgccagcaatgccaagtctttcccctgggcg

SEQ ID NO: 371312 - DNA, 222 bp, Homo sapiens
  chr6:124125086-124125308
  hyper
cactgcccgcggcgcggcgtgtgcaccgagcgagtgaaggtatgtgtggcgggcgcggctggagctgccgccgccgccgccgccgcgccagcaggtcctaatgcctgtcacttcccaggacgctggcagcagcagcagcccggagcccccgagccctcggcaggtttgcgtgtccttccccgcgatctgattggataaagtgggggctcgacggtggccgac

SEQ ID NO: 371313 - DNA, 58 bp, Homo sapiens; identical to SEQ ID NO: 346854
  chr6:126068722-126068780
  hyper

SEQ ID NO: 371314 - DNA, 155 bp, Homo sapiens; identical to SEQ ID NO: 345250
  chr6:126069942-126070097
  hyper

SEQ ID NO: 371315 - DNA, 33 bp, Homo sapiens
  chr6:126071152-126071185
  hyper
cgctcgcagagcgtgagttgggatggggcaagg

SEQ ID NO: 371316 - DNA, 134 bp, Homo sapiens
  chr6:126071333-126071467
  hyper
tgaaaccgtatttgggggcactttcaaaatagatcaggagaaaataaaaacaatttgatttttgatttttagagataccaaaatcacaacttgatttttggaggaattaaagcaacctgcgatgtcaaggctac

SEQ ID NO: 371317 - DNA, 311 bp, Homo sapiens; identical to SEQ ID NO: 284435
  chr6:127442338-127442649
  hyper

SEQ ID NO: 371318 - DNA, 37 bp, Homo sapiens
  chr6:127442699-127442736
  hyper
gtgcaatcctggtagaggggcgaccccttgcgtcctc

SEQ ID NO: 371319 - DNA, 439 bp, Homo sapiens; identical to SEQ ID NO: 284440
  chr6:127836226-127836665
  hyper

SEQ ID NO: 371320 - DNA, 31 bp, Homo sapiens; identical to SEQ ID NO: 350458
  chr6:127837749-127837780
  hyper

SEQ ID NO: 371321 - DNA, 516 bp, Homo sapiens; identical to SEQ ID NO: 358646
  chr6:128840521-128841037
  hyper

SEQ ID NO: 371322 - DNA, 476 bp, Homo sapiens; identical to SEQ ID NO: 200651
  chr6:128841101-128841577
  hyper

SEQ ID NO: 371323 - DNA, 686 bp, Homo sapiens; identical to SEQ ID NO: 358648
  chr6:128841719-128842405
  hyper

SEQ ID NO: 371324 - DNA, 291 bp, Homo sapiens; identical to SEQ ID NO: 350459
  chr6:130088466-130088757
  hyper

SEQ ID NO: 371325 - DNA, 365 bp, Homo sapiens; identical to SEQ ID NO: 332922
  chr6:131383375-131383740
  hyper

SEQ ID NO: 371326 - DNA, 96 bp, Homo sapiens; identical to SEQ ID NO: 350461
  chr6:134499457-134499553
  hyper

SEQ ID NO: 371327 - DNA, 160 bp, Homo sapiens; identical to SEQ ID NO: 346856
  chr6:134639003-134639163
  hyper

SEQ ID NO: 371328 - DNA, 330 bp, Homo sapiens; identical to SEQ ID NO: 345251
  chr6:137112609-137112939
  hyper

SEQ ID NO: 371329 - DNA, 61 bp, Homo sapiens; identical to SEQ ID NO: 345252
  chr6:137112940-137113001
  hyper

SEQ ID NO: 371330 - DNA, 48 bp, Homo sapiens; identical to SEQ ID NO: 200668
  chr6:137243410-137243458
  hyper

SEQ ID NO: 371331 - DNA, 216 bp, Homo sapiens; identical to SEQ ID NO: 284487
  chr6:137310942-137311158
  hyper

SEQ ID NO: 371332 - DNA, 259 bp, Homo sapiens; identical to SEQ ID NO: 332933
  chr6:137365631-137365890
  hyper

SEQ ID NO: 371333 - DNA, 46 bp, Homo sapiens; identical to SEQ ID NO: 350467
  chr6:137808706-137808752
  hyper

SEQ ID NO: 371334 - DNA, 120 bp, Homo sapiens; identical to SEQ ID NO: 332939
  chr6:138132663-138132783
  hyper

SEQ ID NO: 371335 - DNA, 499 bp, Homo sapiens; identical to SEQ ID NO: 332940
  chr6:138428812-138429311
  hyper

SEQ ID NO: 371336 - DNA, 249 bp, Homo sapiens; identical to SEQ ID NO: 332941
  chr6:138724531-138724780
  hyper

SEQ ID NO: 371337 - DNA, 256 bp, Homo sapiens; identical to SEQ ID NO: 358661
  chr6:139694249-139694505
  hyper

SEQ ID NO: 371338 - DNA, 131 bp, Homo sapiens; identical to SEQ ID NO: 358662
  chr6:142622583-142622714
  hyper

SEQ ID NO: 371339 - DNA, 486 bp, Homo sapiens; identical to SEQ ID NO: 358663
  chr6:142622963-142623449
  hyper

SEQ ID NO: 371340 - DNA, 368 bp, Homo sapiens; identical to SEQ ID NO: 200679
  chr6:143247975-143248343
  hyper

SEQ ID NO: 371341 - DNA, 208 bp, Homo sapiens; identical to SEQ ID NO: 350470
  chr6:143248451-143248659
  hyper

SEQ ID NO: 371342 - DNA, 370 bp, Homo sapiens; identical to SEQ ID NO: 332946
  chr6:143268770-143269140
  hyper

SEQ ID NO: 371343 - DNA, 528 bp, Homo sapiens; identical to SEQ ID NO: 346860
  chr6:146136035-146136563
  hyper

SEQ ID NO: 371344 - DNA, 232 bp, Homo sapiens; identical to SEQ ID NO: 346861
  chr6:146136564-146136796
  hyper

SEQ ID NO: 371345 - DNA, 56 bp, Homo sapiens; identical to SEQ ID NO: 350473
  chr6:146349455-146349511
  hyper

SEQ ID NO: 371346 - DNA, 213 bp, Homo sapiens; identical to SEQ ID NO: 200695
  chr6:148663794-148664007
  hyper

SEQ ID NO: 371347 - DNA, 181 bp, Homo sapiens; identical to SEQ ID NO: 358671
  chr6:148664163-148664344
  hyper

SEQ ID NO: 371348 - DNA, 258 bp, Homo sapiens; identical to SEQ ID NO: 200697
  chr6:149068930-149069188
  hyper

SEQ ID NO: 371349 - DNA, 223 bp, Homo sapiens; identical to SEQ ID NO: 284543
  chr6:149069508-149069731
  hyper

SEQ ID NO: 371350 - DNA, 59 bp, Homo sapiens; identical to SEQ ID NO: 350476
  chr6:149069769-149069828
  hyper

SEQ ID NO: 371351 - DNA, 291 bp, Homo sapiens; identical to SEQ ID NO: 284555
  chr6:150246875-150247166
  hyper

SEQ ID NO: 371352 - DNA, 86 bp, Homo sapiens; identical to SEQ ID NO: 200703
  chr6:150284581-150284667
  hyper

SEQ ID NO: 371353 - DNA, 173 bp, Homo sapiens
  chr6:150312215-150312388
  hyper
tcctacagcctggtgctgggcgcggggaggactttacacccagctcctgccgagacgtgaccttacagctggggtccttggggctccaaaagtgcggcttccgcgcggatcccattcctgcttgctttgaggctgctggtgagcggcgcctgcgcaggggaagttgtgtgccc

SEQ ID NO: 371354 - DNA, 752 bp, Homo sapiens; identical to SEQ ID NO: 332955
  chr6:150921277-150922029
  hyper

SEQ ID NO: 371355 - DNA, 42 bp, Homo sapiens; identical to SEQ ID NO: 332956
  chr6:150962790-150962832
  hyper

SEQ ID NO: 371356 - DNA, 69 bp, Homo sapiens; identical to SEQ ID NO: 358678
  chr6:151562596-151562665
  hyper

SEQ ID NO: 371357 - DNA, 234 bp, Homo sapiens; identical to SEQ ID NO: 200709
  chr6:151815611-151815845
  hyper

SEQ ID NO: 371358 - DNA, 80 bp, Homo sapiens; identical to SEQ ID NO: 350480
  chr6:151815879-151815959
  hyper

SEQ ID NO: 371359 - DNA, 181 bp, Homo sapiens; identical to SEQ ID NO: 345254
  chr6:152622733-152622914
  hyper

SEQ ID NO: 371360 - DNA, 42 bp, Homo sapiens
  chr6:153452827-153452869
  hyper
agcagcctgcctgctccgggtcccggaggaagcattccctgc

SEQ ID NO: 371361 - DNA, 520 bp, Homo sapiens; identical to SEQ ID NO: 346865
  chr6:158402113-158402633
  hyper

SEQ ID NO: 371362 - DNA, 39 bp, Homo sapiens; identical to SEQ ID NO: 358683
  chr6:158957708-158957747
  hyper

SEQ ID NO: 371363 - DNA, 206 bp, Homo sapiens; identical to SEQ ID NO: 284595
  chr6:158957988-158958194
  hyper

SEQ ID NO: 371364 - DNA, 228 bp, Homo sapiens; identical to SEQ ID NO: 358685
  chr6:159589682-159589910
  hyper

SEQ ID NO: 371365 - DNA, 41 bp, Homo sapiens; identical to SEQ ID NO: 346866
  chr6:159591277-159591318
  hyper

SEQ ID NO: 371366 - DNA, 240 bp, Homo sapiens; identical to SEQ ID NO: 350484
  chr6:159654657-159654897
  hyper

SEQ ID NO: 371367 - DNA, 62 bp, Homo sapiens; identical to SEQ ID NO: 200729
  chr6:159655003-159655065
  hyper

SEQ ID NO: 371368 - DNA, 257 bp, Homo sapiens; identical to SEQ ID NO: 350486
  chr6:159655082-159655339
  hyper

SEQ ID NO: 371369 - DNA, 128 bp, Homo sapiens; identical to SEQ ID NO: 284612
  chr6:161188108-161188236
  hyper

SEQ ID NO: 371370 - DNA, 108 bp, Homo sapiens; identical to SEQ ID NO: 346867
  chr6:163834157-163834265
  hyper

SEQ ID NO: 371371 - DNA, 96 bp, Homo sapiens; identical to SEQ ID NO: 200737
  chr6:163834987-163835083
  hyper

SEQ ID NO: 371372 - DNA, 666 bp, Homo sapiens; identical to SEQ ID NO: 284617
  chr6:163835131-163835797
  hyper

SEQ ID NO: 371373 - DNA, 291 bp, Homo sapiens; identical to SEQ ID NO: 200740
  chr6:163835906-163836197
  hyper

SEQ ID NO: 371374 - DNA, 238 bp, Homo sapiens; identical to SEQ ID NO: 200741
  chr6:163837231-163837469
  hyper

SEQ ID NO: 371375 - DNA, 88 bp, Homo sapiens; identical to SEQ ID NO: 350492
  chr6:166076007-166076095
  hyper

SEQ ID NO: 371376 - DNA, 276 bp, Homo sapiens; identical to SEQ ID NO: 284624
  chr6:166077059-166077335
  hyper

SEQ ID NO: 371377 - DNA, 55 bp, Homo sapiens; identical to SEQ ID NO: 350493
  chr6:166268182-166268237
  hyper

SEQ ID NO: 371378 - DNA, 140 bp, Homo sapiens; identical to SEQ ID NO: 350494
  chr6:166298522-166298662
  hyper

SEQ ID NO: 371379 - DNA, 211 bp, Homo sapiens; identical to SEQ ID NO: 332975
  chr6:166419580-166419791
  hyper

SEQ ID NO: 371380 - DNA, 60 bp, Homo sapiens; identical to SEQ ID NO: 358700
  chr6:166422281-166422341
  hyper

SEQ ID NO: 371381 - DNA, 228 bp, Homo sapiens; identical to SEQ ID NO: 284635
  chr6:166667296-166667524
  hyper

SEQ ID NO: 371382 - DNA, 334 bp, Homo sapiens; identical to SEQ ID NO: 358702
  chr6:167039793-167040127
  hyper

SEQ ID NO: 371383 - DNA, 423 bp, Homo sapiens; identical to SEQ ID NO: 358703
  chr6:167040325-167040748
  hyper

SEQ ID NO: 371384 - DNA, 340 bp, Homo sapiens; identical to SEQ ID NO: 358704
  chr6:167764611-167764951
  hyper

SEQ ID NO: 371385 - DNA, 142 bp, Homo sapiens
  chr6:169653496-169653638
  hyper
cgtttacccgggttcccaggcaggtatatacattgaaatagcagcagccacaaccctcagagaggaaggggtgcccggctggtgaaagcacagccacggaggaaaagctgaggagcggccacgtgccttgctcttcaagcgg

SEQ ID NO: 371386 - DNA, 506 bp, Homo sapiens; identical to SEQ ID NO: 345259
  chr6:170124879-170125385
  hyper

SEQ ID NO: 371387 - DNA, 264 bp, Homo sapiens
  chr6:170598840-170599104
  hyper
cccttcttgttgacgaactcctgcagcttcagttcgaacaccccagagctccagacctgcacgggggagggcgggggcgtgaggacgcgggtcccgcccgagctagggggcgtgaggcctgggtggggggtgtgcggagagcctggaagggctcaggggccgagcgcgctcgctgcacggccggcgctggggtcgtcgcccccgggattcatcttccgggccgtggctggcgcggcccgtgccgctgtccgcccctccccgcgc

SEQ ID NO: 371388 - DNA, 86 bp, Homo sapiens; identical to SEQ ID NO: 350497
  chr7:149024-149110
  hyper

SEQ ID NO: 371389 - DNA, 575 bp, Homo sapiens; identical to SEQ ID NO: 350498
  chr7:149220-149795
  hyper

SEQ ID NO: 371390 - DNA, 437 bp, Homo sapiens; identical to SEQ ID NO: 358708
  chr7:191993-192430
  hyper

SEQ ID NO: 371391 - DNA, 362 bp, Homo sapiens; identical to SEQ ID NO: 284670
  chr7:192614-192976
  hyper

SEQ ID NO: 371392 - DNA, 511 bp, Homo sapiens; identical to SEQ ID NO: 284671
  chr7:193101-193612
  hyper

SEQ ID NO: 371393 - DNA, 276 bp, Homo sapiens; identical to SEQ ID NO: 284672
  chr7:193708-193984
  hyper

SEQ ID NO: 371394 - DNA, 115 bp, Homo sapiens; identical to SEQ ID NO: 358712
  chr7:556571-556686
  hyper

SEQ ID NO: 371395 - DNA, 212 bp, Homo sapiens; identical to SEQ ID NO: 200765
  chr7:556716-556928
  hyper

SEQ ID NO: 371396 - DNA, 110 bp, Homo sapiens; identical to SEQ ID NO: 200766
  chr7:556983-557093
  hyper

SEQ ID NO: 371397 - DNA, 77 bp, Homo sapiens; identical to SEQ ID NO: 358715
  chr7:557220-557297
  hyper

SEQ ID NO: 371398 - DNA, 294 bp, Homo sapiens; identical to SEQ ID NO: 200769
  chr7:557697-557991
  hyper

SEQ ID NO: 371399 - DNA, 173 bp, Homo sapiens
  chr7:561245-561418
  hyper
ggggttagaggactcggtaagacggtgtggaaggcaaggaggaaggtcgcgttgtattggggatggggtacccgtccctcccagcttgagggatcctgggggtcctcgccgcctctgagggcctagatggctgcttccctcggctcccctgcccggcctggagctacgggtgc

SEQ ID NO: 371400 - DNA, 238 bp, Homo sapiens; identical to SEQ ID NO: 332992
  chr7:822395-822633
  hyper

SEQ ID NO: 371401 - DNA, 42 bp, Homo sapiens; identical to SEQ ID NO: 200773
  chr7:852797-852839
  hyper

SEQ ID NO: 371402 - DNA, 274 bp, Homo sapiens; identical to SEQ ID NO: 332994
  chr7:889360-889634
  hyper

SEQ ID NO: 371403 - DNA, 333 bp, Homo sapiens; identical to SEQ ID NO: 332995
  chr7:1001822-1002155
  hyper

SEQ ID NO: 371404 - DNA, 223 bp, Homo sapiens; identical to SEQ ID NO: 358720
  chr7:1270815-1271038
  hyper

SEQ ID NO: 371405 - DNA, 91 bp, Homo sapiens; identical to SEQ ID NO: 358721
  chr7:1276567-1276658
  hyper

SEQ ID NO: 371406 - DNA, 261 bp, Homo sapiens; identical to SEQ ID NO: 284709
  chr7:1277556-1277817
  hyper

SEQ ID NO: 371407 - DNA, 114 bp, Homo sapiens; identical to SEQ ID NO: 350501
  chr7:1280235-1280349
  hyper

SEQ ID NO: 371408 - DNA, 192 bp, Homo sapiens; identical to SEQ ID NO: 284717
  chr7:1287431-1287623
  hyper

SEQ ID NO: 371409 - DNA, 1005 bp, Homo sapiens; identical to SEQ ID NO: 333003
  chr7:1498587-1499592
  hyper

SEQ ID NO: 371410 - DNA, 233 bp, Homo sapiens; identical to SEQ ID NO: 284724
  chr7:1705153-1705386
  hyper

SEQ ID NO: 371411 - DNA, 502 bp, Homo sapiens; identical to SEQ ID NO: 284725
  chr7:1705693-1706195
  hyper

SEQ ID NO: 371412 - DNA, 147 bp, Homo sapiens; identical to SEQ ID NO: 358727
  chr7:1708913-1709060
  hyper

SEQ ID NO: 371413 - DNA, 290 bp, Homo sapiens; identical to SEQ ID NO: 333006
  chr7:2517249-2517539
  hyper

SEQ ID NO: 371414 - DNA, 224 bp, Homo sapiens
  chr7:2558675-2558899
  hyper
ggcgagggaagtggcggccttcgtttctcctcgccatggggcgcctgaggatttcggggagccaaccctcccgacggagggccaggatcgaggaaatcagccagggaggaaggagtggaatttggttctggtgctttctcgttagaacctcgtgtccccacctgcggcacaggtggccaagctcttgctctgtacaaataacggctcccctgaaccgagcgctc

SEQ ID NO: 371415 - DNA, 152 bp, Homo sapiens; identical to SEQ ID NO: 333008
  chr7:2559952-2560104
  hyper

SEQ ID NO: 371416 - DNA, 43 bp, Homo sapiens; identical to SEQ ID NO: 284742
  chr7:2728259-2728302
  hyper

SEQ ID NO: 371417 - DNA, 396 bp, Homo sapiens; identical to SEQ ID NO: 333010
  chr7:3018114-3018510
  hyper

SEQ ID NO: 371418 - DNA, 395 bp, Homo sapiens; identical to SEQ ID NO: 350504
  chr7:3082731-3083126
  hyper

SEQ ID NO: 371419 - DNA, 84 bp, Homo sapiens; identical to SEQ ID NO: 350505
  chr7:3083602-3083686
  hyper

SEQ ID NO: 371420 - DNA, 132 bp, Homo sapiens; identical to SEQ ID NO: 284748
  chr7:4784755-4784887
  hyper

SEQ ID NO: 371421 - DNA, 293 bp, Homo sapiens; identical to SEQ ID NO: 358735
  chr7:4922256-4922549
  hyper

SEQ ID NO: 371422 - DNA, 436 bp, Homo sapiens; identical to SEQ ID NO: 350507
  chr7:5458503-5458939
  hyper

SEQ ID NO: 371423 - DNA, 590 bp, Homo sapiens
  chr7:5466599-5467189
  hyper
cgccctccccagtatggcgggccacattgaaatgtaaaaaccaggcctgggcgctgtggccatagggcacaggccataggccaccaggtccagccgccatcttccgcgccccacccccattccatcccctccccctccccaccccctcatacttttgtttacccagcgggataggtggccaaaaactgtggacgcaattgagtgaaagtgcgtgtgtgtgtgtgtgtgtgtgtgtgtgcgcgcgcgcgcgcgcgtgtctgtgtgtgtgtgtgtttgactgggtagaaaatcggctgggggctgggggggtcttccttgtagccctaagccgcagctgcgggagaagctgccctggctagccgaggcccggcccagcgtgcttctccgcggccagcctgggccaccggagccgaggccttccctgtgttcctaggccgctggctccggcctccgctccctggacgcctcccgactgacaaaattctccgtctttgttttaaaaccaaaggacaggccaaccttgagcccggccgtcacccctgtcgcgcttttgttggcgcaggctcggccccctacaccgggctggtgca

SEQ ID NO: 371424 - DNA, 107 bp, Homo sapiens; identical to SEQ ID NO: 350509
  chr7:5467905-5468012
  hyper

SEQ ID NO: 371425 - DNA, 281 bp, Homo sapiens
  chr7:5603124-5603405
  hyper
cgctctctggcccctgcacctgggagaggtggggtgctggaccgagggcgaagtaacagcgtcctgagggcccatccccaaatcgccttccttagggaagccggaacaaacgatgcagcggggcggccctggatctgttccttcctaagagctggagcaggtacagccccatcctagaccccagcaacccgcgcgccctccctcgcaccatctcccctacctggttggttgggttgtggggttccaggcgaccgccaggtggcgcaaccgacgcgcctgcc

SEQ ID NO: 371426 - DNA, 635 bp, Homo sapiens; identical to SEQ ID NO: 346875
  chr7:5632268-5632903
  hyper

SEQ ID NO: 371427 - DNA, 123 bp, Homo sapiens; identical to SEQ ID NO: 350511
  chr7:5633472-5633595
  hyper

SEQ ID NO: 371428 - DNA, 237 bp, Homo sapiens; identical to SEQ ID NO: 358741
  chr7:6543240-6543477
  hyper

SEQ ID NO: 371429 - DNA, 61 bp, Homo sapiens; identical to SEQ ID NO: 358742
  chr7:6570393-6570454
  hyper

SEQ ID NO: 371430 - DNA, 62 bp, Homo sapiens; identical to SEQ ID NO: 284778
  chr7:6655356-6655418
  hyper

SEQ ID NO: 371431 - DNA, 220 bp, Homo sapiens; identical to SEQ ID NO: 284779
  chr7:6655448-6655668
  hyper

SEQ ID NO: 371432 - DNA, 153 bp, Homo sapiens; identical to SEQ ID NO: 358745
  chr7:6655854-6656007
  hyper

SEQ ID NO: 371433 - DNA, 521 bp, Homo sapiens; identical to SEQ ID NO: 333026
  chr7:8301683-8302204
  hyper

SEQ ID NO: 371434 - DNA, 322 bp, Homo sapiens; identical to SEQ ID NO: 345260
  chr7:8476750-8477072
  hyper

SEQ ID NO: 371435 - DNA, 314 bp, Homo sapiens; identical to SEQ ID NO: 333029
  chr7:8480006-8480320
  hyper

SEQ ID NO: 371436 - DNA, 66 bp, Homo sapiens; identical to SEQ ID NO: 333032
  chr7:11870605-11870671
  hyper

SEQ ID NO: 371437 - DNA, 49 bp, Homo sapiens
  chr7:12442871-12442920
  hyper
cggttggaggtggaattcgtgcagtatggaattcaactctgttctgaga

SEQ ID NO: 371438 - DNA, 344 bp, Homo sapiens; identical to SEQ ID NO: 284800
  chr7:12442950-12443294
  hyper

SEQ ID NO: 371439 - DNA, 52 bp, Homo sapiens
  chr7:12443718-12443770
  hyper
acagaggctgtatgaaaacttggtaatcctagaaactgctcagatggacctc

SEQ ID NO: 371440 - DNA, 352 bp, Homo sapiens; identical to SEQ ID NO: 358750
  chr7:14028689-14029041
  hyper

SEQ ID NO: 371441 - DNA, 370 bp, Homo sapiens; identical to SEQ ID NO: 358751
  chr7:14029071-14029441
  hyper

SEQ ID NO: 371442 - DNA, 150 bp, Homo sapiens
  chr7:15725486-15725636
  hyper
cgagggtgcctggcgcgcccttacctgagctgtcgcttttcctcttgccgccgcttcgcttctccgcctccgcaggtgacagtgcctggcggccgtagtcccccggcgcgcacgcggccccagtcggggtgctggagcccaagctggaag

SEQ ID NO: 371443 - DNA, 47 bp, Homo sapiens
  chr7:15726410-15726457
  hyper
cgctcagcctgcgccacgcgctcccagttccacttcctatctcctgc

SEQ ID NO: 371444 - DNA, 89 bp, Homo sapiens
  chr7:15727077-15727166
  hyper
ccacttgtccaccaagaagaacttttcctgggtcaagaatatttccaagcgattgtgtcccggtcatatgagatgtgtagattgcacgc

SEQ ID NO: 371445 - DNA, 373 bp, Homo sapiens; identical to SEQ ID NO: 284815
  chr7:16460517-16460890
  hyper

SEQ ID NO: 371446 - DNA, 271 bp, Homo sapiens; identical to SEQ ID NO: 350515
  chr7:16793071-16793342
  hyper

SEQ ID NO: 371447 - DNA, 182 bp, Homo sapiens; identical to SEQ ID NO: 114656
  chr7:16793380-16793562
  hyper

SEQ ID NO: 371448 - DNA, 215 bp, Homo sapiens; identical to SEQ ID NO: 350517
  chr7:17339346-17339561
  hyper

SEQ ID NO: 371449 - DNA, 260 bp, Homo sapiens; identical to SEQ ID NO: 350518
  chr7:17339591-17339851
  hyper

SEQ ID NO: 371450 - DNA, 104 bp, Homo sapiens; identical to SEQ ID NO: 346877
  chr7:18125868-18125972
  hyper

SEQ ID NO: 371451 - DNA, 218 bp, Homo sapiens; identical to SEQ ID NO: 200838
  chr7:18126225-18126443
  hyper

SEQ ID NO: 371452 - DNA, 76 bp, Homo sapiens; identical to SEQ ID NO: 350521
  chr7:19146849-19146925
  hyper

SEQ ID NO: 371453 - DNA, 59 bp, Homo sapiens; identical to SEQ ID NO: 200840
  chr7:19156644-19156703
  hyper

SEQ ID NO: 371454 - DNA, 127 bp, Homo sapiens; identical to SEQ ID NO: 350523
  chr7:19183520-19183647
  hyper

SEQ ID NO: 371455 - DNA, 312 bp, Homo sapiens; identical to SEQ ID NO: 284827
  chr7:19183746-19184058
  hyper

SEQ ID NO: 371456 - DNA, 276 bp, Homo sapiens; identical to SEQ ID NO: 333045
  chr7:20369119-20369395
  hyper

SEQ ID NO: 371457 - DNA, 85 bp, Homo sapiens
  chr7:20817295-20817380
  hyper
cgctgcactttgacgtcgctggggagaggaggcgggtgcgagtgaacacaaagcagtttggccaagaaaagagcacaggaggtga

SEQ ID NO: 371458 - DNA, 127 bp, Homo sapiens; identical to SEQ ID NO: 200844
  chr7:20817410-20817537
  hyper

SEQ ID NO: 371459 - DNA, 119 bp, Homo sapiens; identical to SEQ ID NO: 200845
  chr7:20825260-20825379
  hyper

SEQ ID NO: 371460 - DNA, 460 bp, Homo sapiens
  chr7:20825559-20826019
  hyper
aactcacctggcacccccaacagccccggcgcccggccgcttcctactctacaggaggggacaagtttggctgccggcgtctgattcgggagcaagcaccacgctaaagaagagtttgacaagtattctcacctaaaacaacactctcttgcacacaaagccccagacacttcgtaacaaacaagcaaaaagtccagattggagaggaaggaagttttctttgccgagaagcctgggggaaaaccattggattgcttttaagagcgcttccctgtaatccggagagctttgaaaaacctgttcgggtccccagaaacccatcctgggttgtttctcccaggccaaaagaaatcaaactgtagggctcactctttcttcctgcttttctttctttctttttttaaaagcatatctacagtagtaaaaacgagacgagttcaacgtacctgcgagacaaggc

SEQ ID NO: 371461 - DNA, 297 bp, Homo sapiens; identical to SEQ ID NO: 200847
  chr7:20826202-20826499
  hyper

SEQ ID NO: 371462 - DNA, 60 bp, Homo sapiens; identical to SEQ ID NO: 284837
  chr7:20827463-20827523
  hyper

SEQ ID NO: 371463 - DNA, 79 bp, Homo sapiens
  chr7:20827557-20827636
  hyper
gaggaggtgtgtgtgtcccgtggtgttgagtaaatttcaatacaaaaggattagatagagaagagagtaagcgagggtc

SEQ ID NO: 371464 - DNA, 41 bp, Homo sapiens; identical to SEQ ID NO: 358766
  chr7:20830567-20830608
  hyper

SEQ ID NO: 371465 - DNA, 147 bp, Homo sapiens; identical to SEQ ID NO: 358767
  chr7:20836997-20837144
  hyper

SEQ ID NO: 371466 - DNA, 255 bp, Homo sapiens; identical to SEQ ID NO: 333054
  chr7:21293835-21294090
  hyper

SEQ ID NO: 371467 - DNA, 49 bp, Homo sapiens; identical to SEQ ID NO: 358768
  chr7:21582471-21582520
  hyper

SEQ ID NO: 371468 - DNA, 176 bp, Homo sapiens
  chr7:21583452-21583628
  hyper
gagcctgttcgaccaggataacccaagaacaccagcgctttctttagctgcttgggtgttaggcgccaggtgggctttctgtgccaaaaaacttgcgtttcagttgctcttgggtcactctggagtcacatcctttaaaaaatggggtgtttggcagagcgcatgtaactcgtcac

SEQ ID NO: 371469 - DNA, 1116 bp, Homo sapiens; identical to SEQ ID NO: 350525
  chr7:21984770-21985886
  hyper

SEQ ID NO: 371470 - DNA, 136 bp, Homo sapiens; identical to SEQ ID NO: 358770
  chr7:22589952-22590088
  hyper

SEQ ID NO: 371471 - DNA, 140 bp, Homo sapiens; identical to SEQ ID NO: 345262
  chr7:22893437-22893577
  hyper

SEQ ID NO: 371472 - DNA, 1088 bp, Homo sapiens; identical to SEQ ID NO: 345263
  chr7:22893607-22894695
  hyper

SEQ ID NO: 371473 - DNA, 209 bp, Homo sapiens; identical to SEQ ID NO: 346882
  chr7:23052818-23053027
  hyper

SEQ ID NO: 371474 - DNA, 713 bp, Homo sapiens; identical to SEQ ID NO: 284856
  chr7:23053080-23053793
  hyper

SEQ ID NO: 371475 - DNA, 246 bp, Homo sapiens; identical to SEQ ID NO: 350530
  chr7:23053819-23054065
  hyper

SEQ ID NO: 371476 - DNA, 107 bp, Homo sapiens; identical to SEQ ID NO: 346884
  chr7:23287654-23287761
  hyper

SEQ ID NO: 371477 - DNA, 522 bp, Homo sapiens; identical to SEQ ID NO: 350532
  chr7:23507580-23508102
  hyper

SEQ ID NO: 371478 - DNA, 760 bp, Homo sapiens; identical to SEQ ID NO: 350533
  chr7:23510081-23510841
  hyper

SEQ ID NO: 371479 - DNA, 228 bp, Homo sapiens; identical to SEQ ID NO: 346885
  chr7:23513246-23513474
  hyper

SEQ ID NO: 371480 - DNA, 241 bp, Homo sapiens; identical to SEQ ID NO: 284862
  chr7:23514425-23514666
  hyper

SEQ ID NO: 371481 - DNA, 221 bp, Homo sapiens; identical to SEQ ID NO: 333064
  chr7:23570157-23570378
  hyper

SEQ ID NO: 371482 - DNA, 285 bp, Homo sapiens; identical to SEQ ID NO: 333065
  chr7:23570662-23570947
  hyper

SEQ ID NO: 371483 - DNA, 42 bp, Homo sapiens; identical to SEQ ID NO: 358783
  chr7:23719658-23719700
  hyper

SEQ ID NO: 371484 - DNA, 868 bp, Homo sapiens; identical to SEQ ID NO: 333067
  chr7:24613119-24613987
  hyper

SEQ ID NO: 371485 - DNA, 1196 bp, Homo sapiens
  chr7:25019058-25020254
  hyper
cgttgtctcagtctctccggcgcgccccatcccgcggatgtggtaaagcttcgcgctcgccccaatttaccaggcttcctgagcctctagccccggcgtagcgcctccccgctgcccaggacagctccgcgcgccgcgtcctcccgcacctgcgccgcggcccctgcgctcggctcctcctggcggtcaatcctctgagccgtccctcgagggaaggtgtcctggggtgggtgagacccgggtcctccttccccgggagctgcagccggcacccaagctcccaggcttgggtctgccccagggccggagcctccccgggcgactcggacagaccccggtccggcagagaaccgcggcgccccgcaaacagcagcccttccgagcccgcgccgccgccaggccccccgacacccaggccccatttaggcgggcgccccgccactcacctgagcgctgtgcagccggagacgctccctagttccccggggccgggctccggggttagcgcacagaaccgggagaaggcaaccccggcttctccggtacccccgcaacgtgcagctgacagctcccgcaccggccgcaggagtcgggggcggggatggccacttgcagacagactgcggggccggagccgcgctgcgcaccggccgcgaagcgctcaagtcccctctcccgggccggctggcgggcgccaccagcacgcggccagttctgagtactttgcccagaacttctcggcgcgcgccgcccggcgattagcccgaggagccgcgcaagggcgggagcgcaggggaggggcctgagaggcccaggggcggggccccgagggggcgggagggcggcagagtgatgcacaatctcaccaatcagaagtcgcctttcgggaaggaggtggggcgatgtcctcggaagaagccagcggattccatgacgcggcgggggaactagggaccccggattccggatgggttgggagggcggagggaggcgagtcctgcggcgaggcactgggtggggctcccggtggcccagctcggtgcctgcgcgcggtaggcgttcggtaaatgttcctctagtggcttttccgggccagggaaggaggaaaaagtgagggcagcgcgggaggggcaggtttacggagaaggctccaggggacccttgcggtcgcacaggctaggagaactcgacctccc

SEQ ID NO: 371486 - DNA, 188 bp, Homo sapiens; identical to SEQ ID NO: 200878
  chr7:25892243-25892431
  hyper

SEQ ID NO: 371487 - DNA, 338 bp, Homo sapiens; identical to SEQ ID NO: 333071
  chr7:25894678-25895016
  hyper

SEQ ID NO: 371488 - DNA, 195 bp, Homo sapiens; identical to SEQ ID NO: 284882
  chr7:25896938-25897133
  hyper

SEQ ID NO: 371489 - DNA, 109 bp, Homo sapiens; identical to SEQ ID NO: 345266
  chr7:25897246-25897355
  hyper

SEQ ID NO: 371490 - DNA, 295 bp, Homo sapiens; identical to SEQ ID NO: 346890
  chr7:25901811-25902106
  hyper

SEQ ID NO: 371491 - DNA, 207 bp, Homo sapiens; identical to SEQ ID NO: 200882
  chr7:25902138-25902345
  hyper

SEQ ID NO: 371492 - DNA, 98 bp, Homo sapiens
  chr7:25989912-25990010
  hyper
cgaaccctcacctccctcggtagttatttaaacttttgccagcagctaactcactctaacttgtggcaactttttaccttcccatctggaaagctggg

SEQ ID NO: 371493 - DNA, 585 bp, Homo sapiens
  chr7:25990228-25990813
  hyper
ccatcccctccgttccacccacccactctttgggattctccctgccccattaggcagtgcttcccgcggaccccgttcgcgcacaaccttgcacacagtccccaagactgctcttctccccctcccggcacccccttttccctgcagcataagcgaccactctgtcccccatcctagcagaccccctccccccacataccgcacctgaacagctgttgcgcgcgtgcaacaggtctggaaagtgctttcccatcttcccccaaacccctcgccaccgttccatcccccgccacccctaagagacaaggccggaggggcagtgggctgcgtcccccgggccggggtgcacgggcggctggcggagtgcggggcgcccagaggctcccggggttgggggcggtggtcgcgctgggccgggacaccttcgcgagtggcccctcgtgcgcccgccgcaggctccccagcctgcccctccagcgccggccgccaggcattcccgggccggctcccccctcgcgctccgctccgctcccttccatcttgacttttgccgacgtggaaattttgggtttggagacgacctgc

SEQ ID NO: 371494 - DNA, 224 bp, Homo sapiens; identical to SEQ ID NO: 345267
  chr7:26192423-26192647
  hyper

SEQ ID NO: 371495 - DNA, 111 bp, Homo sapiens; identical to SEQ ID NO: 200885
  chr7:26192748-26192859
  hyper

SEQ ID NO: 371496 - DNA, 90 bp, Homo sapiens; identical to SEQ ID NO: 345269
  chr7:27135176-27135266
  hyper

SEQ ID NO: 371497 - DNA, 142 bp, Homo sapiens; identical to SEQ ID NO: 345270
  chr7:27136790-27136932
  hyper

SEQ ID NO: 371498 - DNA, 66 bp, Homo sapiens; identical to SEQ ID NO: 358796
  chr7:27203938-27204004
  hyper

SEQ ID NO: 371499 - DNA, 243 bp, Homo sapiens; identical to SEQ ID NO: 200892
  chr7:27204141-27204384
  hyper

SEQ ID NO: 371500 - DNA, 418 bp, Homo sapiens; identical to SEQ ID NO: 284906
  chr7:27209044-27209462
  hyper

SEQ ID NO: 371501 - DNA, 108 bp, Homo sapiens; identical to SEQ ID NO: 284907
  chr7:27209681-27209789
  hyper

SEQ ID NO: 371502 - DNA, 104 bp, Homo sapiens; identical to SEQ ID NO: 358800
  chr7:27223010-27223114
  hyper

SEQ ID NO: 371503 - DNA, 268 bp, Homo sapiens; identical to SEQ ID NO: 200894
  chr7:27223306-27223574
  hyper

SEQ ID NO: 371504 - DNA, 47 bp, Homo sapiens; identical to SEQ ID NO: 358802
  chr7:27225249-27225296
  hyper

SEQ ID NO: 371505 - DNA, 59 bp, Homo sapiens; identical to SEQ ID NO: 350549
  chr7:27233098-27233157
  hyper

SEQ ID NO: 371506 - DNA, 226 bp, Homo sapiens
  chr7:27237765-27237991
  hyper
cgagttctgaagcgtttcttcaagttgccttcttgctctatttttaatccattaactagtggttttcagtttgttgatgacttttttctctttaaccctcctgttctggaaccagattgtgacctgccgctcagagagattcgtcgtggctgatatccgcctccgtttgtccttagtaatgaatttattcgtggcgtattcccgttcaagttcttttaattgcacc

SEQ ID NO: 371507 - DNA, 178 bp, Homo sapiens
  chr7:27238170-27238348
  hyper
acccgctgtacaatcctgtcttctgctaaagcctagagggtcagtggggaaggtagttagttctgaactgaaatgaaatcacccagggctccagtgacttccccaacccggccatcctgcaggagcagcgcgtaggcagcctcgagtgatagcctggtccaacggcccacaccttagc

SEQ ID NO: 371508 - DNA, 224 bp, Homo sapiens; identical to SEQ ID NO: 200900
  chr7:27238917-27239141
  hyper

SEQ ID NO: 371509 - DNA, 71 bp, Homo sapiens; identical to SEQ ID NO: 350551
  chr7:27245310-27245381
  hyper

SEQ ID NO: 371510 - DNA, 263 bp, Homo sapiens; identical to SEQ ID NO: 358806
  chr7:27250231-27250494
  hyper

SEQ ID NO: 371511 - DNA, 37 bp, Homo sapiens; identical to SEQ ID NO: 350552
  chr7:27278957-27278994
  hyper

SEQ ID NO: 371512 - DNA, 136 bp, Homo sapiens; identical to SEQ ID NO: 350553
  chr7:27279659-27279795
  hyper

SEQ ID NO: 371513 - DNA, 77 bp, Homo sapiens; identical to SEQ ID NO: 350554
  chr7:27281871-27281948
  hyper

SEQ ID NO: 371514 - DNA, 59 bp, Homo sapiens; identical to SEQ ID NO: 200908
  chr7:27285386-27285445
  hyper

SEQ ID NO: 371515 - DNA, 371 bp, Homo sapiens; identical to SEQ ID NO: 284934
  chr7:28450240-28450611
  hyper

SEQ ID NO: 371516 - DNA, 185 bp, Homo sapiens; identical to SEQ ID NO: 350556
  chr7:28995382-28995567
  hyper

SEQ ID NO: 371517 - DNA, 332 bp, Homo sapiens; identical to SEQ ID NO: 200912
  chr7:28995992-28996324
  hyper

SEQ ID NO: 371518 - DNA, 55 bp, Homo sapiens
  chr7:28998209-28998264
  hyper
tctgcgagcggagagcaaacggggcggaaattcgttcttcccacactctgcccgc

SEQ ID NO: 371519 - DNA, 161 bp, Homo sapiens; identical to SEQ ID NO: 350558
  chr7:29185654-29185815
  hyper

SEQ ID NO: 371520 - DNA, 37 bp, Homo sapiens; identical to SEQ ID NO: 200915
  chr7:29186197-29186234
  hyper

SEQ ID NO: 371521 - DNA, 496 bp, Homo sapiens; identical to SEQ ID NO: 200916
  chr7:29234008-29234504
  hyper

SEQ ID NO: 371522 - DNA, 159 bp, Homo sapiens; identical to SEQ ID NO: 345272
  chr7:29234886-29235045
  hyper

SEQ ID NO: 371523 - DNA, 292 bp, Homo sapiens; identical to SEQ ID NO: 346899
  chr7:29602717-29603009
  hyper

SEQ ID NO: 371524 - DNA, 66 bp, Homo sapiens; identical to SEQ ID NO: 350563
  chr7:29604726-29604792
  hyper

SEQ ID NO: 371525 - DNA, 156 bp, Homo sapiens; identical to SEQ ID NO: 358820
  chr7:29847067-29847223
  hyper

SEQ ID NO: 371526 - DNA, 108 bp, Homo sapiens
  chr7:31091717-31091825
  hyper
cgcccccgacccccgccgctgggatttcccgccgcagctcctgctccagtctgtgctgcgggtggggtcgggttgagcagcccggcgccccccaccgcgccccccacc

SEQ ID NO: 371527 - DNA, 69 bp, Homo sapiens; identical to SEQ ID NO: 200930
  chr7:31091826-31091895
  hyper

SEQ ID NO: 371528 - DNA, 31 bp, Homo sapiens; identical to SEQ ID NO: 350564
  chr7:31528326-31528357
  hyper

SEQ ID NO: 371529 - DNA, 338 bp, Homo sapiens; identical to SEQ ID NO: 358822
  chr7:32981774-32982112
  hyper

SEQ ID NO: 371530 - DNA, 687 bp, Homo sapiens
  chr7:32982270-32982957
  hyper
ggcccctccgtggccgggcgggcctcgctccccacccagtgaggactagaagtcccgtcgcaggcactaggttcctcacaggcccgcacccctgcctgggtcctgggggcttggaggacccagcccagcgcccaacacggcgccgggcgcccctgttcccagaaaacgggcggcgcgcggactgcggcccagacggctgctcgagactcacaaggactccaggcgcttgagctgctgcagctgctgggcgtcgtgccgccgccgcttctgctcccgggcccgctgcagttcctgatccagcggctcccgcggccaccacgcgcccccagccctcgcatcctcgcgccccggccaggacgacatcgcggcacctgcggcgcggctctggctgcggccaagagggcacttcctccgtgcggcgccccttcccgccgccgccccgcgactcgcccgggaggggccccgaagtcccggcctcggccgccagatgcccgcctgcccgcggccggccccaagtcagtgcgcagagccccagagcccagccgccggtgggcggggagcgcccgctggcggcggctggagccgaggcggggcggggccctggttgggagcctggggaagcttccaggagcttcagggttcccgccaggccacactcatctccctgcccctttgaggttcccgacc

SEQ ID NO: 371531 - DNA, 212 bp, Homo sapiens; identical to SEQ ID NO: 358824
  chr7:32996732-32996944
  hyper

SEQ ID NO: 371532 - DNA, 155 bp, Homo sapiens; identical to SEQ ID NO: 358825
  chr7:32997454-32997609
  hyper

SEQ ID NO: 371533 - DNA, 308 bp, Homo sapiens; identical to SEQ ID NO: 333118
  chr7:35576961-35577269
  hyper

SEQ ID NO: 371534 - DNA, 164 bp, Homo sapiens
  chr7:35839776-35839940
  hyper
cgacattcatcgctacagtagaaactcacacaatcgcagccctttattagtattttgttacccagtagttcctgtgtccattcatttcctcaactggagtgtgagctccaagaggaccgaaccgggcaccgacaaggtgagccaatatgaatgtggcgagtccg

SEQ ID NO: 371535 - DNA, 58 bp, Homo sapiens
  chr7:35840078-35840136
  hyper
atggggagcacagacacctgcctcgaagtgtctcttcactttcactcacaaagccgtc

SEQ ID NO: 371536 - DNA, 40 bp, Homo sapiens; identical to SEQ ID NO: 358827
  chr7:37955597-37955637
  hyper

SEQ ID NO: 371537 - DNA, 204 bp, Homo sapiens; identical to SEQ ID NO: 200945
  chr7:37956056-37956260
  hyper

SEQ ID NO: 371538 - DNA, 136 bp, Homo sapiens; identical to SEQ ID NO: 358829
  chr7:37956568-37956704
  hyper

SEQ ID NO: 371539 - DNA, 168 bp, Homo sapiens; identical to SEQ ID NO: 345273
  chr7:37960958-37961126
  hyper

SEQ ID NO: 371540 - DNA, 46 bp, Homo sapiens; identical to SEQ ID NO: 350567
  chr7:39454304-39454350
  hyper

SEQ ID NO: 371541 - DNA, 62 bp, Homo sapiens; identical to SEQ ID NO: 350568
  chr7:42267546-42267608
  hyper

SEQ ID NO: 371542 - DNA, 139 bp, Homo sapiens; identical to SEQ ID NO: 350569
  chr7:42267822-42267961
  hyper

SEQ ID NO: 371543 - DNA, 408 bp, Homo sapiens; identical to SEQ ID NO: 200954
  chr7:42276904-42277312
  hyper

SEQ ID NO: 371544 - DNA, 60 bp, Homo sapiens; identical to SEQ ID NO: 200955
  chr7:42277588-42277648
  hyper

SEQ ID NO: 371545 - DNA, 51 bp, Homo sapiens; identical to SEQ ID NO: 346902
  chr7:42927739-42927790
  hyper

SEQ ID NO: 371546 - DNA, 412 bp, Homo sapiens; identical to SEQ ID NO: 346903
  chr7:42928175-42928587
  hyper

SEQ ID NO: 371547 - DNA, 36 bp, Homo sapiens; identical to SEQ ID NO: 285008
  chr7:44349523-44349559
  hyper

SEQ ID NO: 371548 - DNA, 38 bp, Homo sapiens; identical to SEQ ID NO: 350573
  chr7:44364447-44364485
  hyper

SEQ ID NO: 371549 - DNA, 369 bp, Homo sapiens; identical to SEQ ID NO: 346904
  chr7:44365258-44365627
  hyper

SEQ ID NO: 371550 - DNA, 211 bp, Homo sapiens; identical to SEQ ID NO: 333131
  chr7:44788907-44789118
  hyper

SEQ ID NO: 371551 - DNA, 160 bp, Homo sapiens; identical to SEQ ID NO: 350576
  chr7:44924093-44924253
  hyper

SEQ ID NO: 371552 - DNA, 309 bp, Homo sapiens; identical to SEQ ID NO: 200961
  chr7:44924469-44924778
  hyper

SEQ ID NO: 371553 - DNA, 168 bp, Homo sapiens; identical to SEQ ID NO: 358843
  chr7:45299683-45299851
  hyper

SEQ ID NO: 371554 - DNA, 95 bp, Homo sapiens; identical to SEQ ID NO: 358844
  chr7:45615102-45615197
  hyper

SEQ ID NO: 371555 - DNA, 219 bp, Homo sapiens
  chr7:47621704-47621923
  hyper
cgagtagcgcgcgggcgggcccgtcctcctggctggctgccggcgcccgcggcagggccccctcgaggcggcgcgggcaatcgccacggccggcccccgcgcccgcgccccgagcctggcgggtcacctggcctcatcaccctaacaatgcagcgcgcctccaggcgcccttcaccggggtcccccgccctgccgaggtgcgccctgggacctcccttc

SEQ ID NO: 371556 - DNA, 55 bp, Homo sapiens; identical to SEQ ID NO: 200968
  chr7:48075904-48075959
  hyper

SEQ ID NO: 371557 - DNA, 102 bp, Homo sapiens; identical to SEQ ID NO: 345274
  chr7:50344738-50344840
  hyper

SEQ ID NO: 371558 - DNA, 41 bp, Homo sapiens
  chr7:50860152-50860193
  hyper
cgcacatgctccaaggcagtcgtcaggcaggcgtttggaga

SEQ ID NO: 371559 - DNA, 208 bp, Homo sapiens; identical to SEQ ID NO: 200972
  chr7:50861127-50861335
  hyper

SEQ ID NO: 371560 - DNA, 106 bp, Homo sapiens; identical to SEQ ID NO: 350580
  chr7:50861531-50861637
  hyper

SEQ ID NO: 371561 - DNA, 362 bp, Homo sapiens; identical to SEQ ID NO: 200974
  chr7:51383392-51383754
  hyper

SEQ ID NO: 371562 - DNA, 461 bp, Homo sapiens; identical to SEQ ID NO: 200975
  chr7:51383790-51384251
  hyper

SEQ ID NO: 371563 - DNA, 152 bp, Homo sapiens; identical to SEQ ID NO: 358851
  chr7:51384951-51385103
  hyper

SEQ ID NO: 371564 - DNA, 294 bp, Homo sapiens; identical to SEQ ID NO: 200980
  chr7:55086689-55086983
  hyper

SEQ ID NO: 371565 - DNA, 144 bp, Homo sapiens; identical to SEQ ID NO: 200981
  chr7:55087803-55087947
  hyper

SEQ ID NO: 371566 - DNA, 78 bp, Homo sapiens; identical to SEQ ID NO: 358854
  chr7:55087982-55088060
  hyper

SEQ ID NO: 371567 - DNA, 392 bp, Homo sapiens
  chr7:55640395-55640787
  hyper
cgtcctgtcgccctagactaaacccaggaaggcttttaaaagaagcagagtctccgcggggggaagcttgttccctgagaggtggccgcagacgaacccactgctcagtctggcatcccgaagccgctccgctcctggctctccccgctgttcctgcgcgcagcgggggcagtgcccccacacccacgcgtgatgggaaggccggcctgggggtgggaaggcccaccgaaatagatggtccccacacctcactgcttccttggatgtggctattttttatgccagtgttctcctgctctgaccctacttgaacttgaccgcaaccggccccgccttgcaggccaccctcccgcagcagaaaactgtgcggagctcgcgctgtcctcgcctcc

SEQ ID NO: 371568 - DNA, 65 bp, Homo sapiens; identical to SEQ ID NO: 333144
  chr7:63767198-63767263
  hyper

SEQ ID NO: 371569 - DNA, 110 bp, Homo sapiens; identical to SEQ ID NO: 333146
  chr7:64254700-64254810
  hyper

SEQ ID NO: 371570 - DNA, 192 bp, Homo sapiens; identical to SEQ ID NO: 200988
  chr7:64349139-64349331
  hyper

SEQ ID NO: 371571 - DNA, 412 bp, Homo sapiens; identical to SEQ ID NO: 200989
  chr7:64349470-64349882
  hyper

SEQ ID NO: 371572 - DNA, 48 bp, Homo sapiens
  chr7:64350036-64350084
  hyper
tggaaccgtcgccctggggcccctccgccccgcaaacgctcgggatgc

SEQ ID NO: 371573 - DNA, 56 bp, Homo sapiens; identical to SEQ ID NO: 346907
  chr7:64734140-64734196
  hyper

SEQ ID NO: 371574 - DNA, 60 bp, Homo sapiens; identical to SEQ ID NO: 200992
  chr7:64974448-64974508
  hyper

SEQ ID NO: 371575 - DNA, 51 bp, Homo sapiens; identical to SEQ ID NO: 346909
  chr7:65037711-65037762
  hyper

SEQ ID NO: 371576 - DNA, 469 bp, Homo sapiens; identical to SEQ ID NO: 200994
  chr7:65509043-65509512
  hyper

SEQ ID NO: 371577 - DNA, 51 bp, Homo sapiens; identical to SEQ ID NO: 358861
  chr7:65509542-65509593
  hyper

SEQ ID NO: 371578 - DNA, 156 bp, Homo sapiens; identical to SEQ ID NO: 350587
  chr7:69062203-69062359
  hyper

SEQ ID NO: 371579 - DNA, 421 bp, Homo sapiens; identical to SEQ ID NO: 201000
  chr7:69063038-69063459
  hyper

SEQ ID NO: 371580 - DNA, 318 bp, Homo sapiens; identical to SEQ ID NO: 201001
  chr7:69063552-69063870
  hyper

SEQ ID NO: 371581 - DNA, 282 bp, Homo sapiens; identical to SEQ ID NO: 201002
  chr7:69063900-69064182
  hyper

SEQ ID NO: 371582 - DNA, 200 bp, Homo sapiens; identical to SEQ ID NO: 350591
  chr7:69065161-69065361
  hyper

SEQ ID NO: 371583 - DNA, 181 bp, Homo sapiens; identical to SEQ ID NO: 346910
  chr7:70060834-70061015
  hyper

SEQ ID NO: 371584 - DNA, 238 bp, Homo sapiens; identical to SEQ ID NO: 346911
  chr7:70061149-70061387
  hyper

SEQ ID NO: 371585 - DNA, 58 bp, Homo sapiens; identical to SEQ ID NO: 350594
  chr7:76145303-76145361
  hyper

SEQ ID NO: 371586 - DNA, 106 bp, Homo sapiens; identical to SEQ ID NO: 346912
  chr7:76751570-76751676
  hyper

SEQ ID NO: 371587 - DNA, 230 bp, Homo sapiens; identical to SEQ ID NO: 346913
  chr7:76751716-76751946
  hyper

SEQ ID NO: 371588 - DNA, 131 bp, Homo sapiens; identical to SEQ ID NO: 285105
  chr7:79081892-79082023
  hyper

SEQ ID NO: 371589 - DNA, 441 bp, Homo sapiens; identical to SEQ ID NO: 285106
  chr7:79082579-79083020
  hyper

SEQ ID NO: 371590 - DNA, 116 bp, Homo sapiens; identical to SEQ ID NO: 358874
  chr7:79084011-79084127
  hyper

SEQ ID NO: 371591 - DNA, 258 bp, Homo sapiens; identical to SEQ ID NO: 201015
  chr7:79764213-79764471
  hyper

SEQ ID NO: 371592 - DNA, 216 bp, Homo sapiens; identical to SEQ ID NO: 201016
  chr7:79764712-79764928
  hyper

SEQ ID NO: 371593 - DNA, 229 bp, Homo sapiens; identical to SEQ ID NO: 358877
  chr7:79765213-79765442
  hyper

SEQ ID NO: 371594 - DNA, 236 bp, Homo sapiens; identical to SEQ ID NO: 358878
  chr7:80548021-80548257
  hyper

SEQ ID NO: 371595 - DNA, 446 bp, Homo sapiens; identical to SEQ ID NO: 358879
  chr7:80548403-80548849
  hyper

SEQ ID NO: 371596 - DNA, 351 bp, Homo sapiens; identical to SEQ ID NO: 201017
  chr7:82072703-82073054
  hyper

SEQ ID NO: 371597 - DNA, 172 bp, Homo sapiens; identical to SEQ ID NO: 358881
  chr7:82073323-82073495
  hyper

SEQ ID NO: 371598 - DNA, 40 bp, Homo sapiens; identical to SEQ ID NO: 358882
  chr7:82073533-82073573
  hyper

SEQ ID NO: 371599 - DNA, 79 bp, Homo sapiens; identical to SEQ ID NO: 350603
  chr7:83277846-83277925
  hyper

SEQ ID NO: 371600 - DNA, 258 bp, Homo sapiens; identical to SEQ ID NO: 201022
  chr7:83277959-83278217
  hyper

SEQ ID NO: 371601 - DNA, 45 bp, Homo sapiens; identical to SEQ ID NO: 346914
  chr7:87258398-87258443
  hyper

SEQ ID NO: 371602 - DNA, 167 bp, Homo sapiens; identical to SEQ ID NO: 358886
  chr7:87563203-87563370
  hyper

SEQ ID NO: 371603 - DNA, 215 bp, Homo sapiens; identical to SEQ ID NO: 285133
  chr7:87563614-87563829
  hyper

SEQ ID NO: 371604 - DNA, 439 bp, Homo sapiens; identical to SEQ ID NO: 285134
  chr7:87563890-87564329
  hyper

SEQ ID NO: 371605 - DNA, 207 bp, Homo sapiens; identical to SEQ ID NO: 350608
  chr7:87564359-87564566
  hyper

SEQ ID NO: 371606 - DNA, 106 bp, Homo sapiens; identical to SEQ ID NO: 350609
  chr7:87936014-87936120
  hyper

SEQ ID NO: 371607 - DNA, 188 bp, Homo sapiens; identical to SEQ ID NO: 350610
  chr7:87936226-87936414
  hyper

SEQ ID NO: 371608 - DNA, 185 bp, Homo sapiens
  chr7:89840705-89840890
  hyper
cgcgtaagaaaagcaatttctagagcggaaaggtgaccccacattacaaaaagaaatggagtagaaaaataggcttgactattctaaagctgcttcagaaagaatctccggaagaccacggaggaaccccgcaggggagccaggcggatactcagccgctcgcggtagaagggcgcgcaaagctg

SEQ ID NO: 371609 - DNA, 91 bp, Homo sapiens; identical to SEQ ID NO: 201037
  chr7:89841066-89841157
  hyper

SEQ ID NO: 371610 - DNA, 57 bp, Homo sapiens
  chr7:89841396-89841453
  hyper
gcggcggagttgagggtcaagatgcagtctgcgccacgcgctgcatccatcctcccc

SEQ ID NO: 371611 - DNA, 636 bp, Homo sapiens; identical to SEQ ID NO: 358892
  chr7:90225109-90225745
  hyper

SEQ ID NO: 371612 - DNA, 211 bp, Homo sapiens; identical to SEQ ID NO: 201040
  chr7:90226057-90226268
  hyper

SEQ ID NO: 371613 - DNA, 204 bp, Homo sapiens; identical to SEQ ID NO: 358894
  chr7:93203842-93204046
  hyper

SEQ ID NO: 371614 - DNA, 170 bp, Homo sapiens; identical to SEQ ID NO: 285166
  chr7:93204047-93204217
  hyper

SEQ ID NO: 371615 - DNA, 139 bp, Homo sapiens; identical to SEQ ID NO: 350613
  chr7:94285147-94285286
  hyper

SEQ ID NO: 371616 - DNA, 38 bp, Homo sapiens; identical to SEQ ID NO: 350614
  chr7:94536809-94536847
  hyper

SEQ ID NO: 371617 - DNA, 279 bp, Homo sapiens; identical to SEQ ID NO: 201051
  chr7:94537598-94537877
  hyper

SEQ ID NO: 371618 - DNA, 472 bp, Homo sapiens; identical to SEQ ID NO: 350616
  chr7:95025593-95026065
  hyper

SEQ ID NO: 371619 - DNA, 101 bp, Homo sapiens; identical to SEQ ID NO: 358900
  chr7:95226207-95226308
  hyper

SEQ ID NO: 371620 - DNA, 155 bp, Homo sapiens
  chr7:96632634-96632789
  hyper
cgatttgtaaacgtgtagatcgtgttactggttcgcgtgttaaagtgcacctcttgttaaaaggtggggaacagggcacgccacttaaaaatgaattcagagttactgaaccggctccccagactcaagaacttaagcgcaacgggctgggaaaa

SEQ ID NO: 371621 - DNA, 177 bp, Homo sapiens
  chr7:96632819-96632996
  hyper
cctgggaactcggaggaaactcgcgggcagcgagcttcaggtcttctgatacattgaaggaaagaaagaaagacagaaaaagaaaaaaacaaactgtcctggagatagctagacatccagggctgggagctgggaaaatcaattggcataagccgctgccggcgggcttcgcgcaac

SEQ ID NO: 371622 - DNA, 319 bp, Homo sapiens; identical to SEQ ID NO: 285182
  chr7:96634326-96634645
  hyper

SEQ ID NO: 371623 - DNA, 31 bp, Homo sapiens
  chr7:96636807-96636838
  hyper
aagagaggtcggggcatcatagggatttttc

SEQ ID NO: 371624 - DNA, 261 bp, Homo sapiens; identical to SEQ ID NO: 285189
  chr7:96652921-96653182
  hyper

SEQ ID NO: 371625 - DNA, 235 bp, Homo sapiens; identical to SEQ ID NO: 358902
  chr7:98030416-98030651
  hyper

SEQ ID NO: 371626 - DNA, 77 bp, Homo sapiens; identical to SEQ ID NO: 201060
  chr7:98971600-98971677
  hyper

SEQ ID NO: 371627 - DNA, 396 bp, Homo sapiens; identical to SEQ ID NO: 346916
  chr7:98971810-98972206
  hyper

SEQ ID NO: 371628 - DNA, 79 bp, Homo sapiens; identical to SEQ ID NO: 345275
  chr7:99155672-99155751
  hyper

SEQ ID NO: 371629 - DNA, 215 bp, Homo sapiens; identical to SEQ ID NO: 201064
  chr7:99156600-99156815
  hyper

SEQ ID NO: 371630 - DNA, 77 bp, Homo sapiens; identical to SEQ ID NO: 345277
  chr7:99156982-99157059
  hyper

SEQ ID NO: 371631 - DNA, 154 bp, Homo sapiens; identical to SEQ ID NO: 333194
  chr7:99680237-99680391
  hyper

SEQ ID NO: 371632 - DNA, 243 bp, Homo sapiens; identical to SEQ ID NO: 345279
  chr7:100167136-100167379
  hyper

SEQ ID NO: 371633 - DNA, 239 bp, Homo sapiens; identical to SEQ ID NO: 285218
  chr7:100167621-100167860
  hyper

SEQ ID NO: 371634 - DNA, 145 bp, Homo sapiens; identical to SEQ ID NO: 350625
  chr7:100168054-100168199
  hyper

SEQ ID NO: 371635 - DNA, 754 bp, Homo sapiens; identical to SEQ ID NO: 358912
  chr7:100202089-100202843
  hyper

SEQ ID NO: 371636 - DNA, 277 bp, Homo sapiens; identical to SEQ ID NO: 358913
  chr7:100203058-100203335
  hyper

SEQ ID NO: 371637 - DNA, 105 bp, Homo sapiens; identical to SEQ ID NO: 285222
  chr7:100203366-100203471
  hyper

SEQ ID NO: 371638 - DNA, 50 bp, Homo sapiens; identical to SEQ ID NO: 358915
  chr7:100203505-100203555
  hyper

SEQ ID NO: 371639 - DNA, 379 bp, Homo sapiens; identical to SEQ ID NO: 333199
  chr7:100224197-100224576
  hyper

SEQ ID NO: 371640 - DNA, 58 bp, Homo sapiens; identical to SEQ ID NO: 358917
  chr7:100254132-100254190
  hyper

SEQ ID NO: 371641 - DNA, 242 bp, Homo sapiens
  chr7:100660381-100660623
  hyper
cggagtccagagagtgagtggttctgcgggaccaggaagtaagtgatcgctgtgctccgggaggatgctggaagaagattccagacgcagcttttttgcctgctatggttaccgttgctatgaaggagggcggccctgctgacccagagccagccctgtctcccgctccactctgacctcacccctgagtccagggctgaacgcacgctcctccgtggcccccgcttccaccccgtgcatgt

SEQ ID NO: 371642 - DNA, 227 bp, Homo sapiens
  chr7:100660682-100660909
  hyper
gctctgcacttacccgcagcccagtgatgcagggtcggaggggtggtcggcagtgggaaagggcgtagggcagatgccgggctgactcttccttttgccagaggaaatcccctctgccccctagtcctccccctaccaaggctcccatcactcatcacggcctctccctacagaccagaatctgagggagagcagattcggccttgagaacgcctacaacaacttcc

SEQ ID NO: 371643 - DNA, 1057 bp, Homo sapiens; identical to SEQ ID NO: 350626
  chr7:100806337-100807394
  hyper

SEQ ID NO: 371644 - DNA, 168 bp, Homo sapiens; identical to SEQ ID NO: 346924
  chr7:100815484-100815652
  hyper

SEQ ID NO: 371645 - DNA, 101 bp, Homo sapiens; identical to SEQ ID NO: 346925
  chr7:100815930-100816031
  hyper

SEQ ID NO: 371646 - DNA, 257 bp, Homo sapiens; identical to SEQ ID NO: 350629
  chr7:100816655-100816912
  hyper

SEQ ID NO: 371647 - DNA, 151 bp, Homo sapiens; identical to SEQ ID NO: 358922
  chr7:100845050-100845201
  hyper

SEQ ID NO: 371648 - DNA, 45 bp, Homo sapiens; identical to SEQ ID NO: 201083
  chr7:100845248-100845293
  hyper

SEQ ID NO: 371649 - DNA, 172 bp, Homo sapiens
  chr7:101006948-101007120
  hyper
cggtggtctctggccgcgcccaccctgtcccttcctttcttcgcttccccaaccttcgccccctcgttccgggctccgagtagaggtggttccgaccgccgtggctggggctggggctctgcccggggcgttcggccgctcacgtggctctgccgctcacctgcgcggctgc

SEQ ID NO: 371650 - DNA, 487 bp, Homo sapiens; identical to SEQ ID NO: 350630
  chr7:101460542-101461029
  hyper

SEQ ID NO: 371651 - DNA, 85 bp, Homo sapiens
  chr7:103085746-103085831
  hyper
cggggcccggcccaggtgcgcactagatgaggcagtcaaccaagtcaattggttcccgatcaactaaatctctcctaaaaataaa

SEQ ID NO: 371652 - DNA, 176 bp, Homo sapiens
  chr7:103086734-103086910
  hyper
tgggacgccggggcgcgggcatccctgccgcctacggatctcttcccaagcacctagaactttccaaagcgtgcttggaatttaacaccttggtcgtcgatccccgcaaatatactctgatgagaccggctttcttcccataccgcccaggagtttctccaggtggcattcctgtc

SEQ ID NO: 371653 - DNA, 251 bp, Homo sapiens; identical to SEQ ID NO: 201131
  chr7:106684920-106685171
  hyper

SEQ ID NO: 371654 - DNA, 221 bp, Homo sapiens; identical to SEQ ID NO: 346927
  chr7:106685920-106686141
  hyper

SEQ ID NO: 371655 - DNA, 684 bp, Homo sapiens; identical to SEQ ID NO: 358927
  chr7:107641955-107642639
  hyper

SEQ ID NO: 371656 - DNA, 259 bp, Homo sapiens
  chr7:107642811-107643070
  hyper
cgccaggtcctgctgtttctggtgccatccggagacaaacagagatggttaattaaagccacatggcccccatctgttcccagaatgaagcctccgctcagctcaggcactctcctgggcaatggatttttggagagccctcctcggtcagcaccgccaaccccagggaacctgccctctgcggtggggaaacccagggtgaaccggccgagggtgcaaaaccctgagcgggggccgcgggaggccgcaggggccgggg

SEQ ID NO: 371657 - DNA, 539 bp, Homo sapiens; identical to SEQ ID NO: 285323
  chr7:107643183-107643722
  hyper

SEQ ID NO: 371658 - DNA, 206 bp, Homo sapiens
  chr7:111844265-111844471
  hyper
gcaagagaggaactaatcgataccagcaccccagctgtgacctggcacatgaagaaatcaagaaaataaatcccatccataatctgtataatttaacacttggaagaaagcaacatctgggatcgactccaagcaggacagttttgcctggatggatctgagcttcctgcactgagtgttaaagccgcttaggaggcgatgccctc

SEQ ID NO: 371659 - DNA, 182 bp, Homo sapiens; identical to SEQ ID NO: 201140
  chr7:112430003-112430185
  hyper

SEQ ID NO: 371660 - DNA, 142 bp, Homo sapiens; identical to SEQ ID NO: 201141
  chr7:112430224-112430366
  hyper

SEQ ID NO: 371661 - DNA, 239 bp, Homo sapiens; identical to SEQ ID NO: 201143
  chr7:112726614-112726853
  hyper

SEQ ID NO: 371662 - DNA, 152 bp, Homo sapiens; identical to SEQ ID NO: 350635
  chr7:113724594-113724746
  hyper

SEQ ID NO: 371663 - DNA, 229 bp, Homo sapiens; identical to SEQ ID NO: 201145
  chr7:113725472-113725701
  hyper

SEQ ID NO: 371664 - DNA, 229 bp, Homo sapiens; identical to SEQ ID NO: 201146
  chr7:113725858-113726087
  hyper

SEQ ID NO: 371665 - DNA, 482 bp, Homo sapiens; identical to SEQ ID NO: 285340
  chr7:113726887-113727369
  hyper

SEQ ID NO: 371666 - DNA, 114 bp, Homo sapiens; identical to SEQ ID NO: 350639
  chr7:115117321-115117435
  hyper

SEQ ID NO: 371667 - DNA, 90 bp, Homo sapiens; identical to SEQ ID NO: 333226
  chr7:116759594-116759684
  hyper

SEQ ID NO: 371668 - DNA, 258 bp, Homo sapiens; identical to SEQ ID NO: 285352
  chr7:117513178-117513436
  hyper

SEQ ID NO: 371669 - DNA, 185 bp, Homo sapiens; identical to SEQ ID NO: 358938
  chr7:117513471-117513656
  hyper

SEQ ID NO: 371670 - DNA, 564 bp, Homo sapiens; identical to SEQ ID NO: 358939
  chr7:119912404-119912968
  hyper

SEQ ID NO: 371671 - DNA, 97 bp, Homo sapiens
  chr7:119913785-119913882
  hyper
tatgcaactaagccccggcgcgcacttggccaggtatgtaccgcgggagcggcgcgttctgcgcggaagcagatgctgctgccgccacggcggcggc

SEQ ID NO: 371672 - DNA, 750 bp, Homo sapiens; identical to SEQ ID NO: 350641
  chr7:120496826-120497576
  hyper

SEQ ID NO: 371673 - DNA, 273 bp, Homo sapiens; identical to SEQ ID NO: 285361
  chr7:120969353-120969626
  hyper

SEQ ID NO: 371674 - DNA, 428 bp, Homo sapiens; identical to SEQ ID NO: 201161
  chr7:121512905-121513333
  hyper

SEQ ID NO: 371675 - DNA, 119 bp, Homo sapiens; identical to SEQ ID NO: 350642
  chr7:121942391-121942510
  hyper

SEQ ID NO: 371676 - DNA, 464 bp, Homo sapiens
  chr7:121945147-121945611
  hyper
cggagtctaattcaggggcaaacgccaggctatatttatcaaacgccaagctccagaaagcctcggctaggaagcctcggcagtgaaatccgaggtttcgctgcttggttccactgggcctgggtgggccgggctgggccgggctgggccgggtcagatctgtgccacctccgcagacctatttcttcctccagggctcggggttgcccgctcccggaatcccggagtctccgcggcccgaaccgagtctggaccatttagaagacgccggcaggtaactggcctccccaaacgccccgaaaattaaaagccttaggaggcttgttctgtgtttgtggttttgtaaaggcaatgcccgcggcaataggcctgggaaagtcgcactttcatccacaaagttgaggagttgcaaggaataattgggtgtcacaccacaagcaaccttgactcgatcggaccccacc

SEQ ID NO: 371677 - DNA, 226 bp, Homo sapiens; identical to SEQ ID NO: 201166
  chr7:121946146-121946372
  hyper

SEQ ID NO: 371678 - DNA, 147 bp, Homo sapiens
  chr7:121956311-121956458
  hyper
cgcactccggtgactactccctgaaagccaatgagcggttgaccctctggtgacatctggaacccaggttcagagtttcgctctcgcctctactcccttaatattttactcaatgtcacagaggagaacagcttaaggcagccctgc

SEQ ID NO: 371679 - DNA, 619 bp, Homo sapiens
  chr7:122526214-122526833
  hyper
cgggctcacagatctggccgcgccgccgccgcccgcgcgccccggcgcgtcccgccgcccttcccgagtcggggctggaggagctcgctgcgagctgccggctgccaccagcacatcgcggctttcctcttccagcccctcgtccgactcctcttcgctggaagacgggtccagcatggtgctcggggatccccgccgctcggcccgcggtccccaagcgcctcacccccggcggctgcgcccgcgggtctgagggagccgcggggctggctgcagcggccgcagaacgaaaggaaaactggccagggctttccggacacgtcgagttagattcaggagtgtttcctaccaccagggcgaaaggggcgggcaggagccgggaggaggattgggaggggggagagggggagccgccgggactgaataggcggagttagcgttgggggtgagcttgggcgcctcaggaattgctccgccagccccgggcgcgccgacccagcggttccccagagcccgccggcagaggcggagccgcccgagcgcccggacgcaggtggggaacctgtggcgcctacaacaagcaacacgtggaattgaatgttgaagagccgcgcggggc

SEQ ID NO: 371680 - DNA, 279 bp, Homo sapiens
  chr7:122526873-122527152
  hyper
ccgcctggagccctagcacacagtttgcaaaggcggggagcggccgagcgcgatggcccgtgtaagcgtccaccggggctgctccgactaccctcaccctaccacctgtgatcttttctccagcaggtggaggtggaatggggagcggggagggactgttccctagcaagaggttagggggagcggccgagacatctccccaacccgaatcggctgcctaggattgaaccccagcgcggaaaagcgggactggagcccttcaccacgaagtatctttgc

SEQ ID NO: 371681 - DNA, 203 bp, Homo sapiens; identical to SEQ ID NO: 201171
  chr7:123673023-123673226
  hyper

SEQ ID NO: 371682 - DNA, 296 bp, Homo sapiens; identical to SEQ ID NO: 358945
  chr7:123673383-123673679
  hyper

SEQ ID NO: 371683 - DNA, 54 bp, Homo sapiens; identical to SEQ ID NO: 350644
  chr7:124404307-124404361
  hyper

SEQ ID NO: 371684 - DNA, 51 bp, Homo sapiens; identical to SEQ ID NO: 350645
  chr7:126891155-126891206
  hyper

SEQ ID NO: 371685 - DNA, 204 bp, Homo sapiens; identical to SEQ ID NO: 201176
  chr7:126893238-126893442
  hyper

SEQ ID NO: 371686 - DNA, 587 bp, Homo sapiens; identical to SEQ ID NO: 285391
  chr7:126893489-126894076
  hyper

SEQ ID NO: 371687 - DNA, 65 bp, Homo sapiens; identical to SEQ ID NO: 358950
  chr7:126894197-126894262
  hyper

SEQ ID NO: 371688 - DNA, 37 bp, Homo sapiens; identical to SEQ ID NO: 285393
  chr7:126988120-126988157
  hyper

SEQ ID NO: 371689 - DNA, 56 bp, Homo sapiens; identical to SEQ ID NO: 350648
  chr7:126988206-126988262
  hyper

SEQ ID NO: 371690 - DNA, 277 bp, Homo sapiens; identical to SEQ ID NO: 333248
  chr7:127291492-127291769
  hyper

SEQ ID NO: 371691 - DNA, 208 bp, Homo sapiens; identical to SEQ ID NO: 285400
  chr7:127671450-127671658
  hyper

SEQ ID NO: 371692 - DNA, 54 bp, Homo sapiens; identical to SEQ ID NO: 285405
  chr7:127991607-127991661
  hyper

SEQ ID NO: 371693 - DNA, 94 bp, Homo sapiens
  chr7:128509984-128510078
  hyper
cgaggagcccctgctgcccggatacctcggcgcgcagggtcgctggcatctcggctccggctccgcgacctgggagccgccgccgggccggggg

SEQ ID NO: 371694 - DNA, 264 bp, Homo sapiens; identical to SEQ ID NO: 285416
  chr7:128828640-128828904
  hyper

SEQ ID NO: 371695 - DNA, 397 bp, Homo sapiens
  chr7:129418755-129419152
  hyper
cgctcagagccggcctcagtgcccctgcccccggcgggtattactgtacacggtgtccgggagcccgggttggaagagcaaacgaatggctcagcctggaggacaccgtggaatcgggcgacccctgaccccgggtgacaccctcactgcccatagtcctgggatgcgctgaccggtgaggcgccagaggcaagccgtccagccgccgatcttggggaagggctgggaacctgggtgccactagcgctattaacaggaatggggcagttgagggcggggaacggtgtctcattcgcgtgcgccggggttcccgggatgagtggccgcgaagtggaggcacacgggaggtctgagagccgctttcccccagagactgggcggggcggctccgggccac

SEQ ID NO: 371696 - DNA, 81 bp, Homo sapiens; identical to SEQ ID NO: 345282
  chr7:129421203-129421284
  hyper

SEQ ID NO: 371697 - DNA, 281 bp, Homo sapiens; identical to SEQ ID NO: 201185
  chr7:129421349-129421630
  hyper

SEQ ID NO: 371698 - DNA, 169 bp, Homo sapiens; identical to SEQ ID NO: 346933
  chr7:129424378-129424547
  hyper

SEQ ID NO: 371699 - DNA, 235 bp, Homo sapiens
  chr7:129913007-129913242
  hyper
cgtgctcaaggtacacggtgcagggacggttcttcctctcgatgtttctagaatctccctcctcccaggctagccggcagtcccagcttgtgctacagagaggctcctttttattactttttttttcttttcctcctaaccggtccttgctggttttgagtatccactcccccacccccgcccccttctttttctttctctctgttcctgagcaagctgacgcaggtctgcagga

SEQ ID NO: 371700 - DNA, 174 bp, Homo sapiens
  chr7:129913272-129913446
  hyper
gctcctggggaaccggggcaaatgcgccaataggagccgaggaagggggaggtgcgggccgggggaggttgggggctgggggctgtaattcaagctgggagttctctgcctcccctccccttctcttttttttctttcctctttaaacacacacacacacacacacatacacgc

SEQ ID NO: 371701 - DNA, 158 bp, Homo sapiens; identical to SEQ ID NO: 333265
  chr7:130741985-130742143
  hyper

SEQ ID NO: 371702 - DNA, 101 bp, Homo sapiens; identical to SEQ ID NO: 333266
  chr7:131240439-131240540
  hyper

SEQ ID NO: 371703 - DNA, 122 bp, Homo sapiens; identical to SEQ ID NO: 350654
  chr7:131242600-131242722
  hyper

SEQ ID NO: 371704 - DNA, 73 bp, Homo sapiens; identical to SEQ ID NO: 350655
  chr7:134832843-134832916
  hyper

SEQ ID NO: 371705 - DNA, 91 bp, Homo sapiens
  chr7:137531067-137531158
  hyper
cgggaggagagggggaaagggggaaggagaggcgtggaaacagagaggtgcccaactccgcggaagcgccccttgctgggtagaagagtgg

SEQ ID NO: 371706 - DNA, 269 bp, Homo sapiens; identical to SEQ ID NO: 350656
  chr7:139168725-139168994
  hyper

SEQ ID NO: 371707 - DNA, 197 bp, Homo sapiens; identical to SEQ ID NO: 345284
  chr7:139929854-139930051
  hyper

SEQ ID NO: 371708 - DNA, 362 bp, Homo sapiens; identical to SEQ ID NO: 345285
  chr7:139930346-139930708
  hyper

SEQ ID NO: 371709 - DNA, 209 bp, Homo sapiens; identical to SEQ ID NO: 333277
  chr7:140103670-140103879
  hyper

SEQ ID NO: 371710 - DNA, 183 bp, Homo sapiens; identical to SEQ ID NO: 285462
  chr7:140340368-140340551
  hyper

SEQ ID NO: 371711 - DNA, 82 bp, Homo sapiens; identical to SEQ ID NO: 345286
  chr7:140771242-140771324
  hyper

SEQ ID NO: 371712 - DNA, 219 bp, Homo sapiens; identical to SEQ ID NO: 285467
  chr7:140771550-140771769
  hyper

SEQ ID NO: 371713 - DNA, 203 bp, Homo sapiens; identical to SEQ ID NO: 345288
  chr7:140771841-140772044
  hyper

SEQ ID NO: 371714 - DNA, 140 bp, Homo sapiens; identical to SEQ ID NO: 201208
  chr7:140774419-140774559
  hyper

SEQ ID NO: 371715 - DNA, 170 bp, Homo sapiens
  chr7:140774560-140774730
  hyper
tctccttcccaggccacaggctatcaggtctctgggttccaggcggtccggttatccaggcctggctgagcctcggggccaggacttgcctcccaatagctgttaatgaagcttggtgcaggcttaactctctcccctgcctctcctttcgcgcgtctctgtcgggattc

SEQ ID NO: 371716 - DNA, 357 bp, Homo sapiens; identical to SEQ ID NO: 201210
  chr7:141211599-141211956
  hyper

SEQ ID NO: 371717 - DNA, 999 bp, Homo sapiens; identical to SEQ ID NO: 333283
  chr7:142985430-142986429
  hyper

SEQ ID NO: 371718 - DNA, 93 bp, Homo sapiens; identical to SEQ ID NO: 345289
  chr7:143105734-143105827
  hyper

SEQ ID NO: 371719 - DNA, 454 bp, Homo sapiens; identical to SEQ ID NO: 345290
  chr7:143105844-143106298
  hyper

SEQ ID NO: 371720 - DNA, 107 bp, Homo sapiens; identical to SEQ ID NO: 350665
  chr7:145814199-145814306
  hyper

SEQ ID NO: 371721 - DNA, 669 bp, Homo sapiens; identical to SEQ ID NO: 333286
  chr7:148036392-148037061
  hyper

SEQ ID NO: 371722 - DNA, 298 bp, Homo sapiens; identical to SEQ ID NO: 333287
  chr7:148394984-148395282
  hyper

SEQ ID NO: 371723 - DNA, 168 bp, Homo sapiens; identical to SEQ ID NO: 333288
  chr7:148523540-148523708
  hyper

SEQ ID NO: 371724 - DNA, 32 bp, Homo sapiens; identical to SEQ ID NO: 350667
  chr7:149112425-149112457
  hyper

SEQ ID NO: 371725 - DNA, 199 bp, Homo sapiens; identical to SEQ ID NO: 350668
  chr7:149119398-149119597
  hyper

SEQ ID NO: 371726 - DNA, 207 bp, Homo sapiens; identical to SEQ ID NO: 285506
  chr7:149119682-149119889
  hyper

SEQ ID NO: 371727 - DNA, 51 bp, Homo sapiens; identical to SEQ ID NO: 285507
  chr7:149120073-149120124
  hyper

SEQ ID NO: 371728 - DNA, 1023 bp, Homo sapiens; identical to SEQ ID NO: 350671
  chr7:149570406-149571429
  hyper

SEQ ID NO: 371729 - DNA, 88 bp, Homo sapiens; identical to SEQ ID NO: 358985
  chr7:149745487-149745575
  hyper

SEQ ID NO: 371730 - DNA, 437 bp, Homo sapiens; identical to SEQ ID NO: 333295
  chr7:150075217-150075654
  hyper

SEQ ID NO: 371731 - DNA, 35 bp, Homo sapiens; identical to SEQ ID NO: 333296
  chr7:150102887-150102922
  hyper

SEQ ID NO: 371732 - DNA, 846 bp, Homo sapiens; identical to SEQ ID NO: 333298
  chr7:150671471-150672317
  hyper

SEQ ID NO: 371733 - DNA, 351 bp, Homo sapiens; identical to SEQ ID NO: 333299
  chr7:150676178-150676529
  hyper

SEQ ID NO: 371734 - DNA, 112 bp, Homo sapiens; identical to SEQ ID NO: 346943
  chr7:150714968-150715080
  hyper

SEQ ID NO: 371735 - DNA, 295 bp, Homo sapiens; identical to SEQ ID NO: 285522
  chr7:150715323-150715618
  hyper

SEQ ID NO: 371736 - DNA, 960 bp, Homo sapiens; identical to SEQ ID NO: 333303
  chr7:150784079-150785039
  hyper

SEQ ID NO: 371737 - DNA, 253 bp, Homo sapiens; identical to SEQ ID NO: 350676
  chr7:150863966-150864219
  hyper

SEQ ID NO: 371738 - DNA, 370 bp, Homo sapiens; identical to SEQ ID NO: 333305
  chr7:151038589-151038959
  hyper

SEQ ID NO: 371739 - DNA, 99 bp, Homo sapiens; identical to SEQ ID NO: 358994
  chr7:151136933-151137032
  hyper

SEQ ID NO: 371740 - DNA, 121 bp, Homo sapiens; identical to SEQ ID NO: 358995
  chr7:151137113-151137234
  hyper

SEQ ID NO: 371741 - DNA, 968 bp, Homo sapiens; identical to SEQ ID NO: 358996
  chr7:151572574-151573542
  hyper

SEQ ID NO: 371742 - DNA, 697 bp, Homo sapiens; identical to SEQ ID NO: 346946
  chr7:151722447-151723144
  hyper

SEQ ID NO: 371743 - DNA, 34 bp, Homo sapiens; identical to SEQ ID NO: 346947
  chr7:151723206-151723240
  hyper

SEQ ID NO: 371744 - DNA, 154 bp, Homo sapiens; identical to SEQ ID NO: 358999
  chr7:152591569-152591723
  hyper

SEQ ID NO: 371745 - DNA, 45 bp, Homo sapiens
  chr7:155244370-155244415
  hyper
gcctgtgttaatgctccaaatggtgtcgagttgctcaactttgcc

SEQ ID NO: 371746 - DNA, 104 bp, Homo sapiens; identical to SEQ ID NO: 350680
  chr7:155246271-155246375
  hyper

SEQ ID NO: 371747 - DNA, 82 bp, Homo sapiens; identical to SEQ ID NO: 359001
  chr7:155257774-155257856
  hyper

SEQ ID NO: 371748 - DNA, 39 bp, Homo sapiens; identical to SEQ ID NO: 350681
  chr7:155301671-155301710
  hyper

SEQ ID NO: 371749 - DNA, 193 bp, Homo sapiens; identical to SEQ ID NO: 359003
  chr7:155601495-155601688
  hyper

SEQ ID NO: 371750 - DNA, 800 bp, Homo sapiens; identical to SEQ ID NO: 285570
  chr7:155601951-155602751
  hyper

SEQ ID NO: 371751 - DNA, 387 bp, Homo sapiens; identical to SEQ ID NO: 359005
  chr7:155604534-155604921
  hyper

SEQ ID NO: 371752 - DNA, 75 bp, Homo sapiens; identical to SEQ ID NO: 359006
  chr7:155605019-155605094
  hyper

SEQ ID NO: 371753 - DNA, 345 bp, Homo sapiens; identical to SEQ ID NO: 201261
  chr7:156433175-156433520
  hyper

SEQ ID NO: 371754 - DNA, 459 bp, Homo sapiens; identical to SEQ ID NO: 201262
  chr7:156433521-156433980
  hyper

SEQ ID NO: 371755 - DNA, 41 bp, Homo sapiens; identical to SEQ ID NO: 350684
  chr7:156796104-156796145
  hyper

SEQ ID NO: 371756 - DNA, 63 bp, Homo sapiens; identical to SEQ ID NO: 346950
  chr7:156796431-156796494
  hyper

SEQ ID NO: 371757 - DNA, 96 bp, Homo sapiens; identical to SEQ ID NO: 346951
  chr7:156799510-156799606
  hyper

SEQ ID NO: 371758 - DNA, 249 bp, Homo sapiens; identical to SEQ ID NO: 201268
  chr7:156802164-156802413
  hyper

SEQ ID NO: 371759 - DNA, 213 bp, Homo sapiens; identical to SEQ ID NO: 359013
  chr7:156802537-156802750
  hyper

SEQ ID NO: 371760 - DNA, 33 bp, Homo sapiens
  chr7:156870979-156871012
  hyper
cgggaagcgaacccacgaggtgcagagagcaga

SEQ ID NO: 371761 - DNA, 210 bp, Homo sapiens; identical to SEQ ID NO: 350687
  chr7:157361395-157361605
  hyper

SEQ ID NO: 371762 - DNA, 53 bp, Homo sapiens; identical to SEQ ID NO: 350688
  chr7:157361751-157361804
  hyper

SEQ ID NO: 371763 - DNA, 216 bp, Homo sapiens; identical to SEQ ID NO: 285596
  chr7:157476655-157476871
  hyper

SEQ ID NO: 371764 - DNA, 242 bp, Homo sapiens; identical to SEQ ID NO: 333344
  chr7:157594777-157595019
  hyper

SEQ ID NO: 371765 - DNA, 107 bp, Homo sapiens; identical to SEQ ID NO: 350690
  chr7:158379699-158379806
  hyper

SEQ ID NO: 371766 - DNA, 93 bp, Homo sapiens; identical to SEQ ID NO: 285601
  chr7:158380396-158380489
  hyper

SEQ ID NO: 371767 - DNA, 126 bp, Homo sapiens; identical to SEQ ID NO: 346954
  chr7:158380510-158380636
  hyper

SEQ ID NO: 371768 - DNA, 71 bp, Homo sapiens; identical to SEQ ID NO: 359021
  chr7:158823238-158823309
  hyper

SEQ ID NO: 371769 - DNA, 77 bp, Homo sapiens; identical to SEQ ID NO: 359022
  chr7:158823665-158823742
  hyper

SEQ ID NO: 371770 - DNA, 42 bp, Homo sapiens; identical to SEQ ID NO: 350693
  chr8:495481-495523
  hyper

SEQ ID NO: 371771 - DNA, 68 bp, Homo sapiens; identical to SEQ ID NO: 201278
  chr8:495635-495703
  hyper

SEQ ID NO: 371772 - DNA, 159 bp, Homo sapiens
  chr8:798791-798950
  hyper
cgtgttccagtgtaggaacgtgccagggtttgttccagtctaggatcttgtgatgtgtgttccagcataggatcgcgcggtgtctgttccagcataggaacgcgcggtgcctgttccagcataggaacgcgcggtgcctgttccagcataggaacgcgc

SEQ ID NO: 371773 - DNA, 287 bp, Homo sapiens; identical to SEQ ID NO: 359025
  chr8:1771751-1772038
  hyper

SEQ ID NO: 371774 - DNA, 130 bp, Homo sapiens; identical to SEQ ID NO: 333354
  chr8:2970523-2970653
  hyper

SEQ ID NO: 371775 - DNA, 84 bp, Homo sapiens
  chr8:4848968-4849052
  hyper
cgaccgcctccagcctcacgactccgcaaacaggtcacgaattatgccccacgcatcaaaaactctgcgcctgccttcgccaca

SEQ ID NO: 371776 - DNA, 397 bp, Homo sapiens; identical to SEQ ID NO: 285618
  chr8:4849835-4850232
  hyper

SEQ ID NO: 371777 - DNA, 335 bp, Homo sapiens; identical to SEQ ID NO: 345293
  chr8:4851007-4851342
  hyper

SEQ ID NO: 371778 - DNA, 117 bp, Homo sapiens; identical to SEQ ID NO: 201281
  chr8:4851375-4851492
  hyper

SEQ ID NO: 371779 - DNA, 73 bp, Homo sapiens; identical to SEQ ID NO: 201282
  chr8:4851508-4851581
  hyper

SEQ ID NO: 371780 - DNA, 125 bp, Homo sapiens; identical to SEQ ID NO: 201283
  chr8:4851611-4851736
  hyper

SEQ ID NO: 371781 - DNA, 34 bp, Homo sapiens; identical to SEQ ID NO: 201284
  chr8:4851780-4851814
  hyper

SEQ ID NO: 371782 - DNA, 66 bp, Homo sapiens; identical to SEQ ID NO: 350700
  chr8:4852588-4852654
  hyper

SEQ ID NO: 371783 - DNA, 108 bp, Homo sapiens; identical to SEQ ID NO: 333357
  chr8:6673921-6674029
  hyper

SEQ ID NO: 371784 - DNA, 202 bp, Homo sapiens; identical to SEQ ID NO: 346961
  chr8:6691849-6692051
  hyper

SEQ ID NO: 371785 - DNA, 224 bp, Homo sapiens; identical to SEQ ID NO: 201288
  chr8:6692462-6692686
  hyper

SEQ ID NO: 371786 - DNA, 209 bp, Homo sapiens; identical to SEQ ID NO: 350704
  chr8:6693170-6693379
  hyper

SEQ ID NO: 371787 - DNA, 106 bp, Homo sapiens; identical to SEQ ID NO: 350705
  chr8:8639980-8640086
  hyper

SEQ ID NO: 371788 - DNA, 208 bp, Homo sapiens; identical to SEQ ID NO: 359039
  chr8:9760527-9760735
  hyper

SEQ ID NO: 371789 - DNA, 260 bp, Homo sapiens; identical to SEQ ID NO: 285637
  chr8:9761155-9761415
  hyper

SEQ ID NO: 371790 - DNA, 206 bp, Homo sapiens; identical to SEQ ID NO: 359041
  chr8:10587216-10587422
  hyper

SEQ ID NO: 371791 - DNA, 303 bp, Homo sapiens; identical to SEQ ID NO: 359042
  chr8:10873138-10873441
  hyper

SEQ ID NO: 371792 - DNA, 240 bp, Homo sapiens; identical to SEQ ID NO: 201296
  chr8:10873649-10873889
  hyper

SEQ ID NO: 371793 - DNA, 258 bp, Homo sapiens; identical to SEQ ID NO: 350707
  chr8:10874042-10874300
  hyper

SEQ ID NO: 371794 - DNA, 376 bp, Homo sapiens; identical to SEQ ID NO: 285647
  chr8:11058799-11059175
  hyper

SEQ ID NO: 371795 - DNA, 158 bp, Homo sapiens; identical to SEQ ID NO: 350709
  chr8:11059210-11059368
  hyper

SEQ ID NO: 371796 - DNA, 106 bp, Homo sapiens; identical to SEQ ID NO: 359047
  chr8:11537483-11537589
  hyper

SEQ ID NO: 371797 - DNA, 150 bp, Homo sapiens
  chr8:11540276-11540426
  hyper
cgtagtagtccccgtttgtgcaaaaacacctcttggccgtggcgatgtggggagggagtgtggtccaatagtccttctcacttctcagaggttgacacagaatctaacagttaccctcttagaactactccggagaattcggtaggtagt

SEQ ID NO: 371798 - DNA, 274 bp, Homo sapiens; identical to SEQ ID NO: 201303
  chr8:11540456-11540730
  hyper

SEQ ID NO: 371799 - DNA, 271 bp, Homo sapiens
  chr8:11540851-11541122
  hyper
cgtattatgcttgctgatgccggtaaatagtaattctacccattgtgactgttaggaagtagcagaatccttttgggttggaggtatcgttttttttcttttaagaagttcaatgagctttacattgtctcattcaaactcacccatcaaggggcgcggttcgattccaactttcaccgtattccttgagactaggtagactaaatccatccccccattctttcattcattcattcggcaaacatttaccaagctttcctctgcgctgggc

SEQ ID NO: 371800 - DNA, 251 bp, Homo sapiens; identical to SEQ ID NO: 285656
  chr8:11550368-11550619
  hyper

SEQ ID NO: 371801 - DNA, 154 bp, Homo sapiens; identical to SEQ ID NO: 350711
  chr8:11554731-11554885
  hyper

SEQ ID NO: 371802 - DNA, 54 bp, Homo sapiens; identical to SEQ ID NO: 201306
  chr8:11554915-11554969
  hyper

SEQ ID NO: 371803 - DNA, 141 bp, Homo sapiens; identical to SEQ ID NO: 350713
  chr8:11555521-11555662
  hyper

SEQ ID NO: 371804 - DNA, 109 bp, Homo sapiens; identical to SEQ ID NO: 359052
  chr8:11561282-11561391
  hyper

SEQ ID NO: 371805 - DNA, 140 bp, Homo sapiens; identical to SEQ ID NO: 333372
  chr8:11726011-11726151
  hyper

SEQ ID NO: 371806 - DNA, 150 bp, Homo sapiens; identical to SEQ ID NO: 285667
  chr8:12808911-12809061
  hyper

SEQ ID NO: 371807 - DNA, 185 bp, Homo sapiens; identical to SEQ ID NO: 285668
  chr8:12809462-12809647
  hyper

SEQ ID NO: 371808 - DNA, 62 bp, Homo sapiens; identical to SEQ ID NO: 346964
  chr8:12809799-12809861
  hyper

SEQ ID NO: 371809 - DNA, 324 bp, Homo sapiens; identical to SEQ ID NO: 285670
  chr8:12989711-12990035
  hyper

SEQ ID NO: 371810 - DNA, 302 bp, Homo sapiens; identical to SEQ ID NO: 201313
  chr8:15094771-15095073
  hyper

SEQ ID NO: 371811 - DNA, 84 bp, Homo sapiens; identical to SEQ ID NO: 201316
  chr8:16884239-16884323
  hyper

SEQ ID NO: 371812 - DNA, 210 bp, Homo sapiens
  chr8:17354241-17354451
  hyper
cggggggaccaaaaccccacttagaactctgcttagaagattcggaaatgcccttgaggtttggtcctcccaggagagcacgaagtttatcctcgcgcgcagcctctcttccccggcccgcgcccaccggcctagcccggggctagcgcccgcccacgtgtgctcggctccaggcaaaccccgctgagcagcggccgcacaccgcccacc

SEQ ID NO: 371813 - DNA, 545 bp, Homo sapiens
  chr8:17354600-17355145
  hyper
ttctgcagcgcggccggcgggcgctcctcttcgcgggaccagcgaggcggcggccgctgctccagcgtcccccagccgcgggcccccgacgcgctgcagccggcagcccaccgccgccttcttggcgcgaccccaacccagccccagtaagttgctaggtctccagccccgccgagaggccgcgggcgaggggcagcccggacgctggggccggcggggaaggagcggggcgagggcgccctggggccggcggggaactagagggtcgagggctcccggggacgagtccagctgcgcgcagctgccctgaggccgcgctccagcgagtcttcgtcagggagtcggggccgtgggctggggctgaagccgtggaccttcgtcctcggggctgcgccccggaatgcgcctcgcctcgtccggtccctgtgcagccggctctgcccggggacttcggggaccgctggaactgggagaggggctggcacggcgacttcgcggggacccttcagtcactatttccagaggagctcggcgcacccctctcc

SEQ ID NO: 371814 - DNA, 287 bp, Homo sapiens; identical to SEQ ID NO: 333378
  chr8:17940762-17941049
  hyper

SEQ ID NO: 371815 - DNA, 1070 bp, Homo sapiens; identical to SEQ ID NO: 333379
  chr8:18870226-18871296
  hyper

SEQ ID NO: 371816 - DNA, 382 bp, Homo sapiens
  chr8:18871577-18871959
  hyper
tgctttgtcttcttccttcacagttttcccaccctgagaaaagtgagaggtgctttccctggtgtttcctctcaggaagggccgtgtgactggagccgcgagttgggcgccgtctcgccggggctggaggtacgcgggcttcgggacacgcacctaggcgtccctcggggtcccggcctctctgaccgggctcccccggcaccgatccgcggccggagcgtttagtcccggggacccgtcgagccctgaaagggccatttccccctgaggcgagtccccccaggcgccccgcagcctggcctcgggactgcccccaccgacagtgcgtgcgcggggagaggtcacttaaaactgcattttcgaacattagtgccccggaccc

SEQ ID NO: 371817 - DNA, 998 bp, Homo sapiens; identical to SEQ ID NO: 333381
  chr8:19171057-19172055
  hyper

SEQ ID NO: 371818 - DNA, 590 bp, Homo sapiens; identical to SEQ ID NO: 359062
  chr8:19796843-19797433
  hyper

SEQ ID NO: 371819 - DNA, 518 bp, Homo sapiens; identical to SEQ ID NO: 285702
  chr8:21882027-21882545
  hyper

SEQ ID NO: 371820 - DNA, 414 bp, Homo sapiens; identical to SEQ ID NO: 333386
  chr8:22299385-22299799
  hyper

SEQ ID NO: 371821 - DNA, 878 bp, Homo sapiens; identical to SEQ ID NO: 346966
  chr8:22436855-22437733
  hyper

SEQ ID NO: 371822 - DNA, 51 bp, Homo sapiens; identical to SEQ ID NO: 359065
  chr8:22722458-22722509
  hyper

SEQ ID NO: 371823 - DNA, 123 bp, Homo sapiens; identical to SEQ ID NO: 359066
  chr8:22960460-22960583
  hyper

SEQ ID NO: 371824 - DNA, 127 bp, Homo sapiens; identical to SEQ ID NO: 345299
  chr8:23021590-23021717
  hyper

SEQ ID NO: 371825 - DNA, 89 bp, Homo sapiens; identical to SEQ ID NO: 359068
  chr8:23082568-23082657
  hyper

SEQ ID NO: 371826 - DNA, 169 bp, Homo sapiens; identical to SEQ ID NO: 359069
  chr8:23082729-23082898
  hyper

SEQ ID NO: 371827 - DNA, 672 bp, Homo sapiens; identical to SEQ ID NO: 350720
  chr8:24771632-24772304
  hyper

SEQ ID NO: 371828 - DNA, 304 bp, Homo sapiens; identical to SEQ ID NO: 201345
  chr8:24812836-24813140
  hyper

SEQ ID NO: 371829 - DNA, 259 bp, Homo sapiens; identical to SEQ ID NO: 350722
  chr8:24814801-24815060
  hyper

SEQ ID NO: 371830 - DNA, 39 bp, Homo sapiens; identical to SEQ ID NO: 350723
  chr8:24815435-24815474
  hyper

SEQ ID NO: 371831 - DNA, 66 bp, Homo sapiens; identical to SEQ ID NO: 359074
  chr8:24816325-24816391
  hyper

SEQ ID NO: 371832 - DNA, 302 bp, Homo sapiens; identical to SEQ ID NO: 201346
  chr8:25041946-25042248
  hyper

SEQ ID NO: 371833 - DNA, 250 bp, Homo sapiens; identical to SEQ ID NO: 201347
  chr8:25042284-25042534
  hyper

SEQ ID NO: 371834 - DNA, 63 bp, Homo sapiens; identical to SEQ ID NO: 201348
  chr8:25042567-25042630
  hyper

SEQ ID NO: 371835 - DNA, 106 bp, Homo sapiens; identical to SEQ ID NO: 201349
  chr8:25042631-25042737
  hyper

SEQ ID NO: 371836 - DNA, 436 bp, Homo sapiens
  chr8:25042833-25043269
  hyper
ggagtaggtgaccagcccgggtcggcacatggactggtgctcattgtcccagtgctttctgccccccgctttcgtaggttcttctcagacgccccttaagtgaggagttgagggtggaaagccgccctgccccctttcctccagagactgggatcttgatgacagttgtgagctggatggaaactagagtcgtggcgtggaagtgatggaagggacaggaagttgtggcacgggaagggggtggctggcccctggggctgtttgtgcgcactcatcccctaacggagcctgtctggagagggtgtaaggctgccttccggatcctgagtttcatcctggagacgagaagaggacattttattaaggaaactgtgccagaccccgtgctgggcacttggcattcagaacagcggtgctggagagccccgggttgtgc

SEQ ID NO: 371837 - DNA, 499 bp, Homo sapiens; identical to SEQ ID NO: 285759
  chr8:25902969-25903468
  hyper

SEQ ID NO: 371838 - DNA, 88 bp, Homo sapiens; identical to SEQ ID NO: 350729
  chr8:25904367-25904455
  hyper

SEQ ID NO: 371839 - DNA, 290 bp, Homo sapiens; identical to SEQ ID NO: 285765
  chr8:25908102-25908392
  hyper

SEQ ID NO: 371840 - DNA, 251 bp, Homo sapiens; identical to SEQ ID NO: 359083
  chr8:25908517-25908768
  hyper

SEQ ID NO: 371841 - DNA, 41 bp, Homo sapiens; identical to SEQ ID NO: 333406
  chr8:25910878-25910919
  hyper

SEQ ID NO: 371842 - DNA, 311 bp, Homo sapiens; identical to SEQ ID NO: 350731
  chr8:26148757-26149068
  hyper

SEQ ID NO: 371843 - DNA, 576 bp, Homo sapiens; identical to SEQ ID NO: 333408
  chr8:26436208-26436784
  hyper

SEQ ID NO: 371844 - DNA, 53 bp, Homo sapiens
  chr8:26724653-26724706
  hyper
tgcattttttaaaaagagtcaaaataagaaaagaaaaaaaaatgcagataacc

SEQ ID NO: 371845 - DNA, 372 bp, Homo sapiens; identical to SEQ ID NO: 346973
  chr8:28347825-28348197
  hyper

SEQ ID NO: 371846 - DNA, 1886 bp, Homo sapiens; identical to SEQ ID NO: 333411
  chr8:29205985-29207871
  hyper

SEQ ID NO: 371847 - DNA, 282 bp, Homo sapiens; identical to SEQ ID NO: 359089
  chr8:29387050-29387332
  hyper

SEQ ID NO: 371848 - DNA, 269 bp, Homo sapiens; identical to SEQ ID NO: 201374
  chr8:29387367-29387636
  hyper

SEQ ID NO: 371849 - DNA, 95 bp, Homo sapiens; identical to SEQ ID NO: 359091
  chr8:30890537-30890632
  hyper

SEQ ID NO: 371850 - DNA, 282 bp, Homo sapiens; identical to SEQ ID NO: 285813
  chr8:32405171-32405453
  hyper

SEQ ID NO: 371851 - DNA, 231 bp, Homo sapiens; identical to SEQ ID NO: 359092
  chr8:33372206-33372437
  hyper

SEQ ID NO: 371852 - DNA, 1274 bp, Homo sapiens; identical to SEQ ID NO: 333416
  chr8:37552902-37554176
  hyper

SEQ ID NO: 371853 - DNA, 134 bp, Homo sapiens; identical to SEQ ID NO: 350735
  chr8:37595183-37595317
  hyper

SEQ ID NO: 371854 - DNA, 56 bp, Homo sapiens; identical to SEQ ID NO: 359095
  chr8:37655257-37655313
  hyper

SEQ ID NO: 371855 - DNA, 217 bp, Homo sapiens; identical to SEQ ID NO: 350736
  chr8:37756358-37756575
  hyper

SEQ ID NO: 371856 - DNA, 355 bp, Homo sapiens; identical to SEQ ID NO: 201389
  chr8:37756610-37756965
  hyper

SEQ ID NO: 371857 - DNA, 372 bp, Homo sapiens; identical to SEQ ID NO: 350738
  chr8:37756966-37757338
  hyper

SEQ ID NO: 371858 - DNA, 153 bp, Homo sapiens; identical to SEQ ID NO: 201395
  chr8:38324508-38324661
  hyper

SEQ ID NO: 371859 - DNA, 215 bp, Homo sapiens; identical to SEQ ID NO: 285835
  chr8:38324861-38325076
  hyper

SEQ ID NO: 371860 - DNA, 226 bp, Homo sapiens; identical to SEQ ID NO: 201396
  chr8:38326050-38326276
  hyper

SEQ ID NO: 371861 - DNA, 234 bp, Homo sapiens; identical to SEQ ID NO: 333424
  chr8:41168659-41168893
  hyper

SEQ ID NO: 371862 - DNA, 539 bp, Homo sapiens; identical to SEQ ID NO: 346977
  chr8:41685769-41686308
  hyper

SEQ ID NO: 371863 - DNA, 111 bp, Homo sapiens; identical to SEQ ID NO: 201404
  chr8:49309646-49309757
  hyper

SEQ ID NO: 371864 - DNA, 164 bp, Homo sapiens; identical to SEQ ID NO: 350744
  chr8:49309797-49309961
  hyper

SEQ ID NO: 371865 - DNA, 112 bp, Homo sapiens; identical to SEQ ID NO: 346978
  chr8:49834207-49834319
  hyper

SEQ ID NO: 371866 - DNA, 127 bp, Homo sapiens; identical to SEQ ID NO: 359106
  chr8:53853387-53853514
  hyper

SEQ ID NO: 371867 - DNA, 231 bp, Homo sapiens; identical to SEQ ID NO: 350746
  chr8:54570292-54570523
  hyper

SEQ ID NO: 371868 - DNA, 61 bp, Homo sapiens; identical to SEQ ID NO: 350747
  chr8:54570562-54570623
  hyper

SEQ ID NO: 371869 - DNA, 177 bp, Homo sapiens
  chr8:54795170-54795347
  hyper
tccggcctgggcgacagagcaagactccgtctcaaaaaaaaaaaaaaaaaatggcaaaagcctatcgctctttgtcgaactccccacgttccccagtcacctggctggggttcgttggtgtcaaaaccccagccttggtgccctcggtgccagcaggaccctcgcccactggctagc

SEQ ID NO: 371870 - DNA, 151 bp, Homo sapiens; identical to SEQ ID NO: 350748
  chr8:55379013-55379164
  hyper

SEQ ID NO: 371871 - DNA, 116 bp, Homo sapiens; identical to SEQ ID NO: 201413
  chr8:56014011-56014127
  hyper

SEQ ID NO: 371872 - DNA, 172 bp, Homo sapiens; identical to SEQ ID NO: 359111
  chr8:56791852-56792024
  hyper

SEQ ID NO: 371873 - DNA, 1176 bp, Homo sapiens; identical to SEQ ID NO: 359112
  chr8:56792065-56793241
  hyper

SEQ ID NO: 371874 - DNA, 606 bp, Homo sapiens; identical to SEQ ID NO: 333447
  chr8:57122656-57123262
  hyper

SEQ ID NO: 371875 - DNA, 148 bp, Homo sapiens; identical to SEQ ID NO: 345301
  chr8:58906804-58906952
  hyper

SEQ ID NO: 371876 - DNA, 115 bp, Homo sapiens
  chr8:58907941-58908056
  hyper
ggttaccccctccagctcctcccgtggcctcaattgtctctattttctttgaaagcatacagatttgaaatagaattaaattctccttggctcactcgtgtctccatcacccagc

SEQ ID NO: 371877 - DNA, 102 bp, Homo sapiens; identical to SEQ ID NO: 346981
  chr8:60030067-60030169
  hyper

SEQ ID NO: 371878 - DNA, 238 bp, Homo sapiens; identical to SEQ ID NO: 201421
  chr8:60030908-60031146
  hyper

SEQ ID NO: 371879 - DNA, 349 bp, Homo sapiens; identical to SEQ ID NO: 201422
  chr8:60031791-60032140
  hyper

SEQ ID NO: 371880 - DNA, 202 bp, Homo sapiens; identical to SEQ ID NO: 285892
  chr8:60032288-60032490
  hyper

SEQ ID NO: 371881 - DNA, 292 bp, Homo sapiens; identical to SEQ ID NO: 201424
  chr8:61193765-61194057
  hyper

SEQ ID NO: 371882 - DNA, 119 bp, Homo sapiens; identical to SEQ ID NO: 345303
  chr8:61822259-61822378
  hyper

SEQ ID NO: 371883 - DNA, 144 bp, Homo sapiens; identical to SEQ ID NO: 201426
  chr8:61822883-61823027
  hyper

SEQ ID NO: 371884 - DNA, 40 bp, Homo sapiens; identical to SEQ ID NO: 359122
  chr8:62200462-62200502
  hyper

SEQ ID NO: 371885 - DNA, 131 bp, Homo sapiens; identical to SEQ ID NO: 359123
  chr8:62200984-62201115
  hyper

SEQ ID NO: 371886 - DNA, 177 bp, Homo sapiens; identical to SEQ ID NO: 359124
  chr8:65283513-65283690
  hyper

SEQ ID NO: 371887 - DNA, 292 bp, Homo sapiens; identical to SEQ ID NO: 285904
  chr8:65488369-65488661
  hyper

SEQ ID NO: 371888 - DNA, 219 bp, Homo sapiens; identical to SEQ ID NO: 201432
  chr8:65489646-65489865
  hyper

SEQ ID NO: 371889 - DNA, 188 bp, Homo sapiens; identical to SEQ ID NO: 359126
  chr8:65490182-65490370
  hyper

SEQ ID NO: 371890 - DNA, 260 bp, Homo sapiens; identical to SEQ ID NO: 201435
  chr8:65492407-65492667
  hyper

SEQ ID NO: 371891 - DNA, 267 bp, Homo sapiens; identical to SEQ ID NO: 350760
  chr8:65494311-65494578
  hyper

SEQ ID NO: 371892 - DNA, 84 bp, Homo sapiens; identical to SEQ ID NO: 350761
  chr8:65499649-65499733
  hyper

SEQ ID NO: 371893 - DNA, 104 bp, Homo sapiens; identical to SEQ ID NO: 350762
  chr8:65710834-65710938
  hyper

SEQ ID NO: 371894 - DNA, 280 bp, Homo sapiens; identical to SEQ ID NO: 201437
  chr8:67025640-67025920
  hyper

SEQ ID NO: 371895 - DNA, 234 bp, Homo sapiens; identical to SEQ ID NO: 201438
  chr8:67026578-67026812
  hyper

SEQ ID NO: 371896 - DNA, 118 bp, Homo sapiens
  chr8:67089303-67089421
  hyper
cgccgcgctccgcgagagccgcggggctgtcgagcgagcgccgaggcagcagcagctgctgcagcaacacgcggaaaaagttggcggtcgcctgttccggcgaagggcggctgccgct

SEQ ID NO: 371897 - DNA, 47 bp, Homo sapiens
  chr8:67090036-67090083
  hyper
attttcccgatcctagagaagagccacagatttaagatcccacccgc

SEQ ID NO: 371898 - DNA, 210 bp, Homo sapiens
  chr8:67344870-67345080
  hyper
gtgacccgctcagatcctgcgcagtcttctccgcttactttcaagaattcggagaatttggataccgccctgggctcccaccgcgcgccaggcggaacagcgaggtcacagagtgcgcgatgcagcctctcagggcgcagtgaggcagcctttactctgcttgtctaccgttaaagaaactgaggcccagagaggacctggtcccacatc

SEQ ID NO: 371899 - DNA, 42 bp, Homo sapiens; identical to SEQ ID NO: 350765
  chr8:69242761-69242803
  hyper

SEQ ID NO: 371900 - DNA, 56 bp, Homo sapiens; identical to SEQ ID NO: 201448
  chr8:69243011-69243067
  hyper

SEQ ID NO: 371901 - DNA, 37 bp, Homo sapiens; identical to SEQ ID NO: 201449
  chr8:69243994-69244031
  hyper

SEQ ID NO: 371902 - DNA, 1459 bp, Homo sapiens; identical to SEQ ID NO: 350767
  chr8:70745324-70746783
  hyper

SEQ ID NO: 371903 - DNA, 311 bp, Homo sapiens; identical to SEQ ID NO: 333477
  chr8:71316520-71316831
  hyper

SEQ ID NO: 371904 - DNA, 55 bp, Homo sapiens; identical to SEQ ID NO: 346990
  chr8:72756949-72757004
  hyper

SEQ ID NO: 371905 - DNA, 94 bp, Homo sapiens; identical to SEQ ID NO: 359138
  chr8:73448692-73448786
  hyper

SEQ ID NO: 371906 - DNA, 252 bp, Homo sapiens; identical to SEQ ID NO: 285959
  chr8:73448832-73449084
  hyper

SEQ ID NO: 371907 - DNA, 263 bp, Homo sapiens; identical to SEQ ID NO: 285960
  chr8:73449114-73449377
  hyper

SEQ ID NO: 371908 - DNA, 207 bp, Homo sapiens; identical to SEQ ID NO: 285961
  chr8:73449432-73449639
  hyper

SEQ ID NO: 371909 - DNA, 339 bp, Homo sapiens; identical to SEQ ID NO: 359142
  chr8:74005170-74005509
  hyper

SEQ ID NO: 371910 - DNA, 122 bp, Homo sapiens; identical to SEQ ID NO: 201465
  chr8:74005539-74005661
  hyper

SEQ ID NO: 371911 - DNA, 57 bp, Homo sapiens; identical to SEQ ID NO: 359144
  chr8:74005798-74005855
  hyper

SEQ ID NO: 371912 - DNA, 77 bp, Homo sapiens; identical to SEQ ID NO: 346991
  chr8:75897394-75897471
  hyper

SEQ ID NO: 371913 - DNA, 172 bp, Homo sapiens; identical to SEQ ID NO: 359146
  chr8:76316995-76317167
  hyper

SEQ ID NO: 371914 - DNA, 194 bp, Homo sapiens; identical to SEQ ID NO: 350770
  chr8:77589904-77590098
  hyper

SEQ ID NO: 371915 - DNA, 135 bp, Homo sapiens; identical to SEQ ID NO: 350771
  chr8:80524710-80524845
  hyper

SEQ ID NO: 371916 - DNA, 112 bp, Homo sapiens; identical to SEQ ID NO: 201479
  chr8:80695946-80696058
  hyper

SEQ ID NO: 371917 - DNA, 132 bp, Homo sapiens; identical to SEQ ID NO: 201480
  chr8:80696101-80696233
  hyper

SEQ ID NO: 371918 - DNA, 307 bp, Homo sapiens; identical to SEQ ID NO: 350774
  chr8:80696263-80696570
  hyper

SEQ ID NO: 371919 - DNA, 208 bp, Homo sapiens; identical to SEQ ID NO: 201482
  chr8:80803900-80804108
  hyper

SEQ ID NO: 371920 - DNA, 185 bp, Homo sapiens
  chr8:81397833-81398018
  hyper
cggggcggtgcattttctgtgaaatgactactgtccggggcccgaggtgctgcctcgcacaatgcatcaaaggaggttgtgtccgtggtcgtaacctcttcgcgtgaaaggcaccgcctggtccagtctttgtgaaggaacaaaataagttcacttccttgggcaccgccacccaccctcagcaa

SEQ ID NO: 371921 - DNA, 273 bp, Homo sapiens; identical to SEQ ID NO: 201484
  chr8:81398155-81398428
  hyper

SEQ ID NO: 371922 - DNA, 836 bp, Homo sapiens; identical to SEQ ID NO: 285998
  chr8:81399496-81400332
  hyper

SEQ ID NO: 371923 - DNA, 917 bp, Homo sapiens; identical to SEQ ID NO: 350777
  chr8:81785915-81786832
  hyper

SEQ ID NO: 371924 - DNA, 196 bp, Homo sapiens; identical to SEQ ID NO: 350778
  chr8:82192428-82192624
  hyper

SEQ ID NO: 371925 - DNA, 99 bp, Homo sapiens; identical to SEQ ID NO: 345308
  chr8:82193698-82193797
  hyper

SEQ ID NO: 371926 - DNA, 272 bp, Homo sapiens; identical to SEQ ID NO: 286011
  chr8:85095711-85095983
  hyper

SEQ ID NO: 371927 - DNA, 140 bp, Homo sapiens; identical to SEQ ID NO: 333501
  chr8:91014317-91014457
  hyper

SEQ ID NO: 371928 - DNA, 243 bp, Homo sapiens; identical to SEQ ID NO: 350780
  chr8:91657148-91657391
  hyper

SEQ ID NO: 371929 - DNA, 245 bp, Homo sapiens; identical to SEQ ID NO: 350781
  chr8:91657421-91657666
  hyper

SEQ ID NO: 371930 - DNA, 65 bp, Homo sapiens; identical to SEQ ID NO: 350782
  chr8:91996920-91996985
  hyper

SEQ ID NO: 371931 - DNA, 52 bp, Homo sapiens; identical to SEQ ID NO: 350783
  chr8:94712366-94712418
  hyper

SEQ ID NO: 371932 - DNA, 248 bp, Homo sapiens; identical to SEQ ID NO: 286033
  chr8:94712881-94713129
  hyper

SEQ ID NO: 371933 - DNA, 261 bp, Homo sapiens; identical to SEQ ID NO: 333507
  chr8:95003763-95004024
  hyper

SEQ ID NO: 371934 - DNA, 187 bp, Homo sapiens
  chr8:95246496-95246683
  hyper
cgcacagctcccccatccgccctctggcgcttcagagtctggaggaatcccgagctgcgcctccctctccctgcatccctggcagagaatttcccctcccagcgcgggggagcccatccctgaggactcgggcaggtcagatgagaattggtagaaagtgaagcgccttttcctcgcgctgagggca

SEQ ID NO: 371935 - DNA, 71 bp, Homo sapiens; identical to SEQ ID NO: 201508
  chr8:95651655-95651726
  hyper

SEQ ID NO: 371936 - DNA, 176 bp, Homo sapiens; identical to SEQ ID NO: 346996
  chr8:95651845-95652021
  hyper

SEQ ID NO: 371937 - DNA, 223 bp, Homo sapiens; identical to SEQ ID NO: 201510
  chr8:95652591-95652814
  hyper

SEQ ID NO: 371938 - DNA, 377 bp, Homo sapiens; identical to SEQ ID NO: 201511
  chr8:95652863-95653240
  hyper

SEQ ID NO: 371939 - DNA, 52 bp, Homo sapiens; identical to SEQ ID NO: 201512
  chr8:95653290-95653342
  hyper

SEQ ID NO: 371940 - DNA, 109 bp, Homo sapiens; identical to SEQ ID NO: 359170
  chr8:95653451-95653560
  hyper

SEQ ID NO: 371941 - DNA, 54 bp, Homo sapiens; identical to SEQ ID NO: 346997
  chr8:97156910-97156964
  hyper

SEQ ID NO: 371942 - DNA, 77 bp, Homo sapiens; identical to SEQ ID NO: 350790
  chr8:97166796-97166873
  hyper

SEQ ID NO: 371943 - DNA, 275 bp, Homo sapiens; identical to SEQ ID NO: 201518
  chr8:97166903-97167178
  hyper

SEQ ID NO: 371944 - DNA, 214 bp, Homo sapiens; identical to SEQ ID NO: 350792
  chr8:97167223-97167437
  hyper

SEQ ID NO: 371945 - DNA, 223 bp, Homo sapiens; identical to SEQ ID NO: 201520
  chr8:97167855-97168078
  hyper

SEQ ID NO: 371946 - DNA, 80 bp, Homo sapiens; identical to SEQ ID NO: 350793
  chr8:97507728-97507808
  hyper

SEQ ID NO: 371947 - DNA, 188 bp, Homo sapiens; identical to SEQ ID NO: 333522
  chr8:98787253-98787441
  hyper

SEQ ID NO: 371948 - DNA, 177 bp, Homo sapiens; identical to SEQ ID NO: 350794
  chr8:98787803-98787980
  hyper

SEQ ID NO: 371949 - DNA, 355 bp, Homo sapiens; identical to SEQ ID NO: 201523
  chr8:98788437-98788792
  hyper

SEQ ID NO: 371950 - DNA, 765 bp, Homo sapiens; identical to SEQ ID NO: 286064
  chr8:98881052-98881817
  hyper

SEQ ID NO: 371951 - DNA, 43 bp, Homo sapiens; identical to SEQ ID NO: 359180
  chr8:98881884-98881927
  hyper

SEQ ID NO: 371952 - DNA, 45 bp, Homo sapiens
  chr8:99077294-99077339
  hyper
cacaggagaaatgtcctatcaaggccttctaccaaggctgggggc

SEQ ID NO: 371953 - DNA, 134 bp, Homo sapiens; identical to SEQ ID NO: 333527
  chr8:99182356-99182490
  hyper

SEQ ID NO: 371954 - DNA, 74 bp, Homo sapiens; identical to SEQ ID NO: 286069
  chr8:99438739-99438813
  hyper

SEQ ID NO: 371955 - DNA, 59 bp, Homo sapiens; identical to SEQ ID NO: 350796
  chr8:99953137-99953196
  hyper

SEQ ID NO: 371956 - DNA, 95 bp, Homo sapiens; identical to SEQ ID NO: 359184
  chr8:99954061-99954156
  hyper

SEQ ID NO: 371957 - DNA, 418 bp, Homo sapiens; identical to SEQ ID NO: 201528
  chr8:99954762-99955180
  hyper

SEQ ID NO: 371958 - DNA, 826 bp, Homo sapiens; identical to SEQ ID NO: 346999
  chr8:99956460-99957286
  hyper

SEQ ID NO: 371959 - DNA, 51 bp, Homo sapiens; identical to SEQ ID NO: 345310
  chr8:99957709-99957760
  hyper

SEQ ID NO: 371960 - DNA, 80 bp, Homo sapiens; identical to SEQ ID NO: 359188
  chr8:99963508-99963588
  hyper

SEQ ID NO: 371961 - DNA, 244 bp, Homo sapiens; identical to SEQ ID NO: 350799
  chr8:101661596-101661840
  hyper

SEQ ID NO: 371962 - DNA, 62 bp, Homo sapiens; identical to SEQ ID NO: 350800
  chr8:101661991-101662053
  hyper

SEQ ID NO: 371963 - DNA, 169 bp, Homo sapiens; identical to SEQ ID NO: 350801
  chr8:101920213-101920382
  hyper

SEQ ID NO: 371964 - DNA, 62 bp, Homo sapiens; identical to SEQ ID NO: 350802
  chr8:101920468-101920530
  hyper

SEQ ID NO: 371965 - DNA, 48 bp, Homo sapiens; identical to SEQ ID NO: 350803
  chr8:102092936-102092984
  hyper

SEQ ID NO: 371966 - DNA, 141 bp, Homo sapiens; identical to SEQ ID NO: 350804
  chr8:102093137-102093278
  hyper

SEQ ID NO: 371967 - DNA, 32 bp, Homo sapiens; identical to SEQ ID NO: 201542
  chr8:102504696-102504728
  hyper

SEQ ID NO: 371968 - DNA, 143 bp, Homo sapiens; identical to SEQ ID NO: 350806
  chr8:102504760-102504903
  hyper

SEQ ID NO: 371969 - DNA, 40 bp, Homo sapiens; identical to SEQ ID NO: 201544
  chr8:102506365-102506405
  hyper

SEQ ID NO: 371970 - DNA, 429 bp, Homo sapiens; identical to SEQ ID NO: 201548
  chr8:104511554-104511983
  hyper

SEQ ID NO: 371971 - DNA, 48 bp, Homo sapiens; identical to SEQ ID NO: 347002
  chr8:105236123-105236171
  hyper

SEQ ID NO: 371972 - DNA, 37 bp, Homo sapiens; identical to SEQ ID NO: 350809
  chr8:105600489-105600526
  hyper

SEQ ID NO: 371973 - DNA, 329 bp, Homo sapiens; identical to SEQ ID NO: 201550
  chr8:105600681-105601010
  hyper

SEQ ID NO: 371974 - DNA, 244 bp, Homo sapiens; identical to SEQ ID NO: 201551
  chr8:105601687-105601931
  hyper

SEQ ID NO: 371975 - DNA, 142 bp, Homo sapiens; identical to SEQ ID NO: 359203
  chr8:105602083-105602225
  hyper

SEQ ID NO: 371976 - DNA, 358 bp, Homo sapiens; identical to SEQ ID NO: 359204
  chr8:106331443-106331801
  hyper

SEQ ID NO: 371977 - DNA, 89 bp, Homo sapiens; identical to SEQ ID NO: 359205
  chr8:107281820-107281909
  hyper

SEQ ID NO: 371978 - DNA, 217 bp, Homo sapiens; identical to SEQ ID NO: 201555
  chr8:107282895-107283112
  hyper

SEQ ID NO: 371979 - DNA, 622 bp, Homo sapiens; identical to SEQ ID NO: 347003
  chr8:107669381-107670003
  hyper

SEQ ID NO: 371980 - DNA, 633 bp, Homo sapiens; identical to SEQ ID NO: 201557
  chr8:107670289-107670922
  hyper

SEQ ID NO: 371981 - DNA, 105 bp, Homo sapiens; identical to SEQ ID NO: 345314
  chr8:107670978-107671083
  hyper

SEQ ID NO: 371982 - DNA, 59 bp, Homo sapiens; identical to SEQ ID NO: 359210
  chr8:108509697-108509756
  hyper

SEQ ID NO: 371983 - DNA, 225 bp, Homo sapiens; identical to SEQ ID NO: 350815
  chr8:109799189-109799414
  hyper

SEQ ID NO: 371984 - DNA, 42 bp, Homo sapiens; identical to SEQ ID NO: 350816
  chr8:109799903-109799945
  hyper

SEQ ID NO: 371985 - DNA, 284 bp, Homo sapiens; identical to SEQ ID NO: 333553
  chr8:110552612-110552896
  hyper

SEQ ID NO: 371986 - DNA, 99 bp, Homo sapiens; identical to SEQ ID NO: 350817
  chr8:110986113-110986212
  hyper

SEQ ID NO: 371987 - DNA, 174 bp, Homo sapiens; identical to SEQ ID NO: 350818
  chr8:110987222-110987396
  hyper

SEQ ID NO: 371988 - DNA, 65 bp, Homo sapiens; identical to SEQ ID NO: 350819
  chr8:110987616-110987681
  hyper

SEQ ID NO: 371989 - DNA, 300 bp, Homo sapiens; identical to SEQ ID NO: 350820
  chr8:110987956-110988256
  hyper

SEQ ID NO: 371990 - DNA, 39 bp, Homo sapiens; identical to SEQ ID NO: 201567
  chr8:114444541-114444580
  hyper

SEQ ID NO: 371991 - DNA, 341 bp, Homo sapiens; identical to SEQ ID NO: 286136
  chr8:114447448-114447789
  hyper

SEQ ID NO: 371992 - DNA, 818 bp, Homo sapiens; identical to SEQ ID NO: 345315
  chr8:114449602-114450420
  hyper

SEQ ID NO: 371993 - DNA, 194 bp, Homo sapiens; identical to SEQ ID NO: 350823
  chr8:119123513-119123707
  hyper

SEQ ID NO: 371994 - DNA, 60 bp, Homo sapiens; identical to SEQ ID NO: 350824
  chr8:120220368-120220428
  hyper

SEQ ID NO: 371995 - DNA, 326 bp, Homo sapiens; identical to SEQ ID NO: 350825
  chr8:120220895-120221221
  hyper

SEQ ID NO: 371996 - DNA, 124 bp, Homo sapiens
  chr8:121136702-121136826
  hyper
cgggtggggaatcagcaggttatgaggtacaaccacacgaaattgcctacattcgtctttttgtaacctacagaaatgtccatttcgatacctccagctgattcccctgcaccttaaagtttga

SEQ ID NO: 371997 - DNA, 540 bp, Homo sapiens; identical to SEQ ID NO: 347007
  chr8:121823361-121823901
  hyper

SEQ ID NO: 371998 - DNA, 211 bp, Homo sapiens; identical to SEQ ID NO: 347008
  chr8:121824481-121824692
  hyper

SEQ ID NO: 371999 - DNA, 79 bp, Homo sapiens; identical to SEQ ID NO: 333566
  chr8:124778505-124778584
  hyper

SEQ ID NO: 372000 - DNA, 335 bp, Homo sapiens; identical to SEQ ID NO: 117170
  chr8:125985496-125985831
  hyper

SEQ ID NO: 372001 - DNA, 971 bp, Homo sapiens; identical to SEQ ID NO: 333568
  chr8:127569937-127570908
  hyper

SEQ ID NO: 372002 - DNA, 278 bp, Homo sapiens; identical to SEQ ID NO: 333569
  chr8:128806660-128806938
  hyper

SEQ ID NO: 372003 - DNA, 105 bp, Homo sapiens; identical to SEQ ID NO: 359228
  chr8:131455079-131455184
  hyper

SEQ ID NO: 372004 - DNA, 72 bp, Homo sapiens; identical to SEQ ID NO: 350829
  chr8:131456212-131456284
  hyper

SEQ ID NO: 372005 - DNA, 188 bp, Homo sapiens
  chr8:133491923-133492111
  hyper
cgcacccctcccatccccaactaaactcagtggcgatcccaacagaagggatccacccgaaacagaaacacagagctcacgggaggacccgctttatcctcttcaaccctcacattaattggaaaaacccacataattattttaagcttccaaaccaacacccctagaagatgtcataaatgtgcacc

SEQ ID NO: 372006 - DNA, 65 bp, Homo sapiens
  chr8:133492127-133492192
  hyper
cgcccaaatcagcaggggaaccacgcttcgttttttaagcccctagtgtggaacacccggagagc

SEQ ID NO: 372007 - DNA, 310 bp, Homo sapiens; identical to SEQ ID NO: 286199
  chr8:133493185-133493495
  hyper

SEQ ID NO: 372008 - DNA, 937 bp, Homo sapiens
  chr8:134582236-134583173
  hyper
cgtccgggcccctgccagcaccttccaccttggggccttgtcaatgaacactgcgttagcacctacgacgtgccaggcgccctggcgactattggaaaacccggctcccctctcaccccgttttcctcgttggcgagtcggcctcgcctcctcctcccgtctcttcctctcaccacacacacccagccgcagagcgggggtgggcgctcgctgtctccctggagaaccagctcgtcgcaaacttgcggggcttggggacccgcgagggggagaagtcgggagaggccaggggtgcccggaaacaatcacgagaaagccgggcgaatgcctgatgcagggacgcggcgagccagtcactgccctcagggtcacggctgactccctctgcgggactcgcccagcccgcgagacgcagtgacctgcccaacccccacccccttgcgcgcttctgggtgcgcacgtgtcccctcgcccaacacaccaccgagccccgcgcatggtacggccgccgaggaccctagcgtaggagggaggagcgagtcagggctccagctgacgagcagagccagacgatccccacacgcttcctgggagacccggctgcaaggccaggctaatgcgcgctccgacgtctctgtgccaagccggggcgcaagctcaacccccatctcaagttcagccgcgcttcctcccgcaaggtcacgcttaaacactcgcgcagagaaaggaggagcggaaagttgcgccaccgtcccgattccaaactaactgtaccctcaccagagcgcctcgccccagggtcaccgctgtccgtccccgtgcgctcccagaaggggtggccctgcccccacgcaggtcacacacacgagagacacaggcaagttgctaacttttgtcagattatttcttgggagctgcgacgcctcacggggttggg

SEQ ID NO: 372009 - DNA, 926 bp, Homo sapiens; identical to SEQ ID NO: 359232
  chr8:134583293-134584219
  hyper

SEQ ID NO: 372010 - DNA, 853 bp, Homo sapiens; identical to SEQ ID NO: 286211
  chr8:136469302-136470155
  hyper

SEQ ID NO: 372011 - DNA, 206 bp, Homo sapiens; identical to SEQ ID NO: 359234
  chr8:136470313-136470519
  hyper

SEQ ID NO: 372012 - DNA, 102 bp, Homo sapiens; identical to SEQ ID NO: 286213
  chr8:139509549-139509651
  hyper

SEQ ID NO: 372013 - DNA, 150 bp, Homo sapiens; identical to SEQ ID NO: 350831
  chr8:140643192-140643342
  hyper

SEQ ID NO: 372014 - DNA, 1631 bp, Homo sapiens; identical to SEQ ID NO: 333579
  chr8:142138208-142139839
  hyper

SEQ ID NO: 372015 - DNA, 449 bp, Homo sapiens; identical to SEQ ID NO: 345316
  chr8:142317706-142318155
  hyper

SEQ ID NO: 372016 - DNA, 415 bp, Homo sapiens; identical to SEQ ID NO: 345317
  chr8:142318184-142318599
  hyper

SEQ ID NO: 372017 - DNA, 106 bp, Homo sapiens; identical to SEQ ID NO: 350835
  chr8:142427489-142427595
  hyper

SEQ ID NO: 372018 - DNA, 327 bp, Homo sapiens; identical to SEQ ID NO: 286229
  chr8:142427700-142428027
  hyper

SEQ ID NO: 372019 - DNA, 69 bp, Homo sapiens; identical to SEQ ID NO: 333583
  chr8:143483659-143483728
  hyper

SEQ ID NO: 372020 - DNA, 64 bp, Homo sapiens; identical to SEQ ID NO: 359243
  chr8:143531771-143531835
  hyper

SEQ ID NO: 372021 - DNA, 120 bp, Homo sapiens; identical to SEQ ID NO: 347012
  chr8:143531858-143531978
  hyper

SEQ ID NO: 372022 - DNA, 296 bp, Homo sapiens; identical to SEQ ID NO: 117271
  chr8:143556722-143557018
  hyper

SEQ ID NO: 372023 - DNA, 90 bp, Homo sapiens; identical to SEQ ID NO: 201623
  chr8:143695816-143695906
  hyper

SEQ ID NO: 372024 - DNA, 56 bp, Homo sapiens; identical to SEQ ID NO: 286236
  chr8:143859071-143859127
  hyper

SEQ ID NO: 372025 - DNA, 49 bp, Homo sapiens; identical to SEQ ID NO: 359248
  chr8:143859361-143859410
  hyper

SEQ ID NO: 372026 - DNA, 219 bp, Homo sapiens; identical to SEQ ID NO: 350840
  chr8:144240980-144241199
  hyper

SEQ ID NO: 372027 - DNA, 55 bp, Homo sapiens; identical to SEQ ID NO: 359250
  chr8:144328118-144328173
  hyper

SEQ ID NO: 372028 - DNA, 104 bp, Homo sapiens; identical to SEQ ID NO: 333591
  chr8:144417159-144417263
  hyper

SEQ ID NO: 372029 - DNA, 101 bp, Homo sapiens; identical to SEQ ID NO: 286248
  chr8:144512372-144512473
  hyper

SEQ ID NO: 372030 - DNA, 120 bp, Homo sapiens; identical to SEQ ID NO: 286253
  chr8:144636569-144636689
  hyper

SEQ ID NO: 372031 - DNA, 394 bp, Homo sapiens; identical to SEQ ID NO: 350842
  chr8:144640377-144640771
  hyper

SEQ ID NO: 372032 - DNA, 91 bp, Homo sapiens; identical to SEQ ID NO: 333595
  chr8:144641074-144641165
  hyper

SEQ ID NO: 372033 - DNA, 93 bp, Homo sapiens; identical to SEQ ID NO: 333596
  chr8:145692498-145692591
  hyper

SEQ ID NO: 372034 - DNA, 77 bp, Homo sapiens; identical to SEQ ID NO: 345318
  chr8:145698674-145698751
  hyper

SEQ ID NO: 372035 - DNA, 429 bp, Homo sapiens; identical to SEQ ID NO: 333598
  chr8:145733644-145734073
  hyper

SEQ ID NO: 372036 - DNA, 209 bp, Homo sapiens; identical to SEQ ID NO: 359258
  chr8:145747534-145747743
  hyper

SEQ ID NO: 372037 - DNA, 526 bp, Homo sapiens; identical to SEQ ID NO: 333600
  chr8:145910996-145911522
  hyper

SEQ ID NO: 372038 - DNA, 85 bp, Homo sapiens; identical to SEQ ID NO: 333601
  chr8:146125638-146125723
  hyper

SEQ ID NO: 372039 - DNA, 37 bp, Homo sapiens; identical to SEQ ID NO: 350846
  chr9:118139-118176
  hyper

SEQ ID NO: 372040 - DNA, 92 bp, Homo sapiens; identical to SEQ ID NO: 359261
  chr9:214559-214651
  hyper

SEQ ID NO: 372041 - DNA, 169 bp, Homo sapiens; identical to SEQ ID NO: 359262
  chr9:215348-215517
  hyper

SEQ ID NO: 372042 - DNA, 878 bp, Homo sapiens; identical to SEQ ID NO: 333605
  chr9:503936-504814
  hyper

SEQ ID NO: 372043 - DNA, 771 bp, Homo sapiens
  chr9:504833-505604
  hyper
cgggctggccccgcgcggagccgacttggcgcgcgccggggttgcgcggcggccgtggcggtggcggagggcagcccccgcgggctcccgctcgtgcgggtgaacccggcggcctcggggcggtcctgggggggggtccgagaggtggcgtcggccccgcggccgtcggagtttggcgcgctctgcagcggcggcgctcggccggtctggaggagggagaggcgcgccgggcacggagcagcgagaaagttcgggccgggccggccggcgggagggtgcgggcgcctggctaccccggcccggcgctctgtccctcggatgcctctgggcccttccctagcccggggcggaacgggggaccctctctgaagcggctctccgtggagttggatgttgcccttcgcgggagggagtggcggtcaagacccctttatcctcggccccagaggggcaggtggcctcgggtcgccctccgccaactccgaggtggcttcggccggggctggagggcggggaggcgggggaggggcgtgggcgctgcggcctctggggcggcccaacccggcgcgggcagcgtgggtttccgaggtcccgcggttccaggtcgagggaaggtgtaggggccctgaagcgggctggtccccgaatgttgcgttttctgtgccgctttgggcaacacgcagtggcgctcgcggcagccacggctccttgaccgttcatctccttcacccgggtcccgtggaactttcagaggcaactgttcttggtggc

SEQ ID NO: 372044 - DNA, 82 bp, Homo sapiens
  chr9:505639-505721
  hyper
tgacctagtgaaggccttgggcgagttggcgttaacaatttatggcgtccgccagcgctcgctttccgcacgtggcctctgc

SEQ ID NO: 372045 - DNA, 52 bp, Homo sapiens
  chr9:975281-975333
  hyper
cggcctccccgaggggacaagggcctctgtgcccatgaggggtcggacattg

SEQ ID NO: 372046 - DNA, 104 bp, Homo sapiens; identical to SEQ ID NO: 359264
  chr9:3181020-3181124
  hyper

SEQ ID NO: 372047 - DNA, 43 bp, Homo sapiens; identical to SEQ ID NO: 359265
  chr9:3181880-3181923
  hyper

SEQ ID NO: 372048 - DNA, 375 bp, Homo sapiens; identical to SEQ ID NO: 333616
  chr9:4297365-4297740
  hyper

SEQ ID NO: 372049 - DNA, 220 bp, Homo sapiens; identical to SEQ ID NO: 359267
  chr9:4298789-4299009
  hyper

SEQ ID NO: 372050 - DNA, 70 bp, Homo sapiens; identical to SEQ ID NO: 359268
  chr9:6412900-6412970
  hyper

SEQ ID NO: 372051 - DNA, 315 bp, Homo sapiens; identical to SEQ ID NO: 286313
  chr9:6644554-6644869
  hyper

SEQ ID NO: 372052 - DNA, 332 bp, Homo sapiens; identical to SEQ ID NO: 359270
  chr9:8857015-8857347
  hyper

SEQ ID NO: 372053 - DNA, 37 bp, Homo sapiens; identical to SEQ ID NO: 201664
  chr9:8857406-8857443
  hyper

SEQ ID NO: 372054 - DNA, 49 bp, Homo sapiens; identical to SEQ ID NO: 201665
  chr9:10612635-10612684
  hyper

SEQ ID NO: 372055 - DNA, 143 bp, Homo sapiens; identical to SEQ ID NO: 350851
  chr9:10613299-10613442
  hyper

SEQ ID NO: 372056 - DNA, 98 bp, Homo sapiens; identical to SEQ ID NO: 359274
  chr9:13278637-13278735
  hyper

SEQ ID NO: 372057 - DNA, 347 bp, Homo sapiens; identical to SEQ ID NO: 286324
  chr9:13278956-13279303
  hyper

SEQ ID NO: 372058 - DNA, 227 bp, Homo sapiens; identical to SEQ ID NO: 201670
  chr9:13279406-13279633
  hyper

SEQ ID NO: 372059 - DNA, 2011 bp, Homo sapiens; identical to SEQ ID NO: 350852
  chr9:14313785-14315796
  hyper

SEQ ID NO: 372060 - DNA, 434 bp, Homo sapiens; identical to SEQ ID NO: 286332
  chr9:14347673-14348107
  hyper

SEQ ID NO: 372061 - DNA, 587 bp, Homo sapiens; identical to SEQ ID NO: 359278
  chr9:14348452-14349039
  hyper

SEQ ID NO: 372062 - DNA, 224 bp, Homo sapiens; identical to SEQ ID NO: 333625
  chr9:16133902-16134126
  hyper

SEQ ID NO: 372063 - DNA, 55 bp, Homo sapiens; identical to SEQ ID NO: 359280
  chr9:16154771-16154826
  hyper

SEQ ID NO: 372064 - DNA, 138 bp, Homo sapiens; identical to SEQ ID NO: 333627
  chr9:16192269-16192407
  hyper

SEQ ID NO: 372065 - DNA, 131 bp, Homo sapiens
  chr9:16871284-16871415
  hyper
cgcccccccccccccccggggagctgcgggcgtggaggtagaggtggccgctagcgcccagctgtcacacacacacaaaaaaaaattgcggggcgggggtggggagcggagcaaggagaggaggctgcgaa

SEQ ID NO: 372066 - DNA, 70 bp, Homo sapiens; identical to SEQ ID NO: 359281
  chr9:17905988-17906058
  hyper

SEQ ID NO: 372067 - DNA, 257 bp, Homo sapiens; identical to SEQ ID NO: 286344
  chr9:17906726-17906983
  hyper

SEQ ID NO: 372068 - DNA, 96 bp, Homo sapiens; identical to SEQ ID NO: 345320
  chr9:19127135-19127231
  hyper

SEQ ID NO: 372069 - DNA, 341 bp, Homo sapiens; identical to SEQ ID NO: 350854
  chr9:20620372-20620713
  hyper

SEQ ID NO: 372070 - DNA, 591 bp, Homo sapiens; identical to SEQ ID NO: 350855
  chr9:20620754-20621345
  hyper

SEQ ID NO: 372071 - DNA, 71 bp, Homo sapiens; identical to SEQ ID NO: 345321
  chr9:21395928-21395999
  hyper

SEQ ID NO: 372072 - DNA, 36 bp, Homo sapiens; identical to SEQ ID NO: 345322
  chr9:21396327-21396363
  hyper

SEQ ID NO: 372073 - DNA, 114 bp, Homo sapiens
  chr9:21559133-21559247
  hyper
cgctgtatgaaagcgctctccgccaacacgctcatggacacacacaactccttcctcgaggtttagggacagagagcgaacctgtgacttcgggccaggatgacgacctgagat

SEQ ID NO: 372074 - DNA, 284 bp, Homo sapiens; identical to SEQ ID NO: 201685
  chr9:21559381-21559665
  hyper

SEQ ID NO: 372075 - DNA, 73 bp, Homo sapiens; identical to SEQ ID NO: 201686
  chr9:21559702-21559775
  hyper

SEQ ID NO: 372076 - DNA, 203 bp, Homo sapiens; identical to SEQ ID NO: 359288
  chr9:21994237-21994440
  hyper

SEQ ID NO: 372077 - DNA, 244 bp, Homo sapiens; identical to SEQ ID NO: 359289
  chr9:22446681-22446925
  hyper

SEQ ID NO: 372078 - DNA, 153 bp, Homo sapiens; identical to SEQ ID NO: 359290
  chr9:22447276-22447429
  hyper

SEQ ID NO: 372079 - DNA, 135 bp, Homo sapiens
  chr9:23831484-23831619
  hyper
aagaagactgaggcccggggagacacagcggctagagaaacagctgtcttatcagcccgctgcagagatggagatggcttgagaggtcctcaacagataatcacttgaataggtttgcaatgcgccaaacttcac

SEQ ID NO: 372080 - DNA, 75 bp, Homo sapiens; identical to SEQ ID NO: 359291
  chr9:23849766-23849841
  hyper

SEQ ID NO: 372081 - DNA, 568 bp, Homo sapiens; identical to SEQ ID NO: 345323
  chr9:27528536-27529104
  hyper

SEQ ID NO: 372082 - DNA, 182 bp, Homo sapiens; identical to SEQ ID NO: 201692
  chr9:27529157-27529339
  hyper

SEQ ID NO: 372083 - DNA, 567 bp, Homo sapiens; identical to SEQ ID NO: 345325
  chr9:27529340-27529907
  hyper

SEQ ID NO: 372084 - DNA, 299 bp, Homo sapiens; identical to SEQ ID NO: 286381
  chr9:29212828-29213127
  hyper

SEQ ID NO: 372085 - DNA, 194 bp, Homo sapiens; identical to SEQ ID NO: 333648
  chr9:34379701-34379895
  hyper

SEQ ID NO: 372086 - DNA, 337 bp, Homo sapiens; identical to SEQ ID NO: 350863
  chr9:34380737-34381074
  hyper

SEQ ID NO: 372087 - DNA, 264 bp, Homo sapiens; identical to SEQ ID NO: 359298
  chr9:34591191-34591455
  hyper

SEQ ID NO: 372088 - DNA, 31 bp, Homo sapiens; identical to SEQ ID NO: 359299
  chr9:34591656-34591687
  hyper

SEQ ID NO: 372089 - DNA, 92 bp, Homo sapiens; identical to SEQ ID NO: 359300
  chr9:34664955-34665047
  hyper

SEQ ID NO: 372090 - DNA, 82 bp, Homo sapiens; identical to SEQ ID NO: 359301
  chr9:34665215-34665297
  hyper

SEQ ID NO: 372091 - DNA, 542 bp, Homo sapiens; identical to SEQ ID NO: 286398
  chr9:34701753-34702295
  hyper

SEQ ID NO: 372092 - DNA, 282 bp, Homo sapiens; identical to SEQ ID NO: 350864
  chr9:35161771-35162053
  hyper

SEQ ID NO: 372093 - DNA, 253 bp, Homo sapiens; identical to SEQ ID NO: 350865
  chr9:35162422-35162675
  hyper

SEQ ID NO: 372094 - DNA, 41 bp, Homo sapiens; identical to SEQ ID NO: 359305
  chr9:35676180-35676221
  hyper

SEQ ID NO: 372095 - DNA, 894 bp, Homo sapiens; identical to SEQ ID NO: 333655
  chr9:35756575-35757469
  hyper

SEQ ID NO: 372096 - DNA, 209 bp, Homo sapiens
  chr9:37028510-37028719
  hyper
gggctaaggctttgggccaggttgcccaagcagagtggctggccctctttcctgcctcagatcaggaactgccagaggctttgggagctggtgttgcgcttctgtccaccggagaaattccgcacccggctcaaggcttcttgagaaccgaatgagccaagtcgcgtccagggctaataagggtccctgaagcgggcgggtggacaggc

SEQ ID NO: 372097 - DNA, 62 bp, Homo sapiens; identical to SEQ ID NO: 345326
  chr9:37034135-37034197
  hyper

SEQ ID NO: 372098 - DNA, 241 bp, Homo sapiens; identical to SEQ ID NO: 286422
  chr9:37035886-37036127
  hyper

SEQ ID NO: 372099 - DNA, 136 bp, Homo sapiens
  chr9:38619917-38620053
  hyper
cggggaattgccagcgacggaaagcagctgaggctccatttggctccgctgctccgagggtgcccggcgccctccaaggtccccgccccaggggctgccgggctgcagggaagccgggcctgcggccccctcccac

SEQ ID NO: 372100 - DNA, 127 bp, Homo sapiens; identical to SEQ ID NO: 201717
  chr9:38620403-38620530
  hyper

SEQ ID NO: 372101 - DNA, 206 bp, Homo sapiens; identical to SEQ ID NO: 286441
  chr9:66458086-66458292
  hyper

SEQ ID NO: 372102 - DNA, 349 bp, Homo sapiens; identical to SEQ ID NO: 333667
  chr9:71320587-71320936
  hyper

SEQ ID NO: 372103 - DNA, 465 bp, Homo sapiens; identical to SEQ ID NO: 350870
  chr9:71735786-71736251
  hyper

SEQ ID NO: 372104 - DNA, 380 bp, Homo sapiens; identical to SEQ ID NO: 350871
  chr9:71788570-71788950
  hyper

SEQ ID NO: 372105 - DNA, 45 bp, Homo sapiens; identical to SEQ ID NO: 350872
  chr9:71789757-71789802
  hyper

SEQ ID NO: 372106 - DNA, 149 bp, Homo sapiens; identical to SEQ ID NO: 359313
  chr9:74061513-74061662
  hyper

SEQ ID NO: 372107 - DNA, 163 bp, Homo sapiens; identical to SEQ ID NO: 333671
  chr9:74640002-74640165
  hyper

SEQ ID NO: 372108 - DNA, 50 bp, Homo sapiens; identical to SEQ ID NO: 359315
  chr9:74764247-74764297
  hyper

SEQ ID NO: 372109 - DNA, 42 bp, Homo sapiens; identical to SEQ ID NO: 359316
  chr9:74764879-74764921
  hyper

SEQ ID NO: 372110 - DNA, 101 bp, Homo sapiens; identical to SEQ ID NO: 350874
  chr9:77111662-77111763
  hyper

SEQ ID NO: 372111 - DNA, 92 bp, Homo sapiens; identical to SEQ ID NO: 359318
  chr9:77501932-77502024
  hyper

SEQ ID NO: 372112 - DNA, 380 bp, Homo sapiens; identical to SEQ ID NO: 201733
  chr9:77502233-77502613
  hyper

SEQ ID NO: 372113 - DNA, 127 bp, Homo sapiens; identical to SEQ ID NO: 350875
  chr9:78505461-78505588
  hyper

SEQ ID NO: 372114 - DNA, 717 bp, Homo sapiens; identical to SEQ ID NO: 286474
  chr9:78505622-78506339
  hyper

SEQ ID NO: 372115 - DNA, 247 bp, Homo sapiens; identical to SEQ ID NO: 333677
  chr9:79319779-79320026
  hyper

SEQ ID NO: 372116 - DNA, 422 bp, Homo sapiens
  chr9:79520881-79521303
  hyper
cgtggctaggggtttggaacccgggtactcggaggggcgcagtggaaaatctcggcccaaggaagacgagcggggtcccgggaaagtggcccgccggggcgcagcgaccgactgctccctcctgccgctctgaggcggctgcggcggaggctgtgcttgcgccctcgaccgtctcgcccagggctccccgccccacccctcgcccggccgccggctctgggcacccgactctgccctaataaggaaagtgggtgtgccgcccaggagccccggggcgcgccgggcacgctctctggcacgcgcctcgggcgccgtggcgcgtgggcggaggtgcaggggtatggcgaggggctcctccgccaatcgcagggccgtgctgcggcctcctgacgtggcgcgccgaaagctgctgcaaccatgga

SEQ ID NO: 372117 - DNA, 210 bp, Homo sapiens
  chr9:79521333-79521543
  hyper
gggctgctgcagagggaggctctgccgcaggcaccgccgcggtcagcgggggaaggtgggaagagggagacgggtcccaggagagcccccgcctcgcccagcgcctcactggctggctggcgcgttacggagcactccggcggtcacttaatgatctggtcggctggcctggccgggggaggcactcagctagattggcgtgggagggac

SEQ ID NO: 372118 - DNA, 183 bp, Homo sapiens; identical to SEQ ID NO: 350878
  chr9:79629667-79629850
  hyper

SEQ ID NO: 372119 - DNA, 54 bp, Homo sapiens; identical to SEQ ID NO: 201741
  chr9:79630437-79630491
  hyper

SEQ ID NO: 372120 - DNA, 472 bp, Homo sapiens; identical to SEQ ID NO: 201742
  chr9:79630544-79631016
  hyper

SEQ ID NO: 372121 - DNA, 171 bp, Homo sapiens; identical to SEQ ID NO: 350881
  chr9:79632239-79632410
  hyper

SEQ ID NO: 372122 - DNA, 291 bp, Homo sapiens; identical to SEQ ID NO: 286485
  chr9:79632921-79633212
  hyper

SEQ ID NO: 372123 - DNA, 276 bp, Homo sapiens; identical to SEQ ID NO: 286486
  chr9:80263018-80263294
  hyper

SEQ ID NO: 372124 - DNA, 211 bp, Homo sapiens
  chr9:80263517-80263728
  hyper
tttcgccaactcactcgctcggagaaggcggcagcaggctggaagaggagcggcgccaagcgtctgttgcgggacacaaagccccggacctgaagtggaagcttgcccaccagcttcaccaccacgcacacccggatttcctagactggctccttccgcttcccggacgccccggcccagctcgggcttggccaaagcccttggtcagctc

SEQ ID NO: 372125 - DNA, 321 bp, Homo sapiens; identical to SEQ ID NO: 286488
  chr9:80645546-80645867
  hyper

SEQ ID NO: 372126 - DNA, 421 bp, Homo sapiens; identical to SEQ ID NO: 201747
  chr9:80645902-80646323
  hyper

SEQ ID NO: 372127 - DNA, 662 bp, Homo sapiens; identical to SEQ ID NO: 201748
  chr9:80646509-80647171
  hyper

SEQ ID NO: 372128 - DNA, 382 bp, Homo sapiens; identical to SEQ ID NO: 347030
  chr9:80647247-80647629
  hyper

SEQ ID NO: 372129 - DNA, 167 bp, Homo sapiens
  chr9:80911724-80911891
  hyper
cggccagattgcgggctcaaggggcgaaggcaggttggcaggggcagcctcttcccgccgcccacaatcctcgggcgggcgcgcagccgagccggctcggctggctggcgcaatctcgcgcgctccttgcattgatcaaaaatgggggttgaaacagtaaacgcgag

SEQ ID NO: 372130 - DNA, 444 bp, Homo sapiens
  chr9:80912036-80912480
  hyper
ggctgcagactctcaccgcagcggccaggaacgccagccgttcacgcgttcggtcctccttggctgactcaccgccctggccgccgcaccatggacgcccccaggcaggtggtcaactttgggcctggtcccgccaagctgccgcactcagtaagtccccgcgagcgggcgccgggagtgaggttcaggcgggagcacgcacgcgggtgggtttgcatccctgcgtgtggcagtcggattcccgctccctgccttgagtcccctaggcgctttgcatcagcgtgcacagcgggatcagcagctccggcaagcgggcttcgggaagaatgcagttggtgaggaagctcggcgaggcgtgcccgtgcagctgcccctggccctgactgctggtgcgaggcagtgcacgactcagctggccggggcctgctgtcccgccggtgccac

SEQ ID NO: 372131 - DNA, 166 bp, Homo sapiens; identical to SEQ ID NO: 286494
  chr9:82185179-82185345
  hyper

SEQ ID NO: 372132 - DNA, 260 bp, Homo sapiens; identical to SEQ ID NO: 286495
  chr9:82185383-82185643
  hyper

SEQ ID NO: 372133 - DNA, 469 bp, Homo sapiens; identical to SEQ ID NO: 347033
  chr9:82185703-82186172
  hyper

SEQ ID NO: 372134 - DNA, 64 bp, Homo sapiens; identical to SEQ ID NO: 333690
  chr9:82188495-82188559
  hyper

SEQ ID NO: 372135 - DNA, 465 bp, Homo sapiens
  chr9:85677440-85677905
  hyper
cgccgccgccgcgtcctcgtcgccttcgtcctcctcgctgtcgtgtgtctccggccccgcctcagacacggcgggcgcgggatccagaggaccccagtcccggcgccgccccccgcggagggacccgaggaagccacgcgcgaactcctggaaggtgatggcgccgtcacggtcggcgtccagccgctggaatactgcctcggcgtcggccggccgcacccgcagctccgtgcacagtgcccggaactcctcgcgctccaggcgccccgagcggttcgcgtcgcaggcggcgaagactgagcgcagccgggccagctcctctccgtccccatccgcctccatcccgcctggcgggggcggccgagagggctccggagcgccgcggggcgcagggccctccctggaaggacggggccacctgctgccgccgggaggcccggcgagtttggctcgtccggctggttc

SEQ ID NO: 372136 - DNA, 259 bp, Homo sapiens
  chr9:85677992-85678251
  hyper
caggtcccgggagcggtggggtgcgcccgggctccaggcaccgccaaggagcgcctcctgcgactgagcgcccaagcgccgaggtggctctcgccactttcccggcgggtgcagctccgcccagccagggaggaggagcgcgcgccaccgcttctccagttcccacgccccggagtccaccgctgcttgccgcgcaggtgggggagacctggctggccggaactgggattcggggggagcattgcccttcggcgtaagc

SEQ ID NO: 372137 - DNA, 243 bp, Homo sapiens; identical to SEQ ID NO: 201759
  chr9:87283766-87284009
  hyper

SEQ ID NO: 372138 - DNA, 113 bp, Homo sapiens; identical to SEQ ID NO: 359337
  chr9:87285083-87285196
  hyper

SEQ ID NO: 372139 - DNA, 218 bp, Homo sapiens; identical to SEQ ID NO: 333696
  chr9:88355794-88356012
  hyper

SEQ ID NO: 372140 - DNA, 92 bp, Homo sapiens; identical to SEQ ID NO: 350891
  chr9:89517563-89517655
  hyper

SEQ ID NO: 372141 - DNA, 182 bp, Homo sapiens; identical to SEQ ID NO: 286516
  chr9:89517860-89518042
  hyper

SEQ ID NO: 372142 - DNA, 431 bp, Homo sapiens; identical to SEQ ID NO: 201763
  chr9:89561318-89561749
  hyper

SEQ ID NO: 372143 - DNA, 494 bp, Homo sapiens; identical to SEQ ID NO: 350894
  chr9:89561779-89562273
  hyper

SEQ ID NO: 372144 - DNA, 276 bp, Homo sapiens; identical to SEQ ID NO: 350895
  chr9:90112514-90112790
  hyper

SEQ ID NO: 372145 - DNA, 270 bp, Homo sapiens; identical to SEQ ID NO: 201767
  chr9:90112856-90113126
  hyper

SEQ ID NO: 372146 - DNA, 115 bp, Homo sapiens; identical to SEQ ID NO: 350897
  chr9:90113156-90113271
  hyper

SEQ ID NO: 372147 - DNA, 385 bp, Homo sapiens; identical to SEQ ID NO: 359346
  chr9:90113280-90113665
  hyper

SEQ ID NO: 372148 - DNA, 202 bp, Homo sapiens; identical to SEQ ID NO: 350898
  chr9:90340643-90340845
  hyper

SEQ ID NO: 372149 - DNA, 321 bp, Homo sapiens; identical to SEQ ID NO: 201770
  chr9:90340943-90341264
  hyper

SEQ ID NO: 372150 - DNA, 198 bp, Homo sapiens; identical to SEQ ID NO: 350900
  chr9:90341343-90341541
  hyper

SEQ ID NO: 372151 - DNA, 105 bp, Homo sapiens
  chr9:91149028-91149133
  hyper
cggctgcgggacacctgcggcggggcccggcagggagcgcgagactggaagagaggccaggagggaaggagagcgacgcggggttttgggggaggggctgcgtgg

SEQ ID NO: 372152 - DNA, 80 bp, Homo sapiens
  chr9:91149326-91149406
  hyper
ggcgcagtggggatgggggcgggggcgcgggatgtggtagggggcgtagtggggagagagtgcaggagtgtgggcagggc

SEQ ID NO: 372153 - DNA, 77 bp, Homo sapiens; identical to SEQ ID NO: 347035
  chr9:91149647-91149724
  hyper

SEQ ID NO: 372154 - DNA, 222 bp, Homo sapiens; identical to SEQ ID NO: 286534
  chr9:91149754-91149976
  hyper

SEQ ID NO: 372155 - DNA, 236 bp, Homo sapiens; identical to SEQ ID NO: 201776
  chr9:91150385-91150621
  hyper

SEQ ID NO: 372156 - DNA, 544 bp, Homo sapiens; identical to SEQ ID NO: 347038
  chr9:93955385-93955929
  hyper

SEQ ID NO: 372157 - DNA, 267 bp, Homo sapiens; identical to SEQ ID NO: 201780
  chr9:93956177-93956444
  hyper

SEQ ID NO: 372158 - DNA, 369 bp, Homo sapiens; identical to SEQ ID NO: 201783
  chr9:95570986-95571355
  hyper

SEQ ID NO: 372159 - DNA, 218 bp, Homo sapiens; identical to SEQ ID NO: 347040
  chr9:95820744-95820962
  hyper

SEQ ID NO: 372160 - DNA, 214 bp, Homo sapiens; identical to SEQ ID NO: 286552
  chr9:95821006-95821220
  hyper

SEQ ID NO: 372161 - DNA, 98 bp, Homo sapiens
  chr9:95946034-95946132
  hyper
cgctgagccccaccaggcttagccccaggctgggctcccgagggcggcggtacccctggtccttttcttcctagcctgcccattctgtcctggcacag

SEQ ID NO: 372162 - DNA, 227 bp, Homo sapiens
  chr9:95946562-95946789
  hyper
cgcggacctcgcccggaactcggaccccgtcctcgaagcgtgatctctcccgcctcgcacgccctggccgccgggccgcgggcatggacggcgtccgctcgccctgtgagtgccgagcctcccctcaacgccgctcgccgcctttgtgtgcgcgccgcggcgctgcagccccctccccgcgcgcccctcccgcgccccgggcccgcgtcctttgtggagccgccgcc

SEQ ID NO: 372163 - DNA, 278 bp, Homo sapiens; identical to SEQ ID NO: 201789
  chr9:96711697-96711975
  hyper

SEQ ID NO: 372164 - DNA, 121 bp, Homo sapiens; identical to SEQ ID NO: 201792
  chr9:96714974-96715095
  hyper

SEQ ID NO: 372165 - DNA, 174 bp, Homo sapiens; identical to SEQ ID NO: 201793
  chr9:96717633-96717807
  hyper

SEQ ID NO: 372166 - DNA, 155 bp, Homo sapiens; identical to SEQ ID NO: 359360
  chr9:96720648-96720803
  hyper

SEQ ID NO: 372167 - DNA, 429 bp, Homo sapiens; identical to SEQ ID NO: 347043
  chr9:97767434-97767863
  hyper

SEQ ID NO: 372168 - DNA, 1264 bp, Homo sapiens; identical to SEQ ID NO: 333721
  chr9:98272643-98273907
  hyper

SEQ ID NO: 372169 - DNA, 248 bp, Homo sapiens; identical to SEQ ID NO: 286576
  chr9:98783525-98783773
  hyper

SEQ ID NO: 372170 - DNA, 395 bp, Homo sapiens; identical to SEQ ID NO: 286577
  chr9:98784377-98784772
  hyper

SEQ ID NO: 372171 - DNA, 178 bp, Homo sapiens; identical to SEQ ID NO: 350911
  chr9:99637706-99637884
  hyper

SEQ ID NO: 372172 - DNA, 316 bp, Homo sapiens; identical to SEQ ID NO: 333725
  chr9:99638097-99638413
  hyper

SEQ ID NO: 372173 - DNA, 41 bp, Homo sapiens; identical to SEQ ID NO: 359367
  chr9:99984107-99984148
  hyper

SEQ ID NO: 372174 - DNA, 239 bp, Homo sapiens; identical to SEQ ID NO: 286592
  chr9:100000500-100000739
  hyper

SEQ ID NO: 372175 - DNA, 99 bp, Homo sapiens; identical to SEQ ID NO: 333730
  chr9:100263437-100263536
  hyper

SEQ ID NO: 372176 - DNA, 110 bp, Homo sapiens; identical to SEQ ID NO: 359370
  chr9:100264589-100264699
  hyper

SEQ ID NO: 372177 - DNA, 108 bp, Homo sapiens; identical to SEQ ID NO: 359371
  chr9:100264871-100264979
  hyper

SEQ ID NO: 372178 - DNA, 93 bp, Homo sapiens; identical to SEQ ID NO: 350914
  chr9:100503340-100503433
  hyper

SEQ ID NO: 372179 - DNA, 201 bp, Homo sapiens; identical to SEQ ID NO: 201812
  chr9:100610480-100610681
  hyper

SEQ ID NO: 372180 - DNA, 55 bp, Homo sapiens
  chr9:101558601-101558656
  hyper
cgggcccggccacctcggcccccgccggctccgcgcccgcctccggctccgcgcc

SEQ ID NO: 372181 - DNA, 703 bp, Homo sapiens; identical to SEQ ID NO: 333740
  chr9:101569830-101570533
  hyper

SEQ ID NO: 372182 - DNA, 441 bp, Homo sapiens; identical to SEQ ID NO: 350917
  chr9:102586203-102586644
  hyper

SEQ ID NO: 372183 - DNA, 227 bp, Homo sapiens; identical to SEQ ID NO: 347046
  chr9:102586985-102587212
  hyper

SEQ ID NO: 372184 - DNA, 273 bp, Homo sapiens; identical to SEQ ID NO: 286613
  chr9:103790689-103790962
  hyper

SEQ ID NO: 372185 - DNA, 203 bp, Homo sapiens; identical to SEQ ID NO: 201821
  chr9:103791017-103791220
  hyper

SEQ ID NO: 372186 - DNA, 148 bp, Homo sapiens; identical to SEQ ID NO: 201823
  chr9:104248697-104248845
  hyper

SEQ ID NO: 372187 - DNA, 499 bp, Homo sapiens; identical to SEQ ID NO: 201824
  chr9:104248975-104249474
  hyper

SEQ ID NO: 372188 - DNA, 68 bp, Homo sapiens
  chr9:108418403-108418471
  hyper
cggaagccagggcgcggagagtggggaggaaacggtgggagtccccgtcgggaaggggcccccgggcc

SEQ ID NO: 372189 - DNA, 171 bp, Homo sapiens
  chr9:108418947-108419118
  hyper
tagatgctttcctggactccctaaatacttaatcattaggcaaggcaatggtttgcaagggggagcaaaagttataaaaagaaaaagggaaaggcctggaagcgaagcgggcaagggaagaagcttgggcagagtattcgagatgcgtccaggctgcacggtgcaggggtc

SEQ ID NO: 372190 - DNA, 282 bp, Homo sapiens
  chr9:109622327-109622609
  hyper
cgtggaggcttggagaggaggtttggtttccaaggattggagcgctgtgaagggcggggccattccaagtccatctcccctttttgtcctcttctcccgggacgggagggtggagccaagtccccccgcggccggttcgggagctttctctatctcggtcgctcgaggtgagtgtgaaagggcggcagcccgtttaattgcagcgcaggttaatttcttgagttcaccgcagtcggtccgccagccgcttccccggtctttgccaagtgggtttacgaggtc

SEQ ID NO: 372191 - DNA, 299 bp, Homo sapiens; identical to SEQ ID NO: 333748
  chr9:110187439-110187738
  hyper

SEQ ID NO: 372192 - DNA, 57 bp, Homo sapiens; identical to SEQ ID NO: 359382
  chr9:110249882-110249939
  hyper

SEQ ID NO: 372193 - DNA, 122 bp, Homo sapiens; identical to SEQ ID NO: 201829
  chr9:110250497-110250619
  hyper

SEQ ID NO: 372194 - DNA, 202 bp, Homo sapiens; identical to SEQ ID NO: 359384
  chr9:110250630-110250832
  hyper

SEQ ID NO: 372195 - DNA, 220 bp, Homo sapiens; identical to SEQ ID NO: 201833
  chr9:110252078-110252298
  hyper

SEQ ID NO: 372196 - DNA, 118 bp, Homo sapiens; identical to SEQ ID NO: 201834
  chr9:110252515-110252633
  hyper

SEQ ID NO: 372197 - DNA, 81 bp, Homo sapiens; identical to SEQ ID NO: 350923
  chr9:110252700-110252781
  hyper

SEQ ID NO: 372198 - DNA, 60 bp, Homo sapiens; identical to SEQ ID NO: 350924
  chr9:112081274-112081334
  hyper

SEQ ID NO: 372199 - DNA, 130 bp, Homo sapiens; identical to SEQ ID NO: 201836
  chr9:112081563-112081693
  hyper

SEQ ID NO: 372200 - DNA, 860 bp, Homo sapiens; identical to SEQ ID NO: 350926
  chr9:112081773-112082633
  hyper

SEQ ID NO: 372201 - DNA, 216 bp, Homo sapiens; identical to SEQ ID NO: 201839
  chr9:112260252-112260468
  hyper

SEQ ID NO: 372202 - DNA, 162 bp, Homo sapiens; identical to SEQ ID NO: 347050
  chr9:112260523-112260685
  hyper

SEQ ID NO: 372203 - DNA, 59 bp, Homo sapiens; identical to SEQ ID NO: 359393
  chr9:112402440-112402499
  hyper

SEQ ID NO: 372204 - DNA, 178 bp, Homo sapiens; identical to SEQ ID NO: 333756
  chr9:113017465-113017643
  hyper

SEQ ID NO: 372205 - DNA, 287 bp, Homo sapiens; identical to SEQ ID NO: 286650
  chr9:113800481-113800768
  hyper

SEQ ID NO: 372206 - DNA, 282 bp, Homo sapiens; identical to SEQ ID NO: 201845
  chr9:113800798-113801080
  hyper

SEQ ID NO: 372207 - DNA, 66 bp, Homo sapiens; identical to SEQ ID NO: 359397
  chr9:113801414-113801480
  hyper

SEQ ID NO: 372208 - DNA, 395 bp, Homo sapiens; identical to SEQ ID NO: 333758
  chr9:116111663-116112058
  hyper

SEQ ID NO: 372209 - DNA, 300 bp, Homo sapiens; identical to SEQ ID NO: 359399
  chr9:116918462-116918762
  hyper

SEQ ID NO: 372210 - DNA, 167 bp, Homo sapiens; identical to SEQ ID NO: 350930
  chr9:117267296-117267463
  hyper

SEQ ID NO: 372211 - DNA, 131 bp, Homo sapiens; identical to SEQ ID NO: 345327
  chr9:117880425-117880556
  hyper

SEQ ID NO: 372212 - DNA, 69 bp, Homo sapiens; identical to SEQ ID NO: 359402
  chr9:120175204-120175273
  hyper

SEQ ID NO: 372213 - DNA, 254 bp, Homo sapiens; identical to SEQ ID NO: 359403
  chr9:120176358-120176612
  hyper

SEQ ID NO: 372214 - DNA, 65 bp, Homo sapiens; identical to SEQ ID NO: 359404
  chr9:120176629-120176694
  hyper

SEQ ID NO: 372215 - DNA, 392 bp, Homo sapiens; identical to SEQ ID NO: 350932
  chr9:122318421-122318813
  hyper

SEQ ID NO: 372216 - DNA, 168 bp, Homo sapiens; identical to SEQ ID NO: 333766
  chr9:124062292-124062460
  hyper

SEQ ID NO: 372217 - DNA, 1023 bp, Homo sapiens; identical to SEQ ID NO: 333767
  chr9:124131788-124132811
  hyper

SEQ ID NO: 372218 - DNA, 268 bp, Homo sapiens; identical to SEQ ID NO: 333769
  chr9:124857529-124857797
  hyper

SEQ ID NO: 372219 - DNA, 82 bp, Homo sapiens; identical to SEQ ID NO: 345328
  chr9:124990438-124990520
  hyper

SEQ ID NO: 372220 - DNA, 142 bp, Homo sapiens; identical to SEQ ID NO: 345329
  chr9:124991012-124991154
  hyper

SEQ ID NO: 372221 - DNA, 215 bp, Homo sapiens; identical to SEQ ID NO: 333771
  chr9:126759147-126759362
  hyper

SEQ ID NO: 372222 - DNA, 360 bp, Homo sapiens
  chr9:126771808-126772168
  hyper
cctcccgagagtggagttgcaccaaggacaaacactctagcgtcattacaaattttttctgccccttgggcgacctccagatgaaccctggtgactctcagattggattttcattccttactttctttgaaagaaagtgccccagatgcgtcaataaaacatgcctatgtattcgtgtaggcgtccgcatgcctgcgcgccggccgtgtgcaggcgccgaagcacacgtctgtgtgaacacacgggcacgcgcgtctttgggtttagtggtccttccctcgcgttggggcatctgtacacatgcagaatatacacatatgattgtaacttcaagttttttcaattatgcaaaacgacctc

SEQ ID NO: 372223 - DNA, 51 bp, Homo sapiens; identical to SEQ ID NO: 359412
  chr9:126773180-126773231
  hyper

SEQ ID NO: 372224 - DNA, 60 bp, Homo sapiens; identical to SEQ ID NO: 201866
  chr9:126773978-126774038
  hyper

SEQ ID NO: 372225 - DNA, 109 bp, Homo sapiens
  chr9:126779038-126779147
  hyper
cggtaggccggtcggtggcgcggatttaagatttgctgaaggcactaccacagatgtagctctctggaacttccatccctcctctcctaccaccccccaaaaaaagaca

SEQ ID NO: 372226 - DNA, 249 bp, Homo sapiens; identical to SEQ ID NO: 201867
  chr9:126780315-126780564
  hyper

SEQ ID NO: 372227 - DNA, 227 bp, Homo sapiens; identical to SEQ ID NO: 359415
  chr9:126782445-126782672
  hyper

SEQ ID NO: 372228 - DNA, 32 bp, Homo sapiens; identical to SEQ ID NO: 350939
  chr9:126783540-126783572
  hyper

SEQ ID NO: 372229 - DNA, 203 bp, Homo sapiens; identical to SEQ ID NO: 359417
  chr9:126784854-126785057
  hyper

SEQ ID NO: 372230 - DNA, 45 bp, Homo sapiens; identical to SEQ ID NO: 359418
  chr9:126785351-126785396
  hyper

SEQ ID NO: 372231 - DNA, 192 bp, Homo sapiens; identical to SEQ ID NO: 350940
  chr9:129373418-129373610
  hyper

SEQ ID NO: 372232 - DNA, 62 bp, Homo sapiens; identical to SEQ ID NO: 350941
  chr9:129373640-129373702
  hyper

SEQ ID NO: 372233 - DNA, 65 bp, Homo sapiens
  chr9:129375660-129375725
  hyper
cgcggaccaagcggccccgagcaggcgccgccgcccgggggactccgactcagcccccgcgacct

SEQ ID NO: 372234 - DNA, 132 bp, Homo sapiens; identical to SEQ ID NO: 359421
  chr9:129387302-129387434
  hyper

SEQ ID NO: 372235 - DNA, 51 bp, Homo sapiens; identical to SEQ ID NO: 201882
  chr9:129387464-129387515
  hyper

SEQ ID NO: 372236 - DNA, 231 bp, Homo sapiens; identical to SEQ ID NO: 333788
  chr9:129393170-129393401
  hyper

SEQ ID NO: 372237 - DNA, 135 bp, Homo sapiens; identical to SEQ ID NO: 345330
  chr9:129400713-129400848
  hyper

SEQ ID NO: 372238 - DNA, 167 bp, Homo sapiens; identical to SEQ ID NO: 347056
  chr9:129485513-129485680
  hyper

SEQ ID NO: 372239 - DNA, 209 bp, Homo sapiens
  chr9:130639769-130639978
  hyper
cggatcacaaccacggatacacagccgcacagcccccagggagccccgcaccagcacgcccccgccctcccccggtgccgctgcccctccccgcagaggcgcccccccagacacgcgcgggcacgcactgacctggggaggggtgcgggtgggcgccggggccagtgcgtgccctgcccgtcctcgcggcggccggcaaaggcgactat

SEQ ID NO: 372240 - DNA, 125 bp, Homo sapiens
  chr9:130640012-130640137
  hyper
cggcgttcccgaaggcagggagggcgggaaggagggagggagagcggaccagggaccgggaagcggggcgggaccgagcccgagcccgggtgcgcggcgacaccgcacccggcaccgtgtgcccc

SEQ ID NO: 372241 - DNA, 120 bp, Homo sapiens; identical to SEQ ID NO: 333794
  chr9:130661066-130661186
  hyper

SEQ ID NO: 372242 - DNA, 456 bp, Homo sapiens; identical to SEQ ID NO: 333795
  chr9:130674546-130675002
  hyper

SEQ ID NO: 372243 - DNA, 42 bp, Homo sapiens; identical to SEQ ID NO: 350946
  chr9:130689378-130689420
  hyper

SEQ ID NO: 372244 - DNA, 418 bp, Homo sapiens; identical to SEQ ID NO: 286760
  chr9:130689749-130690167
  hyper

SEQ ID NO: 372245 - DNA, 138 bp, Homo sapiens; identical to SEQ ID NO: 359429
  chr9:131127341-131127479
  hyper

SEQ ID NO: 372246 - DNA, 88 bp, Homo sapiens; identical to SEQ ID NO: 350948
  chr9:131842789-131842877
  hyper

SEQ ID NO: 372247 - DNA, 704 bp, Homo sapiens; identical to SEQ ID NO: 350949
  chr9:131842946-131843650
  hyper

SEQ ID NO: 372248 - DNA, 258 bp, Homo sapiens; identical to SEQ ID NO: 350950
  chr9:132020659-132020917
  hyper

SEQ ID NO: 372249 - DNA, 73 bp, Homo sapiens; identical to SEQ ID NO: 350951
  chr9:132021110-132021183
  hyper

SEQ ID NO: 372250 - DNA, 280 bp, Homo sapiens; identical to SEQ ID NO: 333801
  chr9:132145475-132145755
  hyper

SEQ ID NO: 372251 - DNA, 166 bp, Homo sapiens; identical to SEQ ID NO: 333802
  chr9:132176641-132176807
  hyper

SEQ ID NO: 372252 - DNA, 187 bp, Homo sapiens; identical to SEQ ID NO: 350954
  chr9:132244512-132244699
  hyper

SEQ ID NO: 372253 - DNA, 554 bp, Homo sapiens; identical to SEQ ID NO: 201899
  chr9:132244741-132245295
  hyper

SEQ ID NO: 372254 - DNA, 728 bp, Homo sapiens; identical to SEQ ID NO: 359438
  chr9:132245345-132246073
  hyper

SEQ ID NO: 372255 - DNA, 690 bp, Homo sapiens; identical to SEQ ID NO: 333804
  chr9:132258226-132258916
  hyper

SEQ ID NO: 372256 - DNA, 201 bp, Homo sapiens
  chr9:132312367-132312568
  hyper
cgacccccaagagagccccggccgggacgcgcggaccccagaagctcgggcgggggcgcccctcggaggaatgtttccggggcccggaccgcgccgccgccgcagcctttcctccctctccccgcccggctcgccggccgccctcgcgccccctccagggccccctatcttcccccacccgaaccccacatcactgccctc

SEQ ID NO: 372257 - DNA, 164 bp, Homo sapiens
  chr9:132312620-132312784
  hyper
cgcctccgccgggaagccgcgcgcggttgccaggaacgcggcaggcgatcggagctggacggcggcccgggcatctcggcactggcggcgctcggccctcctgggcggccctggcccggccctctccccactggcgccgctgcgcttgctccgattccctccgc

SEQ ID NO: 372258 - DNA, 644 bp, Homo sapiens; identical to SEQ ID NO: 333807
  chr9:132647794-132648438
  hyper

SEQ ID NO: 372259 - DNA, 112 bp, Homo sapiens; identical to SEQ ID NO: 345331
  chr9:132804293-132804405
  hyper

SEQ ID NO: 372260 - DNA, 207 bp, Homo sapiens; identical to SEQ ID NO: 201905
  chr9:132804455-132804662
  hyper

SEQ ID NO: 372261 - DNA, 103 bp, Homo sapiens; identical to SEQ ID NO: 201906
  chr9:132804693-132804796
  hyper

SEQ ID NO: 372262 - DNA, 290 bp, Homo sapiens; identical to SEQ ID NO: 201907
  chr9:132805028-132805318
  hyper

SEQ ID NO: 372263 - DNA, 292 bp, Homo sapiens; identical to SEQ ID NO: 201908
  chr9:132805445-132805737
  hyper

SEQ ID NO: 372264 - DNA, 55 bp, Homo sapiens; identical to SEQ ID NO: 201909
  chr9:132805893-132805948
  hyper

SEQ ID NO: 372265 - DNA, 140 bp, Homo sapiens; identical to SEQ ID NO: 359446
  chr9:133308607-133308747
  hyper

SEQ ID NO: 372266 - DNA, 67 bp, Homo sapiens; identical to SEQ ID NO: 286803
  chr9:133308769-133308836
  hyper

SEQ ID NO: 372267 - DNA, 199 bp, Homo sapiens; identical to SEQ ID NO: 359448
  chr9:133309052-133309251
  hyper

SEQ ID NO: 372268 - DNA, 1351 bp, Homo sapiens; identical to SEQ ID NO: 333814
  chr9:133710055-133711406
  hyper

SEQ ID NO: 372269 - DNA, 306 bp, Homo sapiens; identical to SEQ ID NO: 286811
  chr9:133814911-133815217
  hyper

SEQ ID NO: 372270 - DNA, 190 bp, Homo sapiens; identical to SEQ ID NO: 286812
  chr9:133815287-133815477
  hyper

SEQ ID NO: 372271 - DNA, 143 bp, Homo sapiens; identical to SEQ ID NO: 286813
  chr9:133815528-133815671
  hyper

SEQ ID NO: 372272 - DNA, 101 bp, Homo sapiens; identical to SEQ ID NO: 286815
  chr9:134131797-134131898
  hyper

SEQ ID NO: 372273 - DNA, 123 bp, Homo sapiens; identical to SEQ ID NO: 359451
  chr9:135037440-135037563
  hyper

SEQ ID NO: 372274 - DNA, 223 bp, Homo sapiens; identical to SEQ ID NO: 359452
  chr9:135117797-135118020
  hyper

SEQ ID NO: 372275 - DNA, 131 bp, Homo sapiens; identical to SEQ ID NO: 359453
  chr9:135118060-135118191
  hyper

SEQ ID NO: 372276 - DNA, 630 bp, Homo sapiens; identical to SEQ ID NO: 345338
  chr9:135286324-135286954
  hyper

SEQ ID NO: 372277 - DNA, 207 bp, Homo sapiens; identical to SEQ ID NO: 359455
  chr9:135645005-135645212
  hyper

SEQ ID NO: 372278 - DNA, 452 bp, Homo sapiens; identical to SEQ ID NO: 359456
  chr9:135645250-135645702
  hyper

SEQ ID NO: 372279 - DNA, 469 bp, Homo sapiens; identical to SEQ ID NO: 201922
  chr9:136399643-136400112
  hyper

SEQ ID NO: 372280 - DNA, 57 bp, Homo sapiens; identical to SEQ ID NO: 359458
  chr9:136603465-136603522
  hyper

SEQ ID NO: 372281 - DNA, 115 bp, Homo sapiens
  chr9:137299004-137299119
  hyper
cgaggtccatgtgaaaggaggctttgcggtggtttctgctttgcttgcattgagcctcaaactcttcctgtcccgtgagaaggggggatgggatttggaggcctgaggaaggaag

SEQ ID NO: 372282 - DNA, 356 bp, Homo sapiens; identical to SEQ ID NO: 350966
  chr9:137533140-137533496
  hyper

SEQ ID NO: 372283 - DNA, 150 bp, Homo sapiens; identical to SEQ ID NO: 333832
  chr9:137979104-137979254
  hyper

SEQ ID NO: 372284 - DNA, 99 bp, Homo sapiens; identical to SEQ ID NO: 359460
  chr9:138986173-138986272
  hyper

SEQ ID NO: 372285 - DNA, 824 bp, Homo sapiens; identical to SEQ ID NO: 201927
  chr9:138986333-138987157
  hyper

SEQ ID NO: 372286 - DNA, 563 bp, Homo sapiens; identical to SEQ ID NO: 359462
  chr9:138987167-138987730
  hyper

SEQ ID NO: 372287 - DNA, 33 bp, Homo sapiens; identical to SEQ ID NO: 359463
  chr9:139084513-139084546
  hyper

SEQ ID NO: 372288 - DNA, 357 bp, Homo sapiens; identical to SEQ ID NO: 333839
  chr9:139401232-139401589
  hyper

SEQ ID NO: 372289 - DNA, 217 bp, Homo sapiens
  chr9:139440686-139440903
  hyper
cgtgggtcgggagcgggcgcctgggactacttctcgtttgaaagttttcagaggccaaaagtttgagccggggctgcggaaggatccggctctggcggttgccgcgctcggcgacaactggcgactgaaatttgcatgtgaataagcggaggagcccggggcggaatggggagggcgaggccgcggacagccgtgtgcaccgtgcgctgggccgggc

SEQ ID NO: 372290 - DNA, 133 bp, Homo sapiens; identical to SEQ ID NO: 333841
  chr9:139703274-139703407
  hyper

SEQ ID NO: 372291 - DNA, 139 bp, Homo sapiens; identical to SEQ ID NO: 286862
  chr9:139740877-139741016
  hyper

SEQ ID NO: 372292 - DNA, 520 bp, Homo sapiens; identical to SEQ ID NO: 350968
  chr9:139948370-139948890
  hyper

SEQ ID NO: 372293 - DNA, 711 bp, Homo sapiens; identical to SEQ ID NO: 286870
  chr9:140023901-140024612
  hyper

SEQ ID NO: 372294 - DNA, 636 bp, Homo sapiens; identical to SEQ ID NO: 347066
  chr9:140196486-140197122
  hyper

SEQ ID NO: 372295 - DNA, 155 bp, Homo sapiens; identical to SEQ ID NO: 347067
  chr9:140197263-140197418
  hyper

SEQ ID NO: 372296 - DNA, 188 bp, Homo sapiens; identical to SEQ ID NO: 345339
  chr9:140703858-140704046
  hyper

SEQ ID NO: 372297 - DNA, 327 bp, Homo sapiens; identical to SEQ ID NO: 345340
  chr9:140704131-140704458
  hyper

SEQ ID NO: 372298 - DNA, 238 bp, Homo sapiens; identical to SEQ ID NO: 359473
  chr10:734738-734976
  hyper

SEQ ID NO: 372299 - DNA, 175 bp, Homo sapiens; identical to SEQ ID NO: 286884
  chr10:735049-735224
  hyper

SEQ ID NO: 372300 - DNA, 884 bp, Homo sapiens; identical to SEQ ID NO: 350974
  chr10:735245-736129
  hyper

SEQ ID NO: 372301 - DNA, 224 bp, Homo sapiens
  chr10:1651074-1651298
  hyper
cgcattgccggccctctgtcttgagcccctgcagggtgccggatggccatgccctattgtgcgtccctcttgcagcaacaccacattaaaccgtggcatcctcttgaggctgcccctgcggattgcacggctaatgcagaaggctagaaagaaggacccgaaacgcccaccaaactataaattaaggcgaagatctcaggagcaatgtgcctggtgcccggcgt

SEQ ID NO: 372302 - DNA, 96 bp, Homo sapiens; identical to SEQ ID NO: 345341
  chr10:1780056-1780152
  hyper

SEQ ID NO: 372303 - DNA, 192 bp, Homo sapiens; identical to SEQ ID NO: 286895
  chr10:3109168-3109360
  hyper

SEQ ID NO: 372304 - DNA, 1896 bp, Homo sapiens; identical to SEQ ID NO: 359478
  chr10:3109459-3111355
  hyper

SEQ ID NO: 372305 - DNA, 298 bp, Homo sapiens; identical to SEQ ID NO: 350977
  chr10:6018666-6018964
  hyper

SEQ ID NO: 372306 - DNA, 146 bp, Homo sapiens; identical to SEQ ID NO: 359480
  chr10:6246024-6246170
  hyper

SEQ ID NO: 372307 - DNA, 666 bp, Homo sapiens; identical to SEQ ID NO: 350978
  chr10:6621854-6622520
  hyper

SEQ ID NO: 372308 - DNA, 87 bp, Homo sapiens; identical to SEQ ID NO: 350979
  chr10:6622706-6622793
  hyper

SEQ ID NO: 372309 - DNA, 56 bp, Homo sapiens; identical to SEQ ID NO: 201966
  chr10:7449898-7449954
  hyper

SEQ ID NO: 372310 - DNA, 60 bp, Homo sapiens; identical to SEQ ID NO: 201967
  chr10:7453036-7453096
  hyper

SEQ ID NO: 372311 - DNA, 228 bp, Homo sapiens; identical to SEQ ID NO: 286915
  chr10:7454077-7454305
  hyper

SEQ ID NO: 372312 - DNA, 106 bp, Homo sapiens; identical to SEQ ID NO: 201968
  chr10:7708304-7708410
  hyper

SEQ ID NO: 372313 - DNA, 42 bp, Homo sapiens; identical to SEQ ID NO: 333857
  chr10:7729428-7729470
  hyper

SEQ ID NO: 372314 - DNA, 117 bp, Homo sapiens; identical to SEQ ID NO: 350982
  chr10:8075813-8075930
  hyper

SEQ ID NO: 372315 - DNA, 124 bp, Homo sapiens; identical to SEQ ID NO: 350983
  chr10:8086048-8086172
  hyper

SEQ ID NO: 372316 - DNA, 168 bp, Homo sapiens; identical to SEQ ID NO: 201973
  chr10:8092278-8092446
  hyper

SEQ ID NO: 372317 - DNA, 602 bp, Homo sapiens; identical to SEQ ID NO: 350985
  chr10:8092535-8093137
  hyper

SEQ ID NO: 372318 - DNA, 102 bp, Homo sapiens; identical to SEQ ID NO: 201975
  chr10:8094141-8094243
  hyper

SEQ ID NO: 372319 - DNA, 83 bp, Homo sapiens; identical to SEQ ID NO: 286932
  chr10:8094348-8094431
  hyper

SEQ ID NO: 372320 - DNA, 111 bp, Homo sapiens; identical to SEQ ID NO: 350988
  chr10:8094540-8094651
  hyper

SEQ ID NO: 372321 - DNA, 78 bp, Homo sapiens; identical to SEQ ID NO: 359493
  chr10:8095120-8095198
  hyper

SEQ ID NO: 372322 - DNA, 99 bp, Homo sapiens; identical to SEQ ID NO: 201977
  chr10:8095845-8095944
  hyper

SEQ ID NO: 372323 - DNA, 51 bp, Homo sapiens; identical to SEQ ID NO: 286936
  chr10:8097537-8097588
  hyper

SEQ ID NO: 372324 - DNA, 42 bp, Homo sapiens; identical to SEQ ID NO: 350990
  chr10:11060746-11060788
  hyper

SEQ ID NO: 372325 - DNA, 100 bp, Homo sapiens; identical to SEQ ID NO: 201979
  chr10:11207330-11207430
  hyper

SEQ ID NO: 372326 - DNA, 155 bp, Homo sapiens; identical to SEQ ID NO: 286940
  chr10:11207724-11207879
  hyper

SEQ ID NO: 372327 - DNA, 124 bp, Homo sapiens; identical to SEQ ID NO: 350993
  chr10:12390701-12390825
  hyper

SEQ ID NO: 372328 - DNA, 875 bp, Homo sapiens; identical to SEQ ID NO: 201983
  chr10:12390995-12391870
  hyper

SEQ ID NO: 372329 - DNA, 324 bp, Homo sapiens; identical to SEQ ID NO: 345344
  chr10:12392327-12392651
  hyper

SEQ ID NO: 372330 - DNA, 85 bp, Homo sapiens; identical to SEQ ID NO: 359502
  chr10:13043901-13043986
  hyper

SEQ ID NO: 372331 - DNA, 99 bp, Homo sapiens; identical to SEQ ID NO: 286955
  chr10:13933035-13933134
  hyper

SEQ ID NO: 372332 - DNA, 190 bp, Homo sapiens; identical to SEQ ID NO: 201987
  chr10:13933246-13933436
  hyper

SEQ ID NO: 372333 - DNA, 76 bp, Homo sapiens; identical to SEQ ID NO: 359505
  chr10:14646259-14646335
  hyper

SEQ ID NO: 372334 - DNA, 87 bp, Homo sapiens; identical to SEQ ID NO: 359506
  chr10:14646653-14646740
  hyper

SEQ ID NO: 372335 - DNA, 174 bp, Homo sapiens; identical to SEQ ID NO: 359507
  chr10:15762154-15762328
  hyper

SEQ ID NO: 372336 - DNA, 208 bp, Homo sapiens; identical to SEQ ID NO: 201993
  chr10:17270445-17270653
  hyper

SEQ ID NO: 372337 - DNA, 368 bp, Homo sapiens; identical to SEQ ID NO: 286970
  chr10:17272233-17272601
  hyper

SEQ ID NO: 372338 - DNA, 259 bp, Homo sapiens; identical to SEQ ID NO: 351000
  chr10:17495133-17495392
  hyper

SEQ ID NO: 372339 - DNA, 322 bp, Homo sapiens; identical to SEQ ID NO: 201996
  chr10:17495680-17496002
  hyper

SEQ ID NO: 372340 - DNA, 116 bp, Homo sapiens; identical to SEQ ID NO: 351002
  chr10:18429033-18429149
  hyper

SEQ ID NO: 372341 - DNA, 49 bp, Homo sapiens; identical to SEQ ID NO: 351003
  chr10:18430247-18430296
  hyper

SEQ ID NO: 372342 - DNA, 70 bp, Homo sapiens
  chr10:20104635-20104705
  hyper
cgaaggggcgagctgtggttaaccctttcgtgcccagggagaccccgccagggtcggggcggggcgcgat

SEQ ID NO: 372343 - DNA, 694 bp, Homo sapiens; identical to SEQ ID NO: 202000
  chr10:20104724-20105418
  hyper

SEQ ID NO: 372344 - DNA, 449 bp, Homo sapiens
  chr10:20105655-20106104
  hyper
gtcaccgtccgcgggcaccgggttggcgctgcccgagtggaaccgacagtttgcgagcctcggctgcaagtggcctctcctccccgcggttgttgttcagtgtcgggtgagggctgcgagtgtggcaagttgcaaagagagcctcagaggtccgaagagcgctgcgctcctactcgcgttcgcttcttcctcttctcggttccctactgtgaaatcgcagcgacatttacaaaggcctccgggtcctaccgagaccgatccgcagcgtttggcccggtcgtgcctattgcatcgggagcccccgagcaccggcgaaggactggcgggtggggtagggaggtggcggcggcggcatggcgaggttcccgaaggccgacctggccgctgcaggagttatgttactttgccacttcttcacggaccagtttcagttcgccgatgggaaaccc

SEQ ID NO: 372345 - DNA, 296 bp, Homo sapiens; identical to SEQ ID NO: 359514
  chr10:20106155-20106451
  hyper

SEQ ID NO: 372346 - DNA, 233 bp, Homo sapiens; identical to SEQ ID NO: 359515
  chr10:20106694-20106927
  hyper

SEQ ID NO: 372347 - DNA, 234 bp, Homo sapiens; identical to SEQ ID NO: 202003
  chr10:21462299-21462533
  hyper

SEQ ID NO: 372348 - DNA, 299 bp, Homo sapiens; identical to SEQ ID NO: 286980
  chr10:21462671-21462970
  hyper

SEQ ID NO: 372349 - DNA, 268 bp, Homo sapiens
  chr10:21463023-21463291
  hyper
gctcgcactccaggtacgggtgactcacacagtcactcgcgcccgcccctcgcgctcactcgctcccccgcctcgccgccgccgccgcgcaggccaaacccaccggcgcgcccggaccgaagtggcagggaacgtgcacgtcgggcaccctgggagggagggcgcagcgggggagggggcgggcagagacccggaaagctccgcagaccgccgtgggtgcgactgtgcggcctggggagtgagcctcgcgccaccgccgctgcaggcc

SEQ ID NO: 372350 - DNA, 873 bp, Homo sapiens; identical to SEQ ID NO: 347076
  chr10:21815648-21816521
  hyper

SEQ ID NO: 372351 - DNA, 102 bp, Homo sapiens; identical to SEQ ID NO: 345347
  chr10:22517909-22518011
  hyper

SEQ ID NO: 372352 - DNA, 60 bp, Homo sapiens; identical to SEQ ID NO: 345348
  chr10:22518450-22518510
  hyper

SEQ ID NO: 372353 - DNA, 62 bp, Homo sapiens; identical to SEQ ID NO: 351007
  chr10:22540645-22540707
  hyper

SEQ ID NO: 372354 - DNA, 32 bp, Homo sapiens; identical to SEQ ID NO: 345349
  chr10:22626103-22626135
  hyper

SEQ ID NO: 372355 - DNA, 214 bp, Homo sapiens; identical to SEQ ID NO: 287005
  chr10:23001984-23002198
  hyper

SEQ ID NO: 372356 - DNA, 286 bp, Homo sapiens; identical to SEQ ID NO: 351010
  chr10:23002228-23002514
  hyper

SEQ ID NO: 372357 - DNA, 193 bp, Homo sapiens; identical to SEQ ID NO: 351011
  chr10:24497856-24498049
  hyper

SEQ ID NO: 372358 - DNA, 471 bp, Homo sapiens; identical to SEQ ID NO: 359524
  chr10:25241259-25241730
  hyper

SEQ ID NO: 372359 - DNA, 627 bp, Homo sapiens; identical to SEQ ID NO: 202018
  chr10:25463893-25464520
  hyper

SEQ ID NO: 372360 - DNA, 186 bp, Homo sapiens; identical to SEQ ID NO: 202019
  chr10:25464915-25465101
  hyper

SEQ ID NO: 372361 - DNA, 64 bp, Homo sapiens
  chr10:25465600-25465664
  hyper
ggcgatgcgacaacttggcgagcgccgggtgtgtccgcggagtggcaagcctcagatgagaggc

SEQ ID NO: 372362 - DNA, 46 bp, Homo sapiens; identical to SEQ ID NO: 351012
  chr10:26222946-26222992
  hyper

SEQ ID NO: 372363 - DNA, 63 bp, Homo sapiens; identical to SEQ ID NO: 359526
  chr10:26503630-26503693
  hyper

SEQ ID NO: 372364 - DNA, 90 bp, Homo sapiens; identical to SEQ ID NO: 359527
  chr10:26726986-26727076
  hyper

SEQ ID NO: 372365 - DNA, 65 bp, Homo sapiens; identical to SEQ ID NO: 351013
  chr10:26728108-26728173
  hyper

SEQ ID NO: 372366 - DNA, 209 bp, Homo sapiens; identical to SEQ ID NO: 287029
  chr10:28031105-28031314
  hyper

SEQ ID NO: 372367 - DNA, 225 bp, Homo sapiens; identical to SEQ ID NO: 202026
  chr10:28031638-28031863
  hyper

SEQ ID NO: 372368 - DNA, 208 bp, Homo sapiens; identical to SEQ ID NO: 202027
  chr10:28032744-28032952
  hyper

SEQ ID NO: 372369 - DNA, 273 bp, Homo sapiens; identical to SEQ ID NO: 333909
  chr10:28968999-28969272
  hyper

SEQ ID NO: 372370 - DNA, 342 bp, Homo sapiens; identical to SEQ ID NO: 287040
  chr10:29011162-29011504
  hyper

SEQ ID NO: 372371 - DNA, 78 bp, Homo sapiens; identical to SEQ ID NO: 345350
  chr10:30024003-30024081
  hyper

SEQ ID NO: 372372 - DNA, 734 bp, Homo sapiens; identical to SEQ ID NO: 202032
  chr10:30024793-30025527
  hyper

SEQ ID NO: 372373 - DNA, 124 bp, Homo sapiens; identical to SEQ ID NO: 359536
  chr10:30509077-30509201
  hyper

SEQ ID NO: 372374 - DNA, 184 bp, Homo sapiens; identical to SEQ ID NO: 359537
  chr10:31422647-31422831
  hyper

SEQ ID NO: 372375 - DNA, 115 bp, Homo sapiens; identical to SEQ ID NO: 359538
  chr10:31423116-31423231
  hyper

SEQ ID NO: 372376 - DNA, 157 bp, Homo sapiens; identical to SEQ ID NO: 333915
  chr10:31607149-31607306
  hyper

SEQ ID NO: 372377 - DNA, 790 bp, Homo sapiens; identical to SEQ ID NO: 345352
  chr10:31607954-31608744
  hyper

SEQ ID NO: 372378 - DNA, 252 bp, Homo sapiens; identical to SEQ ID NO: 202037
  chr10:31609416-31609668
  hyper

SEQ ID NO: 372379 - DNA, 586 bp, Homo sapiens
  chr10:33623220-33623806
  hyper
ctctgcctgtcacttaccgttgcgaaaagcgccggccggggcgaggacgagggcgagcacggcgcagaggagcggcagccccctctccattctcccttctccgggtccgcaggcagacgcgggagaacgaggacgtggggggaaatgcagcaaagaggagaatctaagcgatccgaagagccccaactccgcctagagctgtacaatcctcagcccgtcttggagaaaagaaagcagcgaggcaatgcctggatccgagaggaacgcttctctttttgtgtctcaagtcgcctgcatcctgtcatttagctccggcttcctctcccttttcccacacttgttcctcttccaggagccactgcccgggccatgtctcaaaaaaaaaaaaaaaaaaaaaaaaggccgggggggggctgtgggtgggagggggaggagggaggtagggcaacacacaccaaagccaatttccaggaagaaaaaaaaaaaatccggcttgtttctggacccgttggagccgcggagctggcgcccaggggaggtccgggtgtctgcgggaaggaggggaacgagcaatgaaaagatgagc

SEQ ID NO: 372380 - DNA, 215 bp, Homo sapiens; identical to SEQ ID NO: 359542
  chr10:33623838-33624053
  hyper

SEQ ID NO: 372381 - DNA, 45 bp, Homo sapiens; identical to SEQ ID NO: 202040
  chr10:33624447-33624492
  hyper

SEQ ID NO: 372382 - DNA, 138 bp, Homo sapiens; identical to SEQ ID NO: 202041
  chr10:33624560-33624698
  hyper

SEQ ID NO: 372383 - DNA, 447 bp, Homo sapiens; identical to SEQ ID NO: 202042
  chr10:33624841-33625288
  hyper

SEQ ID NO: 372384 - DNA, 256 bp, Homo sapiens; identical to SEQ ID NO: 202043
  chr10:33625870-33626126
  hyper

SEQ ID NO: 372385 - DNA, 62 bp, Homo sapiens; identical to SEQ ID NO: 351024
  chr10:35102985-35103047
  hyper

SEQ ID NO: 372386 - DNA, 403 bp, Homo sapiens; identical to SEQ ID NO: 202045
  chr10:35103079-35103482
  hyper

SEQ ID NO: 372387 - DNA, 544 bp, Homo sapiens; identical to SEQ ID NO: 202046
  chr10:35103534-35104078
  hyper

SEQ ID NO: 372388 - DNA, 649 bp, Homo sapiens; identical to SEQ ID NO: 347086
  chr10:35104117-35104766
  hyper

SEQ ID NO: 372389 - DNA, 251 bp, Homo sapiens; identical to SEQ ID NO: 287083
  chr10:43572998-43573249
  hyper

SEQ ID NO: 372390 - DNA, 34 bp, Homo sapiens; identical to SEQ ID NO: 287084
  chr10:43600323-43600357
  hyper

SEQ ID NO: 372391 - DNA, 135 bp, Homo sapiens; identical to SEQ ID NO: 351029
  chr10:43697752-43697887
  hyper

SEQ ID NO: 372392 - DNA, 124 bp, Homo sapiens; identical to SEQ ID NO: 202055
  chr10:43698155-43698279
  hyper

SEQ ID NO: 372393 - DNA, 133 bp, Homo sapiens; identical to SEQ ID NO: 333927
  chr10:43725410-43725543
  hyper

SEQ ID NO: 372394 - DNA, 504 bp, Homo sapiens; identical to SEQ ID NO: 359554
  chr10:43761675-43762179
  hyper

SEQ ID NO: 372395 - DNA, 55 bp, Homo sapiens; identical to SEQ ID NO: 351031
  chr10:43818322-43818377
  hyper

SEQ ID NO: 372396 - DNA, 129 bp, Homo sapiens; identical to SEQ ID NO: 202057
  chr10:43818407-43818536
  hyper

SEQ ID NO: 372397 - DNA, 36 bp, Homo sapiens
  chr10:43857868-43857904
  hyper
tagacattccttggtgctgattggctggcggccagc

SEQ ID NO: 372398 - DNA, 700 bp, Homo sapiens; identical to SEQ ID NO: 351033
  chr10:43892074-43892774
  hyper

SEQ ID NO: 372399 - DNA, 171 bp, Homo sapiens; identical to SEQ ID NO: 347088
  chr10:43892970-43893141
  hyper

SEQ ID NO: 372400 - DNA, 216 bp, Homo sapiens; identical to SEQ ID NO: 347089
  chr10:44185124-44185340
  hyper

SEQ ID NO: 372401 - DNA, 78 bp, Homo sapiens; identical to SEQ ID NO: 347090
  chr10:44186043-44186121
  hyper

SEQ ID NO: 372402 - DNA, 107 bp, Homo sapiens; identical to SEQ ID NO: 345354
  chr10:44806674-44806781
  hyper

SEQ ID NO: 372403 - DNA, 173 bp, Homo sapiens; identical to SEQ ID NO: 351038
  chr10:44879650-44879823
  hyper

SEQ ID NO: 372404 - DNA, 197 bp, Homo sapiens; identical to SEQ ID NO: 345355
  chr10:44882100-44882297
  hyper

SEQ ID NO: 372405 - DNA, 201 bp, Homo sapiens; identical to SEQ ID NO: 287106
  chr10:49731801-49732002
  hyper

SEQ ID NO: 372406 - DNA, 59 bp, Homo sapiens
  chr10:50323163-50323222
  hyper
cgctcctgctgcatctcccctcggggcctgccgctgggaagatctcggctgctgcgaga

SEQ ID NO: 372407 - DNA, 94 bp, Homo sapiens; identical to SEQ ID NO: 351040
  chr10:50606762-50606856
  hyper

SEQ ID NO: 372408 - DNA, 53 bp, Homo sapiens; identical to SEQ ID NO: 359566
  chr10:50815014-50815067
  hyper

SEQ ID NO: 372409 - DNA, 159 bp, Homo sapiens; identical to SEQ ID NO: 359567
  chr10:50815344-50815503
  hyper

SEQ ID NO: 372410 - DNA, 215 bp, Homo sapiens; identical to SEQ ID NO: 359568
  chr10:50969681-50969896
  hyper

SEQ ID NO: 372411 - DNA, 192 bp, Homo sapiens; identical to SEQ ID NO: 359569
  chr10:50970412-50970604
  hyper

SEQ ID NO: 372412 - DNA, 122 bp, Homo sapiens; identical to SEQ ID NO: 351041
  chr10:54073737-54073859
  hyper

SEQ ID NO: 372413 - DNA, 48 bp, Homo sapiens; identical to SEQ ID NO: 287131
  chr10:60026209-60026257
  hyper

SEQ ID NO: 372414 - DNA, 193 bp, Homo sapiens; identical to SEQ ID NO: 359572
  chr10:60272362-60272555
  hyper

SEQ ID NO: 372415 - DNA, 211 bp, Homo sapiens; identical to SEQ ID NO: 202085
  chr10:60273346-60273557
  hyper

SEQ ID NO: 372416 - DNA, 313 bp, Homo sapiens; identical to SEQ ID NO: 287136
  chr10:60935996-60936309
  hyper

SEQ ID NO: 372417 - DNA, 65 bp, Homo sapiens; identical to SEQ ID NO: 359574
  chr10:61469827-61469892
  hyper

SEQ ID NO: 372418 - DNA, 256 bp, Homo sapiens; identical to SEQ ID NO: 351043
  chr10:62492589-62492845
  hyper

SEQ ID NO: 372419 - DNA, 295 bp, Homo sapiens; identical to SEQ ID NO: 351044
  chr10:62761026-62761321
  hyper

SEQ ID NO: 372420 - DNA, 76 bp, Homo sapiens; identical to SEQ ID NO: 287148
  chr10:62761372-62761448
  hyper

SEQ ID NO: 372421 - DNA, 127 bp, Homo sapiens; identical to SEQ ID NO: 359578
  chr10:63213212-63213339
  hyper

SEQ ID NO: 372422 - DNA, 194 bp, Homo sapiens; identical to SEQ ID NO: 351046
  chr10:63656701-63656895
  hyper

SEQ ID NO: 372423 - DNA, 78 bp, Homo sapiens
  chr10:64133789-64133867
  hyper
cgccgcgactgcgaggctgacacgcgtctttccttccctcccccggggaatgatcccagcatctctcgcagtgatgtc

SEQ ID NO: 372424 - DNA, 73 bp, Homo sapiens; identical to SEQ ID NO: 347093
  chr10:64578688-64578761
  hyper

SEQ ID NO: 372425 - DNA, 42 bp, Homo sapiens; identical to SEQ ID NO: 333957
  chr10:68685841-68685883
  hyper

SEQ ID NO: 372426 - DNA, 153 bp, Homo sapiens; identical to SEQ ID NO: 359582
  chr10:69834338-69834491
  hyper

SEQ ID NO: 372427 - DNA, 1236 bp, Homo sapiens; identical to SEQ ID NO: 333960
  chr10:71078140-71079376
  hyper

SEQ ID NO: 372428 - DNA, 65 bp, Homo sapiens; identical to SEQ ID NO: 359584
  chr10:71267698-71267763
  hyper

SEQ ID NO: 372429 - DNA, 38 bp, Homo sapiens; identical to SEQ ID NO: 359585
  chr10:71267805-71267843
  hyper

SEQ ID NO: 372430 - DNA, 99 bp, Homo sapiens; identical to SEQ ID NO: 287184
  chr10:71333132-71333231
  hyper

SEQ ID NO: 372431 - DNA, 198 bp, Homo sapiens; identical to SEQ ID NO: 202107
  chr10:71389862-71390060
  hyper

SEQ ID NO: 372432 - DNA, 140 bp, Homo sapiens; identical to SEQ ID NO: 351051
  chr10:71390109-71390249
  hyper

SEQ ID NO: 372433 - DNA, 782 bp, Homo sapiens; identical to SEQ ID NO: 359589
  chr10:71812318-71813100
  hyper

SEQ ID NO: 372434 - DNA, 643 bp, Homo sapiens; identical to SEQ ID NO: 351052
  chr10:71892158-71892801
  hyper

SEQ ID NO: 372435 - DNA, 85 bp, Homo sapiens; identical to SEQ ID NO: 347094
  chr10:72015065-72015150
  hyper

SEQ ID NO: 372436 - DNA, 323 bp, Homo sapiens; identical to SEQ ID NO: 347095
  chr10:72238261-72238584
  hyper

SEQ ID NO: 372437 - DNA, 146 bp, Homo sapiens; identical to SEQ ID NO: 351055
  chr10:73846836-73846982
  hyper

SEQ ID NO: 372438 - DNA, 261 bp, Homo sapiens; identical to SEQ ID NO: 202119
  chr10:73847427-73847688
  hyper

SEQ ID NO: 372439 - DNA, 365 bp, Homo sapiens; identical to SEQ ID NO: 359595
  chr10:74020611-74020976
  hyper

SEQ ID NO: 372440 - DNA, 249 bp, Homo sapiens; identical to SEQ ID NO: 347096
  chr10:74057413-74057662
  hyper

SEQ ID NO: 372441 - DNA, 295 bp, Homo sapiens; identical to SEQ ID NO: 347097
  chr10:74057707-74058002
  hyper

SEQ ID NO: 372442 - DNA, 412 bp, Homo sapiens; identical to SEQ ID NO: 345356
  chr10:74079281-74079693
  hyper

SEQ ID NO: 372443 - DNA, 179 bp, Homo sapiens; identical to SEQ ID NO: 345357
  chr10:74079752-74079931
  hyper

SEQ ID NO: 372444 - DNA, 73 bp, Homo sapiens; identical to SEQ ID NO: 359600
  chr10:75670652-75670725
  hyper

SEQ ID NO: 372445 - DNA, 45 bp, Homo sapiens; identical to SEQ ID NO: 359601
  chr10:75670755-75670800
  hyper

SEQ ID NO: 372446 - DNA, 345 bp, Homo sapiens; identical to SEQ ID NO: 351061
  chr10:77159582-77159927
  hyper

SEQ ID NO: 372447 - DNA, 1015 bp, Homo sapiens; identical to SEQ ID NO: 287250
  chr10:77160017-77161032
  hyper

SEQ ID NO: 372448 - DNA, 217 bp, Homo sapiens; identical to SEQ ID NO: 202139
  chr10:77161406-77161623
  hyper

SEQ ID NO: 372449 - DNA, 1015 bp, Homo sapiens; identical to SEQ ID NO: 202140
  chr10:77161691-77162706
  hyper

SEQ ID NO: 372450 - DNA, 324 bp, Homo sapiens; identical to SEQ ID NO: 202141
  chr10:77163338-77163662
  hyper

SEQ ID NO: 372451 - DNA, 86 bp, Homo sapiens; identical to SEQ ID NO: 359608
  chr10:77163726-77163812
  hyper

SEQ ID NO: 372452 - DNA, 310 bp, Homo sapiens; identical to SEQ ID NO: 351067
  chr10:77168785-77169095
  hyper

SEQ ID NO: 372453 - DNA, 364 bp, Homo sapiens; identical to SEQ ID NO: 351068
  chr10:77169218-77169582
  hyper

SEQ ID NO: 372454 - DNA, 200 bp, Homo sapiens; identical to SEQ ID NO: 359611
  chr10:77190985-77191185
  hyper

SEQ ID NO: 372455 - DNA, 84 bp, Homo sapiens; identical to SEQ ID NO: 351069
  chr10:79396547-79396631
  hyper

SEQ ID NO: 372456 - DNA, 102 bp, Homo sapiens; identical to SEQ ID NO: 287279
  chr10:83634159-83634261
  hyper

SEQ ID NO: 372457 - DNA, 47 bp, Homo sapiens; identical to SEQ ID NO: 359614
  chr10:83634499-83634546
  hyper

SEQ ID NO: 372458 - DNA, 415 bp, Homo sapiens; identical to SEQ ID NO: 287282
  chr10:83635818-83636233
  hyper

SEQ ID NO: 372459 - DNA, 64 bp, Homo sapiens; identical to SEQ ID NO: 359616
  chr10:83636388-83636452
  hyper

SEQ ID NO: 372460 - DNA, 90 bp, Homo sapiens; identical to SEQ ID NO: 351070
  chr10:85954199-85954289
  hyper

SEQ ID NO: 372461 - DNA, 41 bp, Homo sapiens; identical to SEQ ID NO: 351071
  chr10:88731062-88731103
  hyper

SEQ ID NO: 372462 - DNA, 177 bp, Homo sapiens; identical to SEQ ID NO: 351072
  chr10:88731133-88731310
  hyper

SEQ ID NO: 372463 - DNA, 417 bp, Homo sapiens; identical to SEQ ID NO: 345358
  chr10:89621342-89621759
  hyper

SEQ ID NO: 372464 - DNA, 148 bp, Homo sapiens; identical to SEQ ID NO: 202167
  chr10:89621836-89621984
  hyper

SEQ ID NO: 372465 - DNA, 853 bp, Homo sapiens; identical to SEQ ID NO: 345360
  chr10:89621985-89622838
  hyper

SEQ ID NO: 372466 - DNA, 53 bp, Homo sapiens; identical to SEQ ID NO: 345361
  chr10:90342577-90342630
  hyper

SEQ ID NO: 372467 - DNA, 239 bp, Homo sapiens; identical to SEQ ID NO: 359624
  chr10:91403644-91403883
  hyper

SEQ ID NO: 372468 - DNA, 81 bp, Homo sapiens; identical to SEQ ID NO: 287311
  chr10:92617016-92617097
  hyper

SEQ ID NO: 372469 - DNA, 508 bp, Homo sapiens; identical to SEQ ID NO: 287312
  chr10:92617539-92618047
  hyper

SEQ ID NO: 372470 - DNA, 64 bp, Homo sapiens; identical to SEQ ID NO: 359627
  chr10:92618077-92618141
  hyper

SEQ ID NO: 372471 - DNA, 57 bp, Homo sapiens; identical to SEQ ID NO: 345362
  chr10:93647662-93647719
  hyper

SEQ ID NO: 372472 - DNA, 79 bp, Homo sapiens; identical to SEQ ID NO: 287325
  chr10:94449318-94449397
  hyper

SEQ ID NO: 372473 - DNA, 643 bp, Homo sapiens; identical to SEQ ID NO: 287326
  chr10:94450726-94451369
  hyper

SEQ ID NO: 372474 - DNA, 314 bp, Homo sapiens; identical to SEQ ID NO: 334000
  chr10:94607767-94608081
  hyper

SEQ ID NO: 372475 - DNA, 230 bp, Homo sapiens; identical to SEQ ID NO: 359632
  chr10:94831380-94831610
  hyper

SEQ ID NO: 372476 - DNA, 384 bp, Homo sapiens; identical to SEQ ID NO: 287332
  chr10:94833649-94834033
  hyper

SEQ ID NO: 372477 - DNA, 112 bp, Homo sapiens; identical to SEQ ID NO: 359634
  chr10:95753372-95753484
  hyper

SEQ ID NO: 372478 - DNA, 372 bp, Homo sapiens; identical to SEQ ID NO: 287338
  chr10:95753760-95754132
  hyper

SEQ ID NO: 372479 - DNA, 50 bp, Homo sapiens; identical to SEQ ID NO: 359636
  chr10:95754214-95754264
  hyper

SEQ ID NO: 372480 - DNA, 173 bp, Homo sapiens; identical to SEQ ID NO: 334004
  chr10:97051022-97051195
  hyper

SEQ ID NO: 372481 - DNA, 852 bp, Homo sapiens; identical to SEQ ID NO: 359637
  chr10:97802911-97803763
  hyper

SEQ ID NO: 372482 - DNA, 230 bp, Homo sapiens; identical to SEQ ID NO: 351082
  chr10:98272415-98272645
  hyper

SEQ ID NO: 372483 - DNA, 715 bp, Homo sapiens; identical to SEQ ID NO: 351083
  chr10:98272768-98273483
  hyper

SEQ ID NO: 372484 - DNA, 761 bp, Homo sapiens; identical to SEQ ID NO: 345363
  chr10:98479725-98480486
  hyper

SEQ ID NO: 372485 - DNA, 114 bp, Homo sapiens; identical to SEQ ID NO: 359641
  chr10:99474279-99474393
  hyper

SEQ ID NO: 372486 - DNA, 62 bp, Homo sapiens; identical to SEQ ID NO: 359642
  chr10:99474467-99474529
  hyper

SEQ ID NO: 372487 - DNA, 194 bp, Homo sapiens; identical to SEQ ID NO: 359643
  chr10:99530903-99531097
  hyper

SEQ ID NO: 372488 - DNA, 59 bp, Homo sapiens; identical to SEQ ID NO: 351085
  chr10:100992740-100992799
  hyper

SEQ ID NO: 372489 - DNA, 124 bp, Homo sapiens; identical to SEQ ID NO: 345364
  chr10:100994695-100994819
  hyper

SEQ ID NO: 372490 - DNA, 56 bp, Homo sapiens; identical to SEQ ID NO: 202208
  chr10:101089476-101089532
  hyper

SEQ ID NO: 372491 - DNA, 236 bp, Homo sapiens; identical to SEQ ID NO: 202209
  chr10:101089565-101089801
  hyper

SEQ ID NO: 372492 - DNA, 312 bp, Homo sapiens; identical to SEQ ID NO: 351087
  chr10:101279860-101280172
  hyper

SEQ ID NO: 372493 - DNA, 142 bp, Homo sapiens
  chr10:101295603-101295745
  hyper
ggcttcggatcgcagctcactcgaggcctggggaaggggactcaggggcgaggaggatgactgggtccggtcgccaggactgtctctgaggcagaaacgccggctgggcgccggggaggacgatggccccgaccctggcagc

SEQ ID NO: 372494 - DNA, 334 bp, Homo sapiens; identical to SEQ ID NO: 334021
  chr10:102132983-102133317
  hyper

SEQ ID NO: 372495 - DNA, 200 bp, Homo sapiens
  chr10:102321832-102322032
  hyper
cgcaccatatttcccgcgctctcccctgggacgtgccgtccctgctgcagtcgcagcgtggcgccctcgctccacgcagggatcctgagccaatggcggaagcggagtgcgcggcgaggtcgcagttgcgtttctcgcactccccactgcggggagcccgtgggccccgcactgcagggaagctgccggcccaggtctcc

SEQ ID NO: 372496 - DNA, 205 bp, Homo sapiens; identical to SEQ ID NO: 359649
  chr10:102473078-102473283
  hyper

SEQ ID NO: 372497 - DNA, 72 bp, Homo sapiens; identical to SEQ ID NO: 359650
  chr10:102475189-102475261
  hyper

SEQ ID NO: 372498 - DNA, 385 bp, Homo sapiens; identical to SEQ ID NO: 202219
  chr10:102489864-102490249
  hyper

SEQ ID NO: 372499 - DNA, 330 bp, Homo sapiens; identical to SEQ ID NO: 202220
  chr10:102490316-102490646
  hyper

SEQ ID NO: 372500 - DNA, 414 bp, Homo sapiens; identical to SEQ ID NO: 359652
  chr10:102490715-102491129
  hyper

SEQ ID NO: 372501 - DNA, 60 bp, Homo sapiens; identical to SEQ ID NO: 287408
  chr10:102498764-102498824
  hyper

SEQ ID NO: 372502 - DNA, 115 bp, Homo sapiens; identical to SEQ ID NO: 351088
  chr10:102501611-102501726
  hyper

SEQ ID NO: 372503 - DNA, 287 bp, Homo sapiens; identical to SEQ ID NO: 287412
  chr10:102507993-102508280
  hyper

SEQ ID NO: 372504 - DNA, 257 bp, Homo sapiens; identical to SEQ ID NO: 202223
  chr10:102585797-102586054
  hyper

SEQ ID NO: 372505 - DNA, 109 bp, Homo sapiens; identical to SEQ ID NO: 202224
  chr10:102587493-102587602
  hyper

SEQ ID NO: 372506 - DNA, 163 bp, Homo sapiens; identical to SEQ ID NO: 202225
  chr10:102587906-102588069
  hyper

SEQ ID NO: 372507 - DNA, 77 bp, Homo sapiens; identical to SEQ ID NO: 202226
  chr10:102588175-102588252
  hyper

SEQ ID NO: 372508 - DNA, 160 bp, Homo sapiens; identical to SEQ ID NO: 202227
  chr10:102588941-102589101
  hyper

SEQ ID NO: 372509 - DNA, 653 bp, Homo sapiens; identical to SEQ ID NO: 347115
  chr10:102791390-102792043
  hyper

SEQ ID NO: 372510 - DNA, 114 bp, Homo sapiens; identical to SEQ ID NO: 347116
  chr10:102792044-102792158
  hyper

SEQ ID NO: 372511 - DNA, 569 bp, Homo sapiens; identical to SEQ ID NO: 334036
  chr10:102822304-102822873
  hyper

SEQ ID NO: 372512 - DNA, 139 bp, Homo sapiens; identical to SEQ ID NO: 334040
  chr10:102978324-102978463
  hyper

SEQ ID NO: 372513 - DNA, 246 bp, Homo sapiens; identical to SEQ ID NO: 287435
  chr10:102988365-102988611
  hyper

SEQ ID NO: 372514 - DNA, 33 bp, Homo sapiens; identical to SEQ ID NO: 345367
  chr10:102995986-102996019
  hyper

SEQ ID NO: 372515 - DNA, 126 bp, Homo sapiens; identical to SEQ ID NO: 287446
  chr10:103535496-103535622
  hyper

SEQ ID NO: 372516 - DNA, 211 bp, Homo sapiens; identical to SEQ ID NO: 202239
  chr10:103535916-103536127
  hyper

SEQ ID NO: 372517 - DNA, 129 bp, Homo sapiens
  chr10:103985878-103986007
  hyper
cgttttacgggagaaaaggctggggaagtgggcgggcgatggcctacgacgggacttggggcggggtgtgcgaaacgcctggcaggcgggcccttgagtatgaccaatcagaatgcggactgcgtccca

SEQ ID NO: 372518 - DNA, 206 bp, Homo sapiens; identical to SEQ ID NO: 287457
  chr10:104001004-104001210
  hyper

SEQ ID NO: 372519 - DNA, 261 bp, Homo sapiens
  chr10:104221426-104221687
  hyper
cgcagaaaggctctccgggggtctggaggaaagggatgcagtgggtcaaatagctccctggtggtctgggatcgagggatgcactggtcaggtcgggatccgtgccattagcataaaggcatttaaccctggtggcacttggggagctttgaaaaacaccgatgctgggcccgcccgaagagattccgatttaactgttctgggtgaggcctgggcctcggtattattgcacagctcctcaggtgattttaacgtgcaggc

SEQ ID NO: 372520 - DNA, 578 bp, Homo sapiens; identical to SEQ ID NO: 351098
  chr10:105253250-105253828
  hyper

SEQ ID NO: 372521 - DNA, 574 bp, Homo sapiens; identical to SEQ ID NO: 359669
  chr10:105253853-105254427
  hyper

SEQ ID NO: 372522 - DNA, 722 bp, Homo sapiens; identical to SEQ ID NO: 351100
  chr10:106097237-106097959
  hyper

SEQ ID NO: 372523 - DNA, 165 bp, Homo sapiens; identical to SEQ ID NO: 351101
  chr10:106098025-106098190
  hyper

SEQ ID NO: 372524 - DNA, 334 bp, Homo sapiens
  chr10:106113480-106113814
  hyper
cgcccctagagggcgtgtccgttgccaggcgacgggccgacgcgccgagcgcgggtttccgctcggggcgggcgatagagacagcgcgtcgcgcctttagcttctttcccagactccggcccagctcctgcgatctccacagcagcctctgaggccgcccccagagagcatcaggatggctgaggtcaggagtcagcgcccctctgtcgcctttcccttgacccctccccattgtccctctcctactgacgattgtcacaaacggtgattccaatatttccccccatcaacatcttattcccctgcaccctcactcactcccgcgcctttctcc

SEQ ID NO: 372525 - DNA, 293 bp, Homo sapiens; identical to SEQ ID NO: 359672
  chr10:106398982-106399275
  hyper

SEQ ID NO: 372526 - DNA, 82 bp, Homo sapiens; identical to SEQ ID NO: 359673
  chr10:108924881-108924963
  hyper

SEQ ID NO: 372527 - DNA, 39 bp, Homo sapiens; identical to SEQ ID NO: 359674
  chr10:110671608-110671647
  hyper

SEQ ID NO: 372528 - DNA, 737 bp, Homo sapiens; identical to SEQ ID NO: 334066
  chr10:111767130-111767867
  hyper

SEQ ID NO: 372529 - DNA, 567 bp, Homo sapiens; identical to SEQ ID NO: 287502
  chr10:112257242-112257809
  hyper

SEQ ID NO: 372530 - DNA, 353 bp, Homo sapiens; identical to SEQ ID NO: 202259
  chr10:112257978-112258331
  hyper

SEQ ID NO: 372531 - DNA, 184 bp, Homo sapiens; identical to SEQ ID NO: 351105
  chr10:112258408-112258592
  hyper

SEQ ID NO: 372532 - DNA, 232 bp, Homo sapiens; identical to SEQ ID NO: 287530
  chr10:112403994-112404226
  hyper

SEQ ID NO: 372533 - DNA, 37 bp, Homo sapiens; identical to SEQ ID NO: 351106
  chr10:112431835-112431872
  hyper

SEQ ID NO: 372534 - DNA, 235 bp, Homo sapiens; identical to SEQ ID NO: 202288
  chr10:112432125-112432360
  hyper

SEQ ID NO: 372535 - DNA, 457 bp, Homo sapiens; identical to SEQ ID NO: 334070
  chr10:114135846-114136303
  hyper

SEQ ID NO: 372536 - DNA, 654 bp, Homo sapiens; identical to SEQ ID NO: 334071
  chr10:114708972-114709626
  hyper

SEQ ID NO: 372537 - DNA, 169 bp, Homo sapiens; identical to SEQ ID NO: 359682
  chr10:114711931-114712100
  hyper

SEQ ID NO: 372538 - DNA, 427 bp, Homo sapiens; identical to SEQ ID NO: 359683
  chr10:114712446-114712873
  hyper

SEQ ID NO: 372539 - DNA, 46 bp, Homo sapiens; identical to SEQ ID NO: 351108
  chr10:115998990-115999036
  hyper

SEQ ID NO: 372540 - DNA, 411 bp, Homo sapiens; identical to SEQ ID NO: 351109
  chr10:115999183-115999594
  hyper

SEQ ID NO: 372541 - DNA, 268 bp, Homo sapiens; identical to SEQ ID NO: 202299
  chr10:116163621-116163889
  hyper

SEQ ID NO: 372542 - DNA, 207 bp, Homo sapiens; identical to SEQ ID NO: 202300
  chr10:116163919-116164126
  hyper

SEQ ID NO: 372543 - DNA, 80 bp, Homo sapiens
  chr10:116164364-116164444
  hyper
gacctggcccccgccagggctcgcccccagcgcccctgtcccagcgcccctgtcccagcgccggagaactccggcccgcc

SEQ ID NO: 372544 - DNA, 916 bp, Homo sapiens; identical to SEQ ID NO: 334075
  chr10:116527415-116528331
  hyper

SEQ ID NO: 372545 - DNA, 184 bp, Homo sapiens; identical to SEQ ID NO: 287574
  chr10:118031118-118031302
  hyper

SEQ ID NO: 372546 - DNA, 587 bp, Homo sapiens; identical to SEQ ID NO: 287577
  chr10:118608718-118609305
  hyper

SEQ ID NO: 372547 - DNA, 239 bp, Homo sapiens; identical to SEQ ID NO: 202308
  chr10:118891774-118892013
  hyper

SEQ ID NO: 372548 - DNA, 295 bp, Homo sapiens; identical to SEQ ID NO: 287582
  chr10:118927594-118927889
  hyper

SEQ ID NO: 372549 - DNA, 51 bp, Homo sapiens; identical to SEQ ID NO: 359690
  chr10:119001564-119001615
  hyper

SEQ ID NO: 372550 - DNA, 542 bp, Homo sapiens; identical to SEQ ID NO: 334087
  chr10:119293016-119293558
  hyper

SEQ ID NO: 372551 - DNA, 482 bp, Homo sapiens; identical to SEQ ID NO: 351112
  chr10:119293799-119294281
  hyper

SEQ ID NO: 372552 - DNA, 116 bp, Homo sapiens; identical to SEQ ID NO: 202319
  chr10:119296211-119296327
  hyper

SEQ ID NO: 372553 - DNA, 52 bp, Homo sapiens; identical to SEQ ID NO: 202320
  chr10:119296362-119296414
  hyper

SEQ ID NO: 372554 - DNA, 62 bp, Homo sapiens; identical to SEQ ID NO: 202321
  chr10:119296567-119296629
  hyper

SEQ ID NO: 372555 - DNA, 203 bp, Homo sapiens
  chr10:119302490-119302693
  hyper
cgcctgcaaattcttctggaaggattttcccccctctcttcaggttgggcgcgtttggtgcaagattctcgggatcctcggctttgcctctccctctccctcccccctcctttcctttttcctttcctttcctttctttcttcctttccttccccccacccccacccccaccccaaacaaacgagtccccaattctcgtccgt

SEQ ID NO: 372556 - DNA, 140 bp, Homo sapiens; identical to SEQ ID NO: 359696
  chr10:119303721-119303861
  hyper

SEQ ID NO: 372557 - DNA, 68 bp, Homo sapiens; identical to SEQ ID NO: 359697
  chr10:119494306-119494374
  hyper

SEQ ID NO: 372558 - DNA, 131 bp, Homo sapiens; identical to SEQ ID NO: 347121
  chr10:121301363-121301494
  hyper

SEQ ID NO: 372559 - DNA, 760 bp, Homo sapiens; identical to SEQ ID NO: 345370
  chr10:121301911-121302671
  hyper

SEQ ID NO: 372560 - DNA, 138 bp, Homo sapiens; identical to SEQ ID NO: 345371
  chr10:122708760-122708898
  hyper

SEQ ID NO: 372561 - DNA, 74 bp, Homo sapiens; identical to SEQ ID NO: 351119
  chr10:122739316-122739390
  hyper

SEQ ID NO: 372562 - DNA, 209 bp, Homo sapiens; identical to SEQ ID NO: 351120
  chr10:123356997-123357206
  hyper

SEQ ID NO: 372563 - DNA, 372 bp, Homo sapiens; identical to SEQ ID NO: 202339
  chr10:123357242-123357614
  hyper

SEQ ID NO: 372564 - DNA, 106 bp, Homo sapiens; identical to SEQ ID NO: 202340
  chr10:123357660-123357766
  hyper

SEQ ID NO: 372565 - DNA, 375 bp, Homo sapiens; identical to SEQ ID NO: 202341
  chr10:123357893-123358268
  hyper

SEQ ID NO: 372566 - DNA, 274 bp, Homo sapiens; identical to SEQ ID NO: 359706
  chr10:124133662-124133936
  hyper

SEQ ID NO: 372567 - DNA, 276 bp, Homo sapiens; identical to SEQ ID NO: 359707
  chr10:124134313-124134589
  hyper

SEQ ID NO: 372568 - DNA, 629 bp, Homo sapiens; identical to SEQ ID NO: 202348
  chr10:124221086-124221715
  hyper

SEQ ID NO: 372569 - DNA, 318 bp, Homo sapiens; identical to SEQ ID NO: 351125
  chr10:124221921-124222239
  hyper

SEQ ID NO: 372570 - DNA, 68 bp, Homo sapiens; identical to SEQ ID NO: 359710
  chr10:124639064-124639132
  hyper

SEQ ID NO: 372571 - DNA, 163 bp, Homo sapiens; identical to SEQ ID NO: 359711
  chr10:124639526-124639689
  hyper

SEQ ID NO: 372572 - DNA, 367 bp, Homo sapiens; identical to SEQ ID NO: 202351
  chr10:124899187-124899554
  hyper

SEQ ID NO: 372573 - DNA, 94 bp, Homo sapiens; identical to SEQ ID NO: 359713
  chr10:124907174-124907268
  hyper

SEQ ID NO: 372574 - DNA, 195 bp, Homo sapiens
  chr10:124908373-124908568
  hyper
ttcctggggaaggttgagttgttgagagagtggaccacagcgagagggacacgcggccggccttacacccggctgtcctcaatcactgcacatctggtactttctttccggacacgaggtggagatctgcaagtcgggtctgggcagtctgtctccaccgtaatctctttctgagtcttcttcctcactcgctcc

SEQ ID NO: 372575 - DNA, 203 bp, Homo sapiens; identical to SEQ ID NO: 202353
  chr10:125851929-125852132
  hyper

SEQ ID NO: 372576 - DNA, 96 bp, Homo sapiens; identical to SEQ ID NO: 287649
  chr10:125853277-125853373
  hyper

SEQ ID NO: 372577 - DNA, 1193 bp, Homo sapiens; identical to SEQ ID NO: 334112
  chr10:126106668-126107861
  hyper

SEQ ID NO: 372578 - DNA, 50 bp, Homo sapiens; identical to SEQ ID NO: 359717
  chr10:126136723-126136773
  hyper

SEQ ID NO: 372579 - DNA, 220 bp, Homo sapiens; identical to SEQ ID NO: 202362
  chr10:128076024-128076244
  hyper

SEQ ID NO: 372580 - DNA, 775 bp, Homo sapiens
  chr10:128593891-128594666
  hyper
cgcggccgtcccgcctcccgccggcgctcccggcctttcccatccggcccgcgacgctccgcccgccccgtcccacatgacgccgcctccgccgcaaactttttcctccccatcctgtcgcggctcgaaaggaatggaaaatggcggcctagacgcggagtttcctgcccgacccgcggcggctccggcggcgccatgacgcgctgggtgcccaccaagcgcgaggagaagtacggcgtgggtgagcagcgccgccgccgccgcgcctctcgccccaagcccaggctccggcggggcgggtgtgccgggcgcctgttgccgccgccccgagcggccgccgggccggggagaggcgcttccgcccgcgcccgcgccgccgccccgctcgcaatgcccggcgaccccggccgccccgcgcccccggcggcgtcagctccagccccggggatgcgggtcgggaacacgagggggtggggtgggaatgggggcgggcgcgtccctccctagggtgtcccctccgacgcccgctcctctggacctctgccgtggagccccccgggctacccccaactccccggccccggccgctgctatctgcgcggctgggcccgtcagggaagcccaggggtcactgtctcgcggcggcttctgcttcttggatgaacttgcgtcccgcgtccgggctctgggtgggcgggctcaggtcggcgcggtcccagcggataattccgccctttcccggcggggaggagggggcgcgacctgggtggccagc

SEQ ID NO: 372581 - DNA, 47 bp, Homo sapiens; identical to SEQ ID NO: 287667
  chr10:128994482-128994529
  hyper

SEQ ID NO: 372582 - DNA, 141 bp, Homo sapiens; identical to SEQ ID NO: 287668
  chr10:128994545-128994686
  hyper

SEQ ID NO: 372583 - DNA, 95 bp, Homo sapiens; identical to SEQ ID NO: 359720
  chr10:129534419-129534514
  hyper

SEQ ID NO: 372584 - DNA, 45 bp, Homo sapiens; identical to SEQ ID NO: 202367
  chr10:129534541-129534586
  hyper

SEQ ID NO: 372585 - DNA, 142 bp, Homo sapiens; identical to SEQ ID NO: 287676
  chr10:130338585-130338727
  hyper

SEQ ID NO: 372586 - DNA, 333 bp, Homo sapiens; identical to SEQ ID NO: 287677
  chr10:130338995-130339328
  hyper

SEQ ID NO: 372587 - DNA, 89 bp, Homo sapiens
  chr10:133110981-133111070
  hyper
catcccgggtccacagcttcagtgcagcccctggcgacgcgcgctgacagctgggcagagacttccgtgcgctgtaaaccccttaggtc

SEQ ID NO: 372588 - DNA, 133 bp, Homo sapiens; identical to SEQ ID NO: 287682
  chr10:133999554-133999687
  hyper

SEQ ID NO: 372589 - DNA, 128 bp, Homo sapiens; identical to SEQ ID NO: 359725
  chr10:134209485-134209613
  hyper

SEQ ID NO: 372590 - DNA, 126 bp, Homo sapiens; identical to SEQ ID NO: 359726
  chr10:134209650-134209776
  hyper

SEQ ID NO: 372591 - DNA, 206 bp, Homo sapiens; identical to SEQ ID NO: 202379
  chr10:134600998-134601204
  hyper

SEQ ID NO: 372592 - DNA, 128 bp, Homo sapiens
  chr10:134602414-134602542
  hyper
gggggctgaggggcgacgggggaactccacagagggaaggagcctgcgttcgccttcggccgcccaggccatagagttcacaaactctgatttatcactgaggtgacttgtcccgcgcagccctaggc

SEQ ID NO: 372593 - DNA, 66 bp, Homo sapiens; identical to SEQ ID NO: 347130
  chr10:134676272-134676338
  hyper

SEQ ID NO: 372594 - DNA, 41 bp, Homo sapiens; identical to SEQ ID NO: 347131
  chr10:134676653-134676694
  hyper

SEQ ID NO: 372595 - DNA, 89 bp, Homo sapiens
  chr10:134902307-134902396
  hyper
ccttccagaggccatggaggctggcggggagcagggcgccacctgatcgcctccccctggacgcctcctccagcggcgctcacgcttcc

SEQ ID NO: 372596 - DNA, 451 bp, Homo sapiens; identical to SEQ ID NO: 351133
  chr10:134973438-134973889
  hyper

SEQ ID NO: 372597 - DNA, 123 bp, Homo sapiens; identical to SEQ ID NO: 347132
  chr10:135075001-135075124
  hyper

SEQ ID NO: 372598 - DNA, 127 bp, Homo sapiens; identical to SEQ ID NO: 351135
  chr10:135090197-135090324
  hyper

SEQ ID NO: 372599 - DNA, 99 bp, Homo sapiens; identical to SEQ ID NO: 351136
  chr10:135090391-135090490
  hyper

SEQ ID NO: 372600 - DNA, 154 bp, Homo sapiens
  chr10:135192037-135192191
  hyper
cgctcaacttcccgggcgagggacgtttctgcacttgccctcggcttctgaactttgtactttgcgagtgtactttgtactttggtcctgtgtccctgcagccctgtgactacacgcgcacacgcaggcgcgcgcacacgcgaactgacggctc

SEQ ID NO: 372601 - DNA, 80 bp, Homo sapiens
  chr11:280028-280108
  hyper
cgcagcctgccccacctccgacccttgtccccgcgctgtctcccgctgcgcccagagtacaagaagaagtaccgggagca

SEQ ID NO: 372602 - DNA, 271 bp, Homo sapiens
  chr11:280472-280743
  hyper
cgcagcctggctgacctgatcctggaccagtgccccgaccgcggcgcgccggtgccgcagatgctggcccagccgcagcggctgctcttcatcctggacggcgcggacgagctgccggcgctggggggccccgaggccgcgccctgcacagaccccttcgaggcggcgagcggcgcgcgggtgctaggcgggctgctgagcaaggcgctgctgcccacggccctcctgctggtgaccacgcgcgccgccgcccccgggaggctgcagggcc

SEQ ID NO: 372603 - DNA, 60 bp, Homo sapiens; identical to SEQ ID NO: 202385
  chr11:308266-308326
  hyper

SEQ ID NO: 372604 - DNA, 93 bp, Homo sapiens; identical to SEQ ID NO: 351138
  chr11:308362-308455
  hyper

SEQ ID NO: 372605 - DNA, 943 bp, Homo sapiens; identical to SEQ ID NO: 359736
  chr11:416597-417540
  hyper

SEQ ID NO: 372606 - DNA, 117 bp, Homo sapiens; identical to SEQ ID NO: 334148
  chr11:441960-442077
  hyper

SEQ ID NO: 372607 - DNA, 394 bp, Homo sapiens; identical to SEQ ID NO: 351140
  chr11:537174-537568
  hyper

SEQ ID NO: 372608 - DNA, 672 bp, Homo sapiens; identical to SEQ ID NO: 334150
  chr11:705963-706635
  hyper

SEQ ID NO: 372609 - DNA, 93 bp, Homo sapiens; identical to SEQ ID NO: 287738
  chr11:829438-829531
  hyper

SEQ ID NO: 372610 - DNA, 731 bp, Homo sapiens; identical to SEQ ID NO: 347133
  chr11:1410711-1411442
  hyper

SEQ ID NO: 372611 - DNA, 93 bp, Homo sapiens; identical to SEQ ID NO: 347134
  chr11:2290844-2290937
  hyper

SEQ ID NO: 372612 - DNA, 34 bp, Homo sapiens
  chr11:2398443-2398477
  hyper
cggggccgggggcggggcgtgagctggccggggc

SEQ ID NO: 372613 - DNA, 564 bp, Homo sapiens; identical to SEQ ID NO: 359743
  chr11:2398759-2399323
  hyper

SEQ ID NO: 372614 - DNA, 401 bp, Homo sapiens; identical to SEQ ID NO: 351145
  chr11:2399399-2399800
  hyper

SEQ ID NO: 372615 - DNA, 127 bp, Homo sapiens; identical to SEQ ID NO: 351146
  chr11:2465520-2465647
  hyper

SEQ ID NO: 372616 - DNA, 157 bp, Homo sapiens; identical to SEQ ID NO: 351147
  chr11:2466019-2466176
  hyper

SEQ ID NO: 372617 - DNA, 250 bp, Homo sapiens; identical to SEQ ID NO: 287760
  chr11:2466191-2466441
  hyper

SEQ ID NO: 372618 - DNA, 413 bp, Homo sapiens; identical to SEQ ID NO: 359748
  chr11:2950407-2950820
  hyper

SEQ ID NO: 372619 - DNA, 76 bp, Homo sapiens; identical to SEQ ID NO: 359749
  chr11:3181650-3181726
  hyper

SEQ ID NO: 372620 - DNA, 211 bp, Homo sapiens; identical to SEQ ID NO: 359750
  chr11:3186017-3186228
  hyper

SEQ ID NO: 372621 - DNA, 290 bp, Homo sapiens; identical to SEQ ID NO: 202417
  chr11:3186311-3186601
  hyper

SEQ ID NO: 372622 - DNA, 150 bp, Homo sapiens; identical to SEQ ID NO: 359752
  chr11:3663265-3663415
  hyper

SEQ ID NO: 372623 - DNA, 212 bp, Homo sapiens; identical to SEQ ID NO: 359753
  chr11:3663525-3663737
  hyper

SEQ ID NO: 372624 - DNA, 148 bp, Homo sapiens
  chr11:7694738-7694886
  hyper
cggaatccgagccggcccgccccactccccgcccttcgcggtcccgcccacgacctctccccacgcctcccgctccggcccccaacctcccggtcggacgttcgttcccggctctagccggcctccgcgcctctggcctctttccttc

SEQ ID NO: 372625 - DNA, 164 bp, Homo sapiens; identical to SEQ ID NO: 120256
  chr11:7695108-7695272
  hyper

SEQ ID NO: 372626 - DNA, 344 bp, Homo sapiens; identical to SEQ ID NO: 287800
  chr11:8041149-8041493
  hyper

SEQ ID NO: 372627 - DNA, 64 bp, Homo sapiens
  chr11:8284161-8284225
  hyper
cgtgccactctcgcaggccgctcccgcacaagtgctaccggccggcggcgggacactttcttcc

SEQ ID NO: 372628 - DNA, 190 bp, Homo sapiens; identical to SEQ ID NO: 202427
  chr11:8284345-8284535
  hyper

SEQ ID NO: 372629 - DNA, 70 bp, Homo sapiens
  chr11:8284961-8285031
  hyper
gactcggggcgcgctttggaggggcggccggtcttcgggcagctagcgggctctaattacccgcttgtcc

SEQ ID NO: 372630 - DNA, 129 bp, Homo sapiens; identical to SEQ ID NO: 351149
  chr11:8615887-8616016
  hyper

SEQ ID NO: 372631 - DNA, 60 bp, Homo sapiens; identical to SEQ ID NO: 287811
  chr11:9112971-9113031
  hyper

SEQ ID NO: 372632 - DNA, 400 bp, Homo sapiens; identical to SEQ ID NO: 359757
  chr11:10326048-10326448
  hyper

SEQ ID NO: 372633 - DNA, 229 bp, Homo sapiens; identical to SEQ ID NO: 359758
  chr11:10326499-10326728
  hyper

SEQ ID NO: 372634 - DNA, 262 bp, Homo sapiens; identical to SEQ ID NO: 202440
  chr11:12030561-12030823
  hyper

SEQ ID NO: 372635 - DNA, 53 bp, Homo sapiens; identical to SEQ ID NO: 359760
  chr11:12031006-12031059
  hyper

SEQ ID NO: 372636 - DNA, 124 bp, Homo sapiens; identical to SEQ ID NO: 345376
  chr11:12131738-12131862
  hyper

SEQ ID NO: 372637 - DNA, 287 bp, Homo sapiens; identical to SEQ ID NO: 202443
  chr11:12132212-12132499
  hyper

SEQ ID NO: 372638 - DNA, 55 bp, Homo sapiens; identical to SEQ ID NO: 202444
  chr11:12399222-12399277
  hyper

SEQ ID NO: 372639 - DNA, 344 bp, Homo sapiens; identical to SEQ ID NO: 202445
  chr11:12399383-12399727
  hyper

SEQ ID NO: 372640 - DNA, 71 bp, Homo sapiens; identical to SEQ ID NO: 359765
  chr11:12399791-12399862
  hyper

SEQ ID NO: 372641 - DNA, 234 bp, Homo sapiens; identical to SEQ ID NO: 347137
  chr11:12696746-12696980
  hyper

SEQ ID NO: 372642 - DNA, 317 bp, Homo sapiens; identical to SEQ ID NO: 334173
  chr11:12849699-12850016
  hyper

SEQ ID NO: 372643 - DNA, 332 bp, Homo sapiens; identical to SEQ ID NO: 202448
  chr11:13031624-13031956
  hyper

SEQ ID NO: 372644 - DNA, 344 bp, Homo sapiens; identical to SEQ ID NO: 287844
  chr11:13032312-13032656
  hyper

SEQ ID NO: 372645 - DNA, 202 bp, Homo sapiens; identical to SEQ ID NO: 351154
  chr11:13300232-13300434
  hyper

SEQ ID NO: 372646 - DNA, 657 bp, Homo sapiens; identical to SEQ ID NO: 359771
  chr11:13689464-13690121
  hyper

SEQ ID NO: 372647 - DNA, 555 bp, Homo sapiens; identical to SEQ ID NO: 359772
  chr11:13690157-13690712
  hyper

SEQ ID NO: 372648 - DNA, 346 bp, Homo sapiens; identical to SEQ ID NO: 202453
  chr11:14665271-14665617
  hyper

SEQ ID NO: 372649 - DNA, 298 bp, Homo sapiens; identical to SEQ ID NO: 202454
  chr11:14665651-14665949
  hyper

SEQ ID NO: 372650 - DNA, 31 bp, Homo sapiens; identical to SEQ ID NO: 202455
  chr11:14665995-14666026
  hyper

SEQ ID NO: 372651 - DNA, 440 bp, Homo sapiens; identical to SEQ ID NO: 287859
  chr11:14666056-14666496
  hyper

SEQ ID NO: 372652 - DNA, 308 bp, Homo sapiens; identical to SEQ ID NO: 359777
  chr11:14666531-14666839
  hyper

SEQ ID NO: 372653 - DNA, 261 bp, Homo sapiens; identical to SEQ ID NO: 202458
  chr11:16626178-16626439
  hyper

SEQ ID NO: 372654 - DNA, 868 bp, Homo sapiens; identical to SEQ ID NO: 287863
  chr11:16626496-16627364
  hyper

SEQ ID NO: 372655 - DNA, 286 bp, Homo sapiens; identical to SEQ ID NO: 359779
  chr11:16627410-16627696
  hyper

SEQ ID NO: 372656 - DNA, 74 bp, Homo sapiens; identical to SEQ ID NO: 359780
  chr11:16628231-16628305
  hyper

SEQ ID NO: 372657 - DNA, 183 bp, Homo sapiens; identical to SEQ ID NO: 359781
  chr11:16628933-16629116
  hyper

SEQ ID NO: 372658 - DNA, 79 bp, Homo sapiens; identical to SEQ ID NO: 351157
  chr11:16634452-16634531
  hyper

SEQ ID NO: 372659 - DNA, 254 bp, Homo sapiens
  chr11:16635541-16635795
  hyper
cgggctgacaggagtgagagctaaaacttccaactagctgaaaccaatagccgggaatcgagcgaaggcgaactctcccagcaaagtataaagcttcgggccaaagagtctgcagctccaagtcaggggctgcggctccgaaactccaaacactaactcccagggcagtggcagagggtgggggcagcttcgaagaggcataccaactgctccggtcctggccgaagaccgagctcccttctgcggtgacctcg

SEQ ID NO: 372660 - DNA, 71 bp, Homo sapiens
  chr11:16635927-16635998
  hyper
gtgcaagagaaggacgttcaggcagcccggccgcctgctgcgagagctgaacatttcccagctctatagtc

SEQ ID NO: 372661 - DNA, 1596 bp, Homo sapiens; identical to SEQ ID NO: 334182
  chr11:17034991-17036587
  hyper

SEQ ID NO: 372662 - DNA, 107 bp, Homo sapiens; identical to SEQ ID NO: 351159
  chr11:17373019-17373126
  hyper

SEQ ID NO: 372663 - DNA, 166 bp, Homo sapiens; identical to SEQ ID NO: 202465
  chr11:17373405-17373571
  hyper

SEQ ID NO: 372664 - DNA, 116 bp, Homo sapiens; identical to SEQ ID NO: 7948
  chr11:17373642-17373758
  hyper

SEQ ID NO: 372665 - DNA, 203 bp, Homo sapiens; identical to SEQ ID NO: 334184
  chr11:17374000-17374203
  hyper

SEQ ID NO: 372666 - DNA, 126 bp, Homo sapiens; identical to SEQ ID NO: 359788
  chr11:17497697-17497823
  hyper

SEQ ID NO: 372667 - DNA, 402 bp, Homo sapiens; identical to SEQ ID NO: 287888
  chr11:17742811-17743213
  hyper

SEQ ID NO: 372668 - DNA, 37 bp, Homo sapiens; identical to SEQ ID NO: 351163
  chr11:17743245-17743282
  hyper

SEQ ID NO: 372669 - DNA, 171 bp, Homo sapiens; identical to SEQ ID NO: 359791
  chr11:17756064-17756235
  hyper

SEQ ID NO: 372670 - DNA, 183 bp, Homo sapiens; identical to SEQ ID NO: 359792
  chr11:17756666-17756849
  hyper

SEQ ID NO: 372671 - DNA, 1265 bp, Homo sapiens; identical to SEQ ID NO: 359793
  chr11:19733708-19734973
  hyper

SEQ ID NO: 372672 - DNA, 338 bp, Homo sapiens; identical to SEQ ID NO: 202485
  chr11:19735066-19735404
  hyper

SEQ ID NO: 372673 - DNA, 917 bp, Homo sapiens; identical to SEQ ID NO: 345381
  chr11:19798519-19799436
  hyper

SEQ ID NO: 372674 - DNA, 66 bp, Homo sapiens; identical to SEQ ID NO: 287911
  chr11:20153468-20153534
  hyper

SEQ ID NO: 372675 - DNA, 77 bp, Homo sapiens
  chr11:20179003-20179080
  hyper
cacggaaacagagaaaacagcccccacaatagcctgtttcgtttttccattcagtggacttagggaaacaaacctgc

SEQ ID NO: 372676 - DNA, 86 bp, Homo sapiens; identical to SEQ ID NO: 351168
  chr11:20230312-20230398
  hyper

SEQ ID NO: 372677 - DNA, 53 bp, Homo sapiens; identical to SEQ ID NO: 351169
  chr11:20230510-20230563
  hyper

SEQ ID NO: 372678 - DNA, 196 bp, Homo sapiens
  chr11:20385084-20385280
  hyper
cgcctgggtgagctgagcccagcaggtgagggaaaacgcgggaagagggtcttgcagattccaaacttaggaagggtcgcggctccgcgcacgtgctctcggggtcaccttccccgcgcctgtgagggtgccaggagttcgtctccaggtcccgcccctgtgggcggggcgaggcagcgtcgccgcgaggccaccc

SEQ ID NO: 372679 - DNA, 237 bp, Homo sapiens; identical to SEQ ID NO: 287919
  chr11:20385481-20385718
  hyper

SEQ ID NO: 372680 - DNA, 38 bp, Homo sapiens; identical to SEQ ID NO: 351170
  chr11:20619974-20620012
  hyper

SEQ ID NO: 372681 - DNA, 229 bp, Homo sapiens
  chr11:22214131-22214360
  hyper
cgagaccaaaagtaactcccaactgggagaggggttctctccgagtggcacgcatgagcggatcgatgaagacccggccaaccggctgagggagcatcgggaccccctttggggatcggaggaggaggattccgacaggagggaagcggcagccctggggaaccaggattcctggtcgtgggtggacccagtggaaaaggacgtgcgaagcctgtacagaatggagcag

SEQ ID NO: 372682 - DNA, 100 bp, Homo sapiens; identical to SEQ ID NO: 334203
  chr11:22647396-22647496
  hyper

SEQ ID NO: 372683 - DNA, 405 bp, Homo sapiens; identical to SEQ ID NO: 287938
  chr11:27740493-27740898
  hyper

SEQ ID NO: 372684 - DNA, 178 bp, Homo sapiens; identical to SEQ ID NO: 359802
  chr11:27740986-27741164
  hyper

SEQ ID NO: 372685 - DNA, 473 bp, Homo sapiens; identical to SEQ ID NO: 351172
  chr11:31818829-31819302
  hyper

SEQ ID NO: 372686 - DNA, 224 bp, Homo sapiens; identical to SEQ ID NO: 202495
  chr11:31821778-31822002
  hyper

SEQ ID NO: 372687 - DNA, 43 bp, Homo sapiens; identical to SEQ ID NO: 351174
  chr11:31823122-31823165
  hyper

SEQ ID NO: 372688 - DNA, 268 bp, Homo sapiens
  chr11:31833155-31833423
  hyper
ttctgggttgggggtcgcgcccccactccccctaagctggactcgggactcccagtcctcggagggtgcaagtttctgtgctgtcctttcttgccaactccaggacagcgtggcctgccgccccgcccccgcccgcccccaccccatcccagccggggccccaagacacagagcacagcggcggccgcaccccagcccacctggccccttggaagaagaggaaaggggcgggagcgtcactgggtcctggcagctccattccagctgc

SEQ ID NO: 372689 - DNA, 100 bp, Homo sapiens; identical to SEQ ID NO: 351175
  chr11:31842276-31842376
  hyper

SEQ ID NO: 372690 - DNA, 76 bp, Homo sapiens; identical to SEQ ID NO: 345383
  chr11:32449104-32449180
  hyper

SEQ ID NO: 372691 - DNA, 214 bp, Homo sapiens; identical to SEQ ID NO: 287961
  chr11:32455062-32455276
  hyper

SEQ ID NO: 372692 - DNA, 384 bp, Homo sapiens; identical to SEQ ID NO: 334231
  chr11:32851566-32851950
  hyper

SEQ ID NO: 372693 - DNA, 929 bp, Homo sapiens; identical to SEQ ID NO: 345384
  chr11:32915113-32916042
  hyper

SEQ ID NO: 372694 - DNA, 805 bp, Homo sapiens; identical to SEQ ID NO: 334233
  chr11:33397688-33398493
  hyper

SEQ ID NO: 372695 - DNA, 324 bp, Homo sapiens
  chr11:33890633-33890957
  hyper
gagcgtcccagtagcctggagtggcccgcagaggcgccgggccgacccctgtccctgccgcccgccgcccagtccctctcccagagcccccggaatcacccgggaggaaggaggagcccagcgctcggcacagggggccaagggcacgccgcgagcgcgcacctggagccccctcgcgggccgcccgggtccccccgacgctccgggacgcgaggccgtggacaccgggggtggcaggggcaggggggccgcacttactctgaagggtccaggctcttcctttcgatggccgaggacattggggagggaggcggggtgccgggc

SEQ ID NO: 372696 - DNA, 250 bp, Homo sapiens; identical to SEQ ID NO: 347147
  chr11:33891709-33891959
  hyper

SEQ ID NO: 372697 - DNA, 119 bp, Homo sapiens; identical to SEQ ID NO: 347148
  chr11:33892127-33892246
  hyper

SEQ ID NO: 372698 - DNA, 742 bp, Homo sapiens; identical to SEQ ID NO: 351182
  chr11:35160331-35161073
  hyper

SEQ ID NO: 372699 - DNA, 202 bp, Homo sapiens; identical to SEQ ID NO: 287979
  chr11:35439896-35440098
  hyper

SEQ ID NO: 372700 - DNA, 238 bp, Homo sapiens; identical to SEQ ID NO: 202513
  chr11:35440137-35440375
  hyper

SEQ ID NO: 372701 - DNA, 56 bp, Homo sapiens; identical to SEQ ID NO: 345385
  chr11:35547041-35547097
  hyper

SEQ ID NO: 372702 - DNA, 208 bp, Homo sapiens; identical to SEQ ID NO: 202515
  chr11:35547127-35547335
  hyper

SEQ ID NO: 372703 - DNA, 623 bp, Homo sapiens; identical to SEQ ID NO: 359818
  chr11:35639806-35640429
  hyper

SEQ ID NO: 372704 - DNA, 170 bp, Homo sapiens
  chr11:40314522-40314692
  hyper
cgaagaatttggggagcaacttcccccccactctccatccttccggccggccccttcgccaaagatctgattagatttctcatcacaacccagtgcgcaattgaatttttgatttcagccacccggccagccaccttcccctctcccctccaaactccggttatatcctg

SEQ ID NO: 372705 - DNA, 362 bp, Homo sapiens
  chr11:40314923-40315285
  hyper
aggtgttgcagaactccgcggtcggggccgggatcacgggggagacgcaggatgcggtccctcgccggtggcccctgccagcccccgggtccccttctcctccatcagccggtagtggctccgggagcgccgaggtgatggaagttgagactggggcttttatttcaaatggggagggcgaagtgaggggacagacagggtggtaggcaaattaaaaaaaacacacacgaaaaaagaaagaaaaaaagaaaaagaagaaaaaaagaaaaaggaagaaaacgggtaaaaaaaaaattccctaatcgctggctcttctcatccttctcaaatgcaactgcagctttgatctcatttccagctgc

SEQ ID NO: 372706 - DNA, 242 bp, Homo sapiens; identical to SEQ ID NO: 287998
  chr11:43596608-43596850
  hyper

SEQ ID NO: 372707 - DNA, 180 bp, Homo sapiens
  chr11:43597312-43597492
  hyper
gagactcaaggcggctgctccgcgctgccttcatgagtctattttctccagccccctcgtagtgaattactagaacgcaaaacacacacacagacacacatatgcagctttcaaaatatacatttccaaaggcggtgtgttgcaaacacaacgcgattttgcagagcgtgggtgggaaac

SEQ ID NO: 372708 - DNA, 55 bp, Homo sapiens; identical to SEQ ID NO: 347151
  chr11:43599961-43600016
  hyper

SEQ ID NO: 372709 - DNA, 238 bp, Homo sapiens; identical to SEQ ID NO: 202528
  chr11:43600215-43600453
  hyper

SEQ ID NO: 372710 - DNA, 230 bp, Homo sapiens; identical to SEQ ID NO: 288003
  chr11:43964015-43964245
  hyper

SEQ ID NO: 372711 - DNA, 61 bp, Homo sapiens; identical to SEQ ID NO: 359822
  chr11:43965299-43965360
  hyper

SEQ ID NO: 372712 - DNA, 41 bp, Homo sapiens; identical to SEQ ID NO: 359823
  chr11:43965463-43965504
  hyper

SEQ ID NO: 372713 - DNA, 141 bp, Homo sapiens; identical to SEQ ID NO: 359824
  chr11:43966061-43966202
  hyper

SEQ ID NO: 372714 - DNA, 174 bp, Homo sapiens; identical to SEQ ID NO: 351190
  chr11:44087366-44087540
  hyper

SEQ ID NO: 372715 - DNA, 51 bp, Homo sapiens; identical to SEQ ID NO: 345388
  chr11:44337578-44337629
  hyper

SEQ ID NO: 372716 - DNA, 230 bp, Homo sapiens; identical to SEQ ID NO: 359827
  chr11:44338552-44338782
  hyper

SEQ ID NO: 372717 - DNA, 117 bp, Homo sapiens
  chr11:44748073-44748190
  hyper
cggcagcgggaagcccaggagcccgatcaggaccgaggatctcaccccaacccctgcgtttgggccccggggtcagctgaaagttcccctggaataaacacttcgggtccagcatgc

SEQ ID NO: 372718 - DNA, 256 bp, Homo sapiens; identical to SEQ ID NO: 202532
  chr11:44748419-44748675
  hyper

SEQ ID NO: 372719 - DNA, 313 bp, Homo sapiens; identical to SEQ ID NO: 202533
  chr11:44748871-44749184
  hyper

SEQ ID NO: 372720 - DNA, 516 bp, Homo sapiens; identical to SEQ ID NO: 351193
  chr11:44749218-44749734
  hyper

SEQ ID NO: 372721 - DNA, 59 bp, Homo sapiens; identical to SEQ ID NO: 334253
  chr11:45392759-45392818
  hyper

SEQ ID NO: 372722 - DNA, 585 bp, Homo sapiens
  chr11:46299162-46299747
  hyper
cgtggcgccttggccagctgggctagccagccaggggttcccggtttcacagagaggaaagtgacagaagacgtgcggagggagacgcagagacagaggagaggccggcagccacccagtctcgggggagcacttagctcccccgccccggctcccaccctgtccggggggctcctgaagccctcagccccaaccccgggctccccatggaagccagctgtgccccaggaggagcaggaggaggtggagtcggctgaatgcccacggtgcgcccggggcccctgagcccatcccgctcctagccgctgccctaaggcccccgcgcgccccgcgccccccacccggggccgcgccgcctccgtccgcccctcccccggggcttcgccccggacctgccccccgcccgtttgccagcgctcaggcaggagctctggactgggcgcgccgccgccctggagtgagggaagcccagtggaagggggtcccgggagccggctgcgatggacgccgtcttggaacccttcccggccgacaggctgttccccggatccagcttcctggacttgggggatctgaacgagtcgg

SEQ ID NO: 372723 - DNA, 346 bp, Homo sapiens; identical to SEQ ID NO: 334256
  chr11:46867730-46868076
  hyper

SEQ ID NO: 372724 - DNA, 86 bp, Homo sapiens; identical to SEQ ID NO: 345389
  chr11:47208495-47208581
  hyper

SEQ ID NO: 372725 - DNA, 51 bp, Homo sapiens; identical to SEQ ID NO: 359833
  chr11:57056851-57056902
  hyper

SEQ ID NO: 372726 - DNA, 77 bp, Homo sapiens; identical to SEQ ID NO: 351195
  chr11:57194101-57194178
  hyper

SEQ ID NO: 372727 - DNA, 431 bp, Homo sapiens; identical to SEQ ID NO: 202547
  chr11:57243735-57244166
  hyper

SEQ ID NO: 372728 - DNA, 50 bp, Homo sapiens; identical to SEQ ID NO: 334262
  chr11:57334786-57334836
  hyper

SEQ ID NO: 372729 - DNA, 188 bp, Homo sapiens; identical to SEQ ID NO: 345390
  chr11:58940419-58940607
  hyper

SEQ ID NO: 372730 - DNA, 200 bp, Homo sapiens; identical to SEQ ID NO: 202554
  chr11:58940666-58940866
  hyper

SEQ ID NO: 372731 - DNA, 55 bp, Homo sapiens; identical to SEQ ID NO: 345392
  chr11:58940867-58940922
  hyper

SEQ ID NO: 372732 - DNA, 42 bp, Homo sapiens; identical to SEQ ID NO: 359839
  chr11:59323829-59323871
  hyper

SEQ ID NO: 372733 - DNA, 60 bp, Homo sapiens; identical to SEQ ID NO: 288078
  chr11:59323899-59323959
  hyper

SEQ ID NO: 372734 - DNA, 187 bp, Homo sapiens; identical to SEQ ID NO: 359841
  chr11:59323987-59324174
  hyper

SEQ ID NO: 372735 - DNA, 190 bp, Homo sapiens; identical to SEQ ID NO: 347158
  chr11:59333673-59333863
  hyper

SEQ ID NO: 372736 - DNA, 230 bp, Homo sapiens; identical to SEQ ID NO: 351201
  chr11:61062458-61062688
  hyper

SEQ ID NO: 372737 - DNA, 236 bp, Homo sapiens; identical to SEQ ID NO: 351202
  chr11:61275825-61276061
  hyper

SEQ ID NO: 372738 - DNA, 315 bp, Homo sapiens; identical to SEQ ID NO: 202562
  chr11:61276101-61276416
  hyper

SEQ ID NO: 372739 - DNA, 604 bp, Homo sapiens; identical to SEQ ID NO: 347160
  chr11:61347974-61348578
  hyper

SEQ ID NO: 372740 - DNA, 217 bp, Homo sapiens; identical to SEQ ID NO: 359847
  chr11:61355118-61355335
  hyper

SEQ ID NO: 372741 - DNA, 259 bp, Homo sapiens; identical to SEQ ID NO: 202565
  chr11:61595492-61595751
  hyper

SEQ ID NO: 372742 - DNA, 34 bp, Homo sapiens; identical to SEQ ID NO: 359849
  chr11:61596695-61596729
  hyper

SEQ ID NO: 372743 - DNA, 176 bp, Homo sapiens; identical to SEQ ID NO: 334274
  chr11:61659371-61659547
  hyper

SEQ ID NO: 372744 - DNA, 205 bp, Homo sapiens; identical to SEQ ID NO: 288109
  chr11:61684832-61685037
  hyper

SEQ ID NO: 372745 - DNA, 128 bp, Homo sapiens; identical to SEQ ID NO: 359852
  chr11:61685087-61685215
  hyper

SEQ ID NO: 372746 - DNA, 213 bp, Homo sapiens; identical to SEQ ID NO: 351207
  chr11:62369471-62369684
  hyper

SEQ ID NO: 372747 - DNA, 428 bp, Homo sapiens; identical to SEQ ID NO: 334279
  chr11:62389464-62389892
  hyper

SEQ ID NO: 372748 - DNA, 231 bp, Homo sapiens; identical to SEQ ID NO: 334280
  chr11:63705659-63705890
  hyper

SEQ ID NO: 372749 - DNA, 199 bp, Homo sapiens; identical to SEQ ID NO: 334282
  chr11:63828227-63828426
  hyper

SEQ ID NO: 372750 - DNA, 203 bp, Homo sapiens; identical to SEQ ID NO: 334283
  chr11:64015094-64015297
  hyper

SEQ ID NO: 372751 - DNA, 103 bp, Homo sapiens; identical to SEQ ID NO: 351211
  chr11:64039104-64039207
  hyper

SEQ ID NO: 372752 - DNA, 82 bp, Homo sapiens; identical to SEQ ID NO: 351212
  chr11:64064539-64064621
  hyper

SEQ ID NO: 372753 - DNA, 369 bp, Homo sapiens; identical to SEQ ID NO: 351213
  chr11:64064662-64065031
  hyper

SEQ ID NO: 372754 - DNA, 625 bp, Homo sapiens
  chr11:64067396-64068021
  hyper
cgctgccccgggcgggtgtatccctcacagcacctcacgactgtgcctcaaagcctgcatcaataaatgaaaacggtctgcaccgctgcgggcgtgacgctcccggacgcgagtgggtgtggaattgctttcctcgggccaccgtgggggcacctctggcctcccgtgacccccaggccgagggtccccgggcacccaggtcggtcaagtctcggccctctcaggcccgcgtctctgcctggaggagactgtgtagggtccggcgtggggatcagccaggatgggctgcgcgtctccagcctctgcacacacattggcgggtggggtgcagggagggagaggcaggggagagagaatggcatctcgcgtggagggctgtcgtttgaactctcccagcgcgagagaccctgccccgcccccttcctggagcgttgactcccttctcgtctcgaggcctgtggcgtctgggtccgttggggcagaaccatggaggaaaagccttcgaaagtaagacgtctccctaggccccttaccctgtccgctccaacccacccttggtccgactcgggcccctggcgctatttcttactcagccttggctgcccgcagcccccacccaacccca

SEQ ID NO: 372755 - DNA, 679 bp, Homo sapiens; identical to SEQ ID NO: 359862
  chr11:64068047-64068726
  hyper

SEQ ID NO: 372756 - DNA, 86 bp, Homo sapiens; identical to SEQ ID NO: 351214
  chr11:64509676-64509762
  hyper

SEQ ID NO: 372757 - DNA, 502 bp, Homo sapiens; identical to SEQ ID NO: 351215
  chr11:64509801-64510303
  hyper

SEQ ID NO: 372758 - DNA, 549 bp, Homo sapiens; identical to SEQ ID NO: 345393
  chr11:64512349-64512898
  hyper

SEQ ID NO: 372759 - DNA, 61 bp, Homo sapiens; identical to SEQ ID NO: 345394
  chr11:64513748-64513809
  hyper

SEQ ID NO: 372760 - DNA, 103 bp, Homo sapiens; identical to SEQ ID NO: 334290
  chr11:64655582-64655685
  hyper

SEQ ID NO: 372761 - DNA, 198 bp, Homo sapiens; identical to SEQ ID NO: 351218
  chr11:65185728-65185926
  hyper

SEQ ID NO: 372762 - DNA, 190 bp, Homo sapiens; identical to SEQ ID NO: 359869
  chr11:65192973-65193163
  hyper

SEQ ID NO: 372763 - DNA, 33 bp, Homo sapiens; identical to SEQ ID NO: 359870
  chr11:65307510-65307543
  hyper

SEQ ID NO: 372764 - DNA, 88 bp, Homo sapiens
  chr11:65420289-65420377
  hyper
cgctgaattttgggacgcgtcccgctgacgataactccttttcccctgctattgtcctcccgcgacggtgcgaagcccaaacgaagac

SEQ ID NO: 372765 - DNA, 35 bp, Homo sapiens; identical to SEQ ID NO: 347164
  chr11:65553778-65553813
  hyper

SEQ ID NO: 372766 - DNA, 227 bp, Homo sapiens; identical to SEQ ID NO: 202605
  chr11:65554410-65554637
  hyper

SEQ ID NO: 372767 - DNA, 1028 bp, Homo sapiens; identical to SEQ ID NO: 351221
  chr11:65554723-65555751
  hyper

SEQ ID NO: 372768 - DNA, 262 bp, Homo sapiens; identical to SEQ ID NO: 334296
  chr11:65582723-65582985
  hyper

SEQ ID NO: 372769 - DNA, 48 bp, Homo sapiens; identical to SEQ ID NO: 351222
  chr11:65779604-65779652
  hyper

SEQ ID NO: 372770 - DNA, 288 bp, Homo sapiens; identical to SEQ ID NO: 351223
  chr11:66045216-66045504
  hyper

SEQ ID NO: 372771 - DNA, 1101 bp, Homo sapiens; identical to SEQ ID NO: 347167
  chr11:66079395-66080496
  hyper

SEQ ID NO: 372772 - DNA, 383 bp, Homo sapiens; identical to SEQ ID NO: 334300
  chr11:66176338-66176721
  hyper

SEQ ID NO: 372773 - DNA, 329 bp, Homo sapiens; identical to SEQ ID NO: 202615
  chr11:66187467-66187796
  hyper

SEQ ID NO: 372774 - DNA, 269 bp, Homo sapiens; identical to SEQ ID NO: 202616
  chr11:66187826-66188095
  hyper

SEQ ID NO: 372775 - DNA, 162 bp, Homo sapiens; identical to SEQ ID NO: 351227
  chr11:66189149-66189311
  hyper

SEQ ID NO: 372776 - DNA, 223 bp, Homo sapiens; identical to SEQ ID NO: 347170
  chr11:66725377-66725600
  hyper

SEQ ID NO: 372777 - DNA, 308 bp, Homo sapiens; identical to SEQ ID NO: 288243
  chr11:66725637-66725945
  hyper

SEQ ID NO: 372778 - DNA, 112 bp, Homo sapiens; identical to SEQ ID NO: 351230
  chr11:66886029-66886141
  hyper

SEQ ID NO: 372779 - DNA, 119 bp, Homo sapiens; identical to SEQ ID NO: 202630
  chr11:67232283-67232402
  hyper

SEQ ID NO: 372780 - DNA, 127 bp, Homo sapiens; identical to SEQ ID NO: 345397
  chr11:67232464-67232591
  hyper

SEQ ID NO: 372781 - DNA, 132 bp, Homo sapiens; identical to SEQ ID NO: 359886
  chr11:67895663-67895795
  hyper

SEQ ID NO: 372782 - DNA, 179 bp, Homo sapiens; identical to SEQ ID NO: 334308
  chr11:68080751-68080930
  hyper

SEQ ID NO: 372783 - DNA, 269 bp, Homo sapiens; identical to SEQ ID NO: 351233
  chr11:68095765-68096034
  hyper

SEQ ID NO: 372784 - DNA, 605 bp, Homo sapiens; identical to SEQ ID NO: 359888
  chr11:68606653-68607258
  hyper

SEQ ID NO: 372785 - DNA, 156 bp, Homo sapiens; identical to SEQ ID NO: 351234
  chr11:68611259-68611415
  hyper

SEQ ID NO: 372786 - DNA, 231 bp, Homo sapiens; identical to SEQ ID NO: 359890
  chr11:69451967-69452198
  hyper

SEQ ID NO: 372787 - DNA, 368 bp, Homo sapiens; identical to SEQ ID NO: 288280
  chr11:69452289-69452657
  hyper

SEQ ID NO: 372788 - DNA, 57 bp, Homo sapiens; identical to SEQ ID NO: 359892
  chr11:69516911-69516968
  hyper

SEQ ID NO: 372789 - DNA, 258 bp, Homo sapiens; identical to SEQ ID NO: 288285
  chr11:69517461-69517719
  hyper

SEQ ID NO: 372790 - DNA, 229 bp, Homo sapiens; identical to SEQ ID NO: 288287
  chr11:69589517-69589746
  hyper

SEQ ID NO: 372791 - DNA, 74 bp, Homo sapiens; identical to SEQ ID NO: 359894
  chr11:71159315-71159389
  hyper

SEQ ID NO: 372792 - DNA, 397 bp, Homo sapiens; identical to SEQ ID NO: 288299
  chr11:71951738-71952135
  hyper

SEQ ID NO: 372793 - DNA, 96 bp, Homo sapiens; identical to SEQ ID NO: 334322
  chr11:73358566-73358662
  hyper

SEQ ID NO: 372794 - DNA, 844 bp, Homo sapiens; identical to SEQ ID NO: 345398
  chr11:73693765-73694609
  hyper

SEQ ID NO: 372795 - DNA, 211 bp, Homo sapiens; identical to SEQ ID NO: 359898
  chr11:74022468-74022679
  hyper

SEQ ID NO: 372796 - DNA, 137 bp, Homo sapiens; identical to SEQ ID NO: 359899
  chr11:74022716-74022853
  hyper

SEQ ID NO: 372797 - DNA, 161 bp, Homo sapiens; identical to SEQ ID NO: 359900
  chr11:74178245-74178406
  hyper

SEQ ID NO: 372798 - DNA, 120 bp, Homo sapiens; identical to SEQ ID NO: 288321
  chr11:74178470-74178590
  hyper

SEQ ID NO: 372799 - DNA, 324 bp, Homo sapiens; identical to SEQ ID NO: 202663
  chr11:74951799-74952123
  hyper

SEQ ID NO: 372800 - DNA, 220 bp, Homo sapiens; identical to SEQ ID NO: 202665
  chr11:75140982-75141202
  hyper

SEQ ID NO: 372801 - DNA, 103 bp, Homo sapiens; identical to SEQ ID NO: 359903
  chr11:75380110-75380213
  hyper

SEQ ID NO: 372802 - DNA, 75 bp, Homo sapiens; identical to SEQ ID NO: 288337
  chr11:76033216-76033291
  hyper

SEQ ID NO: 372803 - DNA, 509 bp, Homo sapiens; identical to SEQ ID NO: 345399
  chr11:76381512-76382021
  hyper

SEQ ID NO: 372804 - DNA, 1276 bp, Homo sapiens
  chr11:77184258-77185534
  hyper
cggactcggtcccggaccggtactcgtgtggcctcccggctccagcctggcctggccccgccccgccccttccctctcccaggtctctcgaatcgcccggcgtctgagacccgcgaccccgccggtacgcgcacagggggcctttgttggcccgacgggagcgggcctcgcggggcgccgcccgcctcaccttacctggcgcctcctcccgcccaggcgcccggccccgcaacgcgaaataaatgggcccagacccccactccacccgtccccacccccgcgccccagccctggcagcccgggacgcgaggggtactgggcggtaggcccgctctcaccttccgcgctcgctcagctcctctcggctcctcctcctcctcccggcggtgggtgccgcctagccgggagtgagggcgcgagtgtgcgcgagctaccgcttcactttctccctcctgccgccgccgccgcgctgcccgtggcggggctcccctcaggacaggggaactgcgagggaagggatgatgggggggcgggagggagcgaggcgacgcgggcggggggggaaggggggactgaggggcgaggtgcgaagggctcagatggcctctgaggcaggaggtggtaactggatgcggagaccaggttcctcgagggggctcacgaaagcgcggggctccgtggaaaagggaatgagagtccaagggggaaggcgtctgtgggggaggactgcagagcctgtgagggaagcgcgatgggcgagcgagggggcgggagcgtgtgggggaagccgtgagggggcgtctactgtgcagccaccaccttcggctccggctgcagccgcgggagggcagcctcccccgcccacagccgcgctattgtacgccgcccggcaggcctgaccgcctagttcactggctcccctactcctcctcctcccgcctcctcctcccctctgccctttccccttctccccctccccctcccccactccccctccccggcgcggcggcggcggctgcggctccggtggagccgtgcccgccccgcctcccgcaggtgagagggggcggggagggcctgaccgacccgtgggagcgaggccaaaccctggcccgcatgagggcgaacgcctgggattacgtcatcggcgcgtgacgccagaggctggggaatcacccgcttgctgcgtgacgtcatcgcgtcgcgtcactgttctcggtccgctgtccgtggcgggttgtttccgtgcagcctttctatcagacaattttgggac

SEQ ID NO: 372805 - DNA, 338 bp, Homo sapiens; identical to SEQ ID NO: 288354
  chr11:79150336-79150674
  hyper

SEQ ID NO: 372806 - DNA, 501 bp, Homo sapiens; identical to SEQ ID NO: 334338
  chr11:84148462-84148963
  hyper

SEQ ID NO: 372807 - DNA, 37 bp, Homo sapiens; identical to SEQ ID NO: 359908
  chr11:84431917-84431954
  hyper

SEQ ID NO: 372808 - DNA, 55 bp, Homo sapiens; identical to SEQ ID NO: 359909
  chr11:84432270-84432325
  hyper

SEQ ID NO: 372809 - DNA, 48 bp, Homo sapiens; identical to SEQ ID NO: 351239
  chr11:86085693-86085741
  hyper

SEQ ID NO: 372810 - DNA, 239 bp, Homo sapiens; identical to SEQ ID NO: 351240
  chr11:86382607-86382846
  hyper

SEQ ID NO: 372811 - DNA, 62 bp, Homo sapiens; identical to SEQ ID NO: 202679
  chr11:86383105-86383167
  hyper

SEQ ID NO: 372812 - DNA, 69 bp, Homo sapiens
  chr11:89224244-89224313
  hyper
cgaattaagacaaaacttccacttccagcttcccacccgtgcacgctcagagaatgaatcaaaatcact

SEQ ID NO: 372813 - DNA, 245 bp, Homo sapiens
  chr11:91959654-91959899
  hyper
cgggatgagaggaacaggggtgctcccggggtgtgggtgtgctggcggtgacatcctgaggctgcagctcgctggaataatgggctcaaaccaggcggtggagaggggtccccggaatggacgtcgggggcggggaggctgcggagaccctgcgaggtctccgtgaaggactaggaggggctcccgggagggagtggcgcctgcggcccggagcgtgggcggccggtggctctggcacgcggaat

SEQ ID NO: 372814 - DNA, 255 bp, Homo sapiens; identical to SEQ ID NO: 202689
  chr11:91960114-91960369
  hyper

SEQ ID NO: 372815 - DNA, 675 bp, Homo sapiens; identical to SEQ ID NO: 288384
  chr11:92930674-92931349
  hyper

SEQ ID NO: 372816 - DNA, 47 bp, Homo sapiens; identical to SEQ ID NO: 347178
  chr11:92931379-92931426
  hyper

SEQ ID NO: 372817 - DNA, 217 bp, Homo sapiens; identical to SEQ ID NO: 202694
  chr11:94474139-94474356
  hyper

SEQ ID NO: 372818 - DNA, 104 bp, Homo sapiens; identical to SEQ ID NO: 202695
  chr11:94474385-94474489
  hyper

SEQ ID NO: 372819 - DNA, 220 bp, Homo sapiens; identical to SEQ ID NO: 359917
  chr11:94474547-94474767
  hyper

SEQ ID NO: 372820 - DNA, 171 bp, Homo sapiens; identical to SEQ ID NO: 359918
  chr11:94501274-94501445
  hyper

SEQ ID NO: 372821 - DNA, 234 bp, Homo sapiens; identical to SEQ ID NO: 202698
  chr11:94502100-94502334
  hyper

SEQ ID NO: 372822 - DNA, 772 bp, Homo sapiens; identical to SEQ ID NO: 334350
  chr11:94963753-94964525
  hyper

SEQ ID NO: 372823 - DNA, 886 bp, Homo sapiens; identical to SEQ ID NO: 334351
  chr11:96122370-96123256
  hyper

SEQ ID NO: 372824 - DNA, 161 bp, Homo sapiens; identical to SEQ ID NO: 202702
  chr11:100999159-100999320
  hyper

SEQ ID NO: 372825 - DNA, 241 bp, Homo sapiens; identical to SEQ ID NO: 202703
  chr11:100999360-100999601
  hyper

SEQ ID NO: 372826 - DNA, 116 bp, Homo sapiens
  chr11:101452974-101453090
  hyper
cgaaagggcaccgcagcagggcttgaggctgggcagccctgacacagcacccatctatcaggagggtctgccaggcgcctatggggtggaatcctccctccaactaaagctgttta

SEQ ID NO: 372827 - DNA, 133 bp, Homo sapiens
  chr11:101453715-101453848
  hyper
cgtagcgatcctgtctcttgtagagcgcaggatgaaggggtctggagaaatcgaccacccatctaatcacctgcaatggtggtgttactatgcggtctcactctcgtgggcaaacatatccatgcgtacctac

SEQ ID NO: 372828 - DNA, 37 bp, Homo sapiens; identical to SEQ ID NO: 359924
  chr11:101918139-101918176
  hyper

SEQ ID NO: 372829 - DNA, 803 bp, Homo sapiens; identical to SEQ ID NO: 351248
  chr11:101980831-101981634
  hyper

SEQ ID NO: 372830 - DNA, 612 bp, Homo sapiens; identical to SEQ ID NO: 351249
  chr11:101981964-101982576
  hyper

SEQ ID NO: 372831 - DNA, 747 bp, Homo sapiens; identical to SEQ ID NO: 351250
  chr11:102962175-102962922
  hyper

SEQ ID NO: 372832 - DNA, 99 bp, Homo sapiens; identical to SEQ ID NO: 351251
  chr11:102963062-102963161
  hyper

SEQ ID NO: 372833 - DNA, 226 bp, Homo sapiens; identical to SEQ ID NO: 288422
  chr11:106889091-106889317
  hyper

SEQ ID NO: 372834 - DNA, 168 bp, Homo sapiens; identical to SEQ ID NO: 351253
  chr11:107462735-107462903
  hyper

SEQ ID NO: 372835 - DNA, 823 bp, Homo sapiens; identical to SEQ ID NO: 351254
  chr11:110166935-110167758
  hyper

SEQ ID NO: 372836 - DNA, 456 bp, Homo sapiens; identical to SEQ ID NO: 359932
  chr11:111169516-111169972
  hyper

SEQ ID NO: 372837 - DNA, 290 bp, Homo sapiens; identical to SEQ ID NO: 288438
  chr11:111412304-111412594
  hyper

SEQ ID NO: 372838 - DNA, 48 bp, Homo sapiens
  chr11:111412624-111412672
  hyper
gagaagagaaggacacttcctgaaggcaggagaaccagataggcccgc

SEQ ID NO: 372839 - DNA, 501 bp, Homo sapiens; identical to SEQ ID NO: 288443
  chr11:113345738-113346239
  hyper

SEQ ID NO: 372840 - DNA, 114 bp, Homo sapiens
  chr11:113746570-113746684
  hyper
cgttcctgagtcttctccgctctctgccctcaaaacctcatttgtaggactgacctccggctccaccctccccacgggcgagttaaaactgttcccccgccgtgggaaactgcc

SEQ ID NO: 372841 - DNA, 44 bp, Homo sapiens; identical to SEQ ID NO: 359934
  chr11:113930323-113930367
  hyper

SEQ ID NO: 372842 - DNA, 229 bp, Homo sapiens; identical to SEQ ID NO: 288447
  chr11:113930801-113931030
  hyper

SEQ ID NO: 372843 - DNA, 232 bp, Homo sapiens; identical to SEQ ID NO: 288448
  chr11:113931067-113931299
  hyper

SEQ ID NO: 372844 - DNA, 238 bp, Homo sapiens; identical to SEQ ID NO: 202728
  chr11:115374753-115374991
  hyper

SEQ ID NO: 372845 - DNA, 398 bp, Homo sapiens; identical to SEQ ID NO: 202729
  chr11:115375434-115375832
  hyper

SEQ ID NO: 372846 - DNA, 301 bp, Homo sapiens; identical to SEQ ID NO: 347181
  chr11:115375894-115376195
  hyper

SEQ ID NO: 372847 - DNA, 75 bp, Homo sapiens
  chr11:117746539-117746614
  hyper
ccagccaccacttgtaagagccagaagccagcgctgggagctccaggctgcacacccaactctccacggaagccc

SEQ ID NO: 372848 - DNA, 159 bp, Homo sapiens; identical to SEQ ID NO: 359940
  chr11:118662849-118663008
  hyper

SEQ ID NO: 372849 - DNA, 66 bp, Homo sapiens; identical to SEQ ID NO: 334374
  chr11:119145611-119145677
  hyper

SEQ ID NO: 372850 - DNA, 128 bp, Homo sapiens; identical to SEQ ID NO: 359942
  chr11:119234947-119235075
  hyper

SEQ ID NO: 372851 - DNA, 87 bp, Homo sapiens; identical to SEQ ID NO: 351258
  chr11:119293218-119293305
  hyper

SEQ ID NO: 372852 - DNA, 62 bp, Homo sapiens; identical to SEQ ID NO: 202750
  chr11:119294072-119294134
  hyper

SEQ ID NO: 372853 - DNA, 752 bp, Homo sapiens; identical to SEQ ID NO: 359945
  chr11:119455153-119455905
  hyper

SEQ ID NO: 372854 - DNA, 283 bp, Homo sapiens; identical to SEQ ID NO: 334379
  chr11:119587853-119588136
  hyper

SEQ ID NO: 372855 - DNA, 301 bp, Homo sapiens; identical to SEQ ID NO: 359947
  chr11:119599011-119599312
  hyper

SEQ ID NO: 372856 - DNA, 91 bp, Homo sapiens; identical to SEQ ID NO: 359948
  chr11:119612432-119612523
  hyper

SEQ ID NO: 372857 - DNA, 223 bp, Homo sapiens; identical to SEQ ID NO: 351261
  chr11:120110626-120110849
  hyper

SEQ ID NO: 372858 - DNA, 155 bp, Homo sapiens; identical to SEQ ID NO: 351262
  chr11:120110967-120111122
  hyper

SEQ ID NO: 372859 - DNA, 159 bp, Homo sapiens; identical to SEQ ID NO: 351263
  chr11:120435049-120435208
  hyper

SEQ ID NO: 372860 - DNA, 166 bp, Homo sapiens; identical to SEQ ID NO: 345400
  chr11:120894634-120894800
  hyper

SEQ ID NO: 372861 - DNA, 85 bp, Homo sapiens; identical to SEQ ID NO: 345401
  chr11:120895026-120895111
  hyper

SEQ ID NO: 372862 - DNA, 53 bp, Homo sapiens; identical to SEQ ID NO: 359954
  chr11:121593326-121593379
  hyper

SEQ ID NO: 372863 - DNA, 223 bp, Homo sapiens; identical to SEQ ID NO: 359955
  chr11:121593636-121593859
  hyper

SEQ ID NO: 372864 - DNA, 35 bp, Homo sapiens; identical to SEQ ID NO: 202770
  chr11:123173029-123173064
  hyper

SEQ ID NO: 372865 - DNA, 417 bp, Homo sapiens; identical to SEQ ID NO: 288544
  chr11:123524977-123525394
  hyper

SEQ ID NO: 372866 - DNA, 137 bp, Homo sapiens; identical to SEQ ID NO: 359958
  chr11:123525473-123525610
  hyper

SEQ ID NO: 372867 - DNA, 191 bp, Homo sapiens; identical to SEQ ID NO: 334392
  chr11:124616924-124617115
  hyper

SEQ ID NO: 372868 - DNA, 239 bp, Homo sapiens
  chr11:124630133-124630372
  hyper
cggaagtcaccaactggtccgtttttttcggtcccagggtccacggagccactgggagagaaaaggagtctggttgggtctgatcgaaggacactgggacagcccaagaaagggacccttccggcccacagccctctccgaggccagagtgagggagccggcaggggccgaaggagagcgaaatgggcccgctccccggggctatttttagtctccctctttctctgagaaactccccc

SEQ ID NO: 372869 - DNA, 141 bp, Homo sapiens
  chr11:124630410-124630551
  hyper
cgccgaggagcctactgagccggagagcctcctccagagcccagaagagcggagccgggcgcctgcacgttgcaccggggtcaccagtgccatttaaccctcgagtggctggcgggaactgggcaaccccccagggggacc

SEQ ID NO: 372870 - DNA, 71 bp, Homo sapiens; identical to SEQ ID NO: 351268
  chr11:124631910-124631981
  hyper

SEQ ID NO: 372871 - DNA, 617 bp, Homo sapiens; identical to SEQ ID NO: 288557
  chr11:124932779-124933396
  hyper

SEQ ID NO: 372872 - DNA, 365 bp, Homo sapiens; identical to SEQ ID NO: 359962
  chr11:125133244-125133609
  hyper

SEQ ID NO: 372873 - DNA, 135 bp, Homo sapiens; identical to SEQ ID NO: 345403
  chr11:128391758-128391893
  hyper

SEQ ID NO: 372874 - DNA, 623 bp, Homo sapiens; identical to SEQ ID NO: 345404
  chr11:128392116-128392739
  hyper

SEQ ID NO: 372875 - DNA, 128 bp, Homo sapiens; identical to SEQ ID NO: 351271
  chr11:128562635-128562763
  hyper

SEQ ID NO: 372876 - DNA, 763 bp, Homo sapiens; identical to SEQ ID NO: 334404
  chr11:128760451-128761214
  hyper

SEQ ID NO: 372877 - DNA, 543 bp, Homo sapiens; identical to SEQ ID NO: 345405
  chr11:129148497-129149040
  hyper

SEQ ID NO: 372878 - DNA, 820 bp, Homo sapiens; identical to SEQ ID NO: 345406
  chr11:129149096-129149916
  hyper

SEQ ID NO: 372879 - DNA, 39 bp, Homo sapiens; identical to SEQ ID NO: 334408
  chr11:130083134-130083173
  hyper

SEQ ID NO: 372880 - DNA, 245 bp, Homo sapiens; identical to SEQ ID NO: 334409
  chr11:130183478-130183723
  hyper

SEQ ID NO: 372881 - DNA, 160 bp, Homo sapiens
  chr11:131564801-131564961
  hyper
cgctcagcgccctcgcagccggaatggggcctgggaagggaggagccccagcagaggggcagtcggagagccatgaaattgcgacctgctgccaccagagggcagtgttggacgggctgggaggagcgccgccgccgccgggagggtgcaggagagagct

SEQ ID NO: 372882 - DNA, 237 bp, Homo sapiens; identical to SEQ ID NO: 288599
  chr11:131781335-131781572
  hyper

SEQ ID NO: 372883 - DNA, 145 bp, Homo sapiens
  chr11:132814249-132814394
  hyper
cggtgtgcgtgtccatcgcgctgcgaacggctccccgcccagccaagtccagccctgacggcgcgctgtcctgggcccgcgcagaggtggagtgcacccacctccgaggacccacctcggaaacgcccgtgcccctccactggac

SEQ ID NO: 372884 - DNA, 76 bp, Homo sapiens
  chr11:133402290-133402366
  hyper
ctgtgctgaattctgagcaggtttaaatccaatgtttgcaaagggagggagagagcagaagagagagagagcgcgc

SEQ ID NO: 372885 - DNA, 217 bp, Homo sapiens; identical to SEQ ID NO: 334418
  chr11:133920473-133920690
  hyper

SEQ ID NO: 372886 - DNA, 161 bp, Homo sapiens; identical to SEQ ID NO: 345407
  chr11:133939437-133939598
  hyper

SEQ ID NO: 372887 - DNA, 241 bp, Homo sapiens; identical to SEQ ID NO: 202804
  chr11:134201549-134201790
  hyper

SEQ ID NO: 372888 - DNA, 236 bp, Homo sapiens; identical to SEQ ID NO: 345409
  chr11:134202154-134202390
  hyper

SEQ ID NO: 372889 - DNA, 196 bp, Homo sapiens; identical to SEQ ID NO: 334422
  chr11:134230275-134230471
  hyper

SEQ ID NO: 372890 - DNA, 73 bp, Homo sapiens; identical to SEQ ID NO: 351280
  chr11:134281810-134281883
  hyper

SEQ ID NO: 372891 - DNA, 133 bp, Homo sapiens; identical to SEQ ID NO: 351281
  chr12:708894-709027
  hyper

SEQ ID NO: 372892 - DNA, 182 bp, Homo sapiens; identical to SEQ ID NO: 351282
  chr12:709062-709244
  hyper

SEQ ID NO: 372893 - DNA, 235 bp, Homo sapiens; identical to SEQ ID NO: 351283
  chr12:1639655-1639890
  hyper

SEQ ID NO: 372894 - DNA, 344 bp, Homo sapiens; identical to SEQ ID NO: 288628
  chr12:1639977-1640321
  hyper

SEQ ID NO: 372895 - DNA, 273 bp, Homo sapiens; identical to SEQ ID NO: 351285
  chr12:1640476-1640749
  hyper

SEQ ID NO: 372896 - DNA, 541 bp, Homo sapiens
  chr12:1739048-1739589
  hyper
cgggctgggggccggctcacttccgagctggctctgcatgacaaaggggaaggagcaagtgtcttctttgatctgccccctgccggccccacacacctgcctgttggtgcccccgccccagccgaggcttcgagaaggaaaatcaaaagggggcttggggaagggctgtgtcccagctctcctggaccctgctcgggccactgtcctctcctggcggccccaggacaaaaatacttcccgggctgatgacccgaagcacccgccgccccctcccggggagcctggggacgccgacgcgcgagagtggcgcagtgagccggggcgcgcggggctgcgctcgtcaggtccggggccccggggaggccgctgggggcgcgggtcacgcccagacgggggccccggaggaccgcgggggagccgcaggggccgtgtgtcccgaggcgcaggctcgctctagcagcactgacctgctgcgggtcccagggcctggggacaggggctctcgggggcggatagaggaacaggcgtgggttacagcagg

SEQ ID NO: 372897 - DNA, 57 bp, Homo sapiens
  chr12:1739775-1739832
  hyper
ccgcctagggaggcaccacctcagccgccagagctttccgggcgggcggttcgcggc

SEQ ID NO: 372898 - DNA, 64 bp, Homo sapiens; identical to SEQ ID NO: 351286
  chr12:1762097-1762161
  hyper

SEQ ID NO: 372899 - DNA, 145 bp, Homo sapiens; identical to SEQ ID NO: 347192
  chr12:1905625-1905770
  hyper

SEQ ID NO: 372900 - DNA, 204 bp, Homo sapiens; identical to SEQ ID NO: 202815
  chr12:1905826-1906030
  hyper

SEQ ID NO: 372901 - DNA, 114 bp, Homo sapiens; identical to SEQ ID NO: 202816
  chr12:1906322-1906436
  hyper

SEQ ID NO: 372902 - DNA, 99 bp, Homo sapiens; identical to SEQ ID NO: 347195
  chr12:1906476-1906575
  hyper

SEQ ID NO: 372903 - DNA, 226 bp, Homo sapiens; identical to SEQ ID NO: 359987
  chr12:2144066-2144292
  hyper

SEQ ID NO: 372904 - DNA, 50 bp, Homo sapiens; identical to SEQ ID NO: 359988
  chr12:2144442-2144492
  hyper

SEQ ID NO: 372905 - DNA, 90 bp, Homo sapiens; identical to SEQ ID NO: 359989
  chr12:2161370-2161460
  hyper

SEQ ID NO: 372906 - DNA, 254 bp, Homo sapiens; identical to SEQ ID NO: 334433
  chr12:2692239-2692493
  hyper

SEQ ID NO: 372907 - DNA, 238 bp, Homo sapiens; identical to SEQ ID NO: 202823
  chr12:2800603-2800841
  hyper

SEQ ID NO: 372908 - DNA, 245 bp, Homo sapiens; identical to SEQ ID NO: 347197
  chr12:2801019-2801264
  hyper

SEQ ID NO: 372909 - DNA, 142 bp, Homo sapiens; identical to SEQ ID NO: 334436
  chr12:3053936-3054078
  hyper

SEQ ID NO: 372910 - DNA, 1049 bp, Homo sapiens; identical to SEQ ID NO: 359994
  chr12:3186011-3187060
  hyper

SEQ ID NO: 372911 - DNA, 234 bp, Homo sapiens; identical to SEQ ID NO: 202829
  chr12:3600534-3600768
  hyper

SEQ ID NO: 372912 - DNA, 396 bp, Homo sapiens; identical to SEQ ID NO: 288660
  chr12:3601625-3602021
  hyper

SEQ ID NO: 372913 - DNA, 41 bp, Homo sapiens; identical to SEQ ID NO: 351298
  chr12:3602961-3603002
  hyper

SEQ ID NO: 372914 - DNA, 152 bp, Homo sapiens; identical to SEQ ID NO: 359998
  chr12:4140253-4140405
  hyper

SEQ ID NO: 372915 - DNA, 125 bp, Homo sapiens; identical to SEQ ID NO: 347200
  chr12:4273746-4273871
  hyper

SEQ ID NO: 372916 - DNA, 85 bp, Homo sapiens; identical to SEQ ID NO: 345410
  chr12:4377809-4377894
  hyper

SEQ ID NO: 372917 - DNA, 244 bp, Homo sapiens; identical to SEQ ID NO: 202837
  chr12:4378558-4378802
  hyper

SEQ ID NO: 372918 - DNA, 246 bp, Homo sapiens; identical to SEQ ID NO: 202838
  chr12:4379920-4380166
  hyper

SEQ ID NO: 372919 - DNA, 284 bp, Homo sapiens; identical to SEQ ID NO: 202839
  chr12:4380196-4380480
  hyper

SEQ ID NO: 372920 - DNA, 400 bp, Homo sapiens; identical to SEQ ID NO: 288669
  chr12:4381033-4381433
  hyper

SEQ ID NO: 372921 - DNA, 167 bp, Homo sapiens; identical to SEQ ID NO: 347205
  chr12:4382439-4382606
  hyper

SEQ ID NO: 372922 - DNA, 50 bp, Homo sapiens; identical to SEQ ID NO: 345413
  chr12:4382915-4382965
  hyper

SEQ ID NO: 372923 - DNA, 209 bp, Homo sapiens; identical to SEQ ID NO: 202843
  chr12:4382999-4383208
  hyper

SEQ ID NO: 372924 - DNA, 254 bp, Homo sapiens; identical to SEQ ID NO: 202844
  chr12:4384059-4384313
  hyper

SEQ ID NO: 372925 - DNA, 79 bp, Homo sapiens; identical to SEQ ID NO: 351309
  chr12:4384533-4384612
  hyper

SEQ ID NO: 372926 - DNA, 557 bp, Homo sapiens; identical to SEQ ID NO: 334445
  chr12:4920230-4920787
  hyper

SEQ ID NO: 372927 - DNA, 180 bp, Homo sapiens; identical to SEQ ID NO: 360011
  chr12:5020472-5020652
  hyper

SEQ ID NO: 372928 - DNA, 322 bp, Homo sapiens; identical to SEQ ID NO: 202852
  chr12:5541693-5542015
  hyper

SEQ ID NO: 372929 - DNA, 36 bp, Homo sapiens; identical to SEQ ID NO: 360013
  chr12:5542974-5543010
  hyper

SEQ ID NO: 372930 - DNA, 526 bp, Homo sapiens
  chr12:6419603-6420129
  hyper
cgcctcgcgggggtctggcccggagtggagggcgcgcggtcccagccctcccgctcggccggcgggtgtcgagttcaggtgcgaccgaaaaggggaaaggagggcaccgccacgtgagctgtcctctccggggaaggcggtggctgcgtgagggcgggggctgctcggtccccagggccccgcccctctgcccctctgccccgagcggtgctggcggtagggaggggccagcccggtccccgccctcctcgcccggacccgcgctgcccggctcccgcgggccgctcgatcccagtcccaggctgggcatcggggctggctggcatcgccggggagccgacggcgacggggagccccgcgggcggggagggcggcgcagggcagcgggtgcggtgacacctgtgggcacaggtgagcggcgggagggctacgcggcccgggggcggggcggccgggacccggggcctggaagccggggcgaaggggaaggaaggcctggcctcccgaaggcgggaggaggggagcc

SEQ ID NO: 372931 - DNA, 95 bp, Homo sapiens; identical to SEQ ID NO: 347209
  chr12:6445038-6445133
  hyper

SEQ ID NO: 372932 - DNA, 241 bp, Homo sapiens; identical to SEQ ID NO: 202859
  chr12:6472613-6472854
  hyper

SEQ ID NO: 372933 - DNA, 94 bp, Homo sapiens; identical to SEQ ID NO: 202860
  chr12:6472900-6472994
  hyper

SEQ ID NO: 372934 - DNA, 406 bp, Homo sapiens; identical to SEQ ID NO: 360017
  chr12:6492947-6493353
  hyper

SEQ ID NO: 372935 - DNA, 33 bp, Homo sapiens; identical to SEQ ID NO: 202862
  chr12:6493416-6493449
  hyper

SEQ ID NO: 372936 - DNA, 115 bp, Homo sapiens; identical to SEQ ID NO: 360019
  chr12:6493504-6493619
  hyper

SEQ ID NO: 372937 - DNA, 539 bp, Homo sapiens; identical to SEQ ID NO: 360020
  chr12:7260775-7261314
  hyper

SEQ ID NO: 372938 - DNA, 499 bp, Homo sapiens; identical to SEQ ID NO: 334454
  chr12:7282303-7282802
  hyper

SEQ ID NO: 372939 - DNA, 104 bp, Homo sapiens; identical to SEQ ID NO: 334456
  chr12:8113465-8113569
  hyper

SEQ ID NO: 372940 - DNA, 55 bp, Homo sapiens; identical to SEQ ID NO: 345416
  chr12:8123528-8123583
  hyper

SEQ ID NO: 372941 - DNA, 751 bp, Homo sapiens; identical to SEQ ID NO: 351316
  chr12:8849750-8850501
  hyper

SEQ ID NO: 372942 - DNA, 310 bp, Homo sapiens; identical to SEQ ID NO: 202867
  chr12:8850744-8851054
  hyper

SEQ ID NO: 372943 - DNA, 113 bp, Homo sapiens; identical to SEQ ID NO: 347213
  chr12:8851275-8851388
  hyper

SEQ ID NO: 372944 - DNA, 294 bp, Homo sapiens; identical to SEQ ID NO: 360027
  chr12:9216950-9217244
  hyper

SEQ ID NO: 372945 - DNA, 565 bp, Homo sapiens; identical to SEQ ID NO: 334461
  chr12:12502899-12503464
  hyper

SEQ ID NO: 372946 - DNA, 107 bp, Homo sapiens; identical to SEQ ID NO: 345417
  chr12:14928211-14928318
  hyper

SEQ ID NO: 372947 - DNA, 93 bp, Homo sapiens; identical to SEQ ID NO: 351320
  chr12:15374050-15374143
  hyper

SEQ ID NO: 372948 - DNA, 1110 bp, Homo sapiens; identical to SEQ ID NO: 360031
  chr12:15941612-15942722
  hyper

SEQ ID NO: 372949 - DNA, 81 bp, Homo sapiens; identical to SEQ ID NO: 347215
  chr12:16500402-16500483
  hyper

SEQ ID NO: 372950 - DNA, 393 bp, Homo sapiens; identical to SEQ ID NO: 347216
  chr12:16500621-16501014
  hyper

SEQ ID NO: 372951 - DNA, 869 bp, Homo sapiens; identical to SEQ ID NO: 360034
  chr12:16758732-16759601
  hyper

SEQ ID NO: 372952 - DNA, 73 bp, Homo sapiens; identical to SEQ ID NO: 345418
  chr12:19282260-19282333
  hyper

SEQ ID NO: 372953 - DNA, 840 bp, Homo sapiens; identical to SEQ ID NO: 202900
  chr12:19282363-19283203
  hyper

SEQ ID NO: 372954 - DNA, 249 bp, Homo sapiens; identical to SEQ ID NO: 202901
  chr12:19283425-19283674
  hyper

SEQ ID NO: 372955 - DNA, 226 bp, Homo sapiens; identical to SEQ ID NO: 351327
  chr12:19283783-19284009
  hyper

SEQ ID NO: 372956 - DNA, 117 bp, Homo sapiens; identical to SEQ ID NO: 347220
  chr12:21681020-21681137
  hyper

SEQ ID NO: 372957 - DNA, 38 bp, Homo sapiens
  chr12:21927952-21927990
  hyper
cagctcctttccagtagccgcgaccccctgccgccagc

SEQ ID NO: 372958 - DNA, 118 bp, Homo sapiens; identical to SEQ ID NO: 347221
  chr12:22488705-22488823
  hyper

SEQ ID NO: 372959 - DNA, 233 bp, Homo sapiens; identical to SEQ ID NO: 334476
  chr12:22778949-22779182
  hyper

SEQ ID NO: 372960 - DNA, 252 bp, Homo sapiens; identical to SEQ ID NO: 202912
  chr12:24715505-24715757
  hyper

SEQ ID NO: 372961 - DNA, 100 bp, Homo sapiens
  chr12:28122526-28122626
  hyper
gcccgctctcaaaaagcctcttcaacatcaagggcatctcccaagttgaaaagaaaaaaaatttctctggagcctctcagcacttacttatttagcaacc

SEQ ID NO: 372962 - DNA, 179 bp, Homo sapiens; identical to SEQ ID NO: 360043
  chr12:28122886-28123065
  hyper

SEQ ID NO: 372963 - DNA, 343 bp, Homo sapiens; identical to SEQ ID NO: 288811
  chr12:28123205-28123548
  hyper

SEQ ID NO: 372964 - DNA, 668 bp, Homo sapiens; identical to SEQ ID NO: 360045
  chr12:29301988-29302656
  hyper

SEQ ID NO: 372965 - DNA, 85 bp, Homo sapiens; identical to SEQ ID NO: 288816
  chr12:29302688-29302773
  hyper

SEQ ID NO: 372966 - DNA, 143 bp, Homo sapiens; identical to SEQ ID NO: 360047
  chr12:29935696-29935839
  hyper

SEQ ID NO: 372967 - DNA, 42 bp, Homo sapiens; identical to SEQ ID NO: 360048
  chr12:30948583-30948625
  hyper

SEQ ID NO: 372968 - DNA, 307 bp, Homo sapiens; identical to SEQ ID NO: 202926
  chr12:30948670-30948977
  hyper

SEQ ID NO: 372969 - DNA, 490 bp, Homo sapiens; identical to SEQ ID NO: 360050
  chr12:30948988-30949478
  hyper

SEQ ID NO: 372970 - DNA, 191 bp, Homo sapiens; identical to SEQ ID NO: 351332
  chr12:33049135-33049326
  hyper

SEQ ID NO: 372971 - DNA, 234 bp, Homo sapiens; identical to SEQ ID NO: 202933
  chr12:33049390-33049624
  hyper

SEQ ID NO: 372972 - DNA, 349 bp, Homo sapiens; identical to SEQ ID NO: 202934
  chr12:33049652-33050001
  hyper

SEQ ID NO: 372973 - DNA, 76 bp, Homo sapiens
  chr12:33050245-33050321
  hyper
ctggacctgagggtgagaaagggctatttggtcaggcggaaagggcaatatgagggaaatgtgccaagaagataac

SEQ ID NO: 372974 - DNA, 115 bp, Homo sapiens; identical to SEQ ID NO: 202939
  chr12:33592401-33592516
  hyper

SEQ ID NO: 372975 - DNA, 71 bp, Homo sapiens; identical to SEQ ID NO: 202940
  chr12:34260770-34260841
  hyper

SEQ ID NO: 372976 - DNA, 136 bp, Homo sapiens
  chr12:34260905-34261041
  hyper
cgctccgccggaccctgtcctccagcgtggctgcggccccatggcctgcgacagccgccccgtccggaattcggcgccctccccggggcagaggccgcggcgtcctcaggctgtagcgccggcctgcgacccccac

SEQ ID NO: 372977 - DNA, 40 bp, Homo sapiens; identical to SEQ ID NO: 202942
  chr12:39298516-39298556
  hyper

SEQ ID NO: 372978 - DNA, 221 bp, Homo sapiens; identical to SEQ ID NO: 202943
  chr12:39298687-39298908
  hyper

SEQ ID NO: 372979 - DNA, 322 bp, Homo sapiens; identical to SEQ ID NO: 288843
  chr12:39300008-39300330
  hyper

SEQ ID NO: 372980 - DNA, 392 bp, Homo sapiens
  chr12:39300405-39300797
  hyper
aggagtcagagtgagcgctgcgtttgggaaactgcattccagggcagcaagactggtgccaagacggagtcgtggcaaaagcatccggaggtagacgaggcgcccctccactgcagggacctttgttccccgcgccttccctcctgcctcacccgagcgcctgcgggtcccgggagctcgccaccaggcggcgacggagaacaggatgcggcgcagctggaaggcagagggtggagagggggcgggtgtccgtccgatttaacgctccaagcacggagtttccagctggttgggctaagtctgggaggagcagtttttgcggtggaggacttgccttgcgttgtaacattttaatccacttgcagcctcctgcctagagaatctatagaggc

SEQ ID NO: 372981 - DNA, 76 bp, Homo sapiens; identical to SEQ ID NO: 351335
  chr12:40618264-40618340
  hyper

SEQ ID NO: 372982 - DNA, 35 bp, Homo sapiens; identical to SEQ ID NO: 351336
  chr12:40619048-40619083
  hyper

SEQ ID NO: 372983 - DNA, 53 bp, Homo sapiens; identical to SEQ ID NO: 360058
  chr12:41086129-41086182
  hyper

SEQ ID NO: 372984 - DNA, 210 bp, Homo sapiens; identical to SEQ ID NO: 288850
  chr12:41086454-41086664
  hyper

SEQ ID NO: 372985 - DNA, 52 bp, Homo sapiens
  chr12:41582155-41582207
  hyper
cgccgccgcgagacggctgccccgggggtggcccggggaaggcaggggggct

SEQ ID NO: 372986 - DNA, 69 bp, Homo sapiens; identical to SEQ ID NO: 360060
  chr12:43944719-43944788
  hyper

SEQ ID NO: 372987 - DNA, 292 bp, Homo sapiens; identical to SEQ ID NO: 288859
  chr12:45270086-45270378
  hyper

SEQ ID NO: 372988 - DNA, 47 bp, Homo sapiens; identical to SEQ ID NO: 334499
  chr12:46663360-46663407
  hyper

SEQ ID NO: 372989 - DNA, 334 bp, Homo sapiens; identical to SEQ ID NO: 345422
  chr12:46766939-46767273
  hyper

SEQ ID NO: 372990 - DNA, 181 bp, Homo sapiens; identical to SEQ ID NO: 351339
  chr12:48299205-48299386
  hyper

SEQ ID NO: 372991 - DNA, 32 bp, Homo sapiens; identical to SEQ ID NO: 288870
  chr12:48299387-48299419
  hyper

SEQ ID NO: 372992 - DNA, 42 bp, Homo sapiens; identical to SEQ ID NO: 351341
  chr12:48299465-48299507
  hyper

SEQ ID NO: 372993 - DNA, 176 bp, Homo sapiens; identical to SEQ ID NO: 351342
  chr12:48398744-48398920
  hyper

SEQ ID NO: 372994 - DNA, 239 bp, Homo sapiens; identical to SEQ ID NO: 334503
  chr12:48551355-48551594
  hyper

SEQ ID NO: 372995 - DNA, 493 bp, Homo sapiens; identical to SEQ ID NO: 202958
  chr12:48576976-48577469
  hyper

SEQ ID NO: 372996 - DNA, 939 bp, Homo sapiens; identical to SEQ ID NO: 334505
  chr12:48591606-48592545
  hyper

SEQ ID NO: 372997 - DNA, 67 bp, Homo sapiens
  chr12:49297935-49298002
  hyper
gagctcagcctcactgatagccggggatctctcctgttcgagggctgagatctccggtcccacaacc

SEQ ID NO: 372998 - DNA, 60 bp, Homo sapiens; identical to SEQ ID NO: 202964
  chr12:49364178-49364238
  hyper

SEQ ID NO: 372999 - DNA, 60 bp, Homo sapiens; identical to SEQ ID NO: 202967
  chr12:49392537-49392597
  hyper

SEQ ID NO: 373000 - DNA, 295 bp, Homo sapiens; identical to SEQ ID NO: 351347
  chr12:49392636-49392931
  hyper

SEQ ID NO: 373001 - DNA, 155 bp, Homo sapiens; identical to SEQ ID NO: 351348
  chr12:49485561-49485716
  hyper

SEQ ID NO: 373002 - DNA, 272 bp, Homo sapiens; identical to SEQ ID NO: 288895
  chr12:49485914-49486186
  hyper

SEQ ID NO: 373003 - DNA, 77 bp, Homo sapiens
  chr12:49487994-49488071
  hyper
cggtcatcaggcggtcggctccactgttctcctcatccttgaagatgatgtcggggttgtagttgggcacgaggtcc

SEQ ID NO: 373004 - DNA, 78 bp, Homo sapiens; identical to SEQ ID NO: 122207
  chr12:49488131-49488209
  hyper

SEQ ID NO: 373005 - DNA, 381 bp, Homo sapiens; identical to SEQ ID NO: 334511
  chr12:49582713-49583094
  hyper

SEQ ID NO: 373006 - DNA, 532 bp, Homo sapiens; identical to SEQ ID NO: 334512
  chr12:49658702-49659234
  hyper

SEQ ID NO: 373007 - DNA, 321 bp, Homo sapiens
  chr12:49690662-49690983
  hyper
cggccgtaggagctgcgagacctgcaggtgagtgtggagagccagcaggtgcagcaggtggaggtggaagccacggtgaagcccgagctgacggcagcgctgagggacatccgcgcgcagtacgagagcatcgccgcgaagaacctgcaggaggcggaggagtggtacaagtccaaggtgcaagagccgggagggcctgcgaggcgggacgctggggtggtgtcgcgcgtcccagccgactaaagcctgggttacccccacttctcagtacgcggacctgtccgacgctgccaaccggaaccacgaggccctgcgccaggc

SEQ ID NO: 373008 - DNA, 343 bp, Homo sapiens
  chr12:49691092-49691435
  hyper
gacgatgaaatgttctgcaactggccccttccactctcctaccccagaacgaggcgctgctcaggcagttgagagagctggaggagcagttcgccctggaggcggggggctaccaggcgggcgctgcgcggctcgaggaggagctgcgacagctaaaagaggagatggcgcggcacctgagggagtaccaggagctcctcaacgtcaagatggccctggacatcgagatcgccacctaccgcaagctgctggagggcgaggagagccggtgagggtggagctgctggggcggggcagggcggggtcgggactgggccgggcagggcggggcctgggcaggggc

SEQ ID NO: 373009 - DNA, 144 bp, Homo sapiens; identical to SEQ ID NO: 202973
  chr12:49735822-49735966
  hyper

SEQ ID NO: 373010 - DNA, 709 bp, Homo sapiens; identical to SEQ ID NO: 288909
  chr12:49736083-49736792
  hyper

SEQ ID NO: 373011 - DNA, 336 bp, Homo sapiens; identical to SEQ ID NO: 345425
  chr12:49736828-49737164
  hyper

SEQ ID NO: 373012 - DNA, 1805 bp, Homo sapiens; identical to SEQ ID NO: 360080
  chr12:49738834-49740639
  hyper

SEQ ID NO: 373013 - DNA, 419 bp, Homo sapiens; identical to SEQ ID NO: 334517
  chr12:49931623-49932042
  hyper

SEQ ID NO: 373014 - DNA, 300 bp, Homo sapiens; identical to SEQ ID NO: 334520
  chr12:50339307-50339607
  hyper

SEQ ID NO: 373015 - DNA, 660 bp, Homo sapiens; identical to SEQ ID NO: 334522
  chr12:51785160-51785820
  hyper

SEQ ID NO: 373016 - DNA, 213 bp, Homo sapiens; identical to SEQ ID NO: 334523
  chr12:52294173-52294386
  hyper

SEQ ID NO: 373017 - DNA, 54 bp, Homo sapiens; identical to SEQ ID NO: 347231
  chr12:52401605-52401659
  hyper

SEQ ID NO: 373018 - DNA, 71 bp, Homo sapiens; identical to SEQ ID NO: 202986
  chr12:52627438-52627509
  hyper

SEQ ID NO: 373019 - DNA, 125 bp, Homo sapiens; identical to SEQ ID NO: 351358
  chr12:52672849-52672974
  hyper

SEQ ID NO: 373020 - DNA, 270 bp, Homo sapiens
  chr12:53085061-53085331
  hyper
agccgctgccataaccgcctccactcctgcctcgtgccccgcctccgcggtagcttcttccgccgccatagcccccaccgctgccgccgccgtagcctcctgagccgtagctgccgccgcctcccgcgccgccgttgacgctcacctggctgttctgcacggctgtgggtaggggacagtgcacacggggtcagagggaccgggcaaggcccccacctgcacccgcccctgcacctgcagcctcctccatcctcgatcacccgtggcatc

SEQ ID NO: 373021 - DNA, 311 bp, Homo sapiens; identical to SEQ ID NO: 334529
  chr12:53267978-53268289
  hyper

SEQ ID NO: 373022 - DNA, 156 bp, Homo sapiens; identical to SEQ ID NO: 334530
  chr12:53272458-53272614
  hyper

SEQ ID NO: 373023 - DNA, 194 bp, Homo sapiens; identical to SEQ ID NO: 360089
  chr12:53342685-53342879
  hyper

SEQ ID NO: 373024 - DNA, 36 bp, Homo sapiens; identical to SEQ ID NO: 202991
  chr12:53342911-53342947
  hyper

SEQ ID NO: 373025 - DNA, 725 bp, Homo sapiens; identical to SEQ ID NO: 351360
  chr12:53613775-53614500
  hyper

SEQ ID NO: 373026 - DNA, 193 bp, Homo sapiens; identical to SEQ ID NO: 351361
  chr12:53719360-53719553
  hyper

SEQ ID NO: 373027 - DNA, 170 bp, Homo sapiens; identical to SEQ ID NO: 288977
  chr12:54070830-54071000
  hyper

SEQ ID NO: 373028 - DNA, 121 bp, Homo sapiens; identical to SEQ ID NO: 288978
  chr12:54088960-54089081
  hyper

SEQ ID NO: 373029 - DNA, 42 bp, Homo sapiens; identical to SEQ ID NO: 360094
  chr12:54132526-54132568
  hyper

SEQ ID NO: 373030 - DNA, 57 bp, Homo sapiens; identical to SEQ ID NO: 351363
  chr12:54144782-54144839
  hyper

SEQ ID NO: 373031 - DNA, 194 bp, Homo sapiens; identical to SEQ ID NO: 345427
  chr12:54150983-54151177
  hyper

SEQ ID NO: 373032 - DNA, 101 bp, Homo sapiens
  chr12:54330575-54330676
  hyper
aggcgtctccacccacccacccccaccagccaggccttaggcaagggggccaacgtcatacaacccagtctagacttggccaggccctgtttgctctcctc

SEQ ID NO: 373033 - DNA, 302 bp, Homo sapiens; identical to SEQ ID NO: 360097
  chr12:54332438-54332740
  hyper

SEQ ID NO: 373034 - DNA, 155 bp, Homo sapiens; identical to SEQ ID NO: 360098
  chr12:54338511-54338666
  hyper

SEQ ID NO: 373035 - DNA, 64 bp, Homo sapiens; identical to SEQ ID NO: 360099
  chr12:54343505-54343569
  hyper

SEQ ID NO: 373036 - DNA, 43 bp, Homo sapiens; identical to SEQ ID NO: 360100
  chr12:54348695-54348738
  hyper

SEQ ID NO: 373037 - DNA, 226 bp, Homo sapiens; identical to SEQ ID NO: 360101
  chr12:54349391-54349617
  hyper

SEQ ID NO: 373038 - DNA, 181 bp, Homo sapiens
  chr12:54366668-54366849
  hyper
cgcccatcccaccgcccaccccaccccaaccctctctctcctcctttgctcgtgctgtggtatggagagaaggggagtgacgagagaaaaacgaatacaaatctgcaattgattttcataatgtttctgcggtgtttgcaaaccaatcgcctgaacgtccccgatcttacctaagagagaa

SEQ ID NO: 373039 - DNA, 192 bp, Homo sapiens; identical to SEQ ID NO: 360102
  chr12:54367630-54367822
  hyper

SEQ ID NO: 373040 - DNA, 215 bp, Homo sapiens; identical to SEQ ID NO: 289008
  chr12:54368432-54368647
  hyper

SEQ ID NO: 373041 - DNA, 257 bp, Homo sapiens; identical to SEQ ID NO: 289009
  chr12:54369002-54369259
  hyper

SEQ ID NO: 373042 - DNA, 354 bp, Homo sapiens; identical to SEQ ID NO: 360105
  chr12:54369303-54369657
  hyper

SEQ ID NO: 373043 - DNA, 333 bp, Homo sapiens; identical to SEQ ID NO: 334550
  chr12:54371976-54372309
  hyper

SEQ ID NO: 373044 - DNA, 326 bp, Homo sapiens; identical to SEQ ID NO: 351366
  chr12:54377527-54377853
  hyper

SEQ ID NO: 373045 - DNA, 393 bp, Homo sapiens; identical to SEQ ID NO: 289013
  chr12:54378327-54378720
  hyper

SEQ ID NO: 373046 - DNA, 377 bp, Homo sapiens; identical to SEQ ID NO: 334552
  chr12:54383388-54383765
  hyper

SEQ ID NO: 373047 - DNA, 250 bp, Homo sapiens; identical to SEQ ID NO: 289016
  chr12:54388354-54388604
  hyper

SEQ ID NO: 373048 - DNA, 320 bp, Homo sapiens; identical to SEQ ID NO: 203012
  chr12:54389321-54389641
  hyper

SEQ ID NO: 373049 - DNA, 55 bp, Homo sapiens; identical to SEQ ID NO: 360112
  chr12:54391212-54391267
  hyper

SEQ ID NO: 373050 - DNA, 103 bp, Homo sapiens; identical to SEQ ID NO: 351368
  chr12:54393256-54393359
  hyper

SEQ ID NO: 373051 - DNA, 432 bp, Homo sapiens; identical to SEQ ID NO: 334559
  chr12:54400009-54400441
  hyper

SEQ ID NO: 373052 - DNA, 60 bp, Homo sapiens; identical to SEQ ID NO: 289023
  chr12:54402812-54402872
  hyper

SEQ ID NO: 373053 - DNA, 229 bp, Homo sapiens
  chr12:54404856-54405085
  hyper
gttttcttctgtccagctccggggaggcgcagtggacggcaaacttacagccggtatcagaccttggaactagaaaaggagtttctctttaatccttatttgacacgaaaacgtcggattgaagtctctcatgccctgggactgaccgagagacaagtgaagatctggttccagaaccgaaggatgaagtggaaaaaggagaacaacaaggataaactgccgggagccc

SEQ ID NO: 373054 - DNA, 205 bp, Homo sapiens; identical to SEQ ID NO: 203018
  chr12:54422141-54422346
  hyper

SEQ ID NO: 373055 - DNA, 55 bp, Homo sapiens; identical to SEQ ID NO: 203019
  chr12:54422376-54422431
  hyper

SEQ ID NO: 373056 - DNA, 404 bp, Homo sapiens; identical to SEQ ID NO: 351372
  chr12:54422525-54422929
  hyper

SEQ ID NO: 373057 - DNA, 571 bp, Homo sapiens; identical to SEQ ID NO: 360119
  chr12:54426536-54427107
  hyper

SEQ ID NO: 373058 - DNA, 329 bp, Homo sapiens; identical to SEQ ID NO: 203022
  chr12:54427307-54427636
  hyper

SEQ ID NO: 373059 - DNA, 91 bp, Homo sapiens; identical to SEQ ID NO: 203023
  chr12:54427974-54428065
  hyper

SEQ ID NO: 373060 - DNA, 56 bp, Homo sapiens; identical to SEQ ID NO: 203024
  chr12:54428083-54428139
  hyper

SEQ ID NO: 373061 - DNA, 43 bp, Homo sapiens; identical to SEQ ID NO: 289037
  chr12:54428224-54428267
  hyper

SEQ ID NO: 373062 - DNA, 205 bp, Homo sapiens; identical to SEQ ID NO: 360124
  chr12:54446894-54447099
  hyper

SEQ ID NO: 373063 - DNA, 219 bp, Homo sapiens; identical to SEQ ID NO: 203026
  chr12:54447599-54447818
  hyper

SEQ ID NO: 373064 - DNA, 261 bp, Homo sapiens; identical to SEQ ID NO: 360126
  chr12:54448041-54448302
  hyper

SEQ ID NO: 373065 - DNA, 129 bp, Homo sapiens; identical to SEQ ID NO: 351377
  chr12:54519801-54519930
  hyper

SEQ ID NO: 373066 - DNA, 103 bp, Homo sapiens; identical to SEQ ID NO: 289048
  chr12:54811879-54811982
  hyper

SEQ ID NO: 373067 - DNA, 277 bp, Homo sapiens; identical to SEQ ID NO: 334568
  chr12:56472747-56473024
  hyper

SEQ ID NO: 373068 - DNA, 274 bp, Homo sapiens; identical to SEQ ID NO: 334569
  chr12:56521418-56521692
  hyper

SEQ ID NO: 373069 - DNA, 59 bp, Homo sapiens; identical to SEQ ID NO: 203042
  chr12:56882380-56882439
  hyper

SEQ ID NO: 373070 - DNA, 189 bp, Homo sapiens; identical to SEQ ID NO: 351378
  chr12:57619157-57619346
  hyper

SEQ ID NO: 373071 - DNA, 207 bp, Homo sapiens; identical to SEQ ID NO: 351379
  chr12:57635256-57635463
  hyper

SEQ ID NO: 373072 - DNA, 160 bp, Homo sapiens; identical to SEQ ID NO: 334574
  chr12:57853395-57853555
  hyper

SEQ ID NO: 373073 - DNA, 212 bp, Homo sapiens; identical to SEQ ID NO: 289104
  chr12:58015267-58015479
  hyper

SEQ ID NO: 373074 - DNA, 189 bp, Homo sapiens; identical to SEQ ID NO: 351381
  chr12:58015548-58015737
  hyper

SEQ ID NO: 373075 - DNA, 300 bp, Homo sapiens; identical to SEQ ID NO: 347238
  chr12:58026315-58026615
  hyper

SEQ ID NO: 373076 - DNA, 216 bp, Homo sapiens; identical to SEQ ID NO: 289119
  chr12:59313943-59314159
  hyper

SEQ ID NO: 373077 - DNA, 341 bp, Homo sapiens; identical to SEQ ID NO: 360136
  chr12:59314189-59314530
  hyper

SEQ ID NO: 373078 - DNA, 54 bp, Homo sapiens
  chr12:59989999-59990053
  hyper
cgccagagaccagataaagtaagtacagctggggagggaggggagaggaggagg

SEQ ID NO: 373079 - DNA, 405 bp, Homo sapiens
  chr12:59990544-59990949
  hyper
cagatgatcaggacaggaagaggctgtgaggggaagacgaaataccgggggatgggggggttgtctttcttcatttttggtccccaggaaggatggcaggggtggaagcagatggaaaactatatgcgggcgaggcctgagcccaggcagaaagggacctctgacttggcaagggttcaggagggcctgagccttctggtcttgctgggccactgcaccacattgggggcgccaggcccggtcaggtggcgccacaggctgcgagcccgctcacgtgcgaactgcctgttttctcagcggatgctgcatcgcggcgcccttctccacccccttttctcctctacttccgcgaaaaggattgcagactgccttggaaagggcggtcgtgcccagtgccactttccc

SEQ ID NO: 373080 - DNA, 184 bp, Homo sapiens; identical to SEQ ID NO: 345428
  chr12:63026256-63026440
  hyper

SEQ ID NO: 373081 - DNA, 73 bp, Homo sapiens; identical to SEQ ID NO: 351384
  chr12:63327114-63327187
  hyper

SEQ ID NO: 373082 - DNA, 1078 bp, Homo sapiens; identical to SEQ ID NO: 351385
  chr12:63327326-63328404
  hyper

SEQ ID NO: 373083 - DNA, 112 bp, Homo sapiens; identical to SEQ ID NO: 360140
  chr12:63545006-63545118
  hyper

SEQ ID NO: 373084 - DNA, 117 bp, Homo sapiens
  chr12:63545150-63545267
  hyper
cgagtcatgccttttctgggctcgtagccgtttccacaagcttccctcactagccttcctcgctagcctccttaaccatgcatttgacttcaacaggcacgctaagcgcggtacctg

SEQ ID NO: 373085 - DNA, 435 bp, Homo sapiens
  chr12:63545586-63546021
  hyper
gtgtctcctggttttctctatggagactagggacttaaggagttttctctagattcctggggttttctgcgggaaaagcctgattcccacagcggggatggcggaaatttggccgcagtggtccgtggggaccgtctggttactactgagtcgtggggacatctttttgggtggacaaagagcagctgccggacagcggccatccaggcagtgctgtccagggcaagggacagaaaacccgcccggctcctgtgctcaggagtaagaaagaggcaatctcaaagagaggaaagaggccctgggaaggaggggaaacaaccacctacctagtaatccgttactctgaacagctggagcccctctgcagggcgggagggaggcagaaatgcgatctccctcagctctgttttaacgttggtgaagatatgcctcgac

SEQ ID NO: 373086 - DNA, 203 bp, Homo sapiens; identical to SEQ ID NO: 203080
  chr12:66122570-66122773
  hyper

SEQ ID NO: 373087 - DNA, 41 bp, Homo sapiens; identical to SEQ ID NO: 351387
  chr12:66136243-66136284
  hyper

SEQ ID NO: 373088 - DNA, 122 bp, Homo sapiens; identical to SEQ ID NO: 360143
  chr12:66217380-66217502
  hyper

SEQ ID NO: 373089 - DNA, 237 bp, Homo sapiens; identical to SEQ ID NO: 203084
  chr12:66217650-66217887
  hyper

SEQ ID NO: 373090 - DNA, 208 bp, Homo sapiens; identical to SEQ ID NO: 360145
  chr12:66217920-66218128
  hyper

SEQ ID NO: 373091 - DNA, 233 bp, Homo sapiens; identical to SEQ ID NO: 203086
  chr12:66218550-66218783
  hyper

SEQ ID NO: 373092 - DNA, 361 bp, Homo sapiens; identical to SEQ ID NO: 203087
  chr12:66219327-66219688
  hyper

SEQ ID NO: 373093 - DNA, 119 bp, Homo sapiens; identical to SEQ ID NO: 360147
  chr12:66220194-66220313
  hyper

SEQ ID NO: 373094 - DNA, 499 bp, Homo sapiens; identical to SEQ ID NO: 334595
  chr12:68041644-68042143
  hyper

SEQ ID NO: 373095 - DNA, 277 bp, Homo sapiens; identical to SEQ ID NO: 360149
  chr12:68758776-68759053
  hyper

SEQ ID NO: 373096 - DNA, 108 bp, Homo sapiens; identical to SEQ ID NO: 360150
  chr12:68759131-68759239
  hyper

SEQ ID NO: 373097 - DNA, 126 bp, Homo sapiens; identical to SEQ ID NO: 345429
  chr12:69326527-69326653
  hyper

SEQ ID NO: 373098 - DNA, 90 bp, Homo sapiens; identical to SEQ ID NO: 334598
  chr12:70759026-70759116
  hyper

SEQ ID NO: 373099 - DNA, 478 bp, Homo sapiens; identical to SEQ ID NO: 351390
  chr12:70760478-70760956
  hyper

SEQ ID NO: 373100 - DNA, 82 bp, Homo sapiens; identical to SEQ ID NO: 351391
  chr12:70761129-70761211
  hyper

SEQ ID NO: 373101 - DNA, 207 bp, Homo sapiens; identical to SEQ ID NO: 289178
  chr12:71833930-71834137
  hyper

SEQ ID NO: 373102 - DNA, 500 bp, Homo sapiens; identical to SEQ ID NO: 289179
  chr12:71834289-71834789
  hyper

SEQ ID NO: 373103 - DNA, 119 bp, Homo sapiens; identical to SEQ ID NO: 360157
  chr12:77719613-77719732
  hyper

SEQ ID NO: 373104 - DNA, 204 bp, Homo sapiens; identical to SEQ ID NO: 289198
  chr12:79257510-79257714
  hyper

SEQ ID NO: 373105 - DNA, 200 bp, Homo sapiens; identical to SEQ ID NO: 289199
  chr12:79258097-79258297
  hyper

SEQ ID NO: 373106 - DNA, 150 bp, Homo sapiens; identical to SEQ ID NO: 360160
  chr12:79259099-79259249
  hyper

SEQ ID NO: 373107 - DNA, 86 bp, Homo sapiens; identical to SEQ ID NO: 360161
  chr12:81102562-81102648
  hyper

SEQ ID NO: 373108 - DNA, 385 bp, Homo sapiens; identical to SEQ ID NO: 203112
  chr12:81330352-81330737
  hyper

SEQ ID NO: 373109 - DNA, 312 bp, Homo sapiens; identical to SEQ ID NO: 203113
  chr12:81331319-81331631
  hyper

SEQ ID NO: 373110 - DNA, 368 bp, Homo sapiens
  chr12:82152624-82152992
  hyper
cgcggcgccgctccccctccgcgcccgggccacccggggtgtgtggggcgtccctccaaaagaaagcttggagaaaaggcgtgagaagtatctgggagagaagttctccacccagtctcccctcctggagcccctctggagtttaaggctaaccctgggagttagaaacctaaaggaaaacgagtccctagggatgcaaaaagcaggacaggtctcctcctggcccccagcctgtttccgcgcgctcccgtgtctcgtttcacttaaaggaggcgctttttctctggaaaggcaaacatcaccccacgccgtcccccggccccccttccctcccccccgccgcccccccgccgccacagcacacacac

SEQ ID NO: 373111 - DNA, 56 bp, Homo sapiens; identical to SEQ ID NO: 360164
  chr12:85305601-85305657
  hyper

SEQ ID NO: 373112 - DNA, 254 bp, Homo sapiens; identical to SEQ ID NO: 203122
  chr12:85305980-85306234
  hyper

SEQ ID NO: 373113 - DNA, 45 bp, Homo sapiens; identical to SEQ ID NO: 360166
  chr12:85430024-85430069
  hyper

SEQ ID NO: 373114 - DNA, 237 bp, Homo sapiens; identical to SEQ ID NO: 360167
  chr12:85430099-85430336
  hyper

SEQ ID NO: 373115 - DNA, 88 bp, Homo sapiens; identical to SEQ ID NO: 360168
  chr12:85674884-85674972
  hyper

SEQ ID NO: 373116 - DNA, 293 bp, Homo sapiens
  chr12:88973866-88974159
  hyper
cggctcggctcgggatcacacaccacgccggcctcccccgcatcctcttgtctcacccggcaggcacagccctgcacgccccagctgcaagtcccagggagcgccggcttccccggggcaccgggcgcgatttttcctggagagcctgggagctcccgggcgcgccctactcacttgtgtcttcttcataaggaaaggcagcgctgcgatccagcacaaacagtggtgtggcgactccgtttagctgttctggagctccagcatattgcacgaacagcggcggcagatagtcc

SEQ ID NO: 373117 - DNA, 177 bp, Homo sapiens; identical to SEQ ID NO: 203125
  chr12:88974253-88974430
  hyper

SEQ ID NO: 373118 - DNA, 35 bp, Homo sapiens
  chr12:88974679-88974714
  hyper
accctgcctgccttagagaaataaagtttaattgc

SEQ ID NO: 373119 - DNA, 437 bp, Homo sapiens; identical to SEQ ID NO: 360169
  chr12:89747140-89747577
  hyper

SEQ ID NO: 373120 - DNA, 393 bp, Homo sapiens; identical to SEQ ID NO: 334614
  chr12:90101352-90101745
  hyper

SEQ ID NO: 373121 - DNA, 118 bp, Homo sapiens; identical to SEQ ID NO: 334615
  chr12:91502991-91503109
  hyper

SEQ ID NO: 373122 - DNA, 264 bp, Homo sapiens; identical to SEQ ID NO: 347242
  chr12:93966037-93966301
  hyper

SEQ ID NO: 373123 - DNA, 66 bp, Homo sapiens; identical to SEQ ID NO: 351396
  chr12:93967274-93967340
  hyper

SEQ ID NO: 373124 - DNA, 104 bp, Homo sapiens; identical to SEQ ID NO: 351397
  chr12:94541793-94541897
  hyper

SEQ ID NO: 373125 - DNA, 1131 bp, Homo sapiens; identical to SEQ ID NO: 289236
  chr12:94541957-94543088
  hyper

SEQ ID NO: 373126 - DNA, 86 bp, Homo sapiens; identical to SEQ ID NO: 345430
  chr12:94544052-94544138
  hyper

SEQ ID NO: 373127 - DNA, 107 bp, Homo sapiens; identical to SEQ ID NO: 360176
  chr12:96183929-96184036
  hyper

SEQ ID NO: 373128 - DNA, 73 bp, Homo sapiens; identical to SEQ ID NO: 360177
  chr12:96184964-96185037
  hyper

SEQ ID NO: 373129 - DNA, 222 bp, Homo sapiens; identical to SEQ ID NO: 360178
  chr12:96185121-96185343
  hyper

SEQ ID NO: 373130 - DNA, 646 bp, Homo sapiens; identical to SEQ ID NO: 203143
  chr12:99287504-99288150
  hyper

SEQ ID NO: 373131 - DNA, 150 bp, Homo sapiens; identical to SEQ ID NO: 360180
  chr12:99289349-99289499
  hyper

SEQ ID NO: 373132 - DNA, 229 bp, Homo sapiens; identical to SEQ ID NO: 334625
  chr12:101674003-101674232
  hyper

SEQ ID NO: 373133 - DNA, 110 bp, Homo sapiens; identical to SEQ ID NO: 334626
  chr12:102878329-102878439
  hyper

SEQ ID NO: 373134 - DNA, 120 bp, Homo sapiens; identical to SEQ ID NO: 360182
  chr12:103311040-103311160
  hyper

SEQ ID NO: 373135 - DNA, 204 bp, Homo sapiens; identical to SEQ ID NO: 203148
  chr12:103311290-103311494
  hyper

SEQ ID NO: 373136 - DNA, 101 bp, Homo sapiens; identical to SEQ ID NO: 360184
  chr12:103311495-103311596
  hyper

SEQ ID NO: 373137 - DNA, 267 bp, Homo sapiens; identical to SEQ ID NO: 347245
  chr12:103351149-103351416
  hyper

SEQ ID NO: 373138 - DNA, 58 bp, Homo sapiens
  chr12:103890025-103890083
  hyper
tggaggtagtaatccccagaaatcctgaaattcccccttccacctactcatctgcctc

SEQ ID NO: 373139 - DNA, 456 bp, Homo sapiens; identical to SEQ ID NO: 334632
  chr12:104235228-104235684
  hyper

SEQ ID NO: 373140 - DNA, 373 bp, Homo sapiens
  chr12:104322593-104322966
  hyper
cgcacactaaatacgggaagttgtaaaagactgtgacagactgtcactaaaaaacttgtcttcaggaattcggacgattatctgaaaagatattcaaagttcaattttgttggaggaagcaataaggaagtggggtgtctatgtcagagacgggcgcgggtatgcgagggggtaacgtatagagtaggttaaagagacgtagaaaatatttccaaaggcacaagtttagcatgagggacttccctcacaggaaagacacctggtgttttatatgtccttctgagcacagacagggtatttctatgaagttacaaagctgcaatcccgttctcatgtgcagcaccacaggttttgctttcaaatatctgcaggt

SEQ ID NO: 373141 - DNA, 226 bp, Homo sapiens
  chr12:104323141-104323367
  hyper
ggtcgggaaggtcccaaccacgttcttctgtaaaccagataaggaaggcctggggattccggccgcggaaaggcacagaggaggtgaacgctccggctgcccaagtgacgcacttgtaggcggattcggaaactcgtgctcttgagccggaggcggagcccccagactcagaccgaccccccagaaccgggcggccttgcccgaggcatgaaggctttctaggccc

SEQ ID NO: 373142 - DNA, 336 bp, Homo sapiens; identical to SEQ ID NO: 334634
  chr12:104359142-104359478
  hyper

SEQ ID NO: 373143 - DNA, 212 bp, Homo sapiens; identical to SEQ ID NO: 334635
  chr12:104443924-104444136
  hyper

SEQ ID NO: 373144 - DNA, 686 bp, Homo sapiens; identical to SEQ ID NO: 334637
  chr12:104682348-104683034
  hyper

SEQ ID NO: 373145 - DNA, 105 bp, Homo sapiens; identical to SEQ ID NO: 347246
  chr12:104850139-104850244
  hyper

SEQ ID NO: 373146 - DNA, 348 bp, Homo sapiens; identical to SEQ ID NO: 203159
  chr12:104851545-104851893
  hyper

SEQ ID NO: 373147 - DNA, 79 bp, Homo sapiens; identical to SEQ ID NO: 351405
  chr12:106975167-106975246
  hyper

SEQ ID NO: 373148 - DNA, 222 bp, Homo sapiens; identical to SEQ ID NO: 360191
  chr12:106976181-106976403
  hyper

SEQ ID NO: 373149 - DNA, 71 bp, Homo sapiens; identical to SEQ ID NO: 351406
  chr12:107486379-107486450
  hyper

SEQ ID NO: 373150 - DNA, 522 bp, Homo sapiens; identical to SEQ ID NO: 203167
  chr12:107486672-107487194
  hyper

SEQ ID NO: 373151 - DNA, 229 bp, Homo sapiens; identical to SEQ ID NO: 351408
  chr12:107711721-107711950
  hyper

SEQ ID NO: 373152 - DNA, 723 bp, Homo sapiens
  chr12:107712337-107713060
  hyper
tctcagtcccacgaacaccgtggccggcgcccggtggctactgcgcccagcggggctcagggaagagcggtctagacactttttattttggaagaaaggggcaagccccggcgggagcttccttcccggcctggctcgctccccattgcgcccagctccggcccggactctggaagatgactccagggtctgctctgtatattccagcggcggcagttccgggaggcagccgaaagtactaacagttggtagcagcggctagtggaaaagtgagccaaggcggcgcggactcggctctccccgcgccccgcggcactcgctgctcctcgccgctccttccctttggctcccaggcggctgcagcatgaagtggcgcagcgatggccaggagaggtaagaagcccgtggtgagaacgctggaggatctgacgctggactcgggttatggtggcgcggcggactcggtgcgctcctccaacttgtctttgtgctgttccgactcgcacccggcgtccccgtatggcgggagctgctggccgcctctagctgactccatgcacagccggcacaacagctttgacactgtcaacactgccctggtggaagactccgaggggctggactgcgccggccagcactgctcgcggctgctgccggacctagacgaggtcccctggactctccaggagctggaggcgctgctgctgcgttcgcgggatcccc

SEQ ID NO: 373153 - DNA, 178 bp, Homo sapiens; identical to SEQ ID NO: 360196
  chr12:109162554-109162732
  hyper

SEQ ID NO: 373154 - DNA, 57 bp, Homo sapiens; identical to SEQ ID NO: 360197
  chr12:109162762-109162819
  hyper

SEQ ID NO: 373155 - DNA, 96 bp, Homo sapiens; identical to SEQ ID NO: 351410
  chr12:111284508-111284604
  hyper

SEQ ID NO: 373156 - DNA, 366 bp, Homo sapiens
  chr12:111473017-111473383
  hyper
tctgtttctttcctctcttccctgctctttctctctccttccctagggcgactcttcgaaaccccatcactttctccccatcctccctttgtgggagtctgtgtgcctcccctagatttggaggtgttctctgcggaccccgtaggagccggggctgggaggtggaatctcagagaacgcaccgtggaggcgcggctccggcctctgttctttcccggagtgccccggacgcgcctggcaaggccccccagccttggagtctcgcaaagtctcggcgggtgcggcggggatcaggggcgggaaaatggtgcggataacagggcggttagagcatcctgccttgaccgtgacattcgcggaagacgc

SEQ ID NO: 373157 - DNA, 320 bp, Homo sapiens; identical to SEQ ID NO: 351411
  chr12:111844290-111844610
  hyper

SEQ ID NO: 373158 - DNA, 99 bp, Homo sapiens; identical to SEQ ID NO: 351412
  chr12:111844690-111844789
  hyper

SEQ ID NO: 373159 - DNA, 507 bp, Homo sapiens; identical to SEQ ID NO: 289355
  chr12:112204412-112204919
  hyper

SEQ ID NO: 373160 - DNA, 186 bp, Homo sapiens; identical to SEQ ID NO: 345433
  chr12:112204992-112205178
  hyper

SEQ ID NO: 373161 - DNA, 83 bp, Homo sapiens; identical to SEQ ID NO: 345434
  chr12:113495127-113495210
  hyper

SEQ ID NO: 373162 - DNA, 615 bp, Homo sapiens; identical to SEQ ID NO: 334652
  chr12:113796265-113796880
  hyper

SEQ ID NO: 373163 - DNA, 58 bp, Homo sapiens; identical to SEQ ID NO: 360205
  chr12:113905322-113905380
  hyper

SEQ ID NO: 373164 - DNA, 43 bp, Homo sapiens; identical to SEQ ID NO: 360206
  chr12:113906434-113906477
  hyper

SEQ ID NO: 373165 - DNA, 83 bp, Homo sapiens
  chr12:113914528-113914611
  hyper
ccactggcgctaggccgtggattgcttggtttccagaacatctctgcggggcgcagggccttcctgtcagttgaatcgtgctc

SEQ ID NO: 373166 - DNA, 60 bp, Homo sapiens
  chr12:114882084-114882144
  hyper
catcaaaggaaatactgtaggtttcagcatcggtctctcccgctgatcgtcgggctccgc

SEQ ID NO: 373167 - DNA, 213 bp, Homo sapiens; identical to SEQ ID NO: 360207
  chr12:115106003-115106216
  hyper

SEQ ID NO: 373168 - DNA, 218 bp, Homo sapiens; identical to SEQ ID NO: 289402
  chr12:115106246-115106464
  hyper

SEQ ID NO: 373169 - DNA, 340 bp, Homo sapiens; identical to SEQ ID NO: 360209
  chr12:115106502-115106842
  hyper

SEQ ID NO: 373170 - DNA, 804 bp, Homo sapiens; identical to SEQ ID NO: 351417
  chr12:115120701-115121505
  hyper

SEQ ID NO: 373171 - DNA, 341 bp, Homo sapiens; identical to SEQ ID NO: 203214
  chr12:115121544-115121885
  hyper

SEQ ID NO: 373172 - DNA, 221 bp, Homo sapiens; identical to SEQ ID NO: 203215
  chr12:115122015-115122236
  hyper

SEQ ID NO: 373173 - DNA, 420 bp, Homo sapiens; identical to SEQ ID NO: 360213
  chr12:115122524-115122944
  hyper

SEQ ID NO: 373174 - DNA, 142 bp, Homo sapiens
  chr12:115889561-115889703
  hyper
cgtcgtgacagtgccaatagccagcagtctcctgtccgcgtgggttgcgagccccgggcgtggacggagttgggagcggagggcggcaggtgccagcggggcccgcctctccctgcaggcggccccggcaagttcacggccg

SEQ ID NO: 373175 - DNA, 70 bp, Homo sapiens
  chr12:115889776-115889846
  hyper
gcccccgcgcccctcgctcgcgccgtgcctgccgccgccacccgcccggccgccgggccggccactgagc

SEQ ID NO: 373176 - DNA, 58 bp, Homo sapiens; identical to SEQ ID NO: 345435
  chr12:116946548-116946606
  hyper

SEQ ID NO: 373177 - DNA, 161 bp, Homo sapiens; identical to SEQ ID NO: 360215
  chr12:117316504-117316665
  hyper

SEQ ID NO: 373178 - DNA, 71 bp, Homo sapiens; identical to SEQ ID NO: 334669
  chr12:117316909-117316980
  hyper

SEQ ID NO: 373179 - DNA, 31 bp, Homo sapiens; identical to SEQ ID NO: 289422
  chr12:117317225-117317256
  hyper

SEQ ID NO: 373180 - DNA, 482 bp, Homo sapiens; identical to SEQ ID NO: 351423
  chr12:117317288-117317770
  hyper

SEQ ID NO: 373181 - DNA, 1016 bp, Homo sapiens; identical to SEQ ID NO: 347252
  chr12:117536372-117537388
  hyper

SEQ ID NO: 373182 - DNA, 357 bp, Homo sapiens; identical to SEQ ID NO: 289438
  chr12:120031899-120032256
  hyper

SEQ ID NO: 373183 - DNA, 723 bp, Homo sapiens; identical to SEQ ID NO: 334679
  chr12:120524652-120525375
  hyper

SEQ ID NO: 373184 - DNA, 185 bp, Homo sapiens; identical to SEQ ID NO: 334680
  chr12:122214111-122214296
  hyper

SEQ ID NO: 373185 - DNA, 751 bp, Homo sapiens; identical to SEQ ID NO: 334681
  chr12:122231543-122232294
  hyper

SEQ ID NO: 373186 - DNA, 62 bp, Homo sapiens; identical to SEQ ID NO: 351426
  chr12:122237462-122237524
  hyper

SEQ ID NO: 373187 - DNA, 582 bp, Homo sapiens; identical to SEQ ID NO: 334683
  chr12:122460955-122461537
  hyper

SEQ ID NO: 373188 - DNA, 88 bp, Homo sapiens; identical to SEQ ID NO: 360225
  chr12:122667648-122667736
  hyper

SEQ ID NO: 373189 - DNA, 64 bp, Homo sapiens; identical to SEQ ID NO: 351427
  chr12:122688584-122688648
  hyper

SEQ ID NO: 373190 - DNA, 551 bp, Homo sapiens; identical to SEQ ID NO: 334686
  chr12:123258823-123259374
  hyper

SEQ ID NO: 373191 - DNA, 90 bp, Homo sapiens; identical to SEQ ID NO: 334687
  chr12:123321244-123321334
  hyper

SEQ ID NO: 373192 - DNA, 473 bp, Homo sapiens; identical to SEQ ID NO: 334688
  chr12:123380333-123380806
  hyper

SEQ ID NO: 373193 - DNA, 345 bp, Homo sapiens; identical to SEQ ID NO: 351430
  chr12:123874193-123874538
  hyper

SEQ ID NO: 373194 - DNA, 384 bp, Homo sapiens
  chr12:124246524-124246908
  hyper
cggtcggcgtggggtggggtcgcaccctcggctgcagcggcccgagggcggctcctggcggcgagggtcccgctccgcatccaggggcgtgcgcgctgccggggccagggagcaaccagcctacctcggcggcccgggggcctggtgcgcgcctccgagatcccggggccggggcgtgggctgcggctcgcgggttcgggatcgaggggccgggcgcggggcactgccgagcttgcagcccccagcgccggcgccgtcggcggggcgagctgcggccgtttccggggcgcccattgctagggccgccgttgccacggacgcccgccctgcgcccggctccctctgcactgcgcggcgccatggacgacctgcgggtgctgtgga

SEQ ID NO: 373195 - DNA, 54 bp, Homo sapiens
  chr12:124246937-124246991
  hyper
atcaccgacccccagcttttcgaggacctgctcaaccgcgacgacggccagggc

SEQ ID NO: 373196 - DNA, 258 bp, Homo sapiens; identical to SEQ ID NO: 360231
  chr12:124456333-124456591
  hyper

SEQ ID NO: 373197 - DNA, 609 bp, Homo sapiens; identical to SEQ ID NO: 289491
  chr12:124779593-124780202
  hyper

SEQ ID NO: 373198 - DNA, 173 bp, Homo sapiens; identical to SEQ ID NO: 334693
  chr12:125093646-125093819
  hyper

SEQ ID NO: 373199 - DNA, 133 bp, Homo sapiens; identical to SEQ ID NO: 334694
  chr12:125477548-125477681
  hyper

SEQ ID NO: 373200 - DNA, 435 bp, Homo sapiens; identical to SEQ ID NO: 334695
  chr12:125815555-125815990
  hyper

SEQ ID NO: 373201 - DNA, 146 bp, Homo sapiens; identical to SEQ ID NO: 360236
  chr12:126018005-126018151
  hyper

SEQ ID NO: 373202 - DNA, 33 bp, Homo sapiens; identical to SEQ ID NO: 360237
  chr12:126018265-126018298
  hyper

SEQ ID NO: 373203 - DNA, 81 bp, Homo sapiens; identical to SEQ ID NO: 360238
  chr12:127865862-127865943
  hyper

SEQ ID NO: 373204 - DNA, 405 bp, Homo sapiens; identical to SEQ ID NO: 360239
  chr12:128750713-128751118
  hyper

SEQ ID NO: 373205 - DNA, 131 bp, Homo sapiens; identical to SEQ ID NO: 351434
  chr12:128850403-128850534
  hyper

SEQ ID NO: 373206 - DNA, 151 bp, Homo sapiens
  chr12:130498574-130498725
  hyper
cggaaagagggcaaggagagtggcggggtgcgagcggggcgctgcggaggaggctgcagcggcagcggtgcgggcaggagctctgatgcgatgcgatgcgatgcgatgctgcccccctgtgtccttcgacgatattgctgcgggaagcttt

SEQ ID NO: 373207 - DNA, 107 bp, Homo sapiens
  chr12:130498755-130498862
  hyper
cagctcagaccttctctgcgaatagctctccgggtggtaaagagatgcatcacatttaaaacttcgagacgtcctggattcacttagaaagatgggaagaggctcac

SEQ ID NO: 373208 - DNA, 263 bp, Homo sapiens; identical to SEQ ID NO: 351435
  chr12:130645806-130646069
  hyper

SEQ ID NO: 373209 - DNA, 54 bp, Homo sapiens; identical to SEQ ID NO: 351436
  chr12:131400919-131400973
  hyper

SEQ ID NO: 373210 - DNA, 107 bp, Homo sapiens; identical to SEQ ID NO: 351437
  chr12:132312451-132312558
  hyper

SEQ ID NO: 373211 - DNA, 246 bp, Homo sapiens; identical to SEQ ID NO: 351438
  chr12:132313659-132313905
  hyper

SEQ ID NO: 373212 - DNA, 173 bp, Homo sapiens
  chr12:133195984-133196157
  hyper
ccagggtcgcctccggagccggcgccgcccctgcccgcaggtacgtattcatcgtgcagaaaagctaccaggagagcgagacgggccccgagagctccatcatcaccaaggtcaaggggatcaccacgtccgagcacaaagtgtgggacgtggaggagtacgtgaagcccccc

SEQ ID NO: 373213 - DNA, 479 bp, Homo sapiens; identical to SEQ ID NO: 334707
  chr12:133286733-133287212
  hyper

SEQ ID NO: 373214 - DNA, 133 bp, Homo sapiens; identical to SEQ ID NO: 203264
  chr12:133463975-133464108
  hyper

SEQ ID NO: 373215 - DNA, 237 bp, Homo sapiens; identical to SEQ ID NO: 203265
  chr12:133464166-133464403
  hyper

SEQ ID NO: 373216 - DNA, 218 bp, Homo sapiens; identical to SEQ ID NO: 203266
  chr12:133464555-133464773
  hyper

SEQ ID NO: 373217 - DNA, 261 bp, Homo sapiens; identical to SEQ ID NO: 351443
  chr13:20702234-20702495
  hyper

SEQ ID NO: 373218 - DNA, 253 bp, Homo sapiens; identical to SEQ ID NO: 289542
  chr13:20702531-20702784
  hyper

SEQ ID NO: 373219 - DNA, 208 bp, Homo sapiens; identical to SEQ ID NO: 351445
  chr13:20702913-20703121
  hyper

SEQ ID NO: 373220 - DNA, 167 bp, Homo sapiens; identical to SEQ ID NO: 345438
  chr13:20735265-20735432
  hyper

SEQ ID NO: 373221 - DNA, 674 bp, Homo sapiens; identical to SEQ ID NO: 351447
  chr13:20767087-20767761
  hyper

SEQ ID NO: 373222 - DNA, 81 bp, Homo sapiens; identical to SEQ ID NO: 351448
  chr13:20767827-20767908
  hyper

SEQ ID NO: 373223 - DNA, 154 bp, Homo sapiens
  chr13:21634593-21634747
  hyper
cgcctcgggccgcgtcccgccaagaccgtgagcaaactcgcagagttggcgcggcagccggccgggagacgccgagcagggcctggccgcccgcagcccgggaggaacggcgcccccagggtccggtggcctctgaggggctgactggcccgtg

SEQ ID NO: 373224 - DNA, 569 bp, Homo sapiens
  chr13:21634965-21635534
  hyper
ggatccgtgggaccgctgcgccgccggaccgggggtcccgaggctgtcaggggcgcccggccgggcgtctagtgaaaagccgatcccccggagacagcggaagcagaggcgcgcccggcgctacggcctttcgggtctaggacaccgcccccggcccgcgccgcccctgccccgccgggatcccggccgccccggtcgccgcacaacaaagcggcgcagccccgctgcccccgcccgacgccggcctccaacttccccggctcctctggaaccggctccgcgggctccgtacggcctggactacgagccgccgggcgggggcggctccgggcgggcgcggaccgtgggggcagggcgcagggctccgtccggacaaacttcctcggccgccccgccgggcgcccttcccggagcctcggcaccacagtaggtgcgcggagccgcagggctcgaccgcttcgcggaaactctcgccaccctccgagctgccgccccgaccccagctcccagccccctcacctccaggggcgcggtctacaccctcgggggcgtcctggccggcggctccc

SEQ ID NO: 373225 - DNA, 143 bp, Homo sapiens; identical to SEQ ID NO: 360255
  chr13:22178308-22178451
  hyper

SEQ ID NO: 373226 - DNA, 142 bp, Homo sapiens; identical to SEQ ID NO: 351449
  chr13:22243864-22244006
  hyper

SEQ ID NO: 373227 - DNA, 536 bp, Homo sapiens
  chr13:22244073-22244609
  hyper
cgccgccactggggatccgggcgcaggcaggctgtcccgggcgcagagcgcgccgcctccagtctctctggcgggcccggcccggcagggcccctggcggcccccggaggcgggtttctttgtccctgactcccgctgggcgcgaaggccgccggcggctaacagaaacccgagcccgcgcaacggagctcaggcttccacgtgcggccccgcagggcagagcaggaaggagcggctgcagccccggggcgccccgcaagcatccagtgcccggccctcccagctccgcggcgggcttcggacggtggagtgagacaccagaactcgcctttcgcttccccgagccgatgcacggcttgggatggcgccgctcgtcctaagcagcgtggtttgagggcgagaagacgcctactggagcgctcccctccacccagactcccgaagacgcgcgcccgagtcgaagtcggggacagagaaggttctctggcgcccccctgccgactgctttgcggccgccgggacccgagcagcggggc

SEQ ID NO: 373228 - DNA, 783 bp, Homo sapiens; identical to SEQ ID NO: 334723
  chr13:24734971-24735754
  hyper

SEQ ID NO: 373229 - DNA, 71 bp, Homo sapiens; identical to SEQ ID NO: 360257
  chr13:25592172-25592243
  hyper

SEQ ID NO: 373230 - DNA, 81 bp, Homo sapiens; identical to SEQ ID NO: 203288
  chr13:25746000-25746081
  hyper

SEQ ID NO: 373231 - DNA, 281 bp, Homo sapiens; identical to SEQ ID NO: 203291
  chr13:26624917-26625198
  hyper

SEQ ID NO: 373232 - DNA, 70 bp, Homo sapiens; identical to SEQ ID NO: 345439
  chr13:27131483-27131553
  hyper

SEQ ID NO: 373233 - DNA, 127 bp, Homo sapiens; identical to SEQ ID NO: 351453
  chr13:28491488-28491615
  hyper

SEQ ID NO: 373234 - DNA, 177 bp, Homo sapiens; identical to SEQ ID NO: 203300
  chr13:28491616-28491793
  hyper

SEQ ID NO: 373235 - DNA, 37 bp, Homo sapiens; identical to SEQ ID NO: 351455
  chr13:28527202-28527239
  hyper

SEQ ID NO: 373236 - DNA, 461 bp, Homo sapiens; identical to SEQ ID NO: 203304
  chr13:28527384-28527845
  hyper

SEQ ID NO: 373237 - DNA, 468 bp, Homo sapiens; identical to SEQ ID NO: 360265
  chr13:28534792-28535260
  hyper

SEQ ID NO: 373238 - DNA, 37 bp, Homo sapiens; identical to SEQ ID NO: 360266
  chr13:28535573-28535610
  hyper

SEQ ID NO: 373239 - DNA, 57 bp, Homo sapiens; identical to SEQ ID NO: 360267
  chr13:28540416-28540473
  hyper

SEQ ID NO: 373240 - DNA, 112 bp, Homo sapiens; identical to SEQ ID NO: 360268
  chr13:28541283-28541395
  hyper

SEQ ID NO: 373241 - DNA, 227 bp, Homo sapiens; identical to SEQ ID NO: 203308
  chr13:28542128-28542355
  hyper

SEQ ID NO: 373242 - DNA, 258 bp, Homo sapiens; identical to SEQ ID NO: 203309
  chr13:28542395-28542653
  hyper

SEQ ID NO: 373243 - DNA, 37 bp, Homo sapiens; identical to SEQ ID NO: 345440
  chr13:29069851-29069888
  hyper

SEQ ID NO: 373244 - DNA, 200 bp, Homo sapiens; identical to SEQ ID NO: 345441
  chr13:29292491-29292691
  hyper

SEQ ID NO: 373245 - DNA, 242 bp, Homo sapiens; identical to SEQ ID NO: 345442
  chr13:29293342-29293584
  hyper

SEQ ID NO: 373246 - DNA, 97 bp, Homo sapiens; identical to SEQ ID NO: 347263
  chr13:29393559-29393656
  hyper

SEQ ID NO: 373247 - DNA, 177 bp, Homo sapiens; identical to SEQ ID NO: 351461
  chr13:33000891-33001068
  hyper

SEQ ID NO: 373248 - DNA, 204 bp, Homo sapiens; identical to SEQ ID NO: 351462
  chr13:33001228-33001432
  hyper

SEQ ID NO: 373249 - DNA, 276 bp, Homo sapiens; identical to SEQ ID NO: 360277
  chr13:35516217-35516493
  hyper

SEQ ID NO: 373250 - DNA, 469 bp, Homo sapiens; identical to SEQ ID NO: 289664
  chr13:35516535-35517004
  hyper

SEQ ID NO: 373251 - DNA, 80 bp, Homo sapiens; identical to SEQ ID NO: 203325
  chr13:35517052-35517132
  hyper

SEQ ID NO: 373252 - DNA, 200 bp, Homo sapiens; identical to SEQ ID NO: 203326
  chr13:35517173-35517373
  hyper

SEQ ID NO: 373253 - DNA, 118 bp, Homo sapiens; identical to SEQ ID NO: 289679
  chr13:38443934-38444052
  hyper

SEQ ID NO: 373254 - DNA, 243 bp, Homo sapiens; identical to SEQ ID NO: 203334
  chr13:39261446-39261689
  hyper

SEQ ID NO: 373255 - DNA, 73 bp, Homo sapiens; identical to SEQ ID NO: 334754
  chr13:39610527-39610600
  hyper

SEQ ID NO: 373256 - DNA, 334 bp, Homo sapiens; identical to SEQ ID NO: 351467
  chr13:39610814-39611148
  hyper

SEQ ID NO: 373257 - DNA, 199 bp, Homo sapiens; identical to SEQ ID NO: 334756
  chr13:41364049-41364248
  hyper

SEQ ID NO: 373258 - DNA, 479 bp, Homo sapiens; identical to SEQ ID NO: 347264
  chr13:42032017-42032496
  hyper

SEQ ID NO: 373259 - DNA, 109 bp, Homo sapiens; identical to SEQ ID NO: 347265
  chr13:42032649-42032758
  hyper

SEQ ID NO: 373260 - DNA, 318 bp, Homo sapiens; identical to SEQ ID NO: 203348
  chr13:44361226-44361544
  hyper

SEQ ID NO: 373261 - DNA, 62 bp, Homo sapiens; identical to SEQ ID NO: 351471
  chr13:44361578-44361640
  hyper

SEQ ID NO: 373262 - DNA, 284 bp, Homo sapiens; identical to SEQ ID NO: 334760
  chr13:44544261-44544545
  hyper

SEQ ID NO: 373263 - DNA, 107 bp, Homo sapiens; identical to SEQ ID NO: 351473
  chr13:45149906-45150013
  hyper

SEQ ID NO: 373264 - DNA, 141 bp, Homo sapiens; identical to SEQ ID NO: 351474
  chr13:45150276-45150417
  hyper

SEQ ID NO: 373265 - DNA, 480 bp, Homo sapiens; identical to SEQ ID NO: 360291
  chr13:45491759-45492239
  hyper

SEQ ID NO: 373266 - DNA, 546 bp, Homo sapiens; identical to SEQ ID NO: 360292
  chr13:45492271-45492817
  hyper

SEQ ID NO: 373267 - DNA, 132 bp, Homo sapiens; identical to SEQ ID NO: 345443
  chr13:46960952-46961084
  hyper

SEQ ID NO: 373268 - DNA, 135 bp, Homo sapiens; identical to SEQ ID NO: 345444
  chr13:46961683-46961818
  hyper

SEQ ID NO: 373269 - DNA, 60 bp, Homo sapiens; identical to SEQ ID NO: 360295
  chr13:50070360-50070420
  hyper

SEQ ID NO: 373270 - DNA, 49 bp, Homo sapiens; identical to SEQ ID NO: 360296
  chr13:50070717-50070766
  hyper

SEQ ID NO: 373271 - DNA, 139 bp, Homo sapiens; identical to SEQ ID NO: 334767
  chr13:50265737-50265876
  hyper

SEQ ID NO: 373272 - DNA, 80 bp, Homo sapiens; identical to SEQ ID NO: 360298
  chr13:50701609-50701689
  hyper

SEQ ID NO: 373273 - DNA, 279 bp, Homo sapiens; identical to SEQ ID NO: 360299
  chr13:50704210-50704489
  hyper

SEQ ID NO: 373274 - DNA, 247 bp, Homo sapiens; identical to SEQ ID NO: 289749
  chr13:50704800-50705047
  hyper

SEQ ID NO: 373275 - DNA, 64 bp, Homo sapiens; identical to SEQ ID NO: 203370
  chr13:52980451-52980515
  hyper

SEQ ID NO: 373276 - DNA, 123 bp, Homo sapiens; identical to SEQ ID NO: 289767
  chr13:53420877-53421000
  hyper

SEQ ID NO: 373277 - DNA, 80 bp, Homo sapiens; identical to SEQ ID NO: 351477
  chr13:53422554-53422634
  hyper

SEQ ID NO: 373278 - DNA, 231 bp, Homo sapiens; identical to SEQ ID NO: 203374
  chr13:53422885-53423116
  hyper

SEQ ID NO: 373279 - DNA, 64 bp, Homo sapiens; identical to SEQ ID NO: 351479
  chr13:53423198-53423262
  hyper

SEQ ID NO: 373280 - DNA, 82 bp, Homo sapiens; identical to SEQ ID NO: 351480
  chr13:53424677-53424759
  hyper

SEQ ID NO: 373281 - DNA, 303 bp, Homo sapiens; identical to SEQ ID NO: 289778
  chr13:58207012-58207315
  hyper

SEQ ID NO: 373282 - DNA, 141 bp, Homo sapiens; identical to SEQ ID NO: 360306
  chr13:60738352-60738493
  hyper

SEQ ID NO: 373283 - DNA, 154 bp, Homo sapiens; identical to SEQ ID NO: 289787
  chr13:67804074-67804228
  hyper

SEQ ID NO: 373284 - DNA, 196 bp, Homo sapiens; identical to SEQ ID NO: 351482
  chr13:67805438-67805634
  hyper

SEQ ID NO: 373285 - DNA, 173 bp, Homo sapiens; identical to SEQ ID NO: 351483
  chr13:72438297-72438470
  hyper

SEQ ID NO: 373286 - DNA, 206 bp, Homo sapiens; identical to SEQ ID NO: 289790
  chr13:72438563-72438769
  hyper

SEQ ID NO: 373287 - DNA, 138 bp, Homo sapiens; identical to SEQ ID NO: 351485
  chr13:74707123-74707261
  hyper

SEQ ID NO: 373288 - DNA, 211 bp, Homo sapiens; identical to SEQ ID NO: 203386
  chr13:74707414-74707625
  hyper

SEQ ID NO: 373289 - DNA, 915 bp, Homo sapiens; identical to SEQ ID NO: 351487
  chr13:74707668-74708583
  hyper

SEQ ID NO: 373290 - DNA, 42 bp, Homo sapiens
  chr13:76054897-76054939
  hyper
cgaagatgacgcgaccagccaaaccggttaaggatttgactg

SEQ ID NO: 373291 - DNA, 111 bp, Homo sapiens; identical to SEQ ID NO: 360314
  chr13:77459256-77459367
  hyper

SEQ ID NO: 373292 - DNA, 718 bp, Homo sapiens; identical to SEQ ID NO: 347268
  chr13:77459628-77460346
  hyper

SEQ ID NO: 373293 - DNA, 34 bp, Homo sapiens; identical to SEQ ID NO: 360316
  chr13:78271860-78271894
  hyper

SEQ ID NO: 373294 - DNA, 425 bp, Homo sapiens; identical to SEQ ID NO: 360317
  chr13:78272232-78272657
  hyper

SEQ ID NO: 373295 - DNA, 33 bp, Homo sapiens; identical to SEQ ID NO: 360318
  chr13:79160914-79160947
  hyper

SEQ ID NO: 373296 - DNA, 65 bp, Homo sapiens; identical to SEQ ID NO: 360319
  chr13:79161096-79161161
  hyper

SEQ ID NO: 373297 - DNA, 36 bp, Homo sapiens
  chr13:84455524-84455560
  hyper
cgtgtaggtccccttctatctcattgcaggaacaga

SEQ ID NO: 373298 - DNA, 161 bp, Homo sapiens; identical to SEQ ID NO: 203406
  chr13:92050814-92050975
  hyper

SEQ ID NO: 373299 - DNA, 147 bp, Homo sapiens; identical to SEQ ID NO: 345446
  chr13:95201113-95201260
  hyper

SEQ ID NO: 373300 - DNA, 287 bp, Homo sapiens; identical to SEQ ID NO: 203409
  chr13:95201339-95201626
  hyper

SEQ ID NO: 373301 - DNA, 229 bp, Homo sapiens; identical to SEQ ID NO: 203410
  chr13:95201662-95201891
  hyper

SEQ ID NO: 373302 - DNA, 301 bp, Homo sapiens; identical to SEQ ID NO: 203411
  chr13:95202013-95202314
  hyper

SEQ ID NO: 373303 - DNA, 267 bp, Homo sapiens; identical to SEQ ID NO: 345450
  chr13:95202344-95202611
  hyper

SEQ ID NO: 373304 - DNA, 387 bp, Homo sapiens
  chr13:95360413-95360800
  hyper
cttctgcacagtctaacttggcaggaggctctctgcaggcgcaaaacccgccaacttgttagcaagaccattggagtcagaatgggtgataaacgagtctgtggggcctgtggaggtcctcaaacagccgcacaatctgttggcgatatgacctcggtgctccccctcggcatcctcacccctcctcttacccatctttccagtcctcttctcattcatcaacaactccggagcgtttctcccagaaaacgctgatctttgggaaaaggggagggggcgggaggaggcggggagtcttcaggccgaggaggcggccgagctggaaggctcagggtggtaactaagatttagggctggggtgatttccagcgagccgcaggaagttcc

SEQ ID NO: 373305 - DNA, 110 bp, Homo sapiens; identical to SEQ ID NO: 360326
  chr13:96205363-96205473
  hyper

SEQ ID NO: 373306 - DNA, 601 bp, Homo sapiens; identical to SEQ ID NO: 334802
  chr13:96705328-96705929
  hyper

SEQ ID NO: 373307 - DNA, 234 bp, Homo sapiens; identical to SEQ ID NO: 289855
  chr13:96743113-96743347
  hyper

SEQ ID NO: 373308 - DNA, 123 bp, Homo sapiens; identical to SEQ ID NO: 360329
  chr13:99404493-99404616
  hyper

SEQ ID NO: 373309 - DNA, 55 bp, Homo sapiens; identical to SEQ ID NO: 360330
  chr13:100620289-100620344
  hyper

SEQ ID NO: 373310 - DNA, 111 bp, Homo sapiens; identical to SEQ ID NO: 289869
  chr13:100620374-100620485
  hyper

SEQ ID NO: 373311 - DNA, 105 bp, Homo sapiens; identical to SEQ ID NO: 203424
  chr13:100620515-100620620
  hyper

SEQ ID NO: 373312 - DNA, 219 bp, Homo sapiens; identical to SEQ ID NO: 203425
  chr13:100620916-100621135
  hyper

SEQ ID NO: 373313 - DNA, 350 bp, Homo sapiens; identical to SEQ ID NO: 203426
  chr13:100621366-100621716
  hyper

SEQ ID NO: 373314 - DNA, 718 bp, Homo sapiens; identical to SEQ ID NO: 289874
  chr13:100623181-100623899
  hyper

SEQ ID NO: 373315 - DNA, 66 bp, Homo sapiens; identical to SEQ ID NO: 360335
  chr13:100631544-100631610
  hyper

SEQ ID NO: 373316 - DNA, 241 bp, Homo sapiens; identical to SEQ ID NO: 289876
  chr13:100631642-100631883
  hyper

SEQ ID NO: 373317 - DNA, 492 bp, Homo sapiens; identical to SEQ ID NO: 289877
  chr13:100631937-100632429
  hyper

SEQ ID NO: 373318 - DNA, 575 bp, Homo sapiens; identical to SEQ ID NO: 289878
  chr13:100632514-100633089
  hyper

SEQ ID NO: 373319 - DNA, 36 bp, Homo sapiens; identical to SEQ ID NO: 289879
  chr13:100633184-100633220
  hyper

SEQ ID NO: 373320 - DNA, 146 bp, Homo sapiens; identical to SEQ ID NO: 360339
  chr13:100634131-100634277
  hyper

SEQ ID NO: 373321 - DNA, 128 bp, Homo sapiens; identical to SEQ ID NO: 203434
  chr13:100634617-100634745
  hyper

SEQ ID NO: 373322 - DNA, 338 bp, Homo sapiens; identical to SEQ ID NO: 289883
  chr13:100635597-100635935
  hyper

SEQ ID NO: 373323 - DNA, 72 bp, Homo sapiens; identical to SEQ ID NO: 289885
  chr13:100650019-100650091
  hyper

SEQ ID NO: 373324 - DNA, 126 bp, Homo sapiens; identical to SEQ ID NO: 351499
  chr13:103046539-103046665
  hyper

SEQ ID NO: 373325 - DNA, 240 bp, Homo sapiens; identical to SEQ ID NO: 203444
  chr13:107187426-107187666
  hyper

SEQ ID NO: 373326 - DNA, 546 bp, Homo sapiens; identical to SEQ ID NO: 203445
  chr13:107187695-107188241
  hyper

SEQ ID NO: 373327 - DNA, 308 bp, Homo sapiens; identical to SEQ ID NO: 203446
  chr13:107188430-107188738
  hyper

SEQ ID NO: 373328 - DNA, 279 bp, Homo sapiens; identical to SEQ ID NO: 203447
  chr13:107188808-107189087
  hyper

SEQ ID NO: 373329 - DNA, 206 bp, Homo sapiens; identical to SEQ ID NO: 351500
  chr13:108518148-108518354
  hyper

SEQ ID NO: 373330 - DNA, 321 bp, Homo sapiens; identical to SEQ ID NO: 203449
  chr13:108518933-108519254
  hyper

SEQ ID NO: 373331 - DNA, 58 bp, Homo sapiens; identical to SEQ ID NO: 203450
  chr13:108519564-108519622
  hyper

SEQ ID NO: 373332 - DNA, 165 bp, Homo sapiens; identical to SEQ ID NO: 203451
  chr13:108519932-108520097
  hyper

SEQ ID NO: 373333 - DNA, 67 bp, Homo sapiens; identical to SEQ ID NO: 203452
  chr13:108520309-108520376
  hyper

SEQ ID NO: 373334 - DNA, 33 bp, Homo sapiens; identical to SEQ ID NO: 203453
  chr13:108520946-108520979
  hyper

SEQ ID NO: 373335 - DNA, 91 bp, Homo sapiens; identical to SEQ ID NO: 360347
  chr13:110960603-110960694
  hyper

SEQ ID NO: 373336 - DNA, 268 bp, Homo sapiens; identical to SEQ ID NO: 289922
  chr13:111766945-111767213
  hyper

SEQ ID NO: 373337 - DNA, 33 bp, Homo sapiens; identical to SEQ ID NO: 289923
  chr13:111768508-111768541
  hyper

SEQ ID NO: 373338 - DNA, 43 bp, Homo sapiens; identical to SEQ ID NO: 360350
  chr13:112716634-112716677
  hyper

SEQ ID NO: 373339 - DNA, 93 bp, Homo sapiens; identical to SEQ ID NO: 360351
  chr13:112716721-112716814
  hyper

SEQ ID NO: 373340 - DNA, 351 bp, Homo sapiens; identical to SEQ ID NO: 289930
  chr13:112760444-112760795
  hyper

SEQ ID NO: 373341 - DNA, 129 bp, Homo sapiens; identical to SEQ ID NO: 351508
  chr13:113547249-113547378
  hyper

SEQ ID NO: 373342 - DNA, 403 bp, Homo sapiens; identical to SEQ ID NO: 345451
  chr13:113622881-113623284
  hyper

SEQ ID NO: 373343 - DNA, 634 bp, Homo sapiens; identical to SEQ ID NO: 345452
  chr13:113623348-113623982
  hyper

SEQ ID NO: 373344 - DNA, 33 bp, Homo sapiens; identical to SEQ ID NO: 360356
  chr13:114017783-114017816
  hyper

SEQ ID NO: 373345 - DNA, 228 bp, Homo sapiens; identical to SEQ ID NO: 203467
  chr13:114017991-114018219
  hyper

SEQ ID NO: 373346 - DNA, 140 bp, Homo sapiens; identical to SEQ ID NO: 360358
  chr13:114018330-114018470
  hyper

SEQ ID NO: 373347 - DNA, 302 bp, Homo sapiens; identical to SEQ ID NO: 347277
  chr13:114565969-114566271
  hyper

SEQ ID NO: 373348 - DNA, 114 bp, Homo sapiens; identical to SEQ ID NO: 347278
  chr13:114566409-114566523
  hyper

SEQ ID NO: 373349 - DNA, 38 bp, Homo sapiens; identical to SEQ ID NO: 360361
  chr13:114776448-114776486
  hyper

SEQ ID NO: 373350 - DNA, 222 bp, Homo sapiens; identical to SEQ ID NO: 360362
  chr13:114776788-114777010
  hyper

SEQ ID NO: 373351 - DNA, 246 bp, Homo sapiens; identical to SEQ ID NO: 351513
  chr14:21098618-21098864
  hyper

SEQ ID NO: 373352 - DNA, 196 bp, Homo sapiens; identical to SEQ ID NO: 351514
  chr14:21099147-21099343
  hyper

SEQ ID NO: 373353 - DNA, 686 bp, Homo sapiens; identical to SEQ ID NO: 334837
  chr14:21099793-21100479
  hyper

SEQ ID NO: 373354 - DNA, 113 bp, Homo sapiens; identical to SEQ ID NO: 345453
  chr14:21101056-21101169
  hyper

SEQ ID NO: 373355 - DNA, 111 bp, Homo sapiens; identical to SEQ ID NO: 345454
  chr14:21439074-21439185
  hyper

SEQ ID NO: 373356 - DNA, 590 bp, Homo sapiens; identical to SEQ ID NO: 345455
  chr14:21439317-21439907
  hyper

SEQ ID NO: 373357 - DNA, 619 bp, Homo sapiens; identical to SEQ ID NO: 351519
  chr14:21539350-21539969
  hyper

SEQ ID NO: 373358 - DNA, 377 bp, Homo sapiens; identical to SEQ ID NO: 347283
  chr14:23291965-23292342
  hyper

SEQ ID NO: 373359 - DNA, 38 bp, Homo sapiens; identical to SEQ ID NO: 351521
  chr14:23355352-23355390
  hyper

SEQ ID NO: 373360 - DNA, 53 bp, Homo sapiens; identical to SEQ ID NO: 351522
  chr14:23355484-23355537
  hyper

SEQ ID NO: 373361 - DNA, 78 bp, Homo sapiens; identical to SEQ ID NO: 351523
  chr14:23835314-23835392
  hyper

SEQ ID NO: 373362 - DNA, 108 bp, Homo sapiens; identical to SEQ ID NO: 360374
  chr14:24550913-24551021
  hyper

SEQ ID NO: 373363 - DNA, 76 bp, Homo sapiens; identical to SEQ ID NO: 351524
  chr14:24808635-24808711
  hyper

SEQ ID NO: 373364 - DNA, 84 bp, Homo sapiens; identical to SEQ ID NO: 351525
  chr14:24808863-24808947
  hyper

SEQ ID NO: 373365 - DNA, 207 bp, Homo sapiens; identical to SEQ ID NO: 351526
  chr14:25148242-25148449
  hyper

SEQ ID NO: 373366 - DNA, 270 bp, Homo sapiens; identical to SEQ ID NO: 334851
  chr14:25601990-25602260
  hyper

SEQ ID NO: 373367 - DNA, 78 bp, Homo sapiens; identical to SEQ ID NO: 360379
  chr14:27067019-27067097
  hyper

SEQ ID NO: 373368 - DNA, 218 bp, Homo sapiens; identical to SEQ ID NO: 203508
  chr14:27067386-27067604
  hyper

SEQ ID NO: 373369 - DNA, 205 bp, Homo sapiens; identical to SEQ ID NO: 360381
  chr14:27067699-27067904
  hyper

SEQ ID NO: 373370 - DNA, 265 bp, Homo sapiens; identical to SEQ ID NO: 203510
  chr14:29225768-29226033
  hyper

SEQ ID NO: 373371 - DNA, 60 bp, Homo sapiens; identical to SEQ ID NO: 203511
  chr14:29236194-29236254
  hyper

SEQ ID NO: 373372 - DNA, 60 bp, Homo sapiens; identical to SEQ ID NO: 290053
  chr14:29236614-29236674
  hyper

SEQ ID NO: 373373 - DNA, 206 bp, Homo sapiens
  chr14:29243307-29243513
  hyper
cgttctgggcttgactttgtccctgctgggaatatcccagttcctggctttggaaatctcaggcaaataattgattcttaatgcacacttaggagacgtcggtagtacgctcgagagcctctctgtcccagagtggctgagagcacgcgccagacacaggttggctcggcccgaagcgaatttgggactctcgtcgcggtgtccta

SEQ ID NO: 373374 - DNA, 87 bp, Homo sapiens; identical to SEQ ID NO: 351530
  chr14:30739859-30739946
  hyper

SEQ ID NO: 373375 - DNA, 69 bp, Homo sapiens; identical to SEQ ID NO: 351531
  chr14:30740003-30740072
  hyper

SEQ ID NO: 373376 - DNA, 96 bp, Homo sapiens; identical to SEQ ID NO: 360387
  chr14:32671357-32671453
  hyper

SEQ ID NO: 373377 - DNA, 163 bp, Homo sapiens; identical to SEQ ID NO: 347284
  chr14:36002437-36002600
  hyper

SEQ ID NO: 373378 - DNA, 438 bp, Homo sapiens; identical to SEQ ID NO: 290092
  chr14:36003004-36003442
  hyper

SEQ ID NO: 373379 - DNA, 212 bp, Homo sapiens; identical to SEQ ID NO: 360390
  chr14:36789412-36789624
  hyper

SEQ ID NO: 373380 - DNA, 31 bp, Homo sapiens; identical to SEQ ID NO: 360391
  chr14:36977312-36977343
  hyper

SEQ ID NO: 373381 - DNA, 48 bp, Homo sapiens; identical to SEQ ID NO: 360392
  chr14:36979694-36979742
  hyper

SEQ ID NO: 373382 - DNA, 48 bp, Homo sapiens; identical to SEQ ID NO: 360393
  chr14:36979809-36979857
  hyper

SEQ ID NO: 373383 - DNA, 254 bp, Homo sapiens; identical to SEQ ID NO: 203528
  chr14:37050246-37050500
  hyper

SEQ ID NO: 373384 - DNA, 213 bp, Homo sapiens; identical to SEQ ID NO: 203529
  chr14:37050539-37050752
  hyper

SEQ ID NO: 373385 - DNA, 250 bp, Homo sapiens; identical to SEQ ID NO: 290107
  chr14:37050794-37051044
  hyper

SEQ ID NO: 373386 - DNA, 403 bp, Homo sapiens; identical to SEQ ID NO: 290108
  chr14:37051196-37051599
  hyper

SEQ ID NO: 373387 - DNA, 56 bp, Homo sapiens; identical to SEQ ID NO: 360398
  chr14:37116049-37116105
  hyper

SEQ ID NO: 373388 - DNA, 100 bp, Homo sapiens
  chr14:37129247-37129347
  hyper
gtctgtgaggggggaggaggattccttcctggtcaagttgccgggcatgttcattccctcccgcaagcctaaggcagagtcataagctcccctacgatgc

SEQ ID NO: 373389 - DNA, 119 bp, Homo sapiens; identical to SEQ ID NO: 347286
  chr14:37130817-37130936
  hyper

SEQ ID NO: 373390 - DNA, 187 bp, Homo sapiens; identical to SEQ ID NO: 360400
  chr14:37130956-37131143
  hyper

SEQ ID NO: 373391 - DNA, 491 bp, Homo sapiens; identical to SEQ ID NO: 290112
  chr14:37131343-37131834
  hyper

SEQ ID NO: 373392 - DNA, 174 bp, Homo sapiens; identical to SEQ ID NO: 203534
  chr14:37131888-37132062
  hyper

SEQ ID NO: 373393 - DNA, 202 bp, Homo sapiens; identical to SEQ ID NO: 347287
  chr14:37135434-37135636
  hyper

SEQ ID NO: 373394 - DNA, 225 bp, Homo sapiens; identical to SEQ ID NO: 347288
  chr14:38052540-38052765
  hyper

SEQ ID NO: 373395 - DNA, 175 bp, Homo sapiens; identical to SEQ ID NO: 347289
  chr14:38053203-38053378
  hyper

SEQ ID NO: 373396 - DNA, 104 bp, Homo sapiens; identical to SEQ ID NO: 351540
  chr14:38057019-38057123
  hyper

SEQ ID NO: 373397 - DNA, 299 bp, Homo sapiens; identical to SEQ ID NO: 203542
  chr14:38057503-38057802
  hyper

SEQ ID NO: 373398 - DNA, 155 bp, Homo sapiens; identical to SEQ ID NO: 351542
  chr14:38057832-38057987
  hyper

SEQ ID NO: 373399 - DNA, 81 bp, Homo sapiens; identical to SEQ ID NO: 351543
  chr14:38060563-38060644
  hyper

SEQ ID NO: 373400 - DNA, 599 bp, Homo sapiens; identical to SEQ ID NO: 203547
  chr14:38061332-38061931
  hyper

SEQ ID NO: 373401 - DNA, 209 bp, Homo sapiens; identical to SEQ ID NO: 351545
  chr14:38062091-38062300
  hyper

SEQ ID NO: 373402 - DNA, 108 bp, Homo sapiens; identical to SEQ ID NO: 360413
  chr14:38063865-38063973
  hyper

SEQ ID NO: 373403 - DNA, 304 bp, Homo sapiens; identical to SEQ ID NO: 290131
  chr14:38064003-38064307
  hyper

SEQ ID NO: 373404 - DNA, 309 bp, Homo sapiens; identical to SEQ ID NO: 360415
  chr14:38064549-38064858
  hyper

SEQ ID NO: 373405 - DNA, 54 bp, Homo sapiens; identical to SEQ ID NO: 347290
  chr14:38072497-38072551
  hyper

SEQ ID NO: 373406 - DNA, 159 bp, Homo sapiens; identical to SEQ ID NO: 360417
  chr14:38677154-38677313
  hyper

SEQ ID NO: 373407 - DNA, 31 bp, Homo sapiens; identical to SEQ ID NO: 203554
  chr14:38677488-38677519
  hyper

SEQ ID NO: 373408 - DNA, 213 bp, Homo sapiens; identical to SEQ ID NO: 203555
  chr14:38677548-38677761
  hyper

SEQ ID NO: 373409 - DNA, 382 bp, Homo sapiens; identical to SEQ ID NO: 203556
  chr14:38677790-38678172
  hyper

SEQ ID NO: 373410 - DNA, 284 bp, Homo sapiens
  chr14:38678202-38678486
  hyper
acctatgtgctctcctccctttctccaccccacccccttttttcgtagctgctgacgcgctggtggtgcctattaatcatttaccagtccagagccgcgccagttaatggctgtgccgtgcggtgctcccacatcctggcctctcctctccacggtcgcctgtgcccgggcaccccggagctgcaaactgcagagcccaggcaaccgctgggctgtgcgccccgccggcgccggtaggagccgcgctccccgcagcggttgcgctctacccggaggcgctgggc

SEQ ID NO: 373411 - DNA, 52 bp, Homo sapiens; identical to SEQ ID NO: 203558
  chr14:38725469-38725521
  hyper

SEQ ID NO: 373412 - DNA, 242 bp, Homo sapiens; identical to SEQ ID NO: 203561
  chr14:42076386-42076628
  hyper

SEQ ID NO: 373413 - DNA, 51 bp, Homo sapiens; identical to SEQ ID NO: 203562
  chr14:42077719-42077770
  hyper

SEQ ID NO: 373414 - DNA, 201 bp, Homo sapiens; identical to SEQ ID NO: 351548
  chr14:45431382-45431583
  hyper

SEQ ID NO: 373415 - DNA, 586 bp, Homo sapiens; identical to SEQ ID NO: 334893
  chr14:50469917-50470503
  hyper

SEQ ID NO: 373416 - DNA, 77 bp, Homo sapiens; identical to SEQ ID NO: 334894
  chr14:50511831-50511908
  hyper

SEQ ID NO: 373417 - DNA, 711 bp, Homo sapiens; identical to SEQ ID NO: 290161
  chr14:51027134-51027845
  hyper

SEQ ID NO: 373418 - DNA, 104 bp, Homo sapiens; identical to SEQ ID NO: 360427
  chr14:51027881-51027985
  hyper

SEQ ID NO: 373419 - DNA, 101 bp, Homo sapiens; identical to SEQ ID NO: 360428
  chr14:51410195-51410296
  hyper

SEQ ID NO: 373420 - DNA, 224 bp, Homo sapiens; identical to SEQ ID NO: 203569
  chr14:51410345-51410569
  hyper

SEQ ID NO: 373421 - DNA, 293 bp, Homo sapiens; identical to SEQ ID NO: 203570
  chr14:51410740-51411033
  hyper

SEQ ID NO: 373422 - DNA, 223 bp, Homo sapiens; identical to SEQ ID NO: 203572
  chr14:51562012-51562235
  hyper

SEQ ID NO: 373423 - DNA, 260 bp, Homo sapiens; identical to SEQ ID NO: 334898
  chr14:52327346-52327606
  hyper

SEQ ID NO: 373424 - DNA, 314 bp, Homo sapiens; identical to SEQ ID NO: 347295
  chr14:52781114-52781428
  hyper

SEQ ID NO: 373425 - DNA, 79 bp, Homo sapiens; identical to SEQ ID NO: 203582
  chr14:52782046-52782125
  hyper

SEQ ID NO: 373426 - DNA, 509 bp, Homo sapiens; identical to SEQ ID NO: 360435
  chr14:53417820-53418329
  hyper

SEQ ID NO: 373427 - DNA, 537 bp, Homo sapiens; identical to SEQ ID NO: 360436
  chr14:54420542-54421079
  hyper

SEQ ID NO: 373428 - DNA, 229 bp, Homo sapiens; identical to SEQ ID NO: 360437
  chr14:54421301-54421530
  hyper

SEQ ID NO: 373429 - DNA, 149 bp, Homo sapiens
  chr14:54421572-54421721
  hyper
cgctccggagctcaagaactcgggttgcctgccgccccactctccacgcacatacttggttttcttcttaggggcattggcaggtagactttgaggaagaaaagtaaaggatcgaacagctcagccctccctcccgaccgtggatgccc

SEQ ID NO: 373430 - DNA, 510 bp, Homo sapiens; identical to SEQ ID NO: 290191
  chr14:54421831-54422341
  hyper

SEQ ID NO: 373431 - DNA, 84 bp, Homo sapiens
  chr14:54423285-54423369
  hyper
cgggctcgccagcagcagctcctggggacctctgaacggttgcagtgaacctgggcgagggccggggactgtggcgctgcaggc

SEQ ID NO: 373432 - DNA, 128 bp, Homo sapiens; identical to SEQ ID NO: 203595
  chr14:55595810-55595938
  hyper

SEQ ID NO: 373433 - DNA, 133 bp, Homo sapiens; identical to SEQ ID NO: 203596
  chr14:55595968-55596101
  hyper

SEQ ID NO: 373434 - DNA, 437 bp, Homo sapiens; identical to SEQ ID NO: 347298
  chr14:55596153-55596590
  hyper

SEQ ID NO: 373435 - DNA, 144 bp, Homo sapiens; identical to SEQ ID NO: 360441
  chr14:57265912-57266056
  hyper

SEQ ID NO: 373436 - DNA, 113 bp, Homo sapiens; identical to SEQ ID NO: 290221
  chr14:58332405-58332518
  hyper

SEQ ID NO: 373437 - DNA, 47 bp, Homo sapiens; identical to SEQ ID NO: 290222
  chr14:58332593-58332640
  hyper

SEQ ID NO: 373438 - DNA, 164 bp, Homo sapiens; identical to SEQ ID NO: 351561
  chr14:58332908-58333072
  hyper

SEQ ID NO: 373439 - DNA, 214 bp, Homo sapiens; identical to SEQ ID NO: 334917
  chr14:58862962-58863176
  hyper

SEQ ID NO: 373440 - DNA, 173 bp, Homo sapiens; identical to SEQ ID NO: 351562
  chr14:60043607-60043780
  hyper

SEQ ID NO: 373441 - DNA, 79 bp, Homo sapiens; identical to SEQ ID NO: 347299
  chr14:60097114-60097193
  hyper

SEQ ID NO: 373442 - DNA, 637 bp, Homo sapiens; identical to SEQ ID NO: 360447
  chr14:60337053-60337690
  hyper

SEQ ID NO: 373443 - DNA, 44 bp, Homo sapiens; identical to SEQ ID NO: 351564
  chr14:60385935-60385979
  hyper

SEQ ID NO: 373444 - DNA, 61 bp, Homo sapiens; identical to SEQ ID NO: 345458
  chr14:60794412-60794473
  hyper

SEQ ID NO: 373445 - DNA, 44 bp, Homo sapiens; identical to SEQ ID NO: 360450
  chr14:60798413-60798457
  hyper

SEQ ID NO: 373446 - DNA, 276 bp, Homo sapiens; identical to SEQ ID NO: 290237
  chr14:60974092-60974368
  hyper

SEQ ID NO: 373447 - DNA, 110 bp, Homo sapiens; identical to SEQ ID NO: 351567
  chr14:60974415-60974525
  hyper

SEQ ID NO: 373448 - DNA, 134 bp, Homo sapiens; identical to SEQ ID NO: 351568
  chr14:60982999-60983133
  hyper

SEQ ID NO: 373449 - DNA, 167 bp, Homo sapiens; identical to SEQ ID NO: 345459
  chr14:61104864-61105031
  hyper

SEQ ID NO: 373450 - DNA, 115 bp, Homo sapiens; identical to SEQ ID NO: 290242
  chr14:61108996-61109111
  hyper

SEQ ID NO: 373451 - DNA, 240 bp, Homo sapiens; identical to SEQ ID NO: 290243
  chr14:61110268-61110508
  hyper

SEQ ID NO: 373452 - DNA, 181 bp, Homo sapiens; identical to SEQ ID NO: 347302
  chr14:61113933-61114114
  hyper

SEQ ID NO: 373453 - DNA, 275 bp, Homo sapiens; identical to SEQ ID NO: 290245
  chr14:61114722-61114997
  hyper

SEQ ID NO: 373454 - DNA, 132 bp, Homo sapiens; identical to SEQ ID NO: 351572
  chr14:61116736-61116868
  hyper

SEQ ID NO: 373455 - DNA, 186 bp, Homo sapiens; identical to SEQ ID NO: 351573
  chr14:61117028-61117214
  hyper

SEQ ID NO: 373456 - DNA, 354 bp, Homo sapiens; identical to SEQ ID NO: 351574
  chr14:61123186-61123540
  hyper

SEQ ID NO: 373457 - DNA, 623 bp, Homo sapiens; identical to SEQ ID NO: 290253
  chr14:61123681-61124304
  hyper

SEQ ID NO: 373458 - DNA, 655 bp, Homo sapiens; identical to SEQ ID NO: 345460
  chr14:61188627-61189282
  hyper

SEQ ID NO: 373459 - DNA, 64 bp, Homo sapiens; identical to SEQ ID NO: 203621
  chr14:61748033-61748097
  hyper

SEQ ID NO: 373460 - DNA, 130 bp, Homo sapiens; identical to SEQ ID NO: 334940
  chr14:61943723-61943853
  hyper

SEQ ID NO: 373461 - DNA, 196 bp, Homo sapiens; identical to SEQ ID NO: 334941
  chr14:62105869-62106065
  hyper

SEQ ID NO: 373462 - DNA, 76 bp, Homo sapiens
  chr14:62161828-62161904
  hyper
cgaaatcccttctcagcagcgcctcccaaagccgggcaccgccttccttcggagaaggcgcagagtccccagactc

SEQ ID NO: 373463 - DNA, 897 bp, Homo sapiens; identical to SEQ ID NO: 334943
  chr14:62162333-62163230
  hyper

SEQ ID NO: 373464 - DNA, 114 bp, Homo sapiens; identical to SEQ ID NO: 347307
  chr14:62584399-62584513
  hyper

SEQ ID NO: 373465 - DNA, 167 bp, Homo sapiens; identical to SEQ ID NO: 334946
  chr14:64805585-64805752
  hyper

SEQ ID NO: 373466 - DNA, 535 bp, Homo sapiens; identical to SEQ ID NO: 290277
  chr14:65006776-65007311
  hyper

SEQ ID NO: 373467 - DNA, 99 bp, Homo sapiens; identical to SEQ ID NO: 360470
  chr14:65008577-65008676
  hyper

SEQ ID NO: 373468 - DNA, 217 bp, Homo sapiens; identical to SEQ ID NO: 203636
  chr14:65008720-65008937
  hyper

SEQ ID NO: 373469 - DNA, 163 bp, Homo sapiens; identical to SEQ ID NO: 360472
  chr14:65009279-65009442
  hyper

SEQ ID NO: 373470 - DNA, 92 bp, Homo sapiens; identical to SEQ ID NO: 347308
  chr14:65016816-65016908
  hyper

SEQ ID NO: 373471 - DNA, 201 bp, Homo sapiens; identical to SEQ ID NO: 203639
  chr14:65171074-65171275
  hyper

SEQ ID NO: 373472 - DNA, 188 bp, Homo sapiens; identical to SEQ ID NO: 360475
  chr14:65171373-65171561
  hyper

SEQ ID NO: 373473 - DNA, 93 bp, Homo sapiens; identical to SEQ ID NO: 334951
  chr14:66869973-66870066
  hyper

SEQ ID NO: 373474 - DNA, 76 bp, Homo sapiens
  chr14:67878644-67878720
  hyper
cgttccggggcgcgcgtctggccccgctctagggagccgcgtcggcggggccccacccgggcaatgtcccgaagct

SEQ ID NO: 373475 - DNA, 40 bp, Homo sapiens; identical to SEQ ID NO: 290300
  chr14:67878763-67878803
  hyper

SEQ ID NO: 373476 - DNA, 213 bp, Homo sapiens; identical to SEQ ID NO: 334953
  chr14:69259278-69259491
  hyper

SEQ ID NO: 373477 - DNA, 219 bp, Homo sapiens; identical to SEQ ID NO: 347309
  chr14:69261392-69261611
  hyper

SEQ ID NO: 373478 - DNA, 105 bp, Homo sapiens; identical to SEQ ID NO: 351584
  chr14:72399486-72399591
  hyper

SEQ ID NO: 373479 - DNA, 55 bp, Homo sapiens; identical to SEQ ID NO: 360480
  chr14:73358909-73358964
  hyper

SEQ ID NO: 373480 - DNA, 254 bp, Homo sapiens; identical to SEQ ID NO: 290336
  chr14:73359040-73359294
  hyper

SEQ ID NO: 373481 - DNA, 139 bp, Homo sapiens; identical to SEQ ID NO: 360482
  chr14:73359490-73359629
  hyper

SEQ ID NO: 373482 - DNA, 464 bp, Homo sapiens; identical to SEQ ID NO: 334962
  chr14:73359779-73360243
  hyper

SEQ ID NO: 373483 - DNA, 227 bp, Homo sapiens; identical to SEQ ID NO: 334963
  chr14:73360763-73360990
  hyper

SEQ ID NO: 373484 - DNA, 618 bp, Homo sapiens; identical to SEQ ID NO: 347312
  chr14:73957523-73958141
  hyper

SEQ ID NO: 373485 - DNA, 149 bp, Homo sapiens; identical to SEQ ID NO: 290345
  chr14:73958379-73958528
  hyper

SEQ ID NO: 373486 - DNA, 409 bp, Homo sapiens; identical to SEQ ID NO: 360487
  chr14:74100394-74100803
  hyper

SEQ ID NO: 373487 - DNA, 49 bp, Homo sapiens; identical to SEQ ID NO: 360488
  chr14:74208160-74208209
  hyper

SEQ ID NO: 373488 - DNA, 98 bp, Homo sapiens; identical to SEQ ID NO: 334967
  chr14:74238704-74238802
  hyper

SEQ ID NO: 373489 - DNA, 84 bp, Homo sapiens; identical to SEQ ID NO: 360490
  chr14:74254318-74254402
  hyper

SEQ ID NO: 373490 - DNA, 241 bp, Homo sapiens; identical to SEQ ID NO: 203669
  chr14:74708533-74708774
  hyper

SEQ ID NO: 373491 - DNA, 108 bp, Homo sapiens
  chr14:75079225-75079333
  hyper
ccccgaatcgttctcccgcccctcgcctcagggaccgtctttggatcgggggacccaggctgcagccttgcaggtctgaaggaagccgggaggggcgccgaggcccgc

SEQ ID NO: 373492 - DNA, 493 bp, Homo sapiens; identical to SEQ ID NO: 334971
  chr14:75517730-75518223
  hyper

SEQ ID NO: 373493 - DNA, 129 bp, Homo sapiens; identical to SEQ ID NO: 351590
  chr14:75894282-75894411
  hyper

SEQ ID NO: 373494 - DNA, 168 bp, Homo sapiens; identical to SEQ ID NO: 347313
  chr14:76597725-76597893
  hyper

SEQ ID NO: 373495 - DNA, 123 bp, Homo sapiens; identical to SEQ ID NO: 334974
  chr14:76603110-76603233
  hyper

SEQ ID NO: 373496 - DNA, 37 bp, Homo sapiens; identical to SEQ ID NO: 351592
  chr14:76819100-76819137
  hyper

SEQ ID NO: 373497 - DNA, 66 bp, Homo sapiens; identical to SEQ ID NO: 360496
  chr14:77228490-77228556
  hyper

SEQ ID NO: 373498 - DNA, 333 bp, Homo sapiens; identical to SEQ ID NO: 334977
  chr14:77428133-77428466
  hyper

SEQ ID NO: 373499 - DNA, 136 bp, Homo sapiens; identical to SEQ ID NO: 360498
  chr14:77591037-77591173
  hyper

SEQ ID NO: 373500 - DNA, 95 bp, Homo sapiens; identical to SEQ ID NO: 360499
  chr14:77591751-77591846
  hyper

SEQ ID NO: 373501 - DNA, 82 bp, Homo sapiens; identical to SEQ ID NO: 290405
  chr14:77965137-77965219
  hyper

SEQ ID NO: 373502 - DNA, 180 bp, Homo sapiens; identical to SEQ ID NO: 290406
  chr14:77965244-77965424
  hyper

SEQ ID NO: 373503 - DNA, 535 bp, Homo sapiens; identical to SEQ ID NO: 360502
  chr14:81902288-81902823
  hyper

SEQ ID NO: 373504 - DNA, 141 bp, Homo sapiens; identical to SEQ ID NO: 360503
  chr14:81903005-81903146
  hyper

SEQ ID NO: 373505 - DNA, 47 bp, Homo sapiens
  chr14:85996094-85996141
  hyper
cgggggcggagagcagagaagtaaaggaataaaaccaacttcgctgg

SEQ ID NO: 373506 - DNA, 163 bp, Homo sapiens; identical to SEQ ID NO: 290421
  chr14:88458964-88459127
  hyper

SEQ ID NO: 373507 - DNA, 239 bp, Homo sapiens; identical to SEQ ID NO: 290422
  chr14:88459170-88459409
  hyper

SEQ ID NO: 373508 - DNA, 57 bp, Homo sapiens; identical to SEQ ID NO: 351598
  chr14:88459631-88459688
  hyper

SEQ ID NO: 373509 - DNA, 306 bp, Homo sapiens; identical to SEQ ID NO: 290424
  chr14:88789656-88789962
  hyper

SEQ ID NO: 373510 - DNA, 406 bp, Homo sapiens; identical to SEQ ID NO: 360508
  chr14:89493490-89493896
  hyper

SEQ ID NO: 373511 - DNA, 67 bp, Homo sapiens; identical to SEQ ID NO: 351600
  chr14:89818034-89818101
  hyper

SEQ ID NO: 373512 - DNA, 216 bp, Homo sapiens; identical to SEQ ID NO: 334989
  chr14:89884061-89884277
  hyper

SEQ ID NO: 373513 - DNA, 485 bp, Homo sapiens; identical to SEQ ID NO: 351602
  chr14:90085312-90085797
  hyper

SEQ ID NO: 373514 - DNA, 144 bp, Homo sapiens; identical to SEQ ID NO: 360512
  chr14:90527180-90527324
  hyper

SEQ ID NO: 373515 - DNA, 226 bp, Homo sapiens; identical to SEQ ID NO: 203711
  chr14:90527931-90528157
  hyper

SEQ ID NO: 373516 - DNA, 39 bp, Homo sapiens; identical to SEQ ID NO: 351603
  chr14:90849401-90849440
  hyper

SEQ ID NO: 373517 - DNA, 382 bp, Homo sapiens; identical to SEQ ID NO: 203714
  chr14:90849476-90849858
  hyper

SEQ ID NO: 373518 - DNA, 53 bp, Homo sapiens; identical to SEQ ID NO: 203715
  chr14:90849897-90849950
  hyper

SEQ ID NO: 373519 - DNA, 67 bp, Homo sapiens; identical to SEQ ID NO: 351606
  chr14:90850476-90850543
  hyper

SEQ ID NO: 373520 - DNA, 73 bp, Homo sapiens; identical to SEQ ID NO: 360518
  chr14:91580279-91580352
  hyper

SEQ ID NO: 373521 - DNA, 201 bp, Homo sapiens; identical to SEQ ID NO: 360519
  chr14:91580494-91580695
  hyper

SEQ ID NO: 373522 - DNA, 479 bp, Homo sapiens; identical to SEQ ID NO: 334996
  chr14:91581063-91581542
  hyper

SEQ ID NO: 373523 - DNA, 267 bp, Homo sapiens; identical to SEQ ID NO: 334997
  chr14:91755357-91755624
  hyper

SEQ ID NO: 373524 - DNA, 118 bp, Homo sapiens; identical to SEQ ID NO: 290458
  chr14:91883379-91883497
  hyper

SEQ ID NO: 373525 - DNA, 405 bp, Homo sapiens; identical to SEQ ID NO: 351609
  chr14:91883530-91883935
  hyper

SEQ ID NO: 373526 - DNA, 551 bp, Homo sapiens; identical to SEQ ID NO: 335000
  chr14:92302201-92302752
  hyper

SEQ ID NO: 373527 - DNA, 187 bp, Homo sapiens; identical to SEQ ID NO: 203723
  chr14:92980770-92980957
  hyper

SEQ ID NO: 373528 - DNA, 330 bp, Homo sapiens; identical to SEQ ID NO: 335005
  chr14:93214751-93215081
  hyper

SEQ ID NO: 373529 - DNA, 182 bp, Homo sapiens; identical to SEQ ID NO: 345461
  chr14:94406037-94406219
  hyper

SEQ ID NO: 373530 - DNA, 102 bp, Homo sapiens; identical to SEQ ID NO: 347317
  chr14:94889915-94890017
  hyper

SEQ ID NO: 373531 - DNA, 294 bp, Homo sapiens; identical to SEQ ID NO: 290483
  chr14:95235695-95235989
  hyper

SEQ ID NO: 373532 - DNA, 266 bp, Homo sapiens; identical to SEQ ID NO: 290484
  chr14:95236553-95236819
  hyper

SEQ ID NO: 373533 - DNA, 34 bp, Homo sapiens; identical to SEQ ID NO: 360530
  chr14:95236848-95236882
  hyper

SEQ ID NO: 373534 - DNA, 46 bp, Homo sapiens; identical to SEQ ID NO: 290489
  chr14:95240181-95240227
  hyper

SEQ ID NO: 373535 - DNA, 120 bp, Homo sapiens; identical to SEQ ID NO: 335011
  chr14:95240610-95240730
  hyper

SEQ ID NO: 373536 - DNA, 60 bp, Homo sapiens; identical to SEQ ID NO: 203738
  chr14:96342530-96342590
  hyper

SEQ ID NO: 373537 - DNA, 209 bp, Homo sapiens; identical to SEQ ID NO: 290501
  chr14:96505691-96505900
  hyper

SEQ ID NO: 373538 - DNA, 290 bp, Homo sapiens; identical to SEQ ID NO: 290502
  chr14:96506053-96506343
  hyper

SEQ ID NO: 373539 - DNA, 75 bp, Homo sapiens; identical to SEQ ID NO: 351616
  chr14:99736040-99736115
  hyper

SEQ ID NO: 373540 - DNA, 60 bp, Homo sapiens; identical to SEQ ID NO: 203743
  chr14:99736213-99736273
  hyper

SEQ ID NO: 373541 - DNA, 128 bp, Homo sapiens; identical to SEQ ID NO: 351618
  chr14:99736431-99736559
  hyper

SEQ ID NO: 373542 - DNA, 220 bp, Homo sapiens; identical to SEQ ID NO: 351619
  chr14:99737178-99737398
  hyper

SEQ ID NO: 373543 - DNA, 544 bp, Homo sapiens; identical to SEQ ID NO: 351620
  chr14:99737462-99738006
  hyper

SEQ ID NO: 373544 - DNA, 459 bp, Homo sapiens; identical to SEQ ID NO: 203747
  chr14:99740032-99740491
  hyper

SEQ ID NO: 373545 - DNA, 166 bp, Homo sapiens; identical to SEQ ID NO: 360540
  chr14:99740713-99740879
  hyper

SEQ ID NO: 373546 - DNA, 279 bp, Homo sapiens; identical to SEQ ID NO: 203753
  chr14:100259401-100259680
  hyper

SEQ ID NO: 373547 - DNA, 41 bp, Homo sapiens; identical to SEQ ID NO: 351622
  chr14:100438971-100439012
  hyper

SEQ ID NO: 373548 - DNA, 63 bp, Homo sapiens; identical to SEQ ID NO: 360543
  chr14:100613205-100613268
  hyper

SEQ ID NO: 373549 - DNA, 206 bp, Homo sapiens
  chr14:100751380-100751586
  hyper
cgggggggggcggggtagctagggagggagaggaggcaaggaggcaggacggggtctgagcacgcccctcaggtgtttgcatggcttcttcttggcctgccacgtgcgtctgtaccggaccctaggaatatcccgggagctggtggccagccctagcccctgcccgcctggcctttggccagcacttagcgcgggcagccctgccc

SEQ ID NO: 373550 - DNA, 63 bp, Homo sapiens
  chr14:101034173-101034236
  hyper
tcccccgccttccccagcgccctcacccccgacccggcccccgcgagccgcggcacgggagac

SEQ ID NO: 373551 - DNA, 34 bp, Homo sapiens
  chr14:101544235-101544269
  hyper
gagcaggtgtctgagcctttgacgtagacttccc

SEQ ID NO: 373552 - DNA, 72 bp, Homo sapiens; identical to SEQ ID NO: 360544
  chr14:102247600-102247672
  hyper

SEQ ID NO: 373553 - DNA, 50 bp, Homo sapiens; identical to SEQ ID NO: 360545
  chr14:102248214-102248264
  hyper

SEQ ID NO: 373554 - DNA, 377 bp, Homo sapiens; identical to SEQ ID NO: 351623
  chr14:102975682-102976059
  hyper

SEQ ID NO: 373555 - DNA, 212 bp, Homo sapiens; identical to SEQ ID NO: 351624
  chr14:103010929-103011141
  hyper

SEQ ID NO: 373556 - DNA, 99 bp, Homo sapiens; identical to SEQ ID NO: 351625
  chr14:103011360-103011459
  hyper

SEQ ID NO: 373557 - DNA, 62 bp, Homo sapiens
  chr14:103394621-103394683
  hyper
cgaggaccccgggcctgagctcgcccgggctccttccgtgcacagggtctcggcttctcgtc

SEQ ID NO: 373558 - DNA, 142 bp, Homo sapiens; identical to SEQ ID NO: 335034
  chr14:103430237-103430379
  hyper

SEQ ID NO: 373559 - DNA, 42 bp, Homo sapiens
  chr14:103686664-103686706
  hyper
cgcgctcccgggccgaccctctgcggcctctgctctgcgcag

SEQ ID NO: 373560 - DNA, 34 bp, Homo sapiens; identical to SEQ ID NO: 203774
  chr14:103739884-103739918
  hyper

SEQ ID NO: 373561 - DNA, 84 bp, Homo sapiens; identical to SEQ ID NO: 360551
  chr14:103740611-103740695
  hyper

SEQ ID NO: 373562 - DNA, 85 bp, Homo sapiens; identical to SEQ ID NO: 203776
  chr14:103745819-103745904
  hyper

SEQ ID NO: 373563 - DNA, 268 bp, Homo sapiens; identical to SEQ ID NO: 360553
  chr14:103988427-103988695
  hyper

SEQ ID NO: 373564 - DNA, 418 bp, Homo sapiens; identical to SEQ ID NO: 290585
  chr14:103988736-103989154
  hyper

SEQ ID NO: 373565 - DNA, 124 bp, Homo sapiens
  chr14:103989597-103989721
  hyper
ccccggccagtgcgagctggcccggagccgccgaccttcctcaaggtgcccgcaggcgtttcctgggcgatcctggtgcaaagcgaaggcgcgcgggaagcgcagtctggctgcggcccagccc

SEQ ID NO: 373566 - DNA, 217 bp, Homo sapiens; identical to SEQ ID NO: 351628
  chr14:104582815-104583032
  hyper

SEQ ID NO: 373567 - DNA, 988 bp, Homo sapiens; identical to SEQ ID NO: 351629
  chr14:104583110-104584098
  hyper

SEQ ID NO: 373568 - DNA, 340 bp, Homo sapiens; identical to SEQ ID NO: 290593
  chr14:104603375-104603715
  hyper

SEQ ID NO: 373569 - DNA, 352 bp, Homo sapiens; identical to SEQ ID NO: 290594
  chr14:104603753-104604105
  hyper

SEQ ID NO: 373570 - DNA, 199 bp, Homo sapiens; identical to SEQ ID NO: 203782
  chr14:105070705-105070904
  hyper

SEQ ID NO: 373571 - DNA, 62 bp, Homo sapiens; identical to SEQ ID NO: 290596
  chr14:105071236-105071298
  hyper

SEQ ID NO: 373572 - DNA, 36 bp, Homo sapiens
  chr14:105071396-105071432
  hyper
ccgactctgggtcgtcagttcctcatcagctcgaac

SEQ ID NO: 373573 - DNA, 76 bp, Homo sapiens; identical to SEQ ID NO: 335045
  chr14:105155749-105155825
  hyper

SEQ ID NO: 373574 - DNA, 198 bp, Homo sapiens; identical to SEQ ID NO: 345462
  chr14:105189960-105190158
  hyper

SEQ ID NO: 373575 - DNA, 151 bp, Homo sapiens; identical to SEQ ID NO: 351633
  chr14:105196121-105196272
  hyper

SEQ ID NO: 373576 - DNA, 667 bp, Homo sapiens; identical to SEQ ID NO: 351634
  chr14:105293560-105294227
  hyper

SEQ ID NO: 373577 - DNA, 464 bp, Homo sapiens; identical to SEQ ID NO: 351635
  chr14:105330476-105330940
  hyper

SEQ ID NO: 373578 - DNA, 727 bp, Homo sapiens; identical to SEQ ID NO: 203788
  chr14:105330980-105331707
  hyper

SEQ ID NO: 373579 - DNA, 156 bp, Homo sapiens
  chr14:105331744-105331900
  hyper
cgcgagggcagggaccgagccgggccgagctggggaacaagccggggaccaagccggggaccaagccggggactaaggcgagccggagaccgagcccgaacagcaggtaggacgcgccggcccagcgctggccgcggcccgggcctcccatcgccc

SEQ ID NO: 373580 - DNA, 93 bp, Homo sapiens
  chr14:105444359-105444452
  hyper
cggccgggaaggcccagaaccacgcgcgagtcccgcaggcgtctccgagtcccccgcccccaaggcccgcactgcgcgcccctggacacgccc

SEQ ID NO: 373581 - DNA, 134 bp, Homo sapiens
  chr14:105444808-105444942
  hyper
tgccgtcggcctcattcagcccattggctgccgtcgccgcggccccgcccctcccagccaggccccgccccaccccgcgcccccggcccgcctgtcgcgtccgcagaattaactttggactcccgccagggagc

SEQ ID NO: 373582 - DNA, 78 bp, Homo sapiens; identical to SEQ ID NO: 345463
  chr14:105512395-105512473
  hyper

SEQ ID NO: 373583 - DNA, 37 bp, Homo sapiens; identical to SEQ ID NO: 345464
  chr14:105715538-105715575
  hyper

SEQ ID NO: 373584 - DNA, 578 bp, Homo sapiens; identical to SEQ ID NO: 335055
  chr15:26095523-26096101
  hyper

SEQ ID NO: 373585 - DNA, 409 bp, Homo sapiens; identical to SEQ ID NO: 335057
  chr15:26178877-26179286
  hyper

SEQ ID NO: 373586 - DNA, 275 bp, Homo sapiens; identical to SEQ ID NO: 203799
  chr15:28340034-28340309
  hyper

SEQ ID NO: 373587 - DNA, 98 bp, Homo sapiens; identical to SEQ ID NO: 360569
  chr15:28341522-28341620
  hyper

SEQ ID NO: 373588 - DNA, 77 bp, Homo sapiens; identical to SEQ ID NO: 351641
  chr15:28351681-28351758
  hyper

SEQ ID NO: 373589 - DNA, 53 bp, Homo sapiens; identical to SEQ ID NO: 347321
  chr15:29130654-29130707
  hyper

SEQ ID NO: 373590 - DNA, 145 bp, Homo sapiens; identical to SEQ ID NO: 335062
  chr15:29432142-29432287
  hyper

SEQ ID NO: 373591 - DNA, 60 bp, Homo sapiens; identical to SEQ ID NO: 290645
  chr15:29561185-29561245
  hyper

SEQ ID NO: 373592 - DNA, 1045 bp, Homo sapiens; identical to SEQ ID NO: 351644
  chr15:29561316-29562361
  hyper

SEQ ID NO: 373593 - DNA, 63 bp, Homo sapiens; identical to SEQ ID NO: 203804
  chr15:29862439-29862502
  hyper

SEQ ID NO: 373594 - DNA, 288 bp, Homo sapiens; identical to SEQ ID NO: 290648
  chr15:29862582-29862870
  hyper

SEQ ID NO: 373595 - DNA, 67 bp, Homo sapiens; identical to SEQ ID NO: 351647
  chr15:29863222-29863289
  hyper

SEQ ID NO: 373596 - DNA, 329 bp, Homo sapiens; identical to SEQ ID NO: 351648
  chr15:30113537-30113866
  hyper

SEQ ID NO: 373597 - DNA, 319 bp, Homo sapiens; identical to SEQ ID NO: 203810
  chr15:30113984-30114303
  hyper

SEQ ID NO: 373598 - DNA, 431 bp, Homo sapiens; identical to SEQ ID NO: 203811
  chr15:30114349-30114780
  hyper

SEQ ID NO: 373599 - DNA, 375 bp, Homo sapiens; identical to SEQ ID NO: 290655
  chr15:30114810-30115185
  hyper

SEQ ID NO: 373600 - DNA, 247 bp, Homo sapiens
  chr15:31620800-31621047
  hyper
cggtgcggggcgggcggcacctgcaccagggcgggcgctgagcctccagcctggggatcaccgcccgcccccgccagcccagcggcaacagttcccacgcgcggcccgatactttgtagttgattcatctgtggcggttccctcccccctttttgtttcgtttttaacataaagatgaaaatattttaatggacggcaatccttccccattttggtgtaaagaattgtatgcttcctctgagctcac

SEQ ID NO: 373601 - DNA, 339 bp, Homo sapiens; identical to SEQ ID NO: 345465
  chr15:31621317-31621656
  hyper

SEQ ID NO: 373602 - DNA, 507 bp, Homo sapiens; identical to SEQ ID NO: 351653
  chr15:31774606-31775113
  hyper

SEQ ID NO: 373603 - DNA, 209 bp, Homo sapiens; identical to SEQ ID NO: 290663
  chr15:32162282-32162491
  hyper

SEQ ID NO: 373604 - DNA, 761 bp, Homo sapiens; identical to SEQ ID NO: 345467
  chr15:32162523-32163284
  hyper

SEQ ID NO: 373605 - DNA, 155 bp, Homo sapiens; identical to SEQ ID NO: 351656
  chr15:32322773-32322928
  hyper

SEQ ID NO: 373606 - DNA, 46 bp, Homo sapiens; identical to SEQ ID NO: 351657
  chr15:34729898-34729944
  hyper

SEQ ID NO: 373607 - DNA, 72 bp, Homo sapiens; identical to SEQ ID NO: 351658
  chr15:34730043-34730115
  hyper

SEQ ID NO: 373608 - DNA, 234 bp, Homo sapiens; identical to SEQ ID NO: 203822
  chr15:34806641-34806875
  hyper

SEQ ID NO: 373609 - DNA, 89 bp, Homo sapiens; identical to SEQ ID NO: 360589
  chr15:35014062-35014151
  hyper

SEQ ID NO: 373610 - DNA, 110 bp, Homo sapiens; identical to SEQ ID NO: 360590
  chr15:35014287-35014397
  hyper

SEQ ID NO: 373611 - DNA, 88 bp, Homo sapiens; identical to SEQ ID NO: 360591
  chr15:35046519-35046607
  hyper

SEQ ID NO: 373612 - DNA, 181 bp, Homo sapiens; identical to SEQ ID NO: 290677
  chr15:35046689-35046870
  hyper

SEQ ID NO: 373613 - DNA, 94 bp, Homo sapiens; identical to SEQ ID NO: 360593
  chr15:37174944-37175038
  hyper

SEQ ID NO: 373614 - DNA, 240 bp, Homo sapiens; identical to SEQ ID NO: 360594
  chr15:37175296-37175536
  hyper

SEQ ID NO: 373615 - DNA, 60 bp, Homo sapiens; identical to SEQ ID NO: 360595
  chr15:37180043-37180103
  hyper

SEQ ID NO: 373616 - DNA, 171 bp, Homo sapiens; identical to SEQ ID NO: 290687
  chr15:37180138-37180309
  hyper

SEQ ID NO: 373617 - DNA, 133 bp, Homo sapiens; identical to SEQ ID NO: 351659
  chr15:37403336-37403469
  hyper

SEQ ID NO: 373618 - DNA, 111 bp, Homo sapiens; identical to SEQ ID NO: 335080
  chr15:38857279-38857390
  hyper

SEQ ID NO: 373619 - DNA, 300 bp, Homo sapiens; identical to SEQ ID NO: 351661
  chr15:39872823-39873123
  hyper

SEQ ID NO: 373620 - DNA, 161 bp, Homo sapiens; identical to SEQ ID NO: 360600
  chr15:40575352-40575513
  hyper

SEQ ID NO: 373621 - DNA, 247 bp, Homo sapiens; identical to SEQ ID NO: 335084
  chr15:40762832-40763079
  hyper

SEQ ID NO: 373622 - DNA, 416 bp, Homo sapiens; identical to SEQ ID NO: 360602
  chr15:41136701-41137117
  hyper

SEQ ID NO: 373623 - DNA, 44 bp, Homo sapiens; identical to SEQ ID NO: 203840
  chr15:41137147-41137191
  hyper

SEQ ID NO: 373624 - DNA, 384 bp, Homo sapiens; identical to SEQ ID NO: 345468
  chr15:41786420-41786804
  hyper

SEQ ID NO: 373625 - DNA, 43 bp, Homo sapiens; identical to SEQ ID NO: 351664
  chr15:41788242-41788285
  hyper

SEQ ID NO: 373626 - DNA, 526 bp, Homo sapiens; identical to SEQ ID NO: 290724
  chr15:41804115-41804641
  hyper

SEQ ID NO: 373627 - DNA, 205 bp, Homo sapiens; identical to SEQ ID NO: 290725
  chr15:41805869-41806074
  hyper

SEQ ID NO: 373628 - DNA, 61 bp, Homo sapiens; identical to SEQ ID NO: 360608
  chr15:41913266-41913327
  hyper

SEQ ID NO: 373629 - DNA, 361 bp, Homo sapiens; identical to SEQ ID NO: 290728
  chr15:41913372-41913733
  hyper

SEQ ID NO: 373630 - DNA, 210 bp, Homo sapiens; identical to SEQ ID NO: 290729
  chr15:41913957-41914167
  hyper

SEQ ID NO: 373631 - DNA, 31 bp, Homo sapiens; identical to SEQ ID NO: 360611
  chr15:41914240-41914271
  hyper

SEQ ID NO: 373632 - DNA, 135 bp, Homo sapiens; identical to SEQ ID NO: 345469
  chr15:41953174-41953309
  hyper

SEQ ID NO: 373633 - DNA, 447 bp, Homo sapiens; identical to SEQ ID NO: 335091
  chr15:42873450-42873897
  hyper

SEQ ID NO: 373634 - DNA, 41 bp, Homo sapiens; identical to SEQ ID NO: 347332
  chr15:43415157-43415198
  hyper

SEQ ID NO: 373635 - DNA, 279 bp, Homo sapiens; identical to SEQ ID NO: 347333
  chr15:43415273-43415552
  hyper

SEQ ID NO: 373636 - DNA, 353 bp, Homo sapiens; identical to SEQ ID NO: 360616
  chr15:43622635-43622988
  hyper

SEQ ID NO: 373637 - DNA, 257 bp, Homo sapiens; identical to SEQ ID NO: 360617
  chr15:43803503-43803760
  hyper

SEQ ID NO: 373638 - DNA, 133 bp, Homo sapiens; identical to SEQ ID NO: 360618
  chr15:43803825-43803958
  hyper

SEQ ID NO: 373639 - DNA, 171 bp, Homo sapiens; identical to SEQ ID NO: 335095
  chr15:43809685-43809856
  hyper

SEQ ID NO: 373640 - DNA, 64 bp, Homo sapiens; identical to SEQ ID NO: 360620
  chr15:45404769-45404833
  hyper

SEQ ID NO: 373641 - DNA, 232 bp, Homo sapiens; identical to SEQ ID NO: 360621
  chr15:45405166-45405398
  hyper

SEQ ID NO: 373642 - DNA, 91 bp, Homo sapiens; identical to SEQ ID NO: 360622
  chr15:45406361-45406452
  hyper

SEQ ID NO: 373643 - DNA, 54 bp, Homo sapiens; identical to SEQ ID NO: 360623
  chr15:45406895-45406949
  hyper

SEQ ID NO: 373644 - DNA, 104 bp, Homo sapiens; identical to SEQ ID NO: 290767
  chr15:45421846-45421950
  hyper

SEQ ID NO: 373645 - DNA, 205 bp, Homo sapiens; identical to SEQ ID NO: 360624
  chr15:45479833-45480038
  hyper

SEQ ID NO: 373646 - DNA, 537 bp, Homo sapiens; identical to SEQ ID NO: 351669
  chr15:45492672-45493209
  hyper

SEQ ID NO: 373647 - DNA, 159 bp, Homo sapiens; identical to SEQ ID NO: 351670
  chr15:45493371-45493530
  hyper

SEQ ID NO: 373648 - DNA, 210 bp, Homo sapiens; identical to SEQ ID NO: 351671
  chr15:45669920-45670130
  hyper

SEQ ID NO: 373649 - DNA, 274 bp, Homo sapiens; identical to SEQ ID NO: 203861
  chr15:45670188-45670462
  hyper

SEQ ID NO: 373650 - DNA, 124 bp, Homo sapiens; identical to SEQ ID NO: 345470
  chr15:45722474-45722598
  hyper

SEQ ID NO: 373651 - DNA, 339 bp, Homo sapiens; identical to SEQ ID NO: 345471
  chr15:45722599-45722938
  hyper

SEQ ID NO: 373652 - DNA, 212 bp, Homo sapiens; identical to SEQ ID NO: 360631
  chr15:48009312-48009524
  hyper

SEQ ID NO: 373653 - DNA, 211 bp, Homo sapiens; identical to SEQ ID NO: 203867
  chr15:48009670-48009881
  hyper

SEQ ID NO: 373654 - DNA, 120 bp, Homo sapiens; identical to SEQ ID NO: 290783
  chr15:48009969-48010089
  hyper

SEQ ID NO: 373655 - DNA, 208 bp, Homo sapiens; identical to SEQ ID NO: 351677
  chr15:48010897-48011105
  hyper

SEQ ID NO: 373656 - DNA, 61 bp, Homo sapiens
  chr15:48011457-48011518
  hyper
cagcatcccgagccctcagcgccgtcagctggatgatctcacagggaaggcgcagcacatc

SEQ ID NO: 373657 - DNA, 118 bp, Homo sapiens; identical to SEQ ID NO: 345472
  chr15:48469946-48470064
  hyper

SEQ ID NO: 373658 - DNA, 52 bp, Homo sapiens; identical to SEQ ID NO: 203870
  chr15:48470094-48470146
  hyper

SEQ ID NO: 373659 - DNA, 158 bp, Homo sapiens; identical to SEQ ID NO: 203871
  chr15:48470215-48470373
  hyper

SEQ ID NO: 373660 - DNA, 77 bp, Homo sapiens; identical to SEQ ID NO: 345475
  chr15:48936649-48936726
  hyper

SEQ ID NO: 373661 - DNA, 350 bp, Homo sapiens; identical to SEQ ID NO: 335110
  chr15:50474768-50475118
  hyper

SEQ ID NO: 373662 - DNA, 344 bp, Homo sapiens; identical to SEQ ID NO: 360640
  chr15:51386268-51386612
  hyper

SEQ ID NO: 373663 - DNA, 185 bp, Homo sapiens; identical to SEQ ID NO: 360641
  chr15:52404388-52404573
  hyper

SEQ ID NO: 373664 - DNA, 815 bp, Homo sapiens; identical to SEQ ID NO: 360642
  chr15:52587420-52588235
  hyper

SEQ ID NO: 373665 - DNA, 227 bp, Homo sapiens; identical to SEQ ID NO: 203880
  chr15:53078992-53079219
  hyper

SEQ ID NO: 373666 - DNA, 217 bp, Homo sapiens; identical to SEQ ID NO: 203881
  chr15:53080082-53080299
  hyper

SEQ ID NO: 373667 - DNA, 159 bp, Homo sapiens; identical to SEQ ID NO: 203882
  chr15:53082144-53082303
  hyper

SEQ ID NO: 373668 - DNA, 48 bp, Homo sapiens; identical to SEQ ID NO: 360646
  chr15:53095580-53095628
  hyper

SEQ ID NO: 373669 - DNA, 147 bp, Homo sapiens; identical to SEQ ID NO: 360647
  chr15:53489675-53489822
  hyper

SEQ ID NO: 373670 - DNA, 379 bp, Homo sapiens; identical to SEQ ID NO: 360648
  chr15:57598802-57599181
  hyper

SEQ ID NO: 373671 - DNA, 771 bp, Homo sapiens; identical to SEQ ID NO: 335123
  chr15:57668421-57669192
  hyper

SEQ ID NO: 373672 - DNA, 102 bp, Homo sapiens; identical to SEQ ID NO: 203896
  chr15:59729554-59729656
  hyper

SEQ ID NO: 373673 - DNA, 91 bp, Homo sapiens; identical to SEQ ID NO: 347343
  chr15:59729815-59729906
  hyper

SEQ ID NO: 373674 - DNA, 34 bp, Homo sapiens; identical to SEQ ID NO: 360651
  chr15:60288752-60288786
  hyper

SEQ ID NO: 373675 - DNA, 75 bp, Homo sapiens; identical to SEQ ID NO: 351687
  chr15:60289235-60289310
  hyper

SEQ ID NO: 373676 - DNA, 340 bp, Homo sapiens
  chr15:60298179-60298519
  hyper
cacctcactcgccttccctggctcccagtcctgccggcccccacctgggaccgccaccctaacttgttcatttcaccttcggccaacccgccttgccccaagagaactttgttttggacccaggagaccaaacacaaacttgcagatgggccgagaggcgcgtgggagttgtcctcgcccccacatcaaggaaggccggggccacctgagccgaaccatcccctccctgaggccccgaaaccccctcctatttgaccggcgggggaaaccctgtcaccccctcttcgccgagaaaagcgcgtcttccctccgcccagatcggcggagccccgaactctgc

SEQ ID NO: 373677 - DNA, 1567 bp, Homo sapiens; identical to SEQ ID NO: 360654
  chr15:60883782-60885349
  hyper

SEQ ID NO: 373678 - DNA, 376 bp, Homo sapiens; identical to SEQ ID NO: 351689
  chr15:61519485-61519861
  hyper

SEQ ID NO: 373679 - DNA, 39 bp, Homo sapiens; identical to SEQ ID NO: 360656
  chr15:61520369-61520408
  hyper

SEQ ID NO: 373680 - DNA, 58 bp, Homo sapiens; identical to SEQ ID NO: 203905
  chr15:61520497-61520555
  hyper

SEQ ID NO: 373681 - DNA, 178 bp, Homo sapiens; identical to SEQ ID NO: 203906
  chr15:61520576-61520754
  hyper

SEQ ID NO: 373682 - DNA, 60 bp, Homo sapiens; identical to SEQ ID NO: 203907
  chr15:61521496-61521556
  hyper

SEQ ID NO: 373683 - DNA, 43 bp, Homo sapiens; identical to SEQ ID NO: 203908
  chr15:61521578-61521621
  hyper

SEQ ID NO: 373684 - DNA, 97 bp, Homo sapiens; identical to SEQ ID NO: 351690
  chr15:62359006-62359103
  hyper

SEQ ID NO: 373685 - DNA, 381 bp, Homo sapiens; identical to SEQ ID NO: 351691
  chr15:62359104-62359485
  hyper

SEQ ID NO: 373686 - DNA, 114 bp, Homo sapiens; identical to SEQ ID NO: 347344
  chr15:62359741-62359855
  hyper

SEQ ID NO: 373687 - DNA, 87 bp, Homo sapiens; identical to SEQ ID NO: 351693
  chr15:62456599-62456686
  hyper

SEQ ID NO: 373688 - DNA, 130 bp, Homo sapiens; identical to SEQ ID NO: 203914
  chr15:62457008-62457138
  hyper

SEQ ID NO: 373689 - DNA, 257 bp, Homo sapiens; identical to SEQ ID NO: 351695
  chr15:62457296-62457553
  hyper

SEQ ID NO: 373690 - DNA, 38 bp, Homo sapiens; identical to SEQ ID NO: 351696
  chr15:62684313-62684351
  hyper

SEQ ID NO: 373691 - DNA, 34 bp, Homo sapiens; identical to SEQ ID NO: 347345
  chr15:63779725-63779759
  hyper

SEQ ID NO: 373692 - DNA, 71 bp, Homo sapiens; identical to SEQ ID NO: 347346
  chr15:63795400-63795471
  hyper

SEQ ID NO: 373693 - DNA, 350 bp, Homo sapiens; identical to SEQ ID NO: 203920
  chr15:63795501-63795851
  hyper

SEQ ID NO: 373694 - DNA, 338 bp, Homo sapiens; identical to SEQ ID NO: 347348
  chr15:63795894-63796232
  hyper

SEQ ID NO: 373695 - DNA, 137 bp, Homo sapiens; identical to SEQ ID NO: 351701
  chr15:64443636-64443773
  hyper

SEQ ID NO: 373696 - DNA, 202 bp, Homo sapiens
  chr15:64454743-64454945
  hyper
cggaatccggcaggcgtgatctttcaccatctccccagcactgaggggtgtttgcaaaaagcctgctctgagactgccagtgtcggccccagatgggtatccggggatccaactaactccctgggtcagggcaggggctgggggtgtcggggtgggtccgggtcgttccctggactgaatgggcaggacggcccagacgcca

SEQ ID NO: 373697 - DNA, 206 bp, Homo sapiens; identical to SEQ ID NO: 335143
  chr15:65186319-65186525
  hyper

SEQ ID NO: 373698 - DNA, 97 bp, Homo sapiens
  chr15:65714323-65714420
  hyper
cctgctgacctcgtccacgcttccctggtcggtccctggggggtggggccggggtgacacgcgtcccatcgtgagaacaagcgctggacatgtccac

SEQ ID NO: 373699 - DNA, 194 bp, Homo sapiens; identical to SEQ ID NO: 351702
  chr15:67357339-67357533
  hyper

SEQ ID NO: 373700 - DNA, 189 bp, Homo sapiens; identical to SEQ ID NO: 351703
  chr15:67357544-67357733
  hyper

SEQ ID NO: 373701 - DNA, 40 bp, Homo sapiens; identical to SEQ ID NO: 351704
  chr15:68125183-68125223
  hyper

SEQ ID NO: 373702 - DNA, 224 bp, Homo sapiens; identical to SEQ ID NO: 203936
  chr15:68126244-68126468
  hyper

SEQ ID NO: 373703 - DNA, 45 bp, Homo sapiens; identical to SEQ ID NO: 360674
  chr15:68126860-68126905
  hyper

SEQ ID NO: 373704 - DNA, 363 bp, Homo sapiens; identical to SEQ ID NO: 203938
  chr15:68127129-68127492
  hyper

SEQ ID NO: 373705 - DNA, 92 bp, Homo sapiens; identical to SEQ ID NO: 203939
  chr15:68128502-68128594
  hyper

SEQ ID NO: 373706 - DNA, 287 bp, Homo sapiens; identical to SEQ ID NO: 335155
  chr15:68347714-68348001
  hyper

SEQ ID NO: 373707 - DNA, 52 bp, Homo sapiens; identical to SEQ ID NO: 351708
  chr15:68723471-68723523
  hyper

SEQ ID NO: 373708 - DNA, 109 bp, Homo sapiens; identical to SEQ ID NO: 290942
  chr15:68724333-68724442
  hyper

SEQ ID NO: 373709 - DNA, 188 bp, Homo sapiens; identical to SEQ ID NO: 351710
  chr15:68724480-68724668
  hyper

SEQ ID NO: 373710 - DNA, 202 bp, Homo sapiens; identical to SEQ ID NO: 335157
  chr15:68821338-68821540
  hyper

SEQ ID NO: 373711 - DNA, 234 bp, Homo sapiens; identical to SEQ ID NO: 335158
  chr15:69109452-69109686
  hyper

SEQ ID NO: 373712 - DNA, 263 bp, Homo sapiens; identical to SEQ ID NO: 335159
  chr15:69114222-69114485
  hyper

SEQ ID NO: 373713 - DNA, 162 bp, Homo sapiens; identical to SEQ ID NO: 351713
  chr15:69366376-69366538
  hyper

SEQ ID NO: 373714 - DNA, 65 bp, Homo sapiens; identical to SEQ ID NO: 351714
  chr15:69366730-69366795
  hyper

SEQ ID NO: 373715 - DNA, 361 bp, Homo sapiens; identical to SEQ ID NO: 360686
  chr15:71055275-71055636
  hyper

SEQ ID NO: 373716 - DNA, 42 bp, Homo sapiens; identical to SEQ ID NO: 203952
  chr15:71055815-71055857
  hyper

SEQ ID NO: 373717 - DNA, 249 bp, Homo sapiens; identical to SEQ ID NO: 360688
  chr15:71055980-71056229
  hyper

SEQ ID NO: 373718 - DNA, 114 bp, Homo sapiens; identical to SEQ ID NO: 290970
  chr15:71146199-71146313
  hyper

SEQ ID NO: 373719 - DNA, 81 bp, Homo sapiens; identical to SEQ ID NO: 290971
  chr15:71146345-71146426
  hyper

SEQ ID NO: 373720 - DNA, 65 bp, Homo sapiens; identical to SEQ ID NO: 360691
  chr15:71146754-71146819
  hyper

SEQ ID NO: 373721 - DNA, 193 bp, Homo sapiens; identical to SEQ ID NO: 351715
  chr15:71184276-71184469
  hyper

SEQ ID NO: 373722 - DNA, 766 bp, Homo sapiens; identical to SEQ ID NO: 290974
  chr15:71184499-71185265
  hyper

SEQ ID NO: 373723 - DNA, 127 bp, Homo sapiens; identical to SEQ ID NO: 351717
  chr15:71185295-71185422
  hyper

SEQ ID NO: 373724 - DNA, 587 bp, Homo sapiens; identical to SEQ ID NO: 345477
  chr15:71407569-71408156
  hyper

SEQ ID NO: 373725 - DNA, 773 bp, Homo sapiens; identical to SEQ ID NO: 360696
  chr15:72523255-72524028
  hyper

SEQ ID NO: 373726 - DNA, 118 bp, Homo sapiens; identical to SEQ ID NO: 335168
  chr15:72612103-72612221
  hyper

SEQ ID NO: 373727 - DNA, 79 bp, Homo sapiens; identical to SEQ ID NO: 347351
  chr15:72612906-72612985
  hyper

SEQ ID NO: 373728 - DNA, 331 bp, Homo sapiens; identical to SEQ ID NO: 335170
  chr15:72668400-72668731
  hyper

SEQ ID NO: 373729 - DNA, 448 bp, Homo sapiens; identical to SEQ ID NO: 351720
  chr15:73660925-73661373
  hyper

SEQ ID NO: 373730 - DNA, 987 bp, Homo sapiens
  chr15:73976461-73977448
  hyper
cggggtgggggatgggcagcgccctgctccgggagccgagggttttccccgccagggtcaggcctgggggcggggcggggcgggggcgggggccaggccgtgtgctctgcccagcgggctggctcaggcctcggtcagcagccgccaccgcggggccaatccggcctcagggacgcaccggagccgcctttccgggcctcaggcggattctccggcgcggcccgccccgcccctcggactccccgggccgcccccggcccccattcgggccgggcctcgctgcggcggcgactgagccaggctgggccgcgtccctgagtcccagagtcggcgcggcgcggtgagtgctggcgtggcgcgggcggcgcggggtggggcggcctttgtctgctgcgggccgggcctggatcccgcggaggtccgcacgttcccgctcagggctgcaggagctgagcagggcgccttccctccgggctcctgctcccctgccctcccccaggtccgggcggcccccctcgcacaggagtcccgggaaccgcgggcgcccctcctgccctgggctgtggggcccgcggagagctgggggctcccggatcctaccccgcccccctttcctcgggttgagaggggcccgggcgccgtcggacctgcagaccccggaagctgcggaccgggccgggtgggtgaatgcgcttttgcaggccccgggtctggagcgggcatgggggcagatctgtcccgtgttgaagcttaacgaagccaccggccggcgctgggaggttagcggggtctcgggtcctgcagaggaaaacgcccagctccgggaggggagcggcggggagggaaggcgagtggttaggcgtgtccactctgcagggcccagcagggcgaaggtgtgggcgactggtgcacttccacaggcagccgtgggcagcatgaggggtcagattccgggaaggacaggtagagacggctggcaggggccac

SEQ ID NO: 373731 - DNA, 70 bp, Homo sapiens; identical to SEQ ID NO: 360701
  chr15:74219413-74219483
  hyper

SEQ ID NO: 373732 - DNA, 56 bp, Homo sapiens; identical to SEQ ID NO: 360702
  chr15:74219620-74219676
  hyper

SEQ ID NO: 373733 - DNA, 375 bp, Homo sapiens
  chr15:74725128-74725503
  hyper
cgaatcggactgggggcggggaggcatttgtgtgcaatgcaggggaggggagatcagttcctcgcggcagaaagcctcaaacccccgcctaaccggctttctgtcccatagtacagggtctaaactgaggtgccctgggggagactccagtcccccaggttcttattatctaccctggcctaaaggctgcacccccgccctagatccaccgcctgggggtcccaacggccgtgccccacccaacgggcactgccccccaacgctggagccgatttctggtgacaactgccacgtgcgggcaaggggggagcggccggtcccggcattgctgaggcagcgccctggtaccccaagccgccgcaccgcaccatgtcc

SEQ ID NO: 373734 - DNA, 675 bp, Homo sapiens
  chr15:74725548-74726223
  hyper
cgggccggggcgggggcgggggcaggcggcggggtctttgttcccgctgccgaagcgcggcggcggcggcaaggggtccgcgccccccttgccggcccagcctgcgccccgcgcgccagcagagcccgcagctcaaaaggagggtacccgggttggggtcccaggcggggaaaggtcctccgccgaagcccccgagccagaggacccagagtggctcggggccgagagaggggcccgccccctcccctggcgcccgggcgttgcggctcctggctgccagggacttggtgcgacttagccggggctccggcccccgccgctcgctcgccgcagcgttacagccggctctggtgtgccagcgtgtacactcacacacactcacccaaacccacacgctccacgcggggacagcgcggggacagcccgggacccgcagagctgcgcgcacgcactccctccgggtgcagcacactccgcacccgccccgcgcagcgtctgatcccgcgcctgaccggccgcgcggcgccgcctacctttccagacggcgaagatgcggggtccgctccttaggtggccctgggcggaggcggcggccgcccagagcagcagcagcagccgcagccgcagcggaagccccaaccgagccggcgggccagggacgcgggcgcgcggtgc

SEQ ID NO: 373735 - DNA, 264 bp, Homo sapiens; identical to SEQ ID NO: 351721
  chr15:74988539-74988803
  hyper

SEQ ID NO: 373736 - DNA, 457 bp, Homo sapiens; identical to SEQ ID NO: 335177
  chr15:75075794-75076251
  hyper

SEQ ID NO: 373737 - DNA, 247 bp, Homo sapiens; identical to SEQ ID NO: 291013
  chr15:75248843-75249090
  hyper

SEQ ID NO: 373738 - DNA, 49 bp, Homo sapiens; identical to SEQ ID NO: 351722
  chr15:75250996-75251045
  hyper

SEQ ID NO: 373739 - DNA, 86 bp, Homo sapiens; identical to SEQ ID NO: 351723
  chr15:75251811-75251897
  hyper

SEQ ID NO: 373740 - DNA, 138 bp, Homo sapiens; identical to SEQ ID NO: 360708
  chr15:75470758-75470896
  hyper

SEQ ID NO: 373741 - DNA, 191 bp, Homo sapiens; identical to SEQ ID NO: 335181
  chr15:75976190-75976381
  hyper

SEQ ID NO: 373742 - DNA, 134 bp, Homo sapiens; identical to SEQ ID NO: 203983
  chr15:76629531-76629665
  hyper

SEQ ID NO: 373743 - DNA, 367 bp, Homo sapiens; identical to SEQ ID NO: 203984
  chr15:76632803-76633170
  hyper

SEQ ID NO: 373744 - DNA, 158 bp, Homo sapiens
  chr15:76633206-76633364
  hyper
cggcagctgcagaaaggtgggagtgcaggtcttgcctttcctcaccgggcggttggcttccagcaccgaggctgacctatcgtggcaagtttgcggcccccgcagatccccagtggagaaagagggctcttccgatgcgatcgagtgtgcgcctcccc

SEQ ID NO: 373745 - DNA, 67 bp, Homo sapiens; identical to SEQ ID NO: 351726
  chr15:76638250-76638317
  hyper

SEQ ID NO: 373746 - DNA, 86 bp, Homo sapiens; identical to SEQ ID NO: 351727
  chr15:76639126-76639212
  hyper

SEQ ID NO: 373747 - DNA, 46 bp, Homo sapiens; identical to SEQ ID NO: 351728
  chr15:78236702-78236748
  hyper

SEQ ID NO: 373748 - DNA, 60 bp, Homo sapiens; identical to SEQ ID NO: 203990
  chr15:79383268-79383328
  hyper

SEQ ID NO: 373749 - DNA, 62 bp, Homo sapiens; identical to SEQ ID NO: 351730
  chr15:79384146-79384208
  hyper

SEQ ID NO: 373750 - DNA, 71 bp, Homo sapiens
  chr15:79725539-79725610
  hyper
agcgataatttccttgggctaccgaatccatcagagtagtcatttgtcccctcgccggcggtgcggggagc

SEQ ID NO: 373751 - DNA, 1218 bp, Homo sapiens; identical to SEQ ID NO: 335194
  chr15:80215312-80216530
  hyper

SEQ ID NO: 373752 - DNA, 128 bp, Homo sapiens; identical to SEQ ID NO: 335195
  chr15:80352864-80352992
  hyper

SEQ ID NO: 373753 - DNA, 394 bp, Homo sapiens
  chr15:81072326-81072720
  hyper
cgccgaggagggagtaccacaagggtcaggtctcggtgtcctgccgactgggagccagctcacgccgagctctagcgggcgtgcgcctagcaacaggtctgcgccctgctgctcctgcctcagcacgctcttcctcccagtttccctcgcctcccagtgcctccgggacagcgctaggcacccagcgacgcgctggcgcggggccgagctgaggcaattgcaatgttagatgaacccggggggctctgctgatgtttagactgagactccaaacgtggcatcgctggaagaaggtctggtggtccctggcaaaggacgtcggctccaagaaaggtcgcgttaggttgtgaggaaaggcagagagtcctggcagaacgctggccaggtctccagc

SEQ ID NO: 373754 - DNA, 371 bp, Homo sapiens; identical to SEQ ID NO: 291070
  chr15:81072789-81073160
  hyper

SEQ ID NO: 373755 - DNA, 196 bp, Homo sapiens; identical to SEQ ID NO: 347353
  chr15:81294105-81294301
  hyper

SEQ ID NO: 373756 - DNA, 194 bp, Homo sapiens; identical to SEQ ID NO: 345478
  chr15:82339684-82339878
  hyper

SEQ ID NO: 373757 - DNA, 43 bp, Homo sapiens; identical to SEQ ID NO: 360720
  chr15:83315393-83315436
  hyper

SEQ ID NO: 373758 - DNA, 73 bp, Homo sapiens; identical to SEQ ID NO: 360721
  chr15:83377928-83378001
  hyper

SEQ ID NO: 373759 - DNA, 125 bp, Homo sapiens; identical to SEQ ID NO: 204007
  chr15:83378087-83378212
  hyper

SEQ ID NO: 373760 - DNA, 54 bp, Homo sapiens; identical to SEQ ID NO: 360723
  chr15:83620900-83620954
  hyper

SEQ ID NO: 373761 - DNA, 319 bp, Homo sapiens; identical to SEQ ID NO: 360724
  chr15:83621407-83621726
  hyper

SEQ ID NO: 373762 - DNA, 127 bp, Homo sapiens; identical to SEQ ID NO: 360725
  chr15:83875521-83875648
  hyper

SEQ ID NO: 373763 - DNA, 59 bp, Homo sapiens; identical to SEQ ID NO: 347355
  chr15:83951722-83951781
  hyper

SEQ ID NO: 373764 - DNA, 227 bp, Homo sapiens; identical to SEQ ID NO: 204012
  chr15:83952822-83953049
  hyper

SEQ ID NO: 373765 - DNA, 181 bp, Homo sapiens; identical to SEQ ID NO: 360728
  chr15:84323434-84323615
  hyper

SEQ ID NO: 373766 - DNA, 99 bp, Homo sapiens; identical to SEQ ID NO: 351737
  chr15:88801240-88801339
  hyper

SEQ ID NO: 373767 - DNA, 493 bp, Homo sapiens; identical to SEQ ID NO: 291111
  chr15:89437837-89438330
  hyper

SEQ ID NO: 373768 - DNA, 250 bp, Homo sapiens; identical to SEQ ID NO: 204020
  chr15:89438421-89438671
  hyper

SEQ ID NO: 373769 - DNA, 107 bp, Homo sapiens; identical to SEQ ID NO: 204021
  chr15:89438672-89438779
  hyper

SEQ ID NO: 373770 - DNA, 101 bp, Homo sapiens; identical to SEQ ID NO: 345482
  chr15:89438863-89438964
  hyper

SEQ ID NO: 373771 - DNA, 68 bp, Homo sapiens; identical to SEQ ID NO: 360734
  chr15:89913879-89913947
  hyper

SEQ ID NO: 373772 - DNA, 136 bp, Homo sapiens; identical to SEQ ID NO: 360735
  chr15:89921803-89921939
  hyper

SEQ ID NO: 373773 - DNA, 34 bp, Homo sapiens; identical to SEQ ID NO: 351742
  chr15:89942592-89942626
  hyper

SEQ ID NO: 373774 - DNA, 59 bp, Homo sapiens; identical to SEQ ID NO: 360737
  chr15:89943816-89943875
  hyper

SEQ ID NO: 373775 - DNA, 294 bp, Homo sapiens; identical to SEQ ID NO: 291126
  chr15:89949942-89950236
  hyper

SEQ ID NO: 373776 - DNA, 76 bp, Homo sapiens
  chr15:89956224-89956300
  hyper
cgcccccgacctactgacccctcttcccccctgacatgaatagtgggactcacagcctccccagcctctccaacta

SEQ ID NO: 373777 - DNA, 40 bp, Homo sapiens; identical to SEQ ID NO: 335222
  chr15:90016187-90016227
  hyper

SEQ ID NO: 373778 - DNA, 272 bp, Homo sapiens
  chr15:90319583-90319855
  hyper
cggccatggcccagtcgcctcctccgcagagcctcctcggccacgaccactggatcttcgcccagggctggggctgggccggccactgggactccacgtccccggcctcctcctccgattcgtcgggttcgtgcccctgcgacggcgcccgcggactcccgcagccacagcctccgagctgcagctcccgagccgcagaggcagccgcgacgacgcccagacgagcgcgcaccggaccagcgggcggacagcggcagagcgccagcgagcgg

SEQ ID NO: 373779 - DNA, 109 bp, Homo sapiens; identical to SEQ ID NO: 351743
  chr15:91427360-91427469
  hyper

SEQ ID NO: 373780 - DNA, 77 bp, Homo sapiens; identical to SEQ ID NO: 351744
  chr15:91427979-91428056
  hyper

SEQ ID NO: 373781 - DNA, 103 bp, Homo sapiens; identical to SEQ ID NO: 347360
  chr15:92459227-92459330
  hyper

SEQ ID NO: 373782 - DNA, 200 bp, Homo sapiens; identical to SEQ ID NO: 347361
  chr15:93199039-93199239
  hyper

SEQ ID NO: 373783 - DNA, 87 bp, Homo sapiens; identical to SEQ ID NO: 335230
  chr15:93352994-93353081
  hyper

SEQ ID NO: 373784 - DNA, 76 bp, Homo sapiens
  chr15:93616753-93616829
  hyper
agtagaaaaactgtccttggaggcaaatcccagccctactttccaaccagactgccgaccccaagcttccaccgac

SEQ ID NO: 373785 - DNA, 757 bp, Homo sapiens; identical to SEQ ID NO: 335233
  chr15:94774574-94775331
  hyper

SEQ ID NO: 373786 - DNA, 202 bp, Homo sapiens; identical to SEQ ID NO: 335234
  chr15:96596605-96596807
  hyper

SEQ ID NO: 373787 - DNA, 460 bp, Homo sapiens; identical to SEQ ID NO: 351747
  chr15:96873798-96874258
  hyper

SEQ ID NO: 373788 - DNA, 159 bp, Homo sapiens; identical to SEQ ID NO: 351748
  chr15:96874514-96874673
  hyper

SEQ ID NO: 373789 - DNA, 597 bp, Homo sapiens; identical to SEQ ID NO: 291171
  chr15:96883828-96884425
  hyper

SEQ ID NO: 373790 - DNA, 157 bp, Homo sapiens; identical to SEQ ID NO: 360748
  chr15:96884499-96884656
  hyper

SEQ ID NO: 373791 - DNA, 177 bp, Homo sapiens
  chr15:96959372-96959549
  hyper
aggggcctttcctcttgtcgctctcgctttattacattagcgcgggcttccccgcgccggcgtgggctcagaagccgaggcgccgggtcacccatgacaaatgtccccgtgtctcgccaacaggccccgcctggccctgccactccatctgcccaacaggaccccggagagtgcttg

SEQ ID NO: 373792 - DNA, 134 bp, Homo sapiens; identical to SEQ ID NO: 351749
  chr15:96960242-96960376
  hyper

SEQ ID NO: 373793 - DNA, 99 bp, Homo sapiens; identical to SEQ ID NO: 291180
  chr15:96960409-96960508
  hyper

SEQ ID NO: 373794 - DNA, 289 bp, Homo sapiens; identical to SEQ ID NO: 351751
  chr15:96960826-96961115
  hyper

SEQ ID NO: 373795 - DNA, 324 bp, Homo sapiens; identical to SEQ ID NO: 351752
  chr15:99090794-99091118
  hyper

SEQ ID NO: 373796 - DNA, 236 bp, Homo sapiens; identical to SEQ ID NO: 204059
  chr15:99091372-99091608
  hyper

SEQ ID NO: 373797 - DNA, 78 bp, Homo sapiens
  chr15:99192824-99192902
  hyper
cggaggagggtccccgacctcgctgtgggggctcctgtttctctccgccgcgctctcgctctggccgacgagtggaga

SEQ ID NO: 373798 - DNA, 265 bp, Homo sapiens; identical to SEQ ID NO: 204065
  chr15:99192941-99193206
  hyper

SEQ ID NO: 373799 - DNA, 176 bp, Homo sapiens
  chr15:99193738-99193914
  hyper
cgggccgggggatggaggggtactagggccgcatccgagtgtgcgttggtgggtgtgtggtcggagccgacgtgcattccgacacacgtgctcgcagcgcggggtgtagtcgccgcctcacggggacacctagacgcccgtccctggcgagaggtgtcgtacgctgtggtttcagc

SEQ ID NO: 373800 - DNA, 372 bp, Homo sapiens
  chr15:99194186-99194558
  hyper
ttttattcttctgaaaaagttgaaagtgtggcttactggtacattcaagatggtagggtaatttgaacacgattaaaagtttaaatgtcgcagaactgggactgggaacggtgagggcgtgttggtgagtaatggttgccgagggtatgcaggtggtgccgattaactttgaaaaaatcacgactgagccttcacgagtgaggcggggaaggaggaggcagcggaggttgtatggccccatcaccggggcaattcagaaaggctgtttctataaacaaatccttaaacgtctggtaagaaatgagtccgcgacggaacgagagcagatcgtggttcgcgtgtttactgccgagtgggacgcggactggggcc

SEQ ID NO: 373801 - DNA, 97 bp, Homo sapiens; identical to SEQ ID NO: 204070
  chr15:100881161-100881258
  hyper

SEQ ID NO: 373802 - DNA, 468 bp, Homo sapiens; identical to SEQ ID NO: 345483
  chr15:100882092-100882560
  hyper

SEQ ID NO: 373803 - DNA, 547 bp, Homo sapiens; identical to SEQ ID NO: 335243
  chr15:100889946-100890493
  hyper

SEQ ID NO: 373804 - DNA, 497 bp, Homo sapiens; identical to SEQ ID NO: 335245
  chr15:101458286-101458783
  hyper

SEQ ID NO: 373805 - DNA, 693 bp, Homo sapiens; identical to SEQ ID NO: 291211
  chr15:101459313-101460006
  hyper

SEQ ID NO: 373806 - DNA, 50 bp, Homo sapiens; identical to SEQ ID NO: 351759
  chr15:101460335-101460385
  hyper

SEQ ID NO: 373807 - DNA, 143 bp, Homo sapiens; identical to SEQ ID NO: 291213
  chr15:101513869-101514012
  hyper

SEQ ID NO: 373808 - DNA, 61 bp, Homo sapiens; identical to SEQ ID NO: 351761
  chr15:102028780-102028841
  hyper

SEQ ID NO: 373809 - DNA, 502 bp, Homo sapiens; identical to SEQ ID NO: 291217
  chr15:102028992-102029494
  hyper

SEQ ID NO: 373810 - DNA, 142 bp, Homo sapiens; identical to SEQ ID NO: 351763
  chr15:102030030-102030172
  hyper

SEQ ID NO: 373811 - DNA, 391 bp, Homo sapiens
  chr16:325107-325498
  hyper
cggggccgcggaagcgggcgagggcgggacgagccgggcctcctctcccctatgtgctccccacccttgcacagcgcgctcagcagggctctgagaactgccagactccaggaaaacccaggcctaggccaccagcccagtgaccccagggcccagtgggaggcagggcgctcaccctcctccgagacgcagaacttctgggccaaccactgcacgacgtcgctgcctgcacgggagagacagaggtggagggaggccgaggcgcgcacgcacccccgccccggcgcgcctcacctgtcaccgcgtggggaatgacggtgaccagcaggcgctggctccgcatcttcacgccctggtcggggtcctgcatgctcacgaccacccgctccat

SEQ ID NO: 373812 - DNA, 55 bp, Homo sapiens
  chr16:325546-325601
  hyper
attccctggcaccggccgggatgccccggatccgggagcgcggagattaacgcgc

SEQ ID NO: 373813 - DNA, 62 bp, Homo sapiens; identical to SEQ ID NO: 351764
  chr16:745060-745122
  hyper

SEQ ID NO: 373814 - DNA, 97 bp, Homo sapiens; identical to SEQ ID NO: 291235
  chr16:745316-745413
  hyper

SEQ ID NO: 373815 - DNA, 179 bp, Homo sapiens; identical to SEQ ID NO: 360766
  chr16:1035474-1035653
  hyper

SEQ ID NO: 373816 - DNA, 46 bp, Homo sapiens; identical to SEQ ID NO: 360767
  chr16:1383142-1383188
  hyper

SEQ ID NO: 373817 - DNA, 39 bp, Homo sapiens; identical to SEQ ID NO: 360768
  chr16:1967780-1967819
  hyper

SEQ ID NO: 373818 - DNA, 223 bp, Homo sapiens; identical to SEQ ID NO: 291256
  chr16:1967909-1968132
  hyper

SEQ ID NO: 373819 - DNA, 85 bp, Homo sapiens; identical to SEQ ID NO: 360770
  chr16:2040762-2040847
  hyper

SEQ ID NO: 373820 - DNA, 96 bp, Homo sapiens; identical to SEQ ID NO: 204085
  chr16:2042503-2042599
  hyper

SEQ ID NO: 373821 - DNA, 226 bp, Homo sapiens; identical to SEQ ID NO: 360772
  chr16:2042617-2042843
  hyper

SEQ ID NO: 373822 - DNA, 150 bp, Homo sapiens; identical to SEQ ID NO: 360773
  chr16:2245386-2245536
  hyper

SEQ ID NO: 373823 - DNA, 208 bp, Homo sapiens; identical to SEQ ID NO: 335262
  chr16:2301873-2302081
  hyper

SEQ ID NO: 373824 - DNA, 274 bp, Homo sapiens; identical to SEQ ID NO: 291274
  chr16:2391769-2392043
  hyper

SEQ ID NO: 373825 - DNA, 102 bp, Homo sapiens; identical to SEQ ID NO: 204091
  chr16:3078252-3078354
  hyper

SEQ ID NO: 373826 - DNA, 335 bp, Homo sapiens; identical to SEQ ID NO: 351770
  chr16:3078384-3078719
  hyper

SEQ ID NO: 373827 - DNA, 31 bp, Homo sapiens
  chr16:3156725-3156756
  hyper
cggggccgttgcttgggcgacaggctccagc

SEQ ID NO: 373828 - DNA, 304 bp, Homo sapiens; identical to SEQ ID NO: 351771
  chr16:3208795-3209099
  hyper

SEQ ID NO: 373829 - DNA, 212 bp, Homo sapiens; identical to SEQ ID NO: 345485
  chr16:3222239-3222451
  hyper

SEQ ID NO: 373830 - DNA, 48 bp, Homo sapiens; identical to SEQ ID NO: 204097
  chr16:3238043-3238091
  hyper

SEQ ID NO: 373831 - DNA, 144 bp, Homo sapiens
  chr16:3241328-3241472
  hyper
cgcagagcggtgagcaaagtcttgcaccagcggggatgtcggggtggaactgaacctgttgtaggggacccccagtgtgccctggtttctggggctgattcattacgtcacttagtttctactattctcatgccaccccgccaa

SEQ ID NO: 373832 - DNA, 282 bp, Homo sapiens; identical to SEQ ID NO: 351774
  chr16:4165534-4165816
  hyper

SEQ ID NO: 373833 - DNA, 1114 bp, Homo sapiens; identical to SEQ ID NO: 351775
  chr16:4165852-4166966
  hyper

SEQ ID NO: 373834 - DNA, 543 bp, Homo sapiens; identical to SEQ ID NO: 345486
  chr16:4233245-4233788
  hyper

SEQ ID NO: 373835 - DNA, 187 bp, Homo sapiens; identical to SEQ ID NO: 335276
  chr16:4234090-4234277
  hyper

SEQ ID NO: 373836 - DNA, 48 bp, Homo sapiens; identical to SEQ ID NO: 345487
  chr16:4363872-4363920
  hyper

SEQ ID NO: 373837 - DNA, 158 bp, Homo sapiens; identical to SEQ ID NO: 345488
  chr16:4364080-4364238
  hyper

SEQ ID NO: 373838 - DNA, 341 bp, Homo sapiens; identical to SEQ ID NO: 291310
  chr16:4377552-4377893
  hyper

SEQ ID NO: 373839 - DNA, 451 bp, Homo sapiens
  chr16:4421671-4422122
  hyper
cgcgcaggtcaggtggccgcagggtgagggccagggcaacccggcccacgagcccctcggtggggaaggggcgtgtctccacgcggctccgccccggccaatggggagaggccccgcccctgccgcggcgggcccgccccccgggactcttaaggcgcgacctgcctccagcgagccgactccggagcccgagcccggggcgggtggacgcggactcgaacgcagttgcttcgggacccaggaccccctcgggcccgacccgccaggaaagactgaggccgcggcctgccccgcccggctccctgcgccgccgccgcctcccggtgagtttctgtggggctggggggctgcgggcggggaagggggcgccacggccaggctgtgcacacgcgcggggaccgccgccgcgcgcacacacgcactctcgggcgggaccgcggccccagcccca

SEQ ID NO: 373840 - DNA, 50 bp, Homo sapiens
  chr16:4422253-4422303
  hyper
acaaaataaacaccccgtcccatgcttcctcctcccacggctgggcctcc

SEQ ID NO: 373841 - DNA, 890 bp, Homo sapiens; identical to SEQ ID NO: 345489
  chr16:4986642-4987532
  hyper

SEQ ID NO: 373842 - DNA, 664 bp, Homo sapiens; identical to SEQ ID NO: 335281
  chr16:5007944-5008608
  hyper

SEQ ID NO: 373843 - DNA, 42 bp, Homo sapiens; identical to SEQ ID NO: 291325
  chr16:6068977-6069019
  hyper

SEQ ID NO: 373844 - DNA, 36 bp, Homo sapiens; identical to SEQ ID NO: 291326
  chr16:6069020-6069056
  hyper

SEQ ID NO: 373845 - DNA, 103 bp, Homo sapiens; identical to SEQ ID NO: 291327
  chr16:6069094-6069197
  hyper

SEQ ID NO: 373846 - DNA, 243 bp, Homo sapiens; identical to SEQ ID NO: 291328
  chr16:6069249-6069492
  hyper

SEQ ID NO: 373847 - DNA, 91 bp, Homo sapiens; identical to SEQ ID NO: 204110
  chr16:6069594-6069685
  hyper

SEQ ID NO: 373848 - DNA, 814 bp, Homo sapiens; identical to SEQ ID NO: 335283
  chr16:8767901-8768715
  hyper

SEQ ID NO: 373849 - DNA, 173 bp, Homo sapiens; identical to SEQ ID NO: 335284
  chr16:9056313-9056486
  hyper

SEQ ID NO: 373850 - DNA, 298 bp, Homo sapiens; identical to SEQ ID NO: 335285
  chr16:9186882-9187180
  hyper

SEQ ID NO: 373851 - DNA, 36 bp, Homo sapiens; identical to SEQ ID NO: 360792
  chr16:10274229-10274265
  hyper

SEQ ID NO: 373852 - DNA, 90 bp, Homo sapiens; identical to SEQ ID NO: 360793
  chr16:12211189-12211279
  hyper

SEQ ID NO: 373853 - DNA, 429 bp, Homo sapiens; identical to SEQ ID NO: 345490
  chr16:12897365-12897794
  hyper

SEQ ID NO: 373854 - DNA, 37 bp, Homo sapiens; identical to SEQ ID NO: 335294
  chr16:14164836-14164873
  hyper

SEQ ID NO: 373855 - DNA, 349 bp, Homo sapiens; identical to SEQ ID NO: 335295
  chr16:14396725-14397074
  hyper

SEQ ID NO: 373856 - DNA, 450 bp, Homo sapiens; identical to SEQ ID NO: 351785
  chr16:19566591-19567041
  hyper

SEQ ID NO: 373857 - DNA, 33 bp, Homo sapiens; identical to SEQ ID NO: 351786
  chr16:20085432-20085465
  hyper

SEQ ID NO: 373858 - DNA, 214 bp, Homo sapiens
  chr16:21531388-21531602
  hyper
cgcccacgatggagaagacgccgcacgcggcccacaccaccagcgccagccccggcgagcctgcctccttgagcacgcccgtgggcgtcacgaagatgcccgagctcatgatggcgaccacgatgacggccacgcccttgagtagcgtgatgttcccctgcagggtcacgccctcgccctcgcctgccggcgccgcgccgtccgcgcgcttggc

SEQ ID NO: 373859 - DNA, 56 bp, Homo sapiens; identical to SEQ ID NO: 335300
  chr16:21964488-21964544
  hyper

SEQ ID NO: 373860 - DNA, 184 bp, Homo sapiens; identical to SEQ ID NO: 360800
  chr16:23193716-23193900
  hyper

SEQ ID NO: 373861 - DNA, 380 bp, Homo sapiens
  chr16:23724334-23724714
  hyper
cgccctcgccccaagtgcgacgccgccccctgcgccccgcgaccagactttggggacttggcgtcggtccctggctctcacctgtggactcagcgtcccgagcagcagcgccgcgaactggagctggagccccagccggggccacggcctcgaccccctgaccgcactcgccatagcgcctgggcagctgcacggctggccaggtccctgggtgcctccaagggagcgctctgtccccgcccgacccggagaaggctccgcccctggctgggcctgcaaccccagcctggagtcctcgccgatccccgcccttctcatcacactcccagccgcatcctcgcgtcccagtcaccccaccaaacacggtggggcgctttccc

SEQ ID NO: 373862 - DNA, 400 bp, Homo sapiens; identical to SEQ ID NO: 335306
  chr16:25078047-25078447
  hyper

SEQ ID NO: 373863 - DNA, 167 bp, Homo sapiens; identical to SEQ ID NO: 360802
  chr16:25704644-25704811
  hyper

SEQ ID NO: 373864 - DNA, 443 bp, Homo sapiens; identical to SEQ ID NO: 291420
  chr16:28891072-28891515
  hyper

SEQ ID NO: 373865 - DNA, 88 bp, Homo sapiens; identical to SEQ ID NO: 335311
  chr16:29607025-29607113
  hyper

SEQ ID NO: 373866 - DNA, 533 bp, Homo sapiens; identical to SEQ ID NO: 347376
  chr16:29624651-29625184
  hyper

SEQ ID NO: 373867 - DNA, 76 bp, Homo sapiens; identical to SEQ ID NO: 335313
  chr16:29938107-29938183
  hyper

SEQ ID NO: 373868 - DNA, 188 bp, Homo sapiens; identical to SEQ ID NO: 204162
  chr16:30620879-30621067
  hyper

SEQ ID NO: 373869 - DNA, 891 bp, Homo sapiens; identical to SEQ ID NO: 351793
  chr16:30621123-30622014
  hyper

SEQ ID NO: 373870 - DNA, 549 bp, Homo sapiens; identical to SEQ ID NO: 347378
  chr16:30959765-30960314
  hyper

SEQ ID NO: 373871 - DNA, 464 bp, Homo sapiens; identical to SEQ ID NO: 351795
  chr16:31213480-31213944
  hyper

SEQ ID NO: 373872 - DNA, 63 bp, Homo sapiens; identical to SEQ ID NO: 360811
  chr16:31228313-31228376
  hyper

SEQ ID NO: 373873 - DNA, 33 bp, Homo sapiens; identical to SEQ ID NO: 335318
  chr16:31483764-31483797
  hyper

SEQ ID NO: 373874 - DNA, 290 bp, Homo sapiens; identical to SEQ ID NO: 291489
  chr16:31499204-31499494
  hyper

SEQ ID NO: 373875 - DNA, 256 bp, Homo sapiens; identical to SEQ ID NO: 360813
  chr16:31548824-31549080
  hyper

SEQ ID NO: 373876 - DNA, 63 bp, Homo sapiens; identical to SEQ ID NO: 127134
  chr16:31549116-31549179
  hyper

SEQ ID NO: 373877 - DNA, 397 bp, Homo sapiens; identical to SEQ ID NO: 351796
  chr16:31712178-31712575
  hyper

SEQ ID NO: 373878 - DNA, 304 bp, Homo sapiens; identical to SEQ ID NO: 345492
  chr16:47176468-47176772
  hyper

SEQ ID NO: 373879 - DNA, 65 bp, Homo sapiens; identical to SEQ ID NO: 204185
  chr16:49316711-49316776
  hyper

SEQ ID NO: 373880 - DNA, 156 bp, Homo sapiens; identical to SEQ ID NO: 351799
  chr16:49316844-49317000
  hyper

SEQ ID NO: 373881 - DNA, 76 bp, Homo sapiens; identical to SEQ ID NO: 204189
  chr16:51184601-51184677
  hyper

SEQ ID NO: 373882 - DNA, 756 bp, Homo sapiens; identical to SEQ ID NO: 335327
  chr16:52579636-52580392
  hyper

SEQ ID NO: 373883 - DNA, 781 bp, Homo sapiens; identical to SEQ ID NO: 360821
  chr16:54316061-54316842
  hyper

SEQ ID NO: 373884 - DNA, 71 bp, Homo sapiens
  chr16:54318434-54318505
  hyper
cgagcgaaggcggcggcggcagccgggtggcccgcggctccgggaagtcccagcaggtgcggaggggcaga

SEQ ID NO: 373885 - DNA, 45 bp, Homo sapiens; identical to SEQ ID NO: 291530
  chr16:54318853-54318898
  hyper

SEQ ID NO: 373886 - DNA, 301 bp, Homo sapiens; identical to SEQ ID NO: 291531
  chr16:54319053-54319354
  hyper

SEQ ID NO: 373887 - DNA, 1090 bp, Homo sapiens; identical to SEQ ID NO: 291532
  chr16:54319649-54320739
  hyper

SEQ ID NO: 373888 - DNA, 206 bp, Homo sapiens; identical to SEQ ID NO: 204201
  chr16:54321080-54321286
  hyper

SEQ ID NO: 373889 - DNA, 123 bp, Homo sapiens; identical to SEQ ID NO: 291534
  chr16:54324470-54324593
  hyper

SEQ ID NO: 373890 - DNA, 229 bp, Homo sapiens; identical to SEQ ID NO: 351802
  chr16:54962422-54962651
  hyper

SEQ ID NO: 373891 - DNA, 367 bp, Homo sapiens; identical to SEQ ID NO: 351803
  chr16:54962936-54963303
  hyper

SEQ ID NO: 373892 - DNA, 280 bp, Homo sapiens; identical to SEQ ID NO: 360827
  chr16:54965796-54966076
  hyper

SEQ ID NO: 373893 - DNA, 106 bp, Homo sapiens; identical to SEQ ID NO: 204205
  chr16:54966659-54966765
  hyper

SEQ ID NO: 373894 - DNA, 114 bp, Homo sapiens; identical to SEQ ID NO: 351805
  chr16:55359125-55359239
  hyper

SEQ ID NO: 373895 - DNA, 58 bp, Homo sapiens
  chr16:55365468-55365526
  hyper
ttccaggccagcgcggaggccagactatcagtcactgaaatccaggcgagcatagtcc

SEQ ID NO: 373896 - DNA, 92 bp, Homo sapiens; identical to SEQ ID NO: 360830
  chr16:55404823-55404915
  hyper

SEQ ID NO: 373897 - DNA, 116 bp, Homo sapiens; identical to SEQ ID NO: 351806
  chr16:55513960-55514076
  hyper

SEQ ID NO: 373898 - DNA, 160 bp, Homo sapiens; identical to SEQ ID NO: 291555
  chr16:55689618-55689778
  hyper

SEQ ID NO: 373899 - DNA, 85 bp, Homo sapiens; identical to SEQ ID NO: 360832
  chr16:55690809-55690894
  hyper

SEQ ID NO: 373900 - DNA, 60 bp, Homo sapiens; identical to SEQ ID NO: 204213
  chr16:56225663-56225723
  hyper

SEQ ID NO: 373901 - DNA, 268 bp, Homo sapiens; identical to SEQ ID NO: 204214
  chr16:56225881-56226149
  hyper

SEQ ID NO: 373902 - DNA, 85 bp, Homo sapiens; identical to SEQ ID NO: 351807
  chr16:56228284-56228369
  hyper

SEQ ID NO: 373903 - DNA, 57 bp, Homo sapiens; identical to SEQ ID NO: 351808
  chr16:56228591-56228648
  hyper

SEQ ID NO: 373904 - DNA, 573 bp, Homo sapiens; identical to SEQ ID NO: 335343
  chr16:56390323-56390896
  hyper

SEQ ID NO: 373905 - DNA, 44 bp, Homo sapiens; identical to SEQ ID NO: 360838
  chr16:56659821-56659865
  hyper

SEQ ID NO: 373906 - DNA, 48 bp, Homo sapiens; identical to SEQ ID NO: 360839
  chr16:56666592-56666640
  hyper

SEQ ID NO: 373907 - DNA, 164 bp, Homo sapiens; identical to SEQ ID NO: 351810
  chr16:56671950-56672114
  hyper

SEQ ID NO: 373908 - DNA, 218 bp, Homo sapiens; identical to SEQ ID NO: 360841
  chr16:56691542-56691760
  hyper

SEQ ID NO: 373909 - DNA, 122 bp, Homo sapiens; identical to SEQ ID NO: 204219
  chr16:56703438-56703560
  hyper

SEQ ID NO: 373910 - DNA, 216 bp, Homo sapiens; identical to SEQ ID NO: 351812
  chr16:56703621-56703837
  hyper

SEQ ID NO: 373911 - DNA, 60 bp, Homo sapiens; identical to SEQ ID NO: 351813
  chr16:56709754-56709814
  hyper

SEQ ID NO: 373912 - DNA, 231 bp, Homo sapiens; identical to SEQ ID NO: 360845
  chr16:57318148-57318379
  hyper

SEQ ID NO: 373913 - DNA, 204 bp, Homo sapiens; identical to SEQ ID NO: 360846
  chr16:57318412-57318616
  hyper

SEQ ID NO: 373914 - DNA, 287 bp, Homo sapiens; identical to SEQ ID NO: 335352
  chr16:57519818-57520105
  hyper

SEQ ID NO: 373915 - DNA, 120 bp, Homo sapiens
  chr16:62068832-62068952
  hyper
cgctggtggaggcaaacggctagtccttgacatgccgccggctccgtgcctgcgggggaagggtcaaccgcaaggaaactttgaggattctgccagactgggtgggggaaggctctggtg

SEQ ID NO: 373916 - DNA, 676 bp, Homo sapiens; identical to SEQ ID NO: 204236
  chr16:62069435-62070111
  hyper

SEQ ID NO: 373917 - DNA, 205 bp, Homo sapiens; identical to SEQ ID NO: 291600
  chr16:65157317-65157522
  hyper

SEQ ID NO: 373918 - DNA, 45 bp, Homo sapiens; identical to SEQ ID NO: 351814
  chr16:66638030-66638075
  hyper

SEQ ID NO: 373919 - DNA, 566 bp, Homo sapiens; identical to SEQ ID NO: 351815
  chr16:66638452-66639018
  hyper

SEQ ID NO: 373920 - DNA, 132 bp, Homo sapiens; identical to SEQ ID NO: 360851
  chr16:67184509-67184641
  hyper

SEQ ID NO: 373921 - DNA, 130 bp, Homo sapiens; identical to SEQ ID NO: 345493
  chr16:67189038-67189168
  hyper

SEQ ID NO: 373922 - DNA, 377 bp, Homo sapiens; identical to SEQ ID NO: 345494
  chr16:67189259-67189636
  hyper

SEQ ID NO: 373923 - DNA, 299 bp, Homo sapiens; identical to SEQ ID NO: 351818
  chr16:67197294-67197593
  hyper

SEQ ID NO: 373924 - DNA, 270 bp, Homo sapiens; identical to SEQ ID NO: 204245
  chr16:67198282-67198552
  hyper

SEQ ID NO: 373925 - DNA, 59 bp, Homo sapiens; identical to SEQ ID NO: 291619
  chr16:67199532-67199591
  hyper

SEQ ID NO: 373926 - DNA, 292 bp, Homo sapiens; identical to SEQ ID NO: 347382
  chr16:67204024-67204316
  hyper

SEQ ID NO: 373927 - DNA, 490 bp, Homo sapiens; identical to SEQ ID NO: 347383
  chr16:67204317-67204807
  hyper

SEQ ID NO: 373928 - DNA, 151 bp, Homo sapiens
  chr16:67427472-67427623
  hyper
aggctgtctcggcgggagagtgaccaaggtcacgccggccccgcccacgaggccccgccctccccgagactctccgggagccgcatcccgcccctcccccgcaactccgcggtcctcgcgacggcgagaccagcgctctgcagttcggggc

SEQ ID NO: 373929 - DNA, 81 bp, Homo sapiens; identical to SEQ ID NO: 351822
  chr16:67433472-67433553
  hyper

SEQ ID NO: 373930 - DNA, 255 bp, Homo sapiens; identical to SEQ ID NO: 291637
  chr16:67678786-67679041
  hyper

SEQ ID NO: 373931 - DNA, 134 bp, Homo sapiens; identical to SEQ ID NO: 345495
  chr16:68118915-68119049
  hyper

SEQ ID NO: 373932 - DNA, 65 bp, Homo sapiens; identical to SEQ ID NO: 347385
  chr16:68269820-68269885
  hyper

SEQ ID NO: 373933 - DNA, 112 bp, Homo sapiens; identical to SEQ ID NO: 204263
  chr16:68269896-68270008
  hyper

SEQ ID NO: 373934 - DNA, 105 bp, Homo sapiens; identical to SEQ ID NO: 204264
  chr16:68270022-68270127
  hyper

SEQ ID NO: 373935 - DNA, 125 bp, Homo sapiens; identical to SEQ ID NO: 347388
  chr16:68270157-68270282
  hyper

SEQ ID NO: 373936 - DNA, 637 bp, Homo sapiens; identical to SEQ ID NO: 347389
  chr16:68270868-68271505
  hyper

SEQ ID NO: 373937 - DNA, 102 bp, Homo sapiens; identical to SEQ ID NO: 345496
  chr16:68504292-68504394
  hyper

SEQ ID NO: 373938 - DNA, 178 bp, Homo sapiens; identical to SEQ ID NO: 291662
  chr16:68679166-68679344
  hyper

SEQ ID NO: 373939 - DNA, 597 bp, Homo sapiens; identical to SEQ ID NO: 291663
  chr16:68679362-68679959
  hyper

SEQ ID NO: 373940 - DNA, 709 bp, Homo sapiens; identical to SEQ ID NO: 360868
  chr16:68771324-68772033
  hyper

SEQ ID NO: 373941 - DNA, 111 bp, Homo sapiens
  chr16:69760293-69760404
  hyper
cgagagacgaccgccaagcaccccgccctttgcagcactcaccgaccatggctctggtgcagtccggggcgctgattggctgggctcgtggttgccggggcgaccctggcc

SEQ ID NO: 373942 - DNA, 909 bp, Homo sapiens; identical to SEQ ID NO: 360869
  chr16:71659877-71660786
  hyper

SEQ ID NO: 373943 - DNA, 50 bp, Homo sapiens; identical to SEQ ID NO: 351831
  chr16:73100590-73100640
  hyper

SEQ ID NO: 373944 - DNA, 174 bp, Homo sapiens; identical to SEQ ID NO: 335377
  chr16:74659437-74659611
  hyper

SEQ ID NO: 373945 - DNA, 351 bp, Homo sapiens
  chr16:75033797-75034148
  hyper
cggggcaccggcgactccgagagggcgcccggcggcggagggtctgcgtccgactccacctatgcccatggcaatggttaccaggagacgggcggcggtcaccatagagacgggatgctgtacctgggctcccgagcctcgctggcggatgctctacctctgcacatcgcacccaggtggttcagctcgcatagtggtgagtccgcgggtggtggaggcctcggagggagggcgcgccggggcgccccaagccttcgcgtgcgtgccaaggtttgggaatgtagtgcacgaccgggatctgtctgcattccctttggttcccgatgccaagggataaatgggatacctacc

SEQ ID NO: 373946 - DNA, 73 bp, Homo sapiens; identical to SEQ ID NO: 335380
  chr16:75600006-75600079
  hyper

SEQ ID NO: 373947 - DNA, 82 bp, Homo sapiens; identical to SEQ ID NO: 204296
  chr16:77246930-77247012
  hyper

SEQ ID NO: 373948 - DNA, 204 bp, Homo sapiens; identical to SEQ ID NO: 204297
  chr16:77247511-77247715
  hyper

SEQ ID NO: 373949 - DNA, 81 bp, Homo sapiens; identical to SEQ ID NO: 360874
  chr16:77469120-77469201
  hyper

SEQ ID NO: 373950 - DNA, 729 bp, Homo sapiens; identical to SEQ ID NO: 335384
  chr16:77756212-77756941
  hyper

SEQ ID NO: 373951 - DNA, 48 bp, Homo sapiens; identical to SEQ ID NO: 351836
  chr16:77822069-77822117
  hyper

SEQ ID NO: 373952 - DNA, 315 bp, Homo sapiens; identical to SEQ ID NO: 335387
  chr16:78322882-78323197
  hyper

SEQ ID NO: 373953 - DNA, 179 bp, Homo sapiens; identical to SEQ ID NO: 204301
  chr16:79633613-79633792
  hyper

SEQ ID NO: 373954 - DNA, 491 bp, Homo sapiens; identical to SEQ ID NO: 204302
  chr16:79633843-79634334
  hyper

SEQ ID NO: 373955 - DNA, 394 bp, Homo sapiens; identical to SEQ ID NO: 291732
  chr16:79634364-79634758
  hyper

SEQ ID NO: 373956 - DNA, 85 bp, Homo sapiens; identical to SEQ ID NO: 351839
  chr16:79804157-79804242
  hyper

SEQ ID NO: 373957 - DNA, 101 bp, Homo sapiens; identical to SEQ ID NO: 291736
  chr16:79804457-79804558
  hyper

SEQ ID NO: 373958 - DNA, 97 bp, Homo sapiens; identical to SEQ ID NO: 351841
  chr16:79804596-79804693
  hyper

SEQ ID NO: 373959 - DNA, 67 bp, Homo sapiens; identical to SEQ ID NO: 345498
  chr16:80574541-80574608
  hyper

SEQ ID NO: 373960 - DNA, 72 bp, Homo sapiens; identical to SEQ ID NO: 345499
  chr16:80575052-80575124
  hyper

SEQ ID NO: 373961 - DNA, 538 bp, Homo sapiens; identical to SEQ ID NO: 291740
  chr16:80837424-80837962
  hyper

SEQ ID NO: 373962 - DNA, 762 bp, Homo sapiens; identical to SEQ ID NO: 351845
  chr16:80838193-80838955
  hyper

SEQ ID NO: 373963 - DNA, 60 bp, Homo sapiens; identical to SEQ ID NO: 351846
  chr16:81779788-81779848
  hyper

SEQ ID NO: 373964 - DNA, 123 bp, Homo sapiens; identical to SEQ ID NO: 351847
  chr16:81780013-81780136
  hyper

SEQ ID NO: 373965 - DNA, 275 bp, Homo sapiens; identical to SEQ ID NO: 204317
  chr16:82660904-82661179
  hyper

SEQ ID NO: 373966 - DNA, 115 bp, Homo sapiens; identical to SEQ ID NO: 360891
  chr16:84328207-84328322
  hyper

SEQ ID NO: 373967 - DNA, 811 bp, Homo sapiens; identical to SEQ ID NO: 347395
  chr16:84650982-84651793
  hyper

SEQ ID NO: 373968 - DNA, 190 bp, Homo sapiens; identical to SEQ ID NO: 360893
  chr16:84853661-84853851
  hyper

SEQ ID NO: 373969 - DNA, 836 bp, Homo sapiens; identical to SEQ ID NO: 360894
  chr16:85202563-85203399
  hyper

SEQ ID NO: 373970 - DNA, 100 bp, Homo sapiens; identical to SEQ ID NO: 360895
  chr16:85203606-85203706
  hyper

SEQ ID NO: 373971 - DNA, 772 bp, Homo sapiens; identical to SEQ ID NO: 335399
  chr16:85590112-85590884
  hyper

SEQ ID NO: 373972 - DNA, 177 bp, Homo sapiens; identical to SEQ ID NO: 345500
  chr16:85932121-85932298
  hyper

SEQ ID NO: 373973 - DNA, 245 bp, Homo sapiens; identical to SEQ ID NO: 351851
  chr16:86531701-86531946
  hyper

SEQ ID NO: 373974 - DNA, 562 bp, Homo sapiens; identical to SEQ ID NO: 127698
  chr16:86532408-86532970
  hyper

SEQ ID NO: 373975 - DNA, 270 bp, Homo sapiens; identical to SEQ ID NO: 360900
  chr16:86542673-86542943
  hyper

SEQ ID NO: 373976 - DNA, 245 bp, Homo sapiens
  chr16:86543378-86543623
  hyper
cgcgtcggggaaggccccggcccagggagcgtttcccgccgcgccgcccgggcggggaaggcggggtccagcgcgcaccggggctgaaccgcgggcggagggcgcattaacacttgctcgccaggttggtggaggcggggcggattctgctggcggccgcggggcggcgagagtgggggctctttaagcgcccaccaacgcgggggcccgaggggggcagggacggagggagggaactccgggag

SEQ ID NO: 373977 - DNA, 352 bp, Homo sapiens; identical to SEQ ID NO: 291782
  chr16:86543822-86544174
  hyper

SEQ ID NO: 373978 - DNA, 389 bp, Homo sapiens; identical to SEQ ID NO: 335407
  chr16:86609636-86610025
  hyper

SEQ ID NO: 373979 - DNA, 464 bp, Homo sapiens; identical to SEQ ID NO: 351853
  chr16:87417704-87418168
  hyper

SEQ ID NO: 373980 - DNA, 50 bp, Homo sapiens; identical to SEQ ID NO: 351854
  chr16:87418200-87418250
  hyper

SEQ ID NO: 373981 - DNA, 802 bp, Homo sapiens; identical to SEQ ID NO: 345501
  chr16:87525701-87526503
  hyper

SEQ ID NO: 373982 - DNA, 505 bp, Homo sapiens; identical to SEQ ID NO: 335410
  chr16:87526565-87527070
  hyper

SEQ ID NO: 373983 - DNA, 59 bp, Homo sapiens; identical to SEQ ID NO: 351857
  chr16:87635912-87635971
  hyper

SEQ ID NO: 373984 - DNA, 189 bp, Homo sapiens; identical to SEQ ID NO: 291796
  chr16:87636008-87636197
  hyper

SEQ ID NO: 373985 - DNA, 83 bp, Homo sapiens; identical to SEQ ID NO: 360908
  chr16:87637320-87637403
  hyper

SEQ ID NO: 373986 - DNA, 491 bp, Homo sapiens; identical to SEQ ID NO: 127736
  chr16:87902835-87903326
  hyper

SEQ ID NO: 373987 - DNA, 83 bp, Homo sapiens; identical to SEQ ID NO: 335413
  chr16:88292860-88292943
  hyper

SEQ ID NO: 373988 - DNA, 262 bp, Homo sapiens
  chr16:88519035-88519297
  hyper
cgtgggcgtcaaggcctcgggcttcctgagccggttgtcactgcccccaccgcgcacgtggagcgtgcggcagagcccaggggtctagggagggaccaagggctgggggcggagttacagtgcgggggcggagcctcggcgtctcaggacccaaccaggtcgggtcaggtttggaggcggagctggcgccgagaggcggggcgcaggatgcggtgccgcggggcagcagaacagaaccgaataggtctcagactcccagcgc

SEQ ID NO: 373989 - DNA, 399 bp, Homo sapiens; identical to SEQ ID NO: 291816
  chr16:89006909-89007308
  hyper

SEQ ID NO: 373990 - DNA, 91 bp, Homo sapiens; identical to SEQ ID NO: 204343
  chr16:89007789-89007880
  hyper

SEQ ID NO: 373991 - DNA, 373 bp, Homo sapiens; identical to SEQ ID NO: 204344
  chr16:89007995-89008368
  hyper

SEQ ID NO: 373992 - DNA, 259 bp, Homo sapiens; identical to SEQ ID NO: 347402
  chr16:89189500-89189759
  hyper

SEQ ID NO: 373993 - DNA, 425 bp, Homo sapiens; identical to SEQ ID NO: 360915
  chr16:89323587-89324012
  hyper

SEQ ID NO: 373994 - DNA, 98 bp, Homo sapiens; identical to SEQ ID NO: 351863
  chr16:89641257-89641355
  hyper

SEQ ID NO: 373995 - DNA, 123 bp, Homo sapiens; identical to SEQ ID NO: 351864
  chr16:89641704-89641827
  hyper

SEQ ID NO: 373996 - DNA, 32 bp, Homo sapiens; identical to SEQ ID NO: 360918
  chr16:89985145-89985177
  hyper

SEQ ID NO: 373997 - DNA, 93 bp, Homo sapiens; identical to SEQ ID NO: 351865
  chr16:89992765-89992858
  hyper

SEQ ID NO: 373998 - DNA, 307 bp, Homo sapiens; identical to SEQ ID NO: 335424
  chr17:523549-523856
  hyper

SEQ ID NO: 373999 - DNA, 483 bp, Homo sapiens; identical to SEQ ID NO: 335425
  chr17:576352-576835
  hyper

SEQ ID NO: 374000 - DNA, 145 bp, Homo sapiens; identical to SEQ ID NO: 335426
  chr17:850237-850382
  hyper

SEQ ID NO: 374001 - DNA, 198 bp, Homo sapiens; identical to SEQ ID NO: 351867
  chr17:1011791-1011989
  hyper

SEQ ID NO: 374002 - DNA, 245 bp, Homo sapiens; identical to SEQ ID NO: 360924
  chr17:1881128-1881373
  hyper

SEQ ID NO: 374003 - DNA, 158 bp, Homo sapiens; identical to SEQ ID NO: 351868
  chr17:1901335-1901493
  hyper

SEQ ID NO: 374004 - DNA, 100 bp, Homo sapiens; identical to SEQ ID NO: 351869
  chr17:1901970-1902070
  hyper

SEQ ID NO: 374005 - DNA, 328 bp, Homo sapiens; identical to SEQ ID NO: 360927
  chr17:1954658-1954986
  hyper

SEQ ID NO: 374006 - DNA, 127 bp, Homo sapiens; identical to SEQ ID NO: 360928
  chr17:1957353-1957480
  hyper

SEQ ID NO: 374007 - DNA, 119 bp, Homo sapiens; identical to SEQ ID NO: 360929
  chr17:1957595-1957714
  hyper

SEQ ID NO: 374008 - DNA, 202 bp, Homo sapiens; identical to SEQ ID NO: 291879
  chr17:2658619-2658821
  hyper

SEQ ID NO: 374009 - DNA, 256 bp, Homo sapiens; identical to SEQ ID NO: 291880
  chr17:2658859-2659115
  hyper

SEQ ID NO: 374010 - DNA, 440 bp, Homo sapiens; identical to SEQ ID NO: 360932
  chr17:2756601-2757041
  hyper

SEQ ID NO: 374011 - DNA, 121 bp, Homo sapiens; identical to SEQ ID NO: 360933
  chr17:3599052-3599173
  hyper

SEQ ID NO: 374012 - DNA, 391 bp, Homo sapiens; identical to SEQ ID NO: 291891
  chr17:3599244-3599635
  hyper

SEQ ID NO: 374013 - DNA, 459 bp, Homo sapiens; identical to SEQ ID NO: 351870
  chr17:3867210-3867669
  hyper

SEQ ID NO: 374014 - DNA, 201 bp, Homo sapiens; identical to SEQ ID NO: 335438
  chr17:3867893-3868094
  hyper

SEQ ID NO: 374015 - DNA, 70 bp, Homo sapiens; identical to SEQ ID NO: 351871
  chr17:3908060-3908130
  hyper

SEQ ID NO: 374016 - DNA, 244 bp, Homo sapiens
  chr17:4545056-4545300
  hyper
aggtctccaatcaactccgcctaccgctggggcccccagctccaaggagcagagcttcaaggggcagaattcagccccagtccaaaaggcggtgtcctggcgagagcagggagtggaaaccactatcttgacgggagggagaaaaagaaaaggatttggaccgaaaacacgcaggaagagggaatcaacgcctggtacagcaggcaggcgaggtgggggtaggagttatgcacgtgtgtaccac

SEQ ID NO: 374017 - DNA, 515 bp, Homo sapiens; identical to SEQ ID NO: 360937
  chr17:4853391-4853906
  hyper

SEQ ID NO: 374018 - DNA, 341 bp, Homo sapiens; identical to SEQ ID NO: 335442
  chr17:4890368-4890709
  hyper

SEQ ID NO: 374019 - DNA, 34 bp, Homo sapiens; identical to SEQ ID NO: 345503
  chr17:4981985-4982019
  hyper

SEQ ID NO: 374020 - DNA, 409 bp, Homo sapiens; identical to SEQ ID NO: 335445
  chr17:6939640-6940049
  hyper

SEQ ID NO: 374021 - DNA, 563 bp, Homo sapiens; identical to SEQ ID NO: 351875
  chr17:7165743-7166306
  hyper

SEQ ID NO: 374022 - DNA, 355 bp, Homo sapiens; identical to SEQ ID NO: 351876
  chr17:7166376-7166731
  hyper

SEQ ID NO: 374023 - DNA, 70 bp, Homo sapiens; identical to SEQ ID NO: 335447
  chr17:7198346-7198416
  hyper

SEQ ID NO: 374024 - DNA, 1345 bp, Homo sapiens; identical to SEQ ID NO: 345504
  chr17:7254483-7255828
  hyper

SEQ ID NO: 374025 - DNA, 229 bp, Homo sapiens; identical to SEQ ID NO: 291949
  chr17:7348518-7348747
  hyper

SEQ ID NO: 374026 - DNA, 229 bp, Homo sapiens; identical to SEQ ID NO: 291950
  chr17:7348997-7349226
  hyper

SEQ ID NO: 374027 - DNA, 42 bp, Homo sapiens
  chr17:7349259-7349301
  hyper
gacttggacccgagaggatggggctcagaaaaagggggcggc

SEQ ID NO: 374028 - DNA, 79 bp, Homo sapiens
  chr17:7554512-7554591
  hyper
cgttttgtttctagacggtttggtggggggtgaagctgcattcataccccttcctcttgttattctcccctgctctgac

SEQ ID NO: 374029 - DNA, 34 bp, Homo sapiens
  chr17:7554793-7554827
  hyper
gcaaccccccgccccgcgcccggactcgccccgc

SEQ ID NO: 374030 - DNA, 49 bp, Homo sapiens; identical to SEQ ID NO: 335451
  chr17:7748395-7748444
  hyper

SEQ ID NO: 374031 - DNA, 656 bp, Homo sapiens; identical to SEQ ID NO: 351879
  chr17:7760506-7761162
  hyper

SEQ ID NO: 374032 - DNA, 392 bp, Homo sapiens; identical to SEQ ID NO: 351880
  chr17:7761197-7761589
  hyper

SEQ ID NO: 374033 - DNA, 69 bp, Homo sapiens; identical to SEQ ID NO: 345505
  chr17:8055823-8055892
  hyper

SEQ ID NO: 374034 - DNA, 631 bp, Homo sapiens; identical to SEQ ID NO: 291995
  chr17:8533862-8534493
  hyper

SEQ ID NO: 374035 - DNA, 350 bp, Homo sapiens; identical to SEQ ID NO: 351883
  chr17:8534582-8534932
  hyper

SEQ ID NO: 374036 - DNA, 107 bp, Homo sapiens; identical to SEQ ID NO: 335458
  chr17:8901441-8901548
  hyper

SEQ ID NO: 374037 - DNA, 56 bp, Homo sapiens; identical to SEQ ID NO: 351885
  chr17:9143010-9143066
  hyper

SEQ ID NO: 374038 - DNA, 186 bp, Homo sapiens; identical to SEQ ID NO: 292005
  chr17:9143110-9143296
  hyper

SEQ ID NO: 374039 - DNA, 89 bp, Homo sapiens; identical to SEQ ID NO: 292006
  chr17:9143376-9143465
  hyper

SEQ ID NO: 374040 - DNA, 33 bp, Homo sapiens; identical to SEQ ID NO: 292007
  chr17:9143504-9143537
  hyper

SEQ ID NO: 374041 - DNA, 183 bp, Homo sapiens; identical to SEQ ID NO: 292008
  chr17:9143607-9143790
  hyper

SEQ ID NO: 374042 - DNA, 1219 bp, Homo sapiens; identical to SEQ ID NO: 335461
  chr17:9548277-9549496
  hyper

SEQ ID NO: 374043 - DNA, 173 bp, Homo sapiens; identical to SEQ ID NO: 351890
  chr17:10632714-10632887
  hyper

SEQ ID NO: 374044 - DNA, 245 bp, Homo sapiens; identical to SEQ ID NO: 351891
  chr17:10633350-10633595
  hyper

SEQ ID NO: 374045 - DNA, 199 bp, Homo sapiens; identical to SEQ ID NO: 351892
  chr17:12568526-12568725
  hyper

SEQ ID NO: 374046 - DNA, 381 bp, Homo sapiens; identical to SEQ ID NO: 292017
  chr17:12568791-12569172
  hyper

SEQ ID NO: 374047 - DNA, 35 bp, Homo sapiens; identical to SEQ ID NO: 351894
  chr17:12569402-12569437
  hyper

SEQ ID NO: 374048 - DNA, 531 bp, Homo sapiens; identical to SEQ ID NO: 345506
  chr17:12692672-12693203
  hyper

SEQ ID NO: 374049 - DNA, 126 bp, Homo sapiens; identical to SEQ ID NO: 345507
  chr17:12693500-12693626
  hyper

SEQ ID NO: 374050 - DNA, 152 bp, Homo sapiens
  chr17:14203859-14204011
  hyper
cgaatgagtccccggcgtgggttggggggggggttccagtgcctagtgcatctcctaccctgctctccctcctccaaccgcctccctactctgcaacacgtaagcatcacgaaacctcctgcgaaacatctggatggggactggtgtcccaa

SEQ ID NO: 374051 - DNA, 260 bp, Homo sapiens; identical to SEQ ID NO: 204436
  chr17:14204242-14204502
  hyper

SEQ ID NO: 374052 - DNA, 168 bp, Homo sapiens; identical to SEQ ID NO: 204437
  chr17:14204834-14205002
  hyper

SEQ ID NO: 374053 - DNA, 75 bp, Homo sapiens; identical to SEQ ID NO: 351897
  chr17:14212398-14212473
  hyper

SEQ ID NO: 374054 - DNA, 266 bp, Homo sapiens; identical to SEQ ID NO: 204441
  chr17:15244586-15244852
  hyper

SEQ ID NO: 374055 - DNA, 264 bp, Homo sapiens; identical to SEQ ID NO: 204442
  chr17:15848879-15849143
  hyper

SEQ ID NO: 374056 - DNA, 198 bp, Homo sapiens; identical to SEQ ID NO: 360969
  chr17:15849211-15849409
  hyper

SEQ ID NO: 374057 - DNA, 109 bp, Homo sapiens; identical to SEQ ID NO: 360970
  chr17:16257038-16257147
  hyper

SEQ ID NO: 374058 - DNA, 48 bp, Homo sapiens; identical to SEQ ID NO: 345508
  chr17:16283879-16283927
  hyper

SEQ ID NO: 374059 - DNA, 674 bp, Homo sapiens; identical to SEQ ID NO: 204447
  chr17:16283956-16284630
  hyper

SEQ ID NO: 374060 - DNA, 39 bp, Homo sapiens; identical to SEQ ID NO: 347411
  chr17:16285065-16285104
  hyper

SEQ ID NO: 374061 - DNA, 360 bp, Homo sapiens; identical to SEQ ID NO: 335472
  chr17:16290077-16290437
  hyper

SEQ ID NO: 374062 - DNA, 438 bp, Homo sapiens; identical to SEQ ID NO: 335475
  chr17:16487650-16488088
  hyper

SEQ ID NO: 374063 - DNA, 55 bp, Homo sapiens
  chr17:17287170-17287225
  hyper
cgacgcggggcgcggggcgatgcggcgcgccttggcttgccgggccttacgtctg

SEQ ID NO: 374064 - DNA, 472 bp, Homo sapiens
  chr17:17399572-17400044
  hyper
cggggtgagcggctggagggctctgctcgggctgggcgcggctcgggcttggggctccggctccgctcgggctgggctcgggctaggctgggctcggctggggttctcccaggatctgggcacaggccgcttgctctggctttggcgcccggccgccgcccttatatgcagcctgctcggctgccccgccccggccctcccagctcggtgcgtcacgccccgcggggcccgcctcccccgcaccggctcccagtcccggcgacctcgtcacccgctgccgggctcctgctctctgggcgcgggggctggggggagcagtccagggtcgggctgaggctggaggcgctcggactccgcttttccactgccgcgggctcggcggccgcaggggcgtcggggttctggtcccggcggtgcccctgtccctctgcgacttcgggcaaggacccccattcctgcacctcccgcgcgc

SEQ ID NO: 374065 - DNA, 1754 bp, Homo sapiens; identical to SEQ ID NO: 345510
  chr17:17685255-17687009
  hyper

SEQ ID NO: 374066 - DNA, 367 bp, Homo sapiens; identical to SEQ ID NO: 345511
  chr17:17687055-17687422
  hyper

SEQ ID NO: 374067 - DNA, 363 bp, Homo sapiens; identical to SEQ ID NO: 335479
  chr17:18218758-18219121
  hyper

SEQ ID NO: 374068 - DNA, 811 bp, Homo sapiens; identical to SEQ ID NO: 335480
  chr17:18907431-18908242
  hyper

SEQ ID NO: 374069 - DNA, 300 bp, Homo sapiens; identical to SEQ ID NO: 335481
  chr17:19140744-19141044
  hyper

SEQ ID NO: 374070 - DNA, 410 bp, Homo sapiens; identical to SEQ ID NO: 335482
  chr17:19282076-19282486
  hyper

SEQ ID NO: 374071 - DNA, 415 bp, Homo sapiens; identical to SEQ ID NO: 292084
  chr17:19770859-19771274
  hyper

SEQ ID NO: 374072 - DNA, 51 bp, Homo sapiens; identical to SEQ ID NO: 335484
  chr17:19912429-19912480
  hyper

SEQ ID NO: 374073 - DNA, 106 bp, Homo sapiens
  chr17:20756146-20756252
  hyper
cttacttggggagaaaacagagctggtggcgctgctgagtgtcaaaccctggagcccatcgtcaagacgttatattggtggcagttctgctgtgagtgcacttgcc

SEQ ID NO: 374074 - DNA, 150 bp, Homo sapiens; identical to SEQ ID NO: 360982
  chr17:26555139-26555289
  hyper

SEQ ID NO: 374075 - DNA, 288 bp, Homo sapiens
  chr17:26578647-26578935
  hyper
cggggagacacctctaaggtgtacgcacgaggacggcataaaaccattggtcagctccctaatctcaccgacctctctcccgcaaattccttatcgccctcctttctccctgcccttccctcaaagtgtcagtcaggttgtcctcagcccagaagactcttcctccagacatcctcatggccggctctgtcgccccctggaggcattagctcaaaatccaccttttaaatgggtcttatcctgacacccctgtttaaaattgcaacccggcagcgtgcggtagatgac

SEQ ID NO: 374076 - DNA, 145 bp, Homo sapiens; identical to SEQ ID NO: 292102
  chr17:26903726-26903871
  hyper

SEQ ID NO: 374077 - DNA, 218 bp, Homo sapiens; identical to SEQ ID NO: 360984
  chr17:26903937-26904155
  hyper

SEQ ID NO: 374078 - DNA, 355 bp, Homo sapiens; identical to SEQ ID NO: 345513
  chr17:27038294-27038649
  hyper

SEQ ID NO: 374079 - DNA, 71 bp, Homo sapiens; identical to SEQ ID NO: 351907
  chr17:27044882-27044953
  hyper

SEQ ID NO: 374080 - DNA, 59 bp, Homo sapiens; identical to SEQ ID NO: 351908
  chr17:27332307-27332366
  hyper

SEQ ID NO: 374081 - DNA, 122 bp, Homo sapiens; identical to SEQ ID NO: 351909
  chr17:27332733-27332855
  hyper

SEQ ID NO: 374082 - DNA, 56 bp, Homo sapiens; identical to SEQ ID NO: 360989
  chr17:27893139-27893195
  hyper

SEQ ID NO: 374083 - DNA, 387 bp, Homo sapiens; identical to SEQ ID NO: 360990
  chr17:27893344-27893731
  hyper

SEQ ID NO: 374084 - DNA, 53 bp, Homo sapiens; identical to SEQ ID NO: 347416
  chr17:27940911-27940964
  hyper

SEQ ID NO: 374085 - DNA, 73 bp, Homo sapiens; identical to SEQ ID NO: 204479
  chr17:28088056-28088129
  hyper

SEQ ID NO: 374086 - DNA, 337 bp, Homo sapiens; identical to SEQ ID NO: 351912
  chr17:29248950-29249287
  hyper

SEQ ID NO: 374087 - DNA, 255 bp, Homo sapiens; identical to SEQ ID NO: 345514
  chr17:29297825-29298080
  hyper

SEQ ID NO: 374088 - DNA, 32 bp, Homo sapiens; identical to SEQ ID NO: 347419
  chr17:29718746-29718778
  hyper

SEQ ID NO: 374089 - DNA, 69 bp, Homo sapiens; identical to SEQ ID NO: 351915
  chr17:30846659-30846728
  hyper

SEQ ID NO: 374090 - DNA, 165 bp, Homo sapiens; identical to SEQ ID NO: 335503
  chr17:31264142-31264307
  hyper

SEQ ID NO: 374091 - DNA, 111 bp, Homo sapiens
  chr17:32483881-32483992
  hyper
cgccactagagacaagattaaaagcgagagcgagagagaaaatgcttaaaacaagtcgctgagcagctcggagcctgttaaccagcgcataatgccccatgttaaccatcc

SEQ ID NO: 374092 - DNA, 78 bp, Homo sapiens; identical to SEQ ID NO: 204550
  chr17:32907146-32907224
  hyper

SEQ ID NO: 374093 - DNA, 146 bp, Homo sapiens; identical to SEQ ID NO: 360999
  chr17:32909146-32909292
  hyper

SEQ ID NO: 374094 - DNA, 171 bp, Homo sapiens
  chr17:33213953-33214124
  hyper
cggggcccgtgcaccccgggtagcaagagccacgtgaacacatttgggttagtgtgtcaataagattagcaggaaagaaaaaggagaagttgtcagcatgtgagacataaaggtgtaaagcttttatcagtattgccaaatggcttcagtctccccgacctagatcccatc

SEQ ID NO: 374095 - DNA, 307 bp, Homo sapiens; identical to SEQ ID NO: 204552
  chr17:33700165-33700472
  hyper

SEQ ID NO: 374096 - DNA, 206 bp, Homo sapiens; identical to SEQ ID NO: 204553
  chr17:33701376-33701582
  hyper

SEQ ID NO: 374097 - DNA, 168 bp, Homo sapiens; identical to SEQ ID NO: 345516
  chr17:33701612-33701780
  hyper

SEQ ID NO: 374098 - DNA, 33 bp, Homo sapiens; identical to SEQ ID NO: 347423
  chr17:33775294-33775327
  hyper

SEQ ID NO: 374099 - DNA, 717 bp, Homo sapiens; identical to SEQ ID NO: 335510
  chr17:33814248-33814965
  hyper

SEQ ID NO: 374100 - DNA, 58 bp, Homo sapiens
  chr17:34400043-34400101
  hyper
cccccattgtattgactccacattgccccctgctggtgaaacaagtgcgaaggtcagc

SEQ ID NO: 374101 - DNA, 122 bp, Homo sapiens; identical to SEQ ID NO: 351920
  chr17:35078956-35079078
  hyper

SEQ ID NO: 374102 - DNA, 114 bp, Homo sapiens; identical to SEQ ID NO: 361006
  chr17:35290220-35290334
  hyper

SEQ ID NO: 374103 - DNA, 211 bp, Homo sapiens; identical to SEQ ID NO: 292225
  chr17:35291109-35291320
  hyper

SEQ ID NO: 374104 - DNA, 37 bp, Homo sapiens
  chr17:35292661-35292698
  hyper
ttcccccgtttcagcttccgtctggtctgcgcatcgc

SEQ ID NO: 374105 - DNA, 304 bp, Homo sapiens; identical to SEQ ID NO: 361008
  chr17:35293365-35293669
  hyper

SEQ ID NO: 374106 - DNA, 85 bp, Homo sapiens; identical to SEQ ID NO: 351922
  chr17:36101946-36102031
  hyper

SEQ ID NO: 374107 - DNA, 202 bp, Homo sapiens; identical to SEQ ID NO: 204562
  chr17:36102080-36102282
  hyper

SEQ ID NO: 374108 - DNA, 72 bp, Homo sapiens
  chr17:36204375-36204447
  hyper
cgggtgtcagtaaccaggggggccgcctgaggcgtcgcatccaacccccgcccaggtttccgccccgggcca

SEQ ID NO: 374109 - DNA, 70 bp, Homo sapiens
  chr17:36204541-36204611
  hyper
ctgactgtccagccccgggtggtgcccatcctgcctgttgttccctctcaaaccaaataaacctcccgac

SEQ ID NO: 374110 - DNA, 145 bp, Homo sapiens; identical to SEQ ID NO: 351924
  chr17:36714786-36714931
  hyper

SEQ ID NO: 374111 - DNA, 445 bp, Homo sapiens; identical to SEQ ID NO: 204564
  chr17:36715092-36715537
  hyper

SEQ ID NO: 374112 - DNA, 241 bp, Homo sapiens; identical to SEQ ID NO: 361013
  chr17:36716048-36716289
  hyper

SEQ ID NO: 374113 - DNA, 77 bp, Homo sapiens; identical to SEQ ID NO: 351926
  chr17:36729187-36729264
  hyper

SEQ ID NO: 374114 - DNA, 159 bp, Homo sapiens; identical to SEQ ID NO: 351927
  chr17:36829818-36829977
  hyper

SEQ ID NO: 374115 - DNA, 303 bp, Homo sapiens; identical to SEQ ID NO: 351928
  chr17:36830051-36830354
  hyper

SEQ ID NO: 374116 - DNA, 226 bp, Homo sapiens; identical to SEQ ID NO: 347425
  chr17:36886750-36886976
  hyper

SEQ ID NO: 374117 - DNA, 90 bp, Homo sapiens; identical to SEQ ID NO: 351930
  chr17:37183607-37183697
  hyper

SEQ ID NO: 374118 - DNA, 54 bp, Homo sapiens; identical to SEQ ID NO: 347426
  chr17:37365986-37366040
  hyper

SEQ ID NO: 374119 - DNA, 912 bp, Homo sapiens; identical to SEQ ID NO: 335530
  chr17:37618442-37619354
  hyper

SEQ ID NO: 374120 - DNA, 585 bp, Homo sapiens; identical to SEQ ID NO: 351932
  chr17:37757285-37757870
  hyper

SEQ ID NO: 374121 - DNA, 121 bp, Homo sapiens; identical to SEQ ID NO: 351933
  chr17:37760007-37760128
  hyper

SEQ ID NO: 374122 - DNA, 328 bp, Homo sapiens
  chr17:37782857-37783185
  hyper
cgacctcgcaggcctctctgaaactcccagtaccaggaccacgaaggggttaaagccagagtcctgcctccccgctgcccctctccccctccctccccctttatcctctctgctggactccatcaataatgcagcttcaagttctggggagaccgcagggggccccccagctggctccccaggccttggctctaactcccaccctcctcccagccccaggagaacacgattctccatgctcattggccagtttcccctaaaccctccctccgagcacccgggcgccagtcccaggcggaggggacgggctggggaccccaaagctggg

SEQ ID NO: 374123 - DNA, 35 bp, Homo sapiens; identical to SEQ ID NO: 361023
  chr17:37794000-37794035
  hyper

SEQ ID NO: 374124 - DNA, 297 bp, Homo sapiens; identical to SEQ ID NO: 335537
  chr17:38020387-38020684
  hyper

SEQ ID NO: 374125 - DNA, 129 bp, Homo sapiens; identical to SEQ ID NO: 347427
  chr17:38478466-38478595
  hyper

SEQ ID NO: 374126 - DNA, 436 bp, Homo sapiens; identical to SEQ ID NO: 204598
  chr17:38498112-38498548
  hyper

SEQ ID NO: 374127 - DNA, 570 bp, Homo sapiens; identical to SEQ ID NO: 361027
  chr17:38498596-38499166
  hyper

SEQ ID NO: 374128 - DNA, 279 bp, Homo sapiens; identical to SEQ ID NO: 361028
  chr17:39683530-39683809
  hyper

SEQ ID NO: 374129 - DNA, 794 bp, Homo sapiens; identical to SEQ ID NO: 361029
  chr17:39683839-39684633
  hyper

SEQ ID NO: 374130 - DNA, 36 bp, Homo sapiens; identical to SEQ ID NO: 347428
  chr17:40332770-40332806
  hyper

SEQ ID NO: 374131 - DNA, 84 bp, Homo sapiens; identical to SEQ ID NO: 345517
  chr17:40558083-40558167
  hyper

SEQ ID NO: 374132 - DNA, 47 bp, Homo sapiens; identical to SEQ ID NO: 345518
  chr17:40558226-40558273
  hyper

SEQ ID NO: 374133 - DNA, 212 bp, Homo sapiens; identical to SEQ ID NO: 204606
  chr17:40573874-40574086
  hyper

SEQ ID NO: 374134 - DNA, 841 bp, Homo sapiens; identical to SEQ ID NO: 335546
  chr17:41245464-41246305
  hyper

SEQ ID NO: 374135 - DNA, 175 bp, Homo sapiens; identical to SEQ ID NO: 361035
  chr17:41790849-41791024
  hyper

SEQ ID NO: 374136 - DNA, 259 bp, Homo sapiens; identical to SEQ ID NO: 204615
  chr17:41791085-41791344
  hyper

SEQ ID NO: 374137 - DNA, 39 bp, Homo sapiens; identical to SEQ ID NO: 204616
  chr17:41791412-41791451
  hyper

SEQ ID NO: 374138 - DNA, 404 bp, Homo sapiens; identical to SEQ ID NO: 204619
  chr17:41984572-41984976
  hyper

SEQ ID NO: 374139 - DNA, 265 bp, Homo sapiens; identical to SEQ ID NO: 361039
  chr17:41985015-41985280
  hyper

SEQ ID NO: 374140 - DNA, 322 bp, Homo sapiens; identical to SEQ ID NO: 335549
  chr17:41995104-41995426
  hyper

SEQ ID NO: 374141 - DNA, 84 bp, Homo sapiens; identical to SEQ ID NO: 204621
  chr17:42030245-42030329
  hyper

SEQ ID NO: 374142 - DNA, 78 bp, Homo sapiens
  chr17:42030794-42030872
  hyper
gagcagggccagaagcactgtggtcaaggcgggccacggcctgcgcacgaacaccatctgggaaggcgacattgggac

SEQ ID NO: 374143 - DNA, 187 bp, Homo sapiens; identical to SEQ ID NO: 351941
  chr17:42061046-42061233
  hyper

SEQ ID NO: 374144 - DNA, 149 bp, Homo sapiens; identical to SEQ ID NO: 351942
  chr17:42061420-42061569
  hyper

SEQ ID NO: 374145 - DNA, 230 bp, Homo sapiens; identical to SEQ ID NO: 351943
  chr17:42081919-42082149
  hyper

SEQ ID NO: 374146 - DNA, 321 bp, Homo sapiens; identical to SEQ ID NO: 347431
  chr17:42083719-42084040
  hyper

SEQ ID NO: 374147 - DNA, 267 bp, Homo sapiens; identical to SEQ ID NO: 204625
  chr17:42091861-42092128
  hyper

SEQ ID NO: 374148 - DNA, 170 bp, Homo sapiens; identical to SEQ ID NO: 345520
  chr17:42092357-42092527
  hyper

SEQ ID NO: 374149 - DNA, 62 bp, Homo sapiens; identical to SEQ ID NO: 204629
  chr17:42402710-42402772
  hyper

SEQ ID NO: 374150 - DNA, 192 bp, Homo sapiens; identical to SEQ ID NO: 347435
  chr17:42402917-42403109
  hyper

SEQ ID NO: 374151 - DNA, 121 bp, Homo sapiens; identical to SEQ ID NO: 361049
  chr17:42906461-42906582
  hyper

SEQ ID NO: 374152 - DNA, 197 bp, Homo sapiens; identical to SEQ ID NO: 204637
  chr17:42988798-42988995
  hyper

SEQ ID NO: 374153 - DNA, 89 bp, Homo sapiens; identical to SEQ ID NO: 345522
  chr17:42989016-42989105
  hyper

SEQ ID NO: 374154 - DNA, 40 bp, Homo sapiens; identical to SEQ ID NO: 361052
  chr17:43045529-43045569
  hyper

SEQ ID NO: 374155 - DNA, 38 bp, Homo sapiens; identical to SEQ ID NO: 347438
  chr17:43298587-43298625
  hyper

SEQ ID NO: 374156 - DNA, 230 bp, Homo sapiens; identical to SEQ ID NO: 347439
  chr17:43298666-43298896
  hyper

SEQ ID NO: 374157 - DNA, 879 bp, Homo sapiens; identical to SEQ ID NO: 351953
  chr17:43324795-43325674
  hyper

SEQ ID NO: 374158 - DNA, 117 bp, Homo sapiens; identical to SEQ ID NO: 345523
  chr17:44849684-44849801
  hyper

SEQ ID NO: 374159 - DNA, 80 bp, Homo sapiens; identical to SEQ ID NO: 345524
  chr17:44849831-44849911
  hyper

SEQ ID NO: 374160 - DNA, 83 bp, Homo sapiens; identical to SEQ ID NO: 361058
  chr17:44919338-44919421
  hyper

SEQ ID NO: 374161 - DNA, 169 bp, Homo sapiens; identical to SEQ ID NO: 361059
  chr17:44928894-44929063
  hyper

SEQ ID NO: 374162 - DNA, 207 bp, Homo sapiens; identical to SEQ ID NO: 292422
  chr17:44929360-44929567
  hyper

SEQ ID NO: 374163 - DNA, 38 bp, Homo sapiens; identical to SEQ ID NO: 361061
  chr17:45055681-45055719
  hyper

SEQ ID NO: 374164 - DNA, 269 bp, Homo sapiens; identical to SEQ ID NO: 292425
  chr17:45056305-45056574
  hyper

SEQ ID NO: 374165 - DNA, 63 bp, Homo sapiens; identical to SEQ ID NO: 345525
  chr17:45330951-45331014
  hyper

SEQ ID NO: 374166 - DNA, 119 bp, Homo sapiens; identical to SEQ ID NO: 204649
  chr17:45331313-45331432
  hyper

SEQ ID NO: 374167 - DNA, 90 bp, Homo sapiens; identical to SEQ ID NO: 345527
  chr17:45331675-45331765
  hyper

SEQ ID NO: 374168 - DNA, 38 bp, Homo sapiens; identical to SEQ ID NO: 351959
  chr17:45500788-45500826
  hyper

SEQ ID NO: 374169 - DNA, 379 bp, Homo sapiens; identical to SEQ ID NO: 292433
  chr17:45500865-45501244
  hyper

SEQ ID NO: 374170 - DNA, 619 bp, Homo sapiens
  chr17:45928211-45928830
  hyper
cgcgttcggagtgcgttttttcgagacaatctccgtagcgctcacccctggccaccccgacccgcgctcctacctcgaggctgcggcgggctccgggcacggctggctggtgcgctactgacggtcgctcataggccctgtgcgccggcgagctctccagcggtaaggggcaggagcccagggcgagccagacccggcggctggcggcaggcggcaggcggcggaggtgagcgctggcgagagggcggaggacggagggcgggcaggagccagcgagcgaacaaggccagctccgcccgtgactcacccgcgctctctgccttcatcctctccccagcgctgctttttcccccggactcgcggccccgcccacctcacctgcggccgcctttaacccttgagggctcggctggaccggagcccagccagggccgcgaggagggggtgggcgggagtgggggaggaaagataactagggcgtgcgccgcccgctccctcgctcctccctggtcccctccactcccagggagaggggcccgggtggggtgattcccaggttctaagacccgccccgccgggtggaaaactgccctggagctagctcggtctagcagaggac

SEQ ID NO: 374171 - DNA, 298 bp, Homo sapiens; identical to SEQ ID NO: 292442
  chr17:46089283-46089581
  hyper

SEQ ID NO: 374172 - DNA, 218 bp, Homo sapiens; identical to SEQ ID NO: 345528
  chr17:46124683-46124901
  hyper

SEQ ID NO: 374173 - DNA, 164 bp, Homo sapiens; identical to SEQ ID NO: 345529
  chr17:46125148-46125312
  hyper

SEQ ID NO: 374174 - DNA, 53 bp, Homo sapiens; identical to SEQ ID NO: 347448
  chr17:46620299-46620352
  hyper

SEQ ID NO: 374175 - DNA, 321 bp, Homo sapiens; identical to SEQ ID NO: 204659
  chr17:46621458-46621779
  hyper

SEQ ID NO: 374176 - DNA, 181 bp, Homo sapiens; identical to SEQ ID NO: 351966
  chr17:46659093-46659274
  hyper

SEQ ID NO: 374177 - DNA, 45 bp, Homo sapiens; identical to SEQ ID NO: 204661
  chr17:46659384-46659429
  hyper

SEQ ID NO: 374178 - DNA, 56 bp, Homo sapiens
  chr17:46663887-46663943
  hyper
cgtctgctgacctctgcatgatcccggactctatgaattattgatgagatatgagc

SEQ ID NO: 374179 - DNA, 97 bp, Homo sapiens; identical to SEQ ID NO: 351968
  chr17:46670752-46670849
  hyper

SEQ ID NO: 374180 - DNA, 89 bp, Homo sapiens; identical to SEQ ID NO: 351969
  chr17:46675757-46675846
  hyper

SEQ ID NO: 374181 - DNA, 63 bp, Homo sapiens; identical to SEQ ID NO: 345531
  chr17:46687527-46687590
  hyper

SEQ ID NO: 374182 - DNA, 321 bp, Homo sapiens; identical to SEQ ID NO: 351971
  chr17:46688806-46689127
  hyper

SEQ ID NO: 374183 - DNA, 149 bp, Homo sapiens; identical to SEQ ID NO: 347451
  chr17:46690905-46691054
  hyper

SEQ ID NO: 374184 - DNA, 92 bp, Homo sapiens; identical to SEQ ID NO: 361080
  chr17:46713841-46713933
  hyper

SEQ ID NO: 374185 - DNA, 170 bp, Homo sapiens; identical to SEQ ID NO: 351973
  chr17:46724200-46724370
  hyper

SEQ ID NO: 374186 - DNA, 304 bp, Homo sapiens; identical to SEQ ID NO: 361082
  chr17:46755701-46756005
  hyper

SEQ ID NO: 374187 - DNA, 171 bp, Homo sapiens; identical to SEQ ID NO: 351974
  chr17:46801836-46802007
  hyper

SEQ ID NO: 374188 - DNA, 348 bp, Homo sapiens
  chr17:46806440-46806788
  hyper
cgtccggggggaggggaggcgtggtgggcggaggaagaggggacgaggagccgggccccacctccttctcctcctctccctccctagctttctgtctcctgcgctttgacaggtttaacgagagaataaaaagctctctctataaagtgtccatctcctgggggggaaggggagtcgggggtggggctgggaggccgctcccggcctcagaggagaacccgggaatgcgcctgtgtaagaggaggctgggaaatgggggttaataggtatttctggcagcccctggctttgggtcctgggtactagcaccccagttcattcccggtacccttcctgtcccagatgtcc

SEQ ID NO: 374189 - DNA, 81 bp, Homo sapiens; identical to SEQ ID NO: 361084
  chr17:46826849-46826930
  hyper

SEQ ID NO: 374190 - DNA, 324 bp, Homo sapiens; identical to SEQ ID NO: 292478
  chr17:46829655-46829979
  hyper

SEQ ID NO: 374191 - DNA, 45 bp, Homo sapiens; identical to SEQ ID NO: 351976
  chr17:46830655-46830700
  hyper

SEQ ID NO: 374192 - DNA, 506 bp, Homo sapiens
  chr17:46831220-46831726
  hyper
cgctgcagagccccgtgcttagtgaccaaaataatgtcccgcctgcctcatcttcctctcggatttttgccaaggccaaactgcgcgtgtcccagaaaaaaaccctcggacacttggcctctgccctgtctcagccgagtgactaggatgactgggaagtgaatcacaggaaaatcacccaagcccactcttctccacagccggtgagcagaaggaaggaagcaaagaaggaagggaggaagggaagaagggagagttcagttccctttcgtcgttcacacagtggtcctccacaccaggaaacctaagggctctgtggagggccaggtgccgtggcagcaacactcctcagggcctgtttcagcaccccatttacgtggcacatgaaaaattcaggatgaacgccctggctgaaagctcttcctgggtttgggacatcagaagaccttcccgggatgggctcttgtctctgcagtagctatgacctgcacataaacctgtttcct

SEQ ID NO: 374193 - DNA, 55 bp, Homo sapiens; identical to SEQ ID NO: 351978
  chr17:46832887-46832942
  hyper

SEQ ID NO: 374194 - DNA, 348 bp, Homo sapiens; identical to SEQ ID NO: 292486
  chr17:47073560-47073908
  hyper

SEQ ID NO: 374195 - DNA, 152 bp, Homo sapiens; identical to SEQ ID NO: 204688
  chr17:47074409-47074561
  hyper

SEQ ID NO: 374196 - DNA, 371 bp, Homo sapiens; identical to SEQ ID NO: 335603
  chr17:47439801-47440172
  hyper

SEQ ID NO: 374197 - DNA, 61 bp, Homo sapiens
  chr17:47575254-47575315
  hyper
cagtctggctcaagcgcctcgcttcttccctgggggaccgcgtggggaggcgggaataatc

SEQ ID NO: 374198 - DNA, 200 bp, Homo sapiens; identical to SEQ ID NO: 335605
  chr17:47647459-47647659
  hyper

SEQ ID NO: 374199 - DNA, 65 bp, Homo sapiens; identical to SEQ ID NO: 351981
  chr17:47653244-47653309
  hyper

SEQ ID NO: 374200 - DNA, 715 bp, Homo sapiens; identical to SEQ ID NO: 351982
  chr17:47653373-47654088
  hyper

SEQ ID NO: 374201 - DNA, 205 bp, Homo sapiens
  chr17:48503201-48503406
  hyper
cagcacgtgacccgagggggcaggggatggatggatcttgaccttgccatctggcccctcacggatgtgctgctggctctccctctaggaaatcaacaaatttttgcgcttctaacatccaggcccctgaggatggtcgcgaggaagatctgtttcggactgcagctggggccttcggatccagaggaaaccagggctattcttc

SEQ ID NO: 374202 - DNA, 197 bp, Homo sapiens; identical to SEQ ID NO: 345532
  chr17:48619736-48619933
  hyper

SEQ ID NO: 374203 - DNA, 95 bp, Homo sapiens; identical to SEQ ID NO: 361095
  chr17:48639236-48639331
  hyper

SEQ ID NO: 374204 - DNA, 455 bp, Homo sapiens
  chr17:48711989-48712444
  hyper
cgactcctggactgttagcctcggtatttagagagacatccccctggcttggcccaggggccgctcgcaggggctgtcgccgtgccaagggcccccccacctctgccccaaagtccctcccagggaggcgctgtcgcaacccgcgggacgggggcagggagaccggacccagaggcactggggtagggctcggcagggcgggtccgggcggagcgcggggtgcggagggcggaggcggctccggcgcccgctctgcccgccgctgggtccgaccgcgctcgccttccttgcagccgcgcctcggccccatggacgccctgtgcggttccggggagctcggctccaagttctgggtaaggcgcggggctccggggtcactgcgcgggggccagggtcggccggcttcgcccggtccccgccgcctgccttcccgcggggccggcaggtatcccggg

SEQ ID NO: 374205 - DNA, 102 bp, Homo sapiens
  chr17:48712602-48712704
  hyper
gagtgcgcggctggggcgcaaaggcacagtgcgtggctgggtgagtcggctccatcccagcccctccgtcgggtgcggaaggggcgtttcgcaatcagccgc

SEQ ID NO: 374206 - DNA, 267 bp, Homo sapiens
  chr17:49008887-49009154
  hyper
atgaagtctatattctgggctacaggcacactaaaaacggcagcgccagggcccagcgccgctcgcgcgtgcaccacgcgccggctttttttggttcctccgaggcgcgggcagctctgcagccgcgggggccgcaggaggtgggggctggacccgcccggagctcgggagggcccgggatggccccggggagcgcaggtcccggcaggggccgagcgaacaagggccggcctggggcgcccagagacgcgggggaccgttctggtc

SEQ ID NO: 374207 - DNA, 528 bp, Homo sapiens; identical to SEQ ID NO: 351984
  chr17:49021815-49022343
  hyper

SEQ ID NO: 374208 - DNA, 215 bp, Homo sapiens; identical to SEQ ID NO: 292543
  chr17:50235416-50235631
  hyper

SEQ ID NO: 374209 - DNA, 730 bp, Homo sapiens
  chr17:52977560-52978290
  hyper
cgcacacctcccctcccggatctctaggacaaaggcaggtcgagggtaaatatttctagttattcagtatattcagtggctaactatttattttgtgggtaccagacaccgacataatcggttacgtccttcccttaattctcataattctgaggtttgtgttattaaccccctattatctttggtctacccagggcagccaaagaggcgcagagaagaatgacaaggtgcccagcaagcggcaggatcaaagcctgggtctctaattcccaggctggagattctgggctgcctgctcctcctgcacggggcgaaaagcccacctgggatccgagcgggcggccgcgccactctcgcaggctccatacacccgccactacccgcctgtaccacctgcagccggcagcgcagcctcctcgcgggtcccgcagggcgcgctgcaggtgcgctgggcgtcccgaagccccgccctcgcgtccctgccccgcgcccagctcctcacgctcggtgcccgcgccccgcagcggcagcgcagaacgcaccgcctctgccagagcccgggaagcgctcgggcgaagaggaggagccaagggtaccgagcgggtggagtcgggagccggagagcggtggaggcggatttcctgggcccggccctctggcgctaccatggcgtttggcaagagtcaccgggatccctacgcgacctccgtgggccacctcataggtaagg

SEQ ID NO: 374210 - DNA, 169 bp, Homo sapiens; identical to SEQ ID NO: 292548
  chr17:53341536-53341705
  hyper

SEQ ID NO: 374211 - DNA, 111 bp, Homo sapiens; identical to SEQ ID NO: 361098
  chr17:53343657-53343768
  hyper

SEQ ID NO: 374212 - DNA, 234 bp, Homo sapiens; identical to SEQ ID NO: 292552
  chr17:54673684-54673918
  hyper

SEQ ID NO: 374213 - DNA, 281 bp, Homo sapiens; identical to SEQ ID NO: 361100
  chr17:54674073-54674354
  hyper

SEQ ID NO: 374214 - DNA, 61 bp, Homo sapiens; identical to SEQ ID NO: 292554
  chr17:54756198-54756259
  hyper

SEQ ID NO: 374215 - DNA, 297 bp, Homo sapiens; identical to SEQ ID NO: 345533
  chr17:54911482-54911779
  hyper

SEQ ID NO: 374216 - DNA, 515 bp, Homo sapiens; identical to SEQ ID NO: 345534
  chr17:54911874-54912389
  hyper

SEQ ID NO: 374217 - DNA, 215 bp, Homo sapiens; identical to SEQ ID NO: 292571
  chr17:56327007-56327222
  hyper

SEQ ID NO: 374218 - DNA, 299 bp, Homo sapiens; identical to SEQ ID NO: 361105
  chr17:56405995-56406294
  hyper

SEQ ID NO: 374219 - DNA, 787 bp, Homo sapiens; identical to SEQ ID NO: 335625
  chr17:56429059-56429846
  hyper

SEQ ID NO: 374220 - DNA, 85 bp, Homo sapiens; identical to SEQ ID NO: 347456
  chr17:58228397-58228482
  hyper

SEQ ID NO: 374221 - DNA, 79 bp, Homo sapiens; identical to SEQ ID NO: 345535
  chr17:58498618-58498697
  hyper

SEQ ID NO: 374222 - DNA, 39 bp, Homo sapiens
  chr17:59475144-59475183
  hyper
gctatggatggactaatgaaatggactaatgtctaaaac

SEQ ID NO: 374223 - DNA, 81 bp, Homo sapiens; identical to SEQ ID NO: 292594
  chr17:59475276-59475357
  hyper

SEQ ID NO: 374224 - DNA, 38 bp, Homo sapiens; identical to SEQ ID NO: 347458
  chr17:59478678-59478716
  hyper

SEQ ID NO: 374225 - DNA, 310 bp, Homo sapiens; identical to SEQ ID NO: 361110
  chr17:59489181-59489491
  hyper

SEQ ID NO: 374226 - DNA, 131 bp, Homo sapiens; identical to SEQ ID NO: 292597
  chr17:59532387-59532518
  hyper

SEQ ID NO: 374227 - DNA, 48 bp, Homo sapiens; identical to SEQ ID NO: 351995
  chr17:59539943-59539991
  hyper

SEQ ID NO: 374228 - DNA, 40 bp, Homo sapiens; identical to SEQ ID NO: 347459
  chr17:60885408-60885448
  hyper

SEQ ID NO: 374229 - DNA, 308 bp, Homo sapiens; identical to SEQ ID NO: 347460
  chr17:60885548-60885856
  hyper

SEQ ID NO: 374230 - DNA, 104 bp, Homo sapiens; identical to SEQ ID NO: 361115
  chr17:61553834-61553938
  hyper

SEQ ID NO: 374231 - DNA, 48 bp, Homo sapiens; identical to SEQ ID NO: 204746
  chr17:61553939-61553987
  hyper

SEQ ID NO: 374232 - DNA, 322 bp, Homo sapiens; identical to SEQ ID NO: 361117
  chr17:61554094-61554416
  hyper

SEQ ID NO: 374233 - DNA, 111 bp, Homo sapiens; identical to SEQ ID NO: 345536
  chr17:61777761-61777872
  hyper

SEQ ID NO: 374234 - DNA, 76 bp, Homo sapiens; identical to SEQ ID NO: 345537
  chr17:61778423-61778499
  hyper

SEQ ID NO: 374235 - DNA, 110 bp, Homo sapiens; identical to SEQ ID NO: 361120
  chr17:62776313-62776423
  hyper

SEQ ID NO: 374236 - DNA, 60 bp, Homo sapiens; identical to SEQ ID NO: 204752
  chr17:62776446-62776506
  hyper

SEQ ID NO: 374237 - DNA, 848 bp, Homo sapiens; identical to SEQ ID NO: 335648
  chr17:63555681-63556529
  hyper

SEQ ID NO: 374238 - DNA, 669 bp, Homo sapiens; identical to SEQ ID NO: 335649
  chr17:64187889-64188558
  hyper

SEQ ID NO: 374239 - DNA, 675 bp, Homo sapiens; identical to SEQ ID NO: 352002
  chr17:64298985-64299660
  hyper

SEQ ID NO: 374240 - DNA, 60 bp, Homo sapiens; identical to SEQ ID NO: 204756
  chr17:64961305-64961365
  hyper

SEQ ID NO: 374241 - DNA, 202 bp, Homo sapiens; identical to SEQ ID NO: 292637
  chr17:64961625-64961827
  hyper

SEQ ID NO: 374242 - DNA, 83 bp, Homo sapiens; identical to SEQ ID NO: 347465
  chr17:64962141-64962224
  hyper

SEQ ID NO: 374243 - DNA, 406 bp, Homo sapiens; identical to SEQ ID NO: 335653
  chr17:65822956-65823362
  hyper

SEQ ID NO: 374244 - DNA, 49 bp, Homo sapiens; identical to SEQ ID NO: 352007
  chr17:68164458-68164507
  hyper

SEQ ID NO: 374245 - DNA, 196 bp, Homo sapiens; identical to SEQ ID NO: 292648
  chr17:68164537-68164733
  hyper

SEQ ID NO: 374246 - DNA, 204 bp, Homo sapiens; identical to SEQ ID NO: 204763
  chr17:68164928-68165132
  hyper

SEQ ID NO: 374247 - DNA, 721 bp, Homo sapiens
  chr17:70588172-70588893
  hyper
cgcttggaggcagggggatgactaaaatgacctccaagaagatgtcaattacaagaacaaaaatttcaacccggaatctcgagaccttcgaaaaacgacgcggaggaaaaaaggaaagaaagaaaagaaagtaaatcagatcccttccccgaaccgcagggaaacttacctccagcttggcgacccagctgttaagcagaacaaatcaatccacggatggagaagaggtcgtgggtcttctgagcccagctgatacacaccaagtaatccacgttaaggggtccgcagccccccacccaattccccactttccatccaaggccaaagagcagccagaccctgtcctctgcgctccagactcgcggaggtcgcgggcgggggtcctcaggcggccgccttctcgtccccaggggtgggcgcgcgacgcgggcagggaccgggcgcccggaggaccaagcgagcgcatcccgcctactcgtgctgggacatcacccagcctggacgccgctcctcgcctttcttccccgcgcatcgccagcgccaaccaaagatccccgccgggaaagcctctctgccaagctggaaagcgctgaaggcggatcgtctctcagacttgggtttgcaggttcacaaggcccgggaggcttacggtgggcgcctgcctaacagagggtccttgcggagaagcgcagaacgacaaatgccagaggcggtgaccgcg

SEQ ID NO: 374248 - DNA, 240 bp, Homo sapiens; identical to SEQ ID NO: 292660
  chr17:71160878-71161118
  hyper

SEQ ID NO: 374249 - DNA, 45 bp, Homo sapiens; identical to SEQ ID NO: 352010
  chr17:71897934-71897979
  hyper

SEQ ID NO: 374250 - DNA, 497 bp, Homo sapiens; identical to SEQ ID NO: 335663
  chr17:72209877-72210374
  hyper

SEQ ID NO: 374251 - DNA, 62 bp, Homo sapiens; identical to SEQ ID NO: 352011
  chr17:72427030-72427092
  hyper

SEQ ID NO: 374252 - DNA, 219 bp, Homo sapiens; identical to SEQ ID NO: 204774
  chr17:72427594-72427813
  hyper

SEQ ID NO: 374253 - DNA, 332 bp, Homo sapiens; identical to SEQ ID NO: 204775
  chr17:72427999-72428331
  hyper

SEQ ID NO: 374254 - DNA, 340 bp, Homo sapiens; identical to SEQ ID NO: 204776
  chr17:72428489-72428829
  hyper

SEQ ID NO: 374255 - DNA, 69 bp, Homo sapiens; identical to SEQ ID NO: 352015
  chr17:72428872-72428941
  hyper

SEQ ID NO: 374256 - DNA, 359 bp, Homo sapiens; identical to SEQ ID NO: 347466
  chr17:72449954-72450313
  hyper

SEQ ID NO: 374257 - DNA, 336 bp, Homo sapiens; identical to SEQ ID NO: 347467
  chr17:72450330-72450666
  hyper

SEQ ID NO: 374258 - DNA, 272 bp, Homo sapiens; identical to SEQ ID NO: 335669
  chr17:72732911-72733183
  hyper

SEQ ID NO: 374259 - DNA, 248 bp, Homo sapiens
  chr17:72856466-72856714
  hyper
gctgggggaccgagccagaagtccccttggacgaccagggctgggaaaccgagtggacgaatggggtgggcatcagggcctggcgggaattcccgtcttgctcacccagcagctccttgcagggtcgcgggacgcacctgggggttcaggttgccgggtgcctttgctccgcgtgtccccgccctgcccgcgtaggcaggaaacaggagactcggggcttcccctccccgccgtcggggatcctgggc

SEQ ID NO: 374260 - DNA, 76 bp, Homo sapiens
  chr17:72931833-72931909
  hyper
cgagcccccgggagggtaattaacgagggattaatgagatttccaaagtcaacagaaaaatcgatgggccgcggag

SEQ ID NO: 374261 - DNA, 1416 bp, Homo sapiens; identical to SEQ ID NO: 335672
  chr17:73029792-73031208
  hyper

SEQ ID NO: 374262 - DNA, 65 bp, Homo sapiens; identical to SEQ ID NO: 347468
  chr17:73073967-73074032
  hyper

SEQ ID NO: 374263 - DNA, 80 bp, Homo sapiens; identical to SEQ ID NO: 292709
  chr17:73584287-73584367
  hyper

SEQ ID NO: 374264 - DNA, 170 bp, Homo sapiens; identical to SEQ ID NO: 352021
  chr17:73584951-73585121
  hyper

SEQ ID NO: 374265 - DNA, 104 bp, Homo sapiens; identical to SEQ ID NO: 335678
  chr17:74072105-74072209
  hyper

SEQ ID NO: 374266 - DNA, 813 bp, Homo sapiens; identical to SEQ ID NO: 361147
  chr17:74236139-74236952
  hyper

SEQ ID NO: 374267 - DNA, 136 bp, Homo sapiens; identical to SEQ ID NO: 335681
  chr17:74620111-74620247
  hyper

SEQ ID NO: 374268 - DNA, 43 bp, Homo sapiens
  chr17:74864600-74864643
  hyper
cgggcgcgggttgccctcgtcgagagccatgggcgcggcgcgg

SEQ ID NO: 374269 - DNA, 164 bp, Homo sapiens
  chr17:74865294-74865458
  hyper
cccctggtgatgaccagtggggctgggctgggggaacggatggcgttggggttcggggtgcggatggggagggttgtgttattcggggacctgtcccgagttgggcagggttggagaggactcggggtgcagaggtaagaatgggggcagaaaacccccaggtc

SEQ ID NO: 374270 - DNA, 91 bp, Homo sapiens; identical to SEQ ID NO: 347469
  chr17:74965156-74965247
  hyper

SEQ ID NO: 374271 - DNA, 84 bp, Homo sapiens; identical to SEQ ID NO: 335686
  chr17:75082793-75082877
  hyper

SEQ ID NO: 374272 - DNA, 93 bp, Homo sapiens; identical to SEQ ID NO: 352024
  chr17:75447727-75447820
  hyper

SEQ ID NO: 374273 - DNA, 51 bp, Homo sapiens; identical to SEQ ID NO: 352025
  chr17:76123746-76123797
  hyper

SEQ ID NO: 374274 - DNA, 342 bp, Homo sapiens; identical to SEQ ID NO: 352026
  chr17:76123831-76124173
  hyper

SEQ ID NO: 374275 - DNA, 39 bp, Homo sapiens; identical to SEQ ID NO: 361153
  chr17:76254688-76254727
  hyper

SEQ ID NO: 374276 - DNA, 62 bp, Homo sapiens; identical to SEQ ID NO: 361154
  chr17:76254854-76254916
  hyper

SEQ ID NO: 374277 - DNA, 170 bp, Homo sapiens; identical to SEQ ID NO: 352027
  chr17:76337740-76337910
  hyper

SEQ ID NO: 374278 - DNA, 192 bp, Homo sapiens; identical to SEQ ID NO: 335693
  chr17:76355660-76355852
  hyper

SEQ ID NO: 374279 - DNA, 360 bp, Homo sapiens; identical to SEQ ID NO: 335694
  chr17:76588327-76588687
  hyper

SEQ ID NO: 374280 - DNA, 32 bp, Homo sapiens
  chr17:77020165-77020197
  hyper
cgcggcgcggggcacacacggttaatcctccg

SEQ ID NO: 374281 - DNA, 83 bp, Homo sapiens; identical to SEQ ID NO: 292767
  chr17:77020426-77020509
  hyper

SEQ ID NO: 374282 - DNA, 256 bp, Homo sapiens; identical to SEQ ID NO: 335696
  chr17:77071245-77071501
  hyper

SEQ ID NO: 374283 - DNA, 226 bp, Homo sapiens; identical to SEQ ID NO: 361158
  chr17:77216473-77216699
  hyper

SEQ ID NO: 374284 - DNA, 122 bp, Homo sapiens
  chr17:77290660-77290782
  hyper
cgtgagccaccacgccccgctagatacctttgcttcttggagaaacaggaaagatgcggaatgggggaaggcaggagttcagcaccacggacagcgacctgcgggtgggagacgctgccagc

SEQ ID NO: 374285 - DNA, 336 bp, Homo sapiens
  chr17:77773692-77774028
  hyper
tgcaaacgtcggggaatcctgcaaagcttgtggcaaaggtggaactcgattcagaaggaaggaagaggtatagaatgatctgagggcagggagcctggctcttgtcagtagcagacgcgctcagtcccgccaaggaaggcaatccccaacggggcagagtgtgtctcatccctgcctggcgcaacccctgccccccaacccgtgagagagcagcgttgcagggggtgtgaaaacaggtcaccgggcaacctcattcctcgacagtttggagacaaagcgggaggtggcggtctgagaaatgggagcccacctcccgggctctggctgggtgggcgc

SEQ ID NO: 374286 - DNA, 403 bp, Homo sapiens; identical to SEQ ID NO: 292779
  chr17:77778031-77778434
  hyper

SEQ ID NO: 374287 - DNA, 179 bp, Homo sapiens; identical to SEQ ID NO: 352031
  chr17:77786288-77786467
  hyper

SEQ ID NO: 374288 - DNA, 61 bp, Homo sapiens; identical to SEQ ID NO: 352032
  chr17:77786805-77786866
  hyper

SEQ ID NO: 374289 - DNA, 41 bp, Homo sapiens; identical to SEQ ID NO: 361162
  chr17:77788305-77788346
  hyper

SEQ ID NO: 374290 - DNA, 233 bp, Homo sapiens; identical to SEQ ID NO: 204826
  chr17:77788400-77788633
  hyper

SEQ ID NO: 374291 - DNA, 257 bp, Homo sapiens; identical to SEQ ID NO: 204828
  chr17:77814493-77814750
  hyper

SEQ ID NO: 374292 - DNA, 221 bp, Homo sapiens; identical to SEQ ID NO: 204829
  chr17:77814929-77815150
  hyper

SEQ ID NO: 374293 - DNA, 50 bp, Homo sapiens; identical to SEQ ID NO: 204830
  chr17:77815935-77815985
  hyper

SEQ ID NO: 374294 - DNA, 187 bp, Homo sapiens; identical to SEQ ID NO: 54699
  chr17:77816033-77816220
  hyper

SEQ ID NO: 374295 - DNA, 397 bp, Homo sapiens; identical to SEQ ID NO: 335708
  chr17:77817078-77817475
  hyper

SEQ ID NO: 374296 - DNA, 1019 bp, Homo sapiens; identical to SEQ ID NO: 335709
  chr17:79007528-79008547
  hyper

SEQ ID NO: 374297 - DNA, 753 bp, Homo sapiens; identical to SEQ ID NO: 352038
  chr17:79008842-79009595
  hyper

SEQ ID NO: 374298 - DNA, 43 bp, Homo sapiens; identical to SEQ ID NO: 352039
  chr17:79009691-79009734
  hyper

SEQ ID NO: 374299 - DNA, 283 bp, Homo sapiens; identical to SEQ ID NO: 204841
  chr17:79317890-79318173
  hyper

SEQ ID NO: 374300 - DNA, 111 bp, Homo sapiens; identical to SEQ ID NO: 352040
  chr17:79988364-79988475
  hyper

SEQ ID NO: 374301 - DNA, 522 bp, Homo sapiens; identical to SEQ ID NO: 352041
  chr17:79989097-79989619
  hyper

SEQ ID NO: 374302 - DNA, 220 bp, Homo sapiens; identical to SEQ ID NO: 347472
  chr17:80186335-80186555
  hyper

SEQ ID NO: 374303 - DNA, 818 bp, Homo sapiens; identical to SEQ ID NO: 292829
  chr17:80186618-80187436
  hyper

SEQ ID NO: 374304 - DNA, 66 bp, Homo sapiens; identical to SEQ ID NO: 361175
  chr17:80277699-80277765
  hyper

SEQ ID NO: 374305 - DNA, 404 bp, Homo sapiens; identical to SEQ ID NO: 361176
  chr17:80332292-80332696
  hyper

SEQ ID NO: 374306 - DNA, 365 bp, Homo sapiens; identical to SEQ ID NO: 335717
  chr17:80452529-80452894
  hyper

SEQ ID NO: 374307 - DNA, 1118 bp, Homo sapiens; identical to SEQ ID NO: 361177
  chr17:80655727-80656845
  hyper

SEQ ID NO: 374308 - DNA, 339 bp, Homo sapiens
  chr17:80692978-80693317
  hyper
cgtgtatgcatgcatgggcgcgcgtgggcattcctgtgtctcaagtccctttcccaggacatcctggaatcagcagccccaccctgggccgggtcagcgcgtgccatcggagcccccacgtcagcctctctctccgatcggcacctggcgtcccagtgcgcaagccccacgtcatcacgggggccgctgggcccggcctggtctgcagtgtgggaagccggccaggcctgtgaccagcgcccgggccgagggccggacctgcgtccgctgcggggcagggataccgggtccctgcagggagctcaagccccagcgcgcccgcgaagagctgcgcggact

SEQ ID NO: 374309 - DNA, 285 bp, Homo sapiens
  chr17:80693554-80693839
  hyper
cgggccttcggcggccccggcgccggctgcatcagcgagggccgagcctacgacacggacgcaggcccagtgttcgtcaaagtcaaccgcaggacgcaggtgctggcccgtgcgcaggcgggggctctgcgggtctctgcggggcctgggaaggcggaggggtcgggggcaggcgcatttcctggggctgggcctggggaggggtcagctttggcccttgggaggtggcacctgctgggtgagcccggctcaagcgttctgtgaaggtttgtgtctgcacgatcc

SEQ ID NO: 374310 - DNA, 443 bp, Homo sapiens; identical to SEQ ID NO: 361178
  chr17:81036717-81037160
  hyper

SEQ ID NO: 374311 - DNA, 277 bp, Homo sapiens; identical to SEQ ID NO: 352044
  chr17:81038567-81038844
  hyper

SEQ ID NO: 374312 - DNA, 508 bp, Homo sapiens; identical to SEQ ID NO: 352045
  chr17:81038865-81039373
  hyper

SEQ ID NO: 374313 - DNA, 238 bp, Homo sapiens
  chr18:499804-500042
  hyper
cggcctgcagaggacaccgcgcagggggcgactaaccagctgaggtgtgtcaccccaaaacaccagtgggcacaccccaaggcgggcacgtggaagggacgcggaaccgagggcaactattttccagtcggtgaatctgatggagaaagatgccaaatgcacttcccgagccagctgaactcctcgggcacctaatcattgccagatgtggcgagggcgcacggagaacatccccagt

SEQ ID NO: 374314 - DNA, 1315 bp, Homo sapiens; identical to SEQ ID NO: 347474
  chr18:811501-812816
  hyper

SEQ ID NO: 374315 - DNA, 190 bp, Homo sapiens; identical to SEQ ID NO: 347475
  chr18:812869-813059
  hyper

SEQ ID NO: 374316 - DNA, 117 bp, Homo sapiens; identical to SEQ ID NO: 352048
  chr18:907197-907314
  hyper

SEQ ID NO: 374317 - DNA, 238 bp, Homo sapiens; identical to SEQ ID NO: 345538
  chr18:2848166-2848404
  hyper

SEQ ID NO: 374318 - DNA, 369 bp, Homo sapiens; identical to SEQ ID NO: 361185
  chr18:2906430-2906799
  hyper

SEQ ID NO: 374319 - DNA, 160 bp, Homo sapiens; identical to SEQ ID NO: 352050
  chr18:3012406-3012566
  hyper

SEQ ID NO: 374320 - DNA, 788 bp, Homo sapiens; identical to SEQ ID NO: 335730
  chr18:3246866-3247654
  hyper

SEQ ID NO: 374321 - DNA, 2276 bp, Homo sapiens; identical to SEQ ID NO: 335731
  chr18:3449180-3451456
  hyper

SEQ ID NO: 374322 - DNA, 51 bp, Homo sapiens; identical to SEQ ID NO: 352052
  chr18:3498992-3499043
  hyper

SEQ ID NO: 374323 - DNA, 995 bp, Homo sapiens; identical to SEQ ID NO: 335733
  chr18:3879130-3880125
  hyper

SEQ ID NO: 374324 - DNA, 46 bp, Homo sapiens; identical to SEQ ID NO: 292873
  chr18:4454645-4454691
  hyper

SEQ ID NO: 374325 - DNA, 254 bp, Homo sapiens; identical to SEQ ID NO: 292874
  chr18:4454777-4455031
  hyper

SEQ ID NO: 374326 - DNA, 584 bp, Homo sapiens; identical to SEQ ID NO: 345539
  chr18:5237294-5237878
  hyper

SEQ ID NO: 374327 - DNA, 537 bp, Homo sapiens; identical to SEQ ID NO: 345540
  chr18:5238247-5238784
  hyper

SEQ ID NO: 374328 - DNA, 40 bp, Homo sapiens
  chr18:5543478-5543518
  hyper
cgcgctcgcccccagcccgaggggcaacttaaaacatggc

SEQ ID NO: 374329 - DNA, 116 bp, Homo sapiens; identical to SEQ ID NO: 361194
  chr18:5896132-5896248
  hyper

SEQ ID NO: 374330 - DNA, 212 bp, Homo sapiens
  chr18:6729229-6729441
  hyper
cgctagcaggagccccaaaggatcccggccggtttccagtttcctagaagcggggatcacacctccccgcgcactcccgacacatgcgcgcgcacgcacacacaggcgcacacacacagacacacaggcgcgcgcacacaggcacacacatggacacacgggcgcgcacacacaggcacaaacacaggcgcacacataggcgcacacacaca

SEQ ID NO: 374331 - DNA, 232 bp, Homo sapiens; identical to SEQ ID NO: 204877
  chr18:6729720-6729952
  hyper

SEQ ID NO: 374332 - DNA, 60 bp, Homo sapiens
  chr18:6730139-6730199
  hyper
cctgggctgaagtcgttggctagcagagattagcaagcagcaggattgcattcttgatac

SEQ ID NO: 374333 - DNA, 148 bp, Homo sapiens; identical to SEQ ID NO: 292890
  chr18:7117374-7117522
  hyper

SEQ ID NO: 374334 - DNA, 216 bp, Homo sapiens; identical to SEQ ID NO: 292892
  chr18:7566793-7567009
  hyper

SEQ ID NO: 374335 - DNA, 415 bp, Homo sapiens; identical to SEQ ID NO: 204882
  chr18:7567335-7567750
  hyper

SEQ ID NO: 374336 - DNA, 70 bp, Homo sapiens; identical to SEQ ID NO: 352058
  chr18:7568821-7568891
  hyper

SEQ ID NO: 374337 - DNA, 59 bp, Homo sapiens; identical to SEQ ID NO: 347482
  chr18:9707859-9707918
  hyper

SEQ ID NO: 374338 - DNA, 275 bp, Homo sapiens; identical to SEQ ID NO: 292905
  chr18:9708063-9708338
  hyper

SEQ ID NO: 374339 - DNA, 202 bp, Homo sapiens; identical to SEQ ID NO: 352061
  chr18:9709406-9709608
  hyper

SEQ ID NO: 374340 - DNA, 293 bp, Homo sapiens; identical to SEQ ID NO: 352062
  chr18:10455170-10455463
  hyper

SEQ ID NO: 374341 - DNA, 189 bp, Homo sapiens; identical to SEQ ID NO: 204891
  chr18:11148436-11148625
  hyper

SEQ ID NO: 374342 - DNA, 200 bp, Homo sapiens; identical to SEQ ID NO: 204892
  chr18:11149298-11149498
  hyper

SEQ ID NO: 374343 - DNA, 61 bp, Homo sapiens
  chr18:11752769-11752830
  hyper
ggattgctcagacccggctagtggtgagagatggcagcgatatccggacacagatcacagc

SEQ ID NO: 374344 - DNA, 563 bp, Homo sapiens; identical to SEQ ID NO: 345541
  chr18:11947488-11948051
  hyper

SEQ ID NO: 374345 - DNA, 212 bp, Homo sapiens; identical to SEQ ID NO: 292919
  chr18:12253892-12254104
  hyper

SEQ ID NO: 374346 - DNA, 306 bp, Homo sapiens; identical to SEQ ID NO: 361205
  chr18:12407715-12408021
  hyper

SEQ ID NO: 374347 - DNA, 206 bp, Homo sapiens; identical to SEQ ID NO: 204898
  chr18:12408117-12408323
  hyper

SEQ ID NO: 374348 - DNA, 435 bp, Homo sapiens; identical to SEQ ID NO: 347485
  chr18:12658128-12658563
  hyper

SEQ ID NO: 374349 - DNA, 928 bp, Homo sapiens; identical to SEQ ID NO: 335756
  chr18:13217150-13218078
  hyper

SEQ ID NO: 374350 - DNA, 93 bp, Homo sapiens; identical to SEQ ID NO: 361209
  chr18:13823932-13824025
  hyper

SEQ ID NO: 374351 - DNA, 112 bp, Homo sapiens; identical to SEQ ID NO: 292934
  chr18:13824102-13824214
  hyper

SEQ ID NO: 374352 - DNA, 49 bp, Homo sapiens; identical to SEQ ID NO: 335760
  chr18:14450819-14450868
  hyper

SEQ ID NO: 374353 - DNA, 40 bp, Homo sapiens; identical to SEQ ID NO: 352066
  chr18:18821658-18821698
  hyper

SEQ ID NO: 374354 - DNA, 48 bp, Homo sapiens; identical to SEQ ID NO: 335763
  chr18:19577719-19577767
  hyper

SEQ ID NO: 374355 - DNA, 154 bp, Homo sapiens
  chr18:19748134-19748288
  hyper
cgaaaatagaaacaaaacaaaaaaccagagcctaaacgctttctaggagaccgaccttcagaaaatcatttacttggatttacctgggcggggggtagggggtggggtcggggtaaagtataaaaattcattctcacaaaaacaacgcctcttg

SEQ ID NO: 374356 - DNA, 71 bp, Homo sapiens
  chr18:19748376-19748447
  hyper
ggctcctgcagcggacgagcctgcggccgcgcgagttgccgctgacagatcggcgctgataaccccgcgac

SEQ ID NO: 374357 - DNA, 107 bp, Homo sapiens
  chr18:19748747-19748854
  hyper
cgtacatgacgacccgagttaaagttcccaaaggtcagctggggaatgttgtcttgaggttcccgaaaccaccacgacctgagccgtagcatcccgagatagggtcg

SEQ ID NO: 374358 - DNA, 525 bp, Homo sapiens; identical to SEQ ID NO: 204908
  chr18:19748884-19749409
  hyper

SEQ ID NO: 374359 - DNA, 418 bp, Homo sapiens; identical to SEQ ID NO: 204909
  chr18:19749446-19749864
  hyper

SEQ ID NO: 374360 - DNA, 384 bp, Homo sapiens; identical to SEQ ID NO: 204910
  chr18:19749924-19750308
  hyper

SEQ ID NO: 374361 - DNA, 349 bp, Homo sapiens; identical to SEQ ID NO: 204911
  chr18:19750390-19750739
  hyper

SEQ ID NO: 374362 - DNA, 224 bp, Homo sapiens; identical to SEQ ID NO: 345544
  chr18:19750806-19751030
  hyper

SEQ ID NO: 374363 - DNA, 469 bp, Homo sapiens; identical to SEQ ID NO: 335766
  chr18:19928416-19928885
  hyper

SEQ ID NO: 374364 - DNA, 195 bp, Homo sapiens; identical to SEQ ID NO: 345545
  chr18:20512643-20512838
  hyper

SEQ ID NO: 374365 - DNA, 1232 bp, Homo sapiens; identical to SEQ ID NO: 345546
  chr18:20512902-20514134
  hyper

SEQ ID NO: 374366 - DNA, 724 bp, Homo sapiens
  chr18:20715848-20716572
  hyper
cgccgcgccggcccagccgccgcccgaacccccccggaagccgcgcatggacccgcggcgccgccaggctgccctctccttcctcaccaacatctcgctggacggccggctgccgccgcaggacgcggagtggggcggtggcgaggagggcggcgcggccaagccgggcgccggcggcgcctgcggcgcgaggactcggttcagcttgctcgccgctgccgagcggggcggctgcatcgcgctcgccgcgccgggcacgccggctgcggggttagccgctgggtccggcccctgcctcccacagccctcgtcgctgccgcccttgattcctggcggccatgcgaccgtgtccggccccggggtggcgcgggggttcgcgagtcccctgggcgccggccgggcgtcgggggagcagtggcagccgccccggccggcgcctctcgccgcctgtgcccaactgcagctgctcgacgggtccggggccgccgggcaggaggagttggaggaggacgatgcctttatcagcgtgcaggtgccggcggccgcctttttgggctccgggacccccgggagtgggagcggcagtcggggacgcctcaactcgttcactcagggaatcctgcccatcgccttctccaggccgacttcgcagaactactgctccctggagcagccaggccagggcggcagcaccagcgccttcgagcagctgcagaggtcccgg

SEQ ID NO: 374367 - DNA, 186 bp, Homo sapiens; identical to SEQ ID NO: 361221
  chr18:20716690-20716876
  hyper

SEQ ID NO: 374368 - DNA, 270 bp, Homo sapiens; identical to SEQ ID NO: 361222
  chr18:21269079-21269349
  hyper

SEQ ID NO: 374369 - DNA, 33 bp, Homo sapiens; identical to SEQ ID NO: 204922
  chr18:21269390-21269423
  hyper

SEQ ID NO: 374370 - DNA, 212 bp, Homo sapiens; identical to SEQ ID NO: 204923
  chr18:21269740-21269952
  hyper

SEQ ID NO: 374371 - DNA, 174 bp, Homo sapiens; identical to SEQ ID NO: 204924
  chr18:21270135-21270309
  hyper

SEQ ID NO: 374372 - DNA, 71 bp, Homo sapiens; identical to SEQ ID NO: 361226
  chr18:21851454-21851525
  hyper

SEQ ID NO: 374373 - DNA, 760 bp, Homo sapiens; identical to SEQ ID NO: 361227
  chr18:21851561-21852321
  hyper

SEQ ID NO: 374374 - DNA, 1113 bp, Homo sapiens; identical to SEQ ID NO: 352075
  chr18:23806188-23807301
  hyper

SEQ ID NO: 374375 - DNA, 121 bp, Homo sapiens; identical to SEQ ID NO: 347492
  chr18:24130266-24130387
  hyper

SEQ ID NO: 374376 - DNA, 169 bp, Homo sapiens
  chr18:24235701-24235870
  hyper
cgacagtgcaagtgttcgaaagcacaaaggcagactgtctacccgcgacagttcgcaagttgcggtggcggggcggctgtgcggagcgcgcgtgcaggtaagggattcctgcacccaggtctgctttcctcttcctggatgttttggggctcgacctcacttttaacgc

SEQ ID NO: 374377 - DNA, 112 bp, Homo sapiens; identical to SEQ ID NO: 361230
  chr18:24764503-24764615
  hyper

SEQ ID NO: 374378 - DNA, 455 bp, Homo sapiens; identical to SEQ ID NO: 204931
  chr18:25756040-25756495
  hyper

SEQ ID NO: 374379 - DNA, 201 bp, Homo sapiens; identical to SEQ ID NO: 292989
  chr18:25756986-25757187
  hyper

SEQ ID NO: 374380 - DNA, 290 bp, Homo sapiens; identical to SEQ ID NO: 292990
  chr18:28622129-28622419
  hyper

SEQ ID NO: 374381 - DNA, 358 bp, Homo sapiens; identical to SEQ ID NO: 204937
  chr18:29077773-29078131
  hyper

SEQ ID NO: 374382 - DNA, 404 bp, Homo sapiens; identical to SEQ ID NO: 361235
  chr18:29078255-29078659
  hyper

SEQ ID NO: 374383 - DNA, 142 bp, Homo sapiens; identical to SEQ ID NO: 335782
  chr18:29598295-29598437
  hyper

SEQ ID NO: 374384 - DNA, 31 bp, Homo sapiens; identical to SEQ ID NO: 361237
  chr18:29599824-29599855
  hyper

SEQ ID NO: 374385 - DNA, 281 bp, Homo sapiens; identical to SEQ ID NO: 293004
  chr18:30349781-30350062
  hyper

SEQ ID NO: 374386 - DNA, 282 bp, Homo sapiens; identical to SEQ ID NO: 293005
  chr18:30351074-30351356
  hyper

SEQ ID NO: 374387 - DNA, 271 bp, Homo sapiens; identical to SEQ ID NO: 293006
  chr18:30351399-30351670
  hyper

SEQ ID NO: 374388 - DNA, 219 bp, Homo sapiens
  chr18:31157631-31157850
  hyper
cggtatggcatcgcgtggatccacggtgacggctctttggtcctgcattgtttgagatgctgtaggtggttcaacattgtgttaagttgcacgtacattattagttctgtatccgaagacactggctctgtaccctttcaacaaggctctgggagttcccccagccaagcagagacagggttaaggcagtccaacagaggagagtagtgcggtgtgtgt

SEQ ID NO: 374389 - DNA, 146 bp, Homo sapiens; identical to SEQ ID NO: 204947
  chr18:31157947-31158093
  hyper

SEQ ID NO: 374390 - DNA, 331 bp, Homo sapiens; identical to SEQ ID NO: 204948
  chr18:31158158-31158489
  hyper

SEQ ID NO: 374391 - DNA, 96 bp, Homo sapiens; identical to SEQ ID NO: 361243
  chr18:31159050-31159146
  hyper

SEQ ID NO: 374392 - DNA, 294 bp, Homo sapiens; identical to SEQ ID NO: 204950
  chr18:31802381-31802675
  hyper

SEQ ID NO: 374393 - DNA, 200 bp, Homo sapiens; identical to SEQ ID NO: 204951
  chr18:31803102-31803302
  hyper

SEQ ID NO: 374394 - DNA, 287 bp, Homo sapiens; identical to SEQ ID NO: 345547
  chr18:31804522-31804809
  hyper

SEQ ID NO: 374395 - DNA, 96 bp, Homo sapiens; identical to SEQ ID NO: 361247
  chr18:32074337-32074433
  hyper

SEQ ID NO: 374396 - DNA, 1207 bp, Homo sapiens; identical to SEQ ID NO: 345548
  chr18:32556625-32557832
  hyper

SEQ ID NO: 374397 - DNA, 45 bp, Homo sapiens; identical to SEQ ID NO: 204955
  chr18:32557883-32557928
  hyper

SEQ ID NO: 374398 - DNA, 445 bp, Homo sapiens; identical to SEQ ID NO: 345550
  chr18:32558003-32558448
  hyper

SEQ ID NO: 374399 - DNA, 593 bp, Homo sapiens; identical to SEQ ID NO: 335791
  chr18:32621215-32621808
  hyper

SEQ ID NO: 374400 - DNA, 32 bp, Homo sapiens; identical to SEQ ID NO: 293036
  chr18:34823862-34823894
  hyper

SEQ ID NO: 374401 - DNA, 411 bp, Homo sapiens; identical to SEQ ID NO: 204961
  chr18:35146241-35146652
  hyper

SEQ ID NO: 374402 - DNA, 200 bp, Homo sapiens; identical to SEQ ID NO: 204962
  chr18:35147249-35147449
  hyper

SEQ ID NO: 374403 - DNA, 755 bp, Homo sapiens; identical to SEQ ID NO: 345552
  chr18:42258983-42259738
  hyper

SEQ ID NO: 374404 - DNA, 120 bp, Homo sapiens; identical to SEQ ID NO: 204967
  chr18:42259821-42259941
  hyper

SEQ ID NO: 374405 - DNA, 1164 bp, Homo sapiens; identical to SEQ ID NO: 352089
  chr18:42260083-42261247
  hyper

SEQ ID NO: 374406 - DNA, 274 bp, Homo sapiens; identical to SEQ ID NO: 293054
  chr18:43914608-43914882
  hyper

SEQ ID NO: 374407 - DNA, 79 bp, Homo sapiens; identical to SEQ ID NO: 345553
  chr18:44335955-44336034
  hyper

SEQ ID NO: 374408 - DNA, 61 bp, Homo sapiens; identical to SEQ ID NO: 361259
  chr18:44786792-44786853
  hyper

SEQ ID NO: 374409 - DNA, 400 bp, Homo sapiens; identical to SEQ ID NO: 293062
  chr18:44787851-44788251
  hyper

SEQ ID NO: 374410 - DNA, 257 bp, Homo sapiens
  chr18:44788281-44788538
  hyper
acgaagtgtcagactgcgtgtcagggagaccgcgggccaggggttccagttggagcccagcgttccaggaggggatgaagaccgagttcggtaaaacagcgtggtattacaaagtttgcctttcaggctccggcctagctccttccttggcaactttgcaagtgccggcaaccctcactggatcatcctacccttggaacttcttgggaagcctcggtttagccttgggtccaccaagacttcggcgaaatggaggc

SEQ ID NO: 374411 - DNA, 282 bp, Homo sapiens; identical to SEQ ID NO: 361260
  chr18:44790173-44790455
  hyper

SEQ ID NO: 374412 - DNA, 78 bp, Homo sapiens; identical to SEQ ID NO: 361261
  chr18:45275733-45275811
  hyper

SEQ ID NO: 374413 - DNA, 237 bp, Homo sapiens; identical to SEQ ID NO: 361262
  chr18:45534410-45534647
  hyper

SEQ ID NO: 374414 - DNA, 260 bp, Homo sapiens; identical to SEQ ID NO: 293070
  chr18:45534675-45534935
  hyper

SEQ ID NO: 374415 - DNA, 41 bp, Homo sapiens; identical to SEQ ID NO: 361264
  chr18:45534976-45535017
  hyper

SEQ ID NO: 374416 - DNA, 232 bp, Homo sapiens; identical to SEQ ID NO: 293072
  chr18:45662351-45662583
  hyper

SEQ ID NO: 374417 - DNA, 258 bp, Homo sapiens; identical to SEQ ID NO: 204975
  chr18:45663079-45663337
  hyper

SEQ ID NO: 374418 - DNA, 796 bp, Homo sapiens; identical to SEQ ID NO: 335809
  chr18:45687770-45688566
  hyper

SEQ ID NO: 374419 - DNA, 164 bp, Homo sapiens; identical to SEQ ID NO: 204977
  chr18:45934609-45934773
  hyper

SEQ ID NO: 374420 - DNA, 221 bp, Homo sapiens; identical to SEQ ID NO: 204978
  chr18:45934810-45935031
  hyper

SEQ ID NO: 374421 - DNA, 1885 bp, Homo sapiens; identical to SEQ ID NO: 204979
  chr18:45935196-45937081
  hyper

SEQ ID NO: 374422 - DNA, 75 bp, Homo sapiens; identical to SEQ ID NO: 347503
  chr18:45937111-45937186
  hyper

SEQ ID NO: 374423 - DNA, 556 bp, Homo sapiens; identical to SEQ ID NO: 335811
  chr18:46502500-46503056
  hyper

SEQ ID NO: 374424 - DNA, 72 bp, Homo sapiens; identical to SEQ ID NO: 361273
  chr18:47087075-47087147
  hyper

SEQ ID NO: 374425 - DNA, 357 bp, Homo sapiens; identical to SEQ ID NO: 204988
  chr18:47087704-47088061
  hyper

SEQ ID NO: 374426 - DNA, 242 bp, Homo sapiens; identical to SEQ ID NO: 347506
  chr18:47088502-47088744
  hyper

SEQ ID NO: 374427 - DNA, 195 bp, Homo sapiens; identical to SEQ ID NO: 345554
  chr18:47339411-47339606
  hyper

SEQ ID NO: 374428 - DNA, 400 bp, Homo sapiens; identical to SEQ ID NO: 204991
  chr18:47339758-47340158
  hyper

SEQ ID NO: 374429 - DNA, 219 bp, Homo sapiens; identical to SEQ ID NO: 361278
  chr18:47719964-47720183
  hyper

SEQ ID NO: 374430 - DNA, 173 bp, Homo sapiens; identical to SEQ ID NO: 293091
  chr18:47720319-47720492
  hyper

SEQ ID NO: 374431 - DNA, 279 bp, Homo sapiens; identical to SEQ ID NO: 293092
  chr18:47720522-47720801
  hyper

SEQ ID NO: 374432 - DNA, 831 bp, Homo sapiens
  chr18:47720908-47721739
  hyper
cctctaggagccgggtggccggtcagtgcgggcgttcccggaaccgccaaactttctccgccaaccgaagttagggactccgaggacagtgacgaggaggacaccgcggaggggggtctcccgtcacctcccgcctccagtagccgagggagaaggcgaccctgagtactaggtggccccgagcgcgccaccccggccccggggcgcctccctcgcggccgcgctcacctggctgtagagctcgcccaccgacatggcccgggccgggcggggctcgggccccggctcctggctgccccgcggctctcagtccgcggctggcccgcctggcgccatgttcccgggctggcctggagtttctcgatcttctcgctcttctccgacctgccccgccggcttcccgcaggcgccgcggccggctcgctcccggcggcgcgacctttactcccgccgcggcggcgcagctacggccggacaggagttgcgagcgccgggggaggaggccgcgccgcaccactcccctcccaggtgtggggaggaggcgagggccggcgaggagggaggacccgctcgcgtcagagcggacggcccgtgcgccgccgcgcctctgagccctgccggtgcccggcccgacgcgccctcccgcgcccccgctgccacctgggcctccgggccgggggcggggcgctcagagaggagctccgggaccggcgcgggccgccccctgctggacgccgcgcgcgcgcaggcacaggtgcgccccggcgcccgcacctgccctgccgcgctccgcttccacccgcaccgggccccgcggagtccggcatgaac

SEQ ID NO: 374433 - DNA, 204 bp, Homo sapiens; identical to SEQ ID NO: 335816
  chr18:47813485-47813689
  hyper

SEQ ID NO: 374434 - DNA, 208 bp, Homo sapiens; identical to SEQ ID NO: 361283
  chr18:49868091-49868299
  hyper

SEQ ID NO: 374435 - DNA, 315 bp, Homo sapiens; identical to SEQ ID NO: 293100
  chr18:49868356-49868671
  hyper

SEQ ID NO: 374436 - DNA, 353 bp, Homo sapiens; identical to SEQ ID NO: 361285
  chr18:52495540-52495893
  hyper

SEQ ID NO: 374437 - DNA, 50 bp, Homo sapiens; identical to SEQ ID NO: 361286
  chr18:52496020-52496070
  hyper

SEQ ID NO: 374438 - DNA, 69 bp, Homo sapiens
  chr18:52988851-52988920
  hyper
cgacaataaaacttgtcaaaaatccccctcgcagcccgcattcgcttaccgctttcccattatagtagt

SEQ ID NO: 374439 - DNA, 138 bp, Homo sapiens; identical to SEQ ID NO: 361287
  chr18:52989603-52989741
  hyper

SEQ ID NO: 374440 - DNA, 448 bp, Homo sapiens; identical to SEQ ID NO: 361288
  chr18:53256017-53256465
  hyper

SEQ ID NO: 374441 - DNA, 53 bp, Homo sapiens; identical to SEQ ID NO: 352104
  chr18:53257322-53257375
  hyper

SEQ ID NO: 374442 - DNA, 44 bp, Homo sapiens; identical to SEQ ID NO: 352105
  chr18:53446783-53446827
  hyper

SEQ ID NO: 374443 - DNA, 34 bp, Homo sapiens; identical to SEQ ID NO: 347512
  chr18:54789287-54789321
  hyper

SEQ ID NO: 374444 - DNA, 154 bp, Homo sapiens; identical to SEQ ID NO: 361292
  chr18:55020285-55020439
  hyper

SEQ ID NO: 374445 - DNA, 118 bp, Homo sapiens; identical to SEQ ID NO: 352107
  chr18:55021430-55021548
  hyper

SEQ ID NO: 374446 - DNA, 910 bp, Homo sapiens
  chr18:55102427-55103337
  hyper
cgagccgtcagccaaacctgaaaagtgcggccccgccccctccacagccactggtagcttcccgtggaaggcccgcctcccggggcagctgcggcctcggagtggttgcgcttggcgcccgtcgggcgtggccccgccccaggtccgggagggtaggttggctgccccggcgagcggcagagcccttctggacagctcccgctcacccaaacagaagacgtcggcgccggagcgggctcggacatggcgaggctgcgagccggcccgagcggcggggcccggtgatccctccctccctccccgtcccctcccctctcccgcacgcacgccccgtccgcccccaccccgcccccaccccgggcgagcccgcccgcagcccggggcgcacacccgcacgcgcactcctctccactcactcccgcgcccgcccccactcccgcagccgagccccgccacgcgcgccttgcccgcccgccggccgcccccgccgcccccgccgcccccgggccctgatggactgaatgaaggctgcctacaccgcctatcgatgcctcaccaaagacctagaaggctgcgccatgaacccggagctgacaatggaaagtctgggcactttgcacgggccggccggcggcggcagtggcgggggcggcggcgggggcggcgggggcggcggcgggggcccgggccatgagcaggagctgctggccagccccagcccccaccacgcgggccgcggcgccgctggctcgctgcggggccctccgccgcctccaaccgcgcaccaggagctgggcacggcggcagcggcggcagcggcggcgtcgcgctcggccatggtcaccagcatggcctcgatcctggacggcggcgactaccggcccgagctctccatcccgctgcaccacgc

SEQ ID NO: 374447 - DNA, 120 bp, Homo sapiens; identical to SEQ ID NO: 293117
  chr18:55103761-55103881
  hyper

SEQ ID NO: 374448 - DNA, 165 bp, Homo sapiens; identical to SEQ ID NO: 293118
  chr18:55103897-55104062
  hyper

SEQ ID NO: 374449 - DNA, 49 bp, Homo sapiens; identical to SEQ ID NO: 293119
  chr18:55104092-55104141
  hyper

SEQ ID NO: 374450 - DNA, 182 bp, Homo sapiens
  chr18:55104166-55104348
  hyper
cgcctggcaggtaaggccggggctagccaggggccaggctgctgggaagagggctccgggtccggtgcttgtggcccaagtctgcgcgccgagtcacttctcttgattctttccttctctttcctatacacgtcctctttcttctcgtttttatttcttcttccattttctctttctcttcc

SEQ ID NO: 374451 - DNA, 49 bp, Homo sapiens; identical to SEQ ID NO: 352108
  chr18:55104759-55104808
  hyper

SEQ ID NO: 374452 - DNA, 279 bp, Homo sapiens; identical to SEQ ID NO: 205011
  chr18:55105185-55105464
  hyper

SEQ ID NO: 374453 - DNA, 57 bp, Homo sapiens; identical to SEQ ID NO: 347514
  chr18:55106090-55106147
  hyper

SEQ ID NO: 374454 - DNA, 234 bp, Homo sapiens; identical to SEQ ID NO: 361297
  chr18:55470607-55470841
  hyper

SEQ ID NO: 374455 - DNA, 246 bp, Homo sapiens; identical to SEQ ID NO: 361298
  chr18:55470954-55471200
  hyper

SEQ ID NO: 374456 - DNA, 145 bp, Homo sapiens; identical to SEQ ID NO: 361299
  chr18:57069721-57069866
  hyper

SEQ ID NO: 374457 - DNA, 168 bp, Homo sapiens; identical to SEQ ID NO: 361300
  chr18:57069918-57070086
  hyper

SEQ ID NO: 374458 - DNA, 152 bp, Homo sapiens; identical to SEQ ID NO: 205022
  chr18:57363523-57363675
  hyper

SEQ ID NO: 374459 - DNA, 33 bp, Homo sapiens
  chr18:57365422-57365455
  hyper
cgccgcgcacatcagagctggaaacgccccccc

SEQ ID NO: 374460 - DNA, 133 bp, Homo sapiens; identical to SEQ ID NO: 335839
  chr18:59500732-59500865
  hyper

SEQ ID NO: 374461 - DNA, 78 bp, Homo sapiens; identical to SEQ ID NO: 361303
  chr18:59560090-59560168
  hyper

SEQ ID NO: 374462 - DNA, 649 bp, Homo sapiens; identical to SEQ ID NO: 361304
  chr18:59560572-59561221
  hyper

SEQ ID NO: 374463 - DNA, 100 bp, Homo sapiens; identical to SEQ ID NO: 347515
  chr18:60985398-60985498
  hyper

SEQ ID NO: 374464 - DNA, 75 bp, Homo sapiens; identical to SEQ ID NO: 347516
  chr18:60985973-60986048
  hyper

SEQ ID NO: 374465 - DNA, 125 bp, Homo sapiens; identical to SEQ ID NO: 335842
  chr18:60987974-60988099
  hyper

SEQ ID NO: 374466 - DNA, 81 bp, Homo sapiens; identical to SEQ ID NO: 352113
  chr18:61603403-61603484
  hyper

SEQ ID NO: 374467 - DNA, 200 bp, Homo sapiens; identical to SEQ ID NO: 293162
  chr18:61603701-61603901
  hyper

SEQ ID NO: 374468 - DNA, 208 bp, Homo sapiens; identical to SEQ ID NO: 352115
  chr18:61603985-61604193
  hyper

SEQ ID NO: 374469 - DNA, 43 bp, Homo sapiens
  chr18:63417693-63417736
  hyper
cggagagatggatgggctgcagcccctcctactttcacccctc

SEQ ID NO: 374470 - DNA, 336 bp, Homo sapiens
  chr18:63418336-63418672
  hyper
cgcccgggtccctggcgtctgacgccgtggggagggcagcgaggccccaggtgagtgtgtctgcctgcgcggggctggggaggcgccgctgggcagatgtgcgcccttgctgtgcgcctttggaagcaggactaatcagtgagcggagagcgggcggggatgtccgtgtggagtttcccttggcgtccccaagttactgcgtgttgcagtgagatgtggctctgcaaggcaggacaggcttgtggacggaggcgggggcgtttggcccggaaagccggtgttgacagacaccaggtgcgacacgaggagtagtagttgagggtaagagcaaatccc

SEQ ID NO: 374471 - DNA, 62 bp, Homo sapiens
  chr18:67069292-67069354
  hyper
acgggaggcagcgggacaggaggggctgtcacctgggcgggagcagcctagacttgggacgc

SEQ ID NO: 374472 - DNA, 137 bp, Homo sapiens; identical to SEQ ID NO: 361311
  chr18:70210281-70210418
  hyper

SEQ ID NO: 374473 - DNA, 52 bp, Homo sapiens; identical to SEQ ID NO: 205039
  chr18:70210508-70210560
  hyper

SEQ ID NO: 374474 - DNA, 65 bp, Homo sapiens; identical to SEQ ID NO: 352116
  chr18:70211724-70211789
  hyper

SEQ ID NO: 374475 - DNA, 122 bp, Homo sapiens; identical to SEQ ID NO: 335849
  chr18:74163260-74163382
  hyper

SEQ ID NO: 374476 - DNA, 817 bp, Homo sapiens; identical to SEQ ID NO: 347518
  chr18:74844285-74845102
  hyper

SEQ ID NO: 374477 - DNA, 62 bp, Homo sapiens; identical to SEQ ID NO: 361316
  chr18:77153122-77153184
  hyper

SEQ ID NO: 374478 - DNA, 34 bp, Homo sapiens; identical to SEQ ID NO: 361317
  chr18:77153516-77153550
  hyper

SEQ ID NO: 374479 - DNA, 303 bp, Homo sapiens; identical to SEQ ID NO: 361318
  chr18:77156459-77156762
  hyper

SEQ ID NO: 374480 - DNA, 51 bp, Homo sapiens; identical to SEQ ID NO: 361319
  chr18:77156828-77156879
  hyper

SEQ ID NO: 374481 - DNA, 583 bp, Homo sapiens; identical to SEQ ID NO: 293194
  chr18:77160022-77160605
  hyper

SEQ ID NO: 374482 - DNA, 67 bp, Homo sapiens; identical to SEQ ID NO: 352120
  chr18:77160661-77160728
  hyper

SEQ ID NO: 374483 - DNA, 75 bp, Homo sapiens; identical to SEQ ID NO: 335859
  chr18:77724415-77724490
  hyper

SEQ ID NO: 374484 - DNA, 251 bp, Homo sapiens; identical to SEQ ID NO: 205052
  chr18:78004742-78004993
  hyper

SEQ ID NO: 374485 - DNA, 33 bp, Homo sapiens; identical to SEQ ID NO: 205053
  chr18:78005051-78005084
  hyper

SEQ ID NO: 374486 - DNA, 405 bp, Homo sapiens; identical to SEQ ID NO: 205054
  chr18:78005162-78005567
  hyper

SEQ ID NO: 374487 - DNA, 330 bp, Homo sapiens; identical to SEQ ID NO: 293207
  chr19:267237-267567
  hyper

SEQ ID NO: 374488 - DNA, 371 bp, Homo sapiens; identical to SEQ ID NO: 361327
  chr19:290594-290965
  hyper

SEQ ID NO: 374489 - DNA, 343 bp, Homo sapiens; identical to SEQ ID NO: 361328
  chr19:291052-291395
  hyper

SEQ ID NO: 374490 - DNA, 179 bp, Homo sapiens; identical to SEQ ID NO: 352124
  chr19:460121-460300
  hyper

SEQ ID NO: 374491 - DNA, 146 bp, Homo sapiens; identical to SEQ ID NO: 352125
  chr19:460529-460675
  hyper

SEQ ID NO: 374492 - DNA, 405 bp, Homo sapiens; identical to SEQ ID NO: 293214
  chr19:460726-461131
  hyper

SEQ ID NO: 374493 - DNA, 601 bp, Homo sapiens; identical to SEQ ID NO: 293215
  chr19:461187-461788
  hyper

SEQ ID NO: 374494 - DNA, 284 bp, Homo sapiens; identical to SEQ ID NO: 293216
  chr19:461846-462130
  hyper

SEQ ID NO: 374495 - DNA, 405 bp, Homo sapiens; identical to SEQ ID NO: 352128
  chr19:603411-603816
  hyper

SEQ ID NO: 374496 - DNA, 159 bp, Homo sapiens; identical to SEQ ID NO: 352129
  chr19:603846-604005
  hyper

SEQ ID NO: 374497 - DNA, 164 bp, Homo sapiens; identical to SEQ ID NO: 361335
  chr19:660994-661158
  hyper

SEQ ID NO: 374498 - DNA, 155 bp, Homo sapiens; identical to SEQ ID NO: 352130
  chr19:661431-661586
  hyper

SEQ ID NO: 374499 - DNA, 296 bp, Homo sapiens; identical to SEQ ID NO: 352131
  chr19:661720-662016
  hyper

SEQ ID NO: 374500 - DNA, 287 bp, Homo sapiens; identical to SEQ ID NO: 293229
  chr19:813409-813696
  hyper

SEQ ID NO: 374501 - DNA, 322 bp, Homo sapiens; identical to SEQ ID NO: 352133
  chr19:813830-814152
  hyper

SEQ ID NO: 374502 - DNA, 161 bp, Homo sapiens; identical to SEQ ID NO: 361340
  chr19:919400-919561
  hyper

SEQ ID NO: 374503 - DNA, 521 bp, Homo sapiens; identical to SEQ ID NO: 361341
  chr19:919591-920112
  hyper

SEQ ID NO: 374504 - DNA, 743 bp, Homo sapiens; identical to SEQ ID NO: 335871
  chr19:941824-942567
  hyper

SEQ ID NO: 374505 - DNA, 152 bp, Homo sapiens; identical to SEQ ID NO: 352135
  chr19:1444961-1445113
  hyper

SEQ ID NO: 374506 - DNA, 120 bp, Homo sapiens; identical to SEQ ID NO: 361344
  chr19:1449921-1450041
  hyper

SEQ ID NO: 374507 - DNA, 107 bp, Homo sapiens; identical to SEQ ID NO: 361345
  chr19:1455104-1455211
  hyper

SEQ ID NO: 374508 - DNA, 249 bp, Homo sapiens; identical to SEQ ID NO: 361346
  chr19:1491131-1491380
  hyper

SEQ ID NO: 374509 - DNA, 296 bp, Homo sapiens; identical to SEQ ID NO: 293267
  chr19:1491429-1491725
  hyper

SEQ ID NO: 374510 - DNA, 191 bp, Homo sapiens; identical to SEQ ID NO: 352136
  chr19:1675929-1676120
  hyper

SEQ ID NO: 374511 - DNA, 191 bp, Homo sapiens
  chr19:1718944-1719135
  hyper
cgatgggagcgggggcccaggctgcggtttacactgaatccacaaaaatcaccgaagcttgaaaagtgctcaataagccatcgatcgctctctgctgatcggtgccgccgccgcagcggggctggggggaaaggcggggcgagcagacccaggctccctgcctgtgccccacgcgggaccgcggccctgca

SEQ ID NO: 374512 - DNA, 98 bp, Homo sapiens; identical to SEQ ID NO: 345556
  chr19:1725428-1725526
  hyper

SEQ ID NO: 374513 - DNA, 280 bp, Homo sapiens; identical to SEQ ID NO: 205085
  chr19:1748599-1748879
  hyper

SEQ ID NO: 374514 - DNA, 349 bp, Homo sapiens; identical to SEQ ID NO: 293279
  chr19:1748939-1749288
  hyper

SEQ ID NO: 374515 - DNA, 200 bp, Homo sapiens; identical to SEQ ID NO: 293280
  chr19:1749318-1749518
  hyper

SEQ ID NO: 374516 - DNA, 220 bp, Homo sapiens; identical to SEQ ID NO: 293281
  chr19:1749556-1749776
  hyper

SEQ ID NO: 374517 - DNA, 217 bp, Homo sapiens; identical to SEQ ID NO: 352141
  chr19:1751192-1751409
  hyper

SEQ ID NO: 374518 - DNA, 112 bp, Homo sapiens; identical to SEQ ID NO: 352142
  chr19:1751497-1751609
  hyper

SEQ ID NO: 374519 - DNA, 286 bp, Homo sapiens; identical to SEQ ID NO: 352143
  chr19:1753216-1753502
  hyper

SEQ ID NO: 374520 - DNA, 227 bp, Homo sapiens; identical to SEQ ID NO: 205087
  chr19:1754950-1755177
  hyper

SEQ ID NO: 374521 - DNA, 378 bp, Homo sapiens; identical to SEQ ID NO: 293287
  chr19:1755227-1755605
  hyper

SEQ ID NO: 374522 - DNA, 110 bp, Homo sapiens
  chr19:1757112-1757222
  hyper
cgcaggcgagaagtcccatggggggggggtgggctccccgcagccgggtcagcagcacccagcacccgccctgagtggacaccgcctgcttcgcctgcacctgaccctgc

SEQ ID NO: 374523 - DNA, 166 bp, Homo sapiens; identical to SEQ ID NO: 361358
  chr19:1758062-1758228
  hyper

SEQ ID NO: 374524 - DNA, 74 bp, Homo sapiens; identical to SEQ ID NO: 347521
  chr19:1761779-1761853
  hyper

SEQ ID NO: 374525 - DNA, 189 bp, Homo sapiens; identical to SEQ ID NO: 205090
  chr19:1761983-1762172
  hyper

SEQ ID NO: 374526 - DNA, 47 bp, Homo sapiens; identical to SEQ ID NO: 345558
  chr19:1762820-1762867
  hyper

SEQ ID NO: 374527 - DNA, 108 bp, Homo sapiens; identical to SEQ ID NO: 352147
  chr19:1765525-1765633
  hyper

SEQ ID NO: 374528 - DNA, 339 bp, Homo sapiens; identical to SEQ ID NO: 352148
  chr19:1766024-1766363
  hyper

SEQ ID NO: 374529 - DNA, 98 bp, Homo sapiens; identical to SEQ ID NO: 361364
  chr19:1768372-1768470
  hyper

SEQ ID NO: 374530 - DNA, 68 bp, Homo sapiens; identical to SEQ ID NO: 352149
  chr19:1769669-1769737
  hyper

SEQ ID NO: 374531 - DNA, 306 bp, Homo sapiens; identical to SEQ ID NO: 352150
  chr19:1775741-1776047
  hyper

SEQ ID NO: 374532 - DNA, 223 bp, Homo sapiens; identical to SEQ ID NO: 205095
  chr19:1776743-1776966
  hyper

SEQ ID NO: 374533 - DNA, 318 bp, Homo sapiens; identical to SEQ ID NO: 335890
  chr19:1853369-1853687
  hyper

SEQ ID NO: 374534 - DNA, 109 bp, Homo sapiens; identical to SEQ ID NO: 345559
  chr19:1857456-1857565
  hyper

SEQ ID NO: 374535 - DNA, 343 bp, Homo sapiens; identical to SEQ ID NO: 335892
  chr19:1862256-1862599
  hyper

SEQ ID NO: 374536 - DNA, 341 bp, Homo sapiens; identical to SEQ ID NO: 335893
  chr19:1874698-1875039
  hyper

SEQ ID NO: 374537 - DNA, 116 bp, Homo sapiens; identical to SEQ ID NO: 345560
  chr19:1979018-1979134
  hyper

SEQ ID NO: 374538 - DNA, 728 bp, Homo sapiens; identical to SEQ ID NO: 335895
  chr19:2164931-2165659
  hyper

SEQ ID NO: 374539 - DNA, 174 bp, Homo sapiens; identical to SEQ ID NO: 361372
  chr19:2236297-2236471
  hyper

SEQ ID NO: 374540 - DNA, 218 bp, Homo sapiens; identical to SEQ ID NO: 361373
  chr19:2273763-2273981
  hyper

SEQ ID NO: 374541 - DNA, 49 bp, Homo sapiens; identical to SEQ ID NO: 293319
  chr19:2302510-2302559
  hyper

SEQ ID NO: 374542 - DNA, 112 bp, Homo sapiens
  chr19:2302951-2303063
  hyper
cagcggcttccacgcagacgcccgcagcaccacagcctgtgcacggcgcatccacgccctgttacaaatgttccattcaacgccttctagcacattcacagatcgtccgccc

SEQ ID NO: 374543 - DNA, 601 bp, Homo sapiens; identical to SEQ ID NO: 335900
  chr19:2461998-2462599
  hyper

SEQ ID NO: 374544 - DNA, 435 bp, Homo sapiens; identical to SEQ ID NO: 361375
  chr19:2488689-2489124
  hyper

SEQ ID NO: 374545 - DNA, 598 bp, Homo sapiens; identical to SEQ ID NO: 347527
  chr19:2579147-2579745
  hyper

SEQ ID NO: 374546 - DNA, 72 bp, Homo sapiens; identical to SEQ ID NO: 347528
  chr19:2702445-2702517
  hyper

SEQ ID NO: 374547 - DNA, 453 bp, Homo sapiens; identical to SEQ ID NO: 347529
  chr19:2702553-2703006
  hyper

SEQ ID NO: 374548 - DNA, 229 bp, Homo sapiens; identical to SEQ ID NO: 352158
  chr19:3360723-3360952
  hyper

SEQ ID NO: 374549 - DNA, 81 bp, Homo sapiens
  chr19:3721508-3721589
  hyper
cgggggttattcctgccgggtcttgctggcagccttgtcgggccgggctctggccgcggccgccggccccctctcggctgc

SEQ ID NO: 374550 - DNA, 46 bp, Homo sapiens; identical to SEQ ID NO: 347530
  chr19:3785511-3785557
  hyper

SEQ ID NO: 374551 - DNA, 265 bp, Homo sapiens; identical to SEQ ID NO: 205120
  chr19:4054040-4054305
  hyper

SEQ ID NO: 374552 - DNA, 55 bp, Homo sapiens; identical to SEQ ID NO: 205121
  chr19:4054380-4054435
  hyper

SEQ ID NO: 374553 - DNA, 170 bp, Homo sapiens; identical to SEQ ID NO: 205122
  chr19:4054471-4054641
  hyper

SEQ ID NO: 374554 - DNA, 520 bp, Homo sapiens; identical to SEQ ID NO: 352163
  chr19:4054917-4055437
  hyper

SEQ ID NO: 374555 - DNA, 36 bp, Homo sapiens; identical to SEQ ID NO: 335909
  chr19:4064382-4064418
  hyper

SEQ ID NO: 374556 - DNA, 97 bp, Homo sapiens; identical to SEQ ID NO: 205124
  chr19:4064872-4064969
  hyper

SEQ ID NO: 374557 - DNA, 33 bp, Homo sapiens; identical to SEQ ID NO: 361387
  chr19:4304684-4304717
  hyper

SEQ ID NO: 374558 - DNA, 107 bp, Homo sapiens; identical to SEQ ID NO: 335912
  chr19:4432865-4432972
  hyper

SEQ ID NO: 374559 - DNA, 242 bp, Homo sapiens; identical to SEQ ID NO: 352167
  chr19:4523777-4524019
  hyper

SEQ ID NO: 374560 - DNA, 303 bp, Homo sapiens; identical to SEQ ID NO: 293400
  chr19:5293673-5293976
  hyper

SEQ ID NO: 374561 - DNA, 541 bp, Homo sapiens; identical to SEQ ID NO: 361391
  chr19:5339897-5340438
  hyper

SEQ ID NO: 374562 - DNA, 355 bp, Homo sapiens; identical to SEQ ID NO: 335916
  chr19:5536543-5536898
  hyper

SEQ ID NO: 374563 - DNA, 416 bp, Homo sapiens
  chr19:5567703-5568119
  hyper
agccgtcctgcaggcgcgcgtcgcgcaccgtctggtggtcgtccagccgccgcgcgttgtagtagaaggcgcgcttccaggagctcacgccctggcccaccagctgggcgcgcaggtcgctgagcgtgtcccgcggccgcacggtcagcggtagcagcagcgcctcgtccgccaggtgcaccttgatgtggtagcgcttccagcgcgacagcccccgccgcagcccctccatggcgcccgcccggctccggctccagctctggccccgggccccgagcgccccgcgcacccgcccgactagcctggccgcccgcccccgccgcgcccgcgctccgcccgcccggacacgcccggcacgcagtgggcaggcccggcccggcggggcggggcgggtgccacggtcccctcaggcgtcc

SEQ ID NO: 374564 - DNA, 438 bp, Homo sapiens; identical to SEQ ID NO: 347531
  chr19:5608081-5608519
  hyper

SEQ ID NO: 374565 - DNA, 407 bp, Homo sapiens; identical to SEQ ID NO: 335919
  chr19:5686667-5687074
  hyper

SEQ ID NO: 374566 - DNA, 290 bp, Homo sapiens; identical to SEQ ID NO: 352169
  chr19:5961947-5962237
  hyper

SEQ ID NO: 374567 - DNA, 45 bp, Homo sapiens; identical to SEQ ID NO: 352170
  chr19:5962455-5962500
  hyper

SEQ ID NO: 374568 - DNA, 306 bp, Homo sapiens; identical to SEQ ID NO: 361396
  chr19:6530758-6531064
  hyper

SEQ ID NO: 374569 - DNA, 97 bp, Homo sapiens; identical to SEQ ID NO: 361397
  chr19:6531295-6531392
  hyper

SEQ ID NO: 374570 - DNA, 65 bp, Homo sapiens; identical to SEQ ID NO: 361398
  chr19:6590260-6590325
  hyper

SEQ ID NO: 374571 - DNA, 323 bp, Homo sapiens; identical to SEQ ID NO: 361399
  chr19:6590881-6591204
  hyper

SEQ ID NO: 374572 - DNA, 150 bp, Homo sapiens; identical to SEQ ID NO: 335923
  chr19:6768009-6768159
  hyper

SEQ ID NO: 374573 - DNA, 1037 bp, Homo sapiens; identical to SEQ ID NO: 335924
  chr19:7459644-7460681
  hyper

SEQ ID NO: 374574 - DNA, 112 bp, Homo sapiens; identical to SEQ ID NO: 335925
  chr19:7701796-7701908
  hyper

SEQ ID NO: 374575 - DNA, 37 bp, Homo sapiens; identical to SEQ ID NO: 361403
  chr19:8067303-8067340
  hyper

SEQ ID NO: 374576 - DNA, 72 bp, Homo sapiens; identical to SEQ ID NO: 361404
  chr19:8115163-8115235
  hyper

SEQ ID NO: 374577 - DNA, 685 bp, Homo sapiens; identical to SEQ ID NO: 335930
  chr19:8274278-8274963
  hyper

SEQ ID NO: 374578 - DNA, 689 bp, Homo sapiens; identical to SEQ ID NO: 335931
  chr19:8372877-8373566
  hyper

SEQ ID NO: 374579 - DNA, 112 bp, Homo sapiens; identical to SEQ ID NO: 361407
  chr19:8942745-8942857
  hyper

SEQ ID NO: 374580 - DNA, 405 bp, Homo sapiens; identical to SEQ ID NO: 335933
  chr19:9545915-9546320
  hyper

SEQ ID NO: 374581 - DNA, 322 bp, Homo sapiens; identical to SEQ ID NO: 352174
  chr19:10024009-10024331
  hyper

SEQ ID NO: 374582 - DNA, 211 bp, Homo sapiens; identical to SEQ ID NO: 347533
  chr19:10197461-10197672
  hyper

SEQ ID NO: 374583 - DNA, 169 bp, Homo sapiens; identical to SEQ ID NO: 335936
  chr19:10207022-10207191
  hyper

SEQ ID NO: 374584 - DNA, 992 bp, Homo sapiens; identical to SEQ ID NO: 335937
  chr19:10381056-10382048
  hyper

SEQ ID NO: 374585 - DNA, 214 bp, Homo sapiens; identical to SEQ ID NO: 205174
  chr19:10400761-10400975
  hyper

SEQ ID NO: 374586 - DNA, 278 bp, Homo sapiens; identical to SEQ ID NO: 293499
  chr19:10401208-10401486
  hyper

SEQ ID NO: 374587 - DNA, 290 bp, Homo sapiens; identical to SEQ ID NO: 293500
  chr19:10402604-10402894
  hyper

SEQ ID NO: 374588 - DNA, 340 bp, Homo sapiens; identical to SEQ ID NO: 293501
  chr19:10402960-10403300
  hyper

SEQ ID NO: 374589 - DNA, 131 bp, Homo sapiens; identical to SEQ ID NO: 352182
  chr19:10403330-10403461
  hyper

SEQ ID NO: 374590 - DNA, 183 bp, Homo sapiens
  chr19:10443523-10443706
  hyper
cgcgtgatatggaggggcgtactctccgcagtcctgaaacttctggatgtgaggtcccgccaccctgtggtagagtgggtggagaaaagcatcatccaagcagggggcaactggtggtccaatgtaccagcccattcacaattccccaacaggaccaaagctgtccgcccccttccattcccc

SEQ ID NO: 374591 - DNA, 484 bp, Homo sapiens; identical to SEQ ID NO: 352183
  chr19:10529649-10530133
  hyper

SEQ ID NO: 374592 - DNA, 111 bp, Homo sapiens; identical to SEQ ID NO: 352184
  chr19:10530526-10530637
  hyper

SEQ ID NO: 374593 - DNA, 630 bp, Homo sapiens; identical to SEQ ID NO: 352185
  chr19:10530654-10531284
  hyper

SEQ ID NO: 374594 - DNA, 38 bp, Homo sapiens; identical to SEQ ID NO: 361421
  chr19:10616220-10616258
  hyper

SEQ ID NO: 374595 - DNA, 115 bp, Homo sapiens; identical to SEQ ID NO: 352186
  chr19:10691764-10691879
  hyper

SEQ ID NO: 374596 - DNA, 508 bp, Homo sapiens; identical to SEQ ID NO: 335951
  chr19:11144009-11144517
  hyper

SEQ ID NO: 374597 - DNA, 177 bp, Homo sapiens; identical to SEQ ID NO: 335952
  chr19:11199850-11200027
  hyper

SEQ ID NO: 374598 - DNA, 146 bp, Homo sapiens; identical to SEQ ID NO: 335953
  chr19:11466008-11466154
  hyper

SEQ ID NO: 374599 - DNA, 597 bp, Homo sapiens; identical to SEQ ID NO: 352189
  chr19:11491655-11492252
  hyper

SEQ ID NO: 374600 - DNA, 134 bp, Homo sapiens; identical to SEQ ID NO: 205186
  chr19:11492528-11492662
  hyper

SEQ ID NO: 374601 - DNA, 163 bp, Homo sapiens; identical to SEQ ID NO: 352191
  chr19:11529251-11529414
  hyper

SEQ ID NO: 374602 - DNA, 50 bp, Homo sapiens; identical to SEQ ID NO: 352192
  chr19:11531278-11531328
  hyper

SEQ ID NO: 374603 - DNA, 37 bp, Homo sapiens; identical to SEQ ID NO: 293533
  chr19:11531888-11531925
  hyper

SEQ ID NO: 374604 - DNA, 284 bp, Homo sapiens; identical to SEQ ID NO: 352194
  chr19:11532739-11533023
  hyper

SEQ ID NO: 374605 - DNA, 300 bp, Homo sapiens
  chr19:11590392-11590692
  hyper
cgcccccgggatacgcccgggctgccgagtgggaatccgagggctcgggcgaggccgggcccccggggccctgggggcggggcctagatgggcgtgcccgggcgtggccaggcagggcgtggcagggcgggaggggctgcgcgctcgggagctgaccagctccgtggctgctgaaagcaccgagcgcggggctagcggtgcgggcgagcaggcgggcgggccgcgctcaaggtcacctcgcggcccagagccttggcgaggtggggagcctggacctggcctaagggggctgtctcggcc

SEQ ID NO: 374606 - DNA, 69 bp, Homo sapiens; identical to SEQ ID NO: 361431
  chr19:11591231-11591300
  hyper

SEQ ID NO: 374607 - DNA, 184 bp, Homo sapiens; identical to SEQ ID NO: 293539
  chr19:11591353-11591537
  hyper

SEQ ID NO: 374608 - DNA, 67 bp, Homo sapiens; identical to SEQ ID NO: 352195
  chr19:11592604-11592671
  hyper

SEQ ID NO: 374609 - DNA, 189 bp, Homo sapiens; identical to SEQ ID NO: 347537
  chr19:11593453-11593642
  hyper

SEQ ID NO: 374610 - DNA, 57 bp, Homo sapiens; identical to SEQ ID NO: 293543
  chr19:11689628-11689685
  hyper

SEQ ID NO: 374611 - DNA, 165 bp, Homo sapiens; identical to SEQ ID NO: 347538
  chr19:11805261-11805426
  hyper

SEQ ID NO: 374612 - DNA, 369 bp, Homo sapiens; identical to SEQ ID NO: 347539
  chr19:11805597-11805966
  hyper

SEQ ID NO: 374613 - DNA, 608 bp, Homo sapiens; identical to SEQ ID NO: 335963
  chr19:11877720-11878328
  hyper

SEQ ID NO: 374614 - DNA, 160 bp, Homo sapiens; identical to SEQ ID NO: 345564
  chr19:11909173-11909333
  hyper

SEQ ID NO: 374615 - DNA, 60 bp, Homo sapiens; identical to SEQ ID NO: 205194
  chr19:11909732-11909792
  hyper

SEQ ID NO: 374616 - DNA, 49 bp, Homo sapiens; identical to SEQ ID NO: 345566
  chr19:11959378-11959427
  hyper

SEQ ID NO: 374617 - DNA, 172 bp, Homo sapiens; identical to SEQ ID NO: 352202
  chr19:11999219-11999391
  hyper

SEQ ID NO: 374618 - DNA, 254 bp, Homo sapiens; identical to SEQ ID NO: 205198
  chr19:12075818-12076072
  hyper

SEQ ID NO: 374619 - DNA, 332 bp, Homo sapiens; identical to SEQ ID NO: 347544
  chr19:12098300-12098632
  hyper

SEQ ID NO: 374620 - DNA, 514 bp, Homo sapiens; identical to SEQ ID NO: 352205
  chr19:12146030-12146544
  hyper

SEQ ID NO: 374621 - DNA, 117 bp, Homo sapiens; identical to SEQ ID NO: 205202
  chr19:12163331-12163448
  hyper

SEQ ID NO: 374622 - DNA, 443 bp, Homo sapiens; identical to SEQ ID NO: 352207
  chr19:12250823-12251266
  hyper

SEQ ID NO: 374623 - DNA, 585 bp, Homo sapiens; identical to SEQ ID NO: 335975
  chr19:12444060-12444645
  hyper

SEQ ID NO: 374624 - DNA, 226 bp, Homo sapiens; identical to SEQ ID NO: 352208
  chr19:12551198-12551424
  hyper

SEQ ID NO: 374625 - DNA, 391 bp, Homo sapiens; identical to SEQ ID NO: 352209
  chr19:12551485-12551876
  hyper

SEQ ID NO: 374626 - DNA, 96 bp, Homo sapiens; identical to SEQ ID NO: 347546
  chr19:12595013-12595109
  hyper

SEQ ID NO: 374627 - DNA, 538 bp, Homo sapiens; identical to SEQ ID NO: 205207
  chr19:12595307-12595845
  hyper

SEQ ID NO: 374628 - DNA, 198 bp, Homo sapiens; identical to SEQ ID NO: 352212
  chr19:12595896-12596094
  hyper

SEQ ID NO: 374629 - DNA, 224 bp, Homo sapiens; identical to SEQ ID NO: 335978
  chr19:12721448-12721672
  hyper

SEQ ID NO: 374630 - DNA, 261 bp, Homo sapiens; identical to SEQ ID NO: 335980
  chr19:12807005-12807266
  hyper

SEQ ID NO: 374631 - DNA, 610 bp, Homo sapiens; identical to SEQ ID NO: 335981
  chr19:12900128-12900738
  hyper

SEQ ID NO: 374632 - DNA, 109 bp, Homo sapiens; identical to SEQ ID NO: 361455
  chr19:12912808-12912917
  hyper

SEQ ID NO: 374633 - DNA, 159 bp, Homo sapiens; identical to SEQ ID NO: 352213
  chr19:12946904-12947063
  hyper

SEQ ID NO: 374634 - DNA, 259 bp, Homo sapiens; identical to SEQ ID NO: 352214
  chr19:12947127-12947386
  hyper

SEQ ID NO: 374635 - DNA, 199 bp, Homo sapiens; identical to SEQ ID NO: 352215
  chr19:12951477-12951676
  hyper

SEQ ID NO: 374636 - DNA, 220 bp, Homo sapiens; identical to SEQ ID NO: 293597
  chr19:12995851-12996071
  hyper

SEQ ID NO: 374637 - DNA, 60 bp, Homo sapiens; identical to SEQ ID NO: 345568
  chr19:13208370-13208430
  hyper

SEQ ID NO: 374638 - DNA, 205 bp, Homo sapiens; identical to SEQ ID NO: 293612
  chr19:13208478-13208683
  hyper

SEQ ID NO: 374639 - DNA, 284 bp, Homo sapiens; identical to SEQ ID NO: 205227
  chr19:13208945-13209229
  hyper

SEQ ID NO: 374640 - DNA, 446 bp, Homo sapiens; identical to SEQ ID NO: 293614
  chr19:13209259-13209705
  hyper

SEQ ID NO: 374641 - DNA, 189 bp, Homo sapiens; identical to SEQ ID NO: 345572
  chr19:13213427-13213616
  hyper

SEQ ID NO: 374642 - DNA, 112 bp, Homo sapiens; identical to SEQ ID NO: 345573
  chr19:13213834-13213946
  hyper

SEQ ID NO: 374643 - DNA, 1257 bp, Homo sapiens; identical to SEQ ID NO: 345574
  chr19:13265772-13267029
  hyper

SEQ ID NO: 374644 - DNA, 223 bp, Homo sapiens; identical to SEQ ID NO: 352223
  chr19:13983612-13983835
  hyper

SEQ ID NO: 374645 - DNA, 433 bp, Homo sapiens; identical to SEQ ID NO: 293628
  chr19:13983865-13984298
  hyper

SEQ ID NO: 374646 - DNA, 1302 bp, Homo sapiens; identical to SEQ ID NO: 335994
  chr19:14073521-14074823
  hyper

SEQ ID NO: 374647 - DNA, 32 bp, Homo sapiens; identical to SEQ ID NO: 205238
  chr19:14584167-14584199
  hyper

SEQ ID NO: 374648 - DNA, 324 bp, Homo sapiens; identical to SEQ ID NO: 335997
  chr19:15235629-15235953
  hyper

SEQ ID NO: 374649 - DNA, 589 bp, Homo sapiens; identical to SEQ ID NO: 361472
  chr19:15334122-15334711
  hyper

SEQ ID NO: 374650 - DNA, 106 bp, Homo sapiens; identical to SEQ ID NO: 352228
  chr19:15695669-15695775
  hyper

SEQ ID NO: 374651 - DNA, 161 bp, Homo sapiens; identical to SEQ ID NO: 345576
  chr19:16186802-16186963
  hyper

SEQ ID NO: 374652 - DNA, 102 bp, Homo sapiens; identical to SEQ ID NO: 205249
  chr19:16187000-16187102
  hyper

SEQ ID NO: 374653 - DNA, 517 bp, Homo sapiens; identical to SEQ ID NO: 205250
  chr19:16187103-16187620
  hyper

SEQ ID NO: 374654 - DNA, 634 bp, Homo sapiens; identical to SEQ ID NO: 345579
  chr19:16187640-16188274
  hyper

SEQ ID NO: 374655 - DNA, 661 bp, Homo sapiens; identical to SEQ ID NO: 352233
  chr19:16772102-16772763
  hyper

SEQ ID NO: 374656 - DNA, 214 bp, Homo sapiens; identical to SEQ ID NO: 345580
  chr19:17008145-17008359
  hyper

SEQ ID NO: 374657 - DNA, 31 bp, Homo sapiens; identical to SEQ ID NO: 55797
  chr19:17008820-17008851
  hyper

SEQ ID NO: 374658 - DNA, 105 bp, Homo sapiens; identical to SEQ ID NO: 361481
  chr19:17392397-17392502
  hyper

SEQ ID NO: 374659 - DNA, 239 bp, Homo sapiens; identical to SEQ ID NO: 205266
  chr19:17716539-17716778
  hyper

SEQ ID NO: 374660 - DNA, 129 bp, Homo sapiens; identical to SEQ ID NO: 205270
  chr19:17958346-17958475
  hyper

SEQ ID NO: 374661 - DNA, 161 bp, Homo sapiens; identical to SEQ ID NO: 352238
  chr19:17984912-17985073
  hyper

SEQ ID NO: 374662 - DNA, 106 bp, Homo sapiens; identical to SEQ ID NO: 336015
  chr19:18059933-18060039
  hyper

SEQ ID NO: 374663 - DNA, 353 bp, Homo sapiens; identical to SEQ ID NO: 347564
  chr19:18117804-18118157
  hyper

SEQ ID NO: 374664 - DNA, 36 bp, Homo sapiens
  chr19:18118537-18118573
  hyper
cgggggaaacaggcctggaacagtcataggctctct

SEQ ID NO: 374665 - DNA, 99 bp, Homo sapiens; identical to SEQ ID NO: 205275
  chr19:18119043-18119142
  hyper

SEQ ID NO: 374666 - DNA, 262 bp, Homo sapiens; identical to SEQ ID NO: 347565
  chr19:18335414-18335676
  hyper

SEQ ID NO: 374667 - DNA, 202 bp, Homo sapiens; identical to SEQ ID NO: 293711
  chr19:18337130-18337332
  hyper

SEQ ID NO: 374668 - DNA, 554 bp, Homo sapiens; identical to SEQ ID NO: 336020
  chr19:18548582-18549136
  hyper

SEQ ID NO: 374669 - DNA, 90 bp, Homo sapiens; identical to SEQ ID NO: 352241
  chr19:18714365-18714455
  hyper

SEQ ID NO: 374670 - DNA, 68 bp, Homo sapiens; identical to SEQ ID NO: 336022
  chr19:18715135-18715203
  hyper

SEQ ID NO: 374671 - DNA, 451 bp, Homo sapiens; identical to SEQ ID NO: 361490
  chr19:18715787-18716238
  hyper

SEQ ID NO: 374672 - DNA, 452 bp, Homo sapiens; identical to SEQ ID NO: 293727
  chr19:18716283-18716735
  hyper

SEQ ID NO: 374673 - DNA, 350 bp, Homo sapiens; identical to SEQ ID NO: 361492
  chr19:18716847-18717197
  hyper

SEQ ID NO: 374674 - DNA, 263 bp, Homo sapiens
  chr19:18722000-18722263
  hyper
cgttttaagcaatgcccaaaggtcacctcccatcattggcagggctctgccggcttttctttgcttctctccctgtcacctggacagaaccactttgcagtctgagcatcagtttcctcacccatataaaagggcaacgctaccggtacctgtcttatacggttgttgcaagaaaaagtgtttcgttggaatgaatgaaagacagtaattgtggaggggttaggcgcgcgcgggcctctggaattagcatgtgtgggcttgaa

SEQ ID NO: 374675 - DNA, 64 bp, Homo sapiens; identical to SEQ ID NO: 293731
  chr19:18722425-18722489
  hyper

SEQ ID NO: 374676 - DNA, 154 bp, Homo sapiens; identical to SEQ ID NO: 293732
  chr19:18722521-18722675
  hyper

SEQ ID NO: 374677 - DNA, 188 bp, Homo sapiens
  chr19:18722768-18722956
  hyper
cgccaggcatgccagcgaaagcgggggcatctttgcagaggatccgggtttagaggggcgtccccactcccttatctggcggagaggaagctgggggtaccctctaaccgagattcggctcctggggctacagtccatcgccctggggtgtgatggttatggaagtcagaagtgtcgctatttgcccc

SEQ ID NO: 374678 - DNA, 62 bp, Homo sapiens; identical to SEQ ID NO: 361493
  chr19:18899652-18899714
  hyper

SEQ ID NO: 374679 - DNA, 36 bp, Homo sapiens
  chr19:19383975-19384011
  hyper
cgctcagcgacagcgccgcgatcttgccggccagcg

SEQ ID NO: 374680 - DNA, 90 bp, Homo sapiens; identical to SEQ ID NO: 352243
  chr19:19729161-19729251
  hyper

SEQ ID NO: 374681 - DNA, 135 bp, Homo sapiens; identical to SEQ ID NO: 205291
  chr19:19729395-19729530
  hyper

SEQ ID NO: 374682 - DNA, 147 bp, Homo sapiens; identical to SEQ ID NO: 352245
  chr19:19729585-19729732
  hyper

SEQ ID NO: 374683 - DNA, 50 bp, Homo sapiens; identical to SEQ ID NO: 205293
  chr19:19738572-19738622
  hyper

SEQ ID NO: 374684 - DNA, 504 bp, Homo sapiens; identical to SEQ ID NO: 293751
  chr19:19738668-19739172
  hyper

SEQ ID NO: 374685 - DNA, 247 bp, Homo sapiens; identical to SEQ ID NO: 205295
  chr19:19739428-19739675
  hyper

SEQ ID NO: 374686 - DNA, 261 bp, Homo sapiens; identical to SEQ ID NO: 205296
  chr19:19843330-19843591
  hyper

SEQ ID NO: 374687 - DNA, 47 bp, Homo sapiens; identical to SEQ ID NO: 352250
  chr19:19844044-19844091
  hyper

SEQ ID NO: 374688 - DNA, 243 bp, Homo sapiens; identical to SEQ ID NO: 336034
  chr19:19887245-19887488
  hyper

SEQ ID NO: 374689 - DNA, 74 bp, Homo sapiens; identical to SEQ ID NO: 347566
  chr19:19932106-19932180
  hyper

SEQ ID NO: 374690 - DNA, 693 bp, Homo sapiens; identical to SEQ ID NO: 345583
  chr19:19976556-19977249
  hyper

SEQ ID NO: 374691 - DNA, 35 bp, Homo sapiens; identical to SEQ ID NO: 345584
  chr19:19977294-19977329
  hyper

SEQ ID NO: 374692 - DNA, 69 bp, Homo sapiens; identical to SEQ ID NO: 347569
  chr19:20011652-20011721
  hyper

SEQ ID NO: 374693 - DNA, 48 bp, Homo sapiens; identical to SEQ ID NO: 347570
  chr19:20011722-20011770
  hyper

SEQ ID NO: 374694 - DNA, 53 bp, Homo sapiens; identical to SEQ ID NO: 347571
  chr19:20162601-20162654
  hyper

SEQ ID NO: 374695 - DNA, 76 bp, Homo sapiens; identical to SEQ ID NO: 336043
  chr19:21512126-21512202
  hyper

SEQ ID NO: 374696 - DNA, 117 bp, Homo sapiens; identical to SEQ ID NO: 336044
  chr19:21541712-21541829
  hyper

SEQ ID NO: 374697 - DNA, 171 bp, Homo sapiens; identical to SEQ ID NO: 336045
  chr19:21542078-21542249
  hyper

SEQ ID NO: 374698 - DNA, 309 bp, Homo sapiens; identical to SEQ ID NO: 336046
  chr19:21579832-21580141
  hyper

SEQ ID NO: 374699 - DNA, 101 bp, Homo sapiens; identical to SEQ ID NO: 12199
  chr19:21580233-21580334
  hyper

SEQ ID NO: 374700 - DNA, 159 bp, Homo sapiens; identical to SEQ ID NO: 336048
  chr19:21688303-21688462
  hyper

SEQ ID NO: 374701 - DNA, 73 bp, Homo sapiens; identical to SEQ ID NO: 293780
  chr19:21688741-21688814
  hyper

SEQ ID NO: 374702 - DNA, 60 bp, Homo sapiens; identical to SEQ ID NO: 205321
  chr19:22019028-22019088
  hyper

SEQ ID NO: 374703 - DNA, 102 bp, Homo sapiens; identical to SEQ ID NO: 336054
  chr19:23432614-23432716
  hyper

SEQ ID NO: 374704 - DNA, 129 bp, Homo sapiens; identical to SEQ ID NO: 347575
  chr19:23432833-23432962
  hyper

SEQ ID NO: 374705 - DNA, 120 bp, Homo sapiens; identical to SEQ ID NO: 205325
  chr19:23433023-23433143
  hyper

SEQ ID NO: 374706 - DNA, 118 bp, Homo sapiens; identical to SEQ ID NO: 347577
  chr19:23433296-23433414
  hyper

SEQ ID NO: 374707 - DNA, 105 bp, Homo sapiens; identical to SEQ ID NO: 347578
  chr19:23456510-23456615
  hyper

SEQ ID NO: 374708 - DNA, 216 bp, Homo sapiens; identical to SEQ ID NO: 347579
  chr19:23456881-23457097
  hyper

SEQ ID NO: 374709 - DNA, 38 bp, Homo sapiens; identical to SEQ ID NO: 361523
  chr19:23577711-23577749
  hyper

SEQ ID NO: 374710 - DNA, 68 bp, Homo sapiens; identical to SEQ ID NO: 336059
  chr19:23578240-23578308
  hyper

SEQ ID NO: 374711 - DNA, 68 bp, Homo sapiens; identical to SEQ ID NO: 347581
  chr19:23598868-23598936
  hyper

SEQ ID NO: 374712 - DNA, 701 bp, Homo sapiens; identical to SEQ ID NO: 12224
  chr19:24216103-24216804
  hyper

SEQ ID NO: 374713 - DNA, 770 bp, Homo sapiens; identical to SEQ ID NO: 336063
  chr19:28284358-28285128
  hyper

SEQ ID NO: 374714 - DNA, 259 bp, Homo sapiens; identical to SEQ ID NO: 336066
  chr19:30165123-30165382
  hyper

SEQ ID NO: 374715 - DNA, 60 bp, Homo sapiens; identical to SEQ ID NO: 205342
  chr19:30718934-30718994
  hyper

SEQ ID NO: 374716 - DNA, 58 bp, Homo sapiens; identical to SEQ ID NO: 352276
  chr19:31839508-31839566
  hyper

SEQ ID NO: 374717 - DNA, 233 bp, Homo sapiens; identical to SEQ ID NO: 293818
  chr19:31841177-31841410
  hyper

SEQ ID NO: 374718 - DNA, 325 bp, Homo sapiens; identical to SEQ ID NO: 293819
  chr19:31841583-31841908
  hyper

SEQ ID NO: 374719 - DNA, 118 bp, Homo sapiens; identical to SEQ ID NO: 336074
  chr19:33182525-33182643
  hyper

SEQ ID NO: 374720 - DNA, 308 bp, Homo sapiens; identical to SEQ ID NO: 293830
  chr19:33685236-33685544
  hyper

SEQ ID NO: 374721 - DNA, 249 bp, Homo sapiens; identical to SEQ ID NO: 293831
  chr19:33685653-33685902
  hyper

SEQ ID NO: 374722 - DNA, 123 bp, Homo sapiens; identical to SEQ ID NO: 361535
  chr19:33686020-33686143
  hyper

SEQ ID NO: 374723 - DNA, 298 bp, Homo sapiens; identical to SEQ ID NO: 361536
  chr19:33791861-33792159
  hyper

SEQ ID NO: 374724 - DNA, 1246 bp, Homo sapiens; identical to SEQ ID NO: 205356
  chr19:33792630-33793876
  hyper

SEQ ID NO: 374725 - DNA, 369 bp, Homo sapiens; identical to SEQ ID NO: 352280
  chr19:33793960-33794329
  hyper

SEQ ID NO: 374726 - DNA, 49 bp, Homo sapiens; identical to SEQ ID NO: 352281
  chr19:34114303-34114352
  hyper

SEQ ID NO: 374727 - DNA, 556 bp, Homo sapiens; identical to SEQ ID NO: 352282
  chr19:34310910-34311466
  hyper

SEQ ID NO: 374728 - DNA, 66 bp, Homo sapiens; identical to SEQ ID NO: 352283
  chr19:34311498-34311564
  hyper

SEQ ID NO: 374729 - DNA, 116 bp, Homo sapiens; identical to SEQ ID NO: 205363
  chr19:34972067-34972183
  hyper

SEQ ID NO: 374730 - DNA, 38 bp, Homo sapiens; identical to SEQ ID NO: 361543
  chr19:35168869-35168907
  hyper

SEQ ID NO: 374731 - DNA, 94 bp, Homo sapiens; identical to SEQ ID NO: 205366
  chr19:35168992-35169086
  hyper

SEQ ID NO: 374732 - DNA, 68 bp, Homo sapiens; identical to SEQ ID NO: 336081
  chr19:35169531-35169599
  hyper

SEQ ID NO: 374733 - DNA, 478 bp, Homo sapiens; identical to SEQ ID NO: 352284
  chr19:35454533-35455011
  hyper

SEQ ID NO: 374734 - DNA, 225 bp, Homo sapiens; identical to SEQ ID NO: 361546
  chr19:35531876-35532101
  hyper

SEQ ID NO: 374735 - DNA, 121 bp, Homo sapiens; identical to SEQ ID NO: 361547
  chr19:35581628-35581749
  hyper

SEQ ID NO: 374736 - DNA, 149 bp, Homo sapiens; identical to SEQ ID NO: 293861
  chr19:35581779-35581928
  hyper

SEQ ID NO: 374737 - DNA, 234 bp, Homo sapiens; identical to SEQ ID NO: 336085
  chr19:35738737-35738971
  hyper

SEQ ID NO: 374738 - DNA, 378 bp, Homo sapiens; identical to SEQ ID NO: 336086
  chr19:35758216-35758594
  hyper

SEQ ID NO: 374739 - DNA, 129 bp, Homo sapiens; identical to SEQ ID NO: 361550
  chr19:36347680-36347809
  hyper

SEQ ID NO: 374740 - DNA, 35 bp, Homo sapiens; identical to SEQ ID NO: 361551
  chr19:36348065-36348100
  hyper

SEQ ID NO: 374741 - DNA, 207 bp, Homo sapiens
  chr19:36351581-36351788
  hyper
cggcctgtgggtgtggtcaaaggtggccgtggctttcagggctgttgagggtcggggcctggaggggcggggccgggagagcgagcgtggggtattaggaggaggagagtgtggagctggggcatattcttgcgccctagagggtgtggtgtttctgtggggctggctgatcccaggtcagtggctgcattccgccccggccatgtg

SEQ ID NO: 374742 - DNA, 63 bp, Homo sapiens; identical to SEQ ID NO: 352285
  chr19:36478303-36478366
  hyper

SEQ ID NO: 374743 - DNA, 49 bp, Homo sapiens; identical to SEQ ID NO: 361553
  chr19:36736769-36736818
  hyper

SEQ ID NO: 374744 - DNA, 159 bp, Homo sapiens; identical to SEQ ID NO: 347586
  chr19:36822892-36823051
  hyper

SEQ ID NO: 374745 - DNA, 209 bp, Homo sapiens; identical to SEQ ID NO: 345589
  chr19:36980725-36980934
  hyper

SEQ ID NO: 374746 - DNA, 290 bp, Homo sapiens; identical to SEQ ID NO: 361556
  chr19:37063799-37064089
  hyper

SEQ ID NO: 374747 - DNA, 275 bp, Homo sapiens; identical to SEQ ID NO: 293893
  chr19:37064360-37064635
  hyper

SEQ ID NO: 374748 - DNA, 31 bp, Homo sapiens; identical to SEQ ID NO: 347588
  chr19:37095634-37095665
  hyper

SEQ ID NO: 374749 - DNA, 105 bp, Homo sapiens; identical to SEQ ID NO: 347589
  chr19:37096594-37096699
  hyper

SEQ ID NO: 374750 - DNA, 156 bp, Homo sapiens; identical to SEQ ID NO: 352290
  chr19:37329462-37329618
  hyper

SEQ ID NO: 374751 - DNA, 142 bp, Homo sapiens; identical to SEQ ID NO: 347590
  chr19:37342189-37342331
  hyper

SEQ ID NO: 374752 - DNA, 34 bp, Homo sapiens
  chr19:37406731-37406765
  hyper
cgtgatcctcctgcctcggcctcccaaacacaac

SEQ ID NO: 374753 - DNA, 170 bp, Homo sapiens; identical to SEQ ID NO: 361562
  chr19:37407590-37407760
  hyper

SEQ ID NO: 374754 - DNA, 41 bp, Homo sapiens; identical to SEQ ID NO: 352292
  chr19:37463952-37463993
  hyper

SEQ ID NO: 374755 - DNA, 295 bp, Homo sapiens; identical to SEQ ID NO: 345590
  chr19:37568994-37569289
  hyper

SEQ ID NO: 374756 - DNA, 182 bp, Homo sapiens; identical to SEQ ID NO: 345591
  chr19:37569554-37569736
  hyper

SEQ ID NO: 374757 - DNA, 100 bp, Homo sapiens; identical to SEQ ID NO: 361566
  chr19:37663394-37663494
  hyper

SEQ ID NO: 374758 - DNA, 52 bp, Homo sapiens; identical to SEQ ID NO: 361567
  chr19:37663804-37663856
  hyper

SEQ ID NO: 374759 - DNA, 187 bp, Homo sapiens; identical to SEQ ID NO: 336109
  chr19:37708883-37709070
  hyper

SEQ ID NO: 374760 - DNA, 83 bp, Homo sapiens; identical to SEQ ID NO: 345592
  chr19:37957588-37957671
  hyper

SEQ ID NO: 374761 - DNA, 33 bp, Homo sapiens
  chr19:37998138-37998171
  hyper
atggattgggagtgtgtgggaatcaataaatgc

SEQ ID NO: 374762 - DNA, 92 bp, Homo sapiens; identical to SEQ ID NO: 352297
  chr19:38085148-38085240
  hyper

SEQ ID NO: 374763 - DNA, 38 bp, Homo sapiens; identical to SEQ ID NO: 361571
  chr19:38086162-38086200
  hyper

SEQ ID NO: 374764 - DNA, 424 bp, Homo sapiens; identical to SEQ ID NO: 205389
  chr19:38145586-38146010
  hyper

SEQ ID NO: 374765 - DNA, 37 bp, Homo sapiens; identical to SEQ ID NO: 345593
  chr19:38182720-38182757
  hyper

SEQ ID NO: 374766 - DNA, 188 bp, Homo sapiens; identical to SEQ ID NO: 352300
  chr19:38210751-38210939
  hyper

SEQ ID NO: 374767 - DNA, 104 bp, Homo sapiens; identical to SEQ ID NO: 336118
  chr19:38270338-38270442
  hyper

SEQ ID NO: 374768 - DNA, 295 bp, Homo sapiens; identical to SEQ ID NO: 293923
  chr19:38701255-38701550
  hyper

SEQ ID NO: 374769 - DNA, 31 bp, Homo sapiens; identical to SEQ ID NO: 352303
  chr19:38702212-38702243
  hyper

SEQ ID NO: 374770 - DNA, 85 bp, Homo sapiens; identical to SEQ ID NO: 293926
  chr19:38719834-38719919
  hyper

SEQ ID NO: 374771 - DNA, 263 bp, Homo sapiens; identical to SEQ ID NO: 293927
  chr19:38719956-38720219
  hyper

SEQ ID NO: 374772 - DNA, 187 bp, Homo sapiens; identical to SEQ ID NO: 352306
  chr19:38720439-38720626
  hyper

SEQ ID NO: 374773 - DNA, 389 bp, Homo sapiens; identical to SEQ ID NO: 347597
  chr19:38754883-38755272
  hyper

SEQ ID NO: 374774 - DNA, 175 bp, Homo sapiens; identical to SEQ ID NO: 347598
  chr19:38755344-38755519
  hyper

SEQ ID NO: 374775 - DNA, 181 bp, Homo sapiens; identical to SEQ ID NO: 361583
  chr19:38852786-38852967
  hyper

SEQ ID NO: 374776 - DNA, 291 bp, Homo sapiens; identical to SEQ ID NO: 361584
  chr19:38853193-38853484
  hyper

SEQ ID NO: 374777 - DNA, 62 bp, Homo sapiens; identical to SEQ ID NO: 361585
  chr19:38976252-38976314
  hyper

SEQ ID NO: 374778 - DNA, 37 bp, Homo sapiens; identical to SEQ ID NO: 361586
  chr19:38976790-38976827
  hyper

SEQ ID NO: 374779 - DNA, 668 bp, Homo sapiens; identical to SEQ ID NO: 361587
  chr19:39574122-39574790
  hyper

SEQ ID NO: 374780 - DNA, 45 bp, Homo sapiens; identical to SEQ ID NO: 361588
  chr19:39575044-39575089
  hyper

SEQ ID NO: 374781 - DNA, 32 bp, Homo sapiens; identical to SEQ ID NO: 205405
  chr19:39754842-39754874
  hyper

SEQ ID NO: 374782 - DNA, 186 bp, Homo sapiens; identical to SEQ ID NO: 361590
  chr19:39989541-39989727
  hyper

SEQ ID NO: 374783 - DNA, 67 bp, Homo sapiens; identical to SEQ ID NO: 352310
  chr19:39997621-39997688
  hyper

SEQ ID NO: 374784 - DNA, 50 bp, Homo sapiens; identical to SEQ ID NO: 361592
  chr19:40005601-40005651
  hyper

SEQ ID NO: 374785 - DNA, 258 bp, Homo sapiens; identical to SEQ ID NO: 352311
  chr19:40323996-40324254
  hyper

SEQ ID NO: 374786 - DNA, 989 bp, Homo sapiens; identical to SEQ ID NO: 336133
  chr19:40561486-40562475
  hyper

SEQ ID NO: 374787 - DNA, 423 bp, Homo sapiens; identical to SEQ ID NO: 336134
  chr19:40948768-40949191
  hyper

SEQ ID NO: 374788 - DNA, 106 bp, Homo sapiens; identical to SEQ ID NO: 361596
  chr19:40972636-40972742
  hyper

SEQ ID NO: 374789 - DNA, 32 bp, Homo sapiens; identical to SEQ ID NO: 205421
  chr19:41060353-41060385
  hyper

SEQ ID NO: 374790 - DNA, 48 bp, Homo sapiens; identical to SEQ ID NO: 347600
  chr19:41105938-41105986
  hyper

SEQ ID NO: 374791 - DNA, 86 bp, Homo sapiens; identical to SEQ ID NO: 347601
  chr19:41106420-41106506
  hyper

SEQ ID NO: 374792 - DNA, 678 bp, Homo sapiens; identical to SEQ ID NO: 361600
  chr19:41111116-41111794
  hyper

SEQ ID NO: 374793 - DNA, 69 bp, Homo sapiens; identical to SEQ ID NO: 345594
  chr19:41115811-41115880
  hyper

SEQ ID NO: 374794 - DNA, 57 bp, Homo sapiens; identical to SEQ ID NO: 352316
  chr19:41119120-41119177
  hyper

SEQ ID NO: 374795 - DNA, 67 bp, Homo sapiens; identical to SEQ ID NO: 293998
  chr19:41119735-41119802
  hyper

SEQ ID NO: 374796 - DNA, 359 bp, Homo sapiens; identical to SEQ ID NO: 336145
  chr19:41190162-41190521
  hyper

SEQ ID NO: 374797 - DNA, 191 bp, Homo sapiens; identical to SEQ ID NO: 205432
  chr19:41698920-41699111
  hyper

SEQ ID NO: 374798 - DNA, 158 bp, Homo sapiens; identical to SEQ ID NO: 361606
  chr19:41699206-41699364
  hyper

SEQ ID NO: 374799 - DNA, 376 bp, Homo sapiens
  chr19:41732035-41732411
  hyper
cggctctggctccgcgcccccgaagccggccggaagcgctggggtggggaggtgcccccggtgactcacgcgggggcaggaatgctgcggtcggaacgggacccggctccagaacccacctccagccccagggcttctccggccggcggcgccagctcccgcgcgctgaccctggcggggccccacgtgccaggtggctggacccgacccaggctccccgcccccactcgggccgcccgcccgggactgtactgtttctcctccgggcggcgcgggggctgcgggcgcggggccttcagggcgcggaggctgcgggagcgggcacctgaccttgtctgggaacggccacctaggaagccgcgactgaggagctccc

SEQ ID NO: 374800 - DNA, 114 bp, Homo sapiens
  chr19:41732441-41732555
  hyper
ttgcaccattccactccctccgctgacggagaaaaggaaactttgtgtctgcggatggagagcctcccttgccaacgcggtgggaacagaggcgtacacgcacggagcaaacac

SEQ ID NO: 374801 - DNA, 121 bp, Homo sapiens; identical to SEQ ID NO: 352319
  chr19:42498155-42498276
  hyper

SEQ ID NO: 374802 - DNA, 75 bp, Homo sapiens
  chr19:42927302-42927377
  hyper
cgggaaccctggtccacgaagctcgcattccggactctgctcccaagccgatccgggcgtcagctagtccctgtg

SEQ ID NO: 374803 - DNA, 247 bp, Homo sapiens; identical to SEQ ID NO: 294038
  chr19:42927478-42927725
  hyper

SEQ ID NO: 374804 - DNA, 246 bp, Homo sapiens; identical to SEQ ID NO: 352320
  chr19:43967263-43967509
  hyper

SEQ ID NO: 374805 - DNA, 423 bp, Homo sapiens; identical to SEQ ID NO: 361610
  chr19:43967731-43968154
  hyper

SEQ ID NO: 374806 - DNA, 165 bp, Homo sapiens
  chr19:44030452-44030617
  hyper
cggagcagccccgagcctgtaatgtggtccgcgtggcagtgggtattcactgggagagagaggagggacaggtccggagggtacagaaaggacctgggagtcccagcccagatccttctccctcagactcaggagttctgggccccagcttcccattccactgac

SEQ ID NO: 374807 - DNA, 133 bp, Homo sapiens
  chr19:44030819-44030952
  hyper
gggggacccaggtgagggcgcagaaccggacttccacccactggaggccaagtagtccagactgaccctatcctcttcctaagatccagaagcagaaaccccagcccactctttccccgggagtcgggagtcc

SEQ ID NO: 374808 - DNA, 387 bp, Homo sapiens; identical to SEQ ID NO: 336154
  chr19:44099002-44099389
  hyper

SEQ ID NO: 374809 - DNA, 108 bp, Homo sapiens; identical to SEQ ID NO: 361612
  chr19:44302742-44302850
  hyper

SEQ ID NO: 374810 - DNA, 33 bp, Homo sapiens; identical to SEQ ID NO: 361613
  chr19:44303168-44303201
  hyper

SEQ ID NO: 374811 - DNA, 91 bp, Homo sapiens; identical to SEQ ID NO: 352321
  chr19:44405817-44405908
  hyper

SEQ ID NO: 374812 - DNA, 48 bp, Homo sapiens; identical to SEQ ID NO: 352322
  chr19:44406123-44406171
  hyper

SEQ ID NO: 374813 - DNA, 280 bp, Homo sapiens; identical to SEQ ID NO: 294057
  chr19:44455341-44455621
  hyper

SEQ ID NO: 374814 - DNA, 72 bp, Homo sapiens
  chr19:44455667-44455739
  hyper
tttctggggctctcagctcgcccaatccgcatccctccactactggcgcggggccgattcccccggtacaac

SEQ ID NO: 374815 - DNA, 269 bp, Homo sapiens; identical to SEQ ID NO: 294061
  chr19:44529438-44529707
  hyper

SEQ ID NO: 374816 - DNA, 48 bp, Homo sapiens; identical to SEQ ID NO: 347605
  chr19:44529774-44529822
  hyper

SEQ ID NO: 374817 - DNA, 68 bp, Homo sapiens; identical to SEQ ID NO: 345595
  chr19:44711963-44712031
  hyper

SEQ ID NO: 374818 - DNA, 782 bp, Homo sapiens; identical to SEQ ID NO: 336161
  chr19:45004129-45004911
  hyper

SEQ ID NO: 374819 - DNA, 150 bp, Homo sapiens; identical to SEQ ID NO: 352326
  chr19:45146966-45147116
  hyper

SEQ ID NO: 374820 - DNA, 332 bp, Homo sapiens; identical to SEQ ID NO: 205468
  chr19:45147367-45147699
  hyper

SEQ ID NO: 374821 - DNA, 95 bp, Homo sapiens; identical to SEQ ID NO: 352328
  chr19:45147734-45147829
  hyper

SEQ ID NO: 374822 - DNA, 272 bp, Homo sapiens; identical to SEQ ID NO: 336163
  chr19:45195351-45195623
  hyper

SEQ ID NO: 374823 - DNA, 1002 bp, Homo sapiens; identical to SEQ ID NO: 352329
  chr19:45349502-45350504
  hyper

SEQ ID NO: 374824 - DNA, 555 bp, Homo sapiens; identical to SEQ ID NO: 336165
  chr19:45579321-45579876
  hyper

SEQ ID NO: 374825 - DNA, 1117 bp, Homo sapiens; identical to SEQ ID NO: 336166
  chr19:45647694-45648811
  hyper

SEQ ID NO: 374826 - DNA, 200 bp, Homo sapiens; identical to SEQ ID NO: 205477
  chr19:45656461-45656661
  hyper

SEQ ID NO: 374827 - DNA, 62 bp, Homo sapiens; identical to SEQ ID NO: 336169
  chr19:45907705-45907767
  hyper

SEQ ID NO: 374828 - DNA, 37 bp, Homo sapiens; identical to SEQ ID NO: 352333
  chr19:45931075-45931112
  hyper

SEQ ID NO: 374829 - DNA, 156 bp, Homo sapiens; identical to SEQ ID NO: 294102
  chr19:45931579-45931735
  hyper

SEQ ID NO: 374830 - DNA, 135 bp, Homo sapiens; identical to SEQ ID NO: 294103
  chr19:45931788-45931923
  hyper

SEQ ID NO: 374831 - DNA, 74 bp, Homo sapiens; identical to SEQ ID NO: 361632
  chr19:45996048-45996122
  hyper

SEQ ID NO: 374832 - DNA, 183 bp, Homo sapiens; identical to SEQ ID NO: 352334
  chr19:46002502-46002685
  hyper

SEQ ID NO: 374833 - DNA, 843 bp, Homo sapiens; identical to SEQ ID NO: 352335
  chr19:46144663-46145506
  hyper

SEQ ID NO: 374834 - DNA, 73 bp, Homo sapiens; identical to SEQ ID NO: 352336
  chr19:46145557-46145630
  hyper

SEQ ID NO: 374835 - DNA, 153 bp, Homo sapiens; identical to SEQ ID NO: 294114
  chr19:46148670-46148823
  hyper

SEQ ID NO: 374836 - DNA, 172 bp, Homo sapiens; identical to SEQ ID NO: 352337
  chr19:46180187-46180359
  hyper

SEQ ID NO: 374837 - DNA, 79 bp, Homo sapiens; identical to SEQ ID NO: 352338
  chr19:46180559-46180638
  hyper

SEQ ID NO: 374838 - DNA, 88 bp, Homo sapiens; identical to SEQ ID NO: 352339
  chr19:46519167-46519255
  hyper

SEQ ID NO: 374839 - DNA, 421 bp, Homo sapiens; identical to SEQ ID NO: 352340
  chr19:46519582-46520003
  hyper

SEQ ID NO: 374840 - DNA, 69 bp, Homo sapiens; identical to SEQ ID NO: 352341
  chr19:46907118-46907187
  hyper

SEQ ID NO: 374841 - DNA, 249 bp, Homo sapiens; identical to SEQ ID NO: 294133
  chr19:46907822-46908071
  hyper

SEQ ID NO: 374842 - DNA, 56 bp, Homo sapiens; identical to SEQ ID NO: 347610
  chr19:46929939-46929995
  hyper

SEQ ID NO: 374843 - DNA, 139 bp, Homo sapiens; identical to SEQ ID NO: 345597
  chr19:46931914-46932053
  hyper

SEQ ID NO: 374844 - DNA, 54 bp, Homo sapiens; identical to SEQ ID NO: 352345
  chr19:46974960-46975014
  hyper

SEQ ID NO: 374845 - DNA, 74 bp, Homo sapiens; identical to SEQ ID NO: 361646
  chr19:46992624-46992698
  hyper

SEQ ID NO: 374846 - DNA, 71 bp, Homo sapiens; identical to SEQ ID NO: 352346
  chr19:46996430-46996501
  hyper

SEQ ID NO: 374847 - DNA, 35 bp, Homo sapiens; identical to SEQ ID NO: 352347
  chr19:46997221-46997256
  hyper

SEQ ID NO: 374848 - DNA, 68 bp, Homo sapiens; identical to SEQ ID NO: 336186
  chr19:47040909-47040977
  hyper

SEQ ID NO: 374849 - DNA, 203 bp, Homo sapiens; identical to SEQ ID NO: 336187
  chr19:47137324-47137527
  hyper

SEQ ID NO: 374850 - DNA, 586 bp, Homo sapiens
  chr19:47137785-47138371
  hyper
cgggccgacacagccccggacagaccgcaggcccagaacccccgccctattccccaccccgacccagcaccttcatgcggtcgatgttcacctccagcttcagctgttccaccgtcttgcgggcctcggcaatcttggccatgttgttggacatggttgcggcggggaaggggttaaaagacgcgcgggagtgggggctgtgggggtaggttaggatacgtctgggtcccgaggtgggggcgagagggcgggccccggtaacaggtgcgagggtggaagggcgcgtgaatggggtggccaggggctggtggagggagggacagatgaaggggacaggaacaagaggagcgatggaggggtgcacggatggaggtagctaaggcaggtggggagagagcagggaggggcgagggagggaaggaggggcgcacagatgggaggctgagacagaaggacagggccacaggtgctggatcagaatccaggtgtcctcacccccgggggcagagcgagagccaggaggggggcccctcccccaggccaattagcagtggctccagggagaactgggaattaagatcgcggc

SEQ ID NO: 374851 - DNA, 259 bp, Homo sapiens; identical to SEQ ID NO: 352348
  chr19:47523724-47523983
  hyper

SEQ ID NO: 374852 - DNA, 83 bp, Homo sapiens; identical to SEQ ID NO: 336190
  chr19:47676020-47676103
  hyper

SEQ ID NO: 374853 - DNA, 286 bp, Homo sapiens; identical to SEQ ID NO: 361652
  chr19:47729538-47729824
  hyper

SEQ ID NO: 374854 - DNA, 681 bp, Homo sapiens; identical to SEQ ID NO: 361653
  chr19:47729850-47730531
  hyper

SEQ ID NO: 374855 - DNA, 287 bp, Homo sapiens; identical to SEQ ID NO: 336192
  chr19:47731303-47731590
  hyper

SEQ ID NO: 374856 - DNA, 202 bp, Homo sapiens; identical to SEQ ID NO: 361655
  chr19:47776511-47776713
  hyper

SEQ ID NO: 374857 - DNA, 423 bp, Homo sapiens; identical to SEQ ID NO: 361656
  chr19:47776742-47777165
  hyper

SEQ ID NO: 374858 - DNA, 147 bp, Homo sapiens; identical to SEQ ID NO: 352350
  chr19:47922898-47923045
  hyper

SEQ ID NO: 374859 - DNA, 260 bp, Homo sapiens; identical to SEQ ID NO: 294167
  chr19:47923084-47923344
  hyper

SEQ ID NO: 374860 - DNA, 242 bp, Homo sapiens; identical to SEQ ID NO: 336199
  chr19:48229040-48229282
  hyper

SEQ ID NO: 374861 - DNA, 311 bp, Homo sapiens; identical to SEQ ID NO: 347612
  chr19:48901504-48901815
  hyper

SEQ ID NO: 374862 - DNA, 196 bp, Homo sapiens; identical to SEQ ID NO: 352353
  chr19:49014625-49014821
  hyper

SEQ ID NO: 374863 - DNA, 93 bp, Homo sapiens; identical to SEQ ID NO: 345598
  chr19:49127280-49127373
  hyper

SEQ ID NO: 374864 - DNA, 480 bp, Homo sapiens; identical to SEQ ID NO: 336204
  chr19:49199703-49200183
  hyper

SEQ ID NO: 374865 - DNA, 484 bp, Homo sapiens; identical to SEQ ID NO: 345599
  chr19:49217005-49217489
  hyper

SEQ ID NO: 374866 - DNA, 43 bp, Homo sapiens; identical to SEQ ID NO: 345600
  chr19:49217526-49217569
  hyper

SEQ ID NO: 374867 - DNA, 141 bp, Homo sapiens; identical to SEQ ID NO: 294203
  chr19:49242393-49242534
  hyper

SEQ ID NO: 374868 - DNA, 35 bp, Homo sapiens; identical to SEQ ID NO: 294204
  chr19:49242773-49242808
  hyper

SEQ ID NO: 374869 - DNA, 56 bp, Homo sapiens; identical to SEQ ID NO: 352358
  chr19:49244884-49244940
  hyper

SEQ ID NO: 374870 - DNA, 618 bp, Homo sapiens
  chr19:49255778-49256396
  hyper
cgcttttcgtggccggagcgcaccctccgcaaaggcaggccacatccggccgcccctggaacgccaggcgtccggctatccggcccggcagccctcccctccgcgcagcctgtccggactggcagcgagggcttggggaggagaggaaggagagggcgcggccgggagtctcgcagcgtccgccctcccgggccgggcggatggctggaaggtggagccccgcccgtcacttggcgccgagccccagcgccaggggctaaggcgatggcccctgggcccaccgctccccagatcggggatgcaggggaccgcgccctgcccctccgccccgtcattgacctgcgcgaaggcttcacccagggcaggctacctggcttctgagcagccgcagcatcattgcgtggaccaggagacggagcgcccagttgcaatgctggagccgggaggtccaatccgccgccctctctcttccggtgccagggcttagagtcggcccccgacacctgggtgcttcgagcctggccacgccccagcggctgggcagggcccccgcacctggtcccggcgagtggagcgatcgtccgccctctgccgcgtcctcctgggggatggagaacc

SEQ ID NO: 374871 - DNA, 550 bp, Homo sapiens; identical to SEQ ID NO: 336209
  chr19:49467064-49467614
  hyper

SEQ ID NO: 374872 - DNA, 64 bp, Homo sapiens; identical to SEQ ID NO: 361670
  chr19:49646052-49646116
  hyper

SEQ ID NO: 374873 - DNA, 62 bp, Homo sapiens; identical to SEQ ID NO: 361671
  chr19:49646245-49646307
  hyper

SEQ ID NO: 374874 - DNA, 781 bp, Homo sapiens; identical to SEQ ID NO: 352360
  chr19:49652265-49653046
  hyper

SEQ ID NO: 374875 - DNA, 435 bp, Homo sapiens; identical to SEQ ID NO: 336213
  chr19:49660929-49661364
  hyper

SEQ ID NO: 374876 - DNA, 333 bp, Homo sapiens; identical to SEQ ID NO: 361674
  chr19:50316721-50317054
  hyper

SEQ ID NO: 374877 - DNA, 180 bp, Homo sapiens
  chr19:50353790-50353970
  hyper
cgaatgagcgaatccacggaaggccggggagcgacgtgagtggcgagaagcttggagtcgccagggacggcgggcggagcctgggcgccggggctaatgggcggagcctccagggacagctggccccgcccaggccgcgcggggcccgctgggagttggagtcccttgcccacctcgcca

SEQ ID NO: 374878 - DNA, 218 bp, Homo sapiens; identical to SEQ ID NO: 347617
  chr19:50553779-50553997
  hyper

SEQ ID NO: 374879 - DNA, 347 bp, Homo sapiens; identical to SEQ ID NO: 352363
  chr19:50706517-50706864
  hyper

SEQ ID NO: 374880 - DNA, 188 bp, Homo sapiens; identical to SEQ ID NO: 294243
  chr19:50706894-50707082
  hyper

SEQ ID NO: 374881 - DNA, 91 bp, Homo sapiens; identical to SEQ ID NO: 352365
  chr19:50707093-50707184
  hyper

SEQ ID NO: 374882 - DNA, 378 bp, Homo sapiens; identical to SEQ ID NO: 336220
  chr19:50708476-50708854
  hyper

SEQ ID NO: 374883 - DNA, 380 bp, Homo sapiens; identical to SEQ ID NO: 294246
  chr19:50816051-50816431
  hyper

SEQ ID NO: 374884 - DNA, 330 bp, Homo sapiens; identical to SEQ ID NO: 336223
  chr19:50828897-50829227
  hyper

SEQ ID NO: 374885 - DNA, 60 bp, Homo sapiens; identical to SEQ ID NO: 294253
  chr19:50832039-50832099
  hyper

SEQ ID NO: 374886 - DNA, 411 bp, Homo sapiens
  chr19:50832540-50832951
  hyper
cgagtcggggccgccaatgagacggagcgattggctctttctaagagagcagggaggaggggcggggcggggcgtcaagggaggcgggaccggttactactaattgtgttcggcagcactggtagccaggggaaggcggggctagatacgatagagagagaccttactgaactgaaaaaagtgcgggcggggtagagggaggaggggacacatccaagctatttaaagacgcccgactggcctggaggggcggggccaccatgagagaggccgtcctgattgggctgagaaaggggcggagagaaacaaaacagatcgcacgccctcacctaaaacaccgctaggcaggacctggtggggaggagcattgcttggaagagacagggccgcagaaagtagaaacggtccaga

SEQ ID NO: 374887 - DNA, 191 bp, Homo sapiens; identical to SEQ ID NO: 294255
  chr19:50833042-50833233
  hyper

SEQ ID NO: 374888 - DNA, 446 bp, Homo sapiens; identical to SEQ ID NO: 352368
  chr19:50833970-50834416
  hyper

SEQ ID NO: 374889 - DNA, 88 bp, Homo sapiens; identical to SEQ ID NO: 345602
  chr19:50836203-50836291
  hyper

SEQ ID NO: 374890 - DNA, 588 bp, Homo sapiens; identical to SEQ ID NO: 205542
  chr19:50836451-50837039
  hyper

SEQ ID NO: 374891 - DNA, 88 bp, Homo sapiens; identical to SEQ ID NO: 345604
  chr19:50837389-50837477
  hyper

SEQ ID NO: 374892 - DNA, 153 bp, Homo sapiens; identical to SEQ ID NO: 352372
  chr19:50979533-50979686
  hyper

SEQ ID NO: 374893 - DNA, 77 bp, Homo sapiens; identical to SEQ ID NO: 336229
  chr19:51111319-51111396
  hyper

SEQ ID NO: 374894 - DNA, 96 bp, Homo sapiens; identical to SEQ ID NO: 361688
  chr19:51143111-51143207
  hyper

SEQ ID NO: 374895 - DNA, 230 bp, Homo sapiens; identical to SEQ ID NO: 294267
  chr19:51161455-51161685
  hyper

SEQ ID NO: 374896 - DNA, 51 bp, Homo sapiens; identical to SEQ ID NO: 352375
  chr19:51198271-51198322
  hyper

SEQ ID NO: 374897 - DNA, 73 bp, Homo sapiens; identical to SEQ ID NO: 345605
  chr19:51228809-51228882
  hyper

SEQ ID NO: 374898 - DNA, 186 bp, Homo sapiens; identical to SEQ ID NO: 336235
  chr19:51324279-51324465
  hyper

SEQ ID NO: 374899 - DNA, 96 bp, Homo sapiens; identical to SEQ ID NO: 345606
  chr19:51416002-51416098
  hyper

SEQ ID NO: 374900 - DNA, 242 bp, Homo sapiens; identical to SEQ ID NO: 345607
  chr19:51416099-51416341
  hyper

SEQ ID NO: 374901 - DNA, 46 bp, Homo sapiens; identical to SEQ ID NO: 361695
  chr19:51520092-51520138
  hyper

SEQ ID NO: 374902 - DNA, 248 bp, Homo sapiens; identical to SEQ ID NO: 294282
  chr19:51520492-51520740
  hyper

SEQ ID NO: 374903 - DNA, 241 bp, Homo sapiens; identical to SEQ ID NO: 205551
  chr19:51522935-51523176
  hyper

SEQ ID NO: 374904 - DNA, 35 bp, Homo sapiens
  chr19:51568027-51568062
  hyper
cgcgggaggggctgctgcgagggtattttgggagg

SEQ ID NO: 374905 - DNA, 187 bp, Homo sapiens; identical to SEQ ID NO: 336241
  chr19:51842647-51842834
  hyper

SEQ ID NO: 374906 - DNA, 88 bp, Homo sapiens; identical to SEQ ID NO: 352381
  chr19:51925272-51925360
  hyper

SEQ ID NO: 374907 - DNA, 204 bp, Homo sapiens; identical to SEQ ID NO: 361700
  chr19:52074533-52074737
  hyper

SEQ ID NO: 374908 - DNA, 248 bp, Homo sapiens
  chr19:52390956-52391204
  hyper
cgaaacgaactccgagcgaggactccccgagagctccccgcaacacggacctcacgcgctagcgaacaacagaaaaaaaaaagcgcgctctccctgcccctgaaacattcccagaagcccacgcagaccagaccgatgacctgtctccactgctggaggcgagtcagggacccgaagtctctaaacactcgcctctacccgccgccccgcgaaccccacacactgcagacgcgacactcgcaagtttc

SEQ ID NO: 374909 - DNA, 80 bp, Homo sapiens; identical to SEQ ID NO: 352382
  chr19:52511228-52511308
  hyper

SEQ ID NO: 374910 - DNA, 394 bp, Homo sapiens; identical to SEQ ID NO: 352383
  chr19:52511384-52511778
  hyper

SEQ ID NO: 374911 - DNA, 74 bp, Homo sapiens; identical to SEQ ID NO: 205557
  chr19:52531285-52531359
  hyper

SEQ ID NO: 374912 - DNA, 208 bp, Homo sapiens; identical to SEQ ID NO: 345609
  chr19:52531884-52532092
  hyper

SEQ ID NO: 374913 - DNA, 273 bp, Homo sapiens; identical to SEQ ID NO: 352386
  chr19:52551831-52552104
  hyper

SEQ ID NO: 374914 - DNA, 465 bp, Homo sapiens; identical to SEQ ID NO: 352387
  chr19:52552233-52552698
  hyper

SEQ ID NO: 374915 - DNA, 119 bp, Homo sapiens; identical to SEQ ID NO: 336251
  chr19:52715152-52715271
  hyper

SEQ ID NO: 374916 - DNA, 105 bp, Homo sapiens; identical to SEQ ID NO: 347627
  chr19:52800214-52800319
  hyper

SEQ ID NO: 374917 - DNA, 313 bp, Homo sapiens; identical to SEQ ID NO: 294314
  chr19:52800380-52800693
  hyper

SEQ ID NO: 374918 - DNA, 89 bp, Homo sapiens; identical to SEQ ID NO: 352391
  chr19:52800915-52801004
  hyper

SEQ ID NO: 374919 - DNA, 179 bp, Homo sapiens; identical to SEQ ID NO: 294317
  chr19:52956933-52957112
  hyper

SEQ ID NO: 374920 - DNA, 31 bp, Homo sapiens; identical to SEQ ID NO: 361712
  chr19:53030704-53030735
  hyper

SEQ ID NO: 374921 - DNA, 395 bp, Homo sapiens; identical to SEQ ID NO: 294319
  chr19:53030790-53031185
  hyper

SEQ ID NO: 374922 - DNA, 79 bp, Homo sapiens; identical to SEQ ID NO: 294320
  chr19:53031215-53031294
  hyper

SEQ ID NO: 374923 - DNA, 164 bp, Homo sapiens; identical to SEQ ID NO: 361715
  chr19:53031347-53031511
  hyper

SEQ ID NO: 374924 - DNA, 263 bp, Homo sapiens; identical to SEQ ID NO: 345610
  chr19:53104083-53104346
  hyper

SEQ ID NO: 374925 - DNA, 62 bp, Homo sapiens; identical to SEQ ID NO: 352393
  chr19:53105086-53105148
  hyper

SEQ ID NO: 374926 - DNA, 60 bp, Homo sapiens; identical to SEQ ID NO: 205570
  chr19:53141353-53141413
  hyper

SEQ ID NO: 374927 - DNA, 56 bp, Homo sapiens; identical to SEQ ID NO: 347630
  chr19:53193139-53193195
  hyper

SEQ ID NO: 374928 - DNA, 818 bp, Homo sapiens; identical to SEQ ID NO: 352396
  chr19:53237625-53238443
  hyper

SEQ ID NO: 374929 - DNA, 273 bp, Homo sapiens; identical to SEQ ID NO: 352397
  chr19:53400792-53401065
  hyper

SEQ ID NO: 374930 - DNA, 346 bp, Homo sapiens; identical to SEQ ID NO: 294330
  chr19:53426164-53426510
  hyper

SEQ ID NO: 374931 - DNA, 351 bp, Homo sapiens; identical to SEQ ID NO: 352398
  chr19:53445359-53445710
  hyper

SEQ ID NO: 374932 - DNA, 231 bp, Homo sapiens; identical to SEQ ID NO: 352399
  chr19:53445822-53446053
  hyper

SEQ ID NO: 374933 - DNA, 148 bp, Homo sapiens; identical to SEQ ID NO: 352400
  chr19:53465713-53465861
  hyper

SEQ ID NO: 374934 - DNA, 263 bp, Homo sapiens; identical to SEQ ID NO: 352401
  chr19:53466513-53466776
  hyper

SEQ ID NO: 374935 - DNA, 104 bp, Homo sapiens; identical to SEQ ID NO: 294336
  chr19:53496055-53496159
  hyper

SEQ ID NO: 374936 - DNA, 35 bp, Homo sapiens; identical to SEQ ID NO: 352403
  chr19:53496405-53496440
  hyper

SEQ ID NO: 374937 - DNA, 180 bp, Homo sapiens; identical to SEQ ID NO: 294338
  chr19:53497109-53497289
  hyper

SEQ ID NO: 374938 - DNA, 139 bp, Homo sapiens; identical to SEQ ID NO: 347631
  chr19:53606073-53606212
  hyper

SEQ ID NO: 374939 - DNA, 221 bp, Homo sapiens; identical to SEQ ID NO: 205580
  chr19:53606354-53606575
  hyper

SEQ ID NO: 374940 - DNA, 427 bp, Homo sapiens; identical to SEQ ID NO: 205581
  chr19:53606605-53607032
  hyper

SEQ ID NO: 374941 - DNA, 111 bp, Homo sapiens; identical to SEQ ID NO: 347634
  chr19:53607111-53607222
  hyper

SEQ ID NO: 374942 - DNA, 160 bp, Homo sapiens; identical to SEQ ID NO: 205583
  chr19:53635604-53635764
  hyper

SEQ ID NO: 374943 - DNA, 101 bp, Homo sapiens; identical to SEQ ID NO: 205584
  chr19:53635784-53635885
  hyper

SEQ ID NO: 374944 - DNA, 120 bp, Homo sapiens
  chr19:53636109-53636229
  hyper
ctcgacgccgtcaccttcacccaacgcgatccgtttccgggcctgtaggaaactgcgcatgcgcggagagaagagcccgggcagcctgaaggaatggctggagtgggcggggtctgcgcc

SEQ ID NO: 374945 - DNA, 83 bp, Homo sapiens; identical to SEQ ID NO: 361733
  chr19:53696029-53696112
  hyper

SEQ ID NO: 374946 - DNA, 197 bp, Homo sapiens; identical to SEQ ID NO: 361734
  chr19:53700110-53700307
  hyper

SEQ ID NO: 374947 - DNA, 291 bp, Homo sapiens; identical to SEQ ID NO: 361735
  chr19:53868337-53868628
  hyper

SEQ ID NO: 374948 - DNA, 90 bp, Homo sapiens; identical to SEQ ID NO: 336275
  chr19:53934944-53935034
  hyper

SEQ ID NO: 374949 - DNA, 113 bp, Homo sapiens; identical to SEQ ID NO: 205589
  chr19:53970643-53970756
  hyper

SEQ ID NO: 374950 - DNA, 578 bp, Homo sapiens; identical to SEQ ID NO: 336278
  chr19:54385484-54386062
  hyper

SEQ ID NO: 374951 - DNA, 84 bp, Homo sapiens; identical to SEQ ID NO: 347635
  chr19:54412564-54412648
  hyper

SEQ ID NO: 374952 - DNA, 33 bp, Homo sapiens; identical to SEQ ID NO: 361739
  chr19:54485370-54485403
  hyper

SEQ ID NO: 374953 - DNA, 124 bp, Homo sapiens; identical to SEQ ID NO: 361740
  chr19:54486197-54486321
  hyper

SEQ ID NO: 374954 - DNA, 546 bp, Homo sapiens; identical to SEQ ID NO: 336285
  chr19:55677520-55678066
  hyper

SEQ ID NO: 374955 - DNA, 182 bp, Homo sapiens; identical to SEQ ID NO: 347636
  chr19:55691158-55691340
  hyper

SEQ ID NO: 374956 - DNA, 412 bp, Homo sapiens; identical to SEQ ID NO: 361743
  chr19:55866046-55866458
  hyper

SEQ ID NO: 374957 - DNA, 132 bp, Homo sapiens; identical to SEQ ID NO: 345612
  chr19:55952964-55953096
  hyper

SEQ ID NO: 374958 - DNA, 41 bp, Homo sapiens
  chr19:56015143-56015184
  hyper
cgctcccgcaggagagtctcgccgcaagcgtcctttcccgc

SEQ ID NO: 374959 - DNA, 95 bp, Homo sapiens
  chr19:56015237-56015332
  hyper
tggagggacgggatggggcaggcgttcatctgcctcgcacctcgtgacgtcacaggcgcgctgcgcctcctgattggccagccggcgcatcgccc

SEQ ID NO: 374960 - DNA, 134 bp, Homo sapiens; identical to SEQ ID NO: 336290
  chr19:56112791-56112925
  hyper

SEQ ID NO: 374961 - DNA, 396 bp, Homo sapiens; identical to SEQ ID NO: 336291
  chr19:56151971-56152367
  hyper

SEQ ID NO: 374962 - DNA, 245 bp, Homo sapiens; identical to SEQ ID NO: 294401
  chr19:56159669-56159914
  hyper

SEQ ID NO: 374963 - DNA, 68 bp, Homo sapiens; identical to SEQ ID NO: 352417
  chr19:56159950-56160018
  hyper

SEQ ID NO: 374964 - DNA, 152 bp, Homo sapiens; identical to SEQ ID NO: 361749
  chr19:56988132-56988284
  hyper

SEQ ID NO: 374965 - DNA, 139 bp, Homo sapiens; identical to SEQ ID NO: 347638
  chr19:57049638-57049777
  hyper

SEQ ID NO: 374966 - DNA, 34 bp, Homo sapiens; identical to SEQ ID NO: 205611
  chr19:57049807-57049841
  hyper

SEQ ID NO: 374967 - DNA, 46 bp, Homo sapiens; identical to SEQ ID NO: 205612
  chr19:57079253-57079299
  hyper

SEQ ID NO: 374968 - DNA, 77 bp, Homo sapiens; identical to SEQ ID NO: 361753
  chr19:57106909-57106986
  hyper

SEQ ID NO: 374969 - DNA, 61 bp, Homo sapiens; identical to SEQ ID NO: 361754
  chr19:57276931-57276992
  hyper

SEQ ID NO: 374970 - DNA, 206 bp, Homo sapiens; identical to SEQ ID NO: 205614
  chr19:57683360-57683566
  hyper

SEQ ID NO: 374971 - DNA, 103 bp, Homo sapiens; identical to SEQ ID NO: 361756
  chr19:57683899-57684002
  hyper

SEQ ID NO: 374972 - DNA, 56 bp, Homo sapiens; identical to SEQ ID NO: 352420
  chr19:57702696-57702752
  hyper

SEQ ID NO: 374973 - DNA, 39 bp, Homo sapiens; identical to SEQ ID NO: 352421
  chr19:57703385-57703424
  hyper

SEQ ID NO: 374974 - DNA, 85 bp, Homo sapiens; identical to SEQ ID NO: 361759
  chr19:57751590-57751675
  hyper

SEQ ID NO: 374975 - DNA, 373 bp, Homo sapiens; identical to SEQ ID NO: 361760
  chr19:57751755-57752128
  hyper

SEQ ID NO: 374976 - DNA, 70 bp, Homo sapiens; identical to SEQ ID NO: 345613
  chr19:57831543-57831613
  hyper

SEQ ID NO: 374977 - DNA, 460 bp, Homo sapiens; identical to SEQ ID NO: 345614
  chr19:57874412-57874872
  hyper

SEQ ID NO: 374978 - DNA, 217 bp, Homo sapiens; identical to SEQ ID NO: 205623
  chr19:57875005-57875222
  hyper

SEQ ID NO: 374979 - DNA, 43 bp, Homo sapiens; identical to SEQ ID NO: 345616
  chr19:57875252-57875295
  hyper

SEQ ID NO: 374980 - DNA, 62 bp, Homo sapiens; identical to SEQ ID NO: 352426
  chr19:57998890-57998952
  hyper

SEQ ID NO: 374981 - DNA, 34 bp, Homo sapiens; identical to SEQ ID NO: 361766
  chr19:58070535-58070569
  hyper

SEQ ID NO: 374982 - DNA, 81 bp, Homo sapiens; identical to SEQ ID NO: 336313
  chr19:58090396-58090477
  hyper

SEQ ID NO: 374983 - DNA, 37 bp, Homo sapiens; identical to SEQ ID NO: 205629
  chr19:58094924-58094961
  hyper

SEQ ID NO: 374984 - DNA, 169 bp, Homo sapiens; identical to SEQ ID NO: 345617
  chr19:58144201-58144370
  hyper

SEQ ID NO: 374985 - DNA, 209 bp, Homo sapiens; identical to SEQ ID NO: 205633
  chr19:58144745-58144954
  hyper

SEQ ID NO: 374986 - DNA, 294 bp, Homo sapiens; identical to SEQ ID NO: 352430
  chr19:58193143-58193437
  hyper

SEQ ID NO: 374987 - DNA, 345 bp, Homo sapiens; identical to SEQ ID NO: 352431
  chr19:58193585-58193930
  hyper

SEQ ID NO: 374988 - DNA, 627 bp, Homo sapiens; identical to SEQ ID NO: 336321
  chr19:58258088-58258715
  hyper

SEQ ID NO: 374989 - DNA, 145 bp, Homo sapiens; identical to SEQ ID NO: 352433
  chr19:58280766-58280911
  hyper

SEQ ID NO: 374990 - DNA, 176 bp, Homo sapiens; identical to SEQ ID NO: 352434
  chr19:58281371-58281547
  hyper

SEQ ID NO: 374991 - DNA, 38 bp, Homo sapiens; identical to SEQ ID NO: 361776
  chr19:58446258-58446296
  hyper

SEQ ID NO: 374992 - DNA, 53 bp, Homo sapiens
  chr19:58459305-58459358
  hyper
gagacgtacccaggtttctaccgattgctgtctgccagtgtttgtttggagac

SEQ ID NO: 374993 - DNA, 59 bp, Homo sapiens
  chr19:58545837-58545896
  hyper
gtttgaggccgaagcccctctacgtacccccattgcccgcccaaacaccgctcggccgc

SEQ ID NO: 374994 - DNA, 130 bp, Homo sapiens; identical to SEQ ID NO: 345620
  chr19:58610001-58610131
  hyper

SEQ ID NO: 374995 - DNA, 168 bp, Homo sapiens; identical to SEQ ID NO: 361778
  chr19:58665973-58666141
  hyper

SEQ ID NO: 374996 - DNA, 224 bp, Homo sapiens; identical to SEQ ID NO: 205646
  chr19:58666733-58666957
  hyper

SEQ ID NO: 374997 - DNA, 343 bp, Homo sapiens; identical to SEQ ID NO: 352436
  chr19:58694209-58694552
  hyper

SEQ ID NO: 374998 - DNA, 43 bp, Homo sapiens; identical to SEQ ID NO: 352437
  chr19:58739694-58739737
  hyper

SEQ ID NO: 374999 - DNA, 404 bp, Homo sapiens; identical to SEQ ID NO: 361782
  chr19:59010484-59010888
  hyper

SEQ ID NO: 375000 - DNA, 48 bp, Homo sapiens; identical to SEQ ID NO: 361783
  chr19:59010962-59011010
  hyper

SEQ ID NO: 375001 - DNA, 538 bp, Homo sapiens; identical to SEQ ID NO: 352438
  chr19:59049765-59050303
  hyper

SEQ ID NO: 375002 - DNA, 210 bp, Homo sapiens; identical to SEQ ID NO: 352439
  chr20:657125-657335
  hyper

SEQ ID NO: 375003 - DNA, 46 bp, Homo sapiens
  chr20:708554-708600
  hyper
cgggagccaccgcgcccggcgggatattatatttccataaggccct

SEQ ID NO: 375004 - DNA, 51 bp, Homo sapiens; identical to SEQ ID NO: 205657
  chr20:708851-708902
  hyper

SEQ ID NO: 375005 - DNA, 460 bp, Homo sapiens
  chr20:708944-709404
  hyper
cgggccgactccgggccagctgcggaggcgggggaggggaccccgctttccatggcagtgccgaggcggcgcgcacaaaggcgccgcgatcagcgcttcatcggttcgagtcaattatctgaggcgcggaggcggcgggcggggcgaggcgattccccggtggggctgcggagcgcggcgccgagactcagaggagggggcgctggggaagcggcttctccgtctcctgctccgccccgggcttcgtggcgaggcgccgtcgccccctggtggggcctcatccattcctcgctcactcgctcgttcacctttttctcaaccttacagcgggtggctctacggtacgagctgagggtgaagtgctgagaacagggcaagcgggccgtacctttaaatgccctgtcgggagctgggcccctctgagtggccaacctcaccaggaaagggcgctcagcctcgc

SEQ ID NO: 375006 - DNA, 214 bp, Homo sapiens; identical to SEQ ID NO: 361786
  chr20:1207191-1207405
  hyper

SEQ ID NO: 375007 - DNA, 157 bp, Homo sapiens; identical to SEQ ID NO: 361787
  chr20:1874963-1875120
  hyper

SEQ ID NO: 375008 - DNA, 955 bp, Homo sapiens; identical to SEQ ID NO: 294495
  chr20:1875155-1876110
  hyper

SEQ ID NO: 375009 - DNA, 120 bp, Homo sapiens; identical to SEQ ID NO: 347648
  chr20:2731109-2731229
  hyper

SEQ ID NO: 375010 - DNA, 225 bp, Homo sapiens; identical to SEQ ID NO: 205669
  chr20:2731391-2731616
  hyper

SEQ ID NO: 375011 - DNA, 744 bp, Homo sapiens; identical to SEQ ID NO: 345622
  chr20:2731675-2732419
  hyper

SEQ ID NO: 375012 - DNA, 37 bp, Homo sapiens; identical to SEQ ID NO: 294512
  chr20:2801696-2801733
  hyper

SEQ ID NO: 375013 - DNA, 143 bp, Homo sapiens; identical to SEQ ID NO: 294514
  chr20:2820861-2821004
  hyper

SEQ ID NO: 375014 - DNA, 235 bp, Homo sapiens; identical to SEQ ID NO: 361794
  chr20:3026333-3026568
  hyper

SEQ ID NO: 375015 - DNA, 67 bp, Homo sapiens; identical to SEQ ID NO: 352444
  chr20:3052452-3052519
  hyper

SEQ ID NO: 375016 - DNA, 283 bp, Homo sapiens; identical to SEQ ID NO: 352445
  chr20:3220266-3220549
  hyper

SEQ ID NO: 375017 - DNA, 125 bp, Homo sapiens; identical to SEQ ID NO: 352446
  chr20:3229128-3229253
  hyper

SEQ ID NO: 375018 - DNA, 154 bp, Homo sapiens; identical to SEQ ID NO: 205676
  chr20:3229326-3229480
  hyper

SEQ ID NO: 375019 - DNA, 31 bp, Homo sapiens; identical to SEQ ID NO: 205677
  chr20:3229526-3229557
  hyper

SEQ ID NO: 375020 - DNA, 144 bp, Homo sapiens; identical to SEQ ID NO: 352449
  chr20:3229659-3229803
  hyper

SEQ ID NO: 375021 - DNA, 450 bp, Homo sapiens; identical to SEQ ID NO: 352450
  chr20:3653532-3653982
  hyper

SEQ ID NO: 375022 - DNA, 414 bp, Homo sapiens; identical to SEQ ID NO: 347652
  chr20:4804008-4804422
  hyper

SEQ ID NO: 375023 - DNA, 1116 bp, Homo sapiens; identical to SEQ ID NO: 347653
  chr20:4981401-4982517
  hyper

SEQ ID NO: 375024 - DNA, 63 bp, Homo sapiens; identical to SEQ ID NO: 361804
  chr20:5297756-5297819
  hyper

SEQ ID NO: 375025 - DNA, 37 bp, Homo sapiens; identical to SEQ ID NO: 361805
  chr20:5891878-5891915
  hyper

SEQ ID NO: 375026 - DNA, 330 bp, Homo sapiens; identical to SEQ ID NO: 361806
  chr20:5892269-5892599
  hyper

SEQ ID NO: 375027 - DNA, 427 bp, Homo sapiens; identical to SEQ ID NO: 352453
  chr20:6747996-6748423
  hyper

SEQ ID NO: 375028 - DNA, 293 bp, Homo sapiens; identical to SEQ ID NO: 294559
  chr20:6748470-6748763
  hyper

SEQ ID NO: 375029 - DNA, 587 bp, Homo sapiens; identical to SEQ ID NO: 361809
  chr20:6749063-6749650
  hyper

SEQ ID NO: 375030 - DNA, 126 bp, Homo sapiens; identical to SEQ ID NO: 361810
  chr20:9048369-9048495
  hyper

SEQ ID NO: 375031 - DNA, 631 bp, Homo sapiens; identical to SEQ ID NO: 294562
  chr20:9048532-9049163
  hyper

SEQ ID NO: 375032 - DNA, 229 bp, Homo sapiens; identical to SEQ ID NO: 294563
  chr20:9049238-9049467
  hyper

SEQ ID NO: 375033 - DNA, 111 bp, Homo sapiens; identical to SEQ ID NO: 361813
  chr20:9049670-9049781
  hyper

SEQ ID NO: 375034 - DNA, 210 bp, Homo sapiens; identical to SEQ ID NO: 205693
  chr20:9489214-9489424
  hyper

SEQ ID NO: 375035 - DNA, 66 bp, Homo sapiens; identical to SEQ ID NO: 352456
  chr20:9489716-9489782
  hyper

SEQ ID NO: 375036 - DNA, 53 bp, Homo sapiens; identical to SEQ ID NO: 205697
  chr20:9496982-9497035
  hyper

SEQ ID NO: 375037 - DNA, 239 bp, Homo sapiens; identical to SEQ ID NO: 294572
  chr20:9497109-9497348
  hyper

SEQ ID NO: 375038 - DNA, 118 bp, Homo sapiens; identical to SEQ ID NO: 361818
  chr20:9497378-9497496
  hyper

SEQ ID NO: 375039 - DNA, 356 bp, Homo sapiens; identical to SEQ ID NO: 361819
  chr20:9818833-9819189
  hyper

SEQ ID NO: 375040 - DNA, 736 bp, Homo sapiens; identical to SEQ ID NO: 347654
  chr20:10415352-10416088
  hyper

SEQ ID NO: 375041 - DNA, 951 bp, Homo sapiens; identical to SEQ ID NO: 336369
  chr20:13976116-13977067
  hyper

SEQ ID NO: 375042 - DNA, 78 bp, Homo sapiens
  chr20:17209635-17209713
  hyper
acaccaacacaataaagaagccgaccttccttcttcactcccccccaccccaaacttggcaagacccaggacccaaac

SEQ ID NO: 375043 - DNA, 95 bp, Homo sapiens; identical to SEQ ID NO: 347655
  chr20:17919868-17919963
  hyper

SEQ ID NO: 375044 - DNA, 79 bp, Homo sapiens; identical to SEQ ID NO: 361823
  chr20:18039568-18039647
  hyper

SEQ ID NO: 375045 - DNA, 94 bp, Homo sapiens; identical to SEQ ID NO: 361824
  chr20:18039936-18040030
  hyper

SEQ ID NO: 375046 - DNA, 86 bp, Homo sapiens; identical to SEQ ID NO: 361825
  chr20:19186796-19186882
  hyper

SEQ ID NO: 375047 - DNA, 153 bp, Homo sapiens; identical to SEQ ID NO: 361826
  chr20:19192506-19192659
  hyper

SEQ ID NO: 375048 - DNA, 267 bp, Homo sapiens; identical to SEQ ID NO: 294620
  chr20:19193616-19193883
  hyper

SEQ ID NO: 375049 - DNA, 78 bp, Homo sapiens; identical to SEQ ID NO: 336375
  chr20:19673407-19673485
  hyper

SEQ ID NO: 375050 - DNA, 145 bp, Homo sapiens; identical to SEQ ID NO: 361829
  chr20:19739207-19739352
  hyper

SEQ ID NO: 375051 - DNA, 151 bp, Homo sapiens; identical to SEQ ID NO: 361830
  chr20:19739786-19739937
  hyper

SEQ ID NO: 375052 - DNA, 148 bp, Homo sapiens; identical to SEQ ID NO: 336377
  chr20:20343543-20343691
  hyper

SEQ ID NO: 375053 - DNA, 62 bp, Homo sapiens; identical to SEQ ID NO: 352462
  chr20:20344267-20344329
  hyper

SEQ ID NO: 375054 - DNA, 79 bp, Homo sapiens; identical to SEQ ID NO: 345625
  chr20:20350750-20350829
  hyper

SEQ ID NO: 375055 - DNA, 205 bp, Homo sapiens; identical to SEQ ID NO: 345626
  chr20:21080357-21080562
  hyper

SEQ ID NO: 375056 - DNA, 118 bp, Homo sapiens
  chr20:21084470-21084588
  hyper
gtgtccgaaatcattagacttgagtgatcttgtggacgggggtataagactaactgtttttcctttcgcaactttgggaattgttagtctcctggcatcagtcacgcagcagactgac

SEQ ID NO: 375057 - DNA, 184 bp, Homo sapiens; identical to SEQ ID NO: 294634
  chr20:21086682-21086866
  hyper

SEQ ID NO: 375058 - DNA, 107 bp, Homo sapiens; identical to SEQ ID NO: 361836
  chr20:21087188-21087295
  hyper

SEQ ID NO: 375059 - DNA, 221 bp, Homo sapiens; identical to SEQ ID NO: 205736
  chr20:21686742-21686963
  hyper

SEQ ID NO: 375060 - DNA, 258 bp, Homo sapiens; identical to SEQ ID NO: 294651
  chr20:22558283-22558541
  hyper

SEQ ID NO: 375061 - DNA, 227 bp, Homo sapiens
  chr20:22558696-22558923
  hyper
caaactcccatgcaccacgcacatcattttctgctgacccccacactagattctggggccaagggggttccccacaccccaccctccactgttctctggaaacatgctgctctcagatcgaatccccagacccgagccgctcgaggggcctgtgtggcttcctcggggccctaccaaactcctctaactgagctcagagcctaagcggtctgagtttgcaactctac

SEQ ID NO: 375062 - DNA, 101 bp, Homo sapiens; identical to SEQ ID NO: 361838
  chr20:22558954-22559055
  hyper

SEQ ID NO: 375063 - DNA, 380 bp, Homo sapiens; identical to SEQ ID NO: 205740
  chr20:22559242-22559622
  hyper

SEQ ID NO: 375064 - DNA, 152 bp, Homo sapiens; identical to SEQ ID NO: 361840
  chr20:22559772-22559924
  hyper

SEQ ID NO: 375065 - DNA, 200 bp, Homo sapiens
  chr20:22563363-22563563
  hyper
cgagatgtacgagtagggcggctttgcgtgcgtgtagctgcgcctgtaggtcttggggtcgcgggcgcggctcaggcccgcctgcccgtacatggggctcatggagttcatgttggcgtagggggccaggccgcccatggccccggccgcctgccccccgagcgggctcaggctgggactcaagtgcggccccatgcccg

SEQ ID NO: 375066 - DNA, 34 bp, Homo sapiens; identical to SEQ ID NO: 205743
  chr20:22563602-22563636
  hyper

SEQ ID NO: 375067 - DNA, 101 bp, Homo sapiens; identical to SEQ ID NO: 205744
  chr20:22563663-22563764
  hyper

SEQ ID NO: 375068 - DNA, 360 bp, Homo sapiens; identical to SEQ ID NO: 205745
  chr20:22563794-22564154
  hyper

SEQ ID NO: 375069 - DNA, 47 bp, Homo sapiens; identical to SEQ ID NO: 205746
  chr20:22564188-22564235
  hyper

SEQ ID NO: 375070 - DNA, 982 bp, Homo sapiens; identical to SEQ ID NO: 361843
  chr20:22564265-22565247
  hyper

SEQ ID NO: 375071 - DNA, 68 bp, Homo sapiens; identical to SEQ ID NO: 361844
  chr20:22565361-22565429
  hyper

SEQ ID NO: 375072 - DNA, 143 bp, Homo sapiens; identical to SEQ ID NO: 294664
  chr20:22565459-22565602
  hyper

SEQ ID NO: 375073 - DNA, 318 bp, Homo sapiens; identical to SEQ ID NO: 294665
  chr20:22565634-22565952
  hyper

SEQ ID NO: 375074 - DNA, 66 bp, Homo sapiens; identical to SEQ ID NO: 294666
  chr20:22567768-22567834
  hyper

SEQ ID NO: 375075 - DNA, 259 bp, Homo sapiens; identical to SEQ ID NO: 205750
  chr20:23030486-23030745
  hyper

SEQ ID NO: 375076 - DNA, 264 bp, Homo sapiens; identical to SEQ ID NO: 352468
  chr20:23617984-23618248
  hyper

SEQ ID NO: 375077 - DNA, 68 bp, Homo sapiens; identical to SEQ ID NO: 352469
  chr20:23618645-23618713
  hyper

SEQ ID NO: 375078 - DNA, 205 bp, Homo sapiens; identical to SEQ ID NO: 352470
  chr20:25065526-25065731
  hyper

SEQ ID NO: 375079 - DNA, 150 bp, Homo sapiens; identical to SEQ ID NO: 294676
  chr20:25566244-25566394
  hyper

SEQ ID NO: 375080 - DNA, 59 bp, Homo sapiens; identical to SEQ ID NO: 352472
  chr20:25566411-25566470
  hyper

SEQ ID NO: 375081 - DNA, 1002 bp, Homo sapiens; identical to SEQ ID NO: 345628
  chr20:30192854-30193856
  hyper

SEQ ID NO: 375082 - DNA, 189 bp, Homo sapiens; identical to SEQ ID NO: 345629
  chr20:30193992-30194181
  hyper

SEQ ID NO: 375083 - DNA, 262 bp, Homo sapiens; identical to SEQ ID NO: 336415
  chr20:30196349-30196611
  hyper

SEQ ID NO: 375084 - DNA, 482 bp, Homo sapiens; identical to SEQ ID NO: 352476
  chr20:30555404-30555886
  hyper

SEQ ID NO: 375085 - DNA, 248 bp, Homo sapiens; identical to SEQ ID NO: 352477
  chr20:30556403-30556651
  hyper

SEQ ID NO: 375086 - DNA, 61 bp, Homo sapiens; identical to SEQ ID NO: 347665
  chr20:30639044-30639105
  hyper

SEQ ID NO: 375087 - DNA, 138 bp, Homo sapiens; identical to SEQ ID NO: 294696
  chr20:30639494-30639632
  hyper

SEQ ID NO: 375088 - DNA, 94 bp, Homo sapiens; identical to SEQ ID NO: 361861
  chr20:30946060-30946154
  hyper

SEQ ID NO: 375089 - DNA, 112 bp, Homo sapiens; identical to SEQ ID NO: 205764
  chr20:30946218-30946330
  hyper

SEQ ID NO: 375090 - DNA, 285 bp, Homo sapiens; identical to SEQ ID NO: 361863
  chr20:30946345-30946630
  hyper

SEQ ID NO: 375091 - DNA, 322 bp, Homo sapiens; identical to SEQ ID NO: 336420
  chr20:32307879-32308201
  hyper

SEQ ID NO: 375092 - DNA, 109 bp, Homo sapiens; identical to SEQ ID NO: 345631
  chr20:32899337-32899446
  hyper

SEQ ID NO: 375093 - DNA, 339 bp, Homo sapiens; identical to SEQ ID NO: 294726
  chr20:32899515-32899854
  hyper

SEQ ID NO: 375094 - DNA, 59 bp, Homo sapiens; identical to SEQ ID NO: 205789
  chr20:34190072-34190131
  hyper

SEQ ID NO: 375095 - DNA, 534 bp, Homo sapiens; identical to SEQ ID NO: 336423
  chr20:34652354-34652888
  hyper

SEQ ID NO: 375096 - DNA, 141 bp, Homo sapiens; identical to SEQ ID NO: 347670
  chr20:35201323-35201464
  hyper

SEQ ID NO: 375097 - DNA, 37 bp, Homo sapiens; identical to SEQ ID NO: 205795
  chr20:35201548-35201585
  hyper

SEQ ID NO: 375098 - DNA, 120 bp, Homo sapiens; identical to SEQ ID NO: 347672
  chr20:35201647-35201767
  hyper

SEQ ID NO: 375099 - DNA, 232 bp, Homo sapiens
  chr20:36781092-36781324
  hyper
cggccctttcccacccatcagactgatttcctcccgcagcgcccctgcgctcaccccagcccaacttcctgcctctgcatcaccagctccacagttcccgccccgggatgtgggtcactttagtcactgtgccgcttggctgaccgccactccaacccgccgccgggtgaggccaagcaggaggaagggggccatcccccagaaccacgcttcccattccctgaactctgaa

SEQ ID NO: 375100 - DNA, 33 bp, Homo sapiens; identical to SEQ ID NO: 361871
  chr20:36793833-36793866
  hyper

SEQ ID NO: 375101 - DNA, 62 bp, Homo sapiens; identical to SEQ ID NO: 345634
  chr20:37274639-37274701
  hyper

SEQ ID NO: 375102 - DNA, 546 bp, Homo sapiens; identical to SEQ ID NO: 205802
  chr20:37274731-37275277
  hyper

SEQ ID NO: 375103 - DNA, 100 bp, Homo sapiens; identical to SEQ ID NO: 352489
  chr20:37303401-37303501
  hyper

SEQ ID NO: 375104 - DNA, 37 bp, Homo sapiens; identical to SEQ ID NO: 347675
  chr20:37358242-37358279
  hyper

SEQ ID NO: 375105 - DNA, 389 bp, Homo sapiens; identical to SEQ ID NO: 345636
  chr20:37433723-37434112
  hyper

SEQ ID NO: 375106 - DNA, 217 bp, Homo sapiens; identical to SEQ ID NO: 205806
  chr20:39318166-39318383
  hyper

SEQ ID NO: 375107 - DNA, 462 bp, Homo sapiens; identical to SEQ ID NO: 294771
  chr20:39318415-39318877
  hyper

SEQ ID NO: 375108 - DNA, 202 bp, Homo sapiens
  chr20:40321525-40321727
  hyper
tctatttggctgcaagagcgctctgtcgcctgcctcggactctgtttcccagaagtcttcctggaaactacatttcgcagggggctttgcggcgcctacttcctcctggctgattagatgggactggtgccgttggccggacgtttttgggagcttcacaggctgatggggaagggcgaaacctgctcgattaaaacaaccc

SEQ ID NO: 375109 - DNA, 207 bp, Homo sapiens; identical to SEQ ID NO: 361880
  chr20:41817010-41817217
  hyper

SEQ ID NO: 375110 - DNA, 220 bp, Homo sapiens; identical to SEQ ID NO: 294785
  chr20:42876305-42876525
  hyper

SEQ ID NO: 375111 - DNA, 124 bp, Homo sapiens; identical to SEQ ID NO: 361882
  chr20:43017186-43017310
  hyper

SEQ ID NO: 375112 - DNA, 110 bp, Homo sapiens; identical to SEQ ID NO: 361883
  chr20:43017399-43017509
  hyper

SEQ ID NO: 375113 - DNA, 135 bp, Homo sapiens; identical to SEQ ID NO: 336443
  chr20:43104449-43104584
  hyper

SEQ ID NO: 375114 - DNA, 57 bp, Homo sapiens; identical to SEQ ID NO: 336444
  chr20:43374349-43374406
  hyper

SEQ ID NO: 375115 - DNA, 108 bp, Homo sapiens; identical to SEQ ID NO: 336447
  chr20:43589121-43589229
  hyper

SEQ ID NO: 375116 - DNA, 47 bp, Homo sapiens; identical to SEQ ID NO: 352493
  chr20:43729515-43729562
  hyper

SEQ ID NO: 375117 - DNA, 150 bp, Homo sapiens
  chr20:43922018-43922168
  hyper
cgccgccacagcacgctccgtctggcttcccctcccccaggcggcgcagcaagacccaaaaacggaccccgtggaaatcagttttttttatttttttaagaacacaaacaagaaatccaacaaagaactgagcgcagcacgcggcgaggg

SEQ ID NO: 375118 - DNA, 215 bp, Homo sapiens; identical to SEQ ID NO: 347677
  chr20:43976984-43977199
  hyper

SEQ ID NO: 375119 - DNA, 71 bp, Homo sapiens; identical to SEQ ID NO: 345637
  chr20:44453063-44453134
  hyper

SEQ ID NO: 375120 - DNA, 171 bp, Homo sapiens; identical to SEQ ID NO: 352496
  chr20:44642198-44642369
  hyper

SEQ ID NO: 375121 - DNA, 578 bp, Homo sapiens; identical to SEQ ID NO: 352497
  chr20:44642532-44643110
  hyper

SEQ ID NO: 375122 - DNA, 32 bp, Homo sapiens; identical to SEQ ID NO: 345638
  chr20:44879699-44879731
  hyper

SEQ ID NO: 375123 - DNA, 66 bp, Homo sapiens; identical to SEQ ID NO: 352499
  chr20:44937643-44937709
  hyper

SEQ ID NO: 375124 - DNA, 180 bp, Homo sapiens; identical to SEQ ID NO: 336458
  chr20:45825086-45825266
  hyper

SEQ ID NO: 375125 - DNA, 50 bp, Homo sapiens; identical to SEQ ID NO: 352500
  chr20:47934774-47934824
  hyper

SEQ ID NO: 375126 - DNA, 125 bp, Homo sapiens
  chr20:48098999-48099124
  hyper
cgtcatgcccgccggcatcgctgatccggccgcccccgccccccctgcccccccaggccgctgtcactcgacggcaaggcccgctgctgcgggggaggggggcagggagcgctgtgggctgctgg

SEQ ID NO: 375127 - DNA, 288 bp, Homo sapiens; identical to SEQ ID NO: 294846
  chr20:48099573-48099861
  hyper

SEQ ID NO: 375128 - DNA, 540 bp, Homo sapiens
  chr20:48100505-48101045
  hyper
gggaccgcgcatcgtcccggccgcccgggcgcccccgcccgtgggcagcggcggtcccggggccgggctgagccgggcctaccccggccgggcaggcaactcgcccgggctgcaggcgccgcggggccggggcgcgctctccgaggcggggggcgccggcgggcgccgggggcgcgggggcaggaccgcggccgcgcggcacctcctccacctcctcctcctcctgctcccgcggcggcggcggcggcggctgcctgggcgagatcaacaagtcggggctgagcttcggctccgcgctcgctgctattctgtcccgcacttcggagcgcccggagccgggcaccaaggcaggacggcgccacctgcgggtcggaagcgagcgcggcttaactcctgcctgcccggcccagcctgccggggaggccgggggcgggctccgggatcgggccaaggagacgcgcgtggccgtgcatccctctccacccaggccacctgcacagctggcctcgcgatcccgccttccttcgtcccgtcaacaac

SEQ ID NO: 375129 - DNA, 982 bp, Homo sapiens; identical to SEQ ID NO: 336464
  chr20:48598700-48599682
  hyper

SEQ ID NO: 375130 - DNA, 164 bp, Homo sapiens; identical to SEQ ID NO: 345639
  chr20:48771177-48771341
  hyper

SEQ ID NO: 375131 - DNA, 139 bp, Homo sapiens; identical to SEQ ID NO: 361897
  chr20:48789173-48789312
  hyper

SEQ ID NO: 375132 - DNA, 581 bp, Homo sapiens; identical to SEQ ID NO: 347682
  chr20:49224897-49225478
  hyper

SEQ ID NO: 375133 - DNA, 305 bp, Homo sapiens; identical to SEQ ID NO: 336468
  chr20:49225991-49226296
  hyper

SEQ ID NO: 375134 - DNA, 315 bp, Homo sapiens; identical to SEQ ID NO: 294860
  chr20:50158039-50158354
  hyper

SEQ ID NO: 375135 - DNA, 952 bp, Homo sapiens; identical to SEQ ID NO: 336473
  chr20:50158723-50159675
  hyper

SEQ ID NO: 375136 - DNA, 570 bp, Homo sapiens; identical to SEQ ID NO: 345641
  chr20:50383675-50384245
  hyper

SEQ ID NO: 375137 - DNA, 249 bp, Homo sapiens; identical to SEQ ID NO: 205848
  chr20:50384400-50384649
  hyper

SEQ ID NO: 375138 - DNA, 243 bp, Homo sapiens; identical to SEQ ID NO: 205849
  chr20:50384928-50385171
  hyper

SEQ ID NO: 375139 - DNA, 87 bp, Homo sapiens; identical to SEQ ID NO: 347688
  chr20:50385230-50385317
  hyper

SEQ ID NO: 375140 - DNA, 296 bp, Homo sapiens; identical to SEQ ID NO: 205853
  chr20:50722302-50722598
  hyper

SEQ ID NO: 375141 - DNA, 640 bp, Homo sapiens; identical to SEQ ID NO: 361907
  chr20:51589126-51589766
  hyper

SEQ ID NO: 375142 - DNA, 56 bp, Homo sapiens; identical to SEQ ID NO: 361908
  chr20:51590002-51590058
  hyper

SEQ ID NO: 375143 - DNA, 372 bp, Homo sapiens; identical to SEQ ID NO: 336479
  chr20:52259577-52259949
  hyper

SEQ ID NO: 375144 - DNA, 171 bp, Homo sapiens; identical to SEQ ID NO: 361910
  chr20:52789230-52789401
  hyper

SEQ ID NO: 375145 - DNA, 60 bp, Homo sapiens; identical to SEQ ID NO: 205858
  chr20:53092081-53092141
  hyper

SEQ ID NO: 375146 - DNA, 148 bp, Homo sapiens
  chr20:54578794-54578942
  hyper
acccaggcatatttgggaaggcgagtgctttacatgattccccatttcccaatcggaccagcttagcctgggcaggcagcctcgtgctgaggtgcctggagaccgcccaccccctaggtgctcgcttccccccgggtctgacctgatc

SEQ ID NO: 375147 - DNA, 43 bp, Homo sapiens; identical to SEQ ID NO: 361912
  chr20:54919370-54919413
  hyper

SEQ ID NO: 375148 - DNA, 275 bp, Homo sapiens; identical to SEQ ID NO: 205862
  chr20:55203829-55204104
  hyper

SEQ ID NO: 375149 - DNA, 216 bp, Homo sapiens; identical to SEQ ID NO: 205863
  chr20:55205088-55205304
  hyper

SEQ ID NO: 375150 - DNA, 135 bp, Homo sapiens; identical to SEQ ID NO: 205864
  chr20:55206463-55206598
  hyper

SEQ ID NO: 375151 - DNA, 95 bp, Homo sapiens; identical to SEQ ID NO: 352515
  chr20:55206774-55206869
  hyper

SEQ ID NO: 375152 - DNA, 56 bp, Homo sapiens; identical to SEQ ID NO: 361917
  chr20:55532724-55532780
  hyper

SEQ ID NO: 375153 - DNA, 52 bp, Homo sapiens; identical to SEQ ID NO: 361918
  chr20:55532850-55532902
  hyper

SEQ ID NO: 375154 - DNA, 103 bp, Homo sapiens; identical to SEQ ID NO: 294893
  chr20:55588994-55589097
  hyper

SEQ ID NO: 375155 - DNA, 284 bp, Homo sapiens; identical to SEQ ID NO: 361920
  chr20:55839319-55839603
  hyper

SEQ ID NO: 375156 - DNA, 103 bp, Homo sapiens
  chr20:55841887-55841990
  hyper
cgggacgtcgcggggatgcggctggaggaatcggagccggccctgccctctcggcactcgcggtccggaccaggaaggcggcccgagcaggacgggtgggctg

SEQ ID NO: 375157 - DNA, 535 bp, Homo sapiens; identical to SEQ ID NO: 352516
  chr20:55964187-55964722
  hyper

SEQ ID NO: 375158 - DNA, 410 bp, Homo sapiens; identical to SEQ ID NO: 336492
  chr20:56073588-56073998
  hyper

SEQ ID NO: 375159 - DNA, 117 bp, Homo sapiens; identical to SEQ ID NO: 352517
  chr20:56725940-56726057
  hyper

SEQ ID NO: 375160 - DNA, 431 bp, Homo sapiens; identical to SEQ ID NO: 336494
  chr20:56784811-56785242
  hyper

SEQ ID NO: 375161 - DNA, 174 bp, Homo sapiens; identical to SEQ ID NO: 361924
  chr20:57090173-57090347
  hyper

SEQ ID NO: 375162 - DNA, 113 bp, Homo sapiens; identical to SEQ ID NO: 345643
  chr20:57225466-57225579
  hyper

SEQ ID NO: 375163 - DNA, 304 bp, Homo sapiens; identical to SEQ ID NO: 336497
  chr20:57227604-57227908
  hyper

SEQ ID NO: 375164 - DNA, 305 bp, Homo sapiens
  chr20:57415535-57415840
  hyper
cgagaccgagcctgagaccgcccccaccactgagcccgagaccgagcctgaagacgatcgcggcccggtggtgcccaagcactccaccttcggccagtccctcacccagcgtctgcacgctctcaagttgcgaagccccgacgcctccccaagtcgcgcgccgcccagcactcaggagccccagagccccagggaaggggaggagctcaagcccgaggacaaagatccaagggaccccgaagagtcgaaggagcccaaggaggagaagcagcggcgtcgctgcaagccaaagaagcccacccgcc

SEQ ID NO: 375165 - DNA, 327 bp, Homo sapiens; identical to SEQ ID NO: 336499
  chr20:57797949-57798276
  hyper

SEQ ID NO: 375166 - DNA, 176 bp, Homo sapiens; identical to SEQ ID NO: 205885
  chr20:57875365-57875541
  hyper

SEQ ID NO: 375167 - DNA, 220 bp, Homo sapiens; identical to SEQ ID NO: 352521
  chr20:57875889-57876109
  hyper

SEQ ID NO: 375168 - DNA, 233 bp, Homo sapiens; identical to SEQ ID NO: 347690
  chr20:57978841-57979074
  hyper

SEQ ID NO: 375169 - DNA, 74 bp, Homo sapiens; identical to SEQ ID NO: 361931
  chr20:58180712-58180786
  hyper

SEQ ID NO: 375170 - DNA, 115 bp, Homo sapiens; identical to SEQ ID NO: 345644
  chr20:58514400-58514515
  hyper

SEQ ID NO: 375171 - DNA, 109 bp, Homo sapiens; identical to SEQ ID NO: 361933
  chr20:58515463-58515572
  hyper

SEQ ID NO: 375172 - DNA, 33 bp, Homo sapiens; identical to SEQ ID NO: 336506
  chr20:60639846-60639879
  hyper

SEQ ID NO: 375173 - DNA, 43 bp, Homo sapiens; identical to SEQ ID NO: 361935
  chr20:60794658-60794701
  hyper

SEQ ID NO: 375174 - DNA, 70 bp, Homo sapiens; identical to SEQ ID NO: 361936
  chr20:61585229-61585299
  hyper

SEQ ID NO: 375175 - DNA, 84 bp, Homo sapiens; identical to SEQ ID NO: 347693
  chr20:61664570-61664654
  hyper

SEQ ID NO: 375176 - DNA, 192 bp, Homo sapiens; identical to SEQ ID NO: 352526
  chr20:61806216-61806408
  hyper

SEQ ID NO: 375177 - DNA, 247 bp, Homo sapiens; identical to SEQ ID NO: 205902
  chr20:61810310-61810557
  hyper

SEQ ID NO: 375178 - DNA, 270 bp, Homo sapiens; identical to SEQ ID NO: 361940
  chr20:61810632-61810902
  hyper

SEQ ID NO: 375179 - DNA, 79 bp, Homo sapiens
  chr20:62103897-62103976
  hyper
gccccccggccgggagccgcatggccgaggcggcggttccgcactcctgccgggcttgggccgcgcgcggagacgctgc

SEQ ID NO: 375180 - DNA, 218 bp, Homo sapiens; identical to SEQ ID NO: 336516
  chr20:62127516-62127734
  hyper

SEQ ID NO: 375181 - DNA, 271 bp, Homo sapiens; identical to SEQ ID NO: 352527
  chr20:62185051-62185322
  hyper

SEQ ID NO: 375182 - DNA, 390 bp, Homo sapiens; identical to SEQ ID NO: 347694
  chr20:62273399-62273789
  hyper

SEQ ID NO: 375183 - DNA, 290 bp, Homo sapiens; identical to SEQ ID NO: 347695
  chr20:62368779-62369069
  hyper

SEQ ID NO: 375184 - DNA, 144 bp, Homo sapiens; identical to SEQ ID NO: 336520
  chr20:62371942-62372086
  hyper

SEQ ID NO: 375185 - DNA, 379 bp, Homo sapiens
  chr20:62384600-62384979
  hyper
cgtggtgtccgatcagacgcctccctggaggcagagaagaaacaaacactgtggagtaatacggacccaaaagtgtgcaggcgaaatgggagatgtgggtgcaactcaaagtcctgggctcttcttgctggacgccggagaagcagccagacccatttaatcaagttcttttcccccaaccctgagacccaacgtcactcagtggcaggaactccacaccaccatctccatggtgcgtgccctggggccaggctcaaaaacctgggggaccctcagcacgcccagtgccgttatgctactcaggcccagataccagcacgtcagacctgggcatgggccactgagagagcccggagcagccacgtccacgggaccctac

SEQ ID NO: 375186 - DNA, 43 bp, Homo sapiens; identical to SEQ ID NO: 352531
  chr20:62461248-62461291
  hyper

SEQ ID NO: 375187 - DNA, 264 bp, Homo sapiens; identical to SEQ ID NO: 352532
  chr20:62461639-62461903
  hyper

SEQ ID NO: 375188 - DNA, 345 bp, Homo sapiens; identical to SEQ ID NO: 345646
  chr20:62495236-62495581
  hyper

SEQ ID NO: 375189 - DNA, 759 bp, Homo sapiens; identical to SEQ ID NO: 205913
  chr20:62600809-62601568
  hyper

SEQ ID NO: 375190 - DNA, 65 bp, Homo sapiens; identical to SEQ ID NO: 361949
  chr20:62601569-62601634
  hyper

SEQ ID NO: 375191 - DNA, 214 bp, Homo sapiens; identical to SEQ ID NO: 295001
  chr20:62680443-62680657
  hyper

SEQ ID NO: 375192 - DNA, 267 bp, Homo sapiens; identical to SEQ ID NO: 361951
  chr20:62680896-62681163
  hyper

SEQ ID NO: 375193 - DNA, 58 bp, Homo sapiens; identical to SEQ ID NO: 352534
  chr20:62694227-62694285
  hyper

SEQ ID NO: 375194 - DNA, 251 bp, Homo sapiens; identical to SEQ ID NO: 205918
  chr20:62694767-62695018
  hyper

SEQ ID NO: 375195 - DNA, 197 bp, Homo sapiens; identical to SEQ ID NO: 352536
  chr20:62695048-62695245
  hyper

SEQ ID NO: 375196 - DNA, 47 bp, Homo sapiens
  chr21:15588309-15588356
  hyper
cgcccagccctacgccaggcgagggagcagtgcggtgggcggtaccc

SEQ ID NO: 375197 - DNA, 66 bp, Homo sapiens
  chr21:15588911-15588977
  hyper
acagcctggtcactgttctccgtcaagtagtaagcacgcctgacatcccccaaaaggagaggggtc

SEQ ID NO: 375198 - DNA, 208 bp, Homo sapiens; identical to SEQ ID NO: 361955
  chr21:15755914-15756122
  hyper

SEQ ID NO: 375199 - DNA, 292 bp, Homo sapiens; identical to SEQ ID NO: 336532
  chr21:18984005-18984297
  hyper

SEQ ID NO: 375200 - DNA, 67 bp, Homo sapiens; identical to SEQ ID NO: 352537
  chr21:22370943-22371010
  hyper

SEQ ID NO: 375201 - DNA, 122 bp, Homo sapiens; identical to SEQ ID NO: 205931
  chr21:27011487-27011609
  hyper

SEQ ID NO: 375202 - DNA, 133 bp, Homo sapiens; identical to SEQ ID NO: 205932
  chr21:27011639-27011772
  hyper

SEQ ID NO: 375203 - DNA, 153 bp, Homo sapiens; identical to SEQ ID NO: 345649
  chr21:27012725-27012878
  hyper

SEQ ID NO: 375204 - DNA, 105 bp, Homo sapiens
  chr21:28215837-28215942
  hyper
cgtagcaggaaggaccggcagtgactttcaacagtgcttgagagcagaattatggccgcgagagggagtgcaaactgggaggcggggcaaacccgggaaagacct

SEQ ID NO: 375205 - DNA, 226 bp, Homo sapiens; identical to SEQ ID NO: 295031
  chr21:28215997-28216223
  hyper

SEQ ID NO: 375206 - DNA, 466 bp, Homo sapiens; identical to SEQ ID NO: 347700
  chr21:30374936-30375402
  hyper

SEQ ID NO: 375207 - DNA, 235 bp, Homo sapiens
  chr21:30670777-30671012
  hyper
cgggcacgcggcgactcggctgaattagggcgtcctgcagctcccgaggcgaggaggcgcttggcctttccgttccgccctcagaagggagaggagaggtggtcctcgagtgggagtcagttcaggatgcgggctgtgccacgcgcggaggtccggggaccccaccgccgcctcctcgaggcccgccccgccccttacgacccgtccctgcaaccccccgcgtgggcttccggcc

SEQ ID NO: 375208 - DNA, 191 bp, Homo sapiens; identical to SEQ ID NO: 361962
  chr21:32716044-32716235
  hyper

SEQ ID NO: 375209 - DNA, 180 bp, Homo sapiens; identical to SEQ ID NO: 352542
  chr21:33244741-33244921
  hyper

SEQ ID NO: 375210 - DNA, 290 bp, Homo sapiens; identical to SEQ ID NO: 205955
  chr21:33245047-33245337
  hyper

SEQ ID NO: 375211 - DNA, 194 bp, Homo sapiens; identical to SEQ ID NO: 205956
  chr21:33245489-33245683
  hyper

SEQ ID NO: 375212 - DNA, 75 bp, Homo sapiens; identical to SEQ ID NO: 205957
  chr21:33245718-33245793
  hyper

SEQ ID NO: 375213 - DNA, 132 bp, Homo sapiens; identical to SEQ ID NO: 205958
  chr21:33245877-33246009
  hyper

SEQ ID NO: 375214 - DNA, 129 bp, Homo sapiens; identical to SEQ ID NO: 352547
  chr21:33246414-33246543
  hyper

SEQ ID NO: 375215 - DNA, 32 bp, Homo sapiens; identical to SEQ ID NO: 361969
  chr21:34401548-34401580
  hyper

SEQ ID NO: 375216 - DNA, 300 bp, Homo sapiens; identical to SEQ ID NO: 352548
  chr21:34602438-34602738
  hyper

SEQ ID NO: 375217 - DNA, 613 bp, Homo sapiens; identical to SEQ ID NO: 352549
  chr21:34602763-34603376
  hyper

SEQ ID NO: 375218 - DNA, 881 bp, Homo sapiens; identical to SEQ ID NO: 336551
  chr21:36163875-36164756
  hyper

SEQ ID NO: 375219 - DNA, 130 bp, Homo sapiens; identical to SEQ ID NO: 336552
  chr21:36206762-36206892
  hyper

SEQ ID NO: 375220 - DNA, 353 bp, Homo sapiens; identical to SEQ ID NO: 336553
  chr21:37528267-37528620
  hyper

SEQ ID NO: 375221 - DNA, 237 bp, Homo sapiens; identical to SEQ ID NO: 336554
  chr21:37757666-37757903
  hyper

SEQ ID NO: 375222 - DNA, 156 bp, Homo sapiens; identical to SEQ ID NO: 352551
  chr21:38064301-38064457
  hyper

SEQ ID NO: 375223 - DNA, 283 bp, Homo sapiens; identical to SEQ ID NO: 205987
  chr21:38064683-38064966
  hyper

SEQ ID NO: 375224 - DNA, 111 bp, Homo sapiens; identical to SEQ ID NO: 295100
  chr21:38071905-38072016
  hyper

SEQ ID NO: 375225 - DNA, 234 bp, Homo sapiens; identical to SEQ ID NO: 361977
  chr21:38073877-38074111
  hyper

SEQ ID NO: 375226 - DNA, 146 bp, Homo sapiens; identical to SEQ ID NO: 352554
  chr21:38080753-38080899
  hyper

SEQ ID NO: 375227 - DNA, 293 bp, Homo sapiens; identical to SEQ ID NO: 336563
  chr21:38382182-38382475
  hyper

SEQ ID NO: 375228 - DNA, 210 bp, Homo sapiens; identical to SEQ ID NO: 361980
  chr21:38592864-38593074
  hyper

SEQ ID NO: 375229 - DNA, 258 bp, Homo sapiens; identical to SEQ ID NO: 295112
  chr21:38593104-38593362
  hyper

SEQ ID NO: 375230 - DNA, 38 bp, Homo sapiens; identical to SEQ ID NO: 361982
  chr21:38593729-38593767
  hyper

SEQ ID NO: 375231 - DNA, 140 bp, Homo sapiens; identical to SEQ ID NO: 347703
  chr21:38936049-38936189
  hyper

SEQ ID NO: 375232 - DNA, 144 bp, Homo sapiens; identical to SEQ ID NO: 347704
  chr21:38936266-38936410
  hyper

SEQ ID NO: 375233 - DNA, 44 bp, Homo sapiens; identical to SEQ ID NO: 347705
  chr21:39047626-39047670
  hyper

SEQ ID NO: 375234 - DNA, 310 bp, Homo sapiens; identical to SEQ ID NO: 206000
  chr21:39288394-39288704
  hyper

SEQ ID NO: 375235 - DNA, 279 bp, Homo sapiens; identical to SEQ ID NO: 206001
  chr21:39288901-39289180
  hyper

SEQ ID NO: 375236 - DNA, 38 bp, Homo sapiens; identical to SEQ ID NO: 361988
  chr21:40032283-40032321
  hyper

SEQ ID NO: 375237 - DNA, 158 bp, Homo sapiens; identical to SEQ ID NO: 206003
  chr21:40032367-40032525
  hyper

SEQ ID NO: 375238 - DNA, 65 bp, Homo sapiens; identical to SEQ ID NO: 361990
  chr21:40032848-40032913
  hyper

SEQ ID NO: 375239 - DNA, 132 bp, Homo sapiens; identical to SEQ ID NO: 206005
  chr21:40032974-40033106
  hyper

SEQ ID NO: 375240 - DNA, 75 bp, Homo sapiens; identical to SEQ ID NO: 206006
  chr21:40033358-40033433
  hyper

SEQ ID NO: 375241 - DNA, 141 bp, Homo sapiens; identical to SEQ ID NO: 361993
  chr21:40033449-40033590
  hyper

SEQ ID NO: 375242 - DNA, 75 bp, Homo sapiens; identical to SEQ ID NO: 352561
  chr21:40105869-40105944
  hyper

SEQ ID NO: 375243 - DNA, 341 bp, Homo sapiens; identical to SEQ ID NO: 206009
  chr21:40105997-40106338
  hyper

SEQ ID NO: 375244 - DNA, 60 bp, Homo sapiens; identical to SEQ ID NO: 352563
  chr21:42688559-42688619
  hyper

SEQ ID NO: 375245 - DNA, 819 bp, Homo sapiens; identical to SEQ ID NO: 295139
  chr21:42879240-42880059
  hyper

SEQ ID NO: 375246 - DNA, 121 bp, Homo sapiens; identical to SEQ ID NO: 206018
  chr21:42880104-42880225
  hyper

SEQ ID NO: 375247 - DNA, 142 bp, Homo sapiens; identical to SEQ ID NO: 206019
  chr21:42880260-42880402
  hyper

SEQ ID NO: 375248 - DNA, 113 bp, Homo sapiens; identical to SEQ ID NO: 352564
  chr21:43186321-43186434
  hyper

SEQ ID NO: 375249 - DNA, 106 bp, Homo sapiens; identical to SEQ ID NO: 206022
  chr21:43186592-43186698
  hyper

SEQ ID NO: 375250 - DNA, 493 bp, Homo sapiens; identical to SEQ ID NO: 347707
  chr21:43186889-43187382
  hyper

SEQ ID NO: 375251 - DNA, 285 bp, Homo sapiens; identical to SEQ ID NO: 352567
  chr21:43188170-43188455
  hyper

SEQ ID NO: 375252 - DNA, 603 bp, Homo sapiens; identical to SEQ ID NO: 336575
  chr21:43188777-43189380
  hyper

SEQ ID NO: 375253 - DNA, 93 bp, Homo sapiens; identical to SEQ ID NO: 336576
  chr21:43430373-43430466
  hyper

SEQ ID NO: 375254 - DNA, 33 bp, Homo sapiens; identical to SEQ ID NO: 352569
  chr21:44847478-44847511
  hyper

SEQ ID NO: 375255 - DNA, 56 bp, Homo sapiens; identical to SEQ ID NO: 352570
  chr21:44847864-44847920
  hyper

SEQ ID NO: 375256 - DNA, 224 bp, Homo sapiens; identical to SEQ ID NO: 206035
  chr21:45875732-45875956
  hyper

SEQ ID NO: 375257 - DNA, 196 bp, Homo sapiens; identical to SEQ ID NO: 352571
  chr21:46294041-46294237
  hyper

SEQ ID NO: 375258 - DNA, 216 bp, Homo sapiens; identical to SEQ ID NO: 295181
  chr21:46351437-46351653
  hyper

SEQ ID NO: 375259 - DNA, 394 bp, Homo sapiens; identical to SEQ ID NO: 295182
  chr21:46352279-46352673
  hyper

SEQ ID NO: 375260 - DNA, 98 bp, Homo sapiens; identical to SEQ ID NO: 336586
  chr21:46686353-46686451
  hyper

SEQ ID NO: 375261 - DNA, 347 bp, Homo sapiens; identical to SEQ ID NO: 362009
  chr21:46800403-46800750
  hyper

SEQ ID NO: 375262 - DNA, 304 bp, Homo sapiens; identical to SEQ ID NO: 362010
  chr21:46800780-46801084
  hyper

SEQ ID NO: 375263 - DNA, 214 bp, Homo sapiens; identical to SEQ ID NO: 336588
  chr21:46801338-46801552
  hyper

SEQ ID NO: 375264 - DNA, 94 bp, Homo sapiens; identical to SEQ ID NO: 295190
  chr21:46825731-46825825
  hyper

SEQ ID NO: 375265 - DNA, 55 bp, Homo sapiens; identical to SEQ ID NO: 352575
  chr21:47062898-47062953
  hyper

SEQ ID NO: 375266 - DNA, 142 bp, Homo sapiens; identical to SEQ ID NO: 345651
  chr21:47063290-47063432
  hyper

SEQ ID NO: 375267 - DNA, 273 bp, Homo sapiens; identical to SEQ ID NO: 362015
  chr21:47649460-47649733
  hyper

SEQ ID NO: 375268 - DNA, 90 bp, Homo sapiens
  chr21:48087109-48087199
  hyper
cgtgatgcaggtgagcaatgatgcagagggctctgtgcgcctggcgggctctgtttgcctgctgggctctgtgcgcctgctgggctctgt

SEQ ID NO: 375269 - DNA, 237 bp, Homo sapiens; identical to SEQ ID NO: 206052
  chr22:17849877-17850114
  hyper

SEQ ID NO: 375270 - DNA, 129 bp, Homo sapiens; identical to SEQ ID NO: 352578
  chr22:19706042-19706171
  hyper

SEQ ID NO: 375271 - DNA, 390 bp, Homo sapiens; identical to SEQ ID NO: 206060
  chr22:21319195-21319585
  hyper

SEQ ID NO: 375272 - DNA, 67 bp, Homo sapiens; identical to SEQ ID NO: 362019
  chr22:21368234-21368301
  hyper

SEQ ID NO: 375273 - DNA, 94 bp, Homo sapiens; identical to SEQ ID NO: 362020
  chr22:21368697-21368791
  hyper

SEQ ID NO: 375274 - DNA, 69 bp, Homo sapiens; identical to SEQ ID NO: 362021
  chr22:21386510-21386579
  hyper

SEQ ID NO: 375275 - DNA, 101 bp, Homo sapiens
  chr22:21399942-21400043
  hyper
cgatgctggaaccgcctaggggaggcagggggataaacgcagcaaggcgcccaatccggtgcatggtctgtggcgcatgcagtgtatcagcccgggcgagg

SEQ ID NO: 375276 - DNA, 126 bp, Homo sapiens
  chr22:21400283-21400409
  hyper
ttcctgtgagaggtctggggaggatgaagagcagaaagaagaggctatggtggcctgtgggcgtctttcaggggtccccgaggccgagcagggtcccgaggccaattgggactccgacctggagac

SEQ ID NO: 375277 - DNA, 166 bp, Homo sapiens; identical to SEQ ID NO: 345652
  chr22:22006759-22006925
  hyper

SEQ ID NO: 375278 - DNA, 328 bp, Homo sapiens; identical to SEQ ID NO: 352581
  chr22:22012017-22012345
  hyper

SEQ ID NO: 375279 - DNA, 354 bp, Homo sapiens; identical to SEQ ID NO: 336607
  chr22:22292773-22293127
  hyper

SEQ ID NO: 375280 - DNA, 136 bp, Homo sapiens; identical to SEQ ID NO: 345653
  chr22:22862472-22862608
  hyper

SEQ ID NO: 375281 - DNA, 60 bp, Homo sapiens; identical to SEQ ID NO: 352583
  chr22:24181727-24181787
  hyper

SEQ ID NO: 375282 - DNA, 187 bp, Homo sapiens; identical to SEQ ID NO: 295268
  chr22:24552924-24553111
  hyper

SEQ ID NO: 375283 - DNA, 31 bp, Homo sapiens; identical to SEQ ID NO: 362028
  chr22:24819665-24819696
  hyper

SEQ ID NO: 375284 - DNA, 173 bp, Homo sapiens; identical to SEQ ID NO: 295271
  chr22:24819901-24820074
  hyper

SEQ ID NO: 375285 - DNA, 61 bp, Homo sapiens; identical to SEQ ID NO: 295272
  chr22:24820486-24820547
  hyper

SEQ ID NO: 375286 - DNA, 240 bp, Homo sapiens; identical to SEQ ID NO: 345654
  chr22:25348202-25348442
  hyper

SEQ ID NO: 375287 - DNA, 787 bp, Homo sapiens; identical to SEQ ID NO: 206075
  chr22:25348485-25349272
  hyper

SEQ ID NO: 375288 - DNA, 395 bp, Homo sapiens; identical to SEQ ID NO: 352589
  chr22:25349348-25349743
  hyper

SEQ ID NO: 375289 - DNA, 60 bp, Homo sapiens; identical to SEQ ID NO: 295278
  chr22:25678186-25678246
  hyper

SEQ ID NO: 375290 - DNA, 1244 bp, Homo sapiens; identical to SEQ ID NO: 362035
  chr22:25959837-25961081
  hyper

SEQ ID NO: 375291 - DNA, 248 bp, Homo sapiens; identical to SEQ ID NO: 57883
  chr22:25961110-25961358
  hyper

SEQ ID NO: 375292 - DNA, 45 bp, Homo sapiens
  chr22:26565120-26565165
  hyper
cgtctggaaaatggtccgggtgctctccagcctggcctggccagg

SEQ ID NO: 375293 - DNA, 284 bp, Homo sapiens; identical to SEQ ID NO: 362037
  chr22:26565999-26566283
  hyper

SEQ ID NO: 375294 - DNA, 96 bp, Homo sapiens; identical to SEQ ID NO: 352593
  chr22:27053098-27053194
  hyper

SEQ ID NO: 375295 - DNA, 267 bp, Homo sapiens; identical to SEQ ID NO: 206085
  chr22:27053250-27053517
  hyper

SEQ ID NO: 375296 - DNA, 230 bp, Homo sapiens; identical to SEQ ID NO: 352595
  chr22:27054028-27054258
  hyper

SEQ ID NO: 375297 - DNA, 299 bp, Homo sapiens; identical to SEQ ID NO: 352596
  chr22:27068622-27068921
  hyper

SEQ ID NO: 375298 - DNA, 607 bp, Homo sapiens; identical to SEQ ID NO: 295296
  chr22:27299049-27299656
  hyper

SEQ ID NO: 375299 - DNA, 37 bp, Homo sapiens; identical to SEQ ID NO: 295297
  chr22:27299689-27299726
  hyper

SEQ ID NO: 375300 - DNA, 253 bp, Homo sapiens; identical to SEQ ID NO: 336622
  chr22:28200773-28201026
  hyper

SEQ ID NO: 375301 - DNA, 123 bp, Homo sapiens; identical to SEQ ID NO: 347716
  chr22:28838056-28838179
  hyper

SEQ ID NO: 375302 - DNA, 60 bp, Homo sapiens; identical to SEQ ID NO: 206092
  chr22:28838449-28838509
  hyper

SEQ ID NO: 375303 - DNA, 243 bp, Homo sapiens; identical to SEQ ID NO: 206093
  chr22:28838551-28838794
  hyper

SEQ ID NO: 375304 - DNA, 278 bp, Homo sapiens; identical to SEQ ID NO: 295309
  chr22:28838844-28839122
  hyper

SEQ ID NO: 375305 - DNA, 129 bp, Homo sapiens; identical to SEQ ID NO: 347720
  chr22:28839263-28839392
  hyper

SEQ ID NO: 375306 - DNA, 63 bp, Homo sapiens; identical to SEQ ID NO: 295312
  chr22:29075343-29075406
  hyper

SEQ ID NO: 375307 - DNA, 258 bp, Homo sapiens; identical to SEQ ID NO: 362049
  chr22:29426301-29426559
  hyper

SEQ ID NO: 375308 - DNA, 219 bp, Homo sapiens; identical to SEQ ID NO: 362050
  chr22:29426653-29426872
  hyper

SEQ ID NO: 375309 - DNA, 306 bp, Homo sapiens; identical to SEQ ID NO: 352603
  chr22:29467406-29467712
  hyper

SEQ ID NO: 375310 - DNA, 149 bp, Homo sapiens; identical to SEQ ID NO: 352604
  chr22:29467742-29467891
  hyper

SEQ ID NO: 375311 - DNA, 170 bp, Homo sapiens; identical to SEQ ID NO: 347722
  chr22:29550509-29550679
  hyper

SEQ ID NO: 375312 - DNA, 199 bp, Homo sapiens; identical to SEQ ID NO: 362054
  chr22:29876679-29876878
  hyper

SEQ ID NO: 375313 - DNA, 148 bp, Homo sapiens
  chr22:30642437-30642585
  hyper
cggcgccccctccctcgccgccaacctgccgcggggcgtgcggtgcttgggaccatgtgcccgcgctcgctccgggccgccacccagcgcctccggtggctgcgcgggcgccccaagtgttcgtgtgtctgcggcgggtgggcgtccg

SEQ ID NO: 375314 - DNA, 44 bp, Homo sapiens
  chr22:30642684-30642728
  hyper
tatgggctgcacttcagagggccttggaggaaacctcagatgcc

SEQ ID NO: 375315 - DNA, 770 bp, Homo sapiens; identical to SEQ ID NO: 336630
  chr22:31090200-31090970
  hyper

SEQ ID NO: 375316 - DNA, 48 bp, Homo sapiens; identical to SEQ ID NO: 362056
  chr22:31198444-31198492
  hyper

SEQ ID NO: 375317 - DNA, 395 bp, Homo sapiens; identical to SEQ ID NO: 362057
  chr22:31198752-31199147
  hyper

SEQ ID NO: 375318 - DNA, 81 bp, Homo sapiens; identical to SEQ ID NO: 362058
  chr22:32571858-32571939
  hyper

SEQ ID NO: 375319 - DNA, 224 bp, Homo sapiens; identical to SEQ ID NO: 336634
  chr22:33192959-33193183
  hyper

SEQ ID NO: 375320 - DNA, 791 bp, Homo sapiens; identical to SEQ ID NO: 362059
  chr22:34316250-34317041
  hyper

SEQ ID NO: 375321 - DNA, 134 bp, Homo sapiens; identical to SEQ ID NO: 295369
  chr22:35420072-35420206
  hyper

SEQ ID NO: 375322 - DNA, 73 bp, Homo sapiens; identical to SEQ ID NO: 352607
  chr22:35420315-35420388
  hyper

SEQ ID NO: 375323 - DNA, 171 bp, Homo sapiens; identical to SEQ ID NO: 352608
  chr22:36847902-36848073
  hyper

SEQ ID NO: 375324 - DNA, 104 bp, Homo sapiens; identical to SEQ ID NO: 336641
  chr22:37252563-37252667
  hyper

SEQ ID NO: 375325 - DNA, 35 bp, Homo sapiens; identical to SEQ ID NO: 362063
  chr22:37731278-37731313
  hyper

SEQ ID NO: 375326 - DNA, 123 bp, Homo sapiens; identical to SEQ ID NO: 362064
  chr22:38966046-38966169
  hyper

SEQ ID NO: 375327 - DNA, 320 bp, Homo sapiens; identical to SEQ ID NO: 352609
  chr22:39549067-39549387
  hyper

SEQ ID NO: 375328 - DNA, 137 bp, Homo sapiens; identical to SEQ ID NO: 352610
  chr22:39549472-39549609
  hyper

SEQ ID NO: 375329 - DNA, 148 bp, Homo sapiens; identical to SEQ ID NO: 345657
  chr22:39852943-39853091
  hyper

SEQ ID NO: 375330 - DNA, 225 bp, Homo sapiens; identical to SEQ ID NO: 295455
  chr22:39853157-39853382
  hyper

SEQ ID NO: 375331 - DNA, 31 bp, Homo sapiens; identical to SEQ ID NO: 295456
  chr22:39853626-39853657
  hyper

SEQ ID NO: 375332 - DNA, 209 bp, Homo sapiens; identical to SEQ ID NO: 295457
  chr22:39853690-39853899
  hyper

SEQ ID NO: 375333 - DNA, 130 bp, Homo sapiens; identical to SEQ ID NO: 345661
  chr22:39853934-39854064
  hyper

SEQ ID NO: 375334 - DNA, 180 bp, Homo sapiens; identical to SEQ ID NO: 336648
  chr22:39941870-39942050
  hyper

SEQ ID NO: 375335 - DNA, 127 bp, Homo sapiens; identical to SEQ ID NO: 362072
  chr22:39954151-39954278
  hyper

SEQ ID NO: 375336 - DNA, 332 bp, Homo sapiens; identical to SEQ ID NO: 336651
  chr22:41418641-41418973
  hyper

SEQ ID NO: 375337 - DNA, 172 bp, Homo sapiens; identical to SEQ ID NO: 336652
  chr22:41593094-41593266
  hyper

SEQ ID NO: 375338 - DNA, 53 bp, Homo sapiens; identical to SEQ ID NO: 352617
  chr22:42896458-42896511
  hyper

SEQ ID NO: 375339 - DNA, 209 bp, Homo sapiens; identical to SEQ ID NO: 352618
  chr22:43115852-43116061
  hyper

SEQ ID NO: 375340 - DNA, 107 bp, Homo sapiens; identical to SEQ ID NO: 352619
  chr22:43116269-43116376
  hyper

SEQ ID NO: 375341 - DNA, 470 bp, Homo sapiens; identical to SEQ ID NO: 352620
  chr22:43659642-43660112
  hyper

SEQ ID NO: 375342 - DNA, 401 bp, Homo sapiens; identical to SEQ ID NO: 362078
  chr22:44208017-44208418
  hyper

SEQ ID NO: 375343 - DNA, 71 bp, Homo sapiens; identical to SEQ ID NO: 295516
  chr22:44208448-44208519
  hyper

SEQ ID NO: 375344 - DNA, 202 bp, Homo sapiens; identical to SEQ ID NO: 295517
  chr22:44258078-44258280
  hyper

SEQ ID NO: 375345 - DNA, 41 bp, Homo sapiens; identical to SEQ ID NO: 352622
  chr22:44258533-44258574
  hyper

SEQ ID NO: 375346 - DNA, 559 bp, Homo sapiens; identical to SEQ ID NO: 295522
  chr22:44419919-44420478
  hyper

SEQ ID NO: 375347 - DNA, 109 bp, Homo sapiens; identical to SEQ ID NO: 352624
  chr22:44420680-44420789
  hyper

SEQ ID NO: 375348 - DNA, 303 bp, Homo sapiens; identical to SEQ ID NO: 295524
  chr22:44727058-44727361
  hyper

SEQ ID NO: 375349 - DNA, 649 bp, Homo sapiens; identical to SEQ ID NO: 352625
  chr22:44893737-44894386
  hyper

SEQ ID NO: 375350 - DNA, 34 bp, Homo sapiens; identical to SEQ ID NO: 295527
  chr22:45064203-45064237
  hyper

SEQ ID NO: 375351 - DNA, 389 bp, Homo sapiens; identical to SEQ ID NO: 295528
  chr22:45064286-45064675
  hyper

SEQ ID NO: 375352 - DNA, 147 bp, Homo sapiens; identical to SEQ ID NO: 352628
  chr22:45064918-45065065
  hyper

SEQ ID NO: 375353 - DNA, 553 bp, Homo sapiens; identical to SEQ ID NO: 345662
  chr22:45097777-45098330
  hyper

SEQ ID NO: 375354 - DNA, 470 bp, Homo sapiens; identical to SEQ ID NO: 206166
  chr22:45098381-45098851
  hyper

SEQ ID NO: 375355 - DNA, 97 bp, Homo sapiens; identical to SEQ ID NO: 345664
  chr22:45098900-45098997
  hyper

SEQ ID NO: 375356 - DNA, 444 bp, Homo sapiens; identical to SEQ ID NO: 352632
  chr22:45148213-45148657
  hyper

SEQ ID NO: 375357 - DNA, 155 bp, Homo sapiens; identical to SEQ ID NO: 352633
  chr22:45148870-45149025
  hyper

SEQ ID NO: 375358 - DNA, 289 bp, Homo sapiens; identical to SEQ ID NO: 295536
  chr22:45403189-45403478
  hyper

SEQ ID NO: 375359 - DNA, 197 bp, Homo sapiens; identical to SEQ ID NO: 206171
  chr22:45403714-45403911
  hyper

SEQ ID NO: 375360 - DNA, 176 bp, Homo sapiens; identical to SEQ ID NO: 295538
  chr22:45405768-45405944
  hyper

SEQ ID NO: 375361 - DNA, 178 bp, Homo sapiens; identical to SEQ ID NO: 362097
  chr22:45406385-45406563
  hyper

SEQ ID NO: 375362 - DNA, 112 bp, Homo sapiens; identical to SEQ ID NO: 295543
  chr22:45899073-45899185
  hyper

SEQ ID NO: 375363 - DNA, 236 bp, Homo sapiens; identical to SEQ ID NO: 206176
  chr22:46367124-46367360
  hyper

SEQ ID NO: 375364 - DNA, 120 bp, Homo sapiens; identical to SEQ ID NO: 295551
  chr22:46367867-46367987
  hyper

SEQ ID NO: 375365 - DNA, 1268 bp, Homo sapiens; identical to SEQ ID NO: 336672
  chr22:46933492-46934760
  hyper

SEQ ID NO: 375366 - DNA, 221 bp, Homo sapiens; identical to SEQ ID NO: 345667
  chr22:47199299-47199520
  hyper

SEQ ID NO: 375367 - DNA, 58 bp, Homo sapiens; identical to SEQ ID NO: 352639
  chr22:50170525-50170583
  hyper

SEQ ID NO: 375368 - DNA, 217 bp, Homo sapiens; identical to SEQ ID NO: 352640
  chr22:50453240-50453457
  hyper

SEQ ID NO: 375369 - DNA, 98 bp, Homo sapiens; identical to SEQ ID NO: 352641
  chr22:50453539-50453637
  hyper

SEQ ID NO: 375370 - DNA, 275 bp, Homo sapiens; identical to SEQ ID NO: 336680
  chr22:50690042-50690317
  hyper

SEQ ID NO: 375371 - DNA, 166 bp, Homo sapiens; identical to SEQ ID NO: 347735
  chr22:50982557-50982723
  hyper

SEQ ID NO: 375372 - DNA, 78 bp, Homo sapiens; identical to SEQ ID NO: 295599
  chr22:51042182-51042260
  hyper

SEQ ID NO: 375373 - DNA, 237 bp, Homo sapiens
  chr22:51112317-51112554
  hyper
ctggaggtccccgtggtccgacccccaggcctggggcgggggggggtccccgccatctcctccaggcccgaagctgggggtcggtggagtgggggggagaagccgccacctccggaaattaattgtttttctttccccttctcgccctaccttggtcttcgtgccccgacgcggcccccaccccagctccgggaccccttcctccgccgcacccgccccggtggtccgcggatgccc

SEQ ID NO: 375374 - DNA, 622 bp, Homo sapiens; identical to SEQ ID NO: 336684
  chrX:2815904-2816526
  hyper

SEQ ID NO: 375375 - DNA, 128 bp, Homo sapiens; identical to SEQ ID NO: 362108
  chrX:2846679-2846807
  hyper

SEQ ID NO: 375376 - DNA, 219 bp, Homo sapiens; identical to SEQ ID NO: 295607
  chrX:2846856-2847075
  hyper

SEQ ID NO: 375377 - DNA, 314 bp, Homo sapiens; identical to SEQ ID NO: 362110
  chrX:2847196-2847510
  hyper

SEQ ID NO: 375378 - DNA, 213 bp, Homo sapiens; identical to SEQ ID NO: 206203
  chrX:8699223-8699436
  hyper

SEQ ID NO: 375379 - DNA, 98 bp, Homo sapiens; identical to SEQ ID NO: 206204
  chrX:8699940-8700038
  hyper

SEQ ID NO: 375380 - DNA, 170 bp, Homo sapiens
  chrX:8700460-8700630
  hyper
ctgcccctcccaccttccccctccgtccaggtaaacgtcggtgtgagcaggtccaggcctgccaggaggggtgctcccttcagcaggagggaagaggcctcaggacccccaggggcgtcccacctgcctggggattgaccccgcgcccctaagtggcttgctttctcccc

SEQ ID NO: 375381 - DNA, 596 bp, Homo sapiens; identical to SEQ ID NO: 352644
  chrX:9432830-9433426
  hyper

SEQ ID NO: 375382 - DNA, 241 bp, Homo sapiens; identical to SEQ ID NO: 206206
  chrX:9433471-9433712
  hyper

SEQ ID NO: 375383 - DNA, 583 bp, Homo sapiens; identical to SEQ ID NO: 206207
  chrX:9433838-9434421
  hyper

SEQ ID NO: 375384 - DNA, 146 bp, Homo sapiens; identical to SEQ ID NO: 362116
  chrX:9753679-9753825
  hyper

SEQ ID NO: 375385 - DNA, 300 bp, Homo sapiens; identical to SEQ ID NO: 362117
  chrX:9753862-9754162
  hyper

SEQ ID NO: 375386 - DNA, 304 bp, Homo sapiens; identical to SEQ ID NO: 352647
  chrX:13706949-13707253
  hyper

SEQ ID NO: 375387 - DNA, 562 bp, Homo sapiens; identical to SEQ ID NO: 347739
  chrX:13707434-13707996
  hyper

SEQ ID NO: 375388 - DNA, 958 bp, Homo sapiens; identical to SEQ ID NO: 336691
  chrX:13752377-13753335
  hyper

SEQ ID NO: 375389 - DNA, 97 bp, Homo sapiens; identical to SEQ ID NO: 352650
  chrX:14048211-14048308
  hyper

SEQ ID NO: 375390 - DNA, 131 bp, Homo sapiens; identical to SEQ ID NO: 347740
  chrX:15511311-15511442
  hyper

SEQ ID NO: 375391 - DNA, 140 bp, Homo sapiens; identical to SEQ ID NO: 347741
  chrX:15511544-15511684
  hyper

SEQ ID NO: 375392 - DNA, 116 bp, Homo sapiens; identical to SEQ ID NO: 352653
  chrX:15755988-15756104
  hyper

SEQ ID NO: 375393 - DNA, 300 bp, Homo sapiens; identical to SEQ ID NO: 352654
  chrX:15756366-15756666
  hyper

SEQ ID NO: 375394 - DNA, 224 bp, Homo sapiens; identical to SEQ ID NO: 206224
  chrX:16730628-16730852
  hyper

SEQ ID NO: 375395 - DNA, 35 bp, Homo sapiens; identical to SEQ ID NO: 345669
  chrX:16730902-16730937
  hyper

SEQ ID NO: 375396 - DNA, 219 bp, Homo sapiens
  chrX:16805209-16805428
  hyper
cgcagtaagataaccgcgcgggagccggggtgtgcttggccccccttcccccgcccccctgcgctccccgccactgcgcgggcgggcaggcgagcgggtgagtgtcgcagggccggtgcgagcgggacgctcggcccccgggacctagaccccggggctccgagggcttggctgcacgtggggccggggatggatggggaggcgatgctggaggacctc

SEQ ID NO: 375397 - DNA, 327 bp, Homo sapiens; identical to SEQ ID NO: 206226
  chrX:16888225-16888552
  hyper

SEQ ID NO: 375398 - DNA, 187 bp, Homo sapiens; identical to SEQ ID NO: 336699
  chrX:23801086-23801273
  hyper

SEQ ID NO: 375399 - DNA, 362 bp, Homo sapiens; identical to SEQ ID NO: 362130
  chrX:39680202-39680564
  hyper

SEQ ID NO: 375400 - DNA, 172 bp, Homo sapiens; identical to SEQ ID NO: 362131
  chrX:39680630-39680802
  hyper

SEQ ID NO: 375401 - DNA, 99 bp, Homo sapiens; identical to SEQ ID NO: 362132
  chrX:39871661-39871760
  hyper

SEQ ID NO: 375402 - DNA, 187 bp, Homo sapiens; identical to SEQ ID NO: 362133
  chrX:39871778-39871965
  hyper

SEQ ID NO: 375403 - DNA, 507 bp, Homo sapiens; identical to SEQ ID NO: 336702
  chrX:39873113-39873620
  hyper

SEQ ID NO: 375404 - DNA, 793 bp, Homo sapiens; identical to SEQ ID NO: 336703
  chrX:39873680-39874473
  hyper

SEQ ID NO: 375405 - DNA, 223 bp, Homo sapiens; identical to SEQ ID NO: 336704
  chrX:39921413-39921636
  hyper

SEQ ID NO: 375406 - DNA, 301 bp, Homo sapiens; identical to SEQ ID NO: 336705
  chrX:39922006-39922307
  hyper

SEQ ID NO: 375407 - DNA, 863 bp, Homo sapiens; identical to SEQ ID NO: 336706
  chrX:39931611-39932474
  hyper

SEQ ID NO: 375408 - DNA, 892 bp, Homo sapiens; identical to SEQ ID NO: 336707
  chrX:39933533-39934425
  hyper

SEQ ID NO: 375409 - DNA, 928 bp, Homo sapiens; identical to SEQ ID NO: 352660
  chrX:39953710-39954638
  hyper

SEQ ID NO: 375410 - DNA, 1938 bp, Homo sapiens; identical to SEQ ID NO: 352661
  chrX:39954918-39956856
  hyper

SEQ ID NO: 375411 - DNA, 878 bp, Homo sapiens; identical to SEQ ID NO: 295679
  chrX:39957026-39957904
  hyper

SEQ ID NO: 375412 - DNA, 514 bp, Homo sapiens; identical to SEQ ID NO: 362143
  chrX:39958064-39958578
  hyper

SEQ ID NO: 375413 - DNA, 633 bp, Homo sapiens; identical to SEQ ID NO: 347744
  chrX:39963967-39964600
  hyper

SEQ ID NO: 375414 - DNA, 285 bp, Homo sapiens; identical to SEQ ID NO: 347745
  chrX:39964630-39964915
  hyper

SEQ ID NO: 375415 - DNA, 1317 bp, Homo sapiens; identical to SEQ ID NO: 347746
  chrX:39965255-39966572
  hyper

SEQ ID NO: 375416 - DNA, 621 bp, Homo sapiens; identical to SEQ ID NO: 345670
  chrX:39968299-39968920
  hyper

SEQ ID NO: 375417 - DNA, 247 bp, Homo sapiens; identical to SEQ ID NO: 345671
  chrX:39968950-39969197
  hyper

SEQ ID NO: 375418 - DNA, 95 bp, Homo sapiens; identical to SEQ ID NO: 206251
  chrX:40005424-40005519
  hyper

SEQ ID NO: 375419 - DNA, 230 bp, Homo sapiens; identical to SEQ ID NO: 362150
  chrX:40005842-40006072
  hyper

SEQ ID NO: 375420 - DNA, 2388 bp, Homo sapiens; identical to SEQ ID NO: 362151
  chrX:40012149-40014537
  hyper

SEQ ID NO: 375421 - DNA, 621 bp, Homo sapiens; identical to SEQ ID NO: 352672
  chrX:40014669-40015290
  hyper

SEQ ID NO: 375422 - DNA, 144 bp, Homo sapiens; identical to SEQ ID NO: 352673
  chrX:40017447-40017591
  hyper

SEQ ID NO: 375423 - DNA, 32 bp, Homo sapiens; identical to SEQ ID NO: 352674
  chrX:40017968-40018000
  hyper

SEQ ID NO: 375424 - DNA, 226 bp, Homo sapiens; identical to SEQ ID NO: 352675
  chrX:40030835-40031061
  hyper

SEQ ID NO: 375425 - DNA, 215 bp, Homo sapiens; identical to SEQ ID NO: 206256
  chrX:40031175-40031390
  hyper

SEQ ID NO: 375426 - DNA, 662 bp, Homo sapiens; identical to SEQ ID NO: 352677
  chrX:40031434-40032096
  hyper

SEQ ID NO: 375427 - DNA, 281 bp, Homo sapiens; identical to SEQ ID NO: 336717
  chrX:40033593-40033874
  hyper

SEQ ID NO: 375428 - DNA, 186 bp, Homo sapiens; identical to SEQ ID NO: 352678
  chrX:40034239-40034425
  hyper

SEQ ID NO: 375429 - DNA, 667 bp, Homo sapiens; identical to SEQ ID NO: 295697
  chrX:40035057-40035724
  hyper

SEQ ID NO: 375430 - DNA, 721 bp, Homo sapiens; identical to SEQ ID NO: 347751
  chrX:40035852-40036573
  hyper

SEQ ID NO: 375431 - DNA, 60 bp, Homo sapiens; identical to SEQ ID NO: 362162
  chrX:40126403-40126463
  hyper

SEQ ID NO: 375432 - DNA, 205 bp, Homo sapiens; identical to SEQ ID NO: 336720
  chrX:40506434-40506639
  hyper

SEQ ID NO: 375433 - DNA, 203 bp, Homo sapiens; identical to SEQ ID NO: 336721
  chrX:40595088-40595291
  hyper

SEQ ID NO: 375434 - DNA, 264 bp, Homo sapiens; identical to SEQ ID NO: 336722
  chrX:41112874-41113138
  hyper

SEQ ID NO: 375435 - DNA, 75 bp, Homo sapiens; identical to SEQ ID NO: 352683
  chrX:68758240-68758315
  hyper

SEQ ID NO: 375436 - DNA, 562 bp, Homo sapiens; identical to SEQ ID NO: 362167
  chrX:71525281-71525843
  hyper

SEQ ID NO: 375437 - DNA, 885 bp, Homo sapiens; identical to SEQ ID NO: 295715
  chrX:71525998-71526883
  hyper

SEQ ID NO: 375438 - DNA, 249 bp, Homo sapiens; identical to SEQ ID NO: 362169
  chrX:71526917-71527166
  hyper

SEQ ID NO: 375439 - DNA, 244 bp, Homo sapiens; identical to SEQ ID NO: 352686
  chrX:95940048-95940292
  hyper

SEQ ID NO: 375440 - DNA, 393 bp, Homo sapiens; identical to SEQ ID NO: 336727
  chrX:102862914-102863307
  hyper

SEQ ID NO: 375441 - DNA, 83 bp, Homo sapiens; identical to SEQ ID NO: 352688
  chrX:110924337-110924420
  hyper

SEQ ID NO: 375442 - DNA, 157 bp, Homo sapiens; identical to SEQ ID NO: 352689
  chrX:110924466-110924623
  hyper

SEQ ID NO: 375443 - DNA, 84 bp, Homo sapiens; identical to SEQ ID NO: 362174
  chrX:123094093-123094177
  hyper

SEQ ID NO: 375444 - DNA, 87 bp, Homo sapiens; identical to SEQ ID NO: 362175
  chrX:123094335-123094422
  hyper

SEQ ID NO: 375445 - DNA, 198 bp, Homo sapiens; identical to SEQ ID NO: 336730
  chrX:123094505-123094703
  hyper

SEQ ID NO: 375446 - DNA, 856 bp, Homo sapiens; identical to SEQ ID NO: 336731
  chrX:129146935-129147791
  hyper

SEQ ID NO: 375447 - DNA, 116 bp, Homo sapiens; identical to SEQ ID NO: 336732
  chrX:129171389-129171505
  hyper

SEQ ID NO: 375448 - DNA, 158 bp, Homo sapiens
  chrX:133507338-133507496
  hyper
cgtaagggcgctccgcgagcccgtctctcctcgaatgaaaggaaacaacctccggcgacagagccccgctctcaggcactgctggagaaccgagaccgacttctttctctttaccctcattggcgcttctctcctgcagtccgcctctgggccctgcc

SEQ ID NO: 375449 - DNA, 89 bp, Homo sapiens; identical to SEQ ID NO: 345674
  chrY:2655227-2655316
  hyper

SEQ ID NO: 375450 - DNA, 596 bp, Homo sapiens; identical to SEQ ID NO: 345675
  chrY:2655346-2655942
  hyper

SEQ ID NO: 375451 - DNA, 51 bp, Homo sapiens; identical to SEQ ID NO: 347756
  chrY:4869596-4869647
  hyper

SEQ ID NO: 375452 - DNA, 49 bp, Homo sapiens; identical to SEQ ID NO: 347757
  chrY:4869714-4869763
  hyper

SEQ ID NO: 375453 - DNA, 246 bp, Homo sapiens; identical to SEQ ID NO: 345676
  chrY:7140850-7141096
  hyper

SEQ ID NO: 375454 - DNA, 237 bp, Homo sapiens; identical to SEQ ID NO: 336737
  chrY:14532909-14533146
  hyper

SEQ ID NO: 375455 - DNA, 240 bp, Homo sapiens; identical to SEQ ID NO: 347759
  chrY:14533316-14533556
  hyper

SEQ ID NO: 375456 - DNA, 41 bp, Homo sapiens; identical to SEQ ID NO: 347760
  chrY:14533613-14533654
  hyper

SEQ ID NO: 375457 - DNA, 218 bp, Homo sapiens; identical to SEQ ID NO: 352699
  chrY:15863192-15863410
  hyper

SEQ ID NO: 375458 - DNA, 461 bp, Homo sapiens; identical to SEQ ID NO: 345677
  chrY:15863654-15864115
  hyper

SEQ ID NO: 375459 - DNA, 73 bp, Homo sapiens; identical to SEQ ID NO: 295805
  chrY:16635744-16635817
  hyper

SEQ ID NO: 375460 - DNA, 1082 bp, Homo sapiens; identical to SEQ ID NO: 345679
  chrY:16636060-16637142
  hyper

SEQ ID NO: 375461 - DNA, 584 bp, Homo sapiens; identical to SEQ ID NO: 336742
  AC211344.3_7702-13588:3943-4527
  hyper

SEQ ID NO: 375462 - DNA, 59 bp, Homo sapiens; identical to SEQ ID NO: 362191
  AC241851.2_88-34049:15074-15133
  hyper

SEQ ID NO: 375463 - DNA, 43 bp, Homo sapiens; identical to SEQ ID NO: 362192
  AC241851.2_88-34049:15553-15596
  hyper

SEQ ID NO: 375464 - DNA, 89 bp, Homo sapiens; identical to SEQ ID NO: 362193
  AC241851.2_88-34049:15853-15942
  hyper

SEQ ID NO: 375465 - DNA, 111 bp, Homo sapiens; identical to SEQ ID NO: 336746
  JH636052.4:789300-789411
  hyper

SEQ ID NO: 375466 - DNA, 279 bp, Homo sapiens; identical to SEQ ID NO: 295817
  JH636052.4:1361829-1362108
  hyper

SEQ ID NO: 375467 - DNA, 60 bp, Homo sapiens; identical to SEQ ID NO: 295818
  JH636052.4:1362132-1362192
  hyper

SEQ ID NO: 375468 - DNA, 523 bp, Homo sapiens; identical to SEQ ID NO: 336748
  chr1:896874-897397
  hypo

SEQ ID NO: 375469 - DNA, 248 bp, Homo sapiens; identical to SEQ ID NO: 336749
  chr1:897754-898002
  hypo

SEQ ID NO: 375470 - DNA, 409 bp, Homo sapiens; identical to SEQ ID NO: 352705
  chr1:898245-898654
  hypo

SEQ ID NO: 375471 - DNA, 38 bp, Homo sapiens; identical to SEQ ID NO: 206360
  chr1:898690-898728
  hypo

SEQ ID NO: 375472 - DNA, 88 bp, Homo sapiens; identical to SEQ ID NO: 352707
  chr1:898776-898864
  hypo

SEQ ID NO: 375473 - DNA, 40 bp, Homo sapiens
  chr1:913463-913503
  hypo
cgcttcccccgcaaccccgggaaccacctgccccgcacac

SEQ ID NO: 375474 - DNA, 372 bp, Homo sapiens; identical to SEQ ID NO: 336753
  chr1:1024267-1024639
  hypo

SEQ ID NO: 375475 - DNA, 514 bp, Homo sapiens; identical to SEQ ID NO: 352708
  chr1:1047017-1047531
  hypo

SEQ ID NO: 375476 - DNA, 584 bp, Homo sapiens; identical to SEQ ID NO: 352709
  chr1:1047619-1048203
  hypo

SEQ ID NO: 375477 - DNA, 489 bp, Homo sapiens; identical to SEQ ID NO: 336756
  chr1:1096415-1096904
  hypo

SEQ ID NO: 375478 - DNA, 360 bp, Homo sapiens; identical to SEQ ID NO: 336758
  chr1:1152902-1153262
  hypo

SEQ ID NO: 375479 - DNA, 559 bp, Homo sapiens; identical to SEQ ID NO: 362203
  chr1:1160631-1161190
  hypo

SEQ ID NO: 375480 - DNA, 75 bp, Homo sapiens; identical to SEQ ID NO: 345681
  chr1:1168275-1168350
  hypo

SEQ ID NO: 375481 - DNA, 462 bp, Homo sapiens; identical to SEQ ID NO: 345682
  chr1:1168984-1169446
  hypo

SEQ ID NO: 375482 - DNA, 190 bp, Homo sapiens; identical to SEQ ID NO: 368954
  chr1:1181916-1182106
  hypo

SEQ ID NO: 375483 - DNA, 54 bp, Homo sapiens; identical to SEQ ID NO: 368955
  chr1:1182227-1182281
  hypo

SEQ ID NO: 375484 - DNA, 367 bp, Homo sapiens; identical to SEQ ID NO: 336762
  chr1:1194390-1194757
  hypo

SEQ ID NO: 375485 - DNA, 189 bp, Homo sapiens; identical to SEQ ID NO: 336763
  chr1:1200473-1200662
  hypo

SEQ ID NO: 375486 - DNA, 32 bp, Homo sapiens; identical to SEQ ID NO: 336764
  chr1:1206802-1206834
  hypo

SEQ ID NO: 375487 - DNA, 394 bp, Homo sapiens; identical to SEQ ID NO: 362209
  chr1:1234784-1235178
  hypo

SEQ ID NO: 375488 - DNA, 452 bp, Homo sapiens
  chr1:1239027-1239479
  hypo
cggctcccctctccacggcctgttgccccctctttctcagcccatgtggggctcatggacacggctcccccctccacggcctgttgccccctcccctttctcagccccagccccagccacaccaaggctcagcccacacagcagctgtccccgtgtcaccagcccagcagaggggacgggcagccaccgtgggtcggggactcaccacagcccagcccctcccagatgggacgagactcagggccagccacatgtgtgcatgtgacatgtgcaccctggaacacacatgctaagacacagggaccaggacctggagcaccacacgcatgctccacatatggggggtgtaagtggcttagtaaggcctggagggcgagtctggccatgtggccatcccaagcttggccgggcacagggcgctccaggcccgcccttcaccttgtccagtttgg

SEQ ID NO: 375489 - DNA, 84 bp, Homo sapiens
  chr1:1239667-1239751
  hypo
ggggcaggactgggaccaggttcagtgcacttccccccgcccccccaaccccaggcaggcagaggcagccgctgctgtgccctc

SEQ ID NO: 375490 - DNA, 269 bp, Homo sapiens; identical to SEQ ID NO: 336767
  chr1:1246145-1246414
  hypo

SEQ ID NO: 375491 - DNA, 607 bp, Homo sapiens; identical to SEQ ID NO: 336768
  chr1:1247740-1248347
  hypo

SEQ ID NO: 375492 - DNA, 115 bp, Homo sapiens; identical to SEQ ID NO: 362212
  chr1:1253130-1253245
  hypo

SEQ ID NO: 375493 - DNA, 126 bp, Homo sapiens; identical to SEQ ID NO: 362213
  chr1:1271745-1271871
  hypo

SEQ ID NO: 375494 - DNA, 369 bp, Homo sapiens; identical to SEQ ID NO: 336771
  chr1:1354536-1354905
  hypo

SEQ ID NO: 375495 - DNA, 183 bp, Homo sapiens; identical to SEQ ID NO: 336772
  chr1:1491949-1492132
  hypo

SEQ ID NO: 375496 - DNA, 137 bp, Homo sapiens; identical to SEQ ID NO: 336773
  chr1:1492373-1492510
  hypo

SEQ ID NO: 375497 - DNA, 109 bp, Homo sapiens; identical to SEQ ID NO: 352716
  chr1:1502406-1502515
  hypo

SEQ ID NO: 375498 - DNA, 130 bp, Homo sapiens; identical to SEQ ID NO: 352717
  chr1:1502555-1502685
  hypo

SEQ ID NO: 375499 - DNA, 575 bp, Homo sapiens; identical to SEQ ID NO: 345683
  chr1:1562211-1562786
  hypo

SEQ ID NO: 375500 - DNA, 431 bp, Homo sapiens; identical to SEQ ID NO: 344930
  chr1:1713574-1714005
  hypo

SEQ ID NO: 375501 - DNA, 232 bp, Homo sapiens; identical to SEQ ID NO: 344931
  chr1:1714067-1714299
  hypo

SEQ ID NO: 375502 - DNA, 80 bp, Homo sapiens; identical to SEQ ID NO: 336777
  chr1:1717283-1717363
  hypo

SEQ ID NO: 375503 - DNA, 139 bp, Homo sapiens; identical to SEQ ID NO: 352722
  chr1:1910184-1910323
  hypo

SEQ ID NO: 375504 - DNA, 48 bp, Homo sapiens; identical to SEQ ID NO: 295971
  chr1:1910367-1910415
  hypo

SEQ ID NO: 375505 - DNA, 71 bp, Homo sapiens; identical to SEQ ID NO: 362224
  chr1:1974777-1974848
  hypo

SEQ ID NO: 375506 - DNA, 162 bp, Homo sapiens; identical to SEQ ID NO: 362225
  chr1:1974925-1975087
  hypo

SEQ ID NO: 375507 - DNA, 633 bp, Homo sapiens; identical to SEQ ID NO: 368961
  chr1:1981183-1981816
  hypo

SEQ ID NO: 375508 - DNA, 494 bp, Homo sapiens; identical to SEQ ID NO: 277829
  chr1:1981817-1982311
  hypo

SEQ ID NO: 375509 - DNA, 198 bp, Homo sapiens; identical to SEQ ID NO: 368963
  chr1:1982427-1982625
  hypo

SEQ ID NO: 375510 - DNA, 119 bp, Homo sapiens; identical to SEQ ID NO: 362226
  chr1:1986115-1986234
  hypo

SEQ ID NO: 375511 - DNA, 413 bp, Homo sapiens; identical to SEQ ID NO: 206424
  chr1:2013582-2013995
  hypo

SEQ ID NO: 375512 - DNA, 174 bp, Homo sapiens
  chr1:2014025-2014199
  hypo
aaatgctcccaccacggccgatttcaggctgccgaagtggaggggttcagtgaaggtggagttgggcaagggcgtacacggtcggcttctgagagttggtccccccgcccaaccctcccctggagatgggatgtcaggagacctggttccatttgtttttttgcctgagcgtcc

SEQ ID NO: 375513 - DNA, 549 bp, Homo sapiens; identical to SEQ ID NO: 362227
  chr1:2025644-2026193
  hypo

SEQ ID NO: 375514 - DNA, 72 bp, Homo sapiens; identical to SEQ ID NO: 336784
  chr1:2103120-2103192
  hypo

SEQ ID NO: 375515 - DNA, 102 bp, Homo sapiens; identical to SEQ ID NO: 352724
  chr1:2141684-2141786
  hypo

SEQ ID NO: 375516 - DNA, 221 bp, Homo sapiens; identical to SEQ ID NO: 336787
  chr1:2142332-2142553
  hypo

SEQ ID NO: 375517 - DNA, 56 bp, Homo sapiens
  chr1:2170983-2171039
  hypo
gacctgaatggagtcaggaagggtttcaacctggatggcccgcgtgccggggaccc

SEQ ID NO: 375518 - DNA, 574 bp, Homo sapiens; identical to SEQ ID NO: 336789
  chr1:2239631-2240205
  hypo

SEQ ID NO: 375519 - DNA, 476 bp, Homo sapiens; identical to SEQ ID NO: 362231
  chr1:2257929-2258405
  hypo

SEQ ID NO: 375520 - DNA, 83 bp, Homo sapiens; identical to SEQ ID NO: 362232
  chr1:2263423-2263506
  hypo

SEQ ID NO: 375521 - DNA, 156 bp, Homo sapiens
  chr1:2265957-2266113
  hypo
cggggctcccttgggggagcaggcctggttttgggctgcctgtcccaacacgacgagagggccctggctgtgtggccgtggagccggcaggaggcaggggaagtggccgctggtcacagatgtgtgccccgaagagacgacatcatttgaacactg

SEQ ID NO: 375522 - DNA, 168 bp, Homo sapiens
  chr1:2266194-2266362
  hypo
ccctttggctgggaggcccaggctgggagcagacgccgacccctccgttctctcaggtggaaaagaacgaaagccttctttctgctgaaataagacgttccaacatcaccctcagcgcggaggttgccacggttctggagcgaagtggaggtgccgccctgggcgttc

SEQ ID NO: 375523 - DNA, 226 bp, Homo sapiens; identical to SEQ ID NO: 362233
  chr1:2267752-2267978
  hypo

SEQ ID NO: 375524 - DNA, 254 bp, Homo sapiens; identical to SEQ ID NO: 206459
  chr1:2275835-2276089
  hypo

SEQ ID NO: 375525 - DNA, 821 bp, Homo sapiens; identical to SEQ ID NO: 352727
  chr1:2276200-2277021
  hypo

SEQ ID NO: 375526 - DNA, 490 bp, Homo sapiens; identical to SEQ ID NO: 352728
  chr1:2303837-2304327
  hypo

SEQ ID NO: 375527 - DNA, 63 bp, Homo sapiens; identical to SEQ ID NO: 352729
  chr1:2304481-2304544
  hypo

SEQ ID NO: 375528 - DNA, 93 bp, Homo sapiens; identical to SEQ ID NO: 336796
  chr1:2330473-2330566
  hypo

SEQ ID NO: 375529 - DNA, 47 bp, Homo sapiens; identical to SEQ ID NO: 345686
  chr1:2331316-2331363
  hypo

SEQ ID NO: 375530 - DNA, 183 bp, Homo sapiens; identical to SEQ ID NO: 345687
  chr1:2331437-2331620
  hypo

SEQ ID NO: 375531 - DNA, 35 bp, Homo sapiens; identical to SEQ ID NO: 336798
  chr1:2331916-2331951
  hypo

SEQ ID NO: 375532 - DNA, 78 bp, Homo sapiens
  chr1:2359894-2359972
  hypo
cgtggactgcatctgtcctgcatggggtcctgcgtctggctcgcccggtgccgtgctgtggggcccacgccaacggct

SEQ ID NO: 375533 - DNA, 44 bp, Homo sapiens
  chr1:2360320-2360364
  hypo
gcaccaccaggcttgggtgaggagggaggcctctggtcgagagc

SEQ ID NO: 375534 - DNA, 205 bp, Homo sapiens; identical to SEQ ID NO: 362242
  chr1:2377210-2377415
  hypo

SEQ ID NO: 375535 - DNA, 131 bp, Homo sapiens
  chr1:2437299-2437430
  hypo
gcccagaagacaccccaagaaaagacctggcctgtcctcagagggctgagctggacaggctcccagggtaggctgcaaagcctgctcctcaggacgcaggccctaaccccgggccacaggccccccaaccc

SEQ ID NO: 375536 - DNA, 443 bp, Homo sapiens; identical to SEQ ID NO: 344934
  chr1:2461988-2462431
  hypo

SEQ ID NO: 375537 - DNA, 55 bp, Homo sapiens; identical to SEQ ID NO: 352734
  chr1:2483785-2483840
  hypo

SEQ ID NO: 375538 - DNA, 74 bp, Homo sapiens; identical to SEQ ID NO: 352735
  chr1:2483873-2483947
  hypo

SEQ ID NO: 375539 - DNA, 255 bp, Homo sapiens; identical to SEQ ID NO: 336806
  chr1:2520320-2520575
  hypo

SEQ ID NO: 375540 - DNA, 37 bp, Homo sapiens; identical to SEQ ID NO: 296084
  chr1:2520987-2521024
  hypo

SEQ ID NO: 375541 - DNA, 39 bp, Homo sapiens; identical to SEQ ID NO: 352737
  chr1:2521063-2521102
  hypo

SEQ ID NO: 375542 - DNA, 87 bp, Homo sapiens
  chr1:2537671-2537758
  hypo
cggcgcggctcgtacgtagatgatgtgccggctggagttctggtcgtcgttccagatgaagaggtcgatgaggacgcgcctgttgaa

SEQ ID NO: 375543 - DNA, 177 bp, Homo sapiens; identical to SEQ ID NO: 362248
  chr1:2716559-2716736
  hypo

SEQ ID NO: 375544 - DNA, 39 bp, Homo sapiens; identical to SEQ ID NO: 362249
  chr1:2717239-2717278
  hypo

SEQ ID NO: 375545 - DNA, 215 bp, Homo sapiens; identical to SEQ ID NO: 336811
  chr1:2726383-2726598
  hypo

SEQ ID NO: 375546 - DNA, 83 bp, Homo sapiens
  chr1:2726958-2727041
  hypo
tccctcctgccagctagccgtccccatcgcccggactggggaacagtcctcctggggatgccgcactcctctccatcattctc

SEQ ID NO: 375547 - DNA, 43 bp, Homo sapiens; identical to SEQ ID NO: 352738
  chr1:2846750-2846793
  hypo

SEQ ID NO: 375548 - DNA, 547 bp, Homo sapiens; identical to SEQ ID NO: 352739
  chr1:2846823-2847370
  hypo

SEQ ID NO: 375549 - DNA, 449 bp, Homo sapiens; identical to SEQ ID NO: 352740
  chr1:2850546-2850995
  hypo

SEQ ID NO: 375550 - DNA, 32 bp, Homo sapiens; identical to SEQ ID NO: 352741
  chr1:2851025-2851057
  hypo

SEQ ID NO: 375551 - DNA, 528 bp, Homo sapiens; identical to SEQ ID NO: 362255
  chr1:2938633-2939161
  hypo

SEQ ID NO: 375552 - DNA, 169 bp, Homo sapiens; identical to SEQ ID NO: 362256
  chr1:2939191-2939360
  hypo

SEQ ID NO: 375553 - DNA, 88 bp, Homo sapiens
  chr1:2999275-2999363
  hypo
cgcagcaaggagaggtggggtgcgcttcatctcagctgccccagggctgagctcagctttgcccgctttgtgcggagtccaccgaggg

SEQ ID NO: 375554 - DNA, 32 bp, Homo sapiens; identical to SEQ ID NO: 352742
  chr1:2999791-2999823
  hypo

SEQ ID NO: 375555 - DNA, 83 bp, Homo sapiens; identical to SEQ ID NO: 352743
  chr1:2999864-2999947
  hypo

SEQ ID NO: 375556 - DNA, 584 bp, Homo sapiens; identical to SEQ ID NO: 336819
  chr1:3000551-3001135
  hypo

SEQ ID NO: 375557 - DNA, 107 bp, Homo sapiens; identical to SEQ ID NO: 362259
  chr1:3008438-3008545
  hypo

SEQ ID NO: 375558 - DNA, 68 bp, Homo sapiens; identical to SEQ ID NO: 362260
  chr1:3008575-3008643
  hypo

SEQ ID NO: 375559 - DNA, 252 bp, Homo sapiens; identical to SEQ ID NO: 362261
  chr1:3032644-3032896
  hypo

SEQ ID NO: 375560 - DNA, 177 bp, Homo sapiens; identical to SEQ ID NO: 362262
  chr1:3032979-3033156
  hypo

SEQ ID NO: 375561 - DNA, 125 bp, Homo sapiens
  chr1:3037182-3037307
  hypo
cggcagccccctgggagcgggaggatgcctgcccttgcgtctctgcgctggagcttctgacacctttcgcagtgaaaggcagggtggatagtcggtgaggagagggtctggaagcggtgggcctc

SEQ ID NO: 375562 - DNA, 145 bp, Homo sapiens; identical to SEQ ID NO: 336823
  chr1:3050813-3050958
  hypo

SEQ ID NO: 375563 - DNA, 303 bp, Homo sapiens; identical to SEQ ID NO: 345689
  chr1:3052594-3052897
  hypo

SEQ ID NO: 375564 - DNA, 40 bp, Homo sapiens; identical to SEQ ID NO: 345690
  chr1:3052927-3052967
  hypo

SEQ ID NO: 375565 - DNA, 119 bp, Homo sapiens; identical to SEQ ID NO: 347776
  chr1:3111118-3111237
  hypo

SEQ ID NO: 375566 - DNA, 326 bp, Homo sapiens; identical to SEQ ID NO: 347777
  chr1:3111463-3111789
  hypo

SEQ ID NO: 375567 - DNA, 683 bp, Homo sapiens; identical to SEQ ID NO: 362268
  chr1:3114432-3115115
  hypo

SEQ ID NO: 375568 - DNA, 128 bp, Homo sapiens; identical to SEQ ID NO: 336827
  chr1:3124802-3124930
  hypo

SEQ ID NO: 375569 - DNA, 188 bp, Homo sapiens; identical to SEQ ID NO: 352749
  chr1:3125905-3126093
  hypo

SEQ ID NO: 375570 - DNA, 187 bp, Homo sapiens; identical to SEQ ID NO: 336829
  chr1:3172404-3172591
  hypo

SEQ ID NO: 375571 - DNA, 427 bp, Homo sapiens
  chr1:3182342-3182769
  hypo
cgctctgtcctcaccgcccagaccctaggagcccccagaccctgcctcagtgggtcgtgcccaggtccttcgctctctatgatccctttacggtcgtgcagtgctccccagggctccgcactgctccccagggttccttggtgcgtgtctcataaagcccaggagggcgaggccaggcccagcccccaactcaagggccgccctccagcctagcgacgccacctggcccctctttccattaagtctccgtcgtcttgagtccatccagggcggtgtgcggccggtcgcttagtcagcaagaaccctgtgagctgcagtcatcataaatgcatatttaataactattttcttcctggggaaaatgtgctgcttcagaagttcagaaatgggcttcgctcttcagctggtaatgagaagttaataaaag

SEQ ID NO: 375572 - DNA, 84 bp, Homo sapiens; identical to SEQ ID NO: 206510
  chr1:3182799-3182883
  hypo

SEQ ID NO: 375573 - DNA, 99 bp, Homo sapiens; identical to SEQ ID NO: 206511
  chr1:3182917-3183016
  hypo

SEQ ID NO: 375574 - DNA, 109 bp, Homo sapiens
  chr1:3183106-3183215
  hypo
gagagggccccaggggcaggagccactccctggatctcagacccgcttgtctcgcaggcgggaggcacgggcctgcaccctccgccgctcccacgctccagcagaccac

SEQ ID NO: 375575 - DNA, 164 bp, Homo sapiens; identical to SEQ ID NO: 336831
  chr1:3193780-3193944
  hypo

SEQ ID NO: 375576 - DNA, 473 bp, Homo sapiens; identical to SEQ ID NO: 336832
  chr1:3195292-3195765
  hypo

SEQ ID NO: 375577 - DNA, 65 bp, Homo sapiens
  chr1:3213764-3213829
  hypo
acattaccagcatttctgtccatttcgggtgagacccgaagcagcgagaccctatccaggtcaac

SEQ ID NO: 375578 - DNA, 550 bp, Homo sapiens; identical to SEQ ID NO: 336834
  chr1:3228695-3229245
  hypo

SEQ ID NO: 375579 - DNA, 866 bp, Homo sapiens; identical to SEQ ID NO: 362274
  chr1:3321132-3321998
  hypo

SEQ ID NO: 375580 - DNA, 121 bp, Homo sapiens; identical to SEQ ID NO: 362275
  chr1:3322260-3322381
  hypo

SEQ ID NO: 375581 - DNA, 42 bp, Homo sapiens; identical to SEQ ID NO: 349148
  chr1:3325196-3325238
  hypo

SEQ ID NO: 375582 - DNA, 214 bp, Homo sapiens; identical to SEQ ID NO: 296175
  chr1:3328319-3328533
  hypo

SEQ ID NO: 375583 - DNA, 644 bp, Homo sapiens; identical to SEQ ID NO: 362278
  chr1:3328625-3329269
  hypo

SEQ ID NO: 375584 - DNA, 152 bp, Homo sapiens; identical to SEQ ID NO: 336839
  chr1:3331040-3331192
  hypo

SEQ ID NO: 375585 - DNA, 102 bp, Homo sapiens
  chr1:3342039-3342141
  hypo
cggggcacggggcaggggcgcgggctcccttccccccaccctctgtggcccggcctgccatgcagagccggggcctgcactgaggagcgcgtgtgccccttc

SEQ ID NO: 375586 - DNA, 484 bp, Homo sapiens
  chr1:3342321-3342805
  hypo
acgcggggtggggcagcccccagagcacccacacgggcaggccccacagagggggagggggaacagcaggggagtgggcgccgggcagggaagagggccacagactacccctcaggaagccaacaggcacccctcaaaccgtggtcattaaagagaacctcgtgctctccggtgtccctaagaaacctgcctccctaacagcaccccaggtgtaccccgttcgcggttggtttgccccacggagggaggggtccagcgagaggccgccccctgatgctcccgcccctccgcagtgagccagcaccccggggtcctcacgaaccacctggggaccagcgcgtcctctcccacctcagagtcggacaaccacgcacttttagacgagaaagaagactcttatttctcggaaatcagaaactttattgccaatagtgagatgaaccaagcatcaacgcgaacagagaaacggtaagaaaactatcgc

SEQ ID NO: 375587 - DNA, 238 bp, Homo sapiens; identical to SEQ ID NO: 362280
  chr1:3343487-3343725
  hypo

SEQ ID NO: 375588 - DNA, 330 bp, Homo sapiens
  chr1:3344504-3344834
  hypo
cgtgtcagacccatgagcgccacaggccaggccttacctacgccccacagccccgtccccaggcacaatcccctaagctgcagctcccagagtaaggccaggcgaggaacaagtgaggattcatcaatggcatccttgccggggtgggcccaggaccaggagcgtgtgcggaggctgaaccacctggaggacagcaaggcccccctaccccgagctagggtgcagcccggccgcactgcaggagacccaccaggaccccgagctagggtgcagcccggccgcactgcaggagacccaccaggaccccgagctagggtgcagcccggccgc

SEQ ID NO: 375589 - DNA, 226 bp, Homo sapiens; identical to SEQ ID NO: 362281
  chr1:3349863-3350089
  hypo

SEQ ID NO: 375590 - DNA, 249 bp, Homo sapiens; identical to SEQ ID NO: 296183
  chr1:3350158-3350407
  hypo

SEQ ID NO: 375591 - DNA, 271 bp, Homo sapiens; identical to SEQ ID NO: 362283
  chr1:3350462-3350733
  hypo

SEQ ID NO: 375592 - DNA, 561 bp, Homo sapiens; identical to SEQ ID NO: 336844
  chr1:3351144-3351705
  hypo

SEQ ID NO: 375593 - DNA, 168 bp, Homo sapiens; identical to SEQ ID NO: 336845
  chr1:3361098-3361266
  hypo

SEQ ID NO: 375594 - DNA, 87 bp, Homo sapiens; identical to SEQ ID NO: 336846
  chr1:3377848-3377935
  hypo

SEQ ID NO: 375595 - DNA, 353 bp, Homo sapiens; identical to SEQ ID NO: 336847
  chr1:3379762-3380115
  hypo

SEQ ID NO: 375596 - DNA, 337 bp, Homo sapiens; identical to SEQ ID NO: 336848
  chr1:3385485-3385822
  hypo

SEQ ID NO: 375597 - DNA, 390 bp, Homo sapiens; identical to SEQ ID NO: 336849
  chr1:3389586-3389976
  hypo

SEQ ID NO: 375598 - DNA, 68 bp, Homo sapiens; identical to SEQ ID NO: 362288
  chr1:3408704-3408772
  hypo

SEQ ID NO: 375599 - DNA, 238 bp, Homo sapiens; identical to SEQ ID NO: 336851
  chr1:3425542-3425780
  hypo

SEQ ID NO: 375600 - DNA, 617 bp, Homo sapiens; identical to SEQ ID NO: 336852
  chr1:3435632-3436249
  hypo

SEQ ID NO: 375601 - DNA, 415 bp, Homo sapiens; identical to SEQ ID NO: 336853
  chr1:3552676-3553091
  hypo

SEQ ID NO: 375602 - DNA, 207 bp, Homo sapiens; identical to SEQ ID NO: 336856
  chr1:3646542-3646749
  hypo

SEQ ID NO: 375603 - DNA, 38 bp, Homo sapiens; identical to SEQ ID NO: 352756
  chr1:3659512-3659550
  hypo

SEQ ID NO: 375604 - DNA, 178 bp, Homo sapiens; identical to SEQ ID NO: 346305
  chr1:3663338-3663516
  hypo

SEQ ID NO: 375605 - DNA, 101 bp, Homo sapiens; identical to SEQ ID NO: 346306
  chr1:3663983-3664084
  hypo

SEQ ID NO: 375606 - DNA, 204 bp, Homo sapiens; identical to SEQ ID NO: 206546
  chr1:3680100-3680304
  hypo

SEQ ID NO: 375607 - DNA, 129 bp, Homo sapiens; identical to SEQ ID NO: 352760
  chr1:3680359-3680488
  hypo

SEQ ID NO: 375608 - DNA, 125 bp, Homo sapiens; identical to SEQ ID NO: 336862
  chr1:3697578-3697703
  hypo

SEQ ID NO: 375609 - DNA, 173 bp, Homo sapiens; identical to SEQ ID NO: 362297
  chr1:3700211-3700384
  hypo

SEQ ID NO: 375610 - DNA, 608 bp, Homo sapiens; identical to SEQ ID NO: 296241
  chr1:3700414-3701022
  hypo

SEQ ID NO: 375611 - DNA, 36 bp, Homo sapiens; identical to SEQ ID NO: 362299
  chr1:3701052-3701088
  hypo

SEQ ID NO: 375612 - DNA, 307 bp, Homo sapiens; identical to SEQ ID NO: 336864
  chr1:3705404-3705711
  hypo

SEQ ID NO: 375613 - DNA, 214 bp, Homo sapiens; identical to SEQ ID NO: 336865
  chr1:4037053-4037267
  hypo

SEQ ID NO: 375614 - DNA, 339 bp, Homo sapiens; identical to SEQ ID NO: 336867
  chr1:4673912-4674251
  hypo

SEQ ID NO: 375615 - DNA, 344 bp, Homo sapiens; identical to SEQ ID NO: 330664
  chr1:5772056-5772400
  hypo

SEQ ID NO: 375616 - DNA, 707 bp, Homo sapiens; identical to SEQ ID NO: 352763
  chr1:5918390-5919097
  hypo

SEQ ID NO: 375617 - DNA, 141 bp, Homo sapiens; identical to SEQ ID NO: 362303
  chr1:5950824-5950965
  hypo

SEQ ID NO: 375618 - DNA, 121 bp, Homo sapiens; identical to SEQ ID NO: 352764
  chr1:6046277-6046398
  hypo

SEQ ID NO: 375619 - DNA, 896 bp, Homo sapiens; identical to SEQ ID NO: 330665
  chr1:6052426-6053322
  hypo

SEQ ID NO: 375620 - DNA, 56 bp, Homo sapiens; identical to SEQ ID NO: 352765
  chr1:6131658-6131714
  hypo

SEQ ID NO: 375621 - DNA, 71 bp, Homo sapiens; identical to SEQ ID NO: 362307
  chr1:6148944-6149015
  hypo

SEQ ID NO: 375622 - DNA, 595 bp, Homo sapiens; identical to SEQ ID NO: 362308
  chr1:6149045-6149640
  hypo

SEQ ID NO: 375623 - DNA, 67 bp, Homo sapiens; identical to SEQ ID NO: 347782
  chr1:6171947-6172014
  hypo

SEQ ID NO: 375624 - DNA, 100 bp, Homo sapiens; identical to SEQ ID NO: 352767
  chr1:6281676-6281776
  hypo

SEQ ID NO: 375625 - DNA, 75 bp, Homo sapiens; identical to SEQ ID NO: 352768
  chr1:6281825-6281900
  hypo

SEQ ID NO: 375626 - DNA, 32 bp, Homo sapiens; identical to SEQ ID NO: 352769
  chr1:6284796-6284828
  hypo

SEQ ID NO: 375627 - DNA, 280 bp, Homo sapiens; identical to SEQ ID NO: 352770
  chr1:6284858-6285138
  hypo

SEQ ID NO: 375628 - DNA, 501 bp, Homo sapiens; identical to SEQ ID NO: 352771
  chr1:6331654-6332155
  hypo

SEQ ID NO: 375629 - DNA, 362 bp, Homo sapiens; identical to SEQ ID NO: 336882
  chr1:6333795-6334157
  hypo

SEQ ID NO: 375630 - DNA, 304 bp, Homo sapiens; identical to SEQ ID NO: 336883
  chr1:6345513-6345817
  hypo

SEQ ID NO: 375631 - DNA, 127 bp, Homo sapiens
  chr1:6347184-6347311
  hypo
cggcacaagtgcacggggaccaggtgcagtcactccgcagtccagggcaggcctcaaaggtggctgtagccgcatgtaatcaatgagggtcaagcttcatcactcacactcgaggccctgacggggc

SEQ ID NO: 375632 - DNA, 56 bp, Homo sapiens; identical to SEQ ID NO: 362316
  chr1:6391374-6391430
  hypo

SEQ ID NO: 375633 - DNA, 94 bp, Homo sapiens; identical to SEQ ID NO: 362317
  chr1:6391541-6391635
  hypo

SEQ ID NO: 375634 - DNA, 116 bp, Homo sapiens; identical to SEQ ID NO: 336887
  chr1:6623403-6623519
  hypo

SEQ ID NO: 375635 - DNA, 35 bp, Homo sapiens; identical to SEQ ID NO: 336888
  chr1:6707164-6707199
  hypo

SEQ ID NO: 375636 - DNA, 318 bp, Homo sapiens; identical to SEQ ID NO: 336889
  chr1:6711983-6712301
  hypo

SEQ ID NO: 375637 - DNA, 106 bp, Homo sapiens; identical to SEQ ID NO: 345693
  chr1:6713808-6713914
  hypo

SEQ ID NO: 375638 - DNA, 307 bp, Homo sapiens; identical to SEQ ID NO: 206600
  chr1:6714041-6714348
  hypo

SEQ ID NO: 375639 - DNA, 105 bp, Homo sapiens; identical to SEQ ID NO: 336891
  chr1:6738127-6738232
  hypo

SEQ ID NO: 375640 - DNA, 115 bp, Homo sapiens; identical to SEQ ID NO: 352777
  chr1:6750362-6750477
  hypo

SEQ ID NO: 375641 - DNA, 1601 bp, Homo sapiens; identical to SEQ ID NO: 336893
  chr1:7723202-7724803
  hypo

SEQ ID NO: 375642 - DNA, 199 bp, Homo sapiens; identical to SEQ ID NO: 349163
  chr1:7764988-7765187
  hypo

SEQ ID NO: 375643 - DNA, 155 bp, Homo sapiens; identical to SEQ ID NO: 336895
  chr1:7842602-7842757
  hypo

SEQ ID NO: 375644 - DNA, 108 bp, Homo sapiens; identical to SEQ ID NO: 330679
  chr1:7843510-7843618
  hypo

SEQ ID NO: 375645 - DNA, 179 bp, Homo sapiens; identical to SEQ ID NO: 349165
  chr1:7844224-7844403
  hypo

SEQ ID NO: 375646 - DNA, 377 bp, Homo sapiens; identical to SEQ ID NO: 277921
  chr1:8085715-8086092
  hypo

SEQ ID NO: 375647 - DNA, 132 bp, Homo sapiens; identical to SEQ ID NO: 362330
  chr1:9402333-9402465
  hypo

SEQ ID NO: 375648 - DNA, 177 bp, Homo sapiens; identical to SEQ ID NO: 362331
  chr1:9402616-9402793
  hypo

SEQ ID NO: 375649 - DNA, 39 bp, Homo sapiens; identical to SEQ ID NO: 336900
  chr1:9654089-9654128
  hypo

SEQ ID NO: 375650 - DNA, 425 bp, Homo sapiens; identical to SEQ ID NO: 344939
  chr1:9711649-9712074
  hypo

SEQ ID NO: 375651 - DNA, 89 bp, Homo sapiens; identical to SEQ ID NO: 336902
  chr1:9725455-9725544
  hypo

SEQ ID NO: 375652 - DNA, 70 bp, Homo sapiens; identical to SEQ ID NO: 352784
  chr1:9795925-9795995
  hypo

SEQ ID NO: 375653 - DNA, 70 bp, Homo sapiens; identical to SEQ ID NO: 206650
  chr1:10091914-10091984
  hypo

SEQ ID NO: 375654 - DNA, 367 bp, Homo sapiens; identical to SEQ ID NO: 336905
  chr1:10495109-10495476
  hypo

SEQ ID NO: 375655 - DNA, 81 bp, Homo sapiens; identical to SEQ ID NO: 336906
  chr1:10591549-10591630
  hypo

SEQ ID NO: 375656 - DNA, 350 bp, Homo sapiens; identical to SEQ ID NO: 336907
  chr1:10676484-10676834
  hypo

SEQ ID NO: 375657 - DNA, 378 bp, Homo sapiens; identical to SEQ ID NO: 336908
  chr1:10680904-10681282
  hypo

SEQ ID NO: 375658 - DNA, 71 bp, Homo sapiens; identical to SEQ ID NO: 336909
  chr1:10692421-10692492
  hypo

SEQ ID NO: 375659 - DNA, 182 bp, Homo sapiens; identical to SEQ ID NO: 352788
  chr1:10692798-10692980
  hypo

SEQ ID NO: 375660 - DNA, 411 bp, Homo sapiens
  chr1:10707634-10708045
  hypo
cgccaccatcggcccacgcgggctggcctgctctgggacaggcagtgaggtaggagcagcagcatctttggctagaaggacatcacccgatggccatgccccagagaggctggggacagcagcaccatccgcagtgaggaacagggcctcctagcgcccttgctagcacctactcccgagacgcgaggggaacgcgggactcccggctcatcgagggactcacttctcctggaactggaggaatccgggtttgacctggggcttggcgttctctagagaagtcgttgccaagggcgaggcgggcaggtgaggcactgacgctgggatctgaggcatctggggtatggtggaagccagctgcttccaggcgagcagggtgggggtggagggcacggaggccgggctgggagc

SEQ ID NO: 375661 - DNA, 138 bp, Homo sapiens
  chr1:10713961-10714099
  hypo
cgtgctccgtgtccttggcgcccagcagcgagggcggcagccccagcgcgcccgaggagcggatgtgccggcgctcatgcttgcgcttgtgagaggtcatctggctggtggaggtgaaggtgaagccgcagccggcgc

SEQ ID NO: 375662 - DNA, 1313 bp, Homo sapiens; identical to SEQ ID NO: 336913
  chr1:10719300-10720613
  hypo

SEQ ID NO: 375663 - DNA, 386 bp, Homo sapiens; identical to SEQ ID NO: 349172
  chr1:10854661-10855047
  hypo

SEQ ID NO: 375664 - DNA, 259 bp, Homo sapiens; identical to SEQ ID NO: 336915
  chr1:11020521-11020780
  hypo

SEQ ID NO: 375665 - DNA, 119 bp, Homo sapiens; identical to SEQ ID NO: 352792
  chr1:11091195-11091314
  hypo

SEQ ID NO: 375666 - DNA, 162 bp, Homo sapiens; identical to SEQ ID NO: 362344
  chr1:11131899-11132061
  hypo

SEQ ID NO: 375667 - DNA, 39 bp, Homo sapiens
  chr1:11139801-11139840
  hypo
aaaaggtgcatttcgttgatctgctgccgcacaaggggc

SEQ ID NO: 375668 - DNA, 247 bp, Homo sapiens; identical to SEQ ID NO: 352793
  chr1:11141000-11141247
  hypo

SEQ ID NO: 375669 - DNA, 52 bp, Homo sapiens; identical to SEQ ID NO: 197314
  chr1:11538821-11538873
  hypo

SEQ ID NO: 375670 - DNA, 102 bp, Homo sapiens; identical to SEQ ID NO: 352795
  chr1:11596382-11596484
  hypo

SEQ ID NO: 375671 - DNA, 367 bp, Homo sapiens; identical to SEQ ID NO: 352796
  chr1:11596583-11596950
  hypo

SEQ ID NO: 375672 - DNA, 217 bp, Homo sapiens; identical to SEQ ID NO: 336922
  chr1:11856166-11856383
  hypo

SEQ ID NO: 375673 - DNA, 112 bp, Homo sapiens; identical to SEQ ID NO: 336923
  chr1:11982519-11982631
  hypo

SEQ ID NO: 375674 - DNA, 145 bp, Homo sapiens
  chr1:12030713-12030858
  hypo
cggtcacctccaggacaaccgcatccagggtggctacgagaacgtgccgactattgacatccacatgaaccagatcggctttgagcgggagtggcacaaattcctgctggagtacattgcgcccatgacggagaagctctacccc

SEQ ID NO: 375675 - DNA, 64 bp, Homo sapiens; identical to SEQ ID NO: 346318
  chr1:12123950-12124014
  hypo

SEQ ID NO: 375676 - DNA, 516 bp, Homo sapiens; identical to SEQ ID NO: 349175
  chr1:12226892-12227408
  hypo

SEQ ID NO: 375677 - DNA, 206 bp, Homo sapiens; identical to SEQ ID NO: 197324
  chr1:12227438-12227644
  hypo

SEQ ID NO: 375678 - DNA, 142 bp, Homo sapiens; identical to SEQ ID NO: 336927
  chr1:12241609-12241751
  hypo

SEQ ID NO: 375679 - DNA, 93 bp, Homo sapiens; identical to SEQ ID NO: 347792
  chr1:12251958-12252051
  hypo

SEQ ID NO: 375680 - DNA, 240 bp, Homo sapiens; identical to SEQ ID NO: 362355
  chr1:12304451-12304691
  hypo

SEQ ID NO: 375681 - DNA, 152 bp, Homo sapiens; identical to SEQ ID NO: 345697
  chr1:12460147-12460299
  hypo

SEQ ID NO: 375682 - DNA, 174 bp, Homo sapiens; identical to SEQ ID NO: 336931
  chr1:12573235-12573409
  hypo

SEQ ID NO: 375683 - DNA, 186 bp, Homo sapiens; identical to SEQ ID NO: 336932
  chr1:12630214-12630400
  hypo

SEQ ID NO: 375684 - DNA, 315 bp, Homo sapiens; identical to SEQ ID NO: 336933
  chr1:12638803-12639118
  hypo

SEQ ID NO: 375685 - DNA, 264 bp, Homo sapiens; identical to SEQ ID NO: 197328
  chr1:13840257-13840521
  hypo

SEQ ID NO: 375686 - DNA, 121 bp, Homo sapiens; identical to SEQ ID NO: 336936
  chr1:14114676-14114797
  hypo

SEQ ID NO: 375687 - DNA, 76 bp, Homo sapiens; identical to SEQ ID NO: 352806
  chr1:14125492-14125568
  hypo

SEQ ID NO: 375688 - DNA, 54 bp, Homo sapiens; identical to SEQ ID NO: 352807
  chr1:14125622-14125676
  hypo

SEQ ID NO: 375689 - DNA, 121 bp, Homo sapiens; identical to SEQ ID NO: 336939
  chr1:15102346-15102467
  hypo

SEQ ID NO: 375690 - DNA, 167 bp, Homo sapiens; identical to SEQ ID NO: 336940
  chr1:15178306-15178473
  hypo

SEQ ID NO: 375691 - DNA, 296 bp, Homo sapiens; identical to SEQ ID NO: 336941
  chr1:15194468-15194764
  hypo

SEQ ID NO: 375692 - DNA, 220 bp, Homo sapiens; identical to SEQ ID NO: 336942
  chr1:15283890-15284110
  hypo

SEQ ID NO: 375693 - DNA, 383 bp, Homo sapiens; identical to SEQ ID NO: 336943
  chr1:15374975-15375358
  hypo

SEQ ID NO: 375694 - DNA, 128 bp, Homo sapiens; identical to SEQ ID NO: 352809
  chr1:16058899-16059027
  hypo

SEQ ID NO: 375695 - DNA, 125 bp, Homo sapiens; identical to SEQ ID NO: 336945
  chr1:16270113-16270238
  hypo

SEQ ID NO: 375696 - DNA, 517 bp, Homo sapiens; identical to SEQ ID NO: 362371
  chr1:16464269-16464786
  hypo

SEQ ID NO: 375697 - DNA, 169 bp, Homo sapiens; identical to SEQ ID NO: 347795
  chr1:16474862-16475031
  hypo

SEQ ID NO: 375698 - DNA, 75 bp, Homo sapiens; identical to SEQ ID NO: 347796
  chr1:16475432-16475507
  hypo

SEQ ID NO: 375699 - DNA, 175 bp, Homo sapiens; identical to SEQ ID NO: 362374
  chr1:16534331-16534506
  hypo

SEQ ID NO: 375700 - DNA, 148 bp, Homo sapiens; identical to SEQ ID NO: 336949
  chr1:16640899-16641047
  hypo

SEQ ID NO: 375701 - DNA, 193 bp, Homo sapiens; identical to SEQ ID NO: 336950
  chr1:17292904-17293097
  hypo

SEQ ID NO: 375702 - DNA, 44 bp, Homo sapiens; identical to SEQ ID NO: 336951
  chr1:17294741-17294785
  hypo

SEQ ID NO: 375703 - DNA, 492 bp, Homo sapiens
  chr1:17736188-17736680
  hypo
cgcgagcgatgtgctcgcccgagagtggatctgctgcggccagttggtgccatctgtcatcaagggtgaggacagccacccagcctggccagcaaccctgtgcactctctcctgcagaatgattgttacctctcaaacaaatcttagcgtgagacaccaggaaagccagctgagatggtaaacaagacaacccaaacagactgcgatgatcaaaatcatgaggagtgacataccactgggtacggacacgtccccgagctggcacagctgcccccactcacctgctctgagaaaatgccatccagagtctttacctcctgggctgcagtggaagacttgggcttgtggtccccgtagccctggcgaagcaaacaagatgttcgcaatcgaggatccatgtggctcagtccacaagtggggaatcacggcaacatttcctggcccccactaaccagaagccagtgatgatgccctctggcccatgacaagccc

SEQ ID NO: 375704 - DNA, 310 bp, Homo sapiens; identical to SEQ ID NO: 336953
  chr1:18023481-18023791
  hypo

SEQ ID NO: 375705 - DNA, 247 bp, Homo sapiens; identical to SEQ ID NO: 336954
  chr1:18026186-18026433
  hypo

SEQ ID NO: 375706 - DNA, 204 bp, Homo sapiens; identical to SEQ ID NO: 349181
  chr1:18434105-18434309
  hypo

SEQ ID NO: 375707 - DNA, 37 bp, Homo sapiens; identical to SEQ ID NO: 349182
  chr1:18434816-18434853
  hypo

SEQ ID NO: 375708 - DNA, 132 bp, Homo sapiens; identical to SEQ ID NO: 336957
  chr1:19436878-19437010
  hypo

SEQ ID NO: 375709 - DNA, 34 bp, Homo sapiens; identical to SEQ ID NO: 336958
  chr1:19518000-19518034
  hypo

SEQ ID NO: 375710 - DNA, 215 bp, Homo sapiens; identical to SEQ ID NO: 336959
  chr1:19659439-19659654
  hypo

SEQ ID NO: 375711 - DNA, 333 bp, Homo sapiens; identical to SEQ ID NO: 347797
  chr1:19676386-19676719
  hypo

SEQ ID NO: 375712 - DNA, 51 bp, Homo sapiens; identical to SEQ ID NO: 347798
  chr1:19676822-19676873
  hypo

SEQ ID NO: 375713 - DNA, 263 bp, Homo sapiens; identical to SEQ ID NO: 336961
  chr1:19711526-19711789
  hypo

SEQ ID NO: 375714 - DNA, 120 bp, Homo sapiens; identical to SEQ ID NO: 336962
  chr1:19720405-19720525
  hypo

SEQ ID NO: 375715 - DNA, 110 bp, Homo sapiens; identical to SEQ ID NO: 336963
  chr1:19767182-19767292
  hypo

SEQ ID NO: 375716 - DNA, 65 bp, Homo sapiens; identical to SEQ ID NO: 336964
  chr1:19774229-19774294
  hypo

SEQ ID NO: 375717 - DNA, 342 bp, Homo sapiens; identical to SEQ ID NO: 330719
  chr1:21563161-21563503
  hypo

SEQ ID NO: 375718 - DNA, 83 bp, Homo sapiens; identical to SEQ ID NO: 352820
  chr1:21568244-21568327
  hypo

SEQ ID NO: 375719 - DNA, 234 bp, Homo sapiens; identical to SEQ ID NO: 206784
  chr1:21573434-21573668
  hypo

SEQ ID NO: 375720 - DNA, 179 bp, Homo sapiens; identical to SEQ ID NO: 336969
  chr1:21610561-21610740
  hypo

SEQ ID NO: 375721 - DNA, 112 bp, Homo sapiens
  chr1:21690437-21690549
  hypo
cgattgttggatcatacgttaagagtatgtttgttttgtaagagactatcatactgtattccaaagaggctgtaccgtttcgcattcccatcagcaacgaatgagcattccc

SEQ ID NO: 375722 - DNA, 108 bp, Homo sapiens; identical to SEQ ID NO: 336971
  chr1:21889603-21889711
  hypo

SEQ ID NO: 375723 - DNA, 195 bp, Homo sapiens; identical to SEQ ID NO: 336972
  chr1:22003573-22003768
  hypo

SEQ ID NO: 375724 - DNA, 189 bp, Homo sapiens; identical to SEQ ID NO: 336973
  chr1:22023693-22023882
  hypo

SEQ ID NO: 375725 - DNA, 242 bp, Homo sapiens; identical to SEQ ID NO: 336974
  chr1:22191349-22191591
  hypo

SEQ ID NO: 375726 - DNA, 123 bp, Homo sapiens; identical to SEQ ID NO: 362394
  chr1:22777390-22777513
  hypo

SEQ ID NO: 375727 - DNA, 150 bp, Homo sapiens; identical to SEQ ID NO: 362395
  chr1:22777697-22777847
  hypo

SEQ ID NO: 375728 - DNA, 160 bp, Homo sapiens; identical to SEQ ID NO: 336977
  chr1:23411446-23411606
  hypo

SEQ ID NO: 375729 - DNA, 158 bp, Homo sapiens; identical to SEQ ID NO: 362397
  chr1:23693515-23693673
  hypo

SEQ ID NO: 375730 - DNA, 385 bp, Homo sapiens; identical to SEQ ID NO: 349190
  chr1:24126326-24126711
  hypo

SEQ ID NO: 375731 - DNA, 155 bp, Homo sapiens; identical to SEQ ID NO: 362399
  chr1:24434944-24435099
  hypo

SEQ ID NO: 375732 - DNA, 38 bp, Homo sapiens; identical to SEQ ID NO: 362400
  chr1:24435146-24435184
  hypo

SEQ ID NO: 375733 - DNA, 358 bp, Homo sapiens; identical to SEQ ID NO: 336982
  chr1:24712899-24713257
  hypo

SEQ ID NO: 375734 - DNA, 247 bp, Homo sapiens; identical to SEQ ID NO: 336983
  chr1:25070663-25070910
  hypo

SEQ ID NO: 375735 - DNA, 320 bp, Homo sapiens; identical to SEQ ID NO: 349193
  chr1:25255291-25255611
  hypo

SEQ ID NO: 375736 - DNA, 164 bp, Homo sapiens; identical to SEQ ID NO: 336985
  chr1:25854484-25854648
  hypo

SEQ ID NO: 375737 - DNA, 102 bp, Homo sapiens; identical to SEQ ID NO: 362404
  chr1:25919205-25919307
  hypo

SEQ ID NO: 375738 - DNA, 120 bp, Homo sapiens; identical to SEQ ID NO: 362405
  chr1:25919337-25919457
  hypo

SEQ ID NO: 375739 - DNA, 211 bp, Homo sapiens; identical to SEQ ID NO: 336987
  chr1:26087011-26087222
  hypo

SEQ ID NO: 375740 - DNA, 807 bp, Homo sapiens; identical to SEQ ID NO: 330733
  chr1:26662538-26663345
  hypo

SEQ ID NO: 375741 - DNA, 38 bp, Homo sapiens
  chr1:27056295-27056333
  hypo
cgatgaccatgcagggccgggcgcagagtgccatgggc

SEQ ID NO: 375742 - DNA, 88 bp, Homo sapiens; identical to SEQ ID NO: 336990
  chr1:27058003-27058091
  hypo

SEQ ID NO: 375743 - DNA, 247 bp, Homo sapiens; identical to SEQ ID NO: 336991
  chr1:27183370-27183617
  hypo

SEQ ID NO: 375744 - DNA, 233 bp, Homo sapiens; identical to SEQ ID NO: 352830
  chr1:27189675-27189908
  hypo

SEQ ID NO: 375745 - DNA, 256 bp, Homo sapiens; identical to SEQ ID NO: 336993
  chr1:27220862-27221118
  hypo

SEQ ID NO: 375746 - DNA, 308 bp, Homo sapiens; identical to SEQ ID NO: 349195
  chr1:27332673-27332981
  hypo

SEQ ID NO: 375747 - DNA, 140 bp, Homo sapiens; identical to SEQ ID NO: 352833
  chr1:27628429-27628569
  hypo

SEQ ID NO: 375748 - DNA, 195 bp, Homo sapiens; identical to SEQ ID NO: 352834
  chr1:27844793-27844988
  hypo

SEQ ID NO: 375749 - DNA, 261 bp, Homo sapiens
  chr1:27875550-27875811
  hypo
cggtaggcggtggggcatagccggcgctgtgggcgctgctgggtgaggcagggaggctgttgccactgccataggcgaagctgcagtccttgctgttagcgcagtcctggcctgtaaagggcttagttggggcgaatacgctttgtccggccccatagccgccgtactggggcaggtaggtgttggcaggcgggtgggtggtaggtgagcgggccatggctgagggcgggggcaccagcttggggaaggtctcggctgccc

SEQ ID NO: 375750 - DNA, 237 bp, Homo sapiens; identical to SEQ ID NO: 352835
  chr1:27875852-27876089
  hypo

SEQ ID NO: 375751 - DNA, 111 bp, Homo sapiens; identical to SEQ ID NO: 296950
  chr1:27876333-27876444
  hypo

SEQ ID NO: 375752 - DNA, 698 bp, Homo sapiens; identical to SEQ ID NO: 330736
  chr1:27901989-27902687
  hypo

SEQ ID NO: 375753 - DNA, 202 bp, Homo sapiens; identical to SEQ ID NO: 337000
  chr1:27921349-27921551
  hypo

SEQ ID NO: 375754 - DNA, 191 bp, Homo sapiens; identical to SEQ ID NO: 362418
  chr1:28293404-28293595
  hypo

SEQ ID NO: 375755 - DNA, 134 bp, Homo sapiens; identical to SEQ ID NO: 337002
  chr1:28887889-28888023
  hypo

SEQ ID NO: 375756 - DNA, 114 bp, Homo sapiens; identical to SEQ ID NO: 296991
  chr1:29463501-29463615
  hypo

SEQ ID NO: 375757 - DNA, 86 bp, Homo sapiens; identical to SEQ ID NO: 337004
  chr1:31474705-31474791
  hypo

SEQ ID NO: 375758 - DNA, 80 bp, Homo sapiens; identical to SEQ ID NO: 347804
  chr1:31863055-31863135
  hypo

SEQ ID NO: 375759 - DNA, 405 bp, Homo sapiens; identical to SEQ ID NO: 337006
  chr1:32742000-32742405
  hypo

SEQ ID NO: 375760 - DNA, 317 bp, Homo sapiens; identical to SEQ ID NO: 352840
  chr1:32826720-32827037
  hypo

SEQ ID NO: 375761 - DNA, 62 bp, Homo sapiens; identical to SEQ ID NO: 337008
  chr1:33016544-33016606
  hypo

SEQ ID NO: 375762 - DNA, 33 bp, Homo sapiens; identical to SEQ ID NO: 349208
  chr1:33438467-33438500
  hypo

SEQ ID NO: 375763 - DNA, 289 bp, Homo sapiens; identical to SEQ ID NO: 352842
  chr1:33441642-33441931
  hypo

SEQ ID NO: 375764 - DNA, 168 bp, Homo sapiens; identical to SEQ ID NO: 362426
  chr1:33741929-33742097
  hypo

SEQ ID NO: 375765 - DNA, 102 bp, Homo sapiens; identical to SEQ ID NO: 369072
  chr1:33772741-33772843
  hypo

SEQ ID NO: 375766 - DNA, 48 bp, Homo sapiens; identical to SEQ ID NO: 278235
  chr1:33772856-33772904
  hypo

SEQ ID NO: 375767 - DNA, 87 bp, Homo sapiens; identical to SEQ ID NO: 369074
  chr1:33772986-33773073
  hypo

SEQ ID NO: 375768 - DNA, 638 bp, Homo sapiens; identical to SEQ ID NO: 278237
  chr1:33896186-33896824
  hypo

SEQ ID NO: 375769 - DNA, 224 bp, Homo sapiens; identical to SEQ ID NO: 197453
  chr1:34629913-34630137
  hypo

SEQ ID NO: 375770 - DNA, 252 bp, Homo sapiens; identical to SEQ ID NO: 278242
  chr1:35394790-35395042
  hypo

SEQ ID NO: 375771 - DNA, 138 bp, Homo sapiens; identical to SEQ ID NO: 337016
  chr1:35650183-35650321
  hypo

SEQ ID NO: 375772 - DNA, 229 bp, Homo sapiens; identical to SEQ ID NO: 337018
  chr1:36025968-36026197
  hypo

SEQ ID NO: 375773 - DNA, 83 bp, Homo sapiens; identical to SEQ ID NO: 337019
  chr1:36640437-36640520
  hypo

SEQ ID NO: 375774 - DNA, 423 bp, Homo sapiens; identical to SEQ ID NO: 349217
  chr1:38512641-38513064
  hypo

SEQ ID NO: 375775 - DNA, 144 bp, Homo sapiens
  chr1:38953154-38953298
  hypo
agatttcacagacaccctctccaagtacaaacacacactcacacacacacagacacatgcgcgcgcctactccatcgcgggctgcgtggtgtgtgcagtcagcagccgtgtggagaatgtgaaatcacacctcgctctccttcc

SEQ ID NO: 375776 - DNA, 62 bp, Homo sapiens; identical to SEQ ID NO: 356737
  chr1:39043982-39044044
  hypo

SEQ ID NO: 375777 - DNA, 66 bp, Homo sapiens; identical to SEQ ID NO: 356738
  chr1:39044466-39044532
  hypo

SEQ ID NO: 375778 - DNA, 482 bp, Homo sapiens; identical to SEQ ID NO: 369088
  chr1:39874756-39875238
  hypo

SEQ ID NO: 375779 - DNA, 696 bp, Homo sapiens; identical to SEQ ID NO: 349219
  chr1:39956640-39957336
  hypo

SEQ ID NO: 375780 - DNA, 93 bp, Homo sapiens; identical to SEQ ID NO: 337029
  chr1:40030094-40030187
  hypo

SEQ ID NO: 375781 - DNA, 182 bp, Homo sapiens; identical to SEQ ID NO: 278287
  chr1:40149563-40149745
  hypo

SEQ ID NO: 375782 - DNA, 130 bp, Homo sapiens; identical to SEQ ID NO: 337031
  chr1:40771005-40771135
  hypo

SEQ ID NO: 375783 - DNA, 334 bp, Homo sapiens; identical to SEQ ID NO: 337032
  chr1:41281568-41281902
  hypo

SEQ ID NO: 375784 - DNA, 38 bp, Homo sapiens; identical to SEQ ID NO: 369096
  chr1:41326952-41326990
  hypo

SEQ ID NO: 375785 - DNA, 434 bp, Homo sapiens; identical to SEQ ID NO: 278304
  chr1:41327080-41327514
  hypo

SEQ ID NO: 375786 - DNA, 69 bp, Homo sapiens; identical to SEQ ID NO: 362438
  chr1:41451907-41451976
  hypo

SEQ ID NO: 375787 - DNA, 99 bp, Homo sapiens; identical to SEQ ID NO: 345702
  chr1:41485949-41486048
  hypo

SEQ ID NO: 375788 - DNA, 91 bp, Homo sapiens; identical to SEQ ID NO: 345703
  chr1:41486164-41486255
  hypo

SEQ ID NO: 375789 - DNA, 462 bp, Homo sapiens; identical to SEQ ID NO: 330784
  chr1:41832027-41832489
  hypo

SEQ ID NO: 375790 - DNA, 132 bp, Homo sapiens; identical to SEQ ID NO: 352851
  chr1:42633144-42633276
  hypo

SEQ ID NO: 375791 - DNA, 166 bp, Homo sapiens; identical to SEQ ID NO: 337039
  chr1:43310153-43310319
  hypo

SEQ ID NO: 375792 - DNA, 37 bp, Homo sapiens; identical to SEQ ID NO: 347810
  chr1:43842627-43842664
  hypo

SEQ ID NO: 375793 - DNA, 856 bp, Homo sapiens; identical to SEQ ID NO: 337041
  chr1:43888937-43889793
  hypo

SEQ ID NO: 375794 - DNA, 148 bp, Homo sapiens; identical to SEQ ID NO: 337042
  chr1:44132677-44132825
  hypo

SEQ ID NO: 375795 - DNA, 254 bp, Homo sapiens; identical to SEQ ID NO: 362446
  chr1:44170219-44170473
  hypo

SEQ ID NO: 375796 - DNA, 59 bp, Homo sapiens; identical to SEQ ID NO: 347811
  chr1:44351032-44351091
  hypo

SEQ ID NO: 375797 - DNA, 140 bp, Homo sapiens; identical to SEQ ID NO: 352855
  chr1:44717932-44718072
  hypo

SEQ ID NO: 375798 - DNA, 138 bp, Homo sapiens; identical to SEQ ID NO: 352856
  chr1:44718164-44718302
  hypo

SEQ ID NO: 375799 - DNA, 105 bp, Homo sapiens; identical to SEQ ID NO: 347812
  chr1:44726788-44726893
  hypo

SEQ ID NO: 375800 - DNA, 361 bp, Homo sapiens; identical to SEQ ID NO: 337050
  chr1:44971165-44971526
  hypo

SEQ ID NO: 375801 - DNA, 335 bp, Homo sapiens; identical to SEQ ID NO: 337051
  chr1:45087586-45087921
  hypo

SEQ ID NO: 375802 - DNA, 559 bp, Homo sapiens; identical to SEQ ID NO: 362453
  chr1:45106068-45106627
  hypo

SEQ ID NO: 375803 - DNA, 221 bp, Homo sapiens; identical to SEQ ID NO: 337053
  chr1:45112018-45112239
  hypo

SEQ ID NO: 375804 - DNA, 174 bp, Homo sapiens; identical to SEQ ID NO: 337055
  chr1:45268631-45268805
  hypo

SEQ ID NO: 375805 - DNA, 93 bp, Homo sapiens; identical to SEQ ID NO: 337056
  chr1:46111798-46111891
  hypo
